United States Patent Application Publication US 2005/0255487 A1 - sequence listing, part 77

SEQ ID NO: 2115351 - RNA, 19 nt, Homo sapiens
  misc_RNA (1)...(19): siRNA sense strand
uggcugaucuucccuauau

SEQ ID NO: 2115352 - RNA, 19 nt, Homo sapiens
  misc_RNA (1)...(19): siRNA sense strand
ggaugaugauguugagaaa

SEQ ID NO: 2115353 - RNA, 19 nt, Homo sapiens
  misc_RNA (1)...(19): siRNA sense strand
cagcuucuccuauguauuu

SEQ ID NO: 2115354 - RNA, 19 nt, Homo sapiens
  misc_RNA (1)...(19): siRNA sense strand
guucauauguuugugguuu

SEQ ID NO: 2115355 - RNA, 19 nt, Homo sapiens
  misc_RNA (1)...(19): siRNA sense strand
uggcacauuucaaguaaua

SEQ ID NO: 2115356 - RNA, 19 nt, Homo sapiens
  misc_RNA (1)...(19): siRNA sense strand
gcacaaaacuggagguaau

SEQ ID NO: 2115357 - RNA, 19 nt, Homo sapiens
  misc_RNA (1)...(19): siRNA sense strand
ugacuuugaugcauugaaa

SEQ ID NO: 2115358 - RNA, 19 nt, Homo sapiens
  misc_RNA (1)...(19): siRNA sense strand
uaucugcccuugacauaaa

SEQ ID NO: 2115359 - RNA, 19 nt, Homo sapiens
  misc_RNA (1)...(19): siRNA sense strand
caaaggcccugcggaaaga

SEQ ID NO: 2115360 - RNA, 19 nt, Homo sapiens
  misc_RNA (1)...(19): siRNA sense strand
ucacaggacuuauuucucu

SEQ ID NO: 2115361 - RNA, 19 nt, Homo sapiens
  misc_RNA (1)...(19): siRNA sense strand
ugacacacaucaucaagga

SEQ ID NO: 2115362 - RNA, 19 nt, Homo sapiens
  misc_RNA (1)...(19): siRNA sense strand
gcauggaggagaaauauga

SEQ ID NO: 2115363 - RNA, 19 nt, Homo sapiens
  misc_RNA (1)...(19): siRNA sense strand
ggcgugcaaucaacaaaua

SEQ ID NO: 2115364 - RNA, 19 nt, Homo sapiens
  misc_RNA (1)...(19): siRNA sense strand
gcaaugcgguuuauuucca

SEQ ID NO: 2115365 - RNA, 19 nt, Homo sapiens
  misc_RNA (1)...(19): siRNA sense strand
gaaacuauuccuuaugaga

SEQ ID NO: 2115366 - RNA, 19 nt, Homo sapiens
  misc_RNA (1)...(19): siRNA sense strand
ucacugagcaggaauuuga

SEQ ID NO: 2115367 - RNA, 19 nt, Homo sapiens
  misc_RNA (1)...(19): siRNA sense strand
gaacguggaagacaaggaa

SEQ ID NO: 2115368 - RNA, 19 nt, Homo sapiens
  misc_RNA (1)...(19): siRNA sense strand
ccaaaugacuucaagaaaa

SEQ ID NO: 2115369 - RNA, 19 nt, Homo sapiens
  misc_RNA (1)...(19): siRNA sense strand
caaaguagaucuuguuuuc

SEQ ID NO: 2115370 - RNA, 19 nt, Homo sapiens
  misc_RNA (1)...(19): siRNA sense strand
ggacugaaacgcucaaauc

SEQ ID NO: 2115371 - RNA, 19 nt, Homo sapiens
  misc_RNA (1)...(19): siRNA sense strand
ggagaacuuugacuaucuu

SEQ ID NO: 2115372 - RNA, 19 nt, Homo sapiens
  misc_RNA (1)...(19): siRNA sense strand
gaaaccagccacuuagaug

SEQ ID NO: 2115373 - RNA, 19 nt, Homo sapiens
  misc_RNA (1)...(19): siRNA sense strand
ugaaugcccucauaacugu

SEQ ID NO: 2115374 - RNA, 19 nt, Homo sapiens
  misc_RNA (1)...(19): siRNA sense strand
gaccaucucuucucaaugc

SEQ ID NO: 2115375 - RNA, 19 nt, Homo sapiens
  misc_RNA (1)...(19): siRNA sense strand
gaacugaagaaggucaaua

SEQ ID NO: 2115376 - RNA, 19 nt, Homo sapiens
  misc_RNA (1)...(19): siRNA sense strand
gagcaagucucagauugga

SEQ ID NO: 2115377 - RNA, 19 nt, Homo sapiens
  misc_RNA (1)...(19): siRNA sense strand
ggccacagauuuccaugaa

SEQ ID NO: 2115378 - RNA, 19 nt, Homo sapiens
  misc_RNA (1)...(19): siRNA sense strand
gcaaacagacugagagaag

SEQ ID NO: 2115379 - RNA, 19 nt, Homo sapiens
  misc_RNA (1)...(19): siRNA sense strand
cauaagagccuuccuugga

SEQ ID NO: 2115380 - RNA, 19 nt, Homo sapiens
  misc_RNA (1)...(19): siRNA sense strand
gcagagcaaugcgguuuau

SEQ ID NO: 2115381 - RNA, 19 nt, Homo sapiens
  misc_RNA (1)...(19): siRNA sense strand
caaaugcaauagaccaaau

SEQ ID NO: 2115382 - RNA, 19 nt, Homo sapiens
  misc_RNA (1)...(19): siRNA sense strand
gcacccaggccacagauuu

SEQ ID NO: 2115383 - RNA, 19 nt, Homo sapiens
  misc_RNA (1)...(19): siRNA sense strand
ggugaaaugucagcaaaug

SEQ ID NO: 2115384 - RNA, 19 nt, Homo sapiens
  misc_RNA (1)...(19): siRNA sense strand
gcaaagaagcagcgaggaa

SEQ ID NO: 2115385 - RNA, 19 nt, Homo sapiens
  misc_RNA (1)...(19): siRNA sense strand
gcggaaagacggagugaaa

SEQ ID NO: 2115386 - RNA, 19 nt, Homo sapiens
  misc_RNA (1)...(19): siRNA sense strand
gcacgagucaguuaaacaa

SEQ ID NO: 2115387 - RNA, 19 nt, Homo sapiens
  misc_RNA (1)...(19): siRNA sense strand
gagcugaguucaaucuuac

SEQ ID NO: 2115388 - RNA, 19 nt, Homo sapiens
  misc_RNA (1)...(19): siRNA sense strand
ccaaagguccuaagggaaa

SEQ ID NO: 2115389 - RNA, 19 nt, Homo sapiens
  misc_RNA (1)...(19): siRNA sense strand
gaagccggcugucaaagca

SEQ ID NO: 2115390 - RNA, 19 nt, Homo sapiens
  misc_RNA (1)...(19): siRNA sense strand
gaucuacagugaaaacaua

SEQ ID NO: 2115391 - RNA, 19 nt, Homo sapiens
  misc_RNA (1)...(19): siRNA sense strand
gccaucagcucccucaaug

SEQ ID NO: 2115392 - RNA, 19 nt, Homo sapiens
  misc_RNA (1)...(19): siRNA sense strand
gcagaucuuuggaaacaca

SEQ ID NO: 2115393 - RNA, 19 nt, Homo sapiens
  misc_RNA (1)...(19): siRNA sense strand
agaaaucuguacugaagaa

SEQ ID NO: 2115394 - RNA, 19 nt, Homo sapiens
  misc_RNA (1)...(19): siRNA sense strand
gaggagaacuuugacuauc

SEQ ID NO: 2115395 - RNA, 19 nt, Homo sapiens
  misc_RNA (1)...(19): siRNA sense strand
ggagagacaagaaacaguu

SEQ ID NO: 2115396 - RNA, 19 nt, Homo sapiens
  misc_RNA (1)...(19): siRNA sense strand
ggaaaggauuugaguacag

SEQ ID NO: 2115397 - RNA, 19 nt, Homo sapiens
  misc_RNA (1)...(19): siRNA sense strand
caacagagugcgaauagga

SEQ ID NO: 2115398 - RNA, 19 nt, Homo sapiens
  misc_RNA (1)...(19): siRNA sense strand
gaagaaugcaagcggauug

SEQ ID NO: 2115399 - RNA, 19 nt, Homo sapiens
  misc_RNA (1)...(19): siRNA sense strand
ccacgucucaguuucauuu

SEQ ID NO: 2115400 - RNA, 19 nt, Homo sapiens
  misc_RNA (1)...(19): siRNA sense strand
agagcugaguucaaucuua

SEQ ID NO: 2115401 - RNA, 19 nt, Homo sapiens
  misc_RNA (1)...(19): siRNA sense strand
caaacagacugagagaaga

SEQ ID NO: 2115402 - RNA, 19 nt, Homo sapiens
  misc_RNA (1)...(19): siRNA sense strand
ucagagaccucagcauguu

SEQ ID NO: 2115403 - RNA, 19 nt, Homo sapiens
  misc_RNA (1)...(19): siRNA sense strand
gcagaugggugggaauaca

SEQ ID NO: 2115404 - RNA, 19 nt, Homo sapiens
  misc_RNA (1)...(19): siRNA sense strand
gggagaaccuggagaucug

SEQ ID NO: 2115405 - RNA, 19 nt, Homo sapiens
  misc_RNA (1)...(19): siRNA sense strand
gacaugggcagcaggauaa

SEQ ID NO: 2115406 - RNA, 19 nt, Homo sapiens
  misc_RNA (1)...(19): siRNA sense strand
gaacaucaaagaagucaua

SEQ ID NO: 2115407 - RNA, 19 nt, Homo sapiens
  misc_RNA (1)...(19): siRNA sense strand
guacagagaugugauguug

SEQ ID NO: 2115408 - RNA, 19 nt, Homo sapiens
  misc_RNA (1)...(19): siRNA sense strand
gguaaggccuuuagucauu

SEQ ID NO: 2115409 - RNA, 19 nt, Homo sapiens
  misc_RNA (1)...(19): siRNA sense strand
ggagaaacccuaugaaugu

SEQ ID NO: 2115410 - RNA, 19 nt, Homo sapiens
  misc_RNA (1)...(19): siRNA sense strand
ggucaucguucaagucuuu

SEQ ID NO: 2115411 - RNA, 19 nt, Homo sapiens
  misc_RNA (1)...(19): siRNA sense strand
gugagaaacucuaugauug

SEQ ID NO: 2115412 - RNA, 19 nt, Homo sapiens
  misc_RNA (1)...(19): siRNA sense strand
ccacagaaaugcaaagaau

SEQ ID NO: 2115413 - RNA, 19 nt, Homo sapiens
  misc_RNA (1)...(19): siRNA sense strand
gagaaacucuaugauugua

SEQ ID NO: 2115414 - RNA, 19 nt, Homo sapiens
  misc_RNA (1)...(19): siRNA sense strand
gcucaagccuucuuaaaca

SEQ ID NO: 2115415 - RNA, 19 nt, Homo sapiens
  misc_RNA (1)...(19): siRNA sense strand
gggaaacguuuagauuaua

SEQ ID NO: 2115416 - RNA, 19 nt, Homo sapiens
  misc_RNA (1)...(19): siRNA sense strand
gagaaacccuaugaaugua

SEQ ID NO: 2115417 - RNA, 19 nt, Homo sapiens
  misc_RNA (1)...(19): siRNA sense strand
gcaacaaguuaucuucaga

SEQ ID NO: 2115418 - RNA, 19 nt, Homo sapiens
  misc_RNA (1)...(19): siRNA sense strand
gaaacccuauguauguaaa

SEQ ID NO: 2115419 - RNA, 19 nt, Homo sapiens
  misc_RNA (1)...(19): siRNA sense strand
gcagcuaucuacuuguuga

SEQ ID NO: 2115420 - RNA, 19 nt, Homo sapiens
  misc_RNA (1)...(19): siRNA sense strand
caagagagaaaucauauga

SEQ ID NO: 2115421 - RNA, 19 nt, Homo sapiens
  misc_RNA (1)...(19): siRNA sense strand
ggagaauuauacuaacuug

SEQ ID NO: 2115422 - RNA, 19 nt, Homo sapiens
  misc_RNA (1)...(19): siRNA sense strand
agucauugcuaucaacuua

SEQ ID NO: 2115423 - RNA, 19 nt, Homo sapiens
  misc_RNA (1)...(19): siRNA sense strand
gaccuaaagugggauguuu

SEQ ID NO: 2115424 - RNA, 19 nt, Homo sapiens
  misc_RNA (1)...(19): siRNA sense strand
ggaggagugggaauauuua

SEQ ID NO: 2115425 - RNA, 19 nt, Homo sapiens
  misc_RNA (1)...(19): siRNA sense strand
gagaugugauguuggagaa

SEQ ID NO: 2115426 - RNA, 19 nt, Homo sapiens
  misc_RNA (1)...(19): siRNA sense strand
gaugugauguuggagaauu

SEQ ID NO: 2115427 - RNA, 19 nt, Homo sapiens
  misc_RNA (1)...(19): siRNA sense strand
caacuuagucaacaucaaa

SEQ ID NO: 2115428 - RNA, 19 nt, Homo sapiens
  misc_RNA (1)...(19): siRNA sense strand
gaaacucuaugauuguaag

SEQ ID NO: 2115429 - RNA, 19 nt, Homo sapiens
  misc_RNA (1)...(19): siRNA sense strand
gagaaaccauauaaaugug

SEQ ID NO: 2115430 - RNA, 19 nt, Homo sapiens
  misc_RNA (1)...(19): siRNA sense strand
ugaaacccuuugaauguaa

SEQ ID NO: 2115431 - RNA, 19 nt, Homo sapiens
  misc_RNA (1)...(19): siRNA sense strand
ugagaaggccuuuagguuu

SEQ ID NO: 2115432 - RNA, 19 nt, Homo sapiens
  misc_RNA (1)...(19): siRNA sense strand
acacaucaaucaauucaug

SEQ ID NO: 2115433 - RNA, 19 nt, Homo sapiens
  misc_RNA (1)...(19): siRNA sense strand
gaacaucugagagaccaua

SEQ ID NO: 2115434 - RNA, 19 nt, Homo sapiens
  misc_RNA (1)...(19): siRNA sense strand
guucgcagcuaucuacuug

SEQ ID NO: 2115435 - RNA, 19 nt, Homo sapiens
  misc_RNA (1)...(19): siRNA sense strand
guucaagucuuuaccaaca

SEQ ID NO: 2115436 - RNA, 19 nt, Homo sapiens
  misc_RNA (1)...(19): siRNA sense strand
gagaaggccuuuagguuuu

SEQ ID NO: 2115437 - RNA, 19 nt, Homo sapiens
  misc_RNA (1)...(19): siRNA sense strand
caagccuucuuaaacauaa

SEQ ID NO: 2115438 - RNA, 19 nt, Homo sapiens
  misc_RNA (1)...(19): siRNA sense strand
gaaaucauaugaguguaag

SEQ ID NO: 2115439 - RNA, 19 nt, Homo sapiens
  misc_RNA (1)...(19): siRNA sense strand
ggaaaagcauuuguaguuu

SEQ ID NO: 2115440 - RNA, 19 nt, Homo sapiens
  misc_RNA (1)...(19): siRNA sense strand
gaaauaacacaagagagaa

SEQ ID NO: 2115441 - RNA, 19 nt, Homo sapiens
  misc_RNA (1)...(19): siRNA sense strand
ucaagucuuuaccaacaua

SEQ ID NO: 2115442 - RNA, 19 nt, Homo sapiens
  misc_RNA (1)...(19): siRNA sense strand
cauaugaguguaaggaaua

SEQ ID NO: 2115443 - RNA, 19 nt, Homo sapiens
  misc_RNA (1)...(19): siRNA sense strand
ucaggucuuucucaacaua

SEQ ID NO: 2115444 - RNA, 19 nt, Homo sapiens
  misc_RNA (1)...(19): siRNA sense strand
gggagaaacccuaugaaug

SEQ ID NO: 2115445 - RNA, 19 nt, Homo sapiens
  misc_RNA (1)...(19): siRNA sense strand
ggugagaaaccauauaaau

SEQ ID NO: 2115446 - RNA, 19 nt, Homo sapiens
  misc_RNA (1)...(19): siRNA sense strand
agacgucauucucaccuua

SEQ ID NO: 2115447 - RNA, 19 nt, Homo sapiens
  misc_RNA (1)...(19): siRNA sense strand
gaaacccuaugaaugcaau

SEQ ID NO: 2115448 - RNA, 19 nt, Homo sapiens
  misc_RNA (1)...(19): siRNA sense strand
agaaauaacacaagagaga

SEQ ID NO: 2115449 - RNA, 19 nt, Homo sapiens
  misc_RNA (1)...(19): siRNA sense strand
gaaagcaacaaguuaucuu

SEQ ID NO: 2115450 - RNA, 19 nt, Homo sapiens
  misc_RNA (1)...(19): siRNA sense strand
auacugauuugaagccaua

SEQ ID NO: 2115451 - RNA, 19 nt, Homo sapiens
  misc_RNA (1)...(19): siRNA sense strand
guagugagaaacucuauga

SEQ ID NO: 2115452 - RNA, 19 nt, Homo sapiens
  misc_RNA (1)...(19): siRNA sense strand
uaugaaacccuaugaaugu

SEQ ID NO: 2115453 - RNA, 19 nt, Homo sapiens
  misc_RNA (1)...(19): siRNA sense strand
gaauauaagaagggcuuua

SEQ ID NO: 2115454 - RNA, 19 nt, Homo sapiens
  misc_RNA (1)...(19): siRNA sense strand
agagagaaaucauaugagu

SEQ ID NO: 2115455 - RNA, 19 nt, Homo sapiens
  misc_RNA (1)...(19): siRNA sense strand
cagcaucagauaauucaua

SEQ ID NO: 2115456 - RNA, 19 nt, Homo sapiens
  misc_RNA (1)...(19): siRNA sense strand
gaaaauauuugcaccuuac

SEQ ID NO: 2115457 - RNA, 19 nt, Homo sapiens
  misc_RNA (1)...(19): siRNA sense strand
gaagccauaugaauguaag

SEQ ID NO: 2115458 - RNA, 19 nt, Homo sapiens
  misc_RNA (1)...(19): siRNA sense strand
guaugaaacccuaugaaug

SEQ ID NO: 2115459 - RNA, 19 nt, Homo sapiens
  misc_RNA (1)...(19): siRNA sense strand
acagagaugugauguugga

SEQ ID NO: 2115460 - RNA, 19 nt, Homo sapiens
  misc_RNA (1)...(19): siRNA sense strand
ggacuuuaauuucacaacu

SEQ ID NO: 2115461 - RNA, 19 nt, Homo sapiens
  misc_RNA (1)...(19): siRNA sense strand
cagcaucagagaauucaua

SEQ ID NO: 2115462 - RNA, 19 nt, Homo sapiens
  misc_RNA (1)...(19): siRNA sense strand
caacuuacacagcaucaga

SEQ ID NO: 2115463 - RNA, 19 nt, Homo sapiens
  misc_RNA (1)...(19): siRNA sense strand
gugagaaaccauauaaaug

SEQ ID NO: 2115464 - RNA, 19 nt, Homo sapiens
  misc_RNA (1)...(19): siRNA sense strand
acacaagagagaaaucaua

SEQ ID NO: 2115465 - RNA, 19 nt, Homo sapiens
  misc_RNA (1)...(19): siRNA sense strand
ggagacaacagagaccuaa

SEQ ID NO: 2115466 - RNA, 19 nt, Homo sapiens
  misc_RNA (1)...(19): siRNA sense strand
gcuaucaacuuagucaaca

SEQ ID NO: 2115467 - RNA, 19 nt, Homo sapiens
  misc_RNA (1)...(19): siRNA sense strand
ucagagggauuuguacaga

SEQ ID NO: 2115468 - RNA, 19 nt, Homo sapiens
  misc_RNA (1)...(19): siRNA sense strand
gaaacccuaugaauguaag

SEQ ID NO: 2115469 - RNA, 19 nt, Homo sapiens
  misc_RNA (1)...(19): siRNA sense strand
auacuaacuuggucucauu

SEQ ID NO: 2115470 - RNA, 19 nt, Homo sapiens
  misc_RNA (1)...(19): siRNA sense strand
gaaacccuaugaauguaag

SEQ ID NO: 2115471 - RNA, 19 nt, Homo sapiens
  misc_RNA (1)...(19): siRNA sense strand
cauaagagaauucauacug

SEQ ID NO: 2115472 - RNA, 19 nt, Homo sapiens
  misc_RNA (1)...(19): siRNA sense strand
ucaaagauuucaccauggu

SEQ ID NO: 2115473 - RNA, 19 nt, Homo sapiens
  misc_RNA (1)...(19): siRNA sense strand
guaaggccuuuagucauug

SEQ ID NO: 2115474 - RNA, 19 nt, Homo sapiens
  misc_RNA (1)...(19): siRNA sense strand
gaauuugggagacaacaga

SEQ ID NO: 2115475 - RNA, 19 nt, Homo sapiens
  misc_RNA (1)...(19): siRNA sense strand
gcagugaucgacuuacuca

SEQ ID NO: 2115476 - RNA, 19 nt, Homo sapiens
  misc_RNA (1)...(19): siRNA sense strand
gguaugaaacccuaugaau

SEQ ID NO: 2115477 - RNA, 19 nt, Homo sapiens
  misc_RNA (1)...(19): siRNA sense strand
gcaccuuacugaacaucug

SEQ ID NO: 2115478 - RNA, 19 nt, Homo sapiens
  misc_RNA (1)...(19): siRNA sense strand
uauaagaagggcuuuagaa

SEQ ID NO: 2115479 - RNA, 19 nt, Homo sapiens
  misc_RNA (1)...(19): siRNA sense strand
gagaaaucauaugagugua

SEQ ID NO: 2115480 - RNA, 19 nt, Homo sapiens
  misc_RNA (1)...(19): siRNA sense strand
caacaaguuaucuucagaa

SEQ ID NO: 2115481 - RNA, 19 nt, Homo sapiens
  misc_RNA (1)...(19): siRNA sense strand
ucucaggucuuucucaaca

SEQ ID NO: 2115482 - RNA, 19 nt, Homo sapiens
  misc_RNA (1)...(19): siRNA sense strand
ccauaugaauguaagcaau

SEQ ID NO: 2115483 - RNA, 19 nt, Homo sapiens
  misc_RNA (1)...(19): siRNA sense strand
auucagcgauguugccaua

SEQ ID NO: 2115484 - RNA, 19 nt, Homo sapiens
  misc_RNA (1)...(19): siRNA sense strand
gugauacccuaugaaugua

SEQ ID NO: 2115485 - RNA, 19 nt, Homo sapiens
  misc_RNA (1)...(19): siRNA sense strand
gacccacaguacacaauug

SEQ ID NO: 2115486 - RNA, 19 nt, Homo sapiens
  misc_RNA (1)...(19): siRNA sense strand
caucagagaauucauacug

SEQ ID NO: 2115487 - RNA, 19 nt, Homo sapiens
  misc_RNA (1)...(19): siRNA sense strand
caucaaagaagucauacug

SEQ ID NO: 2115488 - RNA, 19 nt, Homo sapiens
  misc_RNA (1)...(19): siRNA sense strand
uugaaacccuuugaaugua

SEQ ID NO: 2115489 - RNA, 19 nt, Homo sapiens
  misc_RNA (1)...(19): siRNA sense strand
gugagaagccacaugaaug

SEQ ID NO: 2115490 - RNA, 19 nt, Homo sapiens
  misc_RNA (1)...(19): siRNA sense strand
gacaauucauacugguuug

SEQ ID NO: 2115491 - RNA, 19 nt, Homo sapiens
  misc_RNA (1)...(19): siRNA sense strand
auaaaucccuuccucuaca

SEQ ID NO: 2115492 - RNA, 19 nt, Homo sapiens
  misc_RNA (1)...(19): siRNA sense strand
gaagucauacuggugagaa

SEQ ID NO: 2115493 - RNA, 19 nt, Homo sapiens
  misc_RNA (1)...(19): siRNA sense strand
ugugaaacccuacaaaugu

SEQ ID NO: 2115494 - RNA, 19 nt, Homo sapiens
  misc_RNA (1)...(19): siRNA sense strand
gugagaaggccuuuagguu

SEQ ID NO: 2115495 - RNA, 19 nt, Homo sapiens
  misc_RNA (1)...(19): siRNA sense strand
ugugauacccuaugaaugu

SEQ ID NO: 2115496 - RNA, 19 nt, Homo sapiens
  misc_RNA (1)...(19): siRNA sense strand
aagaagggcuuuagaaaau

SEQ ID NO: 2115497 - RNA, 19 nt, Homo sapiens
  misc_RNA (1)...(19): siRNA sense strand
agagaaaucauaugagugu

SEQ ID NO: 2115498 - RNA, 19 nt, Homo sapiens
  misc_RNA (1)...(19): siRNA sense strand
ggggaaacguuuagauuau

SEQ ID NO: 2115499 - RNA, 19 nt, Homo sapiens
  misc_RNA (1)...(19): siRNA sense strand
uaucucaggucuuucucaa

SEQ ID NO: 2115500 - RNA, 19 nt, Homo sapiens
  misc_RNA (1)...(19): siRNA sense strand
gaauguaaggaauguggaa

SEQ ID NO: 2115501 - RNA, 19 nt, Homo sapiens
  misc_RNA (1)...(19): siRNA sense strand
ucagcgauguugccauaga

SEQ ID NO: 2115502 - RNA, 19 nt, Homo sapiens
  misc_RNA (1)...(19): siRNA sense strand
ucgcagcuaucuacuuguu

SEQ ID NO: 2115503 - RNA, 19 nt, Homo sapiens
  misc_RNA (1)...(19): siRNA sense strand
ggugagaagccacaugaau

SEQ ID NO: 2115504 - RNA, 19 nt, Homo sapiens
  misc_RNA (1)...(19): siRNA sense strand
agagggauuuguacagaga

SEQ ID NO: 2115505 - RNA, 19 nt, Homo sapiens
  misc_RNA (1)...(19): siRNA sense strand
uaaagaaugugggaagacu

SEQ ID NO: 2115506 - RNA, 19 nt, Homo sapiens
  misc_RNA (1)...(19): siRNA sense strand
gguaagagcuuccauagua

SEQ ID NO: 2115507 - RNA, 19 nt, Homo sapiens
  misc_RNA (1)...(19): siRNA sense strand
ggucagagaucagcacuua

SEQ ID NO: 2115508 - RNA, 19 nt, Homo sapiens
  misc_RNA (1)...(19): siRNA sense strand
ggagagagaccuuauaauu

SEQ ID NO: 2115509 - RNA, 19 nt, Homo sapiens
  misc_RNA (1)...(19): siRNA sense strand
gggaagggcuacauuagua

SEQ ID NO: 2115510 - RNA, 19 nt, Homo sapiens
  misc_RNA (1)...(19): siRNA sense strand
gaucagcacuuaauaguca

SEQ ID NO: 2115511 - RNA, 19 nt, Homo sapiens
  misc_RNA (1)...(19): siRNA sense strand
ggaaagauaucccauacau

SEQ ID NO: 2115512 - RNA, 19 nt, Homo sapiens
  misc_RNA (1)...(19): siRNA sense strand
ugugauaccuguaguaaua

SEQ ID NO: 2115513 - RNA, 19 nt, Homo sapiens
  misc_RNA (1)...(19): siRNA sense strand
gagaaaagccuuacaaaua

SEQ ID NO: 2115514 - RNA, 19 nt, Homo sapiens
  misc_RNA (1)...(19): siRNA sense strand
gggaagagguuuacugaga

SEQ ID NO: 2115515 - RNA, 19 nt, Homo sapiens
  misc_RNA (1)...(19): siRNA sense strand
gaacaucaaagaauccaua

SEQ ID NO: 2115516 - RNA, 19 nt, Homo sapiens
  misc_RNA (1)...(19): siRNA sense strand
ccucaagacuccauaagua

SEQ ID NO: 2115517 - RNA, 19 nt, Homo sapiens
  misc_RNA (1)...(19): siRNA sense strand
aggaagagauucuguuaua

SEQ ID NO: 2115518 - RNA, 19 nt, Homo sapiens
  misc_RNA (1)...(19): siRNA sense strand
gcaggacuaucuauaauuc

SEQ ID NO: 2115519 - RNA, 19 nt, Homo sapiens
  misc_RNA (1)...(19): siRNA sense strand
ggaagagguuuacugagaa

SEQ ID NO: 2115520 - RNA, 19 nt, Homo sapiens
  misc_RNA (1)...(19): siRNA sense strand
ggagacaaaccauauaauu

SEQ ID NO: 2115521 - RNA, 19 nt, Homo sapiens
  misc_RNA (1)...(19): siRNA sense strand
gggaagagauuuuauauga

SEQ ID NO: 2115522 - RNA, 19 nt, Homo sapiens
  misc_RNA (1)...(19): siRNA sense strand
gagagagaccuuauaauug

SEQ ID NO: 2115523 - RNA, 19 nt, Homo sapiens
  misc_RNA (1)...(19): siRNA sense strand
cagcaaaucugggaacaaa

SEQ ID NO: 2115524 - RNA, 19 nt, Homo sapiens
  misc_RNA (1)...(19): siRNA sense strand
gaggcaagauccaaacuga

SEQ ID NO: 2115525 - RNA, 19 nt, Homo sapiens
  misc_RNA (1)...(19): siRNA sense strand
gagaagaagaacuguauaa

SEQ ID NO: 2115526 - RNA, 19 nt, Homo sapiens
  misc_RNA (1)...(19): siRNA sense strand
agagagaccuuauaauugu

SEQ ID NO: 2115527 - RNA, 19 nt, Homo sapiens
  misc_RNA (1)...(19): siRNA sense strand
gaucaggaauguauguuca

SEQ ID NO: 2115528 - RNA, 19 nt, Homo sapiens
  misc_RNA (1)...(19): siRNA sense strand
gagacaaaccauauaauug

SEQ ID NO: 2115529 - RNA, 19 nt, Homo sapiens
  misc_RNA (1)...(19): siRNA sense strand
ggagagaaaccauucaaau

SEQ ID NO: 2115530 - RNA, 19 nt, Homo sapiens
  misc_RNA (1)...(19): siRNA sense strand
gaagaacuguauaaauguc

SEQ ID NO: 2115531 - RNA, 19 nt, Homo sapiens
  misc_RNA (1)...(19): siRNA sense strand
ucagagagccuauagagaa

SEQ ID NO: 2115532 - RNA, 19 nt, Homo sapiens
  misc_RNA (1)...(19): siRNA sense strand
ucagaaaccugcuaucagu

SEQ ID NO: 2115533 - RNA, 19 nt, Homo sapiens
  misc_RNA (1)...(19): siRNA sense strand
gaagagguuuacugagaau

SEQ ID NO: 2115534 - RNA, 19 nt, Homo sapiens
  misc_RNA (1)...(19): siRNA sense strand
ggagagaaacgcuauaagu

SEQ ID NO: 2115535 - RNA, 19 nt, Homo sapiens
  misc_RNA (1)...(19): siRNA sense strand
gagagaccuuauaauugua

SEQ ID NO: 2115536 - RNA, 19 nt, Homo sapiens
  misc_RNA (1)...(19): siRNA sense strand
gagaaacuauacaaaugug

SEQ ID NO: 2115537 - RNA, 19 nt, Homo sapiens
  misc_RNA (1)...(19): siRNA sense strand
aaagauaucccauacaugu

SEQ ID NO: 2115538 - RNA, 19 nt, Homo sapiens
  misc_RNA (1)...(19): siRNA sense strand
gagagaaacgcuauaagug

SEQ ID NO: 2115539 - RNA, 19 nt, Homo sapiens
  misc_RNA (1)...(19): siRNA sense strand
ggagacagcaacccaaaga

SEQ ID NO: 2115540 - RNA, 19 nt, Homo sapiens
  misc_RNA (1)...(19): siRNA sense strand
ggaagagauucuguuauag

SEQ ID NO: 2115541 - RNA, 19 nt, Homo sapiens
  misc_RNA (1)...(19): siRNA sense strand
gcaagugaguuaacuagac

SEQ ID NO: 2115542 - RNA, 19 nt, Homo sapiens
  misc_RNA (1)...(19): siRNA sense strand
caauuacacucaggaaaga

SEQ ID NO: 2115543 - RNA, 19 nt, Homo sapiens
  misc_RNA (1)...(19): siRNA sense strand
aguaauagcuuuggucaga

SEQ ID NO: 2115544 - RNA, 19 nt, Homo sapiens
  misc_RNA (1)...(19): siRNA sense strand
gaacaaacugcaagugagu

SEQ ID NO: 2115545 - RNA, 19 nt, Homo sapiens
  misc_RNA (1)...(19): siRNA sense strand
gagcuuccauaguagauca

SEQ ID NO: 2115546 - RNA, 19 nt, Homo sapiens
  misc_RNA (1)...(19): siRNA sense strand
gggcuacauuaguaaguuu

SEQ ID NO: 2115547 - RNA, 19 nt, Homo sapiens
  misc_RNA (1)...(19): siRNA sense strand
ggcaagaucuuuguaagca

SEQ ID NO: 2115548 - RNA, 19 nt, Homo sapiens
  misc_RNA (1)...(19): siRNA sense strand
ggauguggcuguggucuuc

SEQ ID NO: 2115549 - RNA, 19 nt, Homo sapiens
  misc_RNA (1)...(19): siRNA sense strand
caaauuacacacaggagaa

SEQ ID NO: 2115550 - RNA, 19 nt, Homo sapiens
  misc_RNA (1)...(19): siRNA sense strand
gaagagcagugagcacagu

SEQ ID NO: 2115551 - RNA, 19 nt, Homo sapiens
  misc_RNA (1)...(19): siRNA sense strand
guauaaaugucagaagugu

SEQ ID NO: 2115552 - RNA, 19 nt, Homo sapiens
  misc_RNA (1)...(19): siRNA sense strand
caacuuucccaccgagaua

SEQ ID NO: 2115553 - RNA, 19 nt, Homo sapiens
  misc_RNA (1)...(19): siRNA sense strand
ggaagggcuacauuaguaa

SEQ ID NO: 2115554 - RNA, 19 nt, Homo sapiens
  misc_RNA (1)...(19): siRNA sense strand
gagagccuauagagaagaa

SEQ ID NO: 2115555 - RNA, 19 nt, Homo sapiens
  misc_RNA (1)...(19): siRNA sense strand
guaagagcuuccauaguag

SEQ ID NO: 2115556 - RNA, 19 nt, Homo sapiens
  misc_RNA (1)...(19): siRNA sense strand
gggaacaaacugcaaguga

SEQ ID NO: 2115557 - RNA, 19 nt, Homo sapiens
  misc_RNA (1)...(19): siRNA sense strand
cauaagagacuccauacug

SEQ ID NO: 2115558 - RNA, 19 nt, Homo sapiens
  misc_RNA (1)...(19): siRNA sense strand
agacauaagagacuccaua

SEQ ID NO: 2115559 - RNA, 19 nt, Homo sapiens
  misc_RNA (1)...(19): siRNA sense strand
gagaugucaugcuggagaa

SEQ ID NO: 2115560 - RNA, 19 nt, Homo sapiens
  misc_RNA (1)...(19): siRNA sense strand
gaugugauaccuguaguaa

SEQ ID NO: 2115561 - RNA, 19 nt, Homo sapiens
  misc_RNA (1)...(19): siRNA sense strand
gcucagcucuuugucuuca

SEQ ID NO: 2115562 - RNA, 19 nt, Homo sapiens
  misc_RNA (1)...(19): siRNA sense strand
gaaacaggaccacaugaag

SEQ ID NO: 2115563 - RNA, 19 nt, Homo sapiens
  misc_RNA (1)...(19): siRNA sense strand
ggagaaacaacauucaagu

SEQ ID NO: 2115564 - RNA, 19 nt, Homo sapiens
  misc_RNA (1)...(19): siRNA sense strand
auaaguagcucucaguucu

SEQ ID NO: 2115565 - RNA, 19 nt, Homo sapiens
  misc_RNA (1)...(19): siRNA sense strand
caggaaagauaucccauac

SEQ ID NO: 2115566 - RNA, 19 nt, Homo sapiens
  misc_RNA (1)...(19): siRNA sense strand
gcagugagcacaguucaug

SEQ ID NO: 2115567 - RNA, 19 nt, Homo sapiens
  misc_RNA (1)...(19): siRNA sense strand
gagaucagcacuuaauagu

SEQ ID NO: 2115568 - RNA, 19 nt, Homo sapiens
  misc_RNA (1)...(19): siRNA sense strand
gaacuucagaaaccugcua

SEQ ID NO: 2115569 - RNA, 19 nt, Homo sapiens
  misc_RNA (1)...(19): siRNA sense strand
ccaaagagaagaaaaguuu

SEQ ID NO: 2115570 - RNA, 19 nt, Homo sapiens
  misc_RNA (1)...(19): siRNA sense strand
cgacggaugugggaagaga

SEQ ID NO: 2115571 - RNA, 19 nt, Homo sapiens
  misc_RNA (1)...(19): siRNA sense strand
gaagcuguaucgagauguc

SEQ ID NO: 2115572 - RNA, 19 nt, Homo sapiens
  misc_RNA (1)...(19): siRNA sense strand
guaguaaggcauuuaguca

SEQ ID NO: 2115573 - RNA, 19 nt, Homo sapiens
  misc_RNA (1)...(19): siRNA sense strand
gacgcaggacuaucuauaa

SEQ ID NO: 2115574 - RNA, 19 nt, Homo sapiens
  misc_RNA (1)...(19): siRNA sense strand
gagaaacaacauucaagug

SEQ ID NO: 2115575 - RNA, 19 nt, Homo sapiens
  misc_RNA (1)...(19): siRNA sense strand
acucacaacugcaaacuca

SEQ ID NO: 2115576 - RNA, 19 nt, Homo sapiens
  misc_RNA (1)...(19): siRNA sense strand
aaacaggaccacaugaaga

SEQ ID NO: 2115577 - RNA, 19 nt, Homo sapiens
  misc_RNA (1)...(19): siRNA sense strand
uaauagcuuuggucagaga

SEQ ID NO: 2115578 - RNA, 19 nt, Homo sapiens
  misc_RNA (1)...(19): siRNA sense strand
gaaagauaucccauacaug

SEQ ID NO: 2115579 - RNA, 19 nt, Homo sapiens
  misc_RNA (1)...(19): siRNA sense strand
guaaggcauuuagucagaa

SEQ ID NO: 2115580 - RNA, 19 nt, Homo sapiens
  misc_RNA (1)...(19): siRNA sense strand
caggagacaaaccauauaa

SEQ ID NO: 2115581 - RNA, 19 nt, Homo sapiens
  misc_RNA (1)...(19): siRNA sense strand
guaggcaagaucuuuguaa

SEQ ID NO: 2115582 - RNA, 19 nt, Homo sapiens
  misc_RNA (1)...(19): siRNA sense strand
gacagcaacccaaagagaa

SEQ ID NO: 2115583 - RNA, 19 nt, Homo sapiens
  misc_RNA (1)...(19): siRNA sense strand
caucaaagaauccauacug

SEQ ID NO: 2115584 - RNA, 19 nt, Homo sapiens
  misc_RNA (1)...(19): siRNA sense strand
ugacgcaggacuaucuaua

SEQ ID NO: 2115585 - RNA, 19 nt, Homo sapiens
  misc_RNA (1)...(19): siRNA sense strand
gcacaguucaugccuucaa

SEQ ID NO: 2115586 - RNA, 19 nt, Homo sapiens
  misc_RNA (1)...(19): siRNA sense strand
ucagagaucagcacuuaau

SEQ ID NO: 2115587 - RNA, 19 nt, Homo sapiens
  misc_RNA (1)...(19): siRNA sense strand
gaagagauucuguuauagc

SEQ ID NO: 2115588 - RNA, 19 nt, Homo sapiens
  misc_RNA (1)...(19): siRNA sense strand
gcaaaucugggaacaaacu

SEQ ID NO: 2115589 - RNA, 19 nt, Homo sapiens
  misc_RNA (1)...(19): siRNA sense strand
gagguuuacugagaauuca

SEQ ID NO: 2115590 - RNA, 19 nt, Homo sapiens
  misc_RNA (1)...(19): siRNA sense strand
uagagaagaagaacuguau

SEQ ID NO: 2115591 - RNA, 19 nt, Homo sapiens
  misc_RNA (1)...(19): siRNA sense strand
ccaaagagaagggaauuca

SEQ ID NO: 2115592 - RNA, 19 nt, Homo sapiens
  misc_RNA (1)...(19): siRNA sense strand
gcucucaguucuccacaca

SEQ ID NO: 2115593 - RNA, 19 nt, Homo sapiens
  misc_RNA (1)...(19): siRNA sense strand
ucaggaaagauaucccaua

SEQ ID NO: 2115594 - RNA, 19 nt, Homo sapiens
  misc_RNA (1)...(19): siRNA sense strand
cgggagagagaccuuauaa

SEQ ID NO: 2115595 - RNA, 19 nt, Homo sapiens
  misc_RNA (1)...(19): siRNA sense strand
caacugcaaacucaucaga

SEQ ID NO: 2115596 - RNA, 19 nt, Homo sapiens
  misc_RNA (1)...(19): siRNA sense strand
aguaaggcauuuagucaga

SEQ ID NO: 2115597 - RNA, 19 nt, Homo sapiens
  misc_RNA (1)...(19): siRNA sense strand
agauaucccauacauguaa

SEQ ID NO: 2115598 - RNA, 19 nt, Homo sapiens
  misc_RNA (1)...(19): siRNA sense strand
ggaccauacaggagacaaa

SEQ ID NO: 2115599 - RNA, 19 nt, Homo sapiens
  misc_RNA (1)...(19): siRNA sense strand
gcaagaucuuuguaagcau

SEQ ID NO: 2115600 - RNA, 19 nt, Homo sapiens
  misc_RNA (1)...(19): siRNA sense strand
gcaaacucaucagagaauc

SEQ ID NO: 2115601 - RNA, 19 nt, Homo sapiens
  misc_RNA (1)...(19): siRNA sense strand
gauaucccauacauguaau

SEQ ID NO: 2115602 - RNA, 19 nt, Homo sapiens
  misc_RNA (1)...(19): siRNA sense strand
cuauaagugugaugugugu

SEQ ID NO: 2115603 - RNA, 19 nt, Homo sapiens
  misc_RNA (1)...(19): siRNA sense strand
ucagguauuuugagacaua

SEQ ID NO: 2115604 - RNA, 19 nt, Homo sapiens
  misc_RNA (1)...(19): siRNA sense strand
uguaaggaauguggaaaga

SEQ ID NO: 2115605 - RNA, 19 nt, Homo sapiens
  misc_RNA (1)...(19): siRNA sense strand
ucacagggccauucacauc

SEQ ID NO: 2115606 - RNA, 19 nt, Homo sapiens
  misc_RNA (1)...(19): siRNA sense strand
gggaaaggcuucaguuaua

SEQ ID NO: 2115607 - RNA, 19 nt, Homo sapiens
  misc_RNA (1)...(19): siRNA sense strand
gaucacagauucccugaaa

SEQ ID NO: 2115608 - RNA, 19 nt, Homo sapiens
  misc_RNA (1)...(19): siRNA sense strand
gagaaacucugucaauaug

SEQ ID NO: 2115609 - RNA, 19 nt, Homo sapiens
  misc_RNA (1)...(19): siRNA sense strand
uaacagacaucaaagaguu

SEQ ID NO: 2115610 - RNA, 19 nt, Homo sapiens
  misc_RNA (1)...(19): siRNA sense strand
gagaauggcuugaaaagua

SEQ ID NO: 2115611 - RNA, 19 nt, Homo sapiens
  misc_RNA (1)...(19): siRNA sense strand
acaaagagcucuccucaug

SEQ ID NO: 2115612 - RNA, 19 nt, Homo sapiens
  misc_RNA (1)...(19): siRNA sense strand
ggagagaaaucuguuaaga

SEQ ID NO: 2115613 - RNA, 19 nt, Homo sapiens
  misc_RNA (1)...(19): siRNA sense strand
gaguaaaucugcaaggaaa

SEQ ID NO: 2115614 - RNA, 19 nt, Homo sapiens
  misc_RNA (1)...(19): siRNA sense strand
ggaaggagacccuauaaau

SEQ ID NO: 2115615 - RNA, 19 nt, Homo sapiens
  misc_RNA (1)...(19): siRNA sense strand
gcucagggcuucucauuca

SEQ ID NO: 2115616 - RNA, 19 nt, Homo sapiens
  misc_RNA (1)...(19): siRNA sense strand
gagagaaacccuauaaaug

SEQ ID NO: 2115617 - RNA, 19 nt, Homo sapiens
  misc_RNA (1)...(19): siRNA sense strand
gcgagaacccuuauaagua

SEQ ID NO: 2115618 - RNA, 19 nt, Homo sapiens
  misc_RNA (1)...(19): siRNA sense strand
gagagaaacccuauaaaug

SEQ ID NO: 2115619 - RNA, 19 nt, Homo sapiens
  misc_RNA (1)...(19): siRNA sense strand
ggagagaaaccauauaaau

SEQ ID NO: 2115620 - RNA, 19 nt, Homo sapiens
  misc_RNA (1)...(19): siRNA sense strand
gaaggagacccuauaaaug

SEQ ID NO: 2115621 - RNA, 19 nt, Homo sapiens
  misc_RNA (1)...(19): siRNA sense strand
gagaaacccuacacuuguu

SEQ ID NO: 2115622 - RNA, 19 nt, Homo sapiens
  misc_RNA (1)...(19): siRNA sense strand
gagagaaacccuacaaaug

SEQ ID NO: 2115623 - RNA, 19 nt, Homo sapiens
  misc_RNA (1)...(19): siRNA sense strand
ggagagaaacccuauaaau

SEQ ID NO: 2115624 - RNA, 19 nt, Homo sapiens
  misc_RNA (1)...(19): siRNA sense strand
gagagaaacccuacacuug

SEQ ID NO: 2115625 - RNA, 19 nt, Homo sapiens
  misc_RNA (1)...(19): siRNA sense strand
ggagagaaacccuauaaau

SEQ ID NO: 2115626 - RNA, 19 nt, Homo sapiens
  misc_RNA (1)...(19): siRNA sense strand
gagaaacccuauaaaugug

SEQ ID NO: 2115627 - RNA, 19 nt, Homo sapiens
  misc_RNA (1)...(19): siRNA sense strand
gagaaacccuauaaaugug

SEQ ID NO: 2115628 - RNA, 19 nt, Homo sapiens
  misc_RNA (1)...(19): siRNA sense strand
gggaagggcuauagucaga

SEQ ID NO: 2115629 - RNA, 19 nt, Homo sapiens
  misc_RNA (1)...(19): siRNA sense strand
ggacguggcuguggucuuc

SEQ ID NO: 2115630 - RNA, 19 nt, Homo sapiens
  misc_RNA (1)...(19): siRNA sense strand
gcucaggucuccuuaguca

SEQ ID NO: 2115631 - RNA, 19 nt, Homo sapiens
  misc_RNA (1)...(19): siRNA sense strand
gagagaaaccauauaaaug

SEQ ID NO: 2115632 - RNA, 19 nt, Homo sapiens
  misc_RNA (1)...(19): siRNA sense strand
ggaaagggguucagguaua

SEQ ID NO: 2115633 - RNA, 19 nt, Homo sapiens
  misc_RNA (1)...(19): siRNA sense strand
ucacagauucccugaaaua

SEQ ID NO: 2115634 - RNA, 19 nt, Homo sapiens
  misc_RNA (1)...(19): siRNA sense strand
gaaacucugucaauaugau

SEQ ID NO: 2115635 - RNA, 19 nt, Homo sapiens
  misc_RNA (1)...(19): siRNA sense strand
cgagaacccuuauaaguag

SEQ ID NO: 2115636 - RNA, 19 nt, Homo sapiens
  misc_RNA (1)...(19): siRNA sense strand
caucaagccuucacaaaca

SEQ ID NO: 2115637 - RNA, 19 nt, Homo sapiens
  misc_RNA (1)...(19): siRNA sense strand
cagaagacacaguauauaa

SEQ ID NO: 2115638 - RNA, 19 nt, Homo sapiens
  misc_RNA (1)...(19): siRNA sense strand
agagaaaucuguuaagagu

SEQ ID NO: 2115639 - RNA, 19 nt, Homo sapiens
  misc_RNA (1)...(19): siRNA sense strand
ugagaaacccuauaaaugu

SEQ ID NO: 2115640 - RNA, 19 nt, Homo sapiens
  misc_RNA (1)...(19): siRNA sense strand
agucagagcucacaucuuc

SEQ ID NO: 2115641 - RNA, 19 nt, Homo sapiens
  misc_RNA (1)...(19): siRNA sense strand
cggaguauauucaagauga

SEQ ID NO: 2115642 - RNA, 19 nt, Homo sapiens
  misc_RNA (1)...(19): siRNA sense strand
ggcaaaggcuucaguuaca

SEQ ID NO: 2115643 - RNA, 19 nt, Homo sapiens
  misc_RNA (1)...(19): siRNA sense strand
gcacaaacaccagcacauu

SEQ ID NO: 2115644 - RNA, 19 nt, Homo sapiens
  misc_RNA (1)...(19): siRNA sense strand
gagccaagacuguagagua

SEQ ID NO: 2115645 - RNA, 19 nt, Homo sapiens
  misc_RNA (1)...(19): siRNA sense strand
ggagagaaacccuacaaau

SEQ ID NO: 2115646 - RNA, 19 nt, Homo sapiens
  misc_RNA (1)...(19): siRNA sense strand
gagaaacccuauaaaugca

SEQ ID NO: 2115647 - RNA, 19 nt, Homo sapiens
  misc_RNA (1)...(19): siRNA sense strand
gagcaucuacgccguguuu

SEQ ID NO: 2115648 - RNA, 19 nt, Homo sapiens
  misc_RNA (1)...(19): siRNA sense strand
gggaaggguuucagauaug

SEQ ID NO: 2115649 - RNA, 19 nt, Homo sapiens
  misc_RNA (1)...(19): siRNA sense strand
gcucagggcuucucaugca

SEQ ID NO: 2115650 - RNA, 19 nt, Homo sapiens
  misc_RNA (1)...(19): siRNA sense strand
ggcagcaucuguacaaaug

SEQ ID NO: 2115651 - RNA, 19 nt, Homo sapiens
  misc_RNA (1)...(19): siRNA sense strand
ggcaagggauucaguuaug

SEQ ID NO: 2115652 - RNA, 19 nt, Homo sapiens
  misc_RNA (1)...(19): siRNA sense strand
gaaagggguucagguauaa

SEQ ID NO: 2115653 - RNA, 19 nt, Homo sapiens
  misc_RNA (1)...(19): siRNA sense strand
gguccacacuggugagaaa

SEQ ID NO: 2115654 - RNA, 19 nt, Homo sapiens
  misc_RNA (1)...(19): siRNA sense strand
agagguggcaggugaauua

SEQ ID NO: 2115655 - RNA, 19 nt, Homo sapiens
  misc_RNA (1)...(19): siRNA sense strand
agagaaacccuauaaaugu

SEQ ID NO: 2115656 - RNA, 19 nt, Homo sapiens
  misc_RNA (1)...(19): siRNA sense strand
cgacacagaagacacagua

SEQ ID NO: 2115657 - RNA, 19 nt, Homo sapiens
  misc_RNA (1)...(19): siRNA sense strand
caacuccugucuucauguu

SEQ ID NO: 2115658 - RNA, 19 nt, Homo sapiens
  misc_RNA (1)...(19): siRNA sense strand
gugagaaacccuauaaaug

SEQ ID NO: 2115659 - RNA, 19 nt, Homo sapiens
  misc_RNA (1)...(19): siRNA sense strand
gugguaagaguuucaguua

SEQ ID NO: 2115660 - RNA, 19 nt, Homo sapiens
  misc_RNA (1)...(19): siRNA sense strand
caucuuaacagacaucaaa

SEQ ID NO: 2115661 - RNA, 19 nt, Homo sapiens
  misc_RNA (1)...(19): siRNA sense strand
ggaaaggcuucaguuauac

SEQ ID NO: 2115662 - RNA, 19 nt, Homo sapiens
  misc_RNA (1)...(19): siRNA sense strand
ggagagaaacccuacacuu

SEQ ID NO: 2115663 - RNA, 19 nt, Homo sapiens
  misc_RNA (1)...(19): siRNA sense strand
gcgagaaaccuuacagaug

SEQ ID NO: 2115664 - RNA, 19 nt, Homo sapiens
  misc_RNA (1)...(19): siRNA sense strand
ccaagacuguagaguaaau

SEQ ID NO: 2115665 - RNA, 19 nt, Homo sapiens
  misc_RNA (1)...(19): siRNA sense strand
gggcuuaucggucuagaaa

SEQ ID NO: 2115666 - RNA, 19 nt, Homo sapiens
  misc_RNA (1)...(19): siRNA sense strand
cuggauaucuugucauguu

SEQ ID NO: 2115667 - RNA, 19 nt, Homo sapiens
  misc_RNA (1)...(19): siRNA sense strand
ucaggucuccuuagucaua

SEQ ID NO: 2115668 - RNA, 19 nt, Homo sapiens
  misc_RNA (1)...(19): siRNA sense strand
agaggcagcuguaccaaga

SEQ ID NO: 2115669 - RNA, 19 nt, Homo sapiens
  misc_RNA (1)...(19): siRNA sense strand
gcaaagguuucagucacaa

SEQ ID NO: 2115670 - RNA, 19 nt, Homo sapiens
  misc_RNA (1)...(19): siRNA sense strand
gagaaaccauauaaaugca

SEQ ID NO: 2115671 - RNA, 19 nt, Homo sapiens
  misc_RNA (1)...(19): siRNA sense strand
gaugugaugucuguggaaa

SEQ ID NO: 2115672 - RNA, 19 nt, Homo sapiens
  misc_RNA (1)...(19): siRNA sense strand
gaaggcauuuggucgaagu

SEQ ID NO: 2115673 - RNA, 19 nt, Homo sapiens
  misc_RNA (1)...(19): siRNA sense strand
ggugagaaacccuauaaau

SEQ ID NO: 2115674 - RNA, 19 nt, Homo sapiens
  misc_RNA (1)...(19): siRNA sense strand
agccaagacuguagaguaa

SEQ ID NO: 2115675 - RNA, 19 nt, Homo sapiens
  misc_RNA (1)...(19): siRNA sense strand
gagcucacaucuucaaggu

SEQ ID NO: 2115676 - RNA, 19 nt, Homo sapiens
  misc_RNA (1)...(19): siRNA sense strand
gcgagaagccauacagaug

SEQ ID NO: 2115677 - RNA, 19 nt, Homo sapiens
  misc_RNA (1)...(19): siRNA sense strand
caaaccugcuuguccauca

SEQ ID NO: 2115678 - RNA, 19 nt, Homo sapiens
  misc_RNA (1)...(19): siRNA sense strand
gacaagaauggaaaggaua

SEQ ID NO: 2115679 - RNA, 19 nt, Homo sapiens
  misc_RNA (1)...(19): siRNA sense strand
caggagagaaacccuauaa

SEQ ID NO: 2115680 - RNA, 19 nt, Homo sapiens
  misc_RNA (1)...(19): siRNA sense strand
uaacgugugugguaagagu

SEQ ID NO: 2115681 - RNA, 19 nt, Homo sapiens
  misc_RNA (1)...(19): siRNA sense strand
acacagaagacacaguaua

SEQ ID NO: 2115682 - RNA, 19 nt, Homo sapiens
  misc_RNA (1)...(19): siRNA sense strand
ucucaagccucagccauuu

SEQ ID NO: 2115683 - RNA, 19 nt, Homo sapiens
  misc_RNA (1)...(19): siRNA sense strand
ggaauccucugggagacaa

SEQ ID NO: 2115684 - RNA, 19 nt, Homo sapiens
  misc_RNA (1)...(19): siRNA sense strand
agaaaucuguuaagagucu

SEQ ID NO: 2115685 - RNA, 19 nt, Homo sapiens
  misc_RNA (1)...(19): siRNA sense strand
cuauaaaugugcugagugu

SEQ ID NO: 2115686 - RNA, 19 nt, Homo sapiens
  misc_RNA (1)...(19): siRNA sense strand
cuauagaugugaugucugu

SEQ ID NO: 2115687 - RNA, 19 nt, Homo sapiens
  misc_RNA (1)...(19): siRNA sense strand
ggagacaugcccuauagau

SEQ ID NO: 2115688 - RNA, 19 nt, Homo sapiens
  misc_RNA (1)...(19): siRNA sense strand
aaagagcucuccucaugca

SEQ ID NO: 2115689 - RNA, 19 nt, Homo sapiens
  misc_RNA (1)...(19): siRNA sense strand
agacaagaauggaaaggau

SEQ ID NO: 2115690 - RNA, 19 nt, Homo sapiens
  misc_RNA (1)...(19): siRNA sense strand
ugacaaguguggcaaaggu

SEQ ID NO: 2115691 - RNA, 19 nt, Homo sapiens
  misc_RNA (1)...(19): siRNA sense strand
aaauguaacugggaugaug

SEQ ID NO: 2115692 - RNA, 19 nt, Homo sapiens
  misc_RNA (1)...(19): siRNA sense strand
ugggaaggguuucagauau

SEQ ID NO: 2115693 - RNA, 19 nt, Homo sapiens
  misc_RNA (1)...(19): siRNA sense strand
gcacaucaagccuucacaa

SEQ ID NO: 2115694 - RNA, 19 nt, Homo sapiens
  misc_RNA (1)...(19): siRNA sense strand
gggaaggguuucaucuaca

SEQ ID NO: 2115695 - RNA, 19 nt, Homo sapiens
  misc_RNA (1)...(19): siRNA sense strand
gcacauucacccuggagaa

SEQ ID NO: 2115696 - RNA, 19 nt, Homo sapiens
  misc_RNA (1)...(19): siRNA sense strand
cauuaacccuggagagaau

SEQ ID NO: 2115697 - RNA, 19 nt, Homo sapiens
  misc_RNA (1)...(19): siRNA sense strand
guauaaaucgguucuucuu

SEQ ID NO: 2115698 - RNA, 19 nt, Homo sapiens
  misc_RNA (1)...(19): siRNA sense strand
ggccgcaacuccugucuuc

SEQ ID NO: 2115699 - RNA, 19 nt, Homo sapiens
  misc_RNA (1)...(19): siRNA sense strand
ggaaggguuucagauaugg

SEQ ID NO: 2115700 - RNA, 19 nt, Homo sapiens
  misc_RNA (1)...(19): siRNA sense strand
gcaagggauucaguuaugg

SEQ ID NO: 2115701 - RNA, 19 nt, Homo sapiens
  misc_RNA (1)...(19): siRNA sense strand
ggaaggguuucaucuacag

SEQ ID NO: 2115702 - RNA, 19 nt, Homo sapiens
  misc_RNA (1)...(19): siRNA sense strand
gggaaggcauuuggucgaa

SEQ ID NO: 2115703 - RNA, 19 nt, Homo sapiens
  misc_RNA (1)...(19): siRNA sense strand
aaggagacccuauaaaugu

SEQ ID NO: 2115704 - RNA, 19 nt, Homo sapiens
  misc_RNA (1)...(19): siRNA sense strand
aaauguaacguguguggua

SEQ ID NO: 2115705 - RNA, 19 nt, Homo sapiens
  misc_RNA (1)...(19): siRNA sense strand
cuacagcuguggcgagugu

SEQ ID NO: 2115706 - RNA, 19 nt, Homo sapiens
  misc_RNA (1)...(19): siRNA sense strand
gagauccgcuucaagauuc

SEQ ID NO: 2115707 - RNA, 19 nt, Homo sapiens
  misc_RNA (1)...(19): siRNA sense strand
ggacguuccuacuggaugu

SEQ ID NO: 2115708 - RNA, 19 nt, Homo sapiens
  misc_RNA (1)...(19): siRNA sense strand
gaugauccgugcaaacagu

SEQ ID NO: 2115709 - RNA, 19 nt, Homo sapiens
  misc_RNA (1)...(19): siRNA sense strand
cuagagauccgcuucaaga

SEQ ID NO: 2115710 - RNA, 19 nt, Homo sapiens
  misc_RNA (1)...(19): siRNA sense strand
gccugggccuccacgauaa

SEQ ID NO: 2115711 - RNA, 19 nt, Homo sapiens
  misc_RNA (1)...(19): siRNA sense strand
ucgcacgacuuccuagaga

SEQ ID NO: 2115712 - RNA, 19 nt, Homo sapiens
  misc_RNA (1)...(19): siRNA sense strand
aaacagugccgcaagagau

SEQ ID NO: 2115713 - RNA, 19 nt, Homo sapiens
  misc_RNA (1)...(19): siRNA sense strand
ggaauacaaaggagaaggu

SEQ ID NO: 2115714 - RNA, 19 nt, Homo sapiens
  misc_RNA (1)...(19): siRNA sense strand
gcgaugauccgugcaaaca

SEQ ID NO: 2115715 - RNA, 19 nt, Homo sapiens
  misc_RNA (1)...(19): siRNA sense strand
cccagcgccuguagucuuu

SEQ ID NO: 2115716 - RNA, 19 nt, Homo sapiens
  misc_RNA (1)...(19): siRNA sense strand
ccaccaagaacgugaagga

SEQ ID NO: 2115717 - RNA, 19 nt, Homo sapiens
  misc_RNA (1)...(19): siRNA sense strand
gcacgacuuccuagagauc

SEQ ID NO: 2115718 - RNA, 19 nt, Homo sapiens
  misc_RNA (1)...(19): siRNA sense strand
caaacagugccgcaagaga

SEQ ID NO: 2115719 - RNA, 19 nt, Homo sapiens
  misc_RNA (1)...(19): siRNA sense strand
agagauccgcuucaagauu

SEQ ID NO: 2115720 - RNA, 19 nt, Homo sapiens
  misc_RNA (1)...(19): siRNA sense strand
gaugguggcccugguggaa

SEQ ID NO: 2115721 - RNA, 19 nt, Homo sapiens
  misc_RNA (1)...(19): siRNA sense strand
gcaccugccaccacuucaa

SEQ ID NO: 2115722 - RNA, 19 nt, Homo sapiens
  misc_RNA (1)...(19): siRNA sense strand
ugcaaacagugccgcaaga

SEQ ID NO: 2115723 - RNA, 19 nt, Homo sapiens
  misc_RNA (1)...(19): siRNA sense strand
ggacguggaccugcucucu

SEQ ID NO: 2115724 - RNA, 19 nt, Homo sapiens
  misc_RNA (1)...(19): siRNA sense strand
aacagugccgcaagagaua

SEQ ID NO: 2115725 - RNA, 19 nt, Homo sapiens
  misc_RNA (1)...(19): siRNA sense strand
ccagcuccaugaaggucaa

SEQ ID NO: 2115726 - RNA, 19 nt, Homo sapiens
  misc_RNA (1)...(19): siRNA sense strand
gcaaacagugccgcaagag

SEQ ID NO: 2115727 - RNA, 19 nt, Homo sapiens
  misc_RNA (1)...(19): siRNA sense strand
gcacgugcuggucaagauc

SEQ ID NO: 2115728 - RNA, 19 nt, Homo sapiens
  misc_RNA (1)...(19): siRNA sense strand
cgggccagcucuucuuucu

SEQ ID NO: 2115729 - RNA, 19 nt, Homo sapiens
  misc_RNA (1)...(19): siRNA sense strand
gggcaucaucgaggcguuu

SEQ ID NO: 2115730 - RNA, 19 nt, Homo sapiens
  misc_RNA (1)...(19): siRNA sense strand
caacuucucugccuucuca

SEQ ID NO: 2115731 - RNA, 19 nt, Homo sapiens
  misc_RNA (1)...(19): siRNA sense strand
guaccuggaucucaucaaa

SEQ ID NO: 2115732 - RNA, 19 nt, Homo sapiens
  misc_RNA (1)...(19): siRNA sense strand
gccgugagcucuauuucua

SEQ ID NO: 2115733 - RNA, 19 nt, Homo sapiens
  misc_RNA (1)...(19): siRNA sense strand
gagauuaagucgcaauucc

SEQ ID NO: 2115734 - RNA, 19 nt, Homo sapiens
  misc_RNA (1)...(19): siRNA sense strand
gcgcgaggguuucuacaag

SEQ ID NO: 2115735 - RNA, 19 nt, Homo sapiens
  misc_RNA (1)...(19): siRNA sense strand
gaacaguguaggccugaga

SEQ ID NO: 2115736 - RNA, 19 nt, Homo sapiens
  misc_RNA (1)...(19): siRNA sense strand
ggagccaacgguccauuga

SEQ ID NO: 2115737 - RNA, 19 nt, Homo sapiens
  misc_RNA (1)...(19): siRNA sense strand
agggagagauggagaaugg

SEQ ID NO: 2115738 - RNA, 19 nt, Homo sapiens
  misc_RNA (1)...(19): siRNA sense strand
cagcccaccugccacgauu

SEQ ID NO: 2115739 - RNA, 19 nt, Homo sapiens
  misc_RNA (1)...(19): siRNA sense strand
caacaagccaauugacaag

SEQ ID NO: 2115740 - RNA, 19 nt, Homo sapiens
  misc_RNA (1)...(19): siRNA sense strand
gaccucaacaagccaauug

SEQ ID NO: 2115741 - RNA, 19 nt, Homo sapiens
  misc_RNA (1)...(19): siRNA sense strand
gccacgauuucaaccaguu

SEQ ID NO: 2115742 - RNA, 19 nt, Homo sapiens
  misc_RNA (1)...(19): siRNA sense strand
ggacugcgcggagauuaag

SEQ ID NO: 2115743 - RNA, 19 nt, Homo sapiens
  misc_RNA (1)...(19): siRNA sense strand
gggacugcgcggagauuaa

SEQ ID NO: 2115744 - RNA, 19 nt, Homo sapiens
  misc_RNA (1)...(19): siRNA sense strand
cuucucaccuacccacuau

SEQ ID NO: 2115745 - RNA, 19 nt, Homo sapiens
  misc_RNA (1)...(19): siRNA sense strand
gaccgcgucugcuucaacu

SEQ ID NO: 2115746 - RNA, 19 nt, Homo sapiens
  misc_RNA (1)...(19): siRNA sense strand
gcaggaccagggagagaug

SEQ ID NO: 2115747 - RNA, 19 nt, Homo sapiens
  misc_RNA (1)...(19): siRNA sense strand
ggagauuaagucgcaauuc

SEQ ID NO: 2115748 - RNA, 19 nt, Homo sapiens
  misc_RNA (1)...(19): siRNA sense strand
uacccacuauaugccauua

SEQ ID NO: 2115749 - RNA, 19 nt, Homo sapiens
  misc_RNA (1)...(19): siRNA sense strand
cagcgggucaagugcagua

SEQ ID NO: 2115750 - RNA, 19 nt, Homo sapiens
  misc_RNA (1)...(19): siRNA sense strand
gggagccaacgguccauug

SEQ ID NO: 2115751 - RNA, 19 nt, Homo sapiens
  misc_RNA (1)...(19): siRNA sense strand
ucucaccuacccacuauau

SEQ ID NO: 2115752 - RNA, 19 nt, Homo sapiens
  misc_RNA (1)...(19): siRNA sense strand
gcgaggguuucuacaagcu

SEQ ID NO: 2115753 - RNA, 19 nt, Homo sapiens
  misc_RNA (1)...(19): siRNA sense strand
ucaccuacccacuauaugc

SEQ ID NO: 2115754 - RNA, 19 nt, Homo sapiens
  misc_RNA (1)...(19): siRNA sense strand
caauugacaagcggaucua

SEQ ID NO: 2115755 - RNA, 19 nt, Homo sapiens
  misc_RNA (1)...(19): siRNA sense strand
ccgcgucugcuucaacuug

SEQ ID NO: 2115756 - RNA, 19 nt, Homo sapiens
  misc_RNA (1)...(19): siRNA sense strand
ggaccgacgugcagauaca

SEQ ID NO: 2115757 - RNA, 19 nt, Homo sapiens
  misc_RNA (1)...(19): siRNA sense strand
gacagggacuggccaaacu

SEQ ID NO: 2115758 - RNA, 19 nt, Homo sapiens
  misc_RNA (1)...(19): siRNA sense strand
ccgccaagaucaacgguau

SEQ ID NO: 2115759 - RNA, 19 nt, Homo sapiens
  misc_RNA (1)...(19): siRNA sense strand
gaggaccgacgugcagaua

SEQ ID NO: 2115760 - RNA, 19 nt, Homo sapiens
  misc_RNA (1)...(19): siRNA sense strand
gcuacguguugucggaaga

SEQ ID NO: 2115761 - RNA, 19 nt, Homo sapiens
  misc_RNA (1)...(19): siRNA sense strand
gcggaagaggagaccauuu

SEQ ID NO: 2115762 - RNA, 19 nt, Homo sapiens
  misc_RNA (1)...(19): siRNA sense strand
ccucagcgcuacguguugu

SEQ ID NO: 2115763 - RNA, 19 nt, Homo sapiens
  misc_RNA (1)...(19): siRNA sense strand
gccaagaucaacgguauca

SEQ ID NO: 2115764 - RNA, 19 nt, Homo sapiens
  misc_RNA (1)...(19): siRNA sense strand
gcccaaggagcgugaguca

SEQ ID NO: 2115765 - RNA, 19 nt, Homo sapiens
  misc_RNA (1)...(19): siRNA sense strand
gcccucagcgcuacguguu

SEQ ID NO: 2115766 - RNA, 19 nt, Homo sapiens
  misc_RNA (1)...(19): siRNA sense strand
cuacagagauggagaauua

SEQ ID NO: 2115767 - RNA, 19 nt, Homo sapiens
  misc_RNA (1)...(19): siRNA sense strand
gcacguaccagaucaagua

SEQ ID NO: 2115768 - RNA, 19 nt, Homo sapiens
  misc_RNA (1)...(19): siRNA sense strand
gaauuaauuuguccucauc

SEQ ID NO: 2115769 - RNA, 19 nt, Homo sapiens
  misc_RNA (1)...(19): siRNA sense strand
gaucugagcucggccuaug

SEQ ID NO: 2115770 - RNA, 19 nt, Homo sapiens
  misc_RNA (1)...(19): siRNA sense strand
ucaagacccucaacaacaa

SEQ ID NO: 2115771 - RNA, 19 nt, Homo sapiens
  misc_RNA (1)...(19): siRNA sense strand
ggaugaaacuuacaugaac

SEQ ID NO: 2115772 - RNA, 19 nt, Homo sapiens
  misc_RNA (1)...(19): siRNA sense strand
caagaaggauguggaugaa

SEQ ID NO: 2115773 - RNA, 19 nt, Homo sapiens
  misc_RNA (1)...(19): siRNA sense strand
gaacaaguaugaggaugag

SEQ ID NO: 2115774 - RNA, 19 nt, Homo sapiens
  misc_RNA (1)...(19): siRNA sense strand
caauaagccuacagagaug

SEQ ID NO: 2115775 - RNA, 19 nt, Homo sapiens
  misc_RNA (1)...(19): siRNA sense strand
ucaauaagccuacagagau

SEQ ID NO: 2115776 - RNA, 19 nt, Homo sapiens
  misc_RNA (1)...(19): siRNA sense strand
ggaacaaguaugaggauga

SEQ ID NO: 2115777 - RNA, 19 nt, Homo sapiens
  misc_RNA (1)...(19): siRNA sense strand
gaugaaacuuacaugaaca

SEQ ID NO: 2115778 - RNA, 19 nt, Homo sapiens
  misc_RNA (1)...(19): siRNA sense strand
uaaagaggcaguacaagga

SEQ ID NO: 2115779 - RNA, 19 nt, Homo sapiens
  misc_RNA (1)...(19): siRNA sense strand
aaacuuacaugaacaacgu

SEQ ID NO: 2115780 - RNA, 19 nt, Homo sapiens
  misc_RNA (1)...(19): siRNA sense strand
ggagcaacauggacaacau

SEQ ID NO: 2115781 - RNA, 19 nt, Homo sapiens
  misc_RNA (1)...(19): siRNA sense strand
ucaagaaggauguggauga

SEQ ID NO: 2115782 - RNA, 19 nt, Homo sapiens
  misc_RNA (1)...(19): siRNA sense strand
gcuggagucucaccuggaa

SEQ ID NO: 2115783 - RNA, 19 nt, Homo sapiens
  misc_RNA (1)...(19): siRNA sense strand
caucaucacugagguaaag

SEQ ID NO: 2115784 - RNA, 19 nt, Homo sapiens
  misc_RNA (1)...(19): siRNA sense strand
ggacauggacagcaucauc

SEQ ID NO: 2115785 - RNA, 19 nt, Homo sapiens
  misc_RNA (1)...(19): siRNA sense strand
gauggagaauuaauuuguc

SEQ ID NO: 2115786 - RNA, 19 nt, Homo sapiens
  misc_RNA (1)...(19): siRNA sense strand
ggauguggaugaaacuuac

SEQ ID NO: 2115787 - RNA, 19 nt, Homo sapiens
  misc_RNA (1)...(19): siRNA sense strand
ucccagaucuccaacaugu

SEQ ID NO: 2115788 - RNA, 19 nt, Homo sapiens
  misc_RNA (1)...(19): siRNA sense strand
gagagcacguaccagauca

SEQ ID NO: 2115789 - RNA, 19 nt, Homo sapiens
  misc_RNA (1)...(19): siRNA sense strand
gaucaagacccucaacaac

SEQ ID NO: 2115790 - RNA, 19 nt, Homo sapiens
  misc_RNA (1)...(19): siRNA sense strand
caaagacucagaucuccaa

SEQ ID NO: 2115791 - RNA, 19 nt, Homo sapiens
  misc_RNA (1)...(19): siRNA sense strand
gagcugcagucccagaucu

SEQ ID NO: 2115792 - RNA, 19 nt, Homo sapiens
  misc_RNA (1)...(19): siRNA sense strand
gcacaggcuucagcuccuu

SEQ ID NO: 2115793 - RNA, 19 nt, Homo sapiens
  misc_RNA (1)...(19): siRNA sense strand
cagaacaugaguauccaua

SEQ ID NO: 2115794 - RNA, 19 nt, Homo sapiens
  misc_RNA (1)...(19): siRNA sense strand
cguaccagaucaaguaugu

SEQ ID NO: 2115795 - RNA, 19 nt, Homo sapiens
  misc_RNA (1)...(19): siRNA sense strand
acaaggugcuggagaccaa

SEQ ID NO: 2115796 - RNA, 19 nt, Homo sapiens
  misc_RNA (1)...(19): siRNA sense strand
gaagaccaccagcggcuau

SEQ ID NO: 2115797 - RNA, 19 nt, Homo sapiens
  misc_RNA (1)...(19): siRNA sense strand
guggaggacuucaggaaca

SEQ ID NO: 2115798 - RNA, 19 nt, Homo sapiens
  misc_RNA (1)...(19): siRNA sense strand
gagaaggagcagaucaaga

SEQ ID NO: 2115799 - RNA, 19 nt, Homo sapiens
  misc_RNA (1)...(19): siRNA sense strand
augggaagcuggugucuga

SEQ ID NO: 2115800 - RNA, 19 nt, Homo sapiens
  misc_RNA (1)...(19): siRNA sense strand
gggccgugguugugaagaa

SEQ ID NO: 2115801 - RNA, 19 nt, Homo sapiens
  misc_RNA (1)...(19): siRNA sense strand
gggaugaccugcggcauac

SEQ ID NO: 2115802 - RNA, 19 nt, Homo sapiens
  misc_RNA (1)...(19): siRNA sense strand
acguagagcuggagucuca

SEQ ID NO: 2115803 - RNA, 19 nt, Homo sapiens
  misc_RNA (1)...(19): siRNA sense strand
uaauuuguccucaucaaga

SEQ ID NO: 2115804 - RNA, 19 nt, Homo sapiens
  misc_RNA (1)...(19): siRNA sense strand
ggagcuauaucaacaaccu

SEQ ID NO: 2115805 - RNA, 19 nt, Homo sapiens
  misc_RNA (1)...(19): siRNA sense strand
ggaugcagaacaugaguau

SEQ ID NO: 2115806 - RNA, 19 nt, Homo sapiens
  misc_RNA (1)...(19): siRNA sense strand
acaacaaguuugccuccuu

SEQ ID NO: 2115807 - RNA, 19 nt, Homo sapiens
  misc_RNA (1)...(19): siRNA sense strand
ucaccaccaucacgguaaa

SEQ ID NO: 2115808 - RNA, 19 nt, Homo sapiens
  misc_RNA (1)...(19): siRNA sense strand
agaaggauguggaugaaac

SEQ ID NO: 2115809 - RNA, 19 nt, Homo sapiens
  misc_RNA (1)...(19): siRNA sense strand
guaugaggaugagaucaau

SEQ ID NO: 2115810 - RNA, 19 nt, Homo sapiens
  misc_RNA (1)...(19): siRNA sense strand
gagauggagaauuaauuug

SEQ ID NO: 2115811 - RNA, 19 nt, Homo sapiens
  misc_RNA (1)...(19): siRNA sense strand
ggagcuggccguuaaggau

SEQ ID NO: 2115812 - RNA, 19 nt, Homo sapiens
  misc_RNA (1)...(19): siRNA sense strand
caaguuugccuccuucaca

SEQ ID NO: 2115813 - RNA, 19 nt, Homo sapiens
  misc_RNA (1)...(19): siRNA sense strand
cagagauggagaauuaauu

SEQ ID NO: 2115814 - RNA, 19 nt, Homo sapiens
  misc_RNA (1)...(19): siRNA sense strand
caggagcuaugaaagucaa

SEQ ID NO: 2115815 - RNA, 19 nt, Homo sapiens
  misc_RNA (1)...(19): siRNA sense strand
ugcagacgcuggcuaggaa

SEQ ID NO: 2115816 - RNA, 19 nt, Homo sapiens
  misc_RNA (1)...(19): siRNA sense strand
gaccugcggcauacaaaga

SEQ ID NO: 2115817 - RNA, 19 nt, Homo sapiens
  misc_RNA (1)...(19): siRNA sense strand
aagcuggccuggaaaugga

SEQ ID NO: 2115818 - RNA, 19 nt, Homo sapiens
  misc_RNA (1)...(19): siRNA sense strand
gacauggacagcaucauca

SEQ ID NO: 2115819 - RNA, 19 nt, Homo sapiens
  misc_RNA (1)...(19): siRNA sense strand
ccagggccgugguugugaa

SEQ ID NO: 2115820 - RNA, 19 nt, Homo sapiens
  misc_RNA (1)...(19): siRNA sense strand
aagucaagcuggccuggaa

SEQ ID NO: 2115821 - RNA, 19 nt, Homo sapiens
  misc_RNA (1)...(19): siRNA sense strand
guggggagcuggccguuaa

SEQ ID NO: 2115822 - RNA, 19 nt, Homo sapiens
  misc_RNA (1)...(19): siRNA sense strand
uggaugaaacuuacaugaa

SEQ ID NO: 2115823 - RNA, 19 nt, Homo sapiens
  misc_RNA (1)...(19): siRNA sense strand
aauuuguccucaucaagaa

SEQ ID NO: 2115824 - RNA, 19 nt, Homo sapiens
  misc_RNA (1)...(19): siRNA sense strand
cuaggaagcacagggauga

SEQ ID NO: 2115825 - RNA, 19 nt, Homo sapiens
  misc_RNA (1)...(19): siRNA sense strand
gccacucccuggacaugga

SEQ ID NO: 2115826 - RNA, 19 nt, Homo sapiens
  misc_RNA (1)...(19): siRNA sense strand
gaugaccugcggcauacaa

SEQ ID NO: 2115827 - RNA, 19 nt, Homo sapiens
  misc_RNA (1)...(19): siRNA sense strand
uggacagcaucaucacuga

SEQ ID NO: 2115828 - RNA, 19 nt, Homo sapiens
  misc_RNA (1)...(19): siRNA sense strand
ucagggugauccagaaguc

SEQ ID NO: 2115829 - RNA, 19 nt, Homo sapiens
  misc_RNA (1)...(19): siRNA sense strand
gacccucaacaacaaguuu

SEQ ID NO: 2115830 - RNA, 19 nt, Homo sapiens
  misc_RNA (1)...(19): siRNA sense strand
agaaggagcagaucaagac

SEQ ID NO: 2115831 - RNA, 19 nt, Homo sapiens
  misc_RNA (1)...(19): siRNA sense strand
guggaugaaacuuacauga

SEQ ID NO: 2115832 - RNA, 19 nt, Homo sapiens
  misc_RNA (1)...(19): siRNA sense strand
caacauguucgggagcuau

SEQ ID NO: 2115833 - RNA, 19 nt, Homo sapiens
  misc_RNA (1)...(19): siRNA sense strand
caacucgugaccucagcua

SEQ ID NO: 2115834 - RNA, 19 nt, Homo sapiens
  misc_RNA (1)...(19): siRNA sense strand
cagcaucaucacugaggua

SEQ ID NO: 2115835 - RNA, 19 nt, Homo sapiens
  misc_RNA (1)...(19): siRNA sense strand
caacguagagcuggagucu

SEQ ID NO: 2115836 - RNA, 19 nt, Homo sapiens
  misc_RNA (1)...(19): siRNA sense strand
ccagaucuccaacaugucu

SEQ ID NO: 2115837 - RNA, 19 nt, Homo sapiens
  misc_RNA (1)...(19): siRNA sense strand
ggagaaggagcagaucaag

SEQ ID NO: 2115838 - RNA, 19 nt, Homo sapiens
  misc_RNA (1)...(19): siRNA sense strand
gggaugcagaacaugagua

SEQ ID NO: 2115839 - RNA, 19 nt, Homo sapiens
  misc_RNA (1)...(19): siRNA sense strand
gcuccaggcugagauugag

SEQ ID NO: 2115840 - RNA, 19 nt, Homo sapiens
  misc_RNA (1)...(19): siRNA sense strand
augaggaugagaucaauaa

SEQ ID NO: 2115841 - RNA, 19 nt, Homo sapiens
  misc_RNA (1)...(19): siRNA sense strand
gugaguaccaggagcuaug

SEQ ID NO: 2115842 - RNA, 19 nt, Homo sapiens
  misc_RNA (1)...(19): siRNA sense strand
auacaaagacucagaucuc

SEQ ID NO: 2115843 - RNA, 19 nt, Homo sapiens
  misc_RNA (1)...(19): siRNA sense strand
cgaggcaucaccaccauca

SEQ ID NO: 2115844 - RNA, 19 nt, Homo sapiens
  misc_RNA (1)...(19): siRNA sense strand
caagcuggccuggaaaugg

SEQ ID NO: 2115845 - RNA, 19 nt, Homo sapiens
  misc_RNA (1)...(19): siRNA sense strand
ggaggccacucugcaacgu

SEQ ID NO: 2115846 - RNA, 19 nt, Homo sapiens
  misc_RNA (1)...(19): siRNA sense strand
aggauguggaugaaacuua

SEQ ID NO: 2115847 - RNA, 19 nt, Homo sapiens
  misc_RNA (1)...(19): siRNA sense strand
ugagagcacguaccagauc

SEQ ID NO: 2115848 - RNA, 19 nt, Homo sapiens
  misc_RNA (1)...(19): siRNA sense strand
cagcggcuaugcaggugau

SEQ ID NO: 2115849 - RNA, 19 nt, Homo sapiens
  misc_RNA (1)...(19): siRNA sense strand
caaguaugaggaugagauc

SEQ ID NO: 2115850 - RNA, 19 nt, Homo sapiens
  misc_RNA (1)...(19): siRNA sense strand
guaccaggagcuaugaaag

SEQ ID NO: 2115851 - RNA, 19 nt, Homo sapiens
  misc_RNA (1)...(19): siRNA sense strand
agggaugaccugcggcaua

SEQ ID NO: 2115852 - RNA, 19 nt, Homo sapiens
  misc_RNA (1)...(19): siRNA sense strand
gaaggauguggaugaaacu

SEQ ID NO: 2115853 - RNA, 19 nt, Homo sapiens
  misc_RNA (1)...(19): siRNA sense strand
acaaguaugaggaugagau

SEQ ID NO: 2115854 - RNA, 19 nt, Homo sapiens
  misc_RNA (1)...(19): siRNA sense strand
gcuggaggccacucugcaa

SEQ ID NO: 2115855 - RNA, 19 nt, Homo sapiens
  misc_RNA (1)...(19): siRNA sense strand
acagagauggagaauuaau

SEQ ID NO: 2115856 - RNA, 19 nt, Homo sapiens
  misc_RNA (1)...(19): siRNA sense strand
gcauacaaagacucagauc

SEQ ID NO: 2115857 - RNA, 19 nt, Homo sapiens
  misc_RNA (1)...(19): siRNA sense strand
gagguaaagaggcaguaca

SEQ ID NO: 2115858 - RNA, 19 nt, Homo sapiens
  misc_RNA (1)...(19): siRNA sense strand
gucaacaacugguucauua

SEQ ID NO: 2115859 - RNA, 19 nt, Homo sapiens
  misc_RNA (1)...(19): siRNA sense strand
ggagaaggaugagaucuau

SEQ ID NO: 2115860 - RNA, 19 nt, Homo sapiens
  misc_RNA (1)...(19): siRNA sense strand
gauagugggucuguacauu

SEQ ID NO: 2115861 - RNA, 19 nt, Homo sapiens
  misc_RNA (1)...(19): siRNA sense strand
gaacuggacaaucugauga

SEQ ID NO: 2115862 - RNA, 19 nt, Homo sapiens
  misc_RNA (1)...(19): siRNA sense strand
ccacacagguccacauaca

SEQ ID NO: 2115863 - RNA, 19 nt, Homo sapiens
  misc_RNA (1)...(19): siRNA sense strand
ccaagcagguucgcucuga

SEQ ID NO: 2115864 - RNA, 19 nt, Homo sapiens
  misc_RNA (1)...(19): siRNA sense strand
gggaggacuucgaggacua

SEQ ID NO: 2115865 - RNA, 19 nt, Homo sapiens
  misc_RNA (1)...(19): siRNA sense strand
caacuccagugaccaagga

SEQ ID NO: 2115866 - RNA, 19 nt, Homo sapiens
  misc_RNA (1)...(19): siRNA sense strand
ggacaacuccagugaccaa

SEQ ID NO: 2115867 - RNA, 19 nt, Homo sapiens
  misc_RNA (1)...(19): siRNA sense strand
ucaccugccucaagggaaa

SEQ ID NO: 2115868 - RNA, 19 nt, Homo sapiens
  misc_RNA (1)...(19): siRNA sense strand
gggagaaggaugagaucua

SEQ ID NO: 2115869 - RNA, 19 nt, Homo sapiens
  misc_RNA (1)...(19): siRNA sense strand
gggcaacagugcacagaca

SEQ ID NO: 2115870 - RNA, 19 nt, Homo sapiens
  misc_RNA (1)...(19): siRNA sense strand
caacucagcaacagccauu

SEQ ID NO: 2115871 - RNA, 19 nt, Homo sapiens
  misc_RNA (1)...(19): siRNA sense strand
gagcgacggcgaaacaaga

SEQ ID NO: 2115872 - RNA, 19 nt, Homo sapiens
  misc_RNA (1)...(19): siRNA sense strand
augaugagcugccgcacua

SEQ ID NO: 2115873 - RNA, 19 nt, Homo sapiens
  misc_RNA (1)...(19): siRNA sense strand
gagaagaugaggacuugga

SEQ ID NO: 2115874 - RNA, 19 nt, Homo sapiens
  misc_RNA (1)...(19): siRNA sense strand
gacgucugcuccucugauu

SEQ ID NO: 2115875 - RNA, 19 nt, Homo sapiens
  misc_RNA (1)...(19): siRNA sense strand
gcucacagccagacaguag

SEQ ID NO: 2115876 - RNA, 19 nt, Homo sapiens
  misc_RNA (1)...(19): siRNA sense strand
uggagaagaugaggacuug

SEQ ID NO: 2115877 - RNA, 19 nt, Homo sapiens
  misc_RNA (1)...(19): siRNA sense strand
uagugggucuguacauuug

SEQ ID NO: 2115878 - RNA, 19 nt, Homo sapiens
  misc_RNA (1)...(19): siRNA sense strand
ugaagagggagaaggauga

SEQ ID NO: 2115879 - RNA, 19 nt, Homo sapiens
  misc_RNA (1)...(19): siRNA sense strand
ccacauacagccacaccaa

SEQ ID NO: 2115880 - RNA, 19 nt, Homo sapiens
  misc_RNA (1)...(19): siRNA sense strand
gcagaugccacccacagau

SEQ ID NO: 2115881 - RNA, 19 nt, Homo sapiens
  misc_RNA (1)...(19): siRNA sense strand
ccacacacccacuacacaa

SEQ ID NO: 2115882 - RNA, 19 nt, Homo sapiens
  misc_RNA (1)...(19): siRNA sense strand
gcccuggucuuugagaaau

SEQ ID NO: 2115883 - RNA, 19 nt, Homo sapiens
  misc_RNA (1)...(19): siRNA sense strand
cggaggagcagaagaaaca

SEQ ID NO: 2115884 - RNA, 19 nt, Homo sapiens
  misc_RNA (1)...(19): siRNA sense strand
ucaacaacugguucauuaa

SEQ ID NO: 2115885 - RNA, 19 nt, Homo sapiens
  misc_RNA (1)...(19): siRNA sense strand
ggucggugcucaguaugau

SEQ ID NO: 2115886 - RNA, 19 nt, Homo sapiens
  misc_RNA (1)...(19): siRNA sense strand
caacaacugguucauuaac

SEQ ID NO: 2115887 - RNA, 19 nt, Homo sapiens
  misc_RNA (1)...(19): siRNA sense strand
ccucuuggcccuggucuuu

SEQ ID NO: 2115888 - RNA, 19 nt, Homo sapiens
  misc_RNA (1)...(19): siRNA sense strand
cuacaucaccugccucaag

SEQ ID NO: 2115889 - RNA, 19 nt, Homo sapiens
  misc_RNA (1)...(19): siRNA sense strand
gaggauagugggucuguac

SEQ ID NO: 2115890 - RNA, 19 nt, Homo sapiens
  misc_RNA (1)...(19): siRNA sense strand
cagaugccacccacagauu

SEQ ID NO: 2115891 - RNA, 19 nt, Homo sapiens
  misc_RNA (1)...(19): siRNA sense strand
gaaggaugagaucuaugga

SEQ ID NO: 2115892 - RNA, 19 nt, Homo sapiens
  misc_RNA (1)...(19): siRNA sense strand
ccucggaaggcuccacuuu

SEQ ID NO: 2115893 - RNA, 19 nt, Homo sapiens
  misc_RNA (1)...(19): siRNA sense strand
agacgcaucgugcaaccua

SEQ ID NO: 2115894 - RNA, 19 nt, Homo sapiens
  misc_RNA (1)...(19): siRNA sense strand
ucuuggcccuggucuuuga

SEQ ID NO: 2115895 - RNA, 19 nt, Homo sapiens
  misc_RNA (1)...(19): siRNA sense strand
ccaaaggagagagggauga

SEQ ID NO: 2115896 - RNA, 19 nt, Homo sapiens
  misc_RNA (1)...(19): siRNA sense strand
aguggucggugcucaguau

SEQ ID NO: 2115897 - RNA, 19 nt, Homo sapiens
  misc_RNA (1)...(19): siRNA sense strand
agaaggaugagaucuaugg

SEQ ID NO: 2115898 - RNA, 19 nt, Homo sapiens
  misc_RNA (1)...(19): siRNA sense strand
ucaccauccugcaagucaa

SEQ ID NO: 2115899 - RNA, 19 nt, Homo sapiens
  misc_RNA (1)...(19): siRNA sense strand
cgacggcgaaacaagaaga

SEQ ID NO: 2115900 - RNA, 19 nt, Homo sapiens
  misc_RNA (1)...(19): siRNA sense strand
caggagcgacggcgaaaca

SEQ ID NO: 2115901 - RNA, 19 nt, Homo sapiens
  misc_RNA (1)...(19): siRNA sense strand
gaggacaucgcugccuuug

SEQ ID NO: 2115902 - RNA, 19 nt, Homo sapiens
  misc_RNA (1)...(19): siRNA sense strand
ccacaccaacucagcaaca

SEQ ID NO: 2115903 - RNA, 19 nt, Homo sapiens
  misc_RNA (1)...(19): siRNA sense strand
caagucaacaacugguuca

SEQ ID NO: 2115904 - RNA, 19 nt, Homo sapiens
  misc_RNA (1)...(19): siRNA sense strand
auagugggucuguacauuu

SEQ ID NO: 2115905 - RNA, 19 nt, Homo sapiens
  misc_RNA (1)...(19): siRNA sense strand
gauucgagaccaugaggau

SEQ ID NO: 2115906 - RNA, 19 nt, Homo sapiens
  misc_RNA (1)...(19): siRNA sense strand
gaaaugugaacuggcuaca

SEQ ID NO: 2115907 - RNA, 19 nt, Homo sapiens
  misc_RNA (1)...(19): siRNA sense strand
cgaggacaucgcugccuuu

SEQ ID NO: 2115908 - RNA, 19 nt, Homo sapiens
  misc_RNA (1)...(19): siRNA sense strand
agagacagugcccgcagua

SEQ ID NO: 2115909 - RNA, 19 nt, Homo sapiens
  misc_RNA (1)...(19): siRNA sense strand
gcaacagugcacagacaca

SEQ ID NO: 2115910 - RNA, 19 nt, Homo sapiens
  misc_RNA (1)...(19): siRNA sense strand
cgaccugugcgacaacuuc

SEQ ID NO: 2115911 - RNA, 19 nt, Homo sapiens
  misc_RNA (1)...(19): siRNA sense strand
gcaguaccagggcccuaug

SEQ ID NO: 2115912 - RNA, 19 nt, Homo sapiens
  misc_RNA (1)...(19): siRNA sense strand
ggauagugggucuguacau

SEQ ID NO: 2115913 - RNA, 19 nt, Homo sapiens
  misc_RNA (1)...(19): siRNA sense strand
gaugccacccacagauuca

SEQ ID NO: 2115914 - RNA, 19 nt, Homo sapiens
  misc_RNA (1)...(19): siRNA sense strand
gaacuuggccuugguaauu

SEQ ID NO: 2115915 - RNA, 19 nt, Homo sapiens
  misc_RNA (1)...(19): siRNA sense strand
ucaaggaccucaagcagaa

SEQ ID NO: 2115916 - RNA, 19 nt, Homo sapiens
  misc_RNA (1)...(19): siRNA sense strand
ggaggaggcucggaggaua

SEQ ID NO: 2115917 - RNA, 19 nt, Homo sapiens
  misc_RNA (1)...(19): siRNA sense strand
uggauaaacucaucaagaa

SEQ ID NO: 2115918 - RNA, 19 nt, Homo sapiens
  misc_RNA (1)...(19): siRNA sense strand
gcggagagcuggaguuugg

SEQ ID NO: 2115919 - RNA, 19 nt, Homo sapiens
  misc_RNA (1)...(19): siRNA sense strand
ggaaugagacgguguccaa

SEQ ID NO: 2115920 - RNA, 19 nt, Homo sapiens
  misc_RNA (1)...(19): siRNA sense strand
gauaguugaugacgaggaa

SEQ ID NO: 2115921 - RNA, 19 nt, Homo sapiens
  misc_RNA (1)...(19): siRNA sense strand
guucgcaucuggaaugaga

SEQ ID NO: 2115922 - RNA, 19 nt, Homo sapiens
  misc_RNA (1)...(19): siRNA sense strand
acaagcggcugcucuucua

SEQ ID NO: 2115923 - RNA, 19 nt, Homo sapiens
  misc_RNA (1)...(19): siRNA sense strand
gggcagugguguacuuugu

SEQ ID NO: 2115924 - RNA, 19 nt, Homo sapiens
  misc_RNA (1)...(19): siRNA sense strand
gcauugccgugcugcugua

SEQ ID NO: 2115925 - RNA, 19 nt, Homo sapiens
  misc_RNA (1)...(19): siRNA sense strand
ugucaaugcuguugucuuc

SEQ ID NO: 2115926 - RNA, 19 nt, Homo sapiens
  misc_RNA (1)...(19): siRNA sense strand
uuaagaacacgguggauaa

SEQ ID NO: 2115927 - RNA, 19 nt, Homo sapiens
  misc_RNA (1)...(19): siRNA sense strand
ggauaaacucaucaagaaa

SEQ ID NO: 2115928 - RNA, 19 nt, Homo sapiens
  misc_RNA (1)...(19): siRNA sense strand
gcaccugagagucuucuuu

SEQ ID NO: 2115929 - RNA, 19 nt, Homo sapiens
  misc_RNA (1)...(19): siRNA sense strand
caacauguuuguggucauc

SEQ ID NO: 2115930 - RNA, 19 nt, Homo sapiens
  misc_RNA (1)...(19): siRNA sense strand
ggcgagagccgcaagauca

SEQ ID NO: 2115931 - RNA, 19 nt, Homo sapiens
  misc_RNA (1)...(19): siRNA sense strand
caaucucucucucucuuuc

SEQ ID NO: 2115932 - RNA, 19 nt, Homo sapiens
  misc_RNA (1)...(19): siRNA sense strand
ugacgaggaauaugagaaa

SEQ ID NO: 2115933 - RNA, 19 nt, Homo sapiens
  misc_RNA (1)...(19): siRNA sense strand
caucaucgccgaccguuuc

SEQ ID NO: 2115934 - RNA, 19 nt, Homo sapiens
  misc_RNA (1)...(19): siRNA sense strand
ccaacgcggugaacguguu

SEQ ID NO: 2115935 - RNA, 19 nt, Homo sapiens
  misc_RNA (1)...(19): siRNA sense strand
ggaggacgagcauuucuuc

SEQ ID NO: 2115936 - RNA, 19 nt, Homo sapiens
  misc_RNA (1)...(19): siRNA sense strand
caaggacucugucaaugcu

SEQ ID NO: 2115937 - RNA, 19 nt, Homo sapiens
  misc_RNA (1)...(19): siRNA sense strand
gagaaggagaucaccauca

SEQ ID NO: 2115938 - RNA, 19 nt, Homo sapiens
  misc_RNA (1)...(19): siRNA sense strand
guggauaaacucaucaaga

SEQ ID NO: 2115939 - RNA, 19 nt, Homo sapiens
  misc_RNA (1)...(19): siRNA sense strand
cugagagucuucuuuguca

SEQ ID NO: 2115940 - RNA, 19 nt, Homo sapiens
  misc_RNA (1)...(19): siRNA sense strand
gcgcugccuucaacauguu

SEQ ID NO: 2115941 - RNA, 19 nt, Homo sapiens
  misc_RNA (1)...(19): siRNA sense strand
ccacgcagcggcaucauca

SEQ ID NO: 2115942 - RNA, 19 nt, Homo sapiens
  misc_RNA (1)...(19): siRNA sense strand
uaagaacacgguggauaaa

SEQ ID NO: 2115943 - RNA, 19 nt, Homo sapiens
  misc_RNA (1)...(19): siRNA sense strand
cagcucugcuacucaauca

SEQ ID NO: 2115944 - RNA, 19 nt, Homo sapiens
  misc_RNA (1)...(19): siRNA sense strand
caagaucaagcaccugaga

SEQ ID NO: 2115945 - RNA, 19 nt, Homo sapiens
  misc_RNA (1)...(19): siRNA sense strand
ggaacgugcugcgcagaca

SEQ ID NO: 2115946 - RNA, 19 nt, Homo sapiens
  misc_RNA (1)...(19): siRNA sense strand
gagaugggcaagccaguuc

SEQ ID NO: 2115947 - RNA, 19 nt, Homo sapiens
  misc_RNA (1)...(19): siRNA sense strand
gccuaugucuggcuuuauc

SEQ ID NO: 2115948 - RNA, 19 nt, Homo sapiens
  misc_RNA (1)...(19): siRNA sense strand
gaacacgguggauaaacuc

SEQ ID NO: 2115949 - RNA, 19 nt, Homo sapiens
  misc_RNA (1)...(19): siRNA sense strand
gggcaucgccaacuacuac

SEQ ID NO: 2115950 - RNA, 19 nt, Homo sapiens
  misc_RNA (1)...(19): siRNA sense strand
cggcugcucuucuacaagu

SEQ ID NO: 2115951 - RNA, 19 nt, Homo sapiens
  misc_RNA (1)...(19): siRNA sense strand
uaucucauccuugcuguuu

SEQ ID NO: 2115952 - RNA, 19 nt, Homo sapiens
  misc_RNA (1)...(19): siRNA sense strand
gauuucagcucugcuacuc

SEQ ID NO: 2115953 - RNA, 19 nt, Homo sapiens
  misc_RNA (1)...(19): siRNA sense strand
aaacgaacuuggccuuggu

SEQ ID NO: 2115954 - RNA, 19 nt, Homo sapiens
  misc_RNA (1)...(19): siRNA sense strand
ucgccuaugucuggcuuua

SEQ ID NO: 2115955 - RNA, 19 nt, Homo sapiens
  misc_RNA (1)...(19): siRNA sense strand
caucaucgacgacgacauc

SEQ ID NO: 2115956 - RNA, 19 nt, Homo sapiens
  misc_RNA (1)...(19): siRNA sense strand
caucgacgacgacaucuuc

SEQ ID NO: 2115957 - RNA, 19 nt, Homo sapiens
  misc_RNA (1)...(19): siRNA sense strand
ucaagcaccugagagucuu

SEQ ID NO: 2115958 - RNA, 19 nt, Homo sapiens
  misc_RNA (1)...(19): siRNA sense strand
ccucaaggacucugucaau

SEQ ID NO: 2115959 - RNA, 19 nt, Homo sapiens
  misc_RNA (1)...(19): siRNA sense strand
agaacacgguggauaaacu

SEQ ID NO: 2115960 - RNA, 19 nt, Homo sapiens
  misc_RNA (1)...(19): siRNA sense strand
cgacgacgagaccaugaaa

SEQ ID NO: 2115961 - RNA, 19 nt, Homo sapiens
  misc_RNA (1)...(19): siRNA sense strand
ucgaggaggacgagcauuu

SEQ ID NO: 2115962 - RNA, 19 nt, Homo sapiens
  misc_RNA (1)...(19): siRNA sense strand
ggagcaucuucgccuaugu

SEQ ID NO: 2115963 - RNA, 19 nt, Homo sapiens
  misc_RNA (1)...(19): siRNA sense strand
agaaggagaucaccaucac

SEQ ID NO: 2115964 - RNA, 19 nt, Homo sapiens
  misc_RNA (1)...(19): siRNA sense strand
ggagucauaugauuuuaag

SEQ ID NO: 2115965 - RNA, 19 nt, Homo sapiens
  misc_RNA (1)...(19): siRNA sense strand
ucgaggagucauaugauuu

SEQ ID NO: 2115966 - RNA, 19 nt, Homo sapiens
  misc_RNA (1)...(19): siRNA sense strand
gcagcggcaucaucauagg

SEQ ID NO: 2115967 - RNA, 19 nt, Homo sapiens
  misc_RNA (1)...(19): siRNA sense strand
aggugaagauaguugauga

SEQ ID NO: 2115968 - RNA, 19 nt, Homo sapiens
  misc_RNA (1)...(19): siRNA sense strand
agaagcacccggacaagga

SEQ ID NO: 2115969 - RNA, 19 nt, Homo sapiens
  misc_RNA (1)...(19): siRNA sense strand
gaagcacccggacaaggau

SEQ ID NO: 2115970 - RNA, 19 nt, Homo sapiens
  misc_RNA (1)...(19): siRNA sense strand
uuucagcucugcuacucaa

SEQ ID NO: 2115971 - RNA, 19 nt, Homo sapiens
  misc_RNA (1)...(19): siRNA sense strand
cgaccacgcaggcaucuuc

SEQ ID NO: 2115972 - RNA, 19 nt, Homo sapiens
  misc_RNA (1)...(19): siRNA sense strand
gagcugcgcaucggcauca

SEQ ID NO: 2115973 - RNA, 19 nt, Homo sapiens
  misc_RNA (1)...(19): siRNA sense strand
gcaccguucgcaucuggaa

SEQ ID NO: 2115974 - RNA, 19 nt, Homo sapiens
  misc_RNA (1)...(19): siRNA sense strand
ucaaugcuguugucuucgu

SEQ ID NO: 2115975 - RNA, 19 nt, Homo sapiens
  misc_RNA (1)...(19): siRNA sense strand
caucaucgaggagucauau

SEQ ID NO: 2115976 - RNA, 19 nt, Homo sapiens
  misc_RNA (1)...(19): siRNA sense strand
caccugagagucuucuuug

SEQ ID NO: 2115977 - RNA, 19 nt, Homo sapiens
  misc_RNA (1)...(19): siRNA sense strand
gagauccugcugucaguca

SEQ ID NO: 2115978 - RNA, 19 nt, Homo sapiens
  misc_RNA (1)...(19): siRNA sense strand
acgcagcggcaucaucaua

SEQ ID NO: 2115979 - RNA, 19 nt, Homo sapiens
  misc_RNA (1)...(19): siRNA sense strand
caaugcuguugucuucguu

SEQ ID NO: 2115980 - RNA, 19 nt, Homo sapiens
  misc_RNA (1)...(19): siRNA sense strand
gaggagucauaugauuuua

SEQ ID NO: 2115981 - RNA, 19 nt, Homo sapiens
  misc_RNA (1)...(19): siRNA sense strand
gugcggagagcuggaguuu

SEQ ID NO: 2115982 - RNA, 19 nt, Homo sapiens
  misc_RNA (1)...(19): siRNA sense strand
gcacgcugguguucaaacc

SEQ ID NO: 2115983 - RNA, 19 nt, Homo sapiens
  misc_RNA (1)...(19): siRNA sense strand
ucgaggucaucacgucaaa

SEQ ID NO: 2115984 - RNA, 19 nt, Homo sapiens
  misc_RNA (1)...(19): siRNA sense strand
uaguugaugacgaggaaua

SEQ ID NO: 2115985 - RNA, 19 nt, Homo sapiens
  misc_RNA (1)...(19): siRNA sense strand
cucaaucucucucucucuu

SEQ ID NO: 2115986 - RNA, 19 nt, Homo sapiens
  misc_RNA (1)...(19): siRNA sense strand
ggcuggaggucaucaucga

SEQ ID NO: 2115987 - RNA, 19 nt, Homo sapiens
  misc_RNA (1)...(19): siRNA sense strand
gcucggaggauagcagaga

SEQ ID NO: 2115988 - RNA, 19 nt, Homo sapiens
  misc_RNA (1)...(19): siRNA sense strand
gccgcgaggucauccagau

SEQ ID NO: 2115989 - RNA, 19 nt, Homo sapiens
  misc_RNA (1)...(19): siRNA sense strand
gcgagagccgcaagaucaa

SEQ ID NO: 2115990 - RNA, 19 nt, Homo sapiens
  misc_RNA (1)...(19): siRNA sense strand
uuuaagaacacgguggaua

SEQ ID NO: 2115991 - RNA, 19 nt, Homo sapiens
  misc_RNA (1)...(19): siRNA sense strand
gcucugcuacucaaucaag

SEQ ID NO: 2115992 - RNA, 19 nt, Homo sapiens
  misc_RNA (1)...(19): siRNA sense strand
gacaagcggcugcucuucu

SEQ ID NO: 2115993 - RNA, 19 nt, Homo sapiens
  misc_RNA (1)...(19): siRNA sense strand
gagcaucuucgccuauguc

SEQ ID NO: 2115994 - RNA, 19 nt, Homo sapiens
  misc_RNA (1)...(19): siRNA sense strand
acgcaggcaucuucuccuu

SEQ ID NO: 2115995 - RNA, 19 nt, Homo sapiens
  misc_RNA (1)...(19): siRNA sense strand
gcaacagcaccuucuacgu

SEQ ID NO: 2115996 - RNA, 19 nt, Homo sapiens
  misc_RNA (1)...(19): siRNA sense strand
cucaaggacucugucaaug

SEQ ID NO: 2115997 - RNA, 19 nt, Homo sapiens
  misc_RNA (1)...(19): siRNA sense strand
uugaugacgaggaauauga

SEQ ID NO: 2115998 - RNA, 19 nt, Homo sapiens
  misc_RNA (1)...(19): siRNA sense strand
cacgggcagugguguacuu

SEQ ID NO: 2115999 - RNA, 19 nt, Homo sapiens
  misc_RNA (1)...(19): siRNA sense strand
ucaaggacucugucaaugc

SEQ ID NO: 2116000 - RNA, 19 nt, Homo sapiens
  misc_RNA (1)...(19): siRNA sense strand
gaggaggcucggaggauag

SEQ ID NO: 2116001 - RNA, 19 nt, Homo sapiens
  misc_RNA (1)...(19): siRNA sense strand
uggcuuaagcgagggauuu

SEQ ID NO: 2116002 - RNA, 19 nt, Homo sapiens
  misc_RNA (1)...(19): siRNA sense strand
caggcgagacgcagaagga

SEQ ID NO: 2116003 - RNA, 19 nt, Homo sapiens
  misc_RNA (1)...(19): siRNA sense strand
gugcuuugacuacgugaug

SEQ ID NO: 2116004 - RNA, 19 nt, Homo sapiens
  misc_RNA (1)...(19): siRNA sense strand
cacgguggauaaacucauc

SEQ ID NO: 2116005 - RNA, 19 nt, Homo sapiens
  misc_RNA (1)...(19): siRNA sense strand
caucgaggagucauaugau

SEQ ID NO: 2116006 - RNA, 19 nt, Homo sapiens
  misc_RNA (1)...(19): siRNA sense strand
caucgccgaccguuucaug

SEQ ID NO: 2116007 - RNA, 19 nt, Homo sapiens
  misc_RNA (1)...(19): siRNA sense strand
agaaagcgcuggagaaugg

SEQ ID NO: 2116008 - RNA, 19 nt, Homo sapiens
  misc_RNA (1)...(19): siRNA sense strand
gaacagcgagcagaucaaa

SEQ ID NO: 2116009 - RNA, 19 nt, Homo sapiens
  misc_RNA (1)...(19): siRNA sense strand
gggaggaugugacaaggaa

SEQ ID NO: 2116010 - RNA, 19 nt, Homo sapiens
  misc_RNA (1)...(19): siRNA sense strand
caagugcugugguugugua

SEQ ID NO: 2116011 - RNA, 19 nt, Homo sapiens
  misc_RNA (1)...(19): siRNA sense strand
gggagaaggugcuggugaa

SEQ ID NO: 2116012 - RNA, 19 nt, Homo sapiens
  misc_RNA (1)...(19): siRNA sense strand
agaaagugcuggagaaugg

SEQ ID NO: 2116013 - RNA, 19 nt, Homo sapiens
  misc_RNA (1)...(19): siRNA sense strand
gaugucggcuucaaggaau

SEQ ID NO: 2116014 - RNA, 19 nt, Homo sapiens
  misc_RNA (1)...(19): siRNA sense strand
ggagaaagcgcuggagaau

SEQ ID NO: 2116015 - RNA, 19 nt, Homo sapiens
  misc_RNA (1)...(19): siRNA sense strand
ggacuacugguaugacauu

SEQ ID NO: 2116016 - RNA, 19 nt, Homo sapiens
  misc_RNA (1)...(19): siRNA sense strand
ugugggagcuguuugaguu

SEQ ID NO: 2116017 - RNA, 19 nt, Homo sapiens
  misc_RNA (1)...(19): siRNA sense strand
cacagucgcugccugaugu

SEQ ID NO: 2116018 - RNA, 19 nt, Homo sapiens
  misc_RNA (1)...(19): siRNA sense strand
aagagaaagugcuggagaa

SEQ ID NO: 2116019 - RNA, 19 nt, Homo sapiens
  misc_RNA (1)...(19): siRNA sense strand
gcaacuacaaggaggacua

SEQ ID NO: 2116020 - RNA, 19 nt, Homo sapiens
  misc_RNA (1)...(19): siRNA sense strand
gauugggaguggcugguuu

SEQ ID NO: 2116021 - RNA, 19 nt, Homo sapiens
  misc_RNA (1)...(19): siRNA sense strand
gugcugugguuguguaaug

SEQ ID NO: 2116022 - RNA, 19 nt, Homo sapiens
  misc_RNA (1)...(19): siRNA sense strand
agaagacgcccgagaguug

SEQ ID NO: 2116023 - RNA, 19 nt, Homo sapiens
  misc_RNA (1)...(19): siRNA sense strand
agaaggugcuggugaaugg

SEQ ID NO: 2116024 - RNA, 19 nt, Homo sapiens
  misc_RNA (1)...(19): siRNA sense strand
ccucugaucuccaauugca

SEQ ID NO: 2116025 - RNA, 19 nt, Homo sapiens
  misc_RNA (1)...(19): siRNA sense strand
cuacugguaugacauucuu

SEQ ID NO: 2116026 - RNA, 19 nt, Homo sapiens
  misc_RNA (1)...(19): siRNA sense strand
gcaagauggucuccuucca

SEQ ID NO: 2116027 - RNA, 19 nt, Homo sapiens
  misc_RNA (1)...(19): siRNA sense strand
cgagaugccacgacuauuc

SEQ ID NO: 2116028 - RNA, 19 nt, Homo sapiens
  misc_RNA (1)...(19): siRNA sense strand
gagcagcgaguacuacauc

SEQ ID NO: 2116029 - RNA, 19 nt, Homo sapiens
  misc_RNA (1)...(19): siRNA sense strand
gagaagacgcccgagaguu

SEQ ID NO: 2116030 - RNA, 19 nt, Homo sapiens
  misc_RNA (1)...(19): siRNA sense strand
ugagcuaccugcaggagau

SEQ ID NO: 2116031 - RNA, 19 nt, Homo sapiens
  misc_RNA (1)...(19): siRNA sense strand
gagcaacgcaaguucaucu

SEQ ID NO: 2116032 - RNA, 19 nt, Homo sapiens
  misc_RNA (1)...(19): siRNA sense strand
gcaccugcauucccacaac

SEQ ID NO: 2116033 - RNA, 19 nt, Homo sapiens
  misc_RNA (1)...(19): siRNA sense strand
ggagaggaagcgcaagaug

SEQ ID NO: 2116034 - RNA, 19 nt, Homo sapiens
  misc_RNA (1)...(19): siRNA sense strand
aauugcagcucaccuacuu

SEQ ID NO: 2116035 - RNA, 19 nt, Homo sapiens
  misc_RNA (1)...(19): siRNA sense strand
gggaacagcgagcagauca

SEQ ID NO: 2116036 - RNA, 19 nt, Homo sapiens
  misc_RNA (1)...(19): siRNA sense strand
gagaaagugcuggagaaug

SEQ ID NO: 2116037 - RNA, 19 nt, Homo sapiens
  misc_RNA (1)...(19): siRNA sense strand
ggagaagacgcccgagagu

SEQ ID NO: 2116038 - RNA, 19 nt, Homo sapiens
  misc_RNA (1)...(19): siRNA sense strand
cagcaacgacagcggcuuu

SEQ ID NO: 2116039 - RNA, 19 nt, Homo sapiens
  misc_RNA (1)...(19): siRNA sense strand
cgagagagaagagaaagug

SEQ ID NO: 2116040 - RNA, 19 nt, Homo sapiens
  misc_RNA (1)...(19): siRNA sense strand
caacgacagcggcuuugga

SEQ ID NO: 2116041 - RNA, 19 nt, Homo sapiens
  misc_RNA (1)...(19): siRNA sense strand
gagaaggugcuggugaaug

SEQ ID NO: 2116042 - RNA, 19 nt, Homo sapiens
  misc_RNA (1)...(19): siRNA sense strand
gagaaagcgcuggagaaug

SEQ ID NO: 2116043 - RNA, 19 nt, Homo sapiens
  misc_RNA (1)...(19): siRNA sense strand
uggagacgcugccguuucu

SEQ ID NO: 2116044 - RNA, 19 nt, Homo sapiens
  misc_RNA (1)...(19): siRNA sense strand
ggcaagugcugugguugug

SEQ ID NO: 2116045 - RNA, 19 nt, Homo sapiens
  misc_RNA (1)...(19): siRNA sense strand
gcggacuacugguaugaca

SEQ ID NO: 2116046 - RNA, 19 nt, Homo sapiens
  misc_RNA (1)...(19): siRNA sense strand
gggugacagugcuggagaa

SEQ ID NO: 2116047 - RNA, 19 nt, Homo sapiens
  misc_RNA (1)...(19): siRNA sense strand
gagaugccacgacuauucu

SEQ ID NO: 2116048 - RNA, 19 nt, Homo sapiens
  misc_RNA (1)...(19): siRNA sense strand
ggaauuugagaacccugaa

SEQ ID NO: 2116049 - RNA, 19 nt, Homo sapiens
  misc_RNA (1)...(19): siRNA sense strand
ucgagugggcggaggauuu

SEQ ID NO: 2116050 - RNA, 19 nt, Homo sapiens
  misc_RNA (1)...(19): siRNA sense strand
ucaccugucugugcugcaa

SEQ ID NO: 2116051 - RNA, 19 nt, Homo sapiens
  misc_RNA (1)...(19): siRNA sense strand
gauuauggaguucugucaa

SEQ ID NO: 2116052 - RNA, 19 nt, Homo sapiens
  misc_RNA (1)...(19): siRNA sense strand
ggagaggccaccagagacu

SEQ ID NO: 2116053 - RNA, 19 nt, Homo sapiens
  misc_RNA (1)...(19): siRNA sense strand
cgaugucggcuucaaggaa

SEQ ID NO: 2116054 - RNA, 19 nt, Homo sapiens
  misc_RNA (1)...(19): siRNA sense strand
ugccguuucugcugauuau

SEQ ID NO: 2116055 - RNA, 19 nt, Homo sapiens
  misc_RNA (1)...(19): siRNA sense strand
agccugagccucccaguga

SEQ ID NO: 2116056 - RNA, 19 nt, Homo sapiens
  misc_RNA (1)...(19): siRNA sense strand
cuacaaggaggacuacuac

SEQ ID NO: 2116057 - RNA, 19 nt, Homo sapiens
  misc_RNA (1)...(19): siRNA sense strand
gagaccuccuccucacagu

SEQ ID NO: 2116058 - RNA, 19 nt, Homo sapiens
  misc_RNA (1)...(19): siRNA sense strand
ucgagugccugugggagaa

SEQ ID NO: 2116059 - RNA, 19 nt, Homo sapiens
  misc_RNA (1)...(19): siRNA sense strand
ggaacagcgagcagaucaa

SEQ ID NO: 2116060 - RNA, 19 nt, Homo sapiens
  misc_RNA (1)...(19): siRNA sense strand
caaagagcgaggacaaggu

SEQ ID NO: 2116061 - RNA, 19 nt, Homo sapiens
  misc_RNA (1)...(19): siRNA sense strand
ggagaaggugcuggugaau

SEQ ID NO: 2116062 - RNA, 19 nt, Homo sapiens
  misc_RNA (1)...(19): siRNA sense strand
gaugccacgacuauucuug

SEQ ID NO: 2116063 - RNA, 19 nt, Homo sapiens
  misc_RNA (1)...(19): siRNA sense strand
gaggaugggccuggagauc

SEQ ID NO: 2116064 - RNA, 19 nt, Homo sapiens
  misc_RNA (1)...(19): siRNA sense strand
gccugagccucccagugaa

SEQ ID NO: 2116065 - RNA, 19 nt, Homo sapiens
  misc_RNA (1)...(19): siRNA sense strand
gaccuucgugguucaagug

SEQ ID NO: 2116066 - RNA, 19 nt, Homo sapiens
  misc_RNA (1)...(19): siRNA sense strand
cgaccuucgugguucaagu

SEQ ID NO: 2116067 - RNA, 19 nt, Homo sapiens
  misc_RNA (1)...(19): siRNA sense strand
ccuccaacccuuucuacga

SEQ ID NO: 2116068 - RNA, 19 nt, Homo sapiens
  misc_RNA (1)...(19): siRNA sense strand
ggugauccugggagagauu

SEQ ID NO: 2116069 - RNA, 19 nt, Homo sapiens
  misc_RNA (1)...(19): siRNA sense strand
ucacagucgcugccugaug

SEQ ID NO: 2116070 - RNA, 19 nt, Homo sapiens
  misc_RNA (1)...(19): siRNA sense strand
caaagaagcugcucaagac

SEQ ID NO: 2116071 - RNA, 19 nt, Homo sapiens
  misc_RNA (1)...(19): siRNA sense strand
ggacaucccuucccucaag

SEQ ID NO: 2116072 - RNA, 19 nt, Homo sapiens
  misc_RNA (1)...(19): siRNA sense strand
gggcaaaggugguuaugga

SEQ ID NO: 2116073 - RNA, 19 nt, Homo sapiens
  misc_RNA (1)...(19): siRNA sense strand
caucugcccugucggcuua

SEQ ID NO: 2116074 - RNA, 19 nt, Homo sapiens
  misc_RNA (1)...(19): siRNA sense strand
gaaauucacuccggagauc

SEQ ID NO: 2116075 - RNA, 19 nt, Homo sapiens
  misc_RNA (1)...(19): siRNA sense strand
gaagaucgaggccaagauu

SEQ ID NO: 2116076 - RNA, 19 nt, Homo sapiens
  misc_RNA (1)...(19): siRNA sense strand
ugaaugagcacaagaagaa

SEQ ID NO: 2116077 - RNA, 19 nt, Homo sapiens
  misc_RNA (1)...(19): siRNA sense strand
ccacggagcucuucaucuc

SEQ ID NO: 2116078 - RNA, 19 nt, Homo sapiens
  misc_RNA (1)...(19): siRNA sense strand
ggagcuacguggagauguu

SEQ ID NO: 2116079 - RNA, 19 nt, Homo sapiens
  misc_RNA (1)...(19): siRNA sense strand
uuaaggagguggaggagaa

SEQ ID NO: 2116080 - RNA, 19 nt, Homo sapiens
  misc_RNA (1)...(19): siRNA sense strand
caacaaaccgccugaacug

SEQ ID NO: 2116081 - RNA, 19 nt, Homo sapiens
  misc_RNA (1)...(19): siRNA sense strand
ccaaagaagcugcucaaga

SEQ ID NO: 2116082 - RNA, 19 nt, Homo sapiens
  misc_RNA (1)...(19): siRNA sense strand
gcacuugacccagacauga

SEQ ID NO: 2116083 - RNA, 19 nt, Homo sapiens
  misc_RNA (1)...(19): siRNA sense strand
gcucagcccucccaagagu

SEQ ID NO: 2116084 - RNA, 19 nt, Homo sapiens
  misc_RNA (1)...(19): siRNA sense strand
uaccagcgccucuauguaa

SEQ ID NO: 2116085 - RNA, 19 nt, Homo sapiens
  misc_RNA (1)...(19): siRNA sense strand
gcaagacgcucagcaagcu

SEQ ID NO: 2116086 - RNA, 19 nt, Homo sapiens
  misc_RNA (1)...(19): siRNA sense strand
uagacggccugcugaauga

SEQ ID NO: 2116087 - RNA, 19 nt, Homo sapiens
  misc_RNA (1)...(19): siRNA sense strand
ccacagcucuauaacuucu

SEQ ID NO: 2116088 - RNA, 19 nt, Homo sapiens
  misc_RNA (1)...(19): siRNA sense strand
ggucagagcccaggaguuc

SEQ ID NO: 2116089 - RNA, 19 nt, Homo sapiens
  misc_RNA (1)...(19): siRNA sense strand
cuaagaagaggaagaaaug

SEQ ID NO: 2116090 - RNA, 19 nt, Homo sapiens
  misc_RNA (1)...(19): siRNA sense strand
ugaagccacuuaagaucaa

SEQ ID NO: 2116091 - RNA, 19 nt, Homo sapiens
  misc_RNA (1)...(19): siRNA sense strand
gagggucugugcucggaaa

SEQ ID NO: 2116092 - RNA, 19 nt, Homo sapiens
  misc_RNA (1)...(19): siRNA sense strand
ggaagaaauggcugaagga

SEQ ID NO: 2116093 - RNA, 19 nt, Homo sapiens
  misc_RNA (1)...(19): siRNA sense strand
cccaugcgcuccagcacua

SEQ ID NO: 2116094 - RNA, 19 nt, Homo sapiens
  misc_RNA (1)...(19): siRNA sense strand
gaaaagacgacaucugaga

SEQ ID NO: 2116095 - RNA, 19 nt, Homo sapiens
  misc_RNA (1)...(19): siRNA sense strand
gcucugggcaggccaagaa

SEQ ID NO: 2116096 - RNA, 19 nt, Homo sapiens
  misc_RNA (1)...(19): siRNA sense strand
gcgccucuauguaaaguuc

SEQ ID NO: 2116097 - RNA, 19 nt, Homo sapiens
  misc_RNA (1)...(19): siRNA sense strand
acuauacacucuaccauuc

SEQ ID NO: 2116098 - RNA, 19 nt, Homo sapiens
  misc_RNA (1)...(19): siRNA sense strand
agaagcagccggagaugaa

SEQ ID NO: 2116099 - RNA, 19 nt, Homo sapiens
  misc_RNA (1)...(19): siRNA sense strand
guacaagacgggcaaaggu

SEQ ID NO: 2116100 - RNA, 19 nt, Homo sapiens
  misc_RNA (1)...(19): siRNA sense strand
ggaaaagucgggauacuau

SEQ ID NO: 2116101 - RNA, 19 nt, Homo sapiens
  misc_RNA (1)...(19): siRNA sense strand
gagaagcagccggagauga

SEQ ID NO: 2116102 - RNA, 19 nt, Homo sapiens
  misc_RNA (1)...(19): siRNA sense strand
guaccagcgccucuaugua

SEQ ID NO: 2116103 - RNA, 19 nt, Homo sapiens
  misc_RNA (1)...(19): siRNA sense strand
ccauucagcccuccagcua

SEQ ID NO: 2116104 - RNA, 19 nt, Homo sapiens
  misc_RNA (1)...(19): siRNA sense strand
gagaagaucgaggccaaga

SEQ ID NO: 2116105 - RNA, 19 nt, Homo sapiens
  misc_RNA (1)...(19): siRNA sense strand
uuucauggccuccuucuug

SEQ ID NO: 2116106 - RNA, 19 nt, Homo sapiens
  misc_RNA (1)...(19): siRNA sense strand
accauucgcuccaccacua

SEQ ID NO: 2116107 - RNA, 19 nt, Homo sapiens
  misc_RNA (1)...(19): siRNA sense strand
gggauacuauacacucuac

SEQ ID NO: 2116108 - RNA, 19 nt, Homo sapiens
  misc_RNA (1)...(19): siRNA sense strand
acacggucaucaagcacua

SEQ ID NO: 2116109 - RNA, 19 nt, Homo sapiens
  misc_RNA (1)...(19): siRNA sense strand
gggcgaugcgggagaugua

SEQ ID NO: 2116110 - RNA, 19 nt, Homo sapiens
  misc_RNA (1)...(19): siRNA sense strand
ucgagacgcugcccuccuu

SEQ ID NO: 2116111 - RNA, 19 nt, Homo sapiens
  misc_RNA (1)...(19): siRNA sense strand
agaagcugcucaagacauc

SEQ ID NO: 2116112 - RNA, 19 nt, Homo sapiens
  misc_RNA (1)...(19): siRNA sense strand
gaaaagucgggauacuaua

SEQ ID NO: 2116113 - RNA, 19 nt, Homo sapiens
  misc_RNA (1)...(19): siRNA sense strand
gguaccagcgccucuaugu

SEQ ID NO: 2116114 - RNA, 19 nt, Homo sapiens
  misc_RNA (1)...(19): siRNA sense strand
aggaugcucugcacacguu

SEQ ID NO: 2116115 - RNA, 19 nt, Homo sapiens
  misc_RNA (1)...(19): siRNA sense strand
gcucuaccaagccaaagaa

SEQ ID NO: 2116116 - RNA, 19 nt, Homo sapiens
  misc_RNA (1)...(19): siRNA sense strand
agaucgaggccaagauuaa

SEQ ID NO: 2116117 - RNA, 19 nt, Homo sapiens
  misc_RNA (1)...(19): siRNA sense strand
gaaugagcacaagaagaaa

SEQ ID NO: 2116118 - RNA, 19 nt, Homo sapiens
  misc_RNA (1)...(19): siRNA sense strand
ccuggaggcugcagagagu

SEQ ID NO: 2116119 - RNA, 19 nt, Homo sapiens
  misc_RNA (1)...(19): siRNA sense strand
aagacucugucgccaagaa

SEQ ID NO: 2116120 - RNA, 19 nt, Homo sapiens
  misc_RNA (1)...(19): siRNA sense strand
gauagacggccugcugaau

SEQ ID NO: 2116121 - RNA, 19 nt, Homo sapiens
  misc_RNA (1)...(19): siRNA sense strand
ccuaagaagaggaagaaau

SEQ ID NO: 2116122 - RNA, 19 nt, Homo sapiens
  misc_RNA (1)...(19): siRNA sense strand
gugccaccaguaauuauuu

SEQ ID NO: 2116123 - RNA, 19 nt, Homo sapiens
  misc_RNA (1)...(19): siRNA sense strand
gagccugacucgggagaag

SEQ ID NO: 2116124 - RNA, 19 nt, Homo sapiens
  misc_RNA (1)...(19): siRNA sense strand
caagaagaaaguccugaag

SEQ ID NO: 2116125 - RNA, 19 nt, Homo sapiens
  misc_RNA (1)...(19): siRNA sense strand
gcaggccucucuggacucu

SEQ ID NO: 2116126 - RNA, 19 nt, Homo sapiens
  misc_RNA (1)...(19): siRNA sense strand
ucaauaagaaggacuacgu

SEQ ID NO: 2116127 - RNA, 19 nt, Homo sapiens
  misc_RNA (1)...(19): siRNA sense strand
caggcgccaugcaggaauu

SEQ ID NO: 2116128 - RNA, 19 nt, Homo sapiens
  misc_RNA (1)...(19): siRNA sense strand
gcaccuuuccguccucauc

SEQ ID NO: 2116129 - RNA, 19 nt, Homo sapiens
  misc_RNA (1)...(19): siRNA sense strand
cgccaucucugcccucgau

SEQ ID NO: 2116130 - RNA, 19 nt, Homo sapiens
  misc_RNA (1)...(19): siRNA sense strand
ccaccgauggcgccaagaa

SEQ ID NO: 2116131 - RNA, 19 nt, Homo sapiens
  misc_RNA (1)...(19): siRNA sense strand
gaucgaggccaagauuaag

SEQ ID NO: 2116132 - RNA, 19 nt, Homo sapiens
  misc_RNA (1)...(19): siRNA sense strand
ccaacaaaccgccugaacu

SEQ ID NO: 2116133 - RNA, 19 nt, Homo sapiens
  misc_RNA (1)...(19): siRNA sense strand
caagaggagcguggucaga

SEQ ID NO: 2116134 - RNA, 19 nt, Homo sapiens
  misc_RNA (1)...(19): siRNA sense strand
ucgcccaucuucugcucua

SEQ ID NO: 2116135 - RNA, 19 nt, Homo sapiens
  misc_RNA (1)...(19): siRNA sense strand
ccccacagcucuauaacuu

SEQ ID NO: 2116136 - RNA, 19 nt, Homo sapiens
  misc_RNA (1)...(19): siRNA sense strand
ggacggccagaggcaguuu

SEQ ID NO: 2116137 - RNA, 19 nt, Homo sapiens
  misc_RNA (1)...(19): siRNA sense strand
acaagaagaaaguccugaa

SEQ ID NO: 2116138 - RNA, 19 nt, Homo sapiens
  misc_RNA (1)...(19): siRNA sense strand
gagcuacguggagauguug

SEQ ID NO: 2116139 - RNA, 19 nt, Homo sapiens
  misc_RNA (1)...(19): siRNA sense strand
aagaucgaggccaagauua

SEQ ID NO: 2116140 - RNA, 19 nt, Homo sapiens
  misc_RNA (1)...(19): siRNA sense strand
gcuccaccacuauaaauac

SEQ ID NO: 2116141 - RNA, 19 nt, Homo sapiens
  misc_RNA (1)...(19): siRNA sense strand
gauacuauacacucuacca

SEQ ID NO: 2116142 - RNA, 19 nt, Homo sapiens
  misc_RNA (1)...(19): siRNA sense strand
ccagagcagacuccugaga

SEQ ID NO: 2116143 - RNA, 19 nt, Homo sapiens
  misc_RNA (1)...(19): siRNA sense strand
gagaggucagcgaaagcua

SEQ ID NO: 2116144 - RNA, 19 nt, Homo sapiens
  misc_RNA (1)...(19): siRNA sense strand
ucagagcccaggaguucaa

SEQ ID NO: 2116145 - RNA, 19 nt, Homo sapiens
  misc_RNA (1)...(19): siRNA sense strand
gccaggacacggucaucaa

SEQ ID NO: 2116146 - RNA, 19 nt, Homo sapiens
  misc_RNA (1)...(19): siRNA sense strand
gcucuuugacuccuucagu

SEQ ID NO: 2116147 - RNA, 19 nt, Homo sapiens
  misc_RNA (1)...(19): siRNA sense strand
ccucucuccucucccaguu

SEQ ID NO: 2116148 - RNA, 19 nt, Homo sapiens
  misc_RNA (1)...(19): siRNA sense strand
ugccaccaguaauuauuug

SEQ ID NO: 2116149 - RNA, 19 nt, Homo sapiens
  misc_RNA (1)...(19): siRNA sense strand
uacgagaggucagcgaaag

SEQ ID NO: 2116150 - RNA, 19 nt, Homo sapiens
  misc_RNA (1)...(19): siRNA sense strand
ggagaagcagccggagaug

SEQ ID NO: 2116151 - RNA, 19 nt, Homo sapiens
  misc_RNA (1)...(19): siRNA sense strand
gaagccacuuaagaucaag

SEQ ID NO: 2116152 - RNA, 19 nt, Homo sapiens
  misc_RNA (1)...(19): siRNA sense strand
ucaccucgcccaucuucug

SEQ ID NO: 2116153 - RNA, 19 nt, Homo sapiens
  misc_RNA (1)...(19): siRNA sense strand
auagacggccugcugaaug

SEQ ID NO: 2116154 - RNA, 19 nt, Homo sapiens
  misc_RNA (1)...(19): siRNA sense strand
aggccucucuggacucuuc

SEQ ID NO: 2116155 - RNA, 19 nt, Homo sapiens
  misc_RNA (1)...(19): siRNA sense strand
ggagaugaagucggguuuc

SEQ ID NO: 2116156 - RNA, 19 nt, Homo sapiens
  misc_RNA (1)...(19): siRNA sense strand
gagaaucccuuuaaaugua

SEQ ID NO: 2116157 - RNA, 19 nt, Homo sapiens
  misc_RNA (1)...(19): siRNA sense strand
gaacaucggcgaauucaua

SEQ ID NO: 2116158 - RNA, 19 nt, Homo sapiens
  misc_RNA (1)...(19): siRNA sense strand
gaggacaccugguuagaua

SEQ ID NO: 2116159 - RNA, 19 nt, Homo sapiens
  misc_RNA (1)...(19): siRNA sense strand
gagaagugcuuuaagugua

SEQ ID NO: 2116160 - RNA, 19 nt, Homo sapiens
  misc_RNA (1)...(19): siRNA sense strand
gagagaagccuuacaaaug

SEQ ID NO: 2116161 - RNA, 19 nt, Homo sapiens
  misc_RNA (1)...(19): siRNA sense strand
cgucagagcucaugccuuu

SEQ ID NO: 2116162 - RNA, 19 nt, Homo sapiens
  misc_RNA (1)...(19): siRNA sense strand
gagaaaccauaucaaugua

SEQ ID NO: 2116163 - RNA, 19 nt, Homo sapiens
  misc_RNA (1)...(19): siRNA sense strand
caagaacucuccucugaug

SEQ ID NO: 2116164 - RNA, 19 nt, Homo sapiens
  misc_RNA (1)...(19): siRNA sense strand
gagagaaucccuuuaaaug

SEQ ID NO: 2116165 - RNA, 19 nt, Homo sapiens
  misc_RNA (1)...(19): siRNA sense strand
guacauaccuguggcauca

SEQ ID NO: 2116166 - RNA, 19 nt, Homo sapiens
  misc_RNA (1)...(19): siRNA sense strand
ggagaaaccauaucaaugu

SEQ ID NO: 2116167 - RNA, 19 nt, Homo sapiens
  misc_RNA (1)...(19): siRNA sense strand
gcucaugccuuucuauuca

SEQ ID NO: 2116168 - RNA, 19 nt, Homo sapiens
  misc_RNA (1)...(19): siRNA sense strand
ggaaauccuucaggcauaa

SEQ ID NO: 2116169 - RNA, 19 nt, Homo sapiens
  misc_RNA (1)...(19): siRNA sense strand
gagaggagccuuauaagug

SEQ ID NO: 2116170 - RNA, 19 nt, Homo sapiens
  misc_RNA (1)...(19): siRNA sense strand
gagugaggcuguauaaaug

SEQ ID NO: 2116171 - RNA, 19 nt, Homo sapiens
  misc_RNA (1)...(19): siRNA sense strand
gggaaauccuucaggcaua

SEQ ID NO: 2116172 - RNA, 19 nt, Homo sapiens
  misc_RNA (1)...(19): siRNA sense strand
gcaagagucaugaauuaaa

SEQ ID NO: 2116173 - RNA, 19 nt, Homo sapiens
  misc_RNA (1)...(19): siRNA sense strand
cuacagauguggugaaugu

SEQ ID NO: 2116174 - RNA, 19 nt, Homo sapiens
  misc_RNA (1)...(19): siRNA sense strand
gauggaggauuucuucgaa

SEQ ID NO: 2116175 - RNA, 19 nt, Homo sapiens
  misc_RNA (1)...(19): siRNA sense strand
aggcauaacucuacccuaa

SEQ ID NO: 2116176 - RNA, 19 nt, Homo sapiens
  misc_RNA (1)...(19): siRNA sense strand
acacagcguuggacaauug

SEQ ID NO: 2116177 - RNA, 19 nt, Homo sapiens
  misc_RNA (1)...(19): siRNA sense strand
gcucaugccuuucuaagca

SEQ ID NO: 2116178 - RNA, 19 nt, Homo sapiens
  misc_RNA (1)...(19): siRNA sense strand
gcaacaagcccugauguga

SEQ ID NO: 2116179 - RNA, 19 nt, Homo sapiens
  misc_RNA (1)...(19): siRNA sense strand
gaaaacaccucauccaaca

SEQ ID NO: 2116180 - RNA, 19 nt, Homo sapiens
  misc_RNA (1)...(19): siRNA sense strand
gaaacccacuguccaucaa

SEQ ID NO: 2116181 - RNA, 19 nt, Homo sapiens
  misc_RNA (1)...(19): siRNA sense strand
gcaggauucuguucaggaa

SEQ ID NO: 2116182 - RNA, 19 nt, Homo sapiens
  misc_RNA (1)...(19): siRNA sense strand
acaguucgcugcucauuga

SEQ ID NO: 2116183 - RNA, 19 nt, Homo sapiens
  misc_RNA (1)...(19): siRNA sense strand
augcaagagucaugaauua

SEQ ID NO: 2116184 - RNA, 19 nt, Homo sapiens
  misc_RNA (1)...(19): siRNA sense strand
ggagagaaucccuuuaaau

SEQ ID NO: 2116185 - RNA, 19 nt, Homo sapiens
  misc_RNA (1)...(19): siRNA sense strand
ggagagaagccuuacaaau

SEQ ID NO: 2116186 - RNA, 19 nt, Homo sapiens
  misc_RNA (1)...(19): siRNA sense strand
gcauaacucuacccuaaag

SEQ ID NO: 2116187 - RNA, 19 nt, Homo sapiens
  misc_RNA (1)...(19): siRNA sense strand
gaaaccauaucaauguagu

SEQ ID NO: 2116188 - RNA, 19 nt, Homo sapiens
  misc_RNA (1)...(19): siRNA sense strand
cagcuaagucuaaggaaua

SEQ ID NO: 2116189 - RNA, 19 nt, Homo sapiens
  misc_RNA (1)...(19): siRNA sense strand
gagaagcccuacagaugug

SEQ ID NO: 2116190 - RNA, 19 nt, Homo sapiens
  misc_RNA (1)...(19): siRNA sense strand
cagagaaacuaccuuguuc

SEQ ID NO: 2116191 - RNA, 19 nt, Homo sapiens
  misc_RNA (1)...(19): siRNA sense strand
gauaguaaguccuacaacu

SEQ ID NO: 2116192 - RNA, 19 nt, Homo sapiens
  misc_RNA (1)...(19): siRNA sense strand
gggagaagcccuacagaug

SEQ ID NO: 2116193 - RNA, 19 nt, Homo sapiens
  misc_RNA (1)...(19): siRNA sense strand
gaucagaacccagaacaga

SEQ ID NO: 2116194 - RNA, 19 nt, Homo sapiens
  misc_RNA (1)...(19): siRNA sense strand
ggucugauauugccaccaa

SEQ ID NO: 2116195 - RNA, 19 nt, Homo sapiens
  misc_RNA (1)...(19): siRNA sense strand
ggagaagcccuacagaugu

SEQ ID NO: 2116196 - RNA, 19 nt, Homo sapiens
  misc_RNA (1)...(19): siRNA sense strand
acccagagcucaugccuuu

SEQ ID NO: 2116197 - RNA, 19 nt, Homo sapiens
  misc_RNA (1)...(19): siRNA sense strand
agaagugcuuuaaguguaa

SEQ ID NO: 2116198 - RNA, 19 nt, Homo sapiens
  misc_RNA (1)...(19): siRNA sense strand
caagagucaugaauuaaag

SEQ ID NO: 2116199 - RNA, 19 nt, Homo sapiens
  misc_RNA (1)...(19): siRNA sense strand
gaacucaugccagaaagaa

SEQ ID NO: 2116200 - RNA, 19 nt, Homo sapiens
  misc_RNA (1)...(19): siRNA sense strand
uaacacagcaccagagaau

SEQ ID NO: 2116201 - RNA, 19 nt, Homo sapiens
  misc_RNA (1)...(19): siRNA sense strand
gagaaaagccuuauguuug

SEQ ID NO: 2116202 - RNA, 19 nt, Homo sapiens
  misc_RNA (1)...(19): siRNA sense strand
gcuaggcgauccagaaagu

SEQ ID NO: 2116203 - RNA, 19 nt, Homo sapiens
  misc_RNA (1)...(19): siRNA sense strand
ccaaaguacucggcucauu

SEQ ID NO: 2116204 - RNA, 19 nt, Homo sapiens
  misc_RNA (1)...(19): siRNA sense strand
gagugaagcccuuugaaug

SEQ ID NO: 2116205 - RNA, 19 nt, Homo sapiens
  misc_RNA (1)...(19): siRNA sense strand
gagaagccuuacuccugua

SEQ ID NO: 2116206 - RNA, 19 nt, Homo sapiens
  misc_RNA (1)...(19): siRNA sense strand
aagauuccauggugcauaa

SEQ ID NO: 2116207 - RNA, 19 nt, Homo sapiens
  misc_RNA (1)...(19): siRNA sense strand
gaauaugggacaacuuuua

SEQ ID NO: 2116208 - RNA, 19 nt, Homo sapiens
  misc_RNA (1)...(19): siRNA sense strand
ccagaaagcaaaucuaaca

SEQ ID NO: 2116209 - RNA, 19 nt, Homo sapiens
  misc_RNA (1)...(19): siRNA sense strand
acacucaccuuaaugaaca

SEQ ID NO: 2116210 - RNA, 19 nt, Homo sapiens
  misc_RNA (1)...(19): siRNA sense strand
accaagaacucuccucuga

SEQ ID NO: 2116211 - RNA, 19 nt, Homo sapiens
  misc_RNA (1)...(19): siRNA sense strand
ccauaucaauguagugaau

SEQ ID NO: 2116212 - RNA, 19 nt, Homo sapiens
  misc_RNA (1)...(19): siRNA sense strand
gcccagaaagcaaaucuaa

SEQ ID NO: 2116213 - RNA, 19 nt, Homo sapiens
  misc_RNA (1)...(19): siRNA sense strand
ggacacagcguuggacaau

SEQ ID NO: 2116214 - RNA, 19 nt, Homo sapiens
  misc_RNA (1)...(19): siRNA sense strand
ggagaaaagccuuauguuu

SEQ ID NO: 2116215 - RNA, 19 nt, Homo sapiens
  misc_RNA (1)...(19): siRNA sense strand
gaagauccacacucggaaa

SEQ ID NO: 2116216 - RNA, 19 nt, Homo sapiens
  misc_RNA (1)...(19): siRNA sense strand
acccggaucuuccaccuua

SEQ ID NO: 2116217 - RNA, 19 nt, Homo sapiens
  misc_RNA (1)...(19): siRNA sense strand
gaagauuccauggugcaua

SEQ ID NO: 2116218 - RNA, 19 nt, Homo sapiens
  misc_RNA (1)...(19): siRNA sense strand
ggagugaagcccuuugaau

SEQ ID NO: 2116219 - RNA, 19 nt, Homo sapiens
  misc_RNA (1)...(19): siRNA sense strand
gcggagaacgcuucauuug

SEQ ID NO: 2116220 - RNA, 19 nt, Homo sapiens
  misc_RNA (1)...(19): siRNA sense strand
ccacaaaugucaggaaugc

SEQ ID NO: 2116221 - RNA, 19 nt, Homo sapiens
  misc_RNA (1)...(19): siRNA sense strand
gaggagccuuauaagugua

SEQ ID NO: 2116222 - RNA, 19 nt, Homo sapiens
  misc_RNA (1)...(19): siRNA sense strand
gagaagcccuauguaugug

SEQ ID NO: 2116223 - RNA, 19 nt, Homo sapiens
  misc_RNA (1)...(19): siRNA sense strand
ccagagaaacuaccuuguu

SEQ ID NO: 2116224 - RNA, 19 nt, Homo sapiens
  misc_RNA (1)...(19): siRNA sense strand
caaagaauccacucuagag

SEQ ID NO: 2116225 - RNA, 19 nt, Homo sapiens
  misc_RNA (1)...(19): siRNA sense strand
cuucugaggucugauauug

SEQ ID NO: 2116226 - RNA, 19 nt, Homo sapiens
  misc_RNA (1)...(19): siRNA sense strand
ggaggaagcccagaagcaa

SEQ ID NO: 2116227 - RNA, 19 nt, Homo sapiens
  misc_RNA (1)...(19): siRNA sense strand
caucaaagaauccacucua

SEQ ID NO: 2116228 - RNA, 19 nt, Homo sapiens
  misc_RNA (1)...(19): siRNA sense strand
aaggagacuuucagcgaua

SEQ ID NO: 2116229 - RNA, 19 nt, Homo sapiens
  misc_RNA (1)...(19): siRNA sense strand
ggagaggagccuuauaagu

SEQ ID NO: 2116230 - RNA, 19 nt, Homo sapiens
  misc_RNA (1)...(19): siRNA sense strand
gggagaaaccauaucaaug

SEQ ID NO: 2116231 - RNA, 19 nt, Homo sapiens
  misc_RNA (1)...(19): siRNA sense strand
guaagagucaagauaguga

SEQ ID NO: 2116232 - RNA, 19 nt, Homo sapiens
  misc_RNA (1)...(19): siRNA sense strand
ugagaagcccuauguaugu

SEQ ID NO: 2116233 - RNA, 19 nt, Homo sapiens
  misc_RNA (1)...(19): siRNA sense strand
ggugagaagcccuauguau

SEQ ID NO: 2116234 - RNA, 19 nt, Homo sapiens
  misc_RNA (1)...(19): siRNA sense strand
agaagccguugguguguaa

SEQ ID NO: 2116235 - RNA, 19 nt, Homo sapiens
  misc_RNA (1)...(19): siRNA sense strand
uaaugaacaucggcgaauu

SEQ ID NO: 2116236 - RNA, 19 nt, Homo sapiens
  misc_RNA (1)...(19): siRNA sense strand
agagaagccuuacaaaugc

SEQ ID NO: 2116237 - RNA, 19 nt, Homo sapiens
  misc_RNA (1)...(19): siRNA sense strand
gaacaccaggcucuucaug

SEQ ID NO: 2116238 - RNA, 19 nt, Homo sapiens
  misc_RNA (1)...(19): siRNA sense strand
agaggagccuuauaagugu

SEQ ID NO: 2116239 - RNA, 19 nt, Homo sapiens
  misc_RNA (1)...(19): siRNA sense strand
gugagaagcccuauguaug

SEQ ID NO: 2116240 - RNA, 19 nt, Homo sapiens
  misc_RNA (1)...(19): siRNA sense strand
caaaguacucggcucauuc

SEQ ID NO: 2116241 - RNA, 19 nt, Homo sapiens
  misc_RNA (1)...(19): siRNA sense strand
ucacaccagcuaagucuaa

SEQ ID NO: 2116242 - RNA, 19 nt, Homo sapiens
  misc_RNA (1)...(19): siRNA sense strand
aaacucacacagauaguaa

SEQ ID NO: 2116243 - RNA, 19 nt, Homo sapiens
  misc_RNA (1)...(19): siRNA sense strand
gaccacagccagcaggauu

SEQ ID NO: 2116244 - RNA, 19 nt, Homo sapiens
  misc_RNA (1)...(19): siRNA sense strand
gagcucaugccuuucuauu

SEQ ID NO: 2116245 - RNA, 19 nt, Homo sapiens
  misc_RNA (1)...(19): siRNA sense strand
acacagauaguaaguccua

SEQ ID NO: 2116246 - RNA, 19 nt, Homo sapiens
  misc_RNA (1)...(19): siRNA sense strand
ccacccagauggcagugaa

SEQ ID NO: 2116247 - RNA, 19 nt, Homo sapiens
  misc_RNA (1)...(19): siRNA sense strand
uggagagaaucccuuuaaa

SEQ ID NO: 2116248 - RNA, 19 nt, Homo sapiens
  misc_RNA (1)...(19): siRNA sense strand
gcacaccucucaaaacauc

SEQ ID NO: 2116249 - RNA, 19 nt, Homo sapiens
  misc_RNA (1)...(19): siRNA sense strand
agagugaggcuguauaaau

SEQ ID NO: 2116250 - RNA, 19 nt, Homo sapiens
  misc_RNA (1)...(19): siRNA sense strand
ccauguaagagucaagaua

SEQ ID NO: 2116251 - RNA, 19 nt, Homo sapiens
  misc_RNA (1)...(19): siRNA sense strand
ucacacgggcuacaaauuc

SEQ ID NO: 2116252 - RNA, 19 nt, Homo sapiens
  misc_RNA (1)...(19): siRNA sense strand
ggagaaacccacuguccau

SEQ ID NO: 2116253 - RNA, 19 nt, Homo sapiens
  misc_RNA (1)...(19): siRNA sense strand
acaccugguuagauaguuu

SEQ ID NO: 2116254 - RNA, 19 nt, Homo sapiens
  misc_RNA (1)...(19): siRNA sense strand
ucagaacccagaacagaaa

SEQ ID NO: 2116255 - RNA, 19 nt, Homo sapiens
  misc_RNA (1)...(19): siRNA sense strand
gaacgugggaaauccuuca

SEQ ID NO: 2116256 - RNA, 19 nt, Homo sapiens
  misc_RNA (1)...(19): siRNA sense strand
gaaccacccuucuuauuca

SEQ ID NO: 2116257 - RNA, 19 nt, Homo sapiens
  misc_RNA (1)...(19): siRNA sense strand
gggaccagcugcucgguua

SEQ ID NO: 2116258 - RNA, 19 nt, Homo sapiens
  misc_RNA (1)...(19): siRNA sense strand
gauggaaccacccuucuua

SEQ ID NO: 2116259 - RNA, 19 nt, Homo sapiens
  misc_RNA (1)...(19): siRNA sense strand
ccacuguugucuacucuaa

SEQ ID NO: 2116260 - RNA, 19 nt, Homo sapiens
  misc_RNA (1)...(19): siRNA sense strand
ggaaccacccuucuuauuc

SEQ ID NO: 2116261 - RNA, 19 nt, Homo sapiens
  misc_RNA (1)...(19): siRNA sense strand
gcagggucaucuugucuug

SEQ ID NO: 2116262 - RNA, 19 nt, Homo sapiens
  misc_RNA (1)...(19): siRNA sense strand
gccagaugcuucuccuuug

SEQ ID NO: 2116263 - RNA, 19 nt, Homo sapiens
  misc_RNA (1)...(19): siRNA sense strand
gcccagaccugagcuccaa

SEQ ID NO: 2116264 - RNA, 19 nt, Homo sapiens
  misc_RNA (1)...(19): siRNA sense strand
ggacaaggccuggaugacu

SEQ ID NO: 2116265 - RNA, 19 nt, Homo sapiens
  misc_RNA (1)...(19): siRNA sense strand
ggguguggaugccauuguu

SEQ ID NO: 2116266 - RNA, 19 nt, Homo sapiens
  misc_RNA (1)...(19): siRNA sense strand
gcacuggagccugcuuuga

SEQ ID NO: 2116267 - RNA, 19 nt, Homo sapiens
  misc_RNA (1)...(19): siRNA sense strand
gcagcagcguggcacacaa

SEQ ID NO: 2116268 - RNA, 19 nt, Homo sapiens
  misc_RNA (1)...(19): siRNA sense strand
ggagaucccagcacucuac

SEQ ID NO: 2116269 - RNA, 19 nt, Homo sapiens
  misc_RNA (1)...(19): siRNA sense strand
ucccucaccuccuguaaga

SEQ ID NO: 2116270 - RNA, 19 nt, Homo sapiens
  misc_RNA (1)...(19): siRNA sense strand
aauacuagauggcccaagu

SEQ ID NO: 2116271 - RNA, 19 nt, Homo sapiens
  misc_RNA (1)...(19): siRNA sense strand
cagcuccucugcccacugu

SEQ ID NO: 2116272 - RNA, 19 nt, Homo sapiens
  misc_RNA (1)...(19): siRNA sense strand
ccagaugcuucuccuuugg

SEQ ID NO: 2116273 - RNA, 19 nt, Homo sapiens
  misc_RNA (1)...(19): siRNA sense strand
gguuacugcucacucuuca

SEQ ID NO: 2116274 - RNA, 19 nt, Homo sapiens
  misc_RNA (1)...(19): siRNA sense strand
gagcuacucuuccuuuugg

SEQ ID NO: 2116275 - RNA, 19 nt, Homo sapiens
  misc_RNA (1)...(19): siRNA sense strand
gagccugcuuugagugaca

SEQ ID NO: 2116276 - RNA, 19 nt, Homo sapiens
  misc_RNA (1)...(19): siRNA sense strand
ugucuacucuaaaggacuu

SEQ ID NO: 2116277 - RNA, 19 nt, Homo sapiens
  misc_RNA (1)...(19): siRNA sense strand
ggacugggacaugcugaug

SEQ ID NO: 2116278 - RNA, 19 nt, Homo sapiens
  misc_RNA (1)...(19): siRNA sense strand
gaguacugaugcucugaca

SEQ ID NO: 2116279 - RNA, 19 nt, Homo sapiens
  misc_RNA (1)...(19): siRNA sense strand
gggcagccuucaggaggaa

SEQ ID NO: 2116280 - RNA, 19 nt, Homo sapiens
  misc_RNA (1)...(19): siRNA sense strand
uuucaguccucguacauuc

SEQ ID NO: 2116281 - RNA, 19 nt, Homo sapiens
  misc_RNA (1)...(19): siRNA sense strand
gcagccaccaucuguguca

SEQ ID NO: 2116282 - RNA, 19 nt, Homo sapiens
  misc_RNA (1)...(19): siRNA sense strand
gaaggcagcgaccaugacu

SEQ ID NO: 2116283 - RNA, 19 nt, Homo sapiens
  misc_RNA (1)...(19): siRNA sense strand
uggaaccacccuucuuauu

SEQ ID NO: 2116284 - RNA, 19 nt, Homo sapiens
  misc_RNA (1)...(19): siRNA sense strand
cagagggccaccacuguga

SEQ ID NO: 2116285 - RNA, 19 nt, Homo sapiens
  misc_RNA (1)...(19): siRNA sense strand
cauauaccuucuccuucga

SEQ ID NO: 2116286 - RNA, 19 nt, Homo sapiens
  misc_RNA (1)...(19): siRNA sense strand
ccucaccuccuguaagaga

SEQ ID NO: 2116287 - RNA, 19 nt, Homo sapiens
  misc_RNA (1)...(19): siRNA sense strand
ggacggcguguucguguac

SEQ ID NO: 2116288 - RNA, 19 nt, Homo sapiens
  misc_RNA (1)...(19): siRNA sense strand
gugaaggcagcgaccauga

SEQ ID NO: 2116289 - RNA, 19 nt, Homo sapiens
  misc_RNA (1)...(19): siRNA sense strand
gcaucuuucaguccucgua

SEQ ID NO: 2116290 - RNA, 19 nt, Homo sapiens
  misc_RNA (1)...(19): siRNA sense strand
uuaucaaccuggccguguu

SEQ ID NO: 2116291 - RNA, 19 nt, Homo sapiens
  misc_RNA (1)...(19): siRNA sense strand
uaucaaccuggccguguuu

SEQ ID NO: 2116292 - RNA, 19 nt, Homo sapiens
  misc_RNA (1)...(19): siRNA sense strand
cgggagcuacucuuccuuu

SEQ ID NO: 2116293 - RNA, 19 nt, Homo sapiens
  misc_RNA (1)...(19): siRNA sense strand
cagcgaagggacagugaug

SEQ ID NO: 2116294 - RNA, 19 nt, Homo sapiens
  misc_RNA (1)...(19): siRNA sense strand
gcuccucugcccacuguug

SEQ ID NO: 2116295 - RNA, 19 nt, Homo sapiens
  misc_RNA (1)...(19): siRNA sense strand
gguguggaugccauuguuu

SEQ ID NO: 2116296 - RNA, 19 nt, Homo sapiens
  misc_RNA (1)...(19): siRNA sense strand
agggucaucuugucuugga

SEQ ID NO: 2116297 - RNA, 19 nt, Homo sapiens
  misc_RNA (1)...(19): siRNA sense strand
agccagaugcuucuccuuu

SEQ ID NO: 2116298 - RNA, 19 nt, Homo sapiens
  misc_RNA (1)...(19): siRNA sense strand
cucuuugggugcaauacua

SEQ ID NO: 2116299 - RNA, 19 nt, Homo sapiens
  misc_RNA (1)...(19): siRNA sense strand
acuguugucuacucuaaag

SEQ ID NO: 2116300 - RNA, 19 nt, Homo sapiens
  misc_RNA (1)...(19): siRNA sense strand
ccacgaaccucugcucuuc

SEQ ID NO: 2116301 - RNA, 19 nt, Homo sapiens
  misc_RNA (1)...(19): siRNA sense strand
ggacggacacguucaagca

SEQ ID NO: 2116302 - RNA, 19 nt, Homo sapiens
  misc_RNA (1)...(19): siRNA sense strand
ucaagcggcuggaauacau

SEQ ID NO: 2116303 - RNA, 19 nt, Homo sapiens
  misc_RNA (1)...(19): siRNA sense strand
ccacgcaggccuucgagua

SEQ ID NO: 2116304 - RNA, 19 nt, Homo sapiens
  misc_RNA (1)...(19): siRNA sense strand
gcaagagacgcagaucuga

SEQ ID NO: 2116305 - RNA, 19 nt, Homo sapiens
  misc_RNA (1)...(19): siRNA sense strand
gcaaccggcuggaccugau

SEQ ID NO: 2116306 - RNA, 19 nt, Homo sapiens
  misc_RNA (1)...(19): siRNA sense strand
ccaaggagaacgugcaaga

SEQ ID NO: 2116307 - RNA, 19 nt, Homo sapiens
  misc_RNA (1)...(19): siRNA sense strand
gcaucuccguccugcauga

SEQ ID NO: 2116308 - RNA, 19 nt, Homo sapiens
  misc_RNA (1)...(19): siRNA sense strand
gcucaugcacgcccaggua

SEQ ID NO: 2116309 - RNA, 19 nt, Homo sapiens
  misc_RNA (1)...(19): siRNA sense strand
gggcaguggugguguugga

SEQ ID NO: 2116310 - RNA, 19 nt, Homo sapiens
  misc_RNA (1)...(19): siRNA sense strand
acacgugcauggugacgaa

SEQ ID NO: 2116311 - RNA, 19 nt, Homo sapiens
  misc_RNA (1)...(19): siRNA sense strand
ggcccugccucgucuucua

SEQ ID NO: 2116312 - RNA, 19 nt, Homo sapiens
  misc_RNA (1)...(19): siRNA sense strand
gcucguggccuucuacaag

SEQ ID NO: 2116313 - RNA, 19 nt, Homo sapiens
  misc_RNA (1)...(19): siRNA sense strand
ucaacacgcuggagcuuuu

SEQ ID NO: 2116314 - RNA, 19 nt, Homo sapiens
  misc_RNA (1)...(19): siRNA sense strand
gcgugcaccucaaccacaa

SEQ ID NO: 2116315 - RNA, 19 nt, Homo sapiens
  misc_RNA (1)...(19): siRNA sense strand
uaccugaaccugcaagaga

SEQ ID NO: 2116316 - RNA, 19 nt, Homo sapiens
  misc_RNA (1)...(19): siRNA sense strand
cugcaugacggcacgcuua

SEQ ID NO: 2116317 - RNA, 19 nt, Homo sapiens
  misc_RNA (1)...(19): siRNA sense strand
gcaguggcggcuacaccua

SEQ ID NO: 2116318 - RNA, 19 nt, Homo sapiens
  misc_RNA (1)...(19): siRNA sense strand
ucgaguaccuguccaagcu

SEQ ID NO: 2116319 - RNA, 19 nt, Homo sapiens
  misc_RNA (1)...(19): siRNA sense strand
ugacggcacgcuuaacuuc

SEQ ID NO: 2116320 - RNA, 19 nt, Homo sapiens
  misc_RNA (1)...(19): siRNA sense strand
gaaccuggugcgcaagauc

SEQ ID NO: 2116321 - RNA, 19 nt, Homo sapiens
  misc_RNA (1)...(19): siRNA sense strand
aaggagaacgugcaagaga

SEQ ID NO: 2116322 - RNA, 19 nt, Homo sapiens
  misc_RNA (1)...(19): siRNA sense strand
gcgcaucuccguccugcau

SEQ ID NO: 2116323 - RNA, 19 nt, Homo sapiens
  misc_RNA (1)...(19): siRNA sense strand
acgaaccucugcucuucaa

SEQ ID NO: 2116324 - RNA, 19 nt, Homo sapiens
  misc_RNA (1)...(19): siRNA sense strand
ggagcgagaccaccucaac

SEQ ID NO: 2116325 - RNA, 19 nt, Homo sapiens
  misc_RNA (1)...(19): siRNA sense strand
gagcucaagcggcuggaau

SEQ ID NO: 2116326 - RNA, 19 nt, Homo sapiens
  misc_RNA (1)...(19): siRNA sense strand
ccucaacuccauccacgaa

SEQ ID NO: 2116327 - RNA, 19 nt, Homo sapiens
  misc_RNA (1)...(19): siRNA sense strand
ucuacaagcugcgcaagca

SEQ ID NO: 2116328 - RNA, 19 nt, Homo sapiens
  misc_RNA (1)...(19): siRNA sense strand
caaccugucccacaacaac

SEQ ID NO: 2116329 - RNA, 19 nt, Homo sapiens
  misc_RNA (1)...(19): siRNA sense strand
gaacggcauccaggugauc

SEQ ID NO: 2116330 - RNA, 19 nt, Homo sapiens
  misc_RNA (1)...(19): siRNA sense strand
ucaacacgcgguaccugaa

SEQ ID NO: 2116331 - RNA, 19 nt, Homo sapiens
  misc_RNA (1)...(19): siRNA sense strand
gcaugugcaaccucaagga

SEQ ID NO: 2116332 - RNA, 19 nt, Homo sapiens
  misc_RNA (1)...(19): siRNA sense strand
ugacggagaacgcccucaa

SEQ ID NO: 2116333 - RNA, 19 nt, Homo sapiens
  misc_RNA (1)...(19): siRNA sense strand
cggagaacgcccucaagga

SEQ ID NO: 2116334 - RNA, 19 nt, Homo sapiens
  misc_RNA (1)...(19): siRNA sense strand
agucgcauuucaccugcua

SEQ ID NO: 2116335 - RNA, 19 nt, Homo sapiens
  misc_RNA (1)...(19): siRNA sense strand
gcaccguggagaucaucaa

SEQ ID NO: 2116336 - RNA, 19 nt, Homo sapiens
  misc_RNA (1)...(19): siRNA sense strand
ggacaacgguucauacuuc

SEQ ID NO: 2116337 - RNA, 19 nt, Homo sapiens
  misc_RNA (1)...(19): siRNA sense strand
gaguauggcuggaaagauu

SEQ ID NO: 2116338 - RNA, 19 nt, Homo sapiens
  misc_RNA (1)...(19): siRNA sense strand
acaaacaacucaacucaaa

SEQ ID NO: 2116339 - RNA, 19 nt, Homo sapiens
  misc_RNA (1)...(19): siRNA sense strand
gcaccaaccucaucuguca

SEQ ID NO: 2116340 - RNA, 19 nt, Homo sapiens
  misc_RNA (1)...(19): siRNA sense strand
gaauguauaugcugucaug

SEQ ID NO: 2116341 - RNA, 19 nt, Homo sapiens
  misc_RNA (1)...(19): siRNA sense strand
uauaugcugucauggguua

SEQ ID NO: 2116342 - RNA, 19 nt, Homo sapiens
  misc_RNA (1)...(19): siRNA sense strand
caacgguucauacuucuuu

SEQ ID NO: 2116343 - RNA, 19 nt, Homo sapiens
  misc_RNA (1)...(19): siRNA sense strand
ggugaucccucaaggaaca

SEQ ID NO: 2116344 - RNA, 19 nt, Homo sapiens
  misc_RNA (1)...(19): siRNA sense strand
gaacugccaagaucucaug

SEQ ID NO: 2116345 - RNA, 19 nt, Homo sapiens
  misc_RNA (1)...(19): siRNA sense strand
gaaaucaggaaccguggaa

SEQ ID NO: 2116346 - RNA, 19 nt, Homo sapiens
  misc_RNA (1)...(19): siRNA sense strand
gagggucugugcaucuuug

SEQ ID NO: 2116347 - RNA, 19 nt, Homo sapiens
  misc_RNA (1)...(19): siRNA sense strand
gagaauguauaugcuguca

SEQ ID NO: 2116348 - RNA, 19 nt, Homo sapiens
  misc_RNA (1)...(19): siRNA sense strand
gguaguggcugugaagauc

SEQ ID NO: 2116349 - RNA, 19 nt, Homo sapiens
  misc_RNA (1)...(19): siRNA sense strand
ccacaaacaacucaacuca

SEQ ID NO: 2116350 - RNA, 19 nt, Homo sapiens
  misc_RNA (1)...(19): siRNA sense strand
ggagggacaacgguucaua

SEQ ID NO: 2116351 - RNA, 19 nt, Homo sapiens
  misc_RNA (1)...(19): siRNA sense strand
caguggagguugaggagaa

SEQ ID NO: 2116352 - RNA, 19 nt, Homo sapiens
  misc_RNA (1)...(19): siRNA sense strand
ccucuucucugcucacaca

SEQ ID NO: 2116353 - RNA, 19 nt, Homo sapiens
  misc_RNA (1)...(19): siRNA sense strand
ucugugaacugccaagauc

SEQ ID NO: 2116354 - RNA, 19 nt, Homo sapiens
  misc_RNA (1)...(19): siRNA sense strand
uggaagaggugguuguuuu

SEQ ID NO: 2116355 - RNA, 19 nt, Homo sapiens
  misc_RNA (1)...(19): siRNA sense strand
agacuccaguggccacaaa

SEQ ID NO: 2116356 - RNA, 19 nt, Homo sapiens
  misc_RNA (1)...(19): siRNA sense strand
ggucuucuaccucgaguau

SEQ ID NO: 2116357 - RNA, 19 nt, Homo sapiens
  misc_RNA (1)...(19): siRNA sense strand
ccucgaguauggcuggaaa

SEQ ID NO: 2116358 - RNA, 19 nt, Homo sapiens
  misc_RNA (1)...(19): siRNA sense strand
ugagggcaguggagguuga

SEQ ID NO: 2116359 - RNA, 19 nt, Homo sapiens
  misc_RNA (1)...(19): siRNA sense strand
caguguuccucuucuguga

SEQ ID NO: 2116360 - RNA, 19 nt, Homo sapiens
  misc_RNA (1)...(19): siRNA sense strand
acacauggcaaacucauca

SEQ ID NO: 2116361 - RNA, 19 nt, Homo sapiens
  misc_RNA (1)...(19): siRNA sense strand
gaaccauccagcucagugu

SEQ ID NO: 2116362 - RNA, 19 nt, Homo sapiens
  misc_RNA (1)...(19): siRNA sense strand
gacaacgguucauacuucu

SEQ ID NO: 2116363 - RNA, 19 nt, Homo sapiens
  misc_RNA (1)...(19): siRNA sense strand
ccucagugcucacgaucau

SEQ ID NO: 2116364 - RNA, 19 nt, Homo sapiens
  misc_RNA (1)...(19): siRNA sense strand
gcaucuuugugcacuguuc

SEQ ID NO: 2116365 - RNA, 19 nt, Homo sapiens
  misc_RNA (1)...(19): siRNA sense strand
gagaggaagaacaaaauuu

SEQ ID NO: 2116366 - RNA, 19 nt, Homo sapiens
  misc_RNA (1)...(19): siRNA sense strand
gcacuguucggucuucuac

SEQ ID NO: 2116367 - RNA, 19 nt, Homo sapiens
  misc_RNA (1)...(19): siRNA sense strand
ggagguugaggagaaugua

SEQ ID NO: 2116368 - RNA, 19 nt, Homo sapiens
  misc_RNA (1)...(19): siRNA sense strand
gcucagugucuccuggaaa

SEQ ID NO: 2116369 - RNA, 19 nt, Homo sapiens
  misc_RNA (1)...(19): siRNA sense strand
gaggagggacaacgguuca

SEQ ID NO: 2116370 - RNA, 19 nt, Homo sapiens
  misc_RNA (1)...(19): siRNA sense strand
gccagacaguguuccucuu

SEQ ID NO: 2116371 - RNA, 19 nt, Homo sapiens
  misc_RNA (1)...(19): siRNA sense strand
cauccucaguuuccacaag

SEQ ID NO: 2116372 - RNA, 19 nt, Homo sapiens
  misc_RNA (1)...(19): siRNA sense strand
ccagacaguguuccucuuc

SEQ ID NO: 2116373 - RNA, 19 nt, Homo sapiens
  misc_RNA (1)...(19): siRNA sense strand
ggagggucugugcaucuuu

SEQ ID NO: 2116374 - RNA, 19 nt, Homo sapiens
  misc_RNA (1)...(19): siRNA sense strand
ucaguuuccacaagaagaa

SEQ ID NO: 2116375 - RNA, 19 nt, Homo sapiens
  misc_RNA (1)...(19): siRNA sense strand
gggacaacgguucauacuu

SEQ ID NO: 2116376 - RNA, 19 nt, Homo sapiens
  misc_RNA (1)...(19): siRNA sense strand
agacaguguuccucuucug

SEQ ID NO: 2116377 - RNA, 19 nt, Homo sapiens
  misc_RNA (1)...(19): siRNA sense strand
cucagugucuccuggaaau

SEQ ID NO: 2116378 - RNA, 19 nt, Homo sapiens
  misc_RNA (1)...(19): siRNA sense strand
caagauuccggcuggagau

SEQ ID NO: 2116379 - RNA, 19 nt, Homo sapiens
  misc_RNA (1)...(19): siRNA sense strand
aaucaggaaccguggaaga

SEQ ID NO: 2116380 - RNA, 19 nt, Homo sapiens
  misc_RNA (1)...(19): siRNA sense strand
ucggugaucccucaaggaa

SEQ ID NO: 2116381 - RNA, 19 nt, Homo sapiens
  misc_RNA (1)...(19): siRNA sense strand
ccacggcaccaaccucauc

SEQ ID NO: 2116382 - RNA, 19 nt, Homo sapiens
  misc_RNA (1)...(19): siRNA sense strand
gguugaggagaauguauau

SEQ ID NO: 2116383 - RNA, 19 nt, Homo sapiens
  misc_RNA (1)...(19): siRNA sense strand
gagguugaggagaauguau

SEQ ID NO: 2116384 - RNA, 19 nt, Homo sapiens
  misc_RNA (1)...(19): siRNA sense strand
ggugagggcaguggagguu

SEQ ID NO: 2116385 - RNA, 19 nt, Homo sapiens
  misc_RNA (1)...(19): siRNA sense strand
ucuucuaccucgaguaugg

SEQ ID NO: 2116386 - RNA, 19 nt, Homo sapiens
  misc_RNA (1)...(19): siRNA sense strand
ugaggagaauguauaugcu

SEQ ID NO: 2116387 - RNA, 19 nt, Homo sapiens
  misc_RNA (1)...(19): siRNA sense strand
ucccggaguuccuaaaguc

SEQ ID NO: 2116388 - RNA, 19 nt, Homo sapiens
  misc_RNA (1)...(19): siRNA sense strand
gagggacaacgguucauac

SEQ ID NO: 2116389 - RNA, 19 nt, Homo sapiens
  misc_RNA (1)...(19): siRNA sense strand
ggaagaggugguuguuuug

SEQ ID NO: 2116390 - RNA, 19 nt, Homo sapiens
  misc_RNA (1)...(19): siRNA sense strand
gaaguucccuccaucaaac

SEQ ID NO: 2116391 - RNA, 19 nt, Homo sapiens
  misc_RNA (1)...(19): siRNA sense strand
ccagagcccugaauccaaa

SEQ ID NO: 2116392 - RNA, 19 nt, Homo sapiens
  misc_RNA (1)...(19): siRNA sense strand
cggaugauauggaucuuaa

SEQ ID NO: 2116393 - RNA, 19 nt, Homo sapiens
  misc_RNA (1)...(19): siRNA sense strand
uggaaagacuccugagaaa

SEQ ID NO: 2116394 - RNA, 19 nt, Homo sapiens
  misc_RNA (1)...(19): siRNA sense strand
ucugaaguauuuccugaua

SEQ ID NO: 2116395 - RNA, 19 nt, Homo sapiens
  misc_RNA (1)...(19): siRNA sense strand
gaccagaucacccucauug

SEQ ID NO: 2116396 - RNA, 19 nt, Homo sapiens
  misc_RNA (1)...(19): siRNA sense strand
gcccaaggcuccagagaca

SEQ ID NO: 2116397 - RNA, 19 nt, Homo sapiens
  misc_RNA (1)...(19): siRNA sense strand
gaaaguuccagaucaguuc

SEQ ID NO: 2116398 - RNA, 19 nt, Homo sapiens
  misc_RNA (1)...(19): siRNA sense strand
cuucaaacauuucuacuca

SEQ ID NO: 2116399 - RNA, 19 nt, Homo sapiens
  misc_RNA (1)...(19): siRNA sense strand
gagaccaccugcgauuuga

SEQ ID NO: 2116400 - RNA, 19 nt, Homo sapiens
  misc_RNA (1)...(19): siRNA sense strand
aaacauuucuacucaaguc

SEQ ID NO: 2116401 - RNA, 19 nt, Homo sapiens
  misc_RNA (1)...(19): siRNA sense strand
auaccaaacugucuguuga

SEQ ID NO: 2116402 - RNA, 19 nt, Homo sapiens
  misc_RNA (1)...(19): siRNA sense strand
aagccuuccuucacuguua

SEQ ID NO: 2116403 - RNA, 19 nt, Homo sapiens
  misc_RNA (1)...(19): siRNA sense strand
gcccugaguuccaacaugu

SEQ ID NO: 2116404 - RNA, 19 nt, Homo sapiens
  misc_RNA (1)...(19): siRNA sense strand
ucaaacauuucuacucaag

SEQ ID NO: 2116405 - RNA, 19 nt, Homo sapiens
  misc_RNA (1)...(19): siRNA sense strand
cagaucaguuccuggauuc

SEQ ID NO: 2116406 - RNA, 19 nt, Homo sapiens
  misc_RNA (1)...(19): siRNA sense strand
aaaagaagaugcauagugu

SEQ ID NO: 2116407 - RNA, 19 nt, Homo sapiens
  misc_RNA (1)...(19): siRNA sense strand
auugggaccugggaaauua

SEQ ID NO: 2116408 - RNA, 19 nt, Homo sapiens
  misc_RNA (1)...(19): siRNA sense strand
ucaagucucccauaccaaa

SEQ ID NO: 2116409 - RNA, 19 nt, Homo sapiens
  misc_RNA (1)...(19): siRNA sense strand
ccaguucaguugucucugu

SEQ ID NO: 2116410 - RNA, 19 nt, Homo sapiens
  misc_RNA (1)...(19): siRNA sense strand
gaaaagaagaugcauagug

SEQ ID NO: 2116411 - RNA, 19 nt, Homo sapiens
  misc_RNA (1)...(19): siRNA sense strand
ccacagugcucaguugaag

SEQ ID NO: 2116412 - RNA, 19 nt, Homo sapiens
  misc_RNA (1)...(19): siRNA sense strand
ugauauggaucuuaaacuc

SEQ ID NO: 2116413 - RNA, 19 nt, Homo sapiens
  misc_RNA (1)...(19): siRNA sense strand
guggaaagacuccugagaa

SEQ ID NO: 2116414 - RNA, 19 nt, Homo sapiens
  misc_RNA (1)...(19): siRNA sense strand
ccucccagcuggaaaguuc

SEQ ID NO: 2116415 - RNA, 19 nt, Homo sapiens
  misc_RNA (1)...(19): siRNA sense strand
gccagggacuccaucacaa

SEQ ID NO: 2116416 - RNA, 19 nt, Homo sapiens
  misc_RNA (1)...(19): siRNA sense strand
gaggaccacagcucaacua

SEQ ID NO: 2116417 - RNA, 19 nt, Homo sapiens
  misc_RNA (1)...(19): siRNA sense strand
acgcguaccugcacaguca

SEQ ID NO: 2116418 - RNA, 19 nt, Homo sapiens
  misc_RNA (1)...(19): siRNA sense strand
ccagaucacccucauugga

SEQ ID NO: 2116419 - RNA, 19 nt, Homo sapiens
  misc_RNA (1)...(19): siRNA sense strand
cgagaccaccugcgauuug

SEQ ID NO: 2116420 - RNA, 19 nt, Homo sapiens
  misc_RNA (1)...(19): siRNA sense strand
gaccccagcuucaaacauu

SEQ ID NO: 2116421 - RNA, 19 nt, Homo sapiens
  misc_RNA (1)...(19): siRNA sense strand
guacuucuccuccuuugca

SEQ ID NO: 2116422 - RNA, 19 nt, Homo sapiens
  misc_RNA (1)...(19): siRNA sense strand
cuacacggcugaggucauc

SEQ ID NO: 2116423 - RNA, 19 nt, Homo sapiens
  misc_RNA (1)...(19): siRNA sense strand
aagaagaugcauaguguga

SEQ ID NO: 2116424 - RNA, 19 nt, Homo sapiens
  misc_RNA (1)...(19): siRNA sense strand
cuacucaagucucccauac

SEQ ID NO: 2116425 - RNA, 19 nt, Homo sapiens
  misc_RNA (1)...(19): siRNA sense strand
caguucaguugucucugua

SEQ ID NO: 2116426 - RNA, 19 nt, Homo sapiens
  misc_RNA (1)...(19): siRNA sense strand
gcacuggaggccucugguu

SEQ ID NO: 2116427 - RNA, 19 nt, Homo sapiens
  misc_RNA (1)...(19): siRNA sense strand
gcugagggccaagauuuga

SEQ ID NO: 2116428 - RNA, 19 nt, Homo sapiens
  misc_RNA (1)...(19): siRNA sense strand
ccagggacuccaucacaaa

SEQ ID NO: 2116429 - RNA, 19 nt, Homo sapiens
  misc_RNA (1)...(19): siRNA sense strand
ccaaggcuccagagacaga

SEQ ID NO: 2116430 - RNA, 19 nt, Homo sapiens
  misc_RNA (1)...(19): siRNA sense strand
gauugggaccugggaaauu

SEQ ID NO: 2116431 - RNA, 19 nt, Homo sapiens
  misc_RNA (1)...(19): siRNA sense strand
uauuucggauccucaaguu

SEQ ID NO: 2116432 - RNA, 19 nt, Homo sapiens
  misc_RNA (1)...(19): siRNA sense strand
ucagagagccagagaugca

SEQ ID NO: 2116433 - RNA, 19 nt, Homo sapiens
  misc_RNA (1)...(19): siRNA sense strand
gagcccugaauccaaauuu

SEQ ID NO: 2116434 - RNA, 19 nt, Homo sapiens
  misc_RNA (1)...(19): siRNA sense strand
gaugauauggaucuuaaac

SEQ ID NO: 2116435 - RNA, 19 nt, Homo sapiens
  misc_RNA (1)...(19): siRNA sense strand
gaucaguuccuggauucaa

SEQ ID NO: 2116436 - RNA, 19 nt, Homo sapiens
  misc_RNA (1)...(19): siRNA sense strand
ugccuucucuucagacuca

SEQ ID NO: 2116437 - RNA, 19 nt, Homo sapiens
  misc_RNA (1)...(19): siRNA sense strand
ucaaguuccugccaaagac

SEQ ID NO: 2116438 - RNA, 19 nt, Homo sapiens
  misc_RNA (1)...(19): siRNA sense strand
cccugguucugaaguauuu

SEQ ID NO: 2116439 - RNA, 19 nt, Homo sapiens
  misc_RNA (1)...(19): siRNA sense strand
caagauuugagcccgguuu

SEQ ID NO: 2116440 - RNA, 19 nt, Homo sapiens
  misc_RNA (1)...(19): siRNA sense strand
gauauggaucuuaaacucu

SEQ ID NO: 2116441 - RNA, 19 nt, Homo sapiens
  misc_RNA (1)...(19): siRNA sense strand
gcgaccagcugcucaucgu

SEQ ID NO: 2116442 - RNA, 19 nt, Homo sapiens
  misc_RNA (1)...(19): siRNA sense strand
ucacgguggguguguauga

SEQ ID NO: 2116443 - RNA, 19 nt, Homo sapiens
  misc_RNA (1)...(19): siRNA sense strand
cugcugagggccaagauuu

SEQ ID NO: 2116444 - RNA, 19 nt, Homo sapiens
  misc_RNA (1)...(19): siRNA sense strand
acucaagucucccauacca

SEQ ID NO: 2116445 - RNA, 19 nt, Homo sapiens
  misc_RNA (1)...(19): siRNA sense strand
gcucgcugcucaaccuuac

SEQ ID NO: 2116446 - RNA, 19 nt, Homo sapiens
  misc_RNA (1)...(19): siRNA sense strand
ggcccugaguuccaacaug

SEQ ID NO: 2116447 - RNA, 19 nt, Homo sapiens
  misc_RNA (1)...(19): siRNA sense strand
ggaaagacuccugagaaaa

SEQ ID NO: 2116448 - RNA, 19 nt, Homo sapiens
  misc_RNA (1)...(19): siRNA sense strand
cauaccaaacugucuguug

SEQ ID NO: 2116449 - RNA, 19 nt, Homo sapiens
  misc_RNA (1)...(19): siRNA sense strand
cacaggcucugccacucuu

SEQ ID NO: 2116450 - RNA, 19 nt, Homo sapiens
  misc_RNA (1)...(19): siRNA sense strand
cugaaguauuuccugauau

SEQ ID NO: 2116451 - RNA, 19 nt, Homo sapiens
  misc_RNA (1)...(19): siRNA sense strand
gcaacuucagccuggauug

SEQ ID NO: 2116452 - RNA, 19 nt, Homo sapiens
  misc_RNA (1)...(19): siRNA sense strand
gagacccacucagcugcaa

SEQ ID NO: 2116453 - RNA, 19 nt, Homo sapiens
  misc_RNA (1)...(19): siRNA sense strand
ucaaaagccucugcuggaa

SEQ ID NO: 2116454 - RNA, 19 nt, Homo sapiens
  misc_RNA (1)...(19): siRNA sense strand
cuucagagagccagagaug

SEQ ID NO: 2116455 - RNA, 19 nt, Homo sapiens
  misc_RNA (1)...(19): siRNA sense strand
ucaaaccucccagcuggaa

SEQ ID NO: 2116456 - RNA, 19 nt, Homo sapiens
  misc_RNA (1)...(19): siRNA sense strand
ggacuucagcaaaccaacu

SEQ ID NO: 2116457 - RNA, 19 nt, Homo sapiens
  misc_RNA (1)...(19): siRNA sense strand
ggcaggacuuccaccuaca

SEQ ID NO: 2116458 - RNA, 19 nt, Homo sapiens
  misc_RNA (1)...(19): siRNA sense strand
gggcccugaucagcaguuu

SEQ ID NO: 2116459 - RNA, 19 nt, Homo sapiens
  misc_RNA (1)...(19): siRNA sense strand
ggauugggaccugggaaau

SEQ ID NO: 2116460 - RNA, 19 nt, Homo sapiens
  misc_RNA (1)...(19): siRNA sense strand
acuccuggccuccuuggua

SEQ ID NO: 2116461 - RNA, 19 nt, Homo sapiens
  misc_RNA (1)...(19): siRNA sense strand
gcacagaccccaguucagu

SEQ ID NO: 2116462 - RNA, 19 nt, Homo sapiens
  misc_RNA (1)...(19): siRNA sense strand
cuucuggacuucagcaaac

SEQ ID NO: 2116463 - RNA, 19 nt, Homo sapiens
  misc_RNA (1)...(19): siRNA sense strand
cagucaagaugggcggaaa

SEQ ID NO: 2116464 - RNA, 19 nt, Homo sapiens
  misc_RNA (1)...(19): siRNA sense strand
ggaugauauggaucuuaaa

SEQ ID NO: 2116465 - RNA, 19 nt, Homo sapiens
  misc_RNA (1)...(19): siRNA sense strand
cauggccucuggaccucaa

SEQ ID NO: 2116466 - RNA, 19 nt, Homo sapiens
  misc_RNA (1)...(19): siRNA sense strand
caacaggccuugcccucuu

SEQ ID NO: 2116467 - RNA, 19 nt, Homo sapiens
  misc_RNA (1)...(19): siRNA sense strand
acacugccaucaccaccaa

SEQ ID NO: 2116468 - RNA, 19 nt, Homo sapiens
  misc_RNA (1)...(19): siRNA sense strand
ggacugggagacagaguac

SEQ ID NO: 2116469 - RNA, 19 nt, Homo sapiens
  misc_RNA (1)...(19): siRNA sense strand
gggccuacaccuuccaaca

SEQ ID NO: 2116470 - RNA, 19 nt, Homo sapiens
  misc_RNA (1)...(19): siRNA sense strand
guacugcaguggcaacuaa

SEQ ID NO: 2116471 - RNA, 19 nt, Homo sapiens
  misc_RNA (1)...(19): siRNA sense strand
ugaagaaggucauuacaca

SEQ ID NO: 2116472 - RNA, 19 nt, Homo sapiens
  misc_RNA (1)...(19): siRNA sense strand
caaaggaggagaucaccua

SEQ ID NO: 2116473 - RNA, 19 nt, Homo sapiens
  misc_RNA (1)...(19): siRNA sense strand
gagguugccuucccugaug

SEQ ID NO: 2116474 - RNA, 19 nt, Homo sapiens
  misc_RNA (1)...(19): siRNA sense strand
cggcucuacuucuuucuua

SEQ ID NO: 2116475 - RNA, 19 nt, Homo sapiens
  misc_RNA (1)...(19): siRNA sense strand
aggaggagaucaccuauuc

SEQ ID NO: 2116476 - RNA, 19 nt, Homo sapiens
  misc_RNA (1)...(19): siRNA sense strand
gaaggucauuacacagcuu

SEQ ID NO: 2116477 - RNA, 19 nt, Homo sapiens
  misc_RNA (1)...(19): siRNA sense strand
ccagggauccuuugagguu

SEQ ID NO: 2116478 - RNA, 19 nt, Homo sapiens
  misc_RNA (1)...(19): siRNA sense strand
cgacaguguuggcguggau

SEQ ID NO: 2116479 - RNA, 19 nt, Homo sapiens
  misc_RNA (1)...(19): siRNA sense strand
gcguggauguucuuucgau

SEQ ID NO: 2116480 - RNA, 19 nt, Homo sapiens
  misc_RNA (1)...(19): siRNA sense strand
gggcgaccaggcuauguuu

SEQ ID NO: 2116481 - RNA, 19 nt, Homo sapiens
  misc_RNA (1)...(19): siRNA sense strand
ggauguucuuucgauggua

SEQ ID NO: 2116482 - RNA, 19 nt, Homo sapiens
  misc_RNA (1)...(19): siRNA sense strand
ggucauuacacagcuuaaa

SEQ ID NO: 2116483 - RNA, 19 nt, Homo sapiens
  misc_RNA (1)...(19): siRNA sense strand
ucauuacacagcuuaaaga

SEQ ID NO: 2116484 - RNA, 19 nt, Homo sapiens
  misc_RNA (1)...(19): siRNA sense strand
ggcucuacuucuuucuuaa

SEQ ID NO: 2116485 - RNA, 19 nt, Homo sapiens
  misc_RNA (1)...(19): siRNA sense strand
uuucuugcaucguaaacuu

SEQ ID NO: 2116486 - RNA, 19 nt, Homo sapiens
  misc_RNA (1)...(19): siRNA sense strand
gcucugacgcccagcaauc

SEQ ID NO: 2116487 - RNA, 19 nt, Homo sapiens
  misc_RNA (1)...(19): siRNA sense strand
cauuacacagcuuaaagaa

SEQ ID NO: 2116488 - RNA, 19 nt, Homo sapiens
  misc_RNA (1)...(19): siRNA sense strand
guucaggaugugacaguga

SEQ ID NO: 2116489 - RNA, 19 nt, Homo sapiens
  misc_RNA (1)...(19): siRNA sense strand
gacguucuccugcgugauc

SEQ ID NO: 2116490 - RNA, 19 nt, Homo sapiens
  misc_RNA (1)...(19): siRNA sense strand
uaaacuuccagcugccaaa

SEQ ID NO: 2116491 - RNA, 19 nt, Homo sapiens
  misc_RNA (1)...(19): siRNA sense strand
uauguuuucuugcaucgua

SEQ ID NO: 2116492 - RNA, 19 nt, Homo sapiens
  misc_RNA (1)...(19): siRNA sense strand
caucagcgagugcgacagu

SEQ ID NO: 2116493 - RNA, 19 nt, Homo sapiens
  misc_RNA (1)...(19): siRNA sense strand
cagaguugcaggccucguu

SEQ ID NO: 2116494 - RNA, 19 nt, Homo sapiens
  misc_RNA (1)...(19): siRNA sense strand
gagagaaccuuacaacuaa

SEQ ID NO: 2116495 - RNA, 19 nt, Homo sapiens
  misc_RNA (1)...(19): siRNA sense strand
ggagagaaccuuacaacua

SEQ ID NO: 2116496 - RNA, 19 nt, Homo sapiens
  misc_RNA (1)...(19): siRNA sense strand
ggaaggacaugaaagcuau

SEQ ID NO: 2116497 - RNA, 19 nt, Homo sapiens
  misc_RNA (1)...(19): siRNA sense strand
gaaagaaaccauauacaug

SEQ ID NO: 2116498 - RNA, 19 nt, Homo sapiens
  misc_RNA (1)...(19): siRNA sense strand
ggauguggcuguagaauuc

SEQ ID NO: 2116499 - RNA, 19 nt, Homo sapiens
  misc_RNA (1)...(19): siRNA sense strand
guggcaaggucuuuaauua

SEQ ID NO: 2116500 - RNA, 19 nt, Homo sapiens
  misc_RNA (1)...(19): siRNA sense strand
gggaagugcuuuagucaaa

SEQ ID NO: 2116501 - RNA, 19 nt, Homo sapiens
  misc_RNA (1)...(19): siRNA sense strand
gagagaaaccuuauaaaug

SEQ ID NO: 2116502 - RNA, 19 nt, Homo sapiens
  misc_RNA (1)...(19): siRNA sense strand
gagagaaaccuuauaaaug

SEQ ID NO: 2116503 - RNA, 19 nt, Homo sapiens
  misc_RNA (1)...(19): siRNA sense strand
ggaaagauggugaaauaaa

SEQ ID NO: 2116504 - RNA, 19 nt, Homo sapiens
  misc_RNA (1)...(19): siRNA sense strand
agagaaaccuuacaaaugu

SEQ ID NO: 2116505 - RNA, 19 nt, Homo sapiens
  misc_RNA (1)...(19): siRNA sense strand
agagaaaccuuacaaaugu

SEQ ID NO: 2116506 - RNA, 19 nt, Homo sapiens
  misc_RNA (1)...(19): siRNA sense strand
agagaaaccuuacaaaugu

SEQ ID NO: 2116507 - RNA, 19 nt, Homo sapiens
  misc_RNA (1)...(19): siRNA sense strand
agagaaaccuuacaaaugu

SEQ ID NO: 2116508 - RNA, 19 nt, Homo sapiens
  misc_RNA (1)...(19): siRNA sense strand
agagaaaccuuacaaaugu

SEQ ID NO: 2116509 - RNA, 19 nt, Homo sapiens
  misc_RNA (1)...(19): siRNA sense strand
agagaaaccuuacaaaugu

SEQ ID NO: 2116510 - RNA, 19 nt, Homo sapiens
  misc_RNA (1)...(19): siRNA sense strand
gagagaaaccuuacaaaug

SEQ ID NO: 2116511 - RNA, 19 nt, Homo sapiens
  misc_RNA (1)...(19): siRNA sense strand
gagagaaaccuuacaaaug

SEQ ID NO: 2116512 - RNA, 19 nt, Homo sapiens
  misc_RNA (1)...(19): siRNA sense strand
gagagaaaccuuacaaaug

SEQ ID NO: 2116513 - RNA, 19 nt, Homo sapiens
  misc_RNA (1)...(19): siRNA sense strand
gcggcaaggucuucaguua

SEQ ID NO: 2116514 - RNA, 19 nt, Homo sapiens
  misc_RNA (1)...(19): siRNA sense strand
gagagaaaccuuacaaaug

SEQ ID NO: 2116515 - RNA, 19 nt, Homo sapiens
  misc_RNA (1)...(19): siRNA sense strand
gagagaaaccuuacaaaug

SEQ ID NO: 2116516 - RNA, 19 nt, Homo sapiens
  misc_RNA (1)...(19): siRNA sense strand
gagagaaaccuuacaaaug

SEQ ID NO: 2116517 - RNA, 19 nt, Homo sapiens
  misc_RNA (1)...(19): siRNA sense strand
ggucaaagaguucgacaua

SEQ ID NO: 2116518 - RNA, 19 nt, Homo sapiens
  misc_RNA (1)...(19): siRNA sense strand
ggagagaaaccuuauaaau

SEQ ID NO: 2116519 - RNA, 19 nt, Homo sapiens
  misc_RNA (1)...(19): siRNA sense strand
ggagagaaaccuuauaaau

SEQ ID NO: 2116520 - RNA, 19 nt, Homo sapiens
  misc_RNA (1)...(19): siRNA sense strand
gagagaaacccuacaaaug

SEQ ID NO: 2116521 - RNA, 19 nt, Homo sapiens
  misc_RNA (1)...(19): siRNA sense strand
gaaaggccguuagauguug

SEQ ID NO: 2116522 - RNA, 19 nt, Homo sapiens
  misc_RNA (1)...(19): siRNA sense strand
agaaaccucuccauuguaa

SEQ ID NO: 2116523 - RNA, 19 nt, Homo sapiens
  misc_RNA (1)...(19): siRNA sense strand
ggcaggaucuucagacaaa

SEQ ID NO: 2116524 - RNA, 19 nt, Homo sapiens
  misc_RNA (1)...(19): siRNA sense strand
gagagaagccauacaaaug

SEQ ID NO: 2116525 - RNA, 19 nt, Homo sapiens
  misc_RNA (1)...(19): siRNA sense strand
cuaaacaucugguaauuca

SEQ ID NO: 2116526 - RNA, 19 nt, Homo sapiens
  misc_RNA (1)...(19): siRNA sense strand
ggagaaaccacacaaaugu

SEQ ID NO: 2116527 - RNA, 19 nt, Homo sapiens
  misc_RNA (1)...(19): siRNA sense strand
ggaaagaaaccauauacau

SEQ ID NO: 2116528 - RNA, 19 nt, Homo sapiens
  misc_RNA (1)...(19): siRNA sense strand
gcacgucauuggaguauuc

SEQ ID NO: 2116529 - RNA, 19 nt, Homo sapiens
  misc_RNA (1)...(19): siRNA sense strand
ggucuucacuuacuauuca

SEQ ID NO: 2116530 - RNA, 19 nt, Homo sapiens
  misc_RNA (1)...(19): siRNA sense strand
ggaaagagcccuggacugu

SEQ ID NO: 2116531 - RNA, 19 nt, Homo sapiens
  misc_RNA (1)...(19): siRNA sense strand
gcucaggccucacuaaaca

SEQ ID NO: 2116532 - RNA, 19 nt, Homo sapiens
  misc_RNA (1)...(19): siRNA sense strand
guucaaaacuugcaagaua

SEQ ID NO: 2116533 - RNA, 19 nt, Homo sapiens
  misc_RNA (1)...(19): siRNA sense strand
caaauugagaggacaguua

SEQ ID NO: 2116534 - RNA, 19 nt, Homo sapiens
  misc_RNA (1)...(19): siRNA sense strand
ccacacaaauguagugaau

SEQ ID NO: 2116535 - RNA, 19 nt, Homo sapiens
  misc_RNA (1)...(19): siRNA sense strand
guacaucagagaauucaua

SEQ ID NO: 2116536 - RNA, 19 nt, Homo sapiens
  misc_RNA (1)...(19): siRNA sense strand
auggaaagauggugaaaua

SEQ ID NO: 2116537 - RNA, 19 nt, Homo sapiens
  misc_RNA (1)...(19): siRNA sense strand
gagaggacaguuaauaauu

SEQ ID NO: 2116538 - RNA, 19 nt, Homo sapiens
  misc_RNA (1)...(19): siRNA sense strand
ggagagaaaccuuacaaau

SEQ ID NO: 2116539 - RNA, 19 nt, Homo sapiens
  misc_RNA (1)...(19): siRNA sense strand
ggagagaaaccuuacaaau

SEQ ID NO: 2116540 - RNA, 19 nt, Homo sapiens
  misc_RNA (1)...(19): siRNA sense strand
ggagagaaaccuuacaaau

SEQ ID NO: 2116541 - RNA, 19 nt, Homo sapiens
  misc_RNA (1)...(19): siRNA sense strand
ggagagaaaccuuacaaau

SEQ ID NO: 2116542 - RNA, 19 nt, Homo sapiens
  misc_RNA (1)...(19): siRNA sense strand
ggagagaaaccuuacaaau

SEQ ID NO: 2116543 - RNA, 19 nt, Homo sapiens
  misc_RNA (1)...(19): siRNA sense strand
ggagagaaaccuuacaaau

SEQ ID NO: 2116544 - RNA, 19 nt, Homo sapiens
  misc_RNA (1)...(19): siRNA sense strand
uaucagaauucacaacuug

SEQ ID NO: 2116545 - RNA, 19 nt, Homo sapiens
  misc_RNA (1)...(19): siRNA sense strand
gaauguggcaaguccuuua

SEQ ID NO: 2116546 - RNA, 19 nt, Homo sapiens
  misc_RNA (1)...(19): siRNA sense strand
guucaauucugcuuaauca

SEQ ID NO: 2116547 - RNA, 19 nt, Homo sapiens
  misc_RNA (1)...(19): siRNA sense strand
acacaaauguagugaaugu

SEQ ID NO: 2116548 - RNA, 19 nt, Homo sapiens
  misc_RNA (1)...(19): siRNA sense strand
agagacaccuuacaaaugu

SEQ ID NO: 2116549 - RNA, 19 nt, Homo sapiens
  misc_RNA (1)...(19): siRNA sense strand
ucaaagaguucgacauagu

SEQ ID NO: 2116550 - RNA, 19 nt, Homo sapiens
  misc_RNA (1)...(19): siRNA sense strand
ggaaaggccguuagauguu

SEQ ID NO: 2116551 - RNA, 19 nt, Homo sapiens
  misc_RNA (1)...(19): siRNA sense strand
ggucuugccucacuaaaca

SEQ ID NO: 2116552 - RNA, 19 nt, Homo sapiens
  misc_RNA (1)...(19): siRNA sense strand
guucaagccucacuaaaca

SEQ ID NO: 2116553 - RNA, 19 nt, Homo sapiens
  misc_RNA (1)...(19): siRNA sense strand
gagagacaccuuacaaaug

SEQ ID NO: 2116554 - RNA, 19 nt, Homo sapiens
  misc_RNA (1)...(19): siRNA sense strand
agacaaacccuacaaaugu

SEQ ID NO: 2116555 - RNA, 19 nt, Homo sapiens
  misc_RNA (1)...(19): siRNA sense strand
gagacaaacccuacaaaug

SEQ ID NO: 2116556 - RNA, 19 nt, Homo sapiens
  misc_RNA (1)...(19): siRNA sense strand
agacaaacccuacauaugu

SEQ ID NO: 2116557 - RNA, 19 nt, Homo sapiens
  misc_RNA (1)...(19): siRNA sense strand
aaaccaacauuucuaggaa

SEQ ID NO: 2116558 - RNA, 19 nt, Homo sapiens
  misc_RNA (1)...(19): siRNA sense strand
ggagagaagccauacaaau

SEQ ID NO: 2116559 - RNA, 19 nt, Homo sapiens
  misc_RNA (1)...(19): siRNA sense strand
ggagagaugccauacaaau

SEQ ID NO: 2116560 - RNA, 19 nt, Homo sapiens
  misc_RNA (1)...(19): siRNA sense strand
ggagagaaacccuacaaau

SEQ ID NO: 2116561 - RNA, 19 nt, Homo sapiens
  misc_RNA (1)...(19): siRNA sense strand
ggagagacaccuuacaaau

SEQ ID NO: 2116562 - RNA, 19 nt, Homo sapiens
  misc_RNA (1)...(19): siRNA sense strand
cuaaaugugugaucaagga

SEQ ID NO: 2116563 - RNA, 19 nt, Homo sapiens
  misc_RNA (1)...(19): siRNA sense strand
caaaguuccucucuugcaa

SEQ ID NO: 2116564 - RNA, 19 nt, Homo sapiens
  misc_RNA (1)...(19): siRNA sense strand
ggagacaaacccuacauau

SEQ ID NO: 2116565 - RNA, 19 nt, Homo sapiens
  misc_RNA (1)...(19): siRNA sense strand
gccguuagauguuguccua

SEQ ID NO: 2116566 - RNA, 19 nt, Homo sapiens
  misc_RNA (1)...(19): siRNA sense strand
uggcaaaucuuacauuagu

SEQ ID NO: 2116567 - RNA, 19 nt, Homo sapiens
  misc_RNA (1)...(19): siRNA sense strand
guggcaaggucuuccguua

SEQ ID NO: 2116568 - RNA, 19 nt, Homo sapiens
  misc_RNA (1)...(19): siRNA sense strand
ugaaagcuaugacacugaa

SEQ ID NO: 2116569 - RNA, 19 nt, Homo sapiens
  misc_RNA (1)...(19): siRNA sense strand
gcaggaaagaaaccauaua

SEQ ID NO: 2116570 - RNA, 19 nt, Homo sapiens
  misc_RNA (1)...(19): siRNA sense strand
agaggacaguuaauaauug

SEQ ID NO: 2116571 - RNA, 19 nt, Homo sapiens
  misc_RNA (1)...(19): siRNA sense strand
gaggacaguuaauaauugu

SEQ ID NO: 2116572 - RNA, 19 nt, Homo sapiens
  misc_RNA (1)...(19): siRNA sense strand
uguggcaaaucuuacauua

SEQ ID NO: 2116573 - RNA, 19 nt, Homo sapiens
  misc_RNA (1)...(19): siRNA sense strand
gagaaaccacacaaaugua

SEQ ID NO: 2116574 - RNA, 19 nt, Homo sapiens
  misc_RNA (1)...(19): siRNA sense strand
gauacauacuacagagaaa

SEQ ID NO: 2116575 - RNA, 19 nt, Homo sapiens
  misc_RNA (1)...(19): siRNA sense strand
ggcaaagccuucagagugu

SEQ ID NO: 2116576 - RNA, 19 nt, Homo sapiens
  misc_RNA (1)...(19): siRNA sense strand
gagacaaacccuacauaug

SEQ ID NO: 2116577 - RNA, 19 nt, Homo sapiens
  misc_RNA (1)...(19): siRNA sense strand
ggucuucaguuacuacuca

SEQ ID NO: 2116578 - RNA, 19 nt, Homo sapiens
  misc_RNA (1)...(19): siRNA sense strand
aaaccucuccauuguaaua

SEQ ID NO: 2116579 - RNA, 19 nt, Homo sapiens
  misc_RNA (1)...(19): siRNA sense strand
guggauaccuuucgguuca

SEQ ID NO: 2116580 - RNA, 19 nt, Homo sapiens
  misc_RNA (1)...(19): siRNA sense strand
agagaaacccuacaaaugu

SEQ ID NO: 2116581 - RNA, 19 nt, Homo sapiens
  misc_RNA (1)...(19): siRNA sense strand
ggcaaggucuucauugaca

SEQ ID NO: 2116582 - RNA, 19 nt, Homo sapiens
  misc_RNA (1)...(19): siRNA sense strand
ggucuucagucaacauuca

SEQ ID NO: 2116583 - RNA, 19 nt, Homo sapiens
  misc_RNA (1)...(19): siRNA sense strand
guaaaucaccggagaaguc

SEQ ID NO: 2116584 - RNA, 19 nt, Homo sapiens
  misc_RNA (1)...(19): siRNA sense strand
agucaaaguuccucucuug

SEQ ID NO: 2116585 - RNA, 19 nt, Homo sapiens
  misc_RNA (1)...(19): siRNA sense strand
caaggaauuaccaccaaua

SEQ ID NO: 2116586 - RNA, 19 nt, Homo sapiens
  misc_RNA (1)...(19): siRNA sense strand
gaugcauacuggagagaaa

SEQ ID NO: 2116587 - RNA, 19 nt, Homo sapiens
  misc_RNA (1)...(19): siRNA sense strand
caauucugcuuaaucauca

SEQ ID NO: 2116588 - RNA, 19 nt, Homo sapiens
  misc_RNA (1)...(19): siRNA sense strand
gcagggcaccggagaauuc

SEQ ID NO: 2116589 - RNA, 19 nt, Homo sapiens
  misc_RNA (1)...(19): siRNA sense strand
gaaaccauauacaugugau

SEQ ID NO: 2116590 - RNA, 19 nt, Homo sapiens
  misc_RNA (1)...(19): siRNA sense strand
ggcaaggucuuccguuauc

SEQ ID NO: 2116591 - RNA, 19 nt, Homo sapiens
  misc_RNA (1)...(19): siRNA sense strand
gggagaaaccacacaaaug

SEQ ID NO: 2116592 - RNA, 19 nt, Homo sapiens
  misc_RNA (1)...(19): siRNA sense strand
agagaacccuuaccacugu

SEQ ID NO: 2116593 - RNA, 19 nt, Homo sapiens
  misc_RNA (1)...(19): siRNA sense strand
guaaggcaccagauaauuc

SEQ ID NO: 2116594 - RNA, 19 nt, Homo sapiens
  misc_RNA (1)...(19): siRNA sense strand
gaucaaaucuuguauguca

SEQ ID NO: 2116595 - RNA, 19 nt, Homo sapiens
  misc_RNA (1)...(19): siRNA sense strand
ggaaagacaucaaagcuau

SEQ ID NO: 2116596 - RNA, 19 nt, Homo sapiens
  misc_RNA (1)...(19): siRNA sense strand
ggagagagccuuacaacua

SEQ ID NO: 2116597 - RNA, 19 nt, Homo sapiens
  misc_RNA (1)...(19): siRNA sense strand
gagagagccuuacaacuaa

SEQ ID NO: 2116598 - RNA, 19 nt, Homo sapiens
  misc_RNA (1)...(19): siRNA sense strand
gagagacccuucaaaugua

SEQ ID NO: 2116599 - RNA, 19 nt, Homo sapiens
  misc_RNA (1)...(19): siRNA sense strand
cgagaaagcuuauaaaugc

SEQ ID NO: 2116600 - RNA, 19 nt, Homo sapiens
  misc_RNA (1)...(19): siRNA sense strand
gaaagauggugaaacaaau

SEQ ID NO: 2116601 - RNA, 19 nt, Homo sapiens
  misc_RNA (1)...(19): siRNA sense strand
agacagaccuuacaaaugu

SEQ ID NO: 2116602 - RNA, 19 nt, Homo sapiens
  misc_RNA (1)...(19): siRNA sense strand
gagagaagccuuacaaaug

SEQ ID NO: 2116603 - RNA, 19 nt, Homo sapiens
  misc_RNA (1)...(19): siRNA sense strand
gcagaaagcuuuguacaag

SEQ ID NO: 2116604 - RNA, 19 nt, Homo sapiens
  misc_RNA (1)...(19): siRNA sense strand
ggacagaaacccuacauau

SEQ ID NO: 2116605 - RNA, 19 nt, Homo sapiens
  misc_RNA (1)...(19): siRNA sense strand
ggaaagauggugaaacaaa

SEQ ID NO: 2116606 - RNA, 19 nt, Homo sapiens
  misc_RNA (1)...(19): siRNA sense strand
gagagaaaccuuacaaaug

SEQ ID NO: 2116607 - RNA, 19 nt, Homo sapiens
  misc_RNA (1)...(19): siRNA sense strand
gagagaaaccuuacaaaug

SEQ ID NO: 2116608 - RNA, 19 nt, Homo sapiens
  misc_RNA (1)...(19): siRNA sense strand
gagagaaaccuuacaaaug

SEQ ID NO: 2116609 - RNA, 19 nt, Homo sapiens
  misc_RNA (1)...(19): siRNA sense strand
gagagaaaccuuacaaaug

SEQ ID NO: 2116610 - RNA, 19 nt, Homo sapiens
  misc_RNA (1)...(19): siRNA sense strand
guacaaggaugugauguug

SEQ ID NO: 2116611 - RNA, 19 nt, Homo sapiens
  misc_RNA (1)...(19): siRNA sense strand
gaagggagacuuuaugaau

SEQ ID NO: 2116612 - RNA, 19 nt, Homo sapiens
  misc_RNA (1)...(19): siRNA sense strand
ggagaaagguuccaaacag

SEQ ID NO: 2116613 - RNA, 19 nt, Homo sapiens
  misc_RNA (1)...(19): siRNA sense strand
gaacaguaauacaggagaa

SEQ ID NO: 2116614 - RNA, 19 nt, Homo sapiens
  misc_RNA (1)...(19): siRNA sense strand
caucgggccucacuacuaa

SEQ ID NO: 2116615 - RNA, 19 nt, Homo sapiens
  misc_RNA (1)...(19): siRNA sense strand
caaugaauguggcaaaguu

SEQ ID NO: 2116616 - RNA, 19 nt, Homo sapiens
  misc_RNA (1)...(19): siRNA sense strand
ggcaaggcauucagacaua

SEQ ID NO: 2116617 - RNA, 19 nt, Homo sapiens
  misc_RNA (1)...(19): siRNA sense strand
gaagacagguaauaauggu

SEQ ID NO: 2116618 - RNA, 19 nt, Homo sapiens
  misc_RNA (1)...(19): siRNA sense strand
gcucaggccucacuaaaca

SEQ ID NO: 2116619 - RNA, 19 nt, Homo sapiens
  misc_RNA (1)...(19): siRNA sense strand
gcucaaaccucacuguaca

SEQ ID NO: 2116620 - RNA, 19 nt, Homo sapiens
  misc_RNA (1)...(19): siRNA sense strand
ggagagagacccuucaaau

SEQ ID NO: 2116621 - RNA, 19 nt, Homo sapiens
  misc_RNA (1)...(19): siRNA sense strand
guucacaucuuguaaguca

SEQ ID NO: 2116622 - RNA, 19 nt, Homo sapiens
  misc_RNA (1)...(19): siRNA sense strand
gagagaaaccauacaaaug

SEQ ID NO: 2116623 - RNA, 19 nt, Homo sapiens
  misc_RNA (1)...(19): siRNA sense strand
caauagacaucagagaauu

SEQ ID NO: 2116624 - RNA, 19 nt, Homo sapiens
  misc_RNA (1)...(19): siRNA sense strand
ggaaauacagaaacaucua

SEQ ID NO: 2116625 - RNA, 19 nt, Homo sapiens
  misc_RNA (1)...(19): siRNA sense strand
ggagagaaaccuuacaaau

SEQ ID NO: 2116626 - RNA, 19 nt, Homo sapiens
  misc_RNA (1)...(19): siRNA sense strand
ggagagaaaccauacaaau

SEQ ID NO: 2116627 - RNA, 19 nt, Homo sapiens
  misc_RNA (1)...(19): siRNA sense strand
ggagagaaaccuuacaaau

SEQ ID NO: 2116628 - RNA, 19 nt, Homo sapiens
  misc_RNA (1)...(19): siRNA sense strand
ggagagaaaccuuacaaau

SEQ ID NO: 2116629 - RNA, 19 nt, Homo sapiens
  misc_RNA (1)...(19): siRNA sense strand
ggagagaaaccuuacaaau

SEQ ID NO: 2116630 - RNA, 19 nt, Homo sapiens
  misc_RNA (1)...(19): siRNA sense strand
gagaagacagguaauaaug

SEQ ID NO: 2116631 - RNA, 19 nt, Homo sapiens
  misc_RNA (1)...(19): siRNA sense strand
gaauguggcaaguccuuua

SEQ ID NO: 2116632 - RNA, 19 nt, Homo sapiens
  misc_RNA (1)...(19): siRNA sense strand
ggauguagccauagaauuc

SEQ ID NO: 2116633 - RNA, 19 nt, Homo sapiens
  misc_RNA (1)...(19): siRNA sense strand
gagaaagguuccaaacagu

SEQ ID NO: 2116634 - RNA, 19 nt, Homo sapiens
  misc_RNA (1)...(19): siRNA sense strand
ggcaagguauucaggcaua

SEQ ID NO: 2116635 - RNA, 19 nt, Homo sapiens
  misc_RNA (1)...(19): siRNA sense strand
caucagaggauacauacua

SEQ ID NO: 2116636 - RNA, 19 nt, Homo sapiens
  misc_RNA (1)...(19): siRNA sense strand
ggagagaagccuuacaaau

SEQ ID NO: 2116637 - RNA, 19 nt, Homo sapiens
  misc_RNA (1)...(19): siRNA sense strand
cuaaaugugugaucaagga

SEQ ID NO: 2116638 - RNA, 19 nt, Homo sapiens
  misc_RNA (1)...(19): siRNA sense strand
ggagacagaccuuacaaau

SEQ ID NO: 2116639 - RNA, 19 nt, Homo sapiens
  misc_RNA (1)...(19): siRNA sense strand
agagaaaccuuacaaaugc

SEQ ID NO: 2116640 - RNA, 19 nt, Homo sapiens
  misc_RNA (1)...(19): siRNA sense strand
agagaaaccuuacaaaugc

SEQ ID NO: 2116641 - RNA, 19 nt, Homo sapiens
  misc_RNA (1)...(19): siRNA sense strand
agagaaaccuuacaaaugc

SEQ ID NO: 2116642 - RNA, 19 nt, Homo sapiens
  misc_RNA (1)...(19): siRNA sense strand
agagaaaccuuacaaaugc

SEQ ID NO: 2116643 - RNA, 19 nt, Homo sapiens
  misc_RNA (1)...(19): siRNA sense strand
cagcauacauucacgacuu

SEQ ID NO: 2116644 - RNA, 19 nt, Homo sapiens
  misc_RNA (1)...(19): siRNA sense strand
gcagugcauuggagaauuc

SEQ ID NO: 2116645 - RNA, 19 nt, Homo sapiens
  misc_RNA (1)...(19): siRNA sense strand
agagaaaccuuacaaaugc

SEQ ID NO: 2116646 - RNA, 19 nt, Homo sapiens
  misc_RNA (1)...(19): siRNA sense strand
cagagaaaccuuacaaaug

SEQ ID NO: 2116647 - RNA, 19 nt, Homo sapiens
  misc_RNA (1)...(19): siRNA sense strand
ggaaaucauaucaauguga

SEQ ID NO: 2116648 - RNA, 19 nt, Homo sapiens
  misc_RNA (1)...(19): siRNA sense strand
gagagaaacaauacaaaug

SEQ ID NO: 2116649 - RNA, 19 nt, Homo sapiens
  misc_RNA (1)...(19): siRNA sense strand
gagagagacccuucaaaug

SEQ ID NO: 2116650 - RNA, 19 nt, Homo sapiens
  misc_RNA (1)...(19): siRNA sense strand
ggcaaggucuucagucaau

SEQ ID NO: 2116651 - RNA, 19 nt, Homo sapiens
  misc_RNA (1)...(19): siRNA sense strand
gcaggaaagaaaccauaua

SEQ ID NO: 2116652 - RNA, 19 nt, Homo sapiens
  misc_RNA (1)...(19): siRNA sense strand
cagcaaacaccaaagaauu

SEQ ID NO: 2116653 - RNA, 19 nt, Homo sapiens
  misc_RNA (1)...(19): siRNA sense strand
gcaggaaagaaaccauaua

SEQ ID NO: 2116654 - RNA, 19 nt, Homo sapiens
  misc_RNA (1)...(19): siRNA sense strand
gcacaucagauaauucaug

SEQ ID NO: 2116655 - RNA, 19 nt, Homo sapiens
  misc_RNA (1)...(19): siRNA sense strand
aaucagggcuccacacuca

SEQ ID NO: 2116656 - RNA, 19 nt, Homo sapiens
  misc_RNA (1)...(19): siRNA sense strand
guggcaagguguacaguaa

SEQ ID NO: 2116657 - RNA, 19 nt, Homo sapiens
  misc_RNA (1)...(19): siRNA sense strand
guggcaaggucuucaguaa

SEQ ID NO: 2116658 - RNA, 19 nt, Homo sapiens
  misc_RNA (1)...(19): siRNA sense strand
agagaaaccuugcaaaugc

SEQ ID NO: 2116659 - RNA, 19 nt, Homo sapiens
  misc_RNA (1)...(19): siRNA sense strand
guggcaaggucuucaguaa

SEQ ID NO: 2116660 - RNA, 19 nt, Homo sapiens
  misc_RNA (1)...(19): siRNA sense strand
ggagagaaacaauacaaau

SEQ ID NO: 2116661 - RNA, 19 nt, Homo sapiens
  misc_RNA (1)...(19): siRNA sense strand
gauacauacuacagagaaa

SEQ ID NO: 2116662 - RNA, 19 nt, Homo sapiens
  misc_RNA (1)...(19): siRNA sense strand
caggaaagaaaccauauaa

SEQ ID NO: 2116663 - RNA, 19 nt, Homo sapiens
  misc_RNA (1)...(19): siRNA sense strand
gcucaucagagaauucaua

SEQ ID NO: 2116664 - RNA, 19 nt, Homo sapiens
  misc_RNA (1)...(19): siRNA sense strand
gcgagaaagcuuauaaaug

SEQ ID NO: 2116665 - RNA, 19 nt, Homo sapiens
  misc_RNA (1)...(19): siRNA sense strand
caggaaagaaaccauauaa

SEQ ID NO: 2116666 - RNA, 19 nt, Homo sapiens
  misc_RNA (1)...(19): siRNA sense strand
ggagaagacagguaauaau

SEQ ID NO: 2116667 - RNA, 19 nt, Homo sapiens
  misc_RNA (1)...(19): siRNA sense strand
ugaugaauguggcaaggua

SEQ ID NO: 2116668 - RNA, 19 nt, Homo sapiens
  misc_RNA (1)...(19): siRNA sense strand
gacagaaacccuacauaug

SEQ ID NO: 2116669 - RNA, 19 nt, Homo sapiens
  misc_RNA (1)...(19): siRNA sense strand
acagaaacccuacauaugu

SEQ ID NO: 2116670 - RNA, 19 nt, Homo sapiens
  misc_RNA (1)...(19): siRNA sense strand
ggucuucagucaacauuca

SEQ ID NO: 2116671 - RNA, 19 nt, Homo sapiens
  misc_RNA (1)...(19): siRNA sense strand
gcacuggaaagacaucaaa

SEQ ID NO: 2116672 - RNA, 19 nt, Homo sapiens
  misc_RNA (1)...(19): siRNA sense strand
aggcauaguucacaucuug

SEQ ID NO: 2116673 - RNA, 19 nt, Homo sapiens
  misc_RNA (1)...(19): siRNA sense strand
gauaauucaugcaggaaag

SEQ ID NO: 2116674 - RNA, 19 nt, Homo sapiens
  misc_RNA (1)...(19): siRNA sense strand
caucuuagacuucaucaga

SEQ ID NO: 2116675 - RNA, 19 nt, Homo sapiens
  misc_RNA (1)...(19): siRNA sense strand
guagagaaaccuugcaaau

SEQ ID NO: 2116676 - RNA, 19 nt, Homo sapiens
  misc_RNA (1)...(19): siRNA sense strand
gagaaacaauacaaaugca

SEQ ID NO: 2116677 - RNA, 19 nt, Homo sapiens
  misc_RNA (1)...(19): siRNA sense strand
caucuuagacuucaucaga

SEQ ID NO: 2116678 - RNA, 19 nt, Homo sapiens
  misc_RNA (1)...(19): siRNA sense strand
guggcaagaucuucagaaa

SEQ ID NO: 2116679 - RNA, 19 nt, Homo sapiens
  misc_RNA (1)...(19): siRNA sense strand
aaacggagaagacagguaa

SEQ ID NO: 2116680 - RNA, 19 nt, Homo sapiens
  misc_RNA (1)...(19): siRNA sense strand
ucaaggauguagccauaga

SEQ ID NO: 2116681 - RNA, 19 nt, Homo sapiens
  misc_RNA (1)...(19): siRNA sense strand
cacuaaacaucgaauaaga

SEQ ID NO: 2116682 - RNA, 19 nt, Homo sapiens
  misc_RNA (1)...(19): siRNA sense strand
gagacagaccuuacaaaug

SEQ ID NO: 2116683 - RNA, 19 nt, Homo sapiens
  misc_RNA (1)...(19): siRNA sense strand
caagguaguccauacaaga

SEQ ID NO: 2116684 - RNA, 19 nt, Homo sapiens
  misc_RNA (1)...(19): siRNA sense strand
ccauacaaaugucaugaau

SEQ ID NO: 2116685 - RNA, 19 nt, Homo sapiens
  misc_RNA (1)...(19): siRNA sense strand
gagaaaccauacaaauguc

SEQ ID NO: 2116686 - RNA, 19 nt, Homo sapiens
  misc_RNA (1)...(19): siRNA sense strand
agucaauguucacgucuua

SEQ ID NO: 2116687 - RNA, 19 nt, Homo sapiens
  misc_RNA (1)...(19): siRNA sense strand
gugcaucggagaauucaua

SEQ ID NO: 2116688 - RNA, 19 nt, Homo sapiens
  misc_RNA (1)...(19): siRNA sense strand
ggcaaggucuucaguaaac

SEQ ID NO: 2116689 - RNA, 19 nt, Homo sapiens
  misc_RNA (1)...(19): siRNA sense strand
ggcaaggucuucaguaaac

SEQ ID NO: 2116690 - RNA, 19 nt, Homo sapiens
  misc_RNA (1)...(19): siRNA sense strand
gguaauccaugcaggaaag

SEQ ID NO: 2116691 - RNA, 19 nt, Homo sapiens
  misc_RNA (1)...(19): siRNA sense strand
agagagacccuucaaaugu

SEQ ID NO: 2116692 - RNA, 19 nt, Homo sapiens
  misc_RNA (1)...(19): siRNA sense strand
gagucacacuggacagaaa

SEQ ID NO: 2116693 - RNA, 19 nt, Homo sapiens
  misc_RNA (1)...(19): siRNA sense strand
caacagagaacaguaauac

SEQ ID NO: 2116694 - RNA, 19 nt, Homo sapiens
  misc_RNA (1)...(19): siRNA sense strand
gaacagaaagcacacauua

SEQ ID NO: 2116695 - RNA, 19 nt, Homo sapiens
  misc_RNA (1)...(19): siRNA sense strand
gagagaaacuuuacaaaug

SEQ ID NO: 2116696 - RNA, 19 nt, Homo sapiens
  misc_RNA (1)...(19): siRNA sense strand
gaaacaagccuauuacaaa

SEQ ID NO: 2116697 - RNA, 19 nt, Homo sapiens
  misc_RNA (1)...(19): siRNA sense strand
gaaagaaucaguaagauga

SEQ ID NO: 2116698 - RNA, 19 nt, Homo sapiens
  misc_RNA (1)...(19): siRNA sense strand
uaacagaugucaugaaugu

SEQ ID NO: 2116699 - RNA, 19 nt, Homo sapiens
  misc_RNA (1)...(19): siRNA sense strand
uaacaaauguggcaagguu

SEQ ID NO: 2116700 - RNA, 19 nt, Homo sapiens
  misc_RNA (1)...(19): siRNA sense strand
gcaggaaacaagccuauua

SEQ ID NO: 2116701 - RNA, 19 nt, Homo sapiens
  misc_RNA (1)...(19): siRNA sense strand
gcacaacauuggagaauuc

SEQ ID NO: 2116702 - RNA, 19 nt, Homo sapiens
  misc_RNA (1)...(19): siRNA sense strand
gagagaaaccuuauaaaug

SEQ ID NO: 2116703 - RNA, 19 nt, Homo sapiens
  misc_RNA (1)...(19): siRNA sense strand
agagaaaccuuacaaaugu

SEQ ID NO: 2116704 - RNA, 19 nt, Homo sapiens
  misc_RNA (1)...(19): siRNA sense strand
agagaaaccuuacaaaugu

SEQ ID NO: 2116705 - RNA, 19 nt, Homo sapiens
  misc_RNA (1)...(19): siRNA sense strand
agagaaaccuuacaaaugu

SEQ ID NO: 2116706 - RNA, 19 nt, Homo sapiens
  misc_RNA (1)...(19): siRNA sense strand
agagaaaccucauaaaugu

SEQ ID NO: 2116707 - RNA, 19 nt, Homo sapiens
  misc_RNA (1)...(19): siRNA sense strand
gagagaaaccuuacaaaug

SEQ ID NO: 2116708 - RNA, 19 nt, Homo sapiens
  misc_RNA (1)...(19): siRNA sense strand
gagagaaaccuuacaaaug

SEQ ID NO: 2116709 - RNA, 19 nt, Homo sapiens
  misc_RNA (1)...(19): siRNA sense strand
gagagaaaccuuacaaaug

SEQ ID NO: 2116710 - RNA, 19 nt, Homo sapiens
  misc_RNA (1)...(19): siRNA sense strand
gagagaaaccuuacaaaug

SEQ ID NO: 2116711 - RNA, 19 nt, Homo sapiens
  misc_RNA (1)...(19): siRNA sense strand
gagagaaaccucauaaaug

SEQ ID NO: 2116712 - RNA, 19 nt, Homo sapiens
  misc_RNA (1)...(19): siRNA sense strand
gaacauuggagaauucgua

SEQ ID NO: 2116713 - RNA, 19 nt, Homo sapiens
  misc_RNA (1)...(19): siRNA sense strand
ggagagaaaccuuauaaau

SEQ ID NO: 2116714 - RNA, 19 nt, Homo sapiens
  misc_RNA (1)...(19): siRNA sense strand
caacuuggauuaaccuuuc

SEQ ID NO: 2116715 - RNA, 19 nt, Homo sapiens
  misc_RNA (1)...(19): siRNA sense strand
gcagaacauuggagaauuc

SEQ ID NO: 2116716 - RNA, 19 nt, Homo sapiens
  misc_RNA (1)...(19): siRNA sense strand
ccagauaggugggaaggua

SEQ ID NO: 2116717 - RNA, 19 nt, Homo sapiens
  misc_RNA (1)...(19): siRNA sense strand
gagaaaaccuuacgaaugu

SEQ ID NO: 2116718 - RNA, 19 nt, Homo sapiens
  misc_RNA (1)...(19): siRNA sense strand
gggaggagcugugcaguga

SEQ ID NO: 2116719 - RNA, 19 nt, Homo sapiens
  misc_RNA (1)...(19): siRNA sense strand
caacauuggagaauucaua

SEQ ID NO: 2116720 - RNA, 19 nt, Homo sapiens
  misc_RNA (1)...(19): siRNA sense strand
ggagagaaacuuuacaaau

SEQ ID NO: 2116721 - RNA, 19 nt, Homo sapiens
  misc_RNA (1)...(19): siRNA sense strand
ggaaacaagccuauuacaa

SEQ ID NO: 2116722 - RNA, 19 nt, Homo sapiens
  misc_RNA (1)...(19): siRNA sense strand
ggacguggccauagaauuc

SEQ ID NO: 2116723 - RNA, 19 nt, Homo sapiens
  misc_RNA (1)...(19): siRNA sense strand
ggagagaaaccuuacaaau

SEQ ID NO: 2116724 - RNA, 19 nt, Homo sapiens
  misc_RNA (1)...(19): siRNA sense strand
ggagagaaaccuuacaaau

SEQ ID NO: 2116725 - RNA, 19 nt, Homo sapiens
  misc_RNA (1)...(19): siRNA sense strand
ggagagaaaccuuacaaau

SEQ ID NO: 2116726 - RNA, 19 nt, Homo sapiens
  misc_RNA (1)...(19): siRNA sense strand
ggagagaaaccuuacaaau

SEQ ID NO: 2116727 - RNA, 19 nt, Homo sapiens
  misc_RNA (1)...(19): siRNA sense strand
aguauuaucuccaugauga

SEQ ID NO: 2116728 - RNA, 19 nt, Homo sapiens
  misc_RNA (1)...(19): siRNA sense strand
ggcaaagucuucacucaga

SEQ ID NO: 2116729 - RNA, 19 nt, Homo sapiens
  misc_RNA (1)...(19): siRNA sense strand
ggcaagcucuucaaucgaa

SEQ ID NO: 2116730 - RNA, 19 nt, Homo sapiens
  misc_RNA (1)...(19): siRNA sense strand
gagagaguccuuacaaaug

SEQ ID NO: 2116731 - RNA, 19 nt, Homo sapiens
  misc_RNA (1)...(19): siRNA sense strand
gcaaagucuucacucagaa

SEQ ID NO: 2116732 - RNA, 19 nt, Homo sapiens
  misc_RNA (1)...(19): siRNA sense strand
ucagagaaaucauaaugga

SEQ ID NO: 2116733 - RNA, 19 nt, Homo sapiens
  misc_RNA (1)...(19): siRNA sense strand
guacaggagagaaaccuua

SEQ ID NO: 2116734 - RNA, 19 nt, Homo sapiens
  misc_RNA (1)...(19): siRNA sense strand
ggagagaguccuuacaaau

SEQ ID NO: 2116735 - RNA, 19 nt, Homo sapiens
  misc_RNA (1)...(19): siRNA sense strand
ggcaaggucuucagucgaa

SEQ ID NO: 2116736 - RNA, 19 nt, Homo sapiens
  misc_RNA (1)...(19): siRNA sense strand
agagaaaccuuacaaaugc

SEQ ID NO: 2116737 - RNA, 19 nt, Homo sapiens
  misc_RNA (1)...(19): siRNA sense strand
ggcaaagucuucagagugu

SEQ ID NO: 2116738 - RNA, 19 nt, Homo sapiens
  misc_RNA (1)...(19): siRNA sense strand
gaagggaagauuuaugaau

SEQ ID NO: 2116739 - RNA, 19 nt, Homo sapiens
  misc_RNA (1)...(19): siRNA sense strand
gcagauaaaccuaacagau

SEQ ID NO: 2116740 - RNA, 19 nt, Homo sapiens
  misc_RNA (1)...(19): siRNA sense strand
ggucaaaacccacauauuu

SEQ ID NO: 2116741 - RNA, 19 nt, Homo sapiens
  misc_RNA (1)...(19): siRNA sense strand
gggaagauuuaugaaugua

SEQ ID NO: 2116742 - RNA, 19 nt, Homo sapiens
  misc_RNA (1)...(19): siRNA sense strand
ggaaagaaucaguaagaug

SEQ ID NO: 2116743 - RNA, 19 nt, Homo sapiens
  misc_RNA (1)...(19): siRNA sense strand
uaaagaaugugacaaagcu

SEQ ID NO: 2116744 - RNA, 19 nt, Homo sapiens
  misc_RNA (1)...(19): siRNA sense strand
ccuaacagaugucaugaau

SEQ ID NO: 2116745 - RNA, 19 nt, Homo sapiens
  misc_RNA (1)...(19): siRNA sense strand
gaggagcugugcagugaga

SEQ ID NO: 2116746 - RNA, 19 nt, Homo sapiens
  misc_RNA (1)...(19): siRNA sense strand
guucauaccuagcacaaca

SEQ ID NO: 2116747 - RNA, 19 nt, Homo sapiens
  misc_RNA (1)...(19): siRNA sense strand
cuucaagccuuccuaauca

SEQ ID NO: 2116748 - RNA, 19 nt, Homo sapiens
  misc_RNA (1)...(19): siRNA sense strand
cagauaaaccuaacagaug

SEQ ID NO: 2116749 - RNA, 19 nt, Homo sapiens
  misc_RNA (1)...(19): siRNA sense strand
aagggaagauuuaugaaug

SEQ ID NO: 2116750 - RNA, 19 nt, Homo sapiens
  misc_RNA (1)...(19): siRNA sense strand
ggcaaagucuucacucaag

SEQ ID NO: 2116751 - RNA, 19 nt, Homo sapiens
  misc_RNA (1)...(19): siRNA sense strand
gggaugugauguuggagaa

SEQ ID NO: 2116752 - RNA, 19 nt, Homo sapiens
  misc_RNA (1)...(19): siRNA sense strand
gcaaagucuucacucaagu

SEQ ID NO: 2116753 - RNA, 19 nt, Homo sapiens
  misc_RNA (1)...(19): siRNA sense strand
agagaguccuuacaaaugu

SEQ ID NO: 2116754 - RNA, 19 nt, Homo sapiens
  misc_RNA (1)...(19): siRNA sense strand
gugaagggaagauuuauga

SEQ ID NO: 2116755 - RNA, 19 nt, Homo sapiens
  misc_RNA (1)...(19): siRNA sense strand
agauaaaccuaacagaugu

SEQ ID NO: 2116756 - RNA, 19 nt, Homo sapiens
  misc_RNA (1)...(19): siRNA sense strand
caucagagaaaucauaaug

SEQ ID NO: 2116757 - RNA, 19 nt, Homo sapiens
  misc_RNA (1)...(19): siRNA sense strand
gagaaaccucauaaaugua

SEQ ID NO: 2116758 - RNA, 19 nt, Homo sapiens
  misc_RNA (1)...(19): siRNA sense strand
gagaagcccagaagaggaa

SEQ ID NO: 2116759 - RNA, 19 nt, Homo sapiens
  misc_RNA (1)...(19): siRNA sense strand
ccucaccacccaucuguua

SEQ ID NO: 2116760 - RNA, 19 nt, Homo sapiens
  misc_RNA (1)...(19): siRNA sense strand
gggaaagaaucaguaagau

SEQ ID NO: 2116761 - RNA, 19 nt, Homo sapiens
  misc_RNA (1)...(19): siRNA sense strand
guucaucagagaaaucaua

SEQ ID NO: 2116762 - RNA, 19 nt, Homo sapiens
  misc_RNA (1)...(19): siRNA sense strand
gagaaugaaaugaaaguag

SEQ ID NO: 2116763 - RNA, 19 nt, Homo sapiens
  misc_RNA (1)...(19): siRNA sense strand
gaaaucauaauggagagaa

SEQ ID NO: 2116764 - RNA, 19 nt, Homo sapiens
  misc_RNA (1)...(19): siRNA sense strand
cagggacacuugacauuca

SEQ ID NO: 2116765 - RNA, 19 nt, Homo sapiens
  misc_RNA (1)...(19): siRNA sense strand
acaaauguggcaagguuua

SEQ ID NO: 2116766 - RNA, 19 nt, Homo sapiens
  misc_RNA (1)...(19): siRNA sense strand
ggucuucagucgaauuaca

SEQ ID NO: 2116767 - RNA, 19 nt, Homo sapiens
  misc_RNA (1)...(19): siRNA sense strand
gaacuggagauauuucaag

SEQ ID NO: 2116768 - RNA, 19 nt, Homo sapiens
  misc_RNA (1)...(19): siRNA sense strand
acaagccuauuacaaauca

SEQ ID NO: 2116769 - RNA, 19 nt, Homo sapiens
  misc_RNA (1)...(19): siRNA sense strand
ggagaaaaccuuacgaaug

SEQ ID NO: 2116770 - RNA, 19 nt, Homo sapiens
  misc_RNA (1)...(19): siRNA sense strand
gagucaggcaugccacuua

SEQ ID NO: 2116771 - RNA, 19 nt, Homo sapiens
  misc_RNA (1)...(19): siRNA sense strand
cuagagagaaaccucauaa

SEQ ID NO: 2116772 - RNA, 19 nt, Homo sapiens
  misc_RNA (1)...(19): siRNA sense strand
aauccacacugcagauaaa

SEQ ID NO: 2116773 - RNA, 19 nt, Homo sapiens
  misc_RNA (1)...(19): siRNA sense strand
caaggugaagggaagauuu

SEQ ID NO: 2116774 - RNA, 19 nt, Homo sapiens
  misc_RNA (1)...(19): siRNA sense strand
ucagggacguggccauaga

SEQ ID NO: 2116775 - RNA, 19 nt, Homo sapiens
  misc_RNA (1)...(19): siRNA sense strand
gaggaaagcagaggaguca

SEQ ID NO: 2116776 - RNA, 19 nt, Homo sapiens
  misc_RNA (1)...(19): siRNA sense strand
gagaaaccuuauaaauguc

SEQ ID NO: 2116777 - RNA, 19 nt, Homo sapiens
  misc_RNA (1)...(19): siRNA sense strand
agagagaaaccucauaaau

SEQ ID NO: 2116778 - RNA, 19 nt, Homo sapiens
  misc_RNA (1)...(19): siRNA sense strand
auacagggaugugauguug

SEQ ID NO: 2116779 - RNA, 19 nt, Homo sapiens
  misc_RNA (1)...(19): siRNA sense strand
ccacaguucuucaguuucg

SEQ ID NO: 2116780 - RNA, 19 nt, Homo sapiens
  misc_RNA (1)...(19): siRNA sense strand
auucacaccuugcaaauca

SEQ ID NO: 2116781 - RNA, 19 nt, Homo sapiens
  misc_RNA (1)...(19): siRNA sense strand
gaauucacaccuugcaaau

SEQ ID NO: 2116782 - RNA, 19 nt, Homo sapiens
  misc_RNA (1)...(19): siRNA sense strand
guaaugagcagggcaaagu

SEQ ID NO: 2116783 - RNA, 19 nt, Homo sapiens
  misc_RNA (1)...(19): siRNA sense strand
guggcaagguuuauaguag

SEQ ID NO: 2116784 - RNA, 19 nt, Homo sapiens
  misc_RNA (1)...(19): siRNA sense strand
ucacucaaguuucacaucu

SEQ ID NO: 2116785 - RNA, 19 nt, Homo sapiens
  misc_RNA (1)...(19): siRNA sense strand
ggagaaugaaaugaaagua

SEQ ID NO: 2116786 - RNA, 19 nt, Homo sapiens
  misc_RNA (1)...(19): siRNA sense strand
gaaggagaagcccagaaga

SEQ ID NO: 2116787 - RNA, 19 nt, Homo sapiens
  misc_RNA (1)...(19): siRNA sense strand
gugggaagguaucaaagau

SEQ ID NO: 2116788 - RNA, 19 nt, Homo sapiens
  misc_RNA (1)...(19): siRNA sense strand
cuuccugaccugaguauua

SEQ ID NO: 2116789 - RNA, 19 nt, Homo sapiens
  misc_RNA (1)...(19): siRNA sense strand
caagucaggccucgcagaa

SEQ ID NO: 2116790 - RNA, 19 nt, Homo sapiens
  misc_RNA (1)...(19): siRNA sense strand
ugacaguucaucagagaaa

SEQ ID NO: 2116791 - RNA, 19 nt, Homo sapiens
  misc_RNA (1)...(19): siRNA sense strand
uggagagaguccuuacaaa

SEQ ID NO: 2116792 - RNA, 19 nt, Homo sapiens
  misc_RNA (1)...(19): siRNA sense strand
ccuggacuguggagaauga

SEQ ID NO: 2116793 - RNA, 19 nt, Homo sapiens
  misc_RNA (1)...(19): siRNA sense strand
uuacaaaugccaugugugu

SEQ ID NO: 2116794 - RNA, 19 nt, Homo sapiens
  misc_RNA (1)...(19): siRNA sense strand
ugacaaagcuuucacaugu

SEQ ID NO: 2116795 - RNA, 19 nt, Homo sapiens
  misc_RNA (1)...(19): siRNA sense strand
guacaaaugugaagaaugu

SEQ ID NO: 2116796 - RNA, 19 nt, Homo sapiens
  misc_RNA (1)...(19): siRNA sense strand
agacaaaccuuaugaaugu

SEQ ID NO: 2116797 - RNA, 19 nt, Homo sapiens
  misc_RNA (1)...(19): siRNA sense strand
caacaaugcuuccucaguu

SEQ ID NO: 2116798 - RNA, 19 nt, Homo sapiens
  misc_RNA (1)...(19): siRNA sense strand
ggaaagaagaugaaacaaa

SEQ ID NO: 2116799 - RNA, 19 nt, Homo sapiens
  misc_RNA (1)...(19): siRNA sense strand
ugacagaaaucaaagaguu

SEQ ID NO: 2116800 - RNA, 19 nt, Homo sapiens
  misc_RNA (1)...(19): siRNA sense strand
agagaaaccuuaugaaugu

SEQ ID NO: 2116801 - RNA, 19 nt, Homo sapiens
  misc_RNA (1)...(19): siRNA sense strand
gcaaauccuuuaauuguag

SEQ ID NO: 2116802 - RNA, 19 nt, Homo sapiens
  misc_RNA (1)...(19): siRNA sense strand
caucguagaucucacauug

SEQ ID NO: 2116803 - RNA, 19 nt, Homo sapiens
  misc_RNA (1)...(19): siRNA sense strand
ugaagaaugugacaaaguu

SEQ ID NO: 2116804 - RNA, 19 nt, Homo sapiens
  misc_RNA (1)...(19): siRNA sense strand
cgucagacaucaucgcuua

SEQ ID NO: 2116805 - RNA, 19 nt, Homo sapiens
  misc_RNA (1)...(19): siRNA sense strand
ugaagaaugugacaaaguu

SEQ ID NO: 2116806 - RNA, 19 nt, Homo sapiens
  misc_RNA (1)...(19): siRNA sense strand
ugagaaaccuuacaagugu

SEQ ID NO: 2116807 - RNA, 19 nt, Homo sapiens
  misc_RNA (1)...(19): siRNA sense strand
gagagaagccuuacaagug

SEQ ID NO: 2116808 - RNA, 19 nt, Homo sapiens
  misc_RNA (1)...(19): siRNA sense strand
gagagaaaccguacaaaug

SEQ ID NO: 2116809 - RNA, 19 nt, Homo sapiens
  misc_RNA (1)...(19): siRNA sense strand
gagaaacaauguaaaugug

SEQ ID NO: 2116810 - RNA, 19 nt, Homo sapiens
  misc_RNA (1)...(19): siRNA sense strand
ggcaagaccuucagucaga

SEQ ID NO: 2116811 - RNA, 19 nt, Homo sapiens
  misc_RNA (1)...(19): siRNA sense strand
ggcaagaccuucagucaga

SEQ ID NO: 2116812 - RNA, 19 nt, Homo sapiens
  misc_RNA (1)...(19): siRNA sense strand
ggcaaauccuuuaauugua

SEQ ID NO: 2116813 - RNA, 19 nt, Homo sapiens
  misc_RNA (1)...(19): siRNA sense strand
gagagaaaccuuaugaaug

SEQ ID NO: 2116814 - RNA, 19 nt, Homo sapiens
  misc_RNA (1)...(19): siRNA sense strand
ggaaagacauaggaggauu

SEQ ID NO: 2116815 - RNA, 19 nt, Homo sapiens
  misc_RNA (1)...(19): siRNA sense strand
gaaauaauucccuccauuc

SEQ ID NO: 2116816 - RNA, 19 nt, Homo sapiens
  misc_RNA (1)...(19): siRNA sense strand
agagaaaccuuacaagugu

SEQ ID NO: 2116817 - RNA, 19 nt, Homo sapiens
  misc_RNA (1)...(19): siRNA sense strand
agagaaaccuuacaagugu

SEQ ID NO: 2116818 - RNA, 19 nt, Homo sapiens
  misc_RNA (1)...(19): siRNA sense strand
agagaaaccuuacaagugu

SEQ ID NO: 2116819 - RNA, 19 nt, Homo sapiens
  misc_RNA (1)...(19): siRNA sense strand
ggcaagaccuuccgucaga

SEQ ID NO: 2116820 - RNA, 19 nt, Homo sapiens
  misc_RNA (1)...(19): siRNA sense strand
agagaaaccuuacaagugu

SEQ ID NO: 2116821 - RNA, 19 nt, Homo sapiens
  misc_RNA (1)...(19): siRNA sense strand
agagaaaccuuacaagugu

SEQ ID NO: 2116822 - RNA, 19 nt, Homo sapiens
  misc_RNA (1)...(19): siRNA sense strand
gacaaagcuuucacaugua

SEQ ID NO: 2116823 - RNA, 19 nt, Homo sapiens
  misc_RNA (1)...(19): siRNA sense strand
gagagaaaccuuacaagug

SEQ ID NO: 2116824 - RNA, 19 nt, Homo sapiens
  misc_RNA (1)...(19): siRNA sense strand
gagagaaaccuuacaagug

SEQ ID NO: 2116825 - RNA, 19 nt, Homo sapiens
  misc_RNA (1)...(19): siRNA sense strand
gagagaaaccuuacaagug

SEQ ID NO: 2116826 - RNA, 19 nt, Homo sapiens
  misc_RNA (1)...(19): siRNA sense strand
gagagaaaccuuacaagug

SEQ ID NO: 2116827 - RNA, 19 nt, Homo sapiens
  misc_RNA (1)...(19): siRNA sense strand
gagagaaaccuuacaagug

SEQ ID NO: 2116828 - RNA, 19 nt, Homo sapiens
  misc_RNA (1)...(19): siRNA sense strand
ggauaucucuuccaaaugc

SEQ ID NO: 2116829 - RNA, 19 nt, Homo sapiens
  misc_RNA (1)...(19): siRNA sense strand
agacauaggaggauucaua

SEQ ID NO: 2116830 - RNA, 19 nt, Homo sapiens
  misc_RNA (1)...(19): siRNA sense strand
gagagaaaccauacaaaug

SEQ ID NO: 2116831 - RNA, 19 nt, Homo sapiens
  misc_RNA (1)...(19): siRNA sense strand
agacauaggaggauucaua

SEQ ID NO: 2116832 - RNA, 19 nt, Homo sapiens
  misc_RNA (1)...(19): siRNA sense strand
gagagaaaccauacaaaug

SEQ ID NO: 2116833 - RNA, 19 nt, Homo sapiens
  misc_RNA (1)...(19): siRNA sense strand
ggacguggccauagaauuc

SEQ ID NO: 2116834 - RNA, 19 nt, Homo sapiens
  misc_RNA (1)...(19): siRNA sense strand
acaaagcuuucacauguaa

SEQ ID NO: 2116835 - RNA, 19 nt, Homo sapiens
  misc_RNA (1)...(19): siRNA sense strand
gcuggaaacaagcauauua

SEQ ID NO: 2116836 - RNA, 19 nt, Homo sapiens
  misc_RNA (1)...(19): siRNA sense strand
ggagagaaaccauacaaau

SEQ ID NO: 2116837 - RNA, 19 nt, Homo sapiens
  misc_RNA (1)...(19): siRNA sense strand
gcagagaaaccauacaaau

SEQ ID NO: 2116838 - RNA, 19 nt, Homo sapiens
  misc_RNA (1)...(19): siRNA sense strand
ggagagaaaccauacaaau

SEQ ID NO: 2116839 - RNA, 19 nt, Homo sapiens
  misc_RNA (1)...(19): siRNA sense strand
ggagagaaaccuuaugaau

SEQ ID NO: 2116840 - RNA, 19 nt, Homo sapiens
  misc_RNA (1)...(19): siRNA sense strand
ucagauaacccacuuagaa

SEQ ID NO: 2116841 - RNA, 19 nt, Homo sapiens
  misc_RNA (1)...(19): siRNA sense strand
gagaguggcaaauccuuua

SEQ ID NO: 2116842 - RNA, 19 nt, Homo sapiens
  misc_RNA (1)...(19): siRNA sense strand
ggagagaaaccauacaugu

SEQ ID NO: 2116843 - RNA, 19 nt, Homo sapiens
  misc_RNA (1)...(19): siRNA sense strand
gcagagaaaccguacaaau

SEQ ID NO: 2116844 - RNA, 19 nt, Homo sapiens
  misc_RNA (1)...(19): siRNA sense strand
ggagagaaaccguacaaau

SEQ ID NO: 2116845 - RNA, 19 nt, Homo sapiens
  misc_RNA (1)...(19): siRNA sense strand
gcaagguauuuaaucagaa

SEQ ID NO: 2116846 - RNA, 19 nt, Homo sapiens
  misc_RNA (1)...(19): siRNA sense strand
caucauagacuucauagug

SEQ ID NO: 2116847 - RNA, 19 nt, Homo sapiens
  misc_RNA (1)...(19): siRNA sense strand
ugaagaaugugagaaaguu

SEQ ID NO: 2116848 - RNA, 19 nt, Homo sapiens
  misc_RNA (1)...(19): siRNA sense strand
agacauaagaggauucaua

SEQ ID NO: 2116849 - RNA, 19 nt, Homo sapiens
  misc_RNA (1)...(19): siRNA sense strand
ugauguauauggcaaggua

SEQ ID NO: 2116850 - RNA, 19 nt, Homo sapiens
  misc_RNA (1)...(19): siRNA sense strand
caucaucgcuuauaaucca

SEQ ID NO: 2116851 - RNA, 19 nt, Homo sapiens
  misc_RNA (1)...(19): siRNA sense strand
caaaucacaccuugaaaga

SEQ ID NO: 2116852 - RNA, 19 nt, Homo sapiens
  misc_RNA (1)...(19): siRNA sense strand
gagaaaccauacaaaugug

SEQ ID NO: 2116853 - RNA, 19 nt, Homo sapiens
  misc_RNA (1)...(19): siRNA sense strand
gcaaaucacaucuugaaag

SEQ ID NO: 2116854 - RNA, 19 nt, Homo sapiens
  misc_RNA (1)...(19): siRNA sense strand
ggcaagguauuuaaucaga

SEQ ID NO: 2116855 - RNA, 19 nt, Homo sapiens
  misc_RNA (1)...(19): siRNA sense strand
guagaucucacauugauga

SEQ ID NO: 2116856 - RNA, 19 nt, Homo sapiens
  misc_RNA (1)...(19): siRNA sense strand
caucauaggcuucauagug

SEQ ID NO: 2116857 - RNA, 19 nt, Homo sapiens
  misc_RNA (1)...(19): siRNA sense strand
cagagaaaccguacaaaug

SEQ ID NO: 2116858 - RNA, 19 nt, Homo sapiens
  misc_RNA (1)...(19): siRNA sense strand
aaucaacaaucaacucuug

SEQ ID NO: 2116859 - RNA, 19 nt, Homo sapiens
  misc_RNA (1)...(19): siRNA sense strand
caagaucuuuggucacaau

SEQ ID NO: 2116860 - RNA, 19 nt, Homo sapiens
  misc_RNA (1)...(19): siRNA sense strand
ugacaaggcuuuugcauau

SEQ ID NO: 2116861 - RNA, 19 nt, Homo sapiens
  misc_RNA (1)...(19): siRNA sense strand
acaagcaagucaucacauu

SEQ ID NO: 2116862 - RNA, 19 nt, Homo sapiens
  misc_RNA (1)...(19): siRNA sense strand
ggagagaaaccuuacaagu

SEQ ID NO: 2116863 - RNA, 19 nt, Homo sapiens
  misc_RNA (1)...(19): siRNA sense strand
uaaugaauguggcaagguu

SEQ ID NO: 2116864 - RNA, 19 nt, Homo sapiens
  misc_RNA (1)...(19): siRNA sense strand
ggagagaaaccuuacaagu

SEQ ID NO: 2116865 - RNA, 19 nt, Homo sapiens
  misc_RNA (1)...(19): siRNA sense strand
ggagagaaaccuuacaagu

SEQ ID NO: 2116866 - RNA, 19 nt, Homo sapiens
  misc_RNA (1)...(19): siRNA sense strand
ggagagaaaccuuacaagu

SEQ ID NO: 2116867 - RNA, 19 nt, Homo sapiens
  misc_RNA (1)...(19): siRNA sense strand
gcaaaucacacauggaaag

SEQ ID NO: 2116868 - RNA, 19 nt, Homo sapiens
  misc_RNA (1)...(19): siRNA sense strand
gagaaaccguacaaaugug

SEQ ID NO: 2116869 - RNA, 19 nt, Homo sapiens
  misc_RNA (1)...(19): siRNA sense strand
uaaugaauguggcaagguu

SEQ ID NO: 2116870 - RNA, 19 nt, Homo sapiens
  misc_RNA (1)...(19): siRNA sense strand
gcaaaucacaccuugaaag

SEQ ID NO: 2116871 - RNA, 19 nt, Homo sapiens
  misc_RNA (1)...(19): siRNA sense strand
uaaugaauguggcaagguu

SEQ ID NO: 2116872 - RNA, 19 nt, Homo sapiens
  misc_RNA (1)...(19): siRNA sense strand
uaaugaauguggcaagguu

SEQ ID NO: 2116873 - RNA, 19 nt, Homo sapiens
  misc_RNA (1)...(19): siRNA sense strand
ggagagaaaccuuacaagu

SEQ ID NO: 2116874 - RNA, 19 nt, Homo sapiens
  misc_RNA (1)...(19): siRNA sense strand
gaucuuuggucacaauaca

SEQ ID NO: 2116875 - RNA, 19 nt, Homo sapiens
  misc_RNA (1)...(19): siRNA sense strand
ugagaagucuaucaacaau

SEQ ID NO: 2116876 - RNA, 19 nt, Homo sapiens
  misc_RNA (1)...(19): siRNA sense strand
ggaaacaagcauauuaaag

SEQ ID NO: 2116877 - RNA, 19 nt, Homo sapiens
  misc_RNA (1)...(19): siRNA sense strand
gcagacaaaccuuaugaau

SEQ ID NO: 2116878 - RNA, 19 nt, Homo sapiens
  misc_RNA (1)...(19): siRNA sense strand
agagaagccuuacaagugu

SEQ ID NO: 2116879 - RNA, 19 nt, Homo sapiens
  misc_RNA (1)...(19): siRNA sense strand
gagggaaaccauacaaaug

SEQ ID NO: 2116880 - RNA, 19 nt, Homo sapiens
  misc_RNA (1)...(19): siRNA sense strand
ggagggaaaccauacaaau

SEQ ID NO: 2116881 - RNA, 19 nt, Homo sapiens
  misc_RNA (1)...(19): siRNA sense strand
caacaucagagaguucaua

SEQ ID NO: 2116882 - RNA, 19 nt, Homo sapiens
  misc_RNA (1)...(19): siRNA sense strand
caucauagacuucauacug

SEQ ID NO: 2116883 - RNA, 19 nt, Homo sapiens
  misc_RNA (1)...(19): siRNA sense strand
gaagaaugugacaaaguuu

SEQ ID NO: 2116884 - RNA, 19 nt, Homo sapiens
  misc_RNA (1)...(19): siRNA sense strand
gaagaaugugagaaaguuu

SEQ ID NO: 2116885 - RNA, 19 nt, Homo sapiens
  misc_RNA (1)...(19): siRNA sense strand
gaagaaugugacaaaguuu

SEQ ID NO: 2116886 - RNA, 19 nt, Homo sapiens
  misc_RNA (1)...(19): siRNA sense strand
ggagagaagccuuacaagu

SEQ ID NO: 2116887 - RNA, 19 nt, Homo sapiens
  misc_RNA (1)...(19): siRNA sense strand
ugaaagacauaagaggauu

SEQ ID NO: 2116888 - RNA, 19 nt, Homo sapiens
  misc_RNA (1)...(19): siRNA sense strand
uaaagaucagcuuggauua

SEQ ID NO: 2116889 - RNA, 19 nt, Homo sapiens
  misc_RNA (1)...(19): siRNA sense strand
ugucaaaccuuguauacca

SEQ ID NO: 2116890 - RNA, 19 nt, Homo sapiens
  misc_RNA (1)...(19): siRNA sense strand
gaaaccuuaugaaugugaa

SEQ ID NO: 2116891 - RNA, 19 nt, Homo sapiens
  misc_RNA (1)...(19): siRNA sense strand
cagacaucaucgcuuauaa

SEQ ID NO: 2116892 - RNA, 19 nt, Homo sapiens
  misc_RNA (1)...(19): siRNA sense strand
aaucacaccuugaaagaca

SEQ ID NO: 2116893 - RNA, 19 nt, Homo sapiens
  misc_RNA (1)...(19): siRNA sense strand
cagagaaaccauacaaaug

SEQ ID NO: 2116894 - RNA, 19 nt, Homo sapiens
  misc_RNA (1)...(19): siRNA sense strand
gaagaauguugcaaaguuu

SEQ ID NO: 2116895 - RNA, 19 nt, Homo sapiens
  misc_RNA (1)...(19): siRNA sense strand
ggucagacaucaucgcuua

SEQ ID NO: 2116896 - RNA, 19 nt, Homo sapiens
  misc_RNA (1)...(19): siRNA sense strand
gaaacaagcguauuaaaga

SEQ ID NO: 2116897 - RNA, 19 nt, Homo sapiens
  misc_RNA (1)...(19): siRNA sense strand
caacaaugcuuccucaguu

SEQ ID NO: 2116898 - RNA, 19 nt, Homo sapiens
  misc_RNA (1)...(19): siRNA sense strand
ggaaagaagaugaaacaaa

SEQ ID NO: 2116899 - RNA, 19 nt, Homo sapiens
  misc_RNA (1)...(19): siRNA sense strand
ugacagaaaucaaagaguu

SEQ ID NO: 2116900 - RNA, 19 nt, Homo sapiens
  misc_RNA (1)...(19): siRNA sense strand
agagaaaccuuacaaaugu

SEQ ID NO: 2116901 - RNA, 19 nt, Homo sapiens
  misc_RNA (1)...(19): siRNA sense strand
agagaaaccuuacaaaugu

SEQ ID NO: 2116902 - RNA, 19 nt, Homo sapiens
  misc_RNA (1)...(19): siRNA sense strand
agagaaaccuuaugaaugu

SEQ ID NO: 2116903 - RNA, 19 nt, Homo sapiens
  misc_RNA (1)...(19): siRNA sense strand
gagagaaaccuuacaaaug

SEQ ID NO: 2116904 - RNA, 19 nt, Homo sapiens
  misc_RNA (1)...(19): siRNA sense strand
gagagaaaccuuacaaaug

SEQ ID NO: 2116905 - RNA, 19 nt, Homo sapiens
  misc_RNA (1)...(19): siRNA sense strand
ugaagaaugugacaaaguu

SEQ ID NO: 2116906 - RNA, 19 nt, Homo sapiens
  misc_RNA (1)...(19): siRNA sense strand
ugaagaauguugcaaaguu

SEQ ID NO: 2116907 - RNA, 19 nt, Homo sapiens
  misc_RNA (1)...(19): siRNA sense strand
ugagaaaccuuacaagugu

SEQ ID NO: 2116908 - RNA, 19 nt, Homo sapiens
  misc_RNA (1)...(19): siRNA sense strand
gagaaacaauguaaaugug

SEQ ID NO: 2116909 - RNA, 19 nt, Homo sapiens
  misc_RNA (1)...(19): siRNA sense strand
ggcaagaccuucagucaga

SEQ ID NO: 2116910 - RNA, 19 nt, Homo sapiens
  misc_RNA (1)...(19): siRNA sense strand
gagagaaaccuuaugaaug

SEQ ID NO: 2116911 - RNA, 19 nt, Homo sapiens
  misc_RNA (1)...(19): siRNA sense strand
gaaauaauucccuccauuc

SEQ ID NO: 2116912 - RNA, 19 nt, Homo sapiens
  misc_RNA (1)...(19): siRNA sense strand
agagaaaccuuacaagugu

SEQ ID NO: 2116913 - RNA, 19 nt, Homo sapiens
  misc_RNA (1)...(19): siRNA sense strand
agagaaaccuuacaagugu

SEQ ID NO: 2116914 - RNA, 19 nt, Homo sapiens
  misc_RNA (1)...(19): siRNA sense strand
agagaaaccuuacacaugu

SEQ ID NO: 2116915 - RNA, 19 nt, Homo sapiens
  misc_RNA (1)...(19): siRNA sense strand
gaaguacacaugagagaaa

SEQ ID NO: 2116916 - RNA, 19 nt, Homo sapiens
  misc_RNA (1)...(19): siRNA sense strand
ggcaaggucuuuaaucaga

SEQ ID NO: 2116917 - RNA, 19 nt, Homo sapiens
  misc_RNA (1)...(19): siRNA sense strand
gagagaaaccuuacaagug

SEQ ID NO: 2116918 - RNA, 19 nt, Homo sapiens
  misc_RNA (1)...(19): siRNA sense strand
gagagaaaccuuacaagug

SEQ ID NO: 2116919 - RNA, 19 nt, Homo sapiens
  misc_RNA (1)...(19): siRNA sense strand
gagagaaaccuuacacaug

SEQ ID NO: 2116920 - RNA, 19 nt, Homo sapiens
  misc_RNA (1)...(19): siRNA sense strand
ggauaucucuuccaaaugc

SEQ ID NO: 2116921 - RNA, 19 nt, Homo sapiens
  misc_RNA (1)...(19): siRNA sense strand
ggacguggccauagaauuc

SEQ ID NO: 2116922 - RNA, 19 nt, Homo sapiens
  misc_RNA (1)...(19): siRNA sense strand
gagagaaaccauacaaaug

SEQ ID NO: 2116923 - RNA, 19 nt, Homo sapiens
  misc_RNA (1)...(19): siRNA sense strand
agacauaggaggauucaua

SEQ ID NO: 2116924 - RNA, 19 nt, Homo sapiens
  misc_RNA (1)...(19): siRNA sense strand
gagagaaaccauacaaaug

SEQ ID NO: 2116925 - RNA, 19 nt, Homo sapiens
  misc_RNA (1)...(19): siRNA sense strand
ggagagaaaccuuaugaau

SEQ ID NO: 2116926 - RNA, 19 nt, Homo sapiens
  misc_RNA (1)...(19): siRNA sense strand
ggagagaaaccauacaaau

SEQ ID NO: 2116927 - RNA, 19 nt, Homo sapiens
  misc_RNA (1)...(19): siRNA sense strand
ggagagaaaccuuacaaau

SEQ ID NO: 2116928 - RNA, 19 nt, Homo sapiens
  misc_RNA (1)...(19): siRNA sense strand
ggagagaaaccuuacaaau

SEQ ID NO: 2116929 - RNA, 19 nt, Homo sapiens
  misc_RNA (1)...(19): siRNA sense strand
uaaugaauguggcaaaguu

SEQ ID NO: 2116930 - RNA, 19 nt, Homo sapiens
  misc_RNA (1)...(19): siRNA sense strand
ggagagaaaccauacaaau

SEQ ID NO: 2116931 - RNA, 19 nt, Homo sapiens
  misc_RNA (1)...(19): siRNA sense strand
ggaaacaagcguauuaaag

SEQ ID NO: 2116932 - RNA, 19 nt, Homo sapiens
  misc_RNA (1)...(19): siRNA sense strand
gaaagacacaggaggauuc

SEQ ID NO: 2116933 - RNA, 19 nt, Homo sapiens
  misc_RNA (1)...(19): siRNA sense strand
uuacaaaugugaagagugu

SEQ ID NO: 2116934 - RNA, 19 nt, Homo sapiens
  misc_RNA (1)...(19): siRNA sense strand
gcaaggcaauacagaagug

SEQ ID NO: 2116935 - RNA, 19 nt, Homo sapiens
  misc_RNA (1)...(19): siRNA sense strand
ugaagagugugacaaaguu

SEQ ID NO: 2116936 - RNA, 19 nt, Homo sapiens
  misc_RNA (1)...(19): siRNA sense strand
gcuggaaacaagcguauua

SEQ ID NO: 2116937 - RNA, 19 nt, Homo sapiens
  misc_RNA (1)...(19): siRNA sense strand
aaucaaaccuggaaagaca

SEQ ID NO: 2116938 - RNA, 19 nt, Homo sapiens
  misc_RNA (1)...(19): siRNA sense strand
ggaucaagcuuucauuugc

SEQ ID NO: 2116939 - RNA, 19 nt, Homo sapiens
  misc_RNA (1)...(19): siRNA sense strand
agacauaagaggauucaua

SEQ ID NO: 2116940 - RNA, 19 nt, Homo sapiens
  misc_RNA (1)...(19): siRNA sense strand
caaaucacaccuugaaaga

SEQ ID NO: 2116941 - RNA, 19 nt, Homo sapiens
  misc_RNA (1)...(19): siRNA sense strand
caucaucgcuuauaaucca

SEQ ID NO: 2116942 - RNA, 19 nt, Homo sapiens
  misc_RNA (1)...(19): siRNA sense strand
caaaucacaccuugaaaga

SEQ ID NO: 2116943 - RNA, 19 nt, Homo sapiens
  misc_RNA (1)...(19): siRNA sense strand
gcaaggucuuuaaucagaa

SEQ ID NO: 2116944 - RNA, 19 nt, Homo sapiens
  misc_RNA (1)...(19): siRNA sense strand
caucauaggcuucauagug

SEQ ID NO: 2116945 - RNA, 19 nt, Homo sapiens
  misc_RNA (1)...(19): siRNA sense strand
gaugaggcuuucgcauaua

SEQ ID NO: 2116946 - RNA, 19 nt, Homo sapiens
  misc_RNA (1)...(19): siRNA sense strand
ugaugaggcuuucgcauau

SEQ ID NO: 2116947 - RNA, 19 nt, Homo sapiens
  misc_RNA (1)...(19): siRNA sense strand
acaagcaagucaucacauu

SEQ ID NO: 2116948 - RNA, 19 nt, Homo sapiens
  misc_RNA (1)...(19): siRNA sense strand
ggagagaaaccuuacaagu

SEQ ID NO: 2116949 - RNA, 19 nt, Homo sapiens
  misc_RNA (1)...(19): siRNA sense strand
ggagagaaaccuuacaagu

SEQ ID NO: 2116950 - RNA, 19 nt, Homo sapiens
  misc_RNA (1)...(19): siRNA sense strand
gcaaaucacaccuugaaag

SEQ ID NO: 2116951 - RNA, 19 nt, Homo sapiens
  misc_RNA (1)...(19): siRNA sense strand
gcaaaucacaccuugaaag

SEQ ID NO: 2116952 - RNA, 19 nt, Homo sapiens
  misc_RNA (1)...(19): siRNA sense strand
ugagaagucuaucaacaau

SEQ ID NO: 2116953 - RNA, 19 nt, Homo sapiens
  misc_RNA (1)...(19): siRNA sense strand
gugaugaggcuuucgcaua

SEQ ID NO: 2116954 - RNA, 19 nt, Homo sapiens
  misc_RNA (1)...(19): siRNA sense strand
caacaucagagaguucaua

SEQ ID NO: 2116955 - RNA, 19 nt, Homo sapiens
  misc_RNA (1)...(19): siRNA sense strand
caucauagacuucauacug

SEQ ID NO: 2116956 - RNA, 19 nt, Homo sapiens
  misc_RNA (1)...(19): siRNA sense strand
gaagaaugugacaaaguuu

SEQ ID NO: 2116957 - RNA, 19 nt, Homo sapiens
  misc_RNA (1)...(19): siRNA sense strand
agacacaggaggauucaua

SEQ ID NO: 2116958 - RNA, 19 nt, Homo sapiens
  misc_RNA (1)...(19): siRNA sense strand
ugaaagacauaagaggauu

SEQ ID NO: 2116959 - RNA, 19 nt, Homo sapiens
  misc_RNA (1)...(19): siRNA sense strand
gaucaagcuuucauuugca

SEQ ID NO: 2116960 - RNA, 19 nt, Homo sapiens
  misc_RNA (1)...(19): siRNA sense strand
guggcaaggucuuuaauca

SEQ ID NO: 2116961 - RNA, 19 nt, Homo sapiens
  misc_RNA (1)...(19): siRNA sense strand
uaauugcagcucacucuua

SEQ ID NO: 2116962 - RNA, 19 nt, Homo sapiens
  misc_RNA (1)...(19): siRNA sense strand
cagacaucaucgcuuauaa

SEQ ID NO: 2116963 - RNA, 19 nt, Homo sapiens
  misc_RNA (1)...(19): siRNA sense strand
aaucacaccuugaaagaca

SEQ ID NO: 2116964 - RNA, 19 nt, Homo sapiens
  misc_RNA (1)...(19): siRNA sense strand
aaucacaccuugaaagaca

SEQ ID NO: 2116965 - RNA, 19 nt, Homo sapiens
  misc_RNA (1)...(19): siRNA sense strand
gaaaccuuaugaaugugaa

SEQ ID NO: 2116966 - RNA, 19 nt, Homo sapiens
  misc_RNA (1)...(19): siRNA sense strand
ccaaaugcauguugaagac

SEQ ID NO: 2116967 - RNA, 19 nt, Homo sapiens
  misc_RNA (1)...(19): siRNA sense strand
auaauucccuccauucuuc

SEQ ID NO: 2116968 - RNA, 19 nt, Homo sapiens
  misc_RNA (1)...(19): siRNA sense strand
gagaaaccuuacaaaugug

SEQ ID NO: 2116969 - RNA, 19 nt, Homo sapiens
  misc_RNA (1)...(19): siRNA sense strand
ugaaagacauaggaggauu

SEQ ID NO: 2116970 - RNA, 19 nt, Homo sapiens
  misc_RNA (1)...(19): siRNA sense strand
gaagagugugacaaaguuu

SEQ ID NO: 2116971 - RNA, 19 nt, Homo sapiens
  misc_RNA (1)...(19): siRNA sense strand
gagaaaccuuacaaaugug

SEQ ID NO: 2116972 - RNA, 19 nt, Homo sapiens
  misc_RNA (1)...(19): siRNA sense strand
aauugcagcucacucuuaa

SEQ ID NO: 2116973 - RNA, 19 nt, Homo sapiens
  misc_RNA (1)...(19): siRNA sense strand
agagaaaccauacaaaugu

SEQ ID NO: 2116974 - RNA, 19 nt, Homo sapiens
  misc_RNA (1)...(19): siRNA sense strand
acgugaugcuggagaauua

SEQ ID NO: 2116975 - RNA, 19 nt, Homo sapiens
  misc_RNA (1)...(19): siRNA sense strand
ggagagaaaccuuacacau

SEQ ID NO: 2116976 - RNA, 19 nt, Homo sapiens
  misc_RNA (1)...(19): siRNA sense strand
agagaaaccauacaaaugu

SEQ ID NO: 2116977 - RNA, 19 nt, Homo sapiens
  misc_RNA (1)...(19): siRNA sense strand
uaccuugccugccaucgua

SEQ ID NO: 2116978 - RNA, 19 nt, Homo sapiens
  misc_RNA (1)...(19): siRNA sense strand
uccaugaaauugagaaaga

SEQ ID NO: 2116979 - RNA, 19 nt, Homo sapiens
  misc_RNA (1)...(19): siRNA sense strand
aauguaagguuugugauga

SEQ ID NO: 2116980 - RNA, 19 nt, Homo sapiens
  misc_RNA (1)...(19): siRNA sense strand
gugagaaaccuuacaagug

SEQ ID NO: 2116981 - RNA, 19 nt, Homo sapiens
  misc_RNA (1)...(19): siRNA sense strand
gaucaaaggcaugcuggaa

SEQ ID NO: 2116982 - RNA, 19 nt, Homo sapiens
  misc_RNA (1)...(19): siRNA sense strand
ggaaagacacaggaggauu

SEQ ID NO: 2116983 - RNA, 19 nt, Homo sapiens
  misc_RNA (1)...(19): siRNA sense strand
gcucagaggacuuuauaca

SEQ ID NO: 2116984 - RNA, 19 nt, Homo sapiens
  misc_RNA (1)...(19): siRNA sense strand
uaauucaucccucuucauu

SEQ ID NO: 2116985 - RNA, 19 nt, Homo sapiens
  misc_RNA (1)...(19): siRNA sense strand
ugaaacaaauggccaugca

SEQ ID NO: 2116986 - RNA, 19 nt, Homo sapiens
  misc_RNA (1)...(19): siRNA sense strand
gauucauacuggagagaaa

SEQ ID NO: 2116987 - RNA, 19 nt, Homo sapiens
  misc_RNA (1)...(19): siRNA sense strand
gaaagacauaggaggauuc

SEQ ID NO: 2116988 - RNA, 19 nt, Homo sapiens
  misc_RNA (1)...(19): siRNA sense strand
gauucauacuggagagaaa

SEQ ID NO: 2116989 - RNA, 19 nt, Homo sapiens
  misc_RNA (1)...(19): siRNA sense strand
ucagggacguggccauaga

SEQ ID NO: 2116990 - RNA, 19 nt, Homo sapiens
  misc_RNA (1)...(19): siRNA sense strand
gaaccgcacauauuucagu

SEQ ID NO: 2116991 - RNA, 19 nt, Homo sapiens
  misc_RNA (1)...(19): siRNA sense strand
cauaagaggauucauacug

SEQ ID NO: 2116992 - RNA, 19 nt, Homo sapiens
  misc_RNA (1)...(19): siRNA sense strand
caaaucaaaccuggaaaga

SEQ ID NO: 2116993 - RNA, 19 nt, Homo sapiens
  misc_RNA (1)...(19): siRNA sense strand
gcaaaucaaaccuggaaag

SEQ ID NO: 2116994 - RNA, 19 nt, Homo sapiens
  misc_RNA (1)...(19): siRNA sense strand
gaaacaagccuauuaaaga

SEQ ID NO: 2116995 - RNA, 19 nt, Homo sapiens
  misc_RNA (1)...(19): siRNA sense strand
gcaagaagaugaaacaaau

SEQ ID NO: 2116996 - RNA, 19 nt, Homo sapiens
  misc_RNA (1)...(19): siRNA sense strand
caacuugcaugucaucaua

SEQ ID NO: 2116997 - RNA, 19 nt, Homo sapiens
  misc_RNA (1)...(19): siRNA sense strand
gcaagaaguugaaagaaau

SEQ ID NO: 2116998 - RNA, 19 nt, Homo sapiens
  misc_RNA (1)...(19): siRNA sense strand
caacaaugcuuccucaguu

SEQ ID NO: 2116999 - RNA, 19 nt, Homo sapiens
  misc_RNA (1)...(19): siRNA sense strand
ggcaagaucuuuaaucaga

SEQ ID NO: 2117000 - RNA, 19 nt, Homo sapiens
  misc_RNA (1)...(19): siRNA sense strand
ggagagggaucauacaaau

SEQ ID NO: 2117001 - RNA, 19 nt, Homo sapiens
  misc_RNA (1)...(19): siRNA sense strand
caaaucacaccuugaaaua

SEQ ID NO: 2117002 - RNA, 19 nt, Homo sapiens
  misc_RNA (1)...(19): siRNA sense strand
ugacaaggcuuucaagugu

SEQ ID NO: 2117003 - RNA, 19 nt, Homo sapiens
  misc_RNA (1)...(19): siRNA sense strand
agagaaaccuuacaaaugu

SEQ ID NO: 2117004 - RNA, 19 nt, Homo sapiens
  misc_RNA (1)...(19): siRNA sense strand
agagaaaccuuacaaaugu

SEQ ID NO: 2117005 - RNA, 19 nt, Homo sapiens
  misc_RNA (1)...(19): siRNA sense strand
agagaaaccuuacaaaugu

SEQ ID NO: 2117006 - RNA, 19 nt, Homo sapiens
  misc_RNA (1)...(19): siRNA sense strand
gcaaauccuuuaauuguag

SEQ ID NO: 2117007 - RNA, 19 nt, Homo sapiens
  misc_RNA (1)...(19): siRNA sense strand
ugacagaaaucaaagaguu

SEQ ID NO: 2117008 - RNA, 19 nt, Homo sapiens
  misc_RNA (1)...(19): siRNA sense strand
agagaaaccuuacaaaugu

SEQ ID NO: 2117009 - RNA, 19 nt, Homo sapiens
  misc_RNA (1)...(19): siRNA sense strand
gaaauaugcaugagagaaa

SEQ ID NO: 2117010 - RNA, 19 nt, Homo sapiens
  misc_RNA (1)...(19): siRNA sense strand
gagagaaaccuuacaaaug

SEQ ID NO: 2117011 - RNA, 19 nt, Homo sapiens
  misc_RNA (1)...(19): siRNA sense strand
gagagaaaccuuacaaaug

SEQ ID NO: 2117012 - RNA, 19 nt, Homo sapiens
  misc_RNA (1)...(19): siRNA sense strand
gaucacaccuugaaagaca

SEQ ID NO: 2117013 - RNA, 19 nt, Homo sapiens
  misc_RNA (1)...(19): siRNA sense strand
gagagaaaccuuacaaaug

SEQ ID NO: 2117014 - RNA, 19 nt, Homo sapiens
  misc_RNA (1)...(19): siRNA sense strand
gaucacaccuugaaagaca

SEQ ID NO: 2117015 - RNA, 19 nt, Homo sapiens
  misc_RNA (1)...(19): siRNA sense strand
gagagaaaccuuacaaaug

SEQ ID NO: 2117016 - RNA, 19 nt, Homo sapiens
  misc_RNA (1)...(19): siRNA sense strand
caagagagagagaauauaa

SEQ ID NO: 2117017 - RNA, 19 nt, Homo sapiens
  misc_RNA (1)...(19): siRNA sense strand
ggcaagaaguugaaagaaa

SEQ ID NO: 2117018 - RNA, 19 nt, Homo sapiens
  misc_RNA (1)...(19): siRNA sense strand
ugaagaaugugacaaaguu

SEQ ID NO: 2117019 - RNA, 19 nt, Homo sapiens
  misc_RNA (1)...(19): siRNA sense strand
ugaagaaugugacaaaguu

SEQ ID NO: 2117020 - RNA, 19 nt, Homo sapiens
  misc_RNA (1)...(19): siRNA sense strand
ugaaagaaauggccaugaa

SEQ ID NO: 2117021 - RNA, 19 nt, Homo sapiens
  misc_RNA (1)...(19): siRNA sense strand
agagaaaccuuaccaaugu

SEQ ID NO: 2117022 - RNA, 19 nt, Homo sapiens
  misc_RNA (1)...(19): siRNA sense strand
ugagaaaccuuacaugugu

SEQ ID NO: 2117023 - RNA, 19 nt, Homo sapiens
  misc_RNA (1)...(19): siRNA sense strand
gaaaggcaauacagaagug

SEQ ID NO: 2117024 - RNA, 19 nt, Homo sapiens
  misc_RNA (1)...(19): siRNA sense strand
ggaaacaagccuauuaaau

SEQ ID NO: 2117025 - RNA, 19 nt, Homo sapiens
  misc_RNA (1)...(19): siRNA sense strand
aauuguagcucacucuuua

SEQ ID NO: 2117026 - RNA, 19 nt, Homo sapiens
  misc_RNA (1)...(19): siRNA sense strand
ccacauaacccauucaaga

SEQ ID NO: 2117027 - RNA, 19 nt, Homo sapiens
  misc_RNA (1)...(19): siRNA sense strand
ggcaagaccuucagucaga

SEQ ID NO: 2117028 - RNA, 19 nt, Homo sapiens
  misc_RNA (1)...(19): siRNA sense strand
ggcaagaccuucagugaga

SEQ ID NO: 2117029 - RNA, 19 nt, Homo sapiens
  misc_RNA (1)...(19): siRNA sense strand
ggcaaauccuuuaauugua

SEQ ID NO: 2117030 - RNA, 19 nt, Homo sapiens
  misc_RNA (1)...(19): siRNA sense strand
agacauaggagaauucaua

SEQ ID NO: 2117031 - RNA, 19 nt, Homo sapiens
  misc_RNA (1)...(19): siRNA sense strand
agagaaaccuuacaagugu

SEQ ID NO: 2117032 - RNA, 19 nt, Homo sapiens
  misc_RNA (1)...(19): siRNA sense strand
agagaaaccuuacaagugu

SEQ ID NO: 2117033 - RNA, 19 nt, Homo sapiens
  misc_RNA (1)...(19): siRNA sense strand
agagaaaccuuacaagugu

SEQ ID NO: 2117034 - RNA, 19 nt, Homo sapiens
  misc_RNA (1)...(19): siRNA sense strand
agagaaaccuuacaagugu

SEQ ID NO: 2117035 - RNA, 19 nt, Homo sapiens
  misc_RNA (1)...(19): siRNA sense strand
agagaaaccuuacaagugu

SEQ ID NO: 2117036 - RNA, 19 nt, Homo sapiens
  misc_RNA (1)...(19): siRNA sense strand
agagaaaccuuacaagugu

SEQ ID NO: 2117037 - RNA, 19 nt, Homo sapiens
  misc_RNA (1)...(19): siRNA sense strand
ccaaaugcaugauggaguu

SEQ ID NO: 2117038 - RNA, 19 nt, Homo sapiens
  misc_RNA (1)...(19): siRNA sense strand
agagaaaccuuacaagugu

SEQ ID NO: 2117039 - RNA, 19 nt, Homo sapiens
  misc_RNA (1)...(19): siRNA sense strand
agagaaaccuuacaagugu

SEQ ID NO: 2117040 - RNA, 19 nt, Homo sapiens
  misc_RNA (1)...(19): siRNA sense strand
agagaaaccuuacaagugu

SEQ ID NO: 2117041 - RNA, 19 nt, Homo sapiens
  misc_RNA (1)...(19): siRNA sense strand
agagaaaccuuacacaugu

SEQ ID NO: 2117042 - RNA, 19 nt, Homo sapiens
  misc_RNA (1)...(19): siRNA sense strand
ugaagaaugugacaauguu

SEQ ID NO: 2117043 - RNA, 19 nt, Homo sapiens
  misc_RNA (1)...(19): siRNA sense strand
agagaaaccuuacaagugu

SEQ ID NO: 2117044 - RNA, 19 nt, Homo sapiens
  misc_RNA (1)...(19): siRNA sense strand
agagaaaccuuacaagugu

SEQ ID NO: 2117045 - RNA, 19 nt, Homo sapiens
  misc_RNA (1)...(19): siRNA sense strand
gaagaaagauauucaucac

SEQ ID NO: 2117046 - RNA, 19 nt, Homo sapiens
  misc_RNA (1)...(19): siRNA sense strand
gagagaaaccuuacaagug

SEQ ID NO: 2117047 - RNA, 19 nt, Homo sapiens
  misc_RNA (1)...(19): siRNA sense strand
gagagaaaccuuacaagug

SEQ ID NO: 2117048 - RNA, 19 nt, Homo sapiens
  misc_RNA (1)...(19): siRNA sense strand
gagagaaaccuuacaagug

SEQ ID NO: 2117049 - RNA, 19 nt, Homo sapiens
  misc_RNA (1)...(19): siRNA sense strand
gagagaaaccuuacaagug

SEQ ID NO: 2117050 - RNA, 19 nt, Homo sapiens
  misc_RNA (1)...(19): siRNA sense strand
gagaaaccuuaccaaugua

SEQ ID NO: 2117051 - RNA, 19 nt, Homo sapiens
  misc_RNA (1)...(19): siRNA sense strand
gagagaaaccuuaccaaug

SEQ ID NO: 2117052 - RNA, 19 nt, Homo sapiens
  misc_RNA (1)...(19): siRNA sense strand
gagagaaaccuuacaagug

SEQ ID NO: 2117053 - RNA, 19 nt, Homo sapiens
  misc_RNA (1)...(19): siRNA sense strand
uaauaaauguggcaagguu

SEQ ID NO: 2117054 - RNA, 19 nt, Homo sapiens
  misc_RNA (1)...(19): siRNA sense strand
ggguauaucucuuccaaau

SEQ ID NO: 2117055 - RNA, 19 nt, Homo sapiens
  misc_RNA (1)...(19): siRNA sense strand
gagagaaaccuuacaagug

SEQ ID NO: 2117056 - RNA, 19 nt, Homo sapiens
  misc_RNA (1)...(19): siRNA sense strand
gagagaaaccuuacaagug

SEQ ID NO: 2117057 - RNA, 19 nt, Homo sapiens
  misc_RNA (1)...(19): siRNA sense strand
gagagaaaccuuacacaug

SEQ ID NO: 2117058 - RNA, 19 nt, Homo sapiens
  misc_RNA (1)...(19): siRNA sense strand
gagagaaaccuuacaagug

SEQ ID NO: 2117059 - RNA, 19 nt, Homo sapiens
  misc_RNA (1)...(19): siRNA sense strand
gagagaaaccuuacaagug

SEQ ID NO: 2117060 - RNA, 19 nt, Homo sapiens
  misc_RNA (1)...(19): siRNA sense strand
gagagaaaccuuacaagug

SEQ ID NO: 2117061 - RNA, 19 nt, Homo sapiens
  misc_RNA (1)...(19): siRNA sense strand
ggcaagaccuucguucaaa

SEQ ID NO: 2117062 - RNA, 19 nt, Homo sapiens
  misc_RNA (1)...(19): siRNA sense strand
gagagaaaccauacaaaug

SEQ ID NO: 2117063 - RNA, 19 nt, Homo sapiens
  misc_RNA (1)...(19): siRNA sense strand
gagagaaaccauacaaaug

SEQ ID NO: 2117064 - RNA, 19 nt, Homo sapiens
  misc_RNA (1)...(19): siRNA sense strand
gaaaucaucccuucaaugc

SEQ ID NO: 2117065 - RNA, 19 nt, Homo sapiens
  misc_RNA (1)...(19): siRNA sense strand
acaaggcuuucaaguguua

SEQ ID NO: 2117066 - RNA, 19 nt, Homo sapiens
  misc_RNA (1)...(19): siRNA sense strand
ggagagaaaccauacaaau

SEQ ID NO: 2117067 - RNA, 19 nt, Homo sapiens
  misc_RNA (1)...(19): siRNA sense strand
ggagagaaaccauacaaau

SEQ ID NO: 2117068 - RNA, 19 nt, Homo sapiens
  misc_RNA (1)...(19): siRNA sense strand
ggagagaaaccuuacaaau

SEQ ID NO: 2117069 - RNA, 19 nt, Homo sapiens
  misc_RNA (1)...(19): siRNA sense strand
ggagagaaaccuuacaaau

SEQ ID NO: 2117070 - RNA, 19 nt, Homo sapiens
  misc_RNA (1)...(19): siRNA sense strand
ggagagaaaccuuacaaau

SEQ ID NO: 2117071 - RNA, 19 nt, Homo sapiens
  misc_RNA (1)...(19): siRNA sense strand
ggagagaaaccuuacaaau

SEQ ID NO: 2117072 - RNA, 19 nt, Homo sapiens
  misc_RNA (1)...(19): siRNA sense strand
ggauguggcuauagaguuc

SEQ ID NO: 2117073 - RNA, 19 nt, Homo sapiens
  misc_RNA (1)...(19): siRNA sense strand
ugacaaggcuuucagacau

SEQ ID NO: 2117074 - RNA, 19 nt, Homo sapiens
  misc_RNA (1)...(19): siRNA sense strand
aaucauaccuugaaagaca

SEQ ID NO: 2117075 - RNA, 19 nt, Homo sapiens
  misc_RNA (1)...(19): siRNA sense strand
caagucagcccucuuaguu

SEQ ID NO: 2117076 - RNA, 19 nt, Homo sapiens
  misc_RNA (1)...(19): siRNA sense strand
gagaguggcaaauccuuua

SEQ ID NO: 2117077 - RNA, 19 nt, Homo sapiens
  misc_RNA (1)...(19): siRNA sense strand
ugaaacaaauggccaugaa

SEQ ID NO: 2117078 - RNA, 19 nt, Homo sapiens
  misc_RNA (1)...(19): siRNA sense strand
agaaagacauucaugacuu

SEQ ID NO: 2117079 - RNA, 19 nt, Homo sapiens
  misc_RNA (1)...(19): siRNA sense strand
ggaaacaagccuauuaaag

SEQ ID NO: 2117080 - RNA, 19 nt, Homo sapiens
  misc_RNA (1)...(19): siRNA sense strand
gcacagagggcuuuauaca

SEQ ID NO: 2117081 - RNA, 19 nt, Homo sapiens
  misc_RNA (1)...(19): siRNA sense strand
gcuggaaacaagccuauua

SEQ ID NO: 2117082 - RNA, 19 nt, Homo sapiens
  misc_RNA (1)...(19): siRNA sense strand
caaaucauaccuugaaaga

SEQ ID NO: 2117083 - RNA, 19 nt, Homo sapiens
  misc_RNA (1)...(19): siRNA sense strand
gcuggaaacaagccuauua

SEQ ID NO: 2117084 - RNA, 19 nt, Homo sapiens
  misc_RNA (1)...(19): siRNA sense strand
gcaagaucuuuaaucagaa

SEQ ID NO: 2117085 - RNA, 19 nt, Homo sapiens
  misc_RNA (1)...(19): siRNA sense strand
ugaaagacauaggaagauu

SEQ ID NO: 2117086 - RNA, 19 nt, Homo sapiens
  misc_RNA (1)...(19): siRNA sense strand
gagagaaacguuacaagug

SEQ ID NO: 2117087 - RNA, 19 nt, Homo sapiens
  misc_RNA (1)...(19): siRNA sense strand
ugaaagacauaggagaauu

SEQ ID NO: 2117088 - RNA, 19 nt, Homo sapiens
  misc_RNA (1)...(19): siRNA sense strand
caaaucacaccuugaaaga

SEQ ID NO: 2117089 - RNA, 19 nt, Homo sapiens
  misc_RNA (1)...(19): siRNA sense strand
ugaaagacauaggagaauu

SEQ ID NO: 2117090 - RNA, 19 nt, Homo sapiens
  misc_RNA (1)...(19): siRNA sense strand
gaucaagcuuucauucaca

SEQ ID NO: 2117091 - RNA, 19 nt, Homo sapiens
  misc_RNA (1)...(19): siRNA sense strand
ugaaagacauaggagaauu

SEQ ID NO: 2117092 - RNA, 19 nt, Homo sapiens
  misc_RNA (1)...(19): siRNA sense strand
agacauaggaagauucaua

SEQ ID NO: 2117093 - RNA, 19 nt, Homo sapiens
  misc_RNA (1)...(19): siRNA sense strand
guauaucucuuccaaaugc

SEQ ID NO: 2117094 - RNA, 19 nt, Homo sapiens
  misc_RNA (1)...(19): siRNA sense strand
gcaagagccuggccaagca

SEQ ID NO: 2117095 - RNA, 19 nt, Homo sapiens
  misc_RNA (1)...(19): siRNA sense strand
ggccgcagcuucacucaga

SEQ ID NO: 2117096 - RNA, 19 nt, Homo sapiens
  misc_RNA (1)...(19): siRNA sense strand
gaguguggcaagagcuuua

SEQ ID NO: 2117097 - RNA, 19 nt, Homo sapiens
  misc_RNA (1)...(19): siRNA sense strand
ccaguggacauccucauca

SEQ ID NO: 2117098 - RNA, 19 nt, Homo sapiens
  misc_RNA (1)...(19): siRNA sense strand
cuacaucugcaacgagugu

SEQ ID NO: 2117099 - RNA, 19 nt, Homo sapiens
  misc_RNA (1)...(19): siRNA sense strand
ggagacacaagaagaucca

SEQ ID NO: 2117100 - RNA, 19 nt, Homo sapiens
  misc_RNA (1)...(19): siRNA sense strand
caguggacauccucaucau

SEQ ID NO: 2117101 - RNA, 19 nt, Homo sapiens
  misc_RNA (1)...(19): siRNA sense strand
gauggccagucacgagaac

SEQ ID NO: 2117102 - RNA, 19 nt, Homo sapiens
  misc_RNA (1)...(19): siRNA sense strand
ggaggaagaugacgaauca

SEQ ID NO: 2117103 - RNA, 19 nt, Homo sapiens
  misc_RNA (1)...(19): siRNA sense strand
ggagcucgguggaggaaga

SEQ ID NO: 2117104 - RNA, 19 nt, Homo sapiens
  misc_RNA (1)...(19): siRNA sense strand
ccaugacagugaugagaaa

SEQ ID NO: 2117105 - RNA, 19 nt, Homo sapiens
  misc_RNA (1)...(19): siRNA sense strand
caacaaacaaccauagucu

SEQ ID NO: 2117106 - RNA, 19 nt, Homo sapiens
  misc_RNA (1)...(19): siRNA sense strand
acaaacaaccauagucuug

SEQ ID NO: 2117107 - RNA, 19 nt, Homo sapiens
  misc_RNA (1)...(19): siRNA sense strand
ggaugccuaugauguuuca

SEQ ID NO: 2117108 - RNA, 19 nt, Homo sapiens
  misc_RNA (1)...(19): siRNA sense strand
gucaaaagcuccacaacaa

SEQ ID NO: 2117109 - RNA, 19 nt, Homo sapiens
  misc_RNA (1)...(19): siRNA sense strand
ccacaacaaacaaccauag

SEQ ID NO: 2117110 - RNA, 19 nt, Homo sapiens
  misc_RNA (1)...(19): siRNA sense strand
gccaugacagugaugagaa

SEQ ID NO: 2117111 - RNA, 19 nt, Homo sapiens
  misc_RNA (1)...(19): siRNA sense strand
ugacagugaugagaaagac

SEQ ID NO: 2117112 - RNA, 19 nt, Homo sapiens
  misc_RNA (1)...(19): siRNA sense strand
uaacggggaugccuaugau

SEQ ID NO: 2117113 - RNA, 19 nt, Homo sapiens
  misc_RNA (1)...(19): siRNA sense strand
gcucgguggaggaagauga

SEQ ID NO: 2117114 - RNA, 19 nt, Homo sapiens
  misc_RNA (1)...(19): siRNA sense strand
gguggaggaagaugacgaa

SEQ ID NO: 2117115 - RNA, 19 nt, Homo sapiens
  misc_RNA (1)...(19): siRNA sense strand
ggggaugccuaugauguuu

SEQ ID NO: 2117116 - RNA, 19 nt, Homo sapiens
  misc_RNA (1)...(19): siRNA sense strand
guacaaagauuacacagaa

SEQ ID NO: 2117117 - RNA, 19 nt, Homo sapiens
  misc_RNA (1)...(19): siRNA sense strand
gagaaacccuaccauugua

SEQ ID NO: 2117118 - RNA, 19 nt, Homo sapiens
  misc_RNA (1)...(19): siRNA sense strand
ucaaagaacucccaauuag

SEQ ID NO: 2117119 - RNA, 19 nt, Homo sapiens
  misc_RNA (1)...(19): siRNA sense strand
gagagaagccuuauaagug

SEQ ID NO: 2117120 - RNA, 19 nt, Homo sapiens
  misc_RNA (1)...(19): siRNA sense strand
ggagaagccuuaugaaugc

SEQ ID NO: 2117121 - RNA, 19 nt, Homo sapiens
  misc_RNA (1)...(19): siRNA sense strand
gagagaagccguaugaaug

SEQ ID NO: 2117122 - RNA, 19 nt, Homo sapiens
  misc_RNA (1)...(19): siRNA sense strand
ggagaaacccuaccauugu

SEQ ID NO: 2117123 - RNA, 19 nt, Homo sapiens
  misc_RNA (1)...(19): siRNA sense strand
gcucaucccucacacauca

SEQ ID NO: 2117124 - RNA, 19 nt, Homo sapiens
  misc_RNA (1)...(19): siRNA sense strand
gagagaaacccuaugaaug

SEQ ID NO: 2117125 - RNA, 19 nt, Homo sapiens
  misc_RNA (1)...(19): siRNA sense strand
gggagaagccuuaugaaug

SEQ ID NO: 2117126 - RNA, 19 nt, Homo sapiens
  misc_RNA (1)...(19): siRNA sense strand
gaauaucaccacugaagaa

SEQ ID NO: 2117127 - RNA, 19 nt, Homo sapiens
  misc_RNA (1)...(19): siRNA sense strand
gugcagaccucauucaaca

SEQ ID NO: 2117128 - RNA, 19 nt, Homo sapiens
  misc_RNA (1)...(19): siRNA sense strand
gggagaagcccuauaagug

SEQ ID NO: 2117129 - RNA, 19 nt, Homo sapiens
  misc_RNA (1)...(19): siRNA sense strand
ggagagaaacccuaugaau

SEQ ID NO: 2117130 - RNA, 19 nt, Homo sapiens
  misc_RNA (1)...(19): siRNA sense strand
gggagaagcccuauaagug

SEQ ID NO: 2117131 - RNA, 19 nt, Homo sapiens
  misc_RNA (1)...(19): siRNA sense strand
ggagagaagccuuauaagu

SEQ ID NO: 2117132 - RNA, 19 nt, Homo sapiens
  misc_RNA (1)...(19): siRNA sense strand
gggagaaacccuaccauug

SEQ ID NO: 2117133 - RNA, 19 nt, Homo sapiens
  misc_RNA (1)...(19): siRNA sense strand
ggagagaagccguaugaau

SEQ ID NO: 2117134 - RNA, 19 nt, Homo sapiens
  misc_RNA (1)...(19): siRNA sense strand
ggaaugcgggaaaguguuu

SEQ ID NO: 2117135 - RNA, 19 nt, Homo sapiens
  misc_RNA (1)...(19): siRNA sense strand
guggagagaagccuuauaa

SEQ ID NO: 2117136 - RNA, 19 nt, Homo sapiens
  misc_RNA (1)...(19): siRNA sense strand
gggaaaaccuuuagcaaga

SEQ ID NO: 2117137 - RNA, 19 nt, Homo sapiens
  misc_RNA (1)...(19): siRNA sense strand
caacagaaggugaucucua

SEQ ID NO: 2117138 - RNA, 19 nt, Homo sapiens
  misc_RNA (1)...(19): siRNA sense strand
gauucacacuggagagaaa

SEQ ID NO: 2117139 - RNA, 19 nt, Homo sapiens
  misc_RNA (1)...(19): siRNA sense strand
caaaagaccucucccaaag

SEQ ID NO: 2117140 - RNA, 19 nt, Homo sapiens
  misc_RNA (1)...(19): siRNA sense strand
ggagugaaacccuuugaau

SEQ ID NO: 2117141 - RNA, 19 nt, Homo sapiens
  misc_RNA (1)...(19): siRNA sense strand
caucugaaaugcaagaagu

SEQ ID NO: 2117142 - RNA, 19 nt, Homo sapiens
  misc_RNA (1)...(19): siRNA sense strand
caucaucaaaggauucaua

SEQ ID NO: 2117143 - RNA, 19 nt, Homo sapiens
  misc_RNA (1)...(19): siRNA sense strand
ggagagaaacccuaugagu

SEQ ID NO: 2117144 - RNA, 19 nt, Homo sapiens
  misc_RNA (1)...(19): siRNA sense strand
aaggugaucucuaugaaug

SEQ ID NO: 2117145 - RNA, 19 nt, Homo sapiens
  misc_RNA (1)...(19): siRNA sense strand
aacagaaggugaucucuau

SEQ ID NO: 2117146 - RNA, 19 nt, Homo sapiens
  misc_RNA (1)...(19): siRNA sense strand
ggagagaagcccuaugagu

SEQ ID NO: 2117147 - RNA, 19 nt, Homo sapiens
  misc_RNA (1)...(19): siRNA sense strand
caaggagccucaaagaacu

SEQ ID NO: 2117148 - RNA, 19 nt, Homo sapiens
  misc_RNA (1)...(19): siRNA sense strand
gagugaaacccuuugaaug

SEQ ID NO: 2117149 - RNA, 19 nt, Homo sapiens
  misc_RNA (1)...(19): siRNA sense strand
aaccagagcugaucuacca

SEQ ID NO: 2117150 - RNA, 19 nt, Homo sapiens
  misc_RNA (1)...(19): siRNA sense strand
caagcagcaucaacggauu

SEQ ID NO: 2117151 - RNA, 19 nt, Homo sapiens
  misc_RNA (1)...(19): siRNA sense strand
caagugaagcccuaugaau

SEQ ID NO: 2117152 - RNA, 19 nt, Homo sapiens
  misc_RNA (1)...(19): siRNA sense strand
agaaugcccuccuuguuca

SEQ ID NO: 2117153 - RNA, 19 nt, Homo sapiens
  misc_RNA (1)...(19): siRNA sense strand
agaaggugaucucuaugaa

SEQ ID NO: 2117154 - RNA, 19 nt, Homo sapiens
  misc_RNA (1)...(19): siRNA sense strand
ccucaaagaacucccaauu

SEQ ID NO: 2117155 - RNA, 19 nt, Homo sapiens
  misc_RNA (1)...(19): siRNA sense strand
gaccacagagccuaccuuu

SEQ ID NO: 2117156 - RNA, 19 nt, Homo sapiens
  misc_RNA (1)...(19): siRNA sense strand
gaaggugaucucuaugaau

SEQ ID NO: 2117157 - RNA, 19 nt, Homo sapiens
  misc_RNA (1)...(19): siRNA sense strand
ucucugggcuguccuuugu

SEQ ID NO: 2117158 - RNA, 19 nt, Homo sapiens
  misc_RNA (1)...(19): siRNA sense strand
caacauccaggaacuuuua

SEQ ID NO: 2117159 - RNA, 19 nt, Homo sapiens
  misc_RNA (1)...(19): siRNA sense strand
caucaaaggauucauacug

SEQ ID NO: 2117160 - RNA, 19 nt, Homo sapiens
  misc_RNA (1)...(19): siRNA sense strand
gagaaacccuaugaaugca

SEQ ID NO: 2117161 - RNA, 19 nt, Homo sapiens
  misc_RNA (1)...(19): siRNA sense strand
cagaaggugaucucuauga

SEQ ID NO: 2117162 - RNA, 19 nt, Homo sapiens
  misc_RNA (1)...(19): siRNA sense strand
gugcaaagaguguggcaaa

SEQ ID NO: 2117163 - RNA, 19 nt, Homo sapiens
  misc_RNA (1)...(19): siRNA sense strand
cucaaagaacucccaauua

SEQ ID NO: 2117164 - RNA, 19 nt, Homo sapiens
  misc_RNA (1)...(19): siRNA sense strand
aaagaaugcccuccuuguu

SEQ ID NO: 2117165 - RNA, 19 nt, Homo sapiens
  misc_RNA (1)...(19): siRNA sense strand
ccacagagccuaccuuuuc

SEQ ID NO: 2117166 - RNA, 19 nt, Homo sapiens
  misc_RNA (1)...(19): siRNA sense strand
gaacggauucacacucaag

SEQ ID NO: 2117167 - RNA, 19 nt, Homo sapiens
  misc_RNA (1)...(19): siRNA sense strand
ggaagcugcuggagaaaau

SEQ ID NO: 2117168 - RNA, 19 nt, Homo sapiens
  misc_RNA (1)...(19): siRNA sense strand
acacaaggagccucaaaga

SEQ ID NO: 2117169 - RNA, 19 nt, Homo sapiens
  misc_RNA (1)...(19): siRNA sense strand
ccuuauaagugcagugaau

SEQ ID NO: 2117170 - RNA, 19 nt, Homo sapiens
  misc_RNA (1)...(19): siRNA sense strand
cgagagugcagaccucauu

SEQ ID NO: 2117171 - RNA, 19 nt, Homo sapiens
  misc_RNA (1)...(19): siRNA sense strand
ugaaacccuuugaaugcaa

SEQ ID NO: 2117172 - RNA, 19 nt, Homo sapiens
  misc_RNA (1)...(19): siRNA sense strand
uguaacagaugugggaaga

SEQ ID NO: 2117173 - RNA, 19 nt, Homo sapiens
  misc_RNA (1)...(19): siRNA sense strand
agagaaacccuaugaaugc

SEQ ID NO: 2117174 - RNA, 19 nt, Homo sapiens
  misc_RNA (1)...(19): siRNA sense strand
acaaggagccucaaagaac

SEQ ID NO: 2117175 - RNA, 19 nt, Homo sapiens
  misc_RNA (1)...(19): siRNA sense strand
ugauagggcagaccucauu

SEQ ID NO: 2117176 - RNA, 19 nt, Homo sapiens
  misc_RNA (1)...(19): siRNA sense strand
gaagcccuaugagugcauu

SEQ ID NO: 2117177 - RNA, 19 nt, Homo sapiens
  misc_RNA (1)...(19): siRNA sense strand
cgggagagaagcccuauga

SEQ ID NO: 2117178 - RNA, 19 nt, Homo sapiens
  misc_RNA (1)...(19): siRNA sense strand
cgagauaggccagguuuca

SEQ ID NO: 2117179 - RNA, 19 nt, Homo sapiens
  misc_RNA (1)...(19): siRNA sense strand
ggugaucucuaugaaugug

SEQ ID NO: 2117180 - RNA, 19 nt, Homo sapiens
  misc_RNA (1)...(19): siRNA sense strand
gggaagaccuuuuaugacu

SEQ ID NO: 2117181 - RNA, 19 nt, Homo sapiens
  misc_RNA (1)...(19): siRNA sense strand
ucacacaucaucaaaggau

SEQ ID NO: 2117182 - RNA, 19 nt, Homo sapiens
  misc_RNA (1)...(19): siRNA sense strand
ccucacacaucaucaaagg

SEQ ID NO: 2117183 - RNA, 19 nt, Homo sapiens
  misc_RNA (1)...(19): siRNA sense strand
ugccggagcgcaaaccuua

SEQ ID NO: 2117184 - RNA, 19 nt, Homo sapiens
  misc_RNA (1)...(19): siRNA sense strand
gaaugcaacgaguguggaa

SEQ ID NO: 2117185 - RNA, 19 nt, Homo sapiens
  misc_RNA (1)...(19): siRNA sense strand
gaggaaugcgggaaagugu

SEQ ID NO: 2117186 - RNA, 19 nt, Homo sapiens
  misc_RNA (1)...(19): siRNA sense strand
aguuacagaugccuugauu

SEQ ID NO: 2117187 - RNA, 19 nt, Homo sapiens
  misc_RNA (1)...(19): siRNA sense strand
ggaagucuuacuccaggaa

SEQ ID NO: 2117188 - RNA, 19 nt, Homo sapiens
  misc_RNA (1)...(19): siRNA sense strand
gugaaacccuuugaaugca

SEQ ID NO: 2117189 - RNA, 19 nt, Homo sapiens
  misc_RNA (1)...(19): siRNA sense strand
gucagaugaugguguaugu

SEQ ID NO: 2117190 - RNA, 19 nt, Homo sapiens
  misc_RNA (1)...(19): siRNA sense strand
ugauucacauggaccaguu

SEQ ID NO: 2117191 - RNA, 19 nt, Homo sapiens
  misc_RNA (1)...(19): siRNA sense strand
ccacuuuugucuugcauaa

SEQ ID NO: 2117192 - RNA, 19 nt, Homo sapiens
  misc_RNA (1)...(19): siRNA sense strand
gauaggccagguuucauuc

SEQ ID NO: 2117193 - RNA, 19 nt, Homo sapiens
  misc_RNA (1)...(19): siRNA sense strand
aaagaccucucccaaagcu

SEQ ID NO: 2117194 - RNA, 19 nt, Homo sapiens
  misc_RNA (1)...(19): siRNA sense strand
aagaaugcccuccuuguuc

SEQ ID NO: 2117195 - RNA, 19 nt, Homo sapiens
  misc_RNA (1)...(19): siRNA sense strand
cagagcugaucuaccaguu

SEQ ID NO: 2117196 - RNA, 19 nt, Homo sapiens
  misc_RNA (1)...(19): siRNA sense strand
cacaaggagccucaaagaa

SEQ ID NO: 2117197 - RNA, 19 nt, Homo sapiens
  misc_RNA (1)...(19): siRNA sense strand
gaucacagacaggagcuau

SEQ ID NO: 2117198 - RNA, 19 nt, Homo sapiens
  misc_RNA (1)...(19): siRNA sense strand
caaagaacucccaauuagg

SEQ ID NO: 2117199 - RNA, 19 nt, Homo sapiens
  misc_RNA (1)...(19): siRNA sense strand
gaaugcaaagaauguggaa

SEQ ID NO: 2117200 - RNA, 19 nt, Homo sapiens
  misc_RNA (1)...(19): siRNA sense strand
caaagauuacacagaaaca

SEQ ID NO: 2117201 - RNA, 19 nt, Homo sapiens
  misc_RNA (1)...(19): siRNA sense strand
gaugugggaagaccuuuua

SEQ ID NO: 2117202 - RNA, 19 nt, Homo sapiens
  misc_RNA (1)...(19): siRNA sense strand
ggauucauacugggagaaa

SEQ ID NO: 2117203 - RNA, 19 nt, Homo sapiens
  misc_RNA (1)...(19): siRNA sense strand
gagaagccguaugaaugca

SEQ ID NO: 2117204 - RNA, 19 nt, Homo sapiens
  misc_RNA (1)...(19): siRNA sense strand
ccuuaugaaugcagugaau

SEQ ID NO: 2117205 - RNA, 19 nt, Homo sapiens
  misc_RNA (1)...(19): siRNA sense strand
ucacccaccgcuccacuuu

SEQ ID NO: 2117206 - RNA, 19 nt, Homo sapiens
  misc_RNA (1)...(19): siRNA sense strand
gauuacacagaaacaaguu

SEQ ID NO: 2117207 - RNA, 19 nt, Homo sapiens
  misc_RNA (1)...(19): siRNA sense strand
uaucaccacugaagaaaau

SEQ ID NO: 2117208 - RNA, 19 nt, Homo sapiens
  misc_RNA (1)...(19): siRNA sense strand
cuggagagaagccguauga

SEQ ID NO: 2117209 - RNA, 19 nt, Homo sapiens
  misc_RNA (1)...(19): siRNA sense strand
gagcgcaaaccuuauucga

SEQ ID NO: 2117210 - RNA, 19 nt, Homo sapiens
  misc_RNA (1)...(19): siRNA sense strand
aagugaagcccuaugaaug

SEQ ID NO: 2117211 - RNA, 19 nt, Homo sapiens
  misc_RNA (1)...(19): siRNA sense strand
gcaaagaguguggcaaagc

SEQ ID NO: 2117212 - RNA, 19 nt, Homo sapiens
  misc_RNA (1)...(19): siRNA sense strand
auucgacacuccaucauuc

SEQ ID NO: 2117213 - RNA, 19 nt, Homo sapiens
  misc_RNA (1)...(19): siRNA sense strand
ucacgaggcaccaacagau

SEQ ID NO: 2117214 - RNA, 19 nt, Homo sapiens
  misc_RNA (1)...(19): siRNA sense strand
gaaugcagugaauguggaa

SEQ ID NO: 2117215 - RNA, 19 nt, Homo sapiens
  misc_RNA (1)...(19): siRNA sense strand
ucacguggcaccaacagau

SEQ ID NO: 2117216 - RNA, 19 nt, Homo sapiens
  misc_RNA (1)...(19): siRNA sense strand
ggaaagaacuuacaaaugc

SEQ ID NO: 2117217 - RNA, 19 nt, Homo sapiens
  misc_RNA (1)...(19): siRNA sense strand
caacaaaugugggaaauuc

SEQ ID NO: 2117218 - RNA, 19 nt, Homo sapiens
  misc_RNA (1)...(19): siRNA sense strand
gagagaagcucaccagaag

SEQ ID NO: 2117219 - RNA, 19 nt, Homo sapiens
  misc_RNA (1)...(19): siRNA sense strand
gagaaaggccuuauaagug

SEQ ID NO: 2117220 - RNA, 19 nt, Homo sapiens
  misc_RNA (1)...(19): siRNA sense strand
ggaaauacuuuauguacag

SEQ ID NO: 2117221 - RNA, 19 nt, Homo sapiens
  misc_RNA (1)...(19): siRNA sense strand
gaauagacaucagagaguu

SEQ ID NO: 2117222 - RNA, 19 nt, Homo sapiens
  misc_RNA (1)...(19): siRNA sense strand
gaaccugacugaggauuau

SEQ ID NO: 2117223 - RNA, 19 nt, Homo sapiens
  misc_RNA (1)...(19): siRNA sense strand
ggagaaaggccuuauaagu

SEQ ID NO: 2117224 - RNA, 19 nt, Homo sapiens
  misc_RNA (1)...(19): siRNA sense strand
gaaaggccuuauaagugua

SEQ ID NO: 2117225 - RNA, 19 nt, Homo sapiens
  misc_RNA (1)...(19): siRNA sense strand
gaauguggcaaauuguuua

SEQ ID NO: 2117226 - RNA, 19 nt, Homo sapiens
  misc_RNA (1)...(19): siRNA sense strand
guacaacuccgaccuuauu

SEQ ID NO: 2117227 - RNA, 19 nt, Homo sapiens
  misc_RNA (1)...(19): siRNA sense strand
ugaaaggccuuaugagugu

SEQ ID NO: 2117228 - RNA, 19 nt, Homo sapiens
  misc_RNA (1)...(19): siRNA sense strand
gggaaauucuuuagguauu

SEQ ID NO: 2117229 - RNA, 19 nt, Homo sapiens
  misc_RNA (1)...(19): siRNA sense strand
ggagagaggccuuaugaau

SEQ ID NO: 2117230 - RNA, 19 nt, Homo sapiens
  misc_RNA (1)...(19): siRNA sense strand
aggcacaacucaaaucaua

SEQ ID NO: 2117231 - RNA, 19 nt, Homo sapiens
  misc_RNA (1)...(19): siRNA sense strand
guggacagcuguacacuga

SEQ ID NO: 2117232 - RNA, 19 nt, Homo sapiens
  misc_RNA (1)...(19): siRNA sense strand
caagcaauguguuucugua

SEQ ID NO: 2117233 - RNA, 19 nt, Homo sapiens
  misc_RNA (1)...(19): siRNA sense strand
gcacaacucaaaucauauu

SEQ ID NO: 2117234 - RNA, 19 nt, Homo sapiens
  misc_RNA (1)...(19): siRNA sense strand
ggaaauucuuuagguauug

SEQ ID NO: 2117235 - RNA, 19 nt, Homo sapiens
  misc_RNA (1)...(19): siRNA sense strand
aaacaucagcgaaaucaua

SEQ ID NO: 2117236 - RNA, 19 nt, Homo sapiens
  misc_RNA (1)...(19): siRNA sense strand
acauguagcucacuucuga

SEQ ID NO: 2117237 - RNA, 19 nt, Homo sapiens
  misc_RNA (1)...(19): siRNA sense strand
caaaguggacagaauaauu

SEQ ID NO: 2117238 - RNA, 19 nt, Homo sapiens
  misc_RNA (1)...(19): siRNA sense strand
agaaaggccuuauaagugu

SEQ ID NO: 2117239 - RNA, 19 nt, Homo sapiens
  misc_RNA (1)...(19): siRNA sense strand
ugucacaggucacaacuuu

SEQ ID NO: 2117240 - RNA, 19 nt, Homo sapiens
  misc_RNA (1)...(19): siRNA sense strand
ggacagcuccacacucauu

SEQ ID NO: 2117241 - RNA, 19 nt, Homo sapiens
  misc_RNA (1)...(19): siRNA sense strand
gaaagaacuuacaaaugca

SEQ ID NO: 2117242 - RNA, 19 nt, Homo sapiens
  misc_RNA (1)...(19): siRNA sense strand
agaaaucacuuuggagaaa

SEQ ID NO: 2117243 - RNA, 19 nt, Homo sapiens
  misc_RNA (1)...(19): siRNA sense strand
gcaauguguuucuguagga

SEQ ID NO: 2117244 - RNA, 19 nt, Homo sapiens
  misc_RNA (1)...(19): siRNA sense strand
ggaggcaccuuccaagcaa

SEQ ID NO: 2117245 - RNA, 19 nt, Homo sapiens
  misc_RNA (1)...(19): siRNA sense strand
gagagaggccuuaugaaug

SEQ ID NO: 2117246 - RNA, 19 nt, Homo sapiens
  misc_RNA (1)...(19): siRNA sense strand
ggagaaaggccuuaugagu

SEQ ID NO: 2117247 - RNA, 19 nt, Homo sapiens
  misc_RNA (1)...(19): siRNA sense strand
ggagagagaccuuaucagu

SEQ ID NO: 2117248 - RNA, 19 nt, Homo sapiens
  misc_RNA (1)...(19): siRNA sense strand
gugggaaauucuuuagaua

SEQ ID NO: 2117249 - RNA, 19 nt, Homo sapiens
  misc_RNA (1)...(19): siRNA sense strand
gcaaugaaugugggaaaua

SEQ ID NO: 2117250 - RNA, 19 nt, Homo sapiens
  misc_RNA (1)...(19): siRNA sense strand
ucacaggucacaacuuuaa

SEQ ID NO: 2117251 - RNA, 19 nt, Homo sapiens
  misc_RNA (1)...(19): siRNA sense strand
gaaugugggaaauacuuua

SEQ ID NO: 2117252 - RNA, 19 nt, Homo sapiens
  misc_RNA (1)...(19): siRNA sense strand
gaaaguucacaccagauaa

SEQ ID NO: 2117253 - RNA, 19 nt, Homo sapiens
  misc_RNA (1)...(19): siRNA sense strand
ggacguggccauacauuuc

SEQ ID NO: 2117254 - RNA, 19 nt, Homo sapiens
  misc_RNA (1)...(19): siRNA sense strand
ggccuucguuugugaauga

SEQ ID NO: 2117255 - RNA, 19 nt, Homo sapiens
  misc_RNA (1)...(19): siRNA sense strand
caacuccgaccuuauuaaa

SEQ ID NO: 2117256 - RNA, 19 nt, Homo sapiens
  misc_RNA (1)...(19): siRNA sense strand
gaagagucaucagagaguu

SEQ ID NO: 2117257 - RNA, 19 nt, Homo sapiens
  misc_RNA (1)...(19): siRNA sense strand
ggacagcuguacacugaag

SEQ ID NO: 2117258 - RNA, 19 nt, Homo sapiens
  misc_RNA (1)...(19): siRNA sense strand
gagaaaagccuuaugaaug

SEQ ID NO: 2117259 - RNA, 19 nt, Homo sapiens
  misc_RNA (1)...(19): siRNA sense strand
guucagcacucauuagaca

SEQ ID NO: 2117260 - RNA, 19 nt, Homo sapiens
  misc_RNA (1)...(19): siRNA sense strand
gccaaggccuuaugugugu

SEQ ID NO: 2117261 - RNA, 19 nt, Homo sapiens
  misc_RNA (1)...(19): siRNA sense strand
gaaugugggaaguucuuua

SEQ ID NO: 2117262 - RNA, 19 nt, Homo sapiens
  misc_RNA (1)...(19): siRNA sense strand
gcuguacacugaagaguca

SEQ ID NO: 2117263 - RNA, 19 nt, Homo sapiens
  misc_RNA (1)...(19): siRNA sense strand
cagugaauguggcaaauug

SEQ ID NO: 2117264 - RNA, 19 nt, Homo sapiens
  misc_RNA (1)...(19): siRNA sense strand
gggaaagaacuuacaaaug

SEQ ID NO: 2117265 - RNA, 19 nt, Homo sapiens
  misc_RNA (1)...(19): siRNA sense strand
gggaaauacuuuauguaca

SEQ ID NO: 2117266 - RNA, 19 nt, Homo sapiens
  misc_RNA (1)...(19): siRNA sense strand
ggacagcugcacacucauu

SEQ ID NO: 2117267 - RNA, 19 nt, Homo sapiens
  misc_RNA (1)...(19): siRNA sense strand
gcuccacacucauuaguca

SEQ ID NO: 2117268 - RNA, 19 nt, Homo sapiens
  misc_RNA (1)...(19): siRNA sense strand
gaaaggccuuaugagugua

SEQ ID NO: 2117269 - RNA, 19 nt, Homo sapiens
  misc_RNA (1)...(19): siRNA sense strand
gugggaaauucuuuaggua

SEQ ID NO: 2117270 - RNA, 19 nt, Homo sapiens
  misc_RNA (1)...(19): siRNA sense strand
gaggaaaggccuuaugagu

SEQ ID NO: 2117271 - RNA, 19 nt, Homo sapiens
  misc_RNA (1)...(19): siRNA sense strand
cuggagaacuuugcacuuu

SEQ ID NO: 2117272 - RNA, 19 nt, Homo sapiens
  misc_RNA (1)...(19): siRNA sense strand
gagaagcucaccagaagug

SEQ ID NO: 2117273 - RNA, 19 nt, Homo sapiens
  misc_RNA (1)...(19): siRNA sense strand
agaugucgcuccacacuug

SEQ ID NO: 2117274 - RNA, 19 nt, Homo sapiens
  misc_RNA (1)...(19): siRNA sense strand
gggaaauccuuuagauguc

SEQ ID NO: 2117275 - RNA, 19 nt, Homo sapiens
  misc_RNA (1)...(19): siRNA sense strand
ugauucagaucuucaacaa

SEQ ID NO: 2117276 - RNA, 19 nt, Homo sapiens
  misc_RNA (1)...(19): siRNA sense strand
ggagaacggccuuauggau

SEQ ID NO: 2117277 - RNA, 19 nt, Homo sapiens
  misc_RNA (1)...(19): siRNA sense strand
gcgaugugaugcuggagaa

SEQ ID NO: 2117278 - RNA, 19 nt, Homo sapiens
  misc_RNA (1)...(19): siRNA sense strand
ccaaaauucucaucucauu

SEQ ID NO: 2117279 - RNA, 19 nt, Homo sapiens
  misc_RNA (1)...(19): siRNA sense strand
gacugaggauuauaugguu

SEQ ID NO: 2117280 - RNA, 19 nt, Homo sapiens
  misc_RNA (1)...(19): siRNA sense strand
guacaguucagcacucauu

SEQ ID NO: 2117281 - RNA, 19 nt, Homo sapiens
  misc_RNA (1)...(19): siRNA sense strand
ggccuuauguguguaguga

SEQ ID NO: 2117282 - RNA, 19 nt, Homo sapiens
  misc_RNA (1)...(19): siRNA sense strand
cauuaaacaucggagaauu

SEQ ID NO: 2117283 - RNA, 19 nt, Homo sapiens
  misc_RNA (1)...(19): siRNA sense strand
ccacacucauuauucauca

SEQ ID NO: 2117284 - RNA, 19 nt, Homo sapiens
  misc_RNA (1)...(19): siRNA sense strand
cauuagacaucagaaaguu

SEQ ID NO: 2117285 - RNA, 19 nt, Homo sapiens
  misc_RNA (1)...(19): siRNA sense strand
gcugcacacucauuauuca

SEQ ID NO: 2117286 - RNA, 19 nt, Homo sapiens
  misc_RNA (1)...(19): siRNA sense strand
cauuagacaucagaaaguu

SEQ ID NO: 2117287 - RNA, 19 nt, Homo sapiens
  misc_RNA (1)...(19): siRNA sense strand
gggaggccuucguuuguga

SEQ ID NO: 2117288 - RNA, 19 nt, Homo sapiens
  misc_RNA (1)...(19): siRNA sense strand
gcuccacacuugauacaca

SEQ ID NO: 2117289 - RNA, 19 nt, Homo sapiens
  misc_RNA (1)...(19): siRNA sense strand
caaaugugggaaauucuuu

SEQ ID NO: 2117290 - RNA, 19 nt, Homo sapiens
  misc_RNA (1)...(19): siRNA sense strand
uuaaugacguucagagaca

SEQ ID NO: 2117291 - RNA, 19 nt, Homo sapiens
  misc_RNA (1)...(19): siRNA sense strand
gaaaauucauacuggagaa

SEQ ID NO: 2117292 - RNA, 19 nt, Homo sapiens
  misc_RNA (1)...(19): siRNA sense strand
agaaaguucacaccagaua

SEQ ID NO: 2117293 - RNA, 19 nt, Homo sapiens
  misc_RNA (1)...(19): siRNA sense strand
gagaaaucacuuuggagaa

SEQ ID NO: 2117294 - RNA, 19 nt, Homo sapiens
  misc_RNA (1)...(19): siRNA sense strand
ggacacuuccacacucauu

SEQ ID NO: 2117295 - RNA, 19 nt, Homo sapiens
  misc_RNA (1)...(19): siRNA sense strand
gacagcugcacacucauua

SEQ ID NO: 2117296 - RNA, 19 nt, Homo sapiens
  misc_RNA (1)...(19): siRNA sense strand
auucagaucuucaacaaca

SEQ ID NO: 2117297 - RNA, 19 nt, Homo sapiens
  misc_RNA (1)...(19): siRNA sense strand
caacuccagccucauuaaa

SEQ ID NO: 2117298 - RNA, 19 nt, Homo sapiens
  misc_RNA (1)...(19): siRNA sense strand
ggaaauucuuuaggcacaa

SEQ ID NO: 2117299 - RNA, 19 nt, Homo sapiens
  misc_RNA (1)...(19): siRNA sense strand
agagaggccuuaugaaugc

SEQ ID NO: 2117300 - RNA, 19 nt, Homo sapiens
  misc_RNA (1)...(19): siRNA sense strand
caaugaaugugggaaauac

SEQ ID NO: 2117301 - RNA, 19 nt, Homo sapiens
  misc_RNA (1)...(19): siRNA sense strand
acaacaggcucuucacagu

SEQ ID NO: 2117302 - RNA, 19 nt, Homo sapiens
  misc_RNA (1)...(19): siRNA sense strand
gagaguucauacuggagaa

SEQ ID NO: 2117303 - RNA, 19 nt, Homo sapiens
  misc_RNA (1)...(19): siRNA sense strand
cauauuagacaucggagaa

SEQ ID NO: 2117304 - RNA, 19 nt, Homo sapiens
  misc_RNA (1)...(19): siRNA sense strand
ggugaaaggccuuaugagu

SEQ ID NO: 2117305 - RNA, 19 nt, Homo sapiens
  misc_RNA (1)...(19): siRNA sense strand
gagaguucauacuggagaa

SEQ ID NO: 2117306 - RNA, 19 nt, Homo sapiens
  misc_RNA (1)...(19): siRNA sense strand
gagaguucauacuggagaa

SEQ ID NO: 2117307 - RNA, 19 nt, Homo sapiens
  misc_RNA (1)...(19): siRNA sense strand
ccuuauaaguguagugaau

SEQ ID NO: 2117308 - RNA, 19 nt, Homo sapiens
  misc_RNA (1)...(19): siRNA sense strand
gcgaaaucauacuggagaa

SEQ ID NO: 2117309 - RNA, 19 nt, Homo sapiens
  misc_RNA (1)...(19): siRNA sense strand
cagaggaaaggccuuauga

SEQ ID NO: 2117310 - RNA, 19 nt, Homo sapiens
  misc_RNA (1)...(19): siRNA sense strand
guggcaaauuguuuaggua

SEQ ID NO: 2117311 - RNA, 19 nt, Homo sapiens
  misc_RNA (1)...(19): siRNA sense strand
caucagagaguucauacug

SEQ ID NO: 2117312 - RNA, 19 nt, Homo sapiens
  misc_RNA (1)...(19): siRNA sense strand
gaaaguucacacuggagaa

SEQ ID NO: 2117313 - RNA, 19 nt, Homo sapiens
  misc_RNA (1)...(19): siRNA sense strand
gaaaguucacacuggagaa

SEQ ID NO: 2117314 - RNA, 19 nt, Homo sapiens
  misc_RNA (1)...(19): siRNA sense strand
gaaaucauacuggagaaag

SEQ ID NO: 2117315 - RNA, 19 nt, Homo sapiens
  misc_RNA (1)...(19): siRNA sense strand
gugggaaguucuuuaugga

SEQ ID NO: 2117316 - RNA, 19 nt, Homo sapiens
  misc_RNA (1)...(19): siRNA sense strand
gcaaagaaauccuugaaga

SEQ ID NO: 2117317 - RNA, 19 nt, Homo sapiens
  misc_RNA (1)...(19): siRNA sense strand
agucaaagcuccauccuua

SEQ ID NO: 2117318 - RNA, 19 nt, Homo sapiens
  misc_RNA (1)...(19): siRNA sense strand
ggacagagccucauaugug

SEQ ID NO: 2117319 - RNA, 19 nt, Homo sapiens
  misc_RNA (1)...(19): siRNA sense strand
gagaaaggccuuauaagug

SEQ ID NO: 2117320 - RNA, 19 nt, Homo sapiens
  misc_RNA (1)...(19): siRNA sense strand
gggaaauccuuuagucaaa

SEQ ID NO: 2117321 - RNA, 19 nt, Homo sapiens
  misc_RNA (1)...(19): siRNA sense strand
gagaaaggccuuauaagug

SEQ ID NO: 2117322 - RNA, 19 nt, Homo sapiens
  misc_RNA (1)...(19): siRNA sense strand
gggaaauccuuuagucaaa

SEQ ID NO: 2117323 - RNA, 19 nt, Homo sapiens
  misc_RNA (1)...(19): siRNA sense strand
gggaauuccuuuagucaaa

SEQ ID NO: 2117324 - RNA, 19 nt, Homo sapiens
  misc_RNA (1)...(19): siRNA sense strand
ggagaacuuugcccuugua

SEQ ID NO: 2117325 - RNA, 19 nt, Homo sapiens
  misc_RNA (1)...(19): siRNA sense strand
caagaaacccggcacaauu

SEQ ID NO: 2117326 - RNA, 19 nt, Homo sapiens
  misc_RNA (1)...(19): siRNA sense strand
ggacaucgccauuuacuuc

SEQ ID NO: 2117327 - RNA, 19 nt, Homo sapiens
  misc_RNA (1)...(19): siRNA sense strand
ggagaaaggccuuauaagu

SEQ ID NO: 2117328 - RNA, 19 nt, Homo sapiens
  misc_RNA (1)...(19): siRNA sense strand
ggagaaaggccuuauaagu

SEQ ID NO: 2117329 - RNA, 19 nt, Homo sapiens
  misc_RNA (1)...(19): siRNA sense strand
gacagagccucauauguga

SEQ ID NO: 2117330 - RNA, 19 nt, Homo sapiens
  misc_RNA (1)...(19): siRNA sense strand
agaaaggccuuauaagugu

SEQ ID NO: 2117331 - RNA, 19 nt, Homo sapiens
  misc_RNA (1)...(19): siRNA sense strand
agaaaggccuuauaagugu

SEQ ID NO: 2117332 - RNA, 19 nt, Homo sapiens
  misc_RNA (1)...(19): siRNA sense strand
gggaaauccuuuagccaaa

SEQ ID NO: 2117333 - RNA, 19 nt, Homo sapiens
  misc_RNA (1)...(19): siRNA sense strand
caacaccggagaauucaua

SEQ ID NO: 2117334 - RNA, 19 nt, Homo sapiens
  misc_RNA (1)...(19): siRNA sense strand
cagcgaauguggaaaauua

SEQ ID NO: 2117335 - RNA, 19 nt, Homo sapiens
  misc_RNA (1)...(19): siRNA sense strand
gcaaaugggagguuggaaa

SEQ ID NO: 2117336 - RNA, 19 nt, Homo sapiens
  misc_RNA (1)...(19): siRNA sense strand
ggagaaaggccuuaugagu

SEQ ID NO: 2117337 - RNA, 19 nt, Homo sapiens
  misc_RNA (1)...(19): siRNA sense strand
ggagaaaggccuuaugagu

SEQ ID NO: 2117338 - RNA, 19 nt, Homo sapiens
  misc_RNA (1)...(19): siRNA sense strand
aagaaacccggcacaauua

SEQ ID NO: 2117339 - RNA, 19 nt, Homo sapiens
  misc_RNA (1)...(19): siRNA sense strand
ggaaaauucuuuagccaaa

SEQ ID NO: 2117340 - RNA, 19 nt, Homo sapiens
  misc_RNA (1)...(19): siRNA sense strand
ccaagagucuacacuggaa

SEQ ID NO: 2117341 - RNA, 19 nt, Homo sapiens
  misc_RNA (1)...(19): siRNA sense strand
aaagugccauucuuaauca

SEQ ID NO: 2117342 - RNA, 19 nt, Homo sapiens
  misc_RNA (1)...(19): siRNA sense strand
uugaggacaucgccauuua

SEQ ID NO: 2117343 - RNA, 19 nt, Homo sapiens
  misc_RNA (1)...(19): siRNA sense strand
ccaaaagucuggucucauu

SEQ ID NO: 2117344 - RNA, 19 nt, Homo sapiens
  misc_RNA (1)...(19): siRNA sense strand
gcaucacagugcaaagaaa

SEQ ID NO: 2117345 - RNA, 19 nt, Homo sapiens
  misc_RNA (1)...(19): siRNA sense strand
gggaauuccuuuagccaau

SEQ ID NO: 2117346 - RNA, 19 nt, Homo sapiens
  misc_RNA (1)...(19): siRNA sense strand
gcaagaaacccggcacaau

SEQ ID NO: 2117347 - RNA, 19 nt, Homo sapiens
  misc_RNA (1)...(19): siRNA sense strand
ccaaugcuccagccucaua

SEQ ID NO: 2117348 - RNA, 19 nt, Homo sapiens
  misc_RNA (1)...(19): siRNA sense strand
caaagugccauucuuaauc

SEQ ID NO: 2117349 - RNA, 19 nt, Homo sapiens
  misc_RNA (1)...(19): siRNA sense strand
ggaauuccuuuagccaaug

SEQ ID NO: 2117350 - RNA, 19 nt, Homo sapiens
  misc_RNA (1)...(19): siRNA sense strand
ucaaagcuccauccuuauu

SEQ ID NO: 2117351 - RNA, 19 nt, Homo sapiens
  misc_RNA (1)...(19): siRNA sense strand
gcuccagccucauacauca

SEQ ID NO: 2117352 - RNA, 19 nt, Homo sapiens
  misc_RNA (1)...(19): siRNA sense strand
gcagguucauccacacaga

SEQ ID NO: 2117353 - RNA, 19 nt, Homo sapiens
  misc_RNA (1)...(19): siRNA sense strand
gaagugcugccuauucugu

SEQ ID NO: 2117354 - RNA, 19 nt, Homo sapiens
  misc_RNA (1)...(19): siRNA sense strand
aagcuacccucauuaaaca

SEQ ID NO: 2117355 - RNA, 19 nt, Homo sapiens
  misc_RNA (1)...(19): siRNA sense strand
agucaaagugccauucuua

SEQ ID NO: 2117356 - RNA, 19 nt, Homo sapiens
  misc_RNA (1)...(19): siRNA sense strand
gagaauguacaaaccauca

SEQ ID NO: 2117357 - RNA, 19 nt, Homo sapiens
  misc_RNA (1)...(19): siRNA sense strand
caacaaaugugggaauucc

SEQ ID NO: 2117358 - RNA, 19 nt, Homo sapiens
  misc_RNA (1)...(19): siRNA sense strand
aaucaacaccgaagaauuc

SEQ ID NO: 2117359 - RNA, 19 nt, Homo sapiens
  misc_RNA (1)...(19): siRNA sense strand
gugaagugcugccuauucu

SEQ ID NO: 2117360 - RNA, 19 nt, Homo sapiens
  misc_RNA (1)...(19): siRNA sense strand
gaagagggacauggacaga

SEQ ID NO: 2117361 - RNA, 19 nt, Homo sapiens
  misc_RNA (1)...(19): siRNA sense strand
caaagaaauccuugaagag

SEQ ID NO: 2117362 - RNA, 19 nt, Homo sapiens
  misc_RNA (1)...(19): siRNA sense strand
ggaaauccuuuagucaaaa

SEQ ID NO: 2117363 - RNA, 19 nt, Homo sapiens
  misc_RNA (1)...(19): siRNA sense strand
guuacugugucuccagaaa

SEQ ID NO: 2117364 - RNA, 19 nt, Homo sapiens
  misc_RNA (1)...(19): siRNA sense strand
gcaaggccuuaugagugua

SEQ ID NO: 2117365 - RNA, 19 nt, Homo sapiens
  misc_RNA (1)...(19): siRNA sense strand
gggaggacauucgcaguca

SEQ ID NO: 2117366 - RNA, 19 nt, Homo sapiens
  misc_RNA (1)...(19): siRNA sense strand
auacuugguuggagaaugu

SEQ ID NO: 2117367 - RNA, 19 nt, Homo sapiens
  misc_RNA (1)...(19): siRNA sense strand
uaugugaagugcugccuau

SEQ ID NO: 2117368 - RNA, 19 nt, Homo sapiens
  misc_RNA (1)...(19): siRNA sense strand
gaggacauucgcagucaaa

SEQ ID NO: 2117369 - RNA, 19 nt, Homo sapiens
  misc_RNA (1)...(19): siRNA sense strand
ggagcaaggccuuaugagu

SEQ ID NO: 2117370 - RNA, 19 nt, Homo sapiens
  misc_RNA (1)...(19): siRNA sense strand
ucaaagugccauucuuaau

SEQ ID NO: 2117371 - RNA, 19 nt, Homo sapiens
  misc_RNA (1)...(19): siRNA sense strand
uuauaaguguggugaaugu

SEQ ID NO: 2117372 - RNA, 19 nt, Homo sapiens
  misc_RNA (1)...(19): siRNA sense strand
ggagcaaggccuuaugagu

SEQ ID NO: 2117373 - RNA, 19 nt, Homo sapiens
  misc_RNA (1)...(19): siRNA sense strand
guaggagugucacagucaa

SEQ ID NO: 2117374 - RNA, 19 nt, Homo sapiens
  misc_RNA (1)...(19): siRNA sense strand
ggaaauccuuuagccaaaa

SEQ ID NO: 2117375 - RNA, 19 nt, Homo sapiens
  misc_RNA (1)...(19): siRNA sense strand
ccaaaccucccaccugaau

SEQ ID NO: 2117376 - RNA, 19 nt, Homo sapiens
  misc_RNA (1)...(19): siRNA sense strand
ccacacagaagacucaauc

SEQ ID NO: 2117377 - RNA, 19 nt, Homo sapiens
  misc_RNA (1)...(19): siRNA sense strand
caacaccgaagaauucaca

SEQ ID NO: 2117378 - RNA, 19 nt, Homo sapiens
  misc_RNA (1)...(19): siRNA sense strand
guuaaacaccaaagaguuc

SEQ ID NO: 2117379 - RNA, 19 nt, Homo sapiens
  misc_RNA (1)...(19): siRNA sense strand
gagaauccacaccggagaa

SEQ ID NO: 2117380 - RNA, 19 nt, Homo sapiens
  misc_RNA (1)...(19): siRNA sense strand
aaaccucccaccugaauga

SEQ ID NO: 2117381 - RNA, 19 nt, Homo sapiens
  misc_RNA (1)...(19): siRNA sense strand
uuacaagucaggugaaugu

SEQ ID NO: 2117382 - RNA, 19 nt, Homo sapiens
  misc_RNA (1)...(19): siRNA sense strand
ggaggacauucgcagucaa

SEQ ID NO: 2117383 - RNA, 19 nt, Homo sapiens
  misc_RNA (1)...(19): siRNA sense strand
uugaagcccuuucgcaaau

SEQ ID NO: 2117384 - RNA, 19 nt, Homo sapiens
  misc_RNA (1)...(19): siRNA sense strand
gugcaaagaaauccuugaa

SEQ ID NO: 2117385 - RNA, 19 nt, Homo sapiens
  misc_RNA (1)...(19): siRNA sense strand
caaaugugggaauuccuuu

SEQ ID NO: 2117386 - RNA, 19 nt, Homo sapiens
  misc_RNA (1)...(19): siRNA sense strand
gcuccauccuuauucaaca

SEQ ID NO: 2117387 - RNA, 19 nt, Homo sapiens
  misc_RNA (1)...(19): siRNA sense strand
aaagcuccauccuuauuca

SEQ ID NO: 2117388 - RNA, 19 nt, Homo sapiens
  misc_RNA (1)...(19): siRNA sense strand
gaagcccuuucgcaaaugg

SEQ ID NO: 2117389 - RNA, 19 nt, Homo sapiens
  misc_RNA (1)...(19): siRNA sense strand
caaaugggagguuggaaag

SEQ ID NO: 2117390 - RNA, 19 nt, Homo sapiens
  misc_RNA (1)...(19): siRNA sense strand
ccucccaccugaaugauca

SEQ ID NO: 2117391 - RNA, 19 nt, Homo sapiens
  misc_RNA (1)...(19): siRNA sense strand
uaaucaacaccgaagaauu

SEQ ID NO: 2117392 - RNA, 19 nt, Homo sapiens
  misc_RNA (1)...(19): siRNA sense strand
ucccaguccugaaagauau

SEQ ID NO: 2117393 - RNA, 19 nt, Homo sapiens
  misc_RNA (1)...(19): siRNA sense strand
caaagcuccauccuuauuc

SEQ ID NO: 2117394 - RNA, 19 nt, Homo sapiens
  misc_RNA (1)...(19): siRNA sense strand
agcaaagccuuaugagugu

SEQ ID NO: 2117395 - RNA, 19 nt, Homo sapiens
  misc_RNA (1)...(19): siRNA sense strand
ggagcaaagccuuaugagu

SEQ ID NO: 2117396 - RNA, 19 nt, Homo sapiens
  misc_RNA (1)...(19): siRNA sense strand
gucaaagugccauucuuaa

SEQ ID NO: 2117397 - RNA, 19 nt, Homo sapiens
  misc_RNA (1)...(19): siRNA sense strand
ggaccuuccagccauguug

SEQ ID NO: 2117398 - RNA, 19 nt, Homo sapiens
  misc_RNA (1)...(19): siRNA sense strand
cuggagaaaggccuuauaa

SEQ ID NO: 2117399 - RNA, 19 nt, Homo sapiens
  misc_RNA (1)...(19): siRNA sense strand
agagacuccuguaccuuga

SEQ ID NO: 2117400 - RNA, 19 nt, Homo sapiens
  misc_RNA (1)...(19): siRNA sense strand
cuggagaaaggccuuauaa

SEQ ID NO: 2117401 - RNA, 19 nt, Homo sapiens
  misc_RNA (1)...(19): siRNA sense strand
cggcacaauuacugaaugu

SEQ ID NO: 2117402 - RNA, 19 nt, Homo sapiens
  misc_RNA (1)...(19): siRNA sense strand
ccggagaaaggccuuauga

SEQ ID NO: 2117403 - RNA, 19 nt, Homo sapiens
  misc_RNA (1)...(19): siRNA sense strand
acacuggagcaaagccuua

SEQ ID NO: 2117404 - RNA, 19 nt, Homo sapiens
  misc_RNA (1)...(19): siRNA sense strand
gaauucacacuggagcaaa

SEQ ID NO: 2117405 - RNA, 19 nt, Homo sapiens
  misc_RNA (1)...(19): siRNA sense strand
gucccaguccugaaagaua

SEQ ID NO: 2117406 - RNA, 19 nt, Homo sapiens
  misc_RNA (1)...(19): siRNA sense strand
agucuggucucauucaaca

SEQ ID NO: 2117407 - RNA, 19 nt, Homo sapiens
  misc_RNA (1)...(19): siRNA sense strand
agcaaggccuuaugagugu

SEQ ID NO: 2117408 - RNA, 19 nt, Homo sapiens
  misc_RNA (1)...(19): siRNA sense strand
uuauaaguguggugacugu

SEQ ID NO: 2117409 - RNA, 19 nt, Homo sapiens
  misc_RNA (1)...(19): siRNA sense strand
agcaaggccuuaugagugu

SEQ ID NO: 2117410 - RNA, 19 nt, Homo sapiens
  misc_RNA (1)...(19): siRNA sense strand
gaaugaucaucggagaauc

SEQ ID NO: 2117411 - RNA, 19 nt, Homo sapiens
  misc_RNA (1)...(19): siRNA sense strand
aaugggagguuggaaagga

SEQ ID NO: 2117412 - RNA, 19 nt, Homo sapiens
  misc_RNA (1)...(19): siRNA sense strand
aaagcuacccucauuaaac

SEQ ID NO: 2117413 - RNA, 19 nt, Homo sapiens
  misc_RNA (1)...(19): siRNA sense strand
aaaugugggaauuccuuua

SEQ ID NO: 2117414 - RNA, 19 nt, Homo sapiens
  misc_RNA (1)...(19): siRNA sense strand
gcaacaaaugugggaauuc

SEQ ID NO: 2117415 - RNA, 19 nt, Homo sapiens
  misc_RNA (1)...(19): siRNA sense strand
ccuuaugagugcaacaaau

SEQ ID NO: 2117416 - RNA, 19 nt, Homo sapiens
  misc_RNA (1)...(19): siRNA sense strand
gcaaagcucuagucucauu

SEQ ID NO: 2117417 - RNA, 19 nt, Homo sapiens
  misc_RNA (1)...(19): siRNA sense strand
caacaagucuaaccucauu

SEQ ID NO: 2117418 - RNA, 19 nt, Homo sapiens
  misc_RNA (1)...(19): siRNA sense strand
ggaaauccuuuagccauaa

SEQ ID NO: 2117419 - RNA, 19 nt, Homo sapiens
  misc_RNA (1)...(19): siRNA sense strand
gggaaauccuuuagccaua

SEQ ID NO: 2117420 - RNA, 19 nt, Homo sapiens
  misc_RNA (1)...(19): siRNA sense strand
gagaaaggccuuauaagug

SEQ ID NO: 2117421 - RNA, 19 nt, Homo sapiens
  misc_RNA (1)...(19): siRNA sense strand
gggaaauccuuuacucaaa

SEQ ID NO: 2117422 - RNA, 19 nt, Homo sapiens
  misc_RNA (1)...(19): siRNA sense strand
ggagaaaggccuuauaagu

SEQ ID NO: 2117423 - RNA, 19 nt, Homo sapiens
  misc_RNA (1)...(19): siRNA sense strand
gagaauucauagucgauaa

SEQ ID NO: 2117424 - RNA, 19 nt, Homo sapiens
  misc_RNA (1)...(19): siRNA sense strand
gcagagaaguugggaagga

SEQ ID NO: 2117425 - RNA, 19 nt, Homo sapiens
  misc_RNA (1)...(19): siRNA sense strand
gggaaauccuuuagccaaa

SEQ ID NO: 2117426 - RNA, 19 nt, Homo sapiens
  misc_RNA (1)...(19): siRNA sense strand
gggaaauccuuuagccaaa

SEQ ID NO: 2117427 - RNA, 19 nt, Homo sapiens
  misc_RNA (1)...(19): siRNA sense strand
aggcaaagcucuagucuca

SEQ ID NO: 2117428 - RNA, 19 nt, Homo sapiens
  misc_RNA (1)...(19): siRNA sense strand
agccauaacuccagccuua

SEQ ID NO: 2117429 - RNA, 19 nt, Homo sapiens
  misc_RNA (1)...(19): siRNA sense strand
gggaaguccuuuaggcaaa

SEQ ID NO: 2117430 - RNA, 19 nt, Homo sapiens
  misc_RNA (1)...(19): siRNA sense strand
ggcagagccuuguuuguga

SEQ ID NO: 2117431 - RNA, 19 nt, Homo sapiens
  misc_RNA (1)...(19): siRNA sense strand
gcagagccuuguuugugaa

SEQ ID NO: 2117432 - RNA, 19 nt, Homo sapiens
  misc_RNA (1)...(19): siRNA sense strand
ggaaauccuuuacucaaaa

SEQ ID NO: 2117433 - RNA, 19 nt, Homo sapiens
  misc_RNA (1)...(19): siRNA sense strand
gagaaaagccuuaugaaug

SEQ ID NO: 2117434 - RNA, 19 nt, Homo sapiens
  misc_RNA (1)...(19): siRNA sense strand
gcagagaacccucacuaca

SEQ ID NO: 2117435 - RNA, 19 nt, Homo sapiens
  misc_RNA (1)...(19): siRNA sense strand
gaaugugggaaauccuuua

SEQ ID NO: 2117436 - RNA, 19 nt, Homo sapiens
  misc_RNA (1)...(19): siRNA sense strand
gaaugugggaaauccuuua

SEQ ID NO: 2117437 - RNA, 19 nt, Homo sapiens
  misc_RNA (1)...(19): siRNA sense strand
gaaugugggaaauccuuua

SEQ ID NO: 2117438 - RNA, 19 nt, Homo sapiens
  misc_RNA (1)...(19): siRNA sense strand
gaaugugggaaauccuuua

SEQ ID NO: 2117439 - RNA, 19 nt, Homo sapiens
  misc_RNA (1)...(19): siRNA sense strand
gaaugugggaaauccuuua

SEQ ID NO: 2117440 - RNA, 19 nt, Homo sapiens
  misc_RNA (1)...(19): siRNA sense strand
agagaacccucacuacaga

SEQ ID NO: 2117441 - RNA, 19 nt, Homo sapiens
  misc_RNA (1)...(19): siRNA sense strand
agucuaaccucauuaaaca

SEQ ID NO: 2117442 - RNA, 19 nt, Homo sapiens
  misc_RNA (1)...(19): siRNA sense strand
ggucugcacuccuucaaca

SEQ ID NO: 2117443 - RNA, 19 nt, Homo sapiens
  misc_RNA (1)...(19): siRNA sense strand
gggaagucauuuagccaaa

SEQ ID NO: 2117444 - RNA, 19 nt, Homo sapiens
  misc_RNA (1)...(19): siRNA sense strand
ggucugcacuccuucaaca

SEQ ID NO: 2117445 - RNA, 19 nt, Homo sapiens
  misc_RNA (1)...(19): siRNA sense strand
gcacugugaccuuugaaga

SEQ ID NO: 2117446 - RNA, 19 nt, Homo sapiens
  misc_RNA (1)...(19): siRNA sense strand
gcaguacgaccucaugaau

SEQ ID NO: 2117447 - RNA, 19 nt, Homo sapiens
  misc_RNA (1)...(19): siRNA sense strand
cuggagaacuuggcucuuu

SEQ ID NO: 2117448 - RNA, 19 nt, Homo sapiens
  misc_RNA (1)...(19): siRNA sense strand
gaacuuggcucuuuuaacc

SEQ ID NO: 2117449 - RNA, 19 nt, Homo sapiens
  misc_RNA (1)...(19): siRNA sense strand
cagcagagaacccucacua

SEQ ID NO: 2117450 - RNA, 19 nt, Homo sapiens
  misc_RNA (1)...(19): siRNA sense strand
uaaccucucuagauguuca

SEQ ID NO: 2117451 - RNA, 19 nt, Homo sapiens
  misc_RNA (1)...(19): siRNA sense strand
gggcagagccuuguuugug

SEQ ID NO: 2117452 - RNA, 19 nt, Homo sapiens
  misc_RNA (1)...(19): siRNA sense strand
ccauaugagugcagugaau

SEQ ID NO: 2117453 - RNA, 19 nt, Homo sapiens
  misc_RNA (1)...(19): siRNA sense strand
agaaaagccuuaugaaugu

SEQ ID NO: 2117454 - RNA, 19 nt, Homo sapiens
  misc_RNA (1)...(19): siRNA sense strand
caucagagaauucauaguc

SEQ ID NO: 2117455 - RNA, 19 nt, Homo sapiens
  misc_RNA (1)...(19): siRNA sense strand
ccaaaacucuagccucauu

SEQ ID NO: 2117456 - RNA, 19 nt, Homo sapiens
  misc_RNA (1)...(19): siRNA sense strand
ggagcaaucaaauagcaaa

SEQ ID NO: 2117457 - RNA, 19 nt, Homo sapiens
  misc_RNA (1)...(19): siRNA sense strand
uaacuccagccuuauuaaa

SEQ ID NO: 2117458 - RNA, 19 nt, Homo sapiens
  misc_RNA (1)...(19): siRNA sense strand
gggaaauccuuuagcaaaa

SEQ ID NO: 2117459 - RNA, 19 nt, Homo sapiens
  misc_RNA (1)...(19): siRNA sense strand
gugaagaccugcacauucc

SEQ ID NO: 2117460 - RNA, 19 nt, Homo sapiens
  misc_RNA (1)...(19): siRNA sense strand
ucagggcacugugaccuuu

SEQ ID NO: 2117461 - RNA, 19 nt, Homo sapiens
  misc_RNA (1)...(19): siRNA sense strand
aguacgaccucaugaaugu

SEQ ID NO: 2117462 - RNA, 19 nt, Homo sapiens
  misc_RNA (1)...(19): siRNA sense strand
uaucauuccagucucauaa

SEQ ID NO: 2117463 - RNA, 19 nt, Homo sapiens
  misc_RNA (1)...(19): siRNA sense strand
ggaaugugggaaauccuuu

SEQ ID NO: 2117464 - RNA, 19 nt, Homo sapiens
  misc_RNA (1)...(19): siRNA sense strand
caaaauuccggccucauua

SEQ ID NO: 2117465 - RNA, 19 nt, Homo sapiens
  misc_RNA (1)...(19): siRNA sense strand
gaagcagcaccuuggagaa

SEQ ID NO: 2117466 - RNA, 19 nt, Homo sapiens
  misc_RNA (1)...(19): siRNA sense strand
cagugaaugugggaaguuu

SEQ ID NO: 2117467 - RNA, 19 nt, Homo sapiens
  misc_RNA (1)...(19): siRNA sense strand
gugaugugaugcuggagaa

SEQ ID NO: 2117468 - RNA, 19 nt, Homo sapiens
  misc_RNA (1)...(19): siRNA sense strand
ugggaaauccuuuagcaaa

SEQ ID NO: 2117469 - RNA, 19 nt, Homo sapiens
  misc_RNA (1)...(19): siRNA sense strand
gcauucagcgguaaacaca

SEQ ID NO: 2117470 - RNA, 19 nt, Homo sapiens
  misc_RNA (1)...(19): siRNA sense strand
gaaauccuuuagccauaac

SEQ ID NO: 2117471 - RNA, 19 nt, Homo sapiens
  misc_RNA (1)...(19): siRNA sense strand
cagcgaaugugggaaguca

SEQ ID NO: 2117472 - RNA, 19 nt, Homo sapiens
  misc_RNA (1)...(19): siRNA sense strand
cauuaaacaucggagaguu

SEQ ID NO: 2117473 - RNA, 19 nt, Homo sapiens
  misc_RNA (1)...(19): siRNA sense strand
ucaacaggcugcucacacu

SEQ ID NO: 2117474 - RNA, 19 nt, Homo sapiens
  misc_RNA (1)...(19): siRNA sense strand
uuuaaccucucuagauguu

SEQ ID NO: 2117475 - RNA, 19 nt, Homo sapiens
  misc_RNA (1)...(19): siRNA sense strand
acaagucuaaccucauuaa

SEQ ID NO: 2117476 - RNA, 19 nt, Homo sapiens
  misc_RNA (1)...(19): siRNA sense strand
ggaauggggucuccuugau

SEQ ID NO: 2117477 - RNA, 19 nt, Homo sapiens
  misc_RNA (1)...(19): siRNA sense strand
uuacauaucauuccagucu

SEQ ID NO: 2117478 - RNA, 19 nt, Homo sapiens
  misc_RNA (1)...(19): siRNA sense strand
aaagcuacagucucaauga

SEQ ID NO: 2117479 - RNA, 19 nt, Homo sapiens
  misc_RNA (1)...(19): siRNA sense strand
ggagaaaagccuuaugaau

SEQ ID NO: 2117480 - RNA, 19 nt, Homo sapiens
  misc_RNA (1)...(19): siRNA sense strand
uuaugaaugucgagagugu

SEQ ID NO: 2117481 - RNA, 19 nt, Homo sapiens
  misc_RNA (1)...(19): siRNA sense strand
ggaucaagacccuaugagu

SEQ ID NO: 2117482 - RNA, 19 nt, Homo sapiens
  misc_RNA (1)...(19): siRNA sense strand
cuggagaaaggccuuauaa

SEQ ID NO: 2117483 - RNA, 19 nt, Homo sapiens
  misc_RNA (1)...(19): siRNA sense strand
guugggauuucuccaucaa

SEQ ID NO: 2117484 - RNA, 19 nt, Homo sapiens
  misc_RNA (1)...(19): siRNA sense strand
ccuuauaagugcagcgaau

SEQ ID NO: 2117485 - RNA, 19 nt, Homo sapiens
  misc_RNA (1)...(19): siRNA sense strand
ggagaacuuggcucuuuua

SEQ ID NO: 2117486 - RNA, 19 nt, Homo sapiens
  misc_RNA (1)...(19): siRNA sense strand
acucuagccucauugaaca

SEQ ID NO: 2117487 - RNA, 19 nt, Homo sapiens
  misc_RNA (1)...(19): siRNA sense strand
ggaagucauuuagccaaaa

SEQ ID NO: 2117488 - RNA, 19 nt, Homo sapiens
  misc_RNA (1)...(19): siRNA sense strand
gcaacaagucuaaccucau

SEQ ID NO: 2117489 - RNA, 19 nt, Homo sapiens
  misc_RNA (1)...(19): siRNA sense strand
gagaguucacacugcagua

SEQ ID NO: 2117490 - RNA, 19 nt, Homo sapiens
  misc_RNA (1)...(19): siRNA sense strand
gagugugggaaguccuuua

SEQ ID NO: 2117491 - RNA, 19 nt, Homo sapiens
  misc_RNA (1)...(19): siRNA sense strand
caaaagcauucagcgguaa

SEQ ID NO: 2117492 - RNA, 19 nt, Homo sapiens
  misc_RNA (1)...(19): siRNA sense strand
acuccagccuuauuaaaca

SEQ ID NO: 2117493 - RNA, 19 nt, Homo sapiens
  misc_RNA (1)...(19): siRNA sense strand
caagucuaaccucauuaaa

SEQ ID NO: 2117494 - RNA, 19 nt, Homo sapiens
  misc_RNA (1)...(19): siRNA sense strand
ucacuacagaaagauguua

SEQ ID NO: 2117495 - RNA, 19 nt, Homo sapiens
  misc_RNA (1)...(19): siRNA sense strand
gcagugaaugugggaaguu

SEQ ID NO: 2117496 - RNA, 19 nt, Homo sapiens
  misc_RNA (1)...(19): siRNA sense strand
gcagugaaugugggaaguu

SEQ ID NO: 2117497 - RNA, 19 nt, Homo sapiens
  misc_RNA (1)...(19): siRNA sense strand
gugcagcgaaugugggaaa

SEQ ID NO: 2117498 - RNA, 19 nt, Homo sapiens
  misc_RNA (1)...(19): siRNA sense strand
acauaucauuccagucuca

SEQ ID NO: 2117499 - RNA, 19 nt, Homo sapiens
  misc_RNA (1)...(19): siRNA sense strand
gcgguaaacacacacuugu

SEQ ID NO: 2117500 - RNA, 19 nt, Homo sapiens
  misc_RNA (1)...(19): siRNA sense strand
gaaugugggaaguucuuuc

SEQ ID NO: 2117501 - RNA, 19 nt, Homo sapiens
  misc_RNA (1)...(19): siRNA sense strand
ugugggaaauccuuuagca

SEQ ID NO: 2117502 - RNA, 19 nt, Homo sapiens
  misc_RNA (1)...(19): siRNA sense strand
cagagaacccucacuacag

SEQ ID NO: 2117503 - RNA, 19 nt, Homo sapiens
  misc_RNA (1)...(19): siRNA sense strand
acugugaccuuugaagaug

SEQ ID NO: 2117504 - RNA, 19 nt, Homo sapiens
  misc_RNA (1)...(19): siRNA sense strand
gcacggaaugugggaaauc

SEQ ID NO: 2117505 - RNA, 19 nt, Homo sapiens
  misc_RNA (1)...(19): siRNA sense strand
gcacaggaggguucacacu

SEQ ID NO: 2117506 - RNA, 19 nt, Homo sapiens
  misc_RNA (1)...(19): siRNA sense strand
ccuuaugagugcagugaau

SEQ ID NO: 2117507 - RNA, 19 nt, Homo sapiens
  misc_RNA (1)...(19): siRNA sense strand
gcgaaugugggaaauccuu

SEQ ID NO: 2117508 - RNA, 19 nt, Homo sapiens
  misc_RNA (1)...(19): siRNA sense strand
ccuuaugagugcagugaau

SEQ ID NO: 2117509 - RNA, 19 nt, Homo sapiens
  misc_RNA (1)...(19): siRNA sense strand
ccuguaccgugaugugaug

SEQ ID NO: 2117510 - RNA, 19 nt, Homo sapiens
  misc_RNA (1)...(19): siRNA sense strand
uguuacauaugcagugaau

SEQ ID NO: 2117511 - RNA, 19 nt, Homo sapiens
  misc_RNA (1)...(19): siRNA sense strand
ugggaaauccuuuacucaa

SEQ ID NO: 2117512 - RNA, 19 nt, Homo sapiens
  misc_RNA (1)...(19): siRNA sense strand
cgaaugugggaaauccuuu

SEQ ID NO: 2117513 - RNA, 19 nt, Homo sapiens
  misc_RNA (1)...(19): siRNA sense strand
aagcagcaccuuggagaaa

SEQ ID NO: 2117514 - RNA, 19 nt, Homo sapiens
  misc_RNA (1)...(19): siRNA sense strand
uuacaacuguggagaacac

SEQ ID NO: 2117515 - RNA, 19 nt, Homo sapiens
  misc_RNA (1)...(19): siRNA sense strand
ugggauuucuccaucaaca

SEQ ID NO: 2117516 - RNA, 19 nt, Homo sapiens
  misc_RNA (1)...(19): siRNA sense strand
gcaaagcucuagucucauu

SEQ ID NO: 2117517 - RNA, 19 nt, Homo sapiens
  misc_RNA (1)...(19): siRNA sense strand
caacaagucuaaccucauu

SEQ ID NO: 2117518 - RNA, 19 nt, Homo sapiens
  misc_RNA (1)...(19): siRNA sense strand
ggaaauccuuuagccauaa

SEQ ID NO: 2117519 - RNA, 19 nt, Homo sapiens
  misc_RNA (1)...(19): siRNA sense strand
gggaaauccuuuagccaua

SEQ ID NO: 2117520 - RNA, 19 nt, Homo sapiens
  misc_RNA (1)...(19): siRNA sense strand
gagaaaggccuuauaagug

SEQ ID NO: 2117521 - RNA, 19 nt, Homo sapiens
  misc_RNA (1)...(19): siRNA sense strand
gggaaauccuuuacucaaa

SEQ ID NO: 2117522 - RNA, 19 nt, Homo sapiens
  misc_RNA (1)...(19): siRNA sense strand
ggagaaaggccuuauaagu

SEQ ID NO: 2117523 - RNA, 19 nt, Homo sapiens
  misc_RNA (1)...(19): siRNA sense strand
gagaauucauagucgauaa

SEQ ID NO: 2117524 - RNA, 19 nt, Homo sapiens
  misc_RNA (1)...(19): siRNA sense strand
gcagagaaguugggaagga

SEQ ID NO: 2117525 - RNA, 19 nt, Homo sapiens
  misc_RNA (1)...(19): siRNA sense strand
gggaaauccuuuagccaaa

SEQ ID NO: 2117526 - RNA, 19 nt, Homo sapiens
  misc_RNA (1)...(19): siRNA sense strand
gggaaauccuuuagccaaa

SEQ ID NO: 2117527 - RNA, 19 nt, Homo sapiens
  misc_RNA (1)...(19): siRNA sense strand
aggcaaagcucuagucuca

SEQ ID NO: 2117528 - RNA, 19 nt, Homo sapiens
  misc_RNA (1)...(19): siRNA sense strand
agccauaacuccagccuua

SEQ ID NO: 2117529 - RNA, 19 nt, Homo sapiens
  misc_RNA (1)...(19): siRNA sense strand
gggaaguccuuuaggcaaa

SEQ ID NO: 2117530 - RNA, 19 nt, Homo sapiens
  misc_RNA (1)...(19): siRNA sense strand
ggcagagccuuguuuguga

SEQ ID NO: 2117531 - RNA, 19 nt, Homo sapiens
  misc_RNA (1)...(19): siRNA sense strand
gcagagccuuguuugugaa

SEQ ID NO: 2117532 - RNA, 19 nt, Homo sapiens
  misc_RNA (1)...(19): siRNA sense strand
ggaaauccuuuacucaaaa

SEQ ID NO: 2117533 - RNA, 19 nt, Homo sapiens
  misc_RNA (1)...(19): siRNA sense strand
gagaaaagccuuaugaaug

SEQ ID NO: 2117534 - RNA, 19 nt, Homo sapiens
  misc_RNA (1)...(19): siRNA sense strand
gcagagaacccucacuaca

SEQ ID NO: 2117535 - RNA, 19 nt, Homo sapiens
  misc_RNA (1)...(19): siRNA sense strand
gaaugugggaaauccuuua

SEQ ID NO: 2117536 - RNA, 19 nt, Homo sapiens
  misc_RNA (1)...(19): siRNA sense strand
gaaugugggaaauccuuua

SEQ ID NO: 2117537 - RNA, 19 nt, Homo sapiens
  misc_RNA (1)...(19): siRNA sense strand
gaaugugggaaauccuuua

SEQ ID NO: 2117538 - RNA, 19 nt, Homo sapiens
  misc_RNA (1)...(19): siRNA sense strand
gaaugugggaaauccuuua

SEQ ID NO: 2117539 - RNA, 19 nt, Homo sapiens
  misc_RNA (1)...(19): siRNA sense strand
gaaugugggaaauccuuua

SEQ ID NO: 2117540 - RNA, 19 nt, Homo sapiens
  misc_RNA (1)...(19): siRNA sense strand
agagaacccucacuacaga

SEQ ID NO: 2117541 - RNA, 19 nt, Homo sapiens
  misc_RNA (1)...(19): siRNA sense strand
agucuaaccucauuaaaca

SEQ ID NO: 2117542 - RNA, 19 nt, Homo sapiens
  misc_RNA (1)...(19): siRNA sense strand
ggucugcacuccuucaaca

SEQ ID NO: 2117543 - RNA, 19 nt, Homo sapiens
  misc_RNA (1)...(19): siRNA sense strand
gggaagucauuuagccaaa

SEQ ID NO: 2117544 - RNA, 19 nt, Homo sapiens
  misc_RNA (1)...(19): siRNA sense strand
ggucugcacuccuucaaca

SEQ ID NO: 2117545 - RNA, 19 nt, Homo sapiens
  misc_RNA (1)...(19): siRNA sense strand
gcacugugaccuuugaaga

SEQ ID NO: 2117546 - RNA, 19 nt, Homo sapiens
  misc_RNA (1)...(19): siRNA sense strand
gcaguacgaccucaugaau

SEQ ID NO: 2117547 - RNA, 19 nt, Homo sapiens
  misc_RNA (1)...(19): siRNA sense strand
cuggagaacuuggcucuuu

SEQ ID NO: 2117548 - RNA, 19 nt, Homo sapiens
  misc_RNA (1)...(19): siRNA sense strand
gaacuuggcucuuuuaacc

SEQ ID NO: 2117549 - RNA, 19 nt, Homo sapiens
  misc_RNA (1)...(19): siRNA sense strand
cagcagagaacccucacua

SEQ ID NO: 2117550 - RNA, 19 nt, Homo sapiens
  misc_RNA (1)...(19): siRNA sense strand
uaaccucucuagauguuca

SEQ ID NO: 2117551 - RNA, 19 nt, Homo sapiens
  misc_RNA (1)...(19): siRNA sense strand
gggcagagccuuguuugug

SEQ ID NO: 2117552 - RNA, 19 nt, Homo sapiens
  misc_RNA (1)...(19): siRNA sense strand
ccauaugagugcagugaau

SEQ ID NO: 2117553 - RNA, 19 nt, Homo sapiens
  misc_RNA (1)...(19): siRNA sense strand
agaaaagccuuaugaaugu

SEQ ID NO: 2117554 - RNA, 19 nt, Homo sapiens
  misc_RNA (1)...(19): siRNA sense strand
caucagagaauucauaguc

SEQ ID NO: 2117555 - RNA, 19 nt, Homo sapiens
  misc_RNA (1)...(19): siRNA sense strand
ccaaaacucuagccucauu

SEQ ID NO: 2117556 - RNA, 19 nt, Homo sapiens
  misc_RNA (1)...(19): siRNA sense strand
ggagcaaucaaauagcaaa

SEQ ID NO: 2117557 - RNA, 19 nt, Homo sapiens
  misc_RNA (1)...(19): siRNA sense strand
uaacuccagccuuauuaaa

SEQ ID NO: 2117558 - RNA, 19 nt, Homo sapiens
  misc_RNA (1)...(19): siRNA sense strand
gggaaauccuuuagcaaaa

SEQ ID NO: 2117559 - RNA, 19 nt, Homo sapiens
  misc_RNA (1)...(19): siRNA sense strand
gugaagaccugcacauucc

SEQ ID NO: 2117560 - RNA, 19 nt, Homo sapiens
  misc_RNA (1)...(19): siRNA sense strand
ucagggcacugugaccuuu

SEQ ID NO: 2117561 - RNA, 19 nt, Homo sapiens
  misc_RNA (1)...(19): siRNA sense strand
aguacgaccucaugaaugu

SEQ ID NO: 2117562 - RNA, 19 nt, Homo sapiens
  misc_RNA (1)...(19): siRNA sense strand
uaucauuccagucucauaa

SEQ ID NO: 2117563 - RNA, 19 nt, Homo sapiens
  misc_RNA (1)...(19): siRNA sense strand
ggaaugugggaaauccuuu

SEQ ID NO: 2117564 - RNA, 19 nt, Homo sapiens
  misc_RNA (1)...(19): siRNA sense strand
caaaauuccggccucauua

SEQ ID NO: 2117565 - RNA, 19 nt, Homo sapiens
  misc_RNA (1)...(19): siRNA sense strand
gaagcagcaccuuggagaa

SEQ ID NO: 2117566 - RNA, 19 nt, Homo sapiens
  misc_RNA (1)...(19): siRNA sense strand
cagugaaugugggaaguuu

SEQ ID NO: 2117567 - RNA, 19 nt, Homo sapiens
  misc_RNA (1)...(19): siRNA sense strand
gugaugugaugcuggagaa

SEQ ID NO: 2117568 - RNA, 19 nt, Homo sapiens
  misc_RNA (1)...(19): siRNA sense strand
ugggaaauccuuuagcaaa

SEQ ID NO: 2117569 - RNA, 19 nt, Homo sapiens
  misc_RNA (1)...(19): siRNA sense strand
gcauucagcgguaaacaca

SEQ ID NO: 2117570 - RNA, 19 nt, Homo sapiens
  misc_RNA (1)...(19): siRNA sense strand
gaaauccuuuagccauaac

SEQ ID NO: 2117571 - RNA, 19 nt, Homo sapiens
  misc_RNA (1)...(19): siRNA sense strand
cagcgaaugugggaaguca

SEQ ID NO: 2117572 - RNA, 19 nt, Homo sapiens
  misc_RNA (1)...(19): siRNA sense strand
cauuaaacaucggagaguu

SEQ ID NO: 2117573 - RNA, 19 nt, Homo sapiens
  misc_RNA (1)...(19): siRNA sense strand
ucaacaggcugcucacacu

SEQ ID NO: 2117574 - RNA, 19 nt, Homo sapiens
  misc_RNA (1)...(19): siRNA sense strand
uuuaaccucucuagauguu

SEQ ID NO: 2117575 - RNA, 19 nt, Homo sapiens
  misc_RNA (1)...(19): siRNA sense strand
acaagucuaaccucauuaa

SEQ ID NO: 2117576 - RNA, 19 nt, Homo sapiens
  misc_RNA (1)...(19): siRNA sense strand
ggaauggggucuccuugau

SEQ ID NO: 2117577 - RNA, 19 nt, Homo sapiens
  misc_RNA (1)...(19): siRNA sense strand
uuacauaucauuccagucu

SEQ ID NO: 2117578 - RNA, 19 nt, Homo sapiens
  misc_RNA (1)...(19): siRNA sense strand
aaagcuacagucucaauga

SEQ ID NO: 2117579 - RNA, 19 nt, Homo sapiens
  misc_RNA (1)...(19): siRNA sense strand
ggagaaaagccuuaugaau

SEQ ID NO: 2117580 - RNA, 19 nt, Homo sapiens
  misc_RNA (1)...(19): siRNA sense strand
uuaugaaugucgagagugu

SEQ ID NO: 2117581 - RNA, 19 nt, Homo sapiens
  misc_RNA (1)...(19): siRNA sense strand
ggaucaagacccuaugagu

SEQ ID NO: 2117582 - RNA, 19 nt, Homo sapiens
  misc_RNA (1)...(19): siRNA sense strand
cuggagaaaggccuuauaa

SEQ ID NO: 2117583 - RNA, 19 nt, Homo sapiens
  misc_RNA (1)...(19): siRNA sense strand
guugggauuucuccaucaa

SEQ ID NO: 2117584 - RNA, 19 nt, Homo sapiens
  misc_RNA (1)...(19): siRNA sense strand
ccuuauaagugcagcgaau

SEQ ID NO: 2117585 - RNA, 19 nt, Homo sapiens
  misc_RNA (1)...(19): siRNA sense strand
ggagaacuuggcucuuuua

SEQ ID NO: 2117586 - RNA, 19 nt, Homo sapiens
  misc_RNA (1)...(19): siRNA sense strand
acucuagccucauugaaca

SEQ ID NO: 2117587 - RNA, 19 nt, Homo sapiens
  misc_RNA (1)...(19): siRNA sense strand
ggaagucauuuagccaaaa

SEQ ID NO: 2117588 - RNA, 19 nt, Homo sapiens
  misc_RNA (1)...(19): siRNA sense strand
gcaacaagucuaaccucau

SEQ ID NO: 2117589 - RNA, 19 nt, Homo sapiens
  misc_RNA (1)...(19): siRNA sense strand
gagaguucacacugcagua

SEQ ID NO: 2117590 - RNA, 19 nt, Homo sapiens
  misc_RNA (1)...(19): siRNA sense strand
gagugugggaaguccuuua

SEQ ID NO: 2117591 - RNA, 19 nt, Homo sapiens
  misc_RNA (1)...(19): siRNA sense strand
caaaagcauucagcgguaa

SEQ ID NO: 2117592 - RNA, 19 nt, Homo sapiens
  misc_RNA (1)...(19): siRNA sense strand
acuccagccuuauuaaaca

SEQ ID NO: 2117593 - RNA, 19 nt, Homo sapiens
  misc_RNA (1)...(19): siRNA sense strand
caagucuaaccucauuaaa

SEQ ID NO: 2117594 - RNA, 19 nt, Homo sapiens
  misc_RNA (1)...(19): siRNA sense strand
ucacuacagaaagauguua

SEQ ID NO: 2117595 - RNA, 19 nt, Homo sapiens
  misc_RNA (1)...(19): siRNA sense strand
gcagugaaugugggaaguu

SEQ ID NO: 2117596 - RNA, 19 nt, Homo sapiens
  misc_RNA (1)...(19): siRNA sense strand
gcagugaaugugggaaguu

SEQ ID NO: 2117597 - RNA, 19 nt, Homo sapiens
  misc_RNA (1)...(19): siRNA sense strand
gugcagcgaaugugggaaa

SEQ ID NO: 2117598 - RNA, 19 nt, Homo sapiens
  misc_RNA (1)...(19): siRNA sense strand
acauaucauuccagucuca

SEQ ID NO: 2117599 - RNA, 19 nt, Homo sapiens
  misc_RNA (1)...(19): siRNA sense strand
gcgguaaacacacacuugu

SEQ ID NO: 2117600 - RNA, 19 nt, Homo sapiens
  misc_RNA (1)...(19): siRNA sense strand
gaaugugggaaguucuuuc

SEQ ID NO: 2117601 - RNA, 19 nt, Homo sapiens
  misc_RNA (1)...(19): siRNA sense strand
ugugggaaauccuuuagca

SEQ ID NO: 2117602 - RNA, 19 nt, Homo sapiens
  misc_RNA (1)...(19): siRNA sense strand
cagagaacccucacuacag

SEQ ID NO: 2117603 - RNA, 19 nt, Homo sapiens
  misc_RNA (1)...(19): siRNA sense strand
acugugaccuuugaagaug

SEQ ID NO: 2117604 - RNA, 19 nt, Homo sapiens
  misc_RNA (1)...(19): siRNA sense strand
gcacggaaugugggaaauc

SEQ ID NO: 2117605 - RNA, 19 nt, Homo sapiens
  misc_RNA (1)...(19): siRNA sense strand
gcacaggaggguucacacu

SEQ ID NO: 2117606 - RNA, 19 nt, Homo sapiens
  misc_RNA (1)...(19): siRNA sense strand
ccuuaugagugcagugaau

SEQ ID NO: 2117607 - RNA, 19 nt, Homo sapiens
  misc_RNA (1)...(19): siRNA sense strand
gcgaaugugggaaauccuu

SEQ ID NO: 2117608 - RNA, 19 nt, Homo sapiens
  misc_RNA (1)...(19): siRNA sense strand
ccuuaugagugcagugaau

SEQ ID NO: 2117609 - RNA, 19 nt, Homo sapiens
  misc_RNA (1)...(19): siRNA sense strand
ccuguaccgugaugugaug

SEQ ID NO: 2117610 - RNA, 19 nt, Homo sapiens
  misc_RNA (1)...(19): siRNA sense strand
uguuacauaugcagugaau

SEQ ID NO: 2117611 - RNA, 19 nt, Homo sapiens
  misc_RNA (1)...(19): siRNA sense strand
ugggaaauccuuuacucaa

SEQ ID NO: 2117612 - RNA, 19 nt, Homo sapiens
  misc_RNA (1)...(19): siRNA sense strand
cgaaugugggaaauccuuu

SEQ ID NO: 2117613 - RNA, 19 nt, Homo sapiens
  misc_RNA (1)...(19): siRNA sense strand
aagcagcaccuuggagaaa

SEQ ID NO: 2117614 - RNA, 19 nt, Homo sapiens
  misc_RNA (1)...(19): siRNA sense strand
uuacaacuguggagaacac

SEQ ID NO: 2117615 - RNA, 19 nt, Homo sapiens
  misc_RNA (1)...(19): siRNA sense strand
ugggauuucuccaucaaca

SEQ ID NO: 2117616 - RNA, 19 nt, Homo sapiens
  misc_RNA (1)...(19): siRNA sense strand
gaaaagaccuuaugaaugu

SEQ ID NO: 2117617 - RNA, 19 nt, Homo sapiens
  misc_RNA (1)...(19): siRNA sense strand
gaaaagaccuuaugaaugu

SEQ ID NO: 2117618 - RNA, 19 nt, Homo sapiens
  misc_RNA (1)...(19): siRNA sense strand
ggaaauccuuuagcaaaua

SEQ ID NO: 2117619 - RNA, 19 nt, Homo sapiens
  misc_RNA (1)...(19): siRNA sense strand
ugaaagaccuuaugagugu

SEQ ID NO: 2117620 - RNA, 19 nt, Homo sapiens
  misc_RNA (1)...(19): siRNA sense strand
gaagagcauuucuauacaa

SEQ ID NO: 2117621 - RNA, 19 nt, Homo sapiens
  misc_RNA (1)...(19): siRNA sense strand
ggagucaucuaucuucauu

SEQ ID NO: 2117622 - RNA, 19 nt, Homo sapiens
  misc_RNA (1)...(19): siRNA sense strand
agaaagaccuuaugagugu

SEQ ID NO: 2117623 - RNA, 19 nt, Homo sapiens
  misc_RNA (1)...(19): siRNA sense strand
agaaagaccuuaugagugu

SEQ ID NO: 2117624 - RNA, 19 nt, Homo sapiens
  misc_RNA (1)...(19): siRNA sense strand
gagcauuucuauacaaaga

SEQ ID NO: 2117625 - RNA, 19 nt, Homo sapiens
  misc_RNA (1)...(19): siRNA sense strand
gagaaaggccuuaugaaug

SEQ ID NO: 2117626 - RNA, 19 nt, Homo sapiens
  misc_RNA (1)...(19): siRNA sense strand
gagaaaggccuuaugaaug

SEQ ID NO: 2117627 - RNA, 19 nt, Homo sapiens
  misc_RNA (1)...(19): siRNA sense strand
ggagagaaacccuauagaa

SEQ ID NO: 2117628 - RNA, 19 nt, Homo sapiens
  misc_RNA (1)...(19): siRNA sense strand
agaaagaccuuacgagugu

SEQ ID NO: 2117629 - RNA, 19 nt, Homo sapiens
  misc_RNA (1)...(19): siRNA sense strand
gaggaagcauuguuuguga

SEQ ID NO: 2117630 - RNA, 19 nt, Homo sapiens
  misc_RNA (1)...(19): siRNA sense strand
gaaaggccauaugaaugua

SEQ ID NO: 2117631 - RNA, 19 nt, Homo sapiens
  misc_RNA (1)...(19): siRNA sense strand
agaaaggccuuaugaaugu

SEQ ID NO: 2117632 - RNA, 19 nt, Homo sapiens
  misc_RNA (1)...(19): siRNA sense strand
ggagaaaggccauaugaau

SEQ ID NO: 2117633 - RNA, 19 nt, Homo sapiens
  misc_RNA (1)...(19): siRNA sense strand
ggagaaaggccuuaugaau

SEQ ID NO: 2117634 - RNA, 19 nt, Homo sapiens
  misc_RNA (1)...(19): siRNA sense strand
ggagaaaggccuuaugaau

SEQ ID NO: 2117635 - RNA, 19 nt, Homo sapiens
  misc_RNA (1)...(19): siRNA sense strand
gcagggcacuguggcauuu

SEQ ID NO: 2117636 - RNA, 19 nt, Homo sapiens
  misc_RNA (1)...(19): siRNA sense strand
gaagggcaaucucauucaa

SEQ ID NO: 2117637 - RNA, 19 nt, Homo sapiens
  misc_RNA (1)...(19): siRNA sense strand
gaaagaaguccuuacaagu

SEQ ID NO: 2117638 - RNA, 19 nt, Homo sapiens
  misc_RNA (1)...(19): siRNA sense strand
agagaugccuuuaccauga

SEQ ID NO: 2117639 - RNA, 19 nt, Homo sapiens
  misc_RNA (1)...(19): siRNA sense strand
gaaacauucuagcaccaaa

SEQ ID NO: 2117640 - RNA, 19 nt, Homo sapiens
  misc_RNA (1)...(19): siRNA sense strand
gagaaacccuauagaagca

SEQ ID NO: 2117641 - RNA, 19 nt, Homo sapiens
  misc_RNA (1)...(19): siRNA sense strand
ggagaaagaccuuaugagu

SEQ ID NO: 2117642 - RNA, 19 nt, Homo sapiens
  misc_RNA (1)...(19): siRNA sense strand
gcagaaagaccuuaugagu

SEQ ID NO: 2117643 - RNA, 19 nt, Homo sapiens
  misc_RNA (1)...(19): siRNA sense strand
ggagaaagaccuuaugagu

SEQ ID NO: 2117644 - RNA, 19 nt, Homo sapiens
  misc_RNA (1)...(19): siRNA sense strand
ggagaacuggguacuuaua

SEQ ID NO: 2117645 - RNA, 19 nt, Homo sapiens
  misc_RNA (1)...(19): siRNA sense strand
ucagagaguucacacagaa

SEQ ID NO: 2117646 - RNA, 19 nt, Homo sapiens
  misc_RNA (1)...(19): siRNA sense strand
gagaaaggccauaugaaug

SEQ ID NO: 2117647 - RNA, 19 nt, Homo sapiens
  misc_RNA (1)...(19): siRNA sense strand
ggacacaucacaagcagaa

SEQ ID NO: 2117648 - RNA, 19 nt, Homo sapiens
  misc_RNA (1)...(19): siRNA sense strand
gggaaauccuuuagcaaau

SEQ ID NO: 2117649 - RNA, 19 nt, Homo sapiens
  misc_RNA (1)...(19): siRNA sense strand
agaaaggccuuaugagugu

SEQ ID NO: 2117650 - RNA, 19 nt, Homo sapiens
  misc_RNA (1)...(19): siRNA sense strand
gagaaugugggaaaucuuu

SEQ ID NO: 2117651 - RNA, 19 nt, Homo sapiens
  misc_RNA (1)...(19): siRNA sense strand
ggagaaaggccuuaugagu

SEQ ID NO: 2117652 - RNA, 19 nt, Homo sapiens
  misc_RNA (1)...(19): siRNA sense strand
ggagaaaggccuuaugagu

SEQ ID NO: 2117653 - RNA, 19 nt, Homo sapiens
  misc_RNA (1)...(19): siRNA sense strand
gagaaugugggaaaucuuu

SEQ ID NO: 2117654 - RNA, 19 nt, Homo sapiens
  misc_RNA (1)...(19): siRNA sense strand
gagaaugugggaaaucuuu

SEQ ID NO: 2117655 - RNA, 19 nt, Homo sapiens
  misc_RNA (1)...(19): siRNA sense strand
gagaaugugggaaaucuuu

SEQ ID NO: 2117656 - RNA, 19 nt, Homo sapiens
  misc_RNA (1)...(19): siRNA sense strand
gagaaugugggaaaucuuu

SEQ ID NO: 2117657 - RNA, 19 nt, Homo sapiens
  misc_RNA (1)...(19): siRNA sense strand
caagacagcucuggguuuc

SEQ ID NO: 2117658 - RNA, 19 nt, Homo sapiens
  misc_RNA (1)...(19): siRNA sense strand
cuggagaacuggguacuua

SEQ ID NO: 2117659 - RNA, 19 nt, Homo sapiens
  misc_RNA (1)...(19): siRNA sense strand
gcaagucccaccucauuga

SEQ ID NO: 2117660 - RNA, 19 nt, Homo sapiens
  misc_RNA (1)...(19): siRNA sense strand
gcaggugugucucccaaga

SEQ ID NO: 2117661 - RNA, 19 nt, Homo sapiens
  misc_RNA (1)...(19): siRNA sense strand
aaacaucagagacuucaua

SEQ ID NO: 2117662 - RNA, 19 nt, Homo sapiens
  misc_RNA (1)...(19): siRNA sense strand
agaaagaaguccuuacaag

SEQ ID NO: 2117663 - RNA, 19 nt, Homo sapiens
  misc_RNA (1)...(19): siRNA sense strand
gagagaaacccuauagaag

SEQ ID NO: 2117664 - RNA, 19 nt, Homo sapiens
  misc_RNA (1)...(19): siRNA sense strand
ggaaauccuuugcugaaac

SEQ ID NO: 2117665 - RNA, 19 nt, Homo sapiens
  misc_RNA (1)...(19): siRNA sense strand
gggaaauccuuugcugaaa

SEQ ID NO: 2117666 - RNA, 19 nt, Homo sapiens
  misc_RNA (1)...(19): siRNA sense strand
gaaugugggaaauccuuua

SEQ ID NO: 2117667 - RNA, 19 nt, Homo sapiens
  misc_RNA (1)...(19): siRNA sense strand
agaaaggccuuaugaaugc

SEQ ID NO: 2117668 - RNA, 19 nt, Homo sapiens
  misc_RNA (1)...(19): siRNA sense strand
cauuaaacaucaacgaguu

SEQ ID NO: 2117669 - RNA, 19 nt, Homo sapiens
  misc_RNA (1)...(19): siRNA sense strand
ugaagaaugugggaaaugu

SEQ ID NO: 2117670 - RNA, 19 nt, Homo sapiens
  misc_RNA (1)...(19): siRNA sense strand
aagaaguccuuacaaguga

SEQ ID NO: 2117671 - RNA, 19 nt, Homo sapiens
  misc_RNA (1)...(19): siRNA sense strand
uagagaguguaggaaauua

SEQ ID NO: 2117672 - RNA, 19 nt, Homo sapiens
  misc_RNA (1)...(19): siRNA sense strand
agaacgaccuuaugagugu

SEQ ID NO: 2117673 - RNA, 19 nt, Homo sapiens
  misc_RNA (1)...(19): siRNA sense strand
gcaaucucauucaacauca

SEQ ID NO: 2117674 - RNA, 19 nt, Homo sapiens
  misc_RNA (1)...(19): siRNA sense strand
gaaaggccuuaugagugua

SEQ ID NO: 2117675 - RNA, 19 nt, Homo sapiens
  misc_RNA (1)...(19): siRNA sense strand
gggcaagucccaccucauu

SEQ ID NO: 2117676 - RNA, 19 nt, Homo sapiens
  misc_RNA (1)...(19): siRNA sense strand
ucaucuaucuucauucaga

SEQ ID NO: 2117677 - RNA, 19 nt, Homo sapiens
  misc_RNA (1)...(19): siRNA sense strand
uuagugagguucagagaug

SEQ ID NO: 2117678 - RNA, 19 nt, Homo sapiens
  misc_RNA (1)...(19): siRNA sense strand
uagaagcaguguugaggaa

SEQ ID NO: 2117679 - RNA, 19 nt, Homo sapiens
  misc_RNA (1)...(19): siRNA sense strand
ggaaauguuuuacucagaa

SEQ ID NO: 2117680 - RNA, 19 nt, Homo sapiens
  misc_RNA (1)...(19): siRNA sense strand
ucagagcucuucccuccuu

SEQ ID NO: 2117681 - RNA, 19 nt, Homo sapiens
  misc_RNA (1)...(19): siRNA sense strand
ucaaagcuguucccuccuu

SEQ ID NO: 2117682 - RNA, 19 nt, Homo sapiens
  misc_RNA (1)...(19): siRNA sense strand
gaaagggcaaccucauuca

SEQ ID NO: 2117683 - RNA, 19 nt, Homo sapiens
  misc_RNA (1)...(19): siRNA sense strand
aaagaaguccuuacaagug

SEQ ID NO: 2117684 - RNA, 19 nt, Homo sapiens
  misc_RNA (1)...(19): siRNA sense strand
ggaaauucuucuccagucu

SEQ ID NO: 2117685 - RNA, 19 nt, Homo sapiens
  misc_RNA (1)...(19): siRNA sense strand
uaaugaaugugggaaauca

SEQ ID NO: 2117686 - RNA, 19 nt, Homo sapiens
  misc_RNA (1)...(19): siRNA sense strand
ggagaagucaaacagcaaa

SEQ ID NO: 2117687 - RNA, 19 nt, Homo sapiens
  misc_RNA (1)...(19): siRNA sense strand
cgacaucggagaguucaua

SEQ ID NO: 2117688 - RNA, 19 nt, Homo sapiens
  misc_RNA (1)...(19): siRNA sense strand
gaagucauuuccucaaagc

SEQ ID NO: 2117689 - RNA, 19 nt, Homo sapiens
  misc_RNA (1)...(19): siRNA sense strand
gagaguguaggaaauuauu

SEQ ID NO: 2117690 - RNA, 19 nt, Homo sapiens
  misc_RNA (1)...(19): siRNA sense strand
ggcccacucuugugaaaug

SEQ ID NO: 2117691 - RNA, 19 nt, Homo sapiens
  misc_RNA (1)...(19): siRNA sense strand
agauguggcugugaacuuu

SEQ ID NO: 2117692 - RNA, 19 nt, Homo sapiens
  misc_RNA (1)...(19): siRNA sense strand
guagagaguguaggaaauu

SEQ ID NO: 2117693 - RNA, 19 nt, Homo sapiens
  misc_RNA (1)...(19): siRNA sense strand
ggaaaagaccuuaugaaug

SEQ ID NO: 2117694 - RNA, 19 nt, Homo sapiens
  misc_RNA (1)...(19): siRNA sense strand
ggaaaagaccuuaugaaug

SEQ ID NO: 2117695 - RNA, 19 nt, Homo sapiens
  misc_RNA (1)...(19): siRNA sense strand
uaugauagcgucaguaauc

SEQ ID NO: 2117696 - RNA, 19 nt, Homo sapiens
  misc_RNA (1)...(19): siRNA sense strand
caaauaugauagcgucagu

SEQ ID NO: 2117697 - RNA, 19 nt, Homo sapiens
  misc_RNA (1)...(19): siRNA sense strand
ucagaggagucaucuaucu

SEQ ID NO: 2117698 - RNA, 19 nt, Homo sapiens
  misc_RNA (1)...(19): siRNA sense strand
gaacacaggagaguacaca

SEQ ID NO: 2117699 - RNA, 19 nt, Homo sapiens
  misc_RNA (1)...(19): siRNA sense strand
gcagagaaugugggaaauu

SEQ ID NO: 2117700 - RNA, 19 nt, Homo sapiens
  misc_RNA (1)...(19): siRNA sense strand
gaggaggcaccuucuaaga

SEQ ID NO: 2117701 - RNA, 19 nt, Homo sapiens
  misc_RNA (1)...(19): siRNA sense strand
cuagagaacgaccuuauga

SEQ ID NO: 2117702 - RNA, 19 nt, Homo sapiens
  misc_RNA (1)...(19): siRNA sense strand
guacucucauuaaacauca

SEQ ID NO: 2117703 - RNA, 19 nt, Homo sapiens
  misc_RNA (1)...(19): siRNA sense strand
gaagaaugugggaaauguu

SEQ ID NO: 2117704 - RNA, 19 nt, Homo sapiens
  misc_RNA (1)...(19): siRNA sense strand
gaggagucaucuaucuuca

SEQ ID NO: 2117705 - RNA, 19 nt, Homo sapiens
  misc_RNA (1)...(19): siRNA sense strand
gagaacuggguacuuauau

SEQ ID NO: 2117706 - RNA, 19 nt, Homo sapiens
  misc_RNA (1)...(19): siRNA sense strand
uuacgaguguggagaaugu

SEQ ID NO: 2117707 - RNA, 19 nt, Homo sapiens
  misc_RNA (1)...(19): siRNA sense strand
caucaucgaguucacacua

SEQ ID NO: 2117708 - RNA, 19 nt, Homo sapiens
  misc_RNA (1)...(19): siRNA sense strand
gagaguacacacuggagaa

SEQ ID NO: 2117709 - RNA, 19 nt, Homo sapiens
  misc_RNA (1)...(19): siRNA sense strand
caucagagacuucauacuc

SEQ ID NO: 2117710 - RNA, 19 nt, Homo sapiens
  misc_RNA (1)...(19): siRNA sense strand
uggagaauguggaaaguca

SEQ ID NO: 2117711 - RNA, 19 nt, Homo sapiens
  misc_RNA (1)...(19): siRNA sense strand
gagaguucauacuggagaa

SEQ ID NO: 2117712 - RNA, 19 nt, Homo sapiens
  misc_RNA (1)...(19): siRNA sense strand
agaaaggccauaugaaugu

SEQ ID NO: 2117713 - RNA, 19 nt, Homo sapiens
  misc_RNA (1)...(19): siRNA sense strand
cgaaagggcaaccucauuc

SEQ ID NO: 2117714 - RNA, 19 nt, Homo sapiens
  misc_RNA (1)...(19): siRNA sense strand
uuaugaauguggagaaugu

SEQ ID NO: 2117715 - RNA, 19 nt, Homo sapiens
  misc_RNA (1)...(19): siRNA sense strand
gugcagagaaugugggaaa

SEQ ID NO: 2117716 - RNA, 19 nt, Homo sapiens
  misc_RNA (1)...(19): siRNA sense strand
gcgagaagcccuacaucug

SEQ ID NO: 2117717 - RNA, 19 nt, Homo sapiens
  misc_RNA (1)...(19): siRNA sense strand
agacgccacccguguguga

SEQ ID NO: 2117718 - RNA, 19 nt, Homo sapiens
  misc_RNA (1)...(19): siRNA sense strand
gggaaggccuuuagacuua

SEQ ID NO: 2117719 - RNA, 19 nt, Homo sapiens
  misc_RNA (1)...(19): siRNA sense strand
gggaagaacuuuaguaaug

SEQ ID NO: 2117720 - RNA, 19 nt, Homo sapiens
  misc_RNA (1)...(19): siRNA sense strand
caacauagcagaauccaua

SEQ ID NO: 2117721 - RNA, 19 nt, Homo sapiens
  misc_RNA (1)...(19): siRNA sense strand
caacagauguaaagaaugu

SEQ ID NO: 2117722 - RNA, 19 nt, Homo sapiens
  misc_RNA (1)...(19): siRNA sense strand
caucagagauugcauguug

SEQ ID NO: 2117723 - RNA, 19 nt, Homo sapiens
  misc_RNA (1)...(19): siRNA sense strand
ggagaaacccuaugaaugu

SEQ ID NO: 2117724 - RNA, 19 nt, Homo sapiens
  misc_RNA (1)...(19): siRNA sense strand
ggagaaacccuaugaaugu

SEQ ID NO: 2117725 - RNA, 19 nt, Homo sapiens
  misc_RNA (1)...(19): siRNA sense strand
gagaaacccuauaaauaug

SEQ ID NO: 2117726 - RNA, 19 nt, Homo sapiens
  misc_RNA (1)...(19): siRNA sense strand
gugagaaacccuauaaaua

SEQ ID NO: 2117727 - RNA, 19 nt, Homo sapiens
  misc_RNA (1)...(19): siRNA sense strand
gggaagaccuuuagauaca

SEQ ID NO: 2117728 - RNA, 19 nt, Homo sapiens
  misc_RNA (1)...(19): siRNA sense strand
caacaucagcgaauucaua

SEQ ID NO: 2117729 - RNA, 19 nt, Homo sapiens
  misc_RNA (1)...(19): siRNA sense strand
gggaaggccuuuagcacua

SEQ ID NO: 2117730 - RNA, 19 nt, Homo sapiens
  misc_RNA (1)...(19): siRNA sense strand
gagaaacccuaugaaugua

SEQ ID NO: 2117731 - RNA, 19 nt, Homo sapiens
  misc_RNA (1)...(19): siRNA sense strand
gagaaacccuaugaaugua

SEQ ID NO: 2117732 - RNA, 19 nt, Homo sapiens
  misc_RNA (1)...(19): siRNA sense strand
gagaaacccuaugaaugua

SEQ ID NO: 2117733 - RNA, 19 nt, Homo sapiens
  misc_RNA (1)...(19): siRNA sense strand
guaaagcccuaugaaugua

SEQ ID NO: 2117734 - RNA, 19 nt, Homo sapiens
  misc_RNA (1)...(19): siRNA sense strand
gagaaacccuuuaaaugca

SEQ ID NO: 2117735 - RNA, 19 nt, Homo sapiens
  misc_RNA (1)...(19): siRNA sense strand
gaaagaauacauaguagug

SEQ ID NO: 2117736 - RNA, 19 nt, Homo sapiens
  misc_RNA (1)...(19): siRNA sense strand
gaaaugcccaccucugaaa

SEQ ID NO: 2117737 - RNA, 19 nt, Homo sapiens
  misc_RNA (1)...(19): siRNA sense strand
gagaagcccuaugaaugua

SEQ ID NO: 2117738 - RNA, 19 nt, Homo sapiens
  misc_RNA (1)...(19): siRNA sense strand
gcgaauucaugcagagaua

SEQ ID NO: 2117739 - RNA, 19 nt, Homo sapiens
  misc_RNA (1)...(19): siRNA sense strand
acaaucggcuguaaagaaa

SEQ ID NO: 2117740 - RNA, 19 nt, Homo sapiens
  misc_RNA (1)...(19): siRNA sense strand
agaagccacucaaauguaa

SEQ ID NO: 2117741 - RNA, 19 nt, Homo sapiens
  misc_RNA (1)...(19): siRNA sense strand
cgagaaacccuaugaaugu

SEQ ID NO: 2117742 - RNA, 19 nt, Homo sapiens
  misc_RNA (1)...(19): siRNA sense strand
gaagaacuuuaguaaugga

SEQ ID NO: 2117743 - RNA, 19 nt, Homo sapiens
  misc_RNA (1)...(19): siRNA sense strand
gagaaacccuaugagugua

SEQ ID NO: 2117744 - RNA, 19 nt, Homo sapiens
  misc_RNA (1)...(19): siRNA sense strand
gagaagccacucaaaugua

SEQ ID NO: 2117745 - RNA, 19 nt, Homo sapiens
  misc_RNA (1)...(19): siRNA sense strand
ggaagaacuuuaguaaugg

SEQ ID NO: 2117746 - RNA, 19 nt, Homo sapiens
  misc_RNA (1)...(19): siRNA sense strand
gguacacacuggugagaaa

SEQ ID NO: 2117747 - RNA, 19 nt, Homo sapiens
  misc_RNA (1)...(19): siRNA sense strand
gcgagaagcccuaugaaug

SEQ ID NO: 2117748 - RNA, 19 nt, Homo sapiens
  misc_RNA (1)...(19): siRNA sense strand
gcacaucagcgaauucaug

SEQ ID NO: 2117749 - RNA, 19 nt, Homo sapiens
  misc_RNA (1)...(19): siRNA sense strand
cgacaucagaguauucaua

SEQ ID NO: 2117750 - RNA, 19 nt, Homo sapiens
  misc_RNA (1)...(19): siRNA sense strand
ggaaggccuuuagacuuaa

SEQ ID NO: 2117751 - RNA, 19 nt, Homo sapiens
  misc_RNA (1)...(19): siRNA sense strand
gacaucaacucaccauaca

SEQ ID NO: 2117752 - RNA, 19 nt, Homo sapiens
  misc_RNA (1)...(19): siRNA sense strand
gugagaaacccuuuaaaug

SEQ ID NO: 2117753 - RNA, 19 nt, Homo sapiens
  misc_RNA (1)...(19): siRNA sense strand
caauguggaaagacuauua

SEQ ID NO: 2117754 - RNA, 19 nt, Homo sapiens
  misc_RNA (1)...(19): siRNA sense strand
gaaugugggaagaacuuua

SEQ ID NO: 2117755 - RNA, 19 nt, Homo sapiens
  misc_RNA (1)...(19): siRNA sense strand
gggagaaacccuaugaaug

SEQ ID NO: 2117756 - RNA, 19 nt, Homo sapiens
  misc_RNA (1)...(19): siRNA sense strand
gggagaaacccuaugaaug

SEQ ID NO: 2117757 - RNA, 19 nt, Homo sapiens
  misc_RNA (1)...(19): siRNA sense strand
gcgagaaacccuaugaaug

SEQ ID NO: 2117758 - RNA, 19 nt, Homo sapiens
  misc_RNA (1)...(19): siRNA sense strand
gcuaucaacuuacaguaca

SEQ ID NO: 2117759 - RNA, 19 nt, Homo sapiens
  misc_RNA (1)...(19): siRNA sense strand
gugggaagaccuuuagaua

SEQ ID NO: 2117760 - RNA, 19 nt, Homo sapiens
  misc_RNA (1)...(19): siRNA sense strand
gcagaauccauacugguaa

SEQ ID NO: 2117761 - RNA, 19 nt, Homo sapiens
  misc_RNA (1)...(19): siRNA sense strand
ggugagaaacccuauaaau

SEQ ID NO: 2117762 - RNA, 19 nt, Homo sapiens
  misc_RNA (1)...(19): siRNA sense strand
guuggaagaugauacaauc

SEQ ID NO: 2117763 - RNA, 19 nt, Homo sapiens
  misc_RNA (1)...(19): siRNA sense strand
ggugagaaacccuuuaaau

SEQ ID NO: 2117764 - RNA, 19 nt, Homo sapiens
  misc_RNA (1)...(19): siRNA sense strand
ugagaaaccuuuugaaugu

SEQ ID NO: 2117765 - RNA, 19 nt, Homo sapiens
  misc_RNA (1)...(19): siRNA sense strand
cagcaucaaagaauucaua

SEQ ID NO: 2117766 - RNA, 19 nt, Homo sapiens
  misc_RNA (1)...(19): siRNA sense strand
ggagagaaacccuaugagu

SEQ ID NO: 2117767 - RNA, 19 nt, Homo sapiens
  misc_RNA (1)...(19): siRNA sense strand
ggcaaggccuuuaguacug

SEQ ID NO: 2117768 - RNA, 19 nt, Homo sapiens
  misc_RNA (1)...(19): siRNA sense strand
ugagaaaccuuuugaaugu

SEQ ID NO: 2117769 - RNA, 19 nt, Homo sapiens
  misc_RNA (1)...(19): siRNA sense strand
ccacucaaauguaagcaau

SEQ ID NO: 2117770 - RNA, 19 nt, Homo sapiens
  misc_RNA (1)...(19): siRNA sense strand
caacucaccauacaucaga

SEQ ID NO: 2117771 - RNA, 19 nt, Homo sapiens
  misc_RNA (1)...(19): siRNA sense strand
cgagaagcccuaugaaugu

SEQ ID NO: 2117772 - RNA, 19 nt, Homo sapiens
  misc_RNA (1)...(19): siRNA sense strand
ggacaucaacucaccauac

SEQ ID NO: 2117773 - RNA, 19 nt, Homo sapiens
  misc_RNA (1)...(19): siRNA sense strand
gaaacccuuuaaaugcaaa

SEQ ID NO: 2117774 - RNA, 19 nt, Homo sapiens
  misc_RNA (1)...(19): siRNA sense strand
cagcuuaccguacaucaaa

SEQ ID NO: 2117775 - RNA, 19 nt, Homo sapiens
  misc_RNA (1)...(19): siRNA sense strand
caccauacaucagagauug

SEQ ID NO: 2117776 - RNA, 19 nt, Homo sapiens
  misc_RNA (1)...(19): siRNA sense strand
gaacuuuaguaauggacau

SEQ ID NO: 2117777 - RNA, 19 nt, Homo sapiens
  misc_RNA (1)...(19): siRNA sense strand
uaagaagcccuaugagugu

SEQ ID NO: 2117778 - RNA, 19 nt, Homo sapiens
  misc_RNA (1)...(19): siRNA sense strand
guacaucaaaggguucaua

SEQ ID NO: 2117779 - RNA, 19 nt, Homo sapiens
  misc_RNA (1)...(19): siRNA sense strand
gaaacccuaugaauguaag

SEQ ID NO: 2117780 - RNA, 19 nt, Homo sapiens
  misc_RNA (1)...(19): siRNA sense strand
gaaacccuaugaauguaag

SEQ ID NO: 2117781 - RNA, 19 nt, Homo sapiens
  misc_RNA (1)...(19): siRNA sense strand
uuucauaccugguucaaca

SEQ ID NO: 2117782 - RNA, 19 nt, Homo sapiens
  misc_RNA (1)...(19): siRNA sense strand
ugagaaacccuuuaaaugc

SEQ ID NO: 2117783 - RNA, 19 nt, Homo sapiens
  misc_RNA (1)...(19): siRNA sense strand
caucaaagaauucauacug

SEQ ID NO: 2117784 - RNA, 19 nt, Homo sapiens
  misc_RNA (1)...(19): siRNA sense strand
cccaacagauguaaagaau

SEQ ID NO: 2117785 - RNA, 19 nt, Homo sapiens
  misc_RNA (1)...(19): siRNA sense strand
gaauucaugcagagauaaa

SEQ ID NO: 2117786 - RNA, 19 nt, Homo sapiens
  misc_RNA (1)...(19): siRNA sense strand
gauguaaagcccuaugaau

SEQ ID NO: 2117787 - RNA, 19 nt, Homo sapiens
  misc_RNA (1)...(19): siRNA sense strand
gaagaccuuuagauacagu

SEQ ID NO: 2117788 - RNA, 19 nt, Homo sapiens
  misc_RNA (1)...(19): siRNA sense strand
uaaggaauguggaaagacu

SEQ ID NO: 2117789 - RNA, 19 nt, Homo sapiens
  misc_RNA (1)...(19): siRNA sense strand
gugggaagaacuuuaguaa

SEQ ID NO: 2117790 - RNA, 19 nt, Homo sapiens
  misc_RNA (1)...(19): siRNA sense strand
caacuuauuggacaucaga

SEQ ID NO: 2117791 - RNA, 19 nt, Homo sapiens
  misc_RNA (1)...(19): siRNA sense strand
agagaaacccuaugagugu

SEQ ID NO: 2117792 - RNA, 19 nt, Homo sapiens
  misc_RNA (1)...(19): siRNA sense strand
gccaucagcuuaccguaca

SEQ ID NO: 2117793 - RNA, 19 nt, Homo sapiens
  misc_RNA (1)...(19): siRNA sense strand
gggaagaaaccauaugagu

SEQ ID NO: 2117794 - RNA, 19 nt, Homo sapiens
  misc_RNA (1)...(19): siRNA sense strand
caucagagaauucauacug

SEQ ID NO: 2117795 - RNA, 19 nt, Homo sapiens
  misc_RNA (1)...(19): siRNA sense strand
ucuaguauauggaaagcuu

SEQ ID NO: 2117796 - RNA, 19 nt, Homo sapiens
  misc_RNA (1)...(19): siRNA sense strand
gaacaucagcggguacaca

SEQ ID NO: 2117797 - RNA, 19 nt, Homo sapiens
  misc_RNA (1)...(19): siRNA sense strand
gaaggccuuuagacuuaau

SEQ ID NO: 2117798 - RNA, 19 nt, Homo sapiens
  misc_RNA (1)...(19): siRNA sense strand
agucgugccucauaucuug

SEQ ID NO: 2117799 - RNA, 19 nt, Homo sapiens
  misc_RNA (1)...(19): siRNA sense strand
uaaagaaugugggaagaac

SEQ ID NO: 2117800 - RNA, 19 nt, Homo sapiens
  misc_RNA (1)...(19): siRNA sense strand
uuaaagugcaucugagaaa

SEQ ID NO: 2117801 - RNA, 19 nt, Homo sapiens
  misc_RNA (1)...(19): siRNA sense strand
ggcaaggccuucaguucug

SEQ ID NO: 2117802 - RNA, 19 nt, Homo sapiens
  misc_RNA (1)...(19): siRNA sense strand
gguaagaagcccuaugagu

SEQ ID NO: 2117803 - RNA, 19 nt, Homo sapiens
  misc_RNA (1)...(19): siRNA sense strand
caucaaaggguucauacug

SEQ ID NO: 2117804 - RNA, 19 nt, Homo sapiens
  misc_RNA (1)...(19): siRNA sense strand
acagaaaccacgugaaugu

SEQ ID NO: 2117805 - RNA, 19 nt, Homo sapiens
  misc_RNA (1)...(19): siRNA sense strand
ggaaggccuuuagcacuag

SEQ ID NO: 2117806 - RNA, 19 nt, Homo sapiens
  misc_RNA (1)...(19): siRNA sense strand
gaauguaaggaauguggaa

SEQ ID NO: 2117807 - RNA, 19 nt, Homo sapiens
  misc_RNA (1)...(19): siRNA sense strand
gaaacccuaugaauguaac

SEQ ID NO: 2117808 - RNA, 19 nt, Homo sapiens
  misc_RNA (1)...(19): siRNA sense strand
gaauguaaggaauguggaa

SEQ ID NO: 2117809 - RNA, 19 nt, Homo sapiens
  misc_RNA (1)...(19): siRNA sense strand
agacagaaaccacgugaau

SEQ ID NO: 2117810 - RNA, 19 nt, Homo sapiens
  misc_RNA (1)...(19): siRNA sense strand
guaaagaaugugggaagaa

SEQ ID NO: 2117811 - RNA, 19 nt, Homo sapiens
  misc_RNA (1)...(19): siRNA sense strand
uguaaagcccuaugaaugu

SEQ ID NO: 2117812 - RNA, 19 nt, Homo sapiens
  misc_RNA (1)...(19): siRNA sense strand
agauacaguucagcccuua

SEQ ID NO: 2117813 - RNA, 19 nt, Homo sapiens
  misc_RNA (1)...(19): siRNA sense strand
aagcaucagagaauucaua

SEQ ID NO: 2117814 - RNA, 19 nt, Homo sapiens
  misc_RNA (1)...(19): siRNA sense strand
aagaaaugcccaccucuga

SEQ ID NO: 2117815 - RNA, 19 nt, Homo sapiens
  misc_RNA (1)...(19): siRNA sense strand
gcaguuggaagaugauaca

SEQ ID NO: 2117816 - RNA, 19 nt, Homo sapiens
  misc_RNA (1)...(19): siRNA sense strand
uguaaggaauguggaaaga

SEQ ID NO: 2117817 - RNA, 19 nt, Homo sapiens
  misc_RNA (1)...(19): siRNA sense strand
caucagaggauccauacug

SEQ ID NO: 2117818 - RNA, 19 nt, Homo sapiens
  misc_RNA (1)...(19): siRNA sense strand
gggaaggccuuuagacuua

SEQ ID NO: 2117819 - RNA, 19 nt, Homo sapiens
  misc_RNA (1)...(19): siRNA sense strand
gggaagaacuuuaguaaug

SEQ ID NO: 2117820 - RNA, 19 nt, Homo sapiens
  misc_RNA (1)...(19): siRNA sense strand
caacauagcagaauccaua

SEQ ID NO: 2117821 - RNA, 19 nt, Homo sapiens
  misc_RNA (1)...(19): siRNA sense strand
caacagauguaaagaaugu

SEQ ID NO: 2117822 - RNA, 19 nt, Homo sapiens
  misc_RNA (1)...(19): siRNA sense strand
guacagagaugugauguug

SEQ ID NO: 2117823 - RNA, 19 nt, Homo sapiens
  misc_RNA (1)...(19): siRNA sense strand
caucagagauugcauguug

SEQ ID NO: 2117824 - RNA, 19 nt, Homo sapiens
  misc_RNA (1)...(19): siRNA sense strand
ggagaaacccuaugaaugu

SEQ ID NO: 2117825 - RNA, 19 nt, Homo sapiens
  misc_RNA (1)...(19): siRNA sense strand
ggagaaacccuaugaaugu

SEQ ID NO: 2117826 - RNA, 19 nt, Homo sapiens
  misc_RNA (1)...(19): siRNA sense strand
gagaaacccuauaaauaug

SEQ ID NO: 2117827 - RNA, 19 nt, Homo sapiens
  misc_RNA (1)...(19): siRNA sense strand
ggucuauucucaucuuaua

SEQ ID NO: 2117828 - RNA, 19 nt, Homo sapiens
  misc_RNA (1)...(19): siRNA sense strand
gugagaaacccuauaaaua

SEQ ID NO: 2117829 - RNA, 19 nt, Homo sapiens
  misc_RNA (1)...(19): siRNA sense strand
gggaagaccuuuagauaca

SEQ ID NO: 2117830 - RNA, 19 nt, Homo sapiens
  misc_RNA (1)...(19): siRNA sense strand
caacaucagcgaauucaua

SEQ ID NO: 2117831 - RNA, 19 nt, Homo sapiens
  misc_RNA (1)...(19): siRNA sense strand
gggaaggccuuuagcacua

SEQ ID NO: 2117832 - RNA, 19 nt, Homo sapiens
  misc_RNA (1)...(19): siRNA sense strand
gagaaacccuaugaaugua

SEQ ID NO: 2117833 - RNA, 19 nt, Homo sapiens
  misc_RNA (1)...(19): siRNA sense strand
gagaaacccuaugaaugua

SEQ ID NO: 2117834 - RNA, 19 nt, Homo sapiens
  misc_RNA (1)...(19): siRNA sense strand
gagaaacccuaugaaugua

SEQ ID NO: 2117835 - RNA, 19 nt, Homo sapiens
  misc_RNA (1)...(19): siRNA sense strand
guaaagcccuaugaaugua

SEQ ID NO: 2117836 - RNA, 19 nt, Homo sapiens
  misc_RNA (1)...(19): siRNA sense strand
gagaaacccuuuaaaugca

SEQ ID NO: 2117837 - RNA, 19 nt, Homo sapiens
  misc_RNA (1)...(19): siRNA sense strand
gaaaugcccaccucugaaa

SEQ ID NO: 2117838 - RNA, 19 nt, Homo sapiens
  misc_RNA (1)...(19): siRNA sense strand
gagaagcccuaugaaugua

SEQ ID NO: 2117839 - RNA, 19 nt, Homo sapiens
  misc_RNA (1)...(19): siRNA sense strand
gcgaauucaugcagagaua

SEQ ID NO: 2117840 - RNA, 19 nt, Homo sapiens
  misc_RNA (1)...(19): siRNA sense strand
gaaagaauacauaguagug

SEQ ID NO: 2117841 - RNA, 19 nt, Homo sapiens
  misc_RNA (1)...(19): siRNA sense strand
acaaucggcuguaaagaaa

SEQ ID NO: 2117842 - RNA, 19 nt, Homo sapiens
  misc_RNA (1)...(19): siRNA sense strand
agaagccacucaaauguaa

SEQ ID NO: 2117843 - RNA, 19 nt, Homo sapiens
  misc_RNA (1)...(19): siRNA sense strand
cgagaaacccuaugaaugu

SEQ ID NO: 2117844 - RNA, 19 nt, Homo sapiens
  misc_RNA (1)...(19): siRNA sense strand
gaagaacuuuaguaaugga

SEQ ID NO: 2117845 - RNA, 19 nt, Homo sapiens
  misc_RNA (1)...(19): siRNA sense strand
gagaaacccuaugagugua

SEQ ID NO: 2117846 - RNA, 19 nt, Homo sapiens
  misc_RNA (1)...(19): siRNA sense strand
gagaagccacucaaaugua

SEQ ID NO: 2117847 - RNA, 19 nt, Homo sapiens
  misc_RNA (1)...(19): siRNA sense strand
gagaugugauguuggagaa

SEQ ID NO: 2117848 - RNA, 19 nt, Homo sapiens
  misc_RNA (1)...(19): siRNA sense strand
ggaagaacuuuaguaaugg

SEQ ID NO: 2117849 - RNA, 19 nt, Homo sapiens
  misc_RNA (1)...(19): siRNA sense strand
gguacacacuggugagaaa

SEQ ID NO: 2117850 - RNA, 19 nt, Homo sapiens
  misc_RNA (1)...(19): siRNA sense strand
gcgagaagcccuaugaaug

SEQ ID NO: 2117851 - RNA, 19 nt, Homo sapiens
  misc_RNA (1)...(19): siRNA sense strand
gcacaucagcgaauucaug

SEQ ID NO: 2117852 - RNA, 19 nt, Homo sapiens
  misc_RNA (1)...(19): siRNA sense strand
cgacaucagaguauucaua

SEQ ID NO: 2117853 - RNA, 19 nt, Homo sapiens
  misc_RNA (1)...(19): siRNA sense strand
ggaaggccuuuagacuuaa

SEQ ID NO: 2117854 - RNA, 19 nt, Homo sapiens
  misc_RNA (1)...(19): siRNA sense strand
gcaggucuauucucaucuu

SEQ ID NO: 2117855 - RNA, 19 nt, Homo sapiens
  misc_RNA (1)...(19): siRNA sense strand
gacaucaacucaccauaca

SEQ ID NO: 2117856 - RNA, 19 nt, Homo sapiens
  misc_RNA (1)...(19): siRNA sense strand
gugagaaacccuuuaaaug

SEQ ID NO: 2117857 - RNA, 19 nt, Homo sapiens
  misc_RNA (1)...(19): siRNA sense strand
caauguggaaagacuauua

SEQ ID NO: 2117858 - RNA, 19 nt, Homo sapiens
  misc_RNA (1)...(19): siRNA sense strand
gaaugugggaagaacuuua

SEQ ID NO: 2117859 - RNA, 19 nt, Homo sapiens
  misc_RNA (1)...(19): siRNA sense strand
gggagaaacccuaugaaug

SEQ ID NO: 2117860 - RNA, 19 nt, Homo sapiens
  misc_RNA (1)...(19): siRNA sense strand
gggagaaacccuaugaaug

SEQ ID NO: 2117861 - RNA, 19 nt, Homo sapiens
  misc_RNA (1)...(19): siRNA sense strand
gcgagaaacccuaugaaug

SEQ ID NO: 2117862 - RNA, 19 nt, Homo sapiens
  misc_RNA (1)...(19): siRNA sense strand
gcuaucaacuuacaguaca

SEQ ID NO: 2117863 - RNA, 19 nt, Homo sapiens
  misc_RNA (1)...(19): siRNA sense strand
gugggaagaccuuuagaua

SEQ ID NO: 2117864 - RNA, 19 nt, Homo sapiens
  misc_RNA (1)...(19): siRNA sense strand
gcagaauccauacugguaa

SEQ ID NO: 2117865 - RNA, 19 nt, Homo sapiens
  misc_RNA (1)...(19): siRNA sense strand
guuggaagaugauacaauc

SEQ ID NO: 2117866 - RNA, 19 nt, Homo sapiens
  misc_RNA (1)...(19): siRNA sense strand
ggugagaaacccuuuaaau

SEQ ID NO: 2117867 - RNA, 19 nt, Homo sapiens
  misc_RNA (1)...(19): siRNA sense strand
ugagaaaccuuuugaaugu

SEQ ID NO: 2117868 - RNA, 19 nt, Homo sapiens
  misc_RNA (1)...(19): siRNA sense strand
cagcaucaaagaauucaua

SEQ ID NO: 2117869 - RNA, 19 nt, Homo sapiens
  misc_RNA (1)...(19): siRNA sense strand
ggagagaaacccuaugagu

SEQ ID NO: 2117870 - RNA, 19 nt, Homo sapiens
  misc_RNA (1)...(19): siRNA sense strand
ggcaaggccuuuaguacug

SEQ ID NO: 2117871 - RNA, 19 nt, Homo sapiens
  misc_RNA (1)...(19): siRNA sense strand
ugagaaaccuuuugaaugu

SEQ ID NO: 2117872 - RNA, 19 nt, Homo sapiens
  misc_RNA (1)...(19): siRNA sense strand
ccacucaaauguaagcaau

SEQ ID NO: 2117873 - RNA, 19 nt, Homo sapiens
  misc_RNA (1)...(19): siRNA sense strand
ggugagaaacccuauaaau

SEQ ID NO: 2117874 - RNA, 19 nt, Homo sapiens
  misc_RNA (1)...(19): siRNA sense strand
caacucaccauacaucaga

SEQ ID NO: 2117875 - RNA, 19 nt, Homo sapiens
  misc_RNA (1)...(19): siRNA sense strand
cgagaagcccuaugaaugu

SEQ ID NO: 2117876 - RNA, 19 nt, Homo sapiens
  misc_RNA (1)...(19): siRNA sense strand
ggacaucaacucaccauac

SEQ ID NO: 2117877 - RNA, 19 nt, Homo sapiens
  misc_RNA (1)...(19): siRNA sense strand
gaaacccuuuaaaugcaaa

SEQ ID NO: 2117878 - RNA, 19 nt, Homo sapiens
  misc_RNA (1)...(19): siRNA sense strand
acagagaugugauguugga

SEQ ID NO: 2117879 - RNA, 19 nt, Homo sapiens
  misc_RNA (1)...(19): siRNA sense strand
cagcuuaccguacaucaaa

SEQ ID NO: 2117880 - RNA, 19 nt, Homo sapiens
  misc_RNA (1)...(19): siRNA sense strand
caccauacaucagagauug

SEQ ID NO: 2117881 - RNA, 19 nt, Homo sapiens
  misc_RNA (1)...(19): siRNA sense strand
gaacuuuaguaauggacau

SEQ ID NO: 2117882 - RNA, 19 nt, Homo sapiens
  misc_RNA (1)...(19): siRNA sense strand
uaagaagcccuaugagugu

SEQ ID NO: 2117883 - RNA, 19 nt, Homo sapiens
  misc_RNA (1)...(19): siRNA sense strand
guacaucaaaggguucaua

SEQ ID NO: 2117884 - RNA, 19 nt, Homo sapiens
  misc_RNA (1)...(19): siRNA sense strand
gaaacccuaugaauguaag

SEQ ID NO: 2117885 - RNA, 19 nt, Homo sapiens
  misc_RNA (1)...(19): siRNA sense strand
gaaacccuaugaauguaag

SEQ ID NO: 2117886 - RNA, 19 nt, Homo sapiens
  misc_RNA (1)...(19): siRNA sense strand
cccaacagauguaaagaau

SEQ ID NO: 2117887 - RNA, 19 nt, Homo sapiens
  misc_RNA (1)...(19): siRNA sense strand
ugagaaacccuuuaaaugc

SEQ ID NO: 2117888 - RNA, 19 nt, Homo sapiens
  misc_RNA (1)...(19): siRNA sense strand
caucaaagaauucauacug

SEQ ID NO: 2117889 - RNA, 19 nt, Homo sapiens
  misc_RNA (1)...(19): siRNA sense strand
gaauucaugcagagauaaa

SEQ ID NO: 2117890 - RNA, 19 nt, Homo sapiens
  misc_RNA (1)...(19): siRNA sense strand
uuucauaccugguucaaca

SEQ ID NO: 2117891 - RNA, 19 nt, Homo sapiens
  misc_RNA (1)...(19): siRNA sense strand
gauguaaagcccuaugaau

SEQ ID NO: 2117892 - RNA, 19 nt, Homo sapiens
  misc_RNA (1)...(19): siRNA sense strand
gaagaccuuuagauacagu

SEQ ID NO: 2117893 - RNA, 19 nt, Homo sapiens
  misc_RNA (1)...(19): siRNA sense strand
uaaggaauguggaaagacu

SEQ ID NO: 2117894 - RNA, 19 nt, Homo sapiens
  misc_RNA (1)...(19): siRNA sense strand
gugggaagaacuuuaguaa

SEQ ID NO: 2117895 - RNA, 19 nt, Homo sapiens
  misc_RNA (1)...(19): siRNA sense strand
gaauuuaugcugguaggaa

SEQ ID NO: 2117896 - RNA, 19 nt, Homo sapiens
  misc_RNA (1)...(19): siRNA sense strand
caacuuauuggacaucaga

SEQ ID NO: 2117897 - RNA, 19 nt, Homo sapiens
  misc_RNA (1)...(19): siRNA sense strand
agagaaacccuaugagugu

SEQ ID NO: 2117898 - RNA, 19 nt, Homo sapiens
  misc_RNA (1)...(19): siRNA sense strand
gccaucagcuuaccguaca

SEQ ID NO: 2117899 - RNA, 19 nt, Homo sapiens
  misc_RNA (1)...(19): siRNA sense strand
gggaagaaaccauaugagu

SEQ ID NO: 2117900 - RNA, 19 nt, Homo sapiens
  misc_RNA (1)...(19): siRNA sense strand
caucagagaauucauacug

SEQ ID NO: 2117901 - RNA, 19 nt, Homo sapiens
  misc_RNA (1)...(19): siRNA sense strand
ucuaguauauggaaagcuu

SEQ ID NO: 2117902 - RNA, 19 nt, Homo sapiens
  misc_RNA (1)...(19): siRNA sense strand
gaacaucagcggguacaca

SEQ ID NO: 2117903 - RNA, 19 nt, Homo sapiens
  misc_RNA (1)...(19): siRNA sense strand
gaaggccuuuagacuuaau

SEQ ID NO: 2117904 - RNA, 19 nt, Homo sapiens
  misc_RNA (1)...(19): siRNA sense strand
agucgugccucauaucuug

SEQ ID NO: 2117905 - RNA, 19 nt, Homo sapiens
  misc_RNA (1)...(19): siRNA sense strand
acagaaaccacgugaaugu

SEQ ID NO: 2117906 - RNA, 19 nt, Homo sapiens
  misc_RNA (1)...(19): siRNA sense strand
uuaaagugcaucugagaaa

SEQ ID NO: 2117907 - RNA, 19 nt, Homo sapiens
  misc_RNA (1)...(19): siRNA sense strand
ggcaaggccuucaguucug

SEQ ID NO: 2117908 - RNA, 19 nt, Homo sapiens
  misc_RNA (1)...(19): siRNA sense strand
gguaagaagcccuaugagu

SEQ ID NO: 2117909 - RNA, 19 nt, Homo sapiens
  misc_RNA (1)...(19): siRNA sense strand
caucaaaggguucauacug

SEQ ID NO: 2117910 - RNA, 19 nt, Homo sapiens
  misc_RNA (1)...(19): siRNA sense strand
ggaaggccuuuagcacuag

SEQ ID NO: 2117911 - RNA, 19 nt, Homo sapiens
  misc_RNA (1)...(19): siRNA sense strand
uaaagaaugugggaagaac

SEQ ID NO: 2117912 - RNA, 19 nt, Homo sapiens
  misc_RNA (1)...(19): siRNA sense strand
agacagaaaccacgugaau

SEQ ID NO: 2117913 - RNA, 19 nt, Homo sapiens
  misc_RNA (1)...(19): siRNA sense strand
gaacaucggggaauuuaug

SEQ ID NO: 2117914 - RNA, 19 nt, Homo sapiens
  misc_RNA (1)...(19): siRNA sense strand
gaaacccuaugaauguaac

SEQ ID NO: 2117915 - RNA, 19 nt, Homo sapiens
  misc_RNA (1)...(19): siRNA sense strand
gaauguaaggaauguggaa

SEQ ID NO: 2117916 - RNA, 19 nt, Homo sapiens
  misc_RNA (1)...(19): siRNA sense strand
gaauguaaggaauguggaa

SEQ ID NO: 2117917 - RNA, 19 nt, Homo sapiens
  misc_RNA (1)...(19): siRNA sense strand
guaaagaaugugggaagaa

SEQ ID NO: 2117918 - RNA, 19 nt, Homo sapiens
  misc_RNA (1)...(19): siRNA sense strand
ugucaaagcucaucucuua

SEQ ID NO: 2117919 - RNA, 19 nt, Homo sapiens
  misc_RNA (1)...(19): siRNA sense strand
gaaagaaggcauauaaaug

SEQ ID NO: 2117920 - RNA, 19 nt, Homo sapiens
  misc_RNA (1)...(19): siRNA sense strand
gggaaagccuucugucaaa

SEQ ID NO: 2117921 - RNA, 19 nt, Homo sapiens
  misc_RNA (1)...(19): siRNA sense strand
agagaaaccuuaugaaugu

SEQ ID NO: 2117922 - RNA, 19 nt, Homo sapiens
  misc_RNA (1)...(19): siRNA sense strand
agagaaaccuuaugaaugu

SEQ ID NO: 2117923 - RNA, 19 nt, Homo sapiens
  misc_RNA (1)...(19): siRNA sense strand
agagaaaccuuaugaaugu

SEQ ID NO: 2117924 - RNA, 19 nt, Homo sapiens
  misc_RNA (1)...(19): siRNA sense strand
cgaaucacaucacuuauug

SEQ ID NO: 2117925 - RNA, 19 nt, Homo sapiens
  misc_RNA (1)...(19): siRNA sense strand
cagaagcaauaccucauua

SEQ ID NO: 2117926 - RNA, 19 nt, Homo sapiens
  misc_RNA (1)...(19): siRNA sense strand
cagaagcaauaccucauua

SEQ ID NO: 2117927 - RNA, 19 nt, Homo sapiens
  misc_RNA (1)...(19): siRNA sense strand
ggaaagaaggcauauaaau

SEQ ID NO: 2117928 - RNA, 19 nt, Homo sapiens
  misc_RNA (1)...(19): siRNA sense strand
gagagaaacccuacaaaug

SEQ ID NO: 2117929 - RNA, 19 nt, Homo sapiens
  misc_RNA (1)...(19): siRNA sense strand
gagaaacccuaugaaugua

SEQ ID NO: 2117930 - RNA, 19 nt, Homo sapiens
  misc_RNA (1)...(19): siRNA sense strand
aagaagcccuuuaaaugua

SEQ ID NO: 2117931 - RNA, 19 nt, Homo sapiens
  misc_RNA (1)...(19): siRNA sense strand
gagagaaaccuuaugaaug

SEQ ID NO: 2117932 - RNA, 19 nt, Homo sapiens
  misc_RNA (1)...(19): siRNA sense strand
gagagaaaccuuaugaaug

SEQ ID NO: 2117933 - RNA, 19 nt, Homo sapiens
  misc_RNA (1)...(19): siRNA sense strand
gagagaaaccuuaugaaug

SEQ ID NO: 2117934 - RNA, 19 nt, Homo sapiens
  misc_RNA (1)...(19): siRNA sense strand
ucucgagucucaucucuua

SEQ ID NO: 2117935 - RNA, 19 nt, Homo sapiens
  misc_RNA (1)...(19): siRNA sense strand
gaagcaauaccucauuaaa

SEQ ID NO: 2117936 - RNA, 19 nt, Homo sapiens
  misc_RNA (1)...(19): siRNA sense strand
gaagcaauaccucauuaaa

SEQ ID NO: 2117937 - RNA, 19 nt, Homo sapiens
  misc_RNA (1)...(19): siRNA sense strand
gagagaaacccuaugaaug

SEQ ID NO: 2117938 - RNA, 19 nt, Homo sapiens
  misc_RNA (1)...(19): siRNA sense strand
guacaugugagaauucaua

SEQ ID NO: 2117939 - RNA, 19 nt, Homo sapiens
  misc_RNA (1)...(19): siRNA sense strand
ggagagaaaccuuaugaau

SEQ ID NO: 2117940 - RNA, 19 nt, Homo sapiens
  misc_RNA (1)...(19): siRNA sense strand
ggagagaaaccuuaugaau

SEQ ID NO: 2117941 - RNA, 19 nt, Homo sapiens
  misc_RNA (1)...(19): siRNA sense strand
ggagagaaaccuuaugaau

SEQ ID NO: 2117942 - RNA, 19 nt, Homo sapiens
  misc_RNA (1)...(19): siRNA sense strand
caggaaagaaggcauauaa

SEQ ID NO: 2117943 - RNA, 19 nt, Homo sapiens
  misc_RNA (1)...(19): siRNA sense strand
ucacaucacuuauuguaca

SEQ ID NO: 2117944 - RNA, 19 nt, Homo sapiens
  misc_RNA (1)...(19): siRNA sense strand
uggaaagucuucagcauga

SEQ ID NO: 2117945 - RNA, 19 nt, Homo sapiens
  misc_RNA (1)...(19): siRNA sense strand
ggaaaagccuucucucgaa

SEQ ID NO: 2117946 - RNA, 19 nt, Homo sapiens
  misc_RNA (1)...(19): siRNA sense strand
ggagagaaacccuaugaau

SEQ ID NO: 2117947 - RNA, 19 nt, Homo sapiens
  misc_RNA (1)...(19): siRNA sense strand
ggagagaaacccuacaaau

SEQ ID NO: 2117948 - RNA, 19 nt, Homo sapiens
  misc_RNA (1)...(19): siRNA sense strand
gagaaaccuuauacgugua

SEQ ID NO: 2117949 - RNA, 19 nt, Homo sapiens
  misc_RNA (1)...(19): siRNA sense strand
gaaggaaaaccucauuaua

SEQ ID NO: 2117950 - RNA, 19 nt, Homo sapiens
  misc_RNA (1)...(19): siRNA sense strand
gaaacccuaugaauguaau

SEQ ID NO: 2117951 - RNA, 19 nt, Homo sapiens
  misc_RNA (1)...(19): siRNA sense strand
gaacaaucuucaggcagaa

SEQ ID NO: 2117952 - RNA, 19 nt, Homo sapiens
  misc_RNA (1)...(19): siRNA sense strand
gagaauccauacuggugaa

SEQ ID NO: 2117953 - RNA, 19 nt, Homo sapiens
  misc_RNA (1)...(19): siRNA sense strand
gagaaaccuuaugaaugua

SEQ ID NO: 2117954 - RNA, 19 nt, Homo sapiens
  misc_RNA (1)...(19): siRNA sense strand
gaagucaagccucauuaga

SEQ ID NO: 2117955 - RNA, 19 nt, Homo sapiens
  misc_RNA (1)...(19): siRNA sense strand
gagaaaccuuaugaaugua

SEQ ID NO: 2117956 - RNA, 19 nt, Homo sapiens
  misc_RNA (1)...(19): siRNA sense strand
agagaaacccuacaaaugu

SEQ ID NO: 2117957 - RNA, 19 nt, Homo sapiens
  misc_RNA (1)...(19): siRNA sense strand
ucucgaaucacaucacuua

SEQ ID NO: 2117958 - RNA, 19 nt, Homo sapiens
  misc_RNA (1)...(19): siRNA sense strand
agagaaacccuaugaaugu

SEQ ID NO: 2117959 - RNA, 19 nt, Homo sapiens
  misc_RNA (1)...(19): siRNA sense strand
gcaaagcauaucucacuga

SEQ ID NO: 2117960 - RNA, 19 nt, Homo sapiens
  misc_RNA (1)...(19): siRNA sense strand
gcagaagcaauaccucauu

SEQ ID NO: 2117961 - RNA, 19 nt, Homo sapiens
  misc_RNA (1)...(19): siRNA sense strand
aaagucacaucacauuaga

SEQ ID NO: 2117962 - RNA, 19 nt, Homo sapiens
  misc_RNA (1)...(19): siRNA sense strand
agcaauaccucauuaaaca

SEQ ID NO: 2117963 - RNA, 19 nt, Homo sapiens
  misc_RNA (1)...(19): siRNA sense strand
agcaauaccucauuaaaca

SEQ ID NO: 2117964 - RNA, 19 nt, Homo sapiens
  misc_RNA (1)...(19): siRNA sense strand
uaaugaauguggaacaauc

SEQ ID NO: 2117965 - RNA, 19 nt, Homo sapiens
  misc_RNA (1)...(19): siRNA sense strand
gaaaccuuaugaaugugaa

SEQ ID NO: 2117966 - RNA, 19 nt, Homo sapiens
  misc_RNA (1)...(19): siRNA sense strand
ggagagaaaccuuauacgu

SEQ ID NO: 2117967 - RNA, 19 nt, Homo sapiens
  misc_RNA (1)...(19): siRNA sense strand
gcaagucaaaucucacaga

SEQ ID NO: 2117968 - RNA, 19 nt, Homo sapiens
  misc_RNA (1)...(19): siRNA sense strand
ggaaagccuucugucaaag

SEQ ID NO: 2117969 - RNA, 19 nt, Homo sapiens
  misc_RNA (1)...(19): siRNA sense strand
gaaaauucauacuggagaa

SEQ ID NO: 2117970 - RNA, 19 nt, Homo sapiens
  misc_RNA (1)...(19): siRNA sense strand
acacaggagagaaaccuua

SEQ ID NO: 2117971 - RNA, 19 nt, Homo sapiens
  misc_RNA (1)...(19): siRNA sense strand
caucagaacauccauacug

SEQ ID NO: 2117972 - RNA, 19 nt, Homo sapiens
  misc_RNA (1)...(19): siRNA sense strand
cagaucuccuucagcauga

SEQ ID NO: 2117973 - RNA, 19 nt, Homo sapiens
  misc_RNA (1)...(19): siRNA sense strand
gcaugaaucagaucuccuu

SEQ ID NO: 2117974 - RNA, 19 nt, Homo sapiens
  misc_RNA (1)...(19): siRNA sense strand
ucucaucucuuacucuaca

SEQ ID NO: 2117975 - RNA, 19 nt, Homo sapiens
  misc_RNA (1)...(19): siRNA sense strand
gaauucauacaggugauaa

SEQ ID NO: 2117976 - RNA, 19 nt, Homo sapiens
  misc_RNA (1)...(19): siRNA sense strand
gaaaagccuucucucgaau

SEQ ID NO: 2117977 - RNA, 19 nt, Homo sapiens
  misc_RNA (1)...(19): siRNA sense strand
caggagagaaacccuauga

SEQ ID NO: 2117978 - RNA, 19 nt, Homo sapiens
  misc_RNA (1)...(19): siRNA sense strand
cagaagucaagccucauua

SEQ ID NO: 2117979 - RNA, 19 nt, Homo sapiens
  misc_RNA (1)...(19): siRNA sense strand
ucucaugaaugcacugaau

SEQ ID NO: 2117980 - RNA, 19 nt, Homo sapiens
  misc_RNA (1)...(19): siRNA sense strand
caucagagaauccauacug

SEQ ID NO: 2117981 - RNA, 19 nt, Homo sapiens
  misc_RNA (1)...(19): siRNA sense strand
aaacaucagaacauccaua

SEQ ID NO: 2117982 - RNA, 19 nt, Homo sapiens
  misc_RNA (1)...(19): siRNA sense strand
gaauguaaucaguguggaa

SEQ ID NO: 2117983 - RNA, 19 nt, Homo sapiens
  misc_RNA (1)...(19): siRNA sense strand
gaauguggaacaaucuuca

SEQ ID NO: 2117984 - RNA, 19 nt, Homo sapiens
  misc_RNA (1)...(19): siRNA sense strand
aaagugugcucucgagucu

SEQ ID NO: 2117985 - RNA, 19 nt, Homo sapiens
  misc_RNA (1)...(19): siRNA sense strand
ccagagaauucauacucau

SEQ ID NO: 2117986 - RNA, 19 nt, Homo sapiens
  misc_RNA (1)...(19): siRNA sense strand
agucaagccucauuagaca

SEQ ID NO: 2117987 - RNA, 19 nt, Homo sapiens
  misc_RNA (1)...(19): siRNA sense strand
agucucaucucuuacucua

SEQ ID NO: 2117988 - RNA, 19 nt, Homo sapiens
  misc_RNA (1)...(19): siRNA sense strand
gaagucacacaggaaagaa

SEQ ID NO: 2117989 - RNA, 19 nt, Homo sapiens
  misc_RNA (1)...(19): siRNA sense strand
caaagcucaucucuuacug

SEQ ID NO: 2117990 - RNA, 19 nt, Homo sapiens
  misc_RNA (1)...(19): siRNA sense strand
caucacuuauuguacaugu

SEQ ID NO: 2117991 - RNA, 19 nt, Homo sapiens
  misc_RNA (1)...(19): siRNA sense strand
ucucuuacucuacaccuua

SEQ ID NO: 2117992 - RNA, 19 nt, Homo sapiens
  misc_RNA (1)...(19): siRNA sense strand
ucacagagcaugagaaaau

SEQ ID NO: 2117993 - RNA, 19 nt, Homo sapiens
  misc_RNA (1)...(19): siRNA sense strand
ccagaagcaauaccucauu

SEQ ID NO: 2117994 - RNA, 19 nt, Homo sapiens
  misc_RNA (1)...(19): siRNA sense strand
acacaggaaagaaggcaua

SEQ ID NO: 2117995 - RNA, 19 nt, Homo sapiens
  misc_RNA (1)...(19): siRNA sense strand
acaucacacuggagagaaa

SEQ ID NO: 2117996 - RNA, 19 nt, Homo sapiens
  misc_RNA (1)...(19): siRNA sense strand
agacaccagagaauucaua

SEQ ID NO: 2117997 - RNA, 19 nt, Homo sapiens
  misc_RNA (1)...(19): siRNA sense strand
gagaauucauacaggugau

SEQ ID NO: 2117998 - RNA, 19 nt, Homo sapiens
  misc_RNA (1)...(19): siRNA sense strand
ucgaaucacaucacuuauu

SEQ ID NO: 2117999 - RNA, 19 nt, Homo sapiens
  misc_RNA (1)...(19): siRNA sense strand
caucaucagacaccagaaa

SEQ ID NO: 2118000 - RNA, 19 nt, Homo sapiens
  misc_RNA (1)...(19): siRNA sense strand
acacuggagagaaaccuua

SEQ ID NO: 2118001 - RNA, 19 nt, Homo sapiens
  misc_RNA (1)...(19): siRNA sense strand
gaaaagccuucagccagaa

SEQ ID NO: 2118002 - RNA, 19 nt, Homo sapiens
  misc_RNA (1)...(19): siRNA sense strand
gagaaaccuuaugaaugug

SEQ ID NO: 2118003 - RNA, 19 nt, Homo sapiens
  misc_RNA (1)...(19): siRNA sense strand
ccaaacccuaugcauguaa

SEQ ID NO: 2118004 - RNA, 19 nt, Homo sapiens
  misc_RNA (1)...(19): siRNA sense strand
caaaagucacaucacauua

SEQ ID NO: 2118005 - RNA, 19 nt, Homo sapiens
  misc_RNA (1)...(19): siRNA sense strand
uguaaugaauguggaacaa

SEQ ID NO: 2118006 - RNA, 19 nt, Homo sapiens
  misc_RNA (1)...(19): siRNA sense strand
cauuauacaucagagaauc

SEQ ID NO: 2118007 - RNA, 19 nt, Homo sapiens
  misc_RNA (1)...(19): siRNA sense strand
cauuaaacaucagaacauc

SEQ ID NO: 2118008 - RNA, 19 nt, Homo sapiens
  misc_RNA (1)...(19): siRNA sense strand
aaccaaacccuaugcaugu

SEQ ID NO: 2118009 - RNA, 19 nt, Homo sapiens
  misc_RNA (1)...(19): siRNA sense strand
cagagaauucauacucauu

SEQ ID NO: 2118010 - RNA, 19 nt, Homo sapiens
  misc_RNA (1)...(19): siRNA sense strand
gugaaugugggaaagcuuu

SEQ ID NO: 2118011 - RNA, 19 nt, Homo sapiens
  misc_RNA (1)...(19): siRNA sense strand
aaacaucacacuggagaga

SEQ ID NO: 2118012 - RNA, 19 nt, Homo sapiens
  misc_RNA (1)...(19): siRNA sense strand
auacaucagagaauccaua

SEQ ID NO: 2118013 - RNA, 19 nt, Homo sapiens
  misc_RNA (1)...(19): siRNA sense strand
gaaaaccucauuauacauc

SEQ ID NO: 2118014 - RNA, 19 nt, Homo sapiens
  misc_RNA (1)...(19): siRNA sense strand
gcaauaccucauuaaacau

SEQ ID NO: 2118015 - RNA, 19 nt, Homo sapiens
  misc_RNA (1)...(19): siRNA sense strand
gcaauaccucauuaaacau

SEQ ID NO: 2118016 - RNA, 19 nt, Homo sapiens
  misc_RNA (1)...(19): siRNA sense strand
ucagaagucaagccucauu

SEQ ID NO: 2118017 - RNA, 19 nt, Homo sapiens
  misc_RNA (1)...(19): siRNA sense strand
cacauuagacaccagagaa

SEQ ID NO: 2118018 - RNA, 19 nt, Homo sapiens
  misc_RNA (1)...(19): siRNA sense strand
acaagugccuggaagaguu

SEQ ID NO: 2118019 - RNA, 19 nt, Homo sapiens
  misc_RNA (1)...(19): siRNA sense strand
acacuaacaucgacaaugg

SEQ ID NO: 2118020 - RNA, 19 nt, Homo sapiens
  misc_RNA (1)...(19): siRNA sense strand
guaccuggcggucaucaaa

SEQ ID NO: 2118021 - RNA, 19 nt, Homo sapiens
  misc_RNA (1)...(19): siRNA sense strand
gcccaaaacuugauucaga

SEQ ID NO: 2118022 - RNA, 19 nt, Homo sapiens
  misc_RNA (1)...(19): siRNA sense strand
uaacaucgacaauggacaa

SEQ ID NO: 2118023 - RNA, 19 nt, Homo sapiens
  misc_RNA (1)...(19): siRNA sense strand
auacagcgcuuugacaagu

SEQ ID NO: 2118024 - RNA, 19 nt, Homo sapiens
  misc_RNA (1)...(19): siRNA sense strand
ggucaucaaagcccagauu

SEQ ID NO: 2118025 - RNA, 19 nt, Homo sapiens
  misc_RNA (1)...(19): siRNA sense strand
gccaagcacucuccaacgu

SEQ ID NO: 2118026 - RNA, 19 nt, Homo sapiens
  misc_RNA (1)...(19): siRNA sense strand
gauccugugcagcguuaua

SEQ ID NO: 2118027 - RNA, 19 nt, Homo sapiens
  misc_RNA (1)...(19): siRNA sense strand
gaacacuaacaucgacaau

SEQ ID NO: 2118028 - RNA, 19 nt, Homo sapiens
  misc_RNA (1)...(19): siRNA sense strand
ucgauccugugcagcguua

SEQ ID NO: 2118029 - RNA, 19 nt, Homo sapiens
  misc_RNA (1)...(19): siRNA sense strand
ccauacagcgcuuugacaa

SEQ ID NO: 2118030 - RNA, 19 nt, Homo sapiens
  misc_RNA (1)...(19): siRNA sense strand
ggacaaaagagcagugaug

SEQ ID NO: 2118031 - RNA, 19 nt, Homo sapiens
  misc_RNA (1)...(19): siRNA sense strand
gcugguguaucggguccua

SEQ ID NO: 2118032 - RNA, 19 nt, Homo sapiens
  misc_RNA (1)...(19): siRNA sense strand
gcuggacugugccaacaag

SEQ ID NO: 2118033 - RNA, 19 nt, Homo sapiens
  misc_RNA (1)...(19): siRNA sense strand
gagagacgcagucguaacg

SEQ ID NO: 2118034 - RNA, 19 nt, Homo sapiens
  misc_RNA (1)...(19): siRNA sense strand
cacaguaccuggcggucau

SEQ ID NO: 2118035 - RNA, 19 nt, Homo sapiens
  misc_RNA (1)...(19): siRNA sense strand
ggacccauacagcgcuuug

SEQ ID NO: 2118036 - RNA, 19 nt, Homo sapiens
  misc_RNA (1)...(19): siRNA sense strand
caaggucacgggcaagaca

SEQ ID NO: 2118037 - RNA, 19 nt, Homo sapiens
  misc_RNA (1)...(19): siRNA sense strand
ggggagagacgcagucgua

SEQ ID NO: 2118038 - RNA, 19 nt, Homo sapiens
  misc_RNA (1)...(19): siRNA sense strand
caucaaagcccagauuucc

SEQ ID NO: 2118039 - RNA, 19 nt, Homo sapiens
  misc_RNA (1)...(19): siRNA sense strand
gggagagacgcagucguaa

SEQ ID NO: 2118040 - RNA, 19 nt, Homo sapiens
  misc_RNA (1)...(19): siRNA sense strand
ccaagcacucuccaacguu

SEQ ID NO: 2118041 - RNA, 19 nt, Homo sapiens
  misc_RNA (1)...(19): siRNA sense strand
ggagagacgcagucguaac

SEQ ID NO: 2118042 - RNA, 19 nt, Homo sapiens
  misc_RNA (1)...(19): siRNA sense strand
gaaaagcaacggggagaga

SEQ ID NO: 2118043 - RNA, 19 nt, Homo sapiens
  misc_RNA (1)...(19): siRNA sense strand
gacaagugccuggaagagu

SEQ ID NO: 2118044 - RNA, 19 nt, Homo sapiens
  misc_RNA (1)...(19): siRNA sense strand
gucaucaaagcccagauuu

SEQ ID NO: 2118045 - RNA, 19 nt, Homo sapiens
  misc_RNA (1)...(19): siRNA sense strand
agacaaaccuggaugaaga

SEQ ID NO: 2118046 - RNA, 19 nt, Homo sapiens
  misc_RNA (1)...(19): siRNA sense strand
gugagaagcuugacuacaa

SEQ ID NO: 2118047 - RNA, 19 nt, Homo sapiens
  misc_RNA (1)...(19): siRNA sense strand
ucaggcagcugcaggaauu

SEQ ID NO: 2118048 - RNA, 19 nt, Homo sapiens
  misc_RNA (1)...(19): siRNA sense strand
ucaagaggcugcaguucaa

SEQ ID NO: 2118049 - RNA, 19 nt, Homo sapiens
  misc_RNA (1)...(19): siRNA sense strand
ccacggcccugaagaugaa

SEQ ID NO: 2118050 - RNA, 19 nt, Homo sapiens
  misc_RNA (1)...(19): siRNA sense strand
caacaucuccuucaacaag

SEQ ID NO: 2118051 - RNA, 19 nt, Homo sapiens
  misc_RNA (1)...(19): siRNA sense strand
uggguaaccugcucaaguu

SEQ ID NO: 2118052 - RNA, 19 nt, Homo sapiens
  misc_RNA (1)...(19): siRNA sense strand
ggaacaaccacgugcuaga

SEQ ID NO: 2118053 - RNA, 19 nt, Homo sapiens
  misc_RNA (1)...(19): siRNA sense strand
guaaccugcucaaguucaa

SEQ ID NO: 2118054 - RNA, 19 nt, Homo sapiens
  misc_RNA (1)...(19): siRNA sense strand
agaacgggcucaucagcaa

SEQ ID NO: 2118055 - RNA, 19 nt, Homo sapiens
  misc_RNA (1)...(19): siRNA sense strand
gcagacaaaccuggaugaa

SEQ ID NO: 2118056 - RNA, 19 nt, Homo sapiens
  misc_RNA (1)...(19): siRNA sense strand
agaaagaggcggugaagag

SEQ ID NO: 2118057 - RNA, 19 nt, Homo sapiens
  misc_RNA (1)...(19): siRNA sense strand
ccugaaaggugagaagcuu

SEQ ID NO: 2118058 - RNA, 19 nt, Homo sapiens
  misc_RNA (1)...(19): siRNA sense strand
aaaccuggaugaagauggu

SEQ ID NO: 2118059 - RNA, 19 nt, Homo sapiens
  misc_RNA (1)...(19): siRNA sense strand
gacuggaccuucgggagaa

SEQ ID NO: 2118060 - RNA, 19 nt, Homo sapiens
  misc_RNA (1)...(19): siRNA sense strand
ggagaacgagaucaagaca

SEQ ID NO: 2118061 - RNA, 19 nt, Homo sapiens
  misc_RNA (1)...(19): siRNA sense strand
gaacaaccacgugcuagac

SEQ ID NO: 2118062 - RNA, 19 nt, Homo sapiens
  misc_RNA (1)...(19): siRNA sense strand
ugaaaggugagaagcuuga

SEQ ID NO: 2118063 - RNA, 19 nt, Homo sapiens
  misc_RNA (1)...(19): siRNA sense strand
gcccugaagaugaacauga

SEQ ID NO: 2118064 - RNA, 19 nt, Homo sapiens
  misc_RNA (1)...(19): siRNA sense strand
cccugaagaugaacaugaa

SEQ ID NO: 2118065 - RNA, 19 nt, Homo sapiens
  misc_RNA (1)...(19): siRNA sense strand
gcuccaagaacgagaagga

SEQ ID NO: 2118066 - RNA, 19 nt, Homo sapiens
  misc_RNA (1)...(19): siRNA sense strand
aagaggcggugaagagcuu

SEQ ID NO: 2118067 - RNA, 19 nt, Homo sapiens
  misc_RNA (1)...(19): siRNA sense strand
cucaacaucuccuucaaca

SEQ ID NO: 2118068 - RNA, 19 nt, Homo sapiens
  misc_RNA (1)...(19): siRNA sense strand
ccacccaccucaacaucuc

SEQ ID NO: 2118069 - RNA, 19 nt, Homo sapiens
  misc_RNA (1)...(19): siRNA sense strand
ugacacugccgcacacuca

SEQ ID NO: 2118070 - RNA, 19 nt, Homo sapiens
  misc_RNA (1)...(19): siRNA sense strand
caagaaagaggcggugaag

SEQ ID NO: 2118071 - RNA, 19 nt, Homo sapiens
  misc_RNA (1)...(19): siRNA sense strand
ccaagaaagaggcggugaa

SEQ ID NO: 2118072 - RNA, 19 nt, Homo sapiens
  misc_RNA (1)...(19): siRNA sense strand
guaccuggcggacaacaag

SEQ ID NO: 2118073 - RNA, 19 nt, Homo sapiens
  misc_RNA (1)...(19): siRNA sense strand
gggagagggaggagaagga

SEQ ID NO: 2118074 - RNA, 19 nt, Homo sapiens
  misc_RNA (1)...(19): siRNA sense strand
gccacggcccugaagauga

SEQ ID NO: 2118075 - RNA, 19 nt, Homo sapiens
  misc_RNA (1)...(19): siRNA sense strand
ccaccgagcagcggauuuc

SEQ ID NO: 2118076 - RNA, 19 nt, Homo sapiens
  misc_RNA (1)...(19): siRNA sense strand
gguaaccugcucaaguuca

SEQ ID NO: 2118077 - RNA, 19 nt, Homo sapiens
  misc_RNA (1)...(19): siRNA sense strand
ccucggcccucuucgacau

SEQ ID NO: 2118078 - RNA, 19 nt, Homo sapiens
  misc_RNA (1)...(19): siRNA sense strand
aaggugagaagcuugacua

SEQ ID NO: 2118079 - RNA, 19 nt, Homo sapiens
  misc_RNA (1)...(19): siRNA sense strand
ucgacugucuggaccugaa

SEQ ID NO: 2118080 - RNA, 19 nt, Homo sapiens
  misc_RNA (1)...(19): siRNA sense strand
ccugugaggcccuggaaga

SEQ ID NO: 2118081 - RNA, 19 nt, Homo sapiens
  misc_RNA (1)...(19): siRNA sense strand
ggaagccagucaggaaucc

SEQ ID NO: 2118082 - RNA, 19 nt, Homo sapiens
  misc_RNA (1)...(19): siRNA sense strand
gacaaaccuggaugaagau

SEQ ID NO: 2118083 - RNA, 19 nt, Homo sapiens
  misc_RNA (1)...(19): siRNA sense strand
ugacccuggugcuguggaa

SEQ ID NO: 2118084 - RNA, 19 nt, Homo sapiens
  misc_RNA (1)...(19): siRNA sense strand
cgggagaacgagaucaaga

SEQ ID NO: 2118085 - RNA, 19 nt, Homo sapiens
  misc_RNA (1)...(19): siRNA sense strand
ccaaagagcugaaccagua

SEQ ID NO: 2118086 - RNA, 19 nt, Homo sapiens
  misc_RNA (1)...(19): siRNA sense strand
ggaagaaggugaauuggaa

SEQ ID NO: 2118087 - RNA, 19 nt, Homo sapiens
  misc_RNA (1)...(19): siRNA sense strand
ccaaggagcugaaccagua

SEQ ID NO: 2118088 - RNA, 19 nt, Homo sapiens
  misc_RNA (1)...(19): siRNA sense strand
gcugagaacugcccuuaua

SEQ ID NO: 2118089 - RNA, 19 nt, Homo sapiens
  misc_RNA (1)...(19): siRNA sense strand
cgagggagcucuuggauaa

SEQ ID NO: 2118090 - RNA, 19 nt, Homo sapiens
  misc_RNA (1)...(19): siRNA sense strand
gagagaagccggaaagaaa

SEQ ID NO: 2118091 - RNA, 19 nt, Homo sapiens
  misc_RNA (1)...(19): siRNA sense strand
ggagaccacuguaauuuua

SEQ ID NO: 2118092 - RNA, 19 nt, Homo sapiens
  misc_RNA (1)...(19): siRNA sense strand
caagaaaggcaaagucauu

SEQ ID NO: 2118093 - RNA, 19 nt, Homo sapiens
  misc_RNA (1)...(19): siRNA sense strand
gaagaaagagcgggagaaa

SEQ ID NO: 2118094 - RNA, 19 nt, Homo sapiens
  misc_RNA (1)...(19): siRNA sense strand
ugacuucucugacuucuca

SEQ ID NO: 2118095 - RNA, 19 nt, Homo sapiens
  misc_RNA (1)...(19): siRNA sense strand
cagggaagauggagaguug

SEQ ID NO: 2118096 - RNA, 19 nt, Homo sapiens
  misc_RNA (1)...(19): siRNA sense strand
ggagaaggccgugaacauu

SEQ ID NO: 2118097 - RNA, 19 nt, Homo sapiens
  misc_RNA (1)...(19): siRNA sense strand
agaaagagcgggagaaaga

SEQ ID NO: 2118098 - RNA, 19 nt, Homo sapiens
  misc_RNA (1)...(19): siRNA sense strand
gaaggugaauuggaagaug

SEQ ID NO: 2118099 - RNA, 19 nt, Homo sapiens
  misc_RNA (1)...(19): siRNA sense strand
ggaggacuaugacgacuuc

SEQ ID NO: 2118100 - RNA, 19 nt, Homo sapiens
  misc_RNA (1)...(19): siRNA sense strand
gaacuucuaugaaaacuuc

SEQ ID NO: 2118101 - RNA, 19 nt, Homo sapiens
  misc_RNA (1)...(19): siRNA sense strand
gaacaagggcggaaugaac

SEQ ID NO: 2118102 - RNA, 19 nt, Homo sapiens
  misc_RNA (1)...(19): siRNA sense strand
ggaaacugguacucaagug

SEQ ID NO: 2118103 - RNA, 19 nt, Homo sapiens
  misc_RNA (1)...(19): siRNA sense strand
gaagauccccuccuuguuu

SEQ ID NO: 2118104 - RNA, 19 nt, Homo sapiens
  misc_RNA (1)...(19): siRNA sense strand
gaugggcccuggcaugaau

SEQ ID NO: 2118105 - RNA, 19 nt, Homo sapiens
  misc_RNA (1)...(19): siRNA sense strand
gagcugagaacugcccuua

SEQ ID NO: 2118106 - RNA, 19 nt, Homo sapiens
  misc_RNA (1)...(19): siRNA sense strand
gaaggcauacuccaagaug

SEQ ID NO: 2118107 - RNA, 19 nt, Homo sapiens
  misc_RNA (1)...(19): siRNA sense strand
gaaacugguacucaaguga

SEQ ID NO: 2118108 - RNA, 19 nt, Homo sapiens
  misc_RNA (1)...(19): siRNA sense strand
gagaaggccgugaacauuc

SEQ ID NO: 2118109 - RNA, 19 nt, Homo sapiens
  misc_RNA (1)...(19): siRNA sense strand
gaggaaauccaagcacaaa

SEQ ID NO: 2118110 - RNA, 19 nt, Homo sapiens
  misc_RNA (1)...(19): siRNA sense strand
ccgcaagucugcccuggaa

SEQ ID NO: 2118111 - RNA, 19 nt, Homo sapiens
  misc_RNA (1)...(19): siRNA sense strand
gagauggacuauggagaga

SEQ ID NO: 2118112 - RNA, 19 nt, Homo sapiens
  misc_RNA (1)...(19): siRNA sense strand
aggaagagauggacuaugg

SEQ ID NO: 2118113 - RNA, 19 nt, Homo sapiens
  misc_RNA (1)...(19): siRNA sense strand
gcagaggagacccaggaua

SEQ ID NO: 2118114 - RNA, 19 nt, Homo sapiens
  misc_RNA (1)...(19): siRNA sense strand
gcagugugcugagcgguau

SEQ ID NO: 2118115 - RNA, 19 nt, Homo sapiens
  misc_RNA (1)...(19): siRNA sense strand
gcagaaacccacagacucu

SEQ ID NO: 2118116 - RNA, 19 nt, Homo sapiens
  misc_RNA (1)...(19): siRNA sense strand
ggacuacgggcacuacgaa

SEQ ID NO: 2118117 - RNA, 19 nt, Homo sapiens
  misc_RNA (1)...(19): siRNA sense strand
gcacaaacgccaugcuucu

SEQ ID NO: 2118118 - RNA, 19 nt, Homo sapiens
  misc_RNA (1)...(19): siRNA sense strand
gcgaugacuucucugacuu

SEQ ID NO: 2118119 - RNA, 19 nt, Homo sapiens
  misc_RNA (1)...(19): siRNA sense strand
gaaugaacgaugacgaaga

SEQ ID NO: 2118120 - RNA, 19 nt, Homo sapiens
  misc_RNA (1)...(19): siRNA sense strand
ucagaugacucggauuuca

SEQ ID NO: 2118121 - RNA, 19 nt, Homo sapiens
  misc_RNA (1)...(19): siRNA sense strand
guacgaggacuacgagaau

SEQ ID NO: 2118122 - RNA, 19 nt, Homo sapiens
  misc_RNA (1)...(19): siRNA sense strand
acaucgaacucccaaagaa

SEQ ID NO: 2118123 - RNA, 19 nt, Homo sapiens
  misc_RNA (1)...(19): siRNA sense strand
caagaguuauggcauguac

SEQ ID NO: 2118124 - RNA, 19 nt, Homo sapiens
  misc_RNA (1)...(19): siRNA sense strand
gaagaaguacagggaauuc

SEQ ID NO: 2118125 - RNA, 19 nt, Homo sapiens
  misc_RNA (1)...(19): siRNA sense strand
aaaaggaggucgaagaaga

SEQ ID NO: 2118126 - RNA, 19 nt, Homo sapiens
  misc_RNA (1)...(19): siRNA sense strand
uggaggaacugaagaagca

SEQ ID NO: 2118127 - RNA, 19 nt, Homo sapiens
  misc_RNA (1)...(19): siRNA sense strand
gacaagaaaggcaaaguca

SEQ ID NO: 2118128 - RNA, 19 nt, Homo sapiens
  misc_RNA (1)...(19): siRNA sense strand
ggacaagaaaggcaaaguc

SEQ ID NO: 2118129 - RNA, 19 nt, Homo sapiens
  misc_RNA (1)...(19): siRNA sense strand
gauggacuauggagagagu

SEQ ID NO: 2118130 - RNA, 19 nt, Homo sapiens
  misc_RNA (1)...(19): siRNA sense strand
ggacauguacaacaagaag

SEQ ID NO: 2118131 - RNA, 19 nt, Homo sapiens
  misc_RNA (1)...(19): siRNA sense strand
cgacgacuaugacgaguac

SEQ ID NO: 2118132 - RNA, 19 nt, Homo sapiens
  misc_RNA (1)...(19): siRNA sense strand
gagaccacccggaggauga

SEQ ID NO: 2118133 - RNA, 19 nt, Homo sapiens
  misc_RNA (1)...(19): siRNA sense strand
guuggaagaaggugaauug

SEQ ID NO: 2118134 - RNA, 19 nt, Homo sapiens
  misc_RNA (1)...(19): siRNA sense strand
gaagcagugucaccuccau

SEQ ID NO: 2118135 - RNA, 19 nt, Homo sapiens
  misc_RNA (1)...(19): siRNA sense strand
ccaagaaggcauacuccaa

SEQ ID NO: 2118136 - RNA, 19 nt, Homo sapiens
  misc_RNA (1)...(19): siRNA sense strand
aaggugaauuggaagauga

SEQ ID NO: 2118137 - RNA, 19 nt, Homo sapiens
  misc_RNA (1)...(19): siRNA sense strand
caggacauguacaacaaga

SEQ ID NO: 2118138 - RNA, 19 nt, Homo sapiens
  misc_RNA (1)...(19): siRNA sense strand
agaaggagguggaggaacu

SEQ ID NO: 2118139 - RNA, 19 nt, Homo sapiens
  misc_RNA (1)...(19): siRNA sense strand
ggaggaaauccaagcacaa

SEQ ID NO: 2118140 - RNA, 19 nt, Homo sapiens
  misc_RNA (1)...(19): siRNA sense strand
ggaugaagaggauuucuac

SEQ ID NO: 2118141 - RNA, 19 nt, Homo sapiens
  misc_RNA (1)...(19): siRNA sense strand
gcaagucugcccuggaaca

SEQ ID NO: 2118142 - RNA, 19 nt, Homo sapiens
  misc_RNA (1)...(19): siRNA sense strand
acugggaacugcaucaaug

SEQ ID NO: 2118143 - RNA, 19 nt, Homo sapiens
  misc_RNA (1)...(19): siRNA sense strand
gagaacugcccuuauaugc

SEQ ID NO: 2118144 - RNA, 19 nt, Homo sapiens
  misc_RNA (1)...(19): siRNA sense strand
ccaaagaagcgagaacugu

SEQ ID NO: 2118145 - RNA, 19 nt, Homo sapiens
  misc_RNA (1)...(19): siRNA sense strand
ucucagaugacucggauuu

SEQ ID NO: 2118146 - RNA, 19 nt, Homo sapiens
  misc_RNA (1)...(19): siRNA sense strand
ggaagaaagagcgggagaa

SEQ ID NO: 2118147 - RNA, 19 nt, Homo sapiens
  misc_RNA (1)...(19): siRNA sense strand
cuacgagaaugagcaguau

SEQ ID NO: 2118148 - RNA, 19 nt, Homo sapiens
  misc_RNA (1)...(19): siRNA sense strand
agaaaggucaccgcaagua

SEQ ID NO: 2118149 - RNA, 19 nt, Homo sapiens
  misc_RNA (1)...(19): siRNA sense strand
gauguuggccgaugaugca

SEQ ID NO: 2118150 - RNA, 19 nt, Homo sapiens
  misc_RNA (1)...(19): siRNA sense strand
gggagaaggccgugaacau

SEQ ID NO: 2118151 - RNA, 19 nt, Homo sapiens
  misc_RNA (1)...(19): siRNA sense strand
agaagcaggugccgaggau

SEQ ID NO: 2118152 - RNA, 19 nt, Homo sapiens
  misc_RNA (1)...(19): siRNA sense strand
caaacgccaugcuucuucu

SEQ ID NO: 2118153 - RNA, 19 nt, Homo sapiens
  misc_RNA (1)...(19): siRNA sense strand
agauggacagcaagaguua

SEQ ID NO: 2118154 - RNA, 19 nt, Homo sapiens
  misc_RNA (1)...(19): siRNA sense strand
aagaaggcauacuccaaga

SEQ ID NO: 2118155 - RNA, 19 nt, Homo sapiens
  misc_RNA (1)...(19): siRNA sense strand
gaaaggucaccgcaaguac

SEQ ID NO: 2118156 - RNA, 19 nt, Homo sapiens
  misc_RNA (1)...(19): siRNA sense strand
caagauggacagcaagagu

SEQ ID NO: 2118157 - RNA, 19 nt, Homo sapiens
  misc_RNA (1)...(19): siRNA sense strand
caagggugcugagggcaau

SEQ ID NO: 2118158 - RNA, 19 nt, Homo sapiens
  misc_RNA (1)...(19): siRNA sense strand
cgaagaagaggaggaaauc

SEQ ID NO: 2118159 - RNA, 19 nt, Homo sapiens
  misc_RNA (1)...(19): siRNA sense strand
ugagagaagccggaaagaa

SEQ ID NO: 2118160 - RNA, 19 nt, Homo sapiens
  misc_RNA (1)...(19): siRNA sense strand
uaugacgacuucaccaaag

SEQ ID NO: 2118161 - RNA, 19 nt, Homo sapiens
  misc_RNA (1)...(19): siRNA sense strand
gcaagaguuauggcaugua

SEQ ID NO: 2118162 - RNA, 19 nt, Homo sapiens
  misc_RNA (1)...(19): siRNA sense strand
ggaaauccaagcacaaacg

SEQ ID NO: 2118163 - RNA, 19 nt, Homo sapiens
  misc_RNA (1)...(19): siRNA sense strand
ucagccacaucaagaagga

SEQ ID NO: 2118164 - RNA, 19 nt, Homo sapiens
  misc_RNA (1)...(19): siRNA sense strand
gccaaugggcgguccaaug

SEQ ID NO: 2118165 - RNA, 19 nt, Homo sapiens
  misc_RNA (1)...(19): siRNA sense strand
gcugagaagcuggguguga

SEQ ID NO: 2118166 - RNA, 19 nt, Homo sapiens
  misc_RNA (1)...(19): siRNA sense strand
gaagaagcagggcaucaac

SEQ ID NO: 2118167 - RNA, 19 nt, Homo sapiens
  misc_RNA (1)...(19): siRNA sense strand
ugagaacugcccuuauaug

SEQ ID NO: 2118168 - RNA, 19 nt, Homo sapiens
  misc_RNA (1)...(19): siRNA sense strand
gagaaaaggaggucgaaga

SEQ ID NO: 2118169 - RNA, 19 nt, Homo sapiens
  misc_RNA (1)...(19): siRNA sense strand
gcaguucagccacaucaag

SEQ ID NO: 2118170 - RNA, 19 nt, Homo sapiens
  misc_RNA (1)...(19): siRNA sense strand
guuggccgaugaugcagaa

SEQ ID NO: 2118171 - RNA, 19 nt, Homo sapiens
  misc_RNA (1)...(19): siRNA sense strand
auaagauguuggccgauga

SEQ ID NO: 2118172 - RNA, 19 nt, Homo sapiens
  misc_RNA (1)...(19): siRNA sense strand
uaugcacgauauccuuuau

SEQ ID NO: 2118173 - RNA, 19 nt, Homo sapiens
  misc_RNA (1)...(19): siRNA sense strand
aagaaaggcaaagucauuu

SEQ ID NO: 2118174 - RNA, 19 nt, Homo sapiens
  misc_RNA (1)...(19): siRNA sense strand
gaugaacaagggcggaaug

SEQ ID NO: 2118175 - RNA, 19 nt, Homo sapiens
  misc_RNA (1)...(19): siRNA sense strand
cagaggagacccaggauac

SEQ ID NO: 2118176 - RNA, 19 nt, Homo sapiens
  misc_RNA (1)...(19): siRNA sense strand
gcaagcaggaccgggagaa

SEQ ID NO: 2118177 - RNA, 19 nt, Homo sapiens
  misc_RNA (1)...(19): siRNA sense strand
ccaaugggcgguccaaugc

SEQ ID NO: 2118178 - RNA, 19 nt, Homo sapiens
  misc_RNA (1)...(19): siRNA sense strand
ugaagaagcagggcaucaa

SEQ ID NO: 2118179 - RNA, 19 nt, Homo sapiens
  misc_RNA (1)...(19): siRNA sense strand
ggugacgacugcauguuuu

SEQ ID NO: 2118180 - RNA, 19 nt, Homo sapiens
  misc_RNA (1)...(19): siRNA sense strand
gauggagaguuggaagaag

SEQ ID NO: 2118181 - RNA, 19 nt, Homo sapiens
  misc_RNA (1)...(19): siRNA sense strand
uccaaugcauccugacaug

SEQ ID NO: 2118182 - RNA, 19 nt, Homo sapiens
  misc_RNA (1)...(19): siRNA sense strand
cagcaggacauguacaaca

SEQ ID NO: 2118183 - RNA, 19 nt, Homo sapiens
  misc_RNA (1)...(19): siRNA sense strand
ggagguggaggaacugaag

SEQ ID NO: 2118184 - RNA, 19 nt, Homo sapiens
  misc_RNA (1)...(19): siRNA sense strand
gacaucgaacucccaaaga

SEQ ID NO: 2118185 - RNA, 19 nt, Homo sapiens
  misc_RNA (1)...(19): siRNA sense strand
gaaacaagccuauuaaaga

SEQ ID NO: 2118186 - RNA, 19 nt, Homo sapiens
  misc_RNA (1)...(19): siRNA sense strand
gaagagagaucguacaagu

SEQ ID NO: 2118187 - RNA, 19 nt, Homo sapiens
  misc_RNA (1)...(19): siRNA sense strand
caagaaaccuuacaagugu

SEQ ID NO: 2118188 - RNA, 19 nt, Homo sapiens
  misc_RNA (1)...(19): siRNA sense strand
ugacaaagcuuucaguuuc

SEQ ID NO: 2118189 - RNA, 19 nt, Homo sapiens
  misc_RNA (1)...(19): siRNA sense strand
gaacuuccgucacaauuca

SEQ ID NO: 2118190 - RNA, 19 nt, Homo sapiens
  misc_RNA (1)...(19): siRNA sense strand
ggcaagaccuucagucaaa

SEQ ID NO: 2118191 - RNA, 19 nt, Homo sapiens
  misc_RNA (1)...(19): siRNA sense strand
ggagaaagauauucaugau

SEQ ID NO: 2118192 - RNA, 19 nt, Homo sapiens
  misc_RNA (1)...(19): siRNA sense strand
ggaaagaagaugaaagaaa

SEQ ID NO: 2118193 - RNA, 19 nt, Homo sapiens
  misc_RNA (1)...(19): siRNA sense strand
ggagagaaaucuuacaagu

SEQ ID NO: 2118194 - RNA, 19 nt, Homo sapiens
  misc_RNA (1)...(19): siRNA sense strand
ugacagaaaucaaacaguu

SEQ ID NO: 2118195 - RNA, 19 nt, Homo sapiens
  misc_RNA (1)...(19): siRNA sense strand
agagaaaccuuacaaaugu

SEQ ID NO: 2118196 - RNA, 19 nt, Homo sapiens
  misc_RNA (1)...(19): siRNA sense strand
agagaaaccuuacaaaugu

SEQ ID NO: 2118197 - RNA, 19 nt, Homo sapiens
  misc_RNA (1)...(19): siRNA sense strand
agagaaaccuuacaaaugu

SEQ ID NO: 2118198 - RNA, 19 nt, Homo sapiens
  misc_RNA (1)...(19): siRNA sense strand
agagaaaccuuacaaaugu

SEQ ID NO: 2118199 - RNA, 19 nt, Homo sapiens
  misc_RNA (1)...(19): siRNA sense strand
agagaaaccuuacaaaugu

SEQ ID NO: 2118200 - RNA, 19 nt, Homo sapiens
  misc_RNA (1)...(19): siRNA sense strand
gcaagaaaccuuacaagug

SEQ ID NO: 2118201 - RNA, 19 nt, Homo sapiens
  misc_RNA (1)...(19): siRNA sense strand
ggcaaggucuuuaaucaaa

SEQ ID NO: 2118202 - RNA, 19 nt, Homo sapiens
  misc_RNA (1)...(19): siRNA sense strand
gagagaaaccuuacaaaug

SEQ ID NO: 2118203 - RNA, 19 nt, Homo sapiens
  misc_RNA (1)...(19): siRNA sense strand
gagagaaaccuuacaaaug

SEQ ID NO: 2118204 - RNA, 19 nt, Homo sapiens
  misc_RNA (1)...(19): siRNA sense strand
gagagaaaccuuacaaaug

SEQ ID NO: 2118205 - RNA, 19 nt, Homo sapiens
  misc_RNA (1)...(19): siRNA sense strand
gagagaaaccuuacaaaug

SEQ ID NO: 2118206 - RNA, 19 nt, Homo sapiens
  misc_RNA (1)...(19): siRNA sense strand
gagagaaaccuuacaaaug

SEQ ID NO: 2118207 - RNA, 19 nt, Homo sapiens
  misc_RNA (1)...(19): siRNA sense strand
ugaagaaugugacaaaguu

SEQ ID NO: 2118208 - RNA, 19 nt, Homo sapiens
  misc_RNA (1)...(19): siRNA sense strand
ggcaagaccuucagucgaa

SEQ ID NO: 2118209 - RNA, 19 nt, Homo sapiens
  misc_RNA (1)...(19): siRNA sense strand
ggcaagaccuucagucaga

SEQ ID NO: 2118210 - RNA, 19 nt, Homo sapiens
  misc_RNA (1)...(19): siRNA sense strand
ggcaagaccuucagucaga

SEQ ID NO: 2118211 - RNA, 19 nt, Homo sapiens
  misc_RNA (1)...(19): siRNA sense strand
agagaaaccuuauaagugu

SEQ ID NO: 2118212 - RNA, 19 nt, Homo sapiens
  misc_RNA (1)...(19): siRNA sense strand
gaaugcagcaggaccuuua

SEQ ID NO: 2118213 - RNA, 19 nt, Homo sapiens
  misc_RNA (1)...(19): siRNA sense strand
agagaaaucuuacaagugu

SEQ ID NO: 2118214 - RNA, 19 nt, Homo sapiens
  misc_RNA (1)...(19): siRNA sense strand
gagagaaaccuuauaagug

SEQ ID NO: 2118215 - RNA, 19 nt, Homo sapiens
  misc_RNA (1)...(19): siRNA sense strand
agacauaggagaauucaua

SEQ ID NO: 2118216 - RNA, 19 nt, Homo sapiens
  misc_RNA (1)...(19): siRNA sense strand
agacauaggagaauucaua

SEQ ID NO: 2118217 - RNA, 19 nt, Homo sapiens
  misc_RNA (1)...(19): siRNA sense strand
gaaguacacaugagagaaa

SEQ ID NO: 2118218 - RNA, 19 nt, Homo sapiens
  misc_RNA (1)...(19): siRNA sense strand
agagaaaccuuacaagugu

SEQ ID NO: 2118219 - RNA, 19 nt, Homo sapiens
  misc_RNA (1)...(19): siRNA sense strand
agagaaaccuuacaagugu

SEQ ID NO: 2118220 - RNA, 19 nt, Homo sapiens
  misc_RNA (1)...(19): siRNA sense strand
agagaaaccuuacaagugu

SEQ ID NO: 2118221 - RNA, 19 nt, Homo sapiens
  misc_RNA (1)...(19): siRNA sense strand
agagaaaccuuacaagugu

SEQ ID NO: 2118222 - RNA, 19 nt, Homo sapiens
  misc_RNA (1)...(19): siRNA sense strand
agagaaaccuuacaagugu

SEQ ID NO: 2118223 - RNA, 19 nt, Homo sapiens
  misc_RNA (1)...(19): siRNA sense strand
agagaaaccuuacaagugu

SEQ ID NO: 2118224 - RNA, 19 nt, Homo sapiens
  misc_RNA (1)...(19): siRNA sense strand
agagaaaccuuacaagugu

SEQ ID NO: 2118225 - RNA, 19 nt, Homo sapiens
  misc_RNA (1)...(19): siRNA sense strand
caccaagucuuuaguaaug

SEQ ID NO: 2118226 - RNA, 19 nt, Homo sapiens
  misc_RNA (1)...(19): siRNA sense strand
uagggaaacuuuacaaaug

SEQ ID NO: 2118227 - RNA, 19 nt, Homo sapiens
  misc_RNA (1)...(19): siRNA sense strand
agagaaaccuuacaagugu

SEQ ID NO: 2118228 - RNA, 19 nt, Homo sapiens
  misc_RNA (1)...(19): siRNA sense strand
agagaaaccuuacaagugu

SEQ ID NO: 2118229 - RNA, 19 nt, Homo sapiens
  misc_RNA (1)...(19): siRNA sense strand
ugaaagaaauagccaugaa

SEQ ID NO: 2118230 - RNA, 19 nt, Homo sapiens
  misc_RNA (1)...(19): siRNA sense strand
gagagaaaccuuacaagug

SEQ ID NO: 2118231 - RNA, 19 nt, Homo sapiens
  misc_RNA (1)...(19): siRNA sense strand
gagagaaaccuuacaagug

SEQ ID NO: 2118232 - RNA, 19 nt, Homo sapiens
  misc_RNA (1)...(19): siRNA sense strand
gagagaaaccuuacaagug

SEQ ID NO: 2118233 - RNA, 19 nt, Homo sapiens
  misc_RNA (1)...(19): siRNA sense strand
gagagaaaccuuacaagug

SEQ ID NO: 2118234 - RNA, 19 nt, Homo sapiens
  misc_RNA (1)...(19): siRNA sense strand
gagagaaaccuuacaagug

SEQ ID NO: 2118235 - RNA, 19 nt, Homo sapiens
  misc_RNA (1)...(19): siRNA sense strand
aaacacaggagaauucaua

SEQ ID NO: 2118236 - RNA, 19 nt, Homo sapiens
  misc_RNA (1)...(19): siRNA sense strand
gagagaaaccuuacaagug

SEQ ID NO: 2118237 - RNA, 19 nt, Homo sapiens
  misc_RNA (1)...(19): siRNA sense strand
gagagaaaccuuacaagug

SEQ ID NO: 2118238 - RNA, 19 nt, Homo sapiens
  misc_RNA (1)...(19): siRNA sense strand
guucauaccuugcaguuca

SEQ ID NO: 2118239 - RNA, 19 nt, Homo sapiens
  misc_RNA (1)...(19): siRNA sense strand
gagagaaaccuuacaagug

SEQ ID NO: 2118240 - RNA, 19 nt, Homo sapiens
  misc_RNA (1)...(19): siRNA sense strand
gagagaaaccuuacaagug

SEQ ID NO: 2118241 - RNA, 19 nt, Homo sapiens
  misc_RNA (1)...(19): siRNA sense strand
gagagaaaccauacaaaug

SEQ ID NO: 2118242 - RNA, 19 nt, Homo sapiens
  misc_RNA (1)...(19): siRNA sense strand
ggaaauggagaaagauauu

SEQ ID NO: 2118243 - RNA, 19 nt, Homo sapiens
  misc_RNA (1)...(19): siRNA sense strand
ggagagaaaccuuacaaau

SEQ ID NO: 2118244 - RNA, 19 nt, Homo sapiens
  misc_RNA (1)...(19): siRNA sense strand
ggagagaaaccauacaaau

SEQ ID NO: 2118245 - RNA, 19 nt, Homo sapiens
  misc_RNA (1)...(19): siRNA sense strand
ggagagaaaccuuacaaau

SEQ ID NO: 2118246 - RNA, 19 nt, Homo sapiens
  misc_RNA (1)...(19): siRNA sense strand
agucagaagucaucccuua

SEQ ID NO: 2118247 - RNA, 19 nt, Homo sapiens
  misc_RNA (1)...(19): siRNA sense strand
gaaauucagcccuuauaau

SEQ ID NO: 2118248 - RNA, 19 nt, Homo sapiens
  misc_RNA (1)...(19): siRNA sense strand
ggagagaaaccuuacaaau

SEQ ID NO: 2118249 - RNA, 19 nt, Homo sapiens
  misc_RNA (1)...(19): siRNA sense strand
cuacaaccauugcaaauca

SEQ ID NO: 2118250 - RNA, 19 nt, Homo sapiens
  misc_RNA (1)...(19): siRNA sense strand
agagaaaccuuaccagugu

SEQ ID NO: 2118251 - RNA, 19 nt, Homo sapiens
  misc_RNA (1)...(19): siRNA sense strand
ggagagaaaccuuacaaau

SEQ ID NO: 2118252 - RNA, 19 nt, Homo sapiens
  misc_RNA (1)...(19): siRNA sense strand
ggagagaaaccuuacaaau

SEQ ID NO: 2118253 - RNA, 19 nt, Homo sapiens
  misc_RNA (1)...(19): siRNA sense strand
ggagagaaaccuuauaagu

SEQ ID NO: 2118254 - RNA, 19 nt, Homo sapiens
  misc_RNA (1)...(19): siRNA sense strand
gagaaaccuuauaagugua

SEQ ID NO: 2118255 - RNA, 19 nt, Homo sapiens
  misc_RNA (1)...(19): siRNA sense strand
gaauguggcaagaccuuua

SEQ ID NO: 2118256 - RNA, 19 nt, Homo sapiens
  misc_RNA (1)...(19): siRNA sense strand
aaucaaaccuucaaagaca

SEQ ID NO: 2118257 - RNA, 19 nt, Homo sapiens
  misc_RNA (1)...(19): siRNA sense strand
gaauguggcaagaccuuua

SEQ ID NO: 2118258 - RNA, 19 nt, Homo sapiens
  misc_RNA (1)...(19): siRNA sense strand
ggaaacaagccuauuaaag

SEQ ID NO: 2118259 - RNA, 19 nt, Homo sapiens
  misc_RNA (1)...(19): siRNA sense strand
ucuaagaacuaugggaaua

SEQ ID NO: 2118260 - RNA, 19 nt, Homo sapiens
  misc_RNA (1)...(19): siRNA sense strand
gcuggaaacaagccuauua

SEQ ID NO: 2118261 - RNA, 19 nt, Homo sapiens
  misc_RNA (1)...(19): siRNA sense strand
ggcaagaacuuccgucaca

SEQ ID NO: 2118262 - RNA, 19 nt, Homo sapiens
  misc_RNA (1)...(19): siRNA sense strand
caaaucaaaccuucaaaga

SEQ ID NO: 2118263 - RNA, 19 nt, Homo sapiens
  misc_RNA (1)...(19): siRNA sense strand
gaccuucagucaggaguua

SEQ ID NO: 2118264 - RNA, 19 nt, Homo sapiens
  misc_RNA (1)...(19): siRNA sense strand
gagagaaacauuacaagug

SEQ ID NO: 2118265 - RNA, 19 nt, Homo sapiens
  misc_RNA (1)...(19): siRNA sense strand
gagcgaaacaauauaaaug

SEQ ID NO: 2118266 - RNA, 19 nt, Homo sapiens
  misc_RNA (1)...(19): siRNA sense strand
ugaaagacauaggagaauu

SEQ ID NO: 2118267 - RNA, 19 nt, Homo sapiens
  misc_RNA (1)...(19): siRNA sense strand
ggcaagaccuuccgucaca

SEQ ID NO: 2118268 - RNA, 19 nt, Homo sapiens
  misc_RNA (1)...(19): siRNA sense strand
ucccuuacaugccaucuua

SEQ ID NO: 2118269 - RNA, 19 nt, Homo sapiens
  misc_RNA (1)...(19): siRNA sense strand
ggucgaaauucagcccuua

SEQ ID NO: 2118270 - RNA, 19 nt, Homo sapiens
  misc_RNA (1)...(19): siRNA sense strand
ucaaagacauaggagaauu

SEQ ID NO: 2118271 - RNA, 19 nt, Homo sapiens
  misc_RNA (1)...(19): siRNA sense strand
gcacuuauuuaccaucaag

SEQ ID NO: 2118272 - RNA, 19 nt, Homo sapiens
  misc_RNA (1)...(19): siRNA sense strand
gaaagacauaggauaauuc

SEQ ID NO: 2118273 - RNA, 19 nt, Homo sapiens
  misc_RNA (1)...(19): siRNA sense strand
ggcaaggccuucagucaga

SEQ ID NO: 2118274 - RNA, 19 nt, Homo sapiens
  misc_RNA (1)...(19): siRNA sense strand
gagaaaccuuaccagugua

SEQ ID NO: 2118275 - RNA, 19 nt, Homo sapiens
  misc_RNA (1)...(19): siRNA sense strand
gaacuccacauguuucaga

SEQ ID NO: 2118276 - RNA, 19 nt, Homo sapiens
  misc_RNA (1)...(19): siRNA sense strand
caccuugcaugucaucaua

SEQ ID NO: 2118277 - RNA, 19 nt, Homo sapiens
  misc_RNA (1)...(19): siRNA sense strand
agucggaagucauaccuua

SEQ ID NO: 2118278 - RNA, 19 nt, Homo sapiens
  misc_RNA (1)...(19): siRNA sense strand
uaucuugcaugucaucgua

SEQ ID NO: 2118279 - RNA, 19 nt, Homo sapiens
  misc_RNA (1)...(19): siRNA sense strand
ggagagaaaccuuacaagu

SEQ ID NO: 2118280 - RNA, 19 nt, Homo sapiens
  misc_RNA (1)...(19): siRNA sense strand
aaacuugcacgucaucaua

SEQ ID NO: 2118281 - RNA, 19 nt, Homo sapiens
  misc_RNA (1)...(19): siRNA sense strand
uaaugaauguggcaagguu

SEQ ID NO: 2118282 - RNA, 19 nt, Homo sapiens
  misc_RNA (1)...(19): siRNA sense strand
ggagagaaaccuuacaagu

SEQ ID NO: 2118283 - RNA, 19 nt, Homo sapiens
  misc_RNA (1)...(19): siRNA sense strand
ggagagaaaccuuacaagu

SEQ ID NO: 2118284 - RNA, 19 nt, Homo sapiens
  misc_RNA (1)...(19): siRNA sense strand
ggagagaaaccuuacaagu

SEQ ID NO: 2118285 - RNA, 19 nt, Homo sapiens
  misc_RNA (1)...(19): siRNA sense strand
ggacagaaacuccucauca

SEQ ID NO: 2118286 - RNA, 19 nt, Homo sapiens
  misc_RNA (1)...(19): siRNA sense strand
gacagaaacuccucaucau

SEQ ID NO: 2118287 - RNA, 19 nt, Homo sapiens
  misc_RNA (1)...(19): siRNA sense strand
ccacuaccaguaccacuua

SEQ ID NO: 2118288 - RNA, 19 nt, Homo sapiens
  misc_RNA (1)...(19): siRNA sense strand
ggcaaggccuuccgcaaca

SEQ ID NO: 2118289 - RNA, 19 nt, Homo sapiens
  misc_RNA (1)...(19): siRNA sense strand
cagcagcgcccaacucuca

SEQ ID NO: 2118290 - RNA, 19 nt, Homo sapiens
  misc_RNA (1)...(19): siRNA sense strand
ggagcugggccugguguua

SEQ ID NO: 2118291 - RNA, 19 nt, Homo sapiens
  misc_RNA (1)...(19): siRNA sense strand
ggucgucccacuaccagua

SEQ ID NO: 2118292 - RNA, 19 nt, Homo sapiens
  misc_RNA (1)...(19): siRNA sense strand
ggucgucccacuaccagua

SEQ ID NO: 2118293 - RNA, 19 nt, Homo sapiens
  misc_RNA (1)...(19): siRNA sense strand
gagcugggccugguguuau

SEQ ID NO: 2118294 - RNA, 19 nt, Homo sapiens
  misc_RNA (1)...(19): siRNA sense strand
ggucgcggcuucguuaugg

SEQ ID NO: 2118295 - RNA, 19 nt, Homo sapiens
  misc_RNA (1)...(19): siRNA sense strand
ccggccagcucuccaauuc

SEQ ID NO: 2118296 - RNA, 19 nt, Homo sapiens
  misc_RNA (1)...(19): siRNA sense strand
cggaguacgugcguuguga

SEQ ID NO: 2118297 - RNA, 19 nt, Homo sapiens
  misc_RNA (1)...(19): siRNA sense strand
ggccagcucuccaauucca

SEQ ID NO: 2118298 - RNA, 19 nt, Homo sapiens
  misc_RNA (1)...(19): siRNA sense strand
ccaaggccuucaagaacuc

SEQ ID NO: 2118299 - RNA, 19 nt, Homo sapiens
  misc_RNA (1)...(19): siRNA sense strand
gcagcaccagcgccucuuu

SEQ ID NO: 2118300 - RNA, 19 nt, Homo sapiens
  misc_RNA (1)...(19): siRNA sense strand
gggaguguggcaagucauu

SEQ ID NO: 2118301 - RNA, 19 nt, Homo sapiens
  misc_RNA (1)...(19): siRNA sense strand
ggcagagccucaucguucu

SEQ ID NO: 2118302 - RNA, 19 nt, Homo sapiens
  misc_RNA (1)...(19): siRNA sense strand
gcagggccacaggaaauga

SEQ ID NO: 2118303 - RNA, 19 nt, Homo sapiens
  misc_RNA (1)...(19): siRNA sense strand
cgcaggaggugaccacagu

SEQ ID NO: 2118304 - RNA, 19 nt, Homo sapiens
  misc_RNA (1)...(19): siRNA sense strand
ccagccagcacaggaagua

SEQ ID NO: 2118305 - RNA, 19 nt, Homo sapiens
  misc_RNA (1)...(19): siRNA sense strand
cccaaggccuucaagaacu

SEQ ID NO: 2118306 - RNA, 19 nt, Homo sapiens
  misc_RNA (1)...(19): siRNA sense strand
gaggcagggccacaggaaa

SEQ ID NO: 2118307 - RNA, 19 nt, Homo sapiens
  misc_RNA (1)...(19): siRNA sense strand
ggacagggcagagccucau

SEQ ID NO: 2118308 - RNA, 19 nt, Homo sapiens
  misc_RNA (1)...(19): siRNA sense strand
ggggagcuguggcuacuga

SEQ ID NO: 2118309 - RNA, 19 nt, Homo sapiens
  misc_RNA (1)...(19): siRNA sense strand
uacaggagguagaaacacu

SEQ ID NO: 2118310 - RNA, 19 nt, Homo sapiens
  misc_RNA (1)...(19): siRNA sense strand
acagaaacuccucaucauc

SEQ ID NO: 2118311 - RNA, 19 nt, Homo sapiens
  misc_RNA (1)...(19): siRNA sense strand
ccucccagauggugcaagu

SEQ ID NO: 2118312 - RNA, 19 nt, Homo sapiens
  misc_RNA (1)...(19): siRNA sense strand
guacgaauguggggagugu

SEQ ID NO: 2118313 - RNA, 19 nt, Homo sapiens
  misc_RNA (1)...(19): siRNA sense strand
gaacacaaccaccauauuu

SEQ ID NO: 2118314 - RNA, 19 nt, Homo sapiens
  misc_RNA (1)...(19): siRNA sense strand
caucaacccucuuauuaua

SEQ ID NO: 2118315 - RNA, 19 nt, Homo sapiens
  misc_RNA (1)...(19): siRNA sense strand
ggauauaacuggaacagaa

SEQ ID NO: 2118316 - RNA, 19 nt, Homo sapiens
  misc_RNA (1)...(19): siRNA sense strand
ggacauagauauaaucaca

SEQ ID NO: 2118317 - RNA, 19 nt, Homo sapiens
  misc_RNA (1)...(19): siRNA sense strand
gaagaaguguggucagaaa

SEQ ID NO: 2118318 - RNA, 19 nt, Homo sapiens
  misc_RNA (1)...(19): siRNA sense strand
ggacacagcucaggaaaug

SEQ ID NO: 2118319 - RNA, 19 nt, Homo sapiens
  misc_RNA (1)...(19): siRNA sense strand
gcauugagcuuucagaaga

SEQ ID NO: 2118320 - RNA, 19 nt, Homo sapiens
  misc_RNA (1)...(19): siRNA sense strand
gacaugagcucugaccuua

SEQ ID NO: 2118321 - RNA, 19 nt, Homo sapiens
  misc_RNA (1)...(19): siRNA sense strand
guacaaaugugaaucucua

SEQ ID NO: 2118322 - RNA, 19 nt, Homo sapiens
  misc_RNA (1)...(19): siRNA sense strand
gcaugaagcugcuggagaa

SEQ ID NO: 2118323 - RNA, 19 nt, Homo sapiens
  misc_RNA (1)...(19): siRNA sense strand
gaaggaagucuuucuguuu

SEQ ID NO: 2118324 - RNA, 19 nt, Homo sapiens
  misc_RNA (1)...(19): siRNA sense strand
gagaagacauggcaagaga

SEQ ID NO: 2118325 - RNA, 19 nt, Homo sapiens
  misc_RNA (1)...(19): siRNA sense strand
ggaccaccaucgugaauuu

SEQ ID NO: 2118326 - RNA, 19 nt, Homo sapiens
  misc_RNA (1)...(19): siRNA sense strand
gaaguuugcuggaggaaga

SEQ ID NO: 2118327 - RNA, 19 nt, Homo sapiens
  misc_RNA (1)...(19): siRNA sense strand
guucaaagcuacccuaaga

SEQ ID NO: 2118328 - RNA, 19 nt, Homo sapiens
  misc_RNA (1)...(19): siRNA sense strand
gaacagaaccgaggauuau

SEQ ID NO: 2118329 - RNA, 19 nt, Homo sapiens
  misc_RNA (1)...(19): siRNA sense strand
gcacaacgaacgcuuuaua

SEQ ID NO: 2118330 - RNA, 19 nt, Homo sapiens
  misc_RNA (1)...(19): siRNA sense strand
caacaaacaugggaucuug

SEQ ID NO: 2118331 - RNA, 19 nt, Homo sapiens
  misc_RNA (1)...(19): siRNA sense strand
gaaauuugcugugggagaa

SEQ ID NO: 2118332 - RNA, 19 nt, Homo sapiens
  misc_RNA (1)...(19): siRNA sense strand
gaugagaggagcaccauua

SEQ ID NO: 2118333 - RNA, 19 nt, Homo sapiens
  misc_RNA (1)...(19): siRNA sense strand
gcaacauucugaccacuuu

SEQ ID NO: 2118334 - RNA, 19 nt, Homo sapiens
  misc_RNA (1)...(19): siRNA sense strand
gcauugagcucuuagauac

SEQ ID NO: 2118335 - RNA, 19 nt, Homo sapiens
  misc_RNA (1)...(19): siRNA sense strand
gaagauccaugaccucugu

SEQ ID NO: 2118336 - RNA, 19 nt, Homo sapiens
  misc_RNA (1)...(19): siRNA sense strand
ggacacaucaacccucuua

SEQ ID NO: 2118337 - RNA, 19 nt, Homo sapiens
  misc_RNA (1)...(19): siRNA sense strand
gaaaaugccuccaggguuu

SEQ ID NO: 2118338 - RNA, 19 nt, Homo sapiens
  misc_RNA (1)...(19): siRNA sense strand
gaacaucauugugggcuuu

SEQ ID NO: 2118339 - RNA, 19 nt, Homo sapiens
  misc_RNA (1)...(19): siRNA sense strand
gaaaugggaaucacacaaa

SEQ ID NO: 2118340 - RNA, 19 nt, Homo sapiens
  misc_RNA (1)...(19): siRNA sense strand
gaagacauggcaagagaua

SEQ ID NO: 2118341 - RNA, 19 nt, Homo sapiens
  misc_RNA (1)...(19): siRNA sense strand
guaaagcccucagcauuga

SEQ ID NO: 2118342 - RNA, 19 nt, Homo sapiens
  misc_RNA (1)...(19): siRNA sense strand
ggcaagagauaucagauga

SEQ ID NO: 2118343 - RNA, 19 nt, Homo sapiens
  misc_RNA (1)...(19): siRNA sense strand
cagcagagcuucagcaaag

SEQ ID NO: 2118344 - RNA, 19 nt, Homo sapiens
  misc_RNA (1)...(19): siRNA sense strand
gaaguguguuugcuacauu

SEQ ID NO: 2118345 - RNA, 19 nt, Homo sapiens
  misc_RNA (1)...(19): siRNA sense strand
ggaaacucauacugucaua

SEQ ID NO: 2118346 - RNA, 19 nt, Homo sapiens
  misc_RNA (1)...(19): siRNA sense strand
gaacaggcuuccuuugaca

SEQ ID NO: 2118347 - RNA, 19 nt, Homo sapiens
  misc_RNA (1)...(19): siRNA sense strand
gugaacaucuggagucuga

SEQ ID NO: 2118348 - RNA, 19 nt, Homo sapiens
  misc_RNA (1)...(19): siRNA sense strand
gcaaagaugucacugucau

SEQ ID NO: 2118349 - RNA, 19 nt, Homo sapiens
  misc_RNA (1)...(19): siRNA sense strand
gaaauccagucaccacaau

SEQ ID NO: 2118350 - RNA, 19 nt, Homo sapiens
  misc_RNA (1)...(19): siRNA sense strand
caagagauaucagaugaga

SEQ ID NO: 2118351 - RNA, 19 nt, Homo sapiens
  misc_RNA (1)...(19): siRNA sense strand
ggugcaauauucaguuuaa

SEQ ID NO: 2118352 - RNA, 19 nt, Homo sapiens
  misc_RNA (1)...(19): siRNA sense strand
ggaacuggaggauguguua

SEQ ID NO: 2118353 - RNA, 19 nt, Homo sapiens
  misc_RNA (1)...(19): siRNA sense strand
gugcauaacuacauucuuc

SEQ ID NO: 2118354 - RNA, 19 nt, Homo sapiens
  misc_RNA (1)...(19): siRNA sense strand
cagaugagaucaagaagau

SEQ ID NO: 2118355 - RNA, 19 nt, Homo sapiens
  misc_RNA (1)...(19): siRNA sense strand
ggaacagaaccgaggauua

SEQ ID NO: 2118356 - RNA, 19 nt, Homo sapiens
  misc_RNA (1)...(19): siRNA sense strand
ggaaguaucaccaagaaau

SEQ ID NO: 2118357 - RNA, 19 nt, Homo sapiens
  misc_RNA (1)...(19): siRNA sense strand
gugcaguucugaucuguaa

SEQ ID NO: 2118358 - RNA, 19 nt, Homo sapiens
  misc_RNA (1)...(19): siRNA sense strand
caaccaccauauuucauuu

SEQ ID NO: 2118359 - RNA, 19 nt, Homo sapiens
  misc_RNA (1)...(19): siRNA sense strand
gagaagaaguguggucaga

SEQ ID NO: 2118360 - RNA, 19 nt, Homo sapiens
  misc_RNA (1)...(19): siRNA sense strand
acacaucuguuacucauug

SEQ ID NO: 2118361 - RNA, 19 nt, Homo sapiens
  misc_RNA (1)...(19): siRNA sense strand
gaaaauaccucagcugugu

SEQ ID NO: 2118362 - RNA, 19 nt, Homo sapiens
  misc_RNA (1)...(19): siRNA sense strand
gcccaaauauugcuccauu

SEQ ID NO: 2118363 - RNA, 19 nt, Homo sapiens
  misc_RNA (1)...(19): siRNA sense strand
gaaaaugucugagcuguug

SEQ ID NO: 2118364 - RNA, 19 nt, Homo sapiens
  misc_RNA (1)...(19): siRNA sense strand
ccuggaaccugacaucuuu

SEQ ID NO: 2118365 - RNA, 19 nt, Homo sapiens
  misc_RNA (1)...(19): siRNA sense strand
ugaccucugugacuuauuu

SEQ ID NO: 2118366 - RNA, 19 nt, Homo sapiens
  misc_RNA (1)...(19): siRNA sense strand
cacaucaacccucuuauua

SEQ ID NO: 2118367 - RNA, 19 nt, Homo sapiens
  misc_RNA (1)...(19): siRNA sense strand
aagcaaagcuggacacauc

SEQ ID NO: 2118368 - RNA, 19 nt, Homo sapiens
  misc_RNA (1)...(19): siRNA sense strand
caucuaaucugagagugua

SEQ ID NO: 2118369 - RNA, 19 nt, Homo sapiens
  misc_RNA (1)...(19): siRNA sense strand
acaauaugcuacugucuuu

SEQ ID NO: 2118370 - RNA, 19 nt, Homo sapiens
  misc_RNA (1)...(19): siRNA sense strand
gaaaaguuauguacaguga

SEQ ID NO: 2118371 - RNA, 19 nt, Homo sapiens
  misc_RNA (1)...(19): siRNA sense strand
ccagcugacugaugacuuu

SEQ ID NO: 2118372 - RNA, 19 nt, Homo sapiens
  misc_RNA (1)...(19): siRNA sense strand
guacacaucuguuacucau

SEQ ID NO: 2118373 - RNA, 19 nt, Homo sapiens
  misc_RNA (1)...(19): siRNA sense strand
ccaaacaacuucuugaaaa

SEQ ID NO: 2118374 - RNA, 19 nt, Homo sapiens
  misc_RNA (1)...(19): siRNA sense strand
gaaguaucaccaagaaauu

SEQ ID NO: 2118375 - RNA, 19 nt, Homo sapiens
  misc_RNA (1)...(19): siRNA sense strand
gaagguggcugaaaaguuc

SEQ ID NO: 2118376 - RNA, 19 nt, Homo sapiens
  misc_RNA (1)...(19): siRNA sense strand
ugaagcugcuggagaauug

SEQ ID NO: 2118377 - RNA, 19 nt, Homo sapiens
  misc_RNA (1)...(19): siRNA sense strand
gauggccgcuuuaccaguu

SEQ ID NO: 2118378 - RNA, 19 nt, Homo sapiens
  misc_RNA (1)...(19): siRNA sense strand
ucacaaagacgucgaugaa

SEQ ID NO: 2118379 - RNA, 19 nt, Homo sapiens
  misc_RNA (1)...(19): siRNA sense strand
caucaggccagcagauuua

SEQ ID NO: 2118380 - RNA, 19 nt, Homo sapiens
  misc_RNA (1)...(19): siRNA sense strand
gcuuauggcuggcuacaug

SEQ ID NO: 2118381 - RNA, 19 nt, Homo sapiens
  misc_RNA (1)...(19): siRNA sense strand
cgaaggacuugguaaacaa

SEQ ID NO: 2118382 - RNA, 19 nt, Homo sapiens
  misc_RNA (1)...(19): siRNA sense strand
ccgaaucccuggagaaguu

SEQ ID NO: 2118383 - RNA, 19 nt, Homo sapiens
  misc_RNA (1)...(19): siRNA sense strand
uggaugagguggaaauuug

SEQ ID NO: 2118384 - RNA, 19 nt, Homo sapiens
  misc_RNA (1)...(19): siRNA sense strand
ccaccuacaucaauggauu

SEQ ID NO: 2118385 - RNA, 19 nt, Homo sapiens
  misc_RNA (1)...(19): siRNA sense strand
gaucaaaauuggccaguuu

SEQ ID NO: 2118386 - RNA, 19 nt, Homo sapiens
  misc_RNA (1)...(19): siRNA sense strand
gacaaugaccugcgugaaa

SEQ ID NO: 2118387 - RNA, 19 nt, Homo sapiens
  misc_RNA (1)...(19): siRNA sense strand
ggaaagcuaggcauuauag

SEQ ID NO: 2118388 - RNA, 19 nt, Homo sapiens
  misc_RNA (1)...(19): siRNA sense strand
ugaaggaagucuuucuguu

SEQ ID NO: 2118389 - RNA, 19 nt, Homo sapiens
  misc_RNA (1)...(19): siRNA sense strand
acauugagcuggcuuacaa

SEQ ID NO: 2118390 - RNA, 19 nt, Homo sapiens
  misc_RNA (1)...(19): siRNA sense strand
ugaaaugcacaccaucuua

SEQ ID NO: 2118391 - RNA, 19 nt, Homo sapiens
  misc_RNA (1)...(19): siRNA sense strand
ggacucuccuucuaagugu

SEQ ID NO: 2118392 - RNA, 19 nt, Homo sapiens
  misc_RNA (1)...(19): siRNA sense strand
gaaaguauagagcaguuau

SEQ ID NO: 2118393 - RNA, 19 nt, Homo sapiens
  misc_RNA (1)...(19): siRNA sense strand
acaaagacgucgaugaauc

SEQ ID NO: 2118394 - RNA, 19 nt, Homo sapiens
  misc_RNA (1)...(19): siRNA sense strand
gaugagaucaagaagauau

SEQ ID NO: 2118395 - RNA, 19 nt, Homo sapiens
  misc_RNA (1)...(19): siRNA sense strand
ggaugaaaauggugcaaua

SEQ ID NO: 2118396 - RNA, 19 nt, Homo sapiens
  misc_RNA (1)...(19): siRNA sense strand
ugaaauuucucccaaugga

SEQ ID NO: 2118397 - RNA, 19 nt, Homo sapiens
  misc_RNA (1)...(19): siRNA sense strand
caggaaguaucaccaagaa

SEQ ID NO: 2118398 - RNA, 19 nt, Homo sapiens
  misc_RNA (1)...(19): siRNA sense strand
aaacauacgccuccuucua

SEQ ID NO: 2118399 - RNA, 19 nt, Homo sapiens
  misc_RNA (1)...(19): siRNA sense strand
acucagggaugaauuuauu

SEQ ID NO: 2118400 - RNA, 19 nt, Homo sapiens
  misc_RNA (1)...(19): siRNA sense strand
aaacugauacacucuauga

SEQ ID NO: 2118401 - RNA, 19 nt, Homo sapiens
  misc_RNA (1)...(19): siRNA sense strand
gagaauugcuugaaaacuu

SEQ ID NO: 2118402 - RNA, 19 nt, Homo sapiens
  misc_RNA (1)...(19): siRNA sense strand
caacgaacgcuuuauaucu

SEQ ID NO: 2118403 - RNA, 19 nt, Homo sapiens
  misc_RNA (1)...(19): siRNA sense strand
gccaauaccugaacacaac

SEQ ID NO: 2118404 - RNA, 19 nt, Homo sapiens
  misc_RNA (1)...(19): siRNA sense strand
gcccagagcuccagaagac

SEQ ID NO: 2118405 - RNA, 19 nt, Homo sapiens
  misc_RNA (1)...(19): siRNA sense strand
gaaaugcacaccaucuuag

SEQ ID NO: 2118406 - RNA, 19 nt, Homo sapiens
  misc_RNA (1)...(19): siRNA sense strand
gcuggagaauugcuugaaa

SEQ ID NO: 2118407 - RNA, 19 nt, Homo sapiens
  misc_RNA (1)...(19): siRNA sense strand
gauacacucuaugaugaaa

SEQ ID NO: 2118408 - RNA, 19 nt, Homo sapiens
  misc_RNA (1)...(19): siRNA sense strand
aaauggagauuguaucauc

SEQ ID NO: 2118409 - RNA, 19 nt, Homo sapiens
  misc_RNA (1)...(19): siRNA sense strand
ggaaagccuucugccuuga

SEQ ID NO: 2118410 - RNA, 19 nt, Homo sapiens
  misc_RNA (1)...(19): siRNA sense strand
aaauggaacuggaggaugu

SEQ ID NO: 2118411 - RNA, 19 nt, Homo sapiens
  misc_RNA (1)...(19): siRNA sense strand
gcagccagguccucaaaca

SEQ ID NO: 2118412 - RNA, 19 nt, Homo sapiens
  misc_RNA (1)...(19): siRNA sense strand
gugaacaauuggcaguuaa

SEQ ID NO: 2118413 - RNA, 19 nt, Homo sapiens
  misc_RNA (1)...(19): siRNA sense strand
caacgaggauuucuucuuc

SEQ ID NO: 2118414 - RNA, 19 nt, Homo sapiens
  misc_RNA (1)...(19): siRNA sense strand
ggaucaagguggugaacaa

SEQ ID NO: 2118415 - RNA, 19 nt, Homo sapiens
  misc_RNA (1)...(19): siRNA sense strand
gcagcaccaucgugaagaa

SEQ ID NO: 2118416 - RNA, 19 nt, Homo sapiens
  misc_RNA (1)...(19): siRNA sense strand
ugucucugcucaaagguuu

SEQ ID NO: 2118417 - RNA, 19 nt, Homo sapiens
  misc_RNA (1)...(19): siRNA sense strand
aaacuggcccucaggauca

SEQ ID NO: 2118418 - RNA, 19 nt, Homo sapiens
  misc_RNA (1)...(19): siRNA sense strand
gcgcaaggagucucuguuc

SEQ ID NO: 2118419 - RNA, 19 nt, Homo sapiens
  misc_RNA (1)...(19): siRNA sense strand
gcaaggagucucuguucca

SEQ ID NO: 2118420 - RNA, 19 nt, Homo sapiens
  misc_RNA (1)...(19): siRNA sense strand
ccaaggcccagacguccua

SEQ ID NO: 2118421 - RNA, 19 nt, Homo sapiens
  misc_RNA (1)...(19): siRNA sense strand
cgggcaagcugcagaagca

SEQ ID NO: 2118422 - RNA, 19 nt, Homo sapiens
  misc_RNA (1)...(19): siRNA sense strand
ggaaacuggcccucaggau

SEQ ID NO: 2118423 - RNA, 19 nt, Homo sapiens
  misc_RNA (1)...(19): siRNA sense strand
gcaccaucgugaagaacag

SEQ ID NO: 2118424 - RNA, 19 nt, Homo sapiens
  misc_RNA (1)...(19): siRNA sense strand
ucaacgaggauuucuucuu

SEQ ID NO: 2118425 - RNA, 19 nt, Homo sapiens
  misc_RNA (1)...(19): siRNA sense strand
gcgcagcaccaucgugaag

SEQ ID NO: 2118426 - RNA, 19 nt, Homo sapiens
  misc_RNA (1)...(19): siRNA sense strand
gacaagauccccgacuuuu

SEQ ID NO: 2118427 - RNA, 19 nt, Homo sapiens
  misc_RNA (1)...(19): siRNA sense strand
cuucaacgaggauuucuuc

SEQ ID NO: 2118428 - RNA, 19 nt, Homo sapiens
  misc_RNA (1)...(19): siRNA sense strand
cuuccuggcucacuacuuc

SEQ ID NO: 2118429 - RNA, 19 nt, Homo sapiens
  misc_RNA (1)...(19): siRNA sense strand
gcucacuacuucgagaaca

SEQ ID NO: 2118430 - RNA, 19 nt, Homo sapiens
  misc_RNA (1)...(19): siRNA sense strand
gcuucgugcugcuggaguu

SEQ ID NO: 2118431 - RNA, 19 nt, Homo sapiens
  misc_RNA (1)...(19): siRNA sense strand
cggcgugacggaaaugcua

SEQ ID NO: 2118432 - RNA, 19 nt, Homo sapiens
  misc_RNA (1)...(19): siRNA sense strand
ggaaagcccuucgccauug

SEQ ID NO: 2118433 - RNA, 19 nt, Homo sapiens
  misc_RNA (1)...(19): siRNA sense strand
gagcgacgccgacaacuuu

SEQ ID NO: 2118434 - RNA, 19 nt, Homo sapiens
  misc_RNA (1)...(19): siRNA sense strand
caaccuggcugccgucaug

SEQ ID NO: 2118435 - RNA, 19 nt, Homo sapiens
  misc_RNA (1)...(19): siRNA sense strand
gaaagcccuucgccauuga

SEQ ID NO: 2118436 - RNA, 19 nt, Homo sapiens
  misc_RNA (1)...(19): siRNA sense strand
acacaugucucggcacuuu

SEQ ID NO: 2118437 - RNA, 19 nt, Homo sapiens
  misc_RNA (1)...(19): siRNA sense strand
gcucaacgccuucaucaug

SEQ ID NO: 2118438 - RNA, 19 nt, Homo sapiens
  misc_RNA (1)...(19): siRNA sense strand
gcucacaggugguggacuu

SEQ ID NO: 2118439 - RNA, 19 nt, Homo sapiens
  misc_RNA (1)...(19): siRNA sense strand
ggacacgcccuucgacuuc

SEQ ID NO: 2118440 - RNA, 19 nt, Homo sapiens
  misc_RNA (1)...(19): siRNA sense strand
gcagcaccgucuucuccua

SEQ ID NO: 2118441 - RNA, 19 nt, Homo sapiens
  misc_RNA (1)...(19): siRNA sense strand
acagagacccugcagauga

SEQ ID NO: 2118442 - RNA, 19 nt, Homo sapiens
  misc_RNA (1)...(19): siRNA sense strand
aaacaguggugacgucauc

SEQ ID NO: 2118443 - RNA, 19 nt, Homo sapiens
  misc_RNA (1)...(19): siRNA sense strand
gucaccagcuucaguauca

SEQ ID NO: 2118444 - RNA, 19 nt, Homo sapiens
  misc_RNA (1)...(19): siRNA sense strand
gggaaagcccuucgccauu

SEQ ID NO: 2118445 - RNA, 19 nt, Homo sapiens
  misc_RNA (1)...(19): siRNA sense strand
aagcgggucuuugcgguua

SEQ ID NO: 2118446 - RNA, 19 nt, Homo sapiens
  misc_RNA (1)...(19): siRNA sense strand
ccuccaaccuguccgaguu

SEQ ID NO: 2118447 - RNA, 19 nt, Homo sapiens
  misc_RNA (1)...(19): siRNA sense strand
caucgacgccgacugcaaa

SEQ ID NO: 2118448 - RNA, 19 nt, Homo sapiens
  misc_RNA (1)...(19): siRNA sense strand
gcuccacccugcgucguaa

SEQ ID NO: 2118449 - RNA, 19 nt, Homo sapiens
  misc_RNA (1)...(19): siRNA sense strand
cacgacaagugguacaaga

SEQ ID NO: 2118450 - RNA, 19 nt, Homo sapiens
  misc_RNA (1)...(19): siRNA sense strand
cgacaagugguacaagaug

SEQ ID NO: 2118451 - RNA, 19 nt, Homo sapiens
  misc_RNA (1)...(19): siRNA sense strand
gaaccucugggccaucuuc

SEQ ID NO: 2118452 - RNA, 19 nt, Homo sapiens
  misc_RNA (1)...(19): siRNA sense strand
uuacagagacccugcagau

SEQ ID NO: 2118453 - RNA, 19 nt, Homo sapiens
  misc_RNA (1)...(19): siRNA sense strand
gacaggcagcucccaggua

SEQ ID NO: 2118454 - RNA, 19 nt, Homo sapiens
  misc_RNA (1)...(19): siRNA sense strand
cagagacccugcagaugag

SEQ ID NO: 2118455 - RNA, 19 nt, Homo sapiens
  misc_RNA (1)...(19): siRNA sense strand
guggugacgucaucguuca

SEQ ID NO: 2118456 - RNA, 19 nt, Homo sapiens
  misc_RNA (1)...(19): siRNA sense strand
gcggucaccagcuucagua

SEQ ID NO: 2118457 - RNA, 19 nt, Homo sapiens
  misc_RNA (1)...(19): siRNA sense strand
ccagcaagacgcccaagug

SEQ ID NO: 2118458 - RNA, 19 nt, Homo sapiens
  misc_RNA (1)...(19): siRNA sense strand
acccaucggugccuuuaug

SEQ ID NO: 2118459 - RNA, 19 nt, Homo sapiens
  misc_RNA (1)...(19): siRNA sense strand
gccgaggcguacaucaaga

SEQ ID NO: 2118460 - RNA, 19 nt, Homo sapiens
  misc_RNA (1)...(19): siRNA sense strand
gugcuacgccauccucuuc

SEQ ID NO: 2118461 - RNA, 19 nt, Homo sapiens
  misc_RNA (1)...(19): siRNA sense strand
cgccauccaugacauugug

SEQ ID NO: 2118462 - RNA, 19 nt, Homo sapiens
  misc_RNA (1)...(19): siRNA sense strand
acaugucucggcacuuuaa

SEQ ID NO: 2118463 - RNA, 19 nt, Homo sapiens
  misc_RNA (1)...(19): siRNA sense strand
caaguccuccggcuucauc

SEQ ID NO: 2118464 - RNA, 19 nt, Homo sapiens
  misc_RNA (1)...(19): siRNA sense strand
aggcguacaucaagaagag

SEQ ID NO: 2118465 - RNA, 19 nt, Homo sapiens
  misc_RNA (1)...(19): siRNA sense strand
ucaacgccuucaucaugga

SEQ ID NO: 2118466 - RNA, 19 nt, Homo sapiens
  misc_RNA (1)...(19): siRNA sense strand
gcucccagguacacauguc

SEQ ID NO: 2118467 - RNA, 19 nt, Homo sapiens
  misc_RNA (1)...(19): siRNA sense strand
caaccuguccgaguucauc

SEQ ID NO: 2118468 - RNA, 19 nt, Homo sapiens
  misc_RNA (1)...(19): siRNA sense strand
ggucugggugcgauggaaa

SEQ ID NO: 2118469 - RNA, 19 nt, Homo sapiens
  misc_RNA (1)...(19): siRNA sense strand
acauggcggucaccagcuu

SEQ ID NO: 2118470 - RNA, 19 nt, Homo sapiens
  misc_RNA (1)...(19): siRNA sense strand
gcacgguuccuggccaaca

SEQ ID NO: 2118471 - RNA, 19 nt, Homo sapiens
  misc_RNA (1)...(19): siRNA sense strand
acucgccgcucaccuccaa

SEQ ID NO: 2118472 - RNA, 19 nt, Homo sapiens
  misc_RNA (1)...(19): siRNA sense strand
cgacgccgacugcaaacug

SEQ ID NO: 2118473 - RNA, 19 nt, Homo sapiens
  misc_RNA (1)...(19): siRNA sense strand
gcaccgucuucuccuacuc

SEQ ID NO: 2118474 - RNA, 19 nt, Homo sapiens
  misc_RNA (1)...(19): siRNA sense strand
ccgacaacuuugcgaugga

SEQ ID NO: 2118475 - RNA, 19 nt, Homo sapiens
  misc_RNA (1)...(19): siRNA sense strand
ccaagaacauggccaagua

SEQ ID NO: 2118476 - RNA, 19 nt, Homo sapiens
  misc_RNA (1)...(19): siRNA sense strand
ggucaaagccuuccauuau

SEQ ID NO: 2118477 - RNA, 19 nt, Homo sapiens
  misc_RNA (1)...(19): siRNA sense strand
ggacgacgcuggagaugga

SEQ ID NO: 2118478 - RNA, 19 nt, Homo sapiens
  misc_RNA (1)...(19): siRNA sense strand
ugaaggaccucaucagcua

SEQ ID NO: 2118479 - RNA, 19 nt, Homo sapiens
  misc_RNA (1)...(19): siRNA sense strand
gaaacgagagcucaugaaa

SEQ ID NO: 2118480 - RNA, 19 nt, Homo sapiens
  misc_RNA (1)...(19): siRNA sense strand
gcucacaacugcagacaga

SEQ ID NO: 2118481 - RNA, 19 nt, Homo sapiens
  misc_RNA (1)...(19): siRNA sense strand
ucaaagccuuccauuauga

SEQ ID NO: 2118482 - RNA, 19 nt, Homo sapiens
  misc_RNA (1)...(19): siRNA sense strand
acaaugaucuggagaaaca

SEQ ID NO: 2118483 - RNA, 19 nt, Homo sapiens
  misc_RNA (1)...(19): siRNA sense strand
caacaaugaucuggagaaa

SEQ ID NO: 2118484 - RNA, 19 nt, Homo sapiens
  misc_RNA (1)...(19): siRNA sense strand
ccaagggccugcagaagau

SEQ ID NO: 2118485 - RNA, 19 nt, Homo sapiens
  misc_RNA (1)...(19): siRNA sense strand
gcaaggccaagcaggguua

SEQ ID NO: 2118486 - RNA, 19 nt, Homo sapiens
  misc_RNA (1)...(19): siRNA sense strand
gcaacguccucaagcucua

SEQ ID NO: 2118487 - RNA, 19 nt, Homo sapiens
  misc_RNA (1)...(19): siRNA sense strand
gucaaagccuuccauuaug

SEQ ID NO: 2118488 - RNA, 19 nt, Homo sapiens
  misc_RNA (1)...(19): siRNA sense strand
gggaaaggcagccggaauu

SEQ ID NO: 2118489 - RNA, 19 nt, Homo sapiens
  misc_RNA (1)...(19): siRNA sense strand
ucuccucccugguggauua

SEQ ID NO: 2118490 - RNA, 19 nt, Homo sapiens
  misc_RNA (1)...(19): siRNA sense strand
caacagcuacgucuacuuc

SEQ ID NO: 2118491 - RNA, 19 nt, Homo sapiens
  misc_RNA (1)...(19): siRNA sense strand
gcaggaaggagaucaagga

SEQ ID NO: 2118492 - RNA, 19 nt, Homo sapiens
  misc_RNA (1)...(19): siRNA sense strand
gagcaggacaacaagauga

SEQ ID NO: 2118493 - RNA, 19 nt, Homo sapiens
  misc_RNA (1)...(19): siRNA sense strand
gcaacaaugaucuggagaa

SEQ ID NO: 2118494 - RNA, 19 nt, Homo sapiens
  misc_RNA (1)...(19): siRNA sense strand
gaagaaacgagagcucaug

SEQ ID NO: 2118495 - RNA, 19 nt, Homo sapiens
  misc_RNA (1)...(19): siRNA sense strand
ccaaguacccgcugcugaa

SEQ ID NO: 2118496 - RNA, 19 nt, Homo sapiens
  misc_RNA (1)...(19): siRNA sense strand
cagcagcucucaggauuca

SEQ ID NO: 2118497 - RNA, 19 nt, Homo sapiens
  misc_RNA (1)...(19): siRNA sense strand
ggacagcagcacccuccua

SEQ ID NO: 2118498 - RNA, 19 nt, Homo sapiens
  misc_RNA (1)...(19): siRNA sense strand
gcacugcuguaugccaaga

SEQ ID NO: 2118499 - RNA, 19 nt, Homo sapiens
  misc_RNA (1)...(19): siRNA sense strand
gccaagggccugcagaaga

SEQ ID NO: 2118500 - RNA, 19 nt, Homo sapiens
  misc_RNA (1)...(19): siRNA sense strand
gcuguggccuucaguagca

SEQ ID NO: 2118501 - RNA, 19 nt, Homo sapiens
  misc_RNA (1)...(19): siRNA sense strand
cccagcagcucucaggauu

SEQ ID NO: 2118502 - RNA, 19 nt, Homo sapiens
  misc_RNA (1)...(19): siRNA sense strand
uaaagacacgcguggagaa

SEQ ID NO: 2118503 - RNA, 19 nt, Homo sapiens
  misc_RNA (1)...(19): siRNA sense strand
gaaacaggaguucgagaag

SEQ ID NO: 2118504 - RNA, 19 nt, Homo sapiens
  misc_RNA (1)...(19): siRNA sense strand
cggccacgaucuccuacua

SEQ ID NO: 2118505 - RNA, 19 nt, Homo sapiens
  misc_RNA (1)...(19): siRNA sense strand
gaacaaggcggaggaagcu

SEQ ID NO: 2118506 - RNA, 19 nt, Homo sapiens
  misc_RNA (1)...(19): siRNA sense strand
gaugugcacuacgacuuug

SEQ ID NO: 2118507 - RNA, 19 nt, Homo sapiens
  misc_RNA (1)...(19): siRNA sense strand
gacaccagguucacaaguc

SEQ ID NO: 2118508 - RNA, 19 nt, Homo sapiens
  misc_RNA (1)...(19): siRNA sense strand
guagcacaguguccgaguu

SEQ ID NO: 2118509 - RNA, 19 nt, Homo sapiens
  misc_RNA (1)...(19): siRNA sense strand
gcggacgggugcagagaau

SEQ ID NO: 2118510 - RNA, 19 nt, Homo sapiens
  misc_RNA (1)...(19): siRNA sense strand
gaagugcgucugcgagauc

SEQ ID NO: 2118511 - RNA, 19 nt, Homo sapiens
  misc_RNA (1)...(19): siRNA sense strand
agaaggcccuggagacgau

SEQ ID NO: 2118512 - RNA, 19 nt, Homo sapiens
  misc_RNA (1)...(19): siRNA sense strand
ggaaaggcagccggaauuc

SEQ ID NO: 2118513 - RNA, 19 nt, Homo sapiens
  misc_RNA (1)...(19): siRNA sense strand
cagagaaucccgaguugug

SEQ ID NO: 2118514 - RNA, 19 nt, Homo sapiens
  misc_RNA (1)...(19): siRNA sense strand
gugcagagaaucccgaguu

SEQ ID NO: 2118515 - RNA, 19 nt, Homo sapiens
  misc_RNA (1)...(19): siRNA sense strand
agaaacaggaguucgagaa

SEQ ID NO: 2118516 - RNA, 19 nt, Homo sapiens
  misc_RNA (1)...(19): siRNA sense strand
uggagacgcuggccauaca

SEQ ID NO: 2118517 - RNA, 19 nt, Homo sapiens
  misc_RNA (1)...(19): siRNA sense strand
gaggacaccagguucacaa

SEQ ID NO: 2118518 - RNA, 19 nt, Homo sapiens
  misc_RNA (1)...(19): siRNA sense strand
ggagguggacgugcugcua

SEQ ID NO: 2118519 - RNA, 19 nt, Homo sapiens
  misc_RNA (1)...(19): siRNA sense strand
aggaagcuauggccaccua

SEQ ID NO: 2118520 - RNA, 19 nt, Homo sapiens
  misc_RNA (1)...(19): siRNA sense strand
ccaccaagacccuggacaa

SEQ ID NO: 2118521 - RNA, 19 nt, Homo sapiens
  misc_RNA (1)...(19): siRNA sense strand
ugcagaagaucgcucacaa

SEQ ID NO: 2118522 - RNA, 19 nt, Homo sapiens
  misc_RNA (1)...(19): siRNA sense strand
acuaccagaugaugcauau

SEQ ID NO: 2118523 - RNA, 19 nt, Homo sapiens
  misc_RNA (1)...(19): siRNA sense strand
ucguagggcuggccaagga

SEQ ID NO: 2118524 - RNA, 19 nt, Homo sapiens
  misc_RNA (1)...(19): siRNA sense strand
gcagacagagcgucaugca

SEQ ID NO: 2118525 - RNA, 19 nt, Homo sapiens
  misc_RNA (1)...(19): siRNA sense strand
acaccagguucacaaguca

SEQ ID NO: 2118526 - RNA, 19 nt, Homo sapiens
  misc_RNA (1)...(19): siRNA sense strand
cgaugugcacuacgacuuu

SEQ ID NO: 2118527 - RNA, 19 nt, Homo sapiens
  misc_RNA (1)...(19): siRNA sense strand
ggaagaaacgagagcucau

SEQ ID NO: 2118528 - RNA, 19 nt, Homo sapiens
  misc_RNA (1)...(19): siRNA sense strand
uaugagagcaacaaugauc

SEQ ID NO: 2118529 - RNA, 19 nt, Homo sapiens
  misc_RNA (1)...(19): siRNA sense strand
ggagcaggacaacaagaug

SEQ ID NO: 2118530 - RNA, 19 nt, Homo sapiens
  misc_RNA (1)...(19): siRNA sense strand
ccagggugcugagugugaa

SEQ ID NO: 2118531 - RNA, 19 nt, Homo sapiens
  misc_RNA (1)...(19): siRNA sense strand
auuaugagagcaacaauga

SEQ ID NO: 2118532 - RNA, 19 nt, Homo sapiens
  misc_RNA (1)...(19): siRNA sense strand
ggacaccagguucacaagu

SEQ ID NO: 2118533 - RNA, 19 nt, Homo sapiens
  misc_RNA (1)...(19): siRNA sense strand
ugagaaacuuaaggagugu

SEQ ID NO: 2118534 - RNA, 19 nt, Homo sapiens
  misc_RNA (1)...(19): siRNA sense strand
agcaggagcuggaggauac

SEQ ID NO: 2118535 - RNA, 19 nt, Homo sapiens
  misc_RNA (1)...(19): siRNA sense strand
cagaagaucgcucacaacu

SEQ ID NO: 2118536 - RNA, 19 nt, Homo sapiens
  misc_RNA (1)...(19): siRNA sense strand
cagcagcacccuccuagca

SEQ ID NO: 2118537 - RNA, 19 nt, Homo sapiens
  misc_RNA (1)...(19): siRNA sense strand
gcaucuaccgggucaaugg

SEQ ID NO: 2118538 - RNA, 19 nt, Homo sapiens
  misc_RNA (1)...(19): siRNA sense strand
aaacuuaaggagugugugu

SEQ ID NO: 2118539 - RNA, 19 nt, Homo sapiens
  misc_RNA (1)...(19): siRNA sense strand
ucucaggauucaacaccaa

SEQ ID NO: 2118540 - RNA, 19 nt, Homo sapiens
  misc_RNA (1)...(19): siRNA sense strand
ucgaggacaucucccaucu

SEQ ID NO: 2118541 - RNA, 19 nt, Homo sapiens
  misc_RNA (1)...(19): siRNA sense strand
gcagccggaauucguguga

SEQ ID NO: 2118542 - RNA, 19 nt, Homo sapiens
  misc_RNA (1)...(19): siRNA sense strand
acaccaaccaguccaacaa

SEQ ID NO: 2118543 - RNA, 19 nt, Homo sapiens
  misc_RNA (1)...(19): siRNA sense strand
gcagagaaucccgaguugu

SEQ ID NO: 2118544 - RNA, 19 nt, Homo sapiens
  misc_RNA (1)...(19): siRNA sense strand
ccaagugccgcgagugcaa

SEQ ID NO: 2118545 - RNA, 19 nt, Homo sapiens
  misc_RNA (1)...(19): siRNA sense strand
ugcagagaaucccgaguug

SEQ ID NO: 2118546 - RNA, 19 nt, Homo sapiens
  misc_RNA (1)...(19): siRNA sense strand
agacucucaucguccacua

SEQ ID NO: 2118547 - RNA, 19 nt, Homo sapiens
  misc_RNA (1)...(19): siRNA sense strand
ggaggaggccaagaacaag

SEQ ID NO: 2118548 - RNA, 19 nt, Homo sapiens
  misc_RNA (1)...(19): siRNA sense strand
aagaaacgagagcucauga

SEQ ID NO: 2118549 - RNA, 19 nt, Homo sapiens
  misc_RNA (1)...(19): siRNA sense strand
gaucucagacucggacagu

SEQ ID NO: 2118550 - RNA, 19 nt, Homo sapiens
  misc_RNA (1)...(19): siRNA sense strand
gcagaagaucgcucacaac

SEQ ID NO: 2118551 - RNA, 19 nt, Homo sapiens
  misc_RNA (1)...(19): siRNA sense strand
ccacuacggccuggucuuc

SEQ ID NO: 2118552 - RNA, 19 nt, Homo sapiens
  misc_RNA (1)...(19): siRNA sense strand
gcaacagcuacgucuacuu

SEQ ID NO: 2118553 - RNA, 19 nt, Homo sapiens
  misc_RNA (1)...(19): siRNA sense strand
gcacccucauugccaaggu

SEQ ID NO: 2118554 - RNA, 19 nt, Homo sapiens
  misc_RNA (1)...(19): siRNA sense strand
uggaggaggaggccaagaa

SEQ ID NO: 2118555 - RNA, 19 nt, Homo sapiens
  misc_RNA (1)...(19): siRNA sense strand
aggaggaggccaagaacaa

SEQ ID NO: 2118556 - RNA, 19 nt, Homo sapiens
  misc_RNA (1)...(19): siRNA sense strand
caucagcaacguccucaag

SEQ ID NO: 2118557 - RNA, 19 nt, Homo sapiens
  misc_RNA (1)...(19): siRNA sense strand
cugagggccuugagaaacu

SEQ ID NO: 2118558 - RNA, 19 nt, Homo sapiens
  misc_RNA (1)...(19): siRNA sense strand
ugucaugcaucagaucauc

SEQ ID NO: 2118559 - RNA, 19 nt, Homo sapiens
  misc_RNA (1)...(19): siRNA sense strand
gaaaggcagccggaauucg

SEQ ID NO: 2118560 - RNA, 19 nt, Homo sapiens
  misc_RNA (1)...(19): siRNA sense strand
cggacgucauccaguggua

SEQ ID NO: 2118561 - RNA, 19 nt, Homo sapiens
  misc_RNA (1)...(19): siRNA sense strand
caagaacaaggcggaggaa

SEQ ID NO: 2118562 - RNA, 19 nt, Homo sapiens
  misc_RNA (1)...(19): siRNA sense strand
gagggccuugagaaacuua

SEQ ID NO: 2118563 - RNA, 19 nt, Homo sapiens
  misc_RNA (1)...(19): siRNA sense strand
gaggaggaggccaagaaca

SEQ ID NO: 2118564 - RNA, 19 nt, Homo sapiens
  misc_RNA (1)...(19): siRNA sense strand
ccgagcugcuguccucauc

SEQ ID NO: 2118565 - RNA, 19 nt, Homo sapiens
  misc_RNA (1)...(19): siRNA sense strand
ggaggaggcuuccggaaau

SEQ ID NO: 2118566 - RNA, 19 nt, Homo sapiens
  misc_RNA (1)...(19): siRNA sense strand
gaggaggcuuccggaaaua

SEQ ID NO: 2118567 - RNA, 19 nt, Homo sapiens
  misc_RNA (1)...(19): siRNA sense strand
cagaguucgugguggcuua

SEQ ID NO: 2118568 - RNA, 19 nt, Homo sapiens
  misc_RNA (1)...(19): siRNA sense strand
gcaucucccucgcccauca

SEQ ID NO: 2118569 - RNA, 19 nt, Homo sapiens
  misc_RNA (1)...(19): siRNA sense strand
ccagcacgcuccacugcaa

SEQ ID NO: 2118570 - RNA, 19 nt, Homo sapiens
  misc_RNA (1)...(19): siRNA sense strand
aaagacacccggcucaguu

SEQ ID NO: 2118571 - RNA, 19 nt, Homo sapiens
  misc_RNA (1)...(19): siRNA sense strand
gaacuaccuccugcgagaa

SEQ ID NO: 2118572 - RNA, 19 nt, Homo sapiens
  misc_RNA (1)...(19): siRNA sense strand
ccggaaauacagauucauu

SEQ ID NO: 2118573 - RNA, 19 nt, Homo sapiens
  misc_RNA (1)...(19): siRNA sense strand
ggaacaguccgugaugcaa

SEQ ID NO: 2118574 - RNA, 19 nt, Homo sapiens
  misc_RNA (1)...(19): siRNA sense strand
ucgagagcuuugugaauca

SEQ ID NO: 2118575 - RNA, 19 nt, Homo sapiens
  misc_RNA (1)...(19): siRNA sense strand
caaagacacccggcucagu

SEQ ID NO: 2118576 - RNA, 19 nt, Homo sapiens
  misc_RNA (1)...(19): siRNA sense strand
caucgagagcuuugugaau

SEQ ID NO: 2118577 - RNA, 19 nt, Homo sapiens
  misc_RNA (1)...(19): siRNA sense strand
gccuggcucuucuccacaa

SEQ ID NO: 2118578 - RNA, 19 nt, Homo sapiens
  misc_RNA (1)...(19): siRNA sense strand
ggaggcuuccggaaauaca

SEQ ID NO: 2118579 - RNA, 19 nt, Homo sapiens
  misc_RNA (1)...(19): siRNA sense strand
gcaccauccugcagauccu

SEQ ID NO: 2118580 - RNA, 19 nt, Homo sapiens
  misc_RNA (1)...(19): siRNA sense strand
cggggaagcugcaggaguu

SEQ ID NO: 2118581 - RNA, 19 nt, Homo sapiens
  misc_RNA (1)...(19): siRNA sense strand
gccucaaagugcccaagga

SEQ ID NO: 2118582 - RNA, 19 nt, Homo sapiens
  misc_RNA (1)...(19): siRNA sense strand
gaugggcgcuacgugcuua

SEQ ID NO: 2118583 - RNA, 19 nt, Homo sapiens
  misc_RNA (1)...(19): siRNA sense strand
gcauccagcucgucuacaa

SEQ ID NO: 2118584 - RNA, 19 nt, Homo sapiens
  misc_RNA (1)...(19): siRNA sense strand
gcaaccaccuggcacugau

SEQ ID NO: 2118585 - RNA, 19 nt, Homo sapiens
  misc_RNA (1)...(19): siRNA sense strand
gcagugacuuuguguucca

SEQ ID NO: 2118586 - RNA, 19 nt, Homo sapiens
  misc_RNA (1)...(19): siRNA sense strand
gcacgcauguggucuacac

SEQ ID NO: 2118587 - RNA, 19 nt, Homo sapiens
  misc_RNA (1)...(19): siRNA sense strand
gcaucgaguuugaguucug

SEQ ID NO: 2118588 - RNA, 19 nt, Homo sapiens
  misc_RNA (1)...(19): siRNA sense strand
gcuaugaggugcgcaucca

SEQ ID NO: 2118589 - RNA, 19 nt, Homo sapiens
  misc_RNA (1)...(19): siRNA sense strand
cccaugaccugcuccuaca

SEQ ID NO: 2118590 - RNA, 19 nt, Homo sapiens
  misc_RNA (1)...(19): siRNA sense strand
ccaccgggacuaccugaug

SEQ ID NO: 2118591 - RNA, 19 nt, Homo sapiens
  misc_RNA (1)...(19): siRNA sense strand
ggcgcuacgugcuuaaugg

SEQ ID NO: 2118592 - RNA, 19 nt, Homo sapiens
  misc_RNA (1)...(19): siRNA sense strand
uccagaaccuccugcucuu

SEQ ID NO: 2118593 - RNA, 19 nt, Homo sapiens
  misc_RNA (1)...(19): siRNA sense strand
agugugcccuguacaaugg

SEQ ID NO: 2118594 - RNA, 19 nt, Homo sapiens
  misc_RNA (1)...(19): siRNA sense strand
caacccuggcaucgaguuu

SEQ ID NO: 2118595 - RNA, 19 nt, Homo sapiens
  misc_RNA (1)...(19): siRNA sense strand
cggcugugauggguuguug

SEQ ID NO: 2118596 - RNA, 19 nt, Homo sapiens
  misc_RNA (1)...(19): siRNA sense strand
cugcugaacugugguuugg

SEQ ID NO: 2118597 - RNA, 19 nt, Homo sapiens
  misc_RNA (1)...(19): siRNA sense strand
cggcagugacuuuguguuc

SEQ ID NO: 2118598 - RNA, 19 nt, Homo sapiens
  misc_RNA (1)...(19): siRNA sense strand
uggcaucgaguuugaguuc

SEQ ID NO: 2118599 - RNA, 19 nt, Homo sapiens
  misc_RNA (1)...(19): siRNA sense strand
gcacccagaagaccuacca

SEQ ID NO: 2118600 - RNA, 19 nt, Homo sapiens
  misc_RNA (1)...(19): siRNA sense strand
guaccgccucugccaguug

SEQ ID NO: 2118601 - RNA, 19 nt, Homo sapiens
  misc_RNA (1)...(19): siRNA sense strand
cuauugcggcagugacuuu

SEQ ID NO: 2118602 - RNA, 19 nt, Homo sapiens
  misc_RNA (1)...(19): siRNA sense strand
ccaaauggguggauuauuc

SEQ ID NO: 2118603 - RNA, 19 nt, Homo sapiens
  misc_RNA (1)...(19): siRNA sense strand
gcaggacgacuucuucaca

SEQ ID NO: 2118604 - RNA, 19 nt, Homo sapiens
  misc_RNA (1)...(19): siRNA sense strand
cgaacccgcucaccugucu

SEQ ID NO: 2118605 - RNA, 19 nt, Homo sapiens
  misc_RNA (1)...(19): siRNA sense strand
gcucaccugucugccaaug

SEQ ID NO: 2118606 - RNA, 19 nt, Homo sapiens
  misc_RNA (1)...(19): siRNA sense strand
ugucggagauguaccaaaa

SEQ ID NO: 2118607 - RNA, 19 nt, Homo sapiens
  misc_RNA (1)...(19): siRNA sense strand
ggccagacccugacuccau

SEQ ID NO: 2118608 - RNA, 19 nt, Homo sapiens
  misc_RNA (1)...(19): siRNA sense strand
gcagcugugccuggaugua

SEQ ID NO: 2118609 - RNA, 19 nt, Homo sapiens
  misc_RNA (1)...(19): siRNA sense strand
ggauggugcaggugagcuu

SEQ ID NO: 2118610 - RNA, 19 nt, Homo sapiens
  misc_RNA (1)...(19): siRNA sense strand
gcuauggacuggucauuua

SEQ ID NO: 2118611 - RNA, 19 nt, Homo sapiens
  misc_RNA (1)...(19): siRNA sense strand
ggaauggaaugacaagaaa

SEQ ID NO: 2118612 - RNA, 19 nt, Homo sapiens
  misc_RNA (1)...(19): siRNA sense strand
acaaagaacuggccacuau

SEQ ID NO: 2118613 - RNA, 19 nt, Homo sapiens
  misc_RNA (1)...(19): siRNA sense strand
caacagacccugccagauu

SEQ ID NO: 2118614 - RNA, 19 nt, Homo sapiens
  misc_RNA (1)...(19): siRNA sense strand
gaacuggccacuauaaaga

SEQ ID NO: 2118615 - RNA, 19 nt, Homo sapiens
  misc_RNA (1)...(19): siRNA sense strand
gaagaacuguggcaagauc

SEQ ID NO: 2118616 - RNA, 19 nt, Homo sapiens
  misc_RNA (1)...(19): siRNA sense strand
uaaagaagauggcguccuu

SEQ ID NO: 2118617 - RNA, 19 nt, Homo sapiens
  misc_RNA (1)...(19): siRNA sense strand
gcagugacauagcaucuga

SEQ ID NO: 2118618 - RNA, 19 nt, Homo sapiens
  misc_RNA (1)...(19): siRNA sense strand
gauagggacugcacacaga

SEQ ID NO: 2118619 - RNA, 19 nt, Homo sapiens
  misc_RNA (1)...(19): siRNA sense strand
ggagguggcugaggacauu

SEQ ID NO: 2118620 - RNA, 19 nt, Homo sapiens
  misc_RNA (1)...(19): siRNA sense strand
gcgcugagcuggucugcuu

SEQ ID NO: 2118621 - RNA, 19 nt, Homo sapiens
  misc_RNA (1)...(19): siRNA sense strand
gaaauacucccuggacauu

SEQ ID NO: 2118622 - RNA, 19 nt, Homo sapiens
  misc_RNA (1)...(19): siRNA sense strand
gaagauggcguccuuucaa

SEQ ID NO: 2118623 - RNA, 19 nt, Homo sapiens
  misc_RNA (1)...(19): siRNA sense strand
ucaaaugucucaagaagag

SEQ ID NO: 2118624 - RNA, 19 nt, Homo sapiens
  misc_RNA (1)...(19): siRNA sense strand
gagcugcugucagagaaua

SEQ ID NO: 2118625 - RNA, 19 nt, Homo sapiens
  misc_RNA (1)...(19): siRNA sense strand
ucaaagaccaccacuacua

SEQ ID NO: 2118626 - RNA, 19 nt, Homo sapiens
  misc_RNA (1)...(19): siRNA sense strand
ggauggcuauguacaguga

SEQ ID NO: 2118627 - RNA, 19 nt, Homo sapiens
  misc_RNA (1)...(19): siRNA sense strand
cagaacaucuugaccuuca

SEQ ID NO: 2118628 - RNA, 19 nt, Homo sapiens
  misc_RNA (1)...(19): siRNA sense strand
caucaaaugucucaagaag

SEQ ID NO: 2118629 - RNA, 19 nt, Homo sapiens
  misc_RNA (1)...(19): siRNA sense strand
ggacaggaacucagcauuc

SEQ ID NO: 2118630 - RNA, 19 nt, Homo sapiens
  misc_RNA (1)...(19): siRNA sense strand
caagauccauuugaagaga

SEQ ID NO: 2118631 - RNA, 19 nt, Homo sapiens
  misc_RNA (1)...(19): siRNA sense strand
gacaggaacucagcauuca

SEQ ID NO: 2118632 - RNA, 19 nt, Homo sapiens
  misc_RNA (1)...(19): siRNA sense strand
aggacgagcucuucaacua

SEQ ID NO: 2118633 - RNA, 19 nt, Homo sapiens
  misc_RNA (1)...(19): siRNA sense strand
aagcuggccuuggucauua

SEQ ID NO: 2118634 - RNA, 19 nt, Homo sapiens
  misc_RNA (1)...(19): siRNA sense strand
ccaccucucuggucaacuu

SEQ ID NO: 2118635 - RNA, 19 nt, Homo sapiens
  misc_RNA (1)...(19): siRNA sense strand
caacaaccgugccuacaac

SEQ ID NO: 2118636 - RNA, 19 nt, Homo sapiens
  misc_RNA (1)...(19): siRNA sense strand
gaagagcaacaucaaaaua

SEQ ID NO: 2118637 - RNA, 19 nt, Homo sapiens
  misc_RNA (1)...(19): siRNA sense strand
gauggucacccacaaagaa

SEQ ID NO: 2118638 - RNA, 19 nt, Homo sapiens
  misc_RNA (1)...(19): siRNA sense strand
caaagaacuggccacuaua

SEQ ID NO: 2118639 - RNA, 19 nt, Homo sapiens
  misc_RNA (1)...(19): siRNA sense strand
caauggaauuugccacaga

SEQ ID NO: 2118640 - RNA, 19 nt, Homo sapiens
  misc_RNA (1)...(19): siRNA sense strand
aaagaacuggccacuauaa

SEQ ID NO: 2118641 - RNA, 19 nt, Homo sapiens
  misc_RNA (1)...(19): siRNA sense strand
gcagagcauucccgacauc

SEQ ID NO: 2118642 - RNA, 19 nt, Homo sapiens
  misc_RNA (1)...(19): siRNA sense strand
caacacagacaccugcuau

SEQ ID NO: 2118643 - RNA, 19 nt, Homo sapiens
  misc_RNA (1)...(19): siRNA sense strand
gccuauggcuggacauuca

SEQ ID NO: 2118644 - RNA, 19 nt, Homo sapiens
  misc_RNA (1)...(19): siRNA sense strand
caagaagagcaacaucaaa

SEQ ID NO: 2118645 - RNA, 19 nt, Homo sapiens
  misc_RNA (1)...(19): siRNA sense strand
uaccugggauggcuaugua

SEQ ID NO: 2118646 - RNA, 19 nt, Homo sapiens
  misc_RNA (1)...(19): siRNA sense strand
gcccagaccagcuguugua

SEQ ID NO: 2118647 - RNA, 19 nt, Homo sapiens
  misc_RNA (1)...(19): siRNA sense strand
ggcaagauccauuugaaga

SEQ ID NO: 2118648 - RNA, 19 nt, Homo sapiens
  misc_RNA (1)...(19): siRNA sense strand
gaaaccaucaaaugucuca

SEQ ID NO: 2118649 - RNA, 19 nt, Homo sapiens
  misc_RNA (1)...(19): siRNA sense strand
caaaggaagaaauacaaga

SEQ ID NO: 2118650 - RNA, 19 nt, Homo sapiens
  misc_RNA (1)...(19): siRNA sense strand
gcgagcugcugucagagaa

SEQ ID NO: 2118651 - RNA, 19 nt, Homo sapiens
  misc_RNA (1)...(19): siRNA sense strand
guggcaagauccauuugaa

SEQ ID NO: 2118652 - RNA, 19 nt, Homo sapiens
  misc_RNA (1)...(19): siRNA sense strand
gaagaaauacaagaccaau

SEQ ID NO: 2118653 - RNA, 19 nt, Homo sapiens
  misc_RNA (1)...(19): siRNA sense strand
augcaaaccucaucacuca

SEQ ID NO: 2118654 - RNA, 19 nt, Homo sapiens
  misc_RNA (1)...(19): siRNA sense strand
ggaacagcgucuucaucga

SEQ ID NO: 2118655 - RNA, 19 nt, Homo sapiens
  misc_RNA (1)...(19): siRNA sense strand
ggaaugacaagaaauacuc

SEQ ID NO: 2118656 - RNA, 19 nt, Homo sapiens
  misc_RNA (1)...(19): siRNA sense strand
agaaauacaagaccaaugu

SEQ ID NO: 2118657 - RNA, 19 nt, Homo sapiens
  misc_RNA (1)...(19): siRNA sense strand
gcuggcaaaggaagaaaua

SEQ ID NO: 2118658 - RNA, 19 nt, Homo sapiens
  misc_RNA (1)...(19): siRNA sense strand
aagcugcucuuccacaaug

SEQ ID NO: 2118659 - RNA, 19 nt, Homo sapiens
  misc_RNA (1)...(19): siRNA sense strand
uggagacgguggacauuga

SEQ ID NO: 2118660 - RNA, 19 nt, Homo sapiens
  misc_RNA (1)...(19): siRNA sense strand
ggaagaaauacaagaccaa

SEQ ID NO: 2118661 - RNA, 19 nt, Homo sapiens
  misc_RNA (1)...(19): siRNA sense strand
ugacauagcaucugaaucc

SEQ ID NO: 2118662 - RNA, 19 nt, Homo sapiens
  misc_RNA (1)...(19): siRNA sense strand
ccugcgagcugcugucaga

SEQ ID NO: 2118663 - RNA, 19 nt, Homo sapiens
  misc_RNA (1)...(19): siRNA sense strand
ugacagagccaucaacaac

SEQ ID NO: 2118664 - RNA, 19 nt, Homo sapiens
  misc_RNA (1)...(19): siRNA sense strand
cuggucaacuucuucauga

SEQ ID NO: 2118665 - RNA, 19 nt, Homo sapiens
  misc_RNA (1)...(19): siRNA sense strand
ucaagaagagcaacaucaa

SEQ ID NO: 2118666 - RNA, 19 nt, Homo sapiens
  misc_RNA (1)...(19): siRNA sense strand
uggagaagccggagcugua

SEQ ID NO: 2118667 - RNA, 19 nt, Homo sapiens
  misc_RNA (1)...(19): siRNA sense strand
guacagcacccugccaguu

SEQ ID NO: 2118668 - RNA, 19 nt, Homo sapiens
  misc_RNA (1)...(19): siRNA sense strand
agaaacggcugugaacauc

SEQ ID NO: 2118669 - RNA, 19 nt, Homo sapiens
  misc_RNA (1)...(19): siRNA sense strand
ggcaaaggaagaaauacaa

SEQ ID NO: 2118670 - RNA, 19 nt, Homo sapiens
  misc_RNA (1)...(19): siRNA sense strand
gaccuucccguuucuguau

SEQ ID NO: 2118671 - RNA, 19 nt, Homo sapiens
  misc_RNA (1)...(19): siRNA sense strand
ggaaaacaguaacaaccuu

SEQ ID NO: 2118672 - RNA, 19 nt, Homo sapiens
  misc_RNA (1)...(19): siRNA sense strand
gagacuguacggagaaaug

SEQ ID NO: 2118673 - RNA, 19 nt, Homo sapiens
  misc_RNA (1)...(19): siRNA sense strand
cagaccagcuguuguacca

SEQ ID NO: 2118674 - RNA, 19 nt, Homo sapiens
  misc_RNA (1)...(19): siRNA sense strand
gcaaaggaagaaauacaag

SEQ ID NO: 2118675 - RNA, 19 nt, Homo sapiens
  misc_RNA (1)...(19): siRNA sense strand
ugucggugcugguucgaaa

SEQ ID NO: 2118676 - RNA, 19 nt, Homo sapiens
  misc_RNA (1)...(19): siRNA sense strand
gagacuuccuggacaaacu

SEQ ID NO: 2118677 - RNA, 19 nt, Homo sapiens
  misc_RNA (1)...(19): siRNA sense strand
ccaacaaccgugccuacaa

SEQ ID NO: 2118678 - RNA, 19 nt, Homo sapiens
  misc_RNA (1)...(19): siRNA sense strand
ggaagguccaggccaacaa

SEQ ID NO: 2118679 - RNA, 19 nt, Homo sapiens
  misc_RNA (1)...(19): siRNA sense strand
gacgagcucuucaacuacu

SEQ ID NO: 2118680 - RNA, 19 nt, Homo sapiens
  misc_RNA (1)...(19): siRNA sense strand
cuggagaccuacugggaaa

SEQ ID NO: 2118681 - RNA, 19 nt, Homo sapiens
  misc_RNA (1)...(19): siRNA sense strand
gcaagauccauuugaagag

SEQ ID NO: 2118682 - RNA, 19 nt, Homo sapiens
  misc_RNA (1)...(19): siRNA sense strand
ccaggucauucuuaucauc

SEQ ID NO: 2118683 - RNA, 19 nt, Homo sapiens
  misc_RNA (1)...(19): siRNA sense strand
caaagaccaccacuacuac

SEQ ID NO: 2118684 - RNA, 19 nt, Homo sapiens
  misc_RNA (1)...(19): siRNA sense strand
gaaauacaagaccaauguc

SEQ ID NO: 2118685 - RNA, 19 nt, Homo sapiens
  misc_RNA (1)...(19): siRNA sense strand
ggacggugccaacgacauc

SEQ ID NO: 2118686 - RNA, 19 nt, Homo sapiens
  misc_RNA (1)...(19): siRNA sense strand
acugggacgugcagaugua

SEQ ID NO: 2118687 - RNA, 19 nt, Homo sapiens
  misc_RNA (1)...(19): siRNA sense strand
gcaacacagacaccugcua

SEQ ID NO: 2118688 - RNA, 19 nt, Homo sapiens
  misc_RNA (1)...(19): siRNA sense strand
gaagaaauggcaggaucug

SEQ ID NO: 2118689 - RNA, 19 nt, Homo sapiens
  misc_RNA (1)...(19): siRNA sense strand
uggaauggaaugacaagaa

SEQ ID NO: 2118690 - RNA, 19 nt, Homo sapiens
  misc_RNA (1)...(19): siRNA sense strand
cagaaacggcugugaacau

SEQ ID NO: 2118691 - RNA, 19 nt, Homo sapiens
  misc_RNA (1)...(19): siRNA sense strand
gaggagacuguacggagaa

SEQ ID NO: 2118692 - RNA, 19 nt, Homo sapiens
  misc_RNA (1)...(19): siRNA sense strand
augaagaacuguggcaaga

SEQ ID NO: 2118693 - RNA, 19 nt, Homo sapiens
  misc_RNA (1)...(19): siRNA sense strand
gcaggauucgcaacacaga

SEQ ID NO: 2118694 - RNA, 19 nt, Homo sapiens
  misc_RNA (1)...(19): siRNA sense strand
ucuccacgcugcccugguu

SEQ ID NO: 2118695 - RNA, 19 nt, Homo sapiens
  misc_RNA (1)...(19): siRNA sense strand
gccaacgacaucaacauga

SEQ ID NO: 2118696 - RNA, 19 nt, Homo sapiens
  misc_RNA (1)...(19): siRNA sense strand
ugcaacagguguacaacga

SEQ ID NO: 2118697 - RNA, 19 nt, Homo sapiens
  misc_RNA (1)...(19): siRNA sense strand
uccaggaucuucugacgau

SEQ ID NO: 2118698 - RNA, 19 nt, Homo sapiens
  misc_RNA (1)...(19): siRNA sense strand
aacagacccugccagauuc

SEQ ID NO: 2118699 - RNA, 19 nt, Homo sapiens
  misc_RNA (1)...(19): siRNA sense strand
guccaggucauucuuauca

SEQ ID NO: 2118700 - RNA, 19 nt, Homo sapiens
  misc_RNA (1)...(19): siRNA sense strand
gcaugcaggcaguucagaa

SEQ ID NO: 2118701 - RNA, 19 nt, Homo sapiens
  misc_RNA (1)...(19): siRNA sense strand
cgcagaacaucuugaccuu

SEQ ID NO: 2118702 - RNA, 19 nt, Homo sapiens
  misc_RNA (1)...(19): siRNA sense strand
ggucauuuaugcugguuuu

SEQ ID NO: 2118703 - RNA, 19 nt, Homo sapiens
  misc_RNA (1)...(19): siRNA sense strand
gugauccugugcuggcaaa

SEQ ID NO: 2118704 - RNA, 19 nt, Homo sapiens
  misc_RNA (1)...(19): siRNA sense strand
ggacgagcucuucaacuac

SEQ ID NO: 2118705 - RNA, 19 nt, Homo sapiens
  misc_RNA (1)...(19): siRNA sense strand
gauggugcaggucugguuu

SEQ ID NO: 2118706 - RNA, 19 nt, Homo sapiens
  misc_RNA (1)...(19): siRNA sense strand
ggucauuaacggagacuuc

SEQ ID NO: 2118707 - RNA, 19 nt, Homo sapiens
  misc_RNA (1)...(19): siRNA sense strand
aaacaguaacaaccuucua

SEQ ID NO: 2118708 - RNA, 19 nt, Homo sapiens
  misc_RNA (1)...(19): siRNA sense strand
ccaucugccuguacaccaa

SEQ ID NO: 2118709 - RNA, 19 nt, Homo sapiens
  misc_RNA (1)...(19): siRNA sense strand
gggacgugcagauguacua

SEQ ID NO: 2118710 - RNA, 19 nt, Homo sapiens
  misc_RNA (1)...(19): siRNA sense strand
ggaagaugcugcugagugu

SEQ ID NO: 2118711 - RNA, 19 nt, Homo sapiens
  misc_RNA (1)...(19): siRNA sense strand
gggagaagcuggaccaagu

SEQ ID NO: 2118712 - RNA, 19 nt, Homo sapiens
  misc_RNA (1)...(19): siRNA sense strand
cuccugaacuacauaaaua

SEQ ID NO: 2118713 - RNA, 19 nt, Homo sapiens
  misc_RNA (1)...(19): siRNA sense strand
gcuguggcaucuuccagua

SEQ ID NO: 2118714 - RNA, 19 nt, Homo sapiens
  misc_RNA (1)...(19): siRNA sense strand
auaaauaacuggcacaaac

SEQ ID NO: 2118715 - RNA, 19 nt, Homo sapiens
  misc_RNA (1)...(19): siRNA sense strand
gcaccgcuguggcaucuuc

SEQ ID NO: 2118716 - RNA, 19 nt, Homo sapiens
  misc_RNA (1)...(19): siRNA sense strand
cgacagcaguguaccagau

SEQ ID NO: 2118717 - RNA, 19 nt, Homo sapiens
  misc_RNA (1)...(19): siRNA sense strand
aaacaggacacgagcauga

SEQ ID NO: 2118718 - RNA, 19 nt, Homo sapiens
  misc_RNA (1)...(19): siRNA sense strand
ccaacgagcugcgaaacau

SEQ ID NO: 2118719 - RNA, 19 nt, Homo sapiens
  misc_RNA (1)...(19): siRNA sense strand
cacagcaacuucuccaaga

SEQ ID NO: 2118720 - RNA, 19 nt, Homo sapiens
  misc_RNA (1)...(19): siRNA sense strand
ccagaacgccaucaucgaa

SEQ ID NO: 2118721 - RNA, 19 nt, Homo sapiens
  misc_RNA (1)...(19): siRNA sense strand
uaaauaacuggcacaaaca

SEQ ID NO: 2118722 - RNA, 19 nt, Homo sapiens
  misc_RNA (1)...(19): siRNA sense strand
gcacugccacagcaacuuc

SEQ ID NO: 2118723 - RNA, 19 nt, Homo sapiens
  misc_RNA (1)...(19): siRNA sense strand
gaccaucuccugcaacaac

SEQ ID NO: 2118724 - RNA, 19 nt, Homo sapiens
  misc_RNA (1)...(19): siRNA sense strand
aaccugaccuuggaagaug

SEQ ID NO: 2118725 - RNA, 19 nt, Homo sapiens
  misc_RNA (1)...(19): siRNA sense strand
ggagcgacgacacgaugaa

SEQ ID NO: 2118726 - RNA, 19 nt, Homo sapiens
  misc_RNA (1)...(19): siRNA sense strand
ggagaagcuggaccaagug

SEQ ID NO: 2118727 - RNA, 19 nt, Homo sapiens
  misc_RNA (1)...(19): siRNA sense strand
gcgacgacacgaugaagga

SEQ ID NO: 2118728 - RNA, 19 nt, Homo sapiens
  misc_RNA (1)...(19): siRNA sense strand
cagaacgccaucaucgaaa

SEQ ID NO: 2118729 - RNA, 19 nt, Homo sapiens
  misc_RNA (1)...(19): siRNA sense strand
caaccugaccuuggaagau

SEQ ID NO: 2118730 - RNA, 19 nt, Homo sapiens
  misc_RNA (1)...(19): siRNA sense strand
caagaucacccgggagaag

SEQ ID NO: 2118731 - RNA, 19 nt, Homo sapiens
  misc_RNA (1)...(19): siRNA sense strand
cgaaagccgcaucgacugu

SEQ ID NO: 2118732 - RNA, 19 nt, Homo sapiens
  misc_RNA (1)...(19): siRNA sense strand
cauaaauaacuggcacaaa

SEQ ID NO: 2118733 - RNA, 19 nt, Homo sapiens
  misc_RNA (1)...(19): siRNA sense strand
acagcaguguaccagauga

SEQ ID NO: 2118734 - RNA, 19 nt, Homo sapiens
  misc_RNA (1)...(19): siRNA sense strand
agaacgccaucaucgaaag

SEQ ID NO: 2118735 - RNA, 19 nt, Homo sapiens
  misc_RNA (1)...(19): siRNA sense strand
gacagcaguguaccagaug

SEQ ID NO: 2118736 - RNA, 19 nt, Homo sapiens
  misc_RNA (1)...(19): siRNA sense strand
gaaaccagcccaaccuaaa

SEQ ID NO: 2118737 - RNA, 19 nt, Homo sapiens
  misc_RNA (1)...(19): siRNA sense strand
caagcuacccgaacuauga

SEQ ID NO: 2118738 - RNA, 19 nt, Homo sapiens
  misc_RNA (1)...(19): siRNA sense strand
gcaccaagcuacccgaacu

SEQ ID NO: 2118739 - RNA, 19 nt, Homo sapiens
  misc_RNA (1)...(19): siRNA sense strand
ggaaaccagcccaaccuaa

SEQ ID NO: 2118740 - RNA, 19 nt, Homo sapiens
  misc_RNA (1)...(19): siRNA sense strand
ccaaggaggcucaaaggaa

SEQ ID NO: 2118741 - RNA, 19 nt, Homo sapiens
  misc_RNA (1)...(19): siRNA sense strand
cuaccuaccaggacaguua

SEQ ID NO: 2118742 - RNA, 19 nt, Homo sapiens
  misc_RNA (1)...(19): siRNA sense strand
ucacagcauucaucaagug

SEQ ID NO: 2118743 - RNA, 19 nt, Homo sapiens
  misc_RNA (1)...(19): siRNA sense strand
ggaugcaggucaccauauc

SEQ ID NO: 2118744 - RNA, 19 nt, Homo sapiens
  misc_RNA (1)...(19): siRNA sense strand
gcaagcacgccaccaucua

SEQ ID NO: 2118745 - RNA, 19 nt, Homo sapiens
  misc_RNA (1)...(19): siRNA sense strand
gggcagaagcacagaaaga

SEQ ID NO: 2118746 - RNA, 19 nt, Homo sapiens
  misc_RNA (1)...(19): siRNA sense strand
cagcauucaucaaguguca

SEQ ID NO: 2118747 - RNA, 19 nt, Homo sapiens
  misc_RNA (1)...(19): siRNA sense strand
ugaccgaggaugaguauga

SEQ ID NO: 2118748 - RNA, 19 nt, Homo sapiens
  misc_RNA (1)...(19): siRNA sense strand
gaaaggcgucaugcgagua

SEQ ID NO: 2118749 - RNA, 19 nt, Homo sapiens
  misc_RNA (1)...(19): siRNA sense strand
ccaccaccauggcuaccua

SEQ ID NO: 2118750 - RNA, 19 nt, Homo sapiens
  misc_RNA (1)...(19): siRNA sense strand
gaacccggaccuucccauu

SEQ ID NO: 2118751 - RNA, 19 nt, Homo sapiens
  misc_RNA (1)...(19): siRNA sense strand
ggauggacccugccgugaa

SEQ ID NO: 2118752 - RNA, 19 nt, Homo sapiens
  misc_RNA (1)...(19): siRNA sense strand
gagagagaccagacagaug

SEQ ID NO: 2118753 - RNA, 19 nt, Homo sapiens
  misc_RNA (1)...(19): siRNA sense strand
guucaucgggugucccaua

SEQ ID NO: 2118754 - RNA, 19 nt, Homo sapiens
  misc_RNA (1)...(19): siRNA sense strand
gauccaagcaccagaaggu

SEQ ID NO: 2118755 - RNA, 19 nt, Homo sapiens
  misc_RNA (1)...(19): siRNA sense strand
ucugucaccucaccucuga

SEQ ID NO: 2118756 - RNA, 19 nt, Homo sapiens
  misc_RNA (1)...(19): siRNA sense strand
gauggacccugccgugaac

SEQ ID NO: 2118757 - RNA, 19 nt, Homo sapiens
  misc_RNA (1)...(19): siRNA sense strand
ggcagaagcacagaaagaa

SEQ ID NO: 2118758 - RNA, 19 nt, Homo sapiens
  misc_RNA (1)...(19): siRNA sense strand
gagggcagaagcacagaaa

SEQ ID NO: 2118759 - RNA, 19 nt, Homo sapiens
  misc_RNA (1)...(19): siRNA sense strand
gaaagugaacccggaccuu

SEQ ID NO: 2118760 - RNA, 19 nt, Homo sapiens
  misc_RNA (1)...(19): siRNA sense strand
gcaccuuguccucgggaua

SEQ ID NO: 2118761 - RNA, 19 nt, Homo sapiens
  misc_RNA (1)...(19): siRNA sense strand
ccacagucaugguguucau

SEQ ID NO: 2118762 - RNA, 19 nt, Homo sapiens
  misc_RNA (1)...(19): siRNA sense strand
ucaucaaguuccacaguca

SEQ ID NO: 2118763 - RNA, 19 nt, Homo sapiens
  misc_RNA (1)...(19): siRNA sense strand
gcaguuucaacgaccuuaa

SEQ ID NO: 2118764 - RNA, 19 nt, Homo sapiens
  misc_RNA (1)...(19): siRNA sense strand
ucaucaaguuccacaguca

SEQ ID NO: 2118765 - RNA, 19 nt, Homo sapiens
  misc_RNA (1)...(19): siRNA sense strand
caucgggugucccauaguc

SEQ ID NO: 2118766 - RNA, 19 nt, Homo sapiens
  misc_RNA (1)...(19): siRNA sense strand
ucaucaaguuccacaguca

SEQ ID NO: 2118767 - RNA, 19 nt, Homo sapiens
  misc_RNA (1)...(19): siRNA sense strand
ccugagaacucgcucuaac

SEQ ID NO: 2118768 - RNA, 19 nt, Homo sapiens
  misc_RNA (1)...(19): siRNA sense strand
guuccacagucacagcauu

SEQ ID NO: 2118769 - RNA, 19 nt, Homo sapiens
  misc_RNA (1)...(19): siRNA sense strand
cgacgaagggcgagugcuu

SEQ ID NO: 2118770 - RNA, 19 nt, Homo sapiens
  misc_RNA (1)...(19): siRNA sense strand
gggaaaccagcccaaccua

SEQ ID NO: 2118771 - RNA, 19 nt, Homo sapiens
  misc_RNA (1)...(19): siRNA sense strand
gcagaagcacagaaagaag

SEQ ID NO: 2118772 - RNA, 19 nt, Homo sapiens
  misc_RNA (1)...(19): siRNA sense strand
ggucaugguguuugagugu

SEQ ID NO: 2118773 - RNA, 19 nt, Homo sapiens
  misc_RNA (1)...(19): siRNA sense strand
cggagcaccuacccaagga

SEQ ID NO: 2118774 - RNA, 19 nt, Homo sapiens
  misc_RNA (1)...(19): siRNA sense strand
ucaugguguucaucaaguu

SEQ ID NO: 2118775 - RNA, 19 nt, Homo sapiens
  misc_RNA (1)...(19): siRNA sense strand
ucaugguguucaucaaguu

SEQ ID NO: 2118776 - RNA, 19 nt, Homo sapiens
  misc_RNA (1)...(19): siRNA sense strand
ucaugguguucaucaaguu

SEQ ID NO: 2118777 - RNA, 19 nt, Homo sapiens
  misc_RNA (1)...(19): siRNA sense strand
ucacagucaugguguucau

SEQ ID NO: 2118778 - RNA, 19 nt, Homo sapiens
  misc_RNA (1)...(19): siRNA sense strand
gcauucaucaagugucaug

SEQ ID NO: 2118779 - RNA, 19 nt, Homo sapiens
  misc_RNA (1)...(19): siRNA sense strand
cgagagagaccagacagau

SEQ ID NO: 2118780 - RNA, 19 nt, Homo sapiens
  misc_RNA (1)...(19): siRNA sense strand
uggaggagcgcaugaggaa

SEQ ID NO: 2118781 - RNA, 19 nt, Homo sapiens
  misc_RNA (1)...(19): siRNA sense strand
aaaccagcccaaccuaaau

SEQ ID NO: 2118782 - RNA, 19 nt, Homo sapiens
  misc_RNA (1)...(19): siRNA sense strand
caggaugcaggucaccaua

SEQ ID NO: 2118783 - RNA, 19 nt, Homo sapiens
  misc_RNA (1)...(19): siRNA sense strand
gguguuugagugucccaua

SEQ ID NO: 2118784 - RNA, 19 nt, Homo sapiens
  misc_RNA (1)...(19): siRNA sense strand
gaccgaggaugaguaugag

SEQ ID NO: 2118785 - RNA, 19 nt, Homo sapiens
  misc_RNA (1)...(19): siRNA sense strand
agacucggguccugaaagg

SEQ ID NO: 2118786 - RNA, 19 nt, Homo sapiens
  misc_RNA (1)...(19): siRNA sense strand
uuacagcuacggacaguca

SEQ ID NO: 2118787 - RNA, 19 nt, Homo sapiens
  misc_RNA (1)...(19): siRNA sense strand
guucaucgggugucugugu

SEQ ID NO: 2118788 - RNA, 19 nt, Homo sapiens
  misc_RNA (1)...(19): siRNA sense strand
gucaugguguucaucaagu

SEQ ID NO: 2118789 - RNA, 19 nt, Homo sapiens
  misc_RNA (1)...(19): siRNA sense strand
ggugaccgaggaugaguau

SEQ ID NO: 2118790 - RNA, 19 nt, Homo sapiens
  misc_RNA (1)...(19): siRNA sense strand
gucaugguguucaucaagu

SEQ ID NO: 2118791 - RNA, 19 nt, Homo sapiens
  misc_RNA (1)...(19): siRNA sense strand
agagacccguggccucgaa

SEQ ID NO: 2118792 - RNA, 19 nt, Homo sapiens
  misc_RNA (1)...(19): siRNA sense strand
gucaugguguucaucaagu

SEQ ID NO: 2118793 - RNA, 19 nt, Homo sapiens
  misc_RNA (1)...(19): siRNA sense strand
guuccacagucaugguguu

SEQ ID NO: 2118794 - RNA, 19 nt, Homo sapiens
  misc_RNA (1)...(19): siRNA sense strand
uggagcugcugguggagaa

SEQ ID NO: 2118795 - RNA, 19 nt, Homo sapiens
  misc_RNA (1)...(19): siRNA sense strand
gcccaugacccuccaagag

SEQ ID NO: 2118796 - RNA, 19 nt, Homo sapiens
  misc_RNA (1)...(19): siRNA sense strand
cggucacgguguucauuga

SEQ ID NO: 2118797 - RNA, 19 nt, Homo sapiens
  misc_RNA (1)...(19): siRNA sense strand
guuccacagucacgguguu

SEQ ID NO: 2118798 - RNA, 19 nt, Homo sapiens
  misc_RNA (1)...(19): siRNA sense strand
ccaagcaccagaaggucuu

SEQ ID NO: 2118799 - RNA, 19 nt, Homo sapiens
  misc_RNA (1)...(19): siRNA sense strand
gcuuugcuauacugcacaa

SEQ ID NO: 2118800 - RNA, 19 nt, Homo sapiens
  misc_RNA (1)...(19): siRNA sense strand
caucgagugucauggucau

SEQ ID NO: 2118801 - RNA, 19 nt, Homo sapiens
  misc_RNA (1)...(19): siRNA sense strand
caucgagugucacagucau

SEQ ID NO: 2118802 - RNA, 19 nt, Homo sapiens
  misc_RNA (1)...(19): siRNA sense strand
guucaucgagugucacagu

SEQ ID NO: 2118803 - RNA, 19 nt, Homo sapiens
  misc_RNA (1)...(19): siRNA sense strand
guguuugagugucccauag

SEQ ID NO: 2118804 - RNA, 19 nt, Homo sapiens
  misc_RNA (1)...(19): siRNA sense strand
gaagccaacauugucaucu

SEQ ID NO: 2118805 - RNA, 19 nt, Homo sapiens
  misc_RNA (1)...(19): siRNA sense strand
caagcacgccaccaucuac

SEQ ID NO: 2118806 - RNA, 19 nt, Homo sapiens
  misc_RNA (1)...(19): siRNA sense strand
caccugagaacucgcucua

SEQ ID NO: 2118807 - RNA, 19 nt, Homo sapiens
  misc_RNA (1)...(19): siRNA sense strand
ggagggcagaagcacagaa

SEQ ID NO: 2118808 - RNA, 19 nt, Homo sapiens
  misc_RNA (1)...(19): siRNA sense strand
gcgagagagaccagacaga

SEQ ID NO: 2118809 - RNA, 19 nt, Homo sapiens
  misc_RNA (1)...(19): siRNA sense strand
caggucaccauaucuguca

SEQ ID NO: 2118810 - RNA, 19 nt, Homo sapiens
  misc_RNA (1)...(19): siRNA sense strand
gagaggaagagggugacaa

SEQ ID NO: 2118811 - RNA, 19 nt, Homo sapiens
  misc_RNA (1)...(19): siRNA sense strand
cggcugcaguaccggaaga

SEQ ID NO: 2118812 - RNA, 19 nt, Homo sapiens
  misc_RNA (1)...(19): siRNA sense strand
ggagguguucagcgacgaa

SEQ ID NO: 2118813 - RNA, 19 nt, Homo sapiens
  misc_RNA (1)...(19): siRNA sense strand
ucacagaacucuccaaaga

SEQ ID NO: 2118814 - RNA, 19 nt, Homo sapiens
  misc_RNA (1)...(19): siRNA sense strand
gaggugcucugcuccuuua

SEQ ID NO: 2118815 - RNA, 19 nt, Homo sapiens
  misc_RNA (1)...(19): siRNA sense strand
aagcaaacauggaaacuaa

SEQ ID NO: 2118816 - RNA, 19 nt, Homo sapiens
  misc_RNA (1)...(19): siRNA sense strand
gacgggagguggagaguuu

SEQ ID NO: 2118817 - RNA, 19 nt, Homo sapiens
  misc_RNA (1)...(19): siRNA sense strand
uaaccacccugcaggauga

SEQ ID NO: 2118818 - RNA, 19 nt, Homo sapiens
  misc_RNA (1)...(19): siRNA sense strand
uaacggagccgagaccaua

SEQ ID NO: 2118819 - RNA, 19 nt, Homo sapiens
  misc_RNA (1)...(19): siRNA sense strand
guacagaagccaccuccua

SEQ ID NO: 2118820 - RNA, 19 nt, Homo sapiens
  misc_RNA (1)...(19): siRNA sense strand
gaagccaccuccuauaugc

SEQ ID NO: 2118821 - RNA, 19 nt, Homo sapiens
  misc_RNA (1)...(19): siRNA sense strand
ccagauggaugaagaugug

SEQ ID NO: 2118822 - RNA, 19 nt, Homo sapiens
  misc_RNA (1)...(19): siRNA sense strand
gagccgagaccauagauga

SEQ ID NO: 2118823 - RNA, 19 nt, Homo sapiens
  misc_RNA (1)...(19): siRNA sense strand
gaagcaaacauggaaacua

SEQ ID NO: 2118824 - RNA, 19 nt, Homo sapiens
  misc_RNA (1)...(19): siRNA sense strand
caacccacauggagcuaaa

SEQ ID NO: 2118825 - RNA, 19 nt, Homo sapiens
  misc_RNA (1)...(19): siRNA sense strand
gugaccaggugaaggauuu

SEQ ID NO: 2118826 - RNA, 19 nt, Homo sapiens
  misc_RNA (1)...(19): siRNA sense strand
gaucacagaacucuccaaa

SEQ ID NO: 2118827 - RNA, 19 nt, Homo sapiens
  misc_RNA (1)...(19): siRNA sense strand
ccaaggagaaggacaagaa

SEQ ID NO: 2118828 - RNA, 19 nt, Homo sapiens
  misc_RNA (1)...(19): siRNA sense strand
ggagaccacagaagaagaa

SEQ ID NO: 2118829 - RNA, 19 nt, Homo sapiens
  misc_RNA (1)...(19): siRNA sense strand
gcaggacgcggcucacuau

SEQ ID NO: 2118830 - RNA, 19 nt, Homo sapiens
  misc_RNA (1)...(19): siRNA sense strand
gugaggcccuguucaugaa

SEQ ID NO: 2118831 - RNA, 19 nt, Homo sapiens
  misc_RNA (1)...(19): siRNA sense strand
gagccaaggucacagaaac

SEQ ID NO: 2118832 - RNA, 19 nt, Homo sapiens
  misc_RNA (1)...(19): siRNA sense strand
gcucauggcagcaauguca

SEQ ID NO: 2118833 - RNA, 19 nt, Homo sapiens
  misc_RNA (1)...(19): siRNA sense strand
acaagaagaucacagaacu

SEQ ID NO: 2118834 - RNA, 19 nt, Homo sapiens
  misc_RNA (1)...(19): siRNA sense strand
ugcaagagcuacagcaguu

SEQ ID NO: 2118835 - RNA, 19 nt, Homo sapiens
  misc_RNA (1)...(19): siRNA sense strand
gaagaagcaaacauggaaa

SEQ ID NO: 2118836 - RNA, 19 nt, Homo sapiens
  misc_RNA (1)...(19): siRNA sense strand
gggagaauacuagcuauga

SEQ ID NO: 2118837 - RNA, 19 nt, Homo sapiens
  misc_RNA (1)...(19): siRNA sense strand
gaagaugugcagcggauuc

SEQ ID NO: 2118838 - RNA, 19 nt, Homo sapiens
  misc_RNA (1)...(19): siRNA sense strand
acagaacucuccaaagaag

SEQ ID NO: 2118839 - RNA, 19 nt, Homo sapiens
  misc_RNA (1)...(19): siRNA sense strand
aauacuagcuaugacguaa

SEQ ID NO: 2118840 - RNA, 19 nt, Homo sapiens
  misc_RNA (1)...(19): siRNA sense strand
ggacaagaagaucacagaa

SEQ ID NO: 2118841 - RNA, 19 nt, Homo sapiens
  misc_RNA (1)...(19): siRNA sense strand
uauagcagcucagaugugu

SEQ ID NO: 2118842 - RNA, 19 nt, Homo sapiens
  misc_RNA (1)...(19): siRNA sense strand
ugaggaggcugcaggagau

SEQ ID NO: 2118843 - RNA, 19 nt, Homo sapiens
  misc_RNA (1)...(19): siRNA sense strand
agauggaaguggaagcuuu

SEQ ID NO: 2118844 - RNA, 19 nt, Homo sapiens
  misc_RNA (1)...(19): siRNA sense strand
gaauacuagcuaugacgua

SEQ ID NO: 2118845 - RNA, 19 nt, Homo sapiens
  misc_RNA (1)...(19): siRNA sense strand
gagaaggacaagaagauca

SEQ ID NO: 2118846 - RNA, 19 nt, Homo sapiens
  misc_RNA (1)...(19): siRNA sense strand
cagaagccaccuccuauau

SEQ ID NO: 2118847 - RNA, 19 nt, Homo sapiens
  misc_RNA (1)...(19): siRNA sense strand
cggaaaagcuucaaguaga

SEQ ID NO: 2118848 - RNA, 19 nt, Homo sapiens
  misc_RNA (1)...(19): siRNA sense strand
gcuccagaaaccaaaguua

SEQ ID NO: 2118849 - RNA, 19 nt, Homo sapiens
  misc_RNA (1)...(19): siRNA sense strand
agaagaagcaaacauggaa

SEQ ID NO: 2118850 - RNA, 19 nt, Homo sapiens
  misc_RNA (1)...(19): siRNA sense strand
cauuauagcagcucagaug

SEQ ID NO: 2118851 - RNA, 19 nt, Homo sapiens
  misc_RNA (1)...(19): siRNA sense strand
gaaauggagaccacagaag

SEQ ID NO: 2118852 - RNA, 19 nt, Homo sapiens
  misc_RNA (1)...(19): siRNA sense strand
gagaaggacgagacacaga

SEQ ID NO: 2118853 - RNA, 19 nt, Homo sapiens
  misc_RNA (1)...(19): siRNA sense strand
gagaacgagcgggagaaua

SEQ ID NO: 2118854 - RNA, 19 nt, Homo sapiens
  misc_RNA (1)...(19): siRNA sense strand
ggacaaggccaaggagaag

SEQ ID NO: 2118855 - RNA, 19 nt, Homo sapiens
  misc_RNA (1)...(19): siRNA sense strand
agaagaagaagcaaacaug

SEQ ID NO: 2118856 - RNA, 19 nt, Homo sapiens
  misc_RNA (1)...(19): siRNA sense strand
ccacagaagaagaagcaaa

SEQ ID NO: 2118857 - RNA, 19 nt, Homo sapiens
  misc_RNA (1)...(19): siRNA sense strand
gaaggacgagacacagaug

SEQ ID NO: 2118858 - RNA, 19 nt, Homo sapiens
  misc_RNA (1)...(19): siRNA sense strand
ggagaauacuagcuaugac

SEQ ID NO: 2118859 - RNA, 19 nt, Homo sapiens
  misc_RNA (1)...(19): siRNA sense strand
ccagcgugguggcuuugua

SEQ ID NO: 2118860 - RNA, 19 nt, Homo sapiens
  misc_RNA (1)...(19): siRNA sense strand
gagaaauggagaccacaga

SEQ ID NO: 2118861 - RNA, 19 nt, Homo sapiens
  misc_RNA (1)...(19): siRNA sense strand
ggacgagacacagauggaa

SEQ ID NO: 2118862 - RNA, 19 nt, Homo sapiens
  misc_RNA (1)...(19): siRNA sense strand
agacagaaccaggaacuga

SEQ ID NO: 2118863 - RNA, 19 nt, Homo sapiens
  misc_RNA (1)...(19): siRNA sense strand
aaauggagaccacagaaga

SEQ ID NO: 2118864 - RNA, 19 nt, Homo sapiens
  misc_RNA (1)...(19): siRNA sense strand
accaggaacugauggagaa

SEQ ID NO: 2118865 - RNA, 19 nt, Homo sapiens
  misc_RNA (1)...(19): siRNA sense strand
uggagaacuuugagaagga

SEQ ID NO: 2118866 - RNA, 19 nt, Homo sapiens
  misc_RNA (1)...(19): siRNA sense strand
acagaagccaccuccuaua

SEQ ID NO: 2118867 - RNA, 19 nt, Homo sapiens
  misc_RNA (1)...(19): siRNA sense strand
ucacagggaccacaaacau

SEQ ID NO: 2118868 - RNA, 19 nt, Homo sapiens
  misc_RNA (1)...(19): siRNA sense strand
gauggaaguggaagcuuug

SEQ ID NO: 2118869 - RNA, 19 nt, Homo sapiens
  misc_RNA (1)...(19): siRNA sense strand
ggcgaggcgucaucucaga

SEQ ID NO: 2118870 - RNA, 19 nt, Homo sapiens
  misc_RNA (1)...(19): siRNA sense strand
agucuucaaucuuaaggaa

SEQ ID NO: 2118871 - RNA, 19 nt, Homo sapiens
  misc_RNA (1)...(19): siRNA sense strand
gacgagaggcugcuacaag

SEQ ID NO: 2118872 - RNA, 19 nt, Homo sapiens
  misc_RNA (1)...(19): siRNA sense strand
cgucaucucagaacucuau

SEQ ID NO: 2118873 - RNA, 19 nt, Homo sapiens
  misc_RNA (1)...(19): siRNA sense strand
cgugguggcuuuguacaga

SEQ ID NO: 2118874 - RNA, 19 nt, Homo sapiens
  misc_RNA (1)...(19): siRNA sense strand
ggaaaagcuucaaguagag

SEQ ID NO: 2118875 - RNA, 19 nt, Homo sapiens
  misc_RNA (1)...(19): siRNA sense strand
gcgggagaauacuagcuau

SEQ ID NO: 2118876 - RNA, 19 nt, Homo sapiens
  misc_RNA (1)...(19): siRNA sense strand
cgugaggcccuguucauga

SEQ ID NO: 2118877 - RNA, 19 nt, Homo sapiens
  misc_RNA (1)...(19): siRNA sense strand
gaccacagaagaagaagca

SEQ ID NO: 2118878 - RNA, 19 nt, Homo sapiens
  misc_RNA (1)...(19): siRNA sense strand
ggccgaguuugaccagcua

SEQ ID NO: 2118879 - RNA, 19 nt, Homo sapiens
  misc_RNA (1)...(19): siRNA sense strand
gaggcccuguucaugaaga

SEQ ID NO: 2118880 - RNA, 19 nt, Homo sapiens
  misc_RNA (1)...(19): siRNA sense strand
ggagccaaggucacagaaa

SEQ ID NO: 2118881 - RNA, 19 nt, Homo sapiens
  misc_RNA (1)...(19): siRNA sense strand
gaugugcagcggauucuca

SEQ ID NO: 2118882 - RNA, 19 nt, Homo sapiens
  misc_RNA (1)...(19): siRNA sense strand
ggagaaggacaagaagauc

SEQ ID NO: 2118883 - RNA, 19 nt, Homo sapiens
  misc_RNA (1)...(19): siRNA sense strand
uagcagcucagauguguca

SEQ ID NO: 2118884 - RNA, 19 nt, Homo sapiens
  misc_RNA (1)...(19): siRNA sense strand
cuccagaaaccaaaguuaa

SEQ ID NO: 2118885 - RNA, 19 nt, Homo sapiens
  misc_RNA (1)...(19): siRNA sense strand
gauagcucauggcagcaau

SEQ ID NO: 2118886 - RNA, 19 nt, Homo sapiens
  misc_RNA (1)...(19): siRNA sense strand
agaacgagcgggagaauac

SEQ ID NO: 2118887 - RNA, 19 nt, Homo sapiens
  misc_RNA (1)...(19): siRNA sense strand
ggagaacgagcgggagaau

SEQ ID NO: 2118888 - RNA, 19 nt, Homo sapiens
  misc_RNA (1)...(19): siRNA sense strand
ggcugucccugcuggagaa

SEQ ID NO: 2118889 - RNA, 19 nt, Homo sapiens
  misc_RNA (1)...(19): siRNA sense strand
cacagaacucuccaaagaa

SEQ ID NO: 2118890 - RNA, 19 nt, Homo sapiens
  misc_RNA (1)...(19): siRNA sense strand
gcaaacauggaaacuaagc

SEQ ID NO: 2118891 - RNA, 19 nt, Homo sapiens
  misc_RNA (1)...(19): siRNA sense strand
gacagaaccaggaacugau

SEQ ID NO: 2118892 - RNA, 19 nt, Homo sapiens
  misc_RNA (1)...(19): siRNA sense strand
uacagaagccaccuccuau

SEQ ID NO: 2118893 - RNA, 19 nt, Homo sapiens
  misc_RNA (1)...(19): siRNA sense strand
gacaagaagaucacagaac

SEQ ID NO: 2118894 - RNA, 19 nt, Homo sapiens
  misc_RNA (1)...(19): siRNA sense strand
agaaauggagaccacagaa

SEQ ID NO: 2118895 - RNA, 19 nt, Homo sapiens
  misc_RNA (1)...(19): siRNA sense strand
ggaggcugcaggagaugaa

SEQ ID NO: 2118896 - RNA, 19 nt, Homo sapiens
  misc_RNA (1)...(19): siRNA sense strand
ggagagacaagaggagaag

SEQ ID NO: 2118897 - RNA, 19 nt, Homo sapiens
  misc_RNA (1)...(19): siRNA sense strand
gugguggcuuuguacagaa

SEQ ID NO: 2118898 - RNA, 19 nt, Homo sapiens
  misc_RNA (1)...(19): siRNA sense strand
gcaacaccccucauuauag

SEQ ID NO: 2118899 - RNA, 19 nt, Homo sapiens
  misc_RNA (1)...(19): siRNA sense strand
gagacaggugcaagagcua

SEQ ID NO: 2118900 - RNA, 19 nt, Homo sapiens
  misc_RNA (1)...(19): siRNA sense strand
ccaaggucacagaaacaaa

SEQ ID NO: 2118901 - RNA, 19 nt, Homo sapiens
  misc_RNA (1)...(19): siRNA sense strand
ccaugaagcagcugugucu

SEQ ID NO: 2118902 - RNA, 19 nt, Homo sapiens
  misc_RNA (1)...(19): siRNA sense strand
uggcugugcucaccagaca

SEQ ID NO: 2118903 - RNA, 19 nt, Homo sapiens
  misc_RNA (1)...(19): siRNA sense strand
ggagagacaggugcaagag

SEQ ID NO: 2118904 - RNA, 19 nt, Homo sapiens
  misc_RNA (1)...(19): siRNA sense strand
agaagccaccuccuauaug

SEQ ID NO: 2118905 - RNA, 19 nt, Homo sapiens
  misc_RNA (1)...(19): siRNA sense strand
uggccucgcugcaggaaca

SEQ ID NO: 2118906 - RNA, 19 nt, Homo sapiens
  misc_RNA (1)...(19): siRNA sense strand
gcaagagcuacagcaguug

SEQ ID NO: 2118907 - RNA, 19 nt, Homo sapiens
  misc_RNA (1)...(19): siRNA sense strand
ugaucgagaugccuaugag

SEQ ID NO: 2118908 - RNA, 19 nt, Homo sapiens
  misc_RNA (1)...(19): siRNA sense strand
ggacggggcagguuacaau

SEQ ID NO: 2118909 - RNA, 19 nt, Homo sapiens
  misc_RNA (1)...(19): siRNA sense strand
ggaagccaggacuauggaa

SEQ ID NO: 2118910 - RNA, 19 nt, Homo sapiens
  misc_RNA (1)...(19): siRNA sense strand
gcgcaacaccccucauuau

SEQ ID NO: 2118911 - RNA, 19 nt, Homo sapiens
  misc_RNA (1)...(19): siRNA sense strand
aagaagaagcaaacaugga

SEQ ID NO: 2118912 - RNA, 19 nt, Homo sapiens
  misc_RNA (1)...(19): siRNA sense strand
caaggucacagaaacaaaa

SEQ ID NO: 2118913 - RNA, 19 nt, Homo sapiens
  misc_RNA (1)...(19): siRNA sense strand
ccaaguggcuacgggacua

SEQ ID NO: 2118914 - RNA, 19 nt, Homo sapiens
  misc_RNA (1)...(19): siRNA sense strand
caaggaaggcagcuaccua

SEQ ID NO: 2118915 - RNA, 19 nt, Homo sapiens
  misc_RNA (1)...(19): siRNA sense strand
ggaaggcagcuaccuagug

SEQ ID NO: 2118916 - RNA, 19 nt, Homo sapiens
  misc_RNA (1)...(19): siRNA sense strand
ggagaugccaaguaugguu

SEQ ID NO: 2118917 - RNA, 19 nt, Homo sapiens
  misc_RNA (1)...(19): siRNA sense strand
gguggaggcugcggauaug

SEQ ID NO: 2118918 - RNA, 19 nt, Homo sapiens
  misc_RNA (1)...(19): siRNA sense strand
ggaagccgacacugaguau

SEQ ID NO: 2118919 - RNA, 19 nt, Homo sapiens
  misc_RNA (1)...(19): siRNA sense strand
gcccuacgaugcccaaugg

SEQ ID NO: 2118920 - RNA, 19 nt, Homo sapiens
  misc_RNA (1)...(19): siRNA sense strand
agccgacacugaguauuua

SEQ ID NO: 2118921 - RNA, 19 nt, Homo sapiens
  misc_RNA (1)...(19): siRNA sense strand
cagcagaugaguaugauca

SEQ ID NO: 2118922 - RNA, 19 nt, Homo sapiens
  misc_RNA (1)...(19): siRNA sense strand
guacauggagcccuacgau

SEQ ID NO: 2118923 - RNA, 19 nt, Homo sapiens
  misc_RNA (1)...(19): siRNA sense strand
ggaacaggacccagagaca

SEQ ID NO: 2118924 - RNA, 19 nt, Homo sapiens
  misc_RNA (1)...(19): siRNA sense strand
aagccgacacugaguauuu

SEQ ID NO: 2118925 - RNA, 19 nt, Homo sapiens
  misc_RNA (1)...(19): siRNA sense strand
gggacuaccugagcuuugg

SEQ ID NO: 2118926 - RNA, 19 nt, Homo sapiens
  misc_RNA (1)...(19): siRNA sense strand
ggccagcagaugaguauga

SEQ ID NO: 2118927 - RNA, 19 nt, Homo sapiens
  misc_RNA (1)...(19): siRNA sense strand
ccacaucuccagggcguuu

SEQ ID NO: 2118928 - RNA, 19 nt, Homo sapiens
  misc_RNA (1)...(19): siRNA sense strand
gcaucuggcucugcuguac

SEQ ID NO: 2118929 - RNA, 19 nt, Homo sapiens
  misc_RNA (1)...(19): siRNA sense strand
ggaagaaagaccacaucuc

SEQ ID NO: 2118930 - RNA, 19 nt, Homo sapiens
  misc_RNA (1)...(19): siRNA sense strand
gaugaacggccagcagaug

SEQ ID NO: 2118931 - RNA, 19 nt, Homo sapiens
  misc_RNA (1)...(19): siRNA sense strand
ugacaccccuuaugaggaa

SEQ ID NO: 2118932 - RNA, 19 nt, Homo sapiens
  misc_RNA (1)...(19): siRNA sense strand
ccaagcaccggcucaucaa

SEQ ID NO: 2118933 - RNA, 19 nt, Homo sapiens
  misc_RNA (1)...(19): siRNA sense strand
gccagcagaugaguaugau

SEQ ID NO: 2118934 - RNA, 19 nt, Homo sapiens
  misc_RNA (1)...(19): siRNA sense strand
gaacggccagcagaugagu

SEQ ID NO: 2118935 - RNA, 19 nt, Homo sapiens
  misc_RNA (1)...(19): siRNA sense strand
gagcucguccuccacuaca

SEQ ID NO: 2118936 - RNA, 19 nt, Homo sapiens
  misc_RNA (1)...(19): siRNA sense strand
uggagaaacagccgugguu

SEQ ID NO: 2118937 - RNA, 19 nt, Homo sapiens
  misc_RNA (1)...(19): siRNA sense strand
ccggagaugccaaguaugg

SEQ ID NO: 2118938 - RNA, 19 nt, Homo sapiens
  misc_RNA (1)...(19): siRNA sense strand
gugcauuccuucucccaua

SEQ ID NO: 2118939 - RNA, 19 nt, Homo sapiens
  misc_RNA (1)...(19): siRNA sense strand
gaaagugaugucccucuga

SEQ ID NO: 2118940 - RNA, 19 nt, Homo sapiens
  misc_RNA (1)...(19): siRNA sense strand
aaagugaugucccucugaa

SEQ ID NO: 2118941 - RNA, 19 nt, Homo sapiens
  misc_RNA (1)...(19): siRNA sense strand
aaugagcaauggcagauga

SEQ ID NO: 2118942 - RNA, 19 nt, Homo sapiens
  misc_RNA (1)...(19): siRNA sense strand
gcgaagaccaccagcacuu

SEQ ID NO: 2118943 - RNA, 19 nt, Homo sapiens
  misc_RNA (1)...(19): siRNA sense strand
gccauggccuacucuaaag

SEQ ID NO: 2118944 - RNA, 19 nt, Homo sapiens
  misc_RNA (1)...(19): siRNA sense strand
ucuaaagccgcauuugaaa

SEQ ID NO: 2118945 - RNA, 19 nt, Homo sapiens
  misc_RNA (1)...(19): siRNA sense strand
ucugaaaacugaggaauuu

SEQ ID NO: 2118946 - RNA, 19 nt, Homo sapiens
  misc_RNA (1)...(19): siRNA sense strand
cgccauggccuacucuaaa

SEQ ID NO: 2118947 - RNA, 19 nt, Homo sapiens
  misc_RNA (1)...(19): siRNA sense strand
uaaagccgcauuugaaagg

SEQ ID NO: 2118948 - RNA, 19 nt, Homo sapiens
  misc_RNA (1)...(19): siRNA sense strand
aaacugaggaauuugaagu

SEQ ID NO: 2118949 - RNA, 19 nt, Homo sapiens
  misc_RNA (1)...(19): siRNA sense strand
ugcauuccuucucccauaa

SEQ ID NO: 2118950 - RNA, 19 nt, Homo sapiens
  misc_RNA (1)...(19): siRNA sense strand
acucuaaagccgcauuuga

SEQ ID NO: 2118951 - RNA, 19 nt, Homo sapiens
  misc_RNA (1)...(19): siRNA sense strand
gaaaacugaggaauuugaa

SEQ ID NO: 2118952 - RNA, 19 nt, Homo sapiens
  misc_RNA (1)...(19): siRNA sense strand
cauuugaaagggaaaguga

SEQ ID NO: 2118953 - RNA, 19 nt, Homo sapiens
  misc_RNA (1)...(19): siRNA sense strand
acugaggaauuugaaguga

SEQ ID NO: 2118954 - RNA, 19 nt, Homo sapiens
  misc_RNA (1)...(19): siRNA sense strand
ccaaugagcaauggcagau

SEQ ID NO: 2118955 - RNA, 19 nt, Homo sapiens
  misc_RNA (1)...(19): siRNA sense strand
gggaaguccuaucuguacu

SEQ ID NO: 2118956 - RNA, 19 nt, Homo sapiens
  misc_RNA (1)...(19): siRNA sense strand
gagggaccaaugagcaaug

SEQ ID NO: 2118957 - RNA, 19 nt, Homo sapiens
  misc_RNA (1)...(19): siRNA sense strand
guacuucacacaguucaag

SEQ ID NO: 2118958 - RNA, 19 nt, Homo sapiens
  misc_RNA (1)...(19): siRNA sense strand
cucuaaagccgcauuugaa

SEQ ID NO: 2118959 - RNA, 19 nt, Homo sapiens
  misc_RNA (1)...(19): siRNA sense strand
ggggacaaauauacgugua

SEQ ID NO: 2118960 - RNA, 19 nt, Homo sapiens
  misc_RNA (1)...(19): siRNA sense strand
gugcauuccuucucccaua

SEQ ID NO: 2118961 - RNA, 19 nt, Homo sapiens
  misc_RNA (1)...(19): siRNA sense strand
gaaagugaugucccucuga

SEQ ID NO: 2118962 - RNA, 19 nt, Homo sapiens
  misc_RNA (1)...(19): siRNA sense strand
aaagugaugucccucugaa

SEQ ID NO: 2118963 - RNA, 19 nt, Homo sapiens
  misc_RNA (1)...(19): siRNA sense strand
aaugagcaauggcagauga

SEQ ID NO: 2118964 - RNA, 19 nt, Homo sapiens
  misc_RNA (1)...(19): siRNA sense strand
gcgaagaccaccagcacuu

SEQ ID NO: 2118965 - RNA, 19 nt, Homo sapiens
  misc_RNA (1)...(19): siRNA sense strand
gccauggccuacucuaaag

SEQ ID NO: 2118966 - RNA, 19 nt, Homo sapiens
  misc_RNA (1)...(19): siRNA sense strand
ucuaaagccgcauuugaaa

SEQ ID NO: 2118967 - RNA, 19 nt, Homo sapiens
  misc_RNA (1)...(19): siRNA sense strand
ucugaaaacugaggaauuu

SEQ ID NO: 2118968 - RNA, 19 nt, Homo sapiens
  misc_RNA (1)...(19): siRNA sense strand
cgccauggccuacucuaaa

SEQ ID NO: 2118969 - RNA, 19 nt, Homo sapiens
  misc_RNA (1)...(19): siRNA sense strand
uaaagccgcauuugaaagg

SEQ ID NO: 2118970 - RNA, 19 nt, Homo sapiens
  misc_RNA (1)...(19): siRNA sense strand
aaacugaggaauuugaagu

SEQ ID NO: 2118971 - RNA, 19 nt, Homo sapiens
  misc_RNA (1)...(19): siRNA sense strand
ugcauuccuucucccauaa

SEQ ID NO: 2118972 - RNA, 19 nt, Homo sapiens
  misc_RNA (1)...(19): siRNA sense strand
acucuaaagccgcauuuga

SEQ ID NO: 2118973 - RNA, 19 nt, Homo sapiens
  misc_RNA (1)...(19): siRNA sense strand
gaaaacugaggaauuugaa

SEQ ID NO: 2118974 - RNA, 19 nt, Homo sapiens
  misc_RNA (1)...(19): siRNA sense strand
cauuugaaagggaaaguga

SEQ ID NO: 2118975 - RNA, 19 nt, Homo sapiens
  misc_RNA (1)...(19): siRNA sense strand
acugaggaauuugaaguga

SEQ ID NO: 2118976 - RNA, 19 nt, Homo sapiens
  misc_RNA (1)...(19): siRNA sense strand
ccaaugagcaauggcagau

SEQ ID NO: 2118977 - RNA, 19 nt, Homo sapiens
  misc_RNA (1)...(19): siRNA sense strand
gggaaguccuaucuguacu

SEQ ID NO: 2118978 - RNA, 19 nt, Homo sapiens
  misc_RNA (1)...(19): siRNA sense strand
gagggaccaaugagcaaug

SEQ ID NO: 2118979 - RNA, 19 nt, Homo sapiens
  misc_RNA (1)...(19): siRNA sense strand
guacuucacacaguucaag

SEQ ID NO: 2118980 - RNA, 19 nt, Homo sapiens
  misc_RNA (1)...(19): siRNA sense strand
cucuaaagccgcauuugaa

SEQ ID NO: 2118981 - RNA, 19 nt, Homo sapiens
  misc_RNA (1)...(19): siRNA sense strand
ggggacaaauauacgugua

SEQ ID NO: 2118982 - RNA, 19 nt, Homo sapiens
  misc_RNA (1)...(19): siRNA sense strand
ggaagaaccucaccuuugu

SEQ ID NO: 2118983 - RNA, 19 nt, Homo sapiens
  misc_RNA (1)...(19): siRNA sense strand
ggaaggacauggucaagau

SEQ ID NO: 2118984 - RNA, 19 nt, Homo sapiens
  misc_RNA (1)...(19): siRNA sense strand
gaacgcaaauacuggaaga

SEQ ID NO: 2118985 - RNA, 19 nt, Homo sapiens
  misc_RNA (1)...(19): siRNA sense strand
ggacuuugaugaccuugaa

SEQ ID NO: 2118986 - RNA, 19 nt, Homo sapiens
  misc_RNA (1)...(19): siRNA sense strand
gaaaccaagucuagaaagg

SEQ ID NO: 2118987 - RNA, 19 nt, Homo sapiens
  misc_RNA (1)...(19): siRNA sense strand
gggaauucaugaucacauu

SEQ ID NO: 2118988 - RNA, 19 nt, Homo sapiens
  misc_RNA (1)...(19): siRNA sense strand
gaagaaagagcagaccaaa

SEQ ID NO: 2118989 - RNA, 19 nt, Homo sapiens
  misc_RNA (1)...(19): siRNA sense strand
gucccgagcuggucaauga

SEQ ID NO: 2118990 - RNA, 19 nt, Homo sapiens
  misc_RNA (1)...(19): siRNA sense strand
gcccaaccauggaagaauu

SEQ ID NO: 2118991 - RNA, 19 nt, Homo sapiens
  misc_RNA (1)...(19): siRNA sense strand
ggaagcggaugaagaaggu

SEQ ID NO: 2118992 - RNA, 19 nt, Homo sapiens
  misc_RNA (1)...(19): siRNA sense strand
caaauacguggccuacaua

SEQ ID NO: 2118993 - RNA, 19 nt, Homo sapiens
  misc_RNA (1)...(19): siRNA sense strand
gaggaaaccaagucuagaa

SEQ ID NO: 2118994 - RNA, 19 nt, Homo sapiens
  misc_RNA (1)...(19): siRNA sense strand
gcaggcaccguccacauuu

SEQ ID NO: 2118995 - RNA, 19 nt, Homo sapiens
  misc_RNA (1)...(19): siRNA sense strand
acaaauacguggccuacau

SEQ ID NO: 2118996 - RNA, 19 nt, Homo sapiens
  misc_RNA (1)...(19): siRNA sense strand
gaacacgcccuaccuguac

SEQ ID NO: 2118997 - RNA, 19 nt, Homo sapiens
  misc_RNA (1)...(19): siRNA sense strand
ucaacuaccugcacuuugg

SEQ ID NO: 2118998 - RNA, 19 nt, Homo sapiens
  misc_RNA (1)...(19): siRNA sense strand
gagaggaaaccaagucuag

SEQ ID NO: 2118999 - RNA, 19 nt, Homo sapiens
  misc_RNA (1)...(19): siRNA sense strand
ccugagagcaucacgagua

SEQ ID NO: 2119000 - RNA, 19 nt, Homo sapiens
  misc_RNA (1)...(19): siRNA sense strand
ggucccagcugacggugaa

SEQ ID NO: 2119001 - RNA, 19 nt, Homo sapiens
  misc_RNA (1)...(19): siRNA sense strand
caucagcggcucuuuguau

SEQ ID NO: 2119002 - RNA, 19 nt, Homo sapiens
  misc_RNA (1)...(19): siRNA sense strand
aaacggagccagcccaaga

SEQ ID NO: 2119003 - RNA, 19 nt, Homo sapiens
  misc_RNA (1)...(19): siRNA sense strand
ggaagaaagagcagaccaa

SEQ ID NO: 2119004 - RNA, 19 nt, Homo sapiens
  misc_RNA (1)...(19): siRNA sense strand
ggaauucaugaucacauuu

SEQ ID NO: 2119005 - RNA, 19 nt, Homo sapiens
  misc_RNA (1)...(19): siRNA sense strand
ccaucauccugaagaagua

SEQ ID NO: 2119006 - RNA, 19 nt, Homo sapiens
  misc_RNA (1)...(19): siRNA sense strand
gcaguacaauauccagaag

SEQ ID NO: 2119007 - RNA, 19 nt, Homo sapiens
  misc_RNA (1)...(19): siRNA sense strand
aaugaaggcuggacguguu

SEQ ID NO: 2119008 - RNA, 19 nt, Homo sapiens
  misc_RNA (1)...(19): siRNA sense strand
ccgaggacauggaccugua

SEQ ID NO: 2119009 - RNA, 19 nt, Homo sapiens
  misc_RNA (1)...(19): siRNA sense strand
gcuacgagcuguggaagca

SEQ ID NO: 2119010 - RNA, 19 nt, Homo sapiens
  misc_RNA (1)...(19): siRNA sense strand
ggacugacggcaaccucua

SEQ ID NO: 2119011 - RNA, 19 nt, Homo sapiens
  misc_RNA (1)...(19): siRNA sense strand
aacagacacuggagaaaga

SEQ ID NO: 2119012 - RNA, 19 nt, Homo sapiens
  misc_RNA (1)...(19): siRNA sense strand
gaagauggagaucaagaag

SEQ ID NO: 2119013 - RNA, 19 nt, Homo sapiens
  misc_RNA (1)...(19): siRNA sense strand
gccaggcccuacagacuga

SEQ ID NO: 2119014 - RNA, 19 nt, Homo sapiens
  misc_RNA (1)...(19): siRNA sense strand
ggaggugcgcugcagauga

SEQ ID NO: 2119015 - RNA, 19 nt, Homo sapiens
  misc_RNA (1)...(19): siRNA sense strand
gcgcagaaucuaccaacuu

SEQ ID NO: 2119016 - RNA, 19 nt, Homo sapiens
  misc_RNA (1)...(19): siRNA sense strand
aguacaauauccagaagaa

SEQ ID NO: 2119017 - RNA, 19 nt, Homo sapiens
  misc_RNA (1)...(19): siRNA sense strand
ucaccugccucaagcacaa

SEQ ID NO: 2119018 - RNA, 19 nt, Homo sapiens
  misc_RNA (1)...(19): siRNA sense strand
gcugucgucucaccggaaa

SEQ ID NO: 2119019 - RNA, 19 nt, Homo sapiens
  misc_RNA (1)...(19): siRNA sense strand
gaaaacagacacuggagaa

SEQ ID NO: 2119020 - RNA, 19 nt, Homo sapiens
  misc_RNA (1)...(19): siRNA sense strand
gaauucaugaucacauuuc

SEQ ID NO: 2119021 - RNA, 19 nt, Homo sapiens
  misc_RNA (1)...(19): siRNA sense strand
ugaacacgcccuaccugua

SEQ ID NO: 2119022 - RNA, 19 nt, Homo sapiens
  misc_RNA (1)...(19): siRNA sense strand
uggaagaaccucaccuuug

SEQ ID NO: 2119023 - RNA, 19 nt, Homo sapiens
  misc_RNA (1)...(19): siRNA sense strand
ggagaggaaaccaagucua

SEQ ID NO: 2119024 - RNA, 19 nt, Homo sapiens
  misc_RNA (1)...(19): siRNA sense strand
gaggugcgcugcagaugac

SEQ ID NO: 2119025 - RNA, 19 nt, Homo sapiens
  misc_RNA (1)...(19): siRNA sense strand
gggaggaagaugugaguga

SEQ ID NO: 2119026 - RNA, 19 nt, Homo sapiens
  misc_RNA (1)...(19): siRNA sense strand
gcaggccuuugagcacuuu

SEQ ID NO: 2119027 - RNA, 19 nt, Homo sapiens
  misc_RNA (1)...(19): siRNA sense strand
cgcagaaucuaccaacuuc

SEQ ID NO: 2119028 - RNA, 19 nt, Homo sapiens
  misc_RNA (1)...(19): siRNA sense strand
gccggaagcggaugaagaa

SEQ ID NO: 2119029 - RNA, 19 nt, Homo sapiens
  misc_RNA (1)...(19): siRNA sense strand
ugagaaggaggcacccaua

SEQ ID NO: 2119030 - RNA, 19 nt, Homo sapiens
  misc_RNA (1)...(19): siRNA sense strand
aaccaagucuagaaaggaa

SEQ ID NO: 2119031 - RNA, 19 nt, Homo sapiens
  misc_RNA (1)...(19): siRNA sense strand
gacaucagcggcucuuugu

SEQ ID NO: 2119032 - RNA, 19 nt, Homo sapiens
  misc_RNA (1)...(19): siRNA sense strand
ucuaccagguggaguuuga

SEQ ID NO: 2119033 - RNA, 19 nt, Homo sapiens
  misc_RNA (1)...(19): siRNA sense strand
gacaaccuguacccugaga

SEQ ID NO: 2119034 - RNA, 19 nt, Homo sapiens
  misc_RNA (1)...(19): siRNA sense strand
agauggagaucaagaagag

SEQ ID NO: 2119035 - RNA, 19 nt, Homo sapiens
  misc_RNA (1)...(19): siRNA sense strand
caucaacuaccugcacuuu

SEQ ID NO: 2119036 - RNA, 19 nt, Homo sapiens
  misc_RNA (1)...(19): siRNA sense strand
gacaaauuagucugaaaga

SEQ ID NO: 2119037 - RNA, 19 nt, Homo sapiens
  misc_RNA (1)...(19): siRNA sense strand
aggaggagcugcccaagag

SEQ ID NO: 2119038 - RNA, 19 nt, Homo sapiens
  misc_RNA (1)...(19): siRNA sense strand
gccaagagcgagcggaaga

SEQ ID NO: 2119039 - RNA, 19 nt, Homo sapiens
  misc_RNA (1)...(19): siRNA sense strand
ugacaucagcggcucuuug

SEQ ID NO: 2119040 - RNA, 19 nt, Homo sapiens
  misc_RNA (1)...(19): siRNA sense strand
ggaaaccaagucuagaaag

SEQ ID NO: 2119041 - RNA, 19 nt, Homo sapiens
  misc_RNA (1)...(19): siRNA sense strand
caaccauggaagaauuuaa

SEQ ID NO: 2119042 - RNA, 19 nt, Homo sapiens
  misc_RNA (1)...(19): siRNA sense strand
gcggcucuuuguaugauga

SEQ ID NO: 2119043 - RNA, 19 nt, Homo sapiens
  misc_RNA (1)...(19): siRNA sense strand
gaggaggagcugcccaaga

SEQ ID NO: 2119044 - RNA, 19 nt, Homo sapiens
  misc_RNA (1)...(19): siRNA sense strand
agaagaaggccaugacagu

SEQ ID NO: 2119045 - RNA, 19 nt, Homo sapiens
  misc_RNA (1)...(19): siRNA sense strand
gagaaggaggcacccauag

SEQ ID NO: 2119046 - RNA, 19 nt, Homo sapiens
  misc_RNA (1)...(19): siRNA sense strand
ccaggacuuugaugaccuu

SEQ ID NO: 2119047 - RNA, 19 nt, Homo sapiens
  misc_RNA (1)...(19): siRNA sense strand
ggcaggcaccguccacauu

SEQ ID NO: 2119048 - RNA, 19 nt, Homo sapiens
  misc_RNA (1)...(19): siRNA sense strand
agagcgagcggaagaagaa

SEQ ID NO: 2119049 - RNA, 19 nt, Homo sapiens
  misc_RNA (1)...(19): siRNA sense strand
gaggagaggaaaccaaguc

SEQ ID NO: 2119050 - RNA, 19 nt, Homo sapiens
  misc_RNA (1)...(19): siRNA sense strand
agacugaggaggagaggaa

SEQ ID NO: 2119051 - RNA, 19 nt, Homo sapiens
  misc_RNA (1)...(19): siRNA sense strand
cagcggcucuuuguaugau

SEQ ID NO: 2119052 - RNA, 19 nt, Homo sapiens
  misc_RNA (1)...(19): siRNA sense strand
gcuguaaaaucaugacguu

SEQ ID NO: 2119053 - RNA, 19 nt, Homo sapiens
  misc_RNA (1)...(19): siRNA sense strand
ugaagauggagaucaagaa

SEQ ID NO: 2119054 - RNA, 19 nt, Homo sapiens
  misc_RNA (1)...(19): siRNA sense strand
gcaaauacuggaagaaccu

SEQ ID NO: 2119055 - RNA, 19 nt, Homo sapiens
  misc_RNA (1)...(19): siRNA sense strand
gcagaugaccaccgauagg

SEQ ID NO: 2119056 - RNA, 19 nt, Homo sapiens
  misc_RNA (1)...(19): siRNA sense strand
ugaggccgcugcugucucu

SEQ ID NO: 2119057 - RNA, 19 nt, Homo sapiens
  misc_RNA (1)...(19): siRNA sense strand
acauggaccuguacagcau

SEQ ID NO: 2119058 - RNA, 19 nt, Homo sapiens
  misc_RNA (1)...(19): siRNA sense strand
ccaugacagugggcgagua

SEQ ID NO: 2119059 - RNA, 19 nt, Homo sapiens
  misc_RNA (1)...(19): siRNA sense strand
ccaaauugaagauggagau

SEQ ID NO: 2119060 - RNA, 19 nt, Homo sapiens
  misc_RNA (1)...(19): siRNA sense strand
aaacagacacuggagaaag

SEQ ID NO: 2119061 - RNA, 19 nt, Homo sapiens
  misc_RNA (1)...(19): siRNA sense strand
cuccuccgcagacaaauua

SEQ ID NO: 2119062 - RNA, 19 nt, Homo sapiens
  misc_RNA (1)...(19): siRNA sense strand
gcacgugccggaaggacau

SEQ ID NO: 2119063 - RNA, 19 nt, Homo sapiens
  misc_RNA (1)...(19): siRNA sense strand
gaaggacauggucaagauc

SEQ ID NO: 2119064 - RNA, 19 nt, Homo sapiens
  misc_RNA (1)...(19): siRNA sense strand
ggacgacuggcccuaugug

SEQ ID NO: 2119065 - RNA, 19 nt, Homo sapiens
  misc_RNA (1)...(19): siRNA sense strand
gaagaaccucaccuuuguc

SEQ ID NO: 2119066 - RNA, 19 nt, Homo sapiens
  misc_RNA (1)...(19): siRNA sense strand
gaagcaggaggccucaagu

SEQ ID NO: 2119067 - RNA, 19 nt, Homo sapiens
  misc_RNA (1)...(19): siRNA sense strand
gcaagcugcggccaaccaa

SEQ ID NO: 2119068 - RNA, 19 nt, Homo sapiens
  misc_RNA (1)...(19): siRNA sense strand
ugaugaccuugaacgcaaa

SEQ ID NO: 2119069 - RNA, 19 nt, Homo sapiens
  misc_RNA (1)...(19): siRNA sense strand
ccauggaagaauuuaaaga

SEQ ID NO: 2119070 - RNA, 19 nt, Homo sapiens
  misc_RNA (1)...(19): siRNA sense strand
ggguucaacugcgcagaau

SEQ ID NO: 2119071 - RNA, 19 nt, Homo sapiens
  misc_RNA (1)...(19): siRNA sense strand
cugcagaugaccaccgaua

SEQ ID NO: 2119072 - RNA, 19 nt, Homo sapiens
  misc_RNA (1)...(19): siRNA sense strand
aaaccaagucuagaaagga

SEQ ID NO: 2119073 - RNA, 19 nt, Homo sapiens
  misc_RNA (1)...(19): siRNA sense strand
guucaacugcgcagaaucu

SEQ ID NO: 2119074 - RNA, 19 nt, Homo sapiens
  misc_RNA (1)...(19): siRNA sense strand
gauugacuacggcaaagug

SEQ ID NO: 2119075 - RNA, 19 nt, Homo sapiens
  misc_RNA (1)...(19): siRNA sense strand
ccaaccauggaagaauuua

SEQ ID NO: 2119076 - RNA, 19 nt, Homo sapiens
  misc_RNA (1)...(19): siRNA sense strand
gcaccaggacuuugaugac

SEQ ID NO: 2119077 - RNA, 19 nt, Homo sapiens
  misc_RNA (1)...(19): siRNA sense strand
gaggaggagaggaaaccaa

SEQ ID NO: 2119078 - RNA, 19 nt, Homo sapiens
  misc_RNA (1)...(19): siRNA sense strand
gaggaggugcgcugcagau

SEQ ID NO: 2119079 - RNA, 19 nt, Homo sapiens
  misc_RNA (1)...(19): siRNA sense strand
cuacaaggccaaguucauc

SEQ ID NO: 2119080 - RNA, 19 nt, Homo sapiens
  misc_RNA (1)...(19): siRNA sense strand
gaagcugaaaugcguguac

SEQ ID NO: 2119081 - RNA, 19 nt, Homo sapiens
  misc_RNA (1)...(19): siRNA sense strand
cagaugaccaccgauagga

SEQ ID NO: 2119082 - RNA, 19 nt, Homo sapiens
  misc_RNA (1)...(19): siRNA sense strand
ggacugcccucuccagaaa

SEQ ID NO: 2119083 - RNA, 19 nt, Homo sapiens
  misc_RNA (1)...(19): siRNA sense strand
gagcaucucucuccucuuc

SEQ ID NO: 2119084 - RNA, 19 nt, Homo sapiens
  misc_RNA (1)...(19): siRNA sense strand
gagcagaagacguuguuua

SEQ ID NO: 2119085 - RNA, 19 nt, Homo sapiens
  misc_RNA (1)...(19): siRNA sense strand
gaaaggagcauccauucga

SEQ ID NO: 2119086 - RNA, 19 nt, Homo sapiens
  misc_RNA (1)...(19): siRNA sense strand
gaaggccucuccaaaguca

SEQ ID NO: 2119087 - RNA, 19 nt, Homo sapiens
  misc_RNA (1)...(19): siRNA sense strand
caacaacuccuacaacuuc

SEQ ID NO: 2119088 - RNA, 19 nt, Homo sapiens
  misc_RNA (1)...(19): siRNA sense strand
gcagguggcugugcccuuu

SEQ ID NO: 2119089 - RNA, 19 nt, Homo sapiens
  misc_RNA (1)...(19): siRNA sense strand
cagaagacguuguuuaucu

SEQ ID NO: 2119090 - RNA, 19 nt, Homo sapiens
  misc_RNA (1)...(19): siRNA sense strand
gggaaggccucuccaaagu

SEQ ID NO: 2119091 - RNA, 19 nt, Homo sapiens
  misc_RNA (1)...(19): siRNA sense strand
gagcggacauccagcugaa

SEQ ID NO: 2119092 - RNA, 19 nt, Homo sapiens
  misc_RNA (1)...(19): siRNA sense strand
ggacaaggaccugguguug

SEQ ID NO: 2119093 - RNA, 19 nt, Homo sapiens
  misc_RNA (1)...(19): siRNA sense strand
caacguggccuacaucauc

SEQ ID NO: 2119094 - RNA, 19 nt, Homo sapiens
  misc_RNA (1)...(19): siRNA sense strand
gagcauccauucgacauca

SEQ ID NO: 2119095 - RNA, 19 nt, Homo sapiens
  misc_RNA (1)...(19): siRNA sense strand
cgaggaggauguucagaug

SEQ ID NO: 2119096 - RNA, 19 nt, Homo sapiens
  misc_RNA (1)...(19): siRNA sense strand
gcaguuuccugguccuguu

SEQ ID NO: 2119097 - RNA, 19 nt, Homo sapiens
  misc_RNA (1)...(19): siRNA sense strand
agaguucgcuccuauucaa

SEQ ID NO: 2119098 - RNA, 19 nt, Homo sapiens
  misc_RNA (1)...(19): siRNA sense strand
gcugggccuucaucaagua

SEQ ID NO: 2119099 - RNA, 19 nt, Homo sapiens
  misc_RNA (1)...(19): siRNA sense strand
gaacagcuucgguuucuac

SEQ ID NO: 2119100 - RNA, 19 nt, Homo sapiens
  misc_RNA (1)...(19): siRNA sense strand
gcgacuacgugcuguggaa

SEQ ID NO: 2119101 - RNA, 19 nt, Homo sapiens
  misc_RNA (1)...(19): siRNA sense strand
acaauucagugccaggaaa

SEQ ID NO: 2119102 - RNA, 19 nt, Homo sapiens
  misc_RNA (1)...(19): siRNA sense strand
gcagaguucgcuccuauuc

SEQ ID NO: 2119103 - RNA, 19 nt, Homo sapiens
  misc_RNA (1)...(19): siRNA sense strand
ggaaguauggagagcagaa

SEQ ID NO: 2119104 - RNA, 19 nt, Homo sapiens
  misc_RNA (1)...(19): siRNA sense strand
gaacacguacagcgucuuc

SEQ ID NO: 2119105 - RNA, 19 nt, Homo sapiens
  misc_RNA (1)...(19): siRNA sense strand
uggcagaguucgcuccuau

SEQ ID NO: 2119106 - RNA, 19 nt, Homo sapiens
  misc_RNA (1)...(19): siRNA sense strand
ggaagcacccuccaaacca

SEQ ID NO: 2119107 - RNA, 19 nt, Homo sapiens
  misc_RNA (1)...(19): siRNA sense strand
gagagcagaagacguuguu

SEQ ID NO: 2119108 - RNA, 19 nt, Homo sapiens
  misc_RNA (1)...(19): siRNA sense strand
uuccacaacugcaacaauu

SEQ ID NO: 2119109 - RNA, 19 nt, Homo sapiens
  misc_RNA (1)...(19): siRNA sense strand
guucagauggagcaaguaa

SEQ ID NO: 2119110 - RNA, 19 nt, Homo sapiens
  misc_RNA (1)...(19): siRNA sense strand
ucagauggagcaaguaaug

SEQ ID NO: 2119111 - RNA, 19 nt, Homo sapiens
  misc_RNA (1)...(19): siRNA sense strand
cagcaucaacuacuacuuc

SEQ ID NO: 2119112 - RNA, 19 nt, Homo sapiens
  misc_RNA (1)...(19): siRNA sense strand
cgaaggccuugccgucaug

SEQ ID NO: 2119113 - RNA, 19 nt, Homo sapiens
  misc_RNA (1)...(19): siRNA sense strand
caggaaaggagcauccauu

SEQ ID NO: 2119114 - RNA, 19 nt, Homo sapiens
  misc_RNA (1)...(19): siRNA sense strand
gcuccacccuggccuucuu

SEQ ID NO: 2119115 - RNA, 19 nt, Homo sapiens
  misc_RNA (1)...(19): siRNA sense strand
ugaagcuguuccggcauua

SEQ ID NO: 2119116 - RNA, 19 nt, Homo sapiens
  misc_RNA (1)...(19): siRNA sense strand
gcagaagacguuguuuauc

SEQ ID NO: 2119117 - RNA, 19 nt, Homo sapiens
  misc_RNA (1)...(19): siRNA sense strand
ccacaacugcaacaauuca

SEQ ID NO: 2119118 - RNA, 19 nt, Homo sapiens
  misc_RNA (1)...(19): siRNA sense strand
gucaacacccgcagugauu

SEQ ID NO: 2119119 - RNA, 19 nt, Homo sapiens
  misc_RNA (1)...(19): siRNA sense strand
gcucacgggcuacaaguuc

SEQ ID NO: 2119120 - RNA, 19 nt, Homo sapiens
  misc_RNA (1)...(19): siRNA sense strand
cagcggagaugccccuuuu

SEQ ID NO: 2119121 - RNA, 19 nt, Homo sapiens
  misc_RNA (1)...(19): siRNA sense strand
caucaacuacuacuucauc

SEQ ID NO: 2119122 - RNA, 19 nt, Homo sapiens
  misc_RNA (1)...(19): siRNA sense strand
caacuacuacuucaucaac

SEQ ID NO: 2119123 - RNA, 19 nt, Homo sapiens
  misc_RNA (1)...(19): siRNA sense strand
gccuugccgucauguacua

SEQ ID NO: 2119124 - RNA, 19 nt, Homo sapiens
  misc_RNA (1)...(19): siRNA sense strand
cugaagcuguuccggcauu

SEQ ID NO: 2119125 - RNA, 19 nt, Homo sapiens
  misc_RNA (1)...(19): siRNA sense strand
caucgagucccgcgaggaa

SEQ ID NO: 2119126 - RNA, 19 nt, Homo sapiens
  misc_RNA (1)...(19): siRNA sense strand
ggaaggccucuccaaaguc

SEQ ID NO: 2119127 - RNA, 19 nt, Homo sapiens
  misc_RNA (1)...(19): siRNA sense strand
gaaccuggccaagcugaag

SEQ ID NO: 2119128 - RNA, 19 nt, Homo sapiens
  misc_RNA (1)...(19): siRNA sense strand
gcaucucucuccucuucca

SEQ ID NO: 2119129 - RNA, 19 nt, Homo sapiens
  misc_RNA (1)...(19): siRNA sense strand
aggaggauguucagaugga

SEQ ID NO: 2119130 - RNA, 19 nt, Homo sapiens
  misc_RNA (1)...(19): siRNA sense strand
ggucaucugcuacgucuac

SEQ ID NO: 2119131 - RNA, 19 nt, Homo sapiens
  misc_RNA (1)...(19): siRNA sense strand
cugaacagcuucgguuucu

SEQ ID NO: 2119132 - RNA, 19 nt, Homo sapiens
  misc_RNA (1)...(19): siRNA sense strand
aguacguccugucggauaa

SEQ ID NO: 2119133 - RNA, 19 nt, Homo sapiens
  misc_RNA (1)...(19): siRNA sense strand
caagauccacuggcucaug

SEQ ID NO: 2119134 - RNA, 19 nt, Homo sapiens
  misc_RNA (1)...(19): siRNA sense strand
gugaugauccgggagaaga

SEQ ID NO: 2119135 - RNA, 19 nt, Homo sapiens
  misc_RNA (1)...(19): siRNA sense strand
ggaaaggagcauccauucg

SEQ ID NO: 2119136 - RNA, 19 nt, Homo sapiens
  misc_RNA (1)...(19): siRNA sense strand
caacacccgcagugauuca

SEQ ID NO: 2119137 - RNA, 19 nt, Homo sapiens
  misc_RNA (1)...(19): siRNA sense strand
caucugcuacgucuacuuc

SEQ ID NO: 2119138 - RNA, 19 nt, Homo sapiens
  misc_RNA (1)...(19): siRNA sense strand
cuacuucacccgcaucauc

SEQ ID NO: 2119139 - RNA, 19 nt, Homo sapiens
  misc_RNA (1)...(19): siRNA sense strand
ccagcaagcccaagucaac

SEQ ID NO: 2119140 - RNA, 19 nt, Homo sapiens
  misc_RNA (1)...(19): siRNA sense strand
ucaacaacuccuacaacuu

SEQ ID NO: 2119141 - RNA, 19 nt, Homo sapiens
  misc_RNA (1)...(19): siRNA sense strand
uccacagcaucaacuacua

SEQ ID NO: 2119142 - RNA, 19 nt, Homo sapiens
  misc_RNA (1)...(19): siRNA sense strand
ggaggacgaggaggauguu

SEQ ID NO: 2119143 - RNA, 19 nt, Homo sapiens
  misc_RNA (1)...(19): siRNA sense strand
cagugaaccuggccaagcu

SEQ ID NO: 2119144 - RNA, 19 nt, Homo sapiens
  misc_RNA (1)...(19): siRNA sense strand
acgggaagguggcagugaa

SEQ ID NO: 2119145 - RNA, 19 nt, Homo sapiens
  misc_RNA (1)...(19): siRNA sense strand
agcagaagacguuguuuau

SEQ ID NO: 2119146 - RNA, 19 nt, Homo sapiens
  misc_RNA (1)...(19): siRNA sense strand
ggacgaggaggauguucag

SEQ ID NO: 2119147 - RNA, 19 nt, Homo sapiens
  misc_RNA (1)...(19): siRNA sense strand
ugucggauaaggagaagaa

SEQ ID NO: 2119148 - RNA, 19 nt, Homo sapiens
  misc_RNA (1)...(19): siRNA sense strand
gcagugauucaggguccua

SEQ ID NO: 2119149 - RNA, 19 nt, Homo sapiens
  misc_RNA (1)...(19): siRNA sense strand
ugaacagcuucgguuucua

SEQ ID NO: 2119150 - RNA, 19 nt, Homo sapiens
  misc_RNA (1)...(19): siRNA sense strand
ccgggaaggccucuccaaa

SEQ ID NO: 2119151 - RNA, 19 nt, Homo sapiens
  misc_RNA (1)...(19): siRNA sense strand
gccaguacagccugaacuu

SEQ ID NO: 2119152 - RNA, 19 nt, Homo sapiens
  misc_RNA (1)...(19): siRNA sense strand
gcuguuccggcauuacuau

SEQ ID NO: 2119153 - RNA, 19 nt, Homo sapiens
  misc_RNA (1)...(19): siRNA sense strand
gcggacauccagcugaaca

SEQ ID NO: 2119154 - RNA, 19 nt, Homo sapiens
  misc_RNA (1)...(19): siRNA sense strand
cucaacaacuccuacaacu

SEQ ID NO: 2119155 - RNA, 19 nt, Homo sapiens
  misc_RNA (1)...(19): siRNA sense strand
ggagagcagaagacguugu

SEQ ID NO: 2119156 - RNA, 19 nt, Homo sapiens
  misc_RNA (1)...(19): siRNA sense strand
cgggaaggccucuccaaag

SEQ ID NO: 2119157 - RNA, 19 nt, Homo sapiens
  misc_RNA (1)...(19): siRNA sense strand
cagauggagcaaguaauga

SEQ ID NO: 2119158 - RNA, 19 nt, Homo sapiens
  misc_RNA (1)...(19): siRNA sense strand
ggcugggccuucaucaagu

SEQ ID NO: 2119159 - RNA, 19 nt, Homo sapiens
  misc_RNA (1)...(19): siRNA sense strand
gggagaagcgagcggacau

SEQ ID NO: 2119160 - RNA, 19 nt, Homo sapiens
  misc_RNA (1)...(19): siRNA sense strand
ucgaaggccuugccgucau

SEQ ID NO: 2119161 - RNA, 19 nt, Homo sapiens
  misc_RNA (1)...(19): siRNA sense strand
ggagaugccccuuuucaag

SEQ ID NO: 2119162 - RNA, 19 nt, Homo sapiens
  misc_RNA (1)...(19): siRNA sense strand
ucacagaacuacaguguua

SEQ ID NO: 2119163 - RNA, 19 nt, Homo sapiens
  misc_RNA (1)...(19): siRNA sense strand
gaacaaauagcgaaggauu

SEQ ID NO: 2119164 - RNA, 19 nt, Homo sapiens
  misc_RNA (1)...(19): siRNA sense strand
gcaacgacaugcccuuuga

SEQ ID NO: 2119165 - RNA, 19 nt, Homo sapiens
  misc_RNA (1)...(19): siRNA sense strand
gccaagaacucaucacaga

SEQ ID NO: 2119166 - RNA, 19 nt, Homo sapiens
  misc_RNA (1)...(19): siRNA sense strand
gugagaagaucuacgagaa

SEQ ID NO: 2119167 - RNA, 19 nt, Homo sapiens
  misc_RNA (1)...(19): siRNA sense strand
gcgagugugucgaguacua

SEQ ID NO: 2119168 - RNA, 19 nt, Homo sapiens
  misc_RNA (1)...(19): siRNA sense strand
gaaaugcaacuucaaugug

SEQ ID NO: 2119169 - RNA, 19 nt, Homo sapiens
  misc_RNA (1)...(19): siRNA sense strand
gaagaggagugcaggaacu

SEQ ID NO: 2119170 - RNA, 19 nt, Homo sapiens
  misc_RNA (1)...(19): siRNA sense strand
caacagcagugguguccau

SEQ ID NO: 2119171 - RNA, 19 nt, Homo sapiens
  misc_RNA (1)...(19): siRNA sense strand
ucagcaaccugcacuugaa

SEQ ID NO: 2119172 - RNA, 19 nt, Homo sapiens
  misc_RNA (1)...(19): siRNA sense strand
ccuccgaccucuucccuaa

SEQ ID NO: 2119173 - RNA, 19 nt, Homo sapiens
  misc_RNA (1)...(19): siRNA sense strand
aggaggagcuggagaagga

SEQ ID NO: 2119174 - RNA, 19 nt, Homo sapiens
  misc_RNA (1)...(19): siRNA sense strand
gaagaucuacgagaacgaa

SEQ ID NO: 2119175 - RNA, 19 nt, Homo sapiens
  misc_RNA (1)...(19): siRNA sense strand
agagggagguggaggaguu

SEQ ID NO: 2119176 - RNA, 19 nt, Homo sapiens
  misc_RNA (1)...(19): siRNA sense strand
ucgcagagauccugucaca

SEQ ID NO: 2119177 - RNA, 19 nt, Homo sapiens
  misc_RNA (1)...(19): siRNA sense strand
gauccgagaugggcucugu

SEQ ID NO: 2119178 - RNA, 19 nt, Homo sapiens
  misc_RNA (1)...(19): siRNA sense strand
gaagagacgcaaucaucug

SEQ ID NO: 2119179 - RNA, 19 nt, Homo sapiens
  misc_RNA (1)...(19): siRNA sense strand
gaccguggcucugcugugu

SEQ ID NO: 2119180 - RNA, 19 nt, Homo sapiens
  misc_RNA (1)...(19): siRNA sense strand
ggagaagccgugaaagaca

SEQ ID NO: 2119181 - RNA, 19 nt, Homo sapiens
  misc_RNA (1)...(19): siRNA sense strand
acaugacccuggacaaaga

SEQ ID NO: 2119182 - RNA, 19 nt, Homo sapiens
  misc_RNA (1)...(19): siRNA sense strand
cagcacagguggcuuuguc

SEQ ID NO: 2119183 - RNA, 19 nt, Homo sapiens
  misc_RNA (1)...(19): siRNA sense strand
ggaagagacgcaaucaucu

SEQ ID NO: 2119184 - RNA, 19 nt, Homo sapiens
  misc_RNA (1)...(19): siRNA sense strand
ccaaggaggagcuggagaa

SEQ ID NO: 2119185 - RNA, 19 nt, Homo sapiens
  misc_RNA (1)...(19): siRNA sense strand
ggugggaccucaguuccaa

SEQ ID NO: 2119186 - RNA, 19 nt, Homo sapiens
  misc_RNA (1)...(19): siRNA sense strand
uguacgaguuggugaaaug

SEQ ID NO: 2119187 - RNA, 19 nt, Homo sapiens
  misc_RNA (1)...(19): siRNA sense strand
gagcaacgacaugcccuuu

SEQ ID NO: 2119188 - RNA, 19 nt, Homo sapiens
  misc_RNA (1)...(19): siRNA sense strand
ugacugggaugcgcacaga

SEQ ID NO: 2119189 - RNA, 19 nt, Homo sapiens
  misc_RNA (1)...(19): siRNA sense strand
aagaacaaauagcgaagga

SEQ ID NO: 2119190 - RNA, 19 nt, Homo sapiens
  misc_RNA (1)...(19): siRNA sense strand
gaggagugcaggaacuuug

SEQ ID NO: 2119191 - RNA, 19 nt, Homo sapiens
  misc_RNA (1)...(19): siRNA sense strand
gcucugugcuuggagugaa

SEQ ID NO: 2119192 - RNA, 19 nt, Homo sapiens
  misc_RNA (1)...(19): siRNA sense strand
gaugggcucugugcuugga

SEQ ID NO: 2119193 - RNA, 19 nt, Homo sapiens
  misc_RNA (1)...(19): siRNA sense strand
cgacaugcccuuugaugag

SEQ ID NO: 2119194 - RNA, 19 nt, Homo sapiens
  misc_RNA (1)...(19): siRNA sense strand
agacaugacccuggacaaa

SEQ ID NO: 2119195 - RNA, 19 nt, Homo sapiens
  misc_RNA (1)...(19): siRNA sense strand
gaaccggcacugugagaag

SEQ ID NO: 2119196 - RNA, 19 nt, Homo sapiens
  misc_RNA (1)...(19): siRNA sense strand
gggcgagugugucgaguac

SEQ ID NO: 2119197 - RNA, 19 nt, Homo sapiens
  misc_RNA (1)...(19): siRNA sense strand
cgagaugggcucugugcuu

SEQ ID NO: 2119198 - RNA, 19 nt, Homo sapiens
  misc_RNA (1)...(19): siRNA sense strand
gaagaggaagagacgcaau

SEQ ID NO: 2119199 - RNA, 19 nt, Homo sapiens
  misc_RNA (1)...(19): siRNA sense strand
acuacuaccuguggaagaa

SEQ ID NO: 2119200 - RNA, 19 nt, Homo sapiens
  misc_RNA (1)...(19): siRNA sense strand
ccuggacaaagaacaaaua

SEQ ID NO: 2119201 - RNA, 19 nt, Homo sapiens
  misc_RNA (1)...(19): siRNA sense strand
agagggagaagccgugaaa

SEQ ID NO: 2119202 - RNA, 19 nt, Homo sapiens
  misc_RNA (1)...(19): siRNA sense strand
gcacuugaaccggcacugu

SEQ ID NO: 2119203 - RNA, 19 nt, Homo sapiens
  misc_RNA (1)...(19): siRNA sense strand
agcaggcgcuguacgaguu

SEQ ID NO: 2119204 - RNA, 19 nt, Homo sapiens
  misc_RNA (1)...(19): siRNA sense strand
gcgaaggauuugcuuucag

SEQ ID NO: 2119205 - RNA, 19 nt, Homo sapiens
  misc_RNA (1)...(19): siRNA sense strand
ggagcgcuacgacuacuuc

SEQ ID NO: 2119206 - RNA, 19 nt, Homo sapiens
  misc_RNA (1)...(19): siRNA sense strand
uuucagaccgggagaguga

SEQ ID NO: 2119207 - RNA, 19 nt, Homo sapiens
  misc_RNA (1)...(19): siRNA sense strand
gggagaagccgugaaagac

SEQ ID NO: 2119208 - RNA, 19 nt, Homo sapiens
  misc_RNA (1)...(19): siRNA sense strand
gacaugacccuggacaaag

SEQ ID NO: 2119209 - RNA, 19 nt, Homo sapiens
  misc_RNA (1)...(19): siRNA sense strand
aggaagagacgcaaucauc

SEQ ID NO: 2119210 - RNA, 19 nt, Homo sapiens
  misc_RNA (1)...(19): siRNA sense strand
uagcgaaggauuugcuuuc

SEQ ID NO: 2119211 - RNA, 19 nt, Homo sapiens
  misc_RNA (1)...(19): siRNA sense strand
gcccagacaagcccaagga

SEQ ID NO: 2119212 - RNA, 19 nt, Homo sapiens
  misc_RNA (1)...(19): siRNA sense strand
gugaagaggagugcaggaa

SEQ ID NO: 2119213 - RNA, 19 nt, Homo sapiens
  misc_RNA (1)...(19): siRNA sense strand
cggaguggaugccaagaac

SEQ ID NO: 2119214 - RNA, 19 nt, Homo sapiens
  misc_RNA (1)...(19): siRNA sense strand
cggaguggccucugaugga

SEQ ID NO: 2119215 - RNA, 19 nt, Homo sapiens
  misc_RNA (1)...(19): siRNA sense strand
ccaaggagcugccccucau

SEQ ID NO: 2119216 - RNA, 19 nt, Homo sapiens
  misc_RNA (1)...(19): siRNA sense strand
ccacgcuggccacucguuu

SEQ ID NO: 2119217 - RNA, 19 nt, Homo sapiens
  misc_RNA (1)...(19): siRNA sense strand
gcucuggagaccaucaguu

SEQ ID NO: 2119218 - RNA, 19 nt, Homo sapiens
  misc_RNA (1)...(19): siRNA sense strand
gacccuggacaaagaacaa

SEQ ID NO: 2119219 - RNA, 19 nt, Homo sapiens
  misc_RNA (1)...(19): siRNA sense strand
uggccgacccagccucaua

SEQ ID NO: 2119220 - RNA, 19 nt, Homo sapiens
  misc_RNA (1)...(19): siRNA sense strand
ccaagaacucaucacagau

SEQ ID NO: 2119221 - RNA, 19 nt, Homo sapiens
  misc_RNA (1)...(19): siRNA sense strand
aaccguggcucugcugugu

SEQ ID NO: 2119222 - RNA, 19 nt, Homo sapiens
  misc_RNA (1)...(19): siRNA sense strand
gcuguacgaguuggugaaa

SEQ ID NO: 2119223 - RNA, 19 nt, Homo sapiens
  misc_RNA (1)...(19): siRNA sense strand
agggagaagccgugaaaga

SEQ ID NO: 2119224 - RNA, 19 nt, Homo sapiens
  misc_RNA (1)...(19): siRNA sense strand
ugucacagaacuacagugu

SEQ ID NO: 2119225 - RNA, 19 nt, Homo sapiens
  misc_RNA (1)...(19): siRNA sense strand
ccaaagaccugguguguuc

SEQ ID NO: 2119226 - RNA, 19 nt, Homo sapiens
  misc_RNA (1)...(19): siRNA sense strand
cagaacugguuaccuagua

SEQ ID NO: 2119227 - RNA, 19 nt, Homo sapiens
  misc_RNA (1)...(19): siRNA sense strand
ggagcuacuucguucguuu

SEQ ID NO: 2119228 - RNA, 19 nt, Homo sapiens
  misc_RNA (1)...(19): siRNA sense strand
uggcaaugcugcagaauga

SEQ ID NO: 2119229 - RNA, 19 nt, Homo sapiens
  misc_RNA (1)...(19): siRNA sense strand
ggccucagcuggcucugua

SEQ ID NO: 2119230 - RNA, 19 nt, Homo sapiens
  misc_RNA (1)...(19): siRNA sense strand
gcagugaacuuggccaaag

SEQ ID NO: 2119231 - RNA, 19 nt, Homo sapiens
  misc_RNA (1)...(19): siRNA sense strand
aaacugggcugaacacaac

SEQ ID NO: 2119232 - RNA, 19 nt, Homo sapiens
  misc_RNA (1)...(19): siRNA sense strand
caaaauaucgcaacaggua

SEQ ID NO: 2119233 - RNA, 19 nt, Homo sapiens
  misc_RNA (1)...(19): siRNA sense strand
gagcuacuucguucguuua

SEQ ID NO: 2119234 - RNA, 19 nt, Homo sapiens
  misc_RNA (1)...(19): siRNA sense strand
caaaauaucgcaacaggua

SEQ ID NO: 2119235 - RNA, 19 nt, Homo sapiens
  misc_RNA (1)...(19): siRNA sense strand
ugacuggugccaugaauuu

SEQ ID NO: 2119236 - RNA, 19 nt, Homo sapiens
  misc_RNA (1)...(19): siRNA sense strand
caaaauaucgcgacaggua

SEQ ID NO: 2119237 - RNA, 19 nt, Homo sapiens
  misc_RNA (1)...(19): siRNA sense strand
gaccugguguguuccaaga

SEQ ID NO: 2119238 - RNA, 19 nt, Homo sapiens
  misc_RNA (1)...(19): siRNA sense strand
gaacacaacccaaaauauc

SEQ ID NO: 2119239 - RNA, 19 nt, Homo sapiens
  misc_RNA (1)...(19): siRNA sense strand
ggccaagggugcugugcaa

SEQ ID NO: 2119240 - RNA, 19 nt, Homo sapiens
  misc_RNA (1)...(19): siRNA sense strand
gggcugaacacaacccaaa

SEQ ID NO: 2119241 - RNA, 19 nt, Homo sapiens
  misc_RNA (1)...(19): siRNA sense strand
ggugaccggugcugcgaaa

SEQ ID NO: 2119242 - RNA, 19 nt, Homo sapiens
  misc_RNA (1)...(19): siRNA sense strand
guaccaaggacaccaucua

SEQ ID NO: 2119243 - RNA, 19 nt, Homo sapiens
  misc_RNA (1)...(19): siRNA sense strand
gaccagugcugugaaugug

SEQ ID NO: 2119244 - RNA, 19 nt, Homo sapiens
  misc_RNA (1)...(19): siRNA sense strand
caccaagacuguccuaacu

SEQ ID NO: 2119245 - RNA, 19 nt, Homo sapiens
  misc_RNA (1)...(19): siRNA sense strand
caccaagacuguccuaacu

SEQ ID NO: 2119246 - RNA, 19 nt, Homo sapiens
  misc_RNA (1)...(19): siRNA sense strand
ccaccaagaucguucuaac

SEQ ID NO: 2119247 - RNA, 19 nt, Homo sapiens
  misc_RNA (1)...(19): siRNA sense strand
ggcagugaaugucgccaaa

SEQ ID NO: 2119248 - RNA, 19 nt, Homo sapiens
  misc_RNA (1)...(19): siRNA sense strand
ggcagugaaugucgccaaa

SEQ ID NO: 2119249 - RNA, 19 nt, Homo sapiens
  misc_RNA (1)...(19): siRNA sense strand
ggucaccggugcugcgaau

SEQ ID NO: 2119250 - RNA, 19 nt, Homo sapiens
  misc_RNA (1)...(19): siRNA sense strand
aagacuguguuaacuggua

SEQ ID NO: 2119251 - RNA, 19 nt, Homo sapiens
  misc_RNA (1)...(19): siRNA sense strand
gagcugcaaccuucggaaa

SEQ ID NO: 2119252 - RNA, 19 nt, Homo sapiens
  misc_RNA (1)...(19): siRNA sense strand
gcugugaacuuggccaaag

SEQ ID NO: 2119253 - RNA, 19 nt, Homo sapiens
  misc_RNA (1)...(19): siRNA sense strand
ccaaggacaccgucuguag

SEQ ID NO: 2119254 - RNA, 19 nt, Homo sapiens
  misc_RNA (1)...(19): siRNA sense strand
cuacuucguucguuuaggu

SEQ ID NO: 2119255 - RNA, 19 nt, Homo sapiens
  misc_RNA (1)...(19): siRNA sense strand
caaacugggcugaacacaa

SEQ ID NO: 2119256 - RNA, 19 nt, Homo sapiens
  misc_RNA (1)...(19): siRNA sense strand
ccaaggacaccgucuguag

SEQ ID NO: 2119257 - RNA, 19 nt, Homo sapiens
  misc_RNA (1)...(19): siRNA sense strand
ccaaggacaccgucuguag

SEQ ID NO: 2119258 - RNA, 19 nt, Homo sapiens
  misc_RNA (1)...(19): siRNA sense strand
gaaaacgacccaaaauauc

SEQ ID NO: 2119259 - RNA, 19 nt, Homo sapiens
  misc_RNA (1)...(19): siRNA sense strand
gaaaacgacccaaaauauc

SEQ ID NO: 2119260 - RNA, 19 nt, Homo sapiens
  misc_RNA (1)...(19): siRNA sense strand
ccaagucuguggucauagg

SEQ ID NO: 2119261 - RNA, 19 nt, Homo sapiens
  misc_RNA (1)...(19): siRNA sense strand
gaccggugcugcgaaagug

SEQ ID NO: 2119262 - RNA, 19 nt, Homo sapiens
  misc_RNA (1)...(19): siRNA sense strand
ggugaccagugcugugaau

SEQ ID NO: 2119263 - RNA, 19 nt, Homo sapiens
  misc_RNA (1)...(19): siRNA sense strand
ccaaagacacagugacuac

SEQ ID NO: 2119264 - RNA, 19 nt, Homo sapiens
  misc_RNA (1)...(19): siRNA sense strand
ugaaaacgacccaaaauau

SEQ ID NO: 2119265 - RNA, 19 nt, Homo sapiens
  misc_RNA (1)...(19): siRNA sense strand
ugaaaacgacccaaaauau

SEQ ID NO: 2119266 - RNA, 19 nt, Homo sapiens
  misc_RNA (1)...(19): siRNA sense strand
ccaugaauguggccaaagg

SEQ ID NO: 2119267 - RNA, 19 nt, Homo sapiens
  misc_RNA (1)...(19): siRNA sense strand
ccaugaauguggccaaagg

SEQ ID NO: 2119268 - RNA, 19 nt, Homo sapiens
  misc_RNA (1)...(19): siRNA sense strand
ccaugaauguggccaaagg

SEQ ID NO: 2119269 - RNA, 19 nt, Homo sapiens
  misc_RNA (1)...(19): siRNA sense strand
ggacaccaccaagaucguu

SEQ ID NO: 2119270 - RNA, 19 nt, Homo sapiens
  misc_RNA (1)...(19): siRNA sense strand
caagggugcugugcaaacu

SEQ ID NO: 2119271 - RNA, 19 nt, Homo sapiens
  misc_RNA (1)...(19): siRNA sense strand
ggugacuggugccaugaau

SEQ ID NO: 2119272 - RNA, 19 nt, Homo sapiens
  misc_RNA (1)...(19): siRNA sense strand
gcuuggcaaugcugcagaa

SEQ ID NO: 2119273 - RNA, 19 nt, Homo sapiens
  misc_RNA (1)...(19): siRNA sense strand
ucacuggugccguaaaugu

SEQ ID NO: 2119274 - RNA, 19 nt, Homo sapiens
  misc_RNA (1)...(19): siRNA sense strand
ggugaccggugcugcgaau

SEQ ID NO: 2119275 - RNA, 19 nt, Homo sapiens
  misc_RNA (1)...(19): siRNA sense strand
ggugaccggugcugcgaau

SEQ ID NO: 2119276 - RNA, 19 nt, Homo sapiens
  misc_RNA (1)...(19): siRNA sense strand
ggugacuggugccaugaau

SEQ ID NO: 2119277 - RNA, 19 nt, Homo sapiens
  misc_RNA (1)...(19): siRNA sense strand
ugacuggugccaugaaugu

SEQ ID NO: 2119278 - RNA, 19 nt, Homo sapiens
  misc_RNA (1)...(19): siRNA sense strand
ggugacuggugccaugaau

SEQ ID NO: 2119279 - RNA, 19 nt, Homo sapiens
  misc_RNA (1)...(19): siRNA sense strand
ugacuggugccaugaaugu

SEQ ID NO: 2119280 - RNA, 19 nt, Homo sapiens
  misc_RNA (1)...(19): siRNA sense strand
ggugacuggugccaugaau

SEQ ID NO: 2119281 - RNA, 19 nt, Homo sapiens
  misc_RNA (1)...(19): siRNA sense strand
ugacuggugccaugaaugu

SEQ ID NO: 2119282 - RNA, 19 nt, Homo sapiens
  misc_RNA (1)...(19): siRNA sense strand
uguccugacuggcacuaaa

SEQ ID NO: 2119283 - RNA, 19 nt, Homo sapiens
  misc_RNA (1)...(19): siRNA sense strand
gcaaugcugcagaaugagu

SEQ ID NO: 2119284 - RNA, 19 nt, Homo sapiens
  misc_RNA (1)...(19): siRNA sense strand
uguccugacuggcacuaaa

SEQ ID NO: 2119285 - RNA, 19 nt, Homo sapiens
  misc_RNA (1)...(19): siRNA sense strand
uguccugacuggcacuaaa

SEQ ID NO: 2119286 - RNA, 19 nt, Homo sapiens
  misc_RNA (1)...(19): siRNA sense strand
caccaagacuguguuaacu

SEQ ID NO: 2119287 - RNA, 19 nt, Homo sapiens
  misc_RNA (1)...(19): siRNA sense strand
aagacuguccuaacuggua

SEQ ID NO: 2119288 - RNA, 19 nt, Homo sapiens
  misc_RNA (1)...(19): siRNA sense strand
gaccggugcugcgaaugug

SEQ ID NO: 2119289 - RNA, 19 nt, Homo sapiens
  misc_RNA (1)...(19): siRNA sense strand
gaccggugcugcgaaugug

SEQ ID NO: 2119290 - RNA, 19 nt, Homo sapiens
  misc_RNA (1)...(19): siRNA sense strand
caaggacaccgucuguagu

SEQ ID NO: 2119291 - RNA, 19 nt, Homo sapiens
  misc_RNA (1)...(19): siRNA sense strand
gacccugggcagcuucuuu

SEQ ID NO: 2119292 - RNA, 19 nt, Homo sapiens
  misc_RNA (1)...(19): siRNA sense strand
gcaacagguacaaagaaca

SEQ ID NO: 2119293 - RNA, 19 nt, Homo sapiens
  misc_RNA (1)...(19): siRNA sense strand
ccaccaagacuguguuaac

SEQ ID NO: 2119294 - RNA, 19 nt, Homo sapiens
  misc_RNA (1)...(19): siRNA sense strand
gcugugaaguuggccaaag

SEQ ID NO: 2119295 - RNA, 19 nt, Homo sapiens
  misc_RNA (1)...(19): siRNA sense strand
caaggacaccaucuacagu

SEQ ID NO: 2119296 - RNA, 19 nt, Homo sapiens
  misc_RNA (1)...(19): siRNA sense strand
ggccaaagaccuggugugu

SEQ ID NO: 2119297 - RNA, 19 nt, Homo sapiens
  misc_RNA (1)...(19): siRNA sense strand
caaggacaccgucuguagu

SEQ ID NO: 2119298 - RNA, 19 nt, Homo sapiens
  misc_RNA (1)...(19): siRNA sense strand
caaggacaccgucuguagu

SEQ ID NO: 2119299 - RNA, 19 nt, Homo sapiens
  misc_RNA (1)...(19): siRNA sense strand
ccugguguguuccaagaug

SEQ ID NO: 2119300 - RNA, 19 nt, Homo sapiens
  misc_RNA (1)...(19): siRNA sense strand
ggcagugaauguggccaaa

SEQ ID NO: 2119301 - RNA, 19 nt, Homo sapiens
  misc_RNA (1)...(19): siRNA sense strand
acacuggccucagcaccuu

SEQ ID NO: 2119302 - RNA, 19 nt, Homo sapiens
  misc_RNA (1)...(19): siRNA sense strand
cuccaaggcugugcuuaug

SEQ ID NO: 2119303 - RNA, 19 nt, Homo sapiens
  misc_RNA (1)...(19): siRNA sense strand
ggcagugaauguggccaaa

SEQ ID NO: 2119304 - RNA, 19 nt, Homo sapiens
  misc_RNA (1)...(19): siRNA sense strand
ugugcaaacugggcugaaa

SEQ ID NO: 2119305 - RNA, 19 nt, Homo sapiens
  misc_RNA (1)...(19): siRNA sense strand
ugugcaaacugggcugaaa

SEQ ID NO: 2119306 - RNA, 19 nt, Homo sapiens
  misc_RNA (1)...(19): siRNA sense strand
ccaaggacaccaucuacag

SEQ ID NO: 2119307 - RNA, 19 nt, Homo sapiens
  misc_RNA (1)...(19): siRNA sense strand
cagaggaaccauccagaca

SEQ ID NO: 2119308 - RNA, 19 nt, Homo sapiens
  misc_RNA (1)...(19): siRNA sense strand
gccgugaacuuggccaaag

SEQ ID NO: 2119309 - RNA, 19 nt, Homo sapiens
  misc_RNA (1)...(19): siRNA sense strand
ggucauagguacaaaagac

SEQ ID NO: 2119310 - RNA, 19 nt, Homo sapiens
  misc_RNA (1)...(19): siRNA sense strand
caccaagacuguccuaacc

SEQ ID NO: 2119311 - RNA, 19 nt, Homo sapiens
  misc_RNA (1)...(19): siRNA sense strand
gauguccacugggcucaca

SEQ ID NO: 2119312 - RNA, 19 nt, Homo sapiens
  misc_RNA (1)...(19): siRNA sense strand
ggucauggguacgaaagac

SEQ ID NO: 2119313 - RNA, 19 nt, Homo sapiens
  misc_RNA (1)...(19): siRNA sense strand
ccgugaacuuggccaaaga

SEQ ID NO: 2119314 - RNA, 19 nt, Homo sapiens
  misc_RNA (1)...(19): siRNA sense strand
gggagcuacuucguucguu

SEQ ID NO: 2119315 - RNA, 19 nt, Homo sapiens
  misc_RNA (1)...(19): siRNA sense strand
cagugaauguggccaaagg

SEQ ID NO: 2119316 - RNA, 19 nt, Homo sapiens
  misc_RNA (1)...(19): siRNA sense strand
ccguaaauguggccaaagg

SEQ ID NO: 2119317 - RNA, 19 nt, Homo sapiens
  misc_RNA (1)...(19): siRNA sense strand
cagugaauguggccaaagg

SEQ ID NO: 2119318 - RNA, 19 nt, Homo sapiens
  misc_RNA (1)...(19): siRNA sense strand
cagugaaugucgccaaagg

SEQ ID NO: 2119319 - RNA, 19 nt, Homo sapiens
  misc_RNA (1)...(19): siRNA sense strand
cagugaaugucgccaaagg

SEQ ID NO: 2119320 - RNA, 19 nt, Homo sapiens
  misc_RNA (1)...(19): siRNA sense strand
gaccggugccgugaacuug

SEQ ID NO: 2119321 - RNA, 19 nt, Homo sapiens
  misc_RNA (1)...(19): siRNA sense strand
gugaauguggccaaaggaa

SEQ ID NO: 2119322 - RNA, 19 nt, Homo sapiens
  misc_RNA (1)...(19): siRNA sense strand
ccaaggacacagucacuac

SEQ ID NO: 2119323 - RNA, 19 nt, Homo sapiens
  misc_RNA (1)...(19): siRNA sense strand
ccaaggacacagugacuac

SEQ ID NO: 2119324 - RNA, 19 nt, Homo sapiens
  misc_RNA (1)...(19): siRNA sense strand
ugaccagugcugugaaugu

SEQ ID NO: 2119325 - RNA, 19 nt, Homo sapiens
  misc_RNA (1)...(19): siRNA sense strand
gaagaggccugucagcaaa

SEQ ID NO: 2119326 - RNA, 19 nt, Homo sapiens
  misc_RNA (1)...(19): siRNA sense strand
ggaagaugcuuaugcuaug

SEQ ID NO: 2119327 - RNA, 19 nt, Homo sapiens
  misc_RNA (1)...(19): siRNA sense strand
gaacccggcuaccgaagaa

SEQ ID NO: 2119328 - RNA, 19 nt, Homo sapiens
  misc_RNA (1)...(19): siRNA sense strand
cagacgaccugaugaauau

SEQ ID NO: 2119329 - RNA, 19 nt, Homo sapiens
  misc_RNA (1)...(19): siRNA sense strand
gaagaugcuuaugcuauga

SEQ ID NO: 2119330 - RNA, 19 nt, Homo sapiens
  misc_RNA (1)...(19): siRNA sense strand
gguggaaccuaaauacuau

SEQ ID NO: 2119331 - RNA, 19 nt, Homo sapiens
  misc_RNA (1)...(19): siRNA sense strand
gcagcacacuuucugauuc

SEQ ID NO: 2119332 - RNA, 19 nt, Homo sapiens
  misc_RNA (1)...(19): siRNA sense strand
agaacuaccagaugaaaua

SEQ ID NO: 2119333 - RNA, 19 nt, Homo sapiens
  misc_RNA (1)...(19): siRNA sense strand
ccugagaacuaccagauga

SEQ ID NO: 2119334 - RNA, 19 nt, Homo sapiens
  misc_RNA (1)...(19): siRNA sense strand
acccucaacuuucagauua

SEQ ID NO: 2119335 - RNA, 19 nt, Homo sapiens
  misc_RNA (1)...(19): siRNA sense strand
ccagacgaccugaugaaua

SEQ ID NO: 2119336 - RNA, 19 nt, Homo sapiens
  misc_RNA (1)...(19): siRNA sense strand
gagcugagacgacaaaugg

SEQ ID NO: 2119337 - RNA, 19 nt, Homo sapiens
  misc_RNA (1)...(19): siRNA sense strand
gaagaaaguggcagugaca

SEQ ID NO: 2119338 - RNA, 19 nt, Homo sapiens
  misc_RNA (1)...(19): siRNA sense strand
ggccagccuugcaccuuua

SEQ ID NO: 2119339 - RNA, 19 nt, Homo sapiens
  misc_RNA (1)...(19): siRNA sense strand
gggaagaugcuuaugcuau

SEQ ID NO: 2119340 - RNA, 19 nt, Homo sapiens
  misc_RNA (1)...(19): siRNA sense strand
caaagaaccuaaggagucu

SEQ ID NO: 2119341 - RNA, 19 nt, Homo sapiens
  misc_RNA (1)...(19): siRNA sense strand
ccuugcaccuuuauucuaa

SEQ ID NO: 2119342 - RNA, 19 nt, Homo sapiens
  misc_RNA (1)...(19): siRNA sense strand
gaacuuuaacgccaaauac

SEQ ID NO: 2119343 - RNA, 19 nt, Homo sapiens
  misc_RNA (1)...(19): siRNA sense strand
gaugaggacgggaagauug

SEQ ID NO: 2119344 - RNA, 19 nt, Homo sapiens
  misc_RNA (1)...(19): siRNA sense strand
ggaagauugugggcuaugu

SEQ ID NO: 2119345 - RNA, 19 nt, Homo sapiens
  misc_RNA (1)...(19): siRNA sense strand
cuaacacccucaacuuuca

SEQ ID NO: 2119346 - RNA, 19 nt, Homo sapiens
  misc_RNA (1)...(19): siRNA sense strand
ccagggccaugauagagaa

SEQ ID NO: 2119347 - RNA, 19 nt, Homo sapiens
  misc_RNA (1)...(19): siRNA sense strand
gauggcagaugagcugaga

SEQ ID NO: 2119348 - RNA, 19 nt, Homo sapiens
  misc_RNA (1)...(19): siRNA sense strand
ucucgcagauggcagauga

SEQ ID NO: 2119349 - RNA, 19 nt, Homo sapiens
  misc_RNA (1)...(19): siRNA sense strand
gacgacaaauggaccugaa

SEQ ID NO: 2119350 - RNA, 19 nt, Homo sapiens
  misc_RNA (1)...(19): siRNA sense strand
acuaccagaugaaauacua

SEQ ID NO: 2119351 - RNA, 19 nt, Homo sapiens
  misc_RNA (1)...(19): siRNA sense strand
ucagaaagcucggauucca

SEQ ID NO: 2119352 - RNA, 19 nt, Homo sapiens
  misc_RNA (1)...(19): siRNA sense strand
gaagauugugggcuauguu

SEQ ID NO: 2119353 - RNA, 19 nt, Homo sapiens
  misc_RNA (1)...(19): siRNA sense strand
ugaagaggccugucagcaa

SEQ ID NO: 2119354 - RNA, 19 nt, Homo sapiens
  misc_RNA (1)...(19): siRNA sense strand
gcucagaaagcucggauuc

SEQ ID NO: 2119355 - RNA, 19 nt, Homo sapiens
  misc_RNA (1)...(19): siRNA sense strand
gaugagcugagacgacaaa

SEQ ID NO: 2119356 - RNA, 19 nt, Homo sapiens
  misc_RNA (1)...(19): siRNA sense strand
gcacacuuucugauucuga

SEQ ID NO: 2119357 - RNA, 19 nt, Homo sapiens
  misc_RNA (1)...(19): siRNA sense strand
ggaggaaccagaugauguc

SEQ ID NO: 2119358 - RNA, 19 nt, Homo sapiens
  misc_RNA (1)...(19): siRNA sense strand
caacacugcaaccuccuuu

SEQ ID NO: 2119359 - RNA, 19 nt, Homo sapiens
  misc_RNA (1)...(19): siRNA sense strand
gccaugauagagaacuuua

SEQ ID NO: 2119360 - RNA, 19 nt, Homo sapiens
  misc_RNA (1)...(19): siRNA sense strand
cgacaaauggaccugaaga

SEQ ID NO: 2119361 - RNA, 19 nt, Homo sapiens
  misc_RNA (1)...(19): siRNA sense strand
gacaaauggaccugaagaa

SEQ ID NO: 2119362 - RNA, 19 nt, Homo sapiens
  misc_RNA (1)...(19): siRNA sense strand
cggccagccuugcaccuuu

SEQ ID NO: 2119363 - RNA, 19 nt, Homo sapiens
  misc_RNA (1)...(19): siRNA sense strand
cagcacacuuucugauucu

SEQ ID NO: 2119364 - RNA, 19 nt, Homo sapiens
  misc_RNA (1)...(19): siRNA sense strand
gcucggauuccaccuccua

SEQ ID NO: 2119365 - RNA, 19 nt, Homo sapiens
  misc_RNA (1)...(19): siRNA sense strand
ggaugaggacgggaagauu

SEQ ID NO: 2119366 - RNA, 19 nt, Homo sapiens
  misc_RNA (1)...(19): siRNA sense strand
agagaacuuuaacgccaaa

SEQ ID NO: 2119367 - RNA, 19 nt, Homo sapiens
  misc_RNA (1)...(19): siRNA sense strand
gagaacuaccagaugaaau

SEQ ID NO: 2119368 - RNA, 19 nt, Homo sapiens
  misc_RNA (1)...(19): siRNA sense strand
ggaggaggaaccagaugau

SEQ ID NO: 2119369 - RNA, 19 nt, Homo sapiens
  misc_RNA (1)...(19): siRNA sense strand
gaacuaccagaugaaauac

SEQ ID NO: 2119370 - RNA, 19 nt, Homo sapiens
  misc_RNA (1)...(19): siRNA sense strand
ggcagcacacuuucugauu

SEQ ID NO: 2119371 - RNA, 19 nt, Homo sapiens
  misc_RNA (1)...(19): siRNA sense strand
ugagaacuaccagaugaaa

SEQ ID NO: 2119372 - RNA, 19 nt, Homo sapiens
  misc_RNA (1)...(19): siRNA sense strand
gggccaugauagagaacuu

SEQ ID NO: 2119373 - RNA, 19 nt, Homo sapiens
  misc_RNA (1)...(19): siRNA sense strand
gcuauguucuggccaaaau

SEQ ID NO: 2119374 - RNA, 19 nt, Homo sapiens
  misc_RNA (1)...(19): siRNA sense strand
ccuaaauacuaugcagaug

SEQ ID NO: 2119375 - RNA, 19 nt, Homo sapiens
  misc_RNA (1)...(19): siRNA sense strand
ucagauuagugagguggaa

SEQ ID NO: 2119376 - RNA, 19 nt, Homo sapiens
  misc_RNA (1)...(19): siRNA sense strand
ucaacuuucagauuaguga

SEQ ID NO: 2119377 - RNA, 19 nt, Homo sapiens
  misc_RNA (1)...(19): siRNA sense strand
ucuaacacccucaacuuuc

SEQ ID NO: 2119378 - RNA, 19 nt, Homo sapiens
  misc_RNA (1)...(19): siRNA sense strand
gaggaggaaccagaugaug

SEQ ID NO: 2119379 - RNA, 19 nt, Homo sapiens
  misc_RNA (1)...(19): siRNA sense strand
cacacuuucugauucugaa

SEQ ID NO: 2119380 - RNA, 19 nt, Homo sapiens
  misc_RNA (1)...(19): siRNA sense strand
agaacuuuaacgccaaaua

SEQ ID NO: 2119381 - RNA, 19 nt, Homo sapiens
  misc_RNA (1)...(19): siRNA sense strand
gggcuauguucuggccaaa

SEQ ID NO: 2119382 - RNA, 19 nt, Homo sapiens
  misc_RNA (1)...(19): siRNA sense strand
gggcagcacacuuucugau

SEQ ID NO: 2119383 - RNA, 19 nt, Homo sapiens
  misc_RNA (1)...(19): siRNA sense strand
gccuugcaccuuuauucua

SEQ ID NO: 2119384 - RNA, 19 nt, Homo sapiens
  misc_RNA (1)...(19): siRNA sense strand
cagccuugcaccuuuauuc

SEQ ID NO: 2119385 - RNA, 19 nt, Homo sapiens
  misc_RNA (1)...(19): siRNA sense strand
gcaacacugcaaccuccuu

SEQ ID NO: 2119386 - RNA, 19 nt, Homo sapiens
  misc_RNA (1)...(19): siRNA sense strand
acccagggcagcacacuuu

SEQ ID NO: 2119387 - RNA, 19 nt, Homo sapiens
  misc_RNA (1)...(19): siRNA sense strand
ccaugauagagaacuuuaa

SEQ ID NO: 2119388 - RNA, 19 nt, Homo sapiens
  misc_RNA (1)...(19): siRNA sense strand
ccgaagaaaguggcaguga

SEQ ID NO: 2119389 - RNA, 19 nt, Homo sapiens
  misc_RNA (1)...(19): siRNA sense strand
acaaauggaccugaagaag

SEQ ID NO: 2119390 - RNA, 19 nt, Homo sapiens
  misc_RNA (1)...(19): siRNA sense strand
uaagagggauccuauaaua

SEQ ID NO: 2119391 - RNA, 19 nt, Homo sapiens
  misc_RNA (1)...(19): siRNA sense strand
gaggaucgaugcauaugua

SEQ ID NO: 2119392 - RNA, 19 nt, Homo sapiens
  misc_RNA (1)...(19): siRNA sense strand
gcucuggccuguaaauaua

SEQ ID NO: 2119393 - RNA, 19 nt, Homo sapiens
  misc_RNA (1)...(19): siRNA sense strand
gaugagaucuguuugacuu

SEQ ID NO: 2119394 - RNA, 19 nt, Homo sapiens
  misc_RNA (1)...(19): siRNA sense strand
gagaauaaccuauauggaa

SEQ ID NO: 2119395 - RNA, 19 nt, Homo sapiens
  misc_RNA (1)...(19): siRNA sense strand
gcauugcucuggccuguaa

SEQ ID NO: 2119396 - RNA, 19 nt, Homo sapiens
  misc_RNA (1)...(19): siRNA sense strand
gagaagaaauucaggaagu

SEQ ID NO: 2119397 - RNA, 19 nt, Homo sapiens
  misc_RNA (1)...(19): siRNA sense strand
gcagauagccgaagcuuuc

SEQ ID NO: 2119398 - RNA, 19 nt, Homo sapiens
  misc_RNA (1)...(19): siRNA sense strand
gaaaugugaucuuuaucug

SEQ ID NO: 2119399 - RNA, 19 nt, Homo sapiens
  misc_RNA (1)...(19): siRNA sense strand
gaauggauguucugugugu

SEQ ID NO: 2119400 - RNA, 19 nt, Homo sapiens
  misc_RNA (1)...(19): siRNA sense strand
cagaucagcuguacaaaca

SEQ ID NO: 2119401 - RNA, 19 nt, Homo sapiens
  misc_RNA (1)...(19): siRNA sense strand
aaaggaggaucgaugcaua

SEQ ID NO: 2119402 - RNA, 19 nt, Homo sapiens
  misc_RNA (1)...(19): siRNA sense strand
ugauggagcugcaaaccua

SEQ ID NO: 2119403 - RNA, 19 nt, Homo sapiens
  misc_RNA (1)...(19): siRNA sense strand
gggaacaucuacugagaga

SEQ ID NO: 2119404 - RNA, 19 nt, Homo sapiens
  misc_RNA (1)...(19): siRNA sense strand
gaaagaaauugaugaugcu

SEQ ID NO: 2119405 - RNA, 19 nt, Homo sapiens
  misc_RNA (1)...(19): siRNA sense strand
gagggauccuauaauaauu

SEQ ID NO: 2119406 - RNA, 19 nt, Homo sapiens
  misc_RNA (1)...(19): siRNA sense strand
gaaguaagagggauccuau

SEQ ID NO: 2119407 - RNA, 19 nt, Homo sapiens
  misc_RNA (1)...(19): siRNA sense strand
ugagaucuguuugacuuua

SEQ ID NO: 2119408 - RNA, 19 nt, Homo sapiens
  misc_RNA (1)...(19): siRNA sense strand
gaagaaauucaggaaguaa

SEQ ID NO: 2119409 - RNA, 19 nt, Homo sapiens
  misc_RNA (1)...(19): siRNA sense strand
gggcugaggugaggaaaga

SEQ ID NO: 2119410 - RNA, 19 nt, Homo sapiens
  misc_RNA (1)...(19): siRNA sense strand
uauggcagcuuuauggaaa

SEQ ID NO: 2119411 - RNA, 19 nt, Homo sapiens
  misc_RNA (1)...(19): siRNA sense strand
agaagaaauucaggaagua

SEQ ID NO: 2119412 - RNA, 19 nt, Homo sapiens
  misc_RNA (1)...(19): siRNA sense strand
aagaggagguugugcuaaa

SEQ ID NO: 2119413 - RNA, 19 nt, Homo sapiens
  misc_RNA (1)...(19): siRNA sense strand
gaggcgaguugcccagaaa

SEQ ID NO: 2119414 - RNA, 19 nt, Homo sapiens
  misc_RNA (1)...(19): siRNA sense strand
gaaggcagaucagcuguac

SEQ ID NO: 2119415 - RNA, 19 nt, Homo sapiens
  misc_RNA (1)...(19): siRNA sense strand
guggaagaauuaaaggaaa

SEQ ID NO: 2119416 - RNA, 19 nt, Homo sapiens
  misc_RNA (1)...(19): siRNA sense strand
ugaugaugcugcccaguuu

SEQ ID NO: 2119417 - RNA, 19 nt, Homo sapiens
  misc_RNA (1)...(19): siRNA sense strand
gagaucuguuugacuuuau

SEQ ID NO: 2119418 - RNA, 19 nt, Homo sapiens
  misc_RNA (1)...(19): siRNA sense strand
ucccguaacuccucaaaug

SEQ ID NO: 2119419 - RNA, 19 nt, Homo sapiens
  misc_RNA (1)...(19): siRNA sense strand
caagauagaaugguaaaca

SEQ ID NO: 2119420 - RNA, 19 nt, Homo sapiens
  misc_RNA (1)...(19): siRNA sense strand
uggaauggauguucugugu

SEQ ID NO: 2119421 - RNA, 19 nt, Homo sapiens
  misc_RNA (1)...(19): siRNA sense strand
uaaaggaaacgaugagauc

SEQ ID NO: 2119422 - RNA, 19 nt, Homo sapiens
  misc_RNA (1)...(19): siRNA sense strand
ucuccaagauagaauggua

SEQ ID NO: 2119423 - RNA, 19 nt, Homo sapiens
  misc_RNA (1)...(19): siRNA sense strand
agccgaagcuuucaauaug

SEQ ID NO: 2119424 - RNA, 19 nt, Homo sapiens
  misc_RNA (1)...(19): siRNA sense strand
gaagaggagguugugcuaa

SEQ ID NO: 2119425 - RNA, 19 nt, Homo sapiens
  misc_RNA (1)...(19): siRNA sense strand
caauauggcagcuuuaugg

SEQ ID NO: 2119426 - RNA, 19 nt, Homo sapiens
  misc_RNA (1)...(19): siRNA sense strand
ggaaugggaacaucuacug

SEQ ID NO: 2119427 - RNA, 19 nt, Homo sapiens
  misc_RNA (1)...(19): siRNA sense strand
aaaggucgauggaauggau

SEQ ID NO: 2119428 - RNA, 19 nt, Homo sapiens
  misc_RNA (1)...(19): siRNA sense strand
cagcagccagcccugauua

SEQ ID NO: 2119429 - RNA, 19 nt, Homo sapiens
  misc_RNA (1)...(19): siRNA sense strand
gcucauggugugugcuaua

SEQ ID NO: 2119430 - RNA, 19 nt, Homo sapiens
  misc_RNA (1)...(19): siRNA sense strand
cuacagcagugauucaucu

SEQ ID NO: 2119431 - RNA, 19 nt, Homo sapiens
  misc_RNA (1)...(19): siRNA sense strand
gaaauucaggaaguaagaa

SEQ ID NO: 2119432 - RNA, 19 nt, Homo sapiens
  misc_RNA (1)...(19): siRNA sense strand
ggacacaguaugagugauc

SEQ ID NO: 2119433 - RNA, 19 nt, Homo sapiens
  misc_RNA (1)...(19): siRNA sense strand
gaucgaugcauauguauac

SEQ ID NO: 2119434 - RNA, 19 nt, Homo sapiens
  misc_RNA (1)...(19): siRNA sense strand
gaauuaggccaucacaucu

SEQ ID NO: 2119435 - RNA, 19 nt, Homo sapiens
  misc_RNA (1)...(19): siRNA sense strand
gaaugggaacaucuacuga

SEQ ID NO: 2119436 - RNA, 19 nt, Homo sapiens
  misc_RNA (1)...(19): siRNA sense strand
ggcuaaaggucgauggaau

SEQ ID NO: 2119437 - RNA, 19 nt, Homo sapiens
  misc_RNA (1)...(19): siRNA sense strand
guaagagggauccuauaau

SEQ ID NO: 2119438 - RNA, 19 nt, Homo sapiens
  misc_RNA (1)...(19): siRNA sense strand
gcuaaaggucgauggaaug

SEQ ID NO: 2119439 - RNA, 19 nt, Homo sapiens
  misc_RNA (1)...(19): siRNA sense strand
gaauaaccuauauggaaug

SEQ ID NO: 2119440 - RNA, 19 nt, Homo sapiens
  misc_RNA (1)...(19): siRNA sense strand
agagggauccuauaauaau

SEQ ID NO: 2119441 - RNA, 19 nt, Homo sapiens
  misc_RNA (1)...(19): siRNA sense strand
aguaagagggauccuauaa

SEQ ID NO: 2119442 - RNA, 19 nt, Homo sapiens
  misc_RNA (1)...(19): siRNA sense strand
cuuaaauacuacaggauga

SEQ ID NO: 2119443 - RNA, 19 nt, Homo sapiens
  misc_RNA (1)...(19): siRNA sense strand
ggaucgaugcauauguaua

SEQ ID NO: 2119444 - RNA, 19 nt, Homo sapiens
  misc_RNA (1)...(19): siRNA sense strand
gaggaaagaaauugaugau

SEQ ID NO: 2119445 - RNA, 19 nt, Homo sapiens
  misc_RNA (1)...(19): siRNA sense strand
gcauauguauaccaagaac

SEQ ID NO: 2119446 - RNA, 19 nt, Homo sapiens
  misc_RNA (1)...(19): siRNA sense strand
ggaagaagaggagguugug

SEQ ID NO: 2119447 - RNA, 19 nt, Homo sapiens
  misc_RNA (1)...(19): siRNA sense strand
agaauuaggccaucacauc

SEQ ID NO: 2119448 - RNA, 19 nt, Homo sapiens
  misc_RNA (1)...(19): siRNA sense strand
agaaauucauucgcgguuu

SEQ ID NO: 2119449 - RNA, 19 nt, Homo sapiens
  misc_RNA (1)...(19): siRNA sense strand
cugcaaaccuaccguuauc

SEQ ID NO: 2119450 - RNA, 19 nt, Homo sapiens
  misc_RNA (1)...(19): siRNA sense strand
cggaggggcuuaaauacua

SEQ ID NO: 2119451 - RNA, 19 nt, Homo sapiens
  misc_RNA (1)...(19): siRNA sense strand
cgaugcauauguauaccaa

SEQ ID NO: 2119452 - RNA, 19 nt, Homo sapiens
  misc_RNA (1)...(19): siRNA sense strand
gagguugugcuaaaggaaa

SEQ ID NO: 2119453 - RNA, 19 nt, Homo sapiens
  misc_RNA (1)...(19): siRNA sense strand
gcagcuuuauggaaauuac

SEQ ID NO: 2119454 - RNA, 19 nt, Homo sapiens
  misc_RNA (1)...(19): siRNA sense strand
ugaaguucguggugcaaau

SEQ ID NO: 2119455 - RNA, 19 nt, Homo sapiens
  misc_RNA (1)...(19): siRNA sense strand
gaggugaggaaagaaauug

SEQ ID NO: 2119456 - RNA, 19 nt, Homo sapiens
  misc_RNA (1)...(19): siRNA sense strand
gccuguaaauauaaaggaa

SEQ ID NO: 2119457 - RNA, 19 nt, Homo sapiens
  misc_RNA (1)...(19): siRNA sense strand
gaagaauuaggccaucaca

SEQ ID NO: 2119458 - RNA, 19 nt, Homo sapiens
  misc_RNA (1)...(19): siRNA sense strand
gcagaucagcuguacaaac

SEQ ID NO: 2119459 - RNA, 19 nt, Homo sapiens
  misc_RNA (1)...(19): siRNA sense strand
gcaaaccuaccguuaucau

SEQ ID NO: 2119460 - RNA, 19 nt, Homo sapiens
  misc_RNA (1)...(19): siRNA sense strand
cagccagcccugauuacua

SEQ ID NO: 2119461 - RNA, 19 nt, Homo sapiens
  misc_RNA (1)...(19): siRNA sense strand
uagccgaagcuuucaauau

SEQ ID NO: 2119462 - RNA, 19 nt, Homo sapiens
  misc_RNA (1)...(19): siRNA sense strand
aagagggauccuauaauaa

SEQ ID NO: 2119463 - RNA, 19 nt, Homo sapiens
  misc_RNA (1)...(19): siRNA sense strand
ucacgucauuacauccuau

SEQ ID NO: 2119464 - RNA, 19 nt, Homo sapiens
  misc_RNA (1)...(19): siRNA sense strand
cagcagugauucaucuuuu

SEQ ID NO: 2119465 - RNA, 19 nt, Homo sapiens
  misc_RNA (1)...(19): siRNA sense strand
gcugcaaaccuaccguuau

SEQ ID NO: 2119466 - RNA, 19 nt, Homo sapiens
  misc_RNA (1)...(19): siRNA sense strand
gcagcagccagcccugauu

SEQ ID NO: 2119467 - RNA, 19 nt, Homo sapiens
  misc_RNA (1)...(19): siRNA sense strand
ucugugagaauaaccuaua

SEQ ID NO: 2119468 - RNA, 19 nt, Homo sapiens
  misc_RNA (1)...(19): siRNA sense strand
augcauauguauaccaaga

SEQ ID NO: 2119469 - RNA, 19 nt, Homo sapiens
  misc_RNA (1)...(19): siRNA sense strand
gcugaggugaggaaagaaa

SEQ ID NO: 2119470 - RNA, 19 nt, Homo sapiens
  misc_RNA (1)...(19): siRNA sense strand
uuauggaaauuaccuugug

SEQ ID NO: 2119471 - RNA, 19 nt, Homo sapiens
  misc_RNA (1)...(19): siRNA sense strand
gggcggaggggcuuaaaua

SEQ ID NO: 2119472 - RNA, 19 nt, Homo sapiens
  misc_RNA (1)...(19): siRNA sense strand
cggaucacgucauuacauc

SEQ ID NO: 2119473 - RNA, 19 nt, Homo sapiens
  misc_RNA (1)...(19): siRNA sense strand
caggaaguaagaaguaaga

SEQ ID NO: 2119474 - RNA, 19 nt, Homo sapiens
  misc_RNA (1)...(19): siRNA sense strand
gccgaagcuuucaauaugg

SEQ ID NO: 2119475 - RNA, 19 nt, Homo sapiens
  misc_RNA (1)...(19): siRNA sense strand
gauagccgaagcuuucaau

SEQ ID NO: 2119476 - RNA, 19 nt, Homo sapiens
  misc_RNA (1)...(19): siRNA sense strand
gcagagcugacgggaagaa

SEQ ID NO: 2119477 - RNA, 19 nt, Homo sapiens
  misc_RNA (1)...(19): siRNA sense strand
ugaggaaagaaauugauga

SEQ ID NO: 2119478 - RNA, 19 nt, Homo sapiens
  misc_RNA (1)...(19): siRNA sense strand
ggaaauuaccuuguguuuu

SEQ ID NO: 2119479 - RNA, 19 nt, Homo sapiens
  misc_RNA (1)...(19): siRNA sense strand
uggaaauuaccuuguguuu

SEQ ID NO: 2119480 - RNA, 19 nt, Homo sapiens
  misc_RNA (1)...(19): siRNA sense strand
gcgaguugcccagaaauca

SEQ ID NO: 2119481 - RNA, 19 nt, Homo sapiens
  misc_RNA (1)...(19): siRNA sense strand
gggauggcgcugcgaauca

SEQ ID NO: 2119482 - RNA, 19 nt, Homo sapiens
  misc_RNA (1)...(19): siRNA sense strand
gggaagaagaggagguugu

SEQ ID NO: 2119483 - RNA, 19 nt, Homo sapiens
  misc_RNA (1)...(19): siRNA sense strand
agaagaggagguugugcua

SEQ ID NO: 2119484 - RNA, 19 nt, Homo sapiens
  misc_RNA (1)...(19): siRNA sense strand
gaaguucguggugcaaauc

SEQ ID NO: 2119485 - RNA, 19 nt, Homo sapiens
  misc_RNA (1)...(19): siRNA sense strand
gggauccuauaauaauucu

SEQ ID NO: 2119486 - RNA, 19 nt, Homo sapiens
  misc_RNA (1)...(19): siRNA sense strand
ggagucaguuaucguacac

SEQ ID NO: 2119487 - RNA, 19 nt, Homo sapiens
  misc_RNA (1)...(19): siRNA sense strand
gagugauccuggagucagu

SEQ ID NO: 2119488 - RNA, 19 nt, Homo sapiens
  misc_RNA (1)...(19): siRNA sense strand
gcauaaaccccucggauca

SEQ ID NO: 2119489 - RNA, 19 nt, Homo sapiens
  misc_RNA (1)...(19): siRNA sense strand
aguuuaaguccgucaguua

SEQ ID NO: 2119490 - RNA, 19 nt, Homo sapiens
  misc_RNA (1)...(19): siRNA sense strand
uaagagggauccuauaaua

SEQ ID NO: 2119491 - RNA, 19 nt, Homo sapiens
  misc_RNA (1)...(19): siRNA sense strand
gaggaucgaugcauaugua

SEQ ID NO: 2119492 - RNA, 19 nt, Homo sapiens
  misc_RNA (1)...(19): siRNA sense strand
gcucuggccuguaaauaua

SEQ ID NO: 2119493 - RNA, 19 nt, Homo sapiens
  misc_RNA (1)...(19): siRNA sense strand
gaugagaucuguuugacuu

SEQ ID NO: 2119494 - RNA, 19 nt, Homo sapiens
  misc_RNA (1)...(19): siRNA sense strand
gagaauaaccuauauggaa

SEQ ID NO: 2119495 - RNA, 19 nt, Homo sapiens
  misc_RNA (1)...(19): siRNA sense strand
gcauugcucuggccuguaa

SEQ ID NO: 2119496 - RNA, 19 nt, Homo sapiens
  misc_RNA (1)...(19): siRNA sense strand
gagaagaaauucaggaagu

SEQ ID NO: 2119497 - RNA, 19 nt, Homo sapiens
  misc_RNA (1)...(19): siRNA sense strand
gcagauagccgaagcuuuc

SEQ ID NO: 2119498 - RNA, 19 nt, Homo sapiens
  misc_RNA (1)...(19): siRNA sense strand
gaaaugugaucuuuaucug

SEQ ID NO: 2119499 - RNA, 19 nt, Homo sapiens
  misc_RNA (1)...(19): siRNA sense strand
gaauggauguucugugugu

SEQ ID NO: 2119500 - RNA, 19 nt, Homo sapiens
  misc_RNA (1)...(19): siRNA sense strand
cagaucagcuguacaaaca

SEQ ID NO: 2119501 - RNA, 19 nt, Homo sapiens
  misc_RNA (1)...(19): siRNA sense strand
aaaggaggaucgaugcaua

SEQ ID NO: 2119502 - RNA, 19 nt, Homo sapiens
  misc_RNA (1)...(19): siRNA sense strand
ugauggagcugcaaaccua

SEQ ID NO: 2119503 - RNA, 19 nt, Homo sapiens
  misc_RNA (1)...(19): siRNA sense strand
gggaacaucuacugagaga

SEQ ID NO: 2119504 - RNA, 19 nt, Homo sapiens
  misc_RNA (1)...(19): siRNA sense strand
gaaagaaauugaugaugcu

SEQ ID NO: 2119505 - RNA, 19 nt, Homo sapiens
  misc_RNA (1)...(19): siRNA sense strand
gagggauccuauaauaauu

SEQ ID NO: 2119506 - RNA, 19 nt, Homo sapiens
  misc_RNA (1)...(19): siRNA sense strand
ugagaucuguuugacuuua

SEQ ID NO: 2119507 - RNA, 19 nt, Homo sapiens
  misc_RNA (1)...(19): siRNA sense strand
gaagaaauucaggaaguaa

SEQ ID NO: 2119508 - RNA, 19 nt, Homo sapiens
  misc_RNA (1)...(19): siRNA sense strand
gggcugaggugaggaaaga

SEQ ID NO: 2119509 - RNA, 19 nt, Homo sapiens
  misc_RNA (1)...(19): siRNA sense strand
uauggcagcuuuauggaaa

SEQ ID NO: 2119510 - RNA, 19 nt, Homo sapiens
  misc_RNA (1)...(19): siRNA sense strand
agaagaaauucaggaagua

SEQ ID NO: 2119511 - RNA, 19 nt, Homo sapiens
  misc_RNA (1)...(19): siRNA sense strand
aagaggagguugugcuaaa

SEQ ID NO: 2119512 - RNA, 19 nt, Homo sapiens
  misc_RNA (1)...(19): siRNA sense strand
gaggcgaguugcccagaaa

SEQ ID NO: 2119513 - RNA, 19 nt, Homo sapiens
  misc_RNA (1)...(19): siRNA sense strand
gaaggcagaucagcuguac

SEQ ID NO: 2119514 - RNA, 19 nt, Homo sapiens
  misc_RNA (1)...(19): siRNA sense strand
guggaagaauuaaaggaaa

SEQ ID NO: 2119515 - RNA, 19 nt, Homo sapiens
  misc_RNA (1)...(19): siRNA sense strand
ugaugaugcugcccaguuu

SEQ ID NO: 2119516 - RNA, 19 nt, Homo sapiens
  misc_RNA (1)...(19): siRNA sense strand
gagaucuguuugacuuuau

SEQ ID NO: 2119517 - RNA, 19 nt, Homo sapiens
  misc_RNA (1)...(19): siRNA sense strand
uggaauggauguucugugu

SEQ ID NO: 2119518 - RNA, 19 nt, Homo sapiens
  misc_RNA (1)...(19): siRNA sense strand
caagauagaaugguaaaca

SEQ ID NO: 2119519 - RNA, 19 nt, Homo sapiens
  misc_RNA (1)...(19): siRNA sense strand
ucccguaacuccucaaaug

SEQ ID NO: 2119520 - RNA, 19 nt, Homo sapiens
  misc_RNA (1)...(19): siRNA sense strand
uaaaggaaacgaugagauc

SEQ ID NO: 2119521 - RNA, 19 nt, Homo sapiens
  misc_RNA (1)...(19): siRNA sense strand
ucuccaagauagaauggua

SEQ ID NO: 2119522 - RNA, 19 nt, Homo sapiens
  misc_RNA (1)...(19): siRNA sense strand
agccgaagcuuucaauaug

SEQ ID NO: 2119523 - RNA, 19 nt, Homo sapiens
  misc_RNA (1)...(19): siRNA sense strand
gaagaggagguugugcuaa

SEQ ID NO: 2119524 - RNA, 19 nt, Homo sapiens
  misc_RNA (1)...(19): siRNA sense strand
caauauggcagcuuuaugg

SEQ ID NO: 2119525 - RNA, 19 nt, Homo sapiens
  misc_RNA (1)...(19): siRNA sense strand
ggaaugggaacaucuacug

SEQ ID NO: 2119526 - RNA, 19 nt, Homo sapiens
  misc_RNA (1)...(19): siRNA sense strand
aaaggucgauggaauggau

SEQ ID NO: 2119527 - RNA, 19 nt, Homo sapiens
  misc_RNA (1)...(19): siRNA sense strand
cagcagccagcccugauua

SEQ ID NO: 2119528 - RNA, 19 nt, Homo sapiens
  misc_RNA (1)...(19): siRNA sense strand
gcucauggugugugcuaua

SEQ ID NO: 2119529 - RNA, 19 nt, Homo sapiens
  misc_RNA (1)...(19): siRNA sense strand
cuacagcagugauucaucu

SEQ ID NO: 2119530 - RNA, 19 nt, Homo sapiens
  misc_RNA (1)...(19): siRNA sense strand
ggacacaguaugagugauc

SEQ ID NO: 2119531 - RNA, 19 nt, Homo sapiens
  misc_RNA (1)...(19): siRNA sense strand
gaucgaugcauauguauac

SEQ ID NO: 2119532 - RNA, 19 nt, Homo sapiens
  misc_RNA (1)...(19): siRNA sense strand
gaauuaggccaucacaucu

SEQ ID NO: 2119533 - RNA, 19 nt, Homo sapiens
  misc_RNA (1)...(19): siRNA sense strand
gaaugggaacaucuacuga

SEQ ID NO: 2119534 - RNA, 19 nt, Homo sapiens
  misc_RNA (1)...(19): siRNA sense strand
ggcuaaaggucgauggaau

SEQ ID NO: 2119535 - RNA, 19 nt, Homo sapiens
  misc_RNA (1)...(19): siRNA sense strand
guaagagggauccuauaau

SEQ ID NO: 2119536 - RNA, 19 nt, Homo sapiens
  misc_RNA (1)...(19): siRNA sense strand
gcuaaaggucgauggaaug

SEQ ID NO: 2119537 - RNA, 19 nt, Homo sapiens
  misc_RNA (1)...(19): siRNA sense strand
gaauaaccuauauggaaug

SEQ ID NO: 2119538 - RNA, 19 nt, Homo sapiens
  misc_RNA (1)...(19): siRNA sense strand
cuuaaauacuacaggauga

SEQ ID NO: 2119539 - RNA, 19 nt, Homo sapiens
  misc_RNA (1)...(19): siRNA sense strand
agagggauccuauaauaau

SEQ ID NO: 2119540 - RNA, 19 nt, Homo sapiens
  misc_RNA (1)...(19): siRNA sense strand
aguaagagggauccuauaa

SEQ ID NO: 2119541 - RNA, 19 nt, Homo sapiens
  misc_RNA (1)...(19): siRNA sense strand
ggaucgaugcauauguaua

SEQ ID NO: 2119542 - RNA, 19 nt, Homo sapiens
  misc_RNA (1)...(19): siRNA sense strand
gaggaaagaaauugaugau

SEQ ID NO: 2119543 - RNA, 19 nt, Homo sapiens
  misc_RNA (1)...(19): siRNA sense strand
gcauauguauaccaagaac

SEQ ID NO: 2119544 - RNA, 19 nt, Homo sapiens
  misc_RNA (1)...(19): siRNA sense strand
ggaagaagaggagguugug

SEQ ID NO: 2119545 - RNA, 19 nt, Homo sapiens
  misc_RNA (1)...(19): siRNA sense strand
agaauuaggccaucacauc

SEQ ID NO: 2119546 - RNA, 19 nt, Homo sapiens
  misc_RNA (1)...(19): siRNA sense strand
agaaauucauucgcgguuu

SEQ ID NO: 2119547 - RNA, 19 nt, Homo sapiens
  misc_RNA (1)...(19): siRNA sense strand
cugcaaaccuaccguuauc

SEQ ID NO: 2119548 - RNA, 19 nt, Homo sapiens
  misc_RNA (1)...(19): siRNA sense strand
cggaggggcuuaaauacua

SEQ ID NO: 2119549 - RNA, 19 nt, Homo sapiens
  misc_RNA (1)...(19): siRNA sense strand
cgaugcauauguauaccaa

SEQ ID NO: 2119550 - RNA, 19 nt, Homo sapiens
  misc_RNA (1)...(19): siRNA sense strand
gagguugugcuaaaggaaa

SEQ ID NO: 2119551 - RNA, 19 nt, Homo sapiens
  misc_RNA (1)...(19): siRNA sense strand
gcagcuuuauggaaauuac

SEQ ID NO: 2119552 - RNA, 19 nt, Homo sapiens
  misc_RNA (1)...(19): siRNA sense strand
ugaaguucguggugcaaau

SEQ ID NO: 2119553 - RNA, 19 nt, Homo sapiens
  misc_RNA (1)...(19): siRNA sense strand
gaggugaggaaagaaauug

SEQ ID NO: 2119554 - RNA, 19 nt, Homo sapiens
  misc_RNA (1)...(19): siRNA sense strand
gccuguaaauauaaaggaa

SEQ ID NO: 2119555 - RNA, 19 nt, Homo sapiens
  misc_RNA (1)...(19): siRNA sense strand
gaagaauuaggccaucaca

SEQ ID NO: 2119556 - RNA, 19 nt, Homo sapiens
  misc_RNA (1)...(19): siRNA sense strand
gcagaucagcuguacaaac

SEQ ID NO: 2119557 - RNA, 19 nt, Homo sapiens
  misc_RNA (1)...(19): siRNA sense strand
gcaaaccuaccguuaucau

SEQ ID NO: 2119558 - RNA, 19 nt, Homo sapiens
  misc_RNA (1)...(19): siRNA sense strand
cagccagcccugauuacua

SEQ ID NO: 2119559 - RNA, 19 nt, Homo sapiens
  misc_RNA (1)...(19): siRNA sense strand
uagccgaagcuuucaauau

SEQ ID NO: 2119560 - RNA, 19 nt, Homo sapiens
  misc_RNA (1)...(19): siRNA sense strand
aagagggauccuauaauaa

SEQ ID NO: 2119561 - RNA, 19 nt, Homo sapiens
  misc_RNA (1)...(19): siRNA sense strand
ucacgucauuacauccuau

SEQ ID NO: 2119562 - RNA, 19 nt, Homo sapiens
  misc_RNA (1)...(19): siRNA sense strand
cagcagugauucaucuuuu

SEQ ID NO: 2119563 - RNA, 19 nt, Homo sapiens
  misc_RNA (1)...(19): siRNA sense strand
gcugcaaaccuaccguuau

SEQ ID NO: 2119564 - RNA, 19 nt, Homo sapiens
  misc_RNA (1)...(19): siRNA sense strand
gcagcagccagcccugauu

SEQ ID NO: 2119565 - RNA, 19 nt, Homo sapiens
  misc_RNA (1)...(19): siRNA sense strand
ucugugagaauaaccuaua

SEQ ID NO: 2119566 - RNA, 19 nt, Homo sapiens
  misc_RNA (1)...(19): siRNA sense strand
augcauauguauaccaaga

SEQ ID NO: 2119567 - RNA, 19 nt, Homo sapiens
  misc_RNA (1)...(19): siRNA sense strand
gcugaggugaggaaagaaa

SEQ ID NO: 2119568 - RNA, 19 nt, Homo sapiens
  misc_RNA (1)...(19): siRNA sense strand
uuauggaaauuaccuugug

SEQ ID NO: 2119569 - RNA, 19 nt, Homo sapiens
  misc_RNA (1)...(19): siRNA sense strand
gggcggaggggcuuaaaua

SEQ ID NO: 2119570 - RNA, 19 nt, Homo sapiens
  misc_RNA (1)...(19): siRNA sense strand
cggaucacgucauuacauc

SEQ ID NO: 2119571 - RNA, 19 nt, Homo sapiens
  misc_RNA (1)...(19): siRNA sense strand
gccgaagcuuucaauaugg

SEQ ID NO: 2119572 - RNA, 19 nt, Homo sapiens
  misc_RNA (1)...(19): siRNA sense strand
gauagccgaagcuuucaau

SEQ ID NO: 2119573 - RNA, 19 nt, Homo sapiens
  misc_RNA (1)...(19): siRNA sense strand
gcagagcugacgggaagaa

SEQ ID NO: 2119574 - RNA, 19 nt, Homo sapiens
  misc_RNA (1)...(19): siRNA sense strand
gcgaguugcccagaaauca

SEQ ID NO: 2119575 - RNA, 19 nt, Homo sapiens
  misc_RNA (1)...(19): siRNA sense strand
ugaggaaagaaauugauga

SEQ ID NO: 2119576 - RNA, 19 nt, Homo sapiens
  misc_RNA (1)...(19): siRNA sense strand
ggaaauuaccuuguguuuu

SEQ ID NO: 2119577 - RNA, 19 nt, Homo sapiens
  misc_RNA (1)...(19): siRNA sense strand
uggaaauuaccuuguguuu

SEQ ID NO: 2119578 - RNA, 19 nt, Homo sapiens
  misc_RNA (1)...(19): siRNA sense strand
gggauggcgcugcgaauca

SEQ ID NO: 2119579 - RNA, 19 nt, Homo sapiens
  misc_RNA (1)...(19): siRNA sense strand
gggaagaagaggagguugu

SEQ ID NO: 2119580 - RNA, 19 nt, Homo sapiens
  misc_RNA (1)...(19): siRNA sense strand
agaagaggagguugugcua

SEQ ID NO: 2119581 - RNA, 19 nt, Homo sapiens
  misc_RNA (1)...(19): siRNA sense strand
gaaguucguggugcaaauc

SEQ ID NO: 2119582 - RNA, 19 nt, Homo sapiens
  misc_RNA (1)...(19): siRNA sense strand
gggauccuauaauaauucu

SEQ ID NO: 2119583 - RNA, 19 nt, Homo sapiens
  misc_RNA (1)...(19): siRNA sense strand
ggagucaguuaucguacac

SEQ ID NO: 2119584 - RNA, 19 nt, Homo sapiens
  misc_RNA (1)...(19): siRNA sense strand
gagugauccuggagucagu

SEQ ID NO: 2119585 - RNA, 19 nt, Homo sapiens
  misc_RNA (1)...(19): siRNA sense strand
gcauaaaccccucggauca

SEQ ID NO: 2119586 - RNA, 19 nt, Homo sapiens
  misc_RNA (1)...(19): siRNA sense strand
aggaaacgaugagaucugu

SEQ ID NO: 2119587 - RNA, 19 nt, Homo sapiens
  misc_RNA (1)...(19): siRNA sense strand
aguuuaaguccgucaguua

SEQ ID NO: 2119588 - RNA, 19 nt, Homo sapiens
  misc_RNA (1)...(19): siRNA sense strand
uacaagaggggcaauuuua

SEQ ID NO: 2119589 - RNA, 19 nt, Homo sapiens
  misc_RNA (1)...(19): siRNA sense strand
uauggaaauuaccuugugu

SEQ ID NO: 2119590 - RNA, 19 nt, Homo sapiens
  misc_RNA (1)...(19): siRNA sense strand
ggaagaauauucacaucaa

SEQ ID NO: 2119591 - RNA, 19 nt, Homo sapiens
  misc_RNA (1)...(19): siRNA sense strand
uaacaggacuuacugagaa

SEQ ID NO: 2119592 - RNA, 19 nt, Homo sapiens
  misc_RNA (1)...(19): siRNA sense strand
gaucuggaaucuacuguuu

SEQ ID NO: 2119593 - RNA, 19 nt, Homo sapiens
  misc_RNA (1)...(19): siRNA sense strand
gaaaucagcuucaaaauac

SEQ ID NO: 2119594 - RNA, 19 nt, Homo sapiens
  misc_RNA (1)...(19): siRNA sense strand
ggaaaucauucaagagcaa

SEQ ID NO: 2119595 - RNA, 19 nt, Homo sapiens
  misc_RNA (1)...(19): siRNA sense strand
guaguggugucacaucuaa

SEQ ID NO: 2119596 - RNA, 19 nt, Homo sapiens
  misc_RNA (1)...(19): siRNA sense strand
gggcucagcuauuaguaaa

SEQ ID NO: 2119597 - RNA, 19 nt, Homo sapiens
  misc_RNA (1)...(19): siRNA sense strand
agucaaagauuuacagaga

SEQ ID NO: 2119598 - RNA, 19 nt, Homo sapiens
  misc_RNA (1)...(19): siRNA sense strand
cagagaagacuaaaugaaa

SEQ ID NO: 2119599 - RNA, 19 nt, Homo sapiens
  misc_RNA (1)...(19): siRNA sense strand
gaaauaacaggacuuacug

SEQ ID NO: 2119600 - RNA, 19 nt, Homo sapiens
  misc_RNA (1)...(19): siRNA sense strand
gggaggauauuuccaguag

SEQ ID NO: 2119601 - RNA, 19 nt, Homo sapiens
  misc_RNA (1)...(19): siRNA sense strand
ggcagucagucauugauuu

SEQ ID NO: 2119602 - RNA, 19 nt, Homo sapiens
  misc_RNA (1)...(19): siRNA sense strand
cacaucaagucaaagauuu

SEQ ID NO: 2119603 - RNA, 19 nt, Homo sapiens
  misc_RNA (1)...(19): siRNA sense strand
ccaauaguauccagaguca

SEQ ID NO: 2119604 - RNA, 19 nt, Homo sapiens
  misc_RNA (1)...(19): siRNA sense strand
uaagagaauuagacacaga

SEQ ID NO: 2119605 - RNA, 19 nt, Homo sapiens
  misc_RNA (1)...(19): siRNA sense strand
gaagaauauucacaucaag

SEQ ID NO: 2119606 - RNA, 19 nt, Homo sapiens
  misc_RNA (1)...(19): siRNA sense strand
ggaacuugauucuccuaga

SEQ ID NO: 2119607 - RNA, 19 nt, Homo sapiens
  misc_RNA (1)...(19): siRNA sense strand
gaggauauuuccaguagag

SEQ ID NO: 2119608 - RNA, 19 nt, Homo sapiens
  misc_RNA (1)...(19): siRNA sense strand
uaauggagguucuucaagu

SEQ ID NO: 2119609 - RNA, 19 nt, Homo sapiens
  misc_RNA (1)...(19): siRNA sense strand
gcucgaagccaagccaaua

SEQ ID NO: 2119610 - RNA, 19 nt, Homo sapiens
  misc_RNA (1)...(19): siRNA sense strand
aagaggacaugcugaaaga

SEQ ID NO: 2119611 - RNA, 19 nt, Homo sapiens
  misc_RNA (1)...(19): siRNA sense strand
uugaagcacugaaaucuga

SEQ ID NO: 2119612 - RNA, 19 nt, Homo sapiens
  misc_RNA (1)...(19): siRNA sense strand
uuacagagaagacuaaaug

SEQ ID NO: 2119613 - RNA, 19 nt, Homo sapiens
  misc_RNA (1)...(19): siRNA sense strand
uaagugaacaugaaguuga

SEQ ID NO: 2119614 - RNA, 19 nt, Homo sapiens
  misc_RNA (1)...(19): siRNA sense strand
gaauuagacacagagauuu

SEQ ID NO: 2119615 - RNA, 19 nt, Homo sapiens
  misc_RNA (1)...(19): siRNA sense strand
gaagcugccaaaugccuua

SEQ ID NO: 2119616 - RNA, 19 nt, Homo sapiens
  misc_RNA (1)...(19): siRNA sense strand
cagcuacguucugaauuaa

SEQ ID NO: 2119617 - RNA, 19 nt, Homo sapiens
  misc_RNA (1)...(19): siRNA sense strand
ggauugagcaguuaauaag

SEQ ID NO: 2119618 - RNA, 19 nt, Homo sapiens
  misc_RNA (1)...(19): siRNA sense strand
ccaaaaggauguaugaaga

SEQ ID NO: 2119619 - RNA, 19 nt, Homo sapiens
  misc_RNA (1)...(19): siRNA sense strand
aaacaaaacuucaggagau

SEQ ID NO: 2119620 - RNA, 19 nt, Homo sapiens
  misc_RNA (1)...(19): siRNA sense strand
agaauuagacacagagauu

SEQ ID NO: 2119621 - RNA, 19 nt, Homo sapiens
  misc_RNA (1)...(19): siRNA sense strand
gaagccaagccaauaguau

SEQ ID NO: 2119622 - RNA, 19 nt, Homo sapiens
  misc_RNA (1)...(19): siRNA sense strand
aagauaggauugagcaguu

SEQ ID NO: 2119623 - RNA, 19 nt, Homo sapiens
  misc_RNA (1)...(19): siRNA sense strand
ucaaagauuuacagagaag

SEQ ID NO: 2119624 - RNA, 19 nt, Homo sapiens
  misc_RNA (1)...(19): siRNA sense strand
gcucagcgaucuggaaucu

SEQ ID NO: 2119625 - RNA, 19 nt, Homo sapiens
  misc_RNA (1)...(19): siRNA sense strand
gcuugggaaucaaauaaug

SEQ ID NO: 2119626 - RNA, 19 nt, Homo sapiens
  misc_RNA (1)...(19): siRNA sense strand
caagaaauccggucaaucc

SEQ ID NO: 2119627 - RNA, 19 nt, Homo sapiens
  misc_RNA (1)...(19): siRNA sense strand
ucacaucaagucaaagauu

SEQ ID NO: 2119628 - RNA, 19 nt, Homo sapiens
  misc_RNA (1)...(19): siRNA sense strand
gagcaagcaagaaaccaaa

SEQ ID NO: 2119629 - RNA, 19 nt, Homo sapiens
  misc_RNA (1)...(19): siRNA sense strand
ugaauugcaugagaaacaa

SEQ ID NO: 2119630 - RNA, 19 nt, Homo sapiens
  misc_RNA (1)...(19): siRNA sense strand
caacaacaccaagauagga

SEQ ID NO: 2119631 - RNA, 19 nt, Homo sapiens
  misc_RNA (1)...(19): siRNA sense strand
gagaugcuauggcugacau

SEQ ID NO: 2119632 - RNA, 19 nt, Homo sapiens
  misc_RNA (1)...(19): siRNA sense strand
agagaagacuaaaugaaag

SEQ ID NO: 2119633 - RNA, 19 nt, Homo sapiens
  misc_RNA (1)...(19): siRNA sense strand
gggaaucaaauaaugaaga

SEQ ID NO: 2119634 - RNA, 19 nt, Homo sapiens
  misc_RNA (1)...(19): siRNA sense strand
guugaaauaacaggacuua

SEQ ID NO: 2119635 - RNA, 19 nt, Homo sapiens
  misc_RNA (1)...(19): siRNA sense strand
gggagugcuucaagaaauc

SEQ ID NO: 2119636 - RNA, 19 nt, Homo sapiens
  misc_RNA (1)...(19): siRNA sense strand
gcagucagucauugauuug

SEQ ID NO: 2119637 - RNA, 19 nt, Homo sapiens
  misc_RNA (1)...(19): siRNA sense strand
agacagcaacacacagaua

SEQ ID NO: 2119638 - RNA, 19 nt, Homo sapiens
  misc_RNA (1)...(19): siRNA sense strand
ucagcgaucuggaaucuac

SEQ ID NO: 2119639 - RNA, 19 nt, Homo sapiens
  misc_RNA (1)...(19): siRNA sense strand
ggacuuacugagaaagcua

SEQ ID NO: 2119640 - RNA, 19 nt, Homo sapiens
  misc_RNA (1)...(19): siRNA sense strand
aauccuaguugacuuugaa

SEQ ID NO: 2119641 - RNA, 19 nt, Homo sapiens
  misc_RNA (1)...(19): siRNA sense strand
gucaaagauuuacagagaa

SEQ ID NO: 2119642 - RNA, 19 nt, Homo sapiens
  misc_RNA (1)...(19): siRNA sense strand
aauaguauccagagucaaa

SEQ ID NO: 2119643 - RNA, 19 nt, Homo sapiens
  misc_RNA (1)...(19): siRNA sense strand
gagggagugcuucaagaaa

SEQ ID NO: 2119644 - RNA, 19 nt, Homo sapiens
  misc_RNA (1)...(19): siRNA sense strand
agauaggauugagcaguua

SEQ ID NO: 2119645 - RNA, 19 nt, Homo sapiens
  misc_RNA (1)...(19): siRNA sense strand
ggaggauauuuccaguaga

SEQ ID NO: 2119646 - RNA, 19 nt, Homo sapiens
  misc_RNA (1)...(19): siRNA sense strand
ugaauuaagggaagccaaa

SEQ ID NO: 2119647 - RNA, 19 nt, Homo sapiens
  misc_RNA (1)...(19): siRNA sense strand
ugaaauaacaggacuuacu

SEQ ID NO: 2119648 - RNA, 19 nt, Homo sapiens
  misc_RNA (1)...(19): siRNA sense strand
gcacugaaaucugaaucac

SEQ ID NO: 2119649 - RNA, 19 nt, Homo sapiens
  misc_RNA (1)...(19): siRNA sense strand
caacuugaagcacugaaau

SEQ ID NO: 2119650 - RNA, 19 nt, Homo sapiens
  misc_RNA (1)...(19): siRNA sense strand
gauuuacagagaagacuaa

SEQ ID NO: 2119651 - RNA, 19 nt, Homo sapiens
  misc_RNA (1)...(19): siRNA sense strand
gauaggauugagcaguuaa

SEQ ID NO: 2119652 - RNA, 19 nt, Homo sapiens
  misc_RNA (1)...(19): siRNA sense strand
gaacuugaagcugccaaau

SEQ ID NO: 2119653 - RNA, 19 nt, Homo sapiens
  misc_RNA (1)...(19): siRNA sense strand
aauggagguucuucaaguu

SEQ ID NO: 2119654 - RNA, 19 nt, Homo sapiens
  misc_RNA (1)...(19): siRNA sense strand
gaacuacuucugcaacaac

SEQ ID NO: 2119655 - RNA, 19 nt, Homo sapiens
  misc_RNA (1)...(19): siRNA sense strand
aaagacagcaacacacaga

SEQ ID NO: 2119656 - RNA, 19 nt, Homo sapiens
  misc_RNA (1)...(19): siRNA sense strand
uuaaagaggacaugcugaa

SEQ ID NO: 2119657 - RNA, 19 nt, Homo sapiens
  misc_RNA (1)...(19): siRNA sense strand
gaauauucacaucaaguca

SEQ ID NO: 2119658 - RNA, 19 nt, Homo sapiens
  misc_RNA (1)...(19): siRNA sense strand
gcaagaaaccaaaacucua

SEQ ID NO: 2119659 - RNA, 19 nt, Homo sapiens
  misc_RNA (1)...(19): siRNA sense strand
cgaagccaagccaauagua

SEQ ID NO: 2119660 - RNA, 19 nt, Homo sapiens
  misc_RNA (1)...(19): siRNA sense strand
uaaagaggacaugcugaaa

SEQ ID NO: 2119661 - RNA, 19 nt, Homo sapiens
  misc_RNA (1)...(19): siRNA sense strand
ugaaagacagcaacacaca

SEQ ID NO: 2119662 - RNA, 19 nt, Homo sapiens
  misc_RNA (1)...(19): siRNA sense strand
gcuacguucugaauuaagg

SEQ ID NO: 2119663 - RNA, 19 nt, Homo sapiens
  misc_RNA (1)...(19): siRNA sense strand
caacaccaagauaggauug

SEQ ID NO: 2119664 - RNA, 19 nt, Homo sapiens
  misc_RNA (1)...(19): siRNA sense strand
gcaacaacaccaagauagg

SEQ ID NO: 2119665 - RNA, 19 nt, Homo sapiens
  misc_RNA (1)...(19): siRNA sense strand
cccuaaauaugaaguggaa

SEQ ID NO: 2119666 - RNA, 19 nt, Homo sapiens
  misc_RNA (1)...(19): siRNA sense strand
acagagaagacuaaaugaa

SEQ ID NO: 2119667 - RNA, 19 nt, Homo sapiens
  misc_RNA (1)...(19): siRNA sense strand
aagugaacaugaaguugaa

SEQ ID NO: 2119668 - RNA, 19 nt, Homo sapiens
  misc_RNA (1)...(19): siRNA sense strand
uagacacagagauuucuua

SEQ ID NO: 2119669 - RNA, 19 nt, Homo sapiens
  misc_RNA (1)...(19): siRNA sense strand
acacacagauagagcaacu

SEQ ID NO: 2119670 - RNA, 19 nt, Homo sapiens
  misc_RNA (1)...(19): siRNA sense strand
caucccaucuccuggaaag

SEQ ID NO: 2119671 - RNA, 19 nt, Homo sapiens
  misc_RNA (1)...(19): siRNA sense strand
gaggacaugcugaaagaca

SEQ ID NO: 2119672 - RNA, 19 nt, Homo sapiens
  misc_RNA (1)...(19): siRNA sense strand
aagcuugggaaucaaauaa

SEQ ID NO: 2119673 - RNA, 19 nt, Homo sapiens
  misc_RNA (1)...(19): siRNA sense strand
gaagacuaaaugaaagcaa

SEQ ID NO: 2119674 - RNA, 19 nt, Homo sapiens
  misc_RNA (1)...(19): siRNA sense strand
agggagugcuucaagaaau

SEQ ID NO: 2119675 - RNA, 19 nt, Homo sapiens
  misc_RNA (1)...(19): siRNA sense strand
agauagagcaacuacgaaa

SEQ ID NO: 2119676 - RNA, 19 nt, Homo sapiens
  misc_RNA (1)...(19): siRNA sense strand
acagauagagcaacuacga

SEQ ID NO: 2119677 - RNA, 19 nt, Homo sapiens
  misc_RNA (1)...(19): siRNA sense strand
caacacacagauagagcaa

SEQ ID NO: 2119678 - RNA, 19 nt, Homo sapiens
  misc_RNA (1)...(19): siRNA sense strand
gucauugauuugcaaacaa

SEQ ID NO: 2119679 - RNA, 19 nt, Homo sapiens
  misc_RNA (1)...(19): siRNA sense strand
gaauugcaugagaaacaaa

SEQ ID NO: 2119680 - RNA, 19 nt, Homo sapiens
  misc_RNA (1)...(19): siRNA sense strand
agaaauccggucaauccua

SEQ ID NO: 2119681 - RNA, 19 nt, Homo sapiens
  misc_RNA (1)...(19): siRNA sense strand
ugagggagugcuucaagaa

SEQ ID NO: 2119682 - RNA, 19 nt, Homo sapiens
  misc_RNA (1)...(19): siRNA sense strand
gacagcaacacacagauag

SEQ ID NO: 2119683 - RNA, 19 nt, Homo sapiens
  misc_RNA (1)...(19): siRNA sense strand
gcugccaaaugccuuaaag

SEQ ID NO: 2119684 - RNA, 19 nt, Homo sapiens
  misc_RNA (1)...(19): siRNA sense strand
cuaguugacuuugaagaag

SEQ ID NO: 2119685 - RNA, 19 nt, Homo sapiens
  misc_RNA (1)...(19): siRNA sense strand
gaaaccaaaacucuaugua

SEQ ID NO: 2119686 - RNA, 19 nt, Homo sapiens
  misc_RNA (1)...(19): siRNA sense strand
ccuaguugacuuugaagaa

SEQ ID NO: 2119687 - RNA, 19 nt, Homo sapiens
  misc_RNA (1)...(19): siRNA sense strand
aaggauguaugaagacaag

SEQ ID NO: 2119688 - RNA, 19 nt, Homo sapiens
  misc_RNA (1)...(19): siRNA sense strand
ccaaaacucuauguauaug

SEQ ID NO: 2119689 - RNA, 19 nt, Homo sapiens
  misc_RNA (1)...(19): siRNA sense strand
caagaaaccaaaacucuau

SEQ ID NO: 2119690 - RNA, 19 nt, Homo sapiens
  misc_RNA (1)...(19): siRNA sense strand
ggaagaauauucacaucaa

SEQ ID NO: 2119691 - RNA, 19 nt, Homo sapiens
  misc_RNA (1)...(19): siRNA sense strand
uaacaggacuuacugagaa

SEQ ID NO: 2119692 - RNA, 19 nt, Homo sapiens
  misc_RNA (1)...(19): siRNA sense strand
gaucuggaaucuacuguuu

SEQ ID NO: 2119693 - RNA, 19 nt, Homo sapiens
  misc_RNA (1)...(19): siRNA sense strand
gaaaucagcuucaaaauac

SEQ ID NO: 2119694 - RNA, 19 nt, Homo sapiens
  misc_RNA (1)...(19): siRNA sense strand
ggaaaucauucaagagcaa

SEQ ID NO: 2119695 - RNA, 19 nt, Homo sapiens
  misc_RNA (1)...(19): siRNA sense strand
guaguggugucacaucuaa

SEQ ID NO: 2119696 - RNA, 19 nt, Homo sapiens
  misc_RNA (1)...(19): siRNA sense strand
gggcucagcuauuaguaaa

SEQ ID NO: 2119697 - RNA, 19 nt, Homo sapiens
  misc_RNA (1)...(19): siRNA sense strand
agucaaagauuuacagaga

SEQ ID NO: 2119698 - RNA, 19 nt, Homo sapiens
  misc_RNA (1)...(19): siRNA sense strand
cagagaagacuaaaugaaa

SEQ ID NO: 2119699 - RNA, 19 nt, Homo sapiens
  misc_RNA (1)...(19): siRNA sense strand
gaaauaacaggacuuacug

SEQ ID NO: 2119700 - RNA, 19 nt, Homo sapiens
  misc_RNA (1)...(19): siRNA sense strand
gggaggauauuuccaguag

SEQ ID NO: 2119701 - RNA, 19 nt, Homo sapiens
  misc_RNA (1)...(19): siRNA sense strand
ggcagucagucauugauuu

SEQ ID NO: 2119702 - RNA, 19 nt, Homo sapiens
  misc_RNA (1)...(19): siRNA sense strand
cacaucaagucaaagauuu

SEQ ID NO: 2119703 - RNA, 19 nt, Homo sapiens
  misc_RNA (1)...(19): siRNA sense strand
ccaauaguauccagaguca

SEQ ID NO: 2119704 - RNA, 19 nt, Homo sapiens
  misc_RNA (1)...(19): siRNA sense strand
uaagagaauuagacacaga

SEQ ID NO: 2119705 - RNA, 19 nt, Homo sapiens
  misc_RNA (1)...(19): siRNA sense strand
gaagaauauucacaucaag

SEQ ID NO: 2119706 - RNA, 19 nt, Homo sapiens
  misc_RNA (1)...(19): siRNA sense strand
ggaacuugauucuccuaga

SEQ ID NO: 2119707 - RNA, 19 nt, Homo sapiens
  misc_RNA (1)...(19): siRNA sense strand
gaggauauuuccaguagag

SEQ ID NO: 2119708 - RNA, 19 nt, Homo sapiens
  misc_RNA (1)...(19): siRNA sense strand
uaauggagguucuucaagu

SEQ ID NO: 2119709 - RNA, 19 nt, Homo sapiens
  misc_RNA (1)...(19): siRNA sense strand
gcucgaagccaagccaaua

SEQ ID NO: 2119710 - RNA, 19 nt, Homo sapiens
  misc_RNA (1)...(19): siRNA sense strand
aagaggacaugcugaaaga

SEQ ID NO: 2119711 - RNA, 19 nt, Homo sapiens
  misc_RNA (1)...(19): siRNA sense strand
uugaagcacugaaaucuga

SEQ ID NO: 2119712 - RNA, 19 nt, Homo sapiens
  misc_RNA (1)...(19): siRNA sense strand
uuacagagaagacuaaaug

SEQ ID NO: 2119713 - RNA, 19 nt, Homo sapiens
  misc_RNA (1)...(19): siRNA sense strand
uaagugaacaugaaguuga

SEQ ID NO: 2119714 - RNA, 19 nt, Homo sapiens
  misc_RNA (1)...(19): siRNA sense strand
gaauuagacacagagauuu

SEQ ID NO: 2119715 - RNA, 19 nt, Homo sapiens
  misc_RNA (1)...(19): siRNA sense strand
gaagcugccaaaugccuua

SEQ ID NO: 2119716 - RNA, 19 nt, Homo sapiens
  misc_RNA (1)...(19): siRNA sense strand
cagcuacguucugaauuaa

SEQ ID NO: 2119717 - RNA, 19 nt, Homo sapiens
  misc_RNA (1)...(19): siRNA sense strand
ggauugagcaguuaauaag

SEQ ID NO: 2119718 - RNA, 19 nt, Homo sapiens
  misc_RNA (1)...(19): siRNA sense strand
ccaaaaggauguaugaaga

SEQ ID NO: 2119719 - RNA, 19 nt, Homo sapiens
  misc_RNA (1)...(19): siRNA sense strand
aaacaaaacuucaggagau

SEQ ID NO: 2119720 - RNA, 19 nt, Homo sapiens
  misc_RNA (1)...(19): siRNA sense strand
agaauuagacacagagauu

SEQ ID NO: 2119721 - RNA, 19 nt, Homo sapiens
  misc_RNA (1)...(19): siRNA sense strand
gaagccaagccaauaguau

SEQ ID NO: 2119722 - RNA, 19 nt, Homo sapiens
  misc_RNA (1)...(19): siRNA sense strand
aagauaggauugagcaguu

SEQ ID NO: 2119723 - RNA, 19 nt, Homo sapiens
  misc_RNA (1)...(19): siRNA sense strand
ucaaagauuuacagagaag

SEQ ID NO: 2119724 - RNA, 19 nt, Homo sapiens
  misc_RNA (1)...(19): siRNA sense strand
gcucagcgaucuggaaucu

SEQ ID NO: 2119725 - RNA, 19 nt, Homo sapiens
  misc_RNA (1)...(19): siRNA sense strand
gcuugggaaucaaauaaug

SEQ ID NO: 2119726 - RNA, 19 nt, Homo sapiens
  misc_RNA (1)...(19): siRNA sense strand
caagaaauccggucaaucc

SEQ ID NO: 2119727 - RNA, 19 nt, Homo sapiens
  misc_RNA (1)...(19): siRNA sense strand
ucacaucaagucaaagauu

SEQ ID NO: 2119728 - RNA, 19 nt, Homo sapiens
  misc_RNA (1)...(19): siRNA sense strand
gagcaagcaagaaaccaaa

SEQ ID NO: 2119729 - RNA, 19 nt, Homo sapiens
  misc_RNA (1)...(19): siRNA sense strand
ugaauugcaugagaaacaa

SEQ ID NO: 2119730 - RNA, 19 nt, Homo sapiens
  misc_RNA (1)...(19): siRNA sense strand
caacaacaccaagauagga

SEQ ID NO: 2119731 - RNA, 19 nt, Homo sapiens
  misc_RNA (1)...(19): siRNA sense strand
gagaugcuauggcugacau

SEQ ID NO: 2119732 - RNA, 19 nt, Homo sapiens
  misc_RNA (1)...(19): siRNA sense strand
agagaagacuaaaugaaag

SEQ ID NO: 2119733 - RNA, 19 nt, Homo sapiens
  misc_RNA (1)...(19): siRNA sense strand
gggaaucaaauaaugaaga

SEQ ID NO: 2119734 - RNA, 19 nt, Homo sapiens
  misc_RNA (1)...(19): siRNA sense strand
guugaaauaacaggacuua

SEQ ID NO: 2119735 - RNA, 19 nt, Homo sapiens
  misc_RNA (1)...(19): siRNA sense strand
gggagugcuucaagaaauc

SEQ ID NO: 2119736 - RNA, 19 nt, Homo sapiens
  misc_RNA (1)...(19): siRNA sense strand
gcagucagucauugauuug

SEQ ID NO: 2119737 - RNA, 19 nt, Homo sapiens
  misc_RNA (1)...(19): siRNA sense strand
agacagcaacacacagaua

SEQ ID NO: 2119738 - RNA, 19 nt, Homo sapiens
  misc_RNA (1)...(19): siRNA sense strand
ucagcgaucuggaaucuac

SEQ ID NO: 2119739 - RNA, 19 nt, Homo sapiens
  misc_RNA (1)...(19): siRNA sense strand
ggacuuacugagaaagcua

SEQ ID NO: 2119740 - RNA, 19 nt, Homo sapiens
  misc_RNA (1)...(19): siRNA sense strand
aauccuaguugacuuugaa

SEQ ID NO: 2119741 - RNA, 19 nt, Homo sapiens
  misc_RNA (1)...(19): siRNA sense strand
gucaaagauuuacagagaa

SEQ ID NO: 2119742 - RNA, 19 nt, Homo sapiens
  misc_RNA (1)...(19): siRNA sense strand
aauaguauccagagucaaa

SEQ ID NO: 2119743 - RNA, 19 nt, Homo sapiens
  misc_RNA (1)...(19): siRNA sense strand
gagggagugcuucaagaaa

SEQ ID NO: 2119744 - RNA, 19 nt, Homo sapiens
  misc_RNA (1)...(19): siRNA sense strand
agauaggauugagcaguua

SEQ ID NO: 2119745 - RNA, 19 nt, Homo sapiens
  misc_RNA (1)...(19): siRNA sense strand
ggaggauauuuccaguaga

SEQ ID NO: 2119746 - RNA, 19 nt, Homo sapiens
  misc_RNA (1)...(19): siRNA sense strand
ugaauuaagggaagccaaa

SEQ ID NO: 2119747 - RNA, 19 nt, Homo sapiens
  misc_RNA (1)...(19): siRNA sense strand
ugaaauaacaggacuuacu

SEQ ID NO: 2119748 - RNA, 19 nt, Homo sapiens
  misc_RNA (1)...(19): siRNA sense strand
gcacugaaaucugaaucac

SEQ ID NO: 2119749 - RNA, 19 nt, Homo sapiens
  misc_RNA (1)...(19): siRNA sense strand
caacuugaagcacugaaau

SEQ ID NO: 2119750 - RNA, 19 nt, Homo sapiens
  misc_RNA (1)...(19): siRNA sense strand
gauuuacagagaagacuaa

SEQ ID NO: 2119751 - RNA, 19 nt, Homo sapiens
  misc_RNA (1)...(19): siRNA sense strand
gauaggauugagcaguuaa

SEQ ID NO: 2119752 - RNA, 19 nt, Homo sapiens
  misc_RNA (1)...(19): siRNA sense strand
gaacuugaagcugccaaau

SEQ ID NO: 2119753 - RNA, 19 nt, Homo sapiens
  misc_RNA (1)...(19): siRNA sense strand
aauggagguucuucaaguu

SEQ ID NO: 2119754 - RNA, 19 nt, Homo sapiens
  misc_RNA (1)...(19): siRNA sense strand
gaacuacuucugcaacaac

SEQ ID NO: 2119755 - RNA, 19 nt, Homo sapiens
  misc_RNA (1)...(19): siRNA sense strand
aaagacagcaacacacaga

SEQ ID NO: 2119756 - RNA, 19 nt, Homo sapiens
  misc_RNA (1)...(19): siRNA sense strand
uuaaagaggacaugcugaa

SEQ ID NO: 2119757 - RNA, 19 nt, Homo sapiens
  misc_RNA (1)...(19): siRNA sense strand
gaauauucacaucaaguca

SEQ ID NO: 2119758 - RNA, 19 nt, Homo sapiens
  misc_RNA (1)...(19): siRNA sense strand
gcaagaaaccaaaacucua

SEQ ID NO: 2119759 - RNA, 19 nt, Homo sapiens
  misc_RNA (1)...(19): siRNA sense strand
cgaagccaagccaauagua

SEQ ID NO: 2119760 - RNA, 19 nt, Homo sapiens
  misc_RNA (1)...(19): siRNA sense strand
uaaagaggacaugcugaaa

SEQ ID NO: 2119761 - RNA, 19 nt, Homo sapiens
  misc_RNA (1)...(19): siRNA sense strand
ugaaagacagcaacacaca

SEQ ID NO: 2119762 - RNA, 19 nt, Homo sapiens
  misc_RNA (1)...(19): siRNA sense strand
gcuacguucugaauuaagg

SEQ ID NO: 2119763 - RNA, 19 nt, Homo sapiens
  misc_RNA (1)...(19): siRNA sense strand
caacaccaagauaggauug

SEQ ID NO: 2119764 - RNA, 19 nt, Homo sapiens
  misc_RNA (1)...(19): siRNA sense strand
gcaacaacaccaagauagg

SEQ ID NO: 2119765 - RNA, 19 nt, Homo sapiens
  misc_RNA (1)...(19): siRNA sense strand
cccuaaauaugaaguggaa

SEQ ID NO: 2119766 - RNA, 19 nt, Homo sapiens
  misc_RNA (1)...(19): siRNA sense strand
acagagaagacuaaaugaa

SEQ ID NO: 2119767 - RNA, 19 nt, Homo sapiens
  misc_RNA (1)...(19): siRNA sense strand
aagugaacaugaaguugaa

SEQ ID NO: 2119768 - RNA, 19 nt, Homo sapiens
  misc_RNA (1)...(19): siRNA sense strand
uagacacagagauuucuua

SEQ ID NO: 2119769 - RNA, 19 nt, Homo sapiens
  misc_RNA (1)...(19): siRNA sense strand
acacacagauagagcaacu

SEQ ID NO: 2119770 - RNA, 19 nt, Homo sapiens
  misc_RNA (1)...(19): siRNA sense strand
caucccaucuccuggaaag

SEQ ID NO: 2119771 - RNA, 19 nt, Homo sapiens
  misc_RNA (1)...(19): siRNA sense strand
gaggacaugcugaaagaca

SEQ ID NO: 2119772 - RNA, 19 nt, Homo sapiens
  misc_RNA (1)...(19): siRNA sense strand
aagcuugggaaucaaauaa

SEQ ID NO: 2119773 - RNA, 19 nt, Homo sapiens
  misc_RNA (1)...(19): siRNA sense strand
gaagacuaaaugaaagcaa

SEQ ID NO: 2119774 - RNA, 19 nt, Homo sapiens
  misc_RNA (1)...(19): siRNA sense strand
agggagugcuucaagaaau

SEQ ID NO: 2119775 - RNA, 19 nt, Homo sapiens
  misc_RNA (1)...(19): siRNA sense strand
agauagagcaacuacgaaa

SEQ ID NO: 2119776 - RNA, 19 nt, Homo sapiens
  misc_RNA (1)...(19): siRNA sense strand
acagauagagcaacuacga

SEQ ID NO: 2119777 - RNA, 19 nt, Homo sapiens
  misc_RNA (1)...(19): siRNA sense strand
caacacacagauagagcaa

SEQ ID NO: 2119778 - RNA, 19 nt, Homo sapiens
  misc_RNA (1)...(19): siRNA sense strand
gucauugauuugcaaacaa

SEQ ID NO: 2119779 - RNA, 19 nt, Homo sapiens
  misc_RNA (1)...(19): siRNA sense strand
gaauugcaugagaaacaaa

SEQ ID NO: 2119780 - RNA, 19 nt, Homo sapiens
  misc_RNA (1)...(19): siRNA sense strand
agaaauccggucaauccua

SEQ ID NO: 2119781 - RNA, 19 nt, Homo sapiens
  misc_RNA (1)...(19): siRNA sense strand
ugagggagugcuucaagaa

SEQ ID NO: 2119782 - RNA, 19 nt, Homo sapiens
  misc_RNA (1)...(19): siRNA sense strand
gacagcaacacacagauag

SEQ ID NO: 2119783 - RNA, 19 nt, Homo sapiens
  misc_RNA (1)...(19): siRNA sense strand
gcugccaaaugccuuaaag

SEQ ID NO: 2119784 - RNA, 19 nt, Homo sapiens
  misc_RNA (1)...(19): siRNA sense strand
cuaguugacuuugaagaag

SEQ ID NO: 2119785 - RNA, 19 nt, Homo sapiens
  misc_RNA (1)...(19): siRNA sense strand
gaaaccaaaacucuaugua

SEQ ID NO: 2119786 - RNA, 19 nt, Homo sapiens
  misc_RNA (1)...(19): siRNA sense strand
ccuaguugacuuugaagaa

SEQ ID NO: 2119787 - RNA, 19 nt, Homo sapiens
  misc_RNA (1)...(19): siRNA sense strand
aaggauguaugaagacaag

SEQ ID NO: 2119788 - RNA, 19 nt, Homo sapiens
  misc_RNA (1)...(19): siRNA sense strand
ccaaaacucuauguauaug

SEQ ID NO: 2119789 - RNA, 19 nt, Homo sapiens
  misc_RNA (1)...(19): siRNA sense strand
caagaaaccaaaacucuau

SEQ ID NO: 2119790 - RNA, 19 nt, Homo sapiens
  misc_RNA (1)...(19): siRNA sense strand
gcaagcaacucuaccuuua

SEQ ID NO: 2119791 - RNA, 19 nt, Homo sapiens
  misc_RNA (1)...(19): siRNA sense strand
ggaagaaauugucaacaua

SEQ ID NO: 2119792 - RNA, 19 nt, Homo sapiens
  misc_RNA (1)...(19): siRNA sense strand
gaaguuauccucucaaauu

SEQ ID NO: 2119793 - RNA, 19 nt, Homo sapiens
  misc_RNA (1)...(19): siRNA sense strand
cgaaagcccuguaauugua

SEQ ID NO: 2119794 - RNA, 19 nt, Homo sapiens
  misc_RNA (1)...(19): siRNA sense strand
gaagucaacugauuaauac

SEQ ID NO: 2119795 - RNA, 19 nt, Homo sapiens
  misc_RNA (1)...(19): siRNA sense strand
gaacagggaauguggguua

SEQ ID NO: 2119796 - RNA, 19 nt, Homo sapiens
  misc_RNA (1)...(19): siRNA sense strand
gcaaauguauuggcuguaa

SEQ ID NO: 2119797 - RNA, 19 nt, Homo sapiens
  misc_RNA (1)...(19): siRNA sense strand
ggaagucaacugauuaaua

SEQ ID NO: 2119798 - RNA, 19 nt, Homo sapiens
  misc_RNA (1)...(19): siRNA sense strand
gaagcaaguuucauuaugu

SEQ ID NO: 2119799 - RNA, 19 nt, Homo sapiens
  misc_RNA (1)...(19): siRNA sense strand
ggaagacauugaugcauuu

SEQ ID NO: 2119800 - RNA, 19 nt, Homo sapiens
  misc_RNA (1)...(19): siRNA sense strand
caauccaacuucacaaaua

SEQ ID NO: 2119801 - RNA, 19 nt, Homo sapiens
  misc_RNA (1)...(19): siRNA sense strand
ggacacugguauaacuuua

SEQ ID NO: 2119802 - RNA, 19 nt, Homo sapiens
  misc_RNA (1)...(19): siRNA sense strand
gucaggagaugcuaaguua

SEQ ID NO: 2119803 - RNA, 19 nt, Homo sapiens
  misc_RNA (1)...(19): siRNA sense strand
caacacagacaccaaauaa

SEQ ID NO: 2119804 - RNA, 19 nt, Homo sapiens
  misc_RNA (1)...(19): siRNA sense strand
ggaagcaaguuucauuaug

SEQ ID NO: 2119805 - RNA, 19 nt, Homo sapiens
  misc_RNA (1)...(19): siRNA sense strand
agacagaacuggaagaaau

SEQ ID NO: 2119806 - RNA, 19 nt, Homo sapiens
  misc_RNA (1)...(19): siRNA sense strand
gaagaaagcccggaaagga

SEQ ID NO: 2119807 - RNA, 19 nt, Homo sapiens
  misc_RNA (1)...(19): siRNA sense strand
gcagugaauaccacaauua

SEQ ID NO: 2119808 - RNA, 19 nt, Homo sapiens
  misc_RNA (1)...(19): siRNA sense strand
gaaauuguauugugauugc

SEQ ID NO: 2119809 - RNA, 19 nt, Homo sapiens
  misc_RNA (1)...(19): siRNA sense strand
gaaauaauggacacuggua

SEQ ID NO: 2119810 - RNA, 19 nt, Homo sapiens
  misc_RNA (1)...(19): siRNA sense strand
gaaaggagggagaaucuga

SEQ ID NO: 2119811 - RNA, 19 nt, Homo sapiens
  misc_RNA (1)...(19): siRNA sense strand
uguauuggcuguaagaauu

SEQ ID NO: 2119812 - RNA, 19 nt, Homo sapiens
  misc_RNA (1)...(19): siRNA sense strand
caaagccagugguuguuaa

SEQ ID NO: 2119813 - RNA, 19 nt, Homo sapiens
  misc_RNA (1)...(19): siRNA sense strand
ggaugauacuugaggaauu

SEQ ID NO: 2119814 - RNA, 19 nt, Homo sapiens
  misc_RNA (1)...(19): siRNA sense strand
gugaauaccacaauuacua

SEQ ID NO: 2119815 - RNA, 19 nt, Homo sapiens
  misc_RNA (1)...(19): siRNA sense strand
uaacuuuaguggaugauga

SEQ ID NO: 2119816 - RNA, 19 nt, Homo sapiens
  misc_RNA (1)...(19): siRNA sense strand
caacugcaauuguacuaau

SEQ ID NO: 2119817 - RNA, 19 nt, Homo sapiens
  misc_RNA (1)...(19): siRNA sense strand
gcaaagccagugguuguua

SEQ ID NO: 2119818 - RNA, 19 nt, Homo sapiens
  misc_RNA (1)...(19): siRNA sense strand
ucacgaagcugaucuuugc

SEQ ID NO: 2119819 - RNA, 19 nt, Homo sapiens
  misc_RNA (1)...(19): siRNA sense strand
caaaggguguaauugcaaa

SEQ ID NO: 2119820 - RNA, 19 nt, Homo sapiens
  misc_RNA (1)...(19): siRNA sense strand
uaaccacacuaaccaaguu

SEQ ID NO: 2119821 - RNA, 19 nt, Homo sapiens
  misc_RNA (1)...(19): siRNA sense strand
gaugauacuugaggaauuc

SEQ ID NO: 2119822 - RNA, 19 nt, Homo sapiens
  misc_RNA (1)...(19): siRNA sense strand
uaaaguaguuaccauugga

SEQ ID NO: 2119823 - RNA, 19 nt, Homo sapiens
  misc_RNA (1)...(19): siRNA sense strand
uaaccaaguugcagugaau

SEQ ID NO: 2119824 - RNA, 19 nt, Homo sapiens
  misc_RNA (1)...(19): siRNA sense strand
caucacaguuuaagacaau

SEQ ID NO: 2119825 - RNA, 19 nt, Homo sapiens
  misc_RNA (1)...(19): siRNA sense strand
caaauaaggcagugaaauc

SEQ ID NO: 2119826 - RNA, 19 nt, Homo sapiens
  misc_RNA (1)...(19): siRNA sense strand
caucaaagaccauaacaau

SEQ ID NO: 2119827 - RNA, 19 nt, Homo sapiens
  misc_RNA (1)...(19): siRNA sense strand
gcagcaaauuaaaguaguu

SEQ ID NO: 2119828 - RNA, 19 nt, Homo sapiens
  misc_RNA (1)...(19): siRNA sense strand
caguacagauugcuaagaa

SEQ ID NO: 2119829 - RNA, 19 nt, Homo sapiens
  misc_RNA (1)...(19): siRNA sense strand
cauuauguccgacuuguua

SEQ ID NO: 2119830 - RNA, 19 nt, Homo sapiens
  misc_RNA (1)...(19): siRNA sense strand
ggugaaaccugucauuggu

SEQ ID NO: 2119831 - RNA, 19 nt, Homo sapiens
  misc_RNA (1)...(19): siRNA sense strand
aaacuacugugaaugcuau

SEQ ID NO: 2119832 - RNA, 19 nt, Homo sapiens
  misc_RNA (1)...(19): siRNA sense strand
caaucacaguguacaguaa

SEQ ID NO: 2119833 - RNA, 19 nt, Homo sapiens
  misc_RNA (1)...(19): siRNA sense strand
cagaagccuuuaagccuaa

SEQ ID NO: 2119834 - RNA, 19 nt, Homo sapiens
  misc_RNA (1)...(19): siRNA sense strand
ccaggaagucaacugauua

SEQ ID NO: 2119835 - RNA, 19 nt, Homo sapiens
  misc_RNA (1)...(19): siRNA sense strand
caacucagcccucuguguu

SEQ ID NO: 2119836 - RNA, 19 nt, Homo sapiens
  misc_RNA (1)...(19): siRNA sense strand
caucaacucugcaggaaag

SEQ ID NO: 2119837 - RNA, 19 nt, Homo sapiens
  misc_RNA (1)...(19): siRNA sense strand
cuacagcagucuucauaug

SEQ ID NO: 2119838 - RNA, 19 nt, Homo sapiens
  misc_RNA (1)...(19): siRNA sense strand
caaagaccauaacaauauc

SEQ ID NO: 2119839 - RNA, 19 nt, Homo sapiens
  misc_RNA (1)...(19): siRNA sense strand
ugaaagugguguuauugga

SEQ ID NO: 2119840 - RNA, 19 nt, Homo sapiens
  misc_RNA (1)...(19): siRNA sense strand
aaauagccaucucaccuuu

SEQ ID NO: 2119841 - RNA, 19 nt, Homo sapiens
  misc_RNA (1)...(19): siRNA sense strand
ggaugucaguuccaauugu

SEQ ID NO: 2119842 - RNA, 19 nt, Homo sapiens
  misc_RNA (1)...(19): siRNA sense strand
ggaauucggacgauguuug

SEQ ID NO: 2119843 - RNA, 19 nt, Homo sapiens
  misc_RNA (1)...(19): siRNA sense strand
caacaccagcuuuaaauag

SEQ ID NO: 2119844 - RNA, 19 nt, Homo sapiens
  misc_RNA (1)...(19): siRNA sense strand
acagcagucuucauaugua

SEQ ID NO: 2119845 - RNA, 19 nt, Homo sapiens
  misc_RNA (1)...(19): siRNA sense strand
guuacagacccaacaguua

SEQ ID NO: 2119846 - RNA, 19 nt, Homo sapiens
  misc_RNA (1)...(19): siRNA sense strand
gaauucggacgauguuuga

SEQ ID NO: 2119847 - RNA, 19 nt, Homo sapiens
  misc_RNA (1)...(19): siRNA sense strand
gcugaagccacauguaauu

SEQ ID NO: 2119848 - RNA, 19 nt, Homo sapiens
  misc_RNA (1)...(19): siRNA sense strand
acaacaauuuggaacauga

SEQ ID NO: 2119849 - RNA, 19 nt, Homo sapiens
  misc_RNA (1)...(19): siRNA sense strand
uuacagacccaacaguuaa

SEQ ID NO: 2119850 - RNA, 19 nt, Homo sapiens
  misc_RNA (1)...(19): siRNA sense strand
gaaauccagaagccuuuaa

SEQ ID NO: 2119851 - RNA, 19 nt, Homo sapiens
  misc_RNA (1)...(19): siRNA sense strand
guuauccucucaaauuuca

SEQ ID NO: 2119852 - RNA, 19 nt, Homo sapiens
  misc_RNA (1)...(19): siRNA sense strand
uauugaggcuguuauuguu

SEQ ID NO: 2119853 - RNA, 19 nt, Homo sapiens
  misc_RNA (1)...(19): siRNA sense strand
aggaagacauugaugcauu

SEQ ID NO: 2119854 - RNA, 19 nt, Homo sapiens
  misc_RNA (1)...(19): siRNA sense strand
gaaaggaaaggagggagaa

SEQ ID NO: 2119855 - RNA, 19 nt, Homo sapiens
  misc_RNA (1)...(19): siRNA sense strand
ccacaccacugccacagau

SEQ ID NO: 2119856 - RNA, 19 nt, Homo sapiens
  misc_RNA (1)...(19): siRNA sense strand
uaaaccagauggacagaag

SEQ ID NO: 2119857 - RNA, 19 nt, Homo sapiens
  misc_RNA (1)...(19): siRNA sense strand
guauaacuuuaguggauga

SEQ ID NO: 2119858 - RNA, 19 nt, Homo sapiens
  misc_RNA (1)...(19): siRNA sense strand
ccaacaccagcuuuaaaua

SEQ ID NO: 2119859 - RNA, 19 nt, Homo sapiens
  misc_RNA (1)...(19): siRNA sense strand
gcacaucacaguuuaagac

SEQ ID NO: 2119860 - RNA, 19 nt, Homo sapiens
  misc_RNA (1)...(19): siRNA sense strand
gaaagugguguuauuggau

SEQ ID NO: 2119861 - RNA, 19 nt, Homo sapiens
  misc_RNA (1)...(19): siRNA sense strand
uggaagaaauugucaacau

SEQ ID NO: 2119862 - RNA, 19 nt, Homo sapiens
  misc_RNA (1)...(19): siRNA sense strand
gaacuggaagaaauuguca

SEQ ID NO: 2119863 - RNA, 19 nt, Homo sapiens
  misc_RNA (1)...(19): siRNA sense strand
uagcugaagccacauguaa

SEQ ID NO: 2119864 - RNA, 19 nt, Homo sapiens
  misc_RNA (1)...(19): siRNA sense strand
ccacagcaacggcuuauca

SEQ ID NO: 2119865 - RNA, 19 nt, Homo sapiens
  misc_RNA (1)...(19): siRNA sense strand
gugcagaccaucacuguug

SEQ ID NO: 2119866 - RNA, 19 nt, Homo sapiens
  misc_RNA (1)...(19): siRNA sense strand
cgaagcugaucuuugcaaa

SEQ ID NO: 2119867 - RNA, 19 nt, Homo sapiens
  misc_RNA (1)...(19): siRNA sense strand
aaacaguacagauugcuaa

SEQ ID NO: 2119868 - RNA, 19 nt, Homo sapiens
  misc_RNA (1)...(19): siRNA sense strand
gacaucugaucuuaaacuu

SEQ ID NO: 2119869 - RNA, 19 nt, Homo sapiens
  misc_RNA (1)...(19): siRNA sense strand
cggaacggaugauacuuga

SEQ ID NO: 2119870 - RNA, 19 nt, Homo sapiens
  misc_RNA (1)...(19): siRNA sense strand
ccagauggacagaaguuaa

SEQ ID NO: 2119871 - RNA, 19 nt, Homo sapiens
  misc_RNA (1)...(19): siRNA sense strand
ggagacagaacuggaagaa

SEQ ID NO: 2119872 - RNA, 19 nt, Homo sapiens
  misc_RNA (1)...(19): siRNA sense strand
agacgaaguuauccucuca

SEQ ID NO: 2119873 - RNA, 19 nt, Homo sapiens
  misc_RNA (1)...(19): siRNA sense strand
ggaaaggaagacauugaug

SEQ ID NO: 2119874 - RNA, 19 nt, Homo sapiens
  misc_RNA (1)...(19): siRNA sense strand
gaccauaacaauaucugaa

SEQ ID NO: 2119875 - RNA, 19 nt, Homo sapiens
  misc_RNA (1)...(19): siRNA sense strand
guauugaggcuguuauugu

SEQ ID NO: 2119876 - RNA, 19 nt, Homo sapiens
  misc_RNA (1)...(19): siRNA sense strand
gcagaugcagcugaaguaa

SEQ ID NO: 2119877 - RNA, 19 nt, Homo sapiens
  misc_RNA (1)...(19): siRNA sense strand
cccaggaagucaacugauu

SEQ ID NO: 2119878 - RNA, 19 nt, Homo sapiens
  misc_RNA (1)...(19): siRNA sense strand
ccaaucacaguguacagua

SEQ ID NO: 2119879 - RNA, 19 nt, Homo sapiens
  misc_RNA (1)...(19): siRNA sense strand
gacagaacuggaagaaauu

SEQ ID NO: 2119880 - RNA, 19 nt, Homo sapiens
  misc_RNA (1)...(19): siRNA sense strand
gaaucugaucgacgucaua

SEQ ID NO: 2119881 - RNA, 19 nt, Homo sapiens
  misc_RNA (1)...(19): siRNA sense strand
gauggacagaaguuaauuu

SEQ ID NO: 2119882 - RNA, 19 nt, Homo sapiens
  misc_RNA (1)...(19): siRNA sense strand
gcggaugucaguuccaauu

SEQ ID NO: 2119883 - RNA, 19 nt, Homo sapiens
  misc_RNA (1)...(19): siRNA sense strand
gacgauguuugaugagugu

SEQ ID NO: 2119884 - RNA, 19 nt, Homo sapiens
  misc_RNA (1)...(19): siRNA sense strand
caaauuucagacuugcuua

SEQ ID NO: 2119885 - RNA, 19 nt, Homo sapiens
  misc_RNA (1)...(19): siRNA sense strand
caacaaacagcagccaaga

SEQ ID NO: 2119886 - RNA, 19 nt, Homo sapiens
  misc_RNA (1)...(19): siRNA sense strand
aaacgaucaggaugucuua

SEQ ID NO: 2119887 - RNA, 19 nt, Homo sapiens
  misc_RNA (1)...(19): siRNA sense strand
ucacuguguuugaaauugu

SEQ ID NO: 2119888 - RNA, 19 nt, Homo sapiens
  misc_RNA (1)...(19): siRNA sense strand
cagcagucuucauauguau

SEQ ID NO: 2119889 - RNA, 19 nt, Homo sapiens
  misc_RNA (1)...(19): siRNA sense strand
gaugucaguuccaauuguc

SEQ ID NO: 2119890 - RNA, 19 nt, Homo sapiens
  misc_RNA (1)...(19): siRNA sense strand
gcaagcaacucuaccuuua

SEQ ID NO: 2119891 - RNA, 19 nt, Homo sapiens
  misc_RNA (1)...(19): siRNA sense strand
ggaagaaauugucaacaua

SEQ ID NO: 2119892 - RNA, 19 nt, Homo sapiens
  misc_RNA (1)...(19): siRNA sense strand
gaaguuauccucucaaauu

SEQ ID NO: 2119893 - RNA, 19 nt, Homo sapiens
  misc_RNA (1)...(19): siRNA sense strand
cgaaagcccuguaauugua

SEQ ID NO: 2119894 - RNA, 19 nt, Homo sapiens
  misc_RNA (1)...(19): siRNA sense strand
gaagucaacugauuaauac

SEQ ID NO: 2119895 - RNA, 19 nt, Homo sapiens
  misc_RNA (1)...(19): siRNA sense strand
gaacagggaauguggguua

SEQ ID NO: 2119896 - RNA, 19 nt, Homo sapiens
  misc_RNA (1)...(19): siRNA sense strand
gcaaauguauuggcuguaa

SEQ ID NO: 2119897 - RNA, 19 nt, Homo sapiens
  misc_RNA (1)...(19): siRNA sense strand
ggaagucaacugauuaaua

SEQ ID NO: 2119898 - RNA, 19 nt, Homo sapiens
  misc_RNA (1)...(19): siRNA sense strand
gaagcaaguuucauuaugu

SEQ ID NO: 2119899 - RNA, 19 nt, Homo sapiens
  misc_RNA (1)...(19): siRNA sense strand
ggaagacauugaugcauuu

SEQ ID NO: 2119900 - RNA, 19 nt, Homo sapiens
  misc_RNA (1)...(19): siRNA sense strand
caauccaacuucacaaaua

SEQ ID NO: 2119901 - RNA, 19 nt, Homo sapiens
  misc_RNA (1)...(19): siRNA sense strand
ggacacugguauaacuuua

SEQ ID NO: 2119902 - RNA, 19 nt, Homo sapiens
  misc_RNA (1)...(19): siRNA sense strand
gucaggagaugcuaaguua

SEQ ID NO: 2119903 - RNA, 19 nt, Homo sapiens
  misc_RNA (1)...(19): siRNA sense strand
caacacagacaccaaauaa

SEQ ID NO: 2119904 - RNA, 19 nt, Homo sapiens
  misc_RNA (1)...(19): siRNA sense strand
ggaagcaaguuucauuaug

SEQ ID NO: 2119905 - RNA, 19 nt, Homo sapiens
  misc_RNA (1)...(19): siRNA sense strand
agacagaacuggaagaaau

SEQ ID NO: 2119906 - RNA, 19 nt, Homo sapiens
  misc_RNA (1)...(19): siRNA sense strand
gaagaaagcccggaaagga

SEQ ID NO: 2119907 - RNA, 19 nt, Homo sapiens
  misc_RNA (1)...(19): siRNA sense strand
gcagugaauaccacaauua

SEQ ID NO: 2119908 - RNA, 19 nt, Homo sapiens
  misc_RNA (1)...(19): siRNA sense strand
gaaauuguauugugauugc

SEQ ID NO: 2119909 - RNA, 19 nt, Homo sapiens
  misc_RNA (1)...(19): siRNA sense strand
gaaauaauggacacuggua

SEQ ID NO: 2119910 - RNA, 19 nt, Homo sapiens
  misc_RNA (1)...(19): siRNA sense strand
gaaaggagggagaaucuga

SEQ ID NO: 2119911 - RNA, 19 nt, Homo sapiens
  misc_RNA (1)...(19): siRNA sense strand
uguauuggcuguaagaauu

SEQ ID NO: 2119912 - RNA, 19 nt, Homo sapiens
  misc_RNA (1)...(19): siRNA sense strand
caaagccagugguuguuaa

SEQ ID NO: 2119913 - RNA, 19 nt, Homo sapiens
  misc_RNA (1)...(19): siRNA sense strand
ggaugauacuugaggaauu

SEQ ID NO: 2119914 - RNA, 19 nt, Homo sapiens
  misc_RNA (1)...(19): siRNA sense strand
gugaauaccacaauuacua

SEQ ID NO: 2119915 - RNA, 19 nt, Homo sapiens
  misc_RNA (1)...(19): siRNA sense strand
uaacuuuaguggaugauga

SEQ ID NO: 2119916 - RNA, 19 nt, Homo sapiens
  misc_RNA (1)...(19): siRNA sense strand
caacugcaauuguacuaau

SEQ ID NO: 2119917 - RNA, 19 nt, Homo sapiens
  misc_RNA (1)...(19): siRNA sense strand
gcaaagccagugguuguua

SEQ ID NO: 2119918 - RNA, 19 nt, Homo sapiens
  misc_RNA (1)...(19): siRNA sense strand
ucacgaagcugaucuuugc

SEQ ID NO: 2119919 - RNA, 19 nt, Homo sapiens
  misc_RNA (1)...(19): siRNA sense strand
caaaggguguaauugcaaa

SEQ ID NO: 2119920 - RNA, 19 nt, Homo sapiens
  misc_RNA (1)...(19): siRNA sense strand
uaaccacacuaaccaaguu

SEQ ID NO: 2119921 - RNA, 19 nt, Homo sapiens
  misc_RNA (1)...(19): siRNA sense strand
gaugauacuugaggaauuc

SEQ ID NO: 2119922 - RNA, 19 nt, Homo sapiens
  misc_RNA (1)...(19): siRNA sense strand
uaaaguaguuaccauugga

SEQ ID NO: 2119923 - RNA, 19 nt, Homo sapiens
  misc_RNA (1)...(19): siRNA sense strand
uaaccaaguugcagugaau

SEQ ID NO: 2119924 - RNA, 19 nt, Homo sapiens
  misc_RNA (1)...(19): siRNA sense strand
caucacaguuuaagacaau

SEQ ID NO: 2119925 - RNA, 19 nt, Homo sapiens
  misc_RNA (1)...(19): siRNA sense strand
caaauaaggcagugaaauc

SEQ ID NO: 2119926 - RNA, 19 nt, Homo sapiens
  misc_RNA (1)...(19): siRNA sense strand
caucaaagaccauaacaau

SEQ ID NO: 2119927 - RNA, 19 nt, Homo sapiens
  misc_RNA (1)...(19): siRNA sense strand
gcagcaaauuaaaguaguu

SEQ ID NO: 2119928 - RNA, 19 nt, Homo sapiens
  misc_RNA (1)...(19): siRNA sense strand
caguacagauugcuaagaa

SEQ ID NO: 2119929 - RNA, 19 nt, Homo sapiens
  misc_RNA (1)...(19): siRNA sense strand
cauuauguccgacuuguua

SEQ ID NO: 2119930 - RNA, 19 nt, Homo sapiens
  misc_RNA (1)...(19): siRNA sense strand
ggugaaaccugucauuggu

SEQ ID NO: 2119931 - RNA, 19 nt, Homo sapiens
  misc_RNA (1)...(19): siRNA sense strand
aaacuacugugaaugcuau

SEQ ID NO: 2119932 - RNA, 19 nt, Homo sapiens
  misc_RNA (1)...(19): siRNA sense strand
caaucacaguguacaguaa

SEQ ID NO: 2119933 - RNA, 19 nt, Homo sapiens
  misc_RNA (1)...(19): siRNA sense strand
cagaagccuuuaagccuaa

SEQ ID NO: 2119934 - RNA, 19 nt, Homo sapiens
  misc_RNA (1)...(19): siRNA sense strand
ccaggaagucaacugauua

SEQ ID NO: 2119935 - RNA, 19 nt, Homo sapiens
  misc_RNA (1)...(19): siRNA sense strand
caacucagcccucuguguu

SEQ ID NO: 2119936 - RNA, 19 nt, Homo sapiens
  misc_RNA (1)...(19): siRNA sense strand
caucaacucugcaggaaag

SEQ ID NO: 2119937 - RNA, 19 nt, Homo sapiens
  misc_RNA (1)...(19): siRNA sense strand
cuacagcagucuucauaug

SEQ ID NO: 2119938 - RNA, 19 nt, Homo sapiens
  misc_RNA (1)...(19): siRNA sense strand
caaagaccauaacaauauc

SEQ ID NO: 2119939 - RNA, 19 nt, Homo sapiens
  misc_RNA (1)...(19): siRNA sense strand
ugaaagugguguuauugga

SEQ ID NO: 2119940 - RNA, 19 nt, Homo sapiens
  misc_RNA (1)...(19): siRNA sense strand
aaauagccaucucaccuuu

SEQ ID NO: 2119941 - RNA, 19 nt, Homo sapiens
  misc_RNA (1)...(19): siRNA sense strand
ggaugucaguuccaauugu

SEQ ID NO: 2119942 - RNA, 19 nt, Homo sapiens
  misc_RNA (1)...(19): siRNA sense strand
ggaauucggacgauguuug

SEQ ID NO: 2119943 - RNA, 19 nt, Homo sapiens
  misc_RNA (1)...(19): siRNA sense strand
caacaccagcuuuaaauag

SEQ ID NO: 2119944 - RNA, 19 nt, Homo sapiens
  misc_RNA (1)...(19): siRNA sense strand
acagcagucuucauaugua

SEQ ID NO: 2119945 - RNA, 19 nt, Homo sapiens
  misc_RNA (1)...(19): siRNA sense strand
guuacagacccaacaguua

SEQ ID NO: 2119946 - RNA, 19 nt, Homo sapiens
  misc_RNA (1)...(19): siRNA sense strand
gaauucggacgauguuuga

SEQ ID NO: 2119947 - RNA, 19 nt, Homo sapiens
  misc_RNA (1)...(19): siRNA sense strand
gcugaagccacauguaauu

SEQ ID NO: 2119948 - RNA, 19 nt, Homo sapiens
  misc_RNA (1)...(19): siRNA sense strand
acaacaauuuggaacauga

SEQ ID NO: 2119949 - RNA, 19 nt, Homo sapiens
  misc_RNA (1)...(19): siRNA sense strand
uuacagacccaacaguuaa

SEQ ID NO: 2119950 - RNA, 19 nt, Homo sapiens
  misc_RNA (1)...(19): siRNA sense strand
gaaauccagaagccuuuaa

SEQ ID NO: 2119951 - RNA, 19 nt, Homo sapiens
  misc_RNA (1)...(19): siRNA sense strand
guuauccucucaaauuuca

SEQ ID NO: 2119952 - RNA, 19 nt, Homo sapiens
  misc_RNA (1)...(19): siRNA sense strand
uauugaggcuguuauuguu

SEQ ID NO: 2119953 - RNA, 19 nt, Homo sapiens
  misc_RNA (1)...(19): siRNA sense strand
aggaagacauugaugcauu

SEQ ID NO: 2119954 - RNA, 19 nt, Homo sapiens
  misc_RNA (1)...(19): siRNA sense strand
gaaaggaaaggagggagaa

SEQ ID NO: 2119955 - RNA, 19 nt, Homo sapiens
  misc_RNA (1)...(19): siRNA sense strand
ccacaccacugccacagau

SEQ ID NO: 2119956 - RNA, 19 nt, Homo sapiens
  misc_RNA (1)...(19): siRNA sense strand
uaaaccagauggacagaag

SEQ ID NO: 2119957 - RNA, 19 nt, Homo sapiens
  misc_RNA (1)...(19): siRNA sense strand
guauaacuuuaguggauga

SEQ ID NO: 2119958 - RNA, 19 nt, Homo sapiens
  misc_RNA (1)...(19): siRNA sense strand
ccaacaccagcuuuaaaua

SEQ ID NO: 2119959 - RNA, 19 nt, Homo sapiens
  misc_RNA (1)...(19): siRNA sense strand
gcacaucacaguuuaagac

SEQ ID NO: 2119960 - RNA, 19 nt, Homo sapiens
  misc_RNA (1)...(19): siRNA sense strand
gaaagugguguuauuggau

SEQ ID NO: 2119961 - RNA, 19 nt, Homo sapiens
  misc_RNA (1)...(19): siRNA sense strand
uggaagaaauugucaacau

SEQ ID NO: 2119962 - RNA, 19 nt, Homo sapiens
  misc_RNA (1)...(19): siRNA sense strand
gaacuggaagaaauuguca

SEQ ID NO: 2119963 - RNA, 19 nt, Homo sapiens
  misc_RNA (1)...(19): siRNA sense strand
uagcugaagccacauguaa

SEQ ID NO: 2119964 - RNA, 19 nt, Homo sapiens
  misc_RNA (1)...(19): siRNA sense strand
ccacagcaacggcuuauca

SEQ ID NO: 2119965 - RNA, 19 nt, Homo sapiens
  misc_RNA (1)...(19): siRNA sense strand
gugcagaccaucacuguug

SEQ ID NO: 2119966 - RNA, 19 nt, Homo sapiens
  misc_RNA (1)...(19): siRNA sense strand
cgaagcugaucuuugcaaa

SEQ ID NO: 2119967 - RNA, 19 nt, Homo sapiens
  misc_RNA (1)...(19): siRNA sense strand
aaacaguacagauugcuaa

SEQ ID NO: 2119968 - RNA, 19 nt, Homo sapiens
  misc_RNA (1)...(19): siRNA sense strand
gacaucugaucuuaaacuu

SEQ ID NO: 2119969 - RNA, 19 nt, Homo sapiens
  misc_RNA (1)...(19): siRNA sense strand
cggaacggaugauacuuga

SEQ ID NO: 2119970 - RNA, 19 nt, Homo sapiens
  misc_RNA (1)...(19): siRNA sense strand
ccagauggacagaaguuaa

SEQ ID NO: 2119971 - RNA, 19 nt, Homo sapiens
  misc_RNA (1)...(19): siRNA sense strand
ggagacagaacuggaagaa

SEQ ID NO: 2119972 - RNA, 19 nt, Homo sapiens
  misc_RNA (1)...(19): siRNA sense strand
agacgaaguuauccucuca

SEQ ID NO: 2119973 - RNA, 19 nt, Homo sapiens
  misc_RNA (1)...(19): siRNA sense strand
ggaaaggaagacauugaug

SEQ ID NO: 2119974 - RNA, 19 nt, Homo sapiens
  misc_RNA (1)...(19): siRNA sense strand
gaccauaacaauaucugaa

SEQ ID NO: 2119975 - RNA, 19 nt, Homo sapiens
  misc_RNA (1)...(19): siRNA sense strand
guauugaggcuguuauugu

SEQ ID NO: 2119976 - RNA, 19 nt, Homo sapiens
  misc_RNA (1)...(19): siRNA sense strand
gcagaugcagcugaaguaa

SEQ ID NO: 2119977 - RNA, 19 nt, Homo sapiens
  misc_RNA (1)...(19): siRNA sense strand
cccaggaagucaacugauu

SEQ ID NO: 2119978 - RNA, 19 nt, Homo sapiens
  misc_RNA (1)...(19): siRNA sense strand
ccaaucacaguguacagua

SEQ ID NO: 2119979 - RNA, 19 nt, Homo sapiens
  misc_RNA (1)...(19): siRNA sense strand
gacagaacuggaagaaauu

SEQ ID NO: 2119980 - RNA, 19 nt, Homo sapiens
  misc_RNA (1)...(19): siRNA sense strand
gaaucugaucgacgucaua

SEQ ID NO: 2119981 - RNA, 19 nt, Homo sapiens
  misc_RNA (1)...(19): siRNA sense strand
gauggacagaaguuaauuu

SEQ ID NO: 2119982 - RNA, 19 nt, Homo sapiens
  misc_RNA (1)...(19): siRNA sense strand
gcggaugucaguuccaauu

SEQ ID NO: 2119983 - RNA, 19 nt, Homo sapiens
  misc_RNA (1)...(19): siRNA sense strand
gacgauguuugaugagugu

SEQ ID NO: 2119984 - RNA, 19 nt, Homo sapiens
  misc_RNA (1)...(19): siRNA sense strand
caaauuucagacuugcuua

SEQ ID NO: 2119985 - RNA, 19 nt, Homo sapiens
  misc_RNA (1)...(19): siRNA sense strand
caacaaacagcagccaaga

SEQ ID NO: 2119986 - RNA, 19 nt, Homo sapiens
  misc_RNA (1)...(19): siRNA sense strand
aaacgaucaggaugucuua

SEQ ID NO: 2119987 - RNA, 19 nt, Homo sapiens
  misc_RNA (1)...(19): siRNA sense strand
ucacuguguuugaaauugu

SEQ ID NO: 2119988 - RNA, 19 nt, Homo sapiens
  misc_RNA (1)...(19): siRNA sense strand
cagcagucuucauauguau

SEQ ID NO: 2119989 - RNA, 19 nt, Homo sapiens
  misc_RNA (1)...(19): siRNA sense strand
gaugucaguuccaauuguc

SEQ ID NO: 2119990 - RNA, 19 nt, Homo sapiens
  misc_RNA (1)...(19): siRNA sense strand
gagagaaccuguauuagua

SEQ ID NO: 2119991 - RNA, 19 nt, Homo sapiens
  misc_RNA (1)...(19): siRNA sense strand
gaaggaagauuuauagaga

SEQ ID NO: 2119992 - RNA, 19 nt, Homo sapiens
  misc_RNA (1)...(19): siRNA sense strand
gcaggaagcucuuuacaau

SEQ ID NO: 2119993 - RNA, 19 nt, Homo sapiens
  misc_RNA (1)...(19): siRNA sense strand
ucagacaccuucagaauuu

SEQ ID NO: 2119994 - RNA, 19 nt, Homo sapiens
  misc_RNA (1)...(19): siRNA sense strand
caaggaagcuacucccuaa

SEQ ID NO: 2119995 - RNA, 19 nt, Homo sapiens
  misc_RNA (1)...(19): siRNA sense strand
gaagaaguauuaacagaag

SEQ ID NO: 2119996 - RNA, 19 nt, Homo sapiens
  misc_RNA (1)...(19): siRNA sense strand
caaaggacguugaucaaga

SEQ ID NO: 2119997 - RNA, 19 nt, Homo sapiens
  misc_RNA (1)...(19): siRNA sense strand
gccaaaggauaaccaauuu

SEQ ID NO: 2119998 - RNA, 19 nt, Homo sapiens
  misc_RNA (1)...(19): siRNA sense strand
gcacucaacuaacaagaau

SEQ ID NO: 2119999 - RNA, 19 nt, Homo sapiens
  misc_RNA (1)...(19): siRNA sense strand
ggagugagccuaagcaaga

SEQ ID NO: 2120000 - RNA, 19 nt, Homo sapiens
  misc_RNA (1)...(19): siRNA sense strand
gggaguagcagaaugauuu

SEQ ID NO: 2120001 - RNA, 19 nt, Homo sapiens
  misc_RNA (1)...(19): siRNA sense strand
cuacagagccaauccauuu

SEQ ID NO: 2120002 - RNA, 19 nt, Homo sapiens
  misc_RNA (1)...(19): siRNA sense strand
agagagagaaccuguauua

SEQ ID NO: 2120003 - RNA, 19 nt, Homo sapiens
  misc_RNA (1)...(19): siRNA sense strand
ggaaaccucugcugcuaau

SEQ ID NO: 2120004 - RNA, 19 nt, Homo sapiens
  misc_RNA (1)...(19): siRNA sense strand
uagaagagccaaaggauaa

SEQ ID NO: 2120005 - RNA, 19 nt, Homo sapiens
  misc_RNA (1)...(19): siRNA sense strand
aaagagcacucaacuaaca

SEQ ID NO: 2120006 - RNA, 19 nt, Homo sapiens
  misc_RNA (1)...(19): siRNA sense strand
uccauuagcuuccaccaua

SEQ ID NO: 2120007 - RNA, 19 nt, Homo sapiens
  misc_RNA (1)...(19): siRNA sense strand
gcacggcagucaagacguu

SEQ ID NO: 2120008 - RNA, 19 nt, Homo sapiens
  misc_RNA (1)...(19): siRNA sense strand
cagaagaaguauuaacaga

SEQ ID NO: 2120009 - RNA, 19 nt, Homo sapiens
  misc_RNA (1)...(19): siRNA sense strand
gaagacauucuguugguuu

SEQ ID NO: 2120010 - RNA, 19 nt, Homo sapiens
  misc_RNA (1)...(19): siRNA sense strand
gaaggaaguguuauuacaa

SEQ ID NO: 2120011 - RNA, 19 nt, Homo sapiens
  misc_RNA (1)...(19): siRNA sense strand
uaucaacuguacacacaua

SEQ ID NO: 2120012 - RNA, 19 nt, Homo sapiens
  misc_RNA (1)...(19): siRNA sense strand
caaacucgucguucuguua

SEQ ID NO: 2120013 - RNA, 19 nt, Homo sapiens
  misc_RNA (1)...(19): siRNA sense strand
aaccagaaccuuaguauuu

SEQ ID NO: 2120014 - RNA, 19 nt, Homo sapiens
  misc_RNA (1)...(19): siRNA sense strand
uaacaaaggacguugauca

SEQ ID NO: 2120015 - RNA, 19 nt, Homo sapiens
  misc_RNA (1)...(19): siRNA sense strand
ccaaaguucuugccaguag

SEQ ID NO: 2120016 - RNA, 19 nt, Homo sapiens
  misc_RNA (1)...(19): siRNA sense strand
gaaccaaugauagaaauga

SEQ ID NO: 2120017 - RNA, 19 nt, Homo sapiens
  misc_RNA (1)...(19): siRNA sense strand
ggaagcuacucccuaaauc

SEQ ID NO: 2120018 - RNA, 19 nt, Homo sapiens
  misc_RNA (1)...(19): siRNA sense strand
ccagugccuuucaagaaua

SEQ ID NO: 2120019 - RNA, 19 nt, Homo sapiens
  misc_RNA (1)...(19): siRNA sense strand
accgaaagauggaaauaua

SEQ ID NO: 2120020 - RNA, 19 nt, Homo sapiens
  misc_RNA (1)...(19): siRNA sense strand
gaauucucauuggaaguua

SEQ ID NO: 2120021 - RNA, 19 nt, Homo sapiens
  misc_RNA (1)...(19): siRNA sense strand
ucucagaugucccucaauu

SEQ ID NO: 2120022 - RNA, 19 nt, Homo sapiens
  misc_RNA (1)...(19): siRNA sense strand
ugagcaacauaaagcaaua

SEQ ID NO: 2120023 - RNA, 19 nt, Homo sapiens
  misc_RNA (1)...(19): siRNA sense strand
gaaauuaacaaaggacguu

SEQ ID NO: 2120024 - RNA, 19 nt, Homo sapiens
  misc_RNA (1)...(19): siRNA sense strand
gcagggaguagcagaauga

SEQ ID NO: 2120025 - RNA, 19 nt, Homo sapiens
  misc_RNA (1)...(19): siRNA sense strand
aaaggacguugaucaagaa

SEQ ID NO: 2120026 - RNA, 19 nt, Homo sapiens
  misc_RNA (1)...(19): siRNA sense strand
cauuggaaguuacacagua

SEQ ID NO: 2120027 - RNA, 19 nt, Homo sapiens
  misc_RNA (1)...(19): siRNA sense strand
guacacacauauggucuga

SEQ ID NO: 2120028 - RNA, 19 nt, Homo sapiens
  misc_RNA (1)...(19): siRNA sense strand
gaaaagagaagaaccagaa

SEQ ID NO: 2120029 - RNA, 19 nt, Homo sapiens
  misc_RNA (1)...(19): siRNA sense strand
ucagaaggaaguguuauua

SEQ ID NO: 2120030 - RNA, 19 nt, Homo sapiens
  misc_RNA (1)...(19): siRNA sense strand
gggaagacauucuguuggu

SEQ ID NO: 2120031 - RNA, 19 nt, Homo sapiens
  misc_RNA (1)...(19): siRNA sense strand
ccacgucacuuccuguuag

SEQ ID NO: 2120032 - RNA, 19 nt, Homo sapiens
  misc_RNA (1)...(19): siRNA sense strand
gauucuaccucucagaugu

SEQ ID NO: 2120033 - RNA, 19 nt, Homo sapiens
  misc_RNA (1)...(19): siRNA sense strand
guuaagcagucaacaagga

SEQ ID NO: 2120034 - RNA, 19 nt, Homo sapiens
  misc_RNA (1)...(19): siRNA sense strand
agaaggaaguguuauuaca

SEQ ID NO: 2120035 - RNA, 19 nt, Homo sapiens
  misc_RNA (1)...(19): siRNA sense strand
ccaauauucagaagaagua

SEQ ID NO: 2120036 - RNA, 19 nt, Homo sapiens
  misc_RNA (1)...(19): siRNA sense strand
ugaagcaaauccugccaaa

SEQ ID NO: 2120037 - RNA, 19 nt, Homo sapiens
  misc_RNA (1)...(19): siRNA sense strand
ugaacuaccugcuacaagu

SEQ ID NO: 2120038 - RNA, 19 nt, Homo sapiens
  misc_RNA (1)...(19): siRNA sense strand
caagagagagaaccuguau

SEQ ID NO: 2120039 - RNA, 19 nt, Homo sapiens
  misc_RNA (1)...(19): siRNA sense strand
aagagaagaaccagaauuu

SEQ ID NO: 2120040 - RNA, 19 nt, Homo sapiens
  misc_RNA (1)...(19): siRNA sense strand
ugaauaauuugggaucuug

SEQ ID NO: 2120041 - RNA, 19 nt, Homo sapiens
  misc_RNA (1)...(19): siRNA sense strand
ggaagacauucuguugguu

SEQ ID NO: 2120042 - RNA, 19 nt, Homo sapiens
  misc_RNA (1)...(19): siRNA sense strand
uauaucaacuguacacaca

SEQ ID NO: 2120043 - RNA, 19 nt, Homo sapiens
  misc_RNA (1)...(19): siRNA sense strand
ggauuggccucuacaaggu

SEQ ID NO: 2120044 - RNA, 19 nt, Homo sapiens
  misc_RNA (1)...(19): siRNA sense strand
aaacaucacauggauauga

SEQ ID NO: 2120045 - RNA, 19 nt, Homo sapiens
  misc_RNA (1)...(19): siRNA sense strand
caaagauaauaccuacuuc

SEQ ID NO: 2120046 - RNA, 19 nt, Homo sapiens
  misc_RNA (1)...(19): siRNA sense strand
gcaauagcggaacauguaa

SEQ ID NO: 2120047 - RNA, 19 nt, Homo sapiens
  misc_RNA (1)...(19): siRNA sense strand
gaaccuguauuaguaagag

SEQ ID NO: 2120048 - RNA, 19 nt, Homo sapiens
  misc_RNA (1)...(19): siRNA sense strand
gccagugccuuucaagaau

SEQ ID NO: 2120049 - RNA, 19 nt, Homo sapiens
  misc_RNA (1)...(19): siRNA sense strand
acaacagucugaauucuca

SEQ ID NO: 2120050 - RNA, 19 nt, Homo sapiens
  misc_RNA (1)...(19): siRNA sense strand
ucaagagagugcagacaug

SEQ ID NO: 2120051 - RNA, 19 nt, Homo sapiens
  misc_RNA (1)...(19): siRNA sense strand
gaucuuugacagaggauuu

SEQ ID NO: 2120052 - RNA, 19 nt, Homo sapiens
  misc_RNA (1)...(19): siRNA sense strand
gcucagacaccuucagaau

SEQ ID NO: 2120053 - RNA, 19 nt, Homo sapiens
  misc_RNA (1)...(19): siRNA sense strand
uaacaagaucuuugacaga

SEQ ID NO: 2120054 - RNA, 19 nt, Homo sapiens
  misc_RNA (1)...(19): siRNA sense strand
gaagagccagugccuuuca

SEQ ID NO: 2120055 - RNA, 19 nt, Homo sapiens
  misc_RNA (1)...(19): siRNA sense strand
acuguucccugugcaauua

SEQ ID NO: 2120056 - RNA, 19 nt, Homo sapiens
  misc_RNA (1)...(19): siRNA sense strand
ugacaacuuuggccacaau

SEQ ID NO: 2120057 - RNA, 19 nt, Homo sapiens
  misc_RNA (1)...(19): siRNA sense strand
ucaccuucuuccaguaaua

SEQ ID NO: 2120058 - RNA, 19 nt, Homo sapiens
  misc_RNA (1)...(19): siRNA sense strand
guacaacagucugaauucu

SEQ ID NO: 2120059 - RNA, 19 nt, Homo sapiens
  misc_RNA (1)...(19): siRNA sense strand
ggaugauucugguuucaca

SEQ ID NO: 2120060 - RNA, 19 nt, Homo sapiens
  misc_RNA (1)...(19): siRNA sense strand
ccauuagcuuccaccauaa

SEQ ID NO: 2120061 - RNA, 19 nt, Homo sapiens
  misc_RNA (1)...(19): siRNA sense strand
acacacauauggucugaca

SEQ ID NO: 2120062 - RNA, 19 nt, Homo sapiens
  misc_RNA (1)...(19): siRNA sense strand
gcauagauucucugccauu

SEQ ID NO: 2120063 - RNA, 19 nt, Homo sapiens
  misc_RNA (1)...(19): siRNA sense strand
cgaaagauggaaauauaga

SEQ ID NO: 2120064 - RNA, 19 nt, Homo sapiens
  misc_RNA (1)...(19): siRNA sense strand
uuacaaagacaacaacaga

SEQ ID NO: 2120065 - RNA, 19 nt, Homo sapiens
  misc_RNA (1)...(19): siRNA sense strand
gagcuucgccauccuguuc

SEQ ID NO: 2120066 - RNA, 19 nt, Homo sapiens
  misc_RNA (1)...(19): siRNA sense strand
ucacagcaauaugcagaaa

SEQ ID NO: 2120067 - RNA, 19 nt, Homo sapiens
  misc_RNA (1)...(19): siRNA sense strand
ccaguagucucaguccauu

SEQ ID NO: 2120068 - RNA, 19 nt, Homo sapiens
  misc_RNA (1)...(19): siRNA sense strand
gguaaacggaggagcauau

SEQ ID NO: 2120069 - RNA, 19 nt, Homo sapiens
  misc_RNA (1)...(19): siRNA sense strand
aggaagcucuuuacaaucu

SEQ ID NO: 2120070 - RNA, 19 nt, Homo sapiens
  misc_RNA (1)...(19): siRNA sense strand
aacagaaucuuucccugaa

SEQ ID NO: 2120071 - RNA, 19 nt, Homo sapiens
  misc_RNA (1)...(19): siRNA sense strand
cuugugaacuggaugaaga

SEQ ID NO: 2120072 - RNA, 19 nt, Homo sapiens
  misc_RNA (1)...(19): siRNA sense strand
gaagauucugugucugaaa

SEQ ID NO: 2120073 - RNA, 19 nt, Homo sapiens
  misc_RNA (1)...(19): siRNA sense strand
gacugaagauucugugucu

SEQ ID NO: 2120074 - RNA, 19 nt, Homo sapiens
  misc_RNA (1)...(19): siRNA sense strand
gcagucaagacguuauuau

SEQ ID NO: 2120075 - RNA, 19 nt, Homo sapiens
  misc_RNA (1)...(19): siRNA sense strand
ggaagaaaacggaggcaua

SEQ ID NO: 2120076 - RNA, 19 nt, Homo sapiens
  misc_RNA (1)...(19): siRNA sense strand
cgucucaugugccgcagua

SEQ ID NO: 2120077 - RNA, 19 nt, Homo sapiens
  misc_RNA (1)...(19): siRNA sense strand
ugaacuggaugaagaugau

SEQ ID NO: 2120078 - RNA, 19 nt, Homo sapiens
  misc_RNA (1)...(19): siRNA sense strand
gcaaauccugccaaaguuc

SEQ ID NO: 2120079 - RNA, 19 nt, Homo sapiens
  misc_RNA (1)...(19): siRNA sense strand
gaacuaccugcuacaagug

SEQ ID NO: 2120080 - RNA, 19 nt, Homo sapiens
  misc_RNA (1)...(19): siRNA sense strand
ccggaaaccucugcugcua

SEQ ID NO: 2120081 - RNA, 19 nt, Homo sapiens
  misc_RNA (1)...(19): siRNA sense strand
caauguagcacugaaucua

SEQ ID NO: 2120082 - RNA, 19 nt, Homo sapiens
  misc_RNA (1)...(19): siRNA sense strand
caaccuggucacagcaaua

SEQ ID NO: 2120083 - RNA, 19 nt, Homo sapiens
  misc_RNA (1)...(19): siRNA sense strand
aagcaaauccugccaaagu

SEQ ID NO: 2120084 - RNA, 19 nt, Homo sapiens
  misc_RNA (1)...(19): siRNA sense strand
ucacauggauaugaagcaa

SEQ ID NO: 2120085 - RNA, 19 nt, Homo sapiens
  misc_RNA (1)...(19): siRNA sense strand
gauaacaagaucuuugaca

SEQ ID NO: 2120086 - RNA, 19 nt, Homo sapiens
  misc_RNA (1)...(19): siRNA sense strand
guaguucacgaaauaagaa

SEQ ID NO: 2120087 - RNA, 19 nt, Homo sapiens
  misc_RNA (1)...(19): siRNA sense strand
gagcagguucuucaucuuc

SEQ ID NO: 2120088 - RNA, 19 nt, Homo sapiens
  misc_RNA (1)...(19): siRNA sense strand
caagagagugcagacauga

SEQ ID NO: 2120089 - RNA, 19 nt, Homo sapiens
  misc_RNA (1)...(19): siRNA sense strand
agacaugauucucuuccuu

SEQ ID NO: 2120090 - RNA, 19 nt, Homo sapiens
  misc_RNA (1)...(19): siRNA sense strand
ccacacagcuaauggguua

SEQ ID NO: 2120091 - RNA, 19 nt, Homo sapiens
  misc_RNA (1)...(19): siRNA sense strand
caaagguacuugauacaua

SEQ ID NO: 2120092 - RNA, 19 nt, Homo sapiens
  misc_RNA (1)...(19): siRNA sense strand
gaagaaagguuuggacaga

SEQ ID NO: 2120093 - RNA, 19 nt, Homo sapiens
  misc_RNA (1)...(19): siRNA sense strand
caaaugaccuccaaacaau

SEQ ID NO: 2120094 - RNA, 19 nt, Homo sapiens
  misc_RNA (1)...(19): siRNA sense strand
gaaaucaagugcaugcaaa

SEQ ID NO: 2120095 - RNA, 19 nt, Homo sapiens
  misc_RNA (1)...(19): siRNA sense strand
gaagaauucuguucagguu

SEQ ID NO: 2120096 - RNA, 19 nt, Homo sapiens
  misc_RNA (1)...(19): siRNA sense strand
caaauaaugugaucccaaa

SEQ ID NO: 2120097 - RNA, 19 nt, Homo sapiens
  misc_RNA (1)...(19): siRNA sense strand
caacacagcuggagcacaa

SEQ ID NO: 2120098 - RNA, 19 nt, Homo sapiens
  misc_RNA (1)...(19): siRNA sense strand
gcuaauggguuaucaaaga

SEQ ID NO: 2120099 - RNA, 19 nt, Homo sapiens
  misc_RNA (1)...(19): siRNA sense strand
cagaacaccucaagcauaa

SEQ ID NO: 2120100 - RNA, 19 nt, Homo sapiens
  misc_RNA (1)...(19): siRNA sense strand
agagucaccuuccaaauua

SEQ ID NO: 2120101 - RNA, 19 nt, Homo sapiens
  misc_RNA (1)...(19): siRNA sense strand
gaagcaagaucccaaggaa

SEQ ID NO: 2120102 - RNA, 19 nt, Homo sapiens
  misc_RNA (1)...(19): siRNA sense strand
aaacauggcuuggcucuuu

SEQ ID NO: 2120103 - RNA, 19 nt, Homo sapiens
  misc_RNA (1)...(19): siRNA sense strand
gagaacagcucaaauaaaa

SEQ ID NO: 2120104 - RNA, 19 nt, Homo sapiens
  misc_RNA (1)...(19): siRNA sense strand
cuacaaagcuccagaaugg

SEQ ID NO: 2120105 - RNA, 19 nt, Homo sapiens
  misc_RNA (1)...(19): siRNA sense strand
ggaaauagccagaguuuua

SEQ ID NO: 2120106 - RNA, 19 nt, Homo sapiens
  misc_RNA (1)...(19): siRNA sense strand
gagcacaagucacaaaugu

SEQ ID NO: 2120107 - RNA, 19 nt, Homo sapiens
  misc_RNA (1)...(19): siRNA sense strand
caaggaggcuuacacaaau

SEQ ID NO: 2120108 - RNA, 19 nt, Homo sapiens
  misc_RNA (1)...(19): siRNA sense strand
gaacaacuacaacaacaaa

SEQ ID NO: 2120109 - RNA, 19 nt, Homo sapiens
  misc_RNA (1)...(19): siRNA sense strand
cuaaauaccuguuccuuuc

SEQ ID NO: 2120110 - RNA, 19 nt, Homo sapiens
  misc_RNA (1)...(19): siRNA sense strand
cgauggaucuguauaggua

SEQ ID NO: 2120111 - RNA, 19 nt, Homo sapiens
  misc_RNA (1)...(19): siRNA sense strand
gaaacuagaagccaagaaa

SEQ ID NO: 2120112 - RNA, 19 nt, Homo sapiens
  misc_RNA (1)...(19): siRNA sense strand
gcaaagagaaggaucauuc

SEQ ID NO: 2120113 - RNA, 19 nt, Homo sapiens
  misc_RNA (1)...(19): siRNA sense strand
gaacaggaaugacauacag

SEQ ID NO: 2120114 - RNA, 19 nt, Homo sapiens
  misc_RNA (1)...(19): siRNA sense strand
acaacaagcuucaguucua

SEQ ID NO: 2120115 - RNA, 19 nt, Homo sapiens
  misc_RNA (1)...(19): siRNA sense strand
aagagaagcuacuguguuu

SEQ ID NO: 2120116 - RNA, 19 nt, Homo sapiens
  misc_RNA (1)...(19): siRNA sense strand
agaagacaaucgagaauuu

SEQ ID NO: 2120117 - RNA, 19 nt, Homo sapiens
  misc_RNA (1)...(19): siRNA sense strand
ggagaugguuucagcaguu

SEQ ID NO: 2120118 - RNA, 19 nt, Homo sapiens
  misc_RNA (1)...(19): siRNA sense strand
ucacaaauguaccaaguug

SEQ ID NO: 2120119 - RNA, 19 nt, Homo sapiens
  misc_RNA (1)...(19): siRNA sense strand
guaaagcuauuaggauuga

SEQ ID NO: 2120120 - RNA, 19 nt, Homo sapiens
  misc_RNA (1)...(19): siRNA sense strand
gagcagaagucacaacaag

SEQ ID NO: 2120121 - RNA, 19 nt, Homo sapiens
  misc_RNA (1)...(19): siRNA sense strand
uaaagaaucccaauaggaa

SEQ ID NO: 2120122 - RNA, 19 nt, Homo sapiens
  misc_RNA (1)...(19): siRNA sense strand
ggguaaagcuauuaggauu

SEQ ID NO: 2120123 - RNA, 19 nt, Homo sapiens
  misc_RNA (1)...(19): siRNA sense strand
aagcauaacccaccaauuu

SEQ ID NO: 2120124 - RNA, 19 nt, Homo sapiens
  misc_RNA (1)...(19): siRNA sense strand
caaacugagucuugccaua

SEQ ID NO: 2120125 - RNA, 19 nt, Homo sapiens
  misc_RNA (1)...(19): siRNA sense strand
caacaaugaucagcaaaga

SEQ ID NO: 2120126 - RNA, 19 nt, Homo sapiens
  misc_RNA (1)...(19): siRNA sense strand
ggaccaacaucuccaguuc

SEQ ID NO: 2120127 - RNA, 19 nt, Homo sapiens
  misc_RNA (1)...(19): siRNA sense strand
caucaauucuucaguauca

SEQ ID NO: 2120128 - RNA, 19 nt, Homo sapiens
  misc_RNA (1)...(19): siRNA sense strand
cuaaugaguuguccuguga

SEQ ID NO: 2120129 - RNA, 19 nt, Homo sapiens
  misc_RNA (1)...(19): siRNA sense strand
gaagagaagcuacuguguu

SEQ ID NO: 2120130 - RNA, 19 nt, Homo sapiens
  misc_RNA (1)...(19): siRNA sense strand
ggacagaaggguaaagcua

SEQ ID NO: 2120131 - RNA, 19 nt, Homo sapiens
  misc_RNA (1)...(19): siRNA sense strand
gcacacagcaccaccagaa

SEQ ID NO: 2120132 - RNA, 19 nt, Homo sapiens
  misc_RNA (1)...(19): siRNA sense strand
aaacaaagagcaagagauu

SEQ ID NO: 2120133 - RNA, 19 nt, Homo sapiens
  misc_RNA (1)...(19): siRNA sense strand
guaccaaguugaaaugaau

SEQ ID NO: 2120134 - RNA, 19 nt, Homo sapiens
  misc_RNA (1)...(19): siRNA sense strand
guaacuacaucuccauaug

SEQ ID NO: 2120135 - RNA, 19 nt, Homo sapiens
  misc_RNA (1)...(19): siRNA sense strand
caaagucucugacguggau

SEQ ID NO: 2120136 - RNA, 19 nt, Homo sapiens
  misc_RNA (1)...(19): siRNA sense strand
gaaggaaggccguccauuc

SEQ ID NO: 2120137 - RNA, 19 nt, Homo sapiens
  misc_RNA (1)...(19): siRNA sense strand
ccgagacgcugaggaaaua

SEQ ID NO: 2120138 - RNA, 19 nt, Homo sapiens
  misc_RNA (1)...(19): siRNA sense strand
ggagaacagcucaaauaaa

SEQ ID NO: 2120139 - RNA, 19 nt, Homo sapiens
  misc_RNA (1)...(19): siRNA sense strand
ggaaggccguccauucuca

SEQ ID NO: 2120140 - RNA, 19 nt, Homo sapiens
  misc_RNA (1)...(19): siRNA sense strand
gauugaauaugaacacaga

SEQ ID NO: 2120141 - RNA, 19 nt, Homo sapiens
  misc_RNA (1)...(19): siRNA sense strand
ccaaggaggcuuacacaaa

SEQ ID NO: 2120142 - RNA, 19 nt, Homo sapiens
  misc_RNA (1)...(19): siRNA sense strand
ggaauaaaacgcacaguua

SEQ ID NO: 2120143 - RNA, 19 nt, Homo sapiens
  misc_RNA (1)...(19): siRNA sense strand
ggaagcaccagcccuauga

SEQ ID NO: 2120144 - RNA, 19 nt, Homo sapiens
  misc_RNA (1)...(19): siRNA sense strand
aaacagaccauuuaccaaa

SEQ ID NO: 2120145 - RNA, 19 nt, Homo sapiens
  misc_RNA (1)...(19): siRNA sense strand
gaauggugcuuacuucaag

SEQ ID NO: 2120146 - RNA, 19 nt, Homo sapiens
  misc_RNA (1)...(19): siRNA sense strand
agaaagaaauccaggugaa

SEQ ID NO: 2120147 - RNA, 19 nt, Homo sapiens
  misc_RNA (1)...(19): siRNA sense strand
ucucagggauguccuauug

SEQ ID NO: 2120148 - RNA, 19 nt, Homo sapiens
  misc_RNA (1)...(19): siRNA sense strand
caucuauacugguaaagaa

SEQ ID NO: 2120149 - RNA, 19 nt, Homo sapiens
  misc_RNA (1)...(19): siRNA sense strand
gaaagagucaucuauacug

SEQ ID NO: 2120150 - RNA, 19 nt, Homo sapiens
  misc_RNA (1)...(19): siRNA sense strand
gaaaagacaccaaccaaaa

SEQ ID NO: 2120151 - RNA, 19 nt, Homo sapiens
  misc_RNA (1)...(19): siRNA sense strand
gaggaaguacagaauauaa

SEQ ID NO: 2120152 - RNA, 19 nt, Homo sapiens
  misc_RNA (1)...(19): siRNA sense strand
caagggcagucccaaggua

SEQ ID NO: 2120153 - RNA, 19 nt, Homo sapiens
  misc_RNA (1)...(19): siRNA sense strand
caggauggauugaauugaa

SEQ ID NO: 2120154 - RNA, 19 nt, Homo sapiens
  misc_RNA (1)...(19): siRNA sense strand
caacacagcacuaucugaa

SEQ ID NO: 2120155 - RNA, 19 nt, Homo sapiens
  misc_RNA (1)...(19): siRNA sense strand
gaaagaaauccaggugaaa

SEQ ID NO: 2120156 - RNA, 19 nt, Homo sapiens
  misc_RNA (1)...(19): siRNA sense strand
gaacaucauucaccuucuc

SEQ ID NO: 2120157 - RNA, 19 nt, Homo sapiens
  misc_RNA (1)...(19): siRNA sense strand
gaaacuggagucucauuug

SEQ ID NO: 2120158 - RNA, 19 nt, Homo sapiens
  misc_RNA (1)...(19): siRNA sense strand
gcagauguguagagcaaau

SEQ ID NO: 2120159 - RNA, 19 nt, Homo sapiens
  misc_RNA (1)...(19): siRNA sense strand
ugaaacagcacuugaauca

SEQ ID NO: 2120160 - RNA, 19 nt, Homo sapiens
  misc_RNA (1)...(19): siRNA sense strand
caagcggaaucccaucuaa

SEQ ID NO: 2120161 - RNA, 19 nt, Homo sapiens
  misc_RNA (1)...(19): siRNA sense strand
ugaaagcagucaaccaaau

SEQ ID NO: 2120162 - RNA, 19 nt, Homo sapiens
  misc_RNA (1)...(19): siRNA sense strand
ucaaugcaauggaaaccua

SEQ ID NO: 2120163 - RNA, 19 nt, Homo sapiens
  misc_RNA (1)...(19): siRNA sense strand
gaaucagaauacccaauau

SEQ ID NO: 2120164 - RNA, 19 nt, Homo sapiens
  misc_RNA (1)...(19): siRNA sense strand
caaaaccuguccacucuua

SEQ ID NO: 2120165 - RNA, 19 nt, Homo sapiens
  misc_RNA (1)...(19): siRNA sense strand
cagaugcacaggccaauua

SEQ ID NO: 2120166 - RNA, 19 nt, Homo sapiens
  misc_RNA (1)...(19): siRNA sense strand
aaauacagguuucuuguuc

SEQ ID NO: 2120167 - RNA, 19 nt, Homo sapiens
  misc_RNA (1)...(19): siRNA sense strand
agacuaaaguggaagaaug

SEQ ID NO: 2120168 - RNA, 19 nt, Homo sapiens
  misc_RNA (1)...(19): siRNA sense strand
gagcagauucccaaacuga

SEQ ID NO: 2120169 - RNA, 19 nt, Homo sapiens
  misc_RNA (1)...(19): siRNA sense strand
gaaaggccucagaauaauu

SEQ ID NO: 2120170 - RNA, 19 nt, Homo sapiens
  misc_RNA (1)...(19): siRNA sense strand
gcucugaacgguauuuaaa

SEQ ID NO: 2120171 - RNA, 19 nt, Homo sapiens
  misc_RNA (1)...(19): siRNA sense strand
gauaagaaagaaucuguga

SEQ ID NO: 2120172 - RNA, 19 nt, Homo sapiens
  misc_RNA (1)...(19): siRNA sense strand
gaaagcagucaaccaaaug

SEQ ID NO: 2120173 - RNA, 19 nt, Homo sapiens
  misc_RNA (1)...(19): siRNA sense strand
ucagaaaccagaacaacua

SEQ ID NO: 2120174 - RNA, 19 nt, Homo sapiens
  misc_RNA (1)...(19): siRNA sense strand
gguaugcacucucacuaga

SEQ ID NO: 2120175 - RNA, 19 nt, Homo sapiens
  misc_RNA (1)...(19): siRNA sense strand
uuagagaaaucauggaaga

SEQ ID NO: 2120176 - RNA, 19 nt, Homo sapiens
  misc_RNA (1)...(19): siRNA sense strand
caacauaagccucauaaac

SEQ ID NO: 2120177 - RNA, 19 nt, Homo sapiens
  misc_RNA (1)...(19): siRNA sense strand
caacaucuccaguuccaaa

SEQ ID NO: 2120178 - RNA, 19 nt, Homo sapiens
  misc_RNA (1)...(19): siRNA sense strand
gcuagcgucuggugaagaa

SEQ ID NO: 2120179 - RNA, 19 nt, Homo sapiens
  misc_RNA (1)...(19): siRNA sense strand
cccaaucucuccaaucaaa

SEQ ID NO: 2120180 - RNA, 19 nt, Homo sapiens
  misc_RNA (1)...(19): siRNA sense strand
gaccacagacuccacagua

SEQ ID NO: 2120181 - RNA, 19 nt, Homo sapiens
  misc_RNA (1)...(19): siRNA sense strand
gguggcaucucuuacagaa

SEQ ID NO: 2120182 - RNA, 19 nt, Homo sapiens
  misc_RNA (1)...(19): siRNA sense strand
gcucuaagguggcaucucu

SEQ ID NO: 2120183 - RNA, 19 nt, Homo sapiens
  misc_RNA (1)...(19): siRNA sense strand
cagcaaagguacuugauac

SEQ ID NO: 2120184 - RNA, 19 nt, Homo sapiens
  misc_RNA (1)...(19): siRNA sense strand
gggagccaccucuagauua

SEQ ID NO: 2120185 - RNA, 19 nt, Homo sapiens
  misc_RNA (1)...(19): siRNA sense strand
ugaaucagaauacccaaua

SEQ ID NO: 2120186 - RNA, 19 nt, Homo sapiens
  misc_RNA (1)...(19): siRNA sense strand
cuaaucccaugaacccuua

SEQ ID NO: 2120187 - RNA, 19 nt, Homo sapiens
  misc_RNA (1)...(19): siRNA sense strand
gaacacagagcaccagagu

SEQ ID NO: 2120188 - RNA, 19 nt, Homo sapiens
  misc_RNA (1)...(19): siRNA sense strand
gauguaaguuugccagaag

SEQ ID NO: 2120189 - RNA, 19 nt, Homo sapiens
  misc_RNA (1)...(19): siRNA sense strand
gagagcucauccagaagua

SEQ ID NO: 2120190 - RNA, 19 nt, Homo sapiens
  misc_RNA (1)...(19): siRNA sense strand
guacaaaugugaagaaugu

SEQ ID NO: 2120191 - RNA, 19 nt, Homo sapiens
  misc_RNA (1)...(19): siRNA sense strand
gagaaacgcuauaaaugug

SEQ ID NO: 2120192 - RNA, 19 nt, Homo sapiens
  misc_RNA (1)...(19): siRNA sense strand
cuacaaaugugaagaaugu

SEQ ID NO: 2120193 - RNA, 19 nt, Homo sapiens
  misc_RNA (1)...(19): siRNA sense strand
gaagaggcaugagaugauu

SEQ ID NO: 2120194 - RNA, 19 nt, Homo sapiens
  misc_RNA (1)...(19): siRNA sense strand
ucaagccucucuaaacaua

SEQ ID NO: 2120195 - RNA, 19 nt, Homo sapiens
  misc_RNA (1)...(19): siRNA sense strand
cagaaacccugcauaguga

SEQ ID NO: 2120196 - RNA, 19 nt, Homo sapiens
  misc_RNA (1)...(19): siRNA sense strand
gagagaaacccuacaaaug

SEQ ID NO: 2120197 - RNA, 19 nt, Homo sapiens
  misc_RNA (1)...(19): siRNA sense strand
gagagaaaccguacaaaug

SEQ ID NO: 2120198 - RNA, 19 nt, Homo sapiens
  misc_RNA (1)...(19): siRNA sense strand
cuacaaaugugacgaaugu

SEQ ID NO: 2120199 - RNA, 19 nt, Homo sapiens
  misc_RNA (1)...(19): siRNA sense strand
gagagaaacccuacaaaug

SEQ ID NO: 2120200 - RNA, 19 nt, Homo sapiens
  misc_RNA (1)...(19): siRNA sense strand
ccucaaaccuuacuaaaca

SEQ ID NO: 2120201 - RNA, 19 nt, Homo sapiens
  misc_RNA (1)...(19): siRNA sense strand
ggagagaaacgcuauaaau

SEQ ID NO: 2120202 - RNA, 19 nt, Homo sapiens
  misc_RNA (1)...(19): siRNA sense strand
gcacagcggaaucuauaua

SEQ ID NO: 2120203 - RNA, 19 nt, Homo sapiens
  misc_RNA (1)...(19): siRNA sense strand
gagagaaacgcuauaaaug

SEQ ID NO: 2120204 - RNA, 19 nt, Homo sapiens
  misc_RNA (1)...(19): siRNA sense strand
gagaaacccuacaaaugug

SEQ ID NO: 2120205 - RNA, 19 nt, Homo sapiens
  misc_RNA (1)...(19): siRNA sense strand
gagaaacccuacaaaugug

SEQ ID NO: 2120206 - RNA, 19 nt, Homo sapiens
  misc_RNA (1)...(19): siRNA sense strand
caaaagagguuauaaugga

SEQ ID NO: 2120207 - RNA, 19 nt, Homo sapiens
  misc_RNA (1)...(19): siRNA sense strand
gauaagagauacuggaaaa

SEQ ID NO: 2120208 - RNA, 19 nt, Homo sapiens
  misc_RNA (1)...(19): siRNA sense strand
ccaguuauguauucucauu

SEQ ID NO: 2120209 - RNA, 19 nt, Homo sapiens
  misc_RNA (1)...(19): siRNA sense strand
gagagaaacccuacaagug

SEQ ID NO: 2120210 - RNA, 19 nt, Homo sapiens
  misc_RNA (1)...(19): siRNA sense strand
gagagaaacccuacagaug

SEQ ID NO: 2120211 - RNA, 19 nt, Homo sapiens
  misc_RNA (1)...(19): siRNA sense strand
gaaacgcuauaaaugugaa

SEQ ID NO: 2120212 - RNA, 19 nt, Homo sapiens
  misc_RNA (1)...(19): siRNA sense strand
cuacaagugugaagaaugu

SEQ ID NO: 2120213 - RNA, 19 nt, Homo sapiens
  misc_RNA (1)...(19): siRNA sense strand
ggagagaaacccuacaaau

SEQ ID NO: 2120214 - RNA, 19 nt, Homo sapiens
  misc_RNA (1)...(19): siRNA sense strand
ggagagaaaccguacaaau

SEQ ID NO: 2120215 - RNA, 19 nt, Homo sapiens
  misc_RNA (1)...(19): siRNA sense strand
ggagagaaacccuacaaau

SEQ ID NO: 2120216 - RNA, 19 nt, Homo sapiens
  misc_RNA (1)...(19): siRNA sense strand
aagcaguccuguaaccuua

SEQ ID NO: 2120217 - RNA, 19 nt, Homo sapiens
  misc_RNA (1)...(19): siRNA sense strand
aaccugaucuuccuuggua

SEQ ID NO: 2120218 - RNA, 19 nt, Homo sapiens
  misc_RNA (1)...(19): siRNA sense strand
ccucagcccuuaauaaaca

SEQ ID NO: 2120219 - RNA, 19 nt, Homo sapiens
  misc_RNA (1)...(19): siRNA sense strand
cuacaaaugugaggaaugu

SEQ ID NO: 2120220 - RNA, 19 nt, Homo sapiens
  misc_RNA (1)...(19): siRNA sense strand
ccucaacccuuacuaaaca

SEQ ID NO: 2120221 - RNA, 19 nt, Homo sapiens
  misc_RNA (1)...(19): siRNA sense strand
aagcaguccucacaccuua

SEQ ID NO: 2120222 - RNA, 19 nt, Homo sapiens
  misc_RNA (1)...(19): siRNA sense strand
gaucuuccuugguauuguu

SEQ ID NO: 2120223 - RNA, 19 nt, Homo sapiens
  misc_RNA (1)...(19): siRNA sense strand
ccuauaagcaguccuguaa

SEQ ID NO: 2120224 - RNA, 19 nt, Homo sapiens
  misc_RNA (1)...(19): siRNA sense strand
gagagaaaccauacaagug

SEQ ID NO: 2120225 - RNA, 19 nt, Homo sapiens
  misc_RNA (1)...(19): siRNA sense strand
aaauguuccucaacccuua

SEQ ID NO: 2120226 - RNA, 19 nt, Homo sapiens
  misc_RNA (1)...(19): siRNA sense strand
ggucagagcagagcauaaa

SEQ ID NO: 2120227 - RNA, 19 nt, Homo sapiens
  misc_RNA (1)...(19): siRNA sense strand
gagaaaccguacaaaugug

SEQ ID NO: 2120228 - RNA, 19 nt, Homo sapiens
  misc_RNA (1)...(19): siRNA sense strand
ggagagaaaccauacaagu

SEQ ID NO: 2120229 - RNA, 19 nt, Homo sapiens
  misc_RNA (1)...(19): siRNA sense strand
gggaugugauguuagagaa

SEQ ID NO: 2120230 - RNA, 19 nt, Homo sapiens
  misc_RNA (1)...(19): siRNA sense strand
agagaaacccuacaaaugu

SEQ ID NO: 2120231 - RNA, 19 nt, Homo sapiens
  misc_RNA (1)...(19): siRNA sense strand
agagaaacccuacaaaugu

SEQ ID NO: 2120232 - RNA, 19 nt, Homo sapiens
  misc_RNA (1)...(19): siRNA sense strand
gagcagagcauaaaagauu

SEQ ID NO: 2120233 - RNA, 19 nt, Homo sapiens
  misc_RNA (1)...(19): siRNA sense strand
aaacauaagagagcucaua

SEQ ID NO: 2120234 - RNA, 19 nt, Homo sapiens
  misc_RNA (1)...(19): siRNA sense strand
ggagagaaacccuacagau

SEQ ID NO: 2120235 - RNA, 19 nt, Homo sapiens
  misc_RNA (1)...(19): siRNA sense strand
ggagagaaacccuacaagu

SEQ ID NO: 2120236 - RNA, 19 nt, Homo sapiens
  misc_RNA (1)...(19): siRNA sense strand
gagaauguggcaaagcuuu

SEQ ID NO: 2120237 - RNA, 19 nt, Homo sapiens
  misc_RNA (1)...(19): siRNA sense strand
caacccguacuacauauaa

SEQ ID NO: 2120238 - RNA, 19 nt, Homo sapiens
  misc_RNA (1)...(19): siRNA sense strand
uuagagauguggccauaga

SEQ ID NO: 2120239 - RNA, 19 nt, Homo sapiens
  misc_RNA (1)...(19): siRNA sense strand
auauagggaugugauguua

SEQ ID NO: 2120240 - RNA, 19 nt, Homo sapiens
  misc_RNA (1)...(19): siRNA sense strand
ccucacaccuuacuacaca

SEQ ID NO: 2120241 - RNA, 19 nt, Homo sapiens
  misc_RNA (1)...(19): siRNA sense strand
ucaaugugaugaauaugug

SEQ ID NO: 2120242 - RNA, 19 nt, Homo sapiens
  misc_RNA (1)...(19): siRNA sense strand
gagauguggccauagaauu

SEQ ID NO: 2120243 - RNA, 19 nt, Homo sapiens
  misc_RNA (1)...(19): siRNA sense strand
cauaagagaauucauacug

SEQ ID NO: 2120244 - RNA, 19 nt, Homo sapiens
  misc_RNA (1)...(19): siRNA sense strand
agagaaacgcuauaaaugu

SEQ ID NO: 2120245 - RNA, 19 nt, Homo sapiens
  misc_RNA (1)...(19): siRNA sense strand
agagaaaccguacaaaugu

SEQ ID NO: 2120246 - RNA, 19 nt, Homo sapiens
  misc_RNA (1)...(19): siRNA sense strand
caacucuaacugaacauaa

SEQ ID NO: 2120247 - RNA, 19 nt, Homo sapiens
  misc_RNA (1)...(19): siRNA sense strand
agagaaacccuacagaugu

SEQ ID NO: 2120248 - RNA, 19 nt, Homo sapiens
  misc_RNA (1)...(19): siRNA sense strand
acagaaacccugcauagug

SEQ ID NO: 2120249 - RNA, 19 nt, Homo sapiens
  misc_RNA (1)...(19): siRNA sense strand
agagaaacccuacaagugu

SEQ ID NO: 2120250 - RNA, 19 nt, Homo sapiens
  misc_RNA (1)...(19): siRNA sense strand
acucaagccucucuaaaca

SEQ ID NO: 2120251 - RNA, 19 nt, Homo sapiens
  misc_RNA (1)...(19): siRNA sense strand
guacucaagccucucuaaa

SEQ ID NO: 2120252 - RNA, 19 nt, Homo sapiens
  misc_RNA (1)...(19): siRNA sense strand
ccauugcaauuuagagaug

SEQ ID NO: 2120253 - RNA, 19 nt, Homo sapiens
  misc_RNA (1)...(19): siRNA sense strand
gguccucagcccuuaauaa

SEQ ID NO: 2120254 - RNA, 19 nt, Homo sapiens
  misc_RNA (1)...(19): siRNA sense strand
ccauacaagugugauaaau

SEQ ID NO: 2120255 - RNA, 19 nt, Homo sapiens
  misc_RNA (1)...(19): siRNA sense strand
ugaagaauguggcaaagcu

SEQ ID NO: 2120256 - RNA, 19 nt, Homo sapiens
  misc_RNA (1)...(19): siRNA sense strand
gagaauucauacuggagau

SEQ ID NO: 2120257 - RNA, 19 nt, Homo sapiens
  misc_RNA (1)...(19): siRNA sense strand
aaccguuccucaaaccuua

SEQ ID NO: 2120258 - RNA, 19 nt, Homo sapiens
  misc_RNA (1)...(19): siRNA sense strand
gacaugacaauuuacaguu

SEQ ID NO: 2120259 - RNA, 19 nt, Homo sapiens
  misc_RNA (1)...(19): siRNA sense strand
guccucagcccuuaauaaa

SEQ ID NO: 2120260 - RNA, 19 nt, Homo sapiens
  misc_RNA (1)...(19): siRNA sense strand
cauaagagagcucauacug

SEQ ID NO: 2120261 - RNA, 19 nt, Homo sapiens
  misc_RNA (1)...(19): siRNA sense strand
gauguuagagaacuacaga

SEQ ID NO: 2120262 - RNA, 19 nt, Homo sapiens
  misc_RNA (1)...(19): siRNA sense strand
gaauguggcaaagccuaua

SEQ ID NO: 2120263 - RNA, 19 nt, Homo sapiens
  misc_RNA (1)...(19): siRNA sense strand
auagggaugugauguuaga

SEQ ID NO: 2120264 - RNA, 19 nt, Homo sapiens
  misc_RNA (1)...(19): siRNA sense strand
gcugugaaaguguagauga

SEQ ID NO: 2120265 - RNA, 19 nt, Homo sapiens
  misc_RNA (1)...(19): siRNA sense strand
guuccucaacccuuaauaa

SEQ ID NO: 2120266 - RNA, 19 nt, Homo sapiens
  misc_RNA (1)...(19): siRNA sense strand
agacagaaacccugcauag

SEQ ID NO: 2120267 - RNA, 19 nt, Homo sapiens
  misc_RNA (1)...(19): siRNA sense strand
agagaaaccauacaagugu

SEQ ID NO: 2120268 - RNA, 19 nt, Homo sapiens
  misc_RNA (1)...(19): siRNA sense strand
cuucaacccguacuacaua

SEQ ID NO: 2120269 - RNA, 19 nt, Homo sapiens
  misc_RNA (1)...(19): siRNA sense strand
cugcacagcggaaucuaua

SEQ ID NO: 2120270 - RNA, 19 nt, Homo sapiens
  misc_RNA (1)...(19): siRNA sense strand
ucucaacucuaacugaaca

SEQ ID NO: 2120271 - RNA, 19 nt, Homo sapiens
  misc_RNA (1)...(19): siRNA sense strand
gagguuauaauggacuuaa

SEQ ID NO: 2120272 - RNA, 19 nt, Homo sapiens
  misc_RNA (1)...(19): siRNA sense strand
gaacuacagaaaccugauc

SEQ ID NO: 2120273 - RNA, 19 nt, Homo sapiens
  misc_RNA (1)...(19): siRNA sense strand
aauugaugcuggagagaaa

SEQ ID NO: 2120274 - RNA, 19 nt, Homo sapiens
  misc_RNA (1)...(19): siRNA sense strand
gaaucuauauagggaugug

SEQ ID NO: 2120275 - RNA, 19 nt, Homo sapiens
  misc_RNA (1)...(19): siRNA sense strand
gaagaauguggcaaagcuu

SEQ ID NO: 2120276 - RNA, 19 nt, Homo sapiens
  misc_RNA (1)...(19): siRNA sense strand
gaauguggcaaaaccuuua

SEQ ID NO: 2120277 - RNA, 19 nt, Homo sapiens
  misc_RNA (1)...(19): siRNA sense strand
gaccauugcaauuuagaga

SEQ ID NO: 2120278 - RNA, 19 nt, Homo sapiens
  misc_RNA (1)...(19): siRNA sense strand
gaucaccugucuggagcaa

SEQ ID NO: 2120279 - RNA, 19 nt, Homo sapiens
  misc_RNA (1)...(19): siRNA sense strand
gaugugauguuagagaacu

SEQ ID NO: 2120280 - RNA, 19 nt, Homo sapiens
  misc_RNA (1)...(19): siRNA sense strand
gcuauaaaugugaagaaug

SEQ ID NO: 2120281 - RNA, 19 nt, Homo sapiens
  misc_RNA (1)...(19): siRNA sense strand
gcacaaaagagguuauaau

SEQ ID NO: 2120282 - RNA, 19 nt, Homo sapiens
  misc_RNA (1)...(19): siRNA sense strand
acagaaaccugaucuuccu

SEQ ID NO: 2120283 - RNA, 19 nt, Homo sapiens
  misc_RNA (1)...(19): siRNA sense strand
cauccucaacccuuacuaa

SEQ ID NO: 2120284 - RNA, 19 nt, Homo sapiens
  misc_RNA (1)...(19): siRNA sense strand
cauacaagugugauaaaug

SEQ ID NO: 2120285 - RNA, 19 nt, Homo sapiens
  misc_RNA (1)...(19): siRNA sense strand
ugaagaggcaugagaugau

SEQ ID NO: 2120286 - RNA, 19 nt, Homo sapiens
  misc_RNA (1)...(19): siRNA sense strand
cuacagaaaccugaucuuc

SEQ ID NO: 2120287 - RNA, 19 nt, Homo sapiens
  misc_RNA (1)...(19): siRNA sense strand
uagagaauguggcaaagcu

SEQ ID NO: 2120288 - RNA, 19 nt, Homo sapiens
  misc_RNA (1)...(19): siRNA sense strand
ucacaccuuacuacacaua

SEQ ID NO: 2120289 - RNA, 19 nt, Homo sapiens
  misc_RNA (1)...(19): siRNA sense strand
agaaugugguaaagccuau

SEQ ID NO: 2120290 - RNA, 19 nt, Homo sapiens
  misc_RNA (1)...(19): siRNA sense strand
gaaagaaacccaacaaaua

SEQ ID NO: 2120291 - RNA, 19 nt, Homo sapiens
  misc_RNA (1)...(19): siRNA sense strand
gaagaaacaugagauggua

SEQ ID NO: 2120292 - RNA, 19 nt, Homo sapiens
  misc_RNA (1)...(19): siRNA sense strand
gcacauaagagaauucaua

SEQ ID NO: 2120293 - RNA, 19 nt, Homo sapiens
  misc_RNA (1)...(19): siRNA sense strand
guacaaaugugaagacugu

SEQ ID NO: 2120294 - RNA, 19 nt, Homo sapiens
  misc_RNA (1)...(19): siRNA sense strand
ggacuuaaccaauauuuga

SEQ ID NO: 2120295 - RNA, 19 nt, Homo sapiens
  misc_RNA (1)...(19): siRNA sense strand
ggagaaacccuucaaaugu

SEQ ID NO: 2120296 - RNA, 19 nt, Homo sapiens
  misc_RNA (1)...(19): siRNA sense strand
gagaaacccuucaaaugug

SEQ ID NO: 2120297 - RNA, 19 nt, Homo sapiens
  misc_RNA (1)...(19): siRNA sense strand
cuacaaaugugaagaaugu

SEQ ID NO: 2120298 - RNA, 19 nt, Homo sapiens
  misc_RNA (1)...(19): siRNA sense strand
cuacaaaugugaagaaugu

SEQ ID NO: 2120299 - RNA, 19 nt, Homo sapiens
  misc_RNA (1)...(19): siRNA sense strand
cuacaaaugugaagaaugu

SEQ ID NO: 2120300 - RNA, 19 nt, Homo sapiens
  misc_RNA (1)...(19): siRNA sense strand
cuacaaaugugaagaaugu

SEQ ID NO: 2120301 - RNA, 19 nt, Homo sapiens
  misc_RNA (1)...(19): siRNA sense strand
cuacaaaugugaagaaugu

SEQ ID NO: 2120302 - RNA, 19 nt, Homo sapiens
  misc_RNA (1)...(19): siRNA sense strand
cuacaaaugugaagaaugu

SEQ ID NO: 2120303 - RNA, 19 nt, Homo sapiens
  misc_RNA (1)...(19): siRNA sense strand
cuacaaaugugaagaaugu

SEQ ID NO: 2120304 - RNA, 19 nt, Homo sapiens
  misc_RNA (1)...(19): siRNA sense strand
cuacaaaugugaagaaugu

SEQ ID NO: 2120305 - RNA, 19 nt, Homo sapiens
  misc_RNA (1)...(19): siRNA sense strand
gcacagcggaauuuauaua

SEQ ID NO: 2120306 - RNA, 19 nt, Homo sapiens
  misc_RNA (1)...(19): siRNA sense strand
ggaaagaaacccaacaaau

SEQ ID NO: 2120307 - RNA, 19 nt, Homo sapiens
  misc_RNA (1)...(19): siRNA sense strand
gagagaaacccuacaaaug

SEQ ID NO: 2120308 - RNA, 19 nt, Homo sapiens
  misc_RNA (1)...(19): siRNA sense strand
gagagaaacccuacaaaug

SEQ ID NO: 2120309 - RNA, 19 nt, Homo sapiens
  misc_RNA (1)...(19): siRNA sense strand
gagagaaacccuacaaaug

SEQ ID NO: 2120310 - RNA, 19 nt, Homo sapiens
  misc_RNA (1)...(19): siRNA sense strand
gagagaaacccuacaaaug

SEQ ID NO: 2120311 - RNA, 19 nt, Homo sapiens
  misc_RNA (1)...(19): siRNA sense strand
gagagaaacccuacaaaug

SEQ ID NO: 2120312 - RNA, 19 nt, Homo sapiens
  misc_RNA (1)...(19): siRNA sense strand
gagagaaacccuacaaaug

SEQ ID NO: 2120313 - RNA, 19 nt, Homo sapiens
  misc_RNA (1)...(19): siRNA sense strand
gagagaaacccuacaaaug

SEQ ID NO: 2120314 - RNA, 19 nt, Homo sapiens
  misc_RNA (1)...(19): siRNA sense strand
gagagaaacccuacaaaug

SEQ ID NO: 2120315 - RNA, 19 nt, Homo sapiens
  misc_RNA (1)...(19): siRNA sense strand
gagagaaacccuacaaaug

SEQ ID NO: 2120316 - RNA, 19 nt, Homo sapiens
  misc_RNA (1)...(19): siRNA sense strand
cuauggacaugacaauuua

SEQ ID NO: 2120317 - RNA, 19 nt, Homo sapiens
  misc_RNA (1)...(19): siRNA sense strand
gcgcauaagauaauucaua

SEQ ID NO: 2120318 - RNA, 19 nt, Homo sapiens
  misc_RNA (1)...(19): siRNA sense strand
gagaaacccuacaaaugug

SEQ ID NO: 2120319 - RNA, 19 nt, Homo sapiens
  misc_RNA (1)...(19): siRNA sense strand
gagaaacccuacaaaugug

SEQ ID NO: 2120320 - RNA, 19 nt, Homo sapiens
  misc_RNA (1)...(19): siRNA sense strand
cuacaaaugugaacgaugu

SEQ ID NO: 2120321 - RNA, 19 nt, Homo sapiens
  misc_RNA (1)...(19): siRNA sense strand
gagaaacccuacaaaugug

SEQ ID NO: 2120322 - RNA, 19 nt, Homo sapiens
  misc_RNA (1)...(19): siRNA sense strand
gagaaacccuacaaaugug

SEQ ID NO: 2120323 - RNA, 19 nt, Homo sapiens
  misc_RNA (1)...(19): siRNA sense strand
gagaaacccuacaaaugug

SEQ ID NO: 2120324 - RNA, 19 nt, Homo sapiens
  misc_RNA (1)...(19): siRNA sense strand
gagaaacccuacaaaugug

SEQ ID NO: 2120325 - RNA, 19 nt, Homo sapiens
  misc_RNA (1)...(19): siRNA sense strand
gagaaacccuacaaaugug

SEQ ID NO: 2120326 - RNA, 19 nt, Homo sapiens
  misc_RNA (1)...(19): siRNA sense strand
gagaaacccuacaaaugug

SEQ ID NO: 2120327 - RNA, 19 nt, Homo sapiens
  misc_RNA (1)...(19): siRNA sense strand
gagaaacccuacaaaugug

SEQ ID NO: 2120328 - RNA, 19 nt, Homo sapiens
  misc_RNA (1)...(19): siRNA sense strand
caaaagagguuauaaugga

SEQ ID NO: 2120329 - RNA, 19 nt, Homo sapiens
  misc_RNA (1)...(19): siRNA sense strand
gcagagccuuuaaguacuu

SEQ ID NO: 2120330 - RNA, 19 nt, Homo sapiens
  misc_RNA (1)...(19): siRNA sense strand
gagaaacgguacaaaugug

SEQ ID NO: 2120331 - RNA, 19 nt, Homo sapiens
  misc_RNA (1)...(19): siRNA sense strand
gagagaaacgguacaaaug

SEQ ID NO: 2120332 - RNA, 19 nt, Homo sapiens
  misc_RNA (1)...(19): siRNA sense strand
ucaguuacguguucucauu

SEQ ID NO: 2120333 - RNA, 19 nt, Homo sapiens
  misc_RNA (1)...(19): siRNA sense strand
gggagaaacccuucaaaug

SEQ ID NO: 2120334 - RNA, 19 nt, Homo sapiens
  misc_RNA (1)...(19): siRNA sense strand
ggagagaaacccuacaaau

SEQ ID NO: 2120335 - RNA, 19 nt, Homo sapiens
  misc_RNA (1)...(19): siRNA sense strand
ggagagaaacccuacaaau

SEQ ID NO: 2120336 - RNA, 19 nt, Homo sapiens
  misc_RNA (1)...(19): siRNA sense strand
ggagagaaacccuacaaau

SEQ ID NO: 2120337 - RNA, 19 nt, Homo sapiens
  misc_RNA (1)...(19): siRNA sense strand
ggagagaaacccuacaaau

SEQ ID NO: 2120338 - RNA, 19 nt, Homo sapiens
  misc_RNA (1)...(19): siRNA sense strand
ggagagaaacccuacaaau

SEQ ID NO: 2120339 - RNA, 19 nt, Homo sapiens
  misc_RNA (1)...(19): siRNA sense strand
ggagagaaacccuacaaau

SEQ ID NO: 2120340 - RNA, 19 nt, Homo sapiens
  misc_RNA (1)...(19): siRNA sense strand
ggagagaaacccuacaaau

SEQ ID NO: 2120341 - RNA, 19 nt, Homo sapiens
  misc_RNA (1)...(19): siRNA sense strand
ggagagaaacccuacaaau

SEQ ID NO: 2120342 - RNA, 19 nt, Homo sapiens
  misc_RNA (1)...(19): siRNA sense strand
ggagagaaacccuacaaau

SEQ ID NO: 2120343 - RNA, 19 nt, Homo sapiens
  misc_RNA (1)...(19): siRNA sense strand
ggagagaaacgguacaaau

SEQ ID NO: 2120344 - RNA, 19 nt, Homo sapiens
  misc_RNA (1)...(19): siRNA sense strand
gaauguggcagagccuuua

SEQ ID NO: 2120345 - RNA, 19 nt, Homo sapiens
  misc_RNA (1)...(19): siRNA sense strand
gacaacuacucaaagcaaa

SEQ ID NO: 2120346 - RNA, 19 nt, Homo sapiens
  misc_RNA (1)...(19): siRNA sense strand
gcaaggccuuuaagugcuu

SEQ ID NO: 2120347 - RNA, 19 nt, Homo sapiens
  misc_RNA (1)...(19): siRNA sense strand
gauaagacauacuggaaaa

SEQ ID NO: 2120348 - RNA, 19 nt, Homo sapiens
  misc_RNA (1)...(19): siRNA sense strand
agagaaacccuacaaaugu

SEQ ID NO: 2120349 - RNA, 19 nt, Homo sapiens
  misc_RNA (1)...(19): siRNA sense strand
agagaaacccuacaaaugu

SEQ ID NO: 2120350 - RNA, 19 nt, Homo sapiens
  misc_RNA (1)...(19): siRNA sense strand
agagaaacccuacaaaugu

SEQ ID NO: 2120351 - RNA, 19 nt, Homo sapiens
  misc_RNA (1)...(19): siRNA sense strand
agagaaacccuacaaaugu

SEQ ID NO: 2120352 - RNA, 19 nt, Homo sapiens
  misc_RNA (1)...(19): siRNA sense strand
agagaaacccuacaaaugu

SEQ ID NO: 2120353 - RNA, 19 nt, Homo sapiens
  misc_RNA (1)...(19): siRNA sense strand
agagaaacccuacaaaugu

SEQ ID NO: 2120354 - RNA, 19 nt, Homo sapiens
  misc_RNA (1)...(19): siRNA sense strand
agagaaacccuacaaaugu

SEQ ID NO: 2120355 - RNA, 19 nt, Homo sapiens
  misc_RNA (1)...(19): siRNA sense strand
agagaaacccuacaaaugu

SEQ ID NO: 2120356 - RNA, 19 nt, Homo sapiens
  misc_RNA (1)...(19): siRNA sense strand
agagaaacccuacaaaugu

SEQ ID NO: 2120357 - RNA, 19 nt, Homo sapiens
  misc_RNA (1)...(19): siRNA sense strand
ccucuaaccuuacuacaca

SEQ ID NO: 2120358 - RNA, 19 nt, Homo sapiens
  misc_RNA (1)...(19): siRNA sense strand
gagcagagcauaaaagauu

SEQ ID NO: 2120359 - RNA, 19 nt, Homo sapiens
  misc_RNA (1)...(19): siRNA sense strand
acacugagaagauaugaaa

SEQ ID NO: 2120360 - RNA, 19 nt, Homo sapiens
  misc_RNA (1)...(19): siRNA sense strand
aaagggcugugaaagugua

SEQ ID NO: 2120361 - RNA, 19 nt, Homo sapiens
  misc_RNA (1)...(19): siRNA sense strand
ccucacaccuuacuacaca

SEQ ID NO: 2120362 - RNA, 19 nt, Homo sapiens
  misc_RNA (1)...(19): siRNA sense strand
ccucacaccuuacuacaca

SEQ ID NO: 2120363 - RNA, 19 nt, Homo sapiens
  misc_RNA (1)...(19): siRNA sense strand
ggacaugacaauuuacagu

SEQ ID NO: 2120364 - RNA, 19 nt, Homo sapiens
  misc_RNA (1)...(19): siRNA sense strand
uuagagacguggccauaga

SEQ ID NO: 2120365 - RNA, 19 nt, Homo sapiens
  misc_RNA (1)...(19): siRNA sense strand
cauaagagaauucauacug

SEQ ID NO: 2120366 - RNA, 19 nt, Homo sapiens
  misc_RNA (1)...(19): siRNA sense strand
cauaagagaauucauacug

SEQ ID NO: 2120367 - RNA, 19 nt, Homo sapiens
  misc_RNA (1)...(19): siRNA sense strand
cauaagagaauucauacug

SEQ ID NO: 2120368 - RNA, 19 nt, Homo sapiens
  misc_RNA (1)...(19): siRNA sense strand
cauaagagaauucauacug

SEQ ID NO: 2120369 - RNA, 19 nt, Homo sapiens
  misc_RNA (1)...(19): siRNA sense strand
ggacagcaacccuucaagu

SEQ ID NO: 2120370 - RNA, 19 nt, Homo sapiens
  misc_RNA (1)...(19): siRNA sense strand
gaauguggcgaagccuuua

SEQ ID NO: 2120371 - RNA, 19 nt, Homo sapiens
  misc_RNA (1)...(19): siRNA sense strand
cauaagagaauucauacug

SEQ ID NO: 2120372 - RNA, 19 nt, Homo sapiens
  misc_RNA (1)...(19): siRNA sense strand
cugcacagcggaauuuaua

SEQ ID NO: 2120373 - RNA, 19 nt, Homo sapiens
  misc_RNA (1)...(19): siRNA sense strand
agaaacccuucaaauguga

SEQ ID NO: 2120374 - RNA, 19 nt, Homo sapiens
  misc_RNA (1)...(19): siRNA sense strand
gaauguggcaaggccuuua

SEQ ID NO: 2120375 - RNA, 19 nt, Homo sapiens
  misc_RNA (1)...(19): siRNA sense strand
caacugguccucacaccuu

SEQ ID NO: 2120376 - RNA, 19 nt, Homo sapiens
  misc_RNA (1)...(19): siRNA sense strand
ggucuuccuugguauuguu

SEQ ID NO: 2120377 - RNA, 19 nt, Homo sapiens
  misc_RNA (1)...(19): siRNA sense strand
gaauguggcaaggccuuua

SEQ ID NO: 2120378 - RNA, 19 nt, Homo sapiens
  misc_RNA (1)...(19): siRNA sense strand
gaauguggcaaggccuuua

SEQ ID NO: 2120379 - RNA, 19 nt, Homo sapiens
  misc_RNA (1)...(19): siRNA sense strand
caacugguccucacaccuu

SEQ ID NO: 2120380 - RNA, 19 nt, Homo sapiens
  misc_RNA (1)...(19): siRNA sense strand
aaccuggucuuccuuggua

SEQ ID NO: 2120381 - RNA, 19 nt, Homo sapiens
  misc_RNA (1)...(19): siRNA sense strand
gcuagcagguauacuugug

SEQ ID NO: 2120382 - RNA, 19 nt, Homo sapiens
  misc_RNA (1)...(19): siRNA sense strand
ucucaucccuuacuacaca

SEQ ID NO: 2120383 - RNA, 19 nt, Homo sapiens
  misc_RNA (1)...(19): siRNA sense strand
gacauaagauaagacauac

SEQ ID NO: 2120384 - RNA, 19 nt, Homo sapiens
  misc_RNA (1)...(19): siRNA sense strand
gcaaaauauuucaguguga

SEQ ID NO: 2120385 - RNA, 19 nt, Homo sapiens
  misc_RNA (1)...(19): siRNA sense strand
gccaguugaugucaugcua

SEQ ID NO: 2120386 - RNA, 19 nt, Homo sapiens
  misc_RNA (1)...(19): siRNA sense strand
cacauaagauaauccauac

SEQ ID NO: 2120387 - RNA, 19 nt, Homo sapiens
  misc_RNA (1)...(19): siRNA sense strand
cgcauaagauaauucauag

SEQ ID NO: 2120388 - RNA, 19 nt, Homo sapiens
  misc_RNA (1)...(19): siRNA sense strand
gggaaagaaacccaacaaa

SEQ ID NO: 2120389 - RNA, 19 nt, Homo sapiens
  misc_RNA (1)...(19): siRNA sense strand
aagcgcuccuuuauccuua

SEQ ID NO: 2120390 - RNA, 19 nt, Homo sapiens
  misc_RNA (1)...(19): siRNA sense strand
ggaaagugauguuagagaa

SEQ ID NO: 2120391 - RNA, 19 nt, Homo sapiens
  misc_RNA (1)...(19): siRNA sense strand
aaagaucccuggaauauga

SEQ ID NO: 2120392 - RNA, 19 nt, Homo sapiens
  misc_RNA (1)...(19): siRNA sense strand
gaagagacacaguauggua

SEQ ID NO: 2120393 - RNA, 19 nt, Homo sapiens
  misc_RNA (1)...(19): siRNA sense strand
agaggaaucuucuggagua

SEQ ID NO: 2120394 - RNA, 19 nt, Homo sapiens
  misc_RNA (1)...(19): siRNA sense strand
gaaaagaucccuggaauau

SEQ ID NO: 2120395 - RNA, 19 nt, Homo sapiens
  misc_RNA (1)...(19): siRNA sense strand
gggauguggucauagaauu

SEQ ID NO: 2120396 - RNA, 19 nt, Homo sapiens
  misc_RNA (1)...(19): siRNA sense strand
ggaguacucuuauuuugaa

SEQ ID NO: 2120397 - RNA, 19 nt, Homo sapiens
  misc_RNA (1)...(19): siRNA sense strand
cagcaagauuuguauagga

SEQ ID NO: 2120398 - RNA, 19 nt, Homo sapiens
  misc_RNA (1)...(19): siRNA sense strand
ggaaucuucuggaguacuc

SEQ ID NO: 2120399 - RNA, 19 nt, Homo sapiens
  misc_RNA (1)...(19): siRNA sense strand
uuagggauguggucauaga

SEQ ID NO: 2120400 - RNA, 19 nt, Homo sapiens
  misc_RNA (1)...(19): siRNA sense strand
auaggaaagugauguuaga

SEQ ID NO: 2120401 - RNA, 19 nt, Homo sapiens
  misc_RNA (1)...(19): siRNA sense strand
gauguuagagaacuucaga

SEQ ID NO: 2120402 - RNA, 19 nt, Homo sapiens
  misc_RNA (1)...(19): siRNA sense strand
caagauuuguauaggaaag

SEQ ID NO: 2120403 - RNA, 19 nt, Homo sapiens
  misc_RNA (1)...(19): siRNA sense strand
ggaaaagaucccuggaaua

SEQ ID NO: 2120404 - RNA, 19 nt, Homo sapiens
  misc_RNA (1)...(19): siRNA sense strand
ccugagguauggaguguau

SEQ ID NO: 2120405 - RNA, 19 nt, Homo sapiens
  misc_RNA (1)...(19): siRNA sense strand
guauaggaaagugauguua

SEQ ID NO: 2120406 - RNA, 19 nt, Homo sapiens
  misc_RNA (1)...(19): siRNA sense strand
gcucagcaagauuuguaua

SEQ ID NO: 2120407 - RNA, 19 nt, Homo sapiens
  misc_RNA (1)...(19): siRNA sense strand
uuagagaacuucagaaacc

SEQ ID NO: 2120408 - RNA, 19 nt, Homo sapiens
  misc_RNA (1)...(19): siRNA sense strand
gggauuacauaaaaccuuu

SEQ ID NO: 2120409 - RNA, 19 nt, Homo sapiens
  misc_RNA (1)...(19): siRNA sense strand
gaucaccugucuggagcaa

SEQ ID NO: 2120410 - RNA, 19 nt, Homo sapiens
  misc_RNA (1)...(19): siRNA sense strand
ccuggaauaugaagagaca

SEQ ID NO: 2120411 - RNA, 19 nt, Homo sapiens
  misc_RNA (1)...(19): siRNA sense strand
aauaugaagagacacagua

SEQ ID NO: 2120412 - RNA, 19 nt, Homo sapiens
  misc_RNA (1)...(19): siRNA sense strand
agcaagauuuguauaggaa

SEQ ID NO: 2120413 - RNA, 19 nt, Homo sapiens
  misc_RNA (1)...(19): siRNA sense strand
ggauguggucauagaauuc

SEQ ID NO: 2120414 - RNA, 19 nt, Homo sapiens
  misc_RNA (1)...(19): siRNA sense strand
gcaagauuuguauaggaaa

SEQ ID NO: 2120415 - RNA, 19 nt, Homo sapiens
  misc_RNA (1)...(19): siRNA sense strand
gaaagugauguuagagaac

SEQ ID NO: 2120416 - RNA, 19 nt, Homo sapiens
  misc_RNA (1)...(19): siRNA sense strand
aggcauauucuuuguggua

SEQ ID NO: 2120417 - RNA, 19 nt, Homo sapiens
  misc_RNA (1)...(19): siRNA sense strand
guucuuggguauugauguc

SEQ ID NO: 2120418 - RNA, 19 nt, Homo sapiens
  misc_RNA (1)...(19): siRNA sense strand
aaagugauguuagagaacu

SEQ ID NO: 2120419 - RNA, 19 nt, Homo sapiens
  misc_RNA (1)...(19): siRNA sense strand
cuucuggaguacucuuauu

SEQ ID NO: 2120420 - RNA, 19 nt, Homo sapiens
  misc_RNA (1)...(19): siRNA sense strand
acaauguauuucagucuag

SEQ ID NO: 2120421 - RNA, 19 nt, Homo sapiens
  misc_RNA (1)...(19): siRNA sense strand
gaauaugaagagacacagu

SEQ ID NO: 2120422 - RNA, 19 nt, Homo sapiens
  misc_RNA (1)...(19): siRNA sense strand
uguuagagaacuucagaaa

SEQ ID NO: 2120423 - RNA, 19 nt, Homo sapiens
  misc_RNA (1)...(19): siRNA sense strand
ggguauugaugucucuaag

SEQ ID NO: 2120424 - RNA, 19 nt, Homo sapiens
  misc_RNA (1)...(19): siRNA sense strand
ucagcaagauuuguauagg

SEQ ID NO: 2120425 - RNA, 19 nt, Homo sapiens
  misc_RNA (1)...(19): siRNA sense strand
caauguauuucagucuagu

SEQ ID NO: 2120426 - RNA, 19 nt, Homo sapiens
  misc_RNA (1)...(19): siRNA sense strand
gggcugagaggaaucuucu

SEQ ID NO: 2120427 - RNA, 19 nt, Homo sapiens
  misc_RNA (1)...(19): siRNA sense strand
uauggaguguauccuguca

SEQ ID NO: 2120428 - RNA, 19 nt, Homo sapiens
  misc_RNA (1)...(19): siRNA sense strand
auuuagggauguggucaua

SEQ ID NO: 2120429 - RNA, 19 nt, Homo sapiens
  misc_RNA (1)...(19): siRNA sense strand
uauaggaaagugauguuag

SEQ ID NO: 2120430 - RNA, 19 nt, Homo sapiens
  misc_RNA (1)...(19): siRNA sense strand
uggaguguauccugucaag

SEQ ID NO: 2120431 - RNA, 19 nt, Homo sapiens
  misc_RNA (1)...(19): siRNA sense strand
gaaagaaacccuacaaaug

SEQ ID NO: 2120432 - RNA, 19 nt, Homo sapiens
  misc_RNA (1)...(19): siRNA sense strand
gaaagaaacccuacaaaug

SEQ ID NO: 2120433 - RNA, 19 nt, Homo sapiens
  misc_RNA (1)...(19): siRNA sense strand
gaagagacaugagauggua

SEQ ID NO: 2120434 - RNA, 19 nt, Homo sapiens
  misc_RNA (1)...(19): siRNA sense strand
acacuuagcucaacauaaa

SEQ ID NO: 2120435 - RNA, 19 nt, Homo sapiens
  misc_RNA (1)...(19): siRNA sense strand
aaacaauccucaacccuua

SEQ ID NO: 2120436 - RNA, 19 nt, Homo sapiens
  misc_RNA (1)...(19): siRNA sense strand
gagagaagcccuacaaaug

SEQ ID NO: 2120437 - RNA, 19 nt, Homo sapiens
  misc_RNA (1)...(19): siRNA sense strand
caaagaauguuacaaugga

SEQ ID NO: 2120438 - RNA, 19 nt, Homo sapiens
  misc_RNA (1)...(19): siRNA sense strand
agagaaaccuuacaaaugu

SEQ ID NO: 2120439 - RNA, 19 nt, Homo sapiens
  misc_RNA (1)...(19): siRNA sense strand
gcacaaagaauguuacaau

SEQ ID NO: 2120440 - RNA, 19 nt, Homo sapiens
  misc_RNA (1)...(19): siRNA sense strand
cuacaaaugugaagaaugu

SEQ ID NO: 2120441 - RNA, 19 nt, Homo sapiens
  misc_RNA (1)...(19): siRNA sense strand
cuacaaaugugaagaaugu

SEQ ID NO: 2120442 - RNA, 19 nt, Homo sapiens
  misc_RNA (1)...(19): siRNA sense strand
gagagaaaccuuacaaaug

SEQ ID NO: 2120443 - RNA, 19 nt, Homo sapiens
  misc_RNA (1)...(19): siRNA sense strand
cuacaaaugugaagaaugu

SEQ ID NO: 2120444 - RNA, 19 nt, Homo sapiens
  misc_RNA (1)...(19): siRNA sense strand
ggacuuaaccaguguuuga

SEQ ID NO: 2120445 - RNA, 19 nt, Homo sapiens
  misc_RNA (1)...(19): siRNA sense strand
gagagaaacccuacaaaug

SEQ ID NO: 2120446 - RNA, 19 nt, Homo sapiens
  misc_RNA (1)...(19): siRNA sense strand
gagagaaacccuacaaaug

SEQ ID NO: 2120447 - RNA, 19 nt, Homo sapiens
  misc_RNA (1)...(19): siRNA sense strand
gagagaaacccuacaaaug

SEQ ID NO: 2120448 - RNA, 19 nt, Homo sapiens
  misc_RNA (1)...(19): siRNA sense strand
ggaaagaaacccuacaaau

SEQ ID NO: 2120449 - RNA, 19 nt, Homo sapiens
  misc_RNA (1)...(19): siRNA sense strand
ggaaagaaacccuacaaau

SEQ ID NO: 2120450 - RNA, 19 nt, Homo sapiens
  misc_RNA (1)...(19): siRNA sense strand
gcacauaagauaauucaug

SEQ ID NO: 2120451 - RNA, 19 nt, Homo sapiens
  misc_RNA (1)...(19): siRNA sense strand
gagaaacccuacaaaugug

SEQ ID NO: 2120452 - RNA, 19 nt, Homo sapiens
  misc_RNA (1)...(19): siRNA sense strand
gagaaacccuacaaaugug

SEQ ID NO: 2120453 - RNA, 19 nt, Homo sapiens
  misc_RNA (1)...(19): siRNA sense strand
gauaagacauacuggaaag

SEQ ID NO: 2120454 - RNA, 19 nt, Homo sapiens
  misc_RNA (1)...(19): siRNA sense strand
aaagaaacccuacaaaugu

SEQ ID NO: 2120455 - RNA, 19 nt, Homo sapiens
  misc_RNA (1)...(19): siRNA sense strand
ucaaaccuuucuacacaua

SEQ ID NO: 2120456 - RNA, 19 nt, Homo sapiens
  misc_RNA (1)...(19): siRNA sense strand
ggagagaaaccuuacaaau

SEQ ID NO: 2120457 - RNA, 19 nt, Homo sapiens
  misc_RNA (1)...(19): siRNA sense strand
gagaagcccuacaaaugug

SEQ ID NO: 2120458 - RNA, 19 nt, Homo sapiens
  misc_RNA (1)...(19): siRNA sense strand
ugacaacauugcaaagauu

SEQ ID NO: 2120459 - RNA, 19 nt, Homo sapiens
  misc_RNA (1)...(19): siRNA sense strand
gagagaaacccuacaagug

SEQ ID NO: 2120460 - RNA, 19 nt, Homo sapiens
  misc_RNA (1)...(19): siRNA sense strand
ccaguuguauguucuuauu

SEQ ID NO: 2120461 - RNA, 19 nt, Homo sapiens
  misc_RNA (1)...(19): siRNA sense strand
ccucaaaccuuucuacaca

SEQ ID NO: 2120462 - RNA, 19 nt, Homo sapiens
  misc_RNA (1)...(19): siRNA sense strand
aaacagacauacgauaaga

SEQ ID NO: 2120463 - RNA, 19 nt, Homo sapiens
  misc_RNA (1)...(19): siRNA sense strand
ccucaacucuuucuaaaca

SEQ ID NO: 2120464 - RNA, 19 nt, Homo sapiens
  misc_RNA (1)...(19): siRNA sense strand
ggagagaaacccuacaaau

SEQ ID NO: 2120465 - RNA, 19 nt, Homo sapiens
  misc_RNA (1)...(19): siRNA sense strand
ggagagaaacccuacaaau

SEQ ID NO: 2120466 - RNA, 19 nt, Homo sapiens
  misc_RNA (1)...(19): siRNA sense strand
ggagagaaacccuacaaau

SEQ ID NO: 2120467 - RNA, 19 nt, Homo sapiens
  misc_RNA (1)...(19): siRNA sense strand
ucaaacagacauacgauaa

SEQ ID NO: 2120468 - RNA, 19 nt, Homo sapiens
  misc_RNA (1)...(19): siRNA sense strand
agacauacgauaagacaua

SEQ ID NO: 2120469 - RNA, 19 nt, Homo sapiens
  misc_RNA (1)...(19): siRNA sense strand
ggagagaagcccuacaaau

SEQ ID NO: 2120470 - RNA, 19 nt, Homo sapiens
  misc_RNA (1)...(19): siRNA sense strand
uaacaacuccucuauucuu

SEQ ID NO: 2120471 - RNA, 19 nt, Homo sapiens
  misc_RNA (1)...(19): siRNA sense strand
ggagagaagcccuacaaau

SEQ ID NO: 2120472 - RNA, 19 nt, Homo sapiens
  misc_RNA (1)...(19): siRNA sense strand
aaagaaccuuggaauguga

SEQ ID NO: 2120473 - RNA, 19 nt, Homo sapiens
  misc_RNA (1)...(19): siRNA sense strand
ugacaaauaugugaaaguc

SEQ ID NO: 2120474 - RNA, 19 nt, Homo sapiens
  misc_RNA (1)...(19): siRNA sense strand
gcaaaccuuacuacacaua

SEQ ID NO: 2120475 - RNA, 19 nt, Homo sapiens
  misc_RNA (1)...(19): siRNA sense strand
agagaaacccuacaaaugu

SEQ ID NO: 2120476 - RNA, 19 nt, Homo sapiens
  misc_RNA (1)...(19): siRNA sense strand
aaauugugcuggugagaaa

SEQ ID NO: 2120477 - RNA, 19 nt, Homo sapiens
  misc_RNA (1)...(19): siRNA sense strand
uuuaacaacuccucuauuc

SEQ ID NO: 2120478 - RNA, 19 nt, Homo sapiens
  misc_RNA (1)...(19): siRNA sense strand
gaaaagaaccuuggaaugu

SEQ ID NO: 2120479 - RNA, 19 nt, Homo sapiens
  misc_RNA (1)...(19): siRNA sense strand
agagaaacccuacaaaugu

SEQ ID NO: 2120480 - RNA, 19 nt, Homo sapiens
  misc_RNA (1)...(19): siRNA sense strand
agagaaacccuacaaaugu

SEQ ID NO: 2120481 - RNA, 19 nt, Homo sapiens
  misc_RNA (1)...(19): siRNA sense strand
cacaaagaauguuacaaug

SEQ ID NO: 2120482 - RNA, 19 nt, Homo sapiens
  misc_RNA (1)...(19): siRNA sense strand
aacaacuccucuauucuua

SEQ ID NO: 2120483 - RNA, 19 nt, Homo sapiens
  misc_RNA (1)...(19): siRNA sense strand
ggagagaaacccuacaagu

SEQ ID NO: 2120484 - RNA, 19 nt, Homo sapiens
  misc_RNA (1)...(19): siRNA sense strand
cugcaaaccuuacuacaca

SEQ ID NO: 2120485 - RNA, 19 nt, Homo sapiens
  misc_RNA (1)...(19): siRNA sense strand
gaaauugugcuggugagaa

SEQ ID NO: 2120486 - RNA, 19 nt, Homo sapiens
  misc_RNA (1)...(19): siRNA sense strand
uugcaugcuuucacacuua

SEQ ID NO: 2120487 - RNA, 19 nt, Homo sapiens
  misc_RNA (1)...(19): siRNA sense strand
ccucacaccuuacuacaca

SEQ ID NO: 2120488 - RNA, 19 nt, Homo sapiens
  misc_RNA (1)...(19): siRNA sense strand
guccucaacucuuucuaaa

SEQ ID NO: 2120489 - RNA, 19 nt, Homo sapiens
  misc_RNA (1)...(19): siRNA sense strand
uggcaaagcuuuuaaccua

SEQ ID NO: 2120490 - RNA, 19 nt, Homo sapiens
  misc_RNA (1)...(19): siRNA sense strand
ccucaacccuuacuacaca

SEQ ID NO: 2120491 - RNA, 19 nt, Homo sapiens
  misc_RNA (1)...(19): siRNA sense strand
ccucaacccuuacuacaca

SEQ ID NO: 2120492 - RNA, 19 nt, Homo sapiens
  misc_RNA (1)...(19): siRNA sense strand
gagaaaccuuacaaaugug

SEQ ID NO: 2120493 - RNA, 19 nt, Homo sapiens
  misc_RNA (1)...(19): siRNA sense strand
aaccggcucucacaccuua

SEQ ID NO: 2120494 - RNA, 19 nt, Homo sapiens
  misc_RNA (1)...(19): siRNA sense strand
aaagaaacccuacaaaugc

SEQ ID NO: 2120495 - RNA, 19 nt, Homo sapiens
  misc_RNA (1)...(19): siRNA sense strand
uggcaaagcuuuuaaacaa

SEQ ID NO: 2120496 - RNA, 19 nt, Homo sapiens
  misc_RNA (1)...(19): siRNA sense strand
aaccaguccucacaccuua

SEQ ID NO: 2120497 - RNA, 19 nt, Homo sapiens
  misc_RNA (1)...(19): siRNA sense strand
cauaagagaauucauacug

SEQ ID NO: 2120498 - RNA, 19 nt, Homo sapiens
  misc_RNA (1)...(19): siRNA sense strand
cauaagagaauucauacug

SEQ ID NO: 2120499 - RNA, 19 nt, Homo sapiens
  misc_RNA (1)...(19): siRNA sense strand
uaaggccuuuagccaguua

SEQ ID NO: 2120500 - RNA, 19 nt, Homo sapiens
  misc_RNA (1)...(19): siRNA sense strand
aguguaaggugcacaaaga

SEQ ID NO: 2120501 - RNA, 19 nt, Homo sapiens
  misc_RNA (1)...(19): siRNA sense strand
aaccaguccucaacucuuu

SEQ ID NO: 2120502 - RNA, 19 nt, Homo sapiens
  misc_RNA (1)...(19): siRNA sense strand
ucacaacuuacuacacaua

SEQ ID NO: 2120503 - RNA, 19 nt, Homo sapiens
  misc_RNA (1)...(19): siRNA sense strand
gauaauucauacuggaaag

SEQ ID NO: 2120504 - RNA, 19 nt, Homo sapiens
  misc_RNA (1)...(19): siRNA sense strand
ucucacaccuuacuacaca

SEQ ID NO: 2120505 - RNA, 19 nt, Homo sapiens
  misc_RNA (1)...(19): siRNA sense strand
gacaacauugcaaagauuu

SEQ ID NO: 2120506 - RNA, 19 nt, Homo sapiens
  misc_RNA (1)...(19): siRNA sense strand
gauucauacuggagagaaa

SEQ ID NO: 2120507 - RNA, 19 nt, Homo sapiens
  misc_RNA (1)...(19): siRNA sense strand
agagaaacccuacaagugu

SEQ ID NO: 2120508 - RNA, 19 nt, Homo sapiens
  misc_RNA (1)...(19): siRNA sense strand
gauucauacuggagagaaa

SEQ ID NO: 2120509 - RNA, 19 nt, Homo sapiens
  misc_RNA (1)...(19): siRNA sense strand
ucucacaccuuacuacaca

SEQ ID NO: 2120510 - RNA, 19 nt, Homo sapiens
  misc_RNA (1)...(19): siRNA sense strand
gaauucauacuggaaagaa

SEQ ID NO: 2120511 - RNA, 19 nt, Homo sapiens
  misc_RNA (1)...(19): siRNA sense strand
gugacaacauugcaaagau

SEQ ID NO: 2120512 - RNA, 19 nt, Homo sapiens
  misc_RNA (1)...(19): siRNA sense strand
cuacaaaugcgaagagugu

SEQ ID NO: 2120513 - RNA, 19 nt, Homo sapiens
  misc_RNA (1)...(19): siRNA sense strand
guaaggugcacaaagaaug

SEQ ID NO: 2120514 - RNA, 19 nt, Homo sapiens
  misc_RNA (1)...(19): siRNA sense strand
caacuccucuauucuuaac

SEQ ID NO: 2120515 - RNA, 19 nt, Homo sapiens
  misc_RNA (1)...(19): siRNA sense strand
ugaagaauguggcaaagcu

SEQ ID NO: 2120516 - RNA, 19 nt, Homo sapiens
  misc_RNA (1)...(19): siRNA sense strand
ugaagaauguggcaaagcu

SEQ ID NO: 2120517 - RNA, 19 nt, Homo sapiens
  misc_RNA (1)...(19): siRNA sense strand
ugaagaauguggcaaagcu

SEQ ID NO: 2120518 - RNA, 19 nt, Homo sapiens
  misc_RNA (1)...(19): siRNA sense strand
ugaagaauguggcaaagcu

SEQ ID NO: 2120519 - RNA, 19 nt, Homo sapiens
  misc_RNA (1)...(19): siRNA sense strand
ugaagaauguggcaaagcu

SEQ ID NO: 2120520 - RNA, 19 nt, Homo sapiens
  misc_RNA (1)...(19): siRNA sense strand
gugggaaagccuauaauga

SEQ ID NO: 2120521 - RNA, 19 nt, Homo sapiens
  misc_RNA (1)...(19): siRNA sense strand
acacauaagagaauucaug

SEQ ID NO: 2120522 - RNA, 19 nt, Homo sapiens
  misc_RNA (1)...(19): siRNA sense strand
gcaaagcuuuuaaacaauc

SEQ ID NO: 2120523 - RNA, 19 nt, Homo sapiens
  misc_RNA (1)...(19): siRNA sense strand
gaauguuacaauggacuua

SEQ ID NO: 2120524 - RNA, 19 nt, Homo sapiens
  misc_RNA (1)...(19): siRNA sense strand
agagaagcccuacaaaugu

SEQ ID NO: 2120525 - RNA, 19 nt, Homo sapiens
  misc_RNA (1)...(19): siRNA sense strand
aagaaacccuacaaaugug

SEQ ID NO: 2120526 - RNA, 19 nt, Homo sapiens
  misc_RNA (1)...(19): siRNA sense strand
uaagacauacuggaaagaa

SEQ ID NO: 2120527 - RNA, 19 nt, Homo sapiens
  misc_RNA (1)...(19): siRNA sense strand
gaaacucuacaaaccugaa

SEQ ID NO: 2120528 - RNA, 19 nt, Homo sapiens
  misc_RNA (1)...(19): siRNA sense strand
acagaaaccuggucuucgu

SEQ ID NO: 2120529 - RNA, 19 nt, Homo sapiens
  misc_RNA (1)...(19): siRNA sense strand
gugauacugagaagauaua

SEQ ID NO: 2120530 - RNA, 19 nt, Homo sapiens
  misc_RNA (1)...(19): siRNA sense strand
aaagugauacugagaagau

SEQ ID NO: 2120531 - RNA, 19 nt, Homo sapiens
  misc_RNA (1)...(19): siRNA sense strand
gagagaagcuguaugaaug

SEQ ID NO: 2120532 - RNA, 19 nt, Homo sapiens
  misc_RNA (1)...(19): siRNA sense strand
gaaagaaacccuucgauug

SEQ ID NO: 2120533 - RNA, 19 nt, Homo sapiens
  misc_RNA (1)...(19): siRNA sense strand
gagaaacccuauaaaugua

SEQ ID NO: 2120534 - RNA, 19 nt, Homo sapiens
  misc_RNA (1)...(19): siRNA sense strand
gaacaacccuaugcaugua

SEQ ID NO: 2120535 - RNA, 19 nt, Homo sapiens
  misc_RNA (1)...(19): siRNA sense strand
gagaaacccuaucaaugua

SEQ ID NO: 2120536 - RNA, 19 nt, Homo sapiens
  misc_RNA (1)...(19): siRNA sense strand
gggaaaguguuaucucaua

SEQ ID NO: 2120537 - RNA, 19 nt, Homo sapiens
  misc_RNA (1)...(19): siRNA sense strand
gagaagccauauacacaua

SEQ ID NO: 2120538 - RNA, 19 nt, Homo sapiens
  misc_RNA (1)...(19): siRNA sense strand
ggaaagccuucagcuguua

SEQ ID NO: 2120539 - RNA, 19 nt, Homo sapiens
  misc_RNA (1)...(19): siRNA sense strand
gguaaagccuucagucuug

SEQ ID NO: 2120540 - RNA, 19 nt, Homo sapiens
  misc_RNA (1)...(19): siRNA sense strand
ucaaauaccuuucucaaca

SEQ ID NO: 2120541 - RNA, 19 nt, Homo sapiens
  misc_RNA (1)...(19): siRNA sense strand
gagagaaaccuuauaaaug

SEQ ID NO: 2120542 - RNA, 19 nt, Homo sapiens
  misc_RNA (1)...(19): siRNA sense strand
ggagauaggccucauaaau

SEQ ID NO: 2120543 - RNA, 19 nt, Homo sapiens
  misc_RNA (1)...(19): siRNA sense strand
gagagaaacccuauaaaug

SEQ ID NO: 2120544 - RNA, 19 nt, Homo sapiens
  misc_RNA (1)...(19): siRNA sense strand
ggaaagcauucaguuguuu

SEQ ID NO: 2120545 - RNA, 19 nt, Homo sapiens
  misc_RNA (1)...(19): siRNA sense strand
gaagagagacgcccuggaa

SEQ ID NO: 2120546 - RNA, 19 nt, Homo sapiens
  misc_RNA (1)...(19): siRNA sense strand
ggagagaaaccuuauaaau

SEQ ID NO: 2120547 - RNA, 19 nt, Homo sapiens
  misc_RNA (1)...(19): siRNA sense strand
ggaaagaaacccuucgauu

SEQ ID NO: 2120548 - RNA, 19 nt, Homo sapiens
  misc_RNA (1)...(19): siRNA sense strand
caagagaaaucuaagaagu

SEQ ID NO: 2120549 - RNA, 19 nt, Homo sapiens
  misc_RNA (1)...(19): siRNA sense strand
ggaaaggcuucaauucuca

SEQ ID NO: 2120550 - RNA, 19 nt, Homo sapiens
  misc_RNA (1)...(19): siRNA sense strand
gguaaagccuucacucguu

SEQ ID NO: 2120551 - RNA, 19 nt, Homo sapiens
  misc_RNA (1)...(19): siRNA sense strand
gagaaacccuaugaaugua

SEQ ID NO: 2120552 - RNA, 19 nt, Homo sapiens
  misc_RNA (1)...(19): siRNA sense strand
gagauaggccucauaaaug

SEQ ID NO: 2120553 - RNA, 19 nt, Homo sapiens
  misc_RNA (1)...(19): siRNA sense strand
ggagagaaacccuauaaau

SEQ ID NO: 2120554 - RNA, 19 nt, Homo sapiens
  misc_RNA (1)...(19): siRNA sense strand
gggaaagccuucagugguu

SEQ ID NO: 2120555 - RNA, 19 nt, Homo sapiens
  misc_RNA (1)...(19): siRNA sense strand
gaagucacaugauaacaca

SEQ ID NO: 2120556 - RNA, 19 nt, Homo sapiens
  misc_RNA (1)...(19): siRNA sense strand
ggagauggaccuuauaaau

SEQ ID NO: 2120557 - RNA, 19 nt, Homo sapiens
  misc_RNA (1)...(19): siRNA sense strand
gaaccuggacuguauagaa

SEQ ID NO: 2120558 - RNA, 19 nt, Homo sapiens
  misc_RNA (1)...(19): siRNA sense strand
gaaacccuaucaauguaaa

SEQ ID NO: 2120559 - RNA, 19 nt, Homo sapiens
  misc_RNA (1)...(19): siRNA sense strand
ggucauucgucucuuaauu

SEQ ID NO: 2120560 - RNA, 19 nt, Homo sapiens
  misc_RNA (1)...(19): siRNA sense strand
gaagccauauacacauaaa

SEQ ID NO: 2120561 - RNA, 19 nt, Homo sapiens
  misc_RNA (1)...(19): siRNA sense strand
gagagaaacccuaugaaug

SEQ ID NO: 2120562 - RNA, 19 nt, Homo sapiens
  misc_RNA (1)...(19): siRNA sense strand
gagagaaacccuaucaaug

SEQ ID NO: 2120563 - RNA, 19 nt, Homo sapiens
  misc_RNA (1)...(19): siRNA sense strand
gagagaaacccuaugaaug

SEQ ID NO: 2120564 - RNA, 19 nt, Homo sapiens
  misc_RNA (1)...(19): siRNA sense strand
gagagaaaccguaugaaug

SEQ ID NO: 2120565 - RNA, 19 nt, Homo sapiens
  misc_RNA (1)...(19): siRNA sense strand
gagauggaccuuauaaaug

SEQ ID NO: 2120566 - RNA, 19 nt, Homo sapiens
  misc_RNA (1)...(19): siRNA sense strand
gagagaagccauaugaaug

SEQ ID NO: 2120567 - RNA, 19 nt, Homo sapiens
  misc_RNA (1)...(19): siRNA sense strand
gaagucgucuugggucauu

SEQ ID NO: 2120568 - RNA, 19 nt, Homo sapiens
  misc_RNA (1)...(19): siRNA sense strand
ggaaagccaucagucauca

SEQ ID NO: 2120569 - RNA, 19 nt, Homo sapiens
  misc_RNA (1)...(19): siRNA sense strand
agagaaaccuuauaaaugc

SEQ ID NO: 2120570 - RNA, 19 nt, Homo sapiens
  misc_RNA (1)...(19): siRNA sense strand
gggaaagcauucaguuguu

SEQ ID NO: 2120571 - RNA, 19 nt, Homo sapiens
  misc_RNA (1)...(19): siRNA sense strand
ucacagaccauuucaaaga

SEQ ID NO: 2120572 - RNA, 19 nt, Homo sapiens
  misc_RNA (1)...(19): siRNA sense strand
ggaaagccuucagugguuu

SEQ ID NO: 2120573 - RNA, 19 nt, Homo sapiens
  misc_RNA (1)...(19): siRNA sense strand
gggaaagccuucagcuguu

SEQ ID NO: 2120574 - RNA, 19 nt, Homo sapiens
  misc_RNA (1)...(19): siRNA sense strand
gaaacccuaugaaugucua

SEQ ID NO: 2120575 - RNA, 19 nt, Homo sapiens
  misc_RNA (1)...(19): siRNA sense strand
ggagugaaacccuauaaau

SEQ ID NO: 2120576 - RNA, 19 nt, Homo sapiens
  misc_RNA (1)...(19): siRNA sense strand
ggagagaaaccguaugaau

SEQ ID NO: 2120577 - RNA, 19 nt, Homo sapiens
  misc_RNA (1)...(19): siRNA sense strand
gagaagcuguaugaaugua

SEQ ID NO: 2120578 - RNA, 19 nt, Homo sapiens
  misc_RNA (1)...(19): siRNA sense strand
ggagagaagcuguaugaau

SEQ ID NO: 2120579 - RNA, 19 nt, Homo sapiens
  misc_RNA (1)...(19): siRNA sense strand
ggagagaaacccuaugaau

SEQ ID NO: 2120580 - RNA, 19 nt, Homo sapiens
  misc_RNA (1)...(19): siRNA sense strand
gagaagccauaugaaugua

SEQ ID NO: 2120581 - RNA, 19 nt, Homo sapiens
  misc_RNA (1)...(19): siRNA sense strand
ggagagaagccauaugaau

SEQ ID NO: 2120582 - RNA, 19 nt, Homo sapiens
  misc_RNA (1)...(19): siRNA sense strand
ggagagaaacccuaucaau

SEQ ID NO: 2120583 - RNA, 19 nt, Homo sapiens
  misc_RNA (1)...(19): siRNA sense strand
ggagagaaacccuaugaau

SEQ ID NO: 2120584 - RNA, 19 nt, Homo sapiens
  misc_RNA (1)...(19): siRNA sense strand
guaccuaucuaagacauga

SEQ ID NO: 2120585 - RNA, 19 nt, Homo sapiens
  misc_RNA (1)...(19): siRNA sense strand
gagaaaccguaugaaugua

SEQ ID NO: 2120586 - RNA, 19 nt, Homo sapiens
  misc_RNA (1)...(19): siRNA sense strand
gggaaaggcuucaauucuc

SEQ ID NO: 2120587 - RNA, 19 nt, Homo sapiens
  misc_RNA (1)...(19): siRNA sense strand
ggaaaguguuaucucauag

SEQ ID NO: 2120588 - RNA, 19 nt, Homo sapiens
  misc_RNA (1)...(19): siRNA sense strand
gaacuuacacuggagagaa

SEQ ID NO: 2120589 - RNA, 19 nt, Homo sapiens
  misc_RNA (1)...(19): siRNA sense strand
caugugagcaucaggaaua

SEQ ID NO: 2120590 - RNA, 19 nt, Homo sapiens
  misc_RNA (1)...(19): siRNA sense strand
agauggaccuuauaaaugu

SEQ ID NO: 2120591 - RNA, 19 nt, Homo sapiens
  misc_RNA (1)...(19): siRNA sense strand
gcauucaguuguuucaaau

SEQ ID NO: 2120592 - RNA, 19 nt, Homo sapiens
  misc_RNA (1)...(19): siRNA sense strand
uuaggaaccuggacuguau

SEQ ID NO: 2120593 - RNA, 19 nt, Homo sapiens
  misc_RNA (1)...(19): siRNA sense strand
gagugaaacccuauaaaug

SEQ ID NO: 2120594 - RNA, 19 nt, Homo sapiens
  misc_RNA (1)...(19): siRNA sense strand
ucaaagacaugaaagaacu

SEQ ID NO: 2120595 - RNA, 19 nt, Homo sapiens
  misc_RNA (1)...(19): siRNA sense strand
agagaaacccuauaaaugu

SEQ ID NO: 2120596 - RNA, 19 nt, Homo sapiens
  misc_RNA (1)...(19): siRNA sense strand
gagagaagccauauacaca

SEQ ID NO: 2120597 - RNA, 19 nt, Homo sapiens
  misc_RNA (1)...(19): siRNA sense strand
uaagaagucauacauguga

SEQ ID NO: 2120598 - RNA, 19 nt, Homo sapiens
  misc_RNA (1)...(19): siRNA sense strand
gaaaacaacccuaugaaga

SEQ ID NO: 2120599 - RNA, 19 nt, Homo sapiens
  misc_RNA (1)...(19): siRNA sense strand
cuggaaagauacucucuaa

SEQ ID NO: 2120600 - RNA, 19 nt, Homo sapiens
  misc_RNA (1)...(19): siRNA sense strand
ucuaagaagucauacaugu

SEQ ID NO: 2120601 - RNA, 19 nt, Homo sapiens
  misc_RNA (1)...(19): siRNA sense strand
gaacacacacuggagagaa

SEQ ID NO: 2120602 - RNA, 19 nt, Homo sapiens
  misc_RNA (1)...(19): siRNA sense strand
aaagaaacccuucgauugu

SEQ ID NO: 2120603 - RNA, 19 nt, Homo sapiens
  misc_RNA (1)...(19): siRNA sense strand
aagaaacccuucgauugua

SEQ ID NO: 2120604 - RNA, 19 nt, Homo sapiens
  misc_RNA (1)...(19): siRNA sense strand
agagaaacccuaugaaugu

SEQ ID NO: 2120605 - RNA, 19 nt, Homo sapiens
  misc_RNA (1)...(19): siRNA sense strand
agagaaacccuaucaaugu

SEQ ID NO: 2120606 - RNA, 19 nt, Homo sapiens
  misc_RNA (1)...(19): siRNA sense strand
agagaaacccuaugaaugu

SEQ ID NO: 2120607 - RNA, 19 nt, Homo sapiens
  misc_RNA (1)...(19): siRNA sense strand
aaacaacccuaugaagaga

SEQ ID NO: 2120608 - RNA, 19 nt, Homo sapiens
  misc_RNA (1)...(19): siRNA sense strand
uaaaaggacucacuggaaa

SEQ ID NO: 2120609 - RNA, 19 nt, Homo sapiens
  misc_RNA (1)...(19): siRNA sense strand
gaaaagccuucagucauuu

SEQ ID NO: 2120610 - RNA, 19 nt, Homo sapiens
  misc_RNA (1)...(19): siRNA sense strand
caaauaccuuucucaacau

SEQ ID NO: 2120611 - RNA, 19 nt, Homo sapiens
  misc_RNA (1)...(19): siRNA sense strand
ggagacggaccacauaaau

SEQ ID NO: 2120612 - RNA, 19 nt, Homo sapiens
  misc_RNA (1)...(19): siRNA sense strand
agauaggccucauaaaugu

SEQ ID NO: 2120613 - RNA, 19 nt, Homo sapiens
  misc_RNA (1)...(19): siRNA sense strand
gauggaccuuauaaaugua

SEQ ID NO: 2120614 - RNA, 19 nt, Homo sapiens
  misc_RNA (1)...(19): siRNA sense strand
gaaaugucaugcaggaaac

SEQ ID NO: 2120615 - RNA, 19 nt, Homo sapiens
  misc_RNA (1)...(19): siRNA sense strand
agaaacccuucgauuguaa

SEQ ID NO: 2120616 - RNA, 19 nt, Homo sapiens
  misc_RNA (1)...(19): siRNA sense strand
gagaagccauaugagugua

SEQ ID NO: 2120617 - RNA, 19 nt, Homo sapiens
  misc_RNA (1)...(19): siRNA sense strand
ggagagaagccauaugagu

SEQ ID NO: 2120618 - RNA, 19 nt, Homo sapiens
  misc_RNA (1)...(19): siRNA sense strand
gaauguaagcaguguucua

SEQ ID NO: 2120619 - RNA, 19 nt, Homo sapiens
  misc_RNA (1)...(19): siRNA sense strand
ucuaagacaugaaagaauc

SEQ ID NO: 2120620 - RNA, 19 nt, Homo sapiens
  misc_RNA (1)...(19): siRNA sense strand
ggaaaccuccgaagacaca

SEQ ID NO: 2120621 - RNA, 19 nt, Homo sapiens
  misc_RNA (1)...(19): siRNA sense strand
gaagcuguaugaauguaag

SEQ ID NO: 2120622 - RNA, 19 nt, Homo sapiens
  misc_RNA (1)...(19): siRNA sense strand
gaagccauaugaauguaag

SEQ ID NO: 2120623 - RNA, 19 nt, Homo sapiens
  misc_RNA (1)...(19): siRNA sense strand
uuagugaucucucuuccuu

SEQ ID NO: 2120624 - RNA, 19 nt, Homo sapiens
  misc_RNA (1)...(19): siRNA sense strand
gaaaucaugaaacuacuca

SEQ ID NO: 2120625 - RNA, 19 nt, Homo sapiens
  misc_RNA (1)...(19): siRNA sense strand
gaaugucuacaauguggua

SEQ ID NO: 2120626 - RNA, 19 nt, Homo sapiens
  misc_RNA (1)...(19): siRNA sense strand
cuaugaaugucuacaaugu

SEQ ID NO: 2120627 - RNA, 19 nt, Homo sapiens
  misc_RNA (1)...(19): siRNA sense strand
agagaaaucuaagaaguca

SEQ ID NO: 2120628 - RNA, 19 nt, Homo sapiens
  misc_RNA (1)...(19): siRNA sense strand
gaaacccuaugaauguaag

SEQ ID NO: 2120629 - RNA, 19 nt, Homo sapiens
  misc_RNA (1)...(19): siRNA sense strand
gaaaccguaugaauguaag

SEQ ID NO: 2120630 - RNA, 19 nt, Homo sapiens
  misc_RNA (1)...(19): siRNA sense strand
ggaaagcauugaguucucu

SEQ ID NO: 2120631 - RNA, 19 nt, Homo sapiens
  misc_RNA (1)...(19): siRNA sense strand
gagaaacucugugaaagua

SEQ ID NO: 2120632 - RNA, 19 nt, Homo sapiens
  misc_RNA (1)...(19): siRNA sense strand
ugaaagaacucauaccauu

SEQ ID NO: 2120633 - RNA, 19 nt, Homo sapiens
  misc_RNA (1)...(19): siRNA sense strand
gguaaagccuucagaugua

SEQ ID NO: 2120634 - RNA, 19 nt, Homo sapiens
  misc_RNA (1)...(19): siRNA sense strand
gaaagaacucauaccauua

SEQ ID NO: 2120635 - RNA, 19 nt, Homo sapiens
  misc_RNA (1)...(19): siRNA sense strand
ggucauucaucucuuaaua

SEQ ID NO: 2120636 - RNA, 19 nt, Homo sapiens
  misc_RNA (1)...(19): siRNA sense strand
guaagaaagccuucaguua

SEQ ID NO: 2120637 - RNA, 19 nt, Homo sapiens
  misc_RNA (1)...(19): siRNA sense strand
gaaacucugugaaaguaaa

SEQ ID NO: 2120638 - RNA, 19 nt, Homo sapiens
  misc_RNA (1)...(19): siRNA sense strand
ugauaaagcuugcacuaaa

SEQ ID NO: 2120639 - RNA, 19 nt, Homo sapiens
  misc_RNA (1)...(19): siRNA sense strand
gguaaagaauguacagaaa

SEQ ID NO: 2120640 - RNA, 19 nt, Homo sapiens
  misc_RNA (1)...(19): siRNA sense strand
ggaauaacaccaugugaaa

SEQ ID NO: 2120641 - RNA, 19 nt, Homo sapiens
  misc_RNA (1)...(19): siRNA sense strand
uaaagaaagucaucacugu

SEQ ID NO: 2120642 - RNA, 19 nt, Homo sapiens
  misc_RNA (1)...(19): siRNA sense strand
uaagaaagccuucaguuau

SEQ ID NO: 2120643 - RNA, 19 nt, Homo sapiens
  misc_RNA (1)...(19): siRNA sense strand
gagaaacccuaugaaugua

SEQ ID NO: 2120644 - RNA, 19 nt, Homo sapiens
  misc_RNA (1)...(19): siRNA sense strand
gaacucauaccauuaauag

SEQ ID NO: 2120645 - RNA, 19 nt, Homo sapiens
  misc_RNA (1)...(19): siRNA sense strand
gagaaacccuaugaaugua

SEQ ID NO: 2120646 - RNA, 19 nt, Homo sapiens
  misc_RNA (1)...(19): siRNA sense strand
gauaaacccuauggaugua

SEQ ID NO: 2120647 - RNA, 19 nt, Homo sapiens
  misc_RNA (1)...(19): siRNA sense strand
gagaaacccuaugaaugua

SEQ ID NO: 2120648 - RNA, 19 nt, Homo sapiens
  misc_RNA (1)...(19): siRNA sense strand
gcaaagccuucacuuguuc

SEQ ID NO: 2120649 - RNA, 19 nt, Homo sapiens
  misc_RNA (1)...(19): siRNA sense strand
ggacacaagucaucugagu

SEQ ID NO: 2120650 - RNA, 19 nt, Homo sapiens
  misc_RNA (1)...(19): siRNA sense strand
ggagauggaccuuauaaau

SEQ ID NO: 2120651 - RNA, 19 nt, Homo sapiens
  misc_RNA (1)...(19): siRNA sense strand
gagagaauccauauagaaa

SEQ ID NO: 2120652 - RNA, 19 nt, Homo sapiens
  misc_RNA (1)...(19): siRNA sense strand
ucaagaaccugaccucugu

SEQ ID NO: 2120653 - RNA, 19 nt, Homo sapiens
  misc_RNA (1)...(19): siRNA sense strand
ggagagaauccauauagaa

SEQ ID NO: 2120654 - RNA, 19 nt, Homo sapiens
  misc_RNA (1)...(19): siRNA sense strand
gagagaaacccuaucaaug

SEQ ID NO: 2120655 - RNA, 19 nt, Homo sapiens
  misc_RNA (1)...(19): siRNA sense strand
ccaauuacauucgauauca

SEQ ID NO: 2120656 - RNA, 19 nt, Homo sapiens
  misc_RNA (1)...(19): siRNA sense strand
gagagaaacccuaugaaug

SEQ ID NO: 2120657 - RNA, 19 nt, Homo sapiens
  misc_RNA (1)...(19): siRNA sense strand
gagagaaacccuaugaaug

SEQ ID NO: 2120658 - RNA, 19 nt, Homo sapiens
  misc_RNA (1)...(19): siRNA sense strand
gagagaaacccuaugaaug

SEQ ID NO: 2120659 - RNA, 19 nt, Homo sapiens
  misc_RNA (1)...(19): siRNA sense strand
gaaugccgaugaauguaaa

SEQ ID NO: 2120660 - RNA, 19 nt, Homo sapiens
  misc_RNA (1)...(19): siRNA sense strand
gagauggaccuuauaaaug

SEQ ID NO: 2120661 - RNA, 19 nt, Homo sapiens
  misc_RNA (1)...(19): siRNA sense strand
gaauguaggcaauguggua

SEQ ID NO: 2120662 - RNA, 19 nt, Homo sapiens
  misc_RNA (1)...(19): siRNA sense strand
ggauaaacccuauggaugu

SEQ ID NO: 2120663 - RNA, 19 nt, Homo sapiens
  misc_RNA (1)...(19): siRNA sense strand
gauaaagcuugcacuaaag

SEQ ID NO: 2120664 - RNA, 19 nt, Homo sapiens
  misc_RNA (1)...(19): siRNA sense strand
gaaaagcauucagguauuu

SEQ ID NO: 2120665 - RNA, 19 nt, Homo sapiens
  misc_RNA (1)...(19): siRNA sense strand
ucaguuaucuugacuccuu

SEQ ID NO: 2120666 - RNA, 19 nt, Homo sapiens
  misc_RNA (1)...(19): siRNA sense strand
ggagagaaacccuaucaau

SEQ ID NO: 2120667 - RNA, 19 nt, Homo sapiens
  misc_RNA (1)...(19): siRNA sense strand
ggagagaaacccuaugaau

SEQ ID NO: 2120668 - RNA, 19 nt, Homo sapiens
  misc_RNA (1)...(19): siRNA sense strand
ggcaaagccuucacuuguu

SEQ ID NO: 2120669 - RNA, 19 nt, Homo sapiens
  misc_RNA (1)...(19): siRNA sense strand
ggagagaaacccuaugaau

SEQ ID NO: 2120670 - RNA, 19 nt, Homo sapiens
  misc_RNA (1)...(19): siRNA sense strand
ggagagaaacccuaugaau

SEQ ID NO: 2120671 - RNA, 19 nt, Homo sapiens
  misc_RNA (1)...(19): siRNA sense strand
ggacacacacuggagauaa

SEQ ID NO: 2120672 - RNA, 19 nt, Homo sapiens
  misc_RNA (1)...(19): siRNA sense strand
ucaaccagauugcagauga

SEQ ID NO: 2120673 - RNA, 19 nt, Homo sapiens
  misc_RNA (1)...(19): siRNA sense strand
gaaccugaccucuguagga

SEQ ID NO: 2120674 - RNA, 19 nt, Homo sapiens
  misc_RNA (1)...(19): siRNA sense strand
agauggaccuuauaaaugu

SEQ ID NO: 2120675 - RNA, 19 nt, Homo sapiens
  misc_RNA (1)...(19): siRNA sense strand
gagaaacccuaucaaugca

SEQ ID NO: 2120676 - RNA, 19 nt, Homo sapiens
  misc_RNA (1)...(19): siRNA sense strand
gaauguaagcacuguggua

SEQ ID NO: 2120677 - RNA, 19 nt, Homo sapiens
  misc_RNA (1)...(19): siRNA sense strand
uaaggaauguggaaaagua

SEQ ID NO: 2120678 - RNA, 19 nt, Homo sapiens
  misc_RNA (1)...(19): siRNA sense strand
gauaagccauaugagugua

SEQ ID NO: 2120679 - RNA, 19 nt, Homo sapiens
  misc_RNA (1)...(19): siRNA sense strand
ggagauaagccauaugagu

SEQ ID NO: 2120680 - RNA, 19 nt, Homo sapiens
  misc_RNA (1)...(19): siRNA sense strand
gaaaguaaagaaagucauc

SEQ ID NO: 2120681 - RNA, 19 nt, Homo sapiens
  misc_RNA (1)...(19): siRNA sense strand
agagaaacccuaugaaugu

SEQ ID NO: 2120682 - RNA, 19 nt, Homo sapiens
  misc_RNA (1)...(19): siRNA sense strand
ggaaaagcauucagguauu

SEQ ID NO: 2120683 - RNA, 19 nt, Homo sapiens
  misc_RNA (1)...(19): siRNA sense strand
agagaaacccuaugaaugu

SEQ ID NO: 2120684 - RNA, 19 nt, Homo sapiens
  misc_RNA (1)...(19): siRNA sense strand
agagaaacccuaugaaugu

SEQ ID NO: 2120685 - RNA, 19 nt, Homo sapiens
  misc_RNA (1)...(19): siRNA sense strand
gagaaagcuucaaccagau

SEQ ID NO: 2120686 - RNA, 19 nt, Homo sapiens
  misc_RNA (1)...(19): siRNA sense strand
gguaaggccuuuauuucca

SEQ ID NO: 2120687 - RNA, 19 nt, Homo sapiens
  misc_RNA (1)...(19): siRNA sense strand
cuucacaacuucaaauuca

SEQ ID NO: 2120688 - RNA, 19 nt, Homo sapiens
  misc_RNA (1)...(19): siRNA sense strand
gugaaaccauauaagugua

SEQ ID NO: 2120689 - RNA, 19 nt, Homo sapiens
  misc_RNA (1)...(19): siRNA sense strand
gauggaccuuauaaaugua

SEQ ID NO: 2120690 - RNA, 19 nt, Homo sapiens
  misc_RNA (1)...(19): siRNA sense strand
ggagugggcuuugcuggau

SEQ ID NO: 2120691 - RNA, 19 nt, Homo sapiens
  misc_RNA (1)...(19): siRNA sense strand
ucaggaauauggagagaau

SEQ ID NO: 2120692 - RNA, 19 nt, Homo sapiens
  misc_RNA (1)...(19): siRNA sense strand
gaaguuggcacgggucauu

SEQ ID NO: 2120693 - RNA, 19 nt, Homo sapiens
  misc_RNA (1)...(19): siRNA sense strand
gaacauugaagaugaguac

SEQ ID NO: 2120694 - RNA, 19 nt, Homo sapiens
  misc_RNA (1)...(19): siRNA sense strand
ucaguuccauucaguauca

SEQ ID NO: 2120695 - RNA, 19 nt, Homo sapiens
  misc_RNA (1)...(19): siRNA sense strand
guaaggccuuuauuuccaa

SEQ ID NO: 2120696 - RNA, 19 nt, Homo sapiens
  misc_RNA (1)...(19): siRNA sense strand
aagaaagccuucaguuauc

SEQ ID NO: 2120697 - RNA, 19 nt, Homo sapiens
  misc_RNA (1)...(19): siRNA sense strand
cgaugaauguaaagaaugu

SEQ ID NO: 2120698 - RNA, 19 nt, Homo sapiens
  misc_RNA (1)...(19): siRNA sense strand
ccacuacccuuccaguaca

SEQ ID NO: 2120699 - RNA, 19 nt, Homo sapiens
  misc_RNA (1)...(19): siRNA sense strand
ccauaugaguguaagguau

SEQ ID NO: 2120700 - RNA, 19 nt, Homo sapiens
  misc_RNA (1)...(19): siRNA sense strand
gaauguaagcaauguggaa

SEQ ID NO: 2120701 - RNA, 19 nt, Homo sapiens
  misc_RNA (1)...(19): siRNA sense strand
cauugaagaugaguacaaa

SEQ ID NO: 2120702 - RNA, 19 nt, Homo sapiens
  misc_RNA (1)...(19): siRNA sense strand
agacacacacugaggauaa

SEQ ID NO: 2120703 - RNA, 19 nt, Homo sapiens
  misc_RNA (1)...(19): siRNA sense strand
caggagaaaucuaagucuu

SEQ ID NO: 2120704 - RNA, 19 nt, Homo sapiens
  misc_RNA (1)...(19): siRNA sense strand
gcacugugguaaggccuuu

SEQ ID NO: 2120705 - RNA, 19 nt, Homo sapiens
  misc_RNA (1)...(19): siRNA sense strand
gaaacccuaugaauguaag

SEQ ID NO: 2120706 - RNA, 19 nt, Homo sapiens
  misc_RNA (1)...(19): siRNA sense strand
gcaggaaaccuucaagaac

SEQ ID NO: 2120707 - RNA, 19 nt, Homo sapiens
  misc_RNA (1)...(19): siRNA sense strand
gaaacccuaugaauguaag

SEQ ID NO: 2120708 - RNA, 19 nt, Homo sapiens
  misc_RNA (1)...(19): siRNA sense strand
gugggaaagccuucuauuu

SEQ ID NO: 2120709 - RNA, 19 nt, Homo sapiens
  misc_RNA (1)...(19): siRNA sense strand
gacacacacugaggauaaa

SEQ ID NO: 2120710 - RNA, 19 nt, Homo sapiens
  misc_RNA (1)...(19): siRNA sense strand
gcagaugacaugcugaaca

SEQ ID NO: 2120711 - RNA, 19 nt, Homo sapiens
  misc_RNA (1)...(19): siRNA sense strand
gccgaugaauguaaagaau

SEQ ID NO: 2120712 - RNA, 19 nt, Homo sapiens
  misc_RNA (1)...(19): siRNA sense strand
gaggauaaacccuauggau

SEQ ID NO: 2120713 - RNA, 19 nt, Homo sapiens
  misc_RNA (1)...(19): siRNA sense strand
uaaagaaugugggaaugca

SEQ ID NO: 2120714 - RNA, 19 nt, Homo sapiens
  misc_RNA (1)...(19): siRNA sense strand
gcauucagguauuucucuu

SEQ ID NO: 2120715 - RNA, 19 nt, Homo sapiens
  misc_RNA (1)...(19): siRNA sense strand
acacaagucaucugaguau

SEQ ID NO: 2120716 - RNA, 19 nt, Homo sapiens
  misc_RNA (1)...(19): siRNA sense strand
caguggagauggaccuuau

SEQ ID NO: 2120717 - RNA, 19 nt, Homo sapiens
  misc_RNA (1)...(19): siRNA sense strand
guauuucucuuccuugcau

SEQ ID NO: 2120718 - RNA, 19 nt, Homo sapiens
  misc_RNA (1)...(19): siRNA sense strand
aggccuuuauuuccaauua

SEQ ID NO: 2120719 - RNA, 19 nt, Homo sapiens
  misc_RNA (1)...(19): siRNA sense strand
ccaguuccauucgauauca

SEQ ID NO: 2120720 - RNA, 19 nt, Homo sapiens
  misc_RNA (1)...(19): siRNA sense strand
ugaaugccgaugaauguaa

SEQ ID NO: 2120721 - RNA, 19 nt, Homo sapiens
  misc_RNA (1)...(19): siRNA sense strand
gacucacacuggagagaaa

SEQ ID NO: 2120722 - RNA, 19 nt, Homo sapiens
  misc_RNA (1)...(19): siRNA sense strand
gacucacacuggagagaaa

SEQ ID NO: 2120723 - RNA, 19 nt, Homo sapiens
  misc_RNA (1)...(19): siRNA sense strand
gacacacacuggagauaag

SEQ ID NO: 2120724 - RNA, 19 nt, Homo sapiens
  misc_RNA (1)...(19): siRNA sense strand
ucagguauuucucuuccuu

SEQ ID NO: 2120725 - RNA, 19 nt, Homo sapiens
  misc_RNA (1)...(19): siRNA sense strand
gaauguaaggaauguggaa

SEQ ID NO: 2120726 - RNA, 19 nt, Homo sapiens
  misc_RNA (1)...(19): siRNA sense strand
gacucacacuggagagaaa

SEQ ID NO: 2120727 - RNA, 19 nt, Homo sapiens
  misc_RNA (1)...(19): siRNA sense strand
gacucacacuggagagaaa

SEQ ID NO: 2120728 - RNA, 19 nt, Homo sapiens
  misc_RNA (1)...(19): siRNA sense strand
gaaagcuucaaccagauug

SEQ ID NO: 2120729 - RNA, 19 nt, Homo sapiens
  misc_RNA (1)...(19): siRNA sense strand
aaacauggaaaguucagaa

SEQ ID NO: 2120730 - RNA, 19 nt, Homo sapiens
  misc_RNA (1)...(19): siRNA sense strand
uggcaaagccuucacuugu

SEQ ID NO: 2120731 - RNA, 19 nt, Homo sapiens
  misc_RNA (1)...(19): siRNA sense strand
gagaaacucugugaaagua

SEQ ID NO: 2120732 - RNA, 19 nt, Homo sapiens
  misc_RNA (1)...(19): siRNA sense strand
ugaaagaacucauaccauu

SEQ ID NO: 2120733 - RNA, 19 nt, Homo sapiens
  misc_RNA (1)...(19): siRNA sense strand
gguaaagccuucagaugua

SEQ ID NO: 2120734 - RNA, 19 nt, Homo sapiens
  misc_RNA (1)...(19): siRNA sense strand
gaaagaacucauaccauua

SEQ ID NO: 2120735 - RNA, 19 nt, Homo sapiens
  misc_RNA (1)...(19): siRNA sense strand
ggucauucaucucuuaaua

SEQ ID NO: 2120736 - RNA, 19 nt, Homo sapiens
  misc_RNA (1)...(19): siRNA sense strand
guaagaaagccuucaguua

SEQ ID NO: 2120737 - RNA, 19 nt, Homo sapiens
  misc_RNA (1)...(19): siRNA sense strand
gaaacucugugaaaguaaa

SEQ ID NO: 2120738 - RNA, 19 nt, Homo sapiens
  misc_RNA (1)...(19): siRNA sense strand
ugauaaagcuugcacuaaa

SEQ ID NO: 2120739 - RNA, 19 nt, Homo sapiens
  misc_RNA (1)...(19): siRNA sense strand
gguaaagaauguacagaaa

SEQ ID NO: 2120740 - RNA, 19 nt, Homo sapiens
  misc_RNA (1)...(19): siRNA sense strand
ggaauaacaccaugugaaa

SEQ ID NO: 2120741 - RNA, 19 nt, Homo sapiens
  misc_RNA (1)...(19): siRNA sense strand
uaaagaaagucaucacugu

SEQ ID NO: 2120742 - RNA, 19 nt, Homo sapiens
  misc_RNA (1)...(19): siRNA sense strand
uaagaaagccuucaguuau

SEQ ID NO: 2120743 - RNA, 19 nt, Homo sapiens
  misc_RNA (1)...(19): siRNA sense strand
gagaaacccuaugaaugua

SEQ ID NO: 2120744 - RNA, 19 nt, Homo sapiens
  misc_RNA (1)...(19): siRNA sense strand
gaacucauaccauuaauag

SEQ ID NO: 2120745 - RNA, 19 nt, Homo sapiens
  misc_RNA (1)...(19): siRNA sense strand
gagaaacccuaugaaugua

SEQ ID NO: 2120746 - RNA, 19 nt, Homo sapiens
  misc_RNA (1)...(19): siRNA sense strand
gauaaacccuauggaugua

SEQ ID NO: 2120747 - RNA, 19 nt, Homo sapiens
  misc_RNA (1)...(19): siRNA sense strand
gagaaacccuaugaaugua

SEQ ID NO: 2120748 - RNA, 19 nt, Homo sapiens
  misc_RNA (1)...(19): siRNA sense strand
gcaaagccuucacuuguuc

SEQ ID NO: 2120749 - RNA, 19 nt, Homo sapiens
  misc_RNA (1)...(19): siRNA sense strand
ggacacaagucaucugagu

SEQ ID NO: 2120750 - RNA, 19 nt, Homo sapiens
  misc_RNA (1)...(19): siRNA sense strand
ggagauggaccuuauaaau

SEQ ID NO: 2120751 - RNA, 19 nt, Homo sapiens
  misc_RNA (1)...(19): siRNA sense strand
gagagaauccauauagaaa

SEQ ID NO: 2120752 - RNA, 19 nt, Homo sapiens
  misc_RNA (1)...(19): siRNA sense strand
ucaagaaccugaccucugu

SEQ ID NO: 2120753 - RNA, 19 nt, Homo sapiens
  misc_RNA (1)...(19): siRNA sense strand
ggagagaauccauauagaa

SEQ ID NO: 2120754 - RNA, 19 nt, Homo sapiens
  misc_RNA (1)...(19): siRNA sense strand
gagagaaacccuaucaaug

SEQ ID NO: 2120755 - RNA, 19 nt, Homo sapiens
  misc_RNA (1)...(19): siRNA sense strand
ccaauuacauucgauauca

SEQ ID NO: 2120756 - RNA, 19 nt, Homo sapiens
  misc_RNA (1)...(19): siRNA sense strand
gagagaaacccuaugaaug

SEQ ID NO: 2120757 - RNA, 19 nt, Homo sapiens
  misc_RNA (1)...(19): siRNA sense strand
gagagaaacccuaugaaug

SEQ ID NO: 2120758 - RNA, 19 nt, Homo sapiens
  misc_RNA (1)...(19): siRNA sense strand
gagagaaacccuaugaaug

SEQ ID NO: 2120759 - RNA, 19 nt, Homo sapiens
  misc_RNA (1)...(19): siRNA sense strand
gaaugccgaugaauguaaa

SEQ ID NO: 2120760 - RNA, 19 nt, Homo sapiens
  misc_RNA (1)...(19): siRNA sense strand
gagauggaccuuauaaaug

SEQ ID NO: 2120761 - RNA, 19 nt, Homo sapiens
  misc_RNA (1)...(19): siRNA sense strand
gaauguaggcaauguggua

SEQ ID NO: 2120762 - RNA, 19 nt, Homo sapiens
  misc_RNA (1)...(19): siRNA sense strand
ggauaaacccuauggaugu

SEQ ID NO: 2120763 - RNA, 19 nt, Homo sapiens
  misc_RNA (1)...(19): siRNA sense strand
gauaaagcuugcacuaaag

SEQ ID NO: 2120764 - RNA, 19 nt, Homo sapiens
  misc_RNA (1)...(19): siRNA sense strand
gaaaagcauucagguauuu

SEQ ID NO: 2120765 - RNA, 19 nt, Homo sapiens
  misc_RNA (1)...(19): siRNA sense strand
ucaguuaucuugacuccuu

SEQ ID NO: 2120766 - RNA, 19 nt, Homo sapiens
  misc_RNA (1)...(19): siRNA sense strand
ggagagaaacccuaucaau

SEQ ID NO: 2120767 - RNA, 19 nt, Homo sapiens
  misc_RNA (1)...(19): siRNA sense strand
ggagagaaacccuaugaau

SEQ ID NO: 2120768 - RNA, 19 nt, Homo sapiens
  misc_RNA (1)...(19): siRNA sense strand
ggcaaagccuucacuuguu

SEQ ID NO: 2120769 - RNA, 19 nt, Homo sapiens
  misc_RNA (1)...(19): siRNA sense strand
ggagagaaacccuaugaau

SEQ ID NO: 2120770 - RNA, 19 nt, Homo sapiens
  misc_RNA (1)...(19): siRNA sense strand
ggagagaaacccuaugaau

SEQ ID NO: 2120771 - RNA, 19 nt, Homo sapiens
  misc_RNA (1)...(19): siRNA sense strand
ggacacacacuggagauaa

SEQ ID NO: 2120772 - RNA, 19 nt, Homo sapiens
  misc_RNA (1)...(19): siRNA sense strand
gaaccugaccucuguagga

SEQ ID NO: 2120773 - RNA, 19 nt, Homo sapiens
  misc_RNA (1)...(19): siRNA sense strand
ucaaccagauugcagauga

SEQ ID NO: 2120774 - RNA, 19 nt, Homo sapiens
  misc_RNA (1)...(19): siRNA sense strand
agauggaccuuauaaaugu

SEQ ID NO: 2120775 - RNA, 19 nt, Homo sapiens
  misc_RNA (1)...(19): siRNA sense strand
gagaaacccuaucaaugca

SEQ ID NO: 2120776 - RNA, 19 nt, Homo sapiens
  misc_RNA (1)...(19): siRNA sense strand
gaauguaagcacuguggua

SEQ ID NO: 2120777 - RNA, 19 nt, Homo sapiens
  misc_RNA (1)...(19): siRNA sense strand
uaaggaauguggaaaagua

SEQ ID NO: 2120778 - RNA, 19 nt, Homo sapiens
  misc_RNA (1)...(19): siRNA sense strand
gauaagccauaugagugua

SEQ ID NO: 2120779 - RNA, 19 nt, Homo sapiens
  misc_RNA (1)...(19): siRNA sense strand
ggagauaagccauaugagu

SEQ ID NO: 2120780 - RNA, 19 nt, Homo sapiens
  misc_RNA (1)...(19): siRNA sense strand
gaaaguaaagaaagucauc

SEQ ID NO: 2120781 - RNA, 19 nt, Homo sapiens
  misc_RNA (1)...(19): siRNA sense strand
agagaaacccuaugaaugu

SEQ ID NO: 2120782 - RNA, 19 nt, Homo sapiens
  misc_RNA (1)...(19): siRNA sense strand
ggaaaagcauucagguauu

SEQ ID NO: 2120783 - RNA, 19 nt, Homo sapiens
  misc_RNA (1)...(19): siRNA sense strand
agagaaacccuaugaaugu

SEQ ID NO: 2120784 - RNA, 19 nt, Homo sapiens
  misc_RNA (1)...(19): siRNA sense strand
agagaaacccuaugaaugu

SEQ ID NO: 2120785 - RNA, 19 nt, Homo sapiens
  misc_RNA (1)...(19): siRNA sense strand
gagaaagcuucaaccagau

SEQ ID NO: 2120786 - RNA, 19 nt, Homo sapiens
  misc_RNA (1)...(19): siRNA sense strand
gguaaggccuuuauuucca

SEQ ID NO: 2120787 - RNA, 19 nt, Homo sapiens
  misc_RNA (1)...(19): siRNA sense strand
ggagugggcuuugcuggau

SEQ ID NO: 2120788 - RNA, 19 nt, Homo sapiens
  misc_RNA (1)...(19): siRNA sense strand
cuucacaacuucaaauuca

SEQ ID NO: 2120789 - RNA, 19 nt, Homo sapiens
  misc_RNA (1)...(19): siRNA sense strand
gugaaaccauauaagugua

SEQ ID NO: 2120790 - RNA, 19 nt, Homo sapiens
  misc_RNA (1)...(19): siRNA sense strand
gauggaccuuauaaaugua

SEQ ID NO: 2120791 - RNA, 19 nt, Homo sapiens
  misc_RNA (1)...(19): siRNA sense strand
ucaggaauauggagagaau

SEQ ID NO: 2120792 - RNA, 19 nt, Homo sapiens
  misc_RNA (1)...(19): siRNA sense strand
gaaguuggcacgggucauu

SEQ ID NO: 2120793 - RNA, 19 nt, Homo sapiens
  misc_RNA (1)...(19): siRNA sense strand
ucaguuccauucaguauca

SEQ ID NO: 2120794 - RNA, 19 nt, Homo sapiens
  misc_RNA (1)...(19): siRNA sense strand
gaacauugaagaugaguac

SEQ ID NO: 2120795 - RNA, 19 nt, Homo sapiens
  misc_RNA (1)...(19): siRNA sense strand
guaaggccuuuauuuccaa

SEQ ID NO: 2120796 - RNA, 19 nt, Homo sapiens
  misc_RNA (1)...(19): siRNA sense strand
aagaaagccuucaguuauc

SEQ ID NO: 2120797 - RNA, 19 nt, Homo sapiens
  misc_RNA (1)...(19): siRNA sense strand
cgaugaauguaaagaaugu

SEQ ID NO: 2120798 - RNA, 19 nt, Homo sapiens
  misc_RNA (1)...(19): siRNA sense strand
ccacuacccuuccaguaca

SEQ ID NO: 2120799 - RNA, 19 nt, Homo sapiens
  misc_RNA (1)...(19): siRNA sense strand
cauugaagaugaguacaaa

SEQ ID NO: 2120800 - RNA, 19 nt, Homo sapiens
  misc_RNA (1)...(19): siRNA sense strand
ccauaugaguguaagguau

SEQ ID NO: 2120801 - RNA, 19 nt, Homo sapiens
  misc_RNA (1)...(19): siRNA sense strand
gaauguaagcaauguggaa

SEQ ID NO: 2120802 - RNA, 19 nt, Homo sapiens
  misc_RNA (1)...(19): siRNA sense strand
agacacacacugaggauaa

SEQ ID NO: 2120803 - RNA, 19 nt, Homo sapiens
  misc_RNA (1)...(19): siRNA sense strand
gaaacccuaugaauguaag

SEQ ID NO: 2120804 - RNA, 19 nt, Homo sapiens
  misc_RNA (1)...(19): siRNA sense strand
gcacugugguaaggccuuu

SEQ ID NO: 2120805 - RNA, 19 nt, Homo sapiens
  misc_RNA (1)...(19): siRNA sense strand
caggagaaaucuaagucuu

SEQ ID NO: 2120806 - RNA, 19 nt, Homo sapiens
  misc_RNA (1)...(19): siRNA sense strand
gaaacccuaugaauguaag

SEQ ID NO: 2120807 - RNA, 19 nt, Homo sapiens
  misc_RNA (1)...(19): siRNA sense strand
gcaggaaaccuucaagaac

SEQ ID NO: 2120808 - RNA, 19 nt, Homo sapiens
  misc_RNA (1)...(19): siRNA sense strand
gugggaaagccuucuauuu

SEQ ID NO: 2120809 - RNA, 19 nt, Homo sapiens
  misc_RNA (1)...(19): siRNA sense strand
gacacacacugaggauaaa

SEQ ID NO: 2120810 - RNA, 19 nt, Homo sapiens
  misc_RNA (1)...(19): siRNA sense strand
gcagaugacaugcugaaca

SEQ ID NO: 2120811 - RNA, 19 nt, Homo sapiens
  misc_RNA (1)...(19): siRNA sense strand
gccgaugaauguaaagaau

SEQ ID NO: 2120812 - RNA, 19 nt, Homo sapiens
  misc_RNA (1)...(19): siRNA sense strand
gaggauaaacccuauggau

SEQ ID NO: 2120813 - RNA, 19 nt, Homo sapiens
  misc_RNA (1)...(19): siRNA sense strand
uaaagaaugugggaaugca

SEQ ID NO: 2120814 - RNA, 19 nt, Homo sapiens
  misc_RNA (1)...(19): siRNA sense strand
gcauucagguauuucucuu

SEQ ID NO: 2120815 - RNA, 19 nt, Homo sapiens
  misc_RNA (1)...(19): siRNA sense strand
acacaagucaucugaguau

SEQ ID NO: 2120816 - RNA, 19 nt, Homo sapiens
  misc_RNA (1)...(19): siRNA sense strand
caguggagauggaccuuau

SEQ ID NO: 2120817 - RNA, 19 nt, Homo sapiens
  misc_RNA (1)...(19): siRNA sense strand
guauuucucuuccuugcau

SEQ ID NO: 2120818 - RNA, 19 nt, Homo sapiens
  misc_RNA (1)...(19): siRNA sense strand
aggccuuuauuuccaauua

SEQ ID NO: 2120819 - RNA, 19 nt, Homo sapiens
  misc_RNA (1)...(19): siRNA sense strand
ccaguuccauucgauauca

SEQ ID NO: 2120820 - RNA, 19 nt, Homo sapiens
  misc_RNA (1)...(19): siRNA sense strand
ugaaugccgaugaauguaa

SEQ ID NO: 2120821 - RNA, 19 nt, Homo sapiens
  misc_RNA (1)...(19): siRNA sense strand
gacucacacuggagagaaa

SEQ ID NO: 2120822 - RNA, 19 nt, Homo sapiens
  misc_RNA (1)...(19): siRNA sense strand
gacucacacuggagagaaa

SEQ ID NO: 2120823 - RNA, 19 nt, Homo sapiens
  misc_RNA (1)...(19): siRNA sense strand
gacacacacuggagauaag

SEQ ID NO: 2120824 - RNA, 19 nt, Homo sapiens
  misc_RNA (1)...(19): siRNA sense strand
ucagguauuucucuuccuu

SEQ ID NO: 2120825 - RNA, 19 nt, Homo sapiens
  misc_RNA (1)...(19): siRNA sense strand
gaauguaaggaauguggaa

SEQ ID NO: 2120826 - RNA, 19 nt, Homo sapiens
  misc_RNA (1)...(19): siRNA sense strand
gacucacacuggagagaaa

SEQ ID NO: 2120827 - RNA, 19 nt, Homo sapiens
  misc_RNA (1)...(19): siRNA sense strand
gacucacacuggagagaaa

SEQ ID NO: 2120828 - RNA, 19 nt, Homo sapiens
  misc_RNA (1)...(19): siRNA sense strand
aaacauggaaaguucagaa

SEQ ID NO: 2120829 - RNA, 19 nt, Homo sapiens
  misc_RNA (1)...(19): siRNA sense strand
uggcaaagccuucacuugu

SEQ ID NO: 2120830 - RNA, 19 nt, Homo sapiens
  misc_RNA (1)...(19): siRNA sense strand
agucaucacuguggagaaa

SEQ ID NO: 2120831 - RNA, 19 nt, Homo sapiens
  misc_RNA (1)...(19): siRNA sense strand
gaagagacaugagaugauu

SEQ ID NO: 2120832 - RNA, 19 nt, Homo sapiens
  misc_RNA (1)...(19): siRNA sense strand
gcacauaagagaauucaua

SEQ ID NO: 2120833 - RNA, 19 nt, Homo sapiens
  misc_RNA (1)...(19): siRNA sense strand
gcacauaagagaauucaua

SEQ ID NO: 2120834 - RNA, 19 nt, Homo sapiens
  misc_RNA (1)...(19): siRNA sense strand
gugaaagucucucauauau

SEQ ID NO: 2120835 - RNA, 19 nt, Homo sapiens
  misc_RNA (1)...(19): siRNA sense strand
gagauaaccugcaaaugug

SEQ ID NO: 2120836 - RNA, 19 nt, Homo sapiens
  misc_RNA (1)...(19): siRNA sense strand
ggacuuaaccaauguuuga

SEQ ID NO: 2120837 - RNA, 19 nt, Homo sapiens
  misc_RNA (1)...(19): siRNA sense strand
gcaaaguauuucaauguga

SEQ ID NO: 2120838 - RNA, 19 nt, Homo sapiens
  misc_RNA (1)...(19): siRNA sense strand
cuacaaaugugaagaaugu

SEQ ID NO: 2120839 - RNA, 19 nt, Homo sapiens
  misc_RNA (1)...(19): siRNA sense strand
cuacaaaugugaagaaugu

SEQ ID NO: 2120840 - RNA, 19 nt, Homo sapiens
  misc_RNA (1)...(19): siRNA sense strand
cuacaaaugugaagaaugu

SEQ ID NO: 2120841 - RNA, 19 nt, Homo sapiens
  misc_RNA (1)...(19): siRNA sense strand
cuacaaaugucaagaaugu

SEQ ID NO: 2120842 - RNA, 19 nt, Homo sapiens
  misc_RNA (1)...(19): siRNA sense strand
cuacaaaugugaagaaugu

SEQ ID NO: 2120843 - RNA, 19 nt, Homo sapiens
  misc_RNA (1)...(19): siRNA sense strand
cuacaaaugucaagaaugu

SEQ ID NO: 2120844 - RNA, 19 nt, Homo sapiens
  misc_RNA (1)...(19): siRNA sense strand
cuacaaaugugaagaaugu

SEQ ID NO: 2120845 - RNA, 19 nt, Homo sapiens
  misc_RNA (1)...(19): siRNA sense strand
cuacaaaugugaagaaugu

SEQ ID NO: 2120846 - RNA, 19 nt, Homo sapiens
  misc_RNA (1)...(19): siRNA sense strand
cuacaaaugugaagaaugu

SEQ ID NO: 2120847 - RNA, 19 nt, Homo sapiens
  misc_RNA (1)...(19): siRNA sense strand
cauccucacuccuuuauaa

SEQ ID NO: 2120848 - RNA, 19 nt, Homo sapiens
  misc_RNA (1)...(19): siRNA sense strand
gaagagaaacccuacaaau

SEQ ID NO: 2120849 - RNA, 19 nt, Homo sapiens
  misc_RNA (1)...(19): siRNA sense strand
gagagaaacccuacaaaug

SEQ ID NO: 2120850 - RNA, 19 nt, Homo sapiens
  misc_RNA (1)...(19): siRNA sense strand
gagagaaucccuacaaaug

SEQ ID NO: 2120851 - RNA, 19 nt, Homo sapiens
  misc_RNA (1)...(19): siRNA sense strand
gagagaaacccuacaaaug

SEQ ID NO: 2120852 - RNA, 19 nt, Homo sapiens
  misc_RNA (1)...(19): siRNA sense strand
gaagagaaacccuacaaau

SEQ ID NO: 2120853 - RNA, 19 nt, Homo sapiens
  misc_RNA (1)...(19): siRNA sense strand
gcaaagcauuuauuucauc

SEQ ID NO: 2120854 - RNA, 19 nt, Homo sapiens
  misc_RNA (1)...(19): siRNA sense strand
gagagaaacccuacaaaug

SEQ ID NO: 2120855 - RNA, 19 nt, Homo sapiens
  misc_RNA (1)...(19): siRNA sense strand
gagcgaaacccuacaaaug

SEQ ID NO: 2120856 - RNA, 19 nt, Homo sapiens
  misc_RNA (1)...(19): siRNA sense strand
cauaagaggauucauauug

SEQ ID NO: 2120857 - RNA, 19 nt, Homo sapiens
  misc_RNA (1)...(19): siRNA sense strand
gcacagcagaauuuauaua

SEQ ID NO: 2120858 - RNA, 19 nt, Homo sapiens
  misc_RNA (1)...(19): siRNA sense strand
cagaaagccuacauaguga

SEQ ID NO: 2120859 - RNA, 19 nt, Homo sapiens
  misc_RNA (1)...(19): siRNA sense strand
gagaaacccuacaaaugug

SEQ ID NO: 2120860 - RNA, 19 nt, Homo sapiens
  misc_RNA (1)...(19): siRNA sense strand
gagaaucccuacaaaugug

SEQ ID NO: 2120861 - RNA, 19 nt, Homo sapiens
  misc_RNA (1)...(19): siRNA sense strand
gagaaacccuacaaaugug

SEQ ID NO: 2120862 - RNA, 19 nt, Homo sapiens
  misc_RNA (1)...(19): siRNA sense strand
gagaaacccuacaaaugug

SEQ ID NO: 2120863 - RNA, 19 nt, Homo sapiens
  misc_RNA (1)...(19): siRNA sense strand
gagaaacccuacaaaugug

SEQ ID NO: 2120864 - RNA, 19 nt, Homo sapiens
  misc_RNA (1)...(19): siRNA sense strand
cuacaagugugauaaaugu

SEQ ID NO: 2120865 - RNA, 19 nt, Homo sapiens
  misc_RNA (1)...(19): siRNA sense strand
ccucacagcuuacuaguca

SEQ ID NO: 2120866 - RNA, 19 nt, Homo sapiens
  misc_RNA (1)...(19): siRNA sense strand
aaagaaacccuacaaaugu

SEQ ID NO: 2120867 - RNA, 19 nt, Homo sapiens
  misc_RNA (1)...(19): siRNA sense strand
cuacaagugugauaaaugu

SEQ ID NO: 2120868 - RNA, 19 nt, Homo sapiens
  misc_RNA (1)...(19): siRNA sense strand
caaaagagguuauaaugga

SEQ ID NO: 2120869 - RNA, 19 nt, Homo sapiens
  misc_RNA (1)...(19): siRNA sense strand
gagaaacgguacaaaugug

SEQ ID NO: 2120870 - RNA, 19 nt, Homo sapiens
  misc_RNA (1)...(19): siRNA sense strand
gagagaaacgguacaaaug

SEQ ID NO: 2120871 - RNA, 19 nt, Homo sapiens
  misc_RNA (1)...(19): siRNA sense strand
gagaaacgguacaaaugug

SEQ ID NO: 2120872 - RNA, 19 nt, Homo sapiens
  misc_RNA (1)...(19): siRNA sense strand
gagagaaacgguacaaaug

SEQ ID NO: 2120873 - RNA, 19 nt, Homo sapiens
  misc_RNA (1)...(19): siRNA sense strand
gauaagagauacuggaaaa

SEQ ID NO: 2120874 - RNA, 19 nt, Homo sapiens
  misc_RNA (1)...(19): siRNA sense strand
gagcaaaguauuucaaugu

SEQ ID NO: 2120875 - RNA, 19 nt, Homo sapiens
  misc_RNA (1)...(19): siRNA sense strand
gagagaaacccuacaagug

SEQ ID NO: 2120876 - RNA, 19 nt, Homo sapiens
  misc_RNA (1)...(19): siRNA sense strand
gagagaaacccuacaagug

SEQ ID NO: 2120877 - RNA, 19 nt, Homo sapiens
  misc_RNA (1)...(19): siRNA sense strand
ccucaaaccuuacuacaca

SEQ ID NO: 2120878 - RNA, 19 nt, Homo sapiens
  misc_RNA (1)...(19): siRNA sense strand
ccucagaccuuaauacaca

SEQ ID NO: 2120879 - RNA, 19 nt, Homo sapiens
  misc_RNA (1)...(19): siRNA sense strand
gagaaacucuacaaauguc

SEQ ID NO: 2120880 - RNA, 19 nt, Homo sapiens
  misc_RNA (1)...(19): siRNA sense strand
ggagagaaacgguacaaau

SEQ ID NO: 2120881 - RNA, 19 nt, Homo sapiens
  misc_RNA (1)...(19): siRNA sense strand
ggagagaaacccuacaaau

SEQ ID NO: 2120882 - RNA, 19 nt, Homo sapiens
  misc_RNA (1)...(19): siRNA sense strand
ugacaaagccuucaaguac

SEQ ID NO: 2120883 - RNA, 19 nt, Homo sapiens
  misc_RNA (1)...(19): siRNA sense strand
ggagagaaacccuacaaau

SEQ ID NO: 2120884 - RNA, 19 nt, Homo sapiens
  misc_RNA (1)...(19): siRNA sense strand
ggagagaaacccuacaaau

SEQ ID NO: 2120885 - RNA, 19 nt, Homo sapiens
  misc_RNA (1)...(19): siRNA sense strand
gcagagcauuuauuucauc

SEQ ID NO: 2120886 - RNA, 19 nt, Homo sapiens
  misc_RNA (1)...(19): siRNA sense strand
ggagagaaacgguacaaau

SEQ ID NO: 2120887 - RNA, 19 nt, Homo sapiens
  misc_RNA (1)...(19): siRNA sense strand
gagcagagccuaaaagauu

SEQ ID NO: 2120888 - RNA, 19 nt, Homo sapiens
  misc_RNA (1)...(19): siRNA sense strand
ugaagaacauggcaaaucu

SEQ ID NO: 2120889 - RNA, 19 nt, Homo sapiens
  misc_RNA (1)...(19): siRNA sense strand
ggacagaaagccuacauag

SEQ ID NO: 2120890 - RNA, 19 nt, Homo sapiens
  misc_RNA (1)...(19): siRNA sense strand
acacauaagaggauucaua

SEQ ID NO: 2120891 - RNA, 19 nt, Homo sapiens
  misc_RNA (1)...(19): siRNA sense strand
gagaaacccuacaaauguc

SEQ ID NO: 2120892 - RNA, 19 nt, Homo sapiens
  misc_RNA (1)...(19): siRNA sense strand
ucaagaaugugacaaaguc

SEQ ID NO: 2120893 - RNA, 19 nt, Homo sapiens
  misc_RNA (1)...(19): siRNA sense strand
gcacacauaagauaauuca

SEQ ID NO: 2120894 - RNA, 19 nt, Homo sapiens
  misc_RNA (1)...(19): siRNA sense strand
gcacacauaagauaauuca

SEQ ID NO: 2120895 - RNA, 19 nt, Homo sapiens
  misc_RNA (1)...(19): siRNA sense strand
gcuccucaguccuuaguaa

SEQ ID NO: 2120896 - RNA, 19 nt, Homo sapiens
  misc_RNA (1)...(19): siRNA sense strand
acagaaagccuacauagug

SEQ ID NO: 2120897 - RNA, 19 nt, Homo sapiens
  misc_RNA (1)...(19): siRNA sense strand
caccuggucuuccuuggua

SEQ ID NO: 2120898 - RNA, 19 nt, Homo sapiens
  misc_RNA (1)...(19): siRNA sense strand
gcgaaacccuacaaaugug

SEQ ID NO: 2120899 - RNA, 19 nt, Homo sapiens
  misc_RNA (1)...(19): siRNA sense strand
gggaugugauguuagagaa

SEQ ID NO: 2120900 - RNA, 19 nt, Homo sapiens
  misc_RNA (1)...(19): siRNA sense strand
agagaaacccuacaaaugu

SEQ ID NO: 2120901 - RNA, 19 nt, Homo sapiens
  misc_RNA (1)...(19): siRNA sense strand
agagaaacccuacaaaugu

SEQ ID NO: 2120902 - RNA, 19 nt, Homo sapiens
  misc_RNA (1)...(19): siRNA sense strand
agagaaacccuacaaaugu

SEQ ID NO: 2120903 - RNA, 19 nt, Homo sapiens
  misc_RNA (1)...(19): siRNA sense strand
ccucaacacuuacuauaca

SEQ ID NO: 2120904 - RNA, 19 nt, Homo sapiens
  misc_RNA (1)...(19): siRNA sense strand
agagaaacccuacaaaugu

SEQ ID NO: 2120905 - RNA, 19 nt, Homo sapiens
  misc_RNA (1)...(19): siRNA sense strand
agagaaacccuacaaaugu

SEQ ID NO: 2120906 - RNA, 19 nt, Homo sapiens
  misc_RNA (1)...(19): siRNA sense strand
cugcaaaugugaagaaugu

SEQ ID NO: 2120907 - RNA, 19 nt, Homo sapiens
  misc_RNA (1)...(19): siRNA sense strand
agagauaaccugcaaaugu

SEQ ID NO: 2120908 - RNA, 19 nt, Homo sapiens
  misc_RNA (1)...(19): siRNA sense strand
acacauaagagaauccaua

SEQ ID NO: 2120909 - RNA, 19 nt, Homo sapiens
  misc_RNA (1)...(19): siRNA sense strand
gaaaagaaacccuacaaau

SEQ ID NO: 2120910 - RNA, 19 nt, Homo sapiens
  misc_RNA (1)...(19): siRNA sense strand
auaauggacuuaaccaaug

SEQ ID NO: 2120911 - RNA, 19 nt, Homo sapiens
  misc_RNA (1)...(19): siRNA sense strand
uggcaaagcuuuuaacuug

SEQ ID NO: 2120912 - RNA, 19 nt, Homo sapiens
  misc_RNA (1)...(19): siRNA sense strand
ggagagaaucccuacaaau

SEQ ID NO: 2120913 - RNA, 19 nt, Homo sapiens
  misc_RNA (1)...(19): siRNA sense strand
ggagagaaacccuacaagu

SEQ ID NO: 2120914 - RNA, 19 nt, Homo sapiens
  misc_RNA (1)...(19): siRNA sense strand
ggagagaaacccuacaagu

SEQ ID NO: 2120915 - RNA, 19 nt, Homo sapiens
  misc_RNA (1)...(19): siRNA sense strand
ggagagauaaccugcaaau

SEQ ID NO: 2120916 - RNA, 19 nt, Homo sapiens
  misc_RNA (1)...(19): siRNA sense strand
cauccucgauccuuuaugu

SEQ ID NO: 2120917 - RNA, 19 nt, Homo sapiens
  misc_RNA (1)...(19): siRNA sense strand
uaagaggauucauauugga

SEQ ID NO: 2120918 - RNA, 19 nt, Homo sapiens
  misc_RNA (1)...(19): siRNA sense strand
uuagagauguggccauaga

SEQ ID NO: 2120919 - RNA, 19 nt, Homo sapiens
  misc_RNA (1)...(19): siRNA sense strand
gaauauggcaauuuagagu

SEQ ID NO: 2120920 - RNA, 19 nt, Homo sapiens
  misc_RNA (1)...(19): siRNA sense strand
cagggaccauuggaauuua

SEQ ID NO: 2120921 - RNA, 19 nt, Homo sapiens
  misc_RNA (1)...(19): siRNA sense strand
ugaagauuguggcaaagaa

SEQ ID NO: 2120922 - RNA, 19 nt, Homo sapiens
  misc_RNA (1)...(19): siRNA sense strand
ugaagauuguggcaaagaa

SEQ ID NO: 2120923 - RNA, 19 nt, Homo sapiens
  misc_RNA (1)...(19): siRNA sense strand
auauagggaugugauguua

SEQ ID NO: 2120924 - RNA, 19 nt, Homo sapiens
  misc_RNA (1)...(19): siRNA sense strand
acgugaauauggcaauuua

SEQ ID NO: 2120925 - RNA, 19 nt, Homo sapiens
  misc_RNA (1)...(19): siRNA sense strand
gaauuuauauagggaugug

SEQ ID NO: 2120926 - RNA, 19 nt, Homo sapiens
  misc_RNA (1)...(19): siRNA sense strand
ccucacaccuuacuucaca

SEQ ID NO: 2120927 - RNA, 19 nt, Homo sapiens
  misc_RNA (1)...(19): siRNA sense strand
gagauguggccauagaauu

SEQ ID NO: 2120928 - RNA, 19 nt, Homo sapiens
  misc_RNA (1)...(19): siRNA sense strand
cauaagagaauucauacug

SEQ ID NO: 2120929 - RNA, 19 nt, Homo sapiens
  misc_RNA (1)...(19): siRNA sense strand
gacaaagccuucaaguacu

SEQ ID NO: 2120930 - RNA, 19 nt, Homo sapiens
  misc_RNA (1)...(19): siRNA sense strand
aagagaaacccuacaaaug

SEQ ID NO: 2120931 - RNA, 19 nt, Homo sapiens
  misc_RNA (1)...(19): siRNA sense strand
ggagagaaaucuuacaaau

SEQ ID NO: 2120932 - RNA, 19 nt, Homo sapiens
  misc_RNA (1)...(19): siRNA sense strand
ggagagaaaucuuacaaau

SEQ ID NO: 2120933 - RNA, 19 nt, Homo sapiens
  misc_RNA (1)...(19): siRNA sense strand
caaaugugguugaguguaa

SEQ ID NO: 2120934 - RNA, 19 nt, Homo sapiens
  misc_RNA (1)...(19): siRNA sense strand
aaagagcccuggaauauga

SEQ ID NO: 2120935 - RNA, 19 nt, Homo sapiens
  misc_RNA (1)...(19): siRNA sense strand
gagaaacccuucaaaugug

SEQ ID NO: 2120936 - RNA, 19 nt, Homo sapiens
  misc_RNA (1)...(19): siRNA sense strand
agagaaaccuuacaaaugu

SEQ ID NO: 2120937 - RNA, 19 nt, Homo sapiens
  misc_RNA (1)...(19): siRNA sense strand
cuacaaaugugaagaaugu

SEQ ID NO: 2120938 - RNA, 19 nt, Homo sapiens
  misc_RNA (1)...(19): siRNA sense strand
cuacaaaugugaagaaugu

SEQ ID NO: 2120939 - RNA, 19 nt, Homo sapiens
  misc_RNA (1)...(19): siRNA sense strand
cuacaaaugugaagaaugu

SEQ ID NO: 2120940 - RNA, 19 nt, Homo sapiens
  misc_RNA (1)...(19): siRNA sense strand
gagagaaaccuuacaaaug

SEQ ID NO: 2120941 - RNA, 19 nt, Homo sapiens
  misc_RNA (1)...(19): siRNA sense strand
cuacaaaugugaagaaugu

SEQ ID NO: 2120942 - RNA, 19 nt, Homo sapiens
  misc_RNA (1)...(19): siRNA sense strand
cuacaaaugugaagaaugu

SEQ ID NO: 2120943 - RNA, 19 nt, Homo sapiens
  misc_RNA (1)...(19): siRNA sense strand
agaggaagcuucuagugua

SEQ ID NO: 2120944 - RNA, 19 nt, Homo sapiens
  misc_RNA (1)...(19): siRNA sense strand
aacaagcccucaauucuua

SEQ ID NO: 2120945 - RNA, 19 nt, Homo sapiens
  misc_RNA (1)...(19): siRNA sense strand
gagagaaacccuacaaaug

SEQ ID NO: 2120946 - RNA, 19 nt, Homo sapiens
  misc_RNA (1)...(19): siRNA sense strand
gagagaaacccuacaaaug

SEQ ID NO: 2120947 - RNA, 19 nt, Homo sapiens
  misc_RNA (1)...(19): siRNA sense strand
gagagaaacccuacaaaug

SEQ ID NO: 2120948 - RNA, 19 nt, Homo sapiens
  misc_RNA (1)...(19): siRNA sense strand
cuacagaugugaagaaugu

SEQ ID NO: 2120949 - RNA, 19 nt, Homo sapiens
  misc_RNA (1)...(19): siRNA sense strand
gagagaaacccuucaaaug

SEQ ID NO: 2120950 - RNA, 19 nt, Homo sapiens
  misc_RNA (1)...(19): siRNA sense strand
aaggagacguugacauuua

SEQ ID NO: 2120951 - RNA, 19 nt, Homo sapiens
  misc_RNA (1)...(19): siRNA sense strand
ccucaaaccuuacuaaaca

SEQ ID NO: 2120952 - RNA, 19 nt, Homo sapiens
  misc_RNA (1)...(19): siRNA sense strand
gcaaagccuucuaccauuc

SEQ ID NO: 2120953 - RNA, 19 nt, Homo sapiens
  misc_RNA (1)...(19): siRNA sense strand
acacauaaguucauucaug

SEQ ID NO: 2120954 - RNA, 19 nt, Homo sapiens
  misc_RNA (1)...(19): siRNA sense strand
gagaaacucuacaaaugug

SEQ ID NO: 2120955 - RNA, 19 nt, Homo sapiens
  misc_RNA (1)...(19): siRNA sense strand
ccucaaaccuuaccaaaca

SEQ ID NO: 2120956 - RNA, 19 nt, Homo sapiens
  misc_RNA (1)...(19): siRNA sense strand
ugacaacaccucaaacuuu

SEQ ID NO: 2120957 - RNA, 19 nt, Homo sapiens
  misc_RNA (1)...(19): siRNA sense strand
ucucauaccuuacuaaaca

SEQ ID NO: 2120958 - RNA, 19 nt, Homo sapiens
  misc_RNA (1)...(19): siRNA sense strand
gagaaacccuacaaaugug

SEQ ID NO: 2120959 - RNA, 19 nt, Homo sapiens
  misc_RNA (1)...(19): siRNA sense strand
gaaauuauacuggugagaa

SEQ ID NO: 2120960 - RNA, 19 nt, Homo sapiens
  misc_RNA (1)...(19): siRNA sense strand
gagaaacccuacaaaugug

SEQ ID NO: 2120961 - RNA, 19 nt, Homo sapiens
  misc_RNA (1)...(19): siRNA sense strand
gagaaacccuacaaaugug

SEQ ID NO: 2120962 - RNA, 19 nt, Homo sapiens
  misc_RNA (1)...(19): siRNA sense strand
ugaagaaugugacaaagug

SEQ ID NO: 2120963 - RNA, 19 nt, Homo sapiens
  misc_RNA (1)...(19): siRNA sense strand
ggagagaaaccuuacaaau

SEQ ID NO: 2120964 - RNA, 19 nt, Homo sapiens
  misc_RNA (1)...(19): siRNA sense strand
gagagaaacccuacagaug

SEQ ID NO: 2120965 - RNA, 19 nt, Homo sapiens
  misc_RNA (1)...(19): siRNA sense strand
gaaagaaacucugcaaacc

SEQ ID NO: 2120966 - RNA, 19 nt, Homo sapiens
  misc_RNA (1)...(19): siRNA sense strand
gagaaacccuacagaugug

SEQ ID NO: 2120967 - RNA, 19 nt, Homo sapiens
  misc_RNA (1)...(19): siRNA sense strand
ggcaaagccuucuaccauu

SEQ ID NO: 2120968 - RNA, 19 nt, Homo sapiens
  misc_RNA (1)...(19): siRNA sense strand
ccucaaaccuuacuacaca

SEQ ID NO: 2120969 - RNA, 19 nt, Homo sapiens
  misc_RNA (1)...(19): siRNA sense strand
uaugugagaugguggauga

SEQ ID NO: 2120970 - RNA, 19 nt, Homo sapiens
  misc_RNA (1)...(19): siRNA sense strand
ccucaacucuuacuaaaca

SEQ ID NO: 2120971 - RNA, 19 nt, Homo sapiens
  misc_RNA (1)...(19): siRNA sense strand
ggagagaaacccuacaaau

SEQ ID NO: 2120972 - RNA, 19 nt, Homo sapiens
  misc_RNA (1)...(19): siRNA sense strand
ggagagaaacccuacaaau

SEQ ID NO: 2120973 - RNA, 19 nt, Homo sapiens
  misc_RNA (1)...(19): siRNA sense strand
ggagagaaacccuacaaau

SEQ ID NO: 2120974 - RNA, 19 nt, Homo sapiens
  misc_RNA (1)...(19): siRNA sense strand
ggagagaaacccuucaaau

SEQ ID NO: 2120975 - RNA, 19 nt, Homo sapiens
  misc_RNA (1)...(19): siRNA sense strand
aaccaauccucaacucuua

SEQ ID NO: 2120976 - RNA, 19 nt, Homo sapiens
  misc_RNA (1)...(19): siRNA sense strand
acaccuacaucaacauaaa

SEQ ID NO: 2120977 - RNA, 19 nt, Homo sapiens
  misc_RNA (1)...(19): siRNA sense strand
gagagaaaucuuacaaaug

SEQ ID NO: 2120978 - RNA, 19 nt, Homo sapiens
  misc_RNA (1)...(19): siRNA sense strand
gagagaaaucuuacaaaug

SEQ ID NO: 2120979 - RNA, 19 nt, Homo sapiens
  misc_RNA (1)...(19): siRNA sense strand
ugaaugugauguuagagaa

SEQ ID NO: 2120980 - RNA, 19 nt, Homo sapiens
  misc_RNA (1)...(19): siRNA sense strand
ggaaagaaacucugcaaac

SEQ ID NO: 2120981 - RNA, 19 nt, Homo sapiens
  misc_RNA (1)...(19): siRNA sense strand
uaacaagcccucaauucuu

SEQ ID NO: 2120982 - RNA, 19 nt, Homo sapiens
  misc_RNA (1)...(19): siRNA sense strand
agagaauucuuaccaaugu

SEQ ID NO: 2120983 - RNA, 19 nt, Homo sapiens
  misc_RNA (1)...(19): siRNA sense strand
agagaaacccuacaaaugu

SEQ ID NO: 2120984 - RNA, 19 nt, Homo sapiens
  misc_RNA (1)...(19): siRNA sense strand
aaccaauccucaaaccuua

SEQ ID NO: 2120985 - RNA, 19 nt, Homo sapiens
  misc_RNA (1)...(19): siRNA sense strand
agagaaacccuacaaaugu

SEQ ID NO: 2120986 - RNA, 19 nt, Homo sapiens
  misc_RNA (1)...(19): siRNA sense strand
agagaaacccuacaaaugu

SEQ ID NO: 2120987 - RNA, 19 nt, Homo sapiens
  misc_RNA (1)...(19): siRNA sense strand
agagaaacccuucaaaugu

SEQ ID NO: 2120988 - RNA, 19 nt, Homo sapiens
  misc_RNA (1)...(19): siRNA sense strand
gaucaccagucuagagcaa

SEQ ID NO: 2120989 - RNA, 19 nt, Homo sapiens
  misc_RNA (1)...(19): siRNA sense strand
ggagagaaacccuacagau

SEQ ID NO: 2120990 - RNA, 19 nt, Homo sapiens
  misc_RNA (1)...(19): siRNA sense strand
gacaacaccucaaacuuuu

SEQ ID NO: 2120991 - RNA, 19 nt, Homo sapiens
  misc_RNA (1)...(19): siRNA sense strand
gauguuagagaacuacaaa

SEQ ID NO: 2120992 - RNA, 19 nt, Homo sapiens
  misc_RNA (1)...(19): siRNA sense strand
caacaagugauacugagaa

SEQ ID NO: 2120993 - RNA, 19 nt, Homo sapiens
  misc_RNA (1)...(19): siRNA sense strand
ggauguggccauagaauuc

SEQ ID NO: 2120994 - RNA, 19 nt, Homo sapiens
  misc_RNA (1)...(19): siRNA sense strand
uuaccaaugugaagaaugu

SEQ ID NO: 2120995 - RNA, 19 nt, Homo sapiens
  misc_RNA (1)...(19): siRNA sense strand
ucaaauagacacaagacaa

SEQ ID NO: 2120996 - RNA, 19 nt, Homo sapiens
  misc_RNA (1)...(19): siRNA sense strand
ggccagagcaagacauaaa

SEQ ID NO: 2120997 - RNA, 19 nt, Homo sapiens
  misc_RNA (1)...(19): siRNA sense strand
agaaagaucuggcaaugcu

SEQ ID NO: 2120998 - RNA, 19 nt, Homo sapiens
  misc_RNA (1)...(19): siRNA sense strand
ccugaggucuggaguguau

SEQ ID NO: 2120999 - RNA, 19 nt, Homo sapiens
  misc_RNA (1)...(19): siRNA sense strand
caaccgauccucaaaccuu

SEQ ID NO: 2121000 - RNA, 19 nt, Homo sapiens
  misc_RNA (1)...(19): siRNA sense strand
gagaaaccuuacaaaugug

SEQ ID NO: 2121001 - RNA, 19 nt, Homo sapiens
  misc_RNA (1)...(19): siRNA sense strand
gagaggaagcuucuagugu

SEQ ID NO: 2121002 - RNA, 19 nt, Homo sapiens
  misc_RNA (1)...(19): siRNA sense strand
ccucaacccuuacuacaca

SEQ ID NO: 2121003 - RNA, 19 nt, Homo sapiens
  misc_RNA (1)...(19): siRNA sense strand
gagagaauucuuaccaaug

SEQ ID NO: 2121004 - RNA, 19 nt, Homo sapiens
  misc_RNA (1)...(19): siRNA sense strand
gcucagcagaauuuauaua

SEQ ID NO: 2121005 - RNA, 19 nt, Homo sapiens
  misc_RNA (1)...(19): siRNA sense strand
uaaccaauccucaaaccuu

SEQ ID NO: 2121006 - RNA, 19 nt, Homo sapiens
  misc_RNA (1)...(19): siRNA sense strand
aagcacuccucaacccuua

SEQ ID NO: 2121007 - RNA, 19 nt, Homo sapiens
  misc_RNA (1)...(19): siRNA sense strand
gaacaugagaauuuacagu

SEQ ID NO: 2121008 - RNA, 19 nt, Homo sapiens
  misc_RNA (1)...(19): siRNA sense strand
agacacaagacaagacaua

SEQ ID NO: 2121009 - RNA, 19 nt, Homo sapiens
  misc_RNA (1)...(19): siRNA sense strand
aaccgauucucauaccuua

SEQ ID NO: 2121010 - RNA, 19 nt, Homo sapiens
  misc_RNA (1)...(19): siRNA sense strand
ugaagaaugugacaaagcu

SEQ ID NO: 2121011 - RNA, 19 nt, Homo sapiens
  misc_RNA (1)...(19): siRNA sense strand
ugaagaaugugguaaagcu

SEQ ID NO: 2121012 - RNA, 19 nt, Homo sapiens
  misc_RNA (1)...(19): siRNA sense strand
gcagagaggaagcuucuag

SEQ ID NO: 2121013 - RNA, 19 nt, Homo sapiens
  misc_RNA (1)...(19): siRNA sense strand
agaaacccuucaaauguga

SEQ ID NO: 2121014 - RNA, 19 nt, Homo sapiens
  misc_RNA (1)...(19): siRNA sense strand
gaaugugacaaaguguuua

SEQ ID NO: 2121015 - RNA, 19 nt, Homo sapiens
  misc_RNA (1)...(19): siRNA sense strand
gcaaaugugguugagugua

SEQ ID NO: 2121016 - RNA, 19 nt, Homo sapiens
  misc_RNA (1)...(19): siRNA sense strand
uaaccgauccucaaaccuu

SEQ ID NO: 2121017 - RNA, 19 nt, Homo sapiens
  misc_RNA (1)...(19): siRNA sense strand
gauucauacuggagagaaa

SEQ ID NO: 2121018 - RNA, 19 nt, Homo sapiens
  misc_RNA (1)...(19): siRNA sense strand
agagaaacccuacagaugu

SEQ ID NO: 2121019 - RNA, 19 nt, Homo sapiens
  misc_RNA (1)...(19): siRNA sense strand
gauucauacuggagagaaa

SEQ ID NO: 2121020 - RNA, 19 nt, Homo sapiens
  misc_RNA (1)...(19): siRNA sense strand
ucucaacccuuacuagaca

SEQ ID NO: 2121021 - RNA, 19 nt, Homo sapiens
  misc_RNA (1)...(19): siRNA sense strand
gcaaaauauuuccauguga

SEQ ID NO: 2121022 - RNA, 19 nt, Homo sapiens
  misc_RNA (1)...(19): siRNA sense strand
cacauaagguaauucauac

SEQ ID NO: 2121023 - RNA, 19 nt, Homo sapiens
  misc_RNA (1)...(19): siRNA sense strand
ggucuucaacccuuacaaa

SEQ ID NO: 2121024 - RNA, 19 nt, Homo sapiens
  misc_RNA (1)...(19): siRNA sense strand
gaaacucuacaaaugugaa

SEQ ID NO: 2121025 - RNA, 19 nt, Homo sapiens
  misc_RNA (1)...(19): siRNA sense strand
ccucaauucuuaacagaca

SEQ ID NO: 2121026 - RNA, 19 nt, Homo sapiens
  misc_RNA (1)...(19): siRNA sense strand
gauccucaaaccuuacuaa

SEQ ID NO: 2121027 - RNA, 19 nt, Homo sapiens
  misc_RNA (1)...(19): siRNA sense strand
aaccgauccucaaaccuua

SEQ ID NO: 2121028 - RNA, 19 nt, Homo sapiens
  misc_RNA (1)...(19): siRNA sense strand
ugaagaauguggcaaagcu

SEQ ID NO: 2121029 - RNA, 19 nt, Homo sapiens
  misc_RNA (1)...(19): siRNA sense strand
aaccgauccucaaaccuua

SEQ ID NO: 2121030 - RNA, 19 nt, Homo sapiens
  misc_RNA (1)...(19): siRNA sense strand
ugaagaauguggcaaagcu

SEQ ID NO: 2121031 - RNA, 19 nt, Homo sapiens
  misc_RNA (1)...(19): siRNA sense strand
ggaugaaucugcuauguua

SEQ ID NO: 2121032 - RNA, 19 nt, Homo sapiens
  misc_RNA (1)...(19): siRNA sense strand
ggagaaugcuguucaagga

SEQ ID NO: 2121033 - RNA, 19 nt, Homo sapiens
  misc_RNA (1)...(19): siRNA sense strand
uaacagagaaguaaaggua

SEQ ID NO: 2121034 - RNA, 19 nt, Homo sapiens
  misc_RNA (1)...(19): siRNA sense strand
gaacauccuugaaccuuuc

SEQ ID NO: 2121035 - RNA, 19 nt, Homo sapiens
  misc_RNA (1)...(19): siRNA sense strand
gagauuagguuggauacuu

SEQ ID NO: 2121036 - RNA, 19 nt, Homo sapiens
  misc_RNA (1)...(19): siRNA sense strand
gaaguaaagguauacguuu

SEQ ID NO: 2121037 - RNA, 19 nt, Homo sapiens
  misc_RNA (1)...(19): siRNA sense strand
gaagagauuagguuggaua

SEQ ID NO: 2121038 - RNA, 19 nt, Homo sapiens
  misc_RNA (1)...(19): siRNA sense strand
gagaugagcucuggaacug

SEQ ID NO: 2121039 - RNA, 19 nt, Homo sapiens
  misc_RNA (1)...(19): siRNA sense strand
ggaacuggacagaguaaua

SEQ ID NO: 2121040 - RNA, 19 nt, Homo sapiens
  misc_RNA (1)...(19): siRNA sense strand
gaacguacucuuggauuaa

SEQ ID NO: 2121041 - RNA, 19 nt, Homo sapiens
  misc_RNA (1)...(19): siRNA sense strand
gauacucacugucagaaug

SEQ ID NO: 2121042 - RNA, 19 nt, Homo sapiens
  misc_RNA (1)...(19): siRNA sense strand
gcaagaucuuuccucagua

SEQ ID NO: 2121043 - RNA, 19 nt, Homo sapiens
  misc_RNA (1)...(19): siRNA sense strand
caagaucuuuccucaguau

SEQ ID NO: 2121044 - RNA, 19 nt, Homo sapiens
  misc_RNA (1)...(19): siRNA sense strand
guaaagguauacguuugua

SEQ ID NO: 2121045 - RNA, 19 nt, Homo sapiens
  misc_RNA (1)...(19): siRNA sense strand
gaacuuguacucagcauuc

SEQ ID NO: 2121046 - RNA, 19 nt, Homo sapiens
  misc_RNA (1)...(19): siRNA sense strand
gagaaagaccagcaucgua

SEQ ID NO: 2121047 - RNA, 19 nt, Homo sapiens
  misc_RNA (1)...(19): siRNA sense strand
acagagaaguaaagguaua

SEQ ID NO: 2121048 - RNA, 19 nt, Homo sapiens
  misc_RNA (1)...(19): siRNA sense strand
agaacguacucuuggauua

SEQ ID NO: 2121049 - RNA, 19 nt, Homo sapiens
  misc_RNA (1)...(19): siRNA sense strand
ggcaagaucuuuccucagu

SEQ ID NO: 2121050 - RNA, 19 nt, Homo sapiens
  misc_RNA (1)...(19): siRNA sense strand
ccucauaucugaagccaau

SEQ ID NO: 2121051 - RNA, 19 nt, Homo sapiens
  misc_RNA (1)...(19): siRNA sense strand
ucagguaccuauacgugua

SEQ ID NO: 2121052 - RNA, 19 nt, Homo sapiens
  misc_RNA (1)...(19): siRNA sense strand
guaccuugaugaagagauu

SEQ ID NO: 2121053 - RNA, 19 nt, Homo sapiens
  misc_RNA (1)...(19): siRNA sense strand
ugagacauguggaggauga

SEQ ID NO: 2121054 - RNA, 19 nt, Homo sapiens
  misc_RNA (1)...(19): siRNA sense strand
gguauacguuuguaaaucu

SEQ ID NO: 2121055 - RNA, 19 nt, Homo sapiens
  misc_RNA (1)...(19): siRNA sense strand
gaccauggauacucacugu

SEQ ID NO: 2121056 - RNA, 19 nt, Homo sapiens
  misc_RNA (1)...(19): siRNA sense strand
gaaagaccagcaucguauu

SEQ ID NO: 2121057 - RNA, 19 nt, Homo sapiens
  misc_RNA (1)...(19): siRNA sense strand
gaggaugaaucugcuaugu

SEQ ID NO: 2121058 - RNA, 19 nt, Homo sapiens
  misc_RNA (1)...(19): siRNA sense strand
guggaacucuuaagacuag

SEQ ID NO: 2121059 - RNA, 19 nt, Homo sapiens
  misc_RNA (1)...(19): siRNA sense strand
ccagagaaacuguaucaga

SEQ ID NO: 2121060 - RNA, 19 nt, Homo sapiens
  misc_RNA (1)...(19): siRNA sense strand
ggaacagaacguacucuug

SEQ ID NO: 2121061 - RNA, 19 nt, Homo sapiens
  misc_RNA (1)...(19): siRNA sense strand
guaauacuguacagaacau

SEQ ID NO: 2121062 - RNA, 19 nt, Homo sapiens
  misc_RNA (1)...(19): siRNA sense strand
gaacuggacagaguaauac

SEQ ID NO: 2121063 - RNA, 19 nt, Homo sapiens
  misc_RNA (1)...(19): siRNA sense strand
guacagaacauccuugaac

SEQ ID NO: 2121064 - RNA, 19 nt, Homo sapiens
  misc_RNA (1)...(19): siRNA sense strand
agaacauccuugaaccuuu

SEQ ID NO: 2121065 - RNA, 19 nt, Homo sapiens
  misc_RNA (1)...(19): siRNA sense strand
auauguaccuugaugaaga

SEQ ID NO: 2121066 - RNA, 19 nt, Homo sapiens
  misc_RNA (1)...(19): siRNA sense strand
agaaagaccagcaucguau

SEQ ID NO: 2121067 - RNA, 19 nt, Homo sapiens
  misc_RNA (1)...(19): siRNA sense strand
gaaaugggagaggaacuug

SEQ ID NO: 2121068 - RNA, 19 nt, Homo sapiens
  misc_RNA (1)...(19): siRNA sense strand
gaacucuuaagacuagauu

SEQ ID NO: 2121069 - RNA, 19 nt, Homo sapiens
  misc_RNA (1)...(19): siRNA sense strand
gcaagccaguggaacucuu

SEQ ID NO: 2121070 - RNA, 19 nt, Homo sapiens
  misc_RNA (1)...(19): siRNA sense strand
ggagcauaauuauauugga

SEQ ID NO: 2121071 - RNA, 19 nt, Homo sapiens
  misc_RNA (1)...(19): siRNA sense strand
gccaaaaucagacaaguua

SEQ ID NO: 2121072 - RNA, 19 nt, Homo sapiens
  misc_RNA (1)...(19): siRNA sense strand
cuaaagaaacacuugaguu

SEQ ID NO: 2121073 - RNA, 19 nt, Homo sapiens
  misc_RNA (1)...(19): siRNA sense strand
caagccaguggaacucuua

SEQ ID NO: 2121074 - RNA, 19 nt, Homo sapiens
  misc_RNA (1)...(19): siRNA sense strand
gaucuuuccucaguaugug

SEQ ID NO: 2121075 - RNA, 19 nt, Homo sapiens
  misc_RNA (1)...(19): siRNA sense strand
aaguaaagguauacguuug

SEQ ID NO: 2121076 - RNA, 19 nt, Homo sapiens
  misc_RNA (1)...(19): siRNA sense strand
uauauuggaugucauugag

SEQ ID NO: 2121077 - RNA, 19 nt, Homo sapiens
  misc_RNA (1)...(19): siRNA sense strand
uaaugacuccguauuugaa

SEQ ID NO: 2121078 - RNA, 19 nt, Homo sapiens
  misc_RNA (1)...(19): siRNA sense strand
uuuaaugacuccguauuug

SEQ ID NO: 2121079 - RNA, 19 nt, Homo sapiens
  misc_RNA (1)...(19): siRNA sense strand
gcugcaauauccagguguu

SEQ ID NO: 2121080 - RNA, 19 nt, Homo sapiens
  misc_RNA (1)...(19): siRNA sense strand
ucauugcccuguauaccuu

SEQ ID NO: 2121081 - RNA, 19 nt, Homo sapiens
  misc_RNA (1)...(19): siRNA sense strand
ggaaucacagacacuccua

SEQ ID NO: 2121082 - RNA, 19 nt, Homo sapiens
  misc_RNA (1)...(19): siRNA sense strand
gaaccuuucuacguguuag

SEQ ID NO: 2121083 - RNA, 19 nt, Homo sapiens
  misc_RNA (1)...(19): siRNA sense strand
aaugucagcaucacaguaa

SEQ ID NO: 2121084 - RNA, 19 nt, Homo sapiens
  misc_RNA (1)...(19): siRNA sense strand
ggagaggaacuuguacuca

SEQ ID NO: 2121085 - RNA, 19 nt, Homo sapiens
  misc_RNA (1)...(19): siRNA sense strand
gagaaugcuguucaaggaa

SEQ ID NO: 2121086 - RNA, 19 nt, Homo sapiens
  misc_RNA (1)...(19): siRNA sense strand
gcugagacauguggaggau

SEQ ID NO: 2121087 - RNA, 19 nt, Homo sapiens
  misc_RNA (1)...(19): siRNA sense strand
gcaucacaguaaagcaaug

SEQ ID NO: 2121088 - RNA, 19 nt, Homo sapiens
  misc_RNA (1)...(19): siRNA sense strand
uuaaugacuccguauuuga

SEQ ID NO: 2121089 - RNA, 19 nt, Homo sapiens
  misc_RNA (1)...(19): siRNA sense strand
agaaguaaagguauacguu

SEQ ID NO: 2121090 - RNA, 19 nt, Homo sapiens
  misc_RNA (1)...(19): siRNA sense strand
ggaagacugacugcuauuc

SEQ ID NO: 2121091 - RNA, 19 nt, Homo sapiens
  misc_RNA (1)...(19): siRNA sense strand
cuggaagacugacugcuau

SEQ ID NO: 2121092 - RNA, 19 nt, Homo sapiens
  misc_RNA (1)...(19): siRNA sense strand
gcacacuugggcagguuaa

SEQ ID NO: 2121093 - RNA, 19 nt, Homo sapiens
  misc_RNA (1)...(19): siRNA sense strand
cagcaucacaguaaagcaa

SEQ ID NO: 2121094 - RNA, 19 nt, Homo sapiens
  misc_RNA (1)...(19): siRNA sense strand
gcaauauccagguguuuac

SEQ ID NO: 2121095 - RNA, 19 nt, Homo sapiens
  misc_RNA (1)...(19): siRNA sense strand
gcucauucagcaggaaaua

SEQ ID NO: 2121096 - RNA, 19 nt, Homo sapiens
  misc_RNA (1)...(19): siRNA sense strand
cagcaggaaauaauggaaa

SEQ ID NO: 2121097 - RNA, 19 nt, Homo sapiens
  misc_RNA (1)...(19): siRNA sense strand
gauuuaaugacuccguauu

SEQ ID NO: 2121098 - RNA, 19 nt, Homo sapiens
  misc_RNA (1)...(19): siRNA sense strand
caguggaacucuuaagacu

SEQ ID NO: 2121099 - RNA, 19 nt, Homo sapiens
  misc_RNA (1)...(19): siRNA sense strand
guuaaaccauacaguucug

SEQ ID NO: 2121100 - RNA, 19 nt, Homo sapiens
  misc_RNA (1)...(19): siRNA sense strand
acugacugcuauuccauuu

SEQ ID NO: 2121101 - RNA, 19 nt, Homo sapiens
  misc_RNA (1)...(19): siRNA sense strand
aaucugcuauguuacaaag

SEQ ID NO: 2121102 - RNA, 19 nt, Homo sapiens
  misc_RNA (1)...(19): siRNA sense strand
ugaaucugcuauguuacaa

SEQ ID NO: 2121103 - RNA, 19 nt, Homo sapiens
  misc_RNA (1)...(19): siRNA sense strand
agaggagaaugcuguucaa

SEQ ID NO: 2121104 - RNA, 19 nt, Homo sapiens
  misc_RNA (1)...(19): siRNA sense strand
caaugucagcaucacagua

SEQ ID NO: 2121105 - RNA, 19 nt, Homo sapiens
  misc_RNA (1)...(19): siRNA sense strand
agauuagguuggauacuuc

SEQ ID NO: 2121106 - RNA, 19 nt, Homo sapiens
  misc_RNA (1)...(19): siRNA sense strand
ugacugcuauuccauuuug

SEQ ID NO: 2121107 - RNA, 19 nt, Homo sapiens
  misc_RNA (1)...(19): siRNA sense strand
gccaguggaacucuuaaga

SEQ ID NO: 2121108 - RNA, 19 nt, Homo sapiens
  misc_RNA (1)...(19): siRNA sense strand
gaagccaaucacuuuccua

SEQ ID NO: 2121109 - RNA, 19 nt, Homo sapiens
  misc_RNA (1)...(19): siRNA sense strand
ggagaaagaccagcaucgu

SEQ ID NO: 2121110 - RNA, 19 nt, Homo sapiens
  misc_RNA (1)...(19): siRNA sense strand
aaugggagaggaacuugua

SEQ ID NO: 2121111 - RNA, 19 nt, Homo sapiens
  misc_RNA (1)...(19): siRNA sense strand
ugcaauauccagguguuua

SEQ ID NO: 2121112 - RNA, 19 nt, Homo sapiens
  misc_RNA (1)...(19): siRNA sense strand
gaaucugcuauguuacaaa

SEQ ID NO: 2121113 - RNA, 19 nt, Homo sapiens
  misc_RNA (1)...(19): siRNA sense strand
aagccaaucacuuuccuaa

SEQ ID NO: 2121114 - RNA, 19 nt, Homo sapiens
  misc_RNA (1)...(19): siRNA sense strand
uaucugaagccaaucacuu

SEQ ID NO: 2121115 - RNA, 19 nt, Homo sapiens
  misc_RNA (1)...(19): siRNA sense strand
guauugcucuggaccucau

SEQ ID NO: 2121116 - RNA, 19 nt, Homo sapiens
  misc_RNA (1)...(19): siRNA sense strand
ugaagccucccacuggaaa

SEQ ID NO: 2121117 - RNA, 19 nt, Homo sapiens
  misc_RNA (1)...(19): siRNA sense strand
ucucuguucugccuguuau

SEQ ID NO: 2121118 - RNA, 19 nt, Homo sapiens
  misc_RNA (1)...(19): siRNA sense strand
aaagaccagcaucguauug

SEQ ID NO: 2121119 - RNA, 19 nt, Homo sapiens
  misc_RNA (1)...(19): siRNA sense strand
gcucuggaccucauaucug

SEQ ID NO: 2121120 - RNA, 19 nt, Homo sapiens
  misc_RNA (1)...(19): siRNA sense strand
cucuggaccucauaucuga

SEQ ID NO: 2121121 - RNA, 19 nt, Homo sapiens
  misc_RNA (1)...(19): siRNA sense strand
cagaacauccuugaaccuu

SEQ ID NO: 2121122 - RNA, 19 nt, Homo sapiens
  misc_RNA (1)...(19): siRNA sense strand
ccauggauacucacuguca

SEQ ID NO: 2121123 - RNA, 19 nt, Homo sapiens
  misc_RNA (1)...(19): siRNA sense strand
cagaacguacucuuggauu

SEQ ID NO: 2121124 - RNA, 19 nt, Homo sapiens
  misc_RNA (1)...(19): siRNA sense strand
ucauucagcaggaaauaau

SEQ ID NO: 2121125 - RNA, 19 nt, Homo sapiens
  misc_RNA (1)...(19): siRNA sense strand
augaagagauuagguugga

SEQ ID NO: 2121126 - RNA, 19 nt, Homo sapiens
  misc_RNA (1)...(19): siRNA sense strand
ucuggaagacugacugcua

SEQ ID NO: 2121127 - RNA, 19 nt, Homo sapiens
  misc_RNA (1)...(19): siRNA sense strand
cguauuugaacaccucuaa

SEQ ID NO: 2121128 - RNA, 19 nt, Homo sapiens
  misc_RNA (1)...(19): siRNA sense strand
aacguacucuuggauuaaa

SEQ ID NO: 2121129 - RNA, 19 nt, Homo sapiens
  misc_RNA (1)...(19): siRNA sense strand
auaaucccauccagguuga

SEQ ID NO: 2121130 - RNA, 19 nt, Homo sapiens
  misc_RNA (1)...(19): siRNA sense strand
ugaaaugggagaggaacuu

SEQ ID NO: 2121131 - RNA, 19 nt, Homo sapiens
  misc_RNA (1)...(19): siRNA sense strand
gaacuuauguagccucauu

SEQ ID NO: 2121132 - RNA, 19 nt, Homo sapiens
  misc_RNA (1)...(19): siRNA sense strand
gaaauuggccaaagaguuu

SEQ ID NO: 2121133 - RNA, 19 nt, Homo sapiens
  misc_RNA (1)...(19): siRNA sense strand
ggaaagaaaucacugaaca

SEQ ID NO: 2121134 - RNA, 19 nt, Homo sapiens
  misc_RNA (1)...(19): siRNA sense strand
caacgagaccuucaaguua

SEQ ID NO: 2121135 - RNA, 19 nt, Homo sapiens
  misc_RNA (1)...(19): siRNA sense strand
gcgaugauguggaaccuua

SEQ ID NO: 2121136 - RNA, 19 nt, Homo sapiens
  misc_RNA (1)...(19): siRNA sense strand
gaaacuuccuuuaccauug

SEQ ID NO: 2121137 - RNA, 19 nt, Homo sapiens
  misc_RNA (1)...(19): siRNA sense strand
gagcauuucuucucuguau

SEQ ID NO: 2121138 - RNA, 19 nt, Homo sapiens
  misc_RNA (1)...(19): siRNA sense strand
gagcaagccuggaagauuc

SEQ ID NO: 2121139 - RNA, 19 nt, Homo sapiens
  misc_RNA (1)...(19): siRNA sense strand
ggauguaccucagcauuaa

SEQ ID NO: 2121140 - RNA, 19 nt, Homo sapiens
  misc_RNA (1)...(19): siRNA sense strand
guagacaucuuuagacuca

SEQ ID NO: 2121141 - RNA, 19 nt, Homo sapiens
  misc_RNA (1)...(19): siRNA sense strand
uaaagaagccauugugaaa

SEQ ID NO: 2121142 - RNA, 19 nt, Homo sapiens
  misc_RNA (1)...(19): siRNA sense strand
guacacauguuguuggauu

SEQ ID NO: 2121143 - RNA, 19 nt, Homo sapiens
  misc_RNA (1)...(19): siRNA sense strand
aaacagagacugaaaguga

SEQ ID NO: 2121144 - RNA, 19 nt, Homo sapiens
  misc_RNA (1)...(19): siRNA sense strand
cagaugagauucaaacaga

SEQ ID NO: 2121145 - RNA, 19 nt, Homo sapiens
  misc_RNA (1)...(19): siRNA sense strand
gagagcaaauucccaagaa

SEQ ID NO: 2121146 - RNA, 19 nt, Homo sapiens
  misc_RNA (1)...(19): siRNA sense strand
aagagaaacucgucaacua

SEQ ID NO: 2121147 - RNA, 19 nt, Homo sapiens
  misc_RNA (1)...(19): siRNA sense strand
gggcaaagagugagagaua

SEQ ID NO: 2121148 - RNA, 19 nt, Homo sapiens
  misc_RNA (1)...(19): siRNA sense strand
aauggagacucuuugauua

SEQ ID NO: 2121149 - RNA, 19 nt, Homo sapiens
  misc_RNA (1)...(19): siRNA sense strand
agaaacucgucaacuauua

SEQ ID NO: 2121150 - RNA, 19 nt, Homo sapiens
  misc_RNA (1)...(19): siRNA sense strand
gcucagcgaugauguggaa

SEQ ID NO: 2121151 - RNA, 19 nt, Homo sapiens
  misc_RNA (1)...(19): siRNA sense strand
caaagaaugcaaaggauuu

SEQ ID NO: 2121152 - RNA, 19 nt, Homo sapiens
  misc_RNA (1)...(19): siRNA sense strand
gcaacagacuacuuccaaa

SEQ ID NO: 2121153 - RNA, 19 nt, Homo sapiens
  misc_RNA (1)...(19): siRNA sense strand
gcaaacagggugcagauga

SEQ ID NO: 2121154 - RNA, 19 nt, Homo sapiens
  misc_RNA (1)...(19): siRNA sense strand
gcaggaaguuacaacaguu

SEQ ID NO: 2121155 - RNA, 19 nt, Homo sapiens
  misc_RNA (1)...(19): siRNA sense strand
gaaauuucauaggcuguuu

SEQ ID NO: 2121156 - RNA, 19 nt, Homo sapiens
  misc_RNA (1)...(19): siRNA sense strand
gaagguauuuagacagugu

SEQ ID NO: 2121157 - RNA, 19 nt, Homo sapiens
  misc_RNA (1)...(19): siRNA sense strand
gaacuauccgggcagauuu

SEQ ID NO: 2121158 - RNA, 19 nt, Homo sapiens
  misc_RNA (1)...(19): siRNA sense strand
aagaagccauugugaaauu

SEQ ID NO: 2121159 - RNA, 19 nt, Homo sapiens
  misc_RNA (1)...(19): siRNA sense strand
gcagaugauggcuuuguua

SEQ ID NO: 2121160 - RNA, 19 nt, Homo sapiens
  misc_RNA (1)...(19): siRNA sense strand
gcaaggaggagaacuuaug

SEQ ID NO: 2121161 - RNA, 19 nt, Homo sapiens
  misc_RNA (1)...(19): siRNA sense strand
ggagagucuuaacagcuua

SEQ ID NO: 2121162 - RNA, 19 nt, Homo sapiens
  misc_RNA (1)...(19): siRNA sense strand
cuucagugcugcugcuuua

SEQ ID NO: 2121163 - RNA, 19 nt, Homo sapiens
  misc_RNA (1)...(19): siRNA sense strand
gaacuuccuacgagaaauu

SEQ ID NO: 2121164 - RNA, 19 nt, Homo sapiens
  misc_RNA (1)...(19): siRNA sense strand
ggaccaaggugucuuugag

SEQ ID NO: 2121165 - RNA, 19 nt, Homo sapiens
  misc_RNA (1)...(19): siRNA sense strand
ucaaugauguaaaggaaga

SEQ ID NO: 2121166 - RNA, 19 nt, Homo sapiens
  misc_RNA (1)...(19): siRNA sense strand
ccaaugagcaggagcugua

SEQ ID NO: 2121167 - RNA, 19 nt, Homo sapiens
  misc_RNA (1)...(19): siRNA sense strand
gagcgccaguuuaaccuaa

SEQ ID NO: 2121168 - RNA, 19 nt, Homo sapiens
  misc_RNA (1)...(19): siRNA sense strand
ccacaaauuacaucuguuu

SEQ ID NO: 2121169 - RNA, 19 nt, Homo sapiens
  misc_RNA (1)...(19): siRNA sense strand
gggaauggcuugagcaaaa

SEQ ID NO: 2121170 - RNA, 19 nt, Homo sapiens
  misc_RNA (1)...(19): siRNA sense strand
aaacuuccuuuaccauuga

SEQ ID NO: 2121171 - RNA, 19 nt, Homo sapiens
  misc_RNA (1)...(19): siRNA sense strand
gaacagaugagauucaaac

SEQ ID NO: 2121172 - RNA, 19 nt, Homo sapiens
  misc_RNA (1)...(19): siRNA sense strand
ggagcagcuugccaacaua

SEQ ID NO: 2121173 - RNA, 19 nt, Homo sapiens
  misc_RNA (1)...(19): siRNA sense strand
gagaaacucgucaacuauu

SEQ ID NO: 2121174 - RNA, 19 nt, Homo sapiens
  misc_RNA (1)...(19): siRNA sense strand
aacgagaccuucaaguuaa

SEQ ID NO: 2121175 - RNA, 19 nt, Homo sapiens
  misc_RNA (1)...(19): siRNA sense strand
gggcagauuugauugaaca

SEQ ID NO: 2121176 - RNA, 19 nt, Homo sapiens
  misc_RNA (1)...(19): siRNA sense strand
gcagacacucuccaucuuu

SEQ ID NO: 2121177 - RNA, 19 nt, Homo sapiens
  misc_RNA (1)...(19): siRNA sense strand
uagacagugugaccaauaa

SEQ ID NO: 2121178 - RNA, 19 nt, Homo sapiens
  misc_RNA (1)...(19): siRNA sense strand
aauguuugcucuucucuuu

SEQ ID NO: 2121179 - RNA, 19 nt, Homo sapiens
  misc_RNA (1)...(19): siRNA sense strand
aaaagugucugcucuaaaa

SEQ ID NO: 2121180 - RNA, 19 nt, Homo sapiens
  misc_RNA (1)...(19): siRNA sense strand
gcaacucaguacuucuuug

SEQ ID NO: 2121181 - RNA, 19 nt, Homo sapiens
  misc_RNA (1)...(19): siRNA sense strand
gcauugacuucgagcaguu

SEQ ID NO: 2121182 - RNA, 19 nt, Homo sapiens
  misc_RNA (1)...(19): siRNA sense strand
gggaagguauuuagacagu

SEQ ID NO: 2121183 - RNA, 19 nt, Homo sapiens
  misc_RNA (1)...(19): siRNA sense strand
ccaugaauauugucacuuc

SEQ ID NO: 2121184 - RNA, 19 nt, Homo sapiens
  misc_RNA (1)...(19): siRNA sense strand
ggcaagggaucugcaugua

SEQ ID NO: 2121185 - RNA, 19 nt, Homo sapiens
  misc_RNA (1)...(19): siRNA sense strand
gggcauugcugcacuaagg

SEQ ID NO: 2121186 - RNA, 19 nt, Homo sapiens
  misc_RNA (1)...(19): siRNA sense strand
ggaacuauccgggcagauu

SEQ ID NO: 2121187 - RNA, 19 nt, Homo sapiens
  misc_RNA (1)...(19): siRNA sense strand
caaacagggugcagaugau

SEQ ID NO: 2121188 - RNA, 19 nt, Homo sapiens
  misc_RNA (1)...(19): siRNA sense strand
gcaguucaagggaauguuu

SEQ ID NO: 2121189 - RNA, 19 nt, Homo sapiens
  misc_RNA (1)...(19): siRNA sense strand
guuccuggccucccucuua

SEQ ID NO: 2121190 - RNA, 19 nt, Homo sapiens
  misc_RNA (1)...(19): siRNA sense strand
ugaaagagcaagccuggaa

SEQ ID NO: 2121191 - RNA, 19 nt, Homo sapiens
  misc_RNA (1)...(19): siRNA sense strand
gagacucuuugauuaacuu

SEQ ID NO: 2121192 - RNA, 19 nt, Homo sapiens
  misc_RNA (1)...(19): siRNA sense strand
ugaggcaacucuuagacaa

SEQ ID NO: 2121193 - RNA, 19 nt, Homo sapiens
  misc_RNA (1)...(19): siRNA sense strand
caacucaguacuucuuuga

SEQ ID NO: 2121194 - RNA, 19 nt, Homo sapiens
  misc_RNA (1)...(19): siRNA sense strand
ggaugcaaauguggacaaa

SEQ ID NO: 2121195 - RNA, 19 nt, Homo sapiens
  misc_RNA (1)...(19): siRNA sense strand
ccacacauccuggguacua

SEQ ID NO: 2121196 - RNA, 19 nt, Homo sapiens
  misc_RNA (1)...(19): siRNA sense strand
gggcaucauugcagaauac

SEQ ID NO: 2121197 - RNA, 19 nt, Homo sapiens
  misc_RNA (1)...(19): siRNA sense strand
gggugcagaugauggcuuu

SEQ ID NO: 2121198 - RNA, 19 nt, Homo sapiens
  misc_RNA (1)...(19): siRNA sense strand
gaguuugucucugggcuaa

SEQ ID NO: 2121199 - RNA, 19 nt, Homo sapiens
  misc_RNA (1)...(19): siRNA sense strand
aaauggagacucuuugauu

SEQ ID NO: 2121200 - RNA, 19 nt, Homo sapiens
  misc_RNA (1)...(19): siRNA sense strand
uagcugugcuggaugcaaa

SEQ ID NO: 2121201 - RNA, 19 nt, Homo sapiens
  misc_RNA (1)...(19): siRNA sense strand
gauggagagcgccaguuua

SEQ ID NO: 2121202 - RNA, 19 nt, Homo sapiens
  misc_RNA (1)...(19): siRNA sense strand
ucaacgagaccuucaaguu

SEQ ID NO: 2121203 - RNA, 19 nt, Homo sapiens
  misc_RNA (1)...(19): siRNA sense strand
gaagaaugccacccugcuu

SEQ ID NO: 2121204 - RNA, 19 nt, Homo sapiens
  misc_RNA (1)...(19): siRNA sense strand
acacggagaaguuuaaaga

SEQ ID NO: 2121205 - RNA, 19 nt, Homo sapiens
  misc_RNA (1)...(19): siRNA sense strand
cagacacucuccaucuuug

SEQ ID NO: 2121206 - RNA, 19 nt, Homo sapiens
  misc_RNA (1)...(19): siRNA sense strand
gcugucaggugccaucaau

SEQ ID NO: 2121207 - RNA, 19 nt, Homo sapiens
  misc_RNA (1)...(19): siRNA sense strand
cagcaaggaggagaacuua

SEQ ID NO: 2121208 - RNA, 19 nt, Homo sapiens
  misc_RNA (1)...(19): siRNA sense strand
uaugaaaucucggccaugu

SEQ ID NO: 2121209 - RNA, 19 nt, Homo sapiens
  misc_RNA (1)...(19): siRNA sense strand
gaaguuacaacaguucaga

SEQ ID NO: 2121210 - RNA, 19 nt, Homo sapiens
  misc_RNA (1)...(19): siRNA sense strand
gacaaggaguuugcaggaa

SEQ ID NO: 2121211 - RNA, 19 nt, Homo sapiens
  misc_RNA (1)...(19): siRNA sense strand
cgaaauuggccaaagaguu

SEQ ID NO: 2121212 - RNA, 19 nt, Homo sapiens
  misc_RNA (1)...(19): siRNA sense strand
gacaagcccgugugcauga

SEQ ID NO: 2121213 - RNA, 19 nt, Homo sapiens
  misc_RNA (1)...(19): siRNA sense strand
ugcaaaggauuuacccaaa

SEQ ID NO: 2121214 - RNA, 19 nt, Homo sapiens
  misc_RNA (1)...(19): siRNA sense strand
gcuggaggauacuacgaaa

SEQ ID NO: 2121215 - RNA, 19 nt, Homo sapiens
  misc_RNA (1)...(19): siRNA sense strand
gcauguaccgcacagagaa

SEQ ID NO: 2121216 - RNA, 19 nt, Homo sapiens
  misc_RNA (1)...(19): siRNA sense strand
gaugacacggagaaguuua

SEQ ID NO: 2121217 - RNA, 19 nt, Homo sapiens
  misc_RNA (1)...(19): siRNA sense strand
gaggacaaauggaggacau

SEQ ID NO: 2121218 - RNA, 19 nt, Homo sapiens
  misc_RNA (1)...(19): siRNA sense strand
uuacaacaguucagaugau

SEQ ID NO: 2121219 - RNA, 19 nt, Homo sapiens
  misc_RNA (1)...(19): siRNA sense strand
ugagggauuugaacaagau

SEQ ID NO: 2121220 - RNA, 19 nt, Homo sapiens
  misc_RNA (1)...(19): siRNA sense strand
guccacaaauuacaucugu

SEQ ID NO: 2121221 - RNA, 19 nt, Homo sapiens
  misc_RNA (1)...(19): siRNA sense strand
ugacagaaacuuccuuuac

SEQ ID NO: 2121222 - RNA, 19 nt, Homo sapiens
  misc_RNA (1)...(19): siRNA sense strand
gaaccauugugacagaaac

SEQ ID NO: 2121223 - RNA, 19 nt, Homo sapiens
  misc_RNA (1)...(19): siRNA sense strand
ggagauugagagggauuua

SEQ ID NO: 2121224 - RNA, 19 nt, Homo sapiens
  misc_RNA (1)...(19): siRNA sense strand
ggaguucaacccgaaauug

SEQ ID NO: 2121225 - RNA, 19 nt, Homo sapiens
  misc_RNA (1)...(19): siRNA sense strand
gcauuaaccaccuuugcuu

SEQ ID NO: 2121226 - RNA, 19 nt, Homo sapiens
  misc_RNA (1)...(19): siRNA sense strand
acagcuccauguccucaua

SEQ ID NO: 2121227 - RNA, 19 nt, Homo sapiens
  misc_RNA (1)...(19): siRNA sense strand
gaaaauggagacucuuuga

SEQ ID NO: 2121228 - RNA, 19 nt, Homo sapiens
  misc_RNA (1)...(19): siRNA sense strand
gacagaaacuuccuuuacc

SEQ ID NO: 2121229 - RNA, 19 nt, Homo sapiens
  misc_RNA (1)...(19): siRNA sense strand
cagauuugauugaacagau

SEQ ID NO: 2121230 - RNA, 19 nt, Homo sapiens
  misc_RNA (1)...(19): siRNA sense strand
gcaaauguggacaaacugu

SEQ ID NO: 2121231 - RNA, 19 nt, Homo sapiens
  misc_RNA (1)...(19): siRNA sense strand
gcuccaagcugucuaauaa

SEQ ID NO: 2121232 - RNA, 19 nt, Homo sapiens
  misc_RNA (1)...(19): siRNA sense strand
ggaauuaucuguacugcuu

SEQ ID NO: 2121233 - RNA, 19 nt, Homo sapiens
  misc_RNA (1)...(19): siRNA sense strand
gcacuucgguuguguuugu

SEQ ID NO: 2121234 - RNA, 19 nt, Homo sapiens
  misc_RNA (1)...(19): siRNA sense strand
caagaagggugacaaggaa

SEQ ID NO: 2121235 - RNA, 19 nt, Homo sapiens
  misc_RNA (1)...(19): siRNA sense strand
ggagggagacgucaucuuu

SEQ ID NO: 2121236 - RNA, 19 nt, Homo sapiens
  misc_RNA (1)...(19): siRNA sense strand
gacgucaucuuuacuacua

SEQ ID NO: 2121237 - RNA, 19 nt, Homo sapiens
  misc_RNA (1)...(19): siRNA sense strand
gaaacaauccuggaauuau

SEQ ID NO: 2121238 - RNA, 19 nt, Homo sapiens
  misc_RNA (1)...(19): siRNA sense strand
gaagacaucguggccauaa

SEQ ID NO: 2121239 - RNA, 19 nt, Homo sapiens
  misc_RNA (1)...(19): siRNA sense strand
gugaaacaauccuggaauu

SEQ ID NO: 2121240 - RNA, 19 nt, Homo sapiens
  misc_RNA (1)...(19): siRNA sense strand
caucguaccugucccaugu

SEQ ID NO: 2121241 - RNA, 19 nt, Homo sapiens
  misc_RNA (1)...(19): siRNA sense strand
aaacaauccuggaauuauc

SEQ ID NO: 2121242 - RNA, 19 nt, Homo sapiens
  misc_RNA (1)...(19): siRNA sense strand
aaagaaagccaucagcaaa

SEQ ID NO: 2121243 - RNA, 19 nt, Homo sapiens
  misc_RNA (1)...(19): siRNA sense strand
ggagacgucaucuuuacua

SEQ ID NO: 2121244 - RNA, 19 nt, Homo sapiens
  misc_RNA (1)...(19): siRNA sense strand
ugaaacaauccuggaauua

SEQ ID NO: 2121245 - RNA, 19 nt, Homo sapiens
  misc_RNA (1)...(19): siRNA sense strand
gagggagacgucaucuuua

SEQ ID NO: 2121246 - RNA, 19 nt, Homo sapiens
  misc_RNA (1)...(19): siRNA sense strand
ucgcauggcucgucuuuua

SEQ ID NO: 2121247 - RNA, 19 nt, Homo sapiens
  misc_RNA (1)...(19): siRNA sense strand
caaagaaagccaucagcaa

SEQ ID NO: 2121248 - RNA, 19 nt, Homo sapiens
  misc_RNA (1)...(19): siRNA sense strand
ggaacuugcagaaauaugu

SEQ ID NO: 2121249 - RNA, 19 nt, Homo sapiens
  misc_RNA (1)...(19): siRNA sense strand
guacaagcccaaugacguu

SEQ ID NO: 2121250 - RNA, 19 nt, Homo sapiens
  misc_RNA (1)...(19): siRNA sense strand
gaguggaagugaaacaauc

SEQ ID NO: 2121251 - RNA, 19 nt, Homo sapiens
  misc_RNA (1)...(19): siRNA sense strand
uaagccugcuggaaagaaa

SEQ ID NO: 2121252 - RNA, 19 nt, Homo sapiens
  misc_RNA (1)...(19): siRNA sense strand
caacagugaaugaaaguuc

SEQ ID NO: 2121253 - RNA, 19 nt, Homo sapiens
  misc_RNA (1)...(19): siRNA sense strand
acacaacagugaaugaaag

SEQ ID NO: 2121254 - RNA, 19 nt, Homo sapiens
  misc_RNA (1)...(19): siRNA sense strand
caucguggccauaaugauu

SEQ ID NO: 2121255 - RNA, 19 nt, Homo sapiens
  misc_RNA (1)...(19): siRNA sense strand
gcaaaugccagggauagga

SEQ ID NO: 2121256 - RNA, 19 nt, Homo sapiens
  misc_RNA (1)...(19): siRNA sense strand
guaugugccuugugguuca

SEQ ID NO: 2121257 - RNA, 19 nt, Homo sapiens
  misc_RNA (1)...(19): siRNA sense strand
aaacauugcaccauacuuc

SEQ ID NO: 2121258 - RNA, 19 nt, Homo sapiens
  misc_RNA (1)...(19): siRNA sense strand
cccggaacuugcagaaaua

SEQ ID NO: 2121259 - RNA, 19 nt, Homo sapiens
  misc_RNA (1)...(19): siRNA sense strand
gcaccauacuucucuuugc

SEQ ID NO: 2121260 - RNA, 19 nt, Homo sapiens
  misc_RNA (1)...(19): siRNA sense strand
ucaagaagggugacaagga

SEQ ID NO: 2121261 - RNA, 19 nt, Homo sapiens
  misc_RNA (1)...(19): siRNA sense strand
gaacuugcagaaauaugug

SEQ ID NO: 2121262 - RNA, 19 nt, Homo sapiens
  misc_RNA (1)...(19): siRNA sense strand
gaucaggaccaucaagaag

SEQ ID NO: 2121263 - RNA, 19 nt, Homo sapiens
  misc_RNA (1)...(19): siRNA sense strand
gauaguaagccugcuggaa

SEQ ID NO: 2121264 - RNA, 19 nt, Homo sapiens
  misc_RNA (1)...(19): siRNA sense strand
uuuauuacauccagagguu

SEQ ID NO: 2121265 - RNA, 19 nt, Homo sapiens
  misc_RNA (1)...(19): siRNA sense strand
auaguaagccugcuggaaa

SEQ ID NO: 2121266 - RNA, 19 nt, Homo sapiens
  misc_RNA (1)...(19): siRNA sense strand
gaacccggaacuugcagaa

SEQ ID NO: 2121267 - RNA, 19 nt, Homo sapiens
  misc_RNA (1)...(19): siRNA sense strand
caaaugccagggauaggaa

SEQ ID NO: 2121268 - RNA, 19 nt, Homo sapiens
  misc_RNA (1)...(19): siRNA sense strand
gacacaacagugaaugaaa

SEQ ID NO: 2121269 - RNA, 19 nt, Homo sapiens
  misc_RNA (1)...(19): siRNA sense strand
aacagugaguucugccaua

SEQ ID NO: 2121270 - RNA, 19 nt, Homo sapiens
  misc_RNA (1)...(19): siRNA sense strand
aaagggaaggagauaguaa

SEQ ID NO: 2121271 - RNA, 19 nt, Homo sapiens
  misc_RNA (1)...(19): siRNA sense strand
cgacacaacagugaaugaa

SEQ ID NO: 2121272 - RNA, 19 nt, Homo sapiens
  misc_RNA (1)...(19): siRNA sense strand
caucggaacccggaacuug

SEQ ID NO: 2121273 - RNA, 19 nt, Homo sapiens
  misc_RNA (1)...(19): siRNA sense strand
ugaguucugccauacuuaa

SEQ ID NO: 2121274 - RNA, 19 nt, Homo sapiens
  misc_RNA (1)...(19): siRNA sense strand
ucuaagaguggaagugaaa

SEQ ID NO: 2121275 - RNA, 19 nt, Homo sapiens
  misc_RNA (1)...(19): siRNA sense strand
caucuuuacuacuaacagu

SEQ ID NO: 2121276 - RNA, 19 nt, Homo sapiens
  misc_RNA (1)...(19): siRNA sense strand
gaaacauugcaccauacuu

SEQ ID NO: 2121277 - RNA, 19 nt, Homo sapiens
  misc_RNA (1)...(19): siRNA sense strand
guaccugucccaugugcaa

SEQ ID NO: 2121278 - RNA, 19 nt, Homo sapiens
  misc_RNA (1)...(19): siRNA sense strand
auccagagguuucgauaug

SEQ ID NO: 2121279 - RNA, 19 nt, Homo sapiens
  misc_RNA (1)...(19): siRNA sense strand
acccggaacuugcagaaau

SEQ ID NO: 2121280 - RNA, 19 nt, Homo sapiens
  misc_RNA (1)...(19): siRNA sense strand
gagacgucaucuuuacuac

SEQ ID NO: 2121281 - RNA, 19 nt, Homo sapiens
  misc_RNA (1)...(19): siRNA sense strand
cgacuugcccacugacuuc

SEQ ID NO: 2121282 - RNA, 19 nt, Homo sapiens
  misc_RNA (1)...(19): siRNA sense strand
ccagagguuucgauaugca

SEQ ID NO: 2121283 - RNA, 19 nt, Homo sapiens
  misc_RNA (1)...(19): siRNA sense strand
gagccgcacuucgguugug

SEQ ID NO: 2121284 - RNA, 19 nt, Homo sapiens
  misc_RNA (1)...(19): siRNA sense strand
uaucuaagaguggaaguga

SEQ ID NO: 2121285 - RNA, 19 nt, Homo sapiens
  misc_RNA (1)...(19): siRNA sense strand
agacaucguggccauaaug

SEQ ID NO: 2121286 - RNA, 19 nt, Homo sapiens
  misc_RNA (1)...(19): siRNA sense strand
uaguaagccugcuggaaag

SEQ ID NO: 2121287 - RNA, 19 nt, Homo sapiens
  misc_RNA (1)...(19): siRNA sense strand
gaaggguacaagcccaaug

SEQ ID NO: 2121288 - RNA, 19 nt, Homo sapiens
  misc_RNA (1)...(19): siRNA sense strand
ugucccaugugcaagauga

SEQ ID NO: 2121289 - RNA, 19 nt, Homo sapiens
  misc_RNA (1)...(19): siRNA sense strand
gacaucguggccauaauga

SEQ ID NO: 2121290 - RNA, 19 nt, Homo sapiens
  misc_RNA (1)...(19): siRNA sense strand
gcgacacaacagugaauga

SEQ ID NO: 2121291 - RNA, 19 nt, Homo sapiens
  misc_RNA (1)...(19): siRNA sense strand
cagaucaggaccaucaaga

SEQ ID NO: 2121292 - RNA, 19 nt, Homo sapiens
  misc_RNA (1)...(19): siRNA sense strand
ucagcaaacuccagaucag

SEQ ID NO: 2121293 - RNA, 19 nt, Homo sapiens
  misc_RNA (1)...(19): siRNA sense strand
agaaagccaucagcaaacu

SEQ ID NO: 2121294 - RNA, 19 nt, Homo sapiens
  misc_RNA (1)...(19): siRNA sense strand
agaugaacauucuuaaagc

SEQ ID NO: 2121295 - RNA, 19 nt, Homo sapiens
  misc_RNA (1)...(19): siRNA sense strand
ggaaacauugcaccauacu

SEQ ID NO: 2121296 - RNA, 19 nt, Homo sapiens
  misc_RNA (1)...(19): siRNA sense strand
agugaguucugccauacuu

SEQ ID NO: 2121297 - RNA, 19 nt, Homo sapiens
  misc_RNA (1)...(19): siRNA sense strand
uaaaaguggcccaagaaaa

SEQ ID NO: 2121298 - RNA, 19 nt, Homo sapiens
  misc_RNA (1)...(19): siRNA sense strand
uaaugauuccugagccaaa

SEQ ID NO: 2121299 - RNA, 19 nt, Homo sapiens
  misc_RNA (1)...(19): siRNA sense strand
ugugcaagaugaacauucu

SEQ ID NO: 2121300 - RNA, 19 nt, Homo sapiens
  misc_RNA (1)...(19): siRNA sense strand
ccuugugguucaauggaaa

SEQ ID NO: 2121301 - RNA, 19 nt, Homo sapiens
  misc_RNA (1)...(19): siRNA sense strand
agggagacgucaucuuuac

SEQ ID NO: 2121302 - RNA, 19 nt, Homo sapiens
  misc_RNA (1)...(19): siRNA sense strand
uggacgacuugcccacuga

SEQ ID NO: 2121303 - RNA, 19 nt, Homo sapiens
  misc_RNA (1)...(19): siRNA sense strand
guaagccugcuggaaagaa

SEQ ID NO: 2121304 - RNA, 19 nt, Homo sapiens
  misc_RNA (1)...(19): siRNA sense strand
gccuugugguucaauggaa

SEQ ID NO: 2121305 - RNA, 19 nt, Homo sapiens
  misc_RNA (1)...(19): siRNA sense strand
gaagggugacaaggaaaca

SEQ ID NO: 2121306 - RNA, 19 nt, Homo sapiens
  misc_RNA (1)...(19): siRNA sense strand
guggugggaguaucuaaga

SEQ ID NO: 2121307 - RNA, 19 nt, Homo sapiens
  misc_RNA (1)...(19): siRNA sense strand
uggaaacauugcaccauac

SEQ ID NO: 2121308 - RNA, 19 nt, Homo sapiens
  misc_RNA (1)...(19): siRNA sense strand
caccauacuucucuuugcu

SEQ ID NO: 2121309 - RNA, 19 nt, Homo sapiens
  misc_RNA (1)...(19): siRNA sense strand
uccaagcugucuaauaacu

SEQ ID NO: 2121310 - RNA, 19 nt, Homo sapiens
  misc_RNA (1)...(19): siRNA sense strand
cauggcucgucuuuuauua

SEQ ID NO: 2121311 - RNA, 19 nt, Homo sapiens
  misc_RNA (1)...(19): siRNA sense strand
gucuccaucuccuucauug

SEQ ID NO: 2121312 - RNA, 19 nt, Homo sapiens
  misc_RNA (1)...(19): siRNA sense strand
ucucuuugcuugguguaga

SEQ ID NO: 2121313 - RNA, 19 nt, Homo sapiens
  misc_RNA (1)...(19): siRNA sense strand
aaggguacaagcccaauga

SEQ ID NO: 2121314 - RNA, 19 nt, Homo sapiens
  misc_RNA (1)...(19): siRNA sense strand
gugaguucugccauacuua

SEQ ID NO: 2121315 - RNA, 19 nt, Homo sapiens
  misc_RNA (1)...(19): siRNA sense strand
acagugaguucugccauac

SEQ ID NO: 2121316 - RNA, 19 nt, Homo sapiens
  misc_RNA (1)...(19): siRNA sense strand
cgacugcauggacgacuug

SEQ ID NO: 2121317 - RNA, 19 nt, Homo sapiens
  misc_RNA (1)...(19): siRNA sense strand
uaagaguggaagugaaaca

SEQ ID NO: 2121318 - RNA, 19 nt, Homo sapiens
  misc_RNA (1)...(19): siRNA sense strand
cugcuuccaucuucuccuu

SEQ ID NO: 2121319 - RNA, 19 nt, Homo sapiens
  misc_RNA (1)...(19): siRNA sense strand
gaacaaagccaaaauagua

SEQ ID NO: 2121320 - RNA, 19 nt, Homo sapiens
  misc_RNA (1)...(19): siRNA sense strand
gaagauagauacagauugg

SEQ ID NO: 2121321 - RNA, 19 nt, Homo sapiens
  misc_RNA (1)...(19): siRNA sense strand
gaaccuggcugaagaaucu

SEQ ID NO: 2121322 - RNA, 19 nt, Homo sapiens
  misc_RNA (1)...(19): siRNA sense strand
gcacaaagguaccacugaa

SEQ ID NO: 2121323 - RNA, 19 nt, Homo sapiens
  misc_RNA (1)...(19): siRNA sense strand
ugacauggaucuucagaaa

SEQ ID NO: 2121324 - RNA, 19 nt, Homo sapiens
  misc_RNA (1)...(19): siRNA sense strand
caaaccagcugcuaacaga

SEQ ID NO: 2121325 - RNA, 19 nt, Homo sapiens
  misc_RNA (1)...(19): siRNA sense strand
gaaaccagauuggcauauu

SEQ ID NO: 2121326 - RNA, 19 nt, Homo sapiens
  misc_RNA (1)...(19): siRNA sense strand
gccaaagccuuauaugauu

SEQ ID NO: 2121327 - RNA, 19 nt, Homo sapiens
  misc_RNA (1)...(19): siRNA sense strand
cuucaaggcuggagauaua

SEQ ID NO: 2121328 - RNA, 19 nt, Homo sapiens
  misc_RNA (1)...(19): siRNA sense strand
ugagagaacuagaaacuug

SEQ ID NO: 2121329 - RNA, 19 nt, Homo sapiens
  misc_RNA (1)...(19): siRNA sense strand
ggaaagcucaguaauguug

SEQ ID NO: 2121330 - RNA, 19 nt, Homo sapiens
  misc_RNA (1)...(19): siRNA sense strand
gcaaccagaagaucuaaua

SEQ ID NO: 2121331 - RNA, 19 nt, Homo sapiens
  misc_RNA (1)...(19): siRNA sense strand
ccaaagccuuauaugauuu

SEQ ID NO: 2121332 - RNA, 19 nt, Homo sapiens
  misc_RNA (1)...(19): siRNA sense strand
guggagaacuuaugggaaa

SEQ ID NO: 2121333 - RNA, 19 nt, Homo sapiens
  misc_RNA (1)...(19): siRNA sense strand
gcugagagcucugauagug

SEQ ID NO: 2121334 - RNA, 19 nt, Homo sapiens
  misc_RNA (1)...(19): siRNA sense strand
guuaaaggcucaagaugug

SEQ ID NO: 2121335 - RNA, 19 nt, Homo sapiens
  misc_RNA (1)...(19): siRNA sense strand
guucagagaugguucuaga

SEQ ID NO: 2121336 - RNA, 19 nt, Homo sapiens
  misc_RNA (1)...(19): siRNA sense strand
cagagcaaguugaugauuu

SEQ ID NO: 2121337 - RNA, 19 nt, Homo sapiens
  misc_RNA (1)...(19): siRNA sense strand
ggccuuauacgaaguguua

SEQ ID NO: 2121338 - RNA, 19 nt, Homo sapiens
  misc_RNA (1)...(19): siRNA sense strand
aaaccagauuggcauauuu

SEQ ID NO: 2121339 - RNA, 19 nt, Homo sapiens
  misc_RNA (1)...(19): siRNA sense strand
gaaugaagaugaacuuucc

SEQ ID NO: 2121340 - RNA, 19 nt, Homo sapiens
  misc_RNA (1)...(19): siRNA sense strand
agagaccagugaugacuua

SEQ ID NO: 2121341 - RNA, 19 nt, Homo sapiens
  misc_RNA (1)...(19): siRNA sense strand
ucagagggagaaauuauua

SEQ ID NO: 2121342 - RNA, 19 nt, Homo sapiens
  misc_RNA (1)...(19): siRNA sense strand
ccucaggacugcccaagaa

SEQ ID NO: 2121343 - RNA, 19 nt, Homo sapiens
  misc_RNA (1)...(19): siRNA sense strand
guucaccugucucaaauga

SEQ ID NO: 2121344 - RNA, 19 nt, Homo sapiens
  misc_RNA (1)...(19): siRNA sense strand
gaucuucccagcaguguuu

SEQ ID NO: 2121345 - RNA, 19 nt, Homo sapiens
  misc_RNA (1)...(19): siRNA sense strand
ggaaugggccagaggagaa

SEQ ID NO: 2121346 - RNA, 19 nt, Homo sapiens
  misc_RNA (1)...(19): siRNA sense strand
gagaagauagauacagauu

SEQ ID NO: 2121347 - RNA, 19 nt, Homo sapiens
  misc_RNA (1)...(19): siRNA sense strand
gcaaguugaugauuugaac

SEQ ID NO: 2121348 - RNA, 19 nt, Homo sapiens
  misc_RNA (1)...(19): siRNA sense strand
gacacccucucuacaguaa

SEQ ID NO: 2121349 - RNA, 19 nt, Homo sapiens
  misc_RNA (1)...(19): siRNA sense strand
gcagaaggaugaguugagu

SEQ ID NO: 2121350 - RNA, 19 nt, Homo sapiens
  misc_RNA (1)...(19): siRNA sense strand
ggccuuugcugcugaagaa

SEQ ID NO: 2121351 - RNA, 19 nt, Homo sapiens
  misc_RNA (1)...(19): siRNA sense strand
aaaccugaauugccaaaga

SEQ ID NO: 2121352 - RNA, 19 nt, Homo sapiens
  misc_RNA (1)...(19): siRNA sense strand
ggccaaagccuuauaugau

SEQ ID NO: 2121353 - RNA, 19 nt, Homo sapiens
  misc_RNA (1)...(19): siRNA sense strand
ggcucaaacucucagguua

SEQ ID NO: 2121354 - RNA, 19 nt, Homo sapiens
  misc_RNA (1)...(19): siRNA sense strand
cauauuuccugccaacuau

SEQ ID NO: 2121355 - RNA, 19 nt, Homo sapiens
  misc_RNA (1)...(19): siRNA sense strand
gcauauuuccugccaacua

SEQ ID NO: 2121356 - RNA, 19 nt, Homo sapiens
  misc_RNA (1)...(19): siRNA sense strand
ggagaaauuguuuaucuuc

SEQ ID NO: 2121357 - RNA, 19 nt, Homo sapiens
  misc_RNA (1)...(19): siRNA sense strand
cagcagagcaaguugauga

SEQ ID NO: 2121358 - RNA, 19 nt, Homo sapiens
  misc_RNA (1)...(19): siRNA sense strand
agaagacacuggcagaguu

SEQ ID NO: 2121359 - RNA, 19 nt, Homo sapiens
  misc_RNA (1)...(19): siRNA sense strand
gaguucaccugucucaaau

SEQ ID NO: 2121360 - RNA, 19 nt, Homo sapiens
  misc_RNA (1)...(19): siRNA sense strand
gcucaaacucucagguuaa

SEQ ID NO: 2121361 - RNA, 19 nt, Homo sapiens
  misc_RNA (1)...(19): siRNA sense strand
accaaacccuggccuuaua

SEQ ID NO: 2121362 - RNA, 19 nt, Homo sapiens
  misc_RNA (1)...(19): siRNA sense strand
accagaagaucuaauaaga

SEQ ID NO: 2121363 - RNA, 19 nt, Homo sapiens
  misc_RNA (1)...(19): siRNA sense strand
gaacuagaaacuuggaauc

SEQ ID NO: 2121364 - RNA, 19 nt, Homo sapiens
  misc_RNA (1)...(19): siRNA sense strand
caucacaagccaaagcaua

SEQ ID NO: 2121365 - RNA, 19 nt, Homo sapiens
  misc_RNA (1)...(19): siRNA sense strand
cccaagaaaccagaaauua

SEQ ID NO: 2121366 - RNA, 19 nt, Homo sapiens
  misc_RNA (1)...(19): siRNA sense strand
ggacacccucucuacagua

SEQ ID NO: 2121367 - RNA, 19 nt, Homo sapiens
  misc_RNA (1)...(19): siRNA sense strand
cuggaaagcucaguaaugu

SEQ ID NO: 2121368 - RNA, 19 nt, Homo sapiens
  misc_RNA (1)...(19): siRNA sense strand
gaagcccacuguaauucga

SEQ ID NO: 2121369 - RNA, 19 nt, Homo sapiens
  misc_RNA (1)...(19): siRNA sense strand
cagcuuugaugaugauguu

SEQ ID NO: 2121370 - RNA, 19 nt, Homo sapiens
  misc_RNA (1)...(19): siRNA sense strand
uggaacgucuggauucuga

SEQ ID NO: 2121371 - RNA, 19 nt, Homo sapiens
  misc_RNA (1)...(19): siRNA sense strand
agaaauuacuccacguuca

SEQ ID NO: 2121372 - RNA, 19 nt, Homo sapiens
  misc_RNA (1)...(19): siRNA sense strand
gauuauugauaucccagaa

SEQ ID NO: 2121373 - RNA, 19 nt, Homo sapiens
  misc_RNA (1)...(19): siRNA sense strand
aaaccaaacccuggccuua

SEQ ID NO: 2121374 - RNA, 19 nt, Homo sapiens
  misc_RNA (1)...(19): siRNA sense strand
uggagaagauagauacaga

SEQ ID NO: 2121375 - RNA, 19 nt, Homo sapiens
  misc_RNA (1)...(19): siRNA sense strand
agagcaaguugaugauuug

SEQ ID NO: 2121376 - RNA, 19 nt, Homo sapiens
  misc_RNA (1)...(19): siRNA sense strand
cgagaccugugaauggaaa

SEQ ID NO: 2121377 - RNA, 19 nt, Homo sapiens
  misc_RNA (1)...(19): siRNA sense strand
caaccagaagaucuaauaa

SEQ ID NO: 2121378 - RNA, 19 nt, Homo sapiens
  misc_RNA (1)...(19): siRNA sense strand
ggucagacaaacauagaaa

SEQ ID NO: 2121379 - RNA, 19 nt, Homo sapiens
  misc_RNA (1)...(19): siRNA sense strand
caagaaaccagaaauuacu

SEQ ID NO: 2121380 - RNA, 19 nt, Homo sapiens
  misc_RNA (1)...(19): siRNA sense strand
ccaggaagcccacuguaau

SEQ ID NO: 2121381 - RNA, 19 nt, Homo sapiens
  misc_RNA (1)...(19): siRNA sense strand
ggagaaugaagaugaacuu

SEQ ID NO: 2121382 - RNA, 19 nt, Homo sapiens
  misc_RNA (1)...(19): siRNA sense strand
cagcagagaccagugauga

SEQ ID NO: 2121383 - RNA, 19 nt, Homo sapiens
  misc_RNA (1)...(19): siRNA sense strand
uggagccuguugaggauua

SEQ ID NO: 2121384 - RNA, 19 nt, Homo sapiens
  misc_RNA (1)...(19): siRNA sense strand
ccaacuaugucaaagugau

SEQ ID NO: 2121385 - RNA, 19 nt, Homo sapiens
  misc_RNA (1)...(19): siRNA sense strand
ucacuccacuugaugaaca

SEQ ID NO: 2121386 - RNA, 19 nt, Homo sapiens
  misc_RNA (1)...(19): siRNA sense strand
ccagaagaucuaauaagaa

SEQ ID NO: 2121387 - RNA, 19 nt, Homo sapiens
  misc_RNA (1)...(19): siRNA sense strand
caaggcuggagauauaaua

SEQ ID NO: 2121388 - RNA, 19 nt, Homo sapiens
  misc_RNA (1)...(19): siRNA sense strand
agaaggaugaguugaguuu

SEQ ID NO: 2121389 - RNA, 19 nt, Homo sapiens
  misc_RNA (1)...(19): siRNA sense strand
gaaacugccuuuuaaucga

SEQ ID NO: 2121390 - RNA, 19 nt, Homo sapiens
  misc_RNA (1)...(19): siRNA sense strand
gcaaauguuuuaagcacaa

SEQ ID NO: 2121391 - RNA, 19 nt, Homo sapiens
  misc_RNA (1)...(19): siRNA sense strand
ucaccugucucaaaugaag

SEQ ID NO: 2121392 - RNA, 19 nt, Homo sapiens
  misc_RNA (1)...(19): siRNA sense strand
ccaagaaaccagaaauuac

SEQ ID NO: 2121393 - RNA, 19 nt, Homo sapiens
  misc_RNA (1)...(19): siRNA sense strand
acugaaaccugucacuguu

SEQ ID NO: 2121394 - RNA, 19 nt, Homo sapiens
  misc_RNA (1)...(19): siRNA sense strand
gagagcagaaggaugaguu

SEQ ID NO: 2121395 - RNA, 19 nt, Homo sapiens
  misc_RNA (1)...(19): siRNA sense strand
cuaauaagaaacugccuuu

SEQ ID NO: 2121396 - RNA, 19 nt, Homo sapiens
  misc_RNA (1)...(19): siRNA sense strand
gcugaagaaucuguugguu

SEQ ID NO: 2121397 - RNA, 19 nt, Homo sapiens
  misc_RNA (1)...(19): siRNA sense strand
gaacuguagaaaccagauu

SEQ ID NO: 2121398 - RNA, 19 nt, Homo sapiens
  misc_RNA (1)...(19): siRNA sense strand
guugcucgguuugaauaua

SEQ ID NO: 2121399 - RNA, 19 nt, Homo sapiens
  misc_RNA (1)...(19): siRNA sense strand
caggaagcccacuguaauu

SEQ ID NO: 2121400 - RNA, 19 nt, Homo sapiens
  misc_RNA (1)...(19): siRNA sense strand
gagaaugaagaugaacuuu

SEQ ID NO: 2121401 - RNA, 19 nt, Homo sapiens
  misc_RNA (1)...(19): siRNA sense strand
gagggagaaauuauuauuc

SEQ ID NO: 2121402 - RNA, 19 nt, Homo sapiens
  misc_RNA (1)...(19): siRNA sense strand
aagagaauguguuucaucu

SEQ ID NO: 2121403 - RNA, 19 nt, Homo sapiens
  misc_RNA (1)...(19): siRNA sense strand
cacguucacuuccuccaaa

SEQ ID NO: 2121404 - RNA, 19 nt, Homo sapiens
  misc_RNA (1)...(19): siRNA sense strand
cuggagaaauuguuuaucu

SEQ ID NO: 2121405 - RNA, 19 nt, Homo sapiens
  misc_RNA (1)...(19): siRNA sense strand
gaagacacuggcagaguuc

SEQ ID NO: 2121406 - RNA, 19 nt, Homo sapiens
  misc_RNA (1)...(19): siRNA sense strand
ucaguaauguugagagaac

SEQ ID NO: 2121407 - RNA, 19 nt, Homo sapiens
  misc_RNA (1)...(19): siRNA sense strand
aagauuaucacuccacuug

SEQ ID NO: 2121408 - RNA, 19 nt, Homo sapiens
  misc_RNA (1)...(19): siRNA sense strand
uacauacaguuucuacaga

SEQ ID NO: 2121409 - RNA, 19 nt, Homo sapiens
  misc_RNA (1)...(19): siRNA sense strand
gaacauuaugaacacagaa

SEQ ID NO: 2121410 - RNA, 19 nt, Homo sapiens
  misc_RNA (1)...(19): siRNA sense strand
gcagagcaaguugaugauu

SEQ ID NO: 2121411 - RNA, 19 nt, Homo sapiens
  misc_RNA (1)...(19): siRNA sense strand
gcccaagaaaccagaaauu

SEQ ID NO: 2121412 - RNA, 19 nt, Homo sapiens
  misc_RNA (1)...(19): siRNA sense strand
ggcuggagauauaauaaca

SEQ ID NO: 2121413 - RNA, 19 nt, Homo sapiens
  misc_RNA (1)...(19): siRNA sense strand
caacuaugucaaagugauu

SEQ ID NO: 2121414 - RNA, 19 nt, Homo sapiens
  misc_RNA (1)...(19): siRNA sense strand
gcagaguucaccugucuca

SEQ ID NO: 2121415 - RNA, 19 nt, Homo sapiens
  misc_RNA (1)...(19): siRNA sense strand
ucaguacaguaucuggaaa

SEQ ID NO: 2121416 - RNA, 19 nt, Homo sapiens
  misc_RNA (1)...(19): siRNA sense strand
ccuuucagcucccugcaaa

SEQ ID NO: 2121417 - RNA, 19 nt, Homo sapiens
  misc_RNA (1)...(19): siRNA sense strand
agaguucaccugucucaaa

SEQ ID NO: 2121418 - RNA, 19 nt, Homo sapiens
  misc_RNA (1)...(19): siRNA sense strand
cuggagauauaauaacaga

SEQ ID NO: 2121419 - RNA, 19 nt, Homo sapiens
  misc_RNA (1)...(19): siRNA sense strand
gaacaucacuaccaaauug

SEQ ID NO: 2121420 - RNA, 19 nt, Homo sapiens
  misc_RNA (1)...(19): siRNA sense strand
gaaacuggaugaaugcuuu

SEQ ID NO: 2121421 - RNA, 19 nt, Homo sapiens
  misc_RNA (1)...(19): siRNA sense strand
ucagaagacugcuagauua

SEQ ID NO: 2121422 - RNA, 19 nt, Homo sapiens
  misc_RNA (1)...(19): siRNA sense strand
gaacugcacuugcuguuug

SEQ ID NO: 2121423 - RNA, 19 nt, Homo sapiens
  misc_RNA (1)...(19): siRNA sense strand
gaacugaugucaugugaag

SEQ ID NO: 2121424 - RNA, 19 nt, Homo sapiens
  misc_RNA (1)...(19): siRNA sense strand
gcaccuggauucaugauug

SEQ ID NO: 2121425 - RNA, 19 nt, Homo sapiens
  misc_RNA (1)...(19): siRNA sense strand
gaugaggccuacacccuua

SEQ ID NO: 2121426 - RNA, 19 nt, Homo sapiens
  misc_RNA (1)...(19): siRNA sense strand
cagaagagguaaagaaguu

SEQ ID NO: 2121427 - RNA, 19 nt, Homo sapiens
  misc_RNA (1)...(19): siRNA sense strand
aacaagagcuccaggauga

SEQ ID NO: 2121428 - RNA, 19 nt, Homo sapiens
  misc_RNA (1)...(19): siRNA sense strand
gaagagcuacauucaauau

SEQ ID NO: 2121429 - RNA, 19 nt, Homo sapiens
  misc_RNA (1)...(19): siRNA sense strand
aaacaaaccugggaugaau

SEQ ID NO: 2121430 - RNA, 19 nt, Homo sapiens
  misc_RNA (1)...(19): siRNA sense strand
gcaggaacaucacuaccaa

SEQ ID NO: 2121431 - RNA, 19 nt, Homo sapiens
  misc_RNA (1)...(19): siRNA sense strand
ggaugaaucuccugcacuu

SEQ ID NO: 2121432 - RNA, 19 nt, Homo sapiens
  misc_RNA (1)...(19): siRNA sense strand
ucagagaccuugcgagaau

SEQ ID NO: 2121433 - RNA, 19 nt, Homo sapiens
  misc_RNA (1)...(19): siRNA sense strand
gcaaugcaguaggauuuaa

SEQ ID NO: 2121434 - RNA, 19 nt, Homo sapiens
  misc_RNA (1)...(19): siRNA sense strand
uaaaagaacugaugucaug

SEQ ID NO: 2121435 - RNA, 19 nt, Homo sapiens
  misc_RNA (1)...(19): siRNA sense strand
uaauucaggugccaaacua

SEQ ID NO: 2121436 - RNA, 19 nt, Homo sapiens
  misc_RNA (1)...(19): siRNA sense strand
cagagaagcucgagaagag

SEQ ID NO: 2121437 - RNA, 19 nt, Homo sapiens
  misc_RNA (1)...(19): siRNA sense strand
aaacggagcaugaacauug

SEQ ID NO: 2121438 - RNA, 19 nt, Homo sapiens
  misc_RNA (1)...(19): siRNA sense strand
gaacuggaaugcuggaaac

SEQ ID NO: 2121439 - RNA, 19 nt, Homo sapiens
  misc_RNA (1)...(19): siRNA sense strand
ccaugaaacuggaugaaug

SEQ ID NO: 2121440 - RNA, 19 nt, Homo sapiens
  misc_RNA (1)...(19): siRNA sense strand
ggagcaaguucgaggcaaa

SEQ ID NO: 2121441 - RNA, 19 nt, Homo sapiens
  misc_RNA (1)...(19): siRNA sense strand
gcucuucucuauauacaga

SEQ ID NO: 2121442 - RNA, 19 nt, Homo sapiens
  misc_RNA (1)...(19): siRNA sense strand
gaagauauucaucaaggaa

SEQ ID NO: 2121443 - RNA, 19 nt, Homo sapiens
  misc_RNA (1)...(19): siRNA sense strand
gcaugaacauugggauauu

SEQ ID NO: 2121444 - RNA, 19 nt, Homo sapiens
  misc_RNA (1)...(19): siRNA sense strand
gcacuuuguugcacaggaa

SEQ ID NO: 2121445 - RNA, 19 nt, Homo sapiens
  misc_RNA (1)...(19): siRNA sense strand
gaugucaugugaagagcua

SEQ ID NO: 2121446 - RNA, 19 nt, Homo sapiens
  misc_RNA (1)...(19): siRNA sense strand
ccuacacccuuauagauuu

SEQ ID NO: 2121447 - RNA, 19 nt, Homo sapiens
  misc_RNA (1)...(19): siRNA sense strand
aaagagaggcucccugaaa

SEQ ID NO: 2121448 - RNA, 19 nt, Homo sapiens
  misc_RNA (1)...(19): siRNA sense strand
gaggaagaacuuuaaauuc

SEQ ID NO: 2121449 - RNA, 19 nt, Homo sapiens
  misc_RNA (1)...(19): siRNA sense strand
gucagcagauggaagauuu

SEQ ID NO: 2121450 - RNA, 19 nt, Homo sapiens
  misc_RNA (1)...(19): siRNA sense strand
gaagagguaaagaaguuaa

SEQ ID NO: 2121451 - RNA, 19 nt, Homo sapiens
  misc_RNA (1)...(19): siRNA sense strand
cgagaagagauuacuauuu

SEQ ID NO: 2121452 - RNA, 19 nt, Homo sapiens
  misc_RNA (1)...(19): siRNA sense strand
gagcaugaacauugggaua

SEQ ID NO: 2121453 - RNA, 19 nt, Homo sapiens
  misc_RNA (1)...(19): siRNA sense strand
gcaaacaaaccugggauga

SEQ ID NO: 2121454 - RNA, 19 nt, Homo sapiens
  misc_RNA (1)...(19): siRNA sense strand
gcaccaggacuccagcuuu

SEQ ID NO: 2121455 - RNA, 19 nt, Homo sapiens
  misc_RNA (1)...(19): siRNA sense strand
gagaauccucaaucccuua

SEQ ID NO: 2121456 - RNA, 19 nt, Homo sapiens
  misc_RNA (1)...(19): siRNA sense strand
cgauggagcuagagucugu

SEQ ID NO: 2121457 - RNA, 19 nt, Homo sapiens
  misc_RNA (1)...(19): siRNA sense strand
caugaacauugggauauuu

SEQ ID NO: 2121458 - RNA, 19 nt, Homo sapiens
  misc_RNA (1)...(19): siRNA sense strand
acaaagcaguuaaggacaa

SEQ ID NO: 2121459 - RNA, 19 nt, Homo sapiens
  misc_RNA (1)...(19): siRNA sense strand
gaaacaagagcuccaggau

SEQ ID NO: 2121460 - RNA, 19 nt, Homo sapiens
  misc_RNA (1)...(19): siRNA sense strand
gagcuacauucaauauuac

SEQ ID NO: 2121461 - RNA, 19 nt, Homo sapiens
  misc_RNA (1)...(19): siRNA sense strand
aaggaaagauguuguagca

SEQ ID NO: 2121462 - RNA, 19 nt, Homo sapiens
  misc_RNA (1)...(19): siRNA sense strand
ugaaggagcaggagcagaa

SEQ ID NO: 2121463 - RNA, 19 nt, Homo sapiens
  misc_RNA (1)...(19): siRNA sense strand
gcagcgacccugagaacaa

SEQ ID NO: 2121464 - RNA, 19 nt, Homo sapiens
  misc_RNA (1)...(19): siRNA sense strand
caccaggacuccagcuuug

SEQ ID NO: 2121465 - RNA, 19 nt, Homo sapiens
  misc_RNA (1)...(19): siRNA sense strand
ggaacaucacuaccaaauu

SEQ ID NO: 2121466 - RNA, 19 nt, Homo sapiens
  misc_RNA (1)...(19): siRNA sense strand
gcccugaggagcccaauaa

SEQ ID NO: 2121467 - RNA, 19 nt, Homo sapiens
  misc_RNA (1)...(19): siRNA sense strand
gaacauugggauauuucuu

SEQ ID NO: 2121468 - RNA, 19 nt, Homo sapiens
  misc_RNA (1)...(19): siRNA sense strand
cagcgacccugagaacaaa

SEQ ID NO: 2121469 - RNA, 19 nt, Homo sapiens
  misc_RNA (1)...(19): siRNA sense strand
ggagaggaagaacuuuaaa

SEQ ID NO: 2121470 - RNA, 19 nt, Homo sapiens
  misc_RNA (1)...(19): siRNA sense strand
gaacacggaggcagaacug

SEQ ID NO: 2121471 - RNA, 19 nt, Homo sapiens
  misc_RNA (1)...(19): siRNA sense strand
gugccaaacuauucacuuc

SEQ ID NO: 2121472 - RNA, 19 nt, Homo sapiens
  misc_RNA (1)...(19): siRNA sense strand
gaagcucgagaagagauua

SEQ ID NO: 2121473 - RNA, 19 nt, Homo sapiens
  misc_RNA (1)...(19): siRNA sense strand
ggauuuaaacugucuucuu

SEQ ID NO: 2121474 - RNA, 19 nt, Homo sapiens
  misc_RNA (1)...(19): siRNA sense strand
caaacaaaccugggaugaa

SEQ ID NO: 2121475 - RNA, 19 nt, Homo sapiens
  misc_RNA (1)...(19): siRNA sense strand
gagaggaagaacuuuaaau

SEQ ID NO: 2121476 - RNA, 19 nt, Homo sapiens
  misc_RNA (1)...(19): siRNA sense strand
caagaagcccagugccaaa

SEQ ID NO: 2121477 - RNA, 19 nt, Homo sapiens
  misc_RNA (1)...(19): siRNA sense strand
cugaggagcccaauaaguu

SEQ ID NO: 2121478 - RNA, 19 nt, Homo sapiens
  misc_RNA (1)...(19): siRNA sense strand
gagcagcagugagaaugau

SEQ ID NO: 2121479 - RNA, 19 nt, Homo sapiens
  misc_RNA (1)...(19): siRNA sense strand
caaauucaacaaagcaguu

SEQ ID NO: 2121480 - RNA, 19 nt, Homo sapiens
  misc_RNA (1)...(19): siRNA sense strand
gcuuucagauauuuagaga

SEQ ID NO: 2121481 - RNA, 19 nt, Homo sapiens
  misc_RNA (1)...(19): siRNA sense strand
cacagcaccuggauucaug

SEQ ID NO: 2121482 - RNA, 19 nt, Homo sapiens
  misc_RNA (1)...(19): siRNA sense strand
uaggagaggaagaacuuua

SEQ ID NO: 2121483 - RNA, 19 nt, Homo sapiens
  misc_RNA (1)...(19): siRNA sense strand
ggaacuggaaugcuggaaa

SEQ ID NO: 2121484 - RNA, 19 nt, Homo sapiens
  misc_RNA (1)...(19): siRNA sense strand
gaagucuccucgguccauu

SEQ ID NO: 2121485 - RNA, 19 nt, Homo sapiens
  misc_RNA (1)...(19): siRNA sense strand
aagaacugaugucauguga

SEQ ID NO: 2121486 - RNA, 19 nt, Homo sapiens
  misc_RNA (1)...(19): siRNA sense strand
gaagccauggugcuaaaga

SEQ ID NO: 2121487 - RNA, 19 nt, Homo sapiens
  misc_RNA (1)...(19): siRNA sense strand
cauuggcucugggaauuaa

SEQ ID NO: 2121488 - RNA, 19 nt, Homo sapiens
  misc_RNA (1)...(19): siRNA sense strand
ccagcgggauggugaacuu

SEQ ID NO: 2121489 - RNA, 19 nt, Homo sapiens
  misc_RNA (1)...(19): siRNA sense strand
aagagaggcucccugaaag

SEQ ID NO: 2121490 - RNA, 19 nt, Homo sapiens
  misc_RNA (1)...(19): siRNA sense strand
guaccaaauucaacaaagc

SEQ ID NO: 2121491 - RNA, 19 nt, Homo sapiens
  misc_RNA (1)...(19): siRNA sense strand
uaaauucauccuucagaga

SEQ ID NO: 2121492 - RNA, 19 nt, Homo sapiens
  misc_RNA (1)...(19): siRNA sense strand
gacagaagccugaggaaaa

SEQ ID NO: 2121493 - RNA, 19 nt, Homo sapiens
  misc_RNA (1)...(19): siRNA sense strand
caaauuggcagacacaaaa

SEQ ID NO: 2121494 - RNA, 19 nt, Homo sapiens
  misc_RNA (1)...(19): siRNA sense strand
cggcaaugcaguaggauuu

SEQ ID NO: 2121495 - RNA, 19 nt, Homo sapiens
  misc_RNA (1)...(19): siRNA sense strand
ucaaauuggcagacacaaa

SEQ ID NO: 2121496 - RNA, 19 nt, Homo sapiens
  misc_RNA (1)...(19): siRNA sense strand
ccauggugcuaaagaagga

SEQ ID NO: 2121497 - RNA, 19 nt, Homo sapiens
  misc_RNA (1)...(19): siRNA sense strand
gggagcugcugaccuucuu

SEQ ID NO: 2121498 - RNA, 19 nt, Homo sapiens
  misc_RNA (1)...(19): siRNA sense strand
ggagcagcagugagaauga

SEQ ID NO: 2121499 - RNA, 19 nt, Homo sapiens
  misc_RNA (1)...(19): siRNA sense strand
ggacaaaaucacuaaaaga

SEQ ID NO: 2121500 - RNA, 19 nt, Homo sapiens
  misc_RNA (1)...(19): siRNA sense strand
ugaaucuccugcacuuugu

SEQ ID NO: 2121501 - RNA, 19 nt, Homo sapiens
  misc_RNA (1)...(19): siRNA sense strand
ggcaaugcaguaggauuua

SEQ ID NO: 2121502 - RNA, 19 nt, Homo sapiens
  misc_RNA (1)...(19): siRNA sense strand
gcccugagagucccaaaga

SEQ ID NO: 2121503 - RNA, 19 nt, Homo sapiens
  misc_RNA (1)...(19): siRNA sense strand
gauguuguagcaccaaaga

SEQ ID NO: 2121504 - RNA, 19 nt, Homo sapiens
  misc_RNA (1)...(19): siRNA sense strand
ggagaacacggaggcagaa

SEQ ID NO: 2121505 - RNA, 19 nt, Homo sapiens
  misc_RNA (1)...(19): siRNA sense strand
cagaagacugcuagauuau

SEQ ID NO: 2121506 - RNA, 19 nt, Homo sapiens
  misc_RNA (1)...(19): siRNA sense strand
aaauucauccuucagagaa

SEQ ID NO: 2121507 - RNA, 19 nt, Homo sapiens
  misc_RNA (1)...(19): siRNA sense strand
ccaaggacagcagcacuuu

SEQ ID NO: 2121508 - RNA, 19 nt, Homo sapiens
  misc_RNA (1)...(19): siRNA sense strand
cuaccaaauugauacaaag

SEQ ID NO: 2121509 - RNA, 19 nt, Homo sapiens
  misc_RNA (1)...(19): siRNA sense strand
gcgggauggugaacuuugu

SEQ ID NO: 2121510 - RNA, 19 nt, Homo sapiens
  misc_RNA (1)...(19): siRNA sense strand
ugaauugugucuccuuggu

SEQ ID NO: 2121511 - RNA, 19 nt, Homo sapiens
  misc_RNA (1)...(19): siRNA sense strand
aggaauuucuaccuucuug

SEQ ID NO: 2121512 - RNA, 19 nt, Homo sapiens
  misc_RNA (1)...(19): siRNA sense strand
acuauucacuucggauuga

SEQ ID NO: 2121513 - RNA, 19 nt, Homo sapiens
  misc_RNA (1)...(19): siRNA sense strand
ugggauauuucuuaagcaa

SEQ ID NO: 2121514 - RNA, 19 nt, Homo sapiens
  misc_RNA (1)...(19): siRNA sense strand
gccagagucagaagaggua

SEQ ID NO: 2121515 - RNA, 19 nt, Homo sapiens
  misc_RNA (1)...(19): siRNA sense strand
cagccaccuugguaagaaa

SEQ ID NO: 2121516 - RNA, 19 nt, Homo sapiens
  misc_RNA (1)...(19): siRNA sense strand
gccuacacccuuauagauu

SEQ ID NO: 2121517 - RNA, 19 nt, Homo sapiens
  misc_RNA (1)...(19): siRNA sense strand
gauugaagccauggugcua

SEQ ID NO: 2121518 - RNA, 19 nt, Homo sapiens
  misc_RNA (1)...(19): siRNA sense strand
caaaaggaaagauguugua

SEQ ID NO: 2121519 - RNA, 19 nt, Homo sapiens
  misc_RNA (1)...(19): siRNA sense strand
cgaggaagcuccaaaggua

SEQ ID NO: 2121520 - RNA, 19 nt, Homo sapiens
  misc_RNA (1)...(19): siRNA sense strand
gaaagggaccugaagaaau

SEQ ID NO: 2121521 - RNA, 19 nt, Homo sapiens
  misc_RNA (1)...(19): siRNA sense strand
aaagggaccugaagaaauc

SEQ ID NO: 2121522 - RNA, 19 nt, Homo sapiens
  misc_RNA (1)...(19): siRNA sense strand
ggagauaaccuacaucaac

SEQ ID NO: 2121523 - RNA, 19 nt, Homo sapiens
  misc_RNA (1)...(19): siRNA sense strand
gcaagaccauuuacaagcu

SEQ ID NO: 2121524 - RNA, 19 nt, Homo sapiens
  misc_RNA (1)...(19): siRNA sense strand
ccaagagcaagaccauuua

SEQ ID NO: 2121525 - RNA, 19 nt, Homo sapiens
  misc_RNA (1)...(19): siRNA sense strand
uaauggaaacgcuuuguaa

SEQ ID NO: 2121526 - RNA, 19 nt, Homo sapiens
  misc_RNA (1)...(19): siRNA sense strand
ugaaggagauaaccuacau

SEQ ID NO: 2121527 - RNA, 19 nt, Homo sapiens
  misc_RNA (1)...(19): siRNA sense strand
ggaucccgcuggucaugaa

SEQ ID NO: 2121528 - RNA, 19 nt, Homo sapiens
  misc_RNA (1)...(19): siRNA sense strand
cgaaagggaccugaagaaa

SEQ ID NO: 2121529 - RNA, 19 nt, Homo sapiens
  misc_RNA (1)...(19): siRNA sense strand
ugacaacgacauaauggaa

SEQ ID NO: 2121530 - RNA, 19 nt, Homo sapiens
  misc_RNA (1)...(19): siRNA sense strand
gugaggagaugaacgacau

SEQ ID NO: 2121531 - RNA, 19 nt, Homo sapiens
  misc_RNA (1)...(19): siRNA sense strand
gagcaagaccauuuacaag

SEQ ID NO: 2121532 - RNA, 19 nt, Homo sapiens
  misc_RNA (1)...(19): siRNA sense strand
gaugaugacaacgacauaa

SEQ ID NO: 2121533 - RNA, 19 nt, Homo sapiens
  misc_RNA (1)...(19): siRNA sense strand
gacaacgacauaauggaaa

SEQ ID NO: 2121534 - RNA, 19 nt, Homo sapiens
  misc_RNA (1)...(19): siRNA sense strand
gacauaauggaaacgcuuu

SEQ ID NO: 2121535 - RNA, 19 nt, Homo sapiens
  misc_RNA (1)...(19): siRNA sense strand
gaugacaacgacauaaugg

SEQ ID NO: 2121536 - RNA, 19 nt, Homo sapiens
  misc_RNA (1)...(19): siRNA sense strand
caaccgagauaccaaaauc

SEQ ID NO: 2121537 - RNA, 19 nt, Homo sapiens
  misc_RNA (1)...(19): siRNA sense strand
accaagagcaagaccauuu

SEQ ID NO: 2121538 - RNA, 19 nt, Homo sapiens
  misc_RNA (1)...(19): siRNA sense strand
uccgcaagcugcagugcua

SEQ ID NO: 2121539 - RNA, 19 nt, Homo sapiens
  misc_RNA (1)...(19): siRNA sense strand
ccgaaagggaccugaagaa

SEQ ID NO: 2121540 - RNA, 19 nt, Homo sapiens
  misc_RNA (1)...(19): siRNA sense strand
agagcaagaccauuuacaa

SEQ ID NO: 2121541 - RNA, 19 nt, Homo sapiens
  misc_RNA (1)...(19): siRNA sense strand
gaggaagcuccaaagguau

SEQ ID NO: 2121542 - RNA, 19 nt, Homo sapiens
  misc_RNA (1)...(19): siRNA sense strand
gcaccugugaggagaugaa

SEQ ID NO: 2121543 - RNA, 19 nt, Homo sapiens
  misc_RNA (1)...(19): siRNA sense strand
caucaaccgagauaccaaa

SEQ ID NO: 2121544 - RNA, 19 nt, Homo sapiens
  misc_RNA (1)...(19): siRNA sense strand
gccacgagaccaugaagga

SEQ ID NO: 2121545 - RNA, 19 nt, Homo sapiens
  misc_RNA (1)...(19): siRNA sense strand
aauggaaacgcuuuguaaa

SEQ ID NO: 2121546 - RNA, 19 nt, Homo sapiens
  misc_RNA (1)...(19): siRNA sense strand
gcucgcugcugcugcucuu

SEQ ID NO: 2121547 - RNA, 19 nt, Homo sapiens
  misc_RNA (1)...(19): siRNA sense strand
ccuacaagcgcagcaauug

SEQ ID NO: 2121548 - RNA, 19 nt, Homo sapiens
  misc_RNA (1)...(19): siRNA sense strand
caucgaauaccagaacaug

SEQ ID NO: 2121549 - RNA, 19 nt, Homo sapiens
  misc_RNA (1)...(19): siRNA sense strand
ugaacgguguguccgaaag

SEQ ID NO: 2121550 - RNA, 19 nt, Homo sapiens
  misc_RNA (1)...(19): siRNA sense strand
ugaugacaacgacauaaug

SEQ ID NO: 2121551 - RNA, 19 nt, Homo sapiens
  misc_RNA (1)...(19): siRNA sense strand
gaacgguguguccgaaagg

SEQ ID NO: 2121552 - RNA, 19 nt, Homo sapiens
  misc_RNA (1)...(19): siRNA sense strand
gguaugugaagccugcaaa

SEQ ID NO: 2121553 - RNA, 19 nt, Homo sapiens
  misc_RNA (1)...(19): siRNA sense strand
auaauggaaacgcuuugua

SEQ ID NO: 2121554 - RNA, 19 nt, Homo sapiens
  misc_RNA (1)...(19): siRNA sense strand
ccaccgaggaagcuccaaa

SEQ ID NO: 2121555 - RNA, 19 nt, Homo sapiens
  misc_RNA (1)...(19): siRNA sense strand
acaacgacauaauggaaac

SEQ ID NO: 2121556 - RNA, 19 nt, Homo sapiens
  misc_RNA (1)...(19): siRNA sense strand
ugaugaugacaacgacaua

SEQ ID NO: 2121557 - RNA, 19 nt, Homo sapiens
  misc_RNA (1)...(19): siRNA sense strand
gaaggagauaaccuacauc

SEQ ID NO: 2121558 - RNA, 19 nt, Homo sapiens
  misc_RNA (1)...(19): siRNA sense strand
gugcaccugugaggagaug

SEQ ID NO: 2121559 - RNA, 19 nt, Homo sapiens
  misc_RNA (1)...(19): siRNA sense strand
aaggagauaaccuacauca

SEQ ID NO: 2121560 - RNA, 19 nt, Homo sapiens
  misc_RNA (1)...(19): siRNA sense strand
gcaauugccuucuguuuga

SEQ ID NO: 2121561 - RNA, 19 nt, Homo sapiens
  misc_RNA (1)...(19): siRNA sense strand
ccaccuagcugucauugau

SEQ ID NO: 2121562 - RNA, 19 nt, Homo sapiens
  misc_RNA (1)...(19): siRNA sense strand
ccaacgaggcccacaauaa

SEQ ID NO: 2121563 - RNA, 19 nt, Homo sapiens
  misc_RNA (1)...(19): siRNA sense strand
gaaggcaucuacaaguaca

SEQ ID NO: 2121564 - RNA, 19 nt, Homo sapiens
  misc_RNA (1)...(19): siRNA sense strand
uggaaggcaucuacaagua

SEQ ID NO: 2121565 - RNA, 19 nt, Homo sapiens
  misc_RNA (1)...(19): siRNA sense strand
gcaagaaacagcuggugaa

SEQ ID NO: 2121566 - RNA, 19 nt, Homo sapiens
  misc_RNA (1)...(19): siRNA sense strand
gcccugagcucggagauga

SEQ ID NO: 2121567 - RNA, 19 nt, Homo sapiens
  misc_RNA (1)...(19): siRNA sense strand
cuacaaggaugaagacaag

SEQ ID NO: 2121568 - RNA, 19 nt, Homo sapiens
  misc_RNA (1)...(19): siRNA sense strand
gaacgaaccgcagaagaau

SEQ ID NO: 2121569 - RNA, 19 nt, Homo sapiens
  misc_RNA (1)...(19): siRNA sense strand
ggcaggagguggagaagga

SEQ ID NO: 2121570 - RNA, 19 nt, Homo sapiens
  misc_RNA (1)...(19): siRNA sense strand
guccacggcuguacaaaga

SEQ ID NO: 2121571 - RNA, 19 nt, Homo sapiens
  misc_RNA (1)...(19): siRNA sense strand
gcucagaagcgacggauug

SEQ ID NO: 2121572 - RNA, 19 nt, Homo sapiens
  misc_RNA (1)...(19): siRNA sense strand
cgaggaagcucugcagauc

SEQ ID NO: 2121573 - RNA, 19 nt, Homo sapiens
  misc_RNA (1)...(19): siRNA sense strand
gaacgggacugggaaaaug

SEQ ID NO: 2121574 - RNA, 19 nt, Homo sapiens
  misc_RNA (1)...(19): siRNA sense strand
gaacaacagcggcaguagu

SEQ ID NO: 2121575 - RNA, 19 nt, Homo sapiens
  misc_RNA (1)...(19): siRNA sense strand
ugaacgaaccgcagaagaa

SEQ ID NO: 2121576 - RNA, 19 nt, Homo sapiens
  misc_RNA (1)...(19): siRNA sense strand
cagcgucagugcccgagua

SEQ ID NO: 2121577 - RNA, 19 nt, Homo sapiens
  misc_RNA (1)...(19): siRNA sense strand
gcugguuccucacgcaauu

SEQ ID NO: 2121578 - RNA, 19 nt, Homo sapiens
  misc_RNA (1)...(19): siRNA sense strand
gcacugccacagcuugaaa

SEQ ID NO: 2121579 - RNA, 19 nt, Homo sapiens
  misc_RNA (1)...(19): siRNA sense strand
ggagaagaccgagcaggaa

SEQ ID NO: 2121580 - RNA, 19 nt, Homo sapiens
  misc_RNA (1)...(19): siRNA sense strand
caacgaggcccacaauaac

SEQ ID NO: 2121581 - RNA, 19 nt, Homo sapiens
  misc_RNA (1)...(19): siRNA sense strand
ccgaguuguucauguguuu

SEQ ID NO: 2121582 - RNA, 19 nt, Homo sapiens
  misc_RNA (1)...(19): siRNA sense strand
cauccacaaugcccuauca

SEQ ID NO: 2121583 - RNA, 19 nt, Homo sapiens
  misc_RNA (1)...(19): siRNA sense strand
gcucaagcccgacuuugug

SEQ ID NO: 2121584 - RNA, 19 nt, Homo sapiens
  misc_RNA (1)...(19): siRNA sense strand
gcggaggaccuuucuagug

SEQ ID NO: 2121585 - RNA, 19 nt, Homo sapiens
  misc_RNA (1)...(19): siRNA sense strand
ggcaguaguucuccugucu

SEQ ID NO: 2121586 - RNA, 19 nt, Homo sapiens
  misc_RNA (1)...(19): siRNA sense strand
gcaccagcccauucucaug

SEQ ID NO: 2121587 - RNA, 19 nt, Homo sapiens
  misc_RNA (1)...(19): siRNA sense strand
ccaacaaguucaucaucca

SEQ ID NO: 2121588 - RNA, 19 nt, Homo sapiens
  misc_RNA (1)...(19): siRNA sense strand
gcgccaaguccaacaaguu

SEQ ID NO: 2121589 - RNA, 19 nt, Homo sapiens
  misc_RNA (1)...(19): siRNA sense strand
ucacgcaauugccuucugu

SEQ ID NO: 2121590 - RNA, 19 nt, Homo sapiens
  misc_RNA (1)...(19): siRNA sense strand
ugucauugaugcccucaug

SEQ ID NO: 2121591 - RNA, 19 nt, Homo sapiens
  misc_RNA (1)...(19): siRNA sense strand
gcaagcgcuucacccagau

SEQ ID NO: 2121592 - RNA, 19 nt, Homo sapiens
  misc_RNA (1)...(19): siRNA sense strand
caguaguucuccugucuuc

SEQ ID NO: 2121593 - RNA, 19 nt, Homo sapiens
  misc_RNA (1)...(19): siRNA sense strand
ccaaagcaccaguguacau

SEQ ID NO: 2121594 - RNA, 19 nt, Homo sapiens
  misc_RNA (1)...(19): siRNA sense strand
caccaaagcaccaguguac

SEQ ID NO: 2121595 - RNA, 19 nt, Homo sapiens
  misc_RNA (1)...(19): siRNA sense strand
ggaaggcaucuacaaguac

SEQ ID NO: 2121596 - RNA, 19 nt, Homo sapiens
  misc_RNA (1)...(19): siRNA sense strand
caaagcaccaguguacaug

SEQ ID NO: 2121597 - RNA, 19 nt, Homo sapiens
  misc_RNA (1)...(19): siRNA sense strand
cagaacaacagcggcagua

SEQ ID NO: 2121598 - RNA, 19 nt, Homo sapiens
  misc_RNA (1)...(19): siRNA sense strand
acaaguucaucauccacaa

SEQ ID NO: 2121599 - RNA, 19 nt, Homo sapiens
  misc_RNA (1)...(19): siRNA sense strand
aacaacagcggcaguaguu

SEQ ID NO: 2121600 - RNA, 19 nt, Homo sapiens
  misc_RNA (1)...(19): siRNA sense strand
caacagcggcaguaguucu

SEQ ID NO: 2121601 - RNA, 19 nt, Homo sapiens
  misc_RNA (1)...(19): siRNA sense strand
caauugccuucuguuugaa

SEQ ID NO: 2121602 - RNA, 19 nt, Homo sapiens
  misc_RNA (1)...(19): siRNA sense strand
aagcaaggccaaccacuuc

SEQ ID NO: 2121603 - RNA, 19 nt, Homo sapiens
  misc_RNA (1)...(19): siRNA sense strand
gauggacgaccucgauaag

SEQ ID NO: 2121604 - RNA, 19 nt, Homo sapiens
  misc_RNA (1)...(19): siRNA sense strand
cgacaggcccaccaaagca

SEQ ID NO: 2121605 - RNA, 19 nt, Homo sapiens
  misc_RNA (1)...(19): siRNA sense strand
gaggaagcucugcagauca

SEQ ID NO: 2121606 - RNA, 19 nt, Homo sapiens
  misc_RNA (1)...(19): siRNA sense strand
ccaccaaagcaccagugua

SEQ ID NO: 2121607 - RNA, 19 nt, Homo sapiens
  misc_RNA (1)...(19): siRNA sense strand
ggguugcugugacgacuca

SEQ ID NO: 2121608 - RNA, 19 nt, Homo sapiens
  misc_RNA (1)...(19): siRNA sense strand
ugugggagcccuucuauac

SEQ ID NO: 2121609 - RNA, 19 nt, Homo sapiens
  misc_RNA (1)...(19): siRNA sense strand
ugauggacgaccucgauaa

SEQ ID NO: 2121610 - RNA, 19 nt, Homo sapiens
  misc_RNA (1)...(19): siRNA sense strand
gcugauggacgaccucgau

SEQ ID NO: 2121611 - RNA, 19 nt, Homo sapiens
  misc_RNA (1)...(19): siRNA sense strand
gaaaaugaccagcuuugca

SEQ ID NO: 2121612 - RNA, 19 nt, Homo sapiens
  misc_RNA (1)...(19): siRNA sense strand
gccacccgcuucugucauc

SEQ ID NO: 2121613 - RNA, 19 nt, Homo sapiens
  misc_RNA (1)...(19): siRNA sense strand
aggaagcucugcagaucau

SEQ ID NO: 2121614 - RNA, 19 nt, Homo sapiens
  misc_RNA (1)...(19): siRNA sense strand
aaagcaaggccaaccacuu

SEQ ID NO: 2121615 - RNA, 19 nt, Homo sapiens
  misc_RNA (1)...(19): siRNA sense strand
ccacggcuguacaaagaac

SEQ ID NO: 2121616 - RNA, 19 nt, Homo sapiens
  misc_RNA (1)...(19): siRNA sense strand
cgcaauugccuucuguuug

SEQ ID NO: 2121617 - RNA, 19 nt, Homo sapiens
  misc_RNA (1)...(19): siRNA sense strand
gccaacgaggcccacaaua

SEQ ID NO: 2121618 - RNA, 19 nt, Homo sapiens
  misc_RNA (1)...(19): siRNA sense strand
gcgacggauugaggccaua

SEQ ID NO: 2121619 - RNA, 19 nt, Homo sapiens
  misc_RNA (1)...(19): siRNA sense strand
guucuccugucuucaccuu

SEQ ID NO: 2121620 - RNA, 19 nt, Homo sapiens
  misc_RNA (1)...(19): siRNA sense strand
uugaggaggugugcuugaa

SEQ ID NO: 2121621 - RNA, 19 nt, Homo sapiens
  misc_RNA (1)...(19): siRNA sense strand
gaugcuggccgaguuguuc

SEQ ID NO: 2121622 - RNA, 19 nt, Homo sapiens
  misc_RNA (1)...(19): siRNA sense strand
guggaaggcaucuacaagu

SEQ ID NO: 2121623 - RNA, 19 nt, Homo sapiens
  misc_RNA (1)...(19): siRNA sense strand
gcugugggagcccuucuau

SEQ ID NO: 2121624 - RNA, 19 nt, Homo sapiens
  misc_RNA (1)...(19): siRNA sense strand
gccgaguuguucauguguu

SEQ ID NO: 2121625 - RNA, 19 nt, Homo sapiens
  misc_RNA (1)...(19): siRNA sense strand
ccgccaccauccacugcua

SEQ ID NO: 2121626 - RNA, 19 nt, Homo sapiens
  misc_RNA (1)...(19): siRNA sense strand
ccacuuccugauccucuuu

SEQ ID NO: 2121627 - RNA, 19 nt, Homo sapiens
  misc_RNA (1)...(19): siRNA sense strand
caagaaacagcuggugaag

SEQ ID NO: 2121628 - RNA, 19 nt, Homo sapiens
  misc_RNA (1)...(19): siRNA sense strand
gugcuccuccgcucuguga

SEQ ID NO: 2121629 - RNA, 19 nt, Homo sapiens
  misc_RNA (1)...(19): siRNA sense strand
gagcccaccuagcugucau

SEQ ID NO: 2121630 - RNA, 19 nt, Homo sapiens
  misc_RNA (1)...(19): siRNA sense strand
aaacccaccacucccaaga

SEQ ID NO: 2121631 - RNA, 19 nt, Homo sapiens
  misc_RNA (1)...(19): siRNA sense strand
gguggaaggcaucuacaag

SEQ ID NO: 2121632 - RNA, 19 nt, Homo sapiens
  misc_RNA (1)...(19): siRNA sense strand
gcauucuggaggaaauuga

SEQ ID NO: 2121633 - RNA, 19 nt, Homo sapiens
  misc_RNA (1)...(19): siRNA sense strand
caccauccacugcuauugu

SEQ ID NO: 2121634 - RNA, 19 nt, Homo sapiens
  misc_RNA (1)...(19): siRNA sense strand
ugaccagcuuggagcacaa

SEQ ID NO: 2121635 - RNA, 19 nt, Homo sapiens
  misc_RNA (1)...(19): siRNA sense strand
gcaguaguucuccugucuu

SEQ ID NO: 2121636 - RNA, 19 nt, Homo sapiens
  misc_RNA (1)...(19): siRNA sense strand
uggccgaguuguucaugug

SEQ ID NO: 2121637 - RNA, 19 nt, Homo sapiens
  misc_RNA (1)...(19): siRNA sense strand
gcucgugcaggauuucugu

SEQ ID NO: 2121638 - RNA, 19 nt, Homo sapiens
  misc_RNA (1)...(19): siRNA sense strand
caaguucaucauccacaau

SEQ ID NO: 2121639 - RNA, 19 nt, Homo sapiens
  misc_RNA (1)...(19): siRNA sense strand
caggagggcuucuucaauc

SEQ ID NO: 2121640 - RNA, 19 nt, Homo sapiens
  misc_RNA (1)...(19): siRNA sense strand
ggacggagcacagaaacga

SEQ ID NO: 2121641 - RNA, 19 nt, Homo sapiens
  misc_RNA (1)...(19): siRNA sense strand
caaggacggagcacagaaa

SEQ ID NO: 2121642 - RNA, 19 nt, Homo sapiens
  misc_RNA (1)...(19): siRNA sense strand
ccgcauggaugaccaacgu

SEQ ID NO: 2121643 - RNA, 19 nt, Homo sapiens
  misc_RNA (1)...(19): siRNA sense strand
ccaggagggcuucuucaau

SEQ ID NO: 2121644 - RNA, 19 nt, Homo sapiens
  misc_RNA (1)...(19): siRNA sense strand
cgagauggacagccucaug

SEQ ID NO: 2121645 - RNA, 19 nt, Homo sapiens
  misc_RNA (1)...(19): siRNA sense strand
ccaaggacggagcacagaa

SEQ ID NO: 2121646 - RNA, 19 nt, Homo sapiens
  misc_RNA (1)...(19): siRNA sense strand
gcaccacgcucaugaucaa

SEQ ID NO: 2121647 - RNA, 19 nt, Homo sapiens
  misc_RNA (1)...(19): siRNA sense strand
gcgcgcaccuucuacauca

SEQ ID NO: 2121648 - RNA, 19 nt, Homo sapiens
  misc_RNA (1)...(19): siRNA sense strand
gcaaggaggcggacaagcu

SEQ ID NO: 2121649 - RNA, 19 nt, Homo sapiens
  misc_RNA (1)...(19): siRNA sense strand
gcgcguugcucuucgucaa

SEQ ID NO: 2121650 - RNA, 19 nt, Homo sapiens
  misc_RNA (1)...(19): siRNA sense strand
ccacgcucaugaucaaguu

SEQ ID NO: 2121651 - RNA, 19 nt, Homo sapiens
  misc_RNA (1)...(19): siRNA sense strand
gagaacagcacgcucaacu

SEQ ID NO: 2121652 - RNA, 19 nt, Homo sapiens
  misc_RNA (1)...(19): siRNA sense strand
gcuguucuccgagcuggua

SEQ ID NO: 2121653 - RNA, 19 nt, Homo sapiens
  misc_RNA (1)...(19): siRNA sense strand
gcucaucaacaccuacauc

SEQ ID NO: 2121654 - RNA, 19 nt, Homo sapiens
  misc_RNA (1)...(19): siRNA sense strand
gcuaggcgcguugcucuuc

SEQ ID NO: 2121655 - RNA, 19 nt, Homo sapiens
  misc_RNA (1)...(19): siRNA sense strand
uggaggcggugcucacaca

SEQ ID NO: 2121656 - RNA, 19 nt, Homo sapiens
  misc_RNA (1)...(19): siRNA sense strand
uggagcaggccaacgauga

SEQ ID NO: 2121657 - RNA, 19 nt, Homo sapiens
  misc_RNA (1)...(19): siRNA sense strand
gagauuggaucauggauua

SEQ ID NO: 2121658 - RNA, 19 nt, Homo sapiens
  misc_RNA (1)...(19): siRNA sense strand
gauaaugaguugugccuuu

SEQ ID NO: 2121659 - RNA, 19 nt, Homo sapiens
  misc_RNA (1)...(19): siRNA sense strand
gcuaauauaccuccucuuu

SEQ ID NO: 2121660 - RNA, 19 nt, Homo sapiens
  misc_RNA (1)...(19): siRNA sense strand
agagagugcuagaagauua

SEQ ID NO: 2121661 - RNA, 19 nt, Homo sapiens
  misc_RNA (1)...(19): siRNA sense strand
ggauuuacuucuuggauug

SEQ ID NO: 2121662 - RNA, 19 nt, Homo sapiens
  misc_RNA (1)...(19): siRNA sense strand
cacaggaccucugcuaaua

SEQ ID NO: 2121663 - RNA, 19 nt, Homo sapiens
  misc_RNA (1)...(19): siRNA sense strand
caggaccucugcuaauaua

SEQ ID NO: 2121664 - RNA, 19 nt, Homo sapiens
  misc_RNA (1)...(19): siRNA sense strand
uaacuacaccuaugagauu

SEQ ID NO: 2121665 - RNA, 19 nt, Homo sapiens
  misc_RNA (1)...(19): siRNA sense strand
uggauugccuacuacauua

SEQ ID NO: 2121666 - RNA, 19 nt, Homo sapiens
  misc_RNA (1)...(19): siRNA sense strand
caaggaaacagauauguau

SEQ ID NO: 2121667 - RNA, 19 nt, Homo sapiens
  misc_RNA (1)...(19): siRNA sense strand
gcuacacgguucauacuga

SEQ ID NO: 2121668 - RNA, 19 nt, Homo sapiens
  misc_RNA (1)...(19): siRNA sense strand
acacuuggcuugcuucugu

SEQ ID NO: 2121669 - RNA, 19 nt, Homo sapiens
  misc_RNA (1)...(19): siRNA sense strand
ggaaacagauauguauucu

SEQ ID NO: 2121670 - RNA, 19 nt, Homo sapiens
  misc_RNA (1)...(19): siRNA sense strand
gaggaucccauguauauau

SEQ ID NO: 2121671 - RNA, 19 nt, Homo sapiens
  misc_RNA (1)...(19): siRNA sense strand
cacaguaucugcuaucaau

SEQ ID NO: 2121672 - RNA, 19 nt, Homo sapiens
  misc_RNA (1)...(19): siRNA sense strand
gggauuuacuucuuggauu

SEQ ID NO: 2121673 - RNA, 19 nt, Homo sapiens
  misc_RNA (1)...(19): siRNA sense strand
acacaaucaucuacuauuc

SEQ ID NO: 2121674 - RNA, 19 nt, Homo sapiens
  misc_RNA (1)...(19): siRNA sense strand
cuacauuaaucauccacua

SEQ ID NO: 2121675 - RNA, 19 nt, Homo sapiens
  misc_RNA (1)...(19): siRNA sense strand
ucacaaagcauguccaaag

SEQ ID NO: 2121676 - RNA, 19 nt, Homo sapiens
  misc_RNA (1)...(19): siRNA sense strand
ggacuacauuaccauucaa

SEQ ID NO: 2121677 - RNA, 19 nt, Homo sapiens
  misc_RNA (1)...(19): siRNA sense strand
uuggaaaccuuauuuguuc

SEQ ID NO: 2121678 - RNA, 19 nt, Homo sapiens
  misc_RNA (1)...(19): siRNA sense strand
gcaggacacacaccuuuga

SEQ ID NO: 2121679 - RNA, 19 nt, Homo sapiens
  misc_RNA (1)...(19): siRNA sense strand
gaaggaugauaugagaaau

SEQ ID NO: 2121680 - RNA, 19 nt, Homo sapiens
  misc_RNA (1)...(19): siRNA sense strand
cuucuuggauugccuacua

SEQ ID NO: 2121681 - RNA, 19 nt, Homo sapiens
  misc_RNA (1)...(19): siRNA sense strand
gugacacaaucaucuacua

SEQ ID NO: 2121682 - RNA, 19 nt, Homo sapiens
  misc_RNA (1)...(19): siRNA sense strand
ggaacgcaagagagcauua

SEQ ID NO: 2121683 - RNA, 19 nt, Homo sapiens
  misc_RNA (1)...(19): siRNA sense strand
gcagcuuccuccauuguca

SEQ ID NO: 2121684 - RNA, 19 nt, Homo sapiens
  misc_RNA (1)...(19): siRNA sense strand
gaaggacuacauuaccauu

SEQ ID NO: 2121685 - RNA, 19 nt, Homo sapiens
  misc_RNA (1)...(19): siRNA sense strand
gcucaaacaaggaaacaga

SEQ ID NO: 2121686 - RNA, 19 nt, Homo sapiens
  misc_RNA (1)...(19): siRNA sense strand
uuacacuucugaugaguau

SEQ ID NO: 2121687 - RNA, 19 nt, Homo sapiens
  misc_RNA (1)...(19): siRNA sense strand
caaaucacaguaucugcua

SEQ ID NO: 2121688 - RNA, 19 nt, Homo sapiens
  misc_RNA (1)...(19): siRNA sense strand
ugaaggaugauaugagaaa

SEQ ID NO: 2121689 - RNA, 19 nt, Homo sapiens
  misc_RNA (1)...(19): siRNA sense strand
caaacaaggaaacagauau

SEQ ID NO: 2121690 - RNA, 19 nt, Homo sapiens
  misc_RNA (1)...(19): siRNA sense strand
ucaaacaaggaaacagaua

SEQ ID NO: 2121691 - RNA, 19 nt, Homo sapiens
  misc_RNA (1)...(19): siRNA sense strand
uggauuaguuucacaguca

SEQ ID NO: 2121692 - RNA, 19 nt, Homo sapiens
  misc_RNA (1)...(19): siRNA sense strand
uggauaaggugacacaauc

SEQ ID NO: 2121693 - RNA, 19 nt, Homo sapiens
  misc_RNA (1)...(19): siRNA sense strand
gaguuggucugcagcuaga

SEQ ID NO: 2121694 - RNA, 19 nt, Homo sapiens
  misc_RNA (1)...(19): siRNA sense strand
ucaauguaauguugucuca

SEQ ID NO: 2121695 - RNA, 19 nt, Homo sapiens
  misc_RNA (1)...(19): siRNA sense strand
caguaucugcuaucaauuu

SEQ ID NO: 2121696 - RNA, 19 nt, Homo sapiens
  misc_RNA (1)...(19): siRNA sense strand
cgcaagagagcauuacuuu

SEQ ID NO: 2121697 - RNA, 19 nt, Homo sapiens
  misc_RNA (1)...(19): siRNA sense strand
gaaacaggcaaaucacagu

SEQ ID NO: 2121698 - RNA, 19 nt, Homo sapiens
  misc_RNA (1)...(19): siRNA sense strand
uauugcagcuuccuccauu

SEQ ID NO: 2121699 - RNA, 19 nt, Homo sapiens
  misc_RNA (1)...(19): siRNA sense strand
acaaggaaacagauaugua

SEQ ID NO: 2121700 - RNA, 19 nt, Homo sapiens
  misc_RNA (1)...(19): siRNA sense strand
cacaaagcauguccaaagu

SEQ ID NO: 2121701 - RNA, 19 nt, Homo sapiens
  misc_RNA (1)...(19): siRNA sense strand
caagagagcauuacuuucc

SEQ ID NO: 2121702 - RNA, 19 nt, Homo sapiens
  misc_RNA (1)...(19): siRNA sense strand
gacacaaucaucuacuauu

SEQ ID NO: 2121703 - RNA, 19 nt, Homo sapiens
  misc_RNA (1)...(19): siRNA sense strand
gaaaagagagugcuagaag

SEQ ID NO: 2121704 - RNA, 19 nt, Homo sapiens
  misc_RNA (1)...(19): siRNA sense strand
gugguacccuucucgaguu

SEQ ID NO: 2121705 - RNA, 19 nt, Homo sapiens
  misc_RNA (1)...(19): siRNA sense strand
acugaaggaugauaugaga

SEQ ID NO: 2121706 - RNA, 19 nt, Homo sapiens
  misc_RNA (1)...(19): siRNA sense strand
ggacacacaccuuugaaaa

SEQ ID NO: 2121707 - RNA, 19 nt, Homo sapiens
  misc_RNA (1)...(19): siRNA sense strand
ucccaaguccaaauuauaa

SEQ ID NO: 2121708 - RNA, 19 nt, Homo sapiens
  misc_RNA (1)...(19): siRNA sense strand
gaucccauguauauaugau

SEQ ID NO: 2121709 - RNA, 19 nt, Homo sapiens
  misc_RNA (1)...(19): siRNA sense strand
gaucauggauuaguuucac

SEQ ID NO: 2121710 - RNA, 19 nt, Homo sapiens
  misc_RNA (1)...(19): siRNA sense strand
gugaagcugggaaucauuu

SEQ ID NO: 2121711 - RNA, 19 nt, Homo sapiens
  misc_RNA (1)...(19): siRNA sense strand
uugcuucugucauuguaua

SEQ ID NO: 2121712 - RNA, 19 nt, Homo sapiens
  misc_RNA (1)...(19): siRNA sense strand
gcaaaaguuucacaaagca

SEQ ID NO: 2121713 - RNA, 19 nt, Homo sapiens
  misc_RNA (1)...(19): siRNA sense strand
aaacaggcaaaucacagua

SEQ ID NO: 2121714 - RNA, 19 nt, Homo sapiens
  misc_RNA (1)...(19): siRNA sense strand
aaacaaggaaacagauaug

SEQ ID NO: 2121715 - RNA, 19 nt, Homo sapiens
  misc_RNA (1)...(19): siRNA sense strand
gcaagagagcauuacuuuc

SEQ ID NO: 2121716 - RNA, 19 nt, Homo sapiens
  misc_RNA (1)...(19): siRNA sense strand
aagcauguccaaaguggua

SEQ ID NO: 2121717 - RNA, 19 nt, Homo sapiens
  misc_RNA (1)...(19): siRNA sense strand
gcacaaaagaaacauaaga

SEQ ID NO: 2121718 - RNA, 19 nt, Homo sapiens
  misc_RNA (1)...(19): siRNA sense strand
guauccagaugucuuugug

SEQ ID NO: 2121719 - RNA, 19 nt, Homo sapiens
  misc_RNA (1)...(19): siRNA sense strand
aauguaauguugucucauc

SEQ ID NO: 2121720 - RNA, 19 nt, Homo sapiens
  misc_RNA (1)...(19): siRNA sense strand
acaccaccaucauuuggaa

SEQ ID NO: 2121721 - RNA, 19 nt, Homo sapiens
  misc_RNA (1)...(19): siRNA sense strand
gcuugcuucugucauugua

SEQ ID NO: 2121722 - RNA, 19 nt, Homo sapiens
  misc_RNA (1)...(19): siRNA sense strand
uugaggaucccauguauau

SEQ ID NO: 2121723 - RNA, 19 nt, Homo sapiens
  misc_RNA (1)...(19): siRNA sense strand
aaagagagugcuagaagau

SEQ ID NO: 2121724 - RNA, 19 nt, Homo sapiens
  misc_RNA (1)...(19): siRNA sense strand
uauauacaccaccaucauu

SEQ ID NO: 2121725 - RNA, 19 nt, Homo sapiens
  misc_RNA (1)...(19): siRNA sense strand
ggauugccuacuacauuaa

SEQ ID NO: 2121726 - RNA, 19 nt, Homo sapiens
  misc_RNA (1)...(19): siRNA sense strand
cauagaaaaucagcaauga

SEQ ID NO: 2121727 - RNA, 19 nt, Homo sapiens
  misc_RNA (1)...(19): siRNA sense strand
gaaaccuuauuuguucaca

SEQ ID NO: 2121728 - RNA, 19 nt, Homo sapiens
  misc_RNA (1)...(19): siRNA sense strand
gaagcugggaaucauuuca

SEQ ID NO: 2121729 - RNA, 19 nt, Homo sapiens
  misc_RNA (1)...(19): siRNA sense strand
acacaggaccucugcuaau

SEQ ID NO: 2121730 - RNA, 19 nt, Homo sapiens
  misc_RNA (1)...(19): siRNA sense strand
aauguugucucaucccaau

SEQ ID NO: 2121731 - RNA, 19 nt, Homo sapiens
  misc_RNA (1)...(19): siRNA sense strand
ggauaaggugacacaauca

SEQ ID NO: 2121732 - RNA, 19 nt, Homo sapiens
  misc_RNA (1)...(19): siRNA sense strand
ugacacaaucaucuacuau

SEQ ID NO: 2121733 - RNA, 19 nt, Homo sapiens
  misc_RNA (1)...(19): siRNA sense strand
ugaguauccagaugucuuu

SEQ ID NO: 2121734 - RNA, 19 nt, Homo sapiens
  misc_RNA (1)...(19): siRNA sense strand
ucacagucaugacacaaac

SEQ ID NO: 2121735 - RNA, 19 nt, Homo sapiens
  misc_RNA (1)...(19): siRNA sense strand
guauacacuacauccgaua

SEQ ID NO: 2121736 - RNA, 19 nt, Homo sapiens
  misc_RNA (1)...(19): siRNA sense strand
uauguauucuggauaaggu

SEQ ID NO: 2121737 - RNA, 19 nt, Homo sapiens
  misc_RNA (1)...(19): siRNA sense strand
aggacuacauuaccauuca

SEQ ID NO: 2121738 - RNA, 19 nt, Homo sapiens
  misc_RNA (1)...(19): siRNA sense strand
gauaaggugacacaaucau

SEQ ID NO: 2121739 - RNA, 19 nt, Homo sapiens
  misc_RNA (1)...(19): siRNA sense strand
cuacauuaccauucaaagu

SEQ ID NO: 2121740 - RNA, 19 nt, Homo sapiens
  misc_RNA (1)...(19): siRNA sense strand
uguccuaacuacaccuaug

SEQ ID NO: 2121741 - RNA, 19 nt, Homo sapiens
  misc_RNA (1)...(19): siRNA sense strand
gguuucauguccuaacuac

SEQ ID NO: 2121742 - RNA, 19 nt, Homo sapiens
  misc_RNA (1)...(19): siRNA sense strand
cacuacauccgauaccuuu

SEQ ID NO: 2121743 - RNA, 19 nt, Homo sapiens
  misc_RNA (1)...(19): siRNA sense strand
aaaagagagugcuagaaga

SEQ ID NO: 2121744 - RNA, 19 nt, Homo sapiens
  misc_RNA (1)...(19): siRNA sense strand
uauuugaggaucccaugua

SEQ ID NO: 2121745 - RNA, 19 nt, Homo sapiens
  misc_RNA (1)...(19): siRNA sense strand
ccaaagugguacccuucuc

SEQ ID NO: 2121746 - RNA, 19 nt, Homo sapiens
  misc_RNA (1)...(19): siRNA sense strand
auauacaccaccaucauuu

SEQ ID NO: 2121747 - RNA, 19 nt, Homo sapiens
  misc_RNA (1)...(19): siRNA sense strand
gaacgcaagagagcauuac

SEQ ID NO: 2121748 - RNA, 19 nt, Homo sapiens
  misc_RNA (1)...(19): siRNA sense strand
ggauuaguuucacagucau

SEQ ID NO: 2121749 - RNA, 19 nt, Homo sapiens
  misc_RNA (1)...(19): siRNA sense strand
cuacaccuaugagauugga

SEQ ID NO: 2121750 - RNA, 19 nt, Homo sapiens
  misc_RNA (1)...(19): siRNA sense strand
caaugccuguuucccaagu

SEQ ID NO: 2121751 - RNA, 19 nt, Homo sapiens
  misc_RNA (1)...(19): siRNA sense strand
uaaggugacacaaucaucu

SEQ ID NO: 2121752 - RNA, 19 nt, Homo sapiens
  misc_RNA (1)...(19): siRNA sense strand
auacacaggaccucugcua

SEQ ID NO: 2121753 - RNA, 19 nt, Homo sapiens
  misc_RNA (1)...(19): siRNA sense strand
gaccaacuccagcagucaa

SEQ ID NO: 2121754 - RNA, 19 nt, Homo sapiens
  misc_RNA (1)...(19): siRNA sense strand
cuccagcagucaaacauuc

SEQ ID NO: 2121755 - RNA, 19 nt, Homo sapiens
  misc_RNA (1)...(19): siRNA sense strand
gagcuacacgguucauacu

SEQ ID NO: 2121756 - RNA, 19 nt, Homo sapiens
  misc_RNA (1)...(19): siRNA sense strand
ugagauuggaucauggauu

SEQ ID NO: 2121757 - RNA, 19 nt, Homo sapiens
  misc_RNA (1)...(19): siRNA sense strand
ggagggaguuugugauuga

SEQ ID NO: 2121758 - RNA, 19 nt, Homo sapiens
  misc_RNA (1)...(19): siRNA sense strand
ucaaguaucugaucguuug

SEQ ID NO: 2121759 - RNA, 19 nt, Homo sapiens
  misc_RNA (1)...(19): siRNA sense strand
gaacaggaggugauacuga

SEQ ID NO: 2121760 - RNA, 19 nt, Homo sapiens
  misc_RNA (1)...(19): siRNA sense strand
ggaagaagucccugaccua

SEQ ID NO: 2121761 - RNA, 19 nt, Homo sapiens
  misc_RNA (1)...(19): siRNA sense strand
caaguugccuucacaccaa

SEQ ID NO: 2121762 - RNA, 19 nt, Homo sapiens
  misc_RNA (1)...(19): siRNA sense strand
ccacggagcugcacaaccu

SEQ ID NO: 2121763 - RNA, 19 nt, Homo sapiens
  misc_RNA (1)...(19): siRNA sense strand
ggucucagcuaucuaugca

SEQ ID NO: 2121764 - RNA, 19 nt, Homo sapiens
  misc_RNA (1)...(19): siRNA sense strand
cagaugaaguggagagagu

SEQ ID NO: 2121765 - RNA, 19 nt, Homo sapiens
  misc_RNA (1)...(19): siRNA sense strand
ggacagaugggaccagaag

SEQ ID NO: 2121766 - RNA, 19 nt, Homo sapiens
  misc_RNA (1)...(19): siRNA sense strand
gggaagagagcaaguucaa

SEQ ID NO: 2121767 - RNA, 19 nt, Homo sapiens
  misc_RNA (1)...(19): siRNA sense strand
ucaaggaccugggcgugaa

SEQ ID NO: 2121768 - RNA, 19 nt, Homo sapiens
  misc_RNA (1)...(19): siRNA sense strand
gugcuugucuaccagauca

SEQ ID NO: 2121769 - RNA, 19 nt, Homo sapiens
  misc_RNA (1)...(19): siRNA sense strand
gaugacagccgaggacuuc

SEQ ID NO: 2121770 - RNA, 19 nt, Homo sapiens
  misc_RNA (1)...(19): siRNA sense strand
uugaggaucugaagaguag

SEQ ID NO: 2121771 - RNA, 19 nt, Homo sapiens
  misc_RNA (1)...(19): siRNA sense strand
gacggguccuggagcauug

SEQ ID NO: 2121772 - RNA, 19 nt, Homo sapiens
  misc_RNA (1)...(19): siRNA sense strand
gaggaccggcugcagauga

SEQ ID NO: 2121773 - RNA, 19 nt, Homo sapiens
  misc_RNA (1)...(19): siRNA sense strand
cagccaagguggugauucu

SEQ ID NO: 2121774 - RNA, 19 nt, Homo sapiens
  misc_RNA (1)...(19): siRNA sense strand
gcuccaaggucaggcucua

SEQ ID NO: 2121775 - RNA, 19 nt, Homo sapiens
  misc_RNA (1)...(19): siRNA sense strand
gcucggagggaguuuguga

SEQ ID NO: 2121776 - RNA, 19 nt, Homo sapiens
  misc_RNA (1)...(19): siRNA sense strand
caucgcacccuuugaaauc

SEQ ID NO: 2121777 - RNA, 19 nt, Homo sapiens
  misc_RNA (1)...(19): siRNA sense strand
gcugcuggauggccuggaa

SEQ ID NO: 2121778 - RNA, 19 nt, Homo sapiens
  misc_RNA (1)...(19): siRNA sense strand
caagccagcuguccaugac

SEQ ID NO: 2121779 - RNA, 19 nt, Homo sapiens
  misc_RNA (1)...(19): siRNA sense strand
ccucaaguaucugaucguu

SEQ ID NO: 2121780 - RNA, 19 nt, Homo sapiens
  misc_RNA (1)...(19): siRNA sense strand
guacgacgucaccaucuug

SEQ ID NO: 2121781 - RNA, 19 nt, Homo sapiens
  misc_RNA (1)...(19): siRNA sense strand
caggaagugaggaagauuu

SEQ ID NO: 2121782 - RNA, 19 nt, Homo sapiens
  misc_RNA (1)...(19): siRNA sense strand
gauugaggaucugaagagu

SEQ ID NO: 2121783 - RNA, 19 nt, Homo sapiens
  misc_RNA (1)...(19): siRNA sense strand
gcacaccaucgucuuccuu

SEQ ID NO: 2121784 - RNA, 19 nt, Homo sapiens
  misc_RNA (1)...(19): siRNA sense strand
uagggaggcacacagagua

SEQ ID NO: 2121785 - RNA, 19 nt, Homo sapiens
  misc_RNA (1)...(19): siRNA sense strand
ugucaucgcacccuuugaa

SEQ ID NO: 2121786 - RNA, 19 nt, Homo sapiens
  misc_RNA (1)...(19): siRNA sense strand
ggcuacaccuugcagaucu

SEQ ID NO: 2121787 - RNA, 19 nt, Homo sapiens
  misc_RNA (1)...(19): siRNA sense strand
cgucuggcgugcuugucua

SEQ ID NO: 2121788 - RNA, 19 nt, Homo sapiens
  misc_RNA (1)...(19): siRNA sense strand
ccaagccagcuguccauga

SEQ ID NO: 2121789 - RNA, 19 nt, Homo sapiens
  misc_RNA (1)...(19): siRNA sense strand
cggagggaguuugugauug

SEQ ID NO: 2121790 - RNA, 19 nt, Homo sapiens
  misc_RNA (1)...(19): siRNA sense strand
gcaggaagugaggaagauu

SEQ ID NO: 2121791 - RNA, 19 nt, Homo sapiens
  misc_RNA (1)...(19): siRNA sense strand
ucaccaucuuggccuacua

SEQ ID NO: 2121792 - RNA, 19 nt, Homo sapiens
  misc_RNA (1)...(19): siRNA sense strand
ugaacucccucagcaccaa

SEQ ID NO: 2121793 - RNA, 19 nt, Homo sapiens
  misc_RNA (1)...(19): siRNA sense strand
gcgccuacuucccgagaca

SEQ ID NO: 2121794 - RNA, 19 nt, Homo sapiens
  misc_RNA (1)...(19): siRNA sense strand
ggaaggcucacgagaucuc

SEQ ID NO: 2121795 - RNA, 19 nt, Homo sapiens
  misc_RNA (1)...(19): siRNA sense strand
ggggaaggcucacgagauc

SEQ ID NO: 2121796 - RNA, 19 nt, Homo sapiens
  misc_RNA (1)...(19): siRNA sense strand
gcuacaccuugcagaucuu

SEQ ID NO: 2121797 - RNA, 19 nt, Homo sapiens
  misc_RNA (1)...(19): siRNA sense strand
caaggacgcccagcugaca

SEQ ID NO: 2121798 - RNA, 19 nt, Homo sapiens
  misc_RNA (1)...(19): siRNA sense strand
guaccuggucuccguguuc

SEQ ID NO: 2121799 - RNA, 19 nt, Homo sapiens
  misc_RNA (1)...(19): siRNA sense strand
cagaucgugugcagugaca

SEQ ID NO: 2121800 - RNA, 19 nt, Homo sapiens
  misc_RNA (1)...(19): siRNA sense strand
ggaggcacacagaguacga

SEQ ID NO: 2121801 - RNA, 19 nt, Homo sapiens
  misc_RNA (1)...(19): siRNA sense strand
gaccuucacgcucuucaag

SEQ ID NO: 2121802 - RNA, 19 nt, Homo sapiens
  misc_RNA (1)...(19): siRNA sense strand
gcaggcagccacgaaguac

SEQ ID NO: 2121803 - RNA, 19 nt, Homo sapiens
  misc_RNA (1)...(19): siRNA sense strand
uccagcaggucaaggacuu

SEQ ID NO: 2121804 - RNA, 19 nt, Homo sapiens
  misc_RNA (1)...(19): siRNA sense strand
guccuggucucagcuaucu

SEQ ID NO: 2121805 - RNA, 19 nt, Homo sapiens
  misc_RNA (1)...(19): siRNA sense strand
gcuugggacccgagaaauc

SEQ ID NO: 2121806 - RNA, 19 nt, Homo sapiens
  misc_RNA (1)...(19): siRNA sense strand
gugcgauguucuccugcuu

SEQ ID NO: 2121807 - RNA, 19 nt, Homo sapiens
  misc_RNA (1)...(19): siRNA sense strand
gugugaagaacgccgauga

SEQ ID NO: 2121808 - RNA, 19 nt, Homo sapiens
  misc_RNA (1)...(19): siRNA sense strand
caguacagcuggacguuug

SEQ ID NO: 2121809 - RNA, 19 nt, Homo sapiens
  misc_RNA (1)...(19): siRNA sense strand
cccaaagccugaccucugu

SEQ ID NO: 2121810 - RNA, 19 nt, Homo sapiens
  misc_RNA (1)...(19): siRNA sense strand
gcaaccagccccugaugua

SEQ ID NO: 2121811 - RNA, 19 nt, Homo sapiens
  misc_RNA (1)...(19): siRNA sense strand
cuauggaguauauggguua

SEQ ID NO: 2121812 - RNA, 19 nt, Homo sapiens
  misc_RNA (1)...(19): siRNA sense strand
gaccgaggcagguggauca

SEQ ID NO: 2121813 - RNA, 19 nt, Homo sapiens
  misc_RNA (1)...(19): siRNA sense strand
caaagccugaccucuguga

SEQ ID NO: 2121814 - RNA, 19 nt, Homo sapiens
  misc_RNA (1)...(19): siRNA sense strand
ccuguaaucccagcacuuu

SEQ ID NO: 2121815 - RNA, 19 nt, Homo sapiens
  misc_RNA (1)...(19): siRNA sense strand
agccugaccucugugagua

SEQ ID NO: 2121816 - RNA, 19 nt, Homo sapiens
  misc_RNA (1)...(19): siRNA sense strand
guauauggguuaaaacaag

SEQ ID NO: 2121817 - RNA, 19 nt, Homo sapiens
  misc_RNA (1)...(19): siRNA sense strand
cagcagcagugagguccuu

SEQ ID NO: 2121818 - RNA, 19 nt, Homo sapiens
  misc_RNA (1)...(19): siRNA sense strand
uggcaggguuauucuaugg

SEQ ID NO: 2121819 - RNA, 19 nt, Homo sapiens
  misc_RNA (1)...(19): siRNA sense strand
gagaggaagacccaguaca

SEQ ID NO: 2121820 - RNA, 19 nt, Homo sapiens
  misc_RNA (1)...(19): siRNA sense strand
caacagccugggucaugga

SEQ ID NO: 2121821 - RNA, 19 nt, Homo sapiens
  misc_RNA (1)...(19): siRNA sense strand
gccucagucuccucaccua

SEQ ID NO: 2121822 - RNA, 19 nt, Homo sapiens
  misc_RNA (1)...(19): siRNA sense strand
ggcagagacccuugaugga

SEQ ID NO: 2121823 - RNA, 19 nt, Homo sapiens
  misc_RNA (1)...(19): siRNA sense strand
uauggaguauauggguuaa

SEQ ID NO: 2121824 - RNA, 19 nt, Homo sapiens
  misc_RNA (1)...(19): siRNA sense strand
cguuugccguccacucuga

SEQ ID NO: 2121825 - RNA, 19 nt, Homo sapiens
  misc_RNA (1)...(19): siRNA sense strand
gagugcgugucaccugcaa

SEQ ID NO: 2121826 - RNA, 19 nt, Homo sapiens
  misc_RNA (1)...(19): siRNA sense strand
ccucggagcacgcacagau

SEQ ID NO: 2121827 - RNA, 19 nt, Homo sapiens
  misc_RNA (1)...(19): siRNA sense strand
gucaacagccugggucaug

SEQ ID NO: 2121828 - RNA, 19 nt, Homo sapiens
  misc_RNA (1)...(19): siRNA sense strand
gaacaucuacgacaaguac

SEQ ID NO: 2121829 - RNA, 19 nt, Homo sapiens
  misc_RNA (1)...(19): siRNA sense strand
ggaagcuugccuugaaaua

SEQ ID NO: 2121830 - RNA, 19 nt, Homo sapiens
  misc_RNA (1)...(19): siRNA sense strand
aggcacagcugcagucuga

SEQ ID NO: 2121831 - RNA, 19 nt, Homo sapiens
  misc_RNA (1)...(19): siRNA sense strand
aaaggaacaucuacgacaa

SEQ ID NO: 2121832 - RNA, 19 nt, Homo sapiens
  misc_RNA (1)...(19): siRNA sense strand
gaagcuugccuugaaauau

SEQ ID NO: 2121833 - RNA, 19 nt, Homo sapiens
  misc_RNA (1)...(19): siRNA sense strand
gaggagcugugcauguaug

SEQ ID NO: 2121834 - RNA, 19 nt, Homo sapiens
  misc_RNA (1)...(19): siRNA sense strand
aagagaacgugaacaccua

SEQ ID NO: 2121835 - RNA, 19 nt, Homo sapiens
  misc_RNA (1)...(19): siRNA sense strand
gcgaggagacggaguucua

SEQ ID NO: 2121836 - RNA, 19 nt, Homo sapiens
  misc_RNA (1)...(19): siRNA sense strand
ccaaggcccuguuugucuu

SEQ ID NO: 2121837 - RNA, 19 nt, Homo sapiens
  misc_RNA (1)...(19): siRNA sense strand
gaacgugaacaccuacuuc

SEQ ID NO: 2121838 - RNA, 19 nt, Homo sapiens
  misc_RNA (1)...(19): siRNA sense strand
aggaggagcugugcaugua

SEQ ID NO: 2121839 - RNA, 19 nt, Homo sapiens
  misc_RNA (1)...(19): siRNA sense strand
aaccucagaugacauuaaa

SEQ ID NO: 2121840 - RNA, 19 nt, Homo sapiens
  misc_RNA (1)...(19): siRNA sense strand
caaccucagaugacauuaa

SEQ ID NO: 2121841 - RNA, 19 nt, Homo sapiens
  misc_RNA (1)...(19): siRNA sense strand
gaacgcaaccucagaugac

SEQ ID NO: 2121842 - RNA, 19 nt, Homo sapiens
  misc_RNA (1)...(19): siRNA sense strand
aagcuugccuugaaauauc

SEQ ID NO: 2121843 - RNA, 19 nt, Homo sapiens
  misc_RNA (1)...(19): siRNA sense strand
ggacaaguuuaaggagauc

SEQ ID NO: 2121844 - RNA, 19 nt, Homo sapiens
  misc_RNA (1)...(19): siRNA sense strand
ggcagagccagauucguua

SEQ ID NO: 2121845 - RNA, 19 nt, Homo sapiens
  misc_RNA (1)...(19): siRNA sense strand
cuacguggccgagcaguuu

SEQ ID NO: 2121846 - RNA, 19 nt, Homo sapiens
  misc_RNA (1)...(19): siRNA sense strand
caagaacgcaaccucagau

SEQ ID NO: 2121847 - RNA, 19 nt, Homo sapiens
  misc_RNA (1)...(19): siRNA sense strand
acacugacggguucaacua

SEQ ID NO: 2121848 - RNA, 19 nt, Homo sapiens
  misc_RNA (1)...(19): siRNA sense strand
ggaacaucuacgacaagua

SEQ ID NO: 2121849 - RNA, 19 nt, Homo sapiens
  misc_RNA (1)...(19): siRNA sense strand
cggacaaguuuaaggagau

SEQ ID NO: 2121850 - RNA, 19 nt, Homo sapiens
  misc_RNA (1)...(19): siRNA sense strand
aggcagagccagauucguu

SEQ ID NO: 2121851 - RNA, 19 nt, Homo sapiens
  misc_RNA (1)...(19): siRNA sense strand
acacgccgaucgucauaca

SEQ ID NO: 2121852 - RNA, 19 nt, Homo sapiens
  misc_RNA (1)...(19): siRNA sense strand
ucggaagcuugccuugaaa

SEQ ID NO: 2121853 - RNA, 19 nt, Homo sapiens
  misc_RNA (1)...(19): siRNA sense strand
agacacgccgaucgucaua

SEQ ID NO: 2121854 - RNA, 19 nt, Homo sapiens
  misc_RNA (1)...(19): siRNA sense strand
ugucugugcugcugcuuca

SEQ ID NO: 2121855 - RNA, 19 nt, Homo sapiens
  misc_RNA (1)...(19): siRNA sense strand
acugacggguucaacuaaa

SEQ ID NO: 2121856 - RNA, 19 nt, Homo sapiens
  misc_RNA (1)...(19): siRNA sense strand
ggaggagcugugcauguau

SEQ ID NO: 2121857 - RNA, 19 nt, Homo sapiens
  misc_RNA (1)...(19): siRNA sense strand
aucggaagcuugccuugaa

SEQ ID NO: 2121858 - RNA, 19 nt, Homo sapiens
  misc_RNA (1)...(19): siRNA sense strand
acaagaacgcaaccucaga

SEQ ID NO: 2121859 - RNA, 19 nt, Homo sapiens
  misc_RNA (1)...(19): siRNA sense strand
gccaaggcccuguuugucu

SEQ ID NO: 2121860 - RNA, 19 nt, Homo sapiens
  misc_RNA (1)...(19): siRNA sense strand
gggaagagaacgugaacac

SEQ ID NO: 2121861 - RNA, 19 nt, Homo sapiens
  misc_RNA (1)...(19): siRNA sense strand
ccacagacacgccgaucgu

SEQ ID NO: 2121862 - RNA, 19 nt, Homo sapiens
  misc_RNA (1)...(19): siRNA sense strand
agaacgcaaccucagauga

SEQ ID NO: 2121863 - RNA, 19 nt, Homo sapiens
  misc_RNA (1)...(19): siRNA sense strand
cugacggguucaacuaaau

SEQ ID NO: 2121864 - RNA, 19 nt, Homo sapiens
  misc_RNA (1)...(19): siRNA sense strand
ggcaugaccgcgugaacug

SEQ ID NO: 2121865 - RNA, 19 nt, Homo sapiens
  misc_RNA (1)...(19): siRNA sense strand
gcagagccagauucguuag

SEQ ID NO: 2121866 - RNA, 19 nt, Homo sapiens
  misc_RNA (1)...(19): siRNA sense strand
gaaauuaccucccuguauu

SEQ ID NO: 2121867 - RNA, 19 nt, Homo sapiens
  misc_RNA (1)...(19): siRNA sense strand
gcacggaaaucuuugaaua

SEQ ID NO: 2121868 - RNA, 19 nt, Homo sapiens
  misc_RNA (1)...(19): siRNA sense strand
ggacagugaucuaccguua

SEQ ID NO: 2121869 - RNA, 19 nt, Homo sapiens
  misc_RNA (1)...(19): siRNA sense strand
ucaaggagauucaauauga

SEQ ID NO: 2121870 - RNA, 19 nt, Homo sapiens
  misc_RNA (1)...(19): siRNA sense strand
gacaacagcuuucgaguga

SEQ ID NO: 2121871 - RNA, 19 nt, Homo sapiens
  misc_RNA (1)...(19): siRNA sense strand
gcaaugggcuuaugcugaa

SEQ ID NO: 2121872 - RNA, 19 nt, Homo sapiens
  misc_RNA (1)...(19): siRNA sense strand
gacaacaccugacauagaa

SEQ ID NO: 2121873 - RNA, 19 nt, Homo sapiens
  misc_RNA (1)...(19): siRNA sense strand
uaacaacccugcaagcaaa

SEQ ID NO: 2121874 - RNA, 19 nt, Homo sapiens
  misc_RNA (1)...(19): siRNA sense strand
ggaugaagaugguuuccua

SEQ ID NO: 2121875 - RNA, 19 nt, Homo sapiens
  misc_RNA (1)...(19): siRNA sense strand
ggauuacaauucaguauga

SEQ ID NO: 2121876 - RNA, 19 nt, Homo sapiens
  misc_RNA (1)...(19): siRNA sense strand
gcgagaaaguagauuauga

SEQ ID NO: 2121877 - RNA, 19 nt, Homo sapiens
  misc_RNA (1)...(19): siRNA sense strand
ggcaguacaucuucgaaua

SEQ ID NO: 2121878 - RNA, 19 nt, Homo sapiens
  misc_RNA (1)...(19): siRNA sense strand
caagaucaguuaagaaaca

SEQ ID NO: 2121879 - RNA, 19 nt, Homo sapiens
  misc_RNA (1)...(19): siRNA sense strand
ggacaacaccugacauaga

SEQ ID NO: 2121880 - RNA, 19 nt, Homo sapiens
  misc_RNA (1)...(19): siRNA sense strand
agaaacagcuaccagauug

SEQ ID NO: 2121881 - RNA, 19 nt, Homo sapiens
  misc_RNA (1)...(19): siRNA sense strand
gaucgugucucgggucuuu

SEQ ID NO: 2121882 - RNA, 19 nt, Homo sapiens
  misc_RNA (1)...(19): siRNA sense strand
ugacauuucuggcaaaguu

SEQ ID NO: 2121883 - RNA, 19 nt, Homo sapiens
  misc_RNA (1)...(19): siRNA sense strand
aaacauggaguuacacaua

SEQ ID NO: 2121884 - RNA, 19 nt, Homo sapiens
  misc_RNA (1)...(19): siRNA sense strand
caguaaaccuccagaguga

SEQ ID NO: 2121885 - RNA, 19 nt, Homo sapiens
  misc_RNA (1)...(19): siRNA sense strand
ccacuaggauuacucaugu

SEQ ID NO: 2121886 - RNA, 19 nt, Homo sapiens
  misc_RNA (1)...(19): siRNA sense strand
ggucuuugcugaugguaaa

SEQ ID NO: 2121887 - RNA, 19 nt, Homo sapiens
  misc_RNA (1)...(19): siRNA sense strand
caccaaauaugcuuaugaa

SEQ ID NO: 2121888 - RNA, 19 nt, Homo sapiens
  misc_RNA (1)...(19): siRNA sense strand
agacuaggcucucagaaau

SEQ ID NO: 2121889 - RNA, 19 nt, Homo sapiens
  misc_RNA (1)...(19): siRNA sense strand
ggcaguggcuggacaguga

SEQ ID NO: 2121890 - RNA, 19 nt, Homo sapiens
  misc_RNA (1)...(19): siRNA sense strand
ggaaaccuccauuuacuga

SEQ ID NO: 2121891 - RNA, 19 nt, Homo sapiens
  misc_RNA (1)...(19): siRNA sense strand
uccaugacgugaaagauua

SEQ ID NO: 2121892 - RNA, 19 nt, Homo sapiens
  misc_RNA (1)...(19): siRNA sense strand
caccguaaauuucuacuga

SEQ ID NO: 2121893 - RNA, 19 nt, Homo sapiens
  misc_RNA (1)...(19): siRNA sense strand
gaaacgccacugccuauug

SEQ ID NO: 2121894 - RNA, 19 nt, Homo sapiens
  misc_RNA (1)...(19): siRNA sense strand
gaaagcaacgccuccauca

SEQ ID NO: 2121895 - RNA, 19 nt, Homo sapiens
  misc_RNA (1)...(19): siRNA sense strand
uuaccucccuguauuauga

SEQ ID NO: 2121896 - RNA, 19 nt, Homo sapiens
  misc_RNA (1)...(19): siRNA sense strand
aaacgccacugccuauuga

SEQ ID NO: 2121897 - RNA, 19 nt, Homo sapiens
  misc_RNA (1)...(19): siRNA sense strand
gcaaggacacgcacuacuu

SEQ ID NO: 2121898 - RNA, 19 nt, Homo sapiens
  misc_RNA (1)...(19): siRNA sense strand
ggagauucaauaugagaua

SEQ ID NO: 2121899 - RNA, 19 nt, Homo sapiens
  misc_RNA (1)...(19): siRNA sense strand
guaaauuucuacugaggau

SEQ ID NO: 2121900 - RNA, 19 nt, Homo sapiens
  misc_RNA (1)...(19): siRNA sense strand
caacuacgaucugaaugga

SEQ ID NO: 2121901 - RNA, 19 nt, Homo sapiens
  misc_RNA (1)...(19): siRNA sense strand
gcuacuaccgcaacauaua

SEQ ID NO: 2121902 - RNA, 19 nt, Homo sapiens
  misc_RNA (1)...(19): siRNA sense strand
gaagaugggaugguaaaug

SEQ ID NO: 2121903 - RNA, 19 nt, Homo sapiens
  misc_RNA (1)...(19): siRNA sense strand
caaaauccaugacgugaaa

SEQ ID NO: 2121904 - RNA, 19 nt, Homo sapiens
  misc_RNA (1)...(19): siRNA sense strand
gaaggcguguuucuagcaa

SEQ ID NO: 2121905 - RNA, 19 nt, Homo sapiens
  misc_RNA (1)...(19): siRNA sense strand
ggaaaucuuugaauauagc

SEQ ID NO: 2121906 - RNA, 19 nt, Homo sapiens
  misc_RNA (1)...(19): siRNA sense strand
uggaaaguuuggaguuaua

SEQ ID NO: 2121907 - RNA, 19 nt, Homo sapiens
  misc_RNA (1)...(19): siRNA sense strand
cagcaucacuucaaaucug

SEQ ID NO: 2121908 - RNA, 19 nt, Homo sapiens
  misc_RNA (1)...(19): siRNA sense strand
ggaguuacacauauuuaga

SEQ ID NO: 2121909 - RNA, 19 nt, Homo sapiens
  misc_RNA (1)...(19): siRNA sense strand
cauucgaguucagaaauua

SEQ ID NO: 2121910 - RNA, 19 nt, Homo sapiens
  misc_RNA (1)...(19): siRNA sense strand
ugacgaccaccguaaauuu

SEQ ID NO: 2121911 - RNA, 19 nt, Homo sapiens
  misc_RNA (1)...(19): siRNA sense strand
gcaaauugguccccugauu

SEQ ID NO: 2121912 - RNA, 19 nt, Homo sapiens
  misc_RNA (1)...(19): siRNA sense strand
uggcaaaguugagcaguuu

SEQ ID NO: 2121913 - RNA, 19 nt, Homo sapiens
  misc_RNA (1)...(19): siRNA sense strand
ggagaaagagauuaugaca

SEQ ID NO: 2121914 - RNA, 19 nt, Homo sapiens
  misc_RNA (1)...(19): siRNA sense strand
guacaacuacgaucugaau

SEQ ID NO: 2121915 - RNA, 19 nt, Homo sapiens
  misc_RNA (1)...(19): siRNA sense strand
uaaccaagagagagauuaa

SEQ ID NO: 2121916 - RNA, 19 nt, Homo sapiens
  misc_RNA (1)...(19): siRNA sense strand
ucaggucgcucauguacug

SEQ ID NO: 2121917 - RNA, 19 nt, Homo sapiens
  misc_RNA (1)...(19): siRNA sense strand
ggacucacacuaccaaaca

SEQ ID NO: 2121918 - RNA, 19 nt, Homo sapiens
  misc_RNA (1)...(19): siRNA sense strand
gauaacaugggucggguaa

SEQ ID NO: 2121919 - RNA, 19 nt, Homo sapiens
  misc_RNA (1)...(19): siRNA sense strand
cuucaaaucuguccucgau

SEQ ID NO: 2121920 - RNA, 19 nt, Homo sapiens
  misc_RNA (1)...(19): siRNA sense strand
acaaugcuauuccuggauu

SEQ ID NO: 2121921 - RNA, 19 nt, Homo sapiens
  misc_RNA (1)...(19): siRNA sense strand
ugaauaugauguugaugga

SEQ ID NO: 2121922 - RNA, 19 nt, Homo sapiens
  misc_RNA (1)...(19): siRNA sense strand
guaucaaggagauucaaua

SEQ ID NO: 2121923 - RNA, 19 nt, Homo sapiens
  misc_RNA (1)...(19): siRNA sense strand
aaacagagccgcacguucu

SEQ ID NO: 2121924 - RNA, 19 nt, Homo sapiens
  misc_RNA (1)...(19): siRNA sense strand
ugacauagaaaucuggaaa

SEQ ID NO: 2121925 - RNA, 19 nt, Homo sapiens
  misc_RNA (1)...(19): siRNA sense strand
acagugaucuaccguuaug

SEQ ID NO: 2121926 - RNA, 19 nt, Homo sapiens
  misc_RNA (1)...(19): siRNA sense strand
ucgcucauguacuggauua

SEQ ID NO: 2121927 - RNA, 19 nt, Homo sapiens
  misc_RNA (1)...(19): siRNA sense strand
cggagggucuuauucaaau

SEQ ID NO: 2121928 - RNA, 19 nt, Homo sapiens
  misc_RNA (1)...(19): siRNA sense strand
uaugacggcucccucagaa

SEQ ID NO: 2121929 - RNA, 19 nt, Homo sapiens
  misc_RNA (1)...(19): siRNA sense strand
acuaggcucucagaaauuu

SEQ ID NO: 2121930 - RNA, 19 nt, Homo sapiens
  misc_RNA (1)...(19): siRNA sense strand
uguccucgaucgauucuuu

SEQ ID NO: 2121931 - RNA, 19 nt, Homo sapiens
  misc_RNA (1)...(19): siRNA sense strand
guauuaugaucuccaagga

SEQ ID NO: 2121932 - RNA, 19 nt, Homo sapiens
  misc_RNA (1)...(19): siRNA sense strand
ccauucgaguucagaaauu

SEQ ID NO: 2121933 - RNA, 19 nt, Homo sapiens
  misc_RNA (1)...(19): siRNA sense strand
uaugauagcacaagaguca

SEQ ID NO: 2121934 - RNA, 19 nt, Homo sapiens
  misc_RNA (1)...(19): siRNA sense strand
ucaguugacuuugaucgaa

SEQ ID NO: 2121935 - RNA, 19 nt, Homo sapiens
  misc_RNA (1)...(19): siRNA sense strand
gggcuuaugcugaaacaga

SEQ ID NO: 2121936 - RNA, 19 nt, Homo sapiens
  misc_RNA (1)...(19): siRNA sense strand
uaauguggcgguacaacua

SEQ ID NO: 2121937 - RNA, 19 nt, Homo sapiens
  misc_RNA (1)...(19): siRNA sense strand
gacuauagcuaugacaaca

SEQ ID NO: 2121938 - RNA, 19 nt, Homo sapiens
  misc_RNA (1)...(19): siRNA sense strand
gaacaacaaagacagaaaa

SEQ ID NO: 2121939 - RNA, 19 nt, Homo sapiens
  misc_RNA (1)...(19): siRNA sense strand
ugacggcucccucagaauu

SEQ ID NO: 2121940 - RNA, 19 nt, Homo sapiens
  misc_RNA (1)...(19): siRNA sense strand
aaauuaccucccuguauua

SEQ ID NO: 2121941 - RNA, 19 nt, Homo sapiens
  misc_RNA (1)...(19): siRNA sense strand
ggacagcaccugcaguuuu

SEQ ID NO: 2121942 - RNA, 19 nt, Homo sapiens
  misc_RNA (1)...(19): siRNA sense strand
ugacuuugaucgaacaaca

SEQ ID NO: 2121943 - RNA, 19 nt, Homo sapiens
  misc_RNA (1)...(19): siRNA sense strand
cagacuaggcucucagaaa

SEQ ID NO: 2121944 - RNA, 19 nt, Homo sapiens
  misc_RNA (1)...(19): siRNA sense strand
uggauucccuguucccaaa

SEQ ID NO: 2121945 - RNA, 19 nt, Homo sapiens
  misc_RNA (1)...(19): siRNA sense strand
ugagucaucuagccgagaa

SEQ ID NO: 2121946 - RNA, 19 nt, Homo sapiens
  misc_RNA (1)...(19): siRNA sense strand
gggaugaauucuauauugc

SEQ ID NO: 2121947 - RNA, 19 nt, Homo sapiens
  misc_RNA (1)...(19): siRNA sense strand
gguucaagaucaguuaaga

SEQ ID NO: 2121948 - RNA, 19 nt, Homo sapiens
  misc_RNA (1)...(19): siRNA sense strand
gaugguuuccuacgucaaa

SEQ ID NO: 2121949 - RNA, 19 nt, Homo sapiens
  misc_RNA (1)...(19): siRNA sense strand
acuacgaucugaauggaaa

SEQ ID NO: 2121950 - RNA, 19 nt, Homo sapiens
  misc_RNA (1)...(19): siRNA sense strand
cgagaacggucaaaacuug

SEQ ID NO: 2121951 - RNA, 19 nt, Homo sapiens
  misc_RNA (1)...(19): siRNA sense strand
cgacagcgccaacaacauc

SEQ ID NO: 2121952 - RNA, 19 nt, Homo sapiens
  misc_RNA (1)...(19): siRNA sense strand
guggacaacaccugacaua

SEQ ID NO: 2121953 - RNA, 19 nt, Homo sapiens
  misc_RNA (1)...(19): siRNA sense strand
ggggaugaauucuauauug

SEQ ID NO: 2121954 - RNA, 19 nt, Homo sapiens
  misc_RNA (1)...(19): siRNA sense strand
ggauuacucaugucuacaa

SEQ ID NO: 2121955 - RNA, 19 nt, Homo sapiens
  misc_RNA (1)...(19): siRNA sense strand
caauaucgguuggaugaag

SEQ ID NO: 2121956 - RNA, 19 nt, Homo sapiens
  misc_RNA (1)...(19): siRNA sense strand
cgaccaccguaaauuucua

SEQ ID NO: 2121957 - RNA, 19 nt, Homo sapiens
  misc_RNA (1)...(19): siRNA sense strand
gccgcaagcucaggguuaa

SEQ ID NO: 2121958 - RNA, 19 nt, Homo sapiens
  misc_RNA (1)...(19): siRNA sense strand
ugagcaguuuggaaaguuu

SEQ ID NO: 2121959 - RNA, 19 nt, Homo sapiens
  misc_RNA (1)...(19): siRNA sense strand
gacacgcacuacuucauca

SEQ ID NO: 2121960 - RNA, 19 nt, Homo sapiens
  misc_RNA (1)...(19): siRNA sense strand
caacgaggacugcaucaag

SEQ ID NO: 2121961 - RNA, 19 nt, Homo sapiens
  misc_RNA (1)...(19): siRNA sense strand
uuuggaaaguuuggaguua

SEQ ID NO: 2121962 - RNA, 19 nt, Homo sapiens
  misc_RNA (1)...(19): siRNA sense strand
gaucuccaaggacaucuuu

SEQ ID NO: 2121963 - RNA, 19 nt, Homo sapiens
  misc_RNA (1)...(19): siRNA sense strand
ggacacgcacuacuucauc

SEQ ID NO: 2121964 - RNA, 19 nt, Homo sapiens
  misc_RNA (1)...(19): siRNA sense strand
ugaaagauuacaucacaga

SEQ ID NO: 2121965 - RNA, 19 nt, Homo sapiens
  misc_RNA (1)...(19): siRNA sense strand
gacccacucaccaaauuaa

SEQ ID NO: 2121966 - RNA, 19 nt, Homo sapiens
  misc_RNA (1)...(19): siRNA sense strand
gaacagugauucuuucuua

SEQ ID NO: 2121967 - RNA, 19 nt, Homo sapiens
  misc_RNA (1)...(19): siRNA sense strand
gaaaggaucagauauguua

SEQ ID NO: 2121968 - RNA, 19 nt, Homo sapiens
  misc_RNA (1)...(19): siRNA sense strand
gaacacagauaaugauuug

SEQ ID NO: 2121969 - RNA, 19 nt, Homo sapiens
  misc_RNA (1)...(19): siRNA sense strand
ggagagagauacaaugauu

SEQ ID NO: 2121970 - RNA, 19 nt, Homo sapiens
  misc_RNA (1)...(19): siRNA sense strand
gaagagccauggagacuuu

SEQ ID NO: 2121971 - RNA, 19 nt, Homo sapiens
  misc_RNA (1)...(19): siRNA sense strand
gaaaggcucacaacaauuu

SEQ ID NO: 2121972 - RNA, 19 nt, Homo sapiens
  misc_RNA (1)...(19): siRNA sense strand
caaagaagaucagaacaaa

SEQ ID NO: 2121973 - RNA, 19 nt, Homo sapiens
  misc_RNA (1)...(19): siRNA sense strand
gcuggaaucugaauuuaaa

SEQ ID NO: 2121974 - RNA, 19 nt, Homo sapiens
  misc_RNA (1)...(19): siRNA sense strand
gagauaugaugaaggauuu

SEQ ID NO: 2121975 - RNA, 19 nt, Homo sapiens
  misc_RNA (1)...(19): siRNA sense strand
gaaagucaauguugugcuu

SEQ ID NO: 2121976 - RNA, 19 nt, Homo sapiens
  misc_RNA (1)...(19): siRNA sense strand
gaugagcaauuguuaaaga

SEQ ID NO: 2121977 - RNA, 19 nt, Homo sapiens
  misc_RNA (1)...(19): siRNA sense strand
gaaauuaccaggaauaaag

SEQ ID NO: 2121978 - RNA, 19 nt, Homo sapiens
  misc_RNA (1)...(19): siRNA sense strand
ggagagauacccagaaauu

SEQ ID NO: 2121979 - RNA, 19 nt, Homo sapiens
  misc_RNA (1)...(19): siRNA sense strand
gaagaccuguggaauguug

SEQ ID NO: 2121980 - RNA, 19 nt, Homo sapiens
  misc_RNA (1)...(19): siRNA sense strand
ggaaggagaaugccacuaa

SEQ ID NO: 2121981 - RNA, 19 nt, Homo sapiens
  misc_RNA (1)...(19): siRNA sense strand
gaacaaguggugugaauau

SEQ ID NO: 2121982 - RNA, 19 nt, Homo sapiens
  misc_RNA (1)...(19): siRNA sense strand
gcacuggcaugcucaaaga

SEQ ID NO: 2121983 - RNA, 19 nt, Homo sapiens
  misc_RNA (1)...(19): siRNA sense strand
ggaaaucguuagaaucaau

SEQ ID NO: 2121984 - RNA, 19 nt, Homo sapiens
  misc_RNA (1)...(19): siRNA sense strand
gaaggagaaugccacuaaa

SEQ ID NO: 2121985 - RNA, 19 nt, Homo sapiens
  misc_RNA (1)...(19): siRNA sense strand
ggaauuguguccagaggaa

SEQ ID NO: 2121986 - RNA, 19 nt, Homo sapiens
  misc_RNA (1)...(19): siRNA sense strand
ccaagaccauucauauaaa

SEQ ID NO: 2121987 - RNA, 19 nt, Homo sapiens
  misc_RNA (1)...(19): siRNA sense strand
gaacagcauuacccguauu

SEQ ID NO: 2121988 - RNA, 19 nt, Homo sapiens
  misc_RNA (1)...(19): siRNA sense strand
aaacacaacugcuugacaa

SEQ ID NO: 2121989 - RNA, 19 nt, Homo sapiens
  misc_RNA (1)...(19): siRNA sense strand
gaaacaggcagacaagauu

SEQ ID NO: 2121990 - RNA, 19 nt, Homo sapiens
  misc_RNA (1)...(19): siRNA sense strand
gaaugaaagucaauguugu

SEQ ID NO: 2121991 - RNA, 19 nt, Homo sapiens
  misc_RNA (1)...(19): siRNA sense strand
ccaaugacaucugcuguaa

SEQ ID NO: 2121992 - RNA, 19 nt, Homo sapiens
  misc_RNA (1)...(19): siRNA sense strand
gaaucaaucucuacgaaag

SEQ ID NO: 2121993 - RNA, 19 nt, Homo sapiens
  misc_RNA (1)...(19): siRNA sense strand
gcagagaaguuggagcaaa

SEQ ID NO: 2121994 - RNA, 19 nt, Homo sapiens
  misc_RNA (1)...(19): siRNA sense strand
aaguauagcuguucaaaug

SEQ ID NO: 2121995 - RNA, 19 nt, Homo sapiens
  misc_RNA (1)...(19): siRNA sense strand
ggaaugaaagucaauguug

SEQ ID NO: 2121996 - RNA, 19 nt, Homo sapiens
  misc_RNA (1)...(19): siRNA sense strand
agaaaucggucauucaaga

SEQ ID NO: 2121997 - RNA, 19 nt, Homo sapiens
  misc_RNA (1)...(19): siRNA sense strand
ggagaugaagaacaauuua

SEQ ID NO: 2121998 - RNA, 19 nt, Homo sapiens
  misc_RNA (1)...(19): siRNA sense strand
cauaugugcucaauuucua

SEQ ID NO: 2121999 - RNA, 19 nt, Homo sapiens
  misc_RNA (1)...(19): siRNA sense strand
ucaaagcccuacacacuga

SEQ ID NO: 2122000 - RNA, 19 nt, Homo sapiens
  misc_RNA (1)...(19): siRNA sense strand
gaggaaggccugagugauu

SEQ ID NO: 2122001 - RNA, 19 nt, Homo sapiens
  misc_RNA (1)...(19): siRNA sense strand
ugagaaacuucaagaaaug

SEQ ID NO: 2122002 - RNA, 19 nt, Homo sapiens
  misc_RNA (1)...(19): siRNA sense strand
ccaagucggugaacaugaa

SEQ ID NO: 2122003 - RNA, 19 nt, Homo sapiens
  misc_RNA (1)...(19): siRNA sense strand
gaacaaagcucagcaaaac

SEQ ID NO: 2122004 - RNA, 19 nt, Homo sapiens
  misc_RNA (1)...(19): siRNA sense strand
aaugacaucugcuguaauu

SEQ ID NO: 2122005 - RNA, 19 nt, Homo sapiens
  misc_RNA (1)...(19): siRNA sense strand
gaaaggaagaguagccauu

SEQ ID NO: 2122006 - RNA, 19 nt, Homo sapiens
  misc_RNA (1)...(19): siRNA sense strand
caagagaaaucggucauuc

SEQ ID NO: 2122007 - RNA, 19 nt, Homo sapiens
  misc_RNA (1)...(19): siRNA sense strand
caaauucacagguaaagaa

SEQ ID NO: 2122008 - RNA, 19 nt, Homo sapiens
  misc_RNA (1)...(19): siRNA sense strand
gaaguuggaugcuagaaaa

SEQ ID NO: 2122009 - RNA, 19 nt, Homo sapiens
  misc_RNA (1)...(19): siRNA sense strand
ccaaguggcugcaaucagu

SEQ ID NO: 2122010 - RNA, 19 nt, Homo sapiens
  misc_RNA (1)...(19): siRNA sense strand
ugccaguggugaaauauua

SEQ ID NO: 2122011 - RNA, 19 nt, Homo sapiens
  misc_RNA (1)...(19): siRNA sense strand
cagacaagauuauggaaga

SEQ ID NO: 2122012 - RNA, 19 nt, Homo sapiens
  misc_RNA (1)...(19): siRNA sense strand
ucaaguggcugcaacuguu

SEQ ID NO: 2122013 - RNA, 19 nt, Homo sapiens
  misc_RNA (1)...(19): siRNA sense strand
gaguugaaauguuaggauu

SEQ ID NO: 2122014 - RNA, 19 nt, Homo sapiens
  misc_RNA (1)...(19): siRNA sense strand
caaguggugugaauauuuc

SEQ ID NO: 2122015 - RNA, 19 nt, Homo sapiens
  misc_RNA (1)...(19): siRNA sense strand
gcucaaagacuccuuagug

SEQ ID NO: 2122016 - RNA, 19 nt, Homo sapiens
  misc_RNA (1)...(19): siRNA sense strand
gaugaaggauuugccuauu

SEQ ID NO: 2122017 - RNA, 19 nt, Homo sapiens
  misc_RNA (1)...(19): siRNA sense strand
ugucacaccugguuaaaga

SEQ ID NO: 2122018 - RNA, 19 nt, Homo sapiens
  misc_RNA (1)...(19): siRNA sense strand
aaauaagcgugacaaugua

SEQ ID NO: 2122019 - RNA, 19 nt, Homo sapiens
  misc_RNA (1)...(19): siRNA sense strand
augcauaugugcucaauuu

SEQ ID NO: 2122020 - RNA, 19 nt, Homo sapiens
  misc_RNA (1)...(19): siRNA sense strand
acacugaaauuaccaggaa

SEQ ID NO: 2122021 - RNA, 19 nt, Homo sapiens
  misc_RNA (1)...(19): siRNA sense strand
gagauacaaugauuuagag

SEQ ID NO: 2122022 - RNA, 19 nt, Homo sapiens
  misc_RNA (1)...(19): siRNA sense strand
gaagaaauauucgauugac

SEQ ID NO: 2122023 - RNA, 19 nt, Homo sapiens
  misc_RNA (1)...(19): siRNA sense strand
aagcagaacaucaucaaua

SEQ ID NO: 2122024 - RNA, 19 nt, Homo sapiens
  misc_RNA (1)...(19): siRNA sense strand
ggagauaugaugaaggauu

SEQ ID NO: 2122025 - RNA, 19 nt, Homo sapiens
  misc_RNA (1)...(19): siRNA sense strand
gaacaacaagaagacauuu

SEQ ID NO: 2122026 - RNA, 19 nt, Homo sapiens
  misc_RNA (1)...(19): siRNA sense strand
ggaacagcauuacccguau

SEQ ID NO: 2122027 - RNA, 19 nt, Homo sapiens
  misc_RNA (1)...(19): siRNA sense strand
uggaaaggcucacaacaau

SEQ ID NO: 2122028 - RNA, 19 nt, Homo sapiens
  misc_RNA (1)...(19): siRNA sense strand
acaaaugucucaacuuucu

SEQ ID NO: 2122029 - RNA, 19 nt, Homo sapiens
  misc_RNA (1)...(19): siRNA sense strand
gcagaacaucaucaauaua

SEQ ID NO: 2122030 - RNA, 19 nt, Homo sapiens
  misc_RNA (1)...(19): siRNA sense strand
aagaggagaugaagaacaa

SEQ ID NO: 2122031 - RNA, 19 nt, Homo sapiens
  misc_RNA (1)...(19): siRNA sense strand
ucacuauccuugagaaugu

SEQ ID NO: 2122032 - RNA, 19 nt, Homo sapiens
  misc_RNA (1)...(19): siRNA sense strand
ggacuugcaucauauuugc

SEQ ID NO: 2122033 - RNA, 19 nt, Homo sapiens
  misc_RNA (1)...(19): siRNA sense strand
acaguucccucucagcaua

SEQ ID NO: 2122034 - RNA, 19 nt, Homo sapiens
  misc_RNA (1)...(19): siRNA sense strand
gaaccacauuugaauuugg

SEQ ID NO: 2122035 - RNA, 19 nt, Homo sapiens
  misc_RNA (1)...(19): siRNA sense strand
gaguauaaccuggcaguaa

SEQ ID NO: 2122036 - RNA, 19 nt, Homo sapiens
  misc_RNA (1)...(19): siRNA sense strand
guugagauacucuuuguaa

SEQ ID NO: 2122037 - RNA, 19 nt, Homo sapiens
  misc_RNA (1)...(19): siRNA sense strand
ugaagauucuggaaauuuc

SEQ ID NO: 2122038 - RNA, 19 nt, Homo sapiens
  misc_RNA (1)...(19): siRNA sense strand
ugcaauagaugaaguacuu

SEQ ID NO: 2122039 - RNA, 19 nt, Homo sapiens
  misc_RNA (1)...(19): siRNA sense strand
aaacuuaaaggcagaauug

SEQ ID NO: 2122040 - RNA, 19 nt, Homo sapiens
  misc_RNA (1)...(19): siRNA sense strand
gcauccagcuuuaugauac

SEQ ID NO: 2122041 - RNA, 19 nt, Homo sapiens
  misc_RNA (1)...(19): siRNA sense strand
caaaucuucucaccaagug

SEQ ID NO: 2122042 - RNA, 19 nt, Homo sapiens
  misc_RNA (1)...(19): siRNA sense strand
ggauuugccuauucuaaag

SEQ ID NO: 2122043 - RNA, 19 nt, Homo sapiens
  misc_RNA (1)...(19): siRNA sense strand
aauguaccaucgugucuua

SEQ ID NO: 2122044 - RNA, 19 nt, Homo sapiens
  misc_RNA (1)...(19): siRNA sense strand
ggaacacagauaaugauuu

SEQ ID NO: 2122045 - RNA, 19 nt, Homo sapiens
  misc_RNA (1)...(19): siRNA sense strand
caacucgugucucacuuga

SEQ ID NO: 2122046 - RNA, 19 nt, Homo sapiens
  misc_RNA (1)...(19): siRNA sense strand
caacucccuuugucaagaa

SEQ ID NO: 2122047 - RNA, 19 nt, Homo sapiens
  misc_RNA (1)...(19): siRNA sense strand
ggaaacaggcagacaagau

SEQ ID NO: 2122048 - RNA, 19 nt, Homo sapiens
  misc_RNA (1)...(19): siRNA sense strand
gcgcuaacgacagauauua

SEQ ID NO: 2122049 - RNA, 19 nt, Homo sapiens
  misc_RNA (1)...(19): siRNA sense strand
gaguagccauuucaccauu

SEQ ID NO: 2122050 - RNA, 19 nt, Homo sapiens
  misc_RNA (1)...(19): siRNA sense strand
aaagaaauuugcaggacuu

SEQ ID NO: 2122051 - RNA, 19 nt, Homo sapiens
  misc_RNA (1)...(19): siRNA sense strand
ugcaggagguggaagauuu

SEQ ID NO: 2122052 - RNA, 19 nt, Homo sapiens
  misc_RNA (1)...(19): siRNA sense strand
ucacaagauuggaaguuau

SEQ ID NO: 2122053 - RNA, 19 nt, Homo sapiens
  misc_RNA (1)...(19): siRNA sense strand
ggaguuuucuggaugcuua

SEQ ID NO: 2122054 - RNA, 19 nt, Homo sapiens
  misc_RNA (1)...(19): siRNA sense strand
gagcuccuccuugucauua

SEQ ID NO: 2122055 - RNA, 19 nt, Homo sapiens
  misc_RNA (1)...(19): siRNA sense strand
gaugagguccauuaucuug

SEQ ID NO: 2122056 - RNA, 19 nt, Homo sapiens
  misc_RNA (1)...(19): siRNA sense strand
gaaugagucagcagugauu

SEQ ID NO: 2122057 - RNA, 19 nt, Homo sapiens
  misc_RNA (1)...(19): siRNA sense strand
ggaagauuauuugacauca

SEQ ID NO: 2122058 - RNA, 19 nt, Homo sapiens
  misc_RNA (1)...(19): siRNA sense strand
gaaaucggucauucaagaa

SEQ ID NO: 2122059 - RNA, 19 nt, Homo sapiens
  misc_RNA (1)...(19): siRNA sense strand
gagagauacccagaaauuu

SEQ ID NO: 2122060 - RNA, 19 nt, Homo sapiens
  misc_RNA (1)...(19): siRNA sense strand
ugagugauuuacaaacgua

SEQ ID NO: 2122061 - RNA, 19 nt, Homo sapiens
  misc_RNA (1)...(19): siRNA sense strand
aaacaggcagacaagauua

SEQ ID NO: 2122062 - RNA, 19 nt, Homo sapiens
  misc_RNA (1)...(19): siRNA sense strand
uuaaugaucuggcaaacuc

SEQ ID NO: 2122063 - RNA, 19 nt, Homo sapiens
  misc_RNA (1)...(19): siRNA sense strand
uccaagaccauucauauaa

SEQ ID NO: 2122064 - RNA, 19 nt, Homo sapiens
  misc_RNA (1)...(19): siRNA sense strand
uuacagugccggaauguuu

SEQ ID NO: 2122065 - RNA, 19 nt, Homo sapiens
  misc_RNA (1)...(19): siRNA sense strand
gccauuacuugauaagaga

SEQ ID NO: 2122066 - RNA, 19 nt, Homo sapiens
  misc_RNA (1)...(19): siRNA sense strand
gaacaaggauggagaaaug

SEQ ID NO: 2122067 - RNA, 19 nt, Homo sapiens
  misc_RNA (1)...(19): siRNA sense strand
agaaagagcuaaacaagua

SEQ ID NO: 2122068 - RNA, 19 nt, Homo sapiens
  misc_RNA (1)...(19): siRNA sense strand
ggaaggaaauuuagaagaa

SEQ ID NO: 2122069 - RNA, 19 nt, Homo sapiens
  misc_RNA (1)...(19): siRNA sense strand
ggacagauguggcagauga

SEQ ID NO: 2122070 - RNA, 19 nt, Homo sapiens
  misc_RNA (1)...(19): siRNA sense strand
gaaauaaacccaucagcua

SEQ ID NO: 2122071 - RNA, 19 nt, Homo sapiens
  misc_RNA (1)...(19): siRNA sense strand
ggaacaaccuggugaagaa

SEQ ID NO: 2122072 - RNA, 19 nt, Homo sapiens
  misc_RNA (1)...(19): siRNA sense strand
gagagaaguugcaguauug

SEQ ID NO: 2122073 - RNA, 19 nt, Homo sapiens
  misc_RNA (1)...(19): siRNA sense strand
gcgaauaaaugcucagaaa

SEQ ID NO: 2122074 - RNA, 19 nt, Homo sapiens
  misc_RNA (1)...(19): siRNA sense strand
gggaagcuaugcagaauaa

SEQ ID NO: 2122075 - RNA, 19 nt, Homo sapiens
  misc_RNA (1)...(19): siRNA sense strand
ggagagaaguugcaguauu

SEQ ID NO: 2122076 - RNA, 19 nt, Homo sapiens
  misc_RNA (1)...(19): siRNA sense strand
uaacagugauggugaaauu

SEQ ID NO: 2122077 - RNA, 19 nt, Homo sapiens
  misc_RNA (1)...(19): siRNA sense strand
ggacugguuuguacagaua

SEQ ID NO: 2122078 - RNA, 19 nt, Homo sapiens
  misc_RNA (1)...(19): siRNA sense strand
gaaacuggaaggaaauuua

SEQ ID NO: 2122079 - RNA, 19 nt, Homo sapiens
  misc_RNA (1)...(19): siRNA sense strand
ggagaaguauguuagacua

SEQ ID NO: 2122080 - RNA, 19 nt, Homo sapiens
  misc_RNA (1)...(19): siRNA sense strand
gauagugucuuuaaccauu

SEQ ID NO: 2122081 - RNA, 19 nt, Homo sapiens
  misc_RNA (1)...(19): siRNA sense strand
gaugagaucuguuauuucu

SEQ ID NO: 2122082 - RNA, 19 nt, Homo sapiens
  misc_RNA (1)...(19): siRNA sense strand
agaagaaccugaugauuug

SEQ ID NO: 2122083 - RNA, 19 nt, Homo sapiens
  misc_RNA (1)...(19): siRNA sense strand
ggagaagguucauuuggaa

SEQ ID NO: 2122084 - RNA, 19 nt, Homo sapiens
  misc_RNA (1)...(19): siRNA sense strand
ccaagaagauaaugaugaa

SEQ ID NO: 2122085 - RNA, 19 nt, Homo sapiens
  misc_RNA (1)...(19): siRNA sense strand
gaaaagccauucuuguuaa

SEQ ID NO: 2122086 - RNA, 19 nt, Homo sapiens
  misc_RNA (1)...(19): siRNA sense strand
gaugagagcuugccaugca

SEQ ID NO: 2122087 - RNA, 19 nt, Homo sapiens
  misc_RNA (1)...(19): siRNA sense strand
caacaaagagcagaagaua

SEQ ID NO: 2122088 - RNA, 19 nt, Homo sapiens
  misc_RNA (1)...(19): siRNA sense strand
ggaauaccuuuagcauaua

SEQ ID NO: 2122089 - RNA, 19 nt, Homo sapiens
  misc_RNA (1)...(19): siRNA sense strand
uggaauaccuuuagcauau

SEQ ID NO: 2122090 - RNA, 19 nt, Homo sapiens
  misc_RNA (1)...(19): siRNA sense strand
gaagauggagucucgagua

SEQ ID NO: 2122091 - RNA, 19 nt, Homo sapiens
  misc_RNA (1)...(19): siRNA sense strand
gaaacucagucggcagaua

SEQ ID NO: 2122092 - RNA, 19 nt, Homo sapiens
  misc_RNA (1)...(19): siRNA sense strand
gaaagagaaaggaggcuua

SEQ ID NO: 2122093 - RNA, 19 nt, Homo sapiens
  misc_RNA (1)...(19): siRNA sense strand
agagaaggcuggaauuuau

SEQ ID NO: 2122094 - RNA, 19 nt, Homo sapiens
  misc_RNA (1)...(19): siRNA sense strand
gcaaacaacccaaagaugu

SEQ ID NO: 2122095 - RNA, 19 nt, Homo sapiens
  misc_RNA (1)...(19): siRNA sense strand
uagaagaaccugaugauuu

SEQ ID NO: 2122096 - RNA, 19 nt, Homo sapiens
  misc_RNA (1)...(19): siRNA sense strand
uaugagcuguguacacuua

SEQ ID NO: 2122097 - RNA, 19 nt, Homo sapiens
  misc_RNA (1)...(19): siRNA sense strand
gaagaauccuuugcauuuc

SEQ ID NO: 2122098 - RNA, 19 nt, Homo sapiens
  misc_RNA (1)...(19): siRNA sense strand
gagaaauacuucguagauu

SEQ ID NO: 2122099 - RNA, 19 nt, Homo sapiens
  misc_RNA (1)...(19): siRNA sense strand
caacaaugcuauuucaagu

SEQ ID NO: 2122100 - RNA, 19 nt, Homo sapiens
  misc_RNA (1)...(19): siRNA sense strand
gacaguauguuaucaagga

SEQ ID NO: 2122101 - RNA, 19 nt, Homo sapiens
  misc_RNA (1)...(19): siRNA sense strand
guuaagaguucugauguuu

SEQ ID NO: 2122102 - RNA, 19 nt, Homo sapiens
  misc_RNA (1)...(19): siRNA sense strand
aaauggcucucucuacaua

SEQ ID NO: 2122103 - RNA, 19 nt, Homo sapiens
  misc_RNA (1)...(19): siRNA sense strand
uaaaggcuauucaugaaga

SEQ ID NO: 2122104 - RNA, 19 nt, Homo sapiens
  misc_RNA (1)...(19): siRNA sense strand
ugaaugcgauagugucuuu

SEQ ID NO: 2122105 - RNA, 19 nt, Homo sapiens
  misc_RNA (1)...(19): siRNA sense strand
ugaaauugcuagugaaugu

SEQ ID NO: 2122106 - RNA, 19 nt, Homo sapiens
  misc_RNA (1)...(19): siRNA sense strand
gaagaauggcacucagaua

SEQ ID NO: 2122107 - RNA, 19 nt, Homo sapiens
  misc_RNA (1)...(19): siRNA sense strand
agaagaauccuuugcauuu

SEQ ID NO: 2122108 - RNA, 19 nt, Homo sapiens
  misc_RNA (1)...(19): siRNA sense strand
aaaggaggcuuaugagaga

SEQ ID NO: 2122109 - RNA, 19 nt, Homo sapiens
  misc_RNA (1)...(19): siRNA sense strand
ggaaagguuggaaagaaua

SEQ ID NO: 2122110 - RNA, 19 nt, Homo sapiens
  misc_RNA (1)...(19): siRNA sense strand
gaaaugaacaucagcaucu

SEQ ID NO: 2122111 - RNA, 19 nt, Homo sapiens
  misc_RNA (1)...(19): siRNA sense strand
ugaagaaacugacacagau

SEQ ID NO: 2122112 - RNA, 19 nt, Homo sapiens
  misc_RNA (1)...(19): siRNA sense strand
gcaaauaagacuacagaau

SEQ ID NO: 2122113 - RNA, 19 nt, Homo sapiens
  misc_RNA (1)...(19): siRNA sense strand
gcaagacugaggcaaauaa

SEQ ID NO: 2122114 - RNA, 19 nt, Homo sapiens
  misc_RNA (1)...(19): siRNA sense strand
gaaaauggcucucucuaca

SEQ ID NO: 2122115 - RNA, 19 nt, Homo sapiens
  misc_RNA (1)...(19): siRNA sense strand
aaugaaggcugaacaaaug

SEQ ID NO: 2122116 - RNA, 19 nt, Homo sapiens
  misc_RNA (1)...(19): siRNA sense strand
uuacaaagccugccgcuaa

SEQ ID NO: 2122117 - RNA, 19 nt, Homo sapiens
  misc_RNA (1)...(19): siRNA sense strand
caaauauuguccaguauag

SEQ ID NO: 2122118 - RNA, 19 nt, Homo sapiens
  misc_RNA (1)...(19): siRNA sense strand
uggagaagcugaacuacaa

SEQ ID NO: 2122119 - RNA, 19 nt, Homo sapiens
  misc_RNA (1)...(19): siRNA sense strand
gaagauggcagacaguaug

SEQ ID NO: 2122120 - RNA, 19 nt, Homo sapiens
  misc_RNA (1)...(19): siRNA sense strand
gcagaagaauuuugucuaa

SEQ ID NO: 2122121 - RNA, 19 nt, Homo sapiens
  misc_RNA (1)...(19): siRNA sense strand
gaggacaguaugaacauua

SEQ ID NO: 2122122 - RNA, 19 nt, Homo sapiens
  misc_RNA (1)...(19): siRNA sense strand
gaacaucagcaucuuuaug

SEQ ID NO: 2122123 - RNA, 19 nt, Homo sapiens
  misc_RNA (1)...(19): siRNA sense strand
caacuuagugacauucaua

SEQ ID NO: 2122124 - RNA, 19 nt, Homo sapiens
  misc_RNA (1)...(19): siRNA sense strand
gaccaacaaugcuauuuca

SEQ ID NO: 2122125 - RNA, 19 nt, Homo sapiens
  misc_RNA (1)...(19): siRNA sense strand
gaacaacuagaacgaaaga

SEQ ID NO: 2122126 - RNA, 19 nt, Homo sapiens
  misc_RNA (1)...(19): siRNA sense strand
gacauuaaaucucagaaca

SEQ ID NO: 2122127 - RNA, 19 nt, Homo sapiens
  misc_RNA (1)...(19): siRNA sense strand
ggaaaagccauucuuguua

SEQ ID NO: 2122128 - RNA, 19 nt, Homo sapiens
  misc_RNA (1)...(19): siRNA sense strand
ugacacagauuuacaagag

SEQ ID NO: 2122129 - RNA, 19 nt, Homo sapiens
  misc_RNA (1)...(19): siRNA sense strand
gcagauaggaucaccauuc

SEQ ID NO: 2122130 - RNA, 19 nt, Homo sapiens
  misc_RNA (1)...(19): siRNA sense strand
gaacauuaccaugccauuu

SEQ ID NO: 2122131 - RNA, 19 nt, Homo sapiens
  misc_RNA (1)...(19): siRNA sense strand
gacuauagcuccaucaucu

SEQ ID NO: 2122132 - RNA, 19 nt, Homo sapiens
  misc_RNA (1)...(19): siRNA sense strand
gaaaauaucugaggaagca

SEQ ID NO: 2122133 - RNA, 19 nt, Homo sapiens
  misc_RNA (1)...(19): siRNA sense strand
ucaagaauguccaguaaag

SEQ ID NO: 2122134 - RNA, 19 nt, Homo sapiens
  misc_RNA (1)...(19): siRNA sense strand
ggaccaacuuagugacauu

SEQ ID NO: 2122135 - RNA, 19 nt, Homo sapiens
  misc_RNA (1)...(19): siRNA sense strand
gaaagagaaggcuggaauu

SEQ ID NO: 2122136 - RNA, 19 nt, Homo sapiens
  misc_RNA (1)...(19): siRNA sense strand
caugaagcauccaaauauu

SEQ ID NO: 2122137 - RNA, 19 nt, Homo sapiens
  misc_RNA (1)...(19): siRNA sense strand
ucagaacccuuauggaugu

SEQ ID NO: 2122138 - RNA, 19 nt, Homo sapiens
  misc_RNA (1)...(19): siRNA sense strand
ccacagaugucauugaaac

SEQ ID NO: 2122139 - RNA, 19 nt, Homo sapiens
  misc_RNA (1)...(19): siRNA sense strand
gcaguuuggugucucaguu

SEQ ID NO: 2122140 - RNA, 19 nt, Homo sapiens
  misc_RNA (1)...(19): siRNA sense strand
gauggcagacaguauguua

SEQ ID NO: 2122141 - RNA, 19 nt, Homo sapiens
  misc_RNA (1)...(19): siRNA sense strand
ggacaaaacucgauuucug

SEQ ID NO: 2122142 - RNA, 19 nt, Homo sapiens
  misc_RNA (1)...(19): siRNA sense strand
gaauggcacucagauaaca

SEQ ID NO: 2122143 - RNA, 19 nt, Homo sapiens
  misc_RNA (1)...(19): siRNA sense strand
agaauacagugaagaagaa

SEQ ID NO: 2122144 - RNA, 19 nt, Homo sapiens
  misc_RNA (1)...(19): siRNA sense strand
guacaaacccuuaauuacu

SEQ ID NO: 2122145 - RNA, 19 nt, Homo sapiens
  misc_RNA (1)...(19): siRNA sense strand
cuaaaggaguuaagaguuc

SEQ ID NO: 2122146 - RNA, 19 nt, Homo sapiens
  misc_RNA (1)...(19): siRNA sense strand
ucucaagaauguccaguaa

SEQ ID NO: 2122147 - RNA, 19 nt, Homo sapiens
  misc_RNA (1)...(19): siRNA sense strand
gaaagguuggaaagaauaa

SEQ ID NO: 2122148 - RNA, 19 nt, Homo sapiens
  misc_RNA (1)...(19): siRNA sense strand
ccuaugaucuccgcaguuu

SEQ ID NO: 2122149 - RNA, 19 nt, Homo sapiens
  misc_RNA (1)...(19): siRNA sense strand
cugaagacauuguguuuga

SEQ ID NO: 2122150 - RNA, 19 nt, Homo sapiens
  misc_RNA (1)...(19): siRNA sense strand
gaaguuggcguggacagua

SEQ ID NO: 2122151 - RNA, 19 nt, Homo sapiens
  misc_RNA (1)...(19): siRNA sense strand
gaagaaaggaggaaaauau

SEQ ID NO: 2122152 - RNA, 19 nt, Homo sapiens
  misc_RNA (1)...(19): siRNA sense strand
caaagccugccgcuaaaua

SEQ ID NO: 2122153 - RNA, 19 nt, Homo sapiens
  misc_RNA (1)...(19): siRNA sense strand
ccaaauauuguccaguaua

SEQ ID NO: 2122154 - RNA, 19 nt, Homo sapiens
  misc_RNA (1)...(19): siRNA sense strand
aaacaaagaggaagagguu

SEQ ID NO: 2122155 - RNA, 19 nt, Homo sapiens
  misc_RNA (1)...(19): siRNA sense strand
gauugaaggcggugucuaa

SEQ ID NO: 2122156 - RNA, 19 nt, Homo sapiens
  misc_RNA (1)...(19): siRNA sense strand
acaaagagcagaagauaau

SEQ ID NO: 2122157 - RNA, 19 nt, Homo sapiens
  misc_RNA (1)...(19): siRNA sense strand
gagaagagagugaauacug

SEQ ID NO: 2122158 - RNA, 19 nt, Homo sapiens
  misc_RNA (1)...(19): siRNA sense strand
gaauaaaugcucagaaagg

SEQ ID NO: 2122159 - RNA, 19 nt, Homo sapiens
  misc_RNA (1)...(19): siRNA sense strand
cagauaggaucaccauuca

SEQ ID NO: 2122160 - RNA, 19 nt, Homo sapiens
  misc_RNA (1)...(19): siRNA sense strand
cauugaaacuggaaggaaa

SEQ ID NO: 2122161 - RNA, 19 nt, Homo sapiens
  misc_RNA (1)...(19): siRNA sense strand
gauacauccuucucuacaa

SEQ ID NO: 2122162 - RNA, 19 nt, Homo sapiens
  misc_RNA (1)...(19): siRNA sense strand
ugaaggcggugucuaaaca

SEQ ID NO: 2122163 - RNA, 19 nt, Homo sapiens
  misc_RNA (1)...(19): siRNA sense strand
gcuaagugcugguggaagu

SEQ ID NO: 2122164 - RNA, 19 nt, Homo sapiens
  misc_RNA (1)...(19): siRNA sense strand
gaacgaagaauggcacuca

SEQ ID NO: 2122165 - RNA, 19 nt, Homo sapiens
  misc_RNA (1)...(19): siRNA sense strand
caaggaaauuaacaucuca

SEQ ID NO: 2122166 - RNA, 19 nt, Homo sapiens
  misc_RNA (1)...(19): siRNA sense strand
gaugaaguguugaaucuga

SEQ ID NO: 2122167 - RNA, 19 nt, Homo sapiens
  misc_RNA (1)...(19): siRNA sense strand
gaggucagcuagaaugaug

SEQ ID NO: 2122168 - RNA, 19 nt, Homo sapiens
  misc_RNA (1)...(19): siRNA sense strand
acaaugaggucagcuagaa

SEQ ID NO: 2122169 - RNA, 19 nt, Homo sapiens
  misc_RNA (1)...(19): siRNA sense strand
cagcuagaaugauggauug

SEQ ID NO: 2122170 - RNA, 19 nt, Homo sapiens
  misc_RNA (1)...(19): siRNA sense strand
cugauucucugaaguauau

SEQ ID NO: 2122171 - RNA, 19 nt, Homo sapiens
  misc_RNA (1)...(19): siRNA sense strand
gcaagucaauguauguuuu

SEQ ID NO: 2122172 - RNA, 19 nt, Homo sapiens
  misc_RNA (1)...(19): siRNA sense strand
ugaauucacagcugcuuua

SEQ ID NO: 2122173 - RNA, 19 nt, Homo sapiens
  misc_RNA (1)...(19): siRNA sense strand
caccucagccucccaagua

SEQ ID NO: 2122174 - RNA, 19 nt, Homo sapiens
  misc_RNA (1)...(19): siRNA sense strand
ggagugcaguggcccaauc

SEQ ID NO: 2122175 - RNA, 19 nt, Homo sapiens
  misc_RNA (1)...(19): siRNA sense strand
cuagaaugauggauuguca

SEQ ID NO: 2122176 - RNA, 19 nt, Homo sapiens
  misc_RNA (1)...(19): siRNA sense strand
ggaaagggguugagcaagu

SEQ ID NO: 2122177 - RNA, 19 nt, Homo sapiens
  misc_RNA (1)...(19): siRNA sense strand
gaaagaugaaguguugaau

SEQ ID NO: 2122178 - RNA, 19 nt, Homo sapiens
  misc_RNA (1)...(19): siRNA sense strand
gaaguguugaaucugaauu

SEQ ID NO: 2122179 - RNA, 19 nt, Homo sapiens
  misc_RNA (1)...(19): siRNA sense strand
ugucugauucucugaagua

SEQ ID NO: 2122180 - RNA, 19 nt, Homo sapiens
  misc_RNA (1)...(19): siRNA sense strand
auucacagcugcuuuaugc

SEQ ID NO: 2122181 - RNA, 19 nt, Homo sapiens
  misc_RNA (1)...(19): siRNA sense strand
ucacagcugcuuuaugcaa

SEQ ID NO: 2122182 - RNA, 19 nt, Homo sapiens
  misc_RNA (1)...(19): siRNA sense strand
gagcaagucaauguauguu

SEQ ID NO: 2122183 - RNA, 19 nt, Homo sapiens
  misc_RNA (1)...(19): siRNA sense strand
uuccagagccuacagaaug

SEQ ID NO: 2122184 - RNA, 19 nt, Homo sapiens
  misc_RNA (1)...(19): siRNA sense strand
gaauucacagcugcuuuau

SEQ ID NO: 2122185 - RNA, 19 nt, Homo sapiens
  misc_RNA (1)...(19): siRNA sense strand
ucagcuagaaugauggauu

SEQ ID NO: 2122186 - RNA, 19 nt, Homo sapiens
  misc_RNA (1)...(19): siRNA sense strand
cacagcugcuuuaugcaau

SEQ ID NO: 2122187 - RNA, 19 nt, Homo sapiens
  misc_RNA (1)...(19): siRNA sense strand
gacaaugaggucagcuaga

SEQ ID NO: 2122188 - RNA, 19 nt, Homo sapiens
  misc_RNA (1)...(19): siRNA sense strand
aaagaugaaguguugaauc

SEQ ID NO: 2122189 - RNA, 19 nt, Homo sapiens
  misc_RNA (1)...(19): siRNA sense strand
gaaagggguugagcaaguc

SEQ ID NO: 2122190 - RNA, 19 nt, Homo sapiens
  misc_RNA (1)...(19): siRNA sense strand
uccagagccuacagaaugu

SEQ ID NO: 2122191 - RNA, 19 nt, Homo sapiens
  misc_RNA (1)...(19): siRNA sense strand
cuacaggagagaagacaau

SEQ ID NO: 2122192 - RNA, 19 nt, Homo sapiens
  misc_RNA (1)...(19): siRNA sense strand
ugagcaagucaauguaugu

SEQ ID NO: 2122193 - RNA, 19 nt, Homo sapiens
  misc_RNA (1)...(19): siRNA sense strand
caggagagaagacaaugag

SEQ ID NO: 2122194 - RNA, 19 nt, Homo sapiens
  misc_RNA (1)...(19): siRNA sense strand
ccaaacagcuggccaauuu

SEQ ID NO: 2122195 - RNA, 19 nt, Homo sapiens
  misc_RNA (1)...(19): siRNA sense strand
ggaaagagauauuuagcaa

SEQ ID NO: 2122196 - RNA, 19 nt, Homo sapiens
  misc_RNA (1)...(19): siRNA sense strand
gaacucaacucuuguccaa

SEQ ID NO: 2122197 - RNA, 19 nt, Homo sapiens
  misc_RNA (1)...(19): siRNA sense strand
gcaaugaacucggcaagaa

SEQ ID NO: 2122198 - RNA, 19 nt, Homo sapiens
  misc_RNA (1)...(19): siRNA sense strand
gaacuaacaguaaauggua

SEQ ID NO: 2122199 - RNA, 19 nt, Homo sapiens
  misc_RNA (1)...(19): siRNA sense strand
gaaaguaaccgucgucaga

SEQ ID NO: 2122200 - RNA, 19 nt, Homo sapiens
  misc_RNA (1)...(19): siRNA sense strand
gaagacaccugcugacaca

SEQ ID NO: 2122201 - RNA, 19 nt, Homo sapiens
  misc_RNA (1)...(19): siRNA sense strand
ugaagaaacuggaagaaga

SEQ ID NO: 2122202 - RNA, 19 nt, Homo sapiens
  misc_RNA (1)...(19): siRNA sense strand
ggaugugucuggugaauug

SEQ ID NO: 2122203 - RNA, 19 nt, Homo sapiens
  misc_RNA (1)...(19): siRNA sense strand
guaaacagcuaucacaagu

SEQ ID NO: 2122204 - RNA, 19 nt, Homo sapiens
  misc_RNA (1)...(19): siRNA sense strand
gaaaucauuaggcgcauua

SEQ ID NO: 2122205 - RNA, 19 nt, Homo sapiens
  misc_RNA (1)...(19): siRNA sense strand
caaaggagauaacuucauc

SEQ ID NO: 2122206 - RNA, 19 nt, Homo sapiens
  misc_RNA (1)...(19): siRNA sense strand
gaaagccugucacccaaga

SEQ ID NO: 2122207 - RNA, 19 nt, Homo sapiens
  misc_RNA (1)...(19): siRNA sense strand
guagagauggaaaucauua

SEQ ID NO: 2122208 - RNA, 19 nt, Homo sapiens
  misc_RNA (1)...(19): siRNA sense strand
gaagaaacuggaagaagaa

SEQ ID NO: 2122209 - RNA, 19 nt, Homo sapiens
  misc_RNA (1)...(19): siRNA sense strand
cauaacuccuucccucaua

SEQ ID NO: 2122210 - RNA, 19 nt, Homo sapiens
  misc_RNA (1)...(19): siRNA sense strand
ccaaagggcucacauuucg

SEQ ID NO: 2122211 - RNA, 19 nt, Homo sapiens
  misc_RNA (1)...(19): siRNA sense strand
gaacacagaggaggagaaa

SEQ ID NO: 2122212 - RNA, 19 nt, Homo sapiens
  misc_RNA (1)...(19): siRNA sense strand
ggacaagaggaaagagaua

SEQ ID NO: 2122213 - RNA, 19 nt, Homo sapiens
  misc_RNA (1)...(19): siRNA sense strand
gaaacucucucaaaaccua

SEQ ID NO: 2122214 - RNA, 19 nt, Homo sapiens
  misc_RNA (1)...(19): siRNA sense strand
caacaaagccaaggagaga

SEQ ID NO: 2122215 - RNA, 19 nt, Homo sapiens
  misc_RNA (1)...(19): siRNA sense strand
cuaaaguuauuccgguuaa

SEQ ID NO: 2122216 - RNA, 19 nt, Homo sapiens
  misc_RNA (1)...(19): siRNA sense strand
caagcauuguugaaaguaa

SEQ ID NO: 2122217 - RNA, 19 nt, Homo sapiens
  misc_RNA (1)...(19): siRNA sense strand
acaccgcgcucaugaagaa

SEQ ID NO: 2122218 - RNA, 19 nt, Homo sapiens
  misc_RNA (1)...(19): siRNA sense strand
ggaaugagagauccaacaa

SEQ ID NO: 2122219 - RNA, 19 nt, Homo sapiens
  misc_RNA (1)...(19): siRNA sense strand
aaagagacuugcagaggaa

SEQ ID NO: 2122220 - RNA, 19 nt, Homo sapiens
  misc_RNA (1)...(19): siRNA sense strand
gcaaagacacacuguucaa

SEQ ID NO: 2122221 - RNA, 19 nt, Homo sapiens
  misc_RNA (1)...(19): siRNA sense strand
agacagaaacucucucaaa

SEQ ID NO: 2122222 - RNA, 19 nt, Homo sapiens
  misc_RNA (1)...(19): siRNA sense strand
gagggcugcuucaucauug

SEQ ID NO: 2122223 - RNA, 19 nt, Homo sapiens
  misc_RNA (1)...(19): siRNA sense strand
caucacagcggaaggagua

SEQ ID NO: 2122224 - RNA, 19 nt, Homo sapiens
  misc_RNA (1)...(19): siRNA sense strand
gacagaaacucucucaaaa

SEQ ID NO: 2122225 - RNA, 19 nt, Homo sapiens
  misc_RNA (1)...(19): siRNA sense strand
caucggaagucccauggaa

SEQ ID NO: 2122226 - RNA, 19 nt, Homo sapiens
  misc_RNA (1)...(19): siRNA sense strand
gagauaacuucaucaugca

SEQ ID NO: 2122227 - RNA, 19 nt, Homo sapiens
  misc_RNA (1)...(19): siRNA sense strand
cccacagacuuauuucaua

SEQ ID NO: 2122228 - RNA, 19 nt, Homo sapiens
  misc_RNA (1)...(19): siRNA sense strand
ggauaucccagcugaaaga

SEQ ID NO: 2122229 - RNA, 19 nt, Homo sapiens
  misc_RNA (1)...(19): siRNA sense strand
caacgucucugaugaugac

SEQ ID NO: 2122230 - RNA, 19 nt, Homo sapiens
  misc_RNA (1)...(19): siRNA sense strand
gagcaaaaguacuguaaau

SEQ ID NO: 2122231 - RNA, 19 nt, Homo sapiens
  misc_RNA (1)...(19): siRNA sense strand
caagaggaaagagauauuu

SEQ ID NO: 2122232 - RNA, 19 nt, Homo sapiens
  misc_RNA (1)...(19): siRNA sense strand
ggagaacugagaugccuuu

SEQ ID NO: 2122233 - RNA, 19 nt, Homo sapiens
  misc_RNA (1)...(19): siRNA sense strand
ggaaaucauuaggcgcauu

SEQ ID NO: 2122234 - RNA, 19 nt, Homo sapiens
  misc_RNA (1)...(19): siRNA sense strand
ccagagagccacccauuca

SEQ ID NO: 2122235 - RNA, 19 nt, Homo sapiens
  misc_RNA (1)...(19): siRNA sense strand
ggagaaggaaagagacuug

SEQ ID NO: 2122236 - RNA, 19 nt, Homo sapiens
  misc_RNA (1)...(19): siRNA sense strand
gaagucccauggaaagucu

SEQ ID NO: 2122237 - RNA, 19 nt, Homo sapiens
  misc_RNA (1)...(19): siRNA sense strand
gaaaagagcaaaaguacug

SEQ ID NO: 2122238 - RNA, 19 nt, Homo sapiens
  misc_RNA (1)...(19): siRNA sense strand
ggaagccucuuuugacuau

SEQ ID NO: 2122239 - RNA, 19 nt, Homo sapiens
  misc_RNA (1)...(19): siRNA sense strand
caucaccucugggaaagaa

SEQ ID NO: 2122240 - RNA, 19 nt, Homo sapiens
  misc_RNA (1)...(19): siRNA sense strand
aaugagagauccaacaaag

SEQ ID NO: 2122241 - RNA, 19 nt, Homo sapiens
  misc_RNA (1)...(19): siRNA sense strand
acacaaaggagauaacuuc

SEQ ID NO: 2122242 - RNA, 19 nt, Homo sapiens
  misc_RNA (1)...(19): siRNA sense strand
gcuaaaguuauuccgguua

SEQ ID NO: 2122243 - RNA, 19 nt, Homo sapiens
  misc_RNA (1)...(19): siRNA sense strand
gaaaaggcccagaggagua

SEQ ID NO: 2122244 - RNA, 19 nt, Homo sapiens
  misc_RNA (1)...(19): siRNA sense strand
ggagggcugcuucaucauu

SEQ ID NO: 2122245 - RNA, 19 nt, Homo sapiens
  misc_RNA (1)...(19): siRNA sense strand
gaaugagagauccaacaaa

SEQ ID NO: 2122246 - RNA, 19 nt, Homo sapiens
  misc_RNA (1)...(19): siRNA sense strand
caaagacacacuguucaaa

SEQ ID NO: 2122247 - RNA, 19 nt, Homo sapiens
  misc_RNA (1)...(19): siRNA sense strand
gcucacauuucguccacaa

SEQ ID NO: 2122248 - RNA, 19 nt, Homo sapiens
  misc_RNA (1)...(19): siRNA sense strand
gcacccacccugcaaagga

SEQ ID NO: 2122249 - RNA, 19 nt, Homo sapiens
  misc_RNA (1)...(19): siRNA sense strand
agaauaaggaggaccauga

SEQ ID NO: 2122250 - RNA, 19 nt, Homo sapiens
  misc_RNA (1)...(19): siRNA sense strand
gcuauaaagagguguguau

SEQ ID NO: 2122251 - RNA, 19 nt, Homo sapiens
  misc_RNA (1)...(19): siRNA sense strand
gggcaaacaagaacacaga

SEQ ID NO: 2122252 - RNA, 19 nt, Homo sapiens
  misc_RNA (1)...(19): siRNA sense strand
gagccugucccuccucaaa

SEQ ID NO: 2122253 - RNA, 19 nt, Homo sapiens
  misc_RNA (1)...(19): siRNA sense strand
gguguguauuccagagaua

SEQ ID NO: 2122254 - RNA, 19 nt, Homo sapiens
  misc_RNA (1)...(19): siRNA sense strand
gcacaccgcgcucaugaag

SEQ ID NO: 2122255 - RNA, 19 nt, Homo sapiens
  misc_RNA (1)...(19): siRNA sense strand
gacaccugcugacacauug

SEQ ID NO: 2122256 - RNA, 19 nt, Homo sapiens
  misc_RNA (1)...(19): siRNA sense strand
gaacugagaugccuuuucc

SEQ ID NO: 2122257 - RNA, 19 nt, Homo sapiens
  misc_RNA (1)...(19): siRNA sense strand
ggauucaacuccccacgua

SEQ ID NO: 2122258 - RNA, 19 nt, Homo sapiens
  misc_RNA (1)...(19): siRNA sense strand
ggaaccaggaagccucuuu

SEQ ID NO: 2122259 - RNA, 19 nt, Homo sapiens
  misc_RNA (1)...(19): siRNA sense strand
caccgaagccacagccaua

SEQ ID NO: 2122260 - RNA, 19 nt, Homo sapiens
  misc_RNA (1)...(19): siRNA sense strand
ggaaguagagauggaaauc

SEQ ID NO: 2122261 - RNA, 19 nt, Homo sapiens
  misc_RNA (1)...(19): siRNA sense strand
ugcaacaccucuagugaga

SEQ ID NO: 2122262 - RNA, 19 nt, Homo sapiens
  misc_RNA (1)...(19): siRNA sense strand
gaaguagagauggaaauca

SEQ ID NO: 2122263 - RNA, 19 nt, Homo sapiens
  misc_RNA (1)...(19): siRNA sense strand
cgacaaaugaagcugagaa

SEQ ID NO: 2122264 - RNA, 19 nt, Homo sapiens
  misc_RNA (1)...(19): siRNA sense strand
uagcaaagacacacuguuc

SEQ ID NO: 2122265 - RNA, 19 nt, Homo sapiens
  misc_RNA (1)...(19): siRNA sense strand
ccaggucgauggauaacuc

SEQ ID NO: 2122266 - RNA, 19 nt, Homo sapiens
  misc_RNA (1)...(19): siRNA sense strand
gaacacaaaggagauaacu

SEQ ID NO: 2122267 - RNA, 19 nt, Homo sapiens
  misc_RNA (1)...(19): siRNA sense strand
uccaacacaucaagcauug

SEQ ID NO: 2122268 - RNA, 19 nt, Homo sapiens
  misc_RNA (1)...(19): siRNA sense strand
acucaacucuuguccaaca

SEQ ID NO: 2122269 - RNA, 19 nt, Homo sapiens
  misc_RNA (1)...(19): siRNA sense strand
caaugaacucggcaagaaa

SEQ ID NO: 2122270 - RNA, 19 nt, Homo sapiens
  misc_RNA (1)...(19): siRNA sense strand
agggagggcugcuucauca

SEQ ID NO: 2122271 - RNA, 19 nt, Homo sapiens
  misc_RNA (1)...(19): siRNA sense strand
gaaaccacugcgacucuug

SEQ ID NO: 2122272 - RNA, 19 nt, Homo sapiens
  misc_RNA (1)...(19): siRNA sense strand
caguaugucucccaucagu

SEQ ID NO: 2122273 - RNA, 19 nt, Homo sapiens
  misc_RNA (1)...(19): siRNA sense strand
aaacagccacagaugacua

SEQ ID NO: 2122274 - RNA, 19 nt, Homo sapiens
  misc_RNA (1)...(19): siRNA sense strand
aaaauucgggcuaaaguua

SEQ ID NO: 2122275 - RNA, 19 nt, Homo sapiens
  misc_RNA (1)...(19): siRNA sense strand
gagaagcuacagaaaccuu

SEQ ID NO: 2122276 - RNA, 19 nt, Homo sapiens
  misc_RNA (1)...(19): siRNA sense strand
ggacagcagcagcaucaca

SEQ ID NO: 2122277 - RNA, 19 nt, Homo sapiens
  misc_RNA (1)...(19): siRNA sense strand
cagcugaaagagaguauga

SEQ ID NO: 2122278 - RNA, 19 nt, Homo sapiens
  misc_RNA (1)...(19): siRNA sense strand
aaaggaagucugccaagga

SEQ ID NO: 2122279 - RNA, 19 nt, Homo sapiens
  misc_RNA (1)...(19): siRNA sense strand
gacaagaggaaagagauau

SEQ ID NO: 2122280 - RNA, 19 nt, Homo sapiens
  misc_RNA (1)...(19): siRNA sense strand
acaaggaggagucaccaaa

SEQ ID NO: 2122281 - RNA, 19 nt, Homo sapiens
  misc_RNA (1)...(19): siRNA sense strand
ccaugacacucugacuuug

SEQ ID NO: 2122282 - RNA, 19 nt, Homo sapiens
  misc_RNA (1)...(19): siRNA sense strand
gaccaugacacucugacuu

SEQ ID NO: 2122283 - RNA, 19 nt, Homo sapiens
  misc_RNA (1)...(19): siRNA sense strand
uauaaagagguguguauuc

SEQ ID NO: 2122284 - RNA, 19 nt, Homo sapiens
  misc_RNA (1)...(19): siRNA sense strand
cgaaaccacugcgacucuu

SEQ ID NO: 2122285 - RNA, 19 nt, Homo sapiens
  misc_RNA (1)...(19): siRNA sense strand
caccaucaccucugggaaa

SEQ ID NO: 2122286 - RNA, 19 nt, Homo sapiens
  misc_RNA (1)...(19): siRNA sense strand
agccacagaugacuauuuc

SEQ ID NO: 2122287 - RNA, 19 nt, Homo sapiens
  misc_RNA (1)...(19): siRNA sense strand
ccaguuuccuccugaagag

SEQ ID NO: 2122288 - RNA, 19 nt, Homo sapiens
  misc_RNA (1)...(19): siRNA sense strand
aagaagacccggagcacaa

SEQ ID NO: 2122289 - RNA, 19 nt, Homo sapiens
  misc_RNA (1)...(19): siRNA sense strand
auaacuccuucccucauaa

SEQ ID NO: 2122290 - RNA, 19 nt, Homo sapiens
  misc_RNA (1)...(19): siRNA sense strand
guaugucucccaucaguca

SEQ ID NO: 2122291 - RNA, 19 nt, Homo sapiens
  misc_RNA (1)...(19): siRNA sense strand
aaguagagauggaaaucau

SEQ ID NO: 2122292 - RNA, 19 nt, Homo sapiens
  misc_RNA (1)...(19): siRNA sense strand
uaagacagaaacucucuca

SEQ ID NO: 2122293 - RNA, 19 nt, Homo sapiens
  misc_RNA (1)...(19): siRNA sense strand
gaaccucacccuucuugcu

SEQ ID NO: 2122294 - RNA, 19 nt, Homo sapiens
  misc_RNA (1)...(19): siRNA sense strand
ggaaagaaaugugaaacua

SEQ ID NO: 2122295 - RNA, 19 nt, Homo sapiens
  misc_RNA (1)...(19): siRNA sense strand
ccacagacauaaacagaaa

SEQ ID NO: 2122296 - RNA, 19 nt, Homo sapiens
  misc_RNA (1)...(19): siRNA sense strand
aaagucgucuucaguguua

SEQ ID NO: 2122297 - RNA, 19 nt, Homo sapiens
  misc_RNA (1)...(19): siRNA sense strand
gggaagaaauaccauguga

SEQ ID NO: 2122298 - RNA, 19 nt, Homo sapiens
  misc_RNA (1)...(19): siRNA sense strand
cagaacaacugauggacua

SEQ ID NO: 2122299 - RNA, 19 nt, Homo sapiens
  misc_RNA (1)...(19): siRNA sense strand
gaagggaaaugaaagaaac

SEQ ID NO: 2122300 - RNA, 19 nt, Homo sapiens
  misc_RNA (1)...(19): siRNA sense strand
gaaacacagccuucaagua

SEQ ID NO: 2122301 - RNA, 19 nt, Homo sapiens
  misc_RNA (1)...(19): siRNA sense strand
ggaauaaaaucgacagaaa

SEQ ID NO: 2122302 - RNA, 19 nt, Homo sapiens
  misc_RNA (1)...(19): siRNA sense strand
gaagaaauaccaugugaag

SEQ ID NO: 2122303 - RNA, 19 nt, Homo sapiens
  misc_RNA (1)...(19): siRNA sense strand
gaacaacaaaggauugaga

SEQ ID NO: 2122304 - RNA, 19 nt, Homo sapiens
  misc_RNA (1)...(19): siRNA sense strand
ucacagugcucucaacaga

SEQ ID NO: 2122305 - RNA, 19 nt, Homo sapiens
  misc_RNA (1)...(19): siRNA sense strand
gauccacucuuggccaaua

SEQ ID NO: 2122306 - RNA, 19 nt, Homo sapiens
  misc_RNA (1)...(19): siRNA sense strand
gagaagaggugagacagau

SEQ ID NO: 2122307 - RNA, 19 nt, Homo sapiens
  misc_RNA (1)...(19): siRNA sense strand
cuacacagauggagaggaa

SEQ ID NO: 2122308 - RNA, 19 nt, Homo sapiens
  misc_RNA (1)...(19): siRNA sense strand
cagaaagucuuacaugaca

SEQ ID NO: 2122309 - RNA, 19 nt, Homo sapiens
  misc_RNA (1)...(19): siRNA sense strand
gaacugggcauagcaaaug

SEQ ID NO: 2122310 - RNA, 19 nt, Homo sapiens
  misc_RNA (1)...(19): siRNA sense strand
ccaaaggaaagaauagaua

SEQ ID NO: 2122311 - RNA, 19 nt, Homo sapiens
  misc_RNA (1)...(19): siRNA sense strand
gccaagaaauauaugaaga

SEQ ID NO: 2122312 - RNA, 19 nt, Homo sapiens
  misc_RNA (1)...(19): siRNA sense strand
caauauagcccauuaagag

SEQ ID NO: 2122313 - RNA, 19 nt, Homo sapiens
  misc_RNA (1)...(19): siRNA sense strand
ggacuaucaucgcaauaug

SEQ ID NO: 2122314 - RNA, 19 nt, Homo sapiens
  misc_RNA (1)...(19): siRNA sense strand
caauggaucugaaucaucu

SEQ ID NO: 2122315 - RNA, 19 nt, Homo sapiens
  misc_RNA (1)...(19): siRNA sense strand
gaaggaaagaaaugugaaa

SEQ ID NO: 2122316 - RNA, 19 nt, Homo sapiens
  misc_RNA (1)...(19): siRNA sense strand
gaaggaacaacaaaggauu

SEQ ID NO: 2122317 - RNA, 19 nt, Homo sapiens
  misc_RNA (1)...(19): siRNA sense strand
uaaaccaucuacuaacguu

SEQ ID NO: 2122318 - RNA, 19 nt, Homo sapiens
  misc_RNA (1)...(19): siRNA sense strand
ccguacagcuugguuauaa

SEQ ID NO: 2122319 - RNA, 19 nt, Homo sapiens
  misc_RNA (1)...(19): siRNA sense strand
ggaucaguuuggagauaua

SEQ ID NO: 2122320 - RNA, 19 nt, Homo sapiens
  misc_RNA (1)...(19): siRNA sense strand
gaugauuacuacacagaug

SEQ ID NO: 2122321 - RNA, 19 nt, Homo sapiens
  misc_RNA (1)...(19): siRNA sense strand
ggaaugcaaacaacagaaa

SEQ ID NO: 2122322 - RNA, 19 nt, Homo sapiens
  misc_RNA (1)...(19): siRNA sense strand
gaaaugaaagaaacgugaa

SEQ ID NO: 2122323 - RNA, 19 nt, Homo sapiens
  misc_RNA (1)...(19): siRNA sense strand
uguaaguucuuucucauug

SEQ ID NO: 2122324 - RNA, 19 nt, Homo sapiens
  misc_RNA (1)...(19): siRNA sense strand
gagaaaacuuggcuuuauu

SEQ ID NO: 2122325 - RNA, 19 nt, Homo sapiens
  misc_RNA (1)...(19): siRNA sense strand
aaucaucucuugaaagcuu

SEQ ID NO: 2122326 - RNA, 19 nt, Homo sapiens
  misc_RNA (1)...(19): siRNA sense strand
augaagauguugaggauuu

SEQ ID NO: 2122327 - RNA, 19 nt, Homo sapiens
  misc_RNA (1)...(19): siRNA sense strand
gugaugaugggaagaaaua

SEQ ID NO: 2122328 - RNA, 19 nt, Homo sapiens
  misc_RNA (1)...(19): siRNA sense strand
caacaggacuuaaaauaca

SEQ ID NO: 2122329 - RNA, 19 nt, Homo sapiens
  misc_RNA (1)...(19): siRNA sense strand
ggaucugaaucaucucuug

SEQ ID NO: 2122330 - RNA, 19 nt, Homo sapiens
  misc_RNA (1)...(19): siRNA sense strand
aaacacagccuucaaguac

SEQ ID NO: 2122331 - RNA, 19 nt, Homo sapiens
  misc_RNA (1)...(19): siRNA sense strand
gacauuagcccucuucagu

SEQ ID NO: 2122332 - RNA, 19 nt, Homo sapiens
  misc_RNA (1)...(19): siRNA sense strand
aaacagaaagucuuacaug

SEQ ID NO: 2122333 - RNA, 19 nt, Homo sapiens
  misc_RNA (1)...(19): siRNA sense strand
cuuaucaacuccagacauu

SEQ ID NO: 2122334 - RNA, 19 nt, Homo sapiens
  misc_RNA (1)...(19): siRNA sense strand
aacagaaagucuuacauga

SEQ ID NO: 2122335 - RNA, 19 nt, Homo sapiens
  misc_RNA (1)...(19): siRNA sense strand
gagaaugauguuacacaaa

SEQ ID NO: 2122336 - RNA, 19 nt, Homo sapiens
  misc_RNA (1)...(19): siRNA sense strand
caacucaucaccauuguca

SEQ ID NO: 2122337 - RNA, 19 nt, Homo sapiens
  misc_RNA (1)...(19): siRNA sense strand
ugaaucaucucuugaaagc

SEQ ID NO: 2122338 - RNA, 19 nt, Homo sapiens
  misc_RNA (1)...(19): siRNA sense strand
gggcauagcaaaugaucaa

SEQ ID NO: 2122339 - RNA, 19 nt, Homo sapiens
  misc_RNA (1)...(19): siRNA sense strand
gaagaaggaaagaaaugug

SEQ ID NO: 2122340 - RNA, 19 nt, Homo sapiens
  misc_RNA (1)...(19): siRNA sense strand
gaggaaagcagugaugaug

SEQ ID NO: 2122341 - RNA, 19 nt, Homo sapiens
  misc_RNA (1)...(19): siRNA sense strand
gaaacauguaucugguaua

SEQ ID NO: 2122342 - RNA, 19 nt, Homo sapiens
  misc_RNA (1)...(19): siRNA sense strand
uggccaauauagcccauua

SEQ ID NO: 2122343 - RNA, 19 nt, Homo sapiens
  misc_RNA (1)...(19): siRNA sense strand
ugacagugacuuugaagaa

SEQ ID NO: 2122344 - RNA, 19 nt, Homo sapiens
  misc_RNA (1)...(19): siRNA sense strand
ugaagaugauuacuacaca

SEQ ID NO: 2122345 - RNA, 19 nt, Homo sapiens
  misc_RNA (1)...(19): siRNA sense strand
aacaaaggauugagagaga

SEQ ID NO: 2122346 - RNA, 19 nt, Homo sapiens
  misc_RNA (1)...(19): siRNA sense strand
agaaacauguaucugguau

SEQ ID NO: 2122347 - RNA, 19 nt, Homo sapiens
  misc_RNA (1)...(19): siRNA sense strand
ucaucuaagucaucuaaga

SEQ ID NO: 2122348 - RNA, 19 nt, Homo sapiens
  misc_RNA (1)...(19): siRNA sense strand
ccgcuaaaccaucuacuaa

SEQ ID NO: 2122349 - RNA, 19 nt, Homo sapiens
  misc_RNA (1)...(19): siRNA sense strand
gaaaugugaaacuaacuca

SEQ ID NO: 2122350 - RNA, 19 nt, Homo sapiens
  misc_RNA (1)...(19): siRNA sense strand
aaaugugagccaagaaaua

SEQ ID NO: 2122351 - RNA, 19 nt, Homo sapiens
  misc_RNA (1)...(19): siRNA sense strand
agaaugauguuacacaaac

SEQ ID NO: 2122352 - RNA, 19 nt, Homo sapiens
  misc_RNA (1)...(19): siRNA sense strand
aaaguacaauuccuagauc

SEQ ID NO: 2122353 - RNA, 19 nt, Homo sapiens
  misc_RNA (1)...(19): siRNA sense strand
ucaaagucgucuucagugu

SEQ ID NO: 2122354 - RNA, 19 nt, Homo sapiens
  misc_RNA (1)...(19): siRNA sense strand
ccugaugucuccucaaagu

SEQ ID NO: 2122355 - RNA, 19 nt, Homo sapiens
  misc_RNA (1)...(19): siRNA sense strand
gcuaaaccaucuacuaacg

SEQ ID NO: 2122356 - RNA, 19 nt, Homo sapiens
  misc_RNA (1)...(19): siRNA sense strand
ggaagaaauaccaugugaa

SEQ ID NO: 2122357 - RNA, 19 nt, Homo sapiens
  misc_RNA (1)...(19): siRNA sense strand
caaguccgcuaaaccaucu

SEQ ID NO: 2122358 - RNA, 19 nt, Homo sapiens
  misc_RNA (1)...(19): siRNA sense strand
agagaaugauguuacacaa

SEQ ID NO: 2122359 - RNA, 19 nt, Homo sapiens
  misc_RNA (1)...(19): siRNA sense strand
gaaguggaccauucuuucu

SEQ ID NO: 2122360 - RNA, 19 nt, Homo sapiens
  misc_RNA (1)...(19): siRNA sense strand
gaccacagacauaaacaga

SEQ ID NO: 2122361 - RNA, 19 nt, Homo sapiens
  misc_RNA (1)...(19): siRNA sense strand
caucuaagucaucuaagaa

SEQ ID NO: 2122362 - RNA, 19 nt, Homo sapiens
  misc_RNA (1)...(19): siRNA sense strand
aaaguuagcuccucuuccu

SEQ ID NO: 2122363 - RNA, 19 nt, Homo sapiens
  misc_RNA (1)...(19): siRNA sense strand
agaaauaccaugugaaguc

SEQ ID NO: 2122364 - RNA, 19 nt, Homo sapiens
  misc_RNA (1)...(19): siRNA sense strand
gaaaaugugagccaagaaa

SEQ ID NO: 2122365 - RNA, 19 nt, Homo sapiens
  misc_RNA (1)...(19): siRNA sense strand
ccaaauagaauucccaaaa

SEQ ID NO: 2122366 - RNA, 19 nt, Homo sapiens
  misc_RNA (1)...(19): siRNA sense strand
caaaggauugagagagaaa

SEQ ID NO: 2122367 - RNA, 19 nt, Homo sapiens
  misc_RNA (1)...(19): siRNA sense strand
agucuuacaugacacaaug

SEQ ID NO: 2122368 - RNA, 19 nt, Homo sapiens
  misc_RNA (1)...(19): siRNA sense strand
caaagucgucuucaguguu

SEQ ID NO: 2122369 - RNA, 19 nt, Homo sapiens
  misc_RNA (1)...(19): siRNA sense strand
gacagugacuuugaagaag

SEQ ID NO: 2122370 - RNA, 19 nt, Homo sapiens
  misc_RNA (1)...(19): siRNA sense strand
gagccaagaaauauaugaa

SEQ ID NO: 2122371 - RNA, 19 nt, Homo sapiens
  misc_RNA (1)...(19): siRNA sense strand
ccugaggagucugaagaua

SEQ ID NO: 2122372 - RNA, 19 nt, Homo sapiens
  misc_RNA (1)...(19): siRNA sense strand
ggagaggaaagcagugaug

SEQ ID NO: 2122373 - RNA, 19 nt, Homo sapiens
  misc_RNA (1)...(19): siRNA sense strand
gaucugaaucaucucuuga

SEQ ID NO: 2122374 - RNA, 19 nt, Homo sapiens
  misc_RNA (1)...(19): siRNA sense strand
gaaagucuuacaugacaca

SEQ ID NO: 2122375 - RNA, 19 nt, Homo sapiens
  misc_RNA (1)...(19): siRNA sense strand
aguguuagacuccaguuua

SEQ ID NO: 2122376 - RNA, 19 nt, Homo sapiens
  misc_RNA (1)...(19): siRNA sense strand
gguacagauuguuuagaug

SEQ ID NO: 2122377 - RNA, 19 nt, Homo sapiens
  misc_RNA (1)...(19): siRNA sense strand
guucagguacagauuguuu

SEQ ID NO: 2122378 - RNA, 19 nt, Homo sapiens
  misc_RNA (1)...(19): siRNA sense strand
gcaaaguuagcuccucuuc

SEQ ID NO: 2122379 - RNA, 19 nt, Homo sapiens
  misc_RNA (1)...(19): siRNA sense strand
uauauuagaaggugaagug

SEQ ID NO: 2122380 - RNA, 19 nt, Homo sapiens
  misc_RNA (1)...(19): siRNA sense strand
cgaguggucucaguuguag

SEQ ID NO: 2122381 - RNA, 19 nt, Homo sapiens
  misc_RNA (1)...(19): siRNA sense strand
gagaagggaaaugaaagaa

SEQ ID NO: 2122382 - RNA, 19 nt, Homo sapiens
  misc_RNA (1)...(19): siRNA sense strand
uaucucaacucaucaccau

SEQ ID NO: 2122383 - RNA, 19 nt, Homo sapiens
  misc_RNA (1)...(19): siRNA sense strand
ggaccauucuuucuuugac

SEQ ID NO: 2122384 - RNA, 19 nt, Homo sapiens
  misc_RNA (1)...(19): siRNA sense strand
gcaaaaugaugacccaaag

SEQ ID NO: 2122385 - RNA, 19 nt, Homo sapiens
  misc_RNA (1)...(19): siRNA sense strand
gacauaaacagaaagucuu

SEQ ID NO: 2122386 - RNA, 19 nt, Homo sapiens
  misc_RNA (1)...(19): siRNA sense strand
aaaagaaggugaagaugau

SEQ ID NO: 2122387 - RNA, 19 nt, Homo sapiens
  misc_RNA (1)...(19): siRNA sense strand
ccaauauagcccauuaaga

SEQ ID NO: 2122388 - RNA, 19 nt, Homo sapiens
  misc_RNA (1)...(19): siRNA sense strand
acagugcucucaacagaca

SEQ ID NO: 2122389 - RNA, 19 nt, Homo sapiens
  misc_RNA (1)...(19): siRNA sense strand
caagagaagaggugagaca

SEQ ID NO: 2122390 - RNA, 19 nt, Homo sapiens
  misc_RNA (1)...(19): siRNA sense strand
cgucaucuaagucaucuaa

SEQ ID NO: 2122391 - RNA, 19 nt, Homo sapiens
  misc_RNA (1)...(19): siRNA sense strand
gcagugaugaugggaagaa

SEQ ID NO: 2122392 - RNA, 19 nt, Homo sapiens
  misc_RNA (1)...(19): siRNA sense strand
gagaggaaagcagugauga

SEQ ID NO: 2122393 - RNA, 19 nt, Homo sapiens
  misc_RNA (1)...(19): siRNA sense strand
agacagaaggaacaacaaa

SEQ ID NO: 2122394 - RNA, 19 nt, Homo sapiens
  misc_RNA (1)...(19): siRNA sense strand
gaaaguggcuggaaacaga

SEQ ID NO: 2122395 - RNA, 19 nt, Homo sapiens
  misc_RNA (1)...(19): siRNA sense strand
gaucacgucuggacaaaua

SEQ ID NO: 2122396 - RNA, 19 nt, Homo sapiens
  misc_RNA (1)...(19): siRNA sense strand
uggaagagcugauuagaaa

SEQ ID NO: 2122397 - RNA, 19 nt, Homo sapiens
  misc_RNA (1)...(19): siRNA sense strand
ggacaaauaugguagaacu

SEQ ID NO: 2122398 - RNA, 19 nt, Homo sapiens
  misc_RNA (1)...(19): siRNA sense strand
gaagaucccuccauuugag

SEQ ID NO: 2122399 - RNA, 19 nt, Homo sapiens
  misc_RNA (1)...(19): siRNA sense strand
ggaauuugcugcucacaca

SEQ ID NO: 2122400 - RNA, 19 nt, Homo sapiens
  misc_RNA (1)...(19): siRNA sense strand
caacaucuauagugacgaa

SEQ ID NO: 2122401 - RNA, 19 nt, Homo sapiens
  misc_RNA (1)...(19): siRNA sense strand
gaugccgccuuguuucuua

SEQ ID NO: 2122402 - RNA, 19 nt, Homo sapiens
  misc_RNA (1)...(19): siRNA sense strand
ggacacagcagcaacauca

SEQ ID NO: 2122403 - RNA, 19 nt, Homo sapiens
  misc_RNA (1)...(19): siRNA sense strand
gaaagauugaggaguauuu

SEQ ID NO: 2122404 - RNA, 19 nt, Homo sapiens
  misc_RNA (1)...(19): siRNA sense strand
cagcagaaguguuugauca

SEQ ID NO: 2122405 - RNA, 19 nt, Homo sapiens
  misc_RNA (1)...(19): siRNA sense strand
acaagaagaucccuccauu

SEQ ID NO: 2122406 - RNA, 19 nt, Homo sapiens
  misc_RNA (1)...(19): siRNA sense strand
acaaaggcguccagcauuu

SEQ ID NO: 2122407 - RNA, 19 nt, Homo sapiens
  misc_RNA (1)...(19): siRNA sense strand
aagaagagguuuaccaugu

SEQ ID NO: 2122408 - RNA, 19 nt, Homo sapiens
  misc_RNA (1)...(19): siRNA sense strand
aagaggagauuccaaguga

SEQ ID NO: 2122409 - RNA, 19 nt, Homo sapiens
  misc_RNA (1)...(19): siRNA sense strand
guucaucccuggaagaaga

SEQ ID NO: 2122410 - RNA, 19 nt, Homo sapiens
  misc_RNA (1)...(19): siRNA sense strand
gaaaagaggaugaugauga

SEQ ID NO: 2122411 - RNA, 19 nt, Homo sapiens
  misc_RNA (1)...(19): siRNA sense strand
gaacgcagaaugagaagga

SEQ ID NO: 2122412 - RNA, 19 nt, Homo sapiens
  misc_RNA (1)...(19): siRNA sense strand
aaacagagagaaacauuga

SEQ ID NO: 2122413 - RNA, 19 nt, Homo sapiens
  misc_RNA (1)...(19): siRNA sense strand
cucagacacucauggauua

SEQ ID NO: 2122414 - RNA, 19 nt, Homo sapiens
  misc_RNA (1)...(19): siRNA sense strand
gaggacaacuuugacuuuc

SEQ ID NO: 2122415 - RNA, 19 nt, Homo sapiens
  misc_RNA (1)...(19): siRNA sense strand
gaaacuacacucacagaag

SEQ ID NO: 2122416 - RNA, 19 nt, Homo sapiens
  misc_RNA (1)...(19): siRNA sense strand
gcggagaccugccuauuuu

SEQ ID NO: 2122417 - RNA, 19 nt, Homo sapiens
  misc_RNA (1)...(19): siRNA sense strand
caagaagaucccuccauuu

SEQ ID NO: 2122418 - RNA, 19 nt, Homo sapiens
  misc_RNA (1)...(19): siRNA sense strand
aagaagaucccuccauuug

SEQ ID NO: 2122419 - RNA, 19 nt, Homo sapiens
  misc_RNA (1)...(19): siRNA sense strand
auggaaagauugaggagua

SEQ ID NO: 2122420 - RNA, 19 nt, Homo sapiens
  misc_RNA (1)...(19): siRNA sense strand
gauuaucaccuucugcaaa

SEQ ID NO: 2122421 - RNA, 19 nt, Homo sapiens
  misc_RNA (1)...(19): siRNA sense strand
ugaugaaugucuugaacaa

SEQ ID NO: 2122422 - RNA, 19 nt, Homo sapiens
  misc_RNA (1)...(19): siRNA sense strand
gaugaugaaugucuugaac

SEQ ID NO: 2122423 - RNA, 19 nt, Homo sapiens
  misc_RNA (1)...(19): siRNA sense strand
gacaaaggcguccagcauu

SEQ ID NO: 2122424 - RNA, 19 nt, Homo sapiens
  misc_RNA (1)...(19): siRNA sense strand
acagaacgaucgcgucuuc

SEQ ID NO: 2122425 - RNA, 19 nt, Homo sapiens
  misc_RNA (1)...(19): siRNA sense strand
ggaagaagagguuuaccau

SEQ ID NO: 2122426 - RNA, 19 nt, Homo sapiens
  misc_RNA (1)...(19): siRNA sense strand
gcagcaacaucagagaguu

SEQ ID NO: 2122427 - RNA, 19 nt, Homo sapiens
  misc_RNA (1)...(19): siRNA sense strand
ucagagaguugugcauuuc

SEQ ID NO: 2122428 - RNA, 19 nt, Homo sapiens
  misc_RNA (1)...(19): siRNA sense strand
uuugacagguucacaauau

SEQ ID NO: 2122429 - RNA, 19 nt, Homo sapiens
  misc_RNA (1)...(19): siRNA sense strand
gagagaaacauugaaagug

SEQ ID NO: 2122430 - RNA, 19 nt, Homo sapiens
  misc_RNA (1)...(19): siRNA sense strand
caucuauagugacgaaguu

SEQ ID NO: 2122431 - RNA, 19 nt, Homo sapiens
  misc_RNA (1)...(19): siRNA sense strand
ggaaacuacacucacagaa

SEQ ID NO: 2122432 - RNA, 19 nt, Homo sapiens
  misc_RNA (1)...(19): siRNA sense strand
gguaggaaauggcgcaaac

SEQ ID NO: 2122433 - RNA, 19 nt, Homo sapiens
  misc_RNA (1)...(19): siRNA sense strand
caucacuucuccagcaguu

SEQ ID NO: 2122434 - RNA, 19 nt, Homo sapiens
  misc_RNA (1)...(19): siRNA sense strand
ggaugaugaugaaugucuu

SEQ ID NO: 2122435 - RNA, 19 nt, Homo sapiens
  misc_RNA (1)...(19): siRNA sense strand
cauugaaaguggcuggaaa

SEQ ID NO: 2122436 - RNA, 19 nt, Homo sapiens
  misc_RNA (1)...(19): siRNA sense strand
agaggaugaugaugaaugu

SEQ ID NO: 2122437 - RNA, 19 nt, Homo sapiens
  misc_RNA (1)...(19): siRNA sense strand
acucauggauuaucaccuu

SEQ ID NO: 2122438 - RNA, 19 nt, Homo sapiens
  misc_RNA (1)...(19): siRNA sense strand
ucaugacaauucaagcaaa

SEQ ID NO: 2122439 - RNA, 19 nt, Homo sapiens
  misc_RNA (1)...(19): siRNA sense strand
acagagagaaacauugaaa

SEQ ID NO: 2122440 - RNA, 19 nt, Homo sapiens
  misc_RNA (1)...(19): siRNA sense strand
agacacucauggauuauca

SEQ ID NO: 2122441 - RNA, 19 nt, Homo sapiens
  misc_RNA (1)...(19): siRNA sense strand
agaagagguuuaccaugug

SEQ ID NO: 2122442 - RNA, 19 nt, Homo sapiens
  misc_RNA (1)...(19): siRNA sense strand
acagaacgcagaaugagaa

SEQ ID NO: 2122443 - RNA, 19 nt, Homo sapiens
  misc_RNA (1)...(19): siRNA sense strand
aaaagaggaugaugaugaa

SEQ ID NO: 2122444 - RNA, 19 nt, Homo sapiens
  misc_RNA (1)...(19): siRNA sense strand
guauuucgcuuuugacaga

SEQ ID NO: 2122445 - RNA, 19 nt, Homo sapiens
  misc_RNA (1)...(19): siRNA sense strand
gauccugcccacugacaaa

SEQ ID NO: 2122446 - RNA, 19 nt, Homo sapiens
  misc_RNA (1)...(19): siRNA sense strand
ccucagacacucauggauu

SEQ ID NO: 2122447 - RNA, 19 nt, Homo sapiens
  misc_RNA (1)...(19): siRNA sense strand
ugacaaaggcguccagcau

SEQ ID NO: 2122448 - RNA, 19 nt, Homo sapiens
  misc_RNA (1)...(19): siRNA sense strand
gugcauuucuggcucucaa

SEQ ID NO: 2122449 - RNA, 19 nt, Homo sapiens
  misc_RNA (1)...(19): siRNA sense strand
caagaggagauuccaagug

SEQ ID NO: 2122450 - RNA, 19 nt, Homo sapiens
  misc_RNA (1)...(19): siRNA sense strand
caauaugugccuaaaucuu

SEQ ID NO: 2122451 - RNA, 19 nt, Homo sapiens
  misc_RNA (1)...(19): siRNA sense strand
caucagagaguugugcauu

SEQ ID NO: 2122452 - RNA, 19 nt, Homo sapiens
  misc_RNA (1)...(19): siRNA sense strand
gaggagauuccaagugaca

SEQ ID NO: 2122453 - RNA, 19 nt, Homo sapiens
  misc_RNA (1)...(19): siRNA sense strand
agaggacaacuuugacuuu

SEQ ID NO: 2122454 - RNA, 19 nt, Homo sapiens
  misc_RNA (1)...(19): siRNA sense strand
gaucgcgucuucgagaaag

SEQ ID NO: 2122455 - RNA, 19 nt, Homo sapiens
  misc_RNA (1)...(19): siRNA sense strand
agaggaaggcaucuacaaa

SEQ ID NO: 2122456 - RNA, 19 nt, Homo sapiens
  misc_RNA (1)...(19): siRNA sense strand
gcucagcccgguaggaaau

SEQ ID NO: 2122457 - RNA, 19 nt, Homo sapiens
  misc_RNA (1)...(19): siRNA sense strand
ggaaagauugaggaguauu

SEQ ID NO: 2122458 - RNA, 19 nt, Homo sapiens
  misc_RNA (1)...(19): siRNA sense strand
agaaaacacugggaaacua

SEQ ID NO: 2122459 - RNA, 19 nt, Homo sapiens
  misc_RNA (1)...(19): siRNA sense strand
gggaaacuacacucacaga

SEQ ID NO: 2122460 - RNA, 19 nt, Homo sapiens
  misc_RNA (1)...(19): siRNA sense strand
agaagaucccuccauuuga

SEQ ID NO: 2122461 - RNA, 19 nt, Homo sapiens
  misc_RNA (1)...(19): siRNA sense strand
gaggaaggcaucuacaaaa

SEQ ID NO: 2122462 - RNA, 19 nt, Homo sapiens
  misc_RNA (1)...(19): siRNA sense strand
ugccuucucuugcuucaga

SEQ ID NO: 2122463 - RNA, 19 nt, Homo sapiens
  misc_RNA (1)...(19): siRNA sense strand
gacagaacgcagaaugaga

SEQ ID NO: 2122464 - RNA, 19 nt, Homo sapiens
  misc_RNA (1)...(19): siRNA sense strand
gaugaaugucuugaacaaa

SEQ ID NO: 2122465 - RNA, 19 nt, Homo sapiens
  misc_RNA (1)...(19): siRNA sense strand
uuucagaggacaacuuuga

SEQ ID NO: 2122466 - RNA, 19 nt, Homo sapiens
  misc_RNA (1)...(19): siRNA sense strand
cguggcagcagaaguguuu

SEQ ID NO: 2122467 - RNA, 19 nt, Homo sapiens
  misc_RNA (1)...(19): siRNA sense strand
gcugacagaacgcagaaug

SEQ ID NO: 2122468 - RNA, 19 nt, Homo sapiens
  misc_RNA (1)...(19): siRNA sense strand
agaaugagaaggaggacaa

SEQ ID NO: 2122469 - RNA, 19 nt, Homo sapiens
  misc_RNA (1)...(19): siRNA sense strand
gaaugagaaggaggacaaa

SEQ ID NO: 2122470 - RNA, 19 nt, Homo sapiens
  misc_RNA (1)...(19): siRNA sense strand
aagaacagccacccuggaa

SEQ ID NO: 2122471 - RNA, 19 nt, Homo sapiens
  misc_RNA (1)...(19): siRNA sense strand
cauuugagaguauuaggaa

SEQ ID NO: 2122472 - RNA, 19 nt, Homo sapiens
  misc_RNA (1)...(19): siRNA sense strand
agagagaaacauugaaagu

SEQ ID NO: 2122473 - RNA, 19 nt, Homo sapiens
  misc_RNA (1)...(19): siRNA sense strand
cagaggaaggcaucuacaa

SEQ ID NO: 2122474 - RNA, 19 nt, Homo sapiens
  misc_RNA (1)...(19): siRNA sense strand
gaugaugaugaaugucuug

SEQ ID NO: 2122475 - RNA, 19 nt, Homo sapiens
  misc_RNA (1)...(19): siRNA sense strand
ugacagguucacaauaugu

SEQ ID NO: 2122476 - RNA, 19 nt, Homo sapiens
  misc_RNA (1)...(19): siRNA sense strand
auggacaggucaaaguauu

SEQ ID NO: 2122477 - RNA, 19 nt, Homo sapiens
  misc_RNA (1)...(19): siRNA sense strand
acauggacaggucaaagua

SEQ ID NO: 2122478 - RNA, 19 nt, Homo sapiens
  misc_RNA (1)...(19): siRNA sense strand
cucccaacaucuauaguga

SEQ ID NO: 2122479 - RNA, 19 nt, Homo sapiens
  misc_RNA (1)...(19): siRNA sense strand
ucagauucacagagacuaa

SEQ ID NO: 2122480 - RNA, 19 nt, Homo sapiens
  misc_RNA (1)...(19): siRNA sense strand
caaaggcguccagcauuuc

SEQ ID NO: 2122481 - RNA, 19 nt, Homo sapiens
  misc_RNA (1)...(19): siRNA sense strand
agagucugcuggccgaaug

SEQ ID NO: 2122482 - RNA, 19 nt, Homo sapiens
  misc_RNA (1)...(19): siRNA sense strand
ccuggaugccgccuuguuu

SEQ ID NO: 2122483 - RNA, 19 nt, Homo sapiens
  misc_RNA (1)...(19): siRNA sense strand
ggacaggucaaaguauuuu

SEQ ID NO: 2122484 - RNA, 19 nt, Homo sapiens
  misc_RNA (1)...(19): siRNA sense strand
uggaaagauugaggaguau

SEQ ID NO: 2122485 - RNA, 19 nt, Homo sapiens
  misc_RNA (1)...(19): siRNA sense strand
ggagauuccaagugacauc

SEQ ID NO: 2122486 - RNA, 19 nt, Homo sapiens
  misc_RNA (1)...(19): siRNA sense strand
cagcggagaccugccuauu

SEQ ID NO: 2122487 - RNA, 19 nt, Homo sapiens
  misc_RNA (1)...(19): siRNA sense strand
cgucuggacaaauauggua

SEQ ID NO: 2122488 - RNA, 19 nt, Homo sapiens
  misc_RNA (1)...(19): siRNA sense strand
cagcucagcccgguaggaa

SEQ ID NO: 2122489 - RNA, 19 nt, Homo sapiens
  misc_RNA (1)...(19): siRNA sense strand
gacaagaagaucccuccau

SEQ ID NO: 2122490 - RNA, 19 nt, Homo sapiens
  misc_RNA (1)...(19): siRNA sense strand
cagaggacaacuuugacuu

SEQ ID NO: 2122491 - RNA, 19 nt, Homo sapiens
  misc_RNA (1)...(19): siRNA sense strand
caugacaauucaagcaaaa

SEQ ID NO: 2122492 - RNA, 19 nt, Homo sapiens
  misc_RNA (1)...(19): siRNA sense strand
acacagcagcaacaucaga

SEQ ID NO: 2122493 - RNA, 19 nt, Homo sapiens
  misc_RNA (1)...(19): siRNA sense strand
ugagaaggaggacaaagca

SEQ ID NO: 2122494 - RNA, 19 nt, Homo sapiens
  misc_RNA (1)...(19): siRNA sense strand
gagaugauauuucgaagaa

SEQ ID NO: 2122495 - RNA, 19 nt, Homo sapiens
  misc_RNA (1)...(19): siRNA sense strand
gagaagagcuuggucuaga

SEQ ID NO: 2122496 - RNA, 19 nt, Homo sapiens
  misc_RNA (1)...(19): siRNA sense strand
ugaauuggaugacguguuu

SEQ ID NO: 2122497 - RNA, 19 nt, Homo sapiens
  misc_RNA (1)...(19): siRNA sense strand
gagaagaaguugacaccuu

SEQ ID NO: 2122498 - RNA, 19 nt, Homo sapiens
  misc_RNA (1)...(19): siRNA sense strand
gaggagaaaugcagaugaa

SEQ ID NO: 2122499 - RNA, 19 nt, Homo sapiens
  misc_RNA (1)...(19): siRNA sense strand
caaagcaaauugacaaauc

SEQ ID NO: 2122500 - RNA, 19 nt, Homo sapiens
  misc_RNA (1)...(19): siRNA sense strand
gcacagagauccgagauac

SEQ ID NO: 2122501 - RNA, 19 nt, Homo sapiens
  misc_RNA (1)...(19): siRNA sense strand
gaauauuggugcucaaagu

SEQ ID NO: 2122502 - RNA, 19 nt, Homo sapiens
  misc_RNA (1)...(19): siRNA sense strand
ucugguaccuuauguuuaa

SEQ ID NO: 2122503 - RNA, 19 nt, Homo sapiens
  misc_RNA (1)...(19): siRNA sense strand
gauagaauccaaccagaaa

SEQ ID NO: 2122504 - RNA, 19 nt, Homo sapiens
  misc_RNA (1)...(19): siRNA sense strand
gaaaugaacgccaaugaag

SEQ ID NO: 2122505 - RNA, 19 nt, Homo sapiens
  misc_RNA (1)...(19): siRNA sense strand
ggaacaggcuaagucauga

SEQ ID NO: 2122506 - RNA, 19 nt, Homo sapiens
  misc_RNA (1)...(19): siRNA sense strand
gauaucaucuguggaaauc

SEQ ID NO: 2122507 - RNA, 19 nt, Homo sapiens
  misc_RNA (1)...(19): siRNA sense strand
gcuaagucaugaagauauu

SEQ ID NO: 2122508 - RNA, 19 nt, Homo sapiens
  misc_RNA (1)...(19): siRNA sense strand
uagaagaccugaagaaacu

SEQ ID NO: 2122509 - RNA, 19 nt, Homo sapiens
  misc_RNA (1)...(19): siRNA sense strand
guaaugaugauuccgagua

SEQ ID NO: 2122510 - RNA, 19 nt, Homo sapiens
  misc_RNA (1)...(19): siRNA sense strand
cuugaucucugguaccuua

SEQ ID NO: 2122511 - RNA, 19 nt, Homo sapiens
  misc_RNA (1)...(19): siRNA sense strand
uagaaugagugagaugaua

SEQ ID NO: 2122512 - RNA, 19 nt, Homo sapiens
  misc_RNA (1)...(19): siRNA sense strand
guugacaccuucauguuug

SEQ ID NO: 2122513 - RNA, 19 nt, Homo sapiens
  misc_RNA (1)...(19): siRNA sense strand
aaaugcagaugaacgcuaa

SEQ ID NO: 2122514 - RNA, 19 nt, Homo sapiens
  misc_RNA (1)...(19): siRNA sense strand
ugacaaauccucuauguac

SEQ ID NO: 2122515 - RNA, 19 nt, Homo sapiens
  misc_RNA (1)...(19): siRNA sense strand
uaacacccacuuuccauuu

SEQ ID NO: 2122516 - RNA, 19 nt, Homo sapiens
  misc_RNA (1)...(19): siRNA sense strand
gaagggaacaggcuaaguc

SEQ ID NO: 2122517 - RNA, 19 nt, Homo sapiens
  misc_RNA (1)...(19): siRNA sense strand
uacaaguacuggaaacaaa

SEQ ID NO: 2122518 - RNA, 19 nt, Homo sapiens
  misc_RNA (1)...(19): siRNA sense strand
aaaaguggaucaugaauug

SEQ ID NO: 2122519 - RNA, 19 nt, Homo sapiens
  misc_RNA (1)...(19): siRNA sense strand
gaacgggccaaugaaauga

SEQ ID NO: 2122520 - RNA, 19 nt, Homo sapiens
  misc_RNA (1)...(19): siRNA sense strand
gaagaauauuggugcucaa

SEQ ID NO: 2122521 - RNA, 19 nt, Homo sapiens
  misc_RNA (1)...(19): siRNA sense strand
gaaguggaccguacaagag

SEQ ID NO: 2122522 - RNA, 19 nt, Homo sapiens
  misc_RNA (1)...(19): siRNA sense strand
ucaugaagauauucgagaa

SEQ ID NO: 2122523 - RNA, 19 nt, Homo sapiens
  misc_RNA (1)...(19): siRNA sense strand
gagaagaggaaacagcuau

SEQ ID NO: 2122524 - RNA, 19 nt, Homo sapiens
  misc_RNA (1)...(19): siRNA sense strand
gacaaauccucuauguaca

SEQ ID NO: 2122525 - RNA, 19 nt, Homo sapiens
  misc_RNA (1)...(19): siRNA sense strand
uggaauguguuauuaagga

SEQ ID NO: 2122526 - RNA, 19 nt, Homo sapiens
  misc_RNA (1)...(19): siRNA sense strand
uuaccauucuggaagauuu

SEQ ID NO: 2122527 - RNA, 19 nt, Homo sapiens
  misc_RNA (1)...(19): siRNA sense strand
gaacaagcaaauauauugg

SEQ ID NO: 2122528 - RNA, 19 nt, Homo sapiens
  misc_RNA (1)...(19): siRNA sense strand
gggaacaggcuaagucaug

SEQ ID NO: 2122529 - RNA, 19 nt, Homo sapiens
  misc_RNA (1)...(19): siRNA sense strand
uaaugaugauuccgaguau

SEQ ID NO: 2122530 - RNA, 19 nt, Homo sapiens
  misc_RNA (1)...(19): siRNA sense strand
guauguccgugcaguuuau

SEQ ID NO: 2122531 - RNA, 19 nt, Homo sapiens
  misc_RNA (1)...(19): siRNA sense strand
ugagugagaugauauuucg

SEQ ID NO: 2122532 - RNA, 19 nt, Homo sapiens
  misc_RNA (1)...(19): siRNA sense strand
gaaugagugagaugauauu

SEQ ID NO: 2122533 - RNA, 19 nt, Homo sapiens
  misc_RNA (1)...(19): siRNA sense strand
aaacuucgguaucuggaau

SEQ ID NO: 2122534 - RNA, 19 nt, Homo sapiens
  misc_RNA (1)...(19): siRNA sense strand
uagugaagauugugaagug

SEQ ID NO: 2122535 - RNA, 19 nt, Homo sapiens
  misc_RNA (1)...(19): siRNA sense strand
gccacgcgcugcugaugaa

SEQ ID NO: 2122536 - RNA, 19 nt, Homo sapiens
  misc_RNA (1)...(19): siRNA sense strand
agaagagcuuggucuagaa

SEQ ID NO: 2122537 - RNA, 19 nt, Homo sapiens
  misc_RNA (1)...(19): siRNA sense strand
aaaguuugcugugauggaa

SEQ ID NO: 2122538 - RNA, 19 nt, Homo sapiens
  misc_RNA (1)...(19): siRNA sense strand
caucauucccuaugcauug

SEQ ID NO: 2122539 - RNA, 19 nt, Homo sapiens
  misc_RNA (1)...(19): siRNA sense strand
ugaagauauucgagaagaa

SEQ ID NO: 2122540 - RNA, 19 nt, Homo sapiens
  misc_RNA (1)...(19): siRNA sense strand
gcagggccuuucuugacuu

SEQ ID NO: 2122541 - RNA, 19 nt, Homo sapiens
  misc_RNA (1)...(19): siRNA sense strand
ugaaaugaacgccaaugaa

SEQ ID NO: 2122542 - RNA, 19 nt, Homo sapiens
  misc_RNA (1)...(19): siRNA sense strand
gaucucugguaccuuaugu

SEQ ID NO: 2122543 - RNA, 19 nt, Homo sapiens
  misc_RNA (1)...(19): siRNA sense strand
caucacucuuugugccuua

SEQ ID NO: 2122544 - RNA, 19 nt, Homo sapiens
  misc_RNA (1)...(19): siRNA sense strand
caaauugacaaauccucua

SEQ ID NO: 2122545 - RNA, 19 nt, Homo sapiens
  misc_RNA (1)...(19): siRNA sense strand
gaagauauucgagaagaag

SEQ ID NO: 2122546 - RNA, 19 nt, Homo sapiens
  misc_RNA (1)...(19): siRNA sense strand
gaacaggcuaagucaugaa

SEQ ID NO: 2122547 - RNA, 19 nt, Homo sapiens
  misc_RNA (1)...(19): siRNA sense strand
gcagaucauugaguacaca

SEQ ID NO: 2122548 - RNA, 19 nt, Homo sapiens
  misc_RNA (1)...(19): siRNA sense strand
gauguuaacacccacuuuc

SEQ ID NO: 2122549 - RNA, 19 nt, Homo sapiens
  misc_RNA (1)...(19): siRNA sense strand
guaauggcaucuggaucaa

SEQ ID NO: 2122550 - RNA, 19 nt, Homo sapiens
  misc_RNA (1)...(19): siRNA sense strand
ugaaguggcagguuacaga

SEQ ID NO: 2122551 - RNA, 19 nt, Homo sapiens
  misc_RNA (1)...(19): siRNA sense strand
uuauuugcccguaguguua

SEQ ID NO: 2122552 - RNA, 19 nt, Homo sapiens
  misc_RNA (1)...(19): siRNA sense strand
cuucagauccuacauacuu

SEQ ID NO: 2122553 - RNA, 19 nt, Homo sapiens
  misc_RNA (1)...(19): siRNA sense strand
gaguauguccgugcaguuu

SEQ ID NO: 2122554 - RNA, 19 nt, Homo sapiens
  misc_RNA (1)...(19): siRNA sense strand
aaagaaggaugggaacaca

SEQ ID NO: 2122555 - RNA, 19 nt, Homo sapiens
  misc_RNA (1)...(19): siRNA sense strand
gcacugaagccgucaucau

SEQ ID NO: 2122556 - RNA, 19 nt, Homo sapiens
  misc_RNA (1)...(19): siRNA sense strand
ggaacagggaguagaagug

SEQ ID NO: 2122557 - RNA, 19 nt, Homo sapiens
  misc_RNA (1)...(19): siRNA sense strand
gcugaacgggccaaugaaa

SEQ ID NO: 2122558 - RNA, 19 nt, Homo sapiens
  misc_RNA (1)...(19): siRNA sense strand
gaacaggaacagggaguag

SEQ ID NO: 2122559 - RNA, 19 nt, Homo sapiens
  misc_RNA (1)...(19): siRNA sense strand
guagaagaccugaagaaac

SEQ ID NO: 2122560 - RNA, 19 nt, Homo sapiens
  misc_RNA (1)...(19): siRNA sense strand
uaacccagaaguccagaaa

SEQ ID NO: 2122561 - RNA, 19 nt, Homo sapiens
  misc_RNA (1)...(19): siRNA sense strand
aauccucuauguacaaguu

SEQ ID NO: 2122562 - RNA, 19 nt, Homo sapiens
  misc_RNA (1)...(19): siRNA sense strand
caugguggcccuuuauaau

SEQ ID NO: 2122563 - RNA, 19 nt, Homo sapiens
  misc_RNA (1)...(19): siRNA sense strand
gcagguuacagaguucuaa

SEQ ID NO: 2122564 - RNA, 19 nt, Homo sapiens
  misc_RNA (1)...(19): siRNA sense strand
auugugaaguggcagguua

SEQ ID NO: 2122565 - RNA, 19 nt, Homo sapiens
  misc_RNA (1)...(19): siRNA sense strand
caggcuaagucaugaagau

SEQ ID NO: 2122566 - RNA, 19 nt, Homo sapiens
  misc_RNA (1)...(19): siRNA sense strand
aaacgcagggccuuucuug

SEQ ID NO: 2122567 - RNA, 19 nt, Homo sapiens
  misc_RNA (1)...(19): siRNA sense strand
caaauccucuauguacaag

SEQ ID NO: 2122568 - RNA, 19 nt, Homo sapiens
  misc_RNA (1)...(19): siRNA sense strand
gguaccuuauguuuaaaga

SEQ ID NO: 2122569 - RNA, 19 nt, Homo sapiens
  misc_RNA (1)...(19): siRNA sense strand
uucagcagaucauugagua

SEQ ID NO: 2122570 - RNA, 19 nt, Homo sapiens
  misc_RNA (1)...(19): siRNA sense strand
ccaugguggcccuuuauaa

SEQ ID NO: 2122571 - RNA, 19 nt, Homo sapiens
  misc_RNA (1)...(19): siRNA sense strand
ugaacgggccaaugaaaug

SEQ ID NO: 2122572 - RNA, 19 nt, Homo sapiens
  misc_RNA (1)...(19): siRNA sense strand
agaaggaugggaacacaaa

SEQ ID NO: 2122573 - RNA, 19 nt, Homo sapiens
  misc_RNA (1)...(19): siRNA sense strand
ggaaggaagaacaggaaca

SEQ ID NO: 2122574 - RNA, 19 nt, Homo sapiens
  misc_RNA (1)...(19): siRNA sense strand
cacugaagccgucaucauu

SEQ ID NO: 2122575 - RNA, 19 nt, Homo sapiens
  misc_RNA (1)...(19): siRNA sense strand
aaagagccuucagauccua

SEQ ID NO: 2122576 - RNA, 19 nt, Homo sapiens
  misc_RNA (1)...(19): siRNA sense strand
agaaguggaccguacaaga

SEQ ID NO: 2122577 - RNA, 19 nt, Homo sapiens
  misc_RNA (1)...(19): siRNA sense strand
gaagaggagaaaugcagau

SEQ ID NO: 2122578 - RNA, 19 nt, Homo sapiens
  misc_RNA (1)...(19): siRNA sense strand
gaaacuucgguaucuggaa

SEQ ID NO: 2122579 - RNA, 19 nt, Homo sapiens
  misc_RNA (1)...(19): siRNA sense strand
gccuaggacuucuuacaag

SEQ ID NO: 2122580 - RNA, 19 nt, Homo sapiens
  misc_RNA (1)...(19): siRNA sense strand
gcucaaaguaaugaugauu

SEQ ID NO: 2122581 - RNA, 19 nt, Homo sapiens
  misc_RNA (1)...(19): siRNA sense strand
gaagaggaaacagcuaugg

SEQ ID NO: 2122582 - RNA, 19 nt, Homo sapiens
  misc_RNA (1)...(19): siRNA sense strand
gggcaggcauggagcaacu

SEQ ID NO: 2122583 - RNA, 19 nt, Homo sapiens
  misc_RNA (1)...(19): siRNA sense strand
gaagagcuuggucuagaag

SEQ ID NO: 2122584 - RNA, 19 nt, Homo sapiens
  misc_RNA (1)...(19): siRNA sense strand
acagagauccgagauacuu

SEQ ID NO: 2122585 - RNA, 19 nt, Homo sapiens
  misc_RNA (1)...(19): siRNA sense strand
ucgcugaacgggccaauga

SEQ ID NO: 2122586 - RNA, 19 nt, Homo sapiens
  misc_RNA (1)...(19): siRNA sense strand
guuuauagaaugagugaga

SEQ ID NO: 2122587 - RNA, 19 nt, Homo sapiens
  misc_RNA (1)...(19): siRNA sense strand
ggccuaggacuucuuacaa

SEQ ID NO: 2122588 - RNA, 19 nt, Homo sapiens
  misc_RNA (1)...(19): siRNA sense strand
aauauuggugcucaaagua

SEQ ID NO: 2122589 - RNA, 19 nt, Homo sapiens
  misc_RNA (1)...(19): siRNA sense strand
caaguaauggcaucuggau

SEQ ID NO: 2122590 - RNA, 19 nt, Homo sapiens
  misc_RNA (1)...(19): siRNA sense strand
acaaauccucuauguacaa

SEQ ID NO: 2122591 - RNA, 19 nt, Homo sapiens
  misc_RNA (1)...(19): siRNA sense strand
gauauucgagaagaaguug

SEQ ID NO: 2122592 - RNA, 19 nt, Homo sapiens
  misc_RNA (1)...(19): siRNA sense strand
caaguacuggaaacaaaug

SEQ ID NO: 2122593 - RNA, 19 nt, Homo sapiens
  misc_RNA (1)...(19): siRNA sense strand
ucuggaauguguuauuaag

SEQ ID NO: 2122594 - RNA, 19 nt, Homo sapiens
  misc_RNA (1)...(19): siRNA sense strand
gcagcugccucaguucuua

SEQ ID NO: 2122595 - RNA, 19 nt, Homo sapiens
  misc_RNA (1)...(19): siRNA sense strand
gcaggucgcaggccucuuu

SEQ ID NO: 2122596 - RNA, 19 nt, Homo sapiens
  misc_RNA (1)...(19): siRNA sense strand
uccaggaguucgucucuua

SEQ ID NO: 2122597 - RNA, 19 nt, Homo sapiens
  misc_RNA (1)...(19): siRNA sense strand
aagcuggaauguccuguug

SEQ ID NO: 2122598 - RNA, 19 nt, Homo sapiens
  misc_RNA (1)...(19): siRNA sense strand
gccacuauguagcggguuu

SEQ ID NO: 2122599 - RNA, 19 nt, Homo sapiens
  misc_RNA (1)...(19): siRNA sense strand
gaagugcagcugccucagu

SEQ ID NO: 2122600 - RNA, 19 nt, Homo sapiens
  misc_RNA (1)...(19): siRNA sense strand
uugcugguauuucaauuga

SEQ ID NO: 2122601 - RNA, 19 nt, Homo sapiens
  misc_RNA (1)...(19): siRNA sense strand
gaagcuggaauguccuguu

SEQ ID NO: 2122602 - RNA, 19 nt, Homo sapiens
  misc_RNA (1)...(19): siRNA sense strand
uaagccaacuaucccuuca

SEQ ID NO: 2122603 - RNA, 19 nt, Homo sapiens
  misc_RNA (1)...(19): siRNA sense strand
gcugguauuucaauugacu

SEQ ID NO: 2122604 - RNA, 19 nt, Homo sapiens
  misc_RNA (1)...(19): siRNA sense strand
aagugcagcugccucaguu

SEQ ID NO: 2122605 - RNA, 19 nt, Homo sapiens
  misc_RNA (1)...(19): siRNA sense strand
ccagagucuucccgggauu

SEQ ID NO: 2122606 - RNA, 19 nt, Homo sapiens
  misc_RNA (1)...(19): siRNA sense strand
ugcccgcucuuguguugua

SEQ ID NO: 2122607 - RNA, 19 nt, Homo sapiens
  misc_RNA (1)...(19): siRNA sense strand
gcugacgcgccacuaugua

SEQ ID NO: 2122608 - RNA, 19 nt, Homo sapiens
  misc_RNA (1)...(19): siRNA sense strand
caagggagugucucuaacu

SEQ ID NO: 2122609 - RNA, 19 nt, Homo sapiens
  misc_RNA (1)...(19): siRNA sense strand
gcuggaauguccuguugcu

SEQ ID NO: 2122610 - RNA, 19 nt, Homo sapiens
  misc_RNA (1)...(19): siRNA sense strand
ugacuuaagccaacuaucc

SEQ ID NO: 2122611 - RNA, 19 nt, Homo sapiens
  misc_RNA (1)...(19): siRNA sense strand
gaauguccuguugcuggua

SEQ ID NO: 2122612 - RNA, 19 nt, Homo sapiens
  misc_RNA (1)...(19): siRNA sense strand
ggucgcaggccucuuuguc

SEQ ID NO: 2122613 - RNA, 19 nt, Homo sapiens
  misc_RNA (1)...(19): siRNA sense strand
cuacugcccgcucuugugu

SEQ ID NO: 2122614 - RNA, 19 nt, Homo sapiens
  misc_RNA (1)...(19): siRNA sense strand
uuagauggcuccaaacuua

SEQ ID NO: 2122615 - RNA, 19 nt, Homo sapiens
  misc_RNA (1)...(19): siRNA sense strand
gaagguugcucccguuaaa

SEQ ID NO: 2122616 - RNA, 19 nt, Homo sapiens
  misc_RNA (1)...(19): siRNA sense strand
gaaaagcucuccaaagaaa

SEQ ID NO: 2122617 - RNA, 19 nt, Homo sapiens
  misc_RNA (1)...(19): siRNA sense strand
guccacagauuauuaagua

SEQ ID NO: 2122618 - RNA, 19 nt, Homo sapiens
  misc_RNA (1)...(19): siRNA sense strand
gcaaaguucucuauuaugc

SEQ ID NO: 2122619 - RNA, 19 nt, Homo sapiens
  misc_RNA (1)...(19): siRNA sense strand
cacggaagcugaaagcaua

SEQ ID NO: 2122620 - RNA, 19 nt, Homo sapiens
  misc_RNA (1)...(19): siRNA sense strand
gcuccaaacuuacagagaa

SEQ ID NO: 2122621 - RNA, 19 nt, Homo sapiens
  misc_RNA (1)...(19): siRNA sense strand
gaacagaagaagaagaaga

SEQ ID NO: 2122622 - RNA, 19 nt, Homo sapiens
  misc_RNA (1)...(19): siRNA sense strand
gagcaggcccuacuuggua

SEQ ID NO: 2122623 - RNA, 19 nt, Homo sapiens
  misc_RNA (1)...(19): siRNA sense strand
cagaaaagcucuccaaaga

SEQ ID NO: 2122624 - RNA, 19 nt, Homo sapiens
  misc_RNA (1)...(19): siRNA sense strand
cgacaaggcagcaaacaaa

SEQ ID NO: 2122625 - RNA, 19 nt, Homo sapiens
  misc_RNA (1)...(19): siRNA sense strand
gaaaggaagggacagaaga

SEQ ID NO: 2122626 - RNA, 19 nt, Homo sapiens
  misc_RNA (1)...(19): siRNA sense strand
caagugagccguccaagga

SEQ ID NO: 2122627 - RNA, 19 nt, Homo sapiens
  misc_RNA (1)...(19): siRNA sense strand
aaacagagggugucaaaga

SEQ ID NO: 2122628 - RNA, 19 nt, Homo sapiens
  misc_RNA (1)...(19): siRNA sense strand
ggaauaaaauugagaagga

SEQ ID NO: 2122629 - RNA, 19 nt, Homo sapiens
  misc_RNA (1)...(19): siRNA sense strand
gagcagacacuccuuagau

SEQ ID NO: 2122630 - RNA, 19 nt, Homo sapiens
  misc_RNA (1)...(19): siRNA sense strand
ggaagcagccgagaagaga

SEQ ID NO: 2122631 - RNA, 19 nt, Homo sapiens
  misc_RNA (1)...(19): siRNA sense strand
gcacgaagaggaacccaau

SEQ ID NO: 2122632 - RNA, 19 nt, Homo sapiens
  misc_RNA (1)...(19): siRNA sense strand
gaagagggacgaggaggaa

SEQ ID NO: 2122633 - RNA, 19 nt, Homo sapiens
  misc_RNA (1)...(19): siRNA sense strand
gguccagaauccugaagaa

SEQ ID NO: 2122634 - RNA, 19 nt, Homo sapiens
  misc_RNA (1)...(19): siRNA sense strand
gagagaagacgccaagaag

SEQ ID NO: 2122635 - RNA, 19 nt, Homo sapiens
  misc_RNA (1)...(19): siRNA sense strand
gagaagguugcucccguua

SEQ ID NO: 2122636 - RNA, 19 nt, Homo sapiens
  misc_RNA (1)...(19): siRNA sense strand
cagaacagaagaagaagaa

SEQ ID NO: 2122637 - RNA, 19 nt, Homo sapiens
  misc_RNA (1)...(19): siRNA sense strand
ugagaaggaccaacuauuc

SEQ ID NO: 2122638 - RNA, 19 nt, Homo sapiens
  misc_RNA (1)...(19): siRNA sense strand
gaagacuacuggcgagaac

SEQ ID NO: 2122639 - RNA, 19 nt, Homo sapiens
  misc_RNA (1)...(19): siRNA sense strand
gaugccagguggagaggaa

SEQ ID NO: 2122640 - RNA, 19 nt, Homo sapiens
  misc_RNA (1)...(19): siRNA sense strand
gaagacgccaagaagacua

SEQ ID NO: 2122641 - RNA, 19 nt, Homo sapiens
  misc_RNA (1)...(19): siRNA sense strand
gcaaagccagacccuguga

SEQ ID NO: 2122642 - RNA, 19 nt, Homo sapiens
  misc_RNA (1)...(19): siRNA sense strand
gccagucaaugcaaaguuc

SEQ ID NO: 2122643 - RNA, 19 nt, Homo sapiens
  misc_RNA (1)...(19): siRNA sense strand
aacagagggugucaaagaa

SEQ ID NO: 2122644 - RNA, 19 nt, Homo sapiens
  misc_RNA (1)...(19): siRNA sense strand
gcgcagagaacagcugaaa

SEQ ID NO: 2122645 - RNA, 19 nt, Homo sapiens
  misc_RNA (1)...(19): siRNA sense strand
agcacaagcuggcuguuaa

SEQ ID NO: 2122646 - RNA, 19 nt, Homo sapiens
  misc_RNA (1)...(19): siRNA sense strand
gcacggaagcugaaagcau

SEQ ID NO: 2122647 - RNA, 19 nt, Homo sapiens
  misc_RNA (1)...(19): siRNA sense strand
ggaaagagaagccgaugcu

SEQ ID NO: 2122648 - RNA, 19 nt, Homo sapiens
  misc_RNA (1)...(19): siRNA sense strand
uaaaagaagucaccaagag

SEQ ID NO: 2122649 - RNA, 19 nt, Homo sapiens
  misc_RNA (1)...(19): siRNA sense strand
gagaagacgccaagaagac

SEQ ID NO: 2122650 - RNA, 19 nt, Homo sapiens
  misc_RNA (1)...(19): siRNA sense strand
gagcgcucguggagagaaa

SEQ ID NO: 2122651 - RNA, 19 nt, Homo sapiens
  misc_RNA (1)...(19): siRNA sense strand
gaaggcaggagcucuugga

SEQ ID NO: 2122652 - RNA, 19 nt, Homo sapiens
  misc_RNA (1)...(19): siRNA sense strand
agaggaggcuuugggaaga

SEQ ID NO: 2122653 - RNA, 19 nt, Homo sapiens
  misc_RNA (1)...(19): siRNA sense strand
ucagagcagacacuccuua

SEQ ID NO: 2122654 - RNA, 19 nt, Homo sapiens
  misc_RNA (1)...(19): siRNA sense strand
ggaaaggaagggacagaag

SEQ ID NO: 2122655 - RNA, 19 nt, Homo sapiens
  misc_RNA (1)...(19): siRNA sense strand
ugaagaacgcagagaguga

SEQ ID NO: 2122656 - RNA, 19 nt, Homo sapiens
  misc_RNA (1)...(19): siRNA sense strand
gaagcugaaagcauacgaa

SEQ ID NO: 2122657 - RNA, 19 nt, Homo sapiens
  misc_RNA (1)...(19): siRNA sense strand
cuccuuagauggcuccaaa

SEQ ID NO: 2122658 - RNA, 19 nt, Homo sapiens
  misc_RNA (1)...(19): siRNA sense strand
gcagaacagaagaagaaga

SEQ ID NO: 2122659 - RNA, 19 nt, Homo sapiens
  misc_RNA (1)...(19): siRNA sense strand
gcagcgagagggaccaguu

SEQ ID NO: 2122660 - RNA, 19 nt, Homo sapiens
  misc_RNA (1)...(19): siRNA sense strand
agagaaagcaagccagaga

SEQ ID NO: 2122661 - RNA, 19 nt, Homo sapiens
  misc_RNA (1)...(19): siRNA sense strand
aggcagaacagaagaagaa

SEQ ID NO: 2122662 - RNA, 19 nt, Homo sapiens
  misc_RNA (1)...(19): siRNA sense strand
caacaggcagaacagaaga

SEQ ID NO: 2122663 - RNA, 19 nt, Homo sapiens
  misc_RNA (1)...(19): siRNA sense strand
caccgagggaugcaaauuu

SEQ ID NO: 2122664 - RNA, 19 nt, Homo sapiens
  misc_RNA (1)...(19): siRNA sense strand
ucaaugcaaaguucucuau

SEQ ID NO: 2122665 - RNA, 19 nt, Homo sapiens
  misc_RNA (1)...(19): siRNA sense strand
agagagaagacgccaagaa

SEQ ID NO: 2122666 - RNA, 19 nt, Homo sapiens
  misc_RNA (1)...(19): siRNA sense strand
aagcacaagcuggcuguua

SEQ ID NO: 2122667 - RNA, 19 nt, Homo sapiens
  misc_RNA (1)...(19): siRNA sense strand
ccucaccguuuggaauaaa

SEQ ID NO: 2122668 - RNA, 19 nt, Homo sapiens
  misc_RNA (1)...(19): siRNA sense strand
cguccgcacucgcagaaug

SEQ ID NO: 2122669 - RNA, 19 nt, Homo sapiens
  misc_RNA (1)...(19): siRNA sense strand
accgagggaugcaaauuug

SEQ ID NO: 2122670 - RNA, 19 nt, Homo sapiens
  misc_RNA (1)...(19): siRNA sense strand
gcacaagcuggcuguuaag

SEQ ID NO: 2122671 - RNA, 19 nt, Homo sapiens
  misc_RNA (1)...(19): siRNA sense strand
cuccaaacuuacagagaaa

SEQ ID NO: 2122672 - RNA, 19 nt, Homo sapiens
  misc_RNA (1)...(19): siRNA sense strand
gaggaagaggcgacagaga

SEQ ID NO: 2122673 - RNA, 19 nt, Homo sapiens
  misc_RNA (1)...(19): siRNA sense strand
ucaaggacaccgcgugcaa

SEQ ID NO: 2122674 - RNA, 19 nt, Homo sapiens
  misc_RNA (1)...(19): siRNA sense strand
agagaagacgccaagaaga

SEQ ID NO: 2122675 - RNA, 19 nt, Homo sapiens
  misc_RNA (1)...(19): siRNA sense strand
ggacagcgagacugcaaac

SEQ ID NO: 2122676 - RNA, 19 nt, Homo sapiens
  misc_RNA (1)...(19): siRNA sense strand
caaugcaaaguucucuauu

SEQ ID NO: 2122677 - RNA, 19 nt, Homo sapiens
  misc_RNA (1)...(19): siRNA sense strand
gaggaaaggaagggacaga

SEQ ID NO: 2122678 - RNA, 19 nt, Homo sapiens
  misc_RNA (1)...(19): siRNA sense strand
agcagacacuccuuagaug

SEQ ID NO: 2122679 - RNA, 19 nt, Homo sapiens
  misc_RNA (1)...(19): siRNA sense strand
cccaggauccacaacauga

SEQ ID NO: 2122680 - RNA, 19 nt, Homo sapiens
  misc_RNA (1)...(19): siRNA sense strand
ccuggaagcagcaguguca

SEQ ID NO: 2122681 - RNA, 19 nt, Homo sapiens
  misc_RNA (1)...(19): siRNA sense strand
cgacgcgggaggagagaaa

SEQ ID NO: 2122682 - RNA, 19 nt, Homo sapiens
  misc_RNA (1)...(19): siRNA sense strand
ccaacaggcagaacagaag

SEQ ID NO: 2122683 - RNA, 19 nt, Homo sapiens
  misc_RNA (1)...(19): siRNA sense strand
gagaaggaccaacuauucc

SEQ ID NO: 2122684 - RNA, 19 nt, Homo sapiens
  misc_RNA (1)...(19): siRNA sense strand
cgagacugcaaacgggaua

SEQ ID NO: 2122685 - RNA, 19 nt, Homo sapiens
  misc_RNA (1)...(19): siRNA sense strand
aaacugagcaggcccuacu

SEQ ID NO: 2122686 - RNA, 19 nt, Homo sapiens
  misc_RNA (1)...(19): siRNA sense strand
gcgcuggagaggaggcuuu

SEQ ID NO: 2122687 - RNA, 19 nt, Homo sapiens
  misc_RNA (1)...(19): siRNA sense strand
gaagucaccaagagguuuu

SEQ ID NO: 2122688 - RNA, 19 nt, Homo sapiens
  misc_RNA (1)...(19): siRNA sense strand
ccaccagcauccccacuuu

SEQ ID NO: 2122689 - RNA, 19 nt, Homo sapiens
  misc_RNA (1)...(19): siRNA sense strand
gcucguggagagaaagaga

SEQ ID NO: 2122690 - RNA, 19 nt, Homo sapiens
  misc_RNA (1)...(19): siRNA sense strand
ccaccgagggaugcaaauu

SEQ ID NO: 2122691 - RNA, 19 nt, Homo sapiens
  misc_RNA (1)...(19): siRNA sense strand
aagcugaaagcauacgaaa

SEQ ID NO: 2122692 - RNA, 19 nt, Homo sapiens
  misc_RNA (1)...(19): siRNA sense strand
gaggaggcuuugggaagag

SEQ ID NO: 2122693 - RNA, 19 nt, Homo sapiens
  misc_RNA (1)...(19): siRNA sense strand
gagaacuggaggccaagug

SEQ ID NO: 2122694 - RNA, 19 nt, Homo sapiens
  misc_RNA (1)...(19): siRNA sense strand
gcagaaaagcucuccaaag

SEQ ID NO: 2122695 - RNA, 19 nt, Homo sapiens
  misc_RNA (1)...(19): siRNA sense strand
gcgcuucaacugcgaccaa

SEQ ID NO: 2122696 - RNA, 19 nt, Homo sapiens
  misc_RNA (1)...(19): siRNA sense strand
gccucaccguuuggaauaa

SEQ ID NO: 2122697 - RNA, 19 nt, Homo sapiens
  misc_RNA (1)...(19): siRNA sense strand
agaagucaccaagagguuu

SEQ ID NO: 2122698 - RNA, 19 nt, Homo sapiens
  misc_RNA (1)...(19): siRNA sense strand
aaaaggcacuucucuucug

SEQ ID NO: 2122699 - RNA, 19 nt, Homo sapiens
  misc_RNA (1)...(19): siRNA sense strand
gcacgacaaggcagcaaac

SEQ ID NO: 2122700 - RNA, 19 nt, Homo sapiens
  misc_RNA (1)...(19): siRNA sense strand
aaagccagacccugugaug

SEQ ID NO: 2122701 - RNA, 19 nt, Homo sapiens
  misc_RNA (1)...(19): siRNA sense strand
gaacaacuacaaaguauga

SEQ ID NO: 2122702 - RNA, 19 nt, Homo sapiens
  misc_RNA (1)...(19): siRNA sense strand
ccaacuggguguucuguaa

SEQ ID NO: 2122703 - RNA, 19 nt, Homo sapiens
  misc_RNA (1)...(19): siRNA sense strand
gcagauagaacaacuacaa

SEQ ID NO: 2122704 - RNA, 19 nt, Homo sapiens
  misc_RNA (1)...(19): siRNA sense strand
ggaagucagugcugcagau

SEQ ID NO: 2122705 - RNA, 19 nt, Homo sapiens
  misc_RNA (1)...(19): siRNA sense strand
gauggaaguugaucucucu

SEQ ID NO: 2122706 - RNA, 19 nt, Homo sapiens
  misc_RNA (1)...(19): siRNA sense strand
gaagaaucccuuaggaagu

SEQ ID NO: 2122707 - RNA, 19 nt, Homo sapiens
  misc_RNA (1)...(19): siRNA sense strand
gauagaacaacuacaaagu

SEQ ID NO: 2122708 - RNA, 19 nt, Homo sapiens
  misc_RNA (1)...(19): siRNA sense strand
gagaucaucacaacaaaca

SEQ ID NO: 2122709 - RNA, 19 nt, Homo sapiens
  misc_RNA (1)...(19): siRNA sense strand
gaagucagugcugcagaua

SEQ ID NO: 2122710 - RNA, 19 nt, Homo sapiens
  misc_RNA (1)...(19): siRNA sense strand
aagaaguacuccagggaaa

SEQ ID NO: 2122711 - RNA, 19 nt, Homo sapiens
  misc_RNA (1)...(19): siRNA sense strand
acacaggaagagauuguua

SEQ ID NO: 2122712 - RNA, 19 nt, Homo sapiens
  misc_RNA (1)...(19): siRNA sense strand
gaaugaaugcuugauuugu

SEQ ID NO: 2122713 - RNA, 19 nt, Homo sapiens
  misc_RNA (1)...(19): siRNA sense strand
ggaaaccucccagauuuua

SEQ ID NO: 2122714 - RNA, 19 nt, Homo sapiens
  misc_RNA (1)...(19): siRNA sense strand
acgcagauauccaggcauu

SEQ ID NO: 2122715 - RNA, 19 nt, Homo sapiens
  misc_RNA (1)...(19): siRNA sense strand
caaacagcuuucagcacaa

SEQ ID NO: 2122716 - RNA, 19 nt, Homo sapiens
  misc_RNA (1)...(19): siRNA sense strand
agucagugcugcagauaga

SEQ ID NO: 2122717 - RNA, 19 nt, Homo sapiens
  misc_RNA (1)...(19): siRNA sense strand
uggagucgauggaaguuga

SEQ ID NO: 2122718 - RNA, 19 nt, Homo sapiens
  misc_RNA (1)...(19): siRNA sense strand
caucacaacaaacagcuuu

SEQ ID NO: 2122719 - RNA, 19 nt, Homo sapiens
  misc_RNA (1)...(19): siRNA sense strand
gcugccaccucacucauca

SEQ ID NO: 2122720 - RNA, 19 nt, Homo sapiens
  misc_RNA (1)...(19): siRNA sense strand
gaaguugaucucucuccuu

SEQ ID NO: 2122721 - RNA, 19 nt, Homo sapiens
  misc_RNA (1)...(19): siRNA sense strand
aaacagcuuucagcacaau

SEQ ID NO: 2122722 - RNA, 19 nt, Homo sapiens
  misc_RNA (1)...(19): siRNA sense strand
gcagauauccaggcauucu

SEQ ID NO: 2122723 - RNA, 19 nt, Homo sapiens
  misc_RNA (1)...(19): siRNA sense strand
aaagauuucuagguuggaa

SEQ ID NO: 2122724 - RNA, 19 nt, Homo sapiens
  misc_RNA (1)...(19): siRNA sense strand
caacuacaaaguaugagau

SEQ ID NO: 2122725 - RNA, 19 nt, Homo sapiens
  misc_RNA (1)...(19): siRNA sense strand
uaaagcuccuugucguaca

SEQ ID NO: 2122726 - RNA, 19 nt, Homo sapiens
  misc_RNA (1)...(19): siRNA sense strand
aagaaucccuuaggaaguc

SEQ ID NO: 2122727 - RNA, 19 nt, Homo sapiens
  misc_RNA (1)...(19): siRNA sense strand
gagauuguuagccuucuau

SEQ ID NO: 2122728 - RNA, 19 nt, Homo sapiens
  misc_RNA (1)...(19): siRNA sense strand
cagauagaacaacuacaaa

SEQ ID NO: 2122729 - RNA, 19 nt, Homo sapiens
  misc_RNA (1)...(19): siRNA sense strand
aaacacaggaagagauugu

SEQ ID NO: 2122730 - RNA, 19 nt, Homo sapiens
  misc_RNA (1)...(19): siRNA sense strand
guugaucucucuccuucuc

SEQ ID NO: 2122731 - RNA, 19 nt, Homo sapiens
  misc_RNA (1)...(19): siRNA sense strand
agaaugaaugcuugauuug

SEQ ID NO: 2122732 - RNA, 19 nt, Homo sapiens
  misc_RNA (1)...(19): siRNA sense strand
cacaggacgucgugcuuca

SEQ ID NO: 2122733 - RNA, 19 nt, Homo sapiens
  misc_RNA (1)...(19): siRNA sense strand
gcauaccgacgcagauauc

SEQ ID NO: 2122734 - RNA, 19 nt, Homo sapiens
  misc_RNA (1)...(19): siRNA sense strand
agagauuguuagccuucua

SEQ ID NO: 2122735 - RNA, 19 nt, Homo sapiens
  misc_RNA (1)...(19): siRNA sense strand
caacuggguguucuguaau

SEQ ID NO: 2122736 - RNA, 19 nt, Homo sapiens
  misc_RNA (1)...(19): siRNA sense strand
aagcauaccgacgcagaua

SEQ ID NO: 2122737 - RNA, 19 nt, Homo sapiens
  misc_RNA (1)...(19): siRNA sense strand
caacugcgggcacguguac

SEQ ID NO: 2122738 - RNA, 19 nt, Homo sapiens
  misc_RNA (1)...(19): siRNA sense strand
auuguuagccuucuauaga

SEQ ID NO: 2122739 - RNA, 19 nt, Homo sapiens
  misc_RNA (1)...(19): siRNA sense strand
uggaagaaucccuuaggaa

SEQ ID NO: 2122740 - RNA, 19 nt, Homo sapiens
  misc_RNA (1)...(19): siRNA sense strand
gcuccuugucguacaguuu

SEQ ID NO: 2122741 - RNA, 19 nt, Homo sapiens
  misc_RNA (1)...(19): siRNA sense strand
uguaaagcuccuugucgua

SEQ ID NO: 2122742 - RNA, 19 nt, Homo sapiens
  misc_RNA (1)...(19): siRNA sense strand
uauccaggcauucuucaug

SEQ ID NO: 2122743 - RNA, 19 nt, Homo sapiens
  misc_RNA (1)...(19): siRNA sense strand
caugauuaguccaccucaa

SEQ ID NO: 2122744 - RNA, 19 nt, Homo sapiens
  misc_RNA (1)...(19): siRNA sense strand
uuggaagaaucccuuagga

SEQ ID NO: 2122745 - RNA, 19 nt, Homo sapiens
  misc_RNA (1)...(19): siRNA sense strand
auccaggcauucuucauga

SEQ ID NO: 2122746 - RNA, 19 nt, Homo sapiens
  misc_RNA (1)...(19): siRNA sense strand
gcuucagccucaccaacug

SEQ ID NO: 2122747 - RNA, 19 nt, Homo sapiens
  misc_RNA (1)...(19): siRNA sense strand
acagcuuucagcacaauaa

SEQ ID NO: 2122748 - RNA, 19 nt, Homo sapiens
  misc_RNA (1)...(19): siRNA sense strand
gauuguuagccuucuauag

SEQ ID NO: 2122749 - RNA, 19 nt, Homo sapiens
  misc_RNA (1)...(19): siRNA sense strand
gauuaguccaccucaagau

SEQ ID NO: 2122750 - RNA, 19 nt, Homo sapiens
  misc_RNA (1)...(19): siRNA sense strand
ucucucuccuucuccgauu

SEQ ID NO: 2122751 - RNA, 19 nt, Homo sapiens
  misc_RNA (1)...(19): siRNA sense strand
gaacaacuacaaaguauga

SEQ ID NO: 2122752 - RNA, 19 nt, Homo sapiens
  misc_RNA (1)...(19): siRNA sense strand
ccaacuggguguucuguaa

SEQ ID NO: 2122753 - RNA, 19 nt, Homo sapiens
  misc_RNA (1)...(19): siRNA sense strand
gcagauagaacaacuacaa

SEQ ID NO: 2122754 - RNA, 19 nt, Homo sapiens
  misc_RNA (1)...(19): siRNA sense strand
ggaagucagugcugcagau

SEQ ID NO: 2122755 - RNA, 19 nt, Homo sapiens
  misc_RNA (1)...(19): siRNA sense strand
gauggaaguugaucucucu

SEQ ID NO: 2122756 - RNA, 19 nt, Homo sapiens
  misc_RNA (1)...(19): siRNA sense strand
gaagaaucccuuaggaagu

SEQ ID NO: 2122757 - RNA, 19 nt, Homo sapiens
  misc_RNA (1)...(19): siRNA sense strand
gauagaacaacuacaaagu

SEQ ID NO: 2122758 - RNA, 19 nt, Homo sapiens
  misc_RNA (1)...(19): siRNA sense strand
gagaucaucacaacaaaca

SEQ ID NO: 2122759 - RNA, 19 nt, Homo sapiens
  misc_RNA (1)...(19): siRNA sense strand
gaagucagugcugcagaua

SEQ ID NO: 2122760 - RNA, 19 nt, Homo sapiens
  misc_RNA (1)...(19): siRNA sense strand
aagaaguacuccagggaaa

SEQ ID NO: 2122761 - RNA, 19 nt, Homo sapiens
  misc_RNA (1)...(19): siRNA sense strand
acacaggaagagauuguua

SEQ ID NO: 2122762 - RNA, 19 nt, Homo sapiens
  misc_RNA (1)...(19): siRNA sense strand
gaaugaaugcuugauuugu

SEQ ID NO: 2122763 - RNA, 19 nt, Homo sapiens
  misc_RNA (1)...(19): siRNA sense strand
ggaaaccucccagauuuua

SEQ ID NO: 2122764 - RNA, 19 nt, Homo sapiens
  misc_RNA (1)...(19): siRNA sense strand
acgcagauauccaggcauu

SEQ ID NO: 2122765 - RNA, 19 nt, Homo sapiens
  misc_RNA (1)...(19): siRNA sense strand
caaacagcuuucagcacaa

SEQ ID NO: 2122766 - RNA, 19 nt, Homo sapiens
  misc_RNA (1)...(19): siRNA sense strand
agucagugcugcagauaga

SEQ ID NO: 2122767 - RNA, 19 nt, Homo sapiens
  misc_RNA (1)...(19): siRNA sense strand
uggagucgauggaaguuga

SEQ ID NO: 2122768 - RNA, 19 nt, Homo sapiens
  misc_RNA (1)...(19): siRNA sense strand
caucacaacaaacagcuuu

SEQ ID NO: 2122769 - RNA, 19 nt, Homo sapiens
  misc_RNA (1)...(19): siRNA sense strand
gcugccaccucacucauca

SEQ ID NO: 2122770 - RNA, 19 nt, Homo sapiens
  misc_RNA (1)...(19): siRNA sense strand
gaaguugaucucucuccuu

SEQ ID NO: 2122771 - RNA, 19 nt, Homo sapiens
  misc_RNA (1)...(19): siRNA sense strand
aaacagcuuucagcacaau

SEQ ID NO: 2122772 - RNA, 19 nt, Homo sapiens
  misc_RNA (1)...(19): siRNA sense strand
gcagauauccaggcauucu

SEQ ID NO: 2122773 - RNA, 19 nt, Homo sapiens
  misc_RNA (1)...(19): siRNA sense strand
aaagauuucuagguuggaa

SEQ ID NO: 2122774 - RNA, 19 nt, Homo sapiens
  misc_RNA (1)...(19): siRNA sense strand
caacuacaaaguaugagau

SEQ ID NO: 2122775 - RNA, 19 nt, Homo sapiens
  misc_RNA (1)...(19): siRNA sense strand
uaaagcuccuugucguaca

SEQ ID NO: 2122776 - RNA, 19 nt, Homo sapiens
  misc_RNA (1)...(19): siRNA sense strand
ggaggcuggucccaaccuu

SEQ ID NO: 2122777 - RNA, 19 nt, Homo sapiens
  misc_RNA (1)...(19): siRNA sense strand
aagaaucccuuaggaaguc

SEQ ID NO: 2122778 - RNA, 19 nt, Homo sapiens
  misc_RNA (1)...(19): siRNA sense strand
gagauuguuagccuucuau

SEQ ID NO: 2122779 - RNA, 19 nt, Homo sapiens
  misc_RNA (1)...(19): siRNA sense strand
cagauagaacaacuacaaa

SEQ ID NO: 2122780 - RNA, 19 nt, Homo sapiens
  misc_RNA (1)...(19): siRNA sense strand
aaacacaggaagagauugu

SEQ ID NO: 2122781 - RNA, 19 nt, Homo sapiens
  misc_RNA (1)...(19): siRNA sense strand
guugaucucucuccuucuc

SEQ ID NO: 2122782 - RNA, 19 nt, Homo sapiens
  misc_RNA (1)...(19): siRNA sense strand
cacaggacgucgugcuuca

SEQ ID NO: 2122783 - RNA, 19 nt, Homo sapiens
  misc_RNA (1)...(19): siRNA sense strand
agaaugaaugcuugauuug

SEQ ID NO: 2122784 - RNA, 19 nt, Homo sapiens
  misc_RNA (1)...(19): siRNA sense strand
gcauaccgacgcagauauc

SEQ ID NO: 2122785 - RNA, 19 nt, Homo sapiens
  misc_RNA (1)...(19): siRNA sense strand
agagauuguuagccuucua

SEQ ID NO: 2122786 - RNA, 19 nt, Homo sapiens
  misc_RNA (1)...(19): siRNA sense strand
caacuggguguucuguaau

SEQ ID NO: 2122787 - RNA, 19 nt, Homo sapiens
  misc_RNA (1)...(19): siRNA sense strand
aagcauaccgacgcagaua

SEQ ID NO: 2122788 - RNA, 19 nt, Homo sapiens
  misc_RNA (1)...(19): siRNA sense strand
caacugcgggcacguguac

SEQ ID NO: 2122789 - RNA, 19 nt, Homo sapiens
  misc_RNA (1)...(19): siRNA sense strand
auuguuagccuucuauaga

SEQ ID NO: 2122790 - RNA, 19 nt, Homo sapiens
  misc_RNA (1)...(19): siRNA sense strand
gcuccuugucguacaguuu

SEQ ID NO: 2122791 - RNA, 19 nt, Homo sapiens
  misc_RNA (1)...(19): siRNA sense strand
uguaaagcuccuugucgua

SEQ ID NO: 2122792 - RNA, 19 nt, Homo sapiens
  misc_RNA (1)...(19): siRNA sense strand
uggaagaaucccuuaggaa

SEQ ID NO: 2122793 - RNA, 19 nt, Homo sapiens
  misc_RNA (1)...(19): siRNA sense strand
uauccaggcauucuucaug

SEQ ID NO: 2122794 - RNA, 19 nt, Homo sapiens
  misc_RNA (1)...(19): siRNA sense strand
caugauuaguccaccucaa

SEQ ID NO: 2122795 - RNA, 19 nt, Homo sapiens
  misc_RNA (1)...(19): siRNA sense strand
uuggaagaaucccuuagga

SEQ ID NO: 2122796 - RNA, 19 nt, Homo sapiens
  misc_RNA (1)...(19): siRNA sense strand
auccaggcauucuucauga

SEQ ID NO: 2122797 - RNA, 19 nt, Homo sapiens
  misc_RNA (1)...(19): siRNA sense strand
gcuucagccucaccaacug

SEQ ID NO: 2122798 - RNA, 19 nt, Homo sapiens
  misc_RNA (1)...(19): siRNA sense strand
acagcuuucagcacaauaa

SEQ ID NO: 2122799 - RNA, 19 nt, Homo sapiens
  misc_RNA (1)...(19): siRNA sense strand
gauuguuagccuucuauag

SEQ ID NO: 2122800 - RNA, 19 nt, Homo sapiens
  misc_RNA (1)...(19): siRNA sense strand
gauuaguccaccucaagau

SEQ ID NO: 2122801 - RNA, 19 nt, Homo sapiens
  misc_RNA (1)...(19): siRNA sense strand
ucucucuccuucuccgauu

SEQ ID NO: 2122802 - RNA, 19 nt, Homo sapiens
  misc_RNA (1)...(19): siRNA sense strand
gaaauugaauccugcuuga

SEQ ID NO: 2122803 - RNA, 19 nt, Homo sapiens
  misc_RNA (1)...(19): siRNA sense strand
agaaaugucuggagaaauu

SEQ ID NO: 2122804 - RNA, 19 nt, Homo sapiens
  misc_RNA (1)...(19): siRNA sense strand
gcucacaacuucaggagaa

SEQ ID NO: 2122805 - RNA, 19 nt, Homo sapiens
  misc_RNA (1)...(19): siRNA sense strand
caagaaaugucuggagaaa

SEQ ID NO: 2122806 - RNA, 19 nt, Homo sapiens
  misc_RNA (1)...(19): siRNA sense strand
ggaagauugucaagucuga

SEQ ID NO: 2122807 - RNA, 19 nt, Homo sapiens
  misc_RNA (1)...(19): siRNA sense strand
gaagaagcacgagaaguuu

SEQ ID NO: 2122808 - RNA, 19 nt, Homo sapiens
  misc_RNA (1)...(19): siRNA sense strand
gagaagaggagaagcagaa

SEQ ID NO: 2122809 - RNA, 19 nt, Homo sapiens
  misc_RNA (1)...(19): siRNA sense strand
ggacaaccuugcucucauc

SEQ ID NO: 2122810 - RNA, 19 nt, Homo sapiens
  misc_RNA (1)...(19): siRNA sense strand
acaaggagcuggacaucga

SEQ ID NO: 2122811 - RNA, 19 nt, Homo sapiens
  misc_RNA (1)...(19): siRNA sense strand
ggaggcagcaccagagaaa

SEQ ID NO: 2122812 - RNA, 19 nt, Homo sapiens
  misc_RNA (1)...(19): siRNA sense strand
gaaaggcgcaggacagaag

SEQ ID NO: 2122813 - RNA, 19 nt, Homo sapiens
  misc_RNA (1)...(19): siRNA sense strand
ggaggaagaugaggacgau

SEQ ID NO: 2122814 - RNA, 19 nt, Homo sapiens
  misc_RNA (1)...(19): siRNA sense strand
agaagaagcacgagaaguu

SEQ ID NO: 2122815 - RNA, 19 nt, Homo sapiens
  misc_RNA (1)...(19): siRNA sense strand
agagggagaugcaagaaau

SEQ ID NO: 2122816 - RNA, 19 nt, Homo sapiens
  misc_RNA (1)...(19): siRNA sense strand
ugaaggaacugaagaaaau

SEQ ID NO: 2122817 - RNA, 19 nt, Homo sapiens
  misc_RNA (1)...(19): siRNA sense strand
cgucaggucucaccaguuc

SEQ ID NO: 2122818 - RNA, 19 nt, Homo sapiens
  misc_RNA (1)...(19): siRNA sense strand
guggaaggguggaaugaga

SEQ ID NO: 2122819 - RNA, 19 nt, Homo sapiens
  misc_RNA (1)...(19): siRNA sense strand
ugaggacgaugaggacuuu

SEQ ID NO: 2122820 - RNA, 19 nt, Homo sapiens
  misc_RNA (1)...(19): siRNA sense strand
ggagguagagagcugcuuu

SEQ ID NO: 2122821 - RNA, 19 nt, Homo sapiens
  misc_RNA (1)...(19): siRNA sense strand
gcaagaaaugucuggagaa

SEQ ID NO: 2122822 - RNA, 19 nt, Homo sapiens
  misc_RNA (1)...(19): siRNA sense strand
ccgacuaaauccugagaaa

SEQ ID NO: 2122823 - RNA, 19 nt, Homo sapiens
  misc_RNA (1)...(19): siRNA sense strand
gaagaaaauuugcaagucu

SEQ ID NO: 2122824 - RNA, 19 nt, Homo sapiens
  misc_RNA (1)...(19): siRNA sense strand
gcagaagcacuuggauaaa

SEQ ID NO: 2122825 - RNA, 19 nt, Homo sapiens
  misc_RNA (1)...(19): siRNA sense strand
gaagagagaagaggagaag

SEQ ID NO: 2122826 - RNA, 19 nt, Homo sapiens
  misc_RNA (1)...(19): siRNA sense strand
guuuaaagcgugccauuga

SEQ ID NO: 2122827 - RNA, 19 nt, Homo sapiens
  misc_RNA (1)...(19): siRNA sense strand
ggagaacgaggacaaccuu

SEQ ID NO: 2122828 - RNA, 19 nt, Homo sapiens
  misc_RNA (1)...(19): siRNA sense strand
guagaagagcucacaacuu

SEQ ID NO: 2122829 - RNA, 19 nt, Homo sapiens
  misc_RNA (1)...(19): siRNA sense strand
gcagaaaggaagagagaag

SEQ ID NO: 2122830 - RNA, 19 nt, Homo sapiens
  misc_RNA (1)...(19): siRNA sense strand
gagguagagagcugcuuua

SEQ ID NO: 2122831 - RNA, 19 nt, Homo sapiens
  misc_RNA (1)...(19): siRNA sense strand
gggcuaccacuucuuaaga

SEQ ID NO: 2122832 - RNA, 19 nt, Homo sapiens
  misc_RNA (1)...(19): siRNA sense strand
cagaagcacuuggauaaaa

SEQ ID NO: 2122833 - RNA, 19 nt, Homo sapiens
  misc_RNA (1)...(19): siRNA sense strand
gcguggaccugcacuacug

SEQ ID NO: 2122834 - RNA, 19 nt, Homo sapiens
  misc_RNA (1)...(19): siRNA sense strand
acagcgaccucgaggaguu

SEQ ID NO: 2122835 - RNA, 19 nt, Homo sapiens
  misc_RNA (1)...(19): siRNA sense strand
gagagggagaugcaagaaa

SEQ ID NO: 2122836 - RNA, 19 nt, Homo sapiens
  misc_RNA (1)...(19): siRNA sense strand
gcuggugccuuuugacuuu

SEQ ID NO: 2122837 - RNA, 19 nt, Homo sapiens
  misc_RNA (1)...(19): siRNA sense strand
ccgggaagauugucaaguc

SEQ ID NO: 2122838 - RNA, 19 nt, Homo sapiens
  misc_RNA (1)...(19): siRNA sense strand
ucucucagccuuccagauu

SEQ ID NO: 2122839 - RNA, 19 nt, Homo sapiens
  misc_RNA (1)...(19): siRNA sense strand
uuucgaaguugguagaaga

SEQ ID NO: 2122840 - RNA, 19 nt, Homo sapiens
  misc_RNA (1)...(19): siRNA sense strand
aagcagaagcacuuggaua

SEQ ID NO: 2122841 - RNA, 19 nt, Homo sapiens
  misc_RNA (1)...(19): siRNA sense strand
ugaaccggauggaccagaa

SEQ ID NO: 2122842 - RNA, 19 nt, Homo sapiens
  misc_RNA (1)...(19): siRNA sense strand
gaugagagacguggaagca

SEQ ID NO: 2122843 - RNA, 19 nt, Homo sapiens
  misc_RNA (1)...(19): siRNA sense strand
gccaagaccggcugaagug

SEQ ID NO: 2122844 - RNA, 19 nt, Homo sapiens
  misc_RNA (1)...(19): siRNA sense strand
ccagagaaagacacaguug

SEQ ID NO: 2122845 - RNA, 19 nt, Homo sapiens
  misc_RNA (1)...(19): siRNA sense strand
gggaugcggaggaagauga

SEQ ID NO: 2122846 - RNA, 19 nt, Homo sapiens
  misc_RNA (1)...(19): siRNA sense strand
gaauuggagcucguacuga

SEQ ID NO: 2122847 - RNA, 19 nt, Homo sapiens
  misc_RNA (1)...(19): siRNA sense strand
gaaaugucuggagaaauug

SEQ ID NO: 2122848 - RNA, 19 nt, Homo sapiens
  misc_RNA (1)...(19): siRNA sense strand
gaggacaaccuugcucuca

SEQ ID NO: 2122849 - RNA, 19 nt, Homo sapiens
  misc_RNA (1)...(19): siRNA sense strand
uaacuacgcacugaacuag

SEQ ID NO: 2122850 - RNA, 19 nt, Homo sapiens
  misc_RNA (1)...(19): siRNA sense strand
ggauggaccagaagaagca

SEQ ID NO: 2122851 - RNA, 19 nt, Homo sapiens
  misc_RNA (1)...(19): siRNA sense strand
ggaugcugguuguuuccaa

SEQ ID NO: 2122852 - RNA, 19 nt, Homo sapiens
  misc_RNA (1)...(19): siRNA sense strand
ggcaggaucucggcucauc

SEQ ID NO: 2122853 - RNA, 19 nt, Homo sapiens
  misc_RNA (1)...(19): siRNA sense strand
ggagaugcaagaaaugucu

SEQ ID NO: 2122854 - RNA, 19 nt, Homo sapiens
  misc_RNA (1)...(19): siRNA sense strand
agcagaagcacuuggauaa

SEQ ID NO: 2122855 - RNA, 19 nt, Homo sapiens
  misc_RNA (1)...(19): siRNA sense strand
ggaagagagaagaggagaa

SEQ ID NO: 2122856 - RNA, 19 nt, Homo sapiens
  misc_RNA (1)...(19): siRNA sense strand
ggagagggagaugcaagaa

SEQ ID NO: 2122857 - RNA, 19 nt, Homo sapiens
  misc_RNA (1)...(19): siRNA sense strand
ggagccgccacaucacuuu

SEQ ID NO: 2122858 - RNA, 19 nt, Homo sapiens
  misc_RNA (1)...(19): siRNA sense strand
gggaaaggcgcaggacaga

SEQ ID NO: 2122859 - RNA, 19 nt, Homo sapiens
  misc_RNA (1)...(19): siRNA sense strand
ggacgaggacgaggaugga

SEQ ID NO: 2122860 - RNA, 19 nt, Homo sapiens
  misc_RNA (1)...(19): siRNA sense strand
acaaguacacgcuggaugu

SEQ ID NO: 2122861 - RNA, 19 nt, Homo sapiens
  misc_RNA (1)...(19): siRNA sense strand
ggacgaugaggacuuugug

SEQ ID NO: 2122862 - RNA, 19 nt, Homo sapiens
  misc_RNA (1)...(19): siRNA sense strand
ggaaaggcgcaggacagaa

SEQ ID NO: 2122863 - RNA, 19 nt, Homo sapiens
  misc_RNA (1)...(19): siRNA sense strand
aaaugaaggaacugaagaa

SEQ ID NO: 2122864 - RNA, 19 nt, Homo sapiens
  misc_RNA (1)...(19): siRNA sense strand
gcgcucgcauugggagaaa

SEQ ID NO: 2122865 - RNA, 19 nt, Homo sapiens
  misc_RNA (1)...(19): siRNA sense strand
gaacgaggacaaccuugcu

SEQ ID NO: 2122866 - RNA, 19 nt, Homo sapiens
  misc_RNA (1)...(19): siRNA sense strand
gcuaccacuucuuaagaca

SEQ ID NO: 2122867 - RNA, 19 nt, Homo sapiens
  misc_RNA (1)...(19): siRNA sense strand
ggagaaccccgacuaaauc

SEQ ID NO: 2122868 - RNA, 19 nt, Homo sapiens
  misc_RNA (1)...(19): siRNA sense strand
gcgacacacucaagcucau

SEQ ID NO: 2122869 - RNA, 19 nt, Homo sapiens
  misc_RNA (1)...(19): siRNA sense strand
ccacagccgggaagauugu

SEQ ID NO: 2122870 - RNA, 19 nt, Homo sapiens
  misc_RNA (1)...(19): siRNA sense strand
gaaaaugaaggaacugaag

SEQ ID NO: 2122871 - RNA, 19 nt, Homo sapiens
  misc_RNA (1)...(19): siRNA sense strand
acccugaguugaugagaga

SEQ ID NO: 2122872 - RNA, 19 nt, Homo sapiens
  misc_RNA (1)...(19): siRNA sense strand
ccacuugcggccugaguau

SEQ ID NO: 2122873 - RNA, 19 nt, Homo sapiens
  misc_RNA (1)...(19): siRNA sense strand
gguagaagagcucacaacu

SEQ ID NO: 2122874 - RNA, 19 nt, Homo sapiens
  misc_RNA (1)...(19): siRNA sense strand
ucucagccuuccagauugu

SEQ ID NO: 2122875 - RNA, 19 nt, Homo sapiens
  misc_RNA (1)...(19): siRNA sense strand
cuucuuaagacacaacaaa

SEQ ID NO: 2122876 - RNA, 19 nt, Homo sapiens
  misc_RNA (1)...(19): siRNA sense strand
uuaacuacgcacugaacua

SEQ ID NO: 2122877 - RNA, 19 nt, Homo sapiens
  misc_RNA (1)...(19): siRNA sense strand
gauuguggaggaacucuuc

SEQ ID NO: 2122878 - RNA, 19 nt, Homo sapiens
  misc_RNA (1)...(19): siRNA sense strand
ugaccugaaggcugaauug

SEQ ID NO: 2122879 - RNA, 19 nt, Homo sapiens
  misc_RNA (1)...(19): siRNA sense strand
cagaaaggaagagagaaga

SEQ ID NO: 2122880 - RNA, 19 nt, Homo sapiens
  misc_RNA (1)...(19): siRNA sense strand
cuugggcuaccacuucuua

SEQ ID NO: 2122881 - RNA, 19 nt, Homo sapiens
  misc_RNA (1)...(19): siRNA sense strand
ugaauuggagcucguacug

SEQ ID NO: 2122882 - RNA, 19 nt, Homo sapiens
  misc_RNA (1)...(19): siRNA sense strand
gacuaaauccugagaaaau

SEQ ID NO: 2122883 - RNA, 19 nt, Homo sapiens
  misc_RNA (1)...(19): siRNA sense strand
gaagcagaagcacuuggau

SEQ ID NO: 2122884 - RNA, 19 nt, Homo sapiens
  misc_RNA (1)...(19): siRNA sense strand
ggagaagcagaagcacuug

SEQ ID NO: 2122885 - RNA, 19 nt, Homo sapiens
  misc_RNA (1)...(19): siRNA sense strand
uaccacuucuuaagacaca

SEQ ID NO: 2122886 - RNA, 19 nt, Homo sapiens
  misc_RNA (1)...(19): siRNA sense strand
uggcagaaaggaagagaga

SEQ ID NO: 2122887 - RNA, 19 nt, Homo sapiens
  misc_RNA (1)...(19): siRNA sense strand
ggaggaggaaguggucaau

SEQ ID NO: 2122888 - RNA, 19 nt, Homo sapiens
  misc_RNA (1)...(19): siRNA sense strand
aggaagaugaggacgauga

SEQ ID NO: 2122889 - RNA, 19 nt, Homo sapiens
  misc_RNA (1)...(19): siRNA sense strand
gcacaaguacacgcuggau

SEQ ID NO: 2122890 - RNA, 19 nt, Homo sapiens
  misc_RNA (1)...(19): siRNA sense strand
gagggagaugcaagaaaug

SEQ ID NO: 2122891 - RNA, 19 nt, Homo sapiens
  misc_RNA (1)...(19): siRNA sense strand
aggaggaaguggucaaugc

SEQ ID NO: 2122892 - RNA, 19 nt, Homo sapiens
  misc_RNA (1)...(19): siRNA sense strand
ggaaggguggaaugagaag

SEQ ID NO: 2122893 - RNA, 19 nt, Homo sapiens
  misc_RNA (1)...(19): siRNA sense strand
cagagaaagacacaguugu

SEQ ID NO: 2122894 - RNA, 19 nt, Homo sapiens
  misc_RNA (1)...(19): siRNA sense strand
ggaagaugaggacgaugag

SEQ ID NO: 2122895 - RNA, 19 nt, Homo sapiens
  misc_RNA (1)...(19): siRNA sense strand
aggagaagcagaagcacuu

SEQ ID NO: 2122896 - RNA, 19 nt, Homo sapiens
  misc_RNA (1)...(19): siRNA sense strand
cacgguggauguuuaaagc

SEQ ID NO: 2122897 - RNA, 19 nt, Homo sapiens
  misc_RNA (1)...(19): siRNA sense strand
ugaaggugcaggagaacga

SEQ ID NO: 2122898 - RNA, 19 nt, Homo sapiens
  misc_RNA (1)...(19): siRNA sense strand
gaaccaaguggaagaagca

SEQ ID NO: 2122899 - RNA, 19 nt, Homo sapiens
  misc_RNA (1)...(19): siRNA sense strand
ccaaguggaagaagcagaa

SEQ ID NO: 2122900 - RNA, 19 nt, Homo sapiens
  misc_RNA (1)...(19): siRNA sense strand
gcaccgccuucaccuacga

SEQ ID NO: 2122901 - RNA, 19 nt, Homo sapiens
  misc_RNA (1)...(19): siRNA sense strand
agacgcaggugaagaucug

SEQ ID NO: 2122902 - RNA, 19 nt, Homo sapiens
  misc_RNA (1)...(19): siRNA sense strand
cagaaccgccgaaccaagu

SEQ ID NO: 2122903 - RNA, 19 nt, Homo sapiens
  misc_RNA (1)...(19): siRNA sense strand
ucguggcgcuggagaacaa

SEQ ID NO: 2122904 - RNA, 19 nt, Homo sapiens
  misc_RNA (1)...(19): siRNA sense strand
ccgagacgcaggugaagau

SEQ ID NO: 2122905 - RNA, 19 nt, Homo sapiens
  misc_RNA (1)...(19): siRNA sense strand
gaacggaaccucugcauuu

SEQ ID NO: 2122906 - RNA, 19 nt, Homo sapiens
  misc_RNA (1)...(19): siRNA sense strand
ggacggaccucugaacuug

SEQ ID NO: 2122907 - RNA, 19 nt, Homo sapiens
  misc_RNA (1)...(19): siRNA sense strand
gaacagcauucgucuccuu

SEQ ID NO: 2122908 - RNA, 19 nt, Homo sapiens
  misc_RNA (1)...(19): siRNA sense strand
gagauguccucuuugcuuu

SEQ ID NO: 2122909 - RNA, 19 nt, Homo sapiens
  misc_RNA (1)...(19): siRNA sense strand
gaaaggaagauuuguggaa

SEQ ID NO: 2122910 - RNA, 19 nt, Homo sapiens
  misc_RNA (1)...(19): siRNA sense strand
gaacaucauuaaccagauc

SEQ ID NO: 2122911 - RNA, 19 nt, Homo sapiens
  misc_RNA (1)...(19): siRNA sense strand
ggacaugauugaugacuac

SEQ ID NO: 2122912 - RNA, 19 nt, Homo sapiens
  misc_RNA (1)...(19): siRNA sense strand
gaaggaauacagcaaauca

SEQ ID NO: 2122913 - RNA, 19 nt, Homo sapiens
  misc_RNA (1)...(19): siRNA sense strand
gaagauuuguggaaggaau

SEQ ID NO: 2122914 - RNA, 19 nt, Homo sapiens
  misc_RNA (1)...(19): siRNA sense strand
gcagagaaaggaagauuug

SEQ ID NO: 2122915 - RNA, 19 nt, Homo sapiens
  misc_RNA (1)...(19): siRNA sense strand
gaggaggacuugagcaaca

SEQ ID NO: 2122916 - RNA, 19 nt, Homo sapiens
  misc_RNA (1)...(19): siRNA sense strand
ccagugaccugagaaguau

SEQ ID NO: 2122917 - RNA, 19 nt, Homo sapiens
  misc_RNA (1)...(19): siRNA sense strand
ucacagagaaccacaaaug

SEQ ID NO: 2122918 - RNA, 19 nt, Homo sapiens
  misc_RNA (1)...(19): siRNA sense strand
gcacuucgacguccuguuc

SEQ ID NO: 2122919 - RNA, 19 nt, Homo sapiens
  misc_RNA (1)...(19): siRNA sense strand
ccaccaagccugaaacaga

SEQ ID NO: 2122920 - RNA, 19 nt, Homo sapiens
  misc_RNA (1)...(19): siRNA sense strand
ccaacugccuucugcauuc

SEQ ID NO: 2122921 - RNA, 19 nt, Homo sapiens
  misc_RNA (1)...(19): siRNA sense strand
gaagauguagggagcuuug

SEQ ID NO: 2122922 - RNA, 19 nt, Homo sapiens
  misc_RNA (1)...(19): siRNA sense strand
gggaagcgcugaggcacuu

SEQ ID NO: 2122923 - RNA, 19 nt, Homo sapiens
  misc_RNA (1)...(19): siRNA sense strand
ugaaacagacgacaaggaa

SEQ ID NO: 2122924 - RNA, 19 nt, Homo sapiens
  misc_RNA (1)...(19): siRNA sense strand
gaugaagcguugcccuaug

SEQ ID NO: 2122925 - RNA, 19 nt, Homo sapiens
  misc_RNA (1)...(19): siRNA sense strand
gccagugaccugagaagua

SEQ ID NO: 2122926 - RNA, 19 nt, Homo sapiens
  misc_RNA (1)...(19): siRNA sense strand
ugucugagguggagagaga

SEQ ID NO: 2122927 - RNA, 19 nt, Homo sapiens
  misc_RNA (1)...(19): siRNA sense strand
gaaacagacgacaaggaaa

SEQ ID NO: 2122928 - RNA, 19 nt, Homo sapiens
  misc_RNA (1)...(19): siRNA sense strand
caaguucccugaggagauc

SEQ ID NO: 2122929 - RNA, 19 nt, Homo sapiens
  misc_RNA (1)...(19): siRNA sense strand
gcagagacggcugagauga

SEQ ID NO: 2122930 - RNA, 19 nt, Homo sapiens
  misc_RNA (1)...(19): siRNA sense strand
gcagcagccuugaucuucu

SEQ ID NO: 2122931 - RNA, 19 nt, Homo sapiens
  misc_RNA (1)...(19): siRNA sense strand
ccacaggccacaagagaga

SEQ ID NO: 2122932 - RNA, 19 nt, Homo sapiens
  misc_RNA (1)...(19): siRNA sense strand
gacgagauguccucuuugc

SEQ ID NO: 2122933 - RNA, 19 nt, Homo sapiens
  misc_RNA (1)...(19): siRNA sense strand
gcacuuucccuggauguug

SEQ ID NO: 2122934 - RNA, 19 nt, Homo sapiens
  misc_RNA (1)...(19): siRNA sense strand
ggacuugagcaacaacaau

SEQ ID NO: 2122935 - RNA, 19 nt, Homo sapiens
  misc_RNA (1)...(19): siRNA sense strand
gauguccucuuugcuuuca

SEQ ID NO: 2122936 - RNA, 19 nt, Homo sapiens
  misc_RNA (1)...(19): siRNA sense strand
cgagauguccucuuugcuu

SEQ ID NO: 2122937 - RNA, 19 nt, Homo sapiens
  misc_RNA (1)...(19): siRNA sense strand
ugacucaggacaugauuga

SEQ ID NO: 2122938 - RNA, 19 nt, Homo sapiens
  misc_RNA (1)...(19): siRNA sense strand
gaggagcgcguguucuuca

SEQ ID NO: 2122939 - RNA, 19 nt, Homo sapiens
  misc_RNA (1)...(19): siRNA sense strand
ggaacggaaccucugcauu

SEQ ID NO: 2122940 - RNA, 19 nt, Homo sapiens
  misc_RNA (1)...(19): siRNA sense strand
gaacaccuacacagagaag

SEQ ID NO: 2122941 - RNA, 19 nt, Homo sapiens
  misc_RNA (1)...(19): siRNA sense strand
ggacagcgagugugaacag

SEQ ID NO: 2122942 - RNA, 19 nt, Homo sapiens
  misc_RNA (1)...(19): siRNA sense strand
ccucgcagguuguuguaga

SEQ ID NO: 2122943 - RNA, 19 nt, Homo sapiens
  misc_RNA (1)...(19): siRNA sense strand
cucguacgcugccggcuua

SEQ ID NO: 2122944 - RNA, 19 nt, Homo sapiens
  misc_RNA (1)...(19): siRNA sense strand
cucaggacaugauugauga

SEQ ID NO: 2122945 - RNA, 19 nt, Homo sapiens
  misc_RNA (1)...(19): siRNA sense strand
cugaacaccuacacagaga

SEQ ID NO: 2122946 - RNA, 19 nt, Homo sapiens
  misc_RNA (1)...(19): siRNA sense strand
cuauaggccucgcuaacug

SEQ ID NO: 2122947 - RNA, 19 nt, Homo sapiens
  misc_RNA (1)...(19): siRNA sense strand
gcagagccagccacagaga

SEQ ID NO: 2122948 - RNA, 19 nt, Homo sapiens
  misc_RNA (1)...(19): siRNA sense strand
gcugagcugguacgacuuu

SEQ ID NO: 2122949 - RNA, 19 nt, Homo sapiens
  misc_RNA (1)...(19): siRNA sense strand
ggaugaagcguugcccuau

SEQ ID NO: 2122950 - RNA, 19 nt, Homo sapiens
  misc_RNA (1)...(19): siRNA sense strand
acaaauggccucgcagguu

SEQ ID NO: 2122951 - RNA, 19 nt, Homo sapiens
  misc_RNA (1)...(19): siRNA sense strand
cagccacggucaucuucaa

SEQ ID NO: 2122952 - RNA, 19 nt, Homo sapiens
  misc_RNA (1)...(19): siRNA sense strand
gacaagugccugccucaca

SEQ ID NO: 2122953 - RNA, 19 nt, Homo sapiens
  misc_RNA (1)...(19): siRNA sense strand
ucccacagcugccuucaag

SEQ ID NO: 2122954 - RNA, 19 nt, Homo sapiens
  misc_RNA (1)...(19): siRNA sense strand
ugcgggaccugaacaccua

SEQ ID NO: 2122955 - RNA, 19 nt, Homo sapiens
  misc_RNA (1)...(19): siRNA sense strand
cugaccagcugcagacgaa

SEQ ID NO: 2122956 - RNA, 19 nt, Homo sapiens
  misc_RNA (1)...(19): siRNA sense strand
ggaaggaauacagcaaauc

SEQ ID NO: 2122957 - RNA, 19 nt, Homo sapiens
  misc_RNA (1)...(19): siRNA sense strand
uggaaggaauacagcaaau

SEQ ID NO: 2122958 - RNA, 19 nt, Homo sapiens
  misc_RNA (1)...(19): siRNA sense strand
cacuuucccuggauguuga

SEQ ID NO: 2122959 - RNA, 19 nt, Homo sapiens
  misc_RNA (1)...(19): siRNA sense strand
gcugugggaaggcauuuga

SEQ ID NO: 2122960 - RNA, 19 nt, Homo sapiens
  misc_RNA (1)...(19): siRNA sense strand
agagacggcugagaugauc

SEQ ID NO: 2122961 - RNA, 19 nt, Homo sapiens
  misc_RNA (1)...(19): siRNA sense strand
ggacuucggguaccugacu

SEQ ID NO: 2122962 - RNA, 19 nt, Homo sapiens
  misc_RNA (1)...(19): siRNA sense strand
cagcagccuugaucuucug

SEQ ID NO: 2122963 - RNA, 19 nt, Homo sapiens
  misc_RNA (1)...(19): siRNA sense strand
cugcagagccagccacaga

SEQ ID NO: 2122964 - RNA, 19 nt, Homo sapiens
  misc_RNA (1)...(19): siRNA sense strand
gucagucaccgcagagaaa

SEQ ID NO: 2122965 - RNA, 19 nt, Homo sapiens
  misc_RNA (1)...(19): siRNA sense strand
guggaaggaauacagcaaa

SEQ ID NO: 2122966 - RNA, 19 nt, Homo sapiens
  misc_RNA (1)...(19): siRNA sense strand
agacauguccgagcuguuc

SEQ ID NO: 2122967 - RNA, 19 nt, Homo sapiens
  misc_RNA (1)...(19): siRNA sense strand
gcuuaagccaggauucguu

SEQ ID NO: 2122968 - RNA, 19 nt, Homo sapiens
  misc_RNA (1)...(19): siRNA sense strand
ugaacaucauuaaccagau

SEQ ID NO: 2122969 - RNA, 19 nt, Homo sapiens
  misc_RNA (1)...(19): siRNA sense strand
aaucacagagaaccacaaa

SEQ ID NO: 2122970 - RNA, 19 nt, Homo sapiens
  misc_RNA (1)...(19): siRNA sense strand
gcuguggccgugucuauag

SEQ ID NO: 2122971 - RNA, 19 nt, Homo sapiens
  misc_RNA (1)...(19): siRNA sense strand
uguguggccucguggucua

SEQ ID NO: 2122972 - RNA, 19 nt, Homo sapiens
  misc_RNA (1)...(19): siRNA sense strand
ucauuaaccagaucaugga

SEQ ID NO: 2122973 - RNA, 19 nt, Homo sapiens
  misc_RNA (1)...(19): siRNA sense strand
aaacagacgacaaggaaaa

SEQ ID NO: 2122974 - RNA, 19 nt, Homo sapiens
  misc_RNA (1)...(19): siRNA sense strand
agacgaacuaugccaguga

SEQ ID NO: 2122975 - RNA, 19 nt, Homo sapiens
  misc_RNA (1)...(19): siRNA sense strand
aggaagauuuguggaagga

SEQ ID NO: 2122976 - RNA, 19 nt, Homo sapiens
  misc_RNA (1)...(19): siRNA sense strand
agagaaaggaagauuugug

SEQ ID NO: 2122977 - RNA, 19 nt, Homo sapiens
  misc_RNA (1)...(19): siRNA sense strand
gggucuaccugcuguuggu

SEQ ID NO: 2122978 - RNA, 19 nt, Homo sapiens
  misc_RNA (1)...(19): siRNA sense strand
aggacaugauugaugacua

SEQ ID NO: 2122979 - RNA, 19 nt, Homo sapiens
  misc_RNA (1)...(19): siRNA sense strand
ggaaggucacccagacucu

SEQ ID NO: 2122980 - RNA, 19 nt, Homo sapiens
  misc_RNA (1)...(19): siRNA sense strand
gagauuucugcgucaaguu

SEQ ID NO: 2122981 - RNA, 19 nt, Homo sapiens
  misc_RNA (1)...(19): siRNA sense strand
cagagacggcugagaugau

SEQ ID NO: 2122982 - RNA, 19 nt, Homo sapiens
  misc_RNA (1)...(19): siRNA sense strand
acucucagcuaaggccaaa

SEQ ID NO: 2122983 - RNA, 19 nt, Homo sapiens
  misc_RNA (1)...(19): siRNA sense strand
ggaccugaacaccuacaca

SEQ ID NO: 2122984 - RNA, 19 nt, Homo sapiens
  misc_RNA (1)...(19): siRNA sense strand
gcacccacugcuacauguu

SEQ ID NO: 2122985 - RNA, 19 nt, Homo sapiens
  misc_RNA (1)...(19): siRNA sense strand
cgacuuuggcagacaguuc

SEQ ID NO: 2122986 - RNA, 19 nt, Homo sapiens
  misc_RNA (1)...(19): siRNA sense strand
cuccucaaaucacagagaa

SEQ ID NO: 2122987 - RNA, 19 nt, Homo sapiens
  misc_RNA (1)...(19): siRNA sense strand
agagauuucugcgucaagu

SEQ ID NO: 2122988 - RNA, 19 nt, Homo sapiens
  misc_RNA (1)...(19): siRNA sense strand
gacuugagcaacaacaauc

SEQ ID NO: 2122989 - RNA, 19 nt, Homo sapiens
  misc_RNA (1)...(19): siRNA sense strand
ggaaaaggaggaggacuug

SEQ ID NO: 2122990 - RNA, 19 nt, Homo sapiens
  misc_RNA (1)...(19): siRNA sense strand
ggaggagcgcguguucuuc

SEQ ID NO: 2122991 - RNA, 19 nt, Homo sapiens
  misc_RNA (1)...(19): siRNA sense strand
gggccacucucagcuaagg

SEQ ID NO: 2122992 - RNA, 19 nt, Homo sapiens
  misc_RNA (1)...(19): siRNA sense strand
aacggaaccucugcauuuc

SEQ ID NO: 2122993 - RNA, 19 nt, Homo sapiens
  misc_RNA (1)...(19): siRNA sense strand
ggagcgcguguucuucaug

SEQ ID NO: 2122994 - RNA, 19 nt, Homo sapiens
  misc_RNA (1)...(19): siRNA sense strand
gcagcugugggaaggcauu

SEQ ID NO: 2122995 - RNA, 19 nt, Homo sapiens
  misc_RNA (1)...(19): siRNA sense strand
gacgaggccuguggcuucu

SEQ ID NO: 2122996 - RNA, 19 nt, Homo sapiens
  misc_RNA (1)...(19): siRNA sense strand
aagauuuguggaaggaaua

SEQ ID NO: 2122997 - RNA, 19 nt, Homo sapiens
  misc_RNA (1)...(19): siRNA sense strand
gcaaacgacugcuacauug

SEQ ID NO: 2122998 - RNA, 19 nt, Homo sapiens
  misc_RNA (1)...(19): siRNA sense strand
gaaauccggacguucuuua

SEQ ID NO: 2122999 - RNA, 19 nt, Homo sapiens
  misc_RNA (1)...(19): siRNA sense strand
gaacaugacagcacagaau

SEQ ID NO: 2123000 - RNA, 19 nt, Homo sapiens
  misc_RNA (1)...(19): siRNA sense strand
ggacacggguuucucuaug

SEQ ID NO: 2123001 - RNA, 19 nt, Homo sapiens
  misc_RNA (1)...(19): siRNA sense strand
gcacagaauuacacguaug

SEQ ID NO: 2123002 - RNA, 19 nt, Homo sapiens
  misc_RNA (1)...(19): siRNA sense strand
ggaaggacgccuggaauuu

SEQ ID NO: 2123003 - RNA, 19 nt, Homo sapiens
  misc_RNA (1)...(19): siRNA sense strand
gacaagcaguucuucaaug

SEQ ID NO: 2123004 - RNA, 19 nt, Homo sapiens
  misc_RNA (1)...(19): siRNA sense strand
gaaggacgccuggaauuug

SEQ ID NO: 2123005 - RNA, 19 nt, Homo sapiens
  misc_RNA (1)...(19): siRNA sense strand
cgggacagcuugugacuga

SEQ ID NO: 2123006 - RNA, 19 nt, Homo sapiens
  misc_RNA (1)...(19): siRNA sense strand
caaaggaaauccggacguu

SEQ ID NO: 2123007 - RNA, 19 nt, Homo sapiens
  misc_RNA (1)...(19): siRNA sense strand
caacaacggcuaccagaug

SEQ ID NO: 2123008 - RNA, 19 nt, Homo sapiens
  misc_RNA (1)...(19): siRNA sense strand
gacacggguuucucuauga

SEQ ID NO: 2123009 - RNA, 19 nt, Homo sapiens
  misc_RNA (1)...(19): siRNA sense strand
gcuacaaccucacgcugaa

SEQ ID NO: 2123010 - RNA, 19 nt, Homo sapiens
  misc_RNA (1)...(19): siRNA sense strand
gugggaagcuguggaaaug

SEQ ID NO: 2123011 - RNA, 19 nt, Homo sapiens
  misc_RNA (1)...(19): siRNA sense strand
gggaagcuguggaaaugga

SEQ ID NO: 2123012 - RNA, 19 nt, Homo sapiens
  misc_RNA (1)...(19): siRNA sense strand
ccucggaccagcagaaaua

SEQ ID NO: 2123013 - RNA, 19 nt, Homo sapiens
  misc_RNA (1)...(19): siRNA sense strand
ggcgagcacccuucaauuu

SEQ ID NO: 2123014 - RNA, 19 nt, Homo sapiens
  misc_RNA (1)...(19): siRNA sense strand
ggaauggcguggcugucuu

SEQ ID NO: 2123015 - RNA, 19 nt, Homo sapiens
  misc_RNA (1)...(19): siRNA sense strand
cguaugaccugcuuauucu

SEQ ID NO: 2123016 - RNA, 19 nt, Homo sapiens
  misc_RNA (1)...(19): siRNA sense strand
ggacguucuuuauucacuu

SEQ ID NO: 2123017 - RNA, 19 nt, Homo sapiens
  misc_RNA (1)...(19): siRNA sense strand
cagcacagaauuacacgua

SEQ ID NO: 2123018 - RNA, 19 nt, Homo sapiens
  misc_RNA (1)...(19): siRNA sense strand
gcaccuugaugaccagauc

SEQ ID NO: 2123019 - RNA, 19 nt, Homo sapiens
  misc_RNA (1)...(19): siRNA sense strand
ggucuacacugugcaggaa

SEQ ID NO: 2123020 - RNA, 19 nt, Homo sapiens
  misc_RNA (1)...(19): siRNA sense strand
gcgagcacccuucaauuug

SEQ ID NO: 2123021 - RNA, 19 nt, Homo sapiens
  misc_RNA (1)...(19): siRNA sense strand
ccacgacgcccacccuauu

SEQ ID NO: 2123022 - RNA, 19 nt, Homo sapiens
  misc_RNA (1)...(19): siRNA sense strand
ggcaaacgacugcuacauu

SEQ ID NO: 2123023 - RNA, 19 nt, Homo sapiens
  misc_RNA (1)...(19): siRNA sense strand
ggaggaaggacgccuggaa

SEQ ID NO: 2123024 - RNA, 19 nt, Homo sapiens
  misc_RNA (1)...(19): siRNA sense strand
gacguucuuuauucacuuu

SEQ ID NO: 2123025 - RNA, 19 nt, Homo sapiens
  misc_RNA (1)...(19): siRNA sense strand
ggcaguacuucuacaggaa

SEQ ID NO: 2123026 - RNA, 19 nt, Homo sapiens
  misc_RNA (1)...(19): siRNA sense strand
ggauagagcaggaguacca

SEQ ID NO: 2123027 - RNA, 19 nt, Homo sapiens
  misc_RNA (1)...(19): siRNA sense strand
gaauuacacguaugcaauc

SEQ ID NO: 2123028 - RNA, 19 nt, Homo sapiens
  misc_RNA (1)...(19): siRNA sense strand
cagcggaggcccuacguuu

SEQ ID NO: 2123029 - RNA, 19 nt, Homo sapiens
  misc_RNA (1)...(19): siRNA sense strand
cagccaacaucaaccucua

SEQ ID NO: 2123030 - RNA, 19 nt, Homo sapiens
  misc_RNA (1)...(19): siRNA sense strand
acacggagcacucucagaa

SEQ ID NO: 2123031 - RNA, 19 nt, Homo sapiens
  misc_RNA (1)...(19): siRNA sense strand
ggcccuacguuuccuaugu

SEQ ID NO: 2123032 - RNA, 19 nt, Homo sapiens
  misc_RNA (1)...(19): siRNA sense strand
gaaaucuucacgcacauca

SEQ ID NO: 2123033 - RNA, 19 nt, Homo sapiens
  misc_RNA (1)...(19): siRNA sense strand
gcguaugaccugcuuauuc

SEQ ID NO: 2123034 - RNA, 19 nt, Homo sapiens
  misc_RNA (1)...(19): siRNA sense strand
ggaaauccggacguucuuu

SEQ ID NO: 2123035 - RNA, 19 nt, Homo sapiens
  misc_RNA (1)...(19): siRNA sense strand
ggacagcuugugacugaga

SEQ ID NO: 2123036 - RNA, 19 nt, Homo sapiens
  misc_RNA (1)...(19): siRNA sense strand
gaaggacacggguuucucu

SEQ ID NO: 2123037 - RNA, 19 nt, Homo sapiens
  misc_RNA (1)...(19): siRNA sense strand
ggaccagcaccaaccuaaa

SEQ ID NO: 2123038 - RNA, 19 nt, Homo sapiens
  misc_RNA (1)...(19): siRNA sense strand
acacggguuucucuaugaa

SEQ ID NO: 2123039 - RNA, 19 nt, Homo sapiens
  misc_RNA (1)...(19): siRNA sense strand
gcucuaccaccuauaugaa

SEQ ID NO: 2123040 - RNA, 19 nt, Homo sapiens
  misc_RNA (1)...(19): siRNA sense strand
auccagaacucaacagaga

SEQ ID NO: 2123041 - RNA, 19 nt, Homo sapiens
  misc_RNA (1)...(19): siRNA sense strand
ggaguccgcgucacagaug

SEQ ID NO: 2123042 - RNA, 19 nt, Homo sapiens
  misc_RNA (1)...(19): siRNA sense strand
acaagcaguucuucaaugc

SEQ ID NO: 2123043 - RNA, 19 nt, Homo sapiens
  misc_RNA (1)...(19): siRNA sense strand
cgagcacccuucaauuugg

SEQ ID NO: 2123044 - RNA, 19 nt, Homo sapiens
  misc_RNA (1)...(19): siRNA sense strand
gagccagcgccuuguugua

SEQ ID NO: 2123045 - RNA, 19 nt, Homo sapiens
  misc_RNA (1)...(19): siRNA sense strand
ucucagagcggcaggaaau

SEQ ID NO: 2123046 - RNA, 19 nt, Homo sapiens
  misc_RNA (1)...(19): siRNA sense strand
gaggaaggacgccuggaau

SEQ ID NO: 2123047 - RNA, 19 nt, Homo sapiens
  misc_RNA (1)...(19): siRNA sense strand
ucaguuaccggcacuacaa

SEQ ID NO: 2123048 - RNA, 19 nt, Homo sapiens
  misc_RNA (1)...(19): siRNA sense strand
agaauuacacguaugcaau

SEQ ID NO: 2123049 - RNA, 19 nt, Homo sapiens
  misc_RNA (1)...(19): siRNA sense strand
gcccuacguuuccuaugug

SEQ ID NO: 2123050 - RNA, 19 nt, Homo sapiens
  misc_RNA (1)...(19): siRNA sense strand
ugacaagcaguucuucaau

SEQ ID NO: 2123051 - RNA, 19 nt, Homo sapiens
  misc_RNA (1)...(19): siRNA sense strand
gccagcaggucaucuacuc

SEQ ID NO: 2123052 - RNA, 19 nt, Homo sapiens
  misc_RNA (1)...(19): siRNA sense strand
acaugacagcacagaauua

SEQ ID NO: 2123053 - RNA, 19 nt, Homo sapiens
  misc_RNA (1)...(19): siRNA sense strand
gcacagcaucugggagaga

SEQ ID NO: 2123054 - RNA, 19 nt, Homo sapiens
  misc_RNA (1)...(19): siRNA sense strand
gccagcgccuuguuguaug

SEQ ID NO: 2123055 - RNA, 19 nt, Homo sapiens
  misc_RNA (1)...(19): siRNA sense strand
caggucaucuacucagaca

SEQ ID NO: 2123056 - RNA, 19 nt, Homo sapiens
  misc_RNA (1)...(19): siRNA sense strand
cacagaaggacacggguuu

SEQ ID NO: 2123057 - RNA, 19 nt, Homo sapiens
  misc_RNA (1)...(19): siRNA sense strand
gcacaucauggaccaguac

SEQ ID NO: 2123058 - RNA, 19 nt, Homo sapiens
  misc_RNA (1)...(19): siRNA sense strand
aaggacgccuggaauuugu

SEQ ID NO: 2123059 - RNA, 19 nt, Homo sapiens
  misc_RNA (1)...(19): siRNA sense strand
ggaacaugacagcacagaa

SEQ ID NO: 2123060 - RNA, 19 nt, Homo sapiens
  misc_RNA (1)...(19): siRNA sense strand
gugacaagcaguucuucaa

SEQ ID NO: 2123061 - RNA, 19 nt, Homo sapiens
  misc_RNA (1)...(19): siRNA sense strand
gaugugacaagcaguucuu

SEQ ID NO: 2123062 - RNA, 19 nt, Homo sapiens
  misc_RNA (1)...(19): siRNA sense strand
gaucgacuacgaccugaag

SEQ ID NO: 2123063 - RNA, 19 nt, Homo sapiens
  misc_RNA (1)...(19): siRNA sense strand
uaccggcacuacaacauca

SEQ ID NO: 2123064 - RNA, 19 nt, Homo sapiens
  misc_RNA (1)...(19): siRNA sense strand
ucauggaccaguacagcua

SEQ ID NO: 2123065 - RNA, 19 nt, Homo sapiens
  misc_RNA (1)...(19): siRNA sense strand
gcgcgugacccaggaauuc

SEQ ID NO: 2123066 - RNA, 19 nt, Homo sapiens
  misc_RNA (1)...(19): siRNA sense strand
aaacgacugcuacauugug

SEQ ID NO: 2123067 - RNA, 19 nt, Homo sapiens
  misc_RNA (1)...(19): siRNA sense strand
gaauggcguggcugucuuc

SEQ ID NO: 2123068 - RNA, 19 nt, Homo sapiens
  misc_RNA (1)...(19): siRNA sense strand
gcucccggaucgacuacga

SEQ ID NO: 2123069 - RNA, 19 nt, Homo sapiens
  misc_RNA (1)...(19): siRNA sense strand
gaccagcaccaaccuaaac

SEQ ID NO: 2123070 - RNA, 19 nt, Homo sapiens
  misc_RNA (1)...(19): siRNA sense strand
uccgauaacuaccuguuca

SEQ ID NO: 2123071 - RNA, 19 nt, Homo sapiens
  misc_RNA (1)...(19): siRNA sense strand
caaacgacugcuacauugu

SEQ ID NO: 2123072 - RNA, 19 nt, Homo sapiens
  misc_RNA (1)...(19): siRNA sense strand
ccucgcagauccagaacuc

SEQ ID NO: 2123073 - RNA, 19 nt, Homo sapiens
  misc_RNA (1)...(19): siRNA sense strand
cacccugacuguugguuuc

SEQ ID NO: 2123074 - RNA, 19 nt, Homo sapiens
  misc_RNA (1)...(19): siRNA sense strand
ggucaggauuuuacuggaa

SEQ ID NO: 2123075 - RNA, 19 nt, Homo sapiens
  misc_RNA (1)...(19): siRNA sense strand
ggagcacucucagaaucuc

SEQ ID NO: 2123076 - RNA, 19 nt, Homo sapiens
  misc_RNA (1)...(19): siRNA sense strand
acggagcacucucagaauc

SEQ ID NO: 2123077 - RNA, 19 nt, Homo sapiens
  misc_RNA (1)...(19): siRNA sense strand
gcagauccagaacucaaca

SEQ ID NO: 2123078 - RNA, 19 nt, Homo sapiens
  misc_RNA (1)...(19): siRNA sense strand
ccaaggugagagacaugua

SEQ ID NO: 2123079 - RNA, 19 nt, Homo sapiens
  misc_RNA (1)...(19): siRNA sense strand
gaguccgcgucacagauga

SEQ ID NO: 2123080 - RNA, 19 nt, Homo sapiens
  misc_RNA (1)...(19): siRNA sense strand
ggucaucuacucagacaac

SEQ ID NO: 2123081 - RNA, 19 nt, Homo sapiens
  misc_RNA (1)...(19): siRNA sense strand
cagaauuacacguaugcaa

SEQ ID NO: 2123082 - RNA, 19 nt, Homo sapiens
  misc_RNA (1)...(19): siRNA sense strand
gacgugggcugggucuaca

SEQ ID NO: 2123083 - RNA, 19 nt, Homo sapiens
  misc_RNA (1)...(19): siRNA sense strand
uaugaccugcuuauucuga

SEQ ID NO: 2123084 - RNA, 19 nt, Homo sapiens
  misc_RNA (1)...(19): siRNA sense strand
ggugcaguuugccaacaug

SEQ ID NO: 2123085 - RNA, 19 nt, Homo sapiens
  misc_RNA (1)...(19): siRNA sense strand
auccggacguucuuuauuc

SEQ ID NO: 2123086 - RNA, 19 nt, Homo sapiens
  misc_RNA (1)...(19): siRNA sense strand
caucggaggccaggucaug

SEQ ID NO: 2123087 - RNA, 19 nt, Homo sapiens
  misc_RNA (1)...(19): siRNA sense strand
gauuguggcgggacagcuu

SEQ ID NO: 2123088 - RNA, 19 nt, Homo sapiens
  misc_RNA (1)...(19): siRNA sense strand
gauccugcagcucacagaa

SEQ ID NO: 2123089 - RNA, 19 nt, Homo sapiens
  misc_RNA (1)...(19): siRNA sense strand
ggaccugggauuugagcau

SEQ ID NO: 2123090 - RNA, 19 nt, Homo sapiens
  misc_RNA (1)...(19): siRNA sense strand
ggcucuaccaccuauauga

SEQ ID NO: 2123091 - RNA, 19 nt, Homo sapiens
  misc_RNA (1)...(19): siRNA sense strand
gcggcucuaccaccuauau

SEQ ID NO: 2123092 - RNA, 19 nt, Homo sapiens
  misc_RNA (1)...(19): siRNA sense strand
cacgacgcccacccuauuu

SEQ ID NO: 2123093 - RNA, 19 nt, Homo sapiens
  misc_RNA (1)...(19): siRNA sense strand
gugcugcucgaccaggaua

SEQ ID NO: 2123094 - RNA, 19 nt, Homo sapiens
  misc_RNA (1)...(19): siRNA sense strand
gaggaccagcaccaaccua

SEQ ID NO: 2123095 - RNA, 19 nt, Homo sapiens
  misc_RNA (1)...(19): siRNA sense strand
ggaaaucuucacgcacauc

SEQ ID NO: 2123096 - RNA, 19 nt, Homo sapiens
  misc_RNA (1)...(19): siRNA sense strand
ggacgccuggaauuuguca

SEQ ID NO: 2123097 - RNA, 19 nt, Homo sapiens
  misc_RNA (1)...(19): siRNA sense strand
ggaagaagaugcagagaaa

SEQ ID NO: 2123098 - RNA, 19 nt, Homo sapiens
  misc_RNA (1)...(19): siRNA sense strand
gacaagagcucgagaaaug

SEQ ID NO: 2123099 - RNA, 19 nt, Homo sapiens
  misc_RNA (1)...(19): siRNA sense strand
gaacaagucuaaagucugu

SEQ ID NO: 2123100 - RNA, 19 nt, Homo sapiens
  misc_RNA (1)...(19): siRNA sense strand
gcaaagagaacacagauuu

SEQ ID NO: 2123101 - RNA, 19 nt, Homo sapiens
  misc_RNA (1)...(19): siRNA sense strand
caaagcagguugucaguuu

SEQ ID NO: 2123102 - RNA, 19 nt, Homo sapiens
  misc_RNA (1)...(19): siRNA sense strand
gaaagaaggccauuacuau

SEQ ID NO: 2123103 - RNA, 19 nt, Homo sapiens
  misc_RNA (1)...(19): siRNA sense strand
gaaaggacacagaguauaa

SEQ ID NO: 2123104 - RNA, 19 nt, Homo sapiens
  misc_RNA (1)...(19): siRNA sense strand
gaagagcgccuguuagauu

SEQ ID NO: 2123105 - RNA, 19 nt, Homo sapiens
  misc_RNA (1)...(19): siRNA sense strand
agaaaugccugcaguuaua

SEQ ID NO: 2123106 - RNA, 19 nt, Homo sapiens
  misc_RNA (1)...(19): siRNA sense strand
aaacagaccuggugggaaa

SEQ ID NO: 2123107 - RNA, 19 nt, Homo sapiens
  misc_RNA (1)...(19): siRNA sense strand
ggaaagaagcagugaagua

SEQ ID NO: 2123108 - RNA, 19 nt, Homo sapiens
  misc_RNA (1)...(19): siRNA sense strand
gaaugaaucccuggaaaua

SEQ ID NO: 2123109 - RNA, 19 nt, Homo sapiens
  misc_RNA (1)...(19): siRNA sense strand
gaaaagaccuguacaugga

SEQ ID NO: 2123110 - RNA, 19 nt, Homo sapiens
  misc_RNA (1)...(19): siRNA sense strand
gaagaauccacacaguuua

SEQ ID NO: 2123111 - RNA, 19 nt, Homo sapiens
  misc_RNA (1)...(19): siRNA sense strand
ugagaaagaugaagcaaau

SEQ ID NO: 2123112 - RNA, 19 nt, Homo sapiens
  misc_RNA (1)...(19): siRNA sense strand
gaaaacacauucauucuug

SEQ ID NO: 2123113 - RNA, 19 nt, Homo sapiens
  misc_RNA (1)...(19): siRNA sense strand
ggauguagcccaagauaaa

SEQ ID NO: 2123114 - RNA, 19 nt, Homo sapiens
  misc_RNA (1)...(19): siRNA sense strand
gaagaauguuacacaaaug

SEQ ID NO: 2123115 - RNA, 19 nt, Homo sapiens
  misc_RNA (1)...(19): siRNA sense strand
gaaaggaacauucauacug

SEQ ID NO: 2123116 - RNA, 19 nt, Homo sapiens
  misc_RNA (1)...(19): siRNA sense strand
gaacacugauauacaagga

SEQ ID NO: 2123117 - RNA, 19 nt, Homo sapiens
  misc_RNA (1)...(19): siRNA sense strand
gcucagacaucacuggauu

SEQ ID NO: 2123118 - RNA, 19 nt, Homo sapiens
  misc_RNA (1)...(19): siRNA sense strand
gacgauagcugguacagau

SEQ ID NO: 2123119 - RNA, 19 nt, Homo sapiens
  misc_RNA (1)...(19): siRNA sense strand
ucugaaagcuccucaaguu

SEQ ID NO: 2123120 - RNA, 19 nt, Homo sapiens
  misc_RNA (1)...(19): siRNA sense strand
gaauguagcaugaaugaau

SEQ ID NO: 2123121 - RNA, 19 nt, Homo sapiens
  misc_RNA (1)...(19): siRNA sense strand
gcagguacuuucauugaug

SEQ ID NO: 2123122 - RNA, 19 nt, Homo sapiens
  misc_RNA (1)...(19): siRNA sense strand
cgaaaucaauccucuguuc

SEQ ID NO: 2123123 - RNA, 19 nt, Homo sapiens
  misc_RNA (1)...(19): siRNA sense strand
uagacucucucccaucuua

SEQ ID NO: 2123124 - RNA, 19 nt, Homo sapiens
  misc_RNA (1)...(19): siRNA sense strand
gcucugguaucgagacuuu

SEQ ID NO: 2123125 - RNA, 19 nt, Homo sapiens
  misc_RNA (1)...(19): siRNA sense strand
ggaaacccuucgugucauu

SEQ ID NO: 2123126 - RNA, 19 nt, Homo sapiens
  misc_RNA (1)...(19): siRNA sense strand
gaugaaagcucugguaucg

SEQ ID NO: 2123127 - RNA, 19 nt, Homo sapiens
  misc_RNA (1)...(19): siRNA sense strand
gaaaauggguuaaauaagg

SEQ ID NO: 2123128 - RNA, 19 nt, Homo sapiens
  misc_RNA (1)...(19): siRNA sense strand
gcaaaacaguagaacuuua

SEQ ID NO: 2123129 - RNA, 19 nt, Homo sapiens
  misc_RNA (1)...(19): siRNA sense strand
gaagaaacacguucagaca

SEQ ID NO: 2123130 - RNA, 19 nt, Homo sapiens
  misc_RNA (1)...(19): siRNA sense strand
ugaaggaucugguauaaac

SEQ ID NO: 2123131 - RNA, 19 nt, Homo sapiens
  misc_RNA (1)...(19): siRNA sense strand
guagaaaugccugcaguua

SEQ ID NO: 2123132 - RNA, 19 nt, Homo sapiens
  misc_RNA (1)...(19): siRNA sense strand
aggcagaucucaaaccuuu

SEQ ID NO: 2123133 - RNA, 19 nt, Homo sapiens
  misc_RNA (1)...(19): siRNA sense strand
ccuagagucucgucaaauu

SEQ ID NO: 2123134 - RNA, 19 nt, Homo sapiens
  misc_RNA (1)...(19): siRNA sense strand
gaucugguauaaacucuug

SEQ ID NO: 2123135 - RNA, 19 nt, Homo sapiens
  misc_RNA (1)...(19): siRNA sense strand
gaaagcuccucaaguucuu

SEQ ID NO: 2123136 - RNA, 19 nt, Homo sapiens
  misc_RNA (1)...(19): siRNA sense strand
guucuaaucuuucaacaag

SEQ ID NO: 2123137 - RNA, 19 nt, Homo sapiens
  misc_RNA (1)...(19): siRNA sense strand
gcucagaagcaaauuguaa

SEQ ID NO: 2123138 - RNA, 19 nt, Homo sapiens
  misc_RNA (1)...(19): siRNA sense strand
gauaugugguguugacaga

SEQ ID NO: 2123139 - RNA, 19 nt, Homo sapiens
  misc_RNA (1)...(19): siRNA sense strand
cggcagauguaaauaacua

SEQ ID NO: 2123140 - RNA, 19 nt, Homo sapiens
  misc_RNA (1)...(19): siRNA sense strand
gaacauucauacuggaagu

SEQ ID NO: 2123141 - RNA, 19 nt, Homo sapiens
  misc_RNA (1)...(19): siRNA sense strand
caagaaaucaugacugugu

SEQ ID NO: 2123142 - RNA, 19 nt, Homo sapiens
  misc_RNA (1)...(19): siRNA sense strand
cuaaagagacacccaguaa

SEQ ID NO: 2123143 - RNA, 19 nt, Homo sapiens
  misc_RNA (1)...(19): siRNA sense strand
gggagagagugguuuagaa

SEQ ID NO: 2123144 - RNA, 19 nt, Homo sapiens
  misc_RNA (1)...(19): siRNA sense strand
gcaaauauucccauuccuu

SEQ ID NO: 2123145 - RNA, 19 nt, Homo sapiens
  misc_RNA (1)...(19): siRNA sense strand
cugaagggauugcaucuuu

SEQ ID NO: 2123146 - RNA, 19 nt, Homo sapiens
  misc_RNA (1)...(19): siRNA sense strand
guacagaugucuuuaugac

SEQ ID NO: 2123147 - RNA, 19 nt, Homo sapiens
  misc_RNA (1)...(19): siRNA sense strand
gaaauagaaagaacugaug

SEQ ID NO: 2123148 - RNA, 19 nt, Homo sapiens
  misc_RNA (1)...(19): siRNA sense strand
ugaagaauccacacaguuu

SEQ ID NO: 2123149 - RNA, 19 nt, Homo sapiens
  misc_RNA (1)...(19): siRNA sense strand
gcaaugcaguaauucuguu

SEQ ID NO: 2123150 - RNA, 19 nt, Homo sapiens
  misc_RNA (1)...(19): siRNA sense strand
uaccagaggacaauaaaua

SEQ ID NO: 2123151 - RNA, 19 nt, Homo sapiens
  misc_RNA (1)...(19): siRNA sense strand
gacauaaaccugaaggaaa

SEQ ID NO: 2123152 - RNA, 19 nt, Homo sapiens
  misc_RNA (1)...(19): siRNA sense strand
gaaagaagcagugaaguac

SEQ ID NO: 2123153 - RNA, 19 nt, Homo sapiens
  misc_RNA (1)...(19): siRNA sense strand
gcagaauguugcauagugu

SEQ ID NO: 2123154 - RNA, 19 nt, Homo sapiens
  misc_RNA (1)...(19): siRNA sense strand
gaaaauuccuucccagguu

SEQ ID NO: 2123155 - RNA, 19 nt, Homo sapiens
  misc_RNA (1)...(19): siRNA sense strand
ggaaauguacuaugaagca

SEQ ID NO: 2123156 - RNA, 19 nt, Homo sapiens
  misc_RNA (1)...(19): siRNA sense strand
uaaugaagagcgccuguua

SEQ ID NO: 2123157 - RNA, 19 nt, Homo sapiens
  misc_RNA (1)...(19): siRNA sense strand
gaaacacguucagacaaug

SEQ ID NO: 2123158 - RNA, 19 nt, Homo sapiens
  misc_RNA (1)...(19): siRNA sense strand
cagcagugguucugucaaa

SEQ ID NO: 2123159 - RNA, 19 nt, Homo sapiens
  misc_RNA (1)...(19): siRNA sense strand
ucuaugaaguggauauuga

SEQ ID NO: 2123160 - RNA, 19 nt, Homo sapiens
  misc_RNA (1)...(19): siRNA sense strand
aaugaaggaucugguauaa

SEQ ID NO: 2123161 - RNA, 19 nt, Homo sapiens
  misc_RNA (1)...(19): siRNA sense strand
gaagcaggcucaaguucca

SEQ ID NO: 2123162 - RNA, 19 nt, Homo sapiens
  misc_RNA (1)...(19): siRNA sense strand
gaaagucggauuuugaaua

SEQ ID NO: 2123163 - RNA, 19 nt, Homo sapiens
  misc_RNA (1)...(19): siRNA sense strand
ggaagaauugucugaauca

SEQ ID NO: 2123164 - RNA, 19 nt, Homo sapiens
  misc_RNA (1)...(19): siRNA sense strand
ggauacaagugaucugaca

SEQ ID NO: 2123165 - RNA, 19 nt, Homo sapiens
  misc_RNA (1)...(19): siRNA sense strand
ggaaucagggagaauuaaa

SEQ ID NO: 2123166 - RNA, 19 nt, Homo sapiens
  misc_RNA (1)...(19): siRNA sense strand
caagggagagagugguuua

SEQ ID NO: 2123167 - RNA, 19 nt, Homo sapiens
  misc_RNA (1)...(19): siRNA sense strand
gaagaguucccuguauuga

SEQ ID NO: 2123168 - RNA, 19 nt, Homo sapiens
  misc_RNA (1)...(19): siRNA sense strand
guugucaguuuccugcuua

SEQ ID NO: 2123169 - RNA, 19 nt, Homo sapiens
  misc_RNA (1)...(19): siRNA sense strand
cgaagauccuggacuugaa

SEQ ID NO: 2123170 - RNA, 19 nt, Homo sapiens
  misc_RNA (1)...(19): siRNA sense strand
cagucuagauugcuaauau

SEQ ID NO: 2123171 - RNA, 19 nt, Homo sapiens
  misc_RNA (1)...(19): siRNA sense strand
gaaaugccugcaguuauaa

SEQ ID NO: 2123172 - RNA, 19 nt, Homo sapiens
  misc_RNA (1)...(19): siRNA sense strand
agucuaaagucuguucuua

SEQ ID NO: 2123173 - RNA, 19 nt, Homo sapiens
  misc_RNA (1)...(19): siRNA sense strand
gcgaggaagaaauuaauaa

SEQ ID NO: 2123174 - RNA, 19 nt, Homo sapiens
  misc_RNA (1)...(19): siRNA sense strand
uuagaaagcucagaagcaa

SEQ ID NO: 2123175 - RNA, 19 nt, Homo sapiens
  misc_RNA (1)...(19): siRNA sense strand
ggacacagaguauaaagag

SEQ ID NO: 2123176 - RNA, 19 nt, Homo sapiens
  misc_RNA (1)...(19): siRNA sense strand
uaaagucuguucuuacucu

SEQ ID NO: 2123177 - RNA, 19 nt, Homo sapiens
  misc_RNA (1)...(19): siRNA sense strand
ggcagaauguugcauagug

SEQ ID NO: 2123178 - RNA, 19 nt, Homo sapiens
  misc_RNA (1)...(19): siRNA sense strand
agagagugguuuagaagaa

SEQ ID NO: 2123179 - RNA, 19 nt, Homo sapiens
  misc_RNA (1)...(19): siRNA sense strand
ggaagcgagucagaauuug

SEQ ID NO: 2123180 - RNA, 19 nt, Homo sapiens
  misc_RNA (1)...(19): siRNA sense strand
gcacaggcaguuauggaaa

SEQ ID NO: 2123181 - RNA, 19 nt, Homo sapiens
  misc_RNA (1)...(19): siRNA sense strand
gaaagagagccuggagaaa

SEQ ID NO: 2123182 - RNA, 19 nt, Homo sapiens
  misc_RNA (1)...(19): siRNA sense strand
ugagauuccuacauuaguu

SEQ ID NO: 2123183 - RNA, 19 nt, Homo sapiens
  misc_RNA (1)...(19): siRNA sense strand
agaaacacguucagacaau

SEQ ID NO: 2123184 - RNA, 19 nt, Homo sapiens
  misc_RNA (1)...(19): siRNA sense strand
aagaggagcccuuguggua

SEQ ID NO: 2123185 - RNA, 19 nt, Homo sapiens
  misc_RNA (1)...(19): siRNA sense strand
ggaagagacaggcucagaa

SEQ ID NO: 2123186 - RNA, 19 nt, Homo sapiens
  misc_RNA (1)...(19): siRNA sense strand
aauagggugucuucuguuu

SEQ ID NO: 2123187 - RNA, 19 nt, Homo sapiens
  misc_RNA (1)...(19): siRNA sense strand
cgggacagcuggaagaguu

SEQ ID NO: 2123188 - RNA, 19 nt, Homo sapiens
  misc_RNA (1)...(19): siRNA sense strand
gaagcgagucagaauuuga

SEQ ID NO: 2123189 - RNA, 19 nt, Homo sapiens
  misc_RNA (1)...(19): siRNA sense strand
ugacuuaagcaauccauuu

SEQ ID NO: 2123190 - RNA, 19 nt, Homo sapiens
  misc_RNA (1)...(19): siRNA sense strand
ggacuugaauacucauuuu

SEQ ID NO: 2123191 - RNA, 19 nt, Homo sapiens
  misc_RNA (1)...(19): siRNA sense strand
gcaaggagaaagucggauu

SEQ ID NO: 2123192 - RNA, 19 nt, Homo sapiens
  misc_RNA (1)...(19): siRNA sense strand
cagaggcaguggaagaauu

SEQ ID NO: 2123193 - RNA, 19 nt, Homo sapiens
  misc_RNA (1)...(19): siRNA sense strand
acagauacuuccucuccua

SEQ ID NO: 2123194 - RNA, 19 nt, Homo sapiens
  misc_RNA (1)...(19): siRNA sense strand
aaagagacacccaguaaug

SEQ ID NO: 2123195 - RNA, 19 nt, Homo sapiens
  misc_RNA (1)...(19): siRNA sense strand
gaggagcccuugugguaca

SEQ ID NO: 2123196 - RNA, 19 nt, Homo sapiens
  misc_RNA (1)...(19): siRNA sense strand
gagagauucuggagcaaag

SEQ ID NO: 2123197 - RNA, 19 nt, Homo sapiens
  misc_RNA (1)...(19): siRNA sense strand
gaaacgggaucaccaagau

SEQ ID NO: 2123198 - RNA, 19 nt, Homo sapiens
  misc_RNA (1)...(19): siRNA sense strand
gaacaucgcccgugacuac

SEQ ID NO: 2123199 - RNA, 19 nt, Homo sapiens
  misc_RNA (1)...(19): siRNA sense strand
gaaaggaggacggcaaaga

SEQ ID NO: 2123200 - RNA, 19 nt, Homo sapiens
  misc_RNA (1)...(19): siRNA sense strand
aagaggugauggagcauua

SEQ ID NO: 2123201 - RNA, 19 nt, Homo sapiens
  misc_RNA (1)...(19): siRNA sense strand
cugcagcucuuuaaacuug

SEQ ID NO: 2123202 - RNA, 19 nt, Homo sapiens
  misc_RNA (1)...(19): siRNA sense strand
ggaaggacaagaaggagaa

SEQ ID NO: 2123203 - RNA, 19 nt, Homo sapiens
  misc_RNA (1)...(19): siRNA sense strand
gaucgaguaugaccaggau

SEQ ID NO: 2123204 - RNA, 19 nt, Homo sapiens
  misc_RNA (1)...(19): siRNA sense strand
agauauggcugcccacguu

SEQ ID NO: 2123205 - RNA, 19 nt, Homo sapiens
  misc_RNA (1)...(19): siRNA sense strand
gcuucgagcuccugucaga

SEQ ID NO: 2123206 - RNA, 19 nt, Homo sapiens
  misc_RNA (1)...(19): siRNA sense strand
aaaccuagccggcuccaaa

SEQ ID NO: 2123207 - RNA, 19 nt, Homo sapiens
  misc_RNA (1)...(19): siRNA sense strand
gaagaggaaggagaacaaa

SEQ ID NO: 2123208 - RNA, 19 nt, Homo sapiens
  misc_RNA (1)...(19): siRNA sense strand
agaaggagcugcgccugaa

SEQ ID NO: 2123209 - RNA, 19 nt, Homo sapiens
  misc_RNA (1)...(19): siRNA sense strand
ugaggccgcuguaccaguu

SEQ ID NO: 2123210 - RNA, 19 nt, Homo sapiens
  misc_RNA (1)...(19): siRNA sense strand
gcgcccacguggacaugua

SEQ ID NO: 2123211 - RNA, 19 nt, Homo sapiens
  misc_RNA (1)...(19): siRNA sense strand
cuagcuaccuggacaaagu

SEQ ID NO: 2123212 - RNA, 19 nt, Homo sapiens
  misc_RNA (1)...(19): siRNA sense strand
gaaaacaugcacaaagaaa

SEQ ID NO: 2123213 - RNA, 19 nt, Homo sapiens
  misc_RNA (1)...(19): siRNA sense strand
auuacgagaucgaguauga

SEQ ID NO: 2123214 - RNA, 19 nt, Homo sapiens
  misc_RNA (1)...(19): siRNA sense strand
uuaaagaccaccuccagaa

SEQ ID NO: 2123215 - RNA, 19 nt, Homo sapiens
  misc_RNA (1)...(19): siRNA sense strand
gggagaagaggaaggagaa

SEQ ID NO: 2123216 - RNA, 19 nt, Homo sapiens
  misc_RNA (1)...(19): siRNA sense strand
ggaagaaguacugcgugua

SEQ ID NO: 2123217 - RNA, 19 nt, Homo sapiens
  misc_RNA (1)...(19): siRNA sense strand
ggacaagaaggagaaggaa

SEQ ID NO: 2123218 - RNA, 19 nt, Homo sapiens
  misc_RNA (1)...(19): siRNA sense strand
ggaagagucggcagaguac

SEQ ID NO: 2123219 - RNA, 19 nt, Homo sapiens
  misc_RNA (1)...(19): siRNA sense strand
gagcauuacgugagcaugu

SEQ ID NO: 2123220 - RNA, 19 nt, Homo sapiens
  misc_RNA (1)...(19): siRNA sense strand
gggaaaggaggacggcaaa

SEQ ID NO: 2123221 - RNA, 19 nt, Homo sapiens
  misc_RNA (1)...(19): siRNA sense strand
uggaagagucggcagagua

SEQ ID NO: 2123222 - RNA, 19 nt, Homo sapiens
  misc_RNA (1)...(19): siRNA sense strand
gacaaaguccuaaagaaaa

SEQ ID NO: 2123223 - RNA, 19 nt, Homo sapiens
  misc_RNA (1)...(19): siRNA sense strand
gacaagaaggagaaggaaa

SEQ ID NO: 2123224 - RNA, 19 nt, Homo sapiens
  misc_RNA (1)...(19): siRNA sense strand
caaggaauccccuccaaaa

SEQ ID NO: 2123225 - RNA, 19 nt, Homo sapiens
  misc_RNA (1)...(19): siRNA sense strand
aaagccgccuuccuagcua

SEQ ID NO: 2123226 - RNA, 19 nt, Homo sapiens
  misc_RNA (1)...(19): siRNA sense strand
cgaaacgggaucaccaaga

SEQ ID NO: 2123227 - RNA, 19 nt, Homo sapiens
  misc_RNA (1)...(19): siRNA sense strand
gcgggaugauuacgagauc

SEQ ID NO: 2123228 - RNA, 19 nt, Homo sapiens
  misc_RNA (1)...(19): siRNA sense strand
ucagcgggcucucugucaa

SEQ ID NO: 2123229 - RNA, 19 nt, Homo sapiens
  misc_RNA (1)...(19): siRNA sense strand
cgggcucucugucaacuau

SEQ ID NO: 2123230 - RNA, 19 nt, Homo sapiens
  misc_RNA (1)...(19): siRNA sense strand
acagaaagcggcuggaucu

SEQ ID NO: 2123231 - RNA, 19 nt, Homo sapiens
  misc_RNA (1)...(19): siRNA sense strand
gugcggaagcugaaagaga

SEQ ID NO: 2123232 - RNA, 19 nt, Homo sapiens
  misc_RNA (1)...(19): siRNA sense strand
gcaguucggcuucggaaac

SEQ ID NO: 2123233 - RNA, 19 nt, Homo sapiens
  misc_RNA (1)...(19): siRNA sense strand
gugacugugaagacuauua

SEQ ID NO: 2123234 - RNA, 19 nt, Homo sapiens
  misc_RNA (1)...(19): siRNA sense strand
cggcaaagacagcgaguuc

SEQ ID NO: 2123235 - RNA, 19 nt, Homo sapiens
  misc_RNA (1)...(19): siRNA sense strand
caugcaaggaguuugauga

SEQ ID NO: 2123236 - RNA, 19 nt, Homo sapiens
  misc_RNA (1)...(19): siRNA sense strand
ggcucucugucaacuauga

SEQ ID NO: 2123237 - RNA, 19 nt, Homo sapiens
  misc_RNA (1)...(19): siRNA sense strand
uucggaaacugggaagaua

SEQ ID NO: 2123238 - RNA, 19 nt, Homo sapiens
  misc_RNA (1)...(19): siRNA sense strand
ugacugugaagacuauuau

SEQ ID NO: 2123239 - RNA, 19 nt, Homo sapiens
  misc_RNA (1)...(19): siRNA sense strand
caucgcccgugacuacaau

SEQ ID NO: 2123240 - RNA, 19 nt, Homo sapiens
  misc_RNA (1)...(19): siRNA sense strand
ucaccaaggaggagaagga

SEQ ID NO: 2123241 - RNA, 19 nt, Homo sapiens
  misc_RNA (1)...(19): siRNA sense strand
uaaagaccaccuccagaag

SEQ ID NO: 2123242 - RNA, 19 nt, Homo sapiens
  misc_RNA (1)...(19): siRNA sense strand
gagaagaggaaggagaaca

SEQ ID NO: 2123243 - RNA, 19 nt, Homo sapiens
  misc_RNA (1)...(19): siRNA sense strand
agaagaggaaggagaacaa

SEQ ID NO: 2123244 - RNA, 19 nt, Homo sapiens
  misc_RNA (1)...(19): siRNA sense strand
gugcucugcagcucuuuaa

SEQ ID NO: 2123245 - RNA, 19 nt, Homo sapiens
  misc_RNA (1)...(19): siRNA sense strand
uugaaaacaugcacaaaga

SEQ ID NO: 2123246 - RNA, 19 nt, Homo sapiens
  misc_RNA (1)...(19): siRNA sense strand
agcauuacgugagcaugua

SEQ ID NO: 2123247 - RNA, 19 nt, Homo sapiens
  misc_RNA (1)...(19): siRNA sense strand
ggcauaaacgggagaagag

SEQ ID NO: 2123248 - RNA, 19 nt, Homo sapiens
  misc_RNA (1)...(19): siRNA sense strand
gggccaagauccgagaacu

SEQ ID NO: 2123249 - RNA, 19 nt, Homo sapiens
  misc_RNA (1)...(19): siRNA sense strand
cuacgugacugugaagacu

SEQ ID NO: 2123250 - RNA, 19 nt, Homo sapiens
  misc_RNA (1)...(19): siRNA sense strand
gcucugcagcucuuuaaac

SEQ ID NO: 2123251 - RNA, 19 nt, Homo sapiens
  misc_RNA (1)...(19): siRNA sense strand
ccugucagaucgcgagaag

SEQ ID NO: 2123252 - RNA, 19 nt, Homo sapiens
  misc_RNA (1)...(19): siRNA sense strand
caagaggugauggagcauu

SEQ ID NO: 2123253 - RNA, 19 nt, Homo sapiens
  misc_RNA (1)...(19): siRNA sense strand
ugucaugcaaggaguuuga

SEQ ID NO: 2123254 - RNA, 19 nt, Homo sapiens
  misc_RNA (1)...(19): siRNA sense strand
gcaaggaauccccuccaaa

SEQ ID NO: 2123255 - RNA, 19 nt, Homo sapiens
  misc_RNA (1)...(19): siRNA sense strand
gacugugaagacuauuaua

SEQ ID NO: 2123256 - RNA, 19 nt, Homo sapiens
  misc_RNA (1)...(19): siRNA sense strand
cggcauaaacgggagaaga

SEQ ID NO: 2123257 - RNA, 19 nt, Homo sapiens
  misc_RNA (1)...(19): siRNA sense strand
ugucagaucgcgagaaggu

SEQ ID NO: 2123258 - RNA, 19 nt, Homo sapiens
  misc_RNA (1)...(19): siRNA sense strand
gcagcucuuuaaacuugag

SEQ ID NO: 2123259 - RNA, 19 nt, Homo sapiens
  misc_RNA (1)...(19): siRNA sense strand
ggugcucugcagcucuuua

SEQ ID NO: 2123260 - RNA, 19 nt, Homo sapiens
  misc_RNA (1)...(19): siRNA sense strand
ggaaagagcugauugaaga

SEQ ID NO: 2123261 - RNA, 19 nt, Homo sapiens
  misc_RNA (1)...(19): siRNA sense strand
gaacugagaucucuguugu

SEQ ID NO: 2123262 - RNA, 19 nt, Homo sapiens
  misc_RNA (1)...(19): siRNA sense strand
gaaagaaagcggaaaguaa

SEQ ID NO: 2123263 - RNA, 19 nt, Homo sapiens
  misc_RNA (1)...(19): siRNA sense strand
gagcuuggcuuugaaauga

SEQ ID NO: 2123264 - RNA, 19 nt, Homo sapiens
  misc_RNA (1)...(19): siRNA sense strand
ggaaagaaauucagacucu

SEQ ID NO: 2123265 - RNA, 19 nt, Homo sapiens
  misc_RNA (1)...(19): siRNA sense strand
gagacaagcucaacgagaa

SEQ ID NO: 2123266 - RNA, 19 nt, Homo sapiens
  misc_RNA (1)...(19): siRNA sense strand
ggaagaggcugauccacaa

SEQ ID NO: 2123267 - RNA, 19 nt, Homo sapiens
  misc_RNA (1)...(19): siRNA sense strand
ggaagaaggugacaguuca

SEQ ID NO: 2123268 - RNA, 19 nt, Homo sapiens
  misc_RNA (1)...(19): siRNA sense strand
gaccaagacuggaaagaaa

SEQ ID NO: 2123269 - RNA, 19 nt, Homo sapiens
  misc_RNA (1)...(19): siRNA sense strand
caagaagacucaacaggaa

SEQ ID NO: 2123270 - RNA, 19 nt, Homo sapiens
  misc_RNA (1)...(19): siRNA sense strand
cuacaaagauggaaagaug

SEQ ID NO: 2123271 - RNA, 19 nt, Homo sapiens
  misc_RNA (1)...(19): siRNA sense strand
gaagaaugcuuggaaagga

SEQ ID NO: 2123272 - RNA, 19 nt, Homo sapiens
  misc_RNA (1)...(19): siRNA sense strand
ggaauacguuggcgauuug

SEQ ID NO: 2123273 - RNA, 19 nt, Homo sapiens
  misc_RNA (1)...(19): siRNA sense strand
gauaaacgcuucggagaau

SEQ ID NO: 2123274 - RNA, 19 nt, Homo sapiens
  misc_RNA (1)...(19): siRNA sense strand
gguuggaugugcucauuua

SEQ ID NO: 2123275 - RNA, 19 nt, Homo sapiens
  misc_RNA (1)...(19): siRNA sense strand
gcagcgacaucaugagaaa

SEQ ID NO: 2123276 - RNA, 19 nt, Homo sapiens
  misc_RNA (1)...(19): siRNA sense strand
cauagcaacuccaaacaaa

SEQ ID NO: 2123277 - RNA, 19 nt, Homo sapiens
  misc_RNA (1)...(19): siRNA sense strand
gcacuuauaucaucuuugc

SEQ ID NO: 2123278 - RNA, 19 nt, Homo sapiens
  misc_RNA (1)...(19): siRNA sense strand
ggaaagaaagcggaaagua

SEQ ID NO: 2123279 - RNA, 19 nt, Homo sapiens
  misc_RNA (1)...(19): siRNA sense strand
uggaugugcucauuuauuu

SEQ ID NO: 2123280 - RNA, 19 nt, Homo sapiens
  misc_RNA (1)...(19): siRNA sense strand
gaauacaacagcaacauga

SEQ ID NO: 2123281 - RNA, 19 nt, Homo sapiens
  misc_RNA (1)...(19): siRNA sense strand
acacaagcgugaauuuaaa

SEQ ID NO: 2123282 - RNA, 19 nt, Homo sapiens
  misc_RNA (1)...(19): siRNA sense strand
gaacagcagcgacaucaug

SEQ ID NO: 2123283 - RNA, 19 nt, Homo sapiens
  misc_RNA (1)...(19): siRNA sense strand
ggucaaaguccucgaguuu

SEQ ID NO: 2123284 - RNA, 19 nt, Homo sapiens
  misc_RNA (1)...(19): siRNA sense strand
caagugacgcuaucaaauu

SEQ ID NO: 2123285 - RNA, 19 nt, Homo sapiens
  misc_RNA (1)...(19): siRNA sense strand
cgaggaagauguccaggaa

SEQ ID NO: 2123286 - RNA, 19 nt, Homo sapiens
  misc_RNA (1)...(19): siRNA sense strand
ggaugcaacucucagaaau

SEQ ID NO: 2123287 - RNA, 19 nt, Homo sapiens
  misc_RNA (1)...(19): siRNA sense strand
aaagaaagcggaaaguaaa

SEQ ID NO: 2123288 - RNA, 19 nt, Homo sapiens
  misc_RNA (1)...(19): siRNA sense strand
acugagaucucuguuguua

SEQ ID NO: 2123289 - RNA, 19 nt, Homo sapiens
  misc_RNA (1)...(19): siRNA sense strand
gaagacggaggcagaauug

SEQ ID NO: 2123290 - RNA, 19 nt, Homo sapiens
  misc_RNA (1)...(19): siRNA sense strand
aaacauaugucagcagaug

SEQ ID NO: 2123291 - RNA, 19 nt, Homo sapiens
  misc_RNA (1)...(19): siRNA sense strand
gcugagagacuucgaagaa

SEQ ID NO: 2123292 - RNA, 19 nt, Homo sapiens
  misc_RNA (1)...(19): siRNA sense strand
ucacagucauugauaaguu

SEQ ID NO: 2123293 - RNA, 19 nt, Homo sapiens
  misc_RNA (1)...(19): siRNA sense strand
ucagagcgcuugggaagaa

SEQ ID NO: 2123294 - RNA, 19 nt, Homo sapiens
  misc_RNA (1)...(19): siRNA sense strand
gcugacugcugcccacuuu

SEQ ID NO: 2123295 - RNA, 19 nt, Homo sapiens
  misc_RNA (1)...(19): siRNA sense strand
aaacacaagcgugaauuua

SEQ ID NO: 2123296 - RNA, 19 nt, Homo sapiens
  misc_RNA (1)...(19): siRNA sense strand
gaaaaucacugggcugcua

SEQ ID NO: 2123297 - RNA, 19 nt, Homo sapiens
  misc_RNA (1)...(19): siRNA sense strand
aaagaugaaugucgaggaa

SEQ ID NO: 2123298 - RNA, 19 nt, Homo sapiens
  misc_RNA (1)...(19): siRNA sense strand
gaugacaggcguuugcuuu

SEQ ID NO: 2123299 - RNA, 19 nt, Homo sapiens
  misc_RNA (1)...(19): siRNA sense strand
ggaacgggaugcggaaaga

SEQ ID NO: 2123300 - RNA, 19 nt, Homo sapiens
  misc_RNA (1)...(19): siRNA sense strand
gcagacaucgagaagcaua

SEQ ID NO: 2123301 - RNA, 19 nt, Homo sapiens
  misc_RNA (1)...(19): siRNA sense strand
cggagaagcuagaccaaga

SEQ ID NO: 2123302 - RNA, 19 nt, Homo sapiens
  misc_RNA (1)...(19): siRNA sense strand
uccaauguauucagagaua

SEQ ID NO: 2123303 - RNA, 19 nt, Homo sapiens
  misc_RNA (1)...(19): siRNA sense strand
ccacaaaacucccaaguca

SEQ ID NO: 2123304 - RNA, 19 nt, Homo sapiens
  misc_RNA (1)...(19): siRNA sense strand
gcaagugacgcuaucaaau

SEQ ID NO: 2123305 - RNA, 19 nt, Homo sapiens
  misc_RNA (1)...(19): siRNA sense strand
ugagagacuucgaagaaug

SEQ ID NO: 2123306 - RNA, 19 nt, Homo sapiens
  misc_RNA (1)...(19): siRNA sense strand
guuuauaccugagcuuauu

SEQ ID NO: 2123307 - RNA, 19 nt, Homo sapiens
  misc_RNA (1)...(19): siRNA sense strand
aagugacgcuaucaaauuu

SEQ ID NO: 2123308 - RNA, 19 nt, Homo sapiens
  misc_RNA (1)...(19): siRNA sense strand
gaugugcucauuuauuuga

SEQ ID NO: 2123309 - RNA, 19 nt, Homo sapiens
  misc_RNA (1)...(19): siRNA sense strand
caaacacaagcgugaauuu

SEQ ID NO: 2123310 - RNA, 19 nt, Homo sapiens
  misc_RNA (1)...(19): siRNA sense strand
ucagucagcugcucaccaa

SEQ ID NO: 2123311 - RNA, 19 nt, Homo sapiens
  misc_RNA (1)...(19): siRNA sense strand
gggcugcuauuuccaacuu

SEQ ID NO: 2123312 - RNA, 19 nt, Homo sapiens
  misc_RNA (1)...(19): siRNA sense strand
uggaauacguuggcgauuu

SEQ ID NO: 2123313 - RNA, 19 nt, Homo sapiens
  misc_RNA (1)...(19): siRNA sense strand
gcggugggcuccuucacaa

SEQ ID NO: 2123314 - RNA, 19 nt, Homo sapiens
  misc_RNA (1)...(19): siRNA sense strand
guacaaagaaagggauaaa

SEQ ID NO: 2123315 - RNA, 19 nt, Homo sapiens
  misc_RNA (1)...(19): siRNA sense strand
ugaaggcgcagcccucuaa

SEQ ID NO: 2123316 - RNA, 19 nt, Homo sapiens
  misc_RNA (1)...(19): siRNA sense strand
gcaagccugucccacugaa

SEQ ID NO: 2123317 - RNA, 19 nt, Homo sapiens
  misc_RNA (1)...(19): siRNA sense strand
gaggcagacuccugggaaa

SEQ ID NO: 2123318 - RNA, 19 nt, Homo sapiens
  misc_RNA (1)...(19): siRNA sense strand
gcaucuacaaucuaaauga

SEQ ID NO: 2123319 - RNA, 19 nt, Homo sapiens
  misc_RNA (1)...(19): siRNA sense strand
gagacgagcugcccuacac

SEQ ID NO: 2123320 - RNA, 19 nt, Homo sapiens
  misc_RNA (1)...(19): siRNA sense strand
gaggagaagaugaugaaga

SEQ ID NO: 2123321 - RNA, 19 nt, Homo sapiens
  misc_RNA (1)...(19): siRNA sense strand
gcaacucucagaaaucaug

SEQ ID NO: 2123322 - RNA, 19 nt, Homo sapiens
  misc_RNA (1)...(19): siRNA sense strand
gaagaauugacucauuaug

SEQ ID NO: 2123323 - RNA, 19 nt, Homo sapiens
  misc_RNA (1)...(19): siRNA sense strand
agaagaugaugaagagguu

SEQ ID NO: 2123324 - RNA, 19 nt, Homo sapiens
  misc_RNA (1)...(19): siRNA sense strand
ugagaucucuguuguuagg

SEQ ID NO: 2123325 - RNA, 19 nt, Homo sapiens
  misc_RNA (1)...(19): siRNA sense strand
gagagcgacagcccagaua

SEQ ID NO: 2123326 - RNA, 19 nt, Homo sapiens
  misc_RNA (1)...(19): siRNA sense strand
gaauggaaggcucugaaga

SEQ ID NO: 2123327 - RNA, 19 nt, Homo sapiens
  misc_RNA (1)...(19): siRNA sense strand
ggaagcguacacagacuuu

SEQ ID NO: 2123328 - RNA, 19 nt, Homo sapiens
  misc_RNA (1)...(19): siRNA sense strand
ugagauggaagaaaugauu

SEQ ID NO: 2123329 - RNA, 19 nt, Homo sapiens
  misc_RNA (1)...(19): siRNA sense strand
gcaaggaaagagcuggaaa

SEQ ID NO: 2123330 - RNA, 19 nt, Homo sapiens
  misc_RNA (1)...(19): siRNA sense strand
ggagagacaagcucaacga

SEQ ID NO: 2123331 - RNA, 19 nt, Homo sapiens
  misc_RNA (1)...(19): siRNA sense strand
ccaauguauucagagauaa

SEQ ID NO: 2123332 - RNA, 19 nt, Homo sapiens
  misc_RNA (1)...(19): siRNA sense strand
aaacaaggcaguaguaagg

SEQ ID NO: 2123333 - RNA, 19 nt, Homo sapiens
  misc_RNA (1)...(19): siRNA sense strand
cgacagaggccaaucacau

SEQ ID NO: 2123334 - RNA, 19 nt, Homo sapiens
  misc_RNA (1)...(19): siRNA sense strand
ccacucuggugcacccuuu

SEQ ID NO: 2123335 - RNA, 19 nt, Homo sapiens
  misc_RNA (1)...(19): siRNA sense strand
aaacaaagcaagccaaggu

SEQ ID NO: 2123336 - RNA, 19 nt, Homo sapiens
  misc_RNA (1)...(19): siRNA sense strand
guugugcacuuauaucauc

SEQ ID NO: 2123337 - RNA, 19 nt, Homo sapiens
  misc_RNA (1)...(19): siRNA sense strand
gaccucacagucauugaua

SEQ ID NO: 2123338 - RNA, 19 nt, Homo sapiens
  misc_RNA (1)...(19): siRNA sense strand
aggaagauguccaggaaga

SEQ ID NO: 2123339 - RNA, 19 nt, Homo sapiens
  misc_RNA (1)...(19): siRNA sense strand
gaaaggaugaggaugaaaa

SEQ ID NO: 2123340 - RNA, 19 nt, Homo sapiens
  misc_RNA (1)...(19): siRNA sense strand
gaaugauggcuucgugcua

SEQ ID NO: 2123341 - RNA, 19 nt, Homo sapiens
  misc_RNA (1)...(19): siRNA sense strand
ggcguuugcuuuccuacaa

SEQ ID NO: 2123342 - RNA, 19 nt, Homo sapiens
  misc_RNA (1)...(19): siRNA sense strand
acaaagaaagggauaaauc

SEQ ID NO: 2123343 - RNA, 19 nt, Homo sapiens
  misc_RNA (1)...(19): siRNA sense strand
ugcaugagauggaagaaau

SEQ ID NO: 2123344 - RNA, 19 nt, Homo sapiens
  misc_RNA (1)...(19): siRNA sense strand
gauaagcggcaaggaaaga

SEQ ID NO: 2123345 - RNA, 19 nt, Homo sapiens
  misc_RNA (1)...(19): siRNA sense strand
cgaugcauaugacaugaug

SEQ ID NO: 2123346 - RNA, 19 nt, Homo sapiens
  misc_RNA (1)...(19): siRNA sense strand
aagaaaugauugagaccaa

SEQ ID NO: 2123347 - RNA, 19 nt, Homo sapiens
  misc_RNA (1)...(19): siRNA sense strand
ggaacugagaucucuguug

SEQ ID NO: 2123348 - RNA, 19 nt, Homo sapiens
  misc_RNA (1)...(19): siRNA sense strand
gaagaggcugauccacaaa

SEQ ID NO: 2123349 - RNA, 19 nt, Homo sapiens
  misc_RNA (1)...(19): siRNA sense strand
ccgcugaccugugagaaga

SEQ ID NO: 2123350 - RNA, 19 nt, Homo sapiens
  misc_RNA (1)...(19): siRNA sense strand
ucacugggcugcuauuucc

SEQ ID NO: 2123351 - RNA, 19 nt, Homo sapiens
  misc_RNA (1)...(19): siRNA sense strand
gugcacuuauaucaucuuu

SEQ ID NO: 2123352 - RNA, 19 nt, Homo sapiens
  misc_RNA (1)...(19): siRNA sense strand
cacagucauugauaaguug

SEQ ID NO: 2123353 - RNA, 19 nt, Homo sapiens
  misc_RNA (1)...(19): siRNA sense strand
agaugaaugucgaggaaga

SEQ ID NO: 2123354 - RNA, 19 nt, Homo sapiens
  misc_RNA (1)...(19): siRNA sense strand
cguucgaggugaaaguuaa

SEQ ID NO: 2123355 - RNA, 19 nt, Homo sapiens
  misc_RNA (1)...(19): siRNA sense strand
gaaaugauugagaccaaag

SEQ ID NO: 2123356 - RNA, 19 nt, Homo sapiens
  misc_RNA (1)...(19): siRNA sense strand
gcgauuuggcuacagauga

SEQ ID NO: 2123357 - RNA, 19 nt, Homo sapiens
  misc_RNA (1)...(19): siRNA sense strand
gcagaaggaaacaaagcaa

SEQ ID NO: 2123358 - RNA, 19 nt, Homo sapiens
  misc_RNA (1)...(19): siRNA sense strand
gcacacugaccgaaaugga

SEQ ID NO: 2123359 - RNA, 19 nt, Homo sapiens
  misc_RNA (1)...(19): siRNA sense strand
aacacaagcgugaauuuaa

SEQ ID NO: 2123360 - RNA, 19 nt, Homo sapiens
  misc_RNA (1)...(19): siRNA sense strand
ggagaaagcccacgcagaa

SEQ ID NO: 2123361 - RNA, 19 nt, Homo sapiens
  misc_RNA (1)...(19): siRNA sense strand
gcaagaggaugaccugguu

SEQ ID NO: 2123362 - RNA, 19 nt, Homo sapiens
  misc_RNA (1)...(19): siRNA sense strand
gaaagcccacgcagaauuu

SEQ ID NO: 2123363 - RNA, 19 nt, Homo sapiens
  misc_RNA (1)...(19): siRNA sense strand
gaacagaacagaacuuucc

SEQ ID NO: 2123364 - RNA, 19 nt, Homo sapiens
  misc_RNA (1)...(19): siRNA sense strand
guguagaggucacuuccaa

SEQ ID NO: 2123365 - RNA, 19 nt, Homo sapiens
  misc_RNA (1)...(19): siRNA sense strand
gggaacagaacagaacuuu

SEQ ID NO: 2123366 - RNA, 19 nt, Homo sapiens
  misc_RNA (1)...(19): siRNA sense strand
gcacugacccacagcucuu

SEQ ID NO: 2123367 - RNA, 19 nt, Homo sapiens
  misc_RNA (1)...(19): siRNA sense strand
aggcugagcugacccacuu

SEQ ID NO: 2123368 - RNA, 19 nt, Homo sapiens
  misc_RNA (1)...(19): siRNA sense strand
gggaucagccuccacuaga

SEQ ID NO: 2123369 - RNA, 19 nt, Homo sapiens
  misc_RNA (1)...(19): siRNA sense strand
ggauggaaguuuggagaca

SEQ ID NO: 2123370 - RNA, 19 nt, Homo sapiens
  misc_RNA (1)...(19): siRNA sense strand
ggacagacucacagacauc

SEQ ID NO: 2123371 - RNA, 19 nt, Homo sapiens
  misc_RNA (1)...(19): siRNA sense strand
ggacgagcagcuucauguu

SEQ ID NO: 2123372 - RNA, 19 nt, Homo sapiens
  misc_RNA (1)...(19): siRNA sense strand
uggccaggcugcagcauga

SEQ ID NO: 2123373 - RNA, 19 nt, Homo sapiens
  misc_RNA (1)...(19): siRNA sense strand
agaaagcccacgcagaauu

SEQ ID NO: 2123374 - RNA, 19 nt, Homo sapiens
  misc_RNA (1)...(19): siRNA sense strand
acgcagaauuugagaacuu

SEQ ID NO: 2123375 - RNA, 19 nt, Homo sapiens
  misc_RNA (1)...(19): siRNA sense strand
ugaguucccugcugagaag

SEQ ID NO: 2123376 - RNA, 19 nt, Homo sapiens
  misc_RNA (1)...(19): siRNA sense strand
gggacagacucacagacau

SEQ ID NO: 2123377 - RNA, 19 nt, Homo sapiens
  misc_RNA (1)...(19): siRNA sense strand
gggccagggugugagugua

SEQ ID NO: 2123378 - RNA, 19 nt, Homo sapiens
  misc_RNA (1)...(19): siRNA sense strand
ggaucagccuccacuagac

SEQ ID NO: 2123379 - RNA, 19 nt, Homo sapiens
  misc_RNA (1)...(19): siRNA sense strand
gagaaagcccacgcagaau

SEQ ID NO: 2123380 - RNA, 19 nt, Homo sapiens
  misc_RNA (1)...(19): siRNA sense strand
gcgacuggcaucugaguuc

SEQ ID NO: 2123381 - RNA, 19 nt, Homo sapiens
  misc_RNA (1)...(19): siRNA sense strand
gacgagcagcuucauguuc

SEQ ID NO: 2123382 - RNA, 19 nt, Homo sapiens
  misc_RNA (1)...(19): siRNA sense strand
ggaacagaacagaacuuuc

SEQ ID NO: 2123383 - RNA, 19 nt, Homo sapiens
  misc_RNA (1)...(19): siRNA sense strand
cggcaaaggcucccacaag

SEQ ID NO: 2123384 - RNA, 19 nt, Homo sapiens
  misc_RNA (1)...(19): siRNA sense strand
acgagcagcuucauguucu

SEQ ID NO: 2123385 - RNA, 19 nt, Homo sapiens
  misc_RNA (1)...(19): siRNA sense strand
gcaaaggcucccacaagcu

SEQ ID NO: 2123386 - RNA, 19 nt, Homo sapiens
  misc_RNA (1)...(19): siRNA sense strand
ggcuccagcugcucacuca

SEQ ID NO: 2123387 - RNA, 19 nt, Homo sapiens
  misc_RNA (1)...(19): siRNA sense strand
aggcagaacgugcagaguu

SEQ ID NO: 2123388 - RNA, 19 nt, Homo sapiens
  misc_RNA (1)...(19): siRNA sense strand
ugcagcgacuggcaucuga

SEQ ID NO: 2123389 - RNA, 19 nt, Homo sapiens
  misc_RNA (1)...(19): siRNA sense strand
gcaaguccaaggagcugau

SEQ ID NO: 2123390 - RNA, 19 nt, Homo sapiens
  misc_RNA (1)...(19): siRNA sense strand
ccuggaagcugccauucac

SEQ ID NO: 2123391 - RNA, 19 nt, Homo sapiens
  misc_RNA (1)...(19): siRNA sense strand
ggaucaggcaugaggagau

SEQ ID NO: 2123392 - RNA, 19 nt, Homo sapiens
  misc_RNA (1)...(19): siRNA sense strand
gaugaccugguuccacaug

SEQ ID NO: 2123393 - RNA, 19 nt, Homo sapiens
  misc_RNA (1)...(19): siRNA sense strand
ccacgcagaauuugagaac

SEQ ID NO: 2123394 - RNA, 19 nt, Homo sapiens
  misc_RNA (1)...(19): siRNA sense strand
gcagauugcuuaugaaaua

SEQ ID NO: 2123395 - RNA, 19 nt, Homo sapiens
  misc_RNA (1)...(19): siRNA sense strand
gaaagagacuggaaaguga

SEQ ID NO: 2123396 - RNA, 19 nt, Homo sapiens
  misc_RNA (1)...(19): siRNA sense strand
agaagaaggugcuguauua

SEQ ID NO: 2123397 - RNA, 19 nt, Homo sapiens
  misc_RNA (1)...(19): siRNA sense strand
gcaagugaauuuccugaua

SEQ ID NO: 2123398 - RNA, 19 nt, Homo sapiens
  misc_RNA (1)...(19): siRNA sense strand
gaaagcagaucucagcauu

SEQ ID NO: 2123399 - RNA, 19 nt, Homo sapiens
  misc_RNA (1)...(19): siRNA sense strand
caacaacacccaaaugaua

SEQ ID NO: 2123400 - RNA, 19 nt, Homo sapiens
  misc_RNA (1)...(19): siRNA sense strand
gauuauggcuuuaguguug

SEQ ID NO: 2123401 - RNA, 19 nt, Homo sapiens
  misc_RNA (1)...(19): siRNA sense strand
gaaggaaccugcaaauagu

SEQ ID NO: 2123402 - RNA, 19 nt, Homo sapiens
  misc_RNA (1)...(19): siRNA sense strand
cgaagauccuccauuaaua

SEQ ID NO: 2123403 - RNA, 19 nt, Homo sapiens
  misc_RNA (1)...(19): siRNA sense strand
gaugacagcucuucuuaug

SEQ ID NO: 2123404 - RNA, 19 nt, Homo sapiens
  misc_RNA (1)...(19): siRNA sense strand
ggaacgcuaugaugauaua

SEQ ID NO: 2123405 - RNA, 19 nt, Homo sapiens
  misc_RNA (1)...(19): siRNA sense strand
ugaaggaucucaacaagaa

SEQ ID NO: 2123406 - RNA, 19 nt, Homo sapiens
  misc_RNA (1)...(19): siRNA sense strand
gcaccuacauuguuuauca

SEQ ID NO: 2123407 - RNA, 19 nt, Homo sapiens
  misc_RNA (1)...(19): siRNA sense strand
ggaacaaccucuuggaaau

SEQ ID NO: 2123408 - RNA, 19 nt, Homo sapiens
  misc_RNA (1)...(19): siRNA sense strand
ccaaggagaugguggcuaa

SEQ ID NO: 2123409 - RNA, 19 nt, Homo sapiens
  misc_RNA (1)...(19): siRNA sense strand
caagugaauuuccugauaa

SEQ ID NO: 2123410 - RNA, 19 nt, Homo sapiens
  misc_RNA (1)...(19): siRNA sense strand
ggaaguaaguccaagaaca

SEQ ID NO: 2123411 - RNA, 19 nt, Homo sapiens
  misc_RNA (1)...(19): siRNA sense strand
ggagaugggugguggagaa

SEQ ID NO: 2123412 - RNA, 19 nt, Homo sapiens
  misc_RNA (1)...(19): siRNA sense strand
ggaaguaauuugcuaugga

SEQ ID NO: 2123413 - RNA, 19 nt, Homo sapiens
  misc_RNA (1)...(19): siRNA sense strand
gcucaugccucuaaaguuc

SEQ ID NO: 2123414 - RNA, 19 nt, Homo sapiens
  misc_RNA (1)...(19): siRNA sense strand
caacacccgugaauagauu

SEQ ID NO: 2123415 - RNA, 19 nt, Homo sapiens
  misc_RNA (1)...(19): siRNA sense strand
ggaccaagauagugauuca

SEQ ID NO: 2123416 - RNA, 19 nt, Homo sapiens
  misc_RNA (1)...(19): siRNA sense strand
gaagauccuccauuaauau

SEQ ID NO: 2123417 - RNA, 19 nt, Homo sapiens
  misc_RNA (1)...(19): siRNA sense strand
gaucaguacugguguggaa

SEQ ID NO: 2123418 - RNA, 19 nt, Homo sapiens
  misc_RNA (1)...(19): siRNA sense strand
gaucugcacuccaugauag

SEQ ID NO: 2123419 - RNA, 19 nt, Homo sapiens
  misc_RNA (1)...(19): siRNA sense strand
gugaauagauuaaguaugc

SEQ ID NO: 2123420 - RNA, 19 nt, Homo sapiens
  misc_RNA (1)...(19): siRNA sense strand
gaaguaaguccaagaacaa

SEQ ID NO: 2123421 - RNA, 19 nt, Homo sapiens
  misc_RNA (1)...(19): siRNA sense strand
gaaggaaaguuuaguaacg

SEQ ID NO: 2123422 - RNA, 19 nt, Homo sapiens
  misc_RNA (1)...(19): siRNA sense strand
gaaagggauugauguugug

SEQ ID NO: 2123423 - RNA, 19 nt, Homo sapiens
  misc_RNA (1)...(19): siRNA sense strand
guccuuaacugauucauug

SEQ ID NO: 2123424 - RNA, 19 nt, Homo sapiens
  misc_RNA (1)...(19): siRNA sense strand
uugcgaagauccuccauua

SEQ ID NO: 2123425 - RNA, 19 nt, Homo sapiens
  misc_RNA (1)...(19): siRNA sense strand
caagaagacuggagaagag

SEQ ID NO: 2123426 - RNA, 19 nt, Homo sapiens
  misc_RNA (1)...(19): siRNA sense strand
gacaagaguuucuguaguc

SEQ ID NO: 2123427 - RNA, 19 nt, Homo sapiens
  misc_RNA (1)...(19): siRNA sense strand
gaagugauuuccucugaag

SEQ ID NO: 2123428 - RNA, 19 nt, Homo sapiens
  misc_RNA (1)...(19): siRNA sense strand
gaccaaagguuaacagcau

SEQ ID NO: 2123429 - RNA, 19 nt, Homo sapiens
  misc_RNA (1)...(19): siRNA sense strand
gguaaaggaugcugcugaa

SEQ ID NO: 2123430 - RNA, 19 nt, Homo sapiens
  misc_RNA (1)...(19): siRNA sense strand
gaaacuggcccgugaguca

SEQ ID NO: 2123431 - RNA, 19 nt, Homo sapiens
  misc_RNA (1)...(19): siRNA sense strand
ugacagcucuucuuaugau

SEQ ID NO: 2123432 - RNA, 19 nt, Homo sapiens
  misc_RNA (1)...(19): siRNA sense strand
uuaaacaucugccucaaau

SEQ ID NO: 2123433 - RNA, 19 nt, Homo sapiens
  misc_RNA (1)...(19): siRNA sense strand
gauauuggagcuagcauuu

SEQ ID NO: 2123434 - RNA, 19 nt, Homo sapiens
  misc_RNA (1)...(19): siRNA sense strand
gaggaggaauugcagaaga

SEQ ID NO: 2123435 - RNA, 19 nt, Homo sapiens
  misc_RNA (1)...(19): siRNA sense strand
ggaaaugagcagaaugauu

SEQ ID NO: 2123436 - RNA, 19 nt, Homo sapiens
  misc_RNA (1)...(19): siRNA sense strand
ugacagagcacccugauau

SEQ ID NO: 2123437 - RNA, 19 nt, Homo sapiens
  misc_RNA (1)...(19): siRNA sense strand
ugaaagggauugauguugu

SEQ ID NO: 2123438 - RNA, 19 nt, Homo sapiens
  misc_RNA (1)...(19): siRNA sense strand
ggucacaaauguccacaga

SEQ ID NO: 2123439 - RNA, 19 nt, Homo sapiens
  misc_RNA (1)...(19): siRNA sense strand
cagcauuuguucacuguaa

SEQ ID NO: 2123440 - RNA, 19 nt, Homo sapiens
  misc_RNA (1)...(19): siRNA sense strand
ucuauuccauugccaguua

SEQ ID NO: 2123441 - RNA, 19 nt, Homo sapiens
  misc_RNA (1)...(19): siRNA sense strand
gcgaagauccuccauuaau

SEQ ID NO: 2123442 - RNA, 19 nt, Homo sapiens
  misc_RNA (1)...(19): siRNA sense strand
ucugguggaugcauucuua

SEQ ID NO: 2123443 - RNA, 19 nt, Homo sapiens
  misc_RNA (1)...(19): siRNA sense strand
caggcgagcucuuggcuuu

SEQ ID NO: 2123444 - RNA, 19 nt, Homo sapiens
  misc_RNA (1)...(19): siRNA sense strand
aaugagaccacuuugauua

SEQ ID NO: 2123445 - RNA, 19 nt, Homo sapiens
  misc_RNA (1)...(19): siRNA sense strand
guugauugguguucucuuu

SEQ ID NO: 2123446 - RNA, 19 nt, Homo sapiens
  misc_RNA (1)...(19): siRNA sense strand
gcacuucacugagaucuac

SEQ ID NO: 2123447 - RNA, 19 nt, Homo sapiens
  misc_RNA (1)...(19): siRNA sense strand
guggaacgcuaugaugaua

SEQ ID NO: 2123448 - RNA, 19 nt, Homo sapiens
  misc_RNA (1)...(19): siRNA sense strand
gauagugauucaaauaugg

SEQ ID NO: 2123449 - RNA, 19 nt, Homo sapiens
  misc_RNA (1)...(19): siRNA sense strand
gauuuccucugaagauauu

SEQ ID NO: 2123450 - RNA, 19 nt, Homo sapiens
  misc_RNA (1)...(19): siRNA sense strand
gguccugccucuccuugua

SEQ ID NO: 2123451 - RNA, 19 nt, Homo sapiens
  misc_RNA (1)...(19): siRNA sense strand
gcaagaagacuggagaaga

SEQ ID NO: 2123452 - RNA, 19 nt, Homo sapiens
  misc_RNA (1)...(19): siRNA sense strand
cggaaagggucacaaaugu

SEQ ID NO: 2123453 - RNA, 19 nt, Homo sapiens
  misc_RNA (1)...(19): siRNA sense strand
aaacaucugccucaaauau

SEQ ID NO: 2123454 - RNA, 19 nt, Homo sapiens
  misc_RNA (1)...(19): siRNA sense strand
caacaccuccuuauuggaa

SEQ ID NO: 2123455 - RNA, 19 nt, Homo sapiens
  misc_RNA (1)...(19): siRNA sense strand
guaauuugcuauggacuga

SEQ ID NO: 2123456 - RNA, 19 nt, Homo sapiens
  misc_RNA (1)...(19): siRNA sense strand
ggacugacccuuccauugg

SEQ ID NO: 2123457 - RNA, 19 nt, Homo sapiens
  misc_RNA (1)...(19): siRNA sense strand
ucacugagaucuacaacuc

SEQ ID NO: 2123458 - RNA, 19 nt, Homo sapiens
  misc_RNA (1)...(19): siRNA sense strand
ugaaggaaccugcaaauag

SEQ ID NO: 2123459 - RNA, 19 nt, Homo sapiens
  misc_RNA (1)...(19): siRNA sense strand
gaaaguuuaguaacgauga

SEQ ID NO: 2123460 - RNA, 19 nt, Homo sapiens
  misc_RNA (1)...(19): siRNA sense strand
guacugcucaugccucuaa

SEQ ID NO: 2123461 - RNA, 19 nt, Homo sapiens
  misc_RNA (1)...(19): siRNA sense strand
guauauacagacuggauua

SEQ ID NO: 2123462 - RNA, 19 nt, Homo sapiens
  misc_RNA (1)...(19): siRNA sense strand
cagcaugacugccauuaca

SEQ ID NO: 2123463 - RNA, 19 nt, Homo sapiens
  misc_RNA (1)...(19): siRNA sense strand
gaugcauucuuagguauuu

SEQ ID NO: 2123464 - RNA, 19 nt, Homo sapiens
  misc_RNA (1)...(19): siRNA sense strand
guggaugcauucuuaggua

SEQ ID NO: 2123465 - RNA, 19 nt, Homo sapiens
  misc_RNA (1)...(19): siRNA sense strand
gaguaacccagcuauuaua

SEQ ID NO: 2123466 - RNA, 19 nt, Homo sapiens
  misc_RNA (1)...(19): siRNA sense strand
agaaauggauaaugagugu

SEQ ID NO: 2123467 - RNA, 19 nt, Homo sapiens
  misc_RNA (1)...(19): siRNA sense strand
cagacuggauuauggcuuu

SEQ ID NO: 2123468 - RNA, 19 nt, Homo sapiens
  misc_RNA (1)...(19): siRNA sense strand
gaaugagaccacuuugauu

SEQ ID NO: 2123469 - RNA, 19 nt, Homo sapiens
  misc_RNA (1)...(19): siRNA sense strand
ggacugccuuaaggaagua

SEQ ID NO: 2123470 - RNA, 19 nt, Homo sapiens
  misc_RNA (1)...(19): siRNA sense strand
caacagaauugcgaagauc

SEQ ID NO: 2123471 - RNA, 19 nt, Homo sapiens
  misc_RNA (1)...(19): siRNA sense strand
ucaaagugcugcugucagu

SEQ ID NO: 2123472 - RNA, 19 nt, Homo sapiens
  misc_RNA (1)...(19): siRNA sense strand
uauaagcucuacucccaaa

SEQ ID NO: 2123473 - RNA, 19 nt, Homo sapiens
  misc_RNA (1)...(19): siRNA sense strand
cgcaagaauugaaucagua

SEQ ID NO: 2123474 - RNA, 19 nt, Homo sapiens
  misc_RNA (1)...(19): siRNA sense strand
gaagaaagagacuggaaag

SEQ ID NO: 2123475 - RNA, 19 nt, Homo sapiens
  misc_RNA (1)...(19): siRNA sense strand
ggaggucacugcauuuggu

SEQ ID NO: 2123476 - RNA, 19 nt, Homo sapiens
  misc_RNA (1)...(19): siRNA sense strand
ugaaauagucacugaagaa

SEQ ID NO: 2123477 - RNA, 19 nt, Homo sapiens
  misc_RNA (1)...(19): siRNA sense strand
gaacaaccucuuggaaaug

SEQ ID NO: 2123478 - RNA, 19 nt, Homo sapiens
  misc_RNA (1)...(19): siRNA sense strand
gacgagagguggcaaaugc

SEQ ID NO: 2123479 - RNA, 19 nt, Homo sapiens
  misc_RNA (1)...(19): siRNA sense strand
guugagacuugugaauaua

SEQ ID NO: 2123480 - RNA, 19 nt, Homo sapiens
  misc_RNA (1)...(19): siRNA sense strand
gaagagauucugccagcuu

SEQ ID NO: 2123481 - RNA, 19 nt, Homo sapiens
  misc_RNA (1)...(19): siRNA sense strand
acaucugccucaaauauuu

SEQ ID NO: 2123482 - RNA, 19 nt, Homo sapiens
  misc_RNA (1)...(19): siRNA sense strand
ccucggagaccaaagguua

SEQ ID NO: 2123483 - RNA, 19 nt, Homo sapiens
  misc_RNA (1)...(19): siRNA sense strand
gaaauagucacugaagaau

SEQ ID NO: 2123484 - RNA, 19 nt, Homo sapiens
  misc_RNA (1)...(19): siRNA sense strand
gagaccacuuugauuaaau

SEQ ID NO: 2123485 - RNA, 19 nt, Homo sapiens
  misc_RNA (1)...(19): siRNA sense strand
gauauuaggggcaauguua

SEQ ID NO: 2123486 - RNA, 19 nt, Homo sapiens
  misc_RNA (1)...(19): siRNA sense strand
ucuaaacucuccuccuuug

SEQ ID NO: 2123487 - RNA, 19 nt, Homo sapiens
  misc_RNA (1)...(19): siRNA sense strand
aagagauucugccagcuua

SEQ ID NO: 2123488 - RNA, 19 nt, Homo sapiens
  misc_RNA (1)...(19): siRNA sense strand
gccaaacccugcaucuaug

SEQ ID NO: 2123489 - RNA, 19 nt, Homo sapiens
  misc_RNA (1)...(19): siRNA sense strand
gcugaugcccuuacagaaa

SEQ ID NO: 2123490 - RNA, 19 nt, Homo sapiens
  misc_RNA (1)...(19): siRNA sense strand
aagaagugauuuccucuga

SEQ ID NO: 2123491 - RNA, 19 nt, Homo sapiens
  misc_RNA (1)...(19): siRNA sense strand
ggugaaggaucucaacaag

SEQ ID NO: 2123492 - RNA, 19 nt, Homo sapiens
  misc_RNA (1)...(19): siRNA sense strand
gggcauguuucuaccaguu

SEQ ID NO: 2123493 - RNA, 19 nt, Homo sapiens
  misc_RNA (1)...(19): siRNA sense strand
gcacuugauuccacgauac

SEQ ID NO: 2123494 - RNA, 19 nt, Homo sapiens
  misc_RNA (1)...(19): siRNA sense strand
gcagauugcuuaugaaaua

SEQ ID NO: 2123495 - RNA, 19 nt, Homo sapiens
  misc_RNA (1)...(19): siRNA sense strand
gaaagagacuggaaaguga

SEQ ID NO: 2123496 - RNA, 19 nt, Homo sapiens
  misc_RNA (1)...(19): siRNA sense strand
agaagaaggugcuguauua

SEQ ID NO: 2123497 - RNA, 19 nt, Homo sapiens
  misc_RNA (1)...(19): siRNA sense strand
gcaagugaauuuccugaua

SEQ ID NO: 2123498 - RNA, 19 nt, Homo sapiens
  misc_RNA (1)...(19): siRNA sense strand
gaaagcagaucucagcauu

SEQ ID NO: 2123499 - RNA, 19 nt, Homo sapiens
  misc_RNA (1)...(19): siRNA sense strand
caacaacacccaaaugaua

SEQ ID NO: 2123500 - RNA, 19 nt, Homo sapiens
  misc_RNA (1)...(19): siRNA sense strand
gauuauggcuuuaguguug

SEQ ID NO: 2123501 - RNA, 19 nt, Homo sapiens
  misc_RNA (1)...(19): siRNA sense strand
gaaggaaccugcaaauagu

SEQ ID NO: 2123502 - RNA, 19 nt, Homo sapiens
  misc_RNA (1)...(19): siRNA sense strand
cgaagauccuccauuaaua

SEQ ID NO: 2123503 - RNA, 19 nt, Homo sapiens
  misc_RNA (1)...(19): siRNA sense strand
gaugacagcucuucuuaug

SEQ ID NO: 2123504 - RNA, 19 nt, Homo sapiens
  misc_RNA (1)...(19): siRNA sense strand
ggaacgcuaugaugauaua

SEQ ID NO: 2123505 - RNA, 19 nt, Homo sapiens
  misc_RNA (1)...(19): siRNA sense strand
ugaaggaucucaacaagaa

SEQ ID NO: 2123506 - RNA, 19 nt, Homo sapiens
  misc_RNA (1)...(19): siRNA sense strand
gcaccuacauuguuuauca

SEQ ID NO: 2123507 - RNA, 19 nt, Homo sapiens
  misc_RNA (1)...(19): siRNA sense strand
ggaacaaccucuuggaaau

SEQ ID NO: 2123508 - RNA, 19 nt, Homo sapiens
  misc_RNA (1)...(19): siRNA sense strand
ccaaggagaugguggcuaa

SEQ ID NO: 2123509 - RNA, 19 nt, Homo sapiens
  misc_RNA (1)...(19): siRNA sense strand
caagugaauuuccugauaa

SEQ ID NO: 2123510 - RNA, 19 nt, Homo sapiens
  misc_RNA (1)...(19): siRNA sense strand
ggaaguaaguccaagaaca

SEQ ID NO: 2123511 - RNA, 19 nt, Homo sapiens
  misc_RNA (1)...(19): siRNA sense strand
ggagaugggugguggagaa

SEQ ID NO: 2123512 - RNA, 19 nt, Homo sapiens
  misc_RNA (1)...(19): siRNA sense strand
ggaaguaauuugcuaugga

SEQ ID NO: 2123513 - RNA, 19 nt, Homo sapiens
  misc_RNA (1)...(19): siRNA sense strand
gcucaugccucuaaaguuc

SEQ ID NO: 2123514 - RNA, 19 nt, Homo sapiens
  misc_RNA (1)...(19): siRNA sense strand
caacacccgugaauagauu

SEQ ID NO: 2123515 - RNA, 19 nt, Homo sapiens
  misc_RNA (1)...(19): siRNA sense strand
ggaccaagauagugauuca

SEQ ID NO: 2123516 - RNA, 19 nt, Homo sapiens
  misc_RNA (1)...(19): siRNA sense strand
gaagauccuccauuaauau

SEQ ID NO: 2123517 - RNA, 19 nt, Homo sapiens
  misc_RNA (1)...(19): siRNA sense strand
gaucaguacugguguggaa

SEQ ID NO: 2123518 - RNA, 19 nt, Homo sapiens
  misc_RNA (1)...(19): siRNA sense strand
gaucugcacuccaugauag

SEQ ID NO: 2123519 - RNA, 19 nt, Homo sapiens
  misc_RNA (1)...(19): siRNA sense strand
gugaauagauuaaguaugc

SEQ ID NO: 2123520 - RNA, 19 nt, Homo sapiens
  misc_RNA (1)...(19): siRNA sense strand
gaaguaaguccaagaacaa

SEQ ID NO: 2123521 - RNA, 19 nt, Homo sapiens
  misc_RNA (1)...(19): siRNA sense strand
gaaggaaaguuuaguaacg

SEQ ID NO: 2123522 - RNA, 19 nt, Homo sapiens
  misc_RNA (1)...(19): siRNA sense strand
gaaagggauugauguugug

SEQ ID NO: 2123523 - RNA, 19 nt, Homo sapiens
  misc_RNA (1)...(19): siRNA sense strand
guccuuaacugauucauug

SEQ ID NO: 2123524 - RNA, 19 nt, Homo sapiens
  misc_RNA (1)...(19): siRNA sense strand
uugcgaagauccuccauua

SEQ ID NO: 2123525 - RNA, 19 nt, Homo sapiens
  misc_RNA (1)...(19): siRNA sense strand
caagaagacuggagaagag

SEQ ID NO: 2123526 - RNA, 19 nt, Homo sapiens
  misc_RNA (1)...(19): siRNA sense strand
gacaagaguuucuguaguc

SEQ ID NO: 2123527 - RNA, 19 nt, Homo sapiens
  misc_RNA (1)...(19): siRNA sense strand
gaagugauuuccucugaag

SEQ ID NO: 2123528 - RNA, 19 nt, Homo sapiens
  misc_RNA (1)...(19): siRNA sense strand
gaccaaagguuaacagcau

SEQ ID NO: 2123529 - RNA, 19 nt, Homo sapiens
  misc_RNA (1)...(19): siRNA sense strand
gguaaaggaugcugcugaa

SEQ ID NO: 2123530 - RNA, 19 nt, Homo sapiens
  misc_RNA (1)...(19): siRNA sense strand
gaaacuggcccgugaguca

SEQ ID NO: 2123531 - RNA, 19 nt, Homo sapiens
  misc_RNA (1)...(19): siRNA sense strand
ugacagcucuucuuaugau

SEQ ID NO: 2123532 - RNA, 19 nt, Homo sapiens
  misc_RNA (1)...(19): siRNA sense strand
uuaaacaucugccucaaau

SEQ ID NO: 2123533 - RNA, 19 nt, Homo sapiens
  misc_RNA (1)...(19): siRNA sense strand
gauauuggagcuagcauuu

SEQ ID NO: 2123534 - RNA, 19 nt, Homo sapiens
  misc_RNA (1)...(19): siRNA sense strand
gaggaggaauugcagaaga

SEQ ID NO: 2123535 - RNA, 19 nt, Homo sapiens
  misc_RNA (1)...(19): siRNA sense strand
ggaaaugagcagaaugauu

SEQ ID NO: 2123536 - RNA, 19 nt, Homo sapiens
  misc_RNA (1)...(19): siRNA sense strand
ugacagagcacccugauau

SEQ ID NO: 2123537 - RNA, 19 nt, Homo sapiens
  misc_RNA (1)...(19): siRNA sense strand
ugaaagggauugauguugu

SEQ ID NO: 2123538 - RNA, 19 nt, Homo sapiens
  misc_RNA (1)...(19): siRNA sense strand
ggucacaaauguccacaga

SEQ ID NO: 2123539 - RNA, 19 nt, Homo sapiens
  misc_RNA (1)...(19): siRNA sense strand
cagcauuuguucacuguaa

SEQ ID NO: 2123540 - RNA, 19 nt, Homo sapiens
  misc_RNA (1)...(19): siRNA sense strand
ucuauuccauugccaguua

SEQ ID NO: 2123541 - RNA, 19 nt, Homo sapiens
  misc_RNA (1)...(19): siRNA sense strand
gcgaagauccuccauuaau

SEQ ID NO: 2123542 - RNA, 19 nt, Homo sapiens
  misc_RNA (1)...(19): siRNA sense strand
ucugguggaugcauucuua

SEQ ID NO: 2123543 - RNA, 19 nt, Homo sapiens
  misc_RNA (1)...(19): siRNA sense strand
caggcgagcucuuggcuuu

SEQ ID NO: 2123544 - RNA, 19 nt, Homo sapiens
  misc_RNA (1)...(19): siRNA sense strand
aaugagaccacuuugauua

SEQ ID NO: 2123545 - RNA, 19 nt, Homo sapiens
  misc_RNA (1)...(19): siRNA sense strand
guugauugguguucucuuu

SEQ ID NO: 2123546 - RNA, 19 nt, Homo sapiens
  misc_RNA (1)...(19): siRNA sense strand
gcacuucacugagaucuac

SEQ ID NO: 2123547 - RNA, 19 nt, Homo sapiens
  misc_RNA (1)...(19): siRNA sense strand
guggaacgcuaugaugaua

SEQ ID NO: 2123548 - RNA, 19 nt, Homo sapiens
  misc_RNA (1)...(19): siRNA sense strand
gauagugauucaaauaugg

SEQ ID NO: 2123549 - RNA, 19 nt, Homo sapiens
  misc_RNA (1)...(19): siRNA sense strand
gauuuccucugaagauauu

SEQ ID NO: 2123550 - RNA, 19 nt, Homo sapiens
  misc_RNA (1)...(19): siRNA sense strand
gguccugccucuccuugua

SEQ ID NO: 2123551 - RNA, 19 nt, Homo sapiens
  misc_RNA (1)...(19): siRNA sense strand
gcaagaagacuggagaaga

SEQ ID NO: 2123552 - RNA, 19 nt, Homo sapiens
  misc_RNA (1)...(19): siRNA sense strand
cggaaagggucacaaaugu

SEQ ID NO: 2123553 - RNA, 19 nt, Homo sapiens
  misc_RNA (1)...(19): siRNA sense strand
aaacaucugccucaaauau

SEQ ID NO: 2123554 - RNA, 19 nt, Homo sapiens
  misc_RNA (1)...(19): siRNA sense strand
caacaccuccuuauuggaa

SEQ ID NO: 2123555 - RNA, 19 nt, Homo sapiens
  misc_RNA (1)...(19): siRNA sense strand
guaauuugcuauggacuga

SEQ ID NO: 2123556 - RNA, 19 nt, Homo sapiens
  misc_RNA (1)...(19): siRNA sense strand
ggacugacccuuccauugg

SEQ ID NO: 2123557 - RNA, 19 nt, Homo sapiens
  misc_RNA (1)...(19): siRNA sense strand
ucacugagaucuacaacuc

SEQ ID NO: 2123558 - RNA, 19 nt, Homo sapiens
  misc_RNA (1)...(19): siRNA sense strand
ugaaggaaccugcaaauag

SEQ ID NO: 2123559 - RNA, 19 nt, Homo sapiens
  misc_RNA (1)...(19): siRNA sense strand
gaaaguuuaguaacgauga

SEQ ID NO: 2123560 - RNA, 19 nt, Homo sapiens
  misc_RNA (1)...(19): siRNA sense strand
guacugcucaugccucuaa

SEQ ID NO: 2123561 - RNA, 19 nt, Homo sapiens
  misc_RNA (1)...(19): siRNA sense strand
guauauacagacuggauua

SEQ ID NO: 2123562 - RNA, 19 nt, Homo sapiens
  misc_RNA (1)...(19): siRNA sense strand
cagcaugacugccauuaca

SEQ ID NO: 2123563 - RNA, 19 nt, Homo sapiens
  misc_RNA (1)...(19): siRNA sense strand
gaugcauucuuagguauuu

SEQ ID NO: 2123564 - RNA, 19 nt, Homo sapiens
  misc_RNA (1)...(19): siRNA sense strand
guggaugcauucuuaggua

SEQ ID NO: 2123565 - RNA, 19 nt, Homo sapiens
  misc_RNA (1)...(19): siRNA sense strand
gaguaacccagcuauuaua

SEQ ID NO: 2123566 - RNA, 19 nt, Homo sapiens
  misc_RNA (1)...(19): siRNA sense strand
agaaauggauaaugagugu

SEQ ID NO: 2123567 - RNA, 19 nt, Homo sapiens
  misc_RNA (1)...(19): siRNA sense strand
cagacuggauuauggcuuu

SEQ ID NO: 2123568 - RNA, 19 nt, Homo sapiens
  misc_RNA (1)...(19): siRNA sense strand
gaaugagaccacuuugauu

SEQ ID NO: 2123569 - RNA, 19 nt, Homo sapiens
  misc_RNA (1)...(19): siRNA sense strand
ggacugccuuaaggaagua

SEQ ID NO: 2123570 - RNA, 19 nt, Homo sapiens
  misc_RNA (1)...(19): siRNA sense strand
caacagaauugcgaagauc

SEQ ID NO: 2123571 - RNA, 19 nt, Homo sapiens
  misc_RNA (1)...(19): siRNA sense strand
ucaaagugcugcugucagu

SEQ ID NO: 2123572 - RNA, 19 nt, Homo sapiens
  misc_RNA (1)...(19): siRNA sense strand
uauaagcucuacucccaaa

SEQ ID NO: 2123573 - RNA, 19 nt, Homo sapiens
  misc_RNA (1)...(19): siRNA sense strand
cgcaagaauugaaucagua

SEQ ID NO: 2123574 - RNA, 19 nt, Homo sapiens
  misc_RNA (1)...(19): siRNA sense strand
gaagaaagagacuggaaag

SEQ ID NO: 2123575 - RNA, 19 nt, Homo sapiens
  misc_RNA (1)...(19): siRNA sense strand
ggaggucacugcauuuggu

SEQ ID NO: 2123576 - RNA, 19 nt, Homo sapiens
  misc_RNA (1)...(19): siRNA sense strand
ugaaauagucacugaagaa

SEQ ID NO: 2123577 - RNA, 19 nt, Homo sapiens
  misc_RNA (1)...(19): siRNA sense strand
gaacaaccucuuggaaaug

SEQ ID NO: 2123578 - RNA, 19 nt, Homo sapiens
  misc_RNA (1)...(19): siRNA sense strand
gacgagagguggcaaaugc

SEQ ID NO: 2123579 - RNA, 19 nt, Homo sapiens
  misc_RNA (1)...(19): siRNA sense strand
guugagacuugugaauaua

SEQ ID NO: 2123580 - RNA, 19 nt, Homo sapiens
  misc_RNA (1)...(19): siRNA sense strand
gaagagauucugccagcuu

SEQ ID NO: 2123581 - RNA, 19 nt, Homo sapiens
  misc_RNA (1)...(19): siRNA sense strand
acaucugccucaaauauuu

SEQ ID NO: 2123582 - RNA, 19 nt, Homo sapiens
  misc_RNA (1)...(19): siRNA sense strand
ccucggagaccaaagguua

SEQ ID NO: 2123583 - RNA, 19 nt, Homo sapiens
  misc_RNA (1)...(19): siRNA sense strand
gaaauagucacugaagaau

SEQ ID NO: 2123584 - RNA, 19 nt, Homo sapiens
  misc_RNA (1)...(19): siRNA sense strand
gagaccacuuugauuaaau

SEQ ID NO: 2123585 - RNA, 19 nt, Homo sapiens
  misc_RNA (1)...(19): siRNA sense strand
gauauuaggggcaauguua

SEQ ID NO: 2123586 - RNA, 19 nt, Homo sapiens
  misc_RNA (1)...(19): siRNA sense strand
ucuaaacucuccuccuuug

SEQ ID NO: 2123587 - RNA, 19 nt, Homo sapiens
  misc_RNA (1)...(19): siRNA sense strand
aagagauucugccagcuua

SEQ ID NO: 2123588 - RNA, 19 nt, Homo sapiens
  misc_RNA (1)...(19): siRNA sense strand
gccaaacccugcaucuaug

SEQ ID NO: 2123589 - RNA, 19 nt, Homo sapiens
  misc_RNA (1)...(19): siRNA sense strand
gcugaugcccuuacagaaa

SEQ ID NO: 2123590 - RNA, 19 nt, Homo sapiens
  misc_RNA (1)...(19): siRNA sense strand
aagaagugauuuccucuga

SEQ ID NO: 2123591 - RNA, 19 nt, Homo sapiens
  misc_RNA (1)...(19): siRNA sense strand
ggugaaggaucucaacaag

SEQ ID NO: 2123592 - RNA, 19 nt, Homo sapiens
  misc_RNA (1)...(19): siRNA sense strand
gggcauguuucuaccaguu

SEQ ID NO: 2123593 - RNA, 19 nt, Homo sapiens
  misc_RNA (1)...(19): siRNA sense strand
gcacuugauuccacgauac

SEQ ID NO: 2123594 - RNA, 19 nt, Homo sapiens
  misc_RNA (1)...(19): siRNA sense strand
gcaagauaguuacaagaaa

SEQ ID NO: 2123595 - RNA, 19 nt, Homo sapiens
  misc_RNA (1)...(19): siRNA sense strand
gugcacagcuguuuauuuc

SEQ ID NO: 2123596 - RNA, 19 nt, Homo sapiens
  misc_RNA (1)...(19): siRNA sense strand
gaaaggaacaccagagcaa

SEQ ID NO: 2123597 - RNA, 19 nt, Homo sapiens
  misc_RNA (1)...(19): siRNA sense strand
gaagcaagauaguuacaag

SEQ ID NO: 2123598 - RNA, 19 nt, Homo sapiens
  misc_RNA (1)...(19): siRNA sense strand
gcacagcuguuuauuucca

SEQ ID NO: 2123599 - RNA, 19 nt, Homo sapiens
  misc_RNA (1)...(19): siRNA sense strand
ucauugcccucaccaacua

SEQ ID NO: 2123600 - RNA, 19 nt, Homo sapiens
  misc_RNA (1)...(19): siRNA sense strand
gcaccuccaucuucuccaa

SEQ ID NO: 2123601 - RNA, 19 nt, Homo sapiens
  misc_RNA (1)...(19): siRNA sense strand
gacgguggcugacgagauc

SEQ ID NO: 2123602 - RNA, 19 nt, Homo sapiens
  misc_RNA (1)...(19): siRNA sense strand
gagcuguaguuugaauuug

SEQ ID NO: 2123603 - RNA, 19 nt, Homo sapiens
  misc_RNA (1)...(19): siRNA sense strand
guacgggacauacggguuu

SEQ ID NO: 2123604 - RNA, 19 nt, Homo sapiens
  misc_RNA (1)...(19): siRNA sense strand
ccagagcuguaguuugaau

SEQ ID NO: 2123605 - RNA, 19 nt, Homo sapiens
  misc_RNA (1)...(19): siRNA sense strand
gcuguaguuugaauuugaa

SEQ ID NO: 2123606 - RNA, 19 nt, Homo sapiens
  misc_RNA (1)...(19): siRNA sense strand
gcauggcuuugacaucuca

SEQ ID NO: 2123607 - RNA, 19 nt, Homo sapiens
  misc_RNA (1)...(19): siRNA sense strand
ggacauacggguuuuggua

SEQ ID NO: 2123608 - RNA, 19 nt, Homo sapiens
  misc_RNA (1)...(19): siRNA sense strand
cagcaaauacuuucacaag

SEQ ID NO: 2123609 - RNA, 19 nt, Homo sapiens
  misc_RNA (1)...(19): siRNA sense strand
gcacggccaucugguacau

SEQ ID NO: 2123610 - RNA, 19 nt, Homo sapiens
  misc_RNA (1)...(19): siRNA sense strand
ccccagagcuguaguuuga

SEQ ID NO: 2123611 - RNA, 19 nt, Homo sapiens
  misc_RNA (1)...(19): siRNA sense strand
ucuccaacaucgaacacua

SEQ ID NO: 2123612 - RNA, 19 nt, Homo sapiens
  misc_RNA (1)...(19): siRNA sense strand
caucugcaccuccaucuuc

SEQ ID NO: 2123613 - RNA, 19 nt, Homo sapiens
  misc_RNA (1)...(19): siRNA sense strand
guuugaauuugaagcaaga

SEQ ID NO: 2123614 - RNA, 19 nt, Homo sapiens
  misc_RNA (1)...(19): siRNA sense strand
gauccggcauggagcaucu

SEQ ID NO: 2123615 - RNA, 19 nt, Homo sapiens
  misc_RNA (1)...(19): siRNA sense strand
gggcuacauuuauccucuu

SEQ ID NO: 2123616 - RNA, 19 nt, Homo sapiens
  misc_RNA (1)...(19): siRNA sense strand
agaugucugugcugcauga

SEQ ID NO: 2123617 - RNA, 19 nt, Homo sapiens
  misc_RNA (1)...(19): siRNA sense strand
uggcauggcuuugacaucu

SEQ ID NO: 2123618 - RNA, 19 nt, Homo sapiens
  misc_RNA (1)...(19): siRNA sense strand
agagcuaccucagcaacaa

SEQ ID NO: 2123619 - RNA, 19 nt, Homo sapiens
  misc_RNA (1)...(19): siRNA sense strand
gaauuugaagcaagauagu

SEQ ID NO: 2123620 - RNA, 19 nt, Homo sapiens
  misc_RNA (1)...(19): siRNA sense strand
caucuucuccaacaucgaa

SEQ ID NO: 2123621 - RNA, 19 nt, Homo sapiens
  misc_RNA (1)...(19): siRNA sense strand
cuucugcgcccucaugauu

SEQ ID NO: 2123622 - RNA, 19 nt, Homo sapiens
  misc_RNA (1)...(19): siRNA sense strand
ggacgguggcugacgagau

SEQ ID NO: 2123623 - RNA, 19 nt, Homo sapiens
  misc_RNA (1)...(19): siRNA sense strand
ccucaugauuguagaagag

SEQ ID NO: 2123624 - RNA, 19 nt, Homo sapiens
  misc_RNA (1)...(19): siRNA sense strand
gacguucugucuccuucug

SEQ ID NO: 2123625 - RNA, 19 nt, Homo sapiens
  misc_RNA (1)...(19): siRNA sense strand
agagcuguaguuugaauuu

SEQ ID NO: 2123626 - RNA, 19 nt, Homo sapiens
  misc_RNA (1)...(19): siRNA sense strand
uuuggcaccuuguuugguu

SEQ ID NO: 2123627 - RNA, 19 nt, Homo sapiens
  misc_RNA (1)...(19): siRNA sense strand
cagaggagacgagcgaguu

SEQ ID NO: 2123628 - RNA, 19 nt, Homo sapiens
  misc_RNA (1)...(19): siRNA sense strand
gcagcagugccaccaggaa

SEQ ID NO: 2123629 - RNA, 19 nt, Homo sapiens
  misc_RNA (1)...(19): siRNA sense strand
cuacauuuauccucuucca

SEQ ID NO: 2123630 - RNA, 19 nt, Homo sapiens
  misc_RNA (1)...(19): siRNA sense strand
ugaauuugaagcaagauag

SEQ ID NO: 2123631 - RNA, 19 nt, Homo sapiens
  misc_RNA (1)...(19): siRNA sense strand
gaccuucugcgcccucaug

SEQ ID NO: 2123632 - RNA, 19 nt, Homo sapiens
  misc_RNA (1)...(19): siRNA sense strand
agcuguaguuugaauuuga

SEQ ID NO: 2123633 - RNA, 19 nt, Homo sapiens
  misc_RNA (1)...(19): siRNA sense strand
agagaugucugugcugcau

SEQ ID NO: 2123634 - RNA, 19 nt, Homo sapiens
  misc_RNA (1)...(19): siRNA sense strand
guaguuugaauuugaagca

SEQ ID NO: 2123635 - RNA, 19 nt, Homo sapiens
  misc_RNA (1)...(19): siRNA sense strand
agcaagauaguuacaagaa

SEQ ID NO: 2123636 - RNA, 19 nt, Homo sapiens
  misc_RNA (1)...(19): siRNA sense strand
cuuccagccuccagcaaau

SEQ ID NO: 2123637 - RNA, 19 nt, Homo sapiens
  misc_RNA (1)...(19): siRNA sense strand
gagagcuaccucagcaaca

SEQ ID NO: 2123638 - RNA, 19 nt, Homo sapiens
  misc_RNA (1)...(19): siRNA sense strand
cccugggcauucugacuuu

SEQ ID NO: 2123639 - RNA, 19 nt, Homo sapiens
  misc_RNA (1)...(19): siRNA sense strand
caacacagcugaagguuua

SEQ ID NO: 2123640 - RNA, 19 nt, Homo sapiens
  misc_RNA (1)...(19): siRNA sense strand
gaaggaagaagaaauguuu

SEQ ID NO: 2123641 - RNA, 19 nt, Homo sapiens
  misc_RNA (1)...(19): siRNA sense strand
gauguaaucucuaaacuca

SEQ ID NO: 2123642 - RNA, 19 nt, Homo sapiens
  misc_RNA (1)...(19): siRNA sense strand
ggacggcaaucuccgcuuu

SEQ ID NO: 2123643 - RNA, 19 nt, Homo sapiens
  misc_RNA (1)...(19): siRNA sense strand
acacaaggguaacuucuuu

SEQ ID NO: 2123644 - RNA, 19 nt, Homo sapiens
  misc_RNA (1)...(19): siRNA sense strand
gggagaagauggcggaaga

SEQ ID NO: 2123645 - RNA, 19 nt, Homo sapiens
  misc_RNA (1)...(19): siRNA sense strand
gcugaagguuuaacaagaa

SEQ ID NO: 2123646 - RNA, 19 nt, Homo sapiens
  misc_RNA (1)...(19): siRNA sense strand
gaggagagguuccccaaua

SEQ ID NO: 2123647 - RNA, 19 nt, Homo sapiens
  misc_RNA (1)...(19): siRNA sense strand
gcguuuggcucccuaauau

SEQ ID NO: 2123648 - RNA, 19 nt, Homo sapiens
  misc_RNA (1)...(19): siRNA sense strand
aaggguaacuucuuucaaa

SEQ ID NO: 2123649 - RNA, 19 nt, Homo sapiens
  misc_RNA (1)...(19): siRNA sense strand
gaaauuuccuuugucaucu

SEQ ID NO: 2123650 - RNA, 19 nt, Homo sapiens
  misc_RNA (1)...(19): siRNA sense strand
ccuaauaucugcugucgau

SEQ ID NO: 2123651 - RNA, 19 nt, Homo sapiens
  misc_RNA (1)...(19): siRNA sense strand
ccucacaaguuugaaauuu

SEQ ID NO: 2123652 - RNA, 19 nt, Homo sapiens
  misc_RNA (1)...(19): siRNA sense strand
uguaguagguggaggaauu

SEQ ID NO: 2123653 - RNA, 19 nt, Homo sapiens
  misc_RNA (1)...(19): siRNA sense strand
cuagcuaucugcaucauau

SEQ ID NO: 2123654 - RNA, 19 nt, Homo sapiens
  misc_RNA (1)...(19): siRNA sense strand
uuuccuaccuccugaauuu

SEQ ID NO: 2123655 - RNA, 19 nt, Homo sapiens
  misc_RNA (1)...(19): siRNA sense strand
gcacaccgcaggaacaaga

SEQ ID NO: 2123656 - RNA, 19 nt, Homo sapiens
  misc_RNA (1)...(19): siRNA sense strand
gcagagcgguaaacauuuu

SEQ ID NO: 2123657 - RNA, 19 nt, Homo sapiens
  misc_RNA (1)...(19): siRNA sense strand
gaugcagucuccauuguuc

SEQ ID NO: 2123658 - RNA, 19 nt, Homo sapiens
  misc_RNA (1)...(19): siRNA sense strand
gcuguuguuucuuuaggua

SEQ ID NO: 2123659 - RNA, 19 nt, Homo sapiens
  misc_RNA (1)...(19): siRNA sense strand
gcugaagcauauugacuug

SEQ ID NO: 2123660 - RNA, 19 nt, Homo sapiens
  misc_RNA (1)...(19): siRNA sense strand
uuacauuucuugccagaga

SEQ ID NO: 2123661 - RNA, 19 nt, Homo sapiens
  misc_RNA (1)...(19): siRNA sense strand
cgauacagauuacauuucu

SEQ ID NO: 2123662 - RNA, 19 nt, Homo sapiens
  misc_RNA (1)...(19): siRNA sense strand
cagcaagacugagaagaug

SEQ ID NO: 2123663 - RNA, 19 nt, Homo sapiens
  misc_RNA (1)...(19): siRNA sense strand
guaaacauuuucccucuuu

SEQ ID NO: 2123664 - RNA, 19 nt, Homo sapiens
  misc_RNA (1)...(19): siRNA sense strand
caugaggguuucaauguca

SEQ ID NO: 2123665 - RNA, 19 nt, Homo sapiens
  misc_RNA (1)...(19): siRNA sense strand
guacgaggcccacuacauc

SEQ ID NO: 2123666 - RNA, 19 nt, Homo sapiens
  misc_RNA (1)...(19): siRNA sense strand
uggcagagcgguaaacauu

SEQ ID NO: 2123667 - RNA, 19 nt, Homo sapiens
  misc_RNA (1)...(19): siRNA sense strand
ggaaggaagaagaaauguu

SEQ ID NO: 2123668 - RNA, 19 nt, Homo sapiens
  misc_RNA (1)...(19): siRNA sense strand
gaauuggaaggaagaagaa

SEQ ID NO: 2123669 - RNA, 19 nt, Homo sapiens
  misc_RNA (1)...(19): siRNA sense strand
caucauauuggugcauuua

SEQ ID NO: 2123670 - RNA, 19 nt, Homo sapiens
  misc_RNA (1)...(19): siRNA sense strand
guagguggaggaauuuauu

SEQ ID NO: 2123671 - RNA, 19 nt, Homo sapiens
  misc_RNA (1)...(19): siRNA sense strand
aggcugauguaaucucuaa

SEQ ID NO: 2123672 - RNA, 19 nt, Homo sapiens
  misc_RNA (1)...(19): siRNA sense strand
caacgaugcagucuccauu

SEQ ID NO: 2123673 - RNA, 19 nt, Homo sapiens
  misc_RNA (1)...(19): siRNA sense strand
ugaaaacucucaccaacaa

SEQ ID NO: 2123674 - RNA, 19 nt, Homo sapiens
  misc_RNA (1)...(19): siRNA sense strand
guguugcuguuguuucuuu

SEQ ID NO: 2123675 - RNA, 19 nt, Homo sapiens
  misc_RNA (1)...(19): siRNA sense strand
gaacaagaaggacgucaac

SEQ ID NO: 2123676 - RNA, 19 nt, Homo sapiens
  misc_RNA (1)...(19): siRNA sense strand
cauauugacuugaggaaaa

SEQ ID NO: 2123677 - RNA, 19 nt, Homo sapiens
  misc_RNA (1)...(19): siRNA sense strand
gcaucauauuggugcauuu

SEQ ID NO: 2123678 - RNA, 19 nt, Homo sapiens
  misc_RNA (1)...(19): siRNA sense strand
uugcuuaucugccuuaugg

SEQ ID NO: 2123679 - RNA, 19 nt, Homo sapiens
  misc_RNA (1)...(19): siRNA sense strand
cgaauuggaaggaagaaga

SEQ ID NO: 2123680 - RNA, 19 nt, Homo sapiens
  misc_RNA (1)...(19): siRNA sense strand
gaguguugcuguuguuucu

SEQ ID NO: 2123681 - RNA, 19 nt, Homo sapiens
  misc_RNA (1)...(19): siRNA sense strand
gcagaaggaaucucacucu

SEQ ID NO: 2123682 - RNA, 19 nt, Homo sapiens
  misc_RNA (1)...(19): siRNA sense strand
ucucaugggagcaguuaua

SEQ ID NO: 2123683 - RNA, 19 nt, Homo sapiens
  misc_RNA (1)...(19): siRNA sense strand
ggaacaagaaggacgucaa

SEQ ID NO: 2123684 - RNA, 19 nt, Homo sapiens
  misc_RNA (1)...(19): siRNA sense strand
ugaaauuuccuuugucauc

SEQ ID NO: 2123685 - RNA, 19 nt, Homo sapiens
  misc_RNA (1)...(19): siRNA sense strand
ugaagcauauugacuugag

SEQ ID NO: 2123686 - RNA, 19 nt, Homo sapiens
  misc_RNA (1)...(19): siRNA sense strand
ugcauuuacugauccgaua

SEQ ID NO: 2123687 - RNA, 19 nt, Homo sapiens
  misc_RNA (1)...(19): siRNA sense strand
gaacucggugguccuggaa

SEQ ID NO: 2123688 - RNA, 19 nt, Homo sapiens
  misc_RNA (1)...(19): siRNA sense strand
uuucuuggccuguccauuu

SEQ ID NO: 2123689 - RNA, 19 nt, Homo sapiens
  misc_RNA (1)...(19): siRNA sense strand
caccguggccuucuuaugu

SEQ ID NO: 2123690 - RNA, 19 nt, Homo sapiens
  misc_RNA (1)...(19): siRNA sense strand
ucaacaugcuggucuuugg

SEQ ID NO: 2123691 - RNA, 19 nt, Homo sapiens
  misc_RNA (1)...(19): siRNA sense strand
caacaugacagacaguuuu

SEQ ID NO: 2123692 - RNA, 19 nt, Homo sapiens
  misc_RNA (1)...(19): siRNA sense strand
uuacugauccgauacagau

SEQ ID NO: 2123693 - RNA, 19 nt, Homo sapiens
  misc_RNA (1)...(19): siRNA sense strand
aaucuccgcuuuuguagua

SEQ ID NO: 2123694 - RNA, 19 nt, Homo sapiens
  misc_RNA (1)...(19): siRNA sense strand
auacaacucaugaggguuu

SEQ ID NO: 2123695 - RNA, 19 nt, Homo sapiens
  misc_RNA (1)...(19): siRNA sense strand
cagagaguguugcuguugu

SEQ ID NO: 2123696 - RNA, 19 nt, Homo sapiens
  misc_RNA (1)...(19): siRNA sense strand
ucucuaaacucaacaugac

SEQ ID NO: 2123697 - RNA, 19 nt, Homo sapiens
  misc_RNA (1)...(19): siRNA sense strand
cacucucacuggcuuaauu

SEQ ID NO: 2123698 - RNA, 19 nt, Homo sapiens
  misc_RNA (1)...(19): siRNA sense strand
gggagagacuaagaagcaa

SEQ ID NO: 2123699 - RNA, 19 nt, Homo sapiens
  misc_RNA (1)...(19): siRNA sense strand
ccaacacagcugaagguuu

SEQ ID NO: 2123700 - RNA, 19 nt, Homo sapiens
  misc_RNA (1)...(19): siRNA sense strand
gccagagaguguugcuguu

SEQ ID NO: 2123701 - RNA, 19 nt, Homo sapiens
  misc_RNA (1)...(19): siRNA sense strand
gacgucaaccucagcaaga

SEQ ID NO: 2123702 - RNA, 19 nt, Homo sapiens
  misc_RNA (1)...(19): siRNA sense strand
guaguagguggaggaauuu

SEQ ID NO: 2123703 - RNA, 19 nt, Homo sapiens
  misc_RNA (1)...(19): siRNA sense strand
ugagucuggauauucauua

SEQ ID NO: 2123704 - RNA, 19 nt, Homo sapiens
  misc_RNA (1)...(19): siRNA sense strand
agagaguguugcuguuguu

SEQ ID NO: 2123705 - RNA, 19 nt, Homo sapiens
  misc_RNA (1)...(19): siRNA sense strand
uguaaucucuaaacucaac

SEQ ID NO: 2123706 - RNA, 19 nt, Homo sapiens
  misc_RNA (1)...(19): siRNA sense strand
gcaccguggccuucuuaug

SEQ ID NO: 2123707 - RNA, 19 nt, Homo sapiens
  misc_RNA (1)...(19): siRNA sense strand
gcauauugacuugaggaaa

SEQ ID NO: 2123708 - RNA, 19 nt, Homo sapiens
  misc_RNA (1)...(19): siRNA sense strand
cugaagguuuaacaagaaa

SEQ ID NO: 2123709 - RNA, 19 nt, Homo sapiens
  misc_RNA (1)...(19): siRNA sense strand
aaacucaacaugacagaca

SEQ ID NO: 2123710 - RNA, 19 nt, Homo sapiens
  misc_RNA (1)...(19): siRNA sense strand
gacagacaguuuugcguuu

SEQ ID NO: 2123711 - RNA, 19 nt, Homo sapiens
  misc_RNA (1)...(19): siRNA sense strand
caagugguacgaggaggua

SEQ ID NO: 2123712 - RNA, 19 nt, Homo sapiens
  misc_RNA (1)...(19): siRNA sense strand
ucacaaguuugaaauuucc

SEQ ID NO: 2123713 - RNA, 19 nt, Homo sapiens
  misc_RNA (1)...(19): siRNA sense strand
caacaugcuggucuuugga

SEQ ID NO: 2123714 - RNA, 19 nt, Homo sapiens
  misc_RNA (1)...(19): siRNA sense strand
ucacaccgaagaugauguu

SEQ ID NO: 2123715 - RNA, 19 nt, Homo sapiens
  misc_RNA (1)...(19): siRNA sense strand
ucacccagauccucaugca

SEQ ID NO: 2123716 - RNA, 19 nt, Homo sapiens
  misc_RNA (1)...(19): siRNA sense strand
ccagagaguguugcuguug

SEQ ID NO: 2123717 - RNA, 19 nt, Homo sapiens
  misc_RNA (1)...(19): siRNA sense strand
ucaugaggguuucaauguc

SEQ ID NO: 2123718 - RNA, 19 nt, Homo sapiens
  misc_RNA (1)...(19): siRNA sense strand
ggcagagcgguaaacauuu

SEQ ID NO: 2123719 - RNA, 19 nt, Homo sapiens
  misc_RNA (1)...(19): siRNA sense strand
gagagacuaagaagcaauc

SEQ ID NO: 2123720 - RNA, 19 nt, Homo sapiens
  misc_RNA (1)...(19): siRNA sense strand
gaccaacacagcugaaggu

SEQ ID NO: 2123721 - RNA, 19 nt, Homo sapiens
  misc_RNA (1)...(19): siRNA sense strand
caugggagcaguuauaaaa

SEQ ID NO: 2123722 - RNA, 19 nt, Homo sapiens
  misc_RNA (1)...(19): siRNA sense strand
ucacggaggaggaguacga

SEQ ID NO: 2123723 - RNA, 19 nt, Homo sapiens
  misc_RNA (1)...(19): siRNA sense strand
acugauccgauacagauua

SEQ ID NO: 2123724 - RNA, 19 nt, Homo sapiens
  misc_RNA (1)...(19): siRNA sense strand
agaaggaaucucacucuca

SEQ ID NO: 2123725 - RNA, 19 nt, Homo sapiens
  misc_RNA (1)...(19): siRNA sense strand
gucaguggguggcaaacau

SEQ ID NO: 2123726 - RNA, 19 nt, Homo sapiens
  misc_RNA (1)...(19): siRNA sense strand
ggagagacuaagaagcaau

SEQ ID NO: 2123727 - RNA, 19 nt, Homo sapiens
  misc_RNA (1)...(19): siRNA sense strand
gagucuggauauucauuac

SEQ ID NO: 2123728 - RNA, 19 nt, Homo sapiens
  misc_RNA (1)...(19): siRNA sense strand
gagaguguugcuguuguuu

SEQ ID NO: 2123729 - RNA, 19 nt, Homo sapiens
  misc_RNA (1)...(19): siRNA sense strand
cgggagagacuaagaagca

SEQ ID NO: 2123730 - RNA, 19 nt, Homo sapiens
  misc_RNA (1)...(19): siRNA sense strand
gauccgauacagauuacau

SEQ ID NO: 2123731 - RNA, 19 nt, Homo sapiens
  misc_RNA (1)...(19): siRNA sense strand
ucaacaugacagacaguuu

SEQ ID NO: 2123732 - RNA, 19 nt, Homo sapiens
  misc_RNA (1)...(19): siRNA sense strand
ggaguacgaggcccacuac

SEQ ID NO: 2123733 - RNA, 19 nt, Homo sapiens
  misc_RNA (1)...(19): siRNA sense strand
ucauauuggugcauuuacu

SEQ ID NO: 2123734 - RNA, 19 nt, Homo sapiens
  misc_RNA (1)...(19): siRNA sense strand
cucacaaguuugaaauuuc

SEQ ID NO: 2123735 - RNA, 19 nt, Homo sapiens
  misc_RNA (1)...(19): siRNA sense strand
gagcaguccagcggcauga

SEQ ID NO: 2123736 - RNA, 19 nt, Homo sapiens
  misc_RNA (1)...(19): siRNA sense strand
ccgcaccguggccuucuua

SEQ ID NO: 2123737 - RNA, 19 nt, Homo sapiens
  misc_RNA (1)...(19): siRNA sense strand
ucaggcggcaggaccuuaa

SEQ ID NO: 2123738 - RNA, 19 nt, Homo sapiens
  misc_RNA (1)...(19): siRNA sense strand
cauaaaaucacaccgaaga

SEQ ID NO: 2123739 - RNA, 19 nt, Homo sapiens
  misc_RNA (1)...(19): siRNA sense strand
ggaauaauguugugaggaa

SEQ ID NO: 2123740 - RNA, 19 nt, Homo sapiens
  misc_RNA (1)...(19): siRNA sense strand
gaagauggaacaaucauaa

SEQ ID NO: 2123741 - RNA, 19 nt, Homo sapiens
  misc_RNA (1)...(19): siRNA sense strand
agacauccauggagacuua

SEQ ID NO: 2123742 - RNA, 19 nt, Homo sapiens
  misc_RNA (1)...(19): siRNA sense strand
ccacauauagucauuagua

SEQ ID NO: 2123743 - RNA, 19 nt, Homo sapiens
  misc_RNA (1)...(19): siRNA sense strand
cgaagaagaugacauuauc

SEQ ID NO: 2123744 - RNA, 19 nt, Homo sapiens
  misc_RNA (1)...(19): siRNA sense strand
ggguacgucuuuacaaaua

SEQ ID NO: 2123745 - RNA, 19 nt, Homo sapiens
  misc_RNA (1)...(19): siRNA sense strand
guacagacacgcuaauaaa

SEQ ID NO: 2123746 - RNA, 19 nt, Homo sapiens
  misc_RNA (1)...(19): siRNA sense strand
ucaaaguacaggacuauua

SEQ ID NO: 2123747 - RNA, 19 nt, Homo sapiens
  misc_RNA (1)...(19): siRNA sense strand
uaacagacaugaugauugc

SEQ ID NO: 2123748 - RNA, 19 nt, Homo sapiens
  misc_RNA (1)...(19): siRNA sense strand
ggaagaagcagacuacagu

SEQ ID NO: 2123749 - RNA, 19 nt, Homo sapiens
  misc_RNA (1)...(19): siRNA sense strand
gguaacaccacauggcuua

SEQ ID NO: 2123750 - RNA, 19 nt, Homo sapiens
  misc_RNA (1)...(19): siRNA sense strand
agaagaagauggaacaauc

SEQ ID NO: 2123751 - RNA, 19 nt, Homo sapiens
  misc_RNA (1)...(19): siRNA sense strand
cagacacgcuaauaaagaa

SEQ ID NO: 2123752 - RNA, 19 nt, Homo sapiens
  misc_RNA (1)...(19): siRNA sense strand
cauggagacuuacuaccua

SEQ ID NO: 2123753 - RNA, 19 nt, Homo sapiens
  misc_RNA (1)...(19): siRNA sense strand
ggagacuuacuaccuauaa

SEQ ID NO: 2123754 - RNA, 19 nt, Homo sapiens
  misc_RNA (1)...(19): siRNA sense strand
gagacuuacuaccuauaaa

SEQ ID NO: 2123755 - RNA, 19 nt, Homo sapiens
  misc_RNA (1)...(19): siRNA sense strand
uaggguacgucuuuacaaa

SEQ ID NO: 2123756 - RNA, 19 nt, Homo sapiens
  misc_RNA (1)...(19): siRNA sense strand
gaagaagauggaacaauca

SEQ ID NO: 2123757 - RNA, 19 nt, Homo sapiens
  misc_RNA (1)...(19): siRNA sense strand
gagcaaguuuggagcugaa

SEQ ID NO: 2123758 - RNA, 19 nt, Homo sapiens
  misc_RNA (1)...(19): siRNA sense strand
uaacacagauagagcuaag

SEQ ID NO: 2123759 - RNA, 19 nt, Homo sapiens
  misc_RNA (1)...(19): siRNA sense strand
gaaggaagaagcagacuac

SEQ ID NO: 2123760 - RNA, 19 nt, Homo sapiens
  misc_RNA (1)...(19): siRNA sense strand
gagcuuagcagccauagca

SEQ ID NO: 2123761 - RNA, 19 nt, Homo sapiens
  misc_RNA (1)...(19): siRNA sense strand
gacaugaugauugcaaaua

SEQ ID NO: 2123762 - RNA, 19 nt, Homo sapiens
  misc_RNA (1)...(19): siRNA sense strand
gcgaagaagaugacauuau

SEQ ID NO: 2123763 - RNA, 19 nt, Homo sapiens
  misc_RNA (1)...(19): siRNA sense strand
caaguuuggagcugaauuu

SEQ ID NO: 2123764 - RNA, 19 nt, Homo sapiens
  misc_RNA (1)...(19): siRNA sense strand
ugaaacacaugcuccagau

SEQ ID NO: 2123765 - RNA, 19 nt, Homo sapiens
  misc_RNA (1)...(19): siRNA sense strand
ggaugaagacagcgaagaa

SEQ ID NO: 2123766 - RNA, 19 nt, Homo sapiens
  misc_RNA (1)...(19): siRNA sense strand
gcagauugaaccaagcuuu

SEQ ID NO: 2123767 - RNA, 19 nt, Homo sapiens
  misc_RNA (1)...(19): siRNA sense strand
gcaaaccagaggaauaaug

SEQ ID NO: 2123768 - RNA, 19 nt, Homo sapiens
  misc_RNA (1)...(19): siRNA sense strand
guuaauggcauagaaguuu

SEQ ID NO: 2123769 - RNA, 19 nt, Homo sapiens
  misc_RNA (1)...(19): siRNA sense strand
ggaggucuggcucaaagua

SEQ ID NO: 2123770 - RNA, 19 nt, Homo sapiens
  misc_RNA (1)...(19): siRNA sense strand
gguacagacacgcuaauaa

SEQ ID NO: 2123771 - RNA, 19 nt, Homo sapiens
  misc_RNA (1)...(19): siRNA sense strand
caaaguacaggacuauuag

SEQ ID NO: 2123772 - RNA, 19 nt, Homo sapiens
  misc_RNA (1)...(19): siRNA sense strand
ccacugcuuaggauauuua

SEQ ID NO: 2123773 - RNA, 19 nt, Homo sapiens
  misc_RNA (1)...(19): siRNA sense strand
gaagacagcgaagaagaug

SEQ ID NO: 2123774 - RNA, 19 nt, Homo sapiens
  misc_RNA (1)...(19): siRNA sense strand
ucaaguaacagacaugaug

SEQ ID NO: 2123775 - RNA, 19 nt, Homo sapiens
  misc_RNA (1)...(19): siRNA sense strand
gaucaaaaccuggaaaauu

SEQ ID NO: 2123776 - RNA, 19 nt, Homo sapiens
  misc_RNA (1)...(19): siRNA sense strand
cgggauggcuccaguguca

SEQ ID NO: 2123777 - RNA, 19 nt, Homo sapiens
  misc_RNA (1)...(19): siRNA sense strand
agaaguuaauggcauagaa

SEQ ID NO: 2123778 - RNA, 19 nt, Homo sapiens
  misc_RNA (1)...(19): siRNA sense strand
gaagaagaugacauuauca

SEQ ID NO: 2123779 - RNA, 19 nt, Homo sapiens
  misc_RNA (1)...(19): siRNA sense strand
guaacagacaugaugauug

SEQ ID NO: 2123780 - RNA, 19 nt, Homo sapiens
  misc_RNA (1)...(19): siRNA sense strand
cagcgaagaagaugacauu

SEQ ID NO: 2123781 - RNA, 19 nt, Homo sapiens
  misc_RNA (1)...(19): siRNA sense strand
cggcaaaccagaggaauaa

SEQ ID NO: 2123782 - RNA, 19 nt, Homo sapiens
  misc_RNA (1)...(19): siRNA sense strand
caaaccagaggaauaaugu

SEQ ID NO: 2123783 - RNA, 19 nt, Homo sapiens
  misc_RNA (1)...(19): siRNA sense strand
caaaagcuguuccuaauac

SEQ ID NO: 2123784 - RNA, 19 nt, Homo sapiens
  misc_RNA (1)...(19): siRNA sense strand
gguaggcuaugcagacauc

SEQ ID NO: 2123785 - RNA, 19 nt, Homo sapiens
  misc_RNA (1)...(19): siRNA sense strand
caaguaacagacaugauga

SEQ ID NO: 2123786 - RNA, 19 nt, Homo sapiens
  misc_RNA (1)...(19): siRNA sense strand
ccagaggaauaauguugug

SEQ ID NO: 2123787 - RNA, 19 nt, Homo sapiens
  misc_RNA (1)...(19): siRNA sense strand
aaacacaugcuccagauca

SEQ ID NO: 2123788 - RNA, 19 nt, Homo sapiens
  misc_RNA (1)...(19): siRNA sense strand
acacggaauuugaaacaca

SEQ ID NO: 2123789 - RNA, 19 nt, Homo sapiens
  misc_RNA (1)...(19): siRNA sense strand
caggaggucuggcucaaag

SEQ ID NO: 2123790 - RNA, 19 nt, Homo sapiens
  misc_RNA (1)...(19): siRNA sense strand
cugagagccuggagucauu

SEQ ID NO: 2123791 - RNA, 19 nt, Homo sapiens
  misc_RNA (1)...(19): siRNA sense strand
gcuuugagccagaggauga

SEQ ID NO: 2123792 - RNA, 19 nt, Homo sapiens
  misc_RNA (1)...(19): siRNA sense strand
gaucaaguaacagacauga

SEQ ID NO: 2123793 - RNA, 19 nt, Homo sapiens
  misc_RNA (1)...(19): siRNA sense strand
gaaguuaauggcauagaag

SEQ ID NO: 2123794 - RNA, 19 nt, Homo sapiens
  misc_RNA (1)...(19): siRNA sense strand
cuauggaggugaagagcaa

SEQ ID NO: 2123795 - RNA, 19 nt, Homo sapiens
  misc_RNA (1)...(19): siRNA sense strand
ggaguuuuauggauuacua

SEQ ID NO: 2123796 - RNA, 19 nt, Homo sapiens
  misc_RNA (1)...(19): siRNA sense strand
cagacaugaugauugcaaa

SEQ ID NO: 2123797 - RNA, 19 nt, Homo sapiens
  misc_RNA (1)...(19): siRNA sense strand
ggagaaaccccuaggauuc

SEQ ID NO: 2123798 - RNA, 19 nt, Homo sapiens
  misc_RNA (1)...(19): siRNA sense strand
ggaggugaagagcaaguuu

SEQ ID NO: 2123799 - RNA, 19 nt, Homo sapiens
  misc_RNA (1)...(19): siRNA sense strand
ggagucauuaacacagaua

SEQ ID NO: 2123800 - RNA, 19 nt, Homo sapiens
  misc_RNA (1)...(19): siRNA sense strand
aaagccacauauagucauu

SEQ ID NO: 2123801 - RNA, 19 nt, Homo sapiens
  misc_RNA (1)...(19): siRNA sense strand
gccguaaccucaucauaac

SEQ ID NO: 2123802 - RNA, 19 nt, Homo sapiens
  misc_RNA (1)...(19): siRNA sense strand
acagacacgcuaauaaaga

SEQ ID NO: 2123803 - RNA, 19 nt, Homo sapiens
  misc_RNA (1)...(19): siRNA sense strand
aaacacggaauuugaaaca

SEQ ID NO: 2123804 - RNA, 19 nt, Homo sapiens
  misc_RNA (1)...(19): siRNA sense strand
caaauacggcacggagaaa

SEQ ID NO: 2123805 - RNA, 19 nt, Homo sapiens
  misc_RNA (1)...(19): siRNA sense strand
cauaagauccccaauguug

SEQ ID NO: 2123806 - RNA, 19 nt, Homo sapiens
  misc_RNA (1)...(19): siRNA sense strand
acaaauacggcacggagaa

SEQ ID NO: 2123807 - RNA, 19 nt, Homo sapiens
  misc_RNA (1)...(19): siRNA sense strand
gcuuuauucccucuaauga

SEQ ID NO: 2123808 - RNA, 19 nt, Homo sapiens
  misc_RNA (1)...(19): siRNA sense strand
gaggugaagagcaaguuug

SEQ ID NO: 2123809 - RNA, 19 nt, Homo sapiens
  misc_RNA (1)...(19): siRNA sense strand
ugaggaguuuuauggauua

SEQ ID NO: 2123810 - RNA, 19 nt, Homo sapiens
  misc_RNA (1)...(19): siRNA sense strand
gcucaaaguacaggacuau

SEQ ID NO: 2123811 - RNA, 19 nt, Homo sapiens
  misc_RNA (1)...(19): siRNA sense strand
uuauagacguggauauucu

SEQ ID NO: 2123812 - RNA, 19 nt, Homo sapiens
  misc_RNA (1)...(19): siRNA sense strand
agccguaaccucaucauaa

SEQ ID NO: 2123813 - RNA, 19 nt, Homo sapiens
  misc_RNA (1)...(19): siRNA sense strand
acaugaugauugcaaauag

SEQ ID NO: 2123814 - RNA, 19 nt, Homo sapiens
  misc_RNA (1)...(19): siRNA sense strand
accugugucuucuauuaua

SEQ ID NO: 2123815 - RNA, 19 nt, Homo sapiens
  misc_RNA (1)...(19): siRNA sense strand
gauggaacaaucauaacau

SEQ ID NO: 2123816 - RNA, 19 nt, Homo sapiens
  misc_RNA (1)...(19): siRNA sense strand
guuuggagcugaauuucgu

SEQ ID NO: 2123817 - RNA, 19 nt, Homo sapiens
  misc_RNA (1)...(19): siRNA sense strand
cuacaacauguucauaaga

SEQ ID NO: 2123818 - RNA, 19 nt, Homo sapiens
  misc_RNA (1)...(19): siRNA sense strand
gaagaagaauguuuuaacc

SEQ ID NO: 2123819 - RNA, 19 nt, Homo sapiens
  misc_RNA (1)...(19): siRNA sense strand
uggacagaauggcuuuauu

SEQ ID NO: 2123820 - RNA, 19 nt, Homo sapiens
  misc_RNA (1)...(19): siRNA sense strand
gcaaguuuggagcugaauu

SEQ ID NO: 2123821 - RNA, 19 nt, Homo sapiens
  misc_RNA (1)...(19): siRNA sense strand
gcagcucaaacacggaauu

SEQ ID NO: 2123822 - RNA, 19 nt, Homo sapiens
  misc_RNA (1)...(19): siRNA sense strand
gagccuggagucauuaaca

SEQ ID NO: 2123823 - RNA, 19 nt, Homo sapiens
  misc_RNA (1)...(19): siRNA sense strand
gacauuaucauugaagaca

SEQ ID NO: 2123824 - RNA, 19 nt, Homo sapiens
  misc_RNA (1)...(19): siRNA sense strand
gccaauccacugcuuagga

SEQ ID NO: 2123825 - RNA, 19 nt, Homo sapiens
  misc_RNA (1)...(19): siRNA sense strand
ggauuacuacaacauguuc

SEQ ID NO: 2123826 - RNA, 19 nt, Homo sapiens
  misc_RNA (1)...(19): siRNA sense strand
uuuauucccucuaaugaag

SEQ ID NO: 2123827 - RNA, 19 nt, Homo sapiens
  misc_RNA (1)...(19): siRNA sense strand
cagauugaaccaagcuuug

SEQ ID NO: 2123828 - RNA, 19 nt, Homo sapiens
  misc_RNA (1)...(19): siRNA sense strand
uuaauggcauagaaguuuc

SEQ ID NO: 2123829 - RNA, 19 nt, Homo sapiens
  misc_RNA (1)...(19): siRNA sense strand
ccacauggcuuagaaaagg

SEQ ID NO: 2123830 - RNA, 19 nt, Homo sapiens
  misc_RNA (1)...(19): siRNA sense strand
ugaagacagcgaagaagau

SEQ ID NO: 2123831 - RNA, 19 nt, Homo sapiens
  misc_RNA (1)...(19): siRNA sense strand
gaccugugucuucuauuau

SEQ ID NO: 2123832 - RNA, 19 nt, Homo sapiens
  misc_RNA (1)...(19): siRNA sense strand
agaagauggaacaaucaua

SEQ ID NO: 2123833 - RNA, 19 nt, Homo sapiens
  misc_RNA (1)...(19): siRNA sense strand
ggagugccacagcagauuc

SEQ ID NO: 2123834 - RNA, 19 nt, Homo sapiens
  misc_RNA (1)...(19): siRNA sense strand
guuccagggaucuuuauau

SEQ ID NO: 2123835 - RNA, 19 nt, Homo sapiens
  misc_RNA (1)...(19): siRNA sense strand
gcacuauggaggugaagag

SEQ ID NO: 2123836 - RNA, 19 nt, Homo sapiens
  misc_RNA (1)...(19): siRNA sense strand
gagagccuggagucauuaa

SEQ ID NO: 2123837 - RNA, 19 nt, Homo sapiens
  misc_RNA (1)...(19): siRNA sense strand
aagcuguuccuaauacuga

SEQ ID NO: 2123838 - RNA, 19 nt, Homo sapiens
  misc_RNA (1)...(19): siRNA sense strand
ccaaaagcuguuccuaaua

SEQ ID NO: 2123839 - RNA, 19 nt, Homo sapiens
  misc_RNA (1)...(19): siRNA sense strand
acucaaagcucacaucaua

SEQ ID NO: 2123840 - RNA, 19 nt, Homo sapiens
  misc_RNA (1)...(19): siRNA sense strand
ugaaucaacuggagaaauu

SEQ ID NO: 2123841 - RNA, 19 nt, Homo sapiens
  misc_RNA (1)...(19): siRNA sense strand
gcccaacgcucaccacuaa

SEQ ID NO: 2123842 - RNA, 19 nt, Homo sapiens
  misc_RNA (1)...(19): siRNA sense strand
caacgugacucccguguau

SEQ ID NO: 2123843 - RNA, 19 nt, Homo sapiens
  misc_RNA (1)...(19): siRNA sense strand
cuacagaucuucccuuuca

SEQ ID NO: 2123844 - RNA, 19 nt, Homo sapiens
  misc_RNA (1)...(19): siRNA sense strand
gaucuucccuuucaccuau

SEQ ID NO: 2123845 - RNA, 19 nt, Homo sapiens
  misc_RNA (1)...(19): siRNA sense strand
ggaaugucaucaacaauca

SEQ ID NO: 2123846 - RNA, 19 nt, Homo sapiens
  misc_RNA (1)...(19): siRNA sense strand
gaaguaagaucggccuguu

SEQ ID NO: 2123847 - RNA, 19 nt, Homo sapiens
  misc_RNA (1)...(19): siRNA sense strand
gaagaguucuaacauccaa

SEQ ID NO: 2123848 - RNA, 19 nt, Homo sapiens
  misc_RNA (1)...(19): siRNA sense strand
ggaagaguguggcaacaug

SEQ ID NO: 2123849 - RNA, 19 nt, Homo sapiens
  misc_RNA (1)...(19): siRNA sense strand
ggucauggcuggcauugug

SEQ ID NO: 2123850 - RNA, 19 nt, Homo sapiens
  misc_RNA (1)...(19): siRNA sense strand
cagaagagccaaauauuga

SEQ ID NO: 2123851 - RNA, 19 nt, Homo sapiens
  misc_RNA (1)...(19): siRNA sense strand
gcagaagagccaaauauug

SEQ ID NO: 2123852 - RNA, 19 nt, Homo sapiens
  misc_RNA (1)...(19): siRNA sense strand
gaagagagaccagagguau

SEQ ID NO: 2123853 - RNA, 19 nt, Homo sapiens
  misc_RNA (1)...(19): siRNA sense strand
caucuuggccgguugcuua

SEQ ID NO: 2123854 - RNA, 19 nt, Homo sapiens
  misc_RNA (1)...(19): siRNA sense strand
gaaguacaaagccacauuu

SEQ ID NO: 2123855 - RNA, 19 nt, Homo sapiens
  misc_RNA (1)...(19): siRNA sense strand
gggcaggauuucguacuua

SEQ ID NO: 2123856 - RNA, 19 nt, Homo sapiens
  misc_RNA (1)...(19): siRNA sense strand
caaccucuauuucuuacuu

SEQ ID NO: 2123857 - RNA, 19 nt, Homo sapiens
  misc_RNA (1)...(19): siRNA sense strand
gaagacuccugccgcguau

SEQ ID NO: 2123858 - RNA, 19 nt, Homo sapiens
  misc_RNA (1)...(19): siRNA sense strand
gcaaugacgucagcaugau

SEQ ID NO: 2123859 - RNA, 19 nt, Homo sapiens
  misc_RNA (1)...(19): siRNA sense strand
cagauucgaucguaugugu

SEQ ID NO: 2123860 - RNA, 19 nt, Homo sapiens
  misc_RNA (1)...(19): siRNA sense strand
cuacaaggaucuucucaag

SEQ ID NO: 2123861 - RNA, 19 nt, Homo sapiens
  misc_RNA (1)...(19): siRNA sense strand
gacggaaagugugggcuua

SEQ ID NO: 2123862 - RNA, 19 nt, Homo sapiens
  misc_RNA (1)...(19): siRNA sense strand
ggagcaguaucaggacuuu

SEQ ID NO: 2123863 - RNA, 19 nt, Homo sapiens
  misc_RNA (1)...(19): siRNA sense strand
gaaagucuccgucaucacu

SEQ ID NO: 2123864 - RNA, 19 nt, Homo sapiens
  misc_RNA (1)...(19): siRNA sense strand
caagggagcaccaucaugu

SEQ ID NO: 2123865 - RNA, 19 nt, Homo sapiens
  misc_RNA (1)...(19): siRNA sense strand
gagacuuggugcacucuau

SEQ ID NO: 2123866 - RNA, 19 nt, Homo sapiens
  misc_RNA (1)...(19): siRNA sense strand
caccauguuuccuguguuu

SEQ ID NO: 2123867 - RNA, 19 nt, Homo sapiens
  misc_RNA (1)...(19): siRNA sense strand
gaaucaacuggagaaauua

SEQ ID NO: 2123868 - RNA, 19 nt, Homo sapiens
  misc_RNA (1)...(19): siRNA sense strand
gcacgaccgcucccucaaa

SEQ ID NO: 2123869 - RNA, 19 nt, Homo sapiens
  misc_RNA (1)...(19): siRNA sense strand
ggugaagaguucuaacauc

SEQ ID NO: 2123870 - RNA, 19 nt, Homo sapiens
  misc_RNA (1)...(19): siRNA sense strand
gggcgcugcugcuguuuga

SEQ ID NO: 2123871 - RNA, 19 nt, Homo sapiens
  misc_RNA (1)...(19): siRNA sense strand
gaugucaaaucggaaguug

SEQ ID NO: 2123872 - RNA, 19 nt, Homo sapiens
  misc_RNA (1)...(19): siRNA sense strand
gagcagcugggcaggauuu

SEQ ID NO: 2123873 - RNA, 19 nt, Homo sapiens
  misc_RNA (1)...(19): siRNA sense strand
gcgaccagauccugaacuu

SEQ ID NO: 2123874 - RNA, 19 nt, Homo sapiens
  misc_RNA (1)...(19): siRNA sense strand
guucaucgauguguacuuc

SEQ ID NO: 2123875 - RNA, 19 nt, Homo sapiens
  misc_RNA (1)...(19): siRNA sense strand
ucaaccaguucaaauacuu

SEQ ID NO: 2123876 - RNA, 19 nt, Homo sapiens
  misc_RNA (1)...(19): siRNA sense strand
cagugaaggugaagaguuc

SEQ ID NO: 2123877 - RNA, 19 nt, Homo sapiens
  misc_RNA (1)...(19): siRNA sense strand
ugaacugccucaccaagau

SEQ ID NO: 2123878 - RNA, 19 nt, Homo sapiens
  misc_RNA (1)...(19): siRNA sense strand
caagcucaccugugcagua

SEQ ID NO: 2123879 - RNA, 19 nt, Homo sapiens
  misc_RNA (1)...(19): siRNA sense strand
aaacaggaguggcgagagu

SEQ ID NO: 2123880 - RNA, 19 nt, Homo sapiens
  misc_RNA (1)...(19): siRNA sense strand
cccauuaguuugcguguga

SEQ ID NO: 2123881 - RNA, 19 nt, Homo sapiens
  misc_RNA (1)...(19): siRNA sense strand
ccacaggguugcagcucaa

SEQ ID NO: 2123882 - RNA, 19 nt, Homo sapiens
  misc_RNA (1)...(19): siRNA sense strand
guacaauuucuucaccuuu

SEQ ID NO: 2123883 - RNA, 19 nt, Homo sapiens
  misc_RNA (1)...(19): siRNA sense strand
gaacuucaccauccuacag

SEQ ID NO: 2123884 - RNA, 19 nt, Homo sapiens
  misc_RNA (1)...(19): siRNA sense strand
gcgagagccugagcauaga

SEQ ID NO: 2123885 - RNA, 19 nt, Homo sapiens
  misc_RNA (1)...(19): siRNA sense strand
gaccuuaucaucguugaaa

SEQ ID NO: 2123886 - RNA, 19 nt, Homo sapiens
  misc_RNA (1)...(19): siRNA sense strand
gaccagaaaccaagacauc

SEQ ID NO: 2123887 - RNA, 19 nt, Homo sapiens
  misc_RNA (1)...(19): siRNA sense strand
guacaaagccacauuuuca

SEQ ID NO: 2123888 - RNA, 19 nt, Homo sapiens
  misc_RNA (1)...(19): siRNA sense strand
ccaacggugugacugauca

SEQ ID NO: 2123889 - RNA, 19 nt, Homo sapiens
  misc_RNA (1)...(19): siRNA sense strand
gcugcagacuucuccauca

SEQ ID NO: 2123890 - RNA, 19 nt, Homo sapiens
  misc_RNA (1)...(19): siRNA sense strand
gggagcagauguggucaug

SEQ ID NO: 2123891 - RNA, 19 nt, Homo sapiens
  misc_RNA (1)...(19): siRNA sense strand
ucaacaaucagaaguacaa

SEQ ID NO: 2123892 - RNA, 19 nt, Homo sapiens
  misc_RNA (1)...(19): siRNA sense strand
aaacgggucaugcuucuug

SEQ ID NO: 2123893 - RNA, 19 nt, Homo sapiens
  misc_RNA (1)...(19): siRNA sense strand
agccaaauauugacauuca

SEQ ID NO: 2123894 - RNA, 19 nt, Homo sapiens
  misc_RNA (1)...(19): siRNA sense strand
gaaguugccaugcuguauc

SEQ ID NO: 2123895 - RNA, 19 nt, Homo sapiens
  misc_RNA (1)...(19): siRNA sense strand
ggcaaugacgucagcauga

SEQ ID NO: 2123896 - RNA, 19 nt, Homo sapiens
  misc_RNA (1)...(19): siRNA sense strand
ggaugaaucaacuggagaa

SEQ ID NO: 2123897 - RNA, 19 nt, Homo sapiens
  misc_RNA (1)...(19): siRNA sense strand
gaagagccaaauauugaca

SEQ ID NO: 2123898 - RNA, 19 nt, Homo sapiens
  misc_RNA (1)...(19): siRNA sense strand
ggaaguugccaugcuguau

SEQ ID NO: 2123899 - RNA, 19 nt, Homo sapiens
  misc_RNA (1)...(19): siRNA sense strand
uggcuggcauugugcagua

SEQ ID NO: 2123900 - RNA, 19 nt, Homo sapiens
  misc_RNA (1)...(19): siRNA sense strand
cuggagaaauuacguuuua

SEQ ID NO: 2123901 - RNA, 19 nt, Homo sapiens
  misc_RNA (1)...(19): siRNA sense strand
caaccaguucaaauacuuu

SEQ ID NO: 2123902 - RNA, 19 nt, Homo sapiens
  misc_RNA (1)...(19): siRNA sense strand
ccgagaagcaguacgaaga

SEQ ID NO: 2123903 - RNA, 19 nt, Homo sapiens
  misc_RNA (1)...(19): siRNA sense strand
uacaauuucuucaccuuuc

SEQ ID NO: 2123904 - RNA, 19 nt, Homo sapiens
  misc_RNA (1)...(19): siRNA sense strand
ucaguuuguucccgaaaug

SEQ ID NO: 2123905 - RNA, 19 nt, Homo sapiens
  misc_RNA (1)...(19): siRNA sense strand
uggaggagauccgaugcua

SEQ ID NO: 2123906 - RNA, 19 nt, Homo sapiens
  misc_RNA (1)...(19): siRNA sense strand
ucacucaauuuaagcaucu

SEQ ID NO: 2123907 - RNA, 19 nt, Homo sapiens
  misc_RNA (1)...(19): siRNA sense strand
guagucugcugccgaugug

SEQ ID NO: 2123908 - RNA, 19 nt, Homo sapiens
  misc_RNA (1)...(19): siRNA sense strand
gcaaacguaugggcaucau

SEQ ID NO: 2123909 - RNA, 19 nt, Homo sapiens
  misc_RNA (1)...(19): siRNA sense strand
gcauuuacacccagcaauc

SEQ ID NO: 2123910 - RNA, 19 nt, Homo sapiens
  misc_RNA (1)...(19): siRNA sense strand
cgaaguacaaagccacauu

SEQ ID NO: 2123911 - RNA, 19 nt, Homo sapiens
  misc_RNA (1)...(19): siRNA sense strand
cgacucaauggacgaagua

SEQ ID NO: 2123912 - RNA, 19 nt, Homo sapiens
  misc_RNA (1)...(19): siRNA sense strand
caggcacucuuacccagaa

SEQ ID NO: 2123913 - RNA, 19 nt, Homo sapiens
  misc_RNA (1)...(19): siRNA sense strand
guugguaccugcagaucau

SEQ ID NO: 2123914 - RNA, 19 nt, Homo sapiens
  misc_RNA (1)...(19): siRNA sense strand
caaguuggagaccuuauca

SEQ ID NO: 2123915 - RNA, 19 nt, Homo sapiens
  misc_RNA (1)...(19): siRNA sense strand
gaggaagaguguggcaaca

SEQ ID NO: 2123916 - RNA, 19 nt, Homo sapiens
  misc_RNA (1)...(19): siRNA sense strand
caucaacaaucagaaguac

SEQ ID NO: 2123917 - RNA, 19 nt, Homo sapiens
  misc_RNA (1)...(19): siRNA sense strand
gcacagugaaggugaagag

SEQ ID NO: 2123918 - RNA, 19 nt, Homo sapiens
  misc_RNA (1)...(19): siRNA sense strand
uggaaagucuccgucauca

SEQ ID NO: 2123919 - RNA, 19 nt, Homo sapiens
  misc_RNA (1)...(19): siRNA sense strand
guguacagcugggugauuc

SEQ ID NO: 2123920 - RNA, 19 nt, Homo sapiens
  misc_RNA (1)...(19): siRNA sense strand
ugucaugaauaccucaaau

SEQ ID NO: 2123921 - RNA, 19 nt, Homo sapiens
  misc_RNA (1)...(19): siRNA sense strand
ggaaggaaaggaaggaaaa

SEQ ID NO: 2123922 - RNA, 19 nt, Homo sapiens
  misc_RNA (1)...(19): siRNA sense strand
aaaccaagacauccacguu

SEQ ID NO: 2123923 - RNA, 19 nt, Homo sapiens
  misc_RNA (1)...(19): siRNA sense strand
uaugaaagcaaacguaugg

SEQ ID NO: 2123924 - RNA, 19 nt, Homo sapiens
  misc_RNA (1)...(19): siRNA sense strand
gagaccuuaucaucguuga

SEQ ID NO: 2123925 - RNA, 19 nt, Homo sapiens
  misc_RNA (1)...(19): siRNA sense strand
ccgccgaccuucuucagau

SEQ ID NO: 2123926 - RNA, 19 nt, Homo sapiens
  misc_RNA (1)...(19): siRNA sense strand
gugaggcgguggaggagau

SEQ ID NO: 2123927 - RNA, 19 nt, Homo sapiens
  misc_RNA (1)...(19): siRNA sense strand
gggaguggaaggaaaggaa

SEQ ID NO: 2123928 - RNA, 19 nt, Homo sapiens
  misc_RNA (1)...(19): siRNA sense strand
gccuggagauggagaugga

SEQ ID NO: 2123929 - RNA, 19 nt, Homo sapiens
  misc_RNA (1)...(19): siRNA sense strand
caacuggagaaauuacguu

SEQ ID NO: 2123930 - RNA, 19 nt, Homo sapiens
  misc_RNA (1)...(19): siRNA sense strand
gaacugccucaccaagauc

SEQ ID NO: 2123931 - RNA, 19 nt, Homo sapiens
  misc_RNA (1)...(19): siRNA sense strand
cuccaucacucaauuuaag

SEQ ID NO: 2123932 - RNA, 19 nt, Homo sapiens
  misc_RNA (1)...(19): siRNA sense strand
agguuugccucaaguacua

SEQ ID NO: 2123933 - RNA, 19 nt, Homo sapiens
  misc_RNA (1)...(19): siRNA sense strand
ggucaugguugcccuucag

SEQ ID NO: 2123934 - RNA, 19 nt, Homo sapiens
  misc_RNA (1)...(19): siRNA sense strand
uuggugcacucuauaccua

SEQ ID NO: 2123935 - RNA, 19 nt, Homo sapiens
  misc_RNA (1)...(19): siRNA sense strand
gcgugggaguggaaggaaa

SEQ ID NO: 2123936 - RNA, 19 nt, Homo sapiens
  misc_RNA (1)...(19): siRNA sense strand
ucgagagccuggagaugga

SEQ ID NO: 2123937 - RNA, 19 nt, Homo sapiens
  misc_RNA (1)...(19): siRNA sense strand
uccuacagaucuucccuuu

SEQ ID NO: 2123938 - RNA, 19 nt, Homo sapiens
  misc_RNA (1)...(19): siRNA sense strand
agagccaaauauugacauu

SEQ ID NO: 2123939 - RNA, 19 nt, Homo sapiens
  misc_RNA (1)...(19): siRNA sense strand
ggagagcacuuucggauuc

SEQ ID NO: 2123940 - RNA, 19 nt, Homo sapiens
  misc_RNA (1)...(19): siRNA sense strand
gcaaauggcucuggcuucu

SEQ ID NO: 2123941 - RNA, 19 nt, Homo sapiens
  misc_RNA (1)...(19): siRNA sense strand
gcaaacccgucaugagcaa

SEQ ID NO: 2123942 - RNA, 19 nt, Homo sapiens
  misc_RNA (1)...(19): siRNA sense strand
gcagauccauaccauguca

SEQ ID NO: 2123943 - RNA, 19 nt, Homo sapiens
  misc_RNA (1)...(19): siRNA sense strand
aaauggcucuggcuucuuu

SEQ ID NO: 2123944 - RNA, 19 nt, Homo sapiens
  misc_RNA (1)...(19): siRNA sense strand
gcaauacggagagcacuuu

SEQ ID NO: 2123945 - RNA, 19 nt, Homo sapiens
  misc_RNA (1)...(19): siRNA sense strand
gagacagugagaagaauaa

SEQ ID NO: 2123946 - RNA, 19 nt, Homo sapiens
  misc_RNA (1)...(19): siRNA sense strand
aaagagacagugagaagaa

SEQ ID NO: 2123947 - RNA, 19 nt, Homo sapiens
  misc_RNA (1)...(19): siRNA sense strand
gcagcuaugccuuuauguu

SEQ ID NO: 2123948 - RNA, 19 nt, Homo sapiens
  misc_RNA (1)...(19): siRNA sense strand
gcucagggccucugugaca

SEQ ID NO: 2123949 - RNA, 19 nt, Homo sapiens
  misc_RNA (1)...(19): siRNA sense strand
gcaagcaaacccgucauga

SEQ ID NO: 2123950 - RNA, 19 nt, Homo sapiens
  misc_RNA (1)...(19): siRNA sense strand
ucaaagagacagugagaag

SEQ ID NO: 2123951 - RNA, 19 nt, Homo sapiens
  misc_RNA (1)...(19): siRNA sense strand
cagcuaugccuuuauguuc

SEQ ID NO: 2123952 - RNA, 19 nt, Homo sapiens
  misc_RNA (1)...(19): siRNA sense strand
caaagagacagugagaaga

SEQ ID NO: 2123953 - RNA, 19 nt, Homo sapiens
  misc_RNA (1)...(19): siRNA sense strand
uuuauguucucuucucuga

SEQ ID NO: 2123954 - RNA, 19 nt, Homo sapiens
  misc_RNA (1)...(19): siRNA sense strand
caucucugcucaccaugug

SEQ ID NO: 2123955 - RNA, 19 nt, Homo sapiens
  misc_RNA (1)...(19): siRNA sense strand
gauacugcagugucaaaga

SEQ ID NO: 2123956 - RNA, 19 nt, Homo sapiens
  misc_RNA (1)...(19): siRNA sense strand
cugcagcuaugccuuuaug

SEQ ID NO: 2123957 - RNA, 19 nt, Homo sapiens
  misc_RNA (1)...(19): siRNA sense strand
acagugagaagaauaagga

SEQ ID NO: 2123958 - RNA, 19 nt, Homo sapiens
  misc_RNA (1)...(19): siRNA sense strand
agagacagugagaagaaua

SEQ ID NO: 2123959 - RNA, 19 nt, Homo sapiens
  misc_RNA (1)...(19): siRNA sense strand
agagaugccugcagaucca

SEQ ID NO: 2123960 - RNA, 19 nt, Homo sapiens
  misc_RNA (1)...(19): siRNA sense strand
caagcaaacccgucaugag

SEQ ID NO: 2123961 - RNA, 19 nt, Homo sapiens
  misc_RNA (1)...(19): siRNA sense strand
cagcucagggccucuguga

SEQ ID NO: 2123962 - RNA, 19 nt, Homo sapiens
  misc_RNA (1)...(19): siRNA sense strand
gcuaugccuuuauguucuc

SEQ ID NO: 2123963 - RNA, 19 nt, Homo sapiens
  misc_RNA (1)...(19): siRNA sense strand
auacugcagugucaaagag

SEQ ID NO: 2123964 - RNA, 19 nt, Homo sapiens
  misc_RNA (1)...(19): siRNA sense strand
gcaacucccuuccccaucu

SEQ ID NO: 2123965 - RNA, 19 nt, Homo sapiens
  misc_RNA (1)...(19): siRNA sense strand
cugcagauccauaccaugu

SEQ ID NO: 2123966 - RNA, 19 nt, Homo sapiens
  misc_RNA (1)...(19): siRNA sense strand
ccauguggacgcugaaauc

SEQ ID NO: 2123967 - RNA, 19 nt, Homo sapiens
  misc_RNA (1)...(19): siRNA sense strand
guuguugugccguuuguga

SEQ ID NO: 2123968 - RNA, 19 nt, Homo sapiens
  misc_RNA (1)...(19): siRNA sense strand
gugauacugcagugucaaa

SEQ ID NO: 2123969 - RNA, 19 nt, Homo sapiens
  misc_RNA (1)...(19): siRNA sense strand
caccugcagcuaugccuuu

SEQ ID NO: 2123970 - RNA, 19 nt, Homo sapiens
  misc_RNA (1)...(19): siRNA sense strand
aagagacagugagaagaau

SEQ ID NO: 2123971 - RNA, 19 nt, Homo sapiens
  misc_RNA (1)...(19): siRNA sense strand
ggacugagcugauggaaca

SEQ ID NO: 2123972 - RNA, 19 nt, Homo sapiens
  misc_RNA (1)...(19): siRNA sense strand
gaacagauuccuccuauug

SEQ ID NO: 2123973 - RNA, 19 nt, Homo sapiens
  misc_RNA (1)...(19): siRNA sense strand
gcucaaagcuuucugacau

SEQ ID NO: 2123974 - RNA, 19 nt, Homo sapiens
  misc_RNA (1)...(19): siRNA sense strand
ccagagggcugcuugauau

SEQ ID NO: 2123975 - RNA, 19 nt, Homo sapiens
  misc_RNA (1)...(19): siRNA sense strand
ggacuucgguaacaaugaa

SEQ ID NO: 2123976 - RNA, 19 nt, Homo sapiens
  misc_RNA (1)...(19): siRNA sense strand
gaggauguguucagucauu

SEQ ID NO: 2123977 - RNA, 19 nt, Homo sapiens
  misc_RNA (1)...(19): siRNA sense strand
ggacuugcaggaugacuua

SEQ ID NO: 2123978 - RNA, 19 nt, Homo sapiens
  misc_RNA (1)...(19): siRNA sense strand
ucacucgccuggagaagua

SEQ ID NO: 2123979 - RNA, 19 nt, Homo sapiens
  misc_RNA (1)...(19): siRNA sense strand
cugaauaucucauaccuau

SEQ ID NO: 2123980 - RNA, 19 nt, Homo sapiens
  misc_RNA (1)...(19): siRNA sense strand
ucacagauccaaacaauca

SEQ ID NO: 2123981 - RNA, 19 nt, Homo sapiens
  misc_RNA (1)...(19): siRNA sense strand
gagaguaacggccuucuug

SEQ ID NO: 2123982 - RNA, 19 nt, Homo sapiens
  misc_RNA (1)...(19): siRNA sense strand
gcggaaagccugugcagaa

SEQ ID NO: 2123983 - RNA, 19 nt, Homo sapiens
  misc_RNA (1)...(19): siRNA sense strand
acaggaagcucuuucaagu

SEQ ID NO: 2123984 - RNA, 19 nt, Homo sapiens
  misc_RNA (1)...(19): siRNA sense strand
ggaagggaccucagcgaaa

SEQ ID NO: 2123985 - RNA, 19 nt, Homo sapiens
  misc_RNA (1)...(19): siRNA sense strand
gauccaaacaaucagauaa

SEQ ID NO: 2123986 - RNA, 19 nt, Homo sapiens
  misc_RNA (1)...(19): siRNA sense strand
ucucauaccuauuguagug

SEQ ID NO: 2123987 - RNA, 19 nt, Homo sapiens
  misc_RNA (1)...(19): siRNA sense strand
gaaagccugugcagaaugc

SEQ ID NO: 2123988 - RNA, 19 nt, Homo sapiens
  misc_RNA (1)...(19): siRNA sense strand
agaagccacugagaaauuu

SEQ ID NO: 2123989 - RNA, 19 nt, Homo sapiens
  misc_RNA (1)...(19): siRNA sense strand
guagucagauugucagaag

SEQ ID NO: 2123990 - RNA, 19 nt, Homo sapiens
  misc_RNA (1)...(19): siRNA sense strand
gcucugcucugaugcuguu

SEQ ID NO: 2123991 - RNA, 19 nt, Homo sapiens
  misc_RNA (1)...(19): siRNA sense strand
acaagaagccacugagaaa

SEQ ID NO: 2123992 - RNA, 19 nt, Homo sapiens
  misc_RNA (1)...(19): siRNA sense strand
ccucacagauccaaacaau

SEQ ID NO: 2123993 - RNA, 19 nt, Homo sapiens
  misc_RNA (1)...(19): siRNA sense strand
caguggugcucucugaaua

SEQ ID NO: 2123994 - RNA, 19 nt, Homo sapiens
  misc_RNA (1)...(19): siRNA sense strand
ggaaagcccuguggaaagc

SEQ ID NO: 2123995 - RNA, 19 nt, Homo sapiens
  misc_RNA (1)...(19): siRNA sense strand
gaagggaccucagcgaaaa

SEQ ID NO: 2123996 - RNA, 19 nt, Homo sapiens
  misc_RNA (1)...(19): siRNA sense strand
gacaagaagccacugagaa

SEQ ID NO: 2123997 - RNA, 19 nt, Homo sapiens
  misc_RNA (1)...(19): siRNA sense strand
ggacaagaagccacugaga

SEQ ID NO: 2123998 - RNA, 19 nt, Homo sapiens
  misc_RNA (1)...(19): siRNA sense strand
agacgacuauggauuugaa

SEQ ID NO: 2123999 - RNA, 19 nt, Homo sapiens
  misc_RNA (1)...(19): siRNA sense strand
uggcuucaaugcugaguaa

SEQ ID NO: 2124000 - RNA, 19 nt, Homo sapiens
  misc_RNA (1)...(19): siRNA sense strand
ucaaagcuuucugacauga

SEQ ID NO: 2124001 - RNA, 19 nt, Homo sapiens
  misc_RNA (1)...(19): siRNA sense strand
aggaagcucuuucaaguuc

SEQ ID NO: 2124002 - RNA, 19 nt, Homo sapiens
  misc_RNA (1)...(19): siRNA sense strand
ugacuuagacgacuaugga

SEQ ID NO: 2124003 - RNA, 19 nt, Homo sapiens
  misc_RNA (1)...(19): siRNA sense strand
ugaagacuaugguacagau

SEQ ID NO: 2124004 - RNA, 19 nt, Homo sapiens
  misc_RNA (1)...(19): siRNA sense strand
gcggaaagcccuguggaaa

SEQ ID NO: 2124005 - RNA, 19 nt, Homo sapiens
  misc_RNA (1)...(19): siRNA sense strand
gccagagggcugcuugaua

SEQ ID NO: 2124006 - RNA, 19 nt, Homo sapiens
  misc_RNA (1)...(19): siRNA sense strand
cagcuacccuggaucagau

SEQ ID NO: 2124007 - RNA, 19 nt, Homo sapiens
  misc_RNA (1)...(19): siRNA sense strand
gaguaagaguaccguugaa

SEQ ID NO: 2124008 - RNA, 19 nt, Homo sapiens
  misc_RNA (1)...(19): siRNA sense strand
gagggcugcuugauaucuu

SEQ ID NO: 2124009 - RNA, 19 nt, Homo sapiens
  misc_RNA (1)...(19): siRNA sense strand
ggagauuguagucagauug

SEQ ID NO: 2124010 - RNA, 19 nt, Homo sapiens
  misc_RNA (1)...(19): siRNA sense strand
gaccagcgccugcucaaag

SEQ ID NO: 2124011 - RNA, 19 nt, Homo sapiens
  misc_RNA (1)...(19): siRNA sense strand
aagaagccacugagaaauu

SEQ ID NO: 2124012 - RNA, 19 nt, Homo sapiens
  misc_RNA (1)...(19): siRNA sense strand
cuauggauuugaagacuau

SEQ ID NO: 2124013 - RNA, 19 nt, Homo sapiens
  misc_RNA (1)...(19): siRNA sense strand
ggaaagccugugcagaaug

SEQ ID NO: 2124014 - RNA, 19 nt, Homo sapiens
  misc_RNA (1)...(19): siRNA sense strand
ucaaugcugaguaagagua

SEQ ID NO: 2124015 - RNA, 19 nt, Homo sapiens
  misc_RNA (1)...(19): siRNA sense strand
ugaguaagaguaccguuga

SEQ ID NO: 2124016 - RNA, 19 nt, Homo sapiens
  misc_RNA (1)...(19): siRNA sense strand
aaagcuuucugacaugaau

SEQ ID NO: 2124017 - RNA, 19 nt, Homo sapiens
  misc_RNA (1)...(19): siRNA sense strand
gauaaccugccuccacuca

SEQ ID NO: 2124018 - RNA, 19 nt, Homo sapiens
  misc_RNA (1)...(19): siRNA sense strand
gcagcuacccuggaucaga

SEQ ID NO: 2124019 - RNA, 19 nt, Homo sapiens
  misc_RNA (1)...(19): siRNA sense strand
cggaaagccugugcagaau

SEQ ID NO: 2124020 - RNA, 19 nt, Homo sapiens
  misc_RNA (1)...(19): siRNA sense strand
cuuagacgacuauggauuu

SEQ ID NO: 2124021 - RNA, 19 nt, Homo sapiens
  misc_RNA (1)...(19): siRNA sense strand
gagauuguagucagauugu

SEQ ID NO: 2124022 - RNA, 19 nt, Homo sapiens
  misc_RNA (1)...(19): siRNA sense strand
ucacgguaauggagauugu

SEQ ID NO: 2124023 - RNA, 19 nt, Homo sapiens
  misc_RNA (1)...(19): siRNA sense strand
uaaccugccuccacucacu

SEQ ID NO: 2124024 - RNA, 19 nt, Homo sapiens
  misc_RNA (1)...(19): siRNA sense strand
gcucucugaauaucucaua

SEQ ID NO: 2124025 - RNA, 19 nt, Homo sapiens
  misc_RNA (1)...(19): siRNA sense strand
ccgauucugugaacugugu

SEQ ID NO: 2124026 - RNA, 19 nt, Homo sapiens
  misc_RNA (1)...(19): siRNA sense strand
ggacauuccaggccaggau

SEQ ID NO: 2124027 - RNA, 19 nt, Homo sapiens
  misc_RNA (1)...(19): siRNA sense strand
ucacuuccaccuuugcaaa

SEQ ID NO: 2124028 - RNA, 19 nt, Homo sapiens
  misc_RNA (1)...(19): siRNA sense strand
guacagauugcgacaacau

SEQ ID NO: 2124029 - RNA, 19 nt, Homo sapiens
  misc_RNA (1)...(19): siRNA sense strand
gagcugauggaacagauuc

SEQ ID NO: 2124030 - RNA, 19 nt, Homo sapiens
  misc_RNA (1)...(19): siRNA sense strand
gaagacuaugguacagauu

SEQ ID NO: 2124031 - RNA, 19 nt, Homo sapiens
  misc_RNA (1)...(19): siRNA sense strand
ggauuugaagacuauggua

SEQ ID NO: 2124032 - RNA, 19 nt, Homo sapiens
  misc_RNA (1)...(19): siRNA sense strand
gaguaacggccuucuugga

SEQ ID NO: 2124033 - RNA, 19 nt, Homo sapiens
  misc_RNA (1)...(19): siRNA sense strand
caagaagccacugagaaau

SEQ ID NO: 2124034 - RNA, 19 nt, Homo sapiens
  misc_RNA (1)...(19): siRNA sense strand
gacaggaagcucuuucaag

SEQ ID NO: 2124035 - RNA, 19 nt, Homo sapiens
  misc_RNA (1)...(19): siRNA sense strand
gacauuccaggccaggaua

SEQ ID NO: 2124036 - RNA, 19 nt, Homo sapiens
  misc_RNA (1)...(19): siRNA sense strand
uaacggccuucuuggacau

SEQ ID NO: 2124037 - RNA, 19 nt, Homo sapiens
  misc_RNA (1)...(19): siRNA sense strand
gguaauggagauuguaguc

SEQ ID NO: 2124038 - RNA, 19 nt, Homo sapiens
  misc_RNA (1)...(19): siRNA sense strand
acuauggauuugaagacua

SEQ ID NO: 2124039 - RNA, 19 nt, Homo sapiens
  misc_RNA (1)...(19): siRNA sense strand
ugauauuugucaugcuguu

SEQ ID NO: 2124040 - RNA, 19 nt, Homo sapiens
  misc_RNA (1)...(19): siRNA sense strand
gauuguagucagauuguca

SEQ ID NO: 2124041 - RNA, 19 nt, Homo sapiens
  misc_RNA (1)...(19): siRNA sense strand
cagcagcuacccuggauca

SEQ ID NO: 2124042 - RNA, 19 nt, Homo sapiens
  misc_RNA (1)...(19): siRNA sense strand
uuagacgacuauggauuug

SEQ ID NO: 2124043 - RNA, 19 nt, Homo sapiens
  misc_RNA (1)...(19): siRNA sense strand
caggaagcucuuucaaguu

SEQ ID NO: 2124044 - RNA, 19 nt, Homo sapiens
  misc_RNA (1)...(19): siRNA sense strand
uaucucauaccuauuguag

SEQ ID NO: 2124045 - RNA, 19 nt, Homo sapiens
  misc_RNA (1)...(19): siRNA sense strand
ugacaggaagcucuuucaa

SEQ ID NO: 2124046 - RNA, 19 nt, Homo sapiens
  misc_RNA (1)...(19): siRNA sense strand
gcuucaaugcugaguaaga

SEQ ID NO: 2124047 - RNA, 19 nt, Homo sapiens
  misc_RNA (1)...(19): siRNA sense strand
ggugcucucugaauaucuc

SEQ ID NO: 2124048 - RNA, 19 nt, Homo sapiens
  misc_RNA (1)...(19): siRNA sense strand
ccgcagaacccagcucuuc

SEQ ID NO: 2124049 - RNA, 19 nt, Homo sapiens
  misc_RNA (1)...(19): siRNA sense strand
acagauugcgacaacauga

SEQ ID NO: 2124050 - RNA, 19 nt, Homo sapiens
  misc_RNA (1)...(19): siRNA sense strand
guaacaaugaagaagacuu

SEQ ID NO: 2124051 - RNA, 19 nt, Homo sapiens
  misc_RNA (1)...(19): siRNA sense strand
gcucuucccgcucuucauc

SEQ ID NO: 2124052 - RNA, 19 nt, Homo sapiens
  misc_RNA (1)...(19): siRNA sense strand
guaauggagauuguaguca

SEQ ID NO: 2124053 - RNA, 19 nt, Homo sapiens
  misc_RNA (1)...(19): siRNA sense strand
cagggaacacugaggaugu

SEQ ID NO: 2124054 - RNA, 19 nt, Homo sapiens
  misc_RNA (1)...(19): siRNA sense strand
gcugaguggaccaggguuu

SEQ ID NO: 2124055 - RNA, 19 nt, Homo sapiens
  misc_RNA (1)...(19): siRNA sense strand
aggaugacuuagacgacua

SEQ ID NO: 2124056 - RNA, 19 nt, Homo sapiens
  misc_RNA (1)...(19): siRNA sense strand
guuuaacucguucagcaaa

SEQ ID NO: 2124057 - RNA, 19 nt, Homo sapiens
  misc_RNA (1)...(19): siRNA sense strand
gcucccagcagugguggua

SEQ ID NO: 2124058 - RNA, 19 nt, Homo sapiens
  misc_RNA (1)...(19): siRNA sense strand
gacuauggauuugaagacu

SEQ ID NO: 2124059 - RNA, 19 nt, Homo sapiens
  misc_RNA (1)...(19): siRNA sense strand
uccaaacaaucagauaauc

SEQ ID NO: 2124060 - RNA, 19 nt, Homo sapiens
  misc_RNA (1)...(19): siRNA sense strand
gccuggagaaguaugcuuu

SEQ ID NO: 2124061 - RNA, 19 nt, Homo sapiens
  misc_RNA (1)...(19): siRNA sense strand
guggugcucucugaauauc

SEQ ID NO: 2124062 - RNA, 19 nt, Homo sapiens
  misc_RNA (1)...(19): siRNA sense strand
aauggagauuguagucaga

SEQ ID NO: 2124063 - RNA, 19 nt, Homo sapiens
  misc_RNA (1)...(19): siRNA sense strand
ccaguggugcucucugaau

SEQ ID NO: 2124064 - RNA, 19 nt, Homo sapiens
  misc_RNA (1)...(19): siRNA sense strand
gagaccagcgccugcucaa

SEQ ID NO: 2124065 - RNA, 19 nt, Homo sapiens
  misc_RNA (1)...(19): siRNA sense strand
cggaaagcccuguggaaag

SEQ ID NO: 2124066 - RNA, 19 nt, Homo sapiens
  misc_RNA (1)...(19): siRNA sense strand
ggauuuggacucugguuuu

SEQ ID NO: 2124067 - RNA, 19 nt, Homo sapiens
  misc_RNA (1)...(19): siRNA sense strand
ggaugacuuagacgacuau

SEQ ID NO: 2124068 - RNA, 19 nt, Homo sapiens
  misc_RNA (1)...(19): siRNA sense strand
cuucaaugcugaguaagag

SEQ ID NO: 2124069 - RNA, 19 nt, Homo sapiens
  misc_RNA (1)...(19): siRNA sense strand
ugcgacaacaugagaguaa

SEQ ID NO: 2124070 - RNA, 19 nt, Homo sapiens
  misc_RNA (1)...(19): siRNA sense strand
uggagauuguagucagauu

SEQ ID NO: 2124071 - RNA, 19 nt, Homo sapiens
  misc_RNA (1)...(19): siRNA sense strand
gcagaccucuucagaaaua

SEQ ID NO: 2124072 - RNA, 19 nt, Homo sapiens
  misc_RNA (1)...(19): siRNA sense strand
gaaggugacugcagacaaa

SEQ ID NO: 2124073 - RNA, 19 nt, Homo sapiens
  misc_RNA (1)...(19): siRNA sense strand
caacagaucccaaaccaua

SEQ ID NO: 2124074 - RNA, 19 nt, Homo sapiens
  misc_RNA (1)...(19): siRNA sense strand
gaacgggcaucauuuguug

SEQ ID NO: 2124075 - RNA, 19 nt, Homo sapiens
  misc_RNA (1)...(19): siRNA sense strand
gggcagaccucuucagaaa

SEQ ID NO: 2124076 - RNA, 19 nt, Homo sapiens
  misc_RNA (1)...(19): siRNA sense strand
ggacaaagaauuucagauu

SEQ ID NO: 2124077 - RNA, 19 nt, Homo sapiens
  misc_RNA (1)...(19): siRNA sense strand
gaugaagaccgauuaguua

SEQ ID NO: 2124078 - RNA, 19 nt, Homo sapiens
  misc_RNA (1)...(19): siRNA sense strand
gaagaccgauuaguuauag

SEQ ID NO: 2124079 - RNA, 19 nt, Homo sapiens
  misc_RNA (1)...(19): siRNA sense strand
gguacaaguucaagaauug

SEQ ID NO: 2124080 - RNA, 19 nt, Homo sapiens
  misc_RNA (1)...(19): siRNA sense strand
ggaacccucucucuuggua

SEQ ID NO: 2124081 - RNA, 19 nt, Homo sapiens
  misc_RNA (1)...(19): siRNA sense strand
ucacauagcccaggaaauu

SEQ ID NO: 2124082 - RNA, 19 nt, Homo sapiens
  misc_RNA (1)...(19): siRNA sense strand
ggacacagacgcaaagaga

SEQ ID NO: 2124083 - RNA, 19 nt, Homo sapiens
  misc_RNA (1)...(19): siRNA sense strand
ucagguaucuggauuaauc

SEQ ID NO: 2124084 - RNA, 19 nt, Homo sapiens
  misc_RNA (1)...(19): siRNA sense strand
gaagaacgggcaucauuug

SEQ ID NO: 2124085 - RNA, 19 nt, Homo sapiens
  misc_RNA (1)...(19): siRNA sense strand
agagaaggcugaagauguu

SEQ ID NO: 2124086 - RNA, 19 nt, Homo sapiens
  misc_RNA (1)...(19): siRNA sense strand
gacaagcccuggagaagga

SEQ ID NO: 2124087 - RNA, 19 nt, Homo sapiens
  misc_RNA (1)...(19): siRNA sense strand
guacaaagggaauuucuug

SEQ ID NO: 2124088 - RNA, 19 nt, Homo sapiens
  misc_RNA (1)...(19): siRNA sense strand
gaagaggagucuggaagga

SEQ ID NO: 2124089 - RNA, 19 nt, Homo sapiens
  misc_RNA (1)...(19): siRNA sense strand
ggaccaaguucagcuaguu

SEQ ID NO: 2124090 - RNA, 19 nt, Homo sapiens
  misc_RNA (1)...(19): siRNA sense strand
ccacuggagucaacugaaa

SEQ ID NO: 2124091 - RNA, 19 nt, Homo sapiens
  misc_RNA (1)...(19): siRNA sense strand
gcggugcacuuuccuggua

SEQ ID NO: 2124092 - RNA, 19 nt, Homo sapiens
  misc_RNA (1)...(19): siRNA sense strand
ggaggacucugacaucaag

SEQ ID NO: 2124093 - RNA, 19 nt, Homo sapiens
  misc_RNA (1)...(19): siRNA sense strand
gaaggaaugagaaagcaaa

SEQ ID NO: 2124094 - RNA, 19 nt, Homo sapiens
  misc_RNA (1)...(19): siRNA sense strand
gcacacaacccuggcguaa

SEQ ID NO: 2124095 - RNA, 19 nt, Homo sapiens
  misc_RNA (1)...(19): siRNA sense strand
cuaaaucccucaagaagag

SEQ ID NO: 2124096 - RNA, 19 nt, Homo sapiens
  misc_RNA (1)...(19): siRNA sense strand
gccuggagcuggagaagaa

SEQ ID NO: 2124097 - RNA, 19 nt, Homo sapiens
  misc_RNA (1)...(19): siRNA sense strand
acacaacccuggcguaagu

SEQ ID NO: 2124098 - RNA, 19 nt, Homo sapiens
  misc_RNA (1)...(19): siRNA sense strand
agaaauagcaggucugaau

SEQ ID NO: 2124099 - RNA, 19 nt, Homo sapiens
  misc_RNA (1)...(19): siRNA sense strand
ggaaggaagagaagaagga

SEQ ID NO: 2124100 - RNA, 19 nt, Homo sapiens
  misc_RNA (1)...(19): siRNA sense strand
caaacgaacugugaaggau

SEQ ID NO: 2124101 - RNA, 19 nt, Homo sapiens
  misc_RNA (1)...(19): siRNA sense strand
cagaaucaccuccuuguug

SEQ ID NO: 2124102 - RNA, 19 nt, Homo sapiens
  misc_RNA (1)...(19): siRNA sense strand
ucggaaagauucugugguu

SEQ ID NO: 2124103 - RNA, 19 nt, Homo sapiens
  misc_RNA (1)...(19): siRNA sense strand
gaacugugaaggauauuuc

SEQ ID NO: 2124104 - RNA, 19 nt, Homo sapiens
  misc_RNA (1)...(19): siRNA sense strand
gaagagggcagagcacaga

SEQ ID NO: 2124105 - RNA, 19 nt, Homo sapiens
  misc_RNA (1)...(19): siRNA sense strand
guacuuggcggugcacuuu

SEQ ID NO: 2124106 - RNA, 19 nt, Homo sapiens
  misc_RNA (1)...(19): siRNA sense strand
cgacgaugaagaccgauua

SEQ ID NO: 2124107 - RNA, 19 nt, Homo sapiens
  misc_RNA (1)...(19): siRNA sense strand
gcgcagauguccaaguucu

SEQ ID NO: 2124108 - RNA, 19 nt, Homo sapiens
  misc_RNA (1)...(19): siRNA sense strand
gcaacucgcugcccuucgu

SEQ ID NO: 2124109 - RNA, 19 nt, Homo sapiens
  misc_RNA (1)...(19): siRNA sense strand
cgucagguaucuggauuaa

SEQ ID NO: 2124110 - RNA, 19 nt, Homo sapiens
  misc_RNA (1)...(19): siRNA sense strand
aaccauacaucuucucaga

SEQ ID NO: 2124111 - RNA, 19 nt, Homo sapiens
  misc_RNA (1)...(19): siRNA sense strand
gaaauggacaaacgaacug

SEQ ID NO: 2124112 - RNA, 19 nt, Homo sapiens
  misc_RNA (1)...(19): siRNA sense strand
gaaauagcaggucugaauc

SEQ ID NO: 2124113 - RNA, 19 nt, Homo sapiens
  misc_RNA (1)...(19): siRNA sense strand
ugaagaacgggcaucauuu

SEQ ID NO: 2124114 - RNA, 19 nt, Homo sapiens
  misc_RNA (1)...(19): siRNA sense strand
aaaaggaucuaccagaaaa

SEQ ID NO: 2124115 - RNA, 19 nt, Homo sapiens
  misc_RNA (1)...(19): siRNA sense strand
ggccuugucuucccacuca

SEQ ID NO: 2124116 - RNA, 19 nt, Homo sapiens
  misc_RNA (1)...(19): siRNA sense strand
cgaugaagaccgauuaguu

SEQ ID NO: 2124117 - RNA, 19 nt, Homo sapiens
  misc_RNA (1)...(19): siRNA sense strand
aaagcaaacucgaguagag

SEQ ID NO: 2124118 - RNA, 19 nt, Homo sapiens
  misc_RNA (1)...(19): siRNA sense strand
agaaucaccuccuuguugu

SEQ ID NO: 2124119 - RNA, 19 nt, Homo sapiens
  misc_RNA (1)...(19): siRNA sense strand
cggcgcagauguccaaguu

SEQ ID NO: 2124120 - RNA, 19 nt, Homo sapiens
  misc_RNA (1)...(19): siRNA sense strand
ugaagaccgauuaguuaua

SEQ ID NO: 2124121 - RNA, 19 nt, Homo sapiens
  misc_RNA (1)...(19): siRNA sense strand
agaccgggcuguccaaaca

SEQ ID NO: 2124122 - RNA, 19 nt, Homo sapiens
  misc_RNA (1)...(19): siRNA sense strand
gagaaagcaaacucgagua

SEQ ID NO: 2124123 - RNA, 19 nt, Homo sapiens
  misc_RNA (1)...(19): siRNA sense strand
gguagcagccuccgagaug

SEQ ID NO: 2124124 - RNA, 19 nt, Homo sapiens
  misc_RNA (1)...(19): siRNA sense strand
caaaggcggcaucugugua

SEQ ID NO: 2124125 - RNA, 19 nt, Homo sapiens
  misc_RNA (1)...(19): siRNA sense strand
gaugagacguucaaaagga

SEQ ID NO: 2124126 - RNA, 19 nt, Homo sapiens
  misc_RNA (1)...(19): siRNA sense strand
gccaagaaccuggauguga

SEQ ID NO: 2124127 - RNA, 19 nt, Homo sapiens
  misc_RNA (1)...(19): siRNA sense strand
gagcagcccauagaaauuc

SEQ ID NO: 2124128 - RNA, 19 nt, Homo sapiens
  misc_RNA (1)...(19): siRNA sense strand
gaaggauauuucuccaucu

SEQ ID NO: 2124129 - RNA, 19 nt, Homo sapiens
  misc_RNA (1)...(19): siRNA sense strand
gcugagagccaguagacuu

SEQ ID NO: 2124130 - RNA, 19 nt, Homo sapiens
  misc_RNA (1)...(19): siRNA sense strand
gagaugagggucccaaugg

SEQ ID NO: 2124131 - RNA, 19 nt, Homo sapiens
  misc_RNA (1)...(19): siRNA sense strand
cagagaaggcugaagaugu

SEQ ID NO: 2124132 - RNA, 19 nt, Homo sapiens
  misc_RNA (1)...(19): siRNA sense strand
gaaagcaaacucgaguaga

SEQ ID NO: 2124133 - RNA, 19 nt, Homo sapiens
  misc_RNA (1)...(19): siRNA sense strand
cagagcagcccauagaaau

SEQ ID NO: 2124134 - RNA, 19 nt, Homo sapiens
  misc_RNA (1)...(19): siRNA sense strand
gaucacauagcccaggaaa

SEQ ID NO: 2124135 - RNA, 19 nt, Homo sapiens
  misc_RNA (1)...(19): siRNA sense strand
ggaaauggacaaacgaacu

SEQ ID NO: 2124136 - RNA, 19 nt, Homo sapiens
  misc_RNA (1)...(19): siRNA sense strand
gaaggaagagaagaaggaa

SEQ ID NO: 2124137 - RNA, 19 nt, Homo sapiens
  misc_RNA (1)...(19): siRNA sense strand
gcaaaggcggcaucugugu

SEQ ID NO: 2124138 - RNA, 19 nt, Homo sapiens
  misc_RNA (1)...(19): siRNA sense strand
ugacugaacccacuaagca

SEQ ID NO: 2124139 - RNA, 19 nt, Homo sapiens
  misc_RNA (1)...(19): siRNA sense strand
ucaaaaggaucuaccagaa

SEQ ID NO: 2124140 - RNA, 19 nt, Homo sapiens
  misc_RNA (1)...(19): siRNA sense strand
acacuuaguucaggacaug

SEQ ID NO: 2124141 - RNA, 19 nt, Homo sapiens
  misc_RNA (1)...(19): siRNA sense strand
gagcauggugacuguacua

SEQ ID NO: 2124142 - RNA, 19 nt, Homo sapiens
  misc_RNA (1)...(19): siRNA sense strand
aaacgaacugugaaggaua

SEQ ID NO: 2124143 - RNA, 19 nt, Homo sapiens
  misc_RNA (1)...(19): siRNA sense strand
ugacugcagacaaaccuua

SEQ ID NO: 2124144 - RNA, 19 nt, Homo sapiens
  misc_RNA (1)...(19): siRNA sense strand
guagcagccuccgagauga

SEQ ID NO: 2124145 - RNA, 19 nt, Homo sapiens
  misc_RNA (1)...(19): siRNA sense strand
ggaaugagaaagcaaacuc

SEQ ID NO: 2124146 - RNA, 19 nt, Homo sapiens
  misc_RNA (1)...(19): siRNA sense strand
ccagagcagcccauagaaa

SEQ ID NO: 2124147 - RNA, 19 nt, Homo sapiens
  misc_RNA (1)...(19): siRNA sense strand
gguaggaaacgucagguau

SEQ ID NO: 2124148 - RNA, 19 nt, Homo sapiens
  misc_RNA (1)...(19): siRNA sense strand
ggacaaacgaacugugaag

SEQ ID NO: 2124149 - RNA, 19 nt, Homo sapiens
  misc_RNA (1)...(19): siRNA sense strand
gggaacagcaagcagagaa

SEQ ID NO: 2124150 - RNA, 19 nt, Homo sapiens
  misc_RNA (1)...(19): siRNA sense strand
gagccagaauggaagaaag

SEQ ID NO: 2124151 - RNA, 19 nt, Homo sapiens
  misc_RNA (1)...(19): siRNA sense strand
gggacaggauggccacuag

SEQ ID NO: 2124152 - RNA, 19 nt, Homo sapiens
  misc_RNA (1)...(19): siRNA sense strand
cgaguagaguucagugaca

SEQ ID NO: 2124153 - RNA, 19 nt, Homo sapiens
  misc_RNA (1)...(19): siRNA sense strand
guaaguugccagagcagaa

SEQ ID NO: 2124154 - RNA, 19 nt, Homo sapiens
  misc_RNA (1)...(19): siRNA sense strand
gauucagucucaacagauc

SEQ ID NO: 2124155 - RNA, 19 nt, Homo sapiens
  misc_RNA (1)...(19): siRNA sense strand
caagaauugucagggaaau

SEQ ID NO: 2124156 - RNA, 19 nt, Homo sapiens
  misc_RNA (1)...(19): siRNA sense strand
ggaaggugacugcagacaa

SEQ ID NO: 2124157 - RNA, 19 nt, Homo sapiens
  misc_RNA (1)...(19): siRNA sense strand
ggaacagcaagcagagaaa

SEQ ID NO: 2124158 - RNA, 19 nt, Homo sapiens
  misc_RNA (1)...(19): siRNA sense strand
caaguucuccuacccaaca

SEQ ID NO: 2124159 - RNA, 19 nt, Homo sapiens
  misc_RNA (1)...(19): siRNA sense strand
ggacgcagacgcaccucaa

SEQ ID NO: 2124160 - RNA, 19 nt, Homo sapiens
  misc_RNA (1)...(19): siRNA sense strand
ggauuaaucacucggaaag

SEQ ID NO: 2124161 - RNA, 19 nt, Homo sapiens
  misc_RNA (1)...(19): siRNA sense strand
acagcaaagucacagaaga

SEQ ID NO: 2124162 - RNA, 19 nt, Homo sapiens
  misc_RNA (1)...(19): siRNA sense strand
caacgugcccuucauacuc

SEQ ID NO: 2124163 - RNA, 19 nt, Homo sapiens
  misc_RNA (1)...(19): siRNA sense strand
uuaggaacccucucucuug

SEQ ID NO: 2124164 - RNA, 19 nt, Homo sapiens
  misc_RNA (1)...(19): siRNA sense strand
aacugaagaucaacccuaa

SEQ ID NO: 2124165 - RNA, 19 nt, Homo sapiens
  misc_RNA (1)...(19): siRNA sense strand
gaagcccaguguucuagag

SEQ ID NO: 2124166 - RNA, 19 nt, Homo sapiens
  misc_RNA (1)...(19): siRNA sense strand
aaacucaucuugaaauacc

SEQ ID NO: 2124167 - RNA, 19 nt, Homo sapiens
  misc_RNA (1)...(19): siRNA sense strand
ggccagagaaggcugaaga

SEQ ID NO: 2124168 - RNA, 19 nt, Homo sapiens
  misc_RNA (1)...(19): siRNA sense strand
gaacuuuuccccaccauga

SEQ ID NO: 2124169 - RNA, 19 nt, Homo sapiens
  misc_RNA (1)...(19): siRNA sense strand
agacgcaccucaacaacuc

SEQ ID NO: 2124170 - RNA, 19 nt, Homo sapiens
  misc_RNA (1)...(19): siRNA sense strand
agaggagucuggaaggaau

SEQ ID NO: 2124171 - RNA, 19 nt, Homo sapiens
  misc_RNA (1)...(19): siRNA sense strand
caacuagccuugaucaaug

SEQ ID NO: 2124172 - RNA, 19 nt, Homo sapiens
  misc_RNA (1)...(19): siRNA sense strand
gcaacacucuucagaccaa

SEQ ID NO: 2124173 - RNA, 19 nt, Homo sapiens
  misc_RNA (1)...(19): siRNA sense strand
gcgccuggcucaaacauau

SEQ ID NO: 2124174 - RNA, 19 nt, Homo sapiens
  misc_RNA (1)...(19): siRNA sense strand
ggacacagcccagaaacuu

SEQ ID NO: 2124175 - RNA, 19 nt, Homo sapiens
  misc_RNA (1)...(19): siRNA sense strand
gaaugugaccugcauccua

SEQ ID NO: 2124176 - RNA, 19 nt, Homo sapiens
  misc_RNA (1)...(19): siRNA sense strand
gcaacuagccuugaucaau

SEQ ID NO: 2124177 - RNA, 19 nt, Homo sapiens
  misc_RNA (1)...(19): siRNA sense strand
guacucugaugccuucuug

SEQ ID NO: 2124178 - RNA, 19 nt, Homo sapiens
  misc_RNA (1)...(19): siRNA sense strand
gcaaggggaugcugucuga

SEQ ID NO: 2124179 - RNA, 19 nt, Homo sapiens
  misc_RNA (1)...(19): siRNA sense strand
gagcggagagcuacguaaa

SEQ ID NO: 2124180 - RNA, 19 nt, Homo sapiens
  misc_RNA (1)...(19): siRNA sense strand
gaucaaugcccguauggau

SEQ ID NO: 2124181 - RNA, 19 nt, Homo sapiens
  misc_RNA (1)...(19): siRNA sense strand
uagacgagauccuaagcaa

SEQ ID NO: 2124182 - RNA, 19 nt, Homo sapiens
  misc_RNA (1)...(19): siRNA sense strand
guacucagacccaaauaca

SEQ ID NO: 2124183 - RNA, 19 nt, Homo sapiens
  misc_RNA (1)...(19): siRNA sense strand
caaggucaaucugaacuca

SEQ ID NO: 2124184 - RNA, 19 nt, Homo sapiens
  misc_RNA (1)...(19): siRNA sense strand
gcggagagcuacguaaagg

SEQ ID NO: 2124185 - RNA, 19 nt, Homo sapiens
  misc_RNA (1)...(19): siRNA sense strand
gaggugagcaacacucuuc

SEQ ID NO: 2124186 - RNA, 19 nt, Homo sapiens
  misc_RNA (1)...(19): siRNA sense strand
gccacuaacaccucccuua

SEQ ID NO: 2124187 - RNA, 19 nt, Homo sapiens
  misc_RNA (1)...(19): siRNA sense strand
cgagaucacucugcucaag

SEQ ID NO: 2124188 - RNA, 19 nt, Homo sapiens
  misc_RNA (1)...(19): siRNA sense strand
gaauaccggcaguguagau

SEQ ID NO: 2124189 - RNA, 19 nt, Homo sapiens
  misc_RNA (1)...(19): siRNA sense strand
ccagaaacuucagcacaca

SEQ ID NO: 2124190 - RNA, 19 nt, Homo sapiens
  misc_RNA (1)...(19): siRNA sense strand
ugacagaggugagcaacac

SEQ ID NO: 2124191 - RNA, 19 nt, Homo sapiens
  misc_RNA (1)...(19): siRNA sense strand
gcugaauaccggcagugua

SEQ ID NO: 2124192 - RNA, 19 nt, Homo sapiens
  misc_RNA (1)...(19): siRNA sense strand
ggccagggcaagccaacua

SEQ ID NO: 2124193 - RNA, 19 nt, Homo sapiens
  misc_RNA (1)...(19): siRNA sense strand
ucacucugcucaaggucaa

SEQ ID NO: 2124194 - RNA, 19 nt, Homo sapiens
  misc_RNA (1)...(19): siRNA sense strand
gcuacaagacagugacaga

SEQ ID NO: 2124195 - RNA, 19 nt, Homo sapiens
  misc_RNA (1)...(19): siRNA sense strand
aauacaagguuggcuacaa

SEQ ID NO: 2124196 - RNA, 19 nt, Homo sapiens
  misc_RNA (1)...(19): siRNA sense strand
auacaagguuggcuacaag

SEQ ID NO: 2124197 - RNA, 19 nt, Homo sapiens
  misc_RNA (1)...(19): siRNA sense strand
gcagucaccgagacccaaa

SEQ ID NO: 2124198 - RNA, 19 nt, Homo sapiens
  misc_RNA (1)...(19): siRNA sense strand
ccaggacacagcccagaaa

SEQ ID NO: 2124199 - RNA, 19 nt, Homo sapiens
  misc_RNA (1)...(19): siRNA sense strand
ugcaaggcguccagaguga

SEQ ID NO: 2124200 - RNA, 19 nt, Homo sapiens
  misc_RNA (1)...(19): siRNA sense strand
gaggagcgccuagcaacau

SEQ ID NO: 2124201 - RNA, 19 nt, Homo sapiens
  misc_RNA (1)...(19): siRNA sense strand
gaugcugucugagguugga

SEQ ID NO: 2124202 - RNA, 19 nt, Homo sapiens
  misc_RNA (1)...(19): siRNA sense strand
agaccaaggugcagcuucu

SEQ ID NO: 2124203 - RNA, 19 nt, Homo sapiens
  misc_RNA (1)...(19): siRNA sense strand
gggcaacuagccuugauca

SEQ ID NO: 2124204 - RNA, 19 nt, Homo sapiens
  misc_RNA (1)...(19): siRNA sense strand
ccaacacgucccuggauga

SEQ ID NO: 2124205 - RNA, 19 nt, Homo sapiens
  misc_RNA (1)...(19): siRNA sense strand
ggagcggagagcuacguaa

SEQ ID NO: 2124206 - RNA, 19 nt, Homo sapiens
  misc_RNA (1)...(19): siRNA sense strand
cuacguaaaggcugaauac

SEQ ID NO: 2124207 - RNA, 19 nt, Homo sapiens
  misc_RNA (1)...(19): siRNA sense strand
ggacgggcagcucacuuca

SEQ ID NO: 2124208 - RNA, 19 nt, Homo sapiens
  misc_RNA (1)...(19): siRNA sense strand
ccaaggugcagcuucuaga

SEQ ID NO: 2124209 - RNA, 19 nt, Homo sapiens
  misc_RNA (1)...(19): siRNA sense strand
caagguuggcuacaagaca

SEQ ID NO: 2124210 - RNA, 19 nt, Homo sapiens
  misc_RNA (1)...(19): siRNA sense strand
acacagcccagaaacuuca

SEQ ID NO: 2124211 - RNA, 19 nt, Homo sapiens
  misc_RNA (1)...(19): siRNA sense strand
gugagcaacacucuucaga

SEQ ID NO: 2124212 - RNA, 19 nt, Homo sapiens
  misc_RNA (1)...(19): siRNA sense strand
caagguggaagccgaaguc

SEQ ID NO: 2124213 - RNA, 19 nt, Homo sapiens
  misc_RNA (1)...(19): siRNA sense strand
uggauggcuuugagcagaa

SEQ ID NO: 2124214 - RNA, 19 nt, Homo sapiens
  misc_RNA (1)...(19): siRNA sense strand
gcuacguaaaggcugaaua

SEQ ID NO: 2124215 - RNA, 19 nt, Homo sapiens
  misc_RNA (1)...(19): siRNA sense strand
cugaauaccggcaguguag

SEQ ID NO: 2124216 - RNA, 19 nt, Homo sapiens
  misc_RNA (1)...(19): siRNA sense strand
aggugcagcuucuagacaa

SEQ ID NO: 2124217 - RNA, 19 nt, Homo sapiens
  misc_RNA (1)...(19): siRNA sense strand
ccuccgggaugaccuacug

SEQ ID NO: 2124218 - RNA, 19 nt, Homo sapiens
  misc_RNA (1)...(19): siRNA sense strand
guggaccagcugaaucgua

SEQ ID NO: 2124219 - RNA, 19 nt, Homo sapiens
  misc_RNA (1)...(19): siRNA sense strand
acgggcagcucacuucaag

SEQ ID NO: 2124220 - RNA, 19 nt, Homo sapiens
  misc_RNA (1)...(19): siRNA sense strand
gugggcaacuagccuugau

SEQ ID NO: 2124221 - RNA, 19 nt, Homo sapiens
  misc_RNA (1)...(19): siRNA sense strand
uggcccugcuggaggagua

SEQ ID NO: 2124222 - RNA, 19 nt, Homo sapiens
  misc_RNA (1)...(19): siRNA sense strand
cuugaucaaugcccguaug

SEQ ID NO: 2124223 - RNA, 19 nt, Homo sapiens
  misc_RNA (1)...(19): siRNA sense strand
gacacagcccagaaacuuc

SEQ ID NO: 2124224 - RNA, 19 nt, Homo sapiens
  misc_RNA (1)...(19): siRNA sense strand
gaaaucagauggcagcaaa

SEQ ID NO: 2124225 - RNA, 19 nt, Homo sapiens
  misc_RNA (1)...(19): siRNA sense strand
guaaagagcucggccuuaa

SEQ ID NO: 2124226 - RNA, 19 nt, Homo sapiens
  misc_RNA (1)...(19): siRNA sense strand
gaaagaagcuauucgugau

SEQ ID NO: 2124227 - RNA, 19 nt, Homo sapiens
  misc_RNA (1)...(19): siRNA sense strand
gaaauggucuccugaacug

SEQ ID NO: 2124228 - RNA, 19 nt, Homo sapiens
  misc_RNA (1)...(19): siRNA sense strand
gcaaguaacuggcagaagu

SEQ ID NO: 2124229 - RNA, 19 nt, Homo sapiens
  misc_RNA (1)...(19): siRNA sense strand
ggaauucuuuggugucuaa

SEQ ID NO: 2124230 - RNA, 19 nt, Homo sapiens
  misc_RNA (1)...(19): siRNA sense strand
gaagaaggaugacaugucu

SEQ ID NO: 2124231 - RNA, 19 nt, Homo sapiens
  misc_RNA (1)...(19): siRNA sense strand
gaagagaaguuggagaaga

SEQ ID NO: 2124232 - RNA, 19 nt, Homo sapiens
  misc_RNA (1)...(19): siRNA sense strand
gaacgacacuaaaccugaa

SEQ ID NO: 2124233 - RNA, 19 nt, Homo sapiens
  misc_RNA (1)...(19): siRNA sense strand
gaacuccugugucugauga

SEQ ID NO: 2124234 - RNA, 19 nt, Homo sapiens
  misc_RNA (1)...(19): siRNA sense strand
gaagauggaagaaaucauu

SEQ ID NO: 2124235 - RNA, 19 nt, Homo sapiens
  misc_RNA (1)...(19): siRNA sense strand
caacccagcuggccaaaug

SEQ ID NO: 2124236 - RNA, 19 nt, Homo sapiens
  misc_RNA (1)...(19): siRNA sense strand
ggaguuucauuacgucaua

SEQ ID NO: 2124237 - RNA, 19 nt, Homo sapiens
  misc_RNA (1)...(19): siRNA sense strand
gcaucgagaucaacauaaa

SEQ ID NO: 2124238 - RNA, 19 nt, Homo sapiens
  misc_RNA (1)...(19): siRNA sense strand
gaggugaaguugauaguga

SEQ ID NO: 2124239 - RNA, 19 nt, Homo sapiens
  misc_RNA (1)...(19): siRNA sense strand
gaacuugccucaucagaac

SEQ ID NO: 2124240 - RNA, 19 nt, Homo sapiens
  misc_RNA (1)...(19): siRNA sense strand
gaaaggcggaagucuauaa

SEQ ID NO: 2124241 - RNA, 19 nt, Homo sapiens
  misc_RNA (1)...(19): siRNA sense strand
gaaggaguuugaaggauug

SEQ ID NO: 2124242 - RNA, 19 nt, Homo sapiens
  misc_RNA (1)...(19): siRNA sense strand
gacagaagauggaagaaau

SEQ ID NO: 2124243 - RNA, 19 nt, Homo sapiens
  misc_RNA (1)...(19): siRNA sense strand
uaaaucaacuccucuaugg

SEQ ID NO: 2124244 - RNA, 19 nt, Homo sapiens
  misc_RNA (1)...(19): siRNA sense strand
gagagacgguucauagaga

SEQ ID NO: 2124245 - RNA, 19 nt, Homo sapiens
  misc_RNA (1)...(19): siRNA sense strand
caaauucacugccacuguu

SEQ ID NO: 2124246 - RNA, 19 nt, Homo sapiens
  misc_RNA (1)...(19): siRNA sense strand
caacagagccaaauuuauc

SEQ ID NO: 2124247 - RNA, 19 nt, Homo sapiens
  misc_RNA (1)...(19): siRNA sense strand
gaaaugcaaagccaaguuu

SEQ ID NO: 2124248 - RNA, 19 nt, Homo sapiens
  misc_RNA (1)...(19): siRNA sense strand
gaugaugucuggaauucuu

SEQ ID NO: 2124249 - RNA, 19 nt, Homo sapiens
  misc_RNA (1)...(19): siRNA sense strand
ggacacugaugacauugaa

SEQ ID NO: 2124250 - RNA, 19 nt, Homo sapiens
  misc_RNA (1)...(19): siRNA sense strand
gcagcaagauucaaaugga

SEQ ID NO: 2124251 - RNA, 19 nt, Homo sapiens
  misc_RNA (1)...(19): siRNA sense strand
gcaagggccucuaagaaag

SEQ ID NO: 2124252 - RNA, 19 nt, Homo sapiens
  misc_RNA (1)...(19): siRNA sense strand
gcaaggagagcaaggauga

SEQ ID NO: 2124253 - RNA, 19 nt, Homo sapiens
  misc_RNA (1)...(19): siRNA sense strand
cagaagaugugaagccaaa

SEQ ID NO: 2124254 - RNA, 19 nt, Homo sapiens
  misc_RNA (1)...(19): siRNA sense strand
gaaagaggaagaaaggaaa

SEQ ID NO: 2124255 - RNA, 19 nt, Homo sapiens
  misc_RNA (1)...(19): siRNA sense strand
gaagaacgcagauacuaug

SEQ ID NO: 2124256 - RNA, 19 nt, Homo sapiens
  misc_RNA (1)...(19): siRNA sense strand
gccaaacacuuucugaaga

SEQ ID NO: 2124257 - RNA, 19 nt, Homo sapiens
  misc_RNA (1)...(19): siRNA sense strand
gcagugggacaaugaauaa

SEQ ID NO: 2124258 - RNA, 19 nt, Homo sapiens
  misc_RNA (1)...(19): siRNA sense strand
gaaagaagccauucaacag

SEQ ID NO: 2124259 - RNA, 19 nt, Homo sapiens
  misc_RNA (1)...(19): siRNA sense strand
aaaggacacugaugacauu

SEQ ID NO: 2124260 - RNA, 19 nt, Homo sapiens
  misc_RNA (1)...(19): siRNA sense strand
ugaaggaguuugaaggauu

SEQ ID NO: 2124261 - RNA, 19 nt, Homo sapiens
  misc_RNA (1)...(19): siRNA sense strand
agacacaacuucaugaugu

SEQ ID NO: 2124262 - RNA, 19 nt, Homo sapiens
  misc_RNA (1)...(19): siRNA sense strand
ggaaagaagccauucaaca

SEQ ID NO: 2124263 - RNA, 19 nt, Homo sapiens
  misc_RNA (1)...(19): siRNA sense strand
gaagaagucaucugucaug

SEQ ID NO: 2124264 - RNA, 19 nt, Homo sapiens
  misc_RNA (1)...(19): siRNA sense strand
ggagcuagaucagcagaaa

SEQ ID NO: 2124265 - RNA, 19 nt, Homo sapiens
  misc_RNA (1)...(19): siRNA sense strand
cagaagaggugaaguugau

SEQ ID NO: 2124266 - RNA, 19 nt, Homo sapiens
  misc_RNA (1)...(19): siRNA sense strand
ggagaggcccuucagcuuu

SEQ ID NO: 2124267 - RNA, 19 nt, Homo sapiens
  misc_RNA (1)...(19): siRNA sense strand
gggaaacugucaagaugaa

SEQ ID NO: 2124268 - RNA, 19 nt, Homo sapiens
  misc_RNA (1)...(19): siRNA sense strand
gcaaacagcugcacauccu

SEQ ID NO: 2124269 - RNA, 19 nt, Homo sapiens
  misc_RNA (1)...(19): siRNA sense strand
gaucgagucucccagugaa

SEQ ID NO: 2124270 - RNA, 19 nt, Homo sapiens
  misc_RNA (1)...(19): siRNA sense strand
cagagaaauuguucaagaa

SEQ ID NO: 2124271 - RNA, 19 nt, Homo sapiens
  misc_RNA (1)...(19): siRNA sense strand
acagagaaauuguucaaga

SEQ ID NO: 2124272 - RNA, 19 nt, Homo sapiens
  misc_RNA (1)...(19): siRNA sense strand
gcaacaggauguggaagaa

SEQ ID NO: 2124273 - RNA, 19 nt, Homo sapiens
  misc_RNA (1)...(19): siRNA sense strand
gcaaagcaagggccucuaa

SEQ ID NO: 2124274 - RNA, 19 nt, Homo sapiens
  misc_RNA (1)...(19): siRNA sense strand
gaaagucagugugaaugga

SEQ ID NO: 2124275 - RNA, 19 nt, Homo sapiens
  misc_RNA (1)...(19): siRNA sense strand
caucagaaccacagcauuu

SEQ ID NO: 2124276 - RNA, 19 nt, Homo sapiens
  misc_RNA (1)...(19): siRNA sense strand
gagcaaggaugaaccaaac

SEQ ID NO: 2124277 - RNA, 19 nt, Homo sapiens
  misc_RNA (1)...(19): siRNA sense strand
cagcagacaucaaauccaa

SEQ ID NO: 2124278 - RNA, 19 nt, Homo sapiens
  misc_RNA (1)...(19): siRNA sense strand
uaaagaagccaaacucugu

SEQ ID NO: 2124279 - RNA, 19 nt, Homo sapiens
  misc_RNA (1)...(19): siRNA sense strand
agaaagcgcuccaagagau

SEQ ID NO: 2124280 - RNA, 19 nt, Homo sapiens
  misc_RNA (1)...(19): siRNA sense strand
uagagaggaugaagaagaa

SEQ ID NO: 2124281 - RNA, 19 nt, Homo sapiens
  misc_RNA (1)...(19): siRNA sense strand
gagaagaugggacaaguga

SEQ ID NO: 2124282 - RNA, 19 nt, Homo sapiens
  misc_RNA (1)...(19): siRNA sense strand
gcaggacuggacaauauua

SEQ ID NO: 2124283 - RNA, 19 nt, Homo sapiens
  misc_RNA (1)...(19): siRNA sense strand
ccagaagcaugucuuuaga

SEQ ID NO: 2124284 - RNA, 19 nt, Homo sapiens
  misc_RNA (1)...(19): siRNA sense strand
gaagcgcagugcuagcaaa

SEQ ID NO: 2124285 - RNA, 19 nt, Homo sapiens
  misc_RNA (1)...(19): siRNA sense strand
ggaaaagcaucaaaaccua

SEQ ID NO: 2124286 - RNA, 19 nt, Homo sapiens
  misc_RNA (1)...(19): siRNA sense strand
caaaaugacugcagaacaa

SEQ ID NO: 2124287 - RNA, 19 nt, Homo sapiens
  misc_RNA (1)...(19): siRNA sense strand
auagugaccuguaacauga

SEQ ID NO: 2124288 - RNA, 19 nt, Homo sapiens
  misc_RNA (1)...(19): siRNA sense strand
gagaggcccuucagcuuuc

SEQ ID NO: 2124289 - RNA, 19 nt, Homo sapiens
  misc_RNA (1)...(19): siRNA sense strand
ggaagaacgcagauacuau

SEQ ID NO: 2124290 - RNA, 19 nt, Homo sapiens
  misc_RNA (1)...(19): siRNA sense strand
cuaaaggucuacccaugaa

SEQ ID NO: 2124291 - RNA, 19 nt, Homo sapiens
  misc_RNA (1)...(19): siRNA sense strand
ggacaaugaauaagauaga

SEQ ID NO: 2124292 - RNA, 19 nt, Homo sapiens
  misc_RNA (1)...(19): siRNA sense strand
agaaugaugugucggaaga

SEQ ID NO: 2124293 - RNA, 19 nt, Homo sapiens
  misc_RNA (1)...(19): siRNA sense strand
ucucaggacuuaaucaaga

SEQ ID NO: 2124294 - RNA, 19 nt, Homo sapiens
  misc_RNA (1)...(19): siRNA sense strand
gaaaggacacugaugacau

SEQ ID NO: 2124295 - RNA, 19 nt, Homo sapiens
  misc_RNA (1)...(19): siRNA sense strand
gauguuaggauucgaaaug

SEQ ID NO: 2124296 - RNA, 19 nt, Homo sapiens
  misc_RNA (1)...(19): siRNA sense strand
gaggaggagcguaagauaa

SEQ ID NO: 2124297 - RNA, 19 nt, Homo sapiens
  misc_RNA (1)...(19): siRNA sense strand
ugaaauaccugcggcaaca

SEQ ID NO: 2124298 - RNA, 19 nt, Homo sapiens
  misc_RNA (1)...(19): siRNA sense strand
gaaaggccagcgaaaguug

SEQ ID NO: 2124299 - RNA, 19 nt, Homo sapiens
  misc_RNA (1)...(19): siRNA sense strand
aagaagaagucaucuguca

SEQ ID NO: 2124300 - RNA, 19 nt, Homo sapiens
  misc_RNA (1)...(19): siRNA sense strand
gauagugaccuguaacaug

SEQ ID NO: 2124301 - RNA, 19 nt, Homo sapiens
  misc_RNA (1)...(19): siRNA sense strand
gcagacgccuucaccagau

SEQ ID NO: 2124302 - RNA, 19 nt, Homo sapiens
  misc_RNA (1)...(19): siRNA sense strand
ggacagaagagaaguugga

SEQ ID NO: 2124303 - RNA, 19 nt, Homo sapiens
  misc_RNA (1)...(19): siRNA sense strand
gagaugacagugacuuauu

SEQ ID NO: 2124304 - RNA, 19 nt, Homo sapiens
  misc_RNA (1)...(19): siRNA sense strand
gaaggcagugggacaauga

SEQ ID NO: 2124305 - RNA, 19 nt, Homo sapiens
  misc_RNA (1)...(19): siRNA sense strand
ugccaaaucucaauucuca

SEQ ID NO: 2124306 - RNA, 19 nt, Homo sapiens
  misc_RNA (1)...(19): siRNA sense strand
aaacggaaccgaauaguca

SEQ ID NO: 2124307 - RNA, 19 nt, Homo sapiens
  misc_RNA (1)...(19): siRNA sense strand
ggaagaggacgacaaaugg

SEQ ID NO: 2124308 - RNA, 19 nt, Homo sapiens
  misc_RNA (1)...(19): siRNA sense strand
gggaagaggacgacaaaug

SEQ ID NO: 2124309 - RNA, 19 nt, Homo sapiens
  misc_RNA (1)...(19): siRNA sense strand
uaagagcaccagcauguuu

SEQ ID NO: 2124310 - RNA, 19 nt, Homo sapiens
  misc_RNA (1)...(19): siRNA sense strand
gcaaagccaaguuucaguu

SEQ ID NO: 2124311 - RNA, 19 nt, Homo sapiens
  misc_RNA (1)...(19): siRNA sense strand
guacguacuuacugcuuug

SEQ ID NO: 2124312 - RNA, 19 nt, Homo sapiens
  misc_RNA (1)...(19): siRNA sense strand
ggaagucuauaaguggaaa

SEQ ID NO: 2124313 - RNA, 19 nt, Homo sapiens
  misc_RNA (1)...(19): siRNA sense strand
ggaggagcguaagauaauu

SEQ ID NO: 2124314 - RNA, 19 nt, Homo sapiens
  misc_RNA (1)...(19): siRNA sense strand
cgagugaccuccaggauac

SEQ ID NO: 2124315 - RNA, 19 nt, Homo sapiens
  misc_RNA (1)...(19): siRNA sense strand
gugguuccauuuacuguuu

SEQ ID NO: 2124316 - RNA, 19 nt, Homo sapiens
  misc_RNA (1)...(19): siRNA sense strand
cgagaacuccugugucuga

SEQ ID NO: 2124317 - RNA, 19 nt, Homo sapiens
  misc_RNA (1)...(19): siRNA sense strand
uaacagaagcugacuugga

SEQ ID NO: 2124318 - RNA, 19 nt, Homo sapiens
  misc_RNA (1)...(19): siRNA sense strand
gcagcaaacagcucucaaa

SEQ ID NO: 2124319 - RNA, 19 nt, Homo sapiens
  misc_RNA (1)...(19): siRNA sense strand
gaaacugccauucgugaug

SEQ ID NO: 2124320 - RNA, 19 nt, Homo sapiens
  misc_RNA (1)...(19): siRNA sense strand
gguacguacuuacugcuuu

SEQ ID NO: 2124321 - RNA, 19 nt, Homo sapiens
  misc_RNA (1)...(19): siRNA sense strand
gaagccaaccaacuacauu

SEQ ID NO: 2124322 - RNA, 19 nt, Homo sapiens
  misc_RNA (1)...(19): siRNA sense strand
gagugaaacuguccucucu

SEQ ID NO: 2124323 - RNA, 19 nt, Homo sapiens
  misc_RNA (1)...(19): siRNA sense strand
uuaaagggccaccaaauau

SEQ ID NO: 2124324 - RNA, 19 nt, Homo sapiens
  misc_RNA (1)...(19): siRNA sense strand
gcaguaagcucaaguauuu

SEQ ID NO: 2124325 - RNA, 19 nt, Homo sapiens
  misc_RNA (1)...(19): siRNA sense strand
gacguuaccuuguuuagua

SEQ ID NO: 2124326 - RNA, 19 nt, Homo sapiens
  misc_RNA (1)...(19): siRNA sense strand
gcacuggacaccuuuaaua

SEQ ID NO: 2124327 - RNA, 19 nt, Homo sapiens
  misc_RNA (1)...(19): siRNA sense strand
ggaccugaauuacagcaua

SEQ ID NO: 2124328 - RNA, 19 nt, Homo sapiens
  misc_RNA (1)...(19): siRNA sense strand
gagcuuacauccacugcua

SEQ ID NO: 2124329 - RNA, 19 nt, Homo sapiens
  misc_RNA (1)...(19): siRNA sense strand
gaaaggacagaccaauaua

SEQ ID NO: 2124330 - RNA, 19 nt, Homo sapiens
  misc_RNA (1)...(19): siRNA sense strand
uuaaggagcugauagaaug

SEQ ID NO: 2124331 - RNA, 19 nt, Homo sapiens
  misc_RNA (1)...(19): siRNA sense strand
gauuguggcucccaagaaa

SEQ ID NO: 2124332 - RNA, 19 nt, Homo sapiens
  misc_RNA (1)...(19): siRNA sense strand
gacuugcucugccaucuua

SEQ ID NO: 2124333 - RNA, 19 nt, Homo sapiens
  misc_RNA (1)...(19): siRNA sense strand
caaauacagucuuuaugug

SEQ ID NO: 2124334 - RNA, 19 nt, Homo sapiens
  misc_RNA (1)...(19): siRNA sense strand
uuuaauaccucucuuguga

SEQ ID NO: 2124335 - RNA, 19 nt, Homo sapiens
  misc_RNA (1)...(19): siRNA sense strand
caggagaggcugcaaauuu

SEQ ID NO: 2124336 - RNA, 19 nt, Homo sapiens
  misc_RNA (1)...(19): siRNA sense strand
uaguagaacugaugacuga

SEQ ID NO: 2124337 - RNA, 19 nt, Homo sapiens
  misc_RNA (1)...(19): siRNA sense strand
gaacauucaugggaaaaua

SEQ ID NO: 2124338 - RNA, 19 nt, Homo sapiens
  misc_RNA (1)...(19): siRNA sense strand
gaccugaauuacagcauaa

SEQ ID NO: 2124339 - RNA, 19 nt, Homo sapiens
  misc_RNA (1)...(19): siRNA sense strand
ggucaacugugaugguuau

SEQ ID NO: 2124340 - RNA, 19 nt, Homo sapiens
  misc_RNA (1)...(19): siRNA sense strand
ugacacccauuuauuaugu

SEQ ID NO: 2124341 - RNA, 19 nt, Homo sapiens
  misc_RNA (1)...(19): siRNA sense strand
gaagccgucucucugaaug

SEQ ID NO: 2124342 - RNA, 19 nt, Homo sapiens
  misc_RNA (1)...(19): siRNA sense strand
caugacagcuggagauauc

SEQ ID NO: 2124343 - RNA, 19 nt, Homo sapiens
  misc_RNA (1)...(19): siRNA sense strand
ucacaucuuugcaugaaau

SEQ ID NO: 2124344 - RNA, 19 nt, Homo sapiens
  misc_RNA (1)...(19): siRNA sense strand
uagaauggaagccaguuua

SEQ ID NO: 2124345 - RNA, 19 nt, Homo sapiens
  misc_RNA (1)...(19): siRNA sense strand
gauuaacuaucucaacaag

SEQ ID NO: 2124346 - RNA, 19 nt, Homo sapiens
  misc_RNA (1)...(19): siRNA sense strand
gacaagguggacauucuua

SEQ ID NO: 2124347 - RNA, 19 nt, Homo sapiens
  misc_RNA (1)...(19): siRNA sense strand
agaaaggacagaccaauau

SEQ ID NO: 2124348 - RNA, 19 nt, Homo sapiens
  misc_RNA (1)...(19): siRNA sense strand
gcugugaucauaacuguga

SEQ ID NO: 2124349 - RNA, 19 nt, Homo sapiens
  misc_RNA (1)...(19): siRNA sense strand
cuagagaacuuggaguguu

SEQ ID NO: 2124350 - RNA, 19 nt, Homo sapiens
  misc_RNA (1)...(19): siRNA sense strand
acacggaccugaauuacag

SEQ ID NO: 2124351 - RNA, 19 nt, Homo sapiens
  misc_RNA (1)...(19): siRNA sense strand
ucaguaacuacacagauua

SEQ ID NO: 2124352 - RNA, 19 nt, Homo sapiens
  misc_RNA (1)...(19): siRNA sense strand
gugaaaggccugggaauug

SEQ ID NO: 2124353 - RNA, 19 nt, Homo sapiens
  misc_RNA (1)...(19): siRNA sense strand
uaauaccucucuugugaca

SEQ ID NO: 2124354 - RNA, 19 nt, Homo sapiens
  misc_RNA (1)...(19): siRNA sense strand
caagagugguauggcauga

SEQ ID NO: 2124355 - RNA, 19 nt, Homo sapiens
  misc_RNA (1)...(19): siRNA sense strand
ggacaagguggacauucuu

SEQ ID NO: 2124356 - RNA, 19 nt, Homo sapiens
  misc_RNA (1)...(19): siRNA sense strand
aagaaaggacagaccaaua

SEQ ID NO: 2124357 - RNA, 19 nt, Homo sapiens
  misc_RNA (1)...(19): siRNA sense strand
uaaacgagcacuugaacau

SEQ ID NO: 2124358 - RNA, 19 nt, Homo sapiens
  misc_RNA (1)...(19): siRNA sense strand
gcaugaaauggaaaugaaa

SEQ ID NO: 2124359 - RNA, 19 nt, Homo sapiens
  misc_RNA (1)...(19): siRNA sense strand
aaagaagccgucucucuga

SEQ ID NO: 2124360 - RNA, 19 nt, Homo sapiens
  misc_RNA (1)...(19): siRNA sense strand
uacauccacugcuaagaaa

SEQ ID NO: 2124361 - RNA, 19 nt, Homo sapiens
  misc_RNA (1)...(19): siRNA sense strand
uaaacaacuugagcauuuc

SEQ ID NO: 2124362 - RNA, 19 nt, Homo sapiens
  misc_RNA (1)...(19): siRNA sense strand
caacugugaugguuaucca

SEQ ID NO: 2124363 - RNA, 19 nt, Homo sapiens
  misc_RNA (1)...(19): siRNA sense strand
gcaauauuaucuuccuacu

SEQ ID NO: 2124364 - RNA, 19 nt, Homo sapiens
  misc_RNA (1)...(19): siRNA sense strand
gacacccauuuauuaugua

SEQ ID NO: 2124365 - RNA, 19 nt, Homo sapiens
  misc_RNA (1)...(19): siRNA sense strand
ggcuccagcuucauacuga

SEQ ID NO: 2124366 - RNA, 19 nt, Homo sapiens
  misc_RNA (1)...(19): siRNA sense strand
ugaugacguuaccuuguuu

SEQ ID NO: 2124367 - RNA, 19 nt, Homo sapiens
  misc_RNA (1)...(19): siRNA sense strand
uuacauccacugcuaagaa

SEQ ID NO: 2124368 - RNA, 19 nt, Homo sapiens
  misc_RNA (1)...(19): siRNA sense strand
uaacugugaucuccuuggu

SEQ ID NO: 2124369 - RNA, 19 nt, Homo sapiens
  misc_RNA (1)...(19): siRNA sense strand
ugcaugaaauggaaaugaa

SEQ ID NO: 2124370 - RNA, 19 nt, Homo sapiens
  misc_RNA (1)...(19): siRNA sense strand
ggaagucacaucuuugcau

SEQ ID NO: 2124371 - RNA, 19 nt, Homo sapiens
  misc_RNA (1)...(19): siRNA sense strand
uacuagagcuggacaaggu

SEQ ID NO: 2124372 - RNA, 19 nt, Homo sapiens
  misc_RNA (1)...(19): siRNA sense strand
uaagaaagaagccgucucu

SEQ ID NO: 2124373 - RNA, 19 nt, Homo sapiens
  misc_RNA (1)...(19): siRNA sense strand
cagcaagggcuuuacuaga

SEQ ID NO: 2124374 - RNA, 19 nt, Homo sapiens
  misc_RNA (1)...(19): siRNA sense strand
gacccugaguggauucuuc

SEQ ID NO: 2124375 - RNA, 19 nt, Homo sapiens
  misc_RNA (1)...(19): siRNA sense strand
gccugggaauugccauuaa

SEQ ID NO: 2124376 - RNA, 19 nt, Homo sapiens
  misc_RNA (1)...(19): siRNA sense strand
ucauaacugugaucuccuu

SEQ ID NO: 2124377 - RNA, 19 nt, Homo sapiens
  misc_RNA (1)...(19): siRNA sense strand
aacgagcacuugaacauuc

SEQ ID NO: 2124378 - RNA, 19 nt, Homo sapiens
  misc_RNA (1)...(19): siRNA sense strand
gaugacguuaccuuguuua

SEQ ID NO: 2124379 - RNA, 19 nt, Homo sapiens
  misc_RNA (1)...(19): siRNA sense strand
aaggacagaccaauauauu

SEQ ID NO: 2124380 - RNA, 19 nt, Homo sapiens
  misc_RNA (1)...(19): siRNA sense strand
ggcaguaagcucaaguauu

SEQ ID NO: 2124381 - RNA, 19 nt, Homo sapiens
  misc_RNA (1)...(19): siRNA sense strand
uucaguaacuacacagauu

SEQ ID NO: 2124382 - RNA, 19 nt, Homo sapiens
  misc_RNA (1)...(19): siRNA sense strand
agucacaucuuugcaugaa

SEQ ID NO: 2124383 - RNA, 19 nt, Homo sapiens
  misc_RNA (1)...(19): siRNA sense strand
uuuauuggcuccagcuuca

SEQ ID NO: 2124384 - RNA, 19 nt, Homo sapiens
  misc_RNA (1)...(19): siRNA sense strand
aagaagccgucucucugaa

SEQ ID NO: 2124385 - RNA, 19 nt, Homo sapiens
  misc_RNA (1)...(19): siRNA sense strand
ucuacacggaccugaauua

SEQ ID NO: 2124386 - RNA, 19 nt, Homo sapiens
  misc_RNA (1)...(19): siRNA sense strand
caagaaaggacagaccaau

SEQ ID NO: 2124387 - RNA, 19 nt, Homo sapiens
  misc_RNA (1)...(19): siRNA sense strand
aaggauaugugcugucucu

SEQ ID NO: 2124388 - RNA, 19 nt, Homo sapiens
  misc_RNA (1)...(19): siRNA sense strand
ugaaaggccugggaauugc

SEQ ID NO: 2124389 - RNA, 19 nt, Homo sapiens
  misc_RNA (1)...(19): siRNA sense strand
agcaagggcuuuacuagag

SEQ ID NO: 2124390 - RNA, 19 nt, Homo sapiens
  misc_RNA (1)...(19): siRNA sense strand
uugugacacccauuuauua

SEQ ID NO: 2124391 - RNA, 19 nt, Homo sapiens
  misc_RNA (1)...(19): siRNA sense strand
aaaggacagaccaauauau

SEQ ID NO: 2124392 - RNA, 19 nt, Homo sapiens
  misc_RNA (1)...(19): siRNA sense strand
cagcaaauguagaaaacaa

SEQ ID NO: 2124393 - RNA, 19 nt, Homo sapiens
  misc_RNA (1)...(19): siRNA sense strand
gugcaauauuaucuuccua

SEQ ID NO: 2124394 - RNA, 19 nt, Homo sapiens
  misc_RNA (1)...(19): siRNA sense strand
gcauaaacaacuugagcau

SEQ ID NO: 2124395 - RNA, 19 nt, Homo sapiens
  misc_RNA (1)...(19): siRNA sense strand
agaagggccucuugcaacu

SEQ ID NO: 2124396 - RNA, 19 nt, Homo sapiens
  misc_RNA (1)...(19): siRNA sense strand
guggauucuucacuauuau

SEQ ID NO: 2124397 - RNA, 19 nt, Homo sapiens
  misc_RNA (1)...(19): siRNA sense strand
aauggaagccaguuuacaa

SEQ ID NO: 2124398 - RNA, 19 nt, Homo sapiens
  misc_RNA (1)...(19): siRNA sense strand
gaauggaagccaguuuaca

SEQ ID NO: 2124399 - RNA, 19 nt, Homo sapiens
  misc_RNA (1)...(19): siRNA sense strand
ccauuaaggagcugauaga

SEQ ID NO: 2124400 - RNA, 19 nt, Homo sapiens
  misc_RNA (1)...(19): siRNA sense strand
ggccugggaauugccauua

SEQ ID NO: 2124401 - RNA, 19 nt, Homo sapiens
  misc_RNA (1)...(19): siRNA sense strand
aggauacaaugaugacguu

SEQ ID NO: 2124402 - RNA, 19 nt, Homo sapiens
  misc_RNA (1)...(19): siRNA sense strand
gcucugccaucuuauucca

SEQ ID NO: 2124403 - RNA, 19 nt, Homo sapiens
  misc_RNA (1)...(19): siRNA sense strand
aggagaggcugcaaauuuu

SEQ ID NO: 2124404 - RNA, 19 nt, Homo sapiens
  misc_RNA (1)...(19): siRNA sense strand
agaaagaagccgucucucu

SEQ ID NO: 2124405 - RNA, 19 nt, Homo sapiens
  misc_RNA (1)...(19): siRNA sense strand
cauccaugguagugacuug

SEQ ID NO: 2124406 - RNA, 19 nt, Homo sapiens
  misc_RNA (1)...(19): siRNA sense strand
gcucuacacggaccugaau

SEQ ID NO: 2124407 - RNA, 19 nt, Homo sapiens
  misc_RNA (1)...(19): siRNA sense strand
agaaggauaugugcugucu

SEQ ID NO: 2124408 - RNA, 19 nt, Homo sapiens
  misc_RNA (1)...(19): siRNA sense strand
cauaaacaacuugagcauu

SEQ ID NO: 2124409 - RNA, 19 nt, Homo sapiens
  misc_RNA (1)...(19): siRNA sense strand
acaagaagaggaagucaca

SEQ ID NO: 2124410 - RNA, 19 nt, Homo sapiens
  misc_RNA (1)...(19): siRNA sense strand
aaacgagcacuugaacauu

SEQ ID NO: 2124411 - RNA, 19 nt, Homo sapiens
  misc_RNA (1)...(19): siRNA sense strand
ucucuggucuguccaaacu

SEQ ID NO: 2124412 - RNA, 19 nt, Homo sapiens
  misc_RNA (1)...(19): siRNA sense strand
augaugacguuaccuuguu

SEQ ID NO: 2124413 - RNA, 19 nt, Homo sapiens
  misc_RNA (1)...(19): siRNA sense strand
uauuaucauuggcaucuuc

SEQ ID NO: 2124414 - RNA, 19 nt, Homo sapiens
  misc_RNA (1)...(19): siRNA sense strand
caguaacuacacagauuaa

SEQ ID NO: 2124415 - RNA, 19 nt, Homo sapiens
  misc_RNA (1)...(19): siRNA sense strand
aacauccgcuggucuuugu

SEQ ID NO: 2124416 - RNA, 19 nt, Homo sapiens
  misc_RNA (1)...(19): siRNA sense strand
acaaacauccgcuggucuu

SEQ ID NO: 2124417 - RNA, 19 nt, Homo sapiens
  misc_RNA (1)...(19): siRNA sense strand
ggauucuucacuauuauca

SEQ ID NO: 2124418 - RNA, 19 nt, Homo sapiens
  misc_RNA (1)...(19): siRNA sense strand
gcucugguggguaggauug

SEQ ID NO: 2124419 - RNA, 19 nt, Homo sapiens
  misc_RNA (1)...(19): siRNA sense strand
cauccacugcuaagaaaga

SEQ ID NO: 2124420 - RNA, 19 nt, Homo sapiens
  misc_RNA (1)...(19): siRNA sense strand
agagugguauggcaugaca

SEQ ID NO: 2124421 - RNA, 19 nt, Homo sapiens
  misc_RNA (1)...(19): siRNA sense strand
guaacuacacagauuaacu

SEQ ID NO: 2124422 - RNA, 19 nt, Homo sapiens
  misc_RNA (1)...(19): siRNA sense strand
uuccuuugcugugaucaua

SEQ ID NO: 2124423 - RNA, 19 nt, Homo sapiens
  misc_RNA (1)...(19): siRNA sense strand
gaggaagucacaucuuugc

SEQ ID NO: 2124424 - RNA, 19 nt, Homo sapiens
  misc_RNA (1)...(19): siRNA sense strand
guuaagugcuucagaauua

SEQ ID NO: 2124425 - RNA, 19 nt, Homo sapiens
  misc_RNA (1)...(19): siRNA sense strand
gaaaucgguuaguccauua

SEQ ID NO: 2124426 - RNA, 19 nt, Homo sapiens
  misc_RNA (1)...(19): siRNA sense strand
gaggagagcuggcuguauu

SEQ ID NO: 2124427 - RNA, 19 nt, Homo sapiens
  misc_RNA (1)...(19): siRNA sense strand
ugaagaagcuggagaagca

SEQ ID NO: 2124428 - RNA, 19 nt, Homo sapiens
  misc_RNA (1)...(19): siRNA sense strand
gaaagucuccggcaagaau

SEQ ID NO: 2124429 - RNA, 19 nt, Homo sapiens
  misc_RNA (1)...(19): siRNA sense strand
ucaagaggcagaauuuaua

SEQ ID NO: 2124430 - RNA, 19 nt, Homo sapiens
  misc_RNA (1)...(19): siRNA sense strand
ccucaguccucuauagaua

SEQ ID NO: 2124431 - RNA, 19 nt, Homo sapiens
  misc_RNA (1)...(19): siRNA sense strand
gcaggcaaguuuuggauua

SEQ ID NO: 2124432 - RNA, 19 nt, Homo sapiens
  misc_RNA (1)...(19): siRNA sense strand
gauagugaguuaagugcuu

SEQ ID NO: 2124433 - RNA, 19 nt, Homo sapiens
  misc_RNA (1)...(19): siRNA sense strand
ccacaaacuugaucaaacu

SEQ ID NO: 2124434 - RNA, 19 nt, Homo sapiens
  misc_RNA (1)...(19): siRNA sense strand
ugaguuaagugcuucagaa

SEQ ID NO: 2124435 - RNA, 19 nt, Homo sapiens
  misc_RNA (1)...(19): siRNA sense strand
ugcaggagcuggugaagaa

SEQ ID NO: 2124436 - RNA, 19 nt, Homo sapiens
  misc_RNA (1)...(19): siRNA sense strand
caaacuugaucaaacuaug

SEQ ID NO: 2124437 - RNA, 19 nt, Homo sapiens
  misc_RNA (1)...(19): siRNA sense strand
uaacugauguacagauucu

SEQ ID NO: 2124438 - RNA, 19 nt, Homo sapiens
  misc_RNA (1)...(19): siRNA sense strand
agaaaucgguuaguccauu

SEQ ID NO: 2124439 - RNA, 19 nt, Homo sapiens
  misc_RNA (1)...(19): siRNA sense strand
caaacuaugucagcucuca

SEQ ID NO: 2124440 - RNA, 19 nt, Homo sapiens
  misc_RNA (1)...(19): siRNA sense strand
gcuaaaugauguaacugau

SEQ ID NO: 2124441 - RNA, 19 nt, Homo sapiens
  misc_RNA (1)...(19): siRNA sense strand
ggacgccaccuccuugcua

SEQ ID NO: 2124442 - RNA, 19 nt, Homo sapiens
  misc_RNA (1)...(19): siRNA sense strand
ggaaauucagguaacuuga

SEQ ID NO: 2124443 - RNA, 19 nt, Homo sapiens
  misc_RNA (1)...(19): siRNA sense strand
caagaggcagaauuuauau

SEQ ID NO: 2124444 - RNA, 19 nt, Homo sapiens
  misc_RNA (1)...(19): siRNA sense strand
gcgcaguucugguucaucu

SEQ ID NO: 2124445 - RNA, 19 nt, Homo sapiens
  misc_RNA (1)...(19): siRNA sense strand
ccuaagcagucacccagaa

SEQ ID NO: 2124446 - RNA, 19 nt, Homo sapiens
  misc_RNA (1)...(19): siRNA sense strand
cagaaauccuccacucagu

SEQ ID NO: 2124447 - RNA, 19 nt, Homo sapiens
  misc_RNA (1)...(19): siRNA sense strand
gcagucacccagaaauuca

SEQ ID NO: 2124448 - RNA, 19 nt, Homo sapiens
  misc_RNA (1)...(19): siRNA sense strand
gcaguucugguucaucuug

SEQ ID NO: 2124449 - RNA, 19 nt, Homo sapiens
  misc_RNA (1)...(19): siRNA sense strand
gaaaagcucagacagaaau

SEQ ID NO: 2124450 - RNA, 19 nt, Homo sapiens
  misc_RNA (1)...(19): siRNA sense strand
guauucaucaccaaagaaa

SEQ ID NO: 2124451 - RNA, 19 nt, Homo sapiens
  misc_RNA (1)...(19): siRNA sense strand
ggauccaauuauaagcuaa

SEQ ID NO: 2124452 - RNA, 19 nt, Homo sapiens
  misc_RNA (1)...(19): siRNA sense strand
uuacaccaaugcagaaauc

SEQ ID NO: 2124453 - RNA, 19 nt, Homo sapiens
  misc_RNA (1)...(19): siRNA sense strand
ccaaugcagaaaucgguua

SEQ ID NO: 2124454 - RNA, 19 nt, Homo sapiens
  misc_RNA (1)...(19): siRNA sense strand
aagaaagucuccggcaaga

SEQ ID NO: 2124455 - RNA, 19 nt, Homo sapiens
  misc_RNA (1)...(19): siRNA sense strand
auacagcaguggcuucaau

SEQ ID NO: 2124456 - RNA, 19 nt, Homo sapiens
  misc_RNA (1)...(19): siRNA sense strand
ugaguuacaccaguccuua

SEQ ID NO: 2124457 - RNA, 19 nt, Homo sapiens
  misc_RNA (1)...(19): siRNA sense strand
agagcuggcuguauucauc

SEQ ID NO: 2124458 - RNA, 19 nt, Homo sapiens
  misc_RNA (1)...(19): siRNA sense strand
ucucuuauccacaaacuug

SEQ ID NO: 2124459 - RNA, 19 nt, Homo sapiens
  misc_RNA (1)...(19): siRNA sense strand
ccagugcgaccuccuauag

SEQ ID NO: 2124460 - RNA, 19 nt, Homo sapiens
  misc_RNA (1)...(19): siRNA sense strand
ccuauagucaaacagcuua

SEQ ID NO: 2124461 - RNA, 19 nt, Homo sapiens
  misc_RNA (1)...(19): siRNA sense strand
caaaugccaguagcccaua

SEQ ID NO: 2124462 - RNA, 19 nt, Homo sapiens
  misc_RNA (1)...(19): siRNA sense strand
uggauccaauuauaagcua

SEQ ID NO: 2124463 - RNA, 19 nt, Homo sapiens
  misc_RNA (1)...(19): siRNA sense strand
ucgguuaguccauuaguuu

SEQ ID NO: 2124464 - RNA, 19 nt, Homo sapiens
  misc_RNA (1)...(19): siRNA sense strand
gaccuccuauagucaaaca

SEQ ID NO: 2124465 - RNA, 19 nt, Homo sapiens
  misc_RNA (1)...(19): siRNA sense strand
gacagaaauccuccacuca

SEQ ID NO: 2124466 - RNA, 19 nt, Homo sapiens
  misc_RNA (1)...(19): siRNA sense strand
uuacccaaguccugauguu

SEQ ID NO: 2124467 - RNA, 19 nt, Homo sapiens
  misc_RNA (1)...(19): siRNA sense strand
uuacaccaguccuuacagu

SEQ ID NO: 2124468 - RNA, 19 nt, Homo sapiens
  misc_RNA (1)...(19): siRNA sense strand
cccagaaauucaccucguu

SEQ ID NO: 2124469 - RNA, 19 nt, Homo sapiens
  misc_RNA (1)...(19): siRNA sense strand
gcgaccuccuauagucaaa

SEQ ID NO: 2124470 - RNA, 19 nt, Homo sapiens
  misc_RNA (1)...(19): siRNA sense strand
gauguugagugugcuaaaa

SEQ ID NO: 2124471 - RNA, 19 nt, Homo sapiens
  misc_RNA (1)...(19): siRNA sense strand
gaguuaagugcuucagaau

SEQ ID NO: 2124472 - RNA, 19 nt, Homo sapiens
  misc_RNA (1)...(19): siRNA sense strand
ucucaagaggcagaauuua

SEQ ID NO: 2124473 - RNA, 19 nt, Homo sapiens
  misc_RNA (1)...(19): siRNA sense strand
ucaccucgaccgucaccua

SEQ ID NO: 2124474 - RNA, 19 nt, Homo sapiens
  misc_RNA (1)...(19): siRNA sense strand
ggaggagagcuggcuguau

SEQ ID NO: 2124475 - RNA, 19 nt, Homo sapiens
  misc_RNA (1)...(19): siRNA sense strand
gucaaacagcuuauacuuc

SEQ ID NO: 2124476 - RNA, 19 nt, Homo sapiens
  misc_RNA (1)...(19): siRNA sense strand
cuaaaugauguaacugaug

SEQ ID NO: 2124477 - RNA, 19 nt, Homo sapiens
  misc_RNA (1)...(19): siRNA sense strand
uggagaagcagaacgaaca

SEQ ID NO: 2124478 - RNA, 19 nt, Homo sapiens
  misc_RNA (1)...(19): siRNA sense strand
aagcagucacccagaaauu

SEQ ID NO: 2124479 - RNA, 19 nt, Homo sapiens
  misc_RNA (1)...(19): siRNA sense strand
ggagagcuggcuguauuca

SEQ ID NO: 2124480 - RNA, 19 nt, Homo sapiens
  misc_RNA (1)...(19): siRNA sense strand
aaagucuccggcaagaaua

SEQ ID NO: 2124481 - RNA, 19 nt, Homo sapiens
  misc_RNA (1)...(19): siRNA sense strand
agucaaacagcuuauacuu

SEQ ID NO: 2124482 - RNA, 19 nt, Homo sapiens
  misc_RNA (1)...(19): siRNA sense strand
gagcuggcuguauucauca

SEQ ID NO: 2124483 - RNA, 19 nt, Homo sapiens
  misc_RNA (1)...(19): siRNA sense strand
cucaagaggcagaauuuau

SEQ ID NO: 2124484 - RNA, 19 nt, Homo sapiens
  misc_RNA (1)...(19): siRNA sense strand
cuaagcagucacccagaaa

SEQ ID NO: 2124485 - RNA, 19 nt, Homo sapiens
  misc_RNA (1)...(19): siRNA sense strand
ucugguucaucuugcaauu

SEQ ID NO: 2124486 - RNA, 19 nt, Homo sapiens
  misc_RNA (1)...(19): siRNA sense strand
uagcccggaugcaggaaga

SEQ ID NO: 2124487 - RNA, 19 nt, Homo sapiens
  misc_RNA (1)...(19): siRNA sense strand
uggaaauucagguaacuug

SEQ ID NO: 2124488 - RNA, 19 nt, Homo sapiens
  misc_RNA (1)...(19): siRNA sense strand
uccacaaacuugaucaaac

SEQ ID NO: 2124489 - RNA, 19 nt, Homo sapiens
  misc_RNA (1)...(19): siRNA sense strand
uaagcagucacccagaaau

SEQ ID NO: 2124490 - RNA, 19 nt, Homo sapiens
  misc_RNA (1)...(19): siRNA sense strand
uugaaaagcucagacagaa

SEQ ID NO: 2124491 - RNA, 19 nt, Homo sapiens
  misc_RNA (1)...(19): siRNA sense strand
uuaagugcuucagaauuag

SEQ ID NO: 2124492 - RNA, 19 nt, Homo sapiens
  misc_RNA (1)...(19): siRNA sense strand
cagaaauucaccucguuca

SEQ ID NO: 2124493 - RNA, 19 nt, Homo sapiens
  misc_RNA (1)...(19): siRNA sense strand
caccucgaccgucaccuaa

SEQ ID NO: 2124494 - RNA, 19 nt, Homo sapiens
  misc_RNA (1)...(19): siRNA sense strand
guaacugauguacagauuc

SEQ ID NO: 2124495 - RNA, 19 nt, Homo sapiens
  misc_RNA (1)...(19): siRNA sense strand
uaagugcuucagaauuaga

SEQ ID NO: 2124496 - RNA, 19 nt, Homo sapiens
  misc_RNA (1)...(19): siRNA sense strand
gaacagggauuaucaaugu

SEQ ID NO: 2124497 - RNA, 19 nt, Homo sapiens
  misc_RNA (1)...(19): siRNA sense strand
gaugaaggauccuauauaa

SEQ ID NO: 2124498 - RNA, 19 nt, Homo sapiens
  misc_RNA (1)...(19): siRNA sense strand
caacaacacuuuauuggaa

SEQ ID NO: 2124499 - RNA, 19 nt, Homo sapiens
  misc_RNA (1)...(19): siRNA sense strand
gauagcagcaucuuuauua

SEQ ID NO: 2124500 - RNA, 19 nt, Homo sapiens
  misc_RNA (1)...(19): siRNA sense strand
gaagacauguauaggauaa

SEQ ID NO: 2124501 - RNA, 19 nt, Homo sapiens
  misc_RNA (1)...(19): siRNA sense strand
gagaaaggauuguccagua

SEQ ID NO: 2124502 - RNA, 19 nt, Homo sapiens
  misc_RNA (1)...(19): siRNA sense strand
aaagagugcugaacaguua

SEQ ID NO: 2124503 - RNA, 19 nt, Homo sapiens
  misc_RNA (1)...(19): siRNA sense strand
ugaagaaggucauuguaua

SEQ ID NO: 2124504 - RNA, 19 nt, Homo sapiens
  misc_RNA (1)...(19): siRNA sense strand
gggcuuagcucaaguucua

SEQ ID NO: 2124505 - RNA, 19 nt, Homo sapiens
  misc_RNA (1)...(19): siRNA sense strand
gaacuuauggugacuagua

SEQ ID NO: 2124506 - RNA, 19 nt, Homo sapiens
  misc_RNA (1)...(19): siRNA sense strand
uagaagagcuggugaguga

SEQ ID NO: 2124507 - RNA, 19 nt, Homo sapiens
  misc_RNA (1)...(19): siRNA sense strand
ccacaucucuauucuguuu

SEQ ID NO: 2124508 - RNA, 19 nt, Homo sapiens
  misc_RNA (1)...(19): siRNA sense strand
agaaacagcuagucgaaua

SEQ ID NO: 2124509 - RNA, 19 nt, Homo sapiens
  misc_RNA (1)...(19): siRNA sense strand
ugaaagaugugaagaagaa

SEQ ID NO: 2124510 - RNA, 19 nt, Homo sapiens
  misc_RNA (1)...(19): siRNA sense strand
ugaagaggauguuaccuua

SEQ ID NO: 2124511 - RNA, 19 nt, Homo sapiens
  misc_RNA (1)...(19): siRNA sense strand
gcaggaaucucuugugugu

SEQ ID NO: 2124512 - RNA, 19 nt, Homo sapiens
  misc_RNA (1)...(19): siRNA sense strand
aaacacagaugcacaagaa

SEQ ID NO: 2124513 - RNA, 19 nt, Homo sapiens
  misc_RNA (1)...(19): siRNA sense strand
caacuacacuuucugaugu

SEQ ID NO: 2124514 - RNA, 19 nt, Homo sapiens
  misc_RNA (1)...(19): siRNA sense strand
acaggaagcuuugcaguua

SEQ ID NO: 2124515 - RNA, 19 nt, Homo sapiens
  misc_RNA (1)...(19): siRNA sense strand
gugaaaguauggacaauuu

SEQ ID NO: 2124516 - RNA, 19 nt, Homo sapiens
  misc_RNA (1)...(19): siRNA sense strand
ggaagcccuuaacauauua

SEQ ID NO: 2124517 - RNA, 19 nt, Homo sapiens
  misc_RNA (1)...(19): siRNA sense strand
uaacauccuuugcuuauug

SEQ ID NO: 2124518 - RNA, 19 nt, Homo sapiens
  misc_RNA (1)...(19): siRNA sense strand
gaauucaucuggaacauca

SEQ ID NO: 2124519 - RNA, 19 nt, Homo sapiens
  misc_RNA (1)...(19): siRNA sense strand
gaaaguauccucaaagaag

SEQ ID NO: 2124520 - RNA, 19 nt, Homo sapiens
  misc_RNA (1)...(19): siRNA sense strand
gaacccaucaguuguauuu

SEQ ID NO: 2124521 - RNA, 19 nt, Homo sapiens
  misc_RNA (1)...(19): siRNA sense strand
gcacaagucccauuaauag

SEQ ID NO: 2124522 - RNA, 19 nt, Homo sapiens
  misc_RNA (1)...(19): siRNA sense strand
gaaggauccuauauaauuc

SEQ ID NO: 2124523 - RNA, 19 nt, Homo sapiens
  misc_RNA (1)...(19): siRNA sense strand
aagaacaccuggauacaua

SEQ ID NO: 2124524 - RNA, 19 nt, Homo sapiens
  misc_RNA (1)...(19): siRNA sense strand
ugaaagugauggagcauaa

SEQ ID NO: 2124525 - RNA, 19 nt, Homo sapiens
  misc_RNA (1)...(19): siRNA sense strand
uaacagugcugccauuuca

SEQ ID NO: 2124526 - RNA, 19 nt, Homo sapiens
  misc_RNA (1)...(19): siRNA sense strand
uauaauggauggacggaua

SEQ ID NO: 2124527 - RNA, 19 nt, Homo sapiens
  misc_RNA (1)...(19): siRNA sense strand
gaagccaacuacaaacuga

SEQ ID NO: 2124528 - RNA, 19 nt, Homo sapiens
  misc_RNA (1)...(19): siRNA sense strand
aaacugccauucauucuuu

SEQ ID NO: 2124529 - RNA, 19 nt, Homo sapiens
  misc_RNA (1)...(19): siRNA sense strand
ugaaagagcuagaugaaag

SEQ ID NO: 2124530 - RNA, 19 nt, Homo sapiens
  misc_RNA (1)...(19): siRNA sense strand
ccaaagaacccaucaguug

SEQ ID NO: 2124531 - RNA, 19 nt, Homo sapiens
  misc_RNA (1)...(19): siRNA sense strand
gauauacgaugccauuuua

SEQ ID NO: 2124532 - RNA, 19 nt, Homo sapiens
  misc_RNA (1)...(19): siRNA sense strand
ggaacaaggaguuuaauga

SEQ ID NO: 2124533 - RNA, 19 nt, Homo sapiens
  misc_RNA (1)...(19): siRNA sense strand
caacagagccuucgucaca

SEQ ID NO: 2124534 - RNA, 19 nt, Homo sapiens
  misc_RNA (1)...(19): siRNA sense strand
agaugaagaugauuccuua

SEQ ID NO: 2124535 - RNA, 19 nt, Homo sapiens
  misc_RNA (1)...(19): siRNA sense strand
gauguuaccuuagcucuga

SEQ ID NO: 2124536 - RNA, 19 nt, Homo sapiens
  misc_RNA (1)...(19): siRNA sense strand
agacauaaaucaagaggaa

SEQ ID NO: 2124537 - RNA, 19 nt, Homo sapiens
  misc_RNA (1)...(19): siRNA sense strand
gagaaaagcuaaugaaugu

SEQ ID NO: 2124538 - RNA, 19 nt, Homo sapiens
  misc_RNA (1)...(19): siRNA sense strand
acaaacugcuuauccauuu

SEQ ID NO: 2124539 - RNA, 19 nt, Homo sapiens
  misc_RNA (1)...(19): siRNA sense strand
gauguucucuccagacuug

SEQ ID NO: 2124540 - RNA, 19 nt, Homo sapiens
  misc_RNA (1)...(19): siRNA sense strand
caaugccacuuuauucuaa

SEQ ID NO: 2124541 - RNA, 19 nt, Homo sapiens
  misc_RNA (1)...(19): siRNA sense strand
caacagacuagccuaauuu

SEQ ID NO: 2124542 - RNA, 19 nt, Homo sapiens
  misc_RNA (1)...(19): siRNA sense strand
cagcaggcauuaacgauuu

SEQ ID NO: 2124543 - RNA, 19 nt, Homo sapiens
  misc_RNA (1)...(19): siRNA sense strand
ggucggagguggagaaugu

SEQ ID NO: 2124544 - RNA, 19 nt, Homo sapiens
  misc_RNA (1)...(19): siRNA sense strand
ggugagcacuggauucuga

SEQ ID NO: 2124545 - RNA, 19 nt, Homo sapiens
  misc_RNA (1)...(19): siRNA sense strand
gaagaaaugggaaaccaaa

SEQ ID NO: 2124546 - RNA, 19 nt, Homo sapiens
  misc_RNA (1)...(19): siRNA sense strand
gaagaaggucauuguauau

SEQ ID NO: 2124547 - RNA, 19 nt, Homo sapiens
  misc_RNA (1)...(19): siRNA sense strand
gcacaaacuacuauagaaa

SEQ ID NO: 2124548 - RNA, 19 nt, Homo sapiens
  misc_RNA (1)...(19): siRNA sense strand
gaagaugaaggauccuaua

SEQ ID NO: 2124549 - RNA, 19 nt, Homo sapiens
  misc_RNA (1)...(19): siRNA sense strand
caacagaagacauaaauca

SEQ ID NO: 2124550 - RNA, 19 nt, Homo sapiens
  misc_RNA (1)...(19): siRNA sense strand
ucaguaaacucauuucugu

SEQ ID NO: 2124551 - RNA, 19 nt, Homo sapiens
  misc_RNA (1)...(19): siRNA sense strand
gaaguaacucuuugagauu

SEQ ID NO: 2124552 - RNA, 19 nt, Homo sapiens
  misc_RNA (1)...(19): siRNA sense strand
gggagauccuuucagauuu

SEQ ID NO: 2124553 - RNA, 19 nt, Homo sapiens
  misc_RNA (1)...(19): siRNA sense strand
caaagcaaauugaaaugga

SEQ ID NO: 2124554 - RNA, 19 nt, Homo sapiens
  misc_RNA (1)...(19): siRNA sense strand
ggaacuuaaucuggaaaua

SEQ ID NO: 2124555 - RNA, 19 nt, Homo sapiens
  misc_RNA (1)...(19): siRNA sense strand
gcacaccacuauccucaau

SEQ ID NO: 2124556 - RNA, 19 nt, Homo sapiens
  misc_RNA (1)...(19): siRNA sense strand
ucucaaaccucauaucaug

SEQ ID NO: 2124557 - RNA, 19 nt, Homo sapiens
  misc_RNA (1)...(19): siRNA sense strand
gugauucaaugccacuuua

SEQ ID NO: 2124558 - RNA, 19 nt, Homo sapiens
  misc_RNA (1)...(19): siRNA sense strand
guaacacacuggauauaau

SEQ ID NO: 2124559 - RNA, 19 nt, Homo sapiens
  misc_RNA (1)...(19): siRNA sense strand
gaaacaaguaugcagcuaa

SEQ ID NO: 2124560 - RNA, 19 nt, Homo sapiens
  misc_RNA (1)...(19): siRNA sense strand
cugaaaccaugaagcauua

SEQ ID NO: 2124561 - RNA, 19 nt, Homo sapiens
  misc_RNA (1)...(19): siRNA sense strand
uaaagcagcugauucuucu

SEQ ID NO: 2124562 - RNA, 19 nt, Homo sapiens
  misc_RNA (1)...(19): siRNA sense strand
caacuucaguauuaaagga

SEQ ID NO: 2124563 - RNA, 19 nt, Homo sapiens
  misc_RNA (1)...(19): siRNA sense strand
cagaagacauaaaucaaga

SEQ ID NO: 2124564 - RNA, 19 nt, Homo sapiens
  misc_RNA (1)...(19): siRNA sense strand
gagaacagauggaguacuc

SEQ ID NO: 2124565 - RNA, 19 nt, Homo sapiens
  misc_RNA (1)...(19): siRNA sense strand
ggacagauacagugauaga

SEQ ID NO: 2124566 - RNA, 19 nt, Homo sapiens
  misc_RNA (1)...(19): siRNA sense strand
gaauuuauaucagcuguag

SEQ ID NO: 2124567 - RNA, 19 nt, Homo sapiens
  misc_RNA (1)...(19): siRNA sense strand
agaaguaacucuuugagau

SEQ ID NO: 2124568 - RNA, 19 nt, Homo sapiens
  misc_RNA (1)...(19): siRNA sense strand
aguaucagcuuaggaaaua

SEQ ID NO: 2124569 - RNA, 19 nt, Homo sapiens
  misc_RNA (1)...(19): siRNA sense strand
ugagcuaacucucgccaua

SEQ ID NO: 2124570 - RNA, 19 nt, Homo sapiens
  misc_RNA (1)...(19): siRNA sense strand
gcagauggcuggcccaaaa

SEQ ID NO: 2124571 - RNA, 19 nt, Homo sapiens
  misc_RNA (1)...(19): siRNA sense strand
gaacuugcccaacuggaaa

SEQ ID NO: 2124572 - RNA, 19 nt, Homo sapiens
  misc_RNA (1)...(19): siRNA sense strand
gaugaaagaugugaagaag

SEQ ID NO: 2124573 - RNA, 19 nt, Homo sapiens
  misc_RNA (1)...(19): siRNA sense strand
gaagaagaagcggcacuua

SEQ ID NO: 2124574 - RNA, 19 nt, Homo sapiens
  misc_RNA (1)...(19): siRNA sense strand
ccaacagacuagccuaauu

SEQ ID NO: 2124575 - RNA, 19 nt, Homo sapiens
  misc_RNA (1)...(19): siRNA sense strand
uugcagagcuguuagagaa

SEQ ID NO: 2124576 - RNA, 19 nt, Homo sapiens
  misc_RNA (1)...(19): siRNA sense strand
gagagaagauugaaaaugu

SEQ ID NO: 2124577 - RNA, 19 nt, Homo sapiens
  misc_RNA (1)...(19): siRNA sense strand
ggaaacaaguaugcagcua

SEQ ID NO: 2124578 - RNA, 19 nt, Homo sapiens
  misc_RNA (1)...(19): siRNA sense strand
gcugggagauccuuucaga

SEQ ID NO: 2124579 - RNA, 19 nt, Homo sapiens
  misc_RNA (1)...(19): siRNA sense strand
gcaaucauaccaacuucua

SEQ ID NO: 2124580 - RNA, 19 nt, Homo sapiens
  misc_RNA (1)...(19): siRNA sense strand
caccagagaagaaguauuu

SEQ ID NO: 2124581 - RNA, 19 nt, Homo sapiens
  misc_RNA (1)...(19): siRNA sense strand
uagcacaagucaaagcuuu

SEQ ID NO: 2124582 - RNA, 19 nt, Homo sapiens
  misc_RNA (1)...(19): siRNA sense strand
ggaauucauuaccucaaga

SEQ ID NO: 2124583 - RNA, 19 nt, Homo sapiens
  misc_RNA (1)...(19): siRNA sense strand
uauaucagcuguagcacaa

SEQ ID NO: 2124584 - RNA, 19 nt, Homo sapiens
  misc_RNA (1)...(19): siRNA sense strand
gugguggccuugauaauga

SEQ ID NO: 2124585 - RNA, 19 nt, Homo sapiens
  misc_RNA (1)...(19): siRNA sense strand
gcgcaggcgucgagacauu

SEQ ID NO: 2124586 - RNA, 19 nt, Homo sapiens
  misc_RNA (1)...(19): siRNA sense strand
gaagaugacccuguacaga

SEQ ID NO: 2124587 - RNA, 19 nt, Homo sapiens
  misc_RNA (1)...(19): siRNA sense strand
gaguaccagugcucuagua

SEQ ID NO: 2124588 - RNA, 19 nt, Homo sapiens
  misc_RNA (1)...(19): siRNA sense strand
agaaguagcuguggaagau

SEQ ID NO: 2124589 - RNA, 19 nt, Homo sapiens
  misc_RNA (1)...(19): siRNA sense strand
gaacaaggaguuuaaugag

SEQ ID NO: 2124590 - RNA, 19 nt, Homo sapiens
  misc_RNA (1)...(19): siRNA sense strand
ggauauaacaguaaugcaa

SEQ ID NO: 2124591 - RNA, 19 nt, Homo sapiens
  misc_RNA (1)...(19): siRNA sense strand
gcucuaaccuggacauguc

SEQ ID NO: 2124592 - RNA, 19 nt, Homo sapiens
  misc_RNA (1)...(19): siRNA sense strand
caacugguacgaauauuug

SEQ ID NO: 2124593 - RNA, 19 nt, Homo sapiens
  misc_RNA (1)...(19): siRNA sense strand
agucaaagcuuucagaucu

SEQ ID NO: 2124594 - RNA, 19 nt, Homo sapiens
  misc_RNA (1)...(19): siRNA sense strand
gaacagcaggaaucucuug

SEQ ID NO: 2124595 - RNA, 19 nt, Homo sapiens
  misc_RNA (1)...(19): siRNA sense strand
ggaagucggugaccaacag

SEQ ID NO: 2124596 - RNA, 19 nt, Homo sapiens
  misc_RNA (1)...(19): siRNA sense strand
ggcaggaccuuuauuguuu

SEQ ID NO: 2124597 - RNA, 19 nt, Homo sapiens
  misc_RNA (1)...(19): siRNA sense strand
guacgaaggucacgugaau

SEQ ID NO: 2124598 - RNA, 19 nt, Homo sapiens
  misc_RNA (1)...(19): siRNA sense strand
gcagugaccucugugcaaa

SEQ ID NO: 2124599 - RNA, 19 nt, Homo sapiens
  misc_RNA (1)...(19): siRNA sense strand
caucagacaugacuggaaa

SEQ ID NO: 2124600 - RNA, 19 nt, Homo sapiens
  misc_RNA (1)...(19): siRNA sense strand
caccagcagucauuugaua

SEQ ID NO: 2124601 - RNA, 19 nt, Homo sapiens
  misc_RNA (1)...(19): siRNA sense strand
gaucugcguuguagaaauc

SEQ ID NO: 2124602 - RNA, 19 nt, Homo sapiens
  misc_RNA (1)...(19): siRNA sense strand
gaccagcucuucguaguga

SEQ ID NO: 2124603 - RNA, 19 nt, Homo sapiens
  misc_RNA (1)...(19): siRNA sense strand
ccacucgccuguuccauga

SEQ ID NO: 2124604 - RNA, 19 nt, Homo sapiens
  misc_RNA (1)...(19): siRNA sense strand
agacaugacuggaaagauc

SEQ ID NO: 2124605 - RNA, 19 nt, Homo sapiens
  misc_RNA (1)...(19): siRNA sense strand
agaagaacauccugcagaa

SEQ ID NO: 2124606 - RNA, 19 nt, Homo sapiens
  misc_RNA (1)...(19): siRNA sense strand
agaacauccugcagaauuu

SEQ ID NO: 2124607 - RNA, 19 nt, Homo sapiens
  misc_RNA (1)...(19): siRNA sense strand
ggaaauucauagcaacauc

SEQ ID NO: 2124608 - RNA, 19 nt, Homo sapiens
  misc_RNA (1)...(19): siRNA sense strand
gaucugagggccacuaaau

SEQ ID NO: 2124609 - RNA, 19 nt, Homo sapiens
  misc_RNA (1)...(19): siRNA sense strand
gggccucgcugaaccaguu

SEQ ID NO: 2124610 - RNA, 19 nt, Homo sapiens
  misc_RNA (1)...(19): siRNA sense strand
ggagaucuuugccauugau

SEQ ID NO: 2124611 - RNA, 19 nt, Homo sapiens
  misc_RNA (1)...(19): siRNA sense strand
ggaagaggccaagcugaaa

SEQ ID NO: 2124612 - RNA, 19 nt, Homo sapiens
  misc_RNA (1)...(19): siRNA sense strand
guccagauaucaccggauu

SEQ ID NO: 2124613 - RNA, 19 nt, Homo sapiens
  misc_RNA (1)...(19): siRNA sense strand
gcaggaccuuuauuguuuc

SEQ ID NO: 2124614 - RNA, 19 nt, Homo sapiens
  misc_RNA (1)...(19): siRNA sense strand
cgaccgauuuaacuucauu

SEQ ID NO: 2124615 - RNA, 19 nt, Homo sapiens
  misc_RNA (1)...(19): siRNA sense strand
ggaaauggaggcugaaagg

SEQ ID NO: 2124616 - RNA, 19 nt, Homo sapiens
  misc_RNA (1)...(19): siRNA sense strand
gagggccacuaaaugugua

SEQ ID NO: 2124617 - RNA, 19 nt, Homo sapiens
  misc_RNA (1)...(19): siRNA sense strand
caucuuccaugcuccgaaa

SEQ ID NO: 2124618 - RNA, 19 nt, Homo sapiens
  misc_RNA (1)...(19): siRNA sense strand
gcuuggaucccuccucuuu

SEQ ID NO: 2124619 - RNA, 19 nt, Homo sapiens
  misc_RNA (1)...(19): siRNA sense strand
cuaaauguguaaggcagua

SEQ ID NO: 2124620 - RNA, 19 nt, Homo sapiens
  misc_RNA (1)...(19): siRNA sense strand
aagaacauccugcagaauu

SEQ ID NO: 2124621 - RNA, 19 nt, Homo sapiens
  misc_RNA (1)...(19): siRNA sense strand
gaaggucacgugaaugagu

SEQ ID NO: 2124622 - RNA, 19 nt, Homo sapiens
  misc_RNA (1)...(19): siRNA sense strand
agaaugggauuuaaugcau

SEQ ID NO: 2124623 - RNA, 19 nt, Homo sapiens
  misc_RNA (1)...(19): siRNA sense strand
uaccagcagugaugucuug

SEQ ID NO: 2124624 - RNA, 19 nt, Homo sapiens
  misc_RNA (1)...(19): siRNA sense strand
ggacaccagcagucauuug

SEQ ID NO: 2124625 - RNA, 19 nt, Homo sapiens
  misc_RNA (1)...(19): siRNA sense strand
caacagcgaccagcucuuc

SEQ ID NO: 2124626 - RNA, 19 nt, Homo sapiens
  misc_RNA (1)...(19): siRNA sense strand
gugcaaauccuccaagaag

SEQ ID NO: 2124627 - RNA, 19 nt, Homo sapiens
  misc_RNA (1)...(19): siRNA sense strand
ccauugaucugcguuguag

SEQ ID NO: 2124628 - RNA, 19 nt, Homo sapiens
  misc_RNA (1)...(19): siRNA sense strand
guacggcuccuuugcuguu

SEQ ID NO: 2124629 - RNA, 19 nt, Homo sapiens
  misc_RNA (1)...(19): siRNA sense strand
gcaaauccuccaagaagag

SEQ ID NO: 2124630 - RNA, 19 nt, Homo sapiens
  misc_RNA (1)...(19): siRNA sense strand
gcgaccagcucuucguagu

SEQ ID NO: 2124631 - RNA, 19 nt, Homo sapiens
  misc_RNA (1)...(19): siRNA sense strand
gacaccagcagucauuuga

SEQ ID NO: 2124632 - RNA, 19 nt, Homo sapiens
  misc_RNA (1)...(19): siRNA sense strand
gaacauccugcagaauuuc

SEQ ID NO: 2124633 - RNA, 19 nt, Homo sapiens
  misc_RNA (1)...(19): siRNA sense strand
gggagaucuuugccauuga

SEQ ID NO: 2124634 - RNA, 19 nt, Homo sapiens
  misc_RNA (1)...(19): siRNA sense strand
ugaaccaguuggacucuca

SEQ ID NO: 2124635 - RNA, 19 nt, Homo sapiens
  misc_RNA (1)...(19): siRNA sense strand
ccagcuagguuuccucaac

SEQ ID NO: 2124636 - RNA, 19 nt, Homo sapiens
  misc_RNA (1)...(19): siRNA sense strand
cggcaggaccuuuauuguu

SEQ ID NO: 2124637 - RNA, 19 nt, Homo sapiens
  misc_RNA (1)...(19): siRNA sense strand
gaagaacauccugcagaau

SEQ ID NO: 2124638 - RNA, 19 nt, Homo sapiens
  misc_RNA (1)...(19): siRNA sense strand
gaaugaguccgccuaucug

SEQ ID NO: 2124639 - RNA, 19 nt, Homo sapiens
  misc_RNA (1)...(19): siRNA sense strand
gauaucaccggauuucucu

SEQ ID NO: 2124640 - RNA, 19 nt, Homo sapiens
  misc_RNA (1)...(19): siRNA sense strand
gggcauaucacugcuuuag

SEQ ID NO: 2124641 - RNA, 19 nt, Homo sapiens
  misc_RNA (1)...(19): siRNA sense strand
guagccagaaugggauuua

SEQ ID NO: 2124642 - RNA, 19 nt, Homo sapiens
  misc_RNA (1)...(19): siRNA sense strand
ccaguuggacucucacguu

SEQ ID NO: 2124643 - RNA, 19 nt, Homo sapiens
  misc_RNA (1)...(19): siRNA sense strand
gccagaaugggauuuaaug

SEQ ID NO: 2124644 - RNA, 19 nt, Homo sapiens
  misc_RNA (1)...(19): siRNA sense strand
ccagauaucaccggauuuc

SEQ ID NO: 2124645 - RNA, 19 nt, Homo sapiens
  misc_RNA (1)...(19): siRNA sense strand
ugaaugaguccgccuaucu

SEQ ID NO: 2124646 - RNA, 19 nt, Homo sapiens
  misc_RNA (1)...(19): siRNA sense strand
ggggagaucuuugccauug

SEQ ID NO: 2124647 - RNA, 19 nt, Homo sapiens
  misc_RNA (1)...(19): siRNA sense strand
ccgggcauaucacugcuuu

SEQ ID NO: 2124648 - RNA, 19 nt, Homo sapiens
  misc_RNA (1)...(19): siRNA sense strand
uagccagaaugggauuuaa

SEQ ID NO: 2124649 - RNA, 19 nt, Homo sapiens
  misc_RNA (1)...(19): siRNA sense strand
gauccauaguccagauauc

SEQ ID NO: 2124650 - RNA, 19 nt, Homo sapiens
  misc_RNA (1)...(19): siRNA sense strand
gagcgaccgauuuaacuuc

SEQ ID NO: 2124651 - RNA, 19 nt, Homo sapiens
  misc_RNA (1)...(19): siRNA sense strand
cggcuccuuugcuguuuaa

SEQ ID NO: 2124652 - RNA, 19 nt, Homo sapiens
  misc_RNA (1)...(19): siRNA sense strand
caggacugcuacacgagaa

SEQ ID NO: 2124653 - RNA, 19 nt, Homo sapiens
  misc_RNA (1)...(19): siRNA sense strand
ugcaaauccuccaagaaga

SEQ ID NO: 2124654 - RNA, 19 nt, Homo sapiens
  misc_RNA (1)...(19): siRNA sense strand
caccaguuacucccguuua

SEQ ID NO: 2124655 - RNA, 19 nt, Homo sapiens
  misc_RNA (1)...(19): siRNA sense strand
acgaaggucacgugaauga

SEQ ID NO: 2124656 - RNA, 19 nt, Homo sapiens
  misc_RNA (1)...(19): siRNA sense strand
ucgcgguucuuaaguguuc

SEQ ID NO: 2124657 - RNA, 19 nt, Homo sapiens
  misc_RNA (1)...(19): siRNA sense strand
gaagaggccaagcugaaaa

SEQ ID NO: 2124658 - RNA, 19 nt, Homo sapiens
  misc_RNA (1)...(19): siRNA sense strand
guuggacucucacguucug

SEQ ID NO: 2124659 - RNA, 19 nt, Homo sapiens
  misc_RNA (1)...(19): siRNA sense strand
ugucuuggcccagcaguuu

SEQ ID NO: 2124660 - RNA, 19 nt, Homo sapiens
  misc_RNA (1)...(19): siRNA sense strand
gcgucgcgguucuuaagug

SEQ ID NO: 2124661 - RNA, 19 nt, Homo sapiens
  misc_RNA (1)...(19): siRNA sense strand
uccucaacgucaccaguua

SEQ ID NO: 2124662 - RNA, 19 nt, Homo sapiens
  misc_RNA (1)...(19): siRNA sense strand
gacaugacuggaaagauca

SEQ ID NO: 2124663 - RNA, 19 nt, Homo sapiens
  misc_RNA (1)...(19): siRNA sense strand
gcaucagacaugacuggaa

SEQ ID NO: 2124664 - RNA, 19 nt, Homo sapiens
  misc_RNA (1)...(19): siRNA sense strand
acucagcagugaccucugu

SEQ ID NO: 2124665 - RNA, 19 nt, Homo sapiens
  misc_RNA (1)...(19): siRNA sense strand
gaggaaauggaggcugaaa

SEQ ID NO: 2124666 - RNA, 19 nt, Homo sapiens
  misc_RNA (1)...(19): siRNA sense strand
ucaccggauuucucuguag

SEQ ID NO: 2124667 - RNA, 19 nt, Homo sapiens
  misc_RNA (1)...(19): siRNA sense strand
cagaaugggauuuaaugca

SEQ ID NO: 2124668 - RNA, 19 nt, Homo sapiens
  misc_RNA (1)...(19): siRNA sense strand
caggauccauaguccagau

SEQ ID NO: 2124669 - RNA, 19 nt, Homo sapiens
  misc_RNA (1)...(19): siRNA sense strand
cuccuuugcuguuuaaugg

SEQ ID NO: 2124670 - RNA, 19 nt, Homo sapiens
  misc_RNA (1)...(19): siRNA sense strand
gcacgaggaagagggaauc

SEQ ID NO: 2124671 - RNA, 19 nt, Homo sapiens
  misc_RNA (1)...(19): siRNA sense strand
ucugagggccacuaaaugu

SEQ ID NO: 2124672 - RNA, 19 nt, Homo sapiens
  misc_RNA (1)...(19): siRNA sense strand
gccauugaucugcguugua

SEQ ID NO: 2124673 - RNA, 19 nt, Homo sapiens
  misc_RNA (1)...(19): siRNA sense strand
cagcgaccagcucuucgua

SEQ ID NO: 2124674 - RNA, 19 nt, Homo sapiens
  misc_RNA (1)...(19): siRNA sense strand
aggaagaggccaagcugaa

SEQ ID NO: 2124675 - RNA, 19 nt, Homo sapiens
  misc_RNA (1)...(19): siRNA sense strand
ugaucugcguuguagaaau

SEQ ID NO: 2124676 - RNA, 19 nt, Homo sapiens
  misc_RNA (1)...(19): siRNA sense strand
uuccaugacucagcaguga

SEQ ID NO: 2124677 - RNA, 19 nt, Homo sapiens
  misc_RNA (1)...(19): siRNA sense strand
ucccuucguuccacgugua

SEQ ID NO: 2124678 - RNA, 19 nt, Homo sapiens
  misc_RNA (1)...(19): siRNA sense strand
ggcaugcucugcaguuucc

SEQ ID NO: 2124679 - RNA, 19 nt, Homo sapiens
  misc_RNA (1)...(19): siRNA sense strand
cgucgcgguucuuaagugu

SEQ ID NO: 2124680 - RNA, 19 nt, Homo sapiens
  misc_RNA (1)...(19): siRNA sense strand
cagcgucgcgguucuuaag

SEQ ID NO: 2124681 - RNA, 19 nt, Homo sapiens
  misc_RNA (1)...(19): siRNA sense strand
ggauccauaguccagauau

SEQ ID NO: 2124682 - RNA, 19 nt, Homo sapiens
  misc_RNA (1)...(19): siRNA sense strand
gccaacgagcugcguguga

SEQ ID NO: 2124683 - RNA, 19 nt, Homo sapiens
  misc_RNA (1)...(19): siRNA sense strand
gggaucugagggccacuaa

SEQ ID NO: 2124684 - RNA, 19 nt, Homo sapiens
  misc_RNA (1)...(19): siRNA sense strand
gcuccuuugcuguuuaaug

SEQ ID NO: 2124685 - RNA, 19 nt, Homo sapiens
  misc_RNA (1)...(19): siRNA sense strand
cgggacaccagcagucauu

SEQ ID NO: 2124686 - RNA, 19 nt, Homo sapiens
  misc_RNA (1)...(19): siRNA sense strand
gaagucgaaggcuccaagu

SEQ ID NO: 2124687 - RNA, 19 nt, Homo sapiens
  misc_RNA (1)...(19): siRNA sense strand
cgagcgaccgauuuaacuu

SEQ ID NO: 2124688 - RNA, 19 nt, Homo sapiens
  misc_RNA (1)...(19): siRNA sense strand
caccggauuucucuguagu

SEQ ID NO: 2124689 - RNA, 19 nt, Homo sapiens
  misc_RNA (1)...(19): siRNA sense strand
gaugcccaccugcucagaa

SEQ ID NO: 2124690 - RNA, 19 nt, Homo sapiens
  misc_RNA (1)...(19): siRNA sense strand
gaagaagccagucaaauua

SEQ ID NO: 2124691 - RNA, 19 nt, Homo sapiens
  misc_RNA (1)...(19): siRNA sense strand
ggauaagccuuuggaauua

SEQ ID NO: 2124692 - RNA, 19 nt, Homo sapiens
  misc_RNA (1)...(19): siRNA sense strand
ggaagaaauuuacacagua

SEQ ID NO: 2124693 - RNA, 19 nt, Homo sapiens
  misc_RNA (1)...(19): siRNA sense strand
ggaagaagccagucaaauu

SEQ ID NO: 2124694 - RNA, 19 nt, Homo sapiens
  misc_RNA (1)...(19): siRNA sense strand
aaacauaacuggagaagau

SEQ ID NO: 2124695 - RNA, 19 nt, Homo sapiens
  misc_RNA (1)...(19): siRNA sense strand
gcaaggaagcagugaauua

SEQ ID NO: 2124696 - RNA, 19 nt, Homo sapiens
  misc_RNA (1)...(19): siRNA sense strand
gcagaaagauagcucaguu

SEQ ID NO: 2124697 - RNA, 19 nt, Homo sapiens
  misc_RNA (1)...(19): siRNA sense strand
caaaugaagucaaccuauu

SEQ ID NO: 2124698 - RNA, 19 nt, Homo sapiens
  misc_RNA (1)...(19): siRNA sense strand
gaaacacacaggcauauuu

SEQ ID NO: 2124699 - RNA, 19 nt, Homo sapiens
  misc_RNA (1)...(19): siRNA sense strand
gaagaaauuuacacaguag

SEQ ID NO: 2124700 - RNA, 19 nt, Homo sapiens
  misc_RNA (1)...(19): siRNA sense strand
caaaggcaauguccucaaa

SEQ ID NO: 2124701 - RNA, 19 nt, Homo sapiens
  misc_RNA (1)...(19): siRNA sense strand
ccaaacagccugaugcuaa

SEQ ID NO: 2124702 - RNA, 19 nt, Homo sapiens
  misc_RNA (1)...(19): siRNA sense strand
gaaccuagccgcugucuca

SEQ ID NO: 2124703 - RNA, 19 nt, Homo sapiens
  misc_RNA (1)...(19): siRNA sense strand
ggacuaacaacacuaauga

SEQ ID NO: 2124704 - RNA, 19 nt, Homo sapiens
  misc_RNA (1)...(19): siRNA sense strand
gggauaagccuuuggaauu

SEQ ID NO: 2124705 - RNA, 19 nt, Homo sapiens
  misc_RNA (1)...(19): siRNA sense strand
caaaggacccgcugcagua

SEQ ID NO: 2124706 - RNA, 19 nt, Homo sapiens
  misc_RNA (1)...(19): siRNA sense strand
ugaagcaccugucagcaua

SEQ ID NO: 2124707 - RNA, 19 nt, Homo sapiens
  misc_RNA (1)...(19): siRNA sense strand
uggaauagcucaacgucua

SEQ ID NO: 2124708 - RNA, 19 nt, Homo sapiens
  misc_RNA (1)...(19): siRNA sense strand
cagcauaccuugcagugaa

SEQ ID NO: 2124709 - RNA, 19 nt, Homo sapiens
  misc_RNA (1)...(19): siRNA sense strand
cgacucauguuggaaauaa

SEQ ID NO: 2124710 - RNA, 19 nt, Homo sapiens
  misc_RNA (1)...(19): siRNA sense strand
gauaagccuuuggaauuaa

SEQ ID NO: 2124711 - RNA, 19 nt, Homo sapiens
  misc_RNA (1)...(19): siRNA sense strand
cagauuuccucucaacaua

SEQ ID NO: 2124712 - RNA, 19 nt, Homo sapiens
  misc_RNA (1)...(19): siRNA sense strand
gaacguauggugaaagaga

SEQ ID NO: 2124713 - RNA, 19 nt, Homo sapiens
  misc_RNA (1)...(19): siRNA sense strand
ggaagcagugaauuaaaua

SEQ ID NO: 2124714 - RNA, 19 nt, Homo sapiens
  misc_RNA (1)...(19): siRNA sense strand
aaagugguuuccucuaaua

SEQ ID NO: 2124715 - RNA, 19 nt, Homo sapiens
  misc_RNA (1)...(19): siRNA sense strand
gaaaaugacuuggaaucua

SEQ ID NO: 2124716 - RNA, 19 nt, Homo sapiens
  misc_RNA (1)...(19): siRNA sense strand
acacaggcauauuuccuua

SEQ ID NO: 2124717 - RNA, 19 nt, Homo sapiens
  misc_RNA (1)...(19): siRNA sense strand
gaaaucaacgugucacuca

SEQ ID NO: 2124718 - RNA, 19 nt, Homo sapiens
  misc_RNA (1)...(19): siRNA sense strand
ccagucaucucaucaguau

SEQ ID NO: 2124719 - RNA, 19 nt, Homo sapiens
  misc_RNA (1)...(19): siRNA sense strand
cggaaacaauugaggauuu

SEQ ID NO: 2124720 - RNA, 19 nt, Homo sapiens
  misc_RNA (1)...(19): siRNA sense strand
gcuauacacuacacacuug

SEQ ID NO: 2124721 - RNA, 19 nt, Homo sapiens
  misc_RNA (1)...(19): siRNA sense strand
gcagauggcaguaauagga

SEQ ID NO: 2124722 - RNA, 19 nt, Homo sapiens
  misc_RNA (1)...(19): siRNA sense strand
gcaggaagauaaccagaca

SEQ ID NO: 2124723 - RNA, 19 nt, Homo sapiens
  misc_RNA (1)...(19): siRNA sense strand
ggagguaauucugaacgua

SEQ ID NO: 2124724 - RNA, 19 nt, Homo sapiens
  misc_RNA (1)...(19): siRNA sense strand
ggacagcagcuauacacua

SEQ ID NO: 2124725 - RNA, 19 nt, Homo sapiens
  misc_RNA (1)...(19): siRNA sense strand
caaggaagcagugaauuaa

SEQ ID NO: 2124726 - RNA, 19 nt, Homo sapiens
  misc_RNA (1)...(19): siRNA sense strand
gcaauguccucaaaguugu

SEQ ID NO: 2124727 - RNA, 19 nt, Homo sapiens
  misc_RNA (1)...(19): siRNA sense strand
gcagcuacauuucguauac

SEQ ID NO: 2124728 - RNA, 19 nt, Homo sapiens
  misc_RNA (1)...(19): siRNA sense strand
caacaaauauauccacacu

SEQ ID NO: 2124729 - RNA, 19 nt, Homo sapiens
  misc_RNA (1)...(19): siRNA sense strand
gguaugccauugacaguug

SEQ ID NO: 2124730 - RNA, 19 nt, Homo sapiens
  misc_RNA (1)...(19): siRNA sense strand
gcaaggcaacuaagacuga

SEQ ID NO: 2124731 - RNA, 19 nt, Homo sapiens
  misc_RNA (1)...(19): siRNA sense strand
aaacuggccucuuguaugg

SEQ ID NO: 2124732 - RNA, 19 nt, Homo sapiens
  misc_RNA (1)...(19): siRNA sense strand
gugcagcuccucccaauuu

SEQ ID NO: 2124733 - RNA, 19 nt, Homo sapiens
  misc_RNA (1)...(19): siRNA sense strand
ugagaaugcccacaucaua

SEQ ID NO: 2124734 - RNA, 19 nt, Homo sapiens
  misc_RNA (1)...(19): siRNA sense strand
gaaaguggaagaaauuuac

SEQ ID NO: 2124735 - RNA, 19 nt, Homo sapiens
  misc_RNA (1)...(19): siRNA sense strand
ggaaggacgguauguaugu

SEQ ID NO: 2124736 - RNA, 19 nt, Homo sapiens
  misc_RNA (1)...(19): siRNA sense strand
auagacagcuuacucauca

SEQ ID NO: 2124737 - RNA, 19 nt, Homo sapiens
  misc_RNA (1)...(19): siRNA sense strand
auauaaagcugcuguuugu

SEQ ID NO: 2124738 - RNA, 19 nt, Homo sapiens
  misc_RNA (1)...(19): siRNA sense strand
gaaaauaauugccuugaag

SEQ ID NO: 2124739 - RNA, 19 nt, Homo sapiens
  misc_RNA (1)...(19): siRNA sense strand
caaacagccugaugcuaau

SEQ ID NO: 2124740 - RNA, 19 nt, Homo sapiens
  misc_RNA (1)...(19): siRNA sense strand
caaguucugucaauagcaa

SEQ ID NO: 2124741 - RNA, 19 nt, Homo sapiens
  misc_RNA (1)...(19): siRNA sense strand
ggagacugcuuuccagaag

SEQ ID NO: 2124742 - RNA, 19 nt, Homo sapiens
  misc_RNA (1)...(19): siRNA sense strand
cauaauuccuugaccaugu

SEQ ID NO: 2124743 - RNA, 19 nt, Homo sapiens
  misc_RNA (1)...(19): siRNA sense strand
uaaaagugguuuccucuaa

SEQ ID NO: 2124744 - RNA, 19 nt, Homo sapiens
  misc_RNA (1)...(19): siRNA sense strand
gcagugaauuaaauaagca

SEQ ID NO: 2124745 - RNA, 19 nt, Homo sapiens
  misc_RNA (1)...(19): siRNA sense strand
gugggaagccgucaucuuu

SEQ ID NO: 2124746 - RNA, 19 nt, Homo sapiens
  misc_RNA (1)...(19): siRNA sense strand
gaacuguugcgcagaaaga

SEQ ID NO: 2124747 - RNA, 19 nt, Homo sapiens
  misc_RNA (1)...(19): siRNA sense strand
gaagagaguacaugaaagg

SEQ ID NO: 2124748 - RNA, 19 nt, Homo sapiens
  misc_RNA (1)...(19): siRNA sense strand
gcugaaaguggaagaaauu

SEQ ID NO: 2124749 - RNA, 19 nt, Homo sapiens
  misc_RNA (1)...(19): siRNA sense strand
gaaagagaaggguucaaau

SEQ ID NO: 2124750 - RNA, 19 nt, Homo sapiens
  misc_RNA (1)...(19): siRNA sense strand
cagaccaacugucagguuu

SEQ ID NO: 2124751 - RNA, 19 nt, Homo sapiens
  misc_RNA (1)...(19): siRNA sense strand
guugauagaugugaagguu

SEQ ID NO: 2124752 - RNA, 19 nt, Homo sapiens
  misc_RNA (1)...(19): siRNA sense strand
cauagaggcuacaugugaa

SEQ ID NO: 2124753 - RNA, 19 nt, Homo sapiens
  misc_RNA (1)...(19): siRNA sense strand
gcuuacucaucaacaaaua

SEQ ID NO: 2124754 - RNA, 19 nt, Homo sapiens
  misc_RNA (1)...(19): siRNA sense strand
ugacuauggugcuauuaga

SEQ ID NO: 2124755 - RNA, 19 nt, Homo sapiens
  misc_RNA (1)...(19): siRNA sense strand
aaaggcaaaugauguugaa

SEQ ID NO: 2124756 - RNA, 19 nt, Homo sapiens
  misc_RNA (1)...(19): siRNA sense strand
guagcaccauccauagaaa

SEQ ID NO: 2124757 - RNA, 19 nt, Homo sapiens
  misc_RNA (1)...(19): siRNA sense strand
gaaagauagcucaguuaau

SEQ ID NO: 2124758 - RNA, 19 nt, Homo sapiens
  misc_RNA (1)...(19): siRNA sense strand
gaaaggacuaacaacacua

SEQ ID NO: 2124759 - RNA, 19 nt, Homo sapiens
  misc_RNA (1)...(19): siRNA sense strand
gcaaaaguguucacaagau

SEQ ID NO: 2124760 - RNA, 19 nt, Homo sapiens
  misc_RNA (1)...(19): siRNA sense strand
gaagugaccaaugugauga

SEQ ID NO: 2124761 - RNA, 19 nt, Homo sapiens
  misc_RNA (1)...(19): siRNA sense strand
gcacaucgucgcucuguag

SEQ ID NO: 2124762 - RNA, 19 nt, Homo sapiens
  misc_RNA (1)...(19): siRNA sense strand
uaauggagguaauucugaa

SEQ ID NO: 2124763 - RNA, 19 nt, Homo sapiens
  misc_RNA (1)...(19): siRNA sense strand
cauauuuccuuaucagugu

SEQ ID NO: 2124764 - RNA, 19 nt, Homo sapiens
  misc_RNA (1)...(19): siRNA sense strand
gacagcagcuauacacuac

SEQ ID NO: 2124765 - RNA, 19 nt, Homo sapiens
  misc_RNA (1)...(19): siRNA sense strand
aaaugucgauucucuacaa

SEQ ID NO: 2124766 - RNA, 19 nt, Homo sapiens
  misc_RNA (1)...(19): siRNA sense strand
cacagcagcuuguucugaa

SEQ ID NO: 2124767 - RNA, 19 nt, Homo sapiens
  misc_RNA (1)...(19): siRNA sense strand
ggcaauguccucaaaguug

SEQ ID NO: 2124768 - RNA, 19 nt, Homo sapiens
  misc_RNA (1)...(19): siRNA sense strand
guacacuuauccaggaaga

SEQ ID NO: 2124769 - RNA, 19 nt, Homo sapiens
  misc_RNA (1)...(19): siRNA sense strand
ucauagaggcuacauguga

SEQ ID NO: 2124770 - RNA, 19 nt, Homo sapiens
  misc_RNA (1)...(19): siRNA sense strand
guucuuaauuccucugaga

SEQ ID NO: 2124771 - RNA, 19 nt, Homo sapiens
  misc_RNA (1)...(19): siRNA sense strand
agaaagauagcucaguuaa

SEQ ID NO: 2124772 - RNA, 19 nt, Homo sapiens
  misc_RNA (1)...(19): siRNA sense strand
aaagucaauugaacuguug

SEQ ID NO: 2124773 - RNA, 19 nt, Homo sapiens
  misc_RNA (1)...(19): siRNA sense strand
ggaauagcucaacgucuaa

SEQ ID NO: 2124774 - RNA, 19 nt, Homo sapiens
  misc_RNA (1)...(19): siRNA sense strand
gcaaauuuaagguaaggaa

SEQ ID NO: 2124775 - RNA, 19 nt, Homo sapiens
  misc_RNA (1)...(19): siRNA sense strand
gauagaagcaacuagagau

SEQ ID NO: 2124776 - RNA, 19 nt, Homo sapiens
  misc_RNA (1)...(19): siRNA sense strand
caucaaagggaacuucaaa

SEQ ID NO: 2124777 - RNA, 19 nt, Homo sapiens
  misc_RNA (1)...(19): siRNA sense strand
caaguaaagucaauauucc

SEQ ID NO: 2124778 - RNA, 19 nt, Homo sapiens
  misc_RNA (1)...(19): siRNA sense strand
ucucuagcaucuguauuua

SEQ ID NO: 2124779 - RNA, 19 nt, Homo sapiens
  misc_RNA (1)...(19): siRNA sense strand
gaaccaaaggaauaccaaa

SEQ ID NO: 2124780 - RNA, 19 nt, Homo sapiens
  misc_RNA (1)...(19): siRNA sense strand
guuguuaccugaaccaaag

SEQ ID NO: 2124781 - RNA, 19 nt, Homo sapiens
  misc_RNA (1)...(19): siRNA sense strand
caacggcauuugauagaag

SEQ ID NO: 2124782 - RNA, 19 nt, Homo sapiens
  misc_RNA (1)...(19): siRNA sense strand
agaagccagucaaauuaaa

SEQ ID NO: 2124783 - RNA, 19 nt, Homo sapiens
  misc_RNA (1)...(19): siRNA sense strand
ccaaugugaugaagguaau

SEQ ID NO: 2124784 - RNA, 19 nt, Homo sapiens
  misc_RNA (1)...(19): siRNA sense strand
gauguggacucgccagaag

SEQ ID NO: 2124785 - RNA, 19 nt, Homo sapiens
  misc_RNA (1)...(19): siRNA sense strand
gagaaugcccacaucauag

SEQ ID NO: 2124786 - RNA, 19 nt, Homo sapiens
  misc_RNA (1)...(19): siRNA sense strand
ucagaaaccuccgaaugau

SEQ ID NO: 2124787 - RNA, 19 nt, Homo sapiens
  misc_RNA (1)...(19): siRNA sense strand
caacauaagagugaguauu

SEQ ID NO: 2124788 - RNA, 19 nt, Homo sapiens
  misc_RNA (1)...(19): siRNA sense strand
uggaagaaauuuacacagu

SEQ ID NO: 2124789 - RNA, 19 nt, Homo sapiens
  misc_RNA (1)...(19): siRNA sense strand
caucagacggcaucaugua

SEQ ID NO: 2124790 - RNA, 19 nt, Homo sapiens
  misc_RNA (1)...(19): siRNA sense strand
ggacaaaccaguucaaaua

SEQ ID NO: 2124791 - RNA, 19 nt, Homo sapiens
  misc_RNA (1)...(19): siRNA sense strand
ucacuugccugcaguauua

SEQ ID NO: 2124792 - RNA, 19 nt, Homo sapiens
  misc_RNA (1)...(19): siRNA sense strand
gaacagacaacaauaguaa

SEQ ID NO: 2124793 - RNA, 19 nt, Homo sapiens
  misc_RNA (1)...(19): siRNA sense strand
gaugauggcuugcuugaug

SEQ ID NO: 2124794 - RNA, 19 nt, Homo sapiens
  misc_RNA (1)...(19): siRNA sense strand
uaaauucacccaccuguua

SEQ ID NO: 2124795 - RNA, 19 nt, Homo sapiens
  misc_RNA (1)...(19): siRNA sense strand
gacaaucuguugauguuaa

SEQ ID NO: 2124796 - RNA, 19 nt, Homo sapiens
  misc_RNA (1)...(19): siRNA sense strand
aaucagauaucuccauuga

SEQ ID NO: 2124797 - RNA, 19 nt, Homo sapiens
  misc_RNA (1)...(19): siRNA sense strand
ucagauaucuccauugaag

SEQ ID NO: 2124798 - RNA, 19 nt, Homo sapiens
  misc_RNA (1)...(19): siRNA sense strand
gaaauuuacucgcucaacu

SEQ ID NO: 2124799 - RNA, 19 nt, Homo sapiens
  misc_RNA (1)...(19): siRNA sense strand
gcagaaagcaaguccuauu

SEQ ID NO: 2124800 - RNA, 19 nt, Homo sapiens
  misc_RNA (1)...(19): siRNA sense strand
gaagaugaaauaacugcua

SEQ ID NO: 2124801 - RNA, 19 nt, Homo sapiens
  misc_RNA (1)...(19): siRNA sense strand
gaagauaauguguucagaa

SEQ ID NO: 2124802 - RNA, 19 nt, Homo sapiens
  misc_RNA (1)...(19): siRNA sense strand
ucaaauacguccuuggaau

SEQ ID NO: 2124803 - RNA, 19 nt, Homo sapiens
  misc_RNA (1)...(19): siRNA sense strand
guaguagauuggccucaua

SEQ ID NO: 2124804 - RNA, 19 nt, Homo sapiens
  misc_RNA (1)...(19): siRNA sense strand
ccaccagccucuucugaaa

SEQ ID NO: 2124805 - RNA, 19 nt, Homo sapiens
  misc_RNA (1)...(19): siRNA sense strand
gauugaagauaauguguuc

SEQ ID NO: 2124806 - RNA, 19 nt, Homo sapiens
  misc_RNA (1)...(19): siRNA sense strand
ugaaucagauaucuccauu

SEQ ID NO: 2124807 - RNA, 19 nt, Homo sapiens
  misc_RNA (1)...(19): siRNA sense strand
caaauacguccuuggaauu

SEQ ID NO: 2124808 - RNA, 19 nt, Homo sapiens
  misc_RNA (1)...(19): siRNA sense strand
gaaaauucccuuaucgaua

SEQ ID NO: 2124809 - RNA, 19 nt, Homo sapiens
  misc_RNA (1)...(19): siRNA sense strand
gaauaugcacucuuuggaa

SEQ ID NO: 2124810 - RNA, 19 nt, Homo sapiens
  misc_RNA (1)...(19): siRNA sense strand
uagaauguaugacaguuug

SEQ ID NO: 2124811 - RNA, 19 nt, Homo sapiens
  misc_RNA (1)...(19): siRNA sense strand
gaacugacaaucuguugau

SEQ ID NO: 2124812 - RNA, 19 nt, Homo sapiens
  misc_RNA (1)...(19): siRNA sense strand
guuugaauaugcacucuuu

SEQ ID NO: 2124813 - RNA, 19 nt, Homo sapiens
  misc_RNA (1)...(19): siRNA sense strand
ugauacagauccugagcua

SEQ ID NO: 2124814 - RNA, 19 nt, Homo sapiens
  misc_RNA (1)...(19): siRNA sense strand
gcauggugauauugauaaa

SEQ ID NO: 2124815 - RNA, 19 nt, Homo sapiens
  misc_RNA (1)...(19): siRNA sense strand
aauaugcacucuuuggaaa

SEQ ID NO: 2124816 - RNA, 19 nt, Homo sapiens
  misc_RNA (1)...(19): siRNA sense strand
gaccagaugugugaugaau

SEQ ID NO: 2124817 - RNA, 19 nt, Homo sapiens
  misc_RNA (1)...(19): siRNA sense strand
uggcagagaucaucguaga

SEQ ID NO: 2124818 - RNA, 19 nt, Homo sapiens
  misc_RNA (1)...(19): siRNA sense strand
ggaucgaaguagaauguau

SEQ ID NO: 2124819 - RNA, 19 nt, Homo sapiens
  misc_RNA (1)...(19): siRNA sense strand
cgauugagcuauccacauc

SEQ ID NO: 2124820 - RNA, 19 nt, Homo sapiens
  misc_RNA (1)...(19): siRNA sense strand
ggacgugaguuccauaagc

SEQ ID NO: 2124821 - RNA, 19 nt, Homo sapiens
  misc_RNA (1)...(19): siRNA sense strand
gguaaagccauaugugcua

SEQ ID NO: 2124822 - RNA, 19 nt, Homo sapiens
  misc_RNA (1)...(19): siRNA sense strand
gcgaguugcuuucuccaau

SEQ ID NO: 2124823 - RNA, 19 nt, Homo sapiens
  misc_RNA (1)...(19): siRNA sense strand
cagaaagcaaguccuauuu

SEQ ID NO: 2124824 - RNA, 19 nt, Homo sapiens
  misc_RNA (1)...(19): siRNA sense strand
gaaauaacugcuagcuuca

SEQ ID NO: 2124825 - RNA, 19 nt, Homo sapiens
  misc_RNA (1)...(19): siRNA sense strand
gauguuaaauggucguucu

SEQ ID NO: 2124826 - RNA, 19 nt, Homo sapiens
  misc_RNA (1)...(19): siRNA sense strand
gaacuaugaaucagauauc

SEQ ID NO: 2124827 - RNA, 19 nt, Homo sapiens
  misc_RNA (1)...(19): siRNA sense strand
ugauaaacguguggaggua

SEQ ID NO: 2124828 - RNA, 19 nt, Homo sapiens
  misc_RNA (1)...(19): siRNA sense strand
ggaauuuaagugauaguga

SEQ ID NO: 2124829 - RNA, 19 nt, Homo sapiens
  misc_RNA (1)...(19): siRNA sense strand
ggaaucccaggaacuauga

SEQ ID NO: 2124830 - RNA, 19 nt, Homo sapiens
  misc_RNA (1)...(19): siRNA sense strand
auacagauccugagcuaaa

SEQ ID NO: 2124831 - RNA, 19 nt, Homo sapiens
  misc_RNA (1)...(19): siRNA sense strand
ggaacuugcuaugaucaug

SEQ ID NO: 2124832 - RNA, 19 nt, Homo sapiens
  misc_RNA (1)...(19): siRNA sense strand
ccuuggaauuuaagugaua

SEQ ID NO: 2124833 - RNA, 19 nt, Homo sapiens
  misc_RNA (1)...(19): siRNA sense strand
uaauacacucuuacccuua

SEQ ID NO: 2124834 - RNA, 19 nt, Homo sapiens
  misc_RNA (1)...(19): siRNA sense strand
ccagaugugugaugaaugc

SEQ ID NO: 2124835 - RNA, 19 nt, Homo sapiens
  misc_RNA (1)...(19): siRNA sense strand
ccaaucagcagagcuauau

SEQ ID NO: 2124836 - RNA, 19 nt, Homo sapiens
  misc_RNA (1)...(19): siRNA sense strand
guucuucccucuuuccaau

SEQ ID NO: 2124837 - RNA, 19 nt, Homo sapiens
  misc_RNA (1)...(19): siRNA sense strand
ggaacuaugaaucagauau

SEQ ID NO: 2124838 - RNA, 19 nt, Homo sapiens
  misc_RNA (1)...(19): siRNA sense strand
gaucauggaccggcuguau

SEQ ID NO: 2124839 - RNA, 19 nt, Homo sapiens
  misc_RNA (1)...(19): siRNA sense strand
auacguccuuggaauuuaa

SEQ ID NO: 2124840 - RNA, 19 nt, Homo sapiens
  misc_RNA (1)...(19): siRNA sense strand
cauugaugcuuguauugaa

SEQ ID NO: 2124841 - RNA, 19 nt, Homo sapiens
  misc_RNA (1)...(19): siRNA sense strand
cgaaguagaauguaugaca

SEQ ID NO: 2124842 - RNA, 19 nt, Homo sapiens
  misc_RNA (1)...(19): siRNA sense strand
guguggagguaaagccaua

SEQ ID NO: 2124843 - RNA, 19 nt, Homo sapiens
  misc_RNA (1)...(19): siRNA sense strand
agccauaugugcuagauga

SEQ ID NO: 2124844 - RNA, 19 nt, Homo sapiens
  misc_RNA (1)...(19): siRNA sense strand
cugacaaucuguugauguu

SEQ ID NO: 2124845 - RNA, 19 nt, Homo sapiens
  misc_RNA (1)...(19): siRNA sense strand
uagaugaccagauguguga

SEQ ID NO: 2124846 - RNA, 19 nt, Homo sapiens
  misc_RNA (1)...(19): siRNA sense strand
gagcuauauugcugccauu

SEQ ID NO: 2124847 - RNA, 19 nt, Homo sapiens
  misc_RNA (1)...(19): siRNA sense strand
caaaccaguucaaauacgu

SEQ ID NO: 2124848 - RNA, 19 nt, Homo sapiens
  misc_RNA (1)...(19): siRNA sense strand
caggaacuaugaaucagau

SEQ ID NO: 2124849 - RNA, 19 nt, Homo sapiens
  misc_RNA (1)...(19): siRNA sense strand
gaguugcuuucuccaauca

SEQ ID NO: 2124850 - RNA, 19 nt, Homo sapiens
  misc_RNA (1)...(19): siRNA sense strand
cuccagauauugaugaaga

SEQ ID NO: 2124851 - RNA, 19 nt, Homo sapiens
  misc_RNA (1)...(19): siRNA sense strand
guagaauguaugacaguuu

SEQ ID NO: 2124852 - RNA, 19 nt, Homo sapiens
  misc_RNA (1)...(19): siRNA sense strand
gaucgaaguagaauguaug

SEQ ID NO: 2124853 - RNA, 19 nt, Homo sapiens
  misc_RNA (1)...(19): siRNA sense strand
ugucauagcaccaccgaaa

SEQ ID NO: 2124854 - RNA, 19 nt, Homo sapiens
  misc_RNA (1)...(19): siRNA sense strand
cagaagauuugggccuuug

SEQ ID NO: 2124855 - RNA, 19 nt, Homo sapiens
  misc_RNA (1)...(19): siRNA sense strand
cuaugcauuucuucucuuu

SEQ ID NO: 2124856 - RNA, 19 nt, Homo sapiens
  misc_RNA (1)...(19): siRNA sense strand
cagcauggugauauugaua

SEQ ID NO: 2124857 - RNA, 19 nt, Homo sapiens
  misc_RNA (1)...(19): siRNA sense strand
aauacguccuuggaauuua

SEQ ID NO: 2124858 - RNA, 19 nt, Homo sapiens
  misc_RNA (1)...(19): siRNA sense strand
gauaaacguguggagguaa

SEQ ID NO: 2124859 - RNA, 19 nt, Homo sapiens
  misc_RNA (1)...(19): siRNA sense strand
ggagguaaagccauaugug

SEQ ID NO: 2124860 - RNA, 19 nt, Homo sapiens
  misc_RNA (1)...(19): siRNA sense strand
gaauguaugacaguuugaa

SEQ ID NO: 2124861 - RNA, 19 nt, Homo sapiens
  misc_RNA (1)...(19): siRNA sense strand
cuauauugcugccauuagu

SEQ ID NO: 2124862 - RNA, 19 nt, Homo sapiens
  misc_RNA (1)...(19): siRNA sense strand
gcuguaugguggaguuugu

SEQ ID NO: 2124863 - RNA, 19 nt, Homo sapiens
  misc_RNA (1)...(19): siRNA sense strand
guucaaauacguccuugga

SEQ ID NO: 2124864 - RNA, 19 nt, Homo sapiens
  misc_RNA (1)...(19): siRNA sense strand
acucauugaugcuuguauu

SEQ ID NO: 2124865 - RNA, 19 nt, Homo sapiens
  misc_RNA (1)...(19): siRNA sense strand
aaauggagagcgaauagaa

SEQ ID NO: 2124866 - RNA, 19 nt, Homo sapiens
  misc_RNA (1)...(19): siRNA sense strand
ggaacugacaaucuguuga

SEQ ID NO: 2124867 - RNA, 19 nt, Homo sapiens
  misc_RNA (1)...(19): siRNA sense strand
uaugacaguuugaauaugc

SEQ ID NO: 2124868 - RNA, 19 nt, Homo sapiens
  misc_RNA (1)...(19): siRNA sense strand
cauagcaccaccgaaauuu

SEQ ID NO: 2124869 - RNA, 19 nt, Homo sapiens
  misc_RNA (1)...(19): siRNA sense strand
gcccuacuaucaaggacaa

SEQ ID NO: 2124870 - RNA, 19 nt, Homo sapiens
  misc_RNA (1)...(19): siRNA sense strand
guagauuggccucauaaag

SEQ ID NO: 2124871 - RNA, 19 nt, Homo sapiens
  misc_RNA (1)...(19): siRNA sense strand
ggccuuugguaguagauug

SEQ ID NO: 2124872 - RNA, 19 nt, Homo sapiens
  misc_RNA (1)...(19): siRNA sense strand
ccuuaucgauauuaugaga

SEQ ID NO: 2124873 - RNA, 19 nt, Homo sapiens
  misc_RNA (1)...(19): siRNA sense strand
ggauugaagauaauguguu

SEQ ID NO: 2124874 - RNA, 19 nt, Homo sapiens
  misc_RNA (1)...(19): siRNA sense strand
cuccaucacugacuccaaa

SEQ ID NO: 2124875 - RNA, 19 nt, Homo sapiens
  misc_RNA (1)...(19): siRNA sense strand
guaugacaguuugaauaug

SEQ ID NO: 2124876 - RNA, 19 nt, Homo sapiens
  misc_RNA (1)...(19): siRNA sense strand
auaaacguguggagguaaa

SEQ ID NO: 2124877 - RNA, 19 nt, Homo sapiens
  misc_RNA (1)...(19): siRNA sense strand
caagaagagagcucaguuc

SEQ ID NO: 2124878 - RNA, 19 nt, Homo sapiens
  misc_RNA (1)...(19): siRNA sense strand
gcuaugcauuucuucucuu

SEQ ID NO: 2124879 - RNA, 19 nt, Homo sapiens
  misc_RNA (1)...(19): siRNA sense strand
ucagaagauuugggccuuu

SEQ ID NO: 2124880 - RNA, 19 nt, Homo sapiens
  misc_RNA (1)...(19): siRNA sense strand
aauaacugcuagcuucaga

SEQ ID NO: 2124881 - RNA, 19 nt, Homo sapiens
  misc_RNA (1)...(19): siRNA sense strand
ccaugaauauaccucaaca

SEQ ID NO: 2124882 - RNA, 19 nt, Homo sapiens
  misc_RNA (1)...(19): siRNA sense strand
ucauagcaccaccgaaauu

SEQ ID NO: 2124883 - RNA, 19 nt, Homo sapiens
  misc_RNA (1)...(19): siRNA sense strand
ggaugguucucagccuuug

SEQ ID NO: 2124884 - RNA, 19 nt, Homo sapiens
  misc_RNA (1)...(19): siRNA sense strand
gaacgcuucucucgaaaag

SEQ ID NO: 2124885 - RNA, 19 nt, Homo sapiens
  misc_RNA (1)...(19): siRNA sense strand
gacaaaccaguucaaauac

SEQ ID NO: 2124886 - RNA, 19 nt, Homo sapiens
  misc_RNA (1)...(19): siRNA sense strand
ucaagaagagagcucaguu

SEQ ID NO: 2124887 - RNA, 19 nt, Homo sapiens
  misc_RNA (1)...(19): siRNA sense strand
gguaguagauuggccucau

SEQ ID NO: 2124888 - RNA, 19 nt, Homo sapiens
  misc_RNA (1)...(19): siRNA sense strand
gcuucagcauggugauauu

SEQ ID NO: 2124889 - RNA, 19 nt, Homo sapiens
  misc_RNA (1)...(19): siRNA sense strand
cauaagccauugguaaagg

SEQ ID NO: 2124890 - RNA, 19 nt, Homo sapiens
  misc_RNA (1)...(19): siRNA sense strand
ggacaaaccaguucaaaua

SEQ ID NO: 2124891 - RNA, 19 nt, Homo sapiens
  misc_RNA (1)...(19): siRNA sense strand
ucacuugccugcaguauua

SEQ ID NO: 2124892 - RNA, 19 nt, Homo sapiens
  misc_RNA (1)...(19): siRNA sense strand
gaacagacaacaauaguaa

SEQ ID NO: 2124893 - RNA, 19 nt, Homo sapiens
  misc_RNA (1)...(19): siRNA sense strand
gaugauggcuugcuugaug

SEQ ID NO: 2124894 - RNA, 19 nt, Homo sapiens
  misc_RNA (1)...(19): siRNA sense strand
uaaauucacccaccuguua

SEQ ID NO: 2124895 - RNA, 19 nt, Homo sapiens
  misc_RNA (1)...(19): siRNA sense strand
gacaaucuguugauguuaa

SEQ ID NO: 2124896 - RNA, 19 nt, Homo sapiens
  misc_RNA (1)...(19): siRNA sense strand
aaucagauaucuccauuga

SEQ ID NO: 2124897 - RNA, 19 nt, Homo sapiens
  misc_RNA (1)...(19): siRNA sense strand
ucagauaucuccauugaag

SEQ ID NO: 2124898 - RNA, 19 nt, Homo sapiens
  misc_RNA (1)...(19): siRNA sense strand
gaaauuuacucgcucaacu

SEQ ID NO: 2124899 - RNA, 19 nt, Homo sapiens
  misc_RNA (1)...(19): siRNA sense strand
gcagaaagcaaguccuauu

SEQ ID NO: 2124900 - RNA, 19 nt, Homo sapiens
  misc_RNA (1)...(19): siRNA sense strand
gaagaugaaauaacugcua

SEQ ID NO: 2124901 - RNA, 19 nt, Homo sapiens
  misc_RNA (1)...(19): siRNA sense strand
gaagauaauguguucagaa

SEQ ID NO: 2124902 - RNA, 19 nt, Homo sapiens
  misc_RNA (1)...(19): siRNA sense strand
ucaaauacguccuuggaau

SEQ ID NO: 2124903 - RNA, 19 nt, Homo sapiens
  misc_RNA (1)...(19): siRNA sense strand
guaguagauuggccucaua

SEQ ID NO: 2124904 - RNA, 19 nt, Homo sapiens
  misc_RNA (1)...(19): siRNA sense strand
ccaccagccucuucugaaa

SEQ ID NO: 2124905 - RNA, 19 nt, Homo sapiens
  misc_RNA (1)...(19): siRNA sense strand
gauugaagauaauguguuc

SEQ ID NO: 2124906 - RNA, 19 nt, Homo sapiens
  misc_RNA (1)...(19): siRNA sense strand
ugaaucagauaucuccauu

SEQ ID NO: 2124907 - RNA, 19 nt, Homo sapiens
  misc_RNA (1)...(19): siRNA sense strand
caaauacguccuuggaauu

SEQ ID NO: 2124908 - RNA, 19 nt, Homo sapiens
  misc_RNA (1)...(19): siRNA sense strand
gaaaauucccuuaucgaua

SEQ ID NO: 2124909 - RNA, 19 nt, Homo sapiens
  misc_RNA (1)...(19): siRNA sense strand
gaauaugcacucuuuggaa

SEQ ID NO: 2124910 - RNA, 19 nt, Homo sapiens
  misc_RNA (1)...(19): siRNA sense strand
uagaauguaugacaguuug

SEQ ID NO: 2124911 - RNA, 19 nt, Homo sapiens
  misc_RNA (1)...(19): siRNA sense strand
gaacugacaaucuguugau

SEQ ID NO: 2124912 - RNA, 19 nt, Homo sapiens
  misc_RNA (1)...(19): siRNA sense strand
guuugaauaugcacucuuu

SEQ ID NO: 2124913 - RNA, 19 nt, Homo sapiens
  misc_RNA (1)...(19): siRNA sense strand
ugauacagauccugagcua

SEQ ID NO: 2124914 - RNA, 19 nt, Homo sapiens
  misc_RNA (1)...(19): siRNA sense strand
gcauggugauauugauaaa

SEQ ID NO: 2124915 - RNA, 19 nt, Homo sapiens
  misc_RNA (1)...(19): siRNA sense strand
aauaugcacucuuuggaaa

SEQ ID NO: 2124916 - RNA, 19 nt, Homo sapiens
  misc_RNA (1)...(19): siRNA sense strand
gaccagaugugugaugaau

SEQ ID NO: 2124917 - RNA, 19 nt, Homo sapiens
  misc_RNA (1)...(19): siRNA sense strand
uggcagagaucaucguaga

SEQ ID NO: 2124918 - RNA, 19 nt, Homo sapiens
  misc_RNA (1)...(19): siRNA sense strand
ggaucgaaguagaauguau

SEQ ID NO: 2124919 - RNA, 19 nt, Homo sapiens
  misc_RNA (1)...(19): siRNA sense strand
cgauugagcuauccacauc

SEQ ID NO: 2124920 - RNA, 19 nt, Homo sapiens
  misc_RNA (1)...(19): siRNA sense strand
ggacgugaguuccauaagc

SEQ ID NO: 2124921 - RNA, 19 nt, Homo sapiens
  misc_RNA (1)...(19): siRNA sense strand
gguaaagccauaugugcua

SEQ ID NO: 2124922 - RNA, 19 nt, Homo sapiens
  misc_RNA (1)...(19): siRNA sense strand
gcgaguugcuuucuccaau

SEQ ID NO: 2124923 - RNA, 19 nt, Homo sapiens
  misc_RNA (1)...(19): siRNA sense strand
cagaaagcaaguccuauuu

SEQ ID NO: 2124924 - RNA, 19 nt, Homo sapiens
  misc_RNA (1)...(19): siRNA sense strand
gaaauaacugcuagcuuca

SEQ ID NO: 2124925 - RNA, 19 nt, Homo sapiens
  misc_RNA (1)...(19): siRNA sense strand
gauguuaaauggucguucu

SEQ ID NO: 2124926 - RNA, 19 nt, Homo sapiens
  misc_RNA (1)...(19): siRNA sense strand
gaacuaugaaucagauauc

SEQ ID NO: 2124927 - RNA, 19 nt, Homo sapiens
  misc_RNA (1)...(19): siRNA sense strand
ugauaaacguguggaggua

SEQ ID NO: 2124928 - RNA, 19 nt, Homo sapiens
  misc_RNA (1)...(19): siRNA sense strand
ggaauuuaagugauaguga

SEQ ID NO: 2124929 - RNA, 19 nt, Homo sapiens
  misc_RNA (1)...(19): siRNA sense strand
ggaaucccaggaacuauga

SEQ ID NO: 2124930 - RNA, 19 nt, Homo sapiens
  misc_RNA (1)...(19): siRNA sense strand
auacagauccugagcuaaa

SEQ ID NO: 2124931 - RNA, 19 nt, Homo sapiens
  misc_RNA (1)...(19): siRNA sense strand
ggaacuugcuaugaucaug

SEQ ID NO: 2124932 - RNA, 19 nt, Homo sapiens
  misc_RNA (1)...(19): siRNA sense strand
ccuuggaauuuaagugaua

SEQ ID NO: 2124933 - RNA, 19 nt, Homo sapiens
  misc_RNA (1)...(19): siRNA sense strand
uaauacacucuuacccuua

SEQ ID NO: 2124934 - RNA, 19 nt, Homo sapiens
  misc_RNA (1)...(19): siRNA sense strand
ccagaugugugaugaaugc

SEQ ID NO: 2124935 - RNA, 19 nt, Homo sapiens
  misc_RNA (1)...(19): siRNA sense strand
ccaaucagcagagcuauau

SEQ ID NO: 2124936 - RNA, 19 nt, Homo sapiens
  misc_RNA (1)...(19): siRNA sense strand
guucuucccucuuuccaau

SEQ ID NO: 2124937 - RNA, 19 nt, Homo sapiens
  misc_RNA (1)...(19): siRNA sense strand
ggaacuaugaaucagauau

SEQ ID NO: 2124938 - RNA, 19 nt, Homo sapiens
  misc_RNA (1)...(19): siRNA sense strand
gaucauggaccggcuguau

SEQ ID NO: 2124939 - RNA, 19 nt, Homo sapiens
  misc_RNA (1)...(19): siRNA sense strand
auacguccuuggaauuuaa

SEQ ID NO: 2124940 - RNA, 19 nt, Homo sapiens
  misc_RNA (1)...(19): siRNA sense strand
cauugaugcuuguauugaa

SEQ ID NO: 2124941 - RNA, 19 nt, Homo sapiens
  misc_RNA (1)...(19): siRNA sense strand
cgaaguagaauguaugaca

SEQ ID NO: 2124942 - RNA, 19 nt, Homo sapiens
  misc_RNA (1)...(19): siRNA sense strand
guguggagguaaagccaua

SEQ ID NO: 2124943 - RNA, 19 nt, Homo sapiens
  misc_RNA (1)...(19): siRNA sense strand
agccauaugugcuagauga

SEQ ID NO: 2124944 - RNA, 19 nt, Homo sapiens
  misc_RNA (1)...(19): siRNA sense strand
cugacaaucuguugauguu

SEQ ID NO: 2124945 - RNA, 19 nt, Homo sapiens
  misc_RNA (1)...(19): siRNA sense strand
uagaugaccagauguguga

SEQ ID NO: 2124946 - RNA, 19 nt, Homo sapiens
  misc_RNA (1)...(19): siRNA sense strand
gagcuauauugcugccauu

SEQ ID NO: 2124947 - RNA, 19 nt, Homo sapiens
  misc_RNA (1)...(19): siRNA sense strand
caaaccaguucaaauacgu

SEQ ID NO: 2124948 - RNA, 19 nt, Homo sapiens
  misc_RNA (1)...(19): siRNA sense strand
caggaacuaugaaucagau

SEQ ID NO: 2124949 - RNA, 19 nt, Homo sapiens
  misc_RNA (1)...(19): siRNA sense strand
gaguugcuuucuccaauca

SEQ ID NO: 2124950 - RNA, 19 nt, Homo sapiens
  misc_RNA (1)...(19): siRNA sense strand
cuccagauauugaugaaga

SEQ ID NO: 2124951 - RNA, 19 nt, Homo sapiens
  misc_RNA (1)...(19): siRNA sense strand
guagaauguaugacaguuu

SEQ ID NO: 2124952 - RNA, 19 nt, Homo sapiens
  misc_RNA (1)...(19): siRNA sense strand
gaucgaaguagaauguaug

SEQ ID NO: 2124953 - RNA, 19 nt, Homo sapiens
  misc_RNA (1)...(19): siRNA sense strand
ugucauagcaccaccgaaa

SEQ ID NO: 2124954 - RNA, 19 nt, Homo sapiens
  misc_RNA (1)...(19): siRNA sense strand
cagaagauuugggccuuug

SEQ ID NO: 2124955 - RNA, 19 nt, Homo sapiens
  misc_RNA (1)...(19): siRNA sense strand
cuaugcauuucuucucuuu

SEQ ID NO: 2124956 - RNA, 19 nt, Homo sapiens
  misc_RNA (1)...(19): siRNA sense strand
cagcauggugauauugaua

SEQ ID NO: 2124957 - RNA, 19 nt, Homo sapiens
  misc_RNA (1)...(19): siRNA sense strand
aauacguccuuggaauuua

SEQ ID NO: 2124958 - RNA, 19 nt, Homo sapiens
  misc_RNA (1)...(19): siRNA sense strand
gauaaacguguggagguaa

SEQ ID NO: 2124959 - RNA, 19 nt, Homo sapiens
  misc_RNA (1)...(19): siRNA sense strand
ggagguaaagccauaugug

SEQ ID NO: 2124960 - RNA, 19 nt, Homo sapiens
  misc_RNA (1)...(19): siRNA sense strand
gaauguaugacaguuugaa

SEQ ID NO: 2124961 - RNA, 19 nt, Homo sapiens
  misc_RNA (1)...(19): siRNA sense strand
cuauauugcugccauuagu

SEQ ID NO: 2124962 - RNA, 19 nt, Homo sapiens
  misc_RNA (1)...(19): siRNA sense strand
gcuguaugguggaguuugu

SEQ ID NO: 2124963 - RNA, 19 nt, Homo sapiens
  misc_RNA (1)...(19): siRNA sense strand
guucaaauacguccuugga

SEQ ID NO: 2124964 - RNA, 19 nt, Homo sapiens
  misc_RNA (1)...(19): siRNA sense strand
acucauugaugcuuguauu

SEQ ID NO: 2124965 - RNA, 19 nt, Homo sapiens
  misc_RNA (1)...(19): siRNA sense strand
aaauggagagcgaauagaa

SEQ ID NO: 2124966 - RNA, 19 nt, Homo sapiens
  misc_RNA (1)...(19): siRNA sense strand
ggaacugacaaucuguuga

SEQ ID NO: 2124967 - RNA, 19 nt, Homo sapiens
  misc_RNA (1)...(19): siRNA sense strand
uaugacaguuugaauaugc

SEQ ID NO: 2124968 - RNA, 19 nt, Homo sapiens
  misc_RNA (1)...(19): siRNA sense strand
cauagcaccaccgaaauuu

SEQ ID NO: 2124969 - RNA, 19 nt, Homo sapiens
  misc_RNA (1)...(19): siRNA sense strand
gcccuacuaucaaggacaa

SEQ ID NO: 2124970 - RNA, 19 nt, Homo sapiens
  misc_RNA (1)...(19): siRNA sense strand
guagauuggccucauaaag

SEQ ID NO: 2124971 - RNA, 19 nt, Homo sapiens
  misc_RNA (1)...(19): siRNA sense strand
ggccuuugguaguagauug

SEQ ID NO: 2124972 - RNA, 19 nt, Homo sapiens
  misc_RNA (1)...(19): siRNA sense strand
ccuuaucgauauuaugaga

SEQ ID NO: 2124973 - RNA, 19 nt, Homo sapiens
  misc_RNA (1)...(19): siRNA sense strand
ggauugaagauaauguguu

SEQ ID NO: 2124974 - RNA, 19 nt, Homo sapiens
  misc_RNA (1)...(19): siRNA sense strand
cuccaucacugacuccaaa

SEQ ID NO: 2124975 - RNA, 19 nt, Homo sapiens
  misc_RNA (1)...(19): siRNA sense strand
guaugacaguuugaauaug

SEQ ID NO: 2124976 - RNA, 19 nt, Homo sapiens
  misc_RNA (1)...(19): siRNA sense strand
auaaacguguggagguaaa

SEQ ID NO: 2124977 - RNA, 19 nt, Homo sapiens
  misc_RNA (1)...(19): siRNA sense strand
caagaagagagcucaguuc

SEQ ID NO: 2124978 - RNA, 19 nt, Homo sapiens
  misc_RNA (1)...(19): siRNA sense strand
gcuaugcauuucuucucuu

SEQ ID NO: 2124979 - RNA, 19 nt, Homo sapiens
  misc_RNA (1)...(19): siRNA sense strand
ucagaagauuugggccuuu

SEQ ID NO: 2124980 - RNA, 19 nt, Homo sapiens
  misc_RNA (1)...(19): siRNA sense strand
aauaacugcuagcuucaga

SEQ ID NO: 2124981 - RNA, 19 nt, Homo sapiens
  misc_RNA (1)...(19): siRNA sense strand
ccaugaauauaccucaaca

SEQ ID NO: 2124982 - RNA, 19 nt, Homo sapiens
  misc_RNA (1)...(19): siRNA sense strand
ucauagcaccaccgaaauu

SEQ ID NO: 2124983 - RNA, 19 nt, Homo sapiens
  misc_RNA (1)...(19): siRNA sense strand
ggaugguucucagccuuug

SEQ ID NO: 2124984 - RNA, 19 nt, Homo sapiens
  misc_RNA (1)...(19): siRNA sense strand
gaacgcuucucucgaaaag

SEQ ID NO: 2124985 - RNA, 19 nt, Homo sapiens
  misc_RNA (1)...(19): siRNA sense strand
gacaaaccaguucaaauac

SEQ ID NO: 2124986 - RNA, 19 nt, Homo sapiens
  misc_RNA (1)...(19): siRNA sense strand
ucaagaagagagcucaguu

SEQ ID NO: 2124987 - RNA, 19 nt, Homo sapiens
  misc_RNA (1)...(19): siRNA sense strand
gguaguagauuggccucau

SEQ ID NO: 2124988 - RNA, 19 nt, Homo sapiens
  misc_RNA (1)...(19): siRNA sense strand
gcuucagcauggugauauu

SEQ ID NO: 2124989 - RNA, 19 nt, Homo sapiens
  misc_RNA (1)...(19): siRNA sense strand
cauaagccauugguaaagg

SEQ ID NO: 2124990 - RNA, 19 nt, Homo sapiens
  misc_RNA (1)...(19): siRNA sense strand
ggacaaaccaguucaaaua

SEQ ID NO: 2124991 - RNA, 19 nt, Homo sapiens
  misc_RNA (1)...(19): siRNA sense strand
ucacuugccugcaguauua

SEQ ID NO: 2124992 - RNA, 19 nt, Homo sapiens
  misc_RNA (1)...(19): siRNA sense strand
gaacagacaacaauaguaa

SEQ ID NO: 2124993 - RNA, 19 nt, Homo sapiens
  misc_RNA (1)...(19): siRNA sense strand
gaugauggcuugcuugaug

SEQ ID NO: 2124994 - RNA, 19 nt, Homo sapiens
  misc_RNA (1)...(19): siRNA sense strand
uaaauucacccaccuguua

SEQ ID NO: 2124995 - RNA, 19 nt, Homo sapiens
  misc_RNA (1)...(19): siRNA sense strand
gacaaucuguugauguuaa

SEQ ID NO: 2124996 - RNA, 19 nt, Homo sapiens
  misc_RNA (1)...(19): siRNA sense strand
aaucagauaucuccauuga

SEQ ID NO: 2124997 - RNA, 19 nt, Homo sapiens
  misc_RNA (1)...(19): siRNA sense strand
ucagauaucuccauugaag

SEQ ID NO: 2124998 - RNA, 19 nt, Homo sapiens
  misc_RNA (1)...(19): siRNA sense strand
gaaauuuacucgcucaacu

SEQ ID NO: 2124999 - RNA, 19 nt, Homo sapiens
  misc_RNA (1)...(19): siRNA sense strand
gcagaaagcaaguccuauu

SEQ ID NO: 2125000 - RNA, 19 nt, Homo sapiens
  misc_RNA (1)...(19): siRNA sense strand
gaagaugaaauaacugcua

SEQ ID NO: 2125001 - RNA, 19 nt, Homo sapiens
  misc_RNA (1)...(19): siRNA sense strand
gaagauaauguguucagaa

SEQ ID NO: 2125002 - RNA, 19 nt, Homo sapiens
  misc_RNA (1)...(19): siRNA sense strand
ucaaauacguccuuggaau

SEQ ID NO: 2125003 - RNA, 19 nt, Homo sapiens
  misc_RNA (1)...(19): siRNA sense strand
guaguagauuggccucaua

SEQ ID NO: 2125004 - RNA, 19 nt, Homo sapiens
  misc_RNA (1)...(19): siRNA sense strand
ccaccagccucuucugaaa

SEQ ID NO: 2125005 - RNA, 19 nt, Homo sapiens
  misc_RNA (1)...(19): siRNA sense strand
gauugaagauaauguguuc

SEQ ID NO: 2125006 - RNA, 19 nt, Homo sapiens
  misc_RNA (1)...(19): siRNA sense strand
ugaaucagauaucuccauu

SEQ ID NO: 2125007 - RNA, 19 nt, Homo sapiens
  misc_RNA (1)...(19): siRNA sense strand
caaauacguccuuggaauu

SEQ ID NO: 2125008 - RNA, 19 nt, Homo sapiens
  misc_RNA (1)...(19): siRNA sense strand
gaaaauucccuuaucgaua

SEQ ID NO: 2125009 - RNA, 19 nt, Homo sapiens
  misc_RNA (1)...(19): siRNA sense strand
gaauaugcacucuuuggaa

SEQ ID NO: 2125010 - RNA, 19 nt, Homo sapiens
  misc_RNA (1)...(19): siRNA sense strand
uagaauguaugacaguuug

SEQ ID NO: 2125011 - RNA, 19 nt, Homo sapiens
  misc_RNA (1)...(19): siRNA sense strand
gaacugacaaucuguugau

SEQ ID NO: 2125012 - RNA, 19 nt, Homo sapiens
  misc_RNA (1)...(19): siRNA sense strand
guuugaauaugcacucuuu

SEQ ID NO: 2125013 - RNA, 19 nt, Homo sapiens
  misc_RNA (1)...(19): siRNA sense strand
ugauacagauccugagcua

SEQ ID NO: 2125014 - RNA, 19 nt, Homo sapiens
  misc_RNA (1)...(19): siRNA sense strand
gcauggugauauugauaaa

SEQ ID NO: 2125015 - RNA, 19 nt, Homo sapiens
  misc_RNA (1)...(19): siRNA sense strand
aauaugcacucuuuggaaa

SEQ ID NO: 2125016 - RNA, 19 nt, Homo sapiens
  misc_RNA (1)...(19): siRNA sense strand
gaccagaugugugaugaau

SEQ ID NO: 2125017 - RNA, 19 nt, Homo sapiens
  misc_RNA (1)...(19): siRNA sense strand
uggcagagaucaucguaga

SEQ ID NO: 2125018 - RNA, 19 nt, Homo sapiens
  misc_RNA (1)...(19): siRNA sense strand
ggaucgaaguagaauguau

SEQ ID NO: 2125019 - RNA, 19 nt, Homo sapiens
  misc_RNA (1)...(19): siRNA sense strand
cgauugagcuauccacauc

SEQ ID NO: 2125020 - RNA, 19 nt, Homo sapiens
  misc_RNA (1)...(19): siRNA sense strand
ggacgugaguuccauaagc

SEQ ID NO: 2125021 - RNA, 19 nt, Homo sapiens
  misc_RNA (1)...(19): siRNA sense strand
gguaaagccauaugugcua

SEQ ID NO: 2125022 - RNA, 19 nt, Homo sapiens
  misc_RNA (1)...(19): siRNA sense strand
gcgaguugcuuucuccaau

SEQ ID NO: 2125023 - RNA, 19 nt, Homo sapiens
  misc_RNA (1)...(19): siRNA sense strand
cagaaagcaaguccuauuu

SEQ ID NO: 2125024 - RNA, 19 nt, Homo sapiens
  misc_RNA (1)...(19): siRNA sense strand
gaaauaacugcuagcuuca

SEQ ID NO: 2125025 - RNA, 19 nt, Homo sapiens
  misc_RNA (1)...(19): siRNA sense strand
gauguuaaauggucguucu

SEQ ID NO: 2125026 - RNA, 19 nt, Homo sapiens
  misc_RNA (1)...(19): siRNA sense strand
gaacuaugaaucagauauc

SEQ ID NO: 2125027 - RNA, 19 nt, Homo sapiens
  misc_RNA (1)...(19): siRNA sense strand
ugauaaacguguggaggua

SEQ ID NO: 2125028 - RNA, 19 nt, Homo sapiens
  misc_RNA (1)...(19): siRNA sense strand
ggaauuuaagugauaguga

SEQ ID NO: 2125029 - RNA, 19 nt, Homo sapiens
  misc_RNA (1)...(19): siRNA sense strand
ggaaucccaggaacuauga

SEQ ID NO: 2125030 - RNA, 19 nt, Homo sapiens
  misc_RNA (1)...(19): siRNA sense strand
auacagauccugagcuaaa

SEQ ID NO: 2125031 - RNA, 19 nt, Homo sapiens
  misc_RNA (1)...(19): siRNA sense strand
ggaacuugcuaugaucaug

SEQ ID NO: 2125032 - RNA, 19 nt, Homo sapiens
  misc_RNA (1)...(19): siRNA sense strand
ccuuggaauuuaagugaua

SEQ ID NO: 2125033 - RNA, 19 nt, Homo sapiens
  misc_RNA (1)...(19): siRNA sense strand
uaauacacucuuacccuua

SEQ ID NO: 2125034 - RNA, 19 nt, Homo sapiens
  misc_RNA (1)...(19): siRNA sense strand
ccagaugugugaugaaugc

SEQ ID NO: 2125035 - RNA, 19 nt, Homo sapiens
  misc_RNA (1)...(19): siRNA sense strand
ccaaucagcagagcuauau

SEQ ID NO: 2125036 - RNA, 19 nt, Homo sapiens
  misc_RNA (1)...(19): siRNA sense strand
guucuucccucuuuccaau

SEQ ID NO: 2125037 - RNA, 19 nt, Homo sapiens
  misc_RNA (1)...(19): siRNA sense strand
ggaacuaugaaucagauau

SEQ ID NO: 2125038 - RNA, 19 nt, Homo sapiens
  misc_RNA (1)...(19): siRNA sense strand
gaucauggaccggcuguau

SEQ ID NO: 2125039 - RNA, 19 nt, Homo sapiens
  misc_RNA (1)...(19): siRNA sense strand
auacguccuuggaauuuaa

SEQ ID NO: 2125040 - RNA, 19 nt, Homo sapiens
  misc_RNA (1)...(19): siRNA sense strand
cauugaugcuuguauugaa

SEQ ID NO: 2125041 - RNA, 19 nt, Homo sapiens
  misc_RNA (1)...(19): siRNA sense strand
cgaaguagaauguaugaca

SEQ ID NO: 2125042 - RNA, 19 nt, Homo sapiens
  misc_RNA (1)...(19): siRNA sense strand
guguggagguaaagccaua

SEQ ID NO: 2125043 - RNA, 19 nt, Homo sapiens
  misc_RNA (1)...(19): siRNA sense strand
agccauaugugcuagauga

SEQ ID NO: 2125044 - RNA, 19 nt, Homo sapiens
  misc_RNA (1)...(19): siRNA sense strand
cugacaaucuguugauguu

SEQ ID NO: 2125045 - RNA, 19 nt, Homo sapiens
  misc_RNA (1)...(19): siRNA sense strand
uagaugaccagauguguga

SEQ ID NO: 2125046 - RNA, 19 nt, Homo sapiens
  misc_RNA (1)...(19): siRNA sense strand
gagcuauauugcugccauu

SEQ ID NO: 2125047 - RNA, 19 nt, Homo sapiens
  misc_RNA (1)...(19): siRNA sense strand
caaaccaguucaaauacgu

SEQ ID NO: 2125048 - RNA, 19 nt, Homo sapiens
  misc_RNA (1)...(19): siRNA sense strand
caggaacuaugaaucagau

SEQ ID NO: 2125049 - RNA, 19 nt, Homo sapiens
  misc_RNA (1)...(19): siRNA sense strand
gaguugcuuucuccaauca

SEQ ID NO: 2125050 - RNA, 19 nt, Homo sapiens
  misc_RNA (1)...(19): siRNA sense strand
cuccagauauugaugaaga

SEQ ID NO: 2125051 - RNA, 19 nt, Homo sapiens
  misc_RNA (1)...(19): siRNA sense strand
guagaauguaugacaguuu

SEQ ID NO: 2125052 - RNA, 19 nt, Homo sapiens
  misc_RNA (1)...(19): siRNA sense strand
gaucgaaguagaauguaug

SEQ ID NO: 2125053 - RNA, 19 nt, Homo sapiens
  misc_RNA (1)...(19): siRNA sense strand
ugucauagcaccaccgaaa

SEQ ID NO: 2125054 - RNA, 19 nt, Homo sapiens
  misc_RNA (1)...(19): siRNA sense strand
cagaagauuugggccuuug

SEQ ID NO: 2125055 - RNA, 19 nt, Homo sapiens
  misc_RNA (1)...(19): siRNA sense strand
cuaugcauuucuucucuuu

SEQ ID NO: 2125056 - RNA, 19 nt, Homo sapiens
  misc_RNA (1)...(19): siRNA sense strand
cagcauggugauauugaua

SEQ ID NO: 2125057 - RNA, 19 nt, Homo sapiens
  misc_RNA (1)...(19): siRNA sense strand
aauacguccuuggaauuua

SEQ ID NO: 2125058 - RNA, 19 nt, Homo sapiens
  misc_RNA (1)...(19): siRNA sense strand
gauaaacguguggagguaa

SEQ ID NO: 2125059 - RNA, 19 nt, Homo sapiens
  misc_RNA (1)...(19): siRNA sense strand
ggagguaaagccauaugug

SEQ ID NO: 2125060 - RNA, 19 nt, Homo sapiens
  misc_RNA (1)...(19): siRNA sense strand
gaauguaugacaguuugaa

SEQ ID NO: 2125061 - RNA, 19 nt, Homo sapiens
  misc_RNA (1)...(19): siRNA sense strand
cuauauugcugccauuagu

SEQ ID NO: 2125062 - RNA, 19 nt, Homo sapiens
  misc_RNA (1)...(19): siRNA sense strand
gcuguaugguggaguuugu

SEQ ID NO: 2125063 - RNA, 19 nt, Homo sapiens
  misc_RNA (1)...(19): siRNA sense strand
guucaaauacguccuugga

SEQ ID NO: 2125064 - RNA, 19 nt, Homo sapiens
  misc_RNA (1)...(19): siRNA sense strand
acucauugaugcuuguauu

SEQ ID NO: 2125065 - RNA, 19 nt, Homo sapiens
  misc_RNA (1)...(19): siRNA sense strand
aaauggagagcgaauagaa

SEQ ID NO: 2125066 - RNA, 19 nt, Homo sapiens
  misc_RNA (1)...(19): siRNA sense strand
ggaacugacaaucuguuga

SEQ ID NO: 2125067 - RNA, 19 nt, Homo sapiens
  misc_RNA (1)...(19): siRNA sense strand
uaugacaguuugaauaugc

SEQ ID NO: 2125068 - RNA, 19 nt, Homo sapiens
  misc_RNA (1)...(19): siRNA sense strand
cauagcaccaccgaaauuu

SEQ ID NO: 2125069 - RNA, 19 nt, Homo sapiens
  misc_RNA (1)...(19): siRNA sense strand
gcccuacuaucaaggacaa

SEQ ID NO: 2125070 - RNA, 19 nt, Homo sapiens
  misc_RNA (1)...(19): siRNA sense strand
guagauuggccucauaaag

SEQ ID NO: 2125071 - RNA, 19 nt, Homo sapiens
  misc_RNA (1)...(19): siRNA sense strand
ggccuuugguaguagauug

SEQ ID NO: 2125072 - RNA, 19 nt, Homo sapiens
  misc_RNA (1)...(19): siRNA sense strand
ccuuaucgauauuaugaga

SEQ ID NO: 2125073 - RNA, 19 nt, Homo sapiens
  misc_RNA (1)...(19): siRNA sense strand
ggauugaagauaauguguu

SEQ ID NO: 2125074 - RNA, 19 nt, Homo sapiens
  misc_RNA (1)...(19): siRNA sense strand
cuccaucacugacuccaaa

SEQ ID NO: 2125075 - RNA, 19 nt, Homo sapiens
  misc_RNA (1)...(19): siRNA sense strand
guaugacaguuugaauaug

SEQ ID NO: 2125076 - RNA, 19 nt, Homo sapiens
  misc_RNA (1)...(19): siRNA sense strand
auaaacguguggagguaaa

SEQ ID NO: 2125077 - RNA, 19 nt, Homo sapiens
  misc_RNA (1)...(19): siRNA sense strand
caagaagagagcucaguuc

SEQ ID NO: 2125078 - RNA, 19 nt, Homo sapiens
  misc_RNA (1)...(19): siRNA sense strand
gcuaugcauuucuucucuu

SEQ ID NO: 2125079 - RNA, 19 nt, Homo sapiens
  misc_RNA (1)...(19): siRNA sense strand
ucagaagauuugggccuuu

SEQ ID NO: 2125080 - RNA, 19 nt, Homo sapiens
  misc_RNA (1)...(19): siRNA sense strand
aauaacugcuagcuucaga

SEQ ID NO: 2125081 - RNA, 19 nt, Homo sapiens
  misc_RNA (1)...(19): siRNA sense strand
ccaugaauauaccucaaca

SEQ ID NO: 2125082 - RNA, 19 nt, Homo sapiens
  misc_RNA (1)...(19): siRNA sense strand
ucauagcaccaccgaaauu

SEQ ID NO: 2125083 - RNA, 19 nt, Homo sapiens
  misc_RNA (1)...(19): siRNA sense strand
ggaugguucucagccuuug

SEQ ID NO: 2125084 - RNA, 19 nt, Homo sapiens
  misc_RNA (1)...(19): siRNA sense strand
gaacgcuucucucgaaaag

SEQ ID NO: 2125085 - RNA, 19 nt, Homo sapiens
  misc_RNA (1)...(19): siRNA sense strand
gacaaaccaguucaaauac

SEQ ID NO: 2125086 - RNA, 19 nt, Homo sapiens
  misc_RNA (1)...(19): siRNA sense strand
ucaagaagagagcucaguu

SEQ ID NO: 2125087 - RNA, 19 nt, Homo sapiens
  misc_RNA (1)...(19): siRNA sense strand
gguaguagauuggccucau

SEQ ID NO: 2125088 - RNA, 19 nt, Homo sapiens
  misc_RNA (1)...(19): siRNA sense strand
gcuucagcauggugauauu

SEQ ID NO: 2125089 - RNA, 19 nt, Homo sapiens
  misc_RNA (1)...(19): siRNA sense strand
cauaagccauugguaaagg

SEQ ID NO: 2125090 - RNA, 19 nt, Homo sapiens
  misc_RNA (1)...(19): siRNA sense strand
gaacauugcuuaagacuau

SEQ ID NO: 2125091 - RNA, 19 nt, Homo sapiens
  misc_RNA (1)...(19): siRNA sense strand
gagcacaucugaucaauuu

SEQ ID NO: 2125092 - RNA, 19 nt, Homo sapiens
  misc_RNA (1)...(19): siRNA sense strand
ggagcaaggucguuauuua

SEQ ID NO: 2125093 - RNA, 19 nt, Homo sapiens
  misc_RNA (1)...(19): siRNA sense strand
gaacuagaacuuccauuua

SEQ ID NO: 2125094 - RNA, 19 nt, Homo sapiens
  misc_RNA (1)...(19): siRNA sense strand
gaaguugacucccaaaguu

SEQ ID NO: 2125095 - RNA, 19 nt, Homo sapiens
  misc_RNA (1)...(19): siRNA sense strand
gaacaggcuuugcagaauu

SEQ ID NO: 2125096 - RNA, 19 nt, Homo sapiens
  misc_RNA (1)...(19): siRNA sense strand
gauagaacauugcuuaaga

SEQ ID NO: 2125097 - RNA, 19 nt, Homo sapiens
  misc_RNA (1)...(19): siRNA sense strand
gaaguggaguuuagcagua

SEQ ID NO: 2125098 - RNA, 19 nt, Homo sapiens
  misc_RNA (1)...(19): siRNA sense strand
ucaggaagaugagaaauua

SEQ ID NO: 2125099 - RNA, 19 nt, Homo sapiens
  misc_RNA (1)...(19): siRNA sense strand
ggaaauggaugaggaagaa

SEQ ID NO: 2125100 - RNA, 19 nt, Homo sapiens
  misc_RNA (1)...(19): siRNA sense strand
gcaguacuauuguguaauu

SEQ ID NO: 2125101 - RNA, 19 nt, Homo sapiens
  misc_RNA (1)...(19): siRNA sense strand
gaaagcagaugaagaagca

SEQ ID NO: 2125102 - RNA, 19 nt, Homo sapiens
  misc_RNA (1)...(19): siRNA sense strand
gagaagauguagaagauga

SEQ ID NO: 2125103 - RNA, 19 nt, Homo sapiens
  misc_RNA (1)...(19): siRNA sense strand
gaaacaagcagcagaagaa

SEQ ID NO: 2125104 - RNA, 19 nt, Homo sapiens
  misc_RNA (1)...(19): siRNA sense strand
gaagugaagccuuuaauug

SEQ ID NO: 2125105 - RNA, 19 nt, Homo sapiens
  misc_RNA (1)...(19): siRNA sense strand
uaagugaacuguuagaaga

SEQ ID NO: 2125106 - RNA, 19 nt, Homo sapiens
  misc_RNA (1)...(19): siRNA sense strand
cacagaagauggaagaaua

SEQ ID NO: 2125107 - RNA, 19 nt, Homo sapiens
  misc_RNA (1)...(19): siRNA sense strand
ggagugcccuucucauuug

SEQ ID NO: 2125108 - RNA, 19 nt, Homo sapiens
  misc_RNA (1)...(19): siRNA sense strand
gaagaugguuuggagauga

SEQ ID NO: 2125109 - RNA, 19 nt, Homo sapiens
  misc_RNA (1)...(19): siRNA sense strand
agaaaggacucaacaagaa

SEQ ID NO: 2125110 - RNA, 19 nt, Homo sapiens
  misc_RNA (1)...(19): siRNA sense strand
gaagaagaaguucccaaua

SEQ ID NO: 2125111 - RNA, 19 nt, Homo sapiens
  misc_RNA (1)...(19): siRNA sense strand
gaaauucgacaaacaagaa

SEQ ID NO: 2125112 - RNA, 19 nt, Homo sapiens
  misc_RNA (1)...(19): siRNA sense strand
gcuccaagcuuuaagaaau

SEQ ID NO: 2125113 - RNA, 19 nt, Homo sapiens
  misc_RNA (1)...(19): siRNA sense strand
gccaagaggugccagaauu

SEQ ID NO: 2125114 - RNA, 19 nt, Homo sapiens
  misc_RNA (1)...(19): siRNA sense strand
gaagggaggauguaaagaa

SEQ ID NO: 2125115 - RNA, 19 nt, Homo sapiens
  misc_RNA (1)...(19): siRNA sense strand
gaaugugccuuaaaguuuc

SEQ ID NO: 2125116 - RNA, 19 nt, Homo sapiens
  misc_RNA (1)...(19): siRNA sense strand
gagaaacgguuacgagaca

SEQ ID NO: 2125117 - RNA, 19 nt, Homo sapiens
  misc_RNA (1)...(19): siRNA sense strand
ugaauuugcuuuagcugua

SEQ ID NO: 2125118 - RNA, 19 nt, Homo sapiens
  misc_RNA (1)...(19): siRNA sense strand
gaaauuacuucaagcaacu

SEQ ID NO: 2125119 - RNA, 19 nt, Homo sapiens
  misc_RNA (1)...(19): siRNA sense strand
gaugagaaauuacuucaag

SEQ ID NO: 2125120 - RNA, 19 nt, Homo sapiens
  misc_RNA (1)...(19): siRNA sense strand
aagaagaaguucccaauau

SEQ ID NO: 2125121 - RNA, 19 nt, Homo sapiens
  misc_RNA (1)...(19): siRNA sense strand
gagcaaggucguuauuuaa

SEQ ID NO: 2125122 - RNA, 19 nt, Homo sapiens
  misc_RNA (1)...(19): siRNA sense strand
agaagaacaugcaguacua

SEQ ID NO: 2125123 - RNA, 19 nt, Homo sapiens
  misc_RNA (1)...(19): siRNA sense strand
ccagaaagcagaugaagaa

SEQ ID NO: 2125124 - RNA, 19 nt, Homo sapiens
  misc_RNA (1)...(19): siRNA sense strand
ucacaugccuuauucugaa

SEQ ID NO: 2125125 - RNA, 19 nt, Homo sapiens
  misc_RNA (1)...(19): siRNA sense strand
gaaagauguuguguucauu

SEQ ID NO: 2125126 - RNA, 19 nt, Homo sapiens
  misc_RNA (1)...(19): siRNA sense strand
gcacagagccagggaaaga

SEQ ID NO: 2125127 - RNA, 19 nt, Homo sapiens
  misc_RNA (1)...(19): siRNA sense strand
gauaguagaagaagaaguu

SEQ ID NO: 2125128 - RNA, 19 nt, Homo sapiens
  misc_RNA (1)...(19): siRNA sense strand
uaaagaagcgcucagugua

SEQ ID NO: 2125129 - RNA, 19 nt, Homo sapiens
  misc_RNA (1)...(19): siRNA sense strand
gaagauggaagaauacaga

SEQ ID NO: 2125130 - RNA, 19 nt, Homo sapiens
  misc_RNA (1)...(19): siRNA sense strand
agaaagaauuggagacuga

SEQ ID NO: 2125131 - RNA, 19 nt, Homo sapiens
  misc_RNA (1)...(19): siRNA sense strand
cgauaugaaucuccacuaa

SEQ ID NO: 2125132 - RNA, 19 nt, Homo sapiens
  misc_RNA (1)...(19): siRNA sense strand
gaagacagccaagaaagaa

SEQ ID NO: 2125133 - RNA, 19 nt, Homo sapiens
  misc_RNA (1)...(19): siRNA sense strand
gacagucccuacauauaaa

SEQ ID NO: 2125134 - RNA, 19 nt, Homo sapiens
  misc_RNA (1)...(19): siRNA sense strand
gaacacauagacacccaua

SEQ ID NO: 2125135 - RNA, 19 nt, Homo sapiens
  misc_RNA (1)...(19): siRNA sense strand
uaucacacguuaucucaaa

SEQ ID NO: 2125136 - RNA, 19 nt, Homo sapiens
  misc_RNA (1)...(19): siRNA sense strand
gccuauaacuucuuuacuu

SEQ ID NO: 2125137 - RNA, 19 nt, Homo sapiens
  misc_RNA (1)...(19): siRNA sense strand
gaacaugcaguacuauugu

SEQ ID NO: 2125138 - RNA, 19 nt, Homo sapiens
  misc_RNA (1)...(19): siRNA sense strand
cacguuaucucaaaccuuu

SEQ ID NO: 2125139 - RNA, 19 nt, Homo sapiens
  misc_RNA (1)...(19): siRNA sense strand
gaagaaguucccaauauca

SEQ ID NO: 2125140 - RNA, 19 nt, Homo sapiens
  misc_RNA (1)...(19): siRNA sense strand
caacuggacauugauauuu

SEQ ID NO: 2125141 - RNA, 19 nt, Homo sapiens
  misc_RNA (1)...(19): siRNA sense strand
caacgaacaguuugccaua

SEQ ID NO: 2125142 - RNA, 19 nt, Homo sapiens
  misc_RNA (1)...(19): siRNA sense strand
gggaaagugucucauagug

SEQ ID NO: 2125143 - RNA, 19 nt, Homo sapiens
  misc_RNA (1)...(19): siRNA sense strand
gaagggcuccuacugaaga

SEQ ID NO: 2125144 - RNA, 19 nt, Homo sapiens
  misc_RNA (1)...(19): siRNA sense strand
gagcggaggucucgagaag

SEQ ID NO: 2125145 - RNA, 19 nt, Homo sapiens
  misc_RNA (1)...(19): siRNA sense strand
gaaaucccuucgagaguuc

SEQ ID NO: 2125146 - RNA, 19 nt, Homo sapiens
  misc_RNA (1)...(19): siRNA sense strand
ugaaugugccuuaaaguuu

SEQ ID NO: 2125147 - RNA, 19 nt, Homo sapiens
  misc_RNA (1)...(19): siRNA sense strand
gaaugaagaacuagaacuu

SEQ ID NO: 2125148 - RNA, 19 nt, Homo sapiens
  misc_RNA (1)...(19): siRNA sense strand
acauaaagcugcuggugaa

SEQ ID NO: 2125149 - RNA, 19 nt, Homo sapiens
  misc_RNA (1)...(19): siRNA sense strand
agucagaccugcagauuau

SEQ ID NO: 2125150 - RNA, 19 nt, Homo sapiens
  misc_RNA (1)...(19): siRNA sense strand
ugcuuuagcuguauacaua

SEQ ID NO: 2125151 - RNA, 19 nt, Homo sapiens
  misc_RNA (1)...(19): siRNA sense strand
gaauaagaacucaaagguu

SEQ ID NO: 2125152 - RNA, 19 nt, Homo sapiens
  misc_RNA (1)...(19): siRNA sense strand
ggagcagacuuccgaguuc

SEQ ID NO: 2125153 - RNA, 19 nt, Homo sapiens
  misc_RNA (1)...(19): siRNA sense strand
guaauuacuuucugucucu

SEQ ID NO: 2125154 - RNA, 19 nt, Homo sapiens
  misc_RNA (1)...(19): siRNA sense strand
uaagcaaguuccagucuau

SEQ ID NO: 2125155 - RNA, 19 nt, Homo sapiens
  misc_RNA (1)...(19): siRNA sense strand
ggcagacagucccuacaua

SEQ ID NO: 2125156 - RNA, 19 nt, Homo sapiens
  misc_RNA (1)...(19): siRNA sense strand
uaauagguccugacaauau

SEQ ID NO: 2125157 - RNA, 19 nt, Homo sapiens
  misc_RNA (1)...(19): siRNA sense strand
ugaagaagaacaugcagua

SEQ ID NO: 2125158 - RNA, 19 nt, Homo sapiens
  misc_RNA (1)...(19): siRNA sense strand
gauuuaggcuucuucaucu

SEQ ID NO: 2125159 - RNA, 19 nt, Homo sapiens
  misc_RNA (1)...(19): siRNA sense strand
cuaugucccugauuucuuu

SEQ ID NO: 2125160 - RNA, 19 nt, Homo sapiens
  misc_RNA (1)...(19): siRNA sense strand
cagcuuaucucgguugcua

SEQ ID NO: 2125161 - RNA, 19 nt, Homo sapiens
  misc_RNA (1)...(19): siRNA sense strand
ugaaaucccuucgagaguu

SEQ ID NO: 2125162 - RNA, 19 nt, Homo sapiens
  misc_RNA (1)...(19): siRNA sense strand
ccucaucagucucucgaua

SEQ ID NO: 2125163 - RNA, 19 nt, Homo sapiens
  misc_RNA (1)...(19): siRNA sense strand
agacagucccuacauauaa

SEQ ID NO: 2125164 - RNA, 19 nt, Homo sapiens
  misc_RNA (1)...(19): siRNA sense strand
cagaagaggccuauaacuu

SEQ ID NO: 2125165 - RNA, 19 nt, Homo sapiens
  misc_RNA (1)...(19): siRNA sense strand
guaaagaagcgcucagugu

SEQ ID NO: 2125166 - RNA, 19 nt, Homo sapiens
  misc_RNA (1)...(19): siRNA sense strand
gcagacagucccuacauau

SEQ ID NO: 2125167 - RNA, 19 nt, Homo sapiens
  misc_RNA (1)...(19): siRNA sense strand
aaaugugggcuguuuaaua

SEQ ID NO: 2125168 - RNA, 19 nt, Homo sapiens
  misc_RNA (1)...(19): siRNA sense strand
cacaauauauuuccaagca

SEQ ID NO: 2125169 - RNA, 19 nt, Homo sapiens
  misc_RNA (1)...(19): siRNA sense strand
uagcuggaaugaagaacua

SEQ ID NO: 2125170 - RNA, 19 nt, Homo sapiens
  misc_RNA (1)...(19): siRNA sense strand
cuucaaggauguucaguga

SEQ ID NO: 2125171 - RNA, 19 nt, Homo sapiens
  misc_RNA (1)...(19): siRNA sense strand
aggaagaacugcuuaaugg

SEQ ID NO: 2125172 - RNA, 19 nt, Homo sapiens
  misc_RNA (1)...(19): siRNA sense strand
uguagaagaugaccacaga

SEQ ID NO: 2125173 - RNA, 19 nt, Homo sapiens
  misc_RNA (1)...(19): siRNA sense strand
aaugugggcuguuuaauag

SEQ ID NO: 2125174 - RNA, 19 nt, Homo sapiens
  misc_RNA (1)...(19): siRNA sense strand
gauacauucugucccuuga

SEQ ID NO: 2125175 - RNA, 19 nt, Homo sapiens
  misc_RNA (1)...(19): siRNA sense strand
gaagcgcucaguguacuua

SEQ ID NO: 2125176 - RNA, 19 nt, Homo sapiens
  misc_RNA (1)...(19): siRNA sense strand
gaggaaaggaaauggauga

SEQ ID NO: 2125177 - RNA, 19 nt, Homo sapiens
  misc_RNA (1)...(19): siRNA sense strand
ucaaggagaagauguagaa

SEQ ID NO: 2125178 - RNA, 19 nt, Homo sapiens
  misc_RNA (1)...(19): siRNA sense strand
ccaaaucgucagugccuua

SEQ ID NO: 2125179 - RNA, 19 nt, Homo sapiens
  misc_RNA (1)...(19): siRNA sense strand
guaaccagcugacucugau

SEQ ID NO: 2125180 - RNA, 19 nt, Homo sapiens
  misc_RNA (1)...(19): siRNA sense strand
gagaaacaaggcgaaauuu

SEQ ID NO: 2125181 - RNA, 19 nt, Homo sapiens
  misc_RNA (1)...(19): siRNA sense strand
ccagaaggaucagaggaaa

SEQ ID NO: 2125182 - RNA, 19 nt, Homo sapiens
  misc_RNA (1)...(19): siRNA sense strand
gaaucuccacuaaggauaa

SEQ ID NO: 2125183 - RNA, 19 nt, Homo sapiens
  misc_RNA (1)...(19): siRNA sense strand
uuuaauagguccugacaau

SEQ ID NO: 2125184 - RNA, 19 nt, Homo sapiens
  misc_RNA (1)...(19): siRNA sense strand
ggacuaugagaaacgguua

SEQ ID NO: 2125185 - RNA, 19 nt, Homo sapiens
  misc_RNA (1)...(19): siRNA sense strand
gaagacagaauaagaacuc

SEQ ID NO: 2125186 - RNA, 19 nt, Homo sapiens
  misc_RNA (1)...(19): siRNA sense strand
gacaugggaagacagaaua

SEQ ID NO: 2125187 - RNA, 19 nt, Homo sapiens
  misc_RNA (1)...(19): siRNA sense strand
uacaaauacucccuugaaa

SEQ ID NO: 2125188 - RNA, 19 nt, Homo sapiens
  misc_RNA (1)...(19): siRNA sense strand
cgagaguuccagagauuua

SEQ ID NO: 2125189 - RNA, 19 nt, Homo sapiens
  misc_RNA (1)...(19): siRNA sense strand
ggguuaaucuucacucauc

SEQ ID NO: 2125190 - RNA, 19 nt, Homo sapiens
  misc_RNA (1)...(19): siRNA sense strand
aaaggaagcucauugaaua

SEQ ID NO: 2125191 - RNA, 19 nt, Homo sapiens
  misc_RNA (1)...(19): siRNA sense strand
gcacaacacuuuuaguuua

SEQ ID NO: 2125192 - RNA, 19 nt, Homo sapiens
  misc_RNA (1)...(19): siRNA sense strand
cagcuuaguucuucauaua

SEQ ID NO: 2125193 - RNA, 19 nt, Homo sapiens
  misc_RNA (1)...(19): siRNA sense strand
ggaaugaacuuaugaacag

SEQ ID NO: 2125194 - RNA, 19 nt, Homo sapiens
  misc_RNA (1)...(19): siRNA sense strand
gaaagaguguccugcuauu

SEQ ID NO: 2125195 - RNA, 19 nt, Homo sapiens
  misc_RNA (1)...(19): siRNA sense strand
gcgcauaguuggccaauau

SEQ ID NO: 2125196 - RNA, 19 nt, Homo sapiens
  misc_RNA (1)...(19): siRNA sense strand
ugagaaagccuuauuauca

SEQ ID NO: 2125197 - RNA, 19 nt, Homo sapiens
  misc_RNA (1)...(19): siRNA sense strand
ggaaagaaaugggcugaau

SEQ ID NO: 2125198 - RNA, 19 nt, Homo sapiens
  misc_RNA (1)...(19): siRNA sense strand
gagaaagccuuauuaucau

SEQ ID NO: 2125199 - RNA, 19 nt, Homo sapiens
  misc_RNA (1)...(19): siRNA sense strand
gaacuaaucauacccacuu

SEQ ID NO: 2125200 - RNA, 19 nt, Homo sapiens
  misc_RNA (1)...(19): siRNA sense strand
gaagugaaauauacagaag

SEQ ID NO: 2125201 - RNA, 19 nt, Homo sapiens
  misc_RNA (1)...(19): siRNA sense strand
ccagagaaauuccacagaa

SEQ ID NO: 2125202 - RNA, 19 nt, Homo sapiens
  misc_RNA (1)...(19): siRNA sense strand
cacaguaucucuucgaauu

SEQ ID NO: 2125203 - RNA, 19 nt, Homo sapiens
  misc_RNA (1)...(19): siRNA sense strand
ugauaagccucuugaauau

SEQ ID NO: 2125204 - RNA, 19 nt, Homo sapiens
  misc_RNA (1)...(19): siRNA sense strand
ugaaagcacugauauugga

SEQ ID NO: 2125205 - RNA, 19 nt, Homo sapiens
  misc_RNA (1)...(19): siRNA sense strand
gaugaaagcacugauauug

SEQ ID NO: 2125206 - RNA, 19 nt, Homo sapiens
  misc_RNA (1)...(19): siRNA sense strand
ggaugaagguaaaggaaga

SEQ ID NO: 2125207 - RNA, 19 nt, Homo sapiens
  misc_RNA (1)...(19): siRNA sense strand
ggaauagugaagugaaaua

SEQ ID NO: 2125208 - RNA, 19 nt, Homo sapiens
  misc_RNA (1)...(19): siRNA sense strand
gaaagaaaugggcugaauu

SEQ ID NO: 2125209 - RNA, 19 nt, Homo sapiens
  misc_RNA (1)...(19): siRNA sense strand
gaggaauagugaagugaaa

SEQ ID NO: 2125210 - RNA, 19 nt, Homo sapiens
  misc_RNA (1)...(19): siRNA sense strand
aaagaaagaggaauaguga

SEQ ID NO: 2125211 - RNA, 19 nt, Homo sapiens
  misc_RNA (1)...(19): siRNA sense strand
aaacagugauguauuccaa

SEQ ID NO: 2125212 - RNA, 19 nt, Homo sapiens
  misc_RNA (1)...(19): siRNA sense strand
gaagaaugauuaugaaacc

SEQ ID NO: 2125213 - RNA, 19 nt, Homo sapiens
  misc_RNA (1)...(19): siRNA sense strand
gcaagacguuauaaugaag

SEQ ID NO: 2125214 - RNA, 19 nt, Homo sapiens
  misc_RNA (1)...(19): siRNA sense strand
gcagaacauuuagaaacaa

SEQ ID NO: 2125215 - RNA, 19 nt, Homo sapiens
  misc_RNA (1)...(19): siRNA sense strand
uugauaagccucuugaaua

SEQ ID NO: 2125216 - RNA, 19 nt, Homo sapiens
  misc_RNA (1)...(19): siRNA sense strand
ugacagaccucaguguguu

SEQ ID NO: 2125217 - RNA, 19 nt, Homo sapiens
  misc_RNA (1)...(19): siRNA sense strand
uuuaugagcucaggaauga

SEQ ID NO: 2125218 - RNA, 19 nt, Homo sapiens
  misc_RNA (1)...(19): siRNA sense strand
gaaauauacagaagcaugu

SEQ ID NO: 2125219 - RNA, 19 nt, Homo sapiens
  misc_RNA (1)...(19): siRNA sense strand
gaagaugauacuuggguaa

SEQ ID NO: 2125220 - RNA, 19 nt, Homo sapiens
  misc_RNA (1)...(19): siRNA sense strand
gaaacaaugcuuauuacuc

SEQ ID NO: 2125221 - RNA, 19 nt, Homo sapiens
  misc_RNA (1)...(19): siRNA sense strand
acagaagcauguucaaguu

SEQ ID NO: 2125222 - RNA, 19 nt, Homo sapiens
  misc_RNA (1)...(19): siRNA sense strand
cagcaaccaugacuggaaa

SEQ ID NO: 2125223 - RNA, 19 nt, Homo sapiens
  misc_RNA (1)...(19): siRNA sense strand
guaagugcaagacguuaua

SEQ ID NO: 2125224 - RNA, 19 nt, Homo sapiens
  misc_RNA (1)...(19): siRNA sense strand
uagaaagaguguccugcua

SEQ ID NO: 2125225 - RNA, 19 nt, Homo sapiens
  misc_RNA (1)...(19): siRNA sense strand
ggaaaacaguuggguaaaa

SEQ ID NO: 2125226 - RNA, 19 nt, Homo sapiens
  misc_RNA (1)...(19): siRNA sense strand
gaugauacuuggguaacaa

SEQ ID NO: 2125227 - RNA, 19 nt, Homo sapiens
  misc_RNA (1)...(19): siRNA sense strand
ggaagcugcacaacacuuu

SEQ ID NO: 2125228 - RNA, 19 nt, Homo sapiens
  misc_RNA (1)...(19): siRNA sense strand
ggauauggugcguacaaua

SEQ ID NO: 2125229 - RNA, 19 nt, Homo sapiens
  misc_RNA (1)...(19): siRNA sense strand
gugcaagacguuauaauga

SEQ ID NO: 2125230 - RNA, 19 nt, Homo sapiens
  misc_RNA (1)...(19): siRNA sense strand
aauuuaaccucacaccuaa

SEQ ID NO: 2125231 - RNA, 19 nt, Homo sapiens
  misc_RNA (1)...(19): siRNA sense strand
aaagaaaugggcugaauug

SEQ ID NO: 2125232 - RNA, 19 nt, Homo sapiens
  misc_RNA (1)...(19): siRNA sense strand
uaaaggaagcucauugaau

SEQ ID NO: 2125233 - RNA, 19 nt, Homo sapiens
  misc_RNA (1)...(19): siRNA sense strand
gcagugaaaguuguuaauu

SEQ ID NO: 2125234 - RNA, 19 nt, Homo sapiens
  misc_RNA (1)...(19): siRNA sense strand
gcaaacuucaacuucauuu

SEQ ID NO: 2125235 - RNA, 19 nt, Homo sapiens
  misc_RNA (1)...(19): siRNA sense strand
uaauugagcuaaacuuggu

SEQ ID NO: 2125236 - RNA, 19 nt, Homo sapiens
  misc_RNA (1)...(19): siRNA sense strand
cuucgaauuuguacuauug

SEQ ID NO: 2125237 - RNA, 19 nt, Homo sapiens
  misc_RNA (1)...(19): siRNA sense strand
gcagcuuaguucuucauau

SEQ ID NO: 2125238 - RNA, 19 nt, Homo sapiens
  misc_RNA (1)...(19): siRNA sense strand
uauggugcguacaauauuu

SEQ ID NO: 2125239 - RNA, 19 nt, Homo sapiens
  misc_RNA (1)...(19): siRNA sense strand
gaacuaggguuuuccaucu

SEQ ID NO: 2125240 - RNA, 19 nt, Homo sapiens
  misc_RNA (1)...(19): siRNA sense strand
caauccagcuugaugaaag

SEQ ID NO: 2125241 - RNA, 19 nt, Homo sapiens
  misc_RNA (1)...(19): siRNA sense strand
ugcaagacguuauaaugaa

SEQ ID NO: 2125242 - RNA, 19 nt, Homo sapiens
  misc_RNA (1)...(19): siRNA sense strand
ggcaagcacacccaucaua

SEQ ID NO: 2125243 - RNA, 19 nt, Homo sapiens
  misc_RNA (1)...(19): siRNA sense strand
agacuggaaugaacuuaug

SEQ ID NO: 2125244 - RNA, 19 nt, Homo sapiens
  misc_RNA (1)...(19): siRNA sense strand
uaaacuuggugccugaaga

SEQ ID NO: 2125245 - RNA, 19 nt, Homo sapiens
  misc_RNA (1)...(19): siRNA sense strand
cguccuagcuauuacaugu

SEQ ID NO: 2125246 - RNA, 19 nt, Homo sapiens
  misc_RNA (1)...(19): siRNA sense strand
gcauaguuggccaauauaa

SEQ ID NO: 2125247 - RNA, 19 nt, Homo sapiens
  misc_RNA (1)...(19): siRNA sense strand
uuagaaaggcgcauaguug

SEQ ID NO: 2125248 - RNA, 19 nt, Homo sapiens
  misc_RNA (1)...(19): siRNA sense strand
aaauuuaaccucacaccua

SEQ ID NO: 2125249 - RNA, 19 nt, Homo sapiens
  misc_RNA (1)...(19): siRNA sense strand
aaagaggaauagugaagug

SEQ ID NO: 2125250 - RNA, 19 nt, Homo sapiens
  misc_RNA (1)...(19): siRNA sense strand
aaaguaaucguccuagcua

SEQ ID NO: 2125251 - RNA, 19 nt, Homo sapiens
  misc_RNA (1)...(19): siRNA sense strand
uugaauagccggcuucuug

SEQ ID NO: 2125252 - RNA, 19 nt, Homo sapiens
  misc_RNA (1)...(19): siRNA sense strand
gcaagcacacccaucauag

SEQ ID NO: 2125253 - RNA, 19 nt, Homo sapiens
  misc_RNA (1)...(19): siRNA sense strand
ucacuucucugucucaaac

SEQ ID NO: 2125254 - RNA, 19 nt, Homo sapiens
  misc_RNA (1)...(19): siRNA sense strand
caguaucucuucgaauuug

SEQ ID NO: 2125255 - RNA, 19 nt, Homo sapiens
  misc_RNA (1)...(19): siRNA sense strand
gaagacuuuccauuguuaa

SEQ ID NO: 2125256 - RNA, 19 nt, Homo sapiens
  misc_RNA (1)...(19): siRNA sense strand
gaaaacaguuggguaaaag

SEQ ID NO: 2125257 - RNA, 19 nt, Homo sapiens
  misc_RNA (1)...(19): siRNA sense strand
aaucauacccacuuacuau

SEQ ID NO: 2125258 - RNA, 19 nt, Homo sapiens
  misc_RNA (1)...(19): siRNA sense strand
gguuuagcauccagagaaa

SEQ ID NO: 2125259 - RNA, 19 nt, Homo sapiens
  misc_RNA (1)...(19): siRNA sense strand
agaccucaguguguuauuu

SEQ ID NO: 2125260 - RNA, 19 nt, Homo sapiens
  misc_RNA (1)...(19): siRNA sense strand
uauacaucgugaagguuua

SEQ ID NO: 2125261 - RNA, 19 nt, Homo sapiens
  misc_RNA (1)...(19): siRNA sense strand
gaauugugcagcaguuaug

SEQ ID NO: 2125262 - RNA, 19 nt, Homo sapiens
  misc_RNA (1)...(19): siRNA sense strand
gauaugcguggcaagauga

SEQ ID NO: 2125263 - RNA, 19 nt, Homo sapiens
  misc_RNA (1)...(19): siRNA sense strand
gcuuaguucuucauauaca

SEQ ID NO: 2125264 - RNA, 19 nt, Homo sapiens
  misc_RNA (1)...(19): siRNA sense strand
gaaagaggaauagugaagu

SEQ ID NO: 2125265 - RNA, 19 nt, Homo sapiens
  misc_RNA (1)...(19): siRNA sense strand
gcaucucacuucucugucu

SEQ ID NO: 2125266 - RNA, 19 nt, Homo sapiens
  misc_RNA (1)...(19): siRNA sense strand
gaauagccggcuucuugaa

SEQ ID NO: 2125267 - RNA, 19 nt, Homo sapiens
  misc_RNA (1)...(19): siRNA sense strand
agaagcauguucaaguuca

SEQ ID NO: 2125268 - RNA, 19 nt, Homo sapiens
  misc_RNA (1)...(19): siRNA sense strand
ccagggauuucgaaagaca

SEQ ID NO: 2125269 - RNA, 19 nt, Homo sapiens
  misc_RNA (1)...(19): siRNA sense strand
ggugcuguguggaaucauu

SEQ ID NO: 2125270 - RNA, 19 nt, Homo sapiens
  misc_RNA (1)...(19): siRNA sense strand
guacuauugcagaacauuu

SEQ ID NO: 2125271 - RNA, 19 nt, Homo sapiens
  misc_RNA (1)...(19): siRNA sense strand
gauaagccucuugaauauu

SEQ ID NO: 2125272 - RNA, 19 nt, Homo sapiens
  misc_RNA (1)...(19): siRNA sense strand
cucaguguguuauuuguaa

SEQ ID NO: 2125273 - RNA, 19 nt, Homo sapiens
  misc_RNA (1)...(19): siRNA sense strand
gaaagcacugauauuggaa

SEQ ID NO: 2125274 - RNA, 19 nt, Homo sapiens
  misc_RNA (1)...(19): siRNA sense strand
caaugcuuauuacucguuu

SEQ ID NO: 2125275 - RNA, 19 nt, Homo sapiens
  misc_RNA (1)...(19): siRNA sense strand
gaaagccuuauuaucauca

SEQ ID NO: 2125276 - RNA, 19 nt, Homo sapiens
  misc_RNA (1)...(19): siRNA sense strand
gauauuggaagcugcacaa

SEQ ID NO: 2125277 - RNA, 19 nt, Homo sapiens
  misc_RNA (1)...(19): siRNA sense strand
acuccaaucugcaaacuuc

SEQ ID NO: 2125278 - RNA, 19 nt, Homo sapiens
  misc_RNA (1)...(19): siRNA sense strand
cauaguuggccaauauaaa

SEQ ID NO: 2125279 - RNA, 19 nt, Homo sapiens
  misc_RNA (1)...(19): siRNA sense strand
gcacuuagaaacucagcau

SEQ ID NO: 2125280 - RNA, 19 nt, Homo sapiens
  misc_RNA (1)...(19): siRNA sense strand
gcaauccagcuugaugaaa

SEQ ID NO: 2125281 - RNA, 19 nt, Homo sapiens
  misc_RNA (1)...(19): siRNA sense strand
ugcagaacauuuagaaaca

SEQ ID NO: 2125282 - RNA, 19 nt, Homo sapiens
  misc_RNA (1)...(19): siRNA sense strand
gacagaccucaguguguua

SEQ ID NO: 2125283 - RNA, 19 nt, Homo sapiens
  misc_RNA (1)...(19): siRNA sense strand
agaaaugggcugaauugug

SEQ ID NO: 2125284 - RNA, 19 nt, Homo sapiens
  misc_RNA (1)...(19): siRNA sense strand
gaagcauguucaaguucau

SEQ ID NO: 2125285 - RNA, 19 nt, Homo sapiens
  misc_RNA (1)...(19): siRNA sense strand
gcuuaaaaccuucgaaauu

SEQ ID NO: 2125286 - RNA, 19 nt, Homo sapiens
  misc_RNA (1)...(19): siRNA sense strand
aaucucauuuggcaaguau

SEQ ID NO: 2125287 - RNA, 19 nt, Homo sapiens
  misc_RNA (1)...(19): siRNA sense strand
gaauuauugcagcuuaguu

SEQ ID NO: 2125288 - RNA, 19 nt, Homo sapiens
  misc_RNA (1)...(19): siRNA sense strand
gcauuaucuuccuguguuc

SEQ ID NO: 2125289 - RNA, 19 nt, Homo sapiens
  misc_RNA (1)...(19): siRNA sense strand
agcauuaucuuccuguguu

SEQ ID NO: 2125290 - RNA, 19 nt, Homo sapiens
  misc_RNA (1)...(19): siRNA sense strand
gaucugaguuccaggauua

SEQ ID NO: 2125291 - RNA, 19 nt, Homo sapiens
  misc_RNA (1)...(19): siRNA sense strand
uaagugaccugaagaagua

SEQ ID NO: 2125292 - RNA, 19 nt, Homo sapiens
  misc_RNA (1)...(19): siRNA sense strand
gcacagaggccgcaagaua

SEQ ID NO: 2125293 - RNA, 19 nt, Homo sapiens
  misc_RNA (1)...(19): siRNA sense strand
gcacagauaugcagaccaa

SEQ ID NO: 2125294 - RNA, 19 nt, Homo sapiens
  misc_RNA (1)...(19): siRNA sense strand
uaaagcagcuggaagaaga

SEQ ID NO: 2125295 - RNA, 19 nt, Homo sapiens
  misc_RNA (1)...(19): siRNA sense strand
gagaugcccuggaaugauu

SEQ ID NO: 2125296 - RNA, 19 nt, Homo sapiens
  misc_RNA (1)...(19): siRNA sense strand
gaagaaacaucucaaagac

SEQ ID NO: 2125297 - RNA, 19 nt, Homo sapiens
  misc_RNA (1)...(19): siRNA sense strand
ggagugcccuugcaugaaa

SEQ ID NO: 2125298 - RNA, 19 nt, Homo sapiens
  misc_RNA (1)...(19): siRNA sense strand
gcagaaaggugcagagaag

SEQ ID NO: 2125299 - RNA, 19 nt, Homo sapiens
  misc_RNA (1)...(19): siRNA sense strand
ggaagagaaugacuuggaa

SEQ ID NO: 2125300 - RNA, 19 nt, Homo sapiens
  misc_RNA (1)...(19): siRNA sense strand
ccaaagaaguccagcagaa

SEQ ID NO: 2125301 - RNA, 19 nt, Homo sapiens
  misc_RNA (1)...(19): siRNA sense strand
ccacugggcucuuuguuga

SEQ ID NO: 2125302 - RNA, 19 nt, Homo sapiens
  misc_RNA (1)...(19): siRNA sense strand
ccaaagugcuucucaagga

SEQ ID NO: 2125303 - RNA, 19 nt, Homo sapiens
  misc_RNA (1)...(19): siRNA sense strand
caagggcccucaacagaaa

SEQ ID NO: 2125304 - RNA, 19 nt, Homo sapiens
  misc_RNA (1)...(19): siRNA sense strand
ggaagaauuuauccaacaa

SEQ ID NO: 2125305 - RNA, 19 nt, Homo sapiens
  misc_RNA (1)...(19): siRNA sense strand
gaaagcagcccucaaugug

SEQ ID NO: 2125306 - RNA, 19 nt, Homo sapiens
  misc_RNA (1)...(19): siRNA sense strand
gagaugccaugaagacuga

SEQ ID NO: 2125307 - RNA, 19 nt, Homo sapiens
  misc_RNA (1)...(19): siRNA sense strand
ggaaguagaagcacaguug

SEQ ID NO: 2125308 - RNA, 19 nt, Homo sapiens
  misc_RNA (1)...(19): siRNA sense strand
gaaaggaggcacagauaug

SEQ ID NO: 2125309 - RNA, 19 nt, Homo sapiens
  misc_RNA (1)...(19): siRNA sense strand
caagauaagugaccugaag

SEQ ID NO: 2125310 - RNA, 19 nt, Homo sapiens
  misc_RNA (1)...(19): siRNA sense strand
ucaagcagcucacggaaga

SEQ ID NO: 2125311 - RNA, 19 nt, Homo sapiens
  misc_RNA (1)...(19): siRNA sense strand
cagaauauaugaagcaaca

SEQ ID NO: 2125312 - RNA, 19 nt, Homo sapiens
  misc_RNA (1)...(19): siRNA sense strand
cagcaaggaucacauaauc

SEQ ID NO: 2125313 - RNA, 19 nt, Homo sapiens
  misc_RNA (1)...(19): siRNA sense strand
uagaagacuugguaaagaa

SEQ ID NO: 2125314 - RNA, 19 nt, Homo sapiens
  misc_RNA (1)...(19): siRNA sense strand
uaaguuagcagcugaagaa

SEQ ID NO: 2125315 - RNA, 19 nt, Homo sapiens
  misc_RNA (1)...(19): siRNA sense strand
guuagcagcugaagaagga

SEQ ID NO: 2125316 - RNA, 19 nt, Homo sapiens
  misc_RNA (1)...(19): siRNA sense strand
gagaggacaucaucaagca

SEQ ID NO: 2125317 - RNA, 19 nt, Homo sapiens
  misc_RNA (1)...(19): siRNA sense strand
ggaaagaugccaccaugga

SEQ ID NO: 2125318 - RNA, 19 nt, Homo sapiens
  misc_RNA (1)...(19): siRNA sense strand
ggagggaagugacccacaa

SEQ ID NO: 2125319 - RNA, 19 nt, Homo sapiens
  misc_RNA (1)...(19): siRNA sense strand
cagcagugaugaagaagaa

SEQ ID NO: 2125320 - RNA, 19 nt, Homo sapiens
  misc_RNA (1)...(19): siRNA sense strand
gaaggaaccagcagugaug

SEQ ID NO: 2125321 - RNA, 19 nt, Homo sapiens
  misc_RNA (1)...(19): siRNA sense strand
gcaacaauaugaagaagac

SEQ ID NO: 2125322 - RNA, 19 nt, Homo sapiens
  misc_RNA (1)...(19): siRNA sense strand
cacagcaucuucgaaguua

SEQ ID NO: 2125323 - RNA, 19 nt, Homo sapiens
  misc_RNA (1)...(19): siRNA sense strand
gaagcaacaauaugaagaa

SEQ ID NO: 2125324 - RNA, 19 nt, Homo sapiens
  misc_RNA (1)...(19): siRNA sense strand
ggaccaaagugcuucucaa

SEQ ID NO: 2125325 - RNA, 19 nt, Homo sapiens
  misc_RNA (1)...(19): siRNA sense strand
gaaucggucuuucucuuuc

SEQ ID NO: 2125326 - RNA, 19 nt, Homo sapiens
  misc_RNA (1)...(19): siRNA sense strand
ggaaucggucuuucucuuu

SEQ ID NO: 2125327 - RNA, 19 nt, Homo sapiens
  misc_RNA (1)...(19): siRNA sense strand
acagaaagcucuugacacu

SEQ ID NO: 2125328 - RNA, 19 nt, Homo sapiens
  misc_RNA (1)...(19): siRNA sense strand
gaagagagaagauuucacu

SEQ ID NO: 2125329 - RNA, 19 nt, Homo sapiens
  misc_RNA (1)...(19): siRNA sense strand
ccaggcagcagacgaauaa

SEQ ID NO: 2125330 - RNA, 19 nt, Homo sapiens
  misc_RNA (1)...(19): siRNA sense strand
gcagaaccacgccaugaaa

SEQ ID NO: 2125331 - RNA, 19 nt, Homo sapiens
  misc_RNA (1)...(19): siRNA sense strand
caugaagacugaguuaguu

SEQ ID NO: 2125332 - RNA, 19 nt, Homo sapiens
  misc_RNA (1)...(19): siRNA sense strand
gcugcuagauuucggcaaa

SEQ ID NO: 2125333 - RNA, 19 nt, Homo sapiens
  misc_RNA (1)...(19): siRNA sense strand
cuagaagacuugguaaaga

SEQ ID NO: 2125334 - RNA, 19 nt, Homo sapiens
  misc_RNA (1)...(19): siRNA sense strand
gggaaaugcuggagcucaa

SEQ ID NO: 2125335 - RNA, 19 nt, Homo sapiens
  misc_RNA (1)...(19): siRNA sense strand
ggagagagaggacaucauc

SEQ ID NO: 2125336 - RNA, 19 nt, Homo sapiens
  misc_RNA (1)...(19): siRNA sense strand
gaggagaggaguaucaaga

SEQ ID NO: 2125337 - RNA, 19 nt, Homo sapiens
  misc_RNA (1)...(19): siRNA sense strand
agaagaaacaucucaaaga

SEQ ID NO: 2125338 - RNA, 19 nt, Homo sapiens
  misc_RNA (1)...(19): siRNA sense strand
caaagaaguccagcagaaa

SEQ ID NO: 2125339 - RNA, 19 nt, Homo sapiens
  misc_RNA (1)...(19): siRNA sense strand
gcuggagaauggacuguga

SEQ ID NO: 2125340 - RNA, 19 nt, Homo sapiens
  misc_RNA (1)...(19): siRNA sense strand
ucaguugccacaucaauaa

SEQ ID NO: 2125341 - RNA, 19 nt, Homo sapiens
  misc_RNA (1)...(19): siRNA sense strand
caacagaaagcucuugaca

SEQ ID NO: 2125342 - RNA, 19 nt, Homo sapiens
  misc_RNA (1)...(19): siRNA sense strand
gcacaccguggaaaucaaa

SEQ ID NO: 2125343 - RNA, 19 nt, Homo sapiens
  misc_RNA (1)...(19): siRNA sense strand
gaaccucgccuccuaugca

SEQ ID NO: 2125344 - RNA, 19 nt, Homo sapiens
  misc_RNA (1)...(19): siRNA sense strand
gaaagauuccggagagaag

SEQ ID NO: 2125345 - RNA, 19 nt, Homo sapiens
  misc_RNA (1)...(19): siRNA sense strand
cacagaggccgcaagauaa

SEQ ID NO: 2125346 - RNA, 19 nt, Homo sapiens
  misc_RNA (1)...(19): siRNA sense strand
caagugcugagacagaaua

SEQ ID NO: 2125347 - RNA, 19 nt, Homo sapiens
  misc_RNA (1)...(19): siRNA sense strand
gaagaaguacgcccagaag

SEQ ID NO: 2125348 - RNA, 19 nt, Homo sapiens
  misc_RNA (1)...(19): siRNA sense strand
aagccgaacugaaagauuc

SEQ ID NO: 2125349 - RNA, 19 nt, Homo sapiens
  misc_RNA (1)...(19): siRNA sense strand
cagaggaacgcuugaagaa

SEQ ID NO: 2125350 - RNA, 19 nt, Homo sapiens
  misc_RNA (1)...(19): siRNA sense strand
ucaaagaccagcuagugaa

SEQ ID NO: 2125351 - RNA, 19 nt, Homo sapiens
  misc_RNA (1)...(19): siRNA sense strand
ucaaacaucagacagaaga

SEQ ID NO: 2125352 - RNA, 19 nt, Homo sapiens
  misc_RNA (1)...(19): siRNA sense strand
aaucaaacaucagacagaa

SEQ ID NO: 2125353 - RNA, 19 nt, Homo sapiens
  misc_RNA (1)...(19): siRNA sense strand
gugcugagacagaauauau

SEQ ID NO: 2125354 - RNA, 19 nt, Homo sapiens
  misc_RNA (1)...(19): siRNA sense strand
gaauaacgugcaugggaaa

SEQ ID NO: 2125355 - RNA, 19 nt, Homo sapiens
  misc_RNA (1)...(19): siRNA sense strand
ugaaacggcccaagccaaa

SEQ ID NO: 2125356 - RNA, 19 nt, Homo sapiens
  misc_RNA (1)...(19): siRNA sense strand
aagcagcccucaaugugaa

SEQ ID NO: 2125357 - RNA, 19 nt, Homo sapiens
  misc_RNA (1)...(19): siRNA sense strand
cagaagaggagaagaaaca

SEQ ID NO: 2125358 - RNA, 19 nt, Homo sapiens
  misc_RNA (1)...(19): siRNA sense strand
gcugagacagaauauauga

SEQ ID NO: 2125359 - RNA, 19 nt, Homo sapiens
  misc_RNA (1)...(19): siRNA sense strand
gggaagagaaugacuugga

SEQ ID NO: 2125360 - RNA, 19 nt, Homo sapiens
  misc_RNA (1)...(19): siRNA sense strand
gacaggagaauucagaguu

SEQ ID NO: 2125361 - RNA, 19 nt, Homo sapiens
  misc_RNA (1)...(19): siRNA sense strand
ccuggaagccgaacugaaa

SEQ ID NO: 2125362 - RNA, 19 nt, Homo sapiens
  misc_RNA (1)...(19): siRNA sense strand
gcucuuuguugaaggagaa

SEQ ID NO: 2125363 - RNA, 19 nt, Homo sapiens
  misc_RNA (1)...(19): siRNA sense strand
ggaaaguccccaggaauua

SEQ ID NO: 2125364 - RNA, 19 nt, Homo sapiens
  misc_RNA (1)...(19): siRNA sense strand
cacaggagcugaggaaagu

SEQ ID NO: 2125365 - RNA, 19 nt, Homo sapiens
  misc_RNA (1)...(19): siRNA sense strand
gcgacuagaagacuuggua

SEQ ID NO: 2125366 - RNA, 19 nt, Homo sapiens
  misc_RNA (1)...(19): siRNA sense strand
acaggagaauucagaguug

SEQ ID NO: 2125367 - RNA, 19 nt, Homo sapiens
  misc_RNA (1)...(19): siRNA sense strand
gaagaagaaaggaccaaag

SEQ ID NO: 2125368 - RNA, 19 nt, Homo sapiens
  misc_RNA (1)...(19): siRNA sense strand
agacagcaaggaucacaua

SEQ ID NO: 2125369 - RNA, 19 nt, Homo sapiens
  misc_RNA (1)...(19): siRNA sense strand
uaacagagagucgcucaga

SEQ ID NO: 2125370 - RNA, 19 nt, Homo sapiens
  misc_RNA (1)...(19): siRNA sense strand
gagcacagaggccgcaaga

SEQ ID NO: 2125371 - RNA, 19 nt, Homo sapiens
  misc_RNA (1)...(19): siRNA sense strand
gaaccagcagugaugaaga

SEQ ID NO: 2125372 - RNA, 19 nt, Homo sapiens
  misc_RNA (1)...(19): siRNA sense strand
agacagaagaggagaagaa

SEQ ID NO: 2125373 - RNA, 19 nt, Homo sapiens
  misc_RNA (1)...(19): siRNA sense strand
ggcaagugcugagacagaa

SEQ ID NO: 2125374 - RNA, 19 nt, Homo sapiens
  misc_RNA (1)...(19): siRNA sense strand
gaagacugaguuaguuuca

SEQ ID NO: 2125375 - RNA, 19 nt, Homo sapiens
  misc_RNA (1)...(19): siRNA sense strand
ccaagggcccucaacagaa

SEQ ID NO: 2125376 - RNA, 19 nt, Homo sapiens
  misc_RNA (1)...(19): siRNA sense strand
ggaccuggaugugcagcuu

SEQ ID NO: 2125377 - RNA, 19 nt, Homo sapiens
  misc_RNA (1)...(19): siRNA sense strand
uaacgugcaugggaaagau

SEQ ID NO: 2125378 - RNA, 19 nt, Homo sapiens
  misc_RNA (1)...(19): siRNA sense strand
gcucucaacagcaaaauua

SEQ ID NO: 2125379 - RNA, 19 nt, Homo sapiens
  misc_RNA (1)...(19): siRNA sense strand
gaagcgacuagaagacuug

SEQ ID NO: 2125380 - RNA, 19 nt, Homo sapiens
  misc_RNA (1)...(19): siRNA sense strand
cggaaucggucuuucucuu

SEQ ID NO: 2125381 - RNA, 19 nt, Homo sapiens
  misc_RNA (1)...(19): siRNA sense strand
gaagccgaacugaaagauu

SEQ ID NO: 2125382 - RNA, 19 nt, Homo sapiens
  misc_RNA (1)...(19): siRNA sense strand
gcaaauuggaggaucuuag

SEQ ID NO: 2125383 - RNA, 19 nt, Homo sapiens
  misc_RNA (1)...(19): siRNA sense strand
ccagaaggccaaauugcaa

SEQ ID NO: 2125384 - RNA, 19 nt, Homo sapiens
  misc_RNA (1)...(19): siRNA sense strand
aaccagcagugaugaagaa

SEQ ID NO: 2125385 - RNA, 19 nt, Homo sapiens
  misc_RNA (1)...(19): siRNA sense strand
agagaaagcagcccucaau

SEQ ID NO: 2125386 - RNA, 19 nt, Homo sapiens
  misc_RNA (1)...(19): siRNA sense strand
gcagcuggaagaagagaaa

SEQ ID NO: 2125387 - RNA, 19 nt, Homo sapiens
  misc_RNA (1)...(19): siRNA sense strand
ggagauaaagcagcuggaa

SEQ ID NO: 2125388 - RNA, 19 nt, Homo sapiens
  misc_RNA (1)...(19): siRNA sense strand
gcagagggaaguagaagca

SEQ ID NO: 2125389 - RNA, 19 nt, Homo sapiens
  misc_RNA (1)...(19): siRNA sense strand
caaccagucuacagaugca

SEQ ID NO: 2125390 - RNA, 19 nt, Homo sapiens
  misc_RNA (1)...(19): siRNA sense strand
guacaggacuuucggauua

SEQ ID NO: 2125391 - RNA, 19 nt, Homo sapiens
  misc_RNA (1)...(19): siRNA sense strand
caacaaaggugacuucaga

SEQ ID NO: 2125392 - RNA, 19 nt, Homo sapiens
  misc_RNA (1)...(19): siRNA sense strand
cagcgaacauuaagaauua

SEQ ID NO: 2125393 - RNA, 19 nt, Homo sapiens
  misc_RNA (1)...(19): siRNA sense strand
ggcaacagcucgacaguua

SEQ ID NO: 2125394 - RNA, 19 nt, Homo sapiens
  misc_RNA (1)...(19): siRNA sense strand
caacaaauuuggcugauga

SEQ ID NO: 2125395 - RNA, 19 nt, Homo sapiens
  misc_RNA (1)...(19): siRNA sense strand
gugcauggcuucauauauu

SEQ ID NO: 2125396 - RNA, 19 nt, Homo sapiens
  misc_RNA (1)...(19): siRNA sense strand
gcaagugcccuaaccauuu

SEQ ID NO: 2125397 - RNA, 19 nt, Homo sapiens
  misc_RNA (1)...(19): siRNA sense strand
gagcauauuuauucaguug

SEQ ID NO: 2125398 - RNA, 19 nt, Homo sapiens
  misc_RNA (1)...(19): siRNA sense strand
ggauaauucuucacuauuc

SEQ ID NO: 2125399 - RNA, 19 nt, Homo sapiens
  misc_RNA (1)...(19): siRNA sense strand
gaacuugugcuuucauauu

SEQ ID NO: 2125400 - RNA, 19 nt, Homo sapiens
  misc_RNA (1)...(19): siRNA sense strand
cgaaauaucuacaaacaag

SEQ ID NO: 2125401 - RNA, 19 nt, Homo sapiens
  misc_RNA (1)...(19): siRNA sense strand
cgaaauaaaucaucaggau

SEQ ID NO: 2125402 - RNA, 19 nt, Homo sapiens
  misc_RNA (1)...(19): siRNA sense strand
ggacggagcucguauucag

SEQ ID NO: 2125403 - RNA, 19 nt, Homo sapiens
  misc_RNA (1)...(19): siRNA sense strand
gauuggaucugacaaacaa

SEQ ID NO: 2125404 - RNA, 19 nt, Homo sapiens
  misc_RNA (1)...(19): siRNA sense strand
gcuaaagccugcaguagga

SEQ ID NO: 2125405 - RNA, 19 nt, Homo sapiens
  misc_RNA (1)...(19): siRNA sense strand
caaaugaugucacuagagu

SEQ ID NO: 2125406 - RNA, 19 nt, Homo sapiens
  misc_RNA (1)...(19): siRNA sense strand
caacugaugacucucuuua

SEQ ID NO: 2125407 - RNA, 19 nt, Homo sapiens
  misc_RNA (1)...(19): siRNA sense strand
ggagugacagcucgaaaua

SEQ ID NO: 2125408 - RNA, 19 nt, Homo sapiens
  misc_RNA (1)...(19): siRNA sense strand
cgaauaggaugucugaaug

SEQ ID NO: 2125409 - RNA, 19 nt, Homo sapiens
  misc_RNA (1)...(19): siRNA sense strand
gcaaauaugagcuuaagga

SEQ ID NO: 2125410 - RNA, 19 nt, Homo sapiens
  misc_RNA (1)...(19): siRNA sense strand
gacaaacaaucgaauagga

SEQ ID NO: 2125411 - RNA, 19 nt, Homo sapiens
  misc_RNA (1)...(19): siRNA sense strand
caaaauagauggugugaau

SEQ ID NO: 2125412 - RNA, 19 nt, Homo sapiens
  misc_RNA (1)...(19): siRNA sense strand
gcccuaaccauuucuaaua

SEQ ID NO: 2125413 - RNA, 19 nt, Homo sapiens
  misc_RNA (1)...(19): siRNA sense strand
gcacguggcgccuuuagaa

SEQ ID NO: 2125414 - RNA, 19 nt, Homo sapiens
  misc_RNA (1)...(19): siRNA sense strand
ggaauaacccagacuagga

SEQ ID NO: 2125415 - RNA, 19 nt, Homo sapiens
  misc_RNA (1)...(19): siRNA sense strand
gaagccagcugugguugaa

SEQ ID NO: 2125416 - RNA, 19 nt, Homo sapiens
  misc_RNA (1)...(19): siRNA sense strand
gagagaauaugccuacgau

SEQ ID NO: 2125417 - RNA, 19 nt, Homo sapiens
  misc_RNA (1)...(19): siRNA sense strand
caagaccaaugcucagauu

SEQ ID NO: 2125418 - RNA, 19 nt, Homo sapiens
  misc_RNA (1)...(19): siRNA sense strand
ucccagggcugcaaauuaa

SEQ ID NO: 2125419 - RNA, 19 nt, Homo sapiens
  misc_RNA (1)...(19): siRNA sense strand
ucacaguccugagagaaua

SEQ ID NO: 2125420 - RNA, 19 nt, Homo sapiens
  misc_RNA (1)...(19): siRNA sense strand
gcagaacggcuuaccuaaa

SEQ ID NO: 2125421 - RNA, 19 nt, Homo sapiens
  misc_RNA (1)...(19): siRNA sense strand
gacgggaucugaacuauac

SEQ ID NO: 2125422 - RNA, 19 nt, Homo sapiens
  misc_RNA (1)...(19): siRNA sense strand
gagaauaugccuacgaugu

SEQ ID NO: 2125423 - RNA, 19 nt, Homo sapiens
  misc_RNA (1)...(19): siRNA sense strand
ccagguguguuuauccuaa

SEQ ID NO: 2125424 - RNA, 19 nt, Homo sapiens
  misc_RNA (1)...(19): siRNA sense strand
gagccgaagagcuuauuua

SEQ ID NO: 2125425 - RNA, 19 nt, Homo sapiens
  misc_RNA (1)...(19): siRNA sense strand
gaaaauaucacuacgauuc

SEQ ID NO: 2125426 - RNA, 19 nt, Homo sapiens
  misc_RNA (1)...(19): siRNA sense strand
gcagcgaacauuaagaauu

SEQ ID NO: 2125427 - RNA, 19 nt, Homo sapiens
  misc_RNA (1)...(19): siRNA sense strand
caaugaaaauggcgaaaua

SEQ ID NO: 2125428 - RNA, 19 nt, Homo sapiens
  misc_RNA (1)...(19): siRNA sense strand
gagcgcaaauaugagcuua

SEQ ID NO: 2125429 - RNA, 19 nt, Homo sapiens
  misc_RNA (1)...(19): siRNA sense strand
uugauuaucuugcgucauu

SEQ ID NO: 2125430 - RNA, 19 nt, Homo sapiens
  misc_RNA (1)...(19): siRNA sense strand
cgauagcacuggcaauguu

SEQ ID NO: 2125431 - RNA, 19 nt, Homo sapiens
  misc_RNA (1)...(19): siRNA sense strand
uauccgagcugaagaaugg

SEQ ID NO: 2125432 - RNA, 19 nt, Homo sapiens
  misc_RNA (1)...(19): siRNA sense strand
caucauuguuugcggcaua

SEQ ID NO: 2125433 - RNA, 19 nt, Homo sapiens
  misc_RNA (1)...(19): siRNA sense strand
gaauaacccagacuaggaa

SEQ ID NO: 2125434 - RNA, 19 nt, Homo sapiens
  misc_RNA (1)...(19): siRNA sense strand
cauauacucuauucagaug

SEQ ID NO: 2125435 - RNA, 19 nt, Homo sapiens
  misc_RNA (1)...(19): siRNA sense strand
caagugcccuaaccauuuc

SEQ ID NO: 2125436 - RNA, 19 nt, Homo sapiens
  misc_RNA (1)...(19): siRNA sense strand
cagagagggugguaaacaa

SEQ ID NO: 2125437 - RNA, 19 nt, Homo sapiens
  misc_RNA (1)...(19): siRNA sense strand
gaagcuaaagccugcagua

SEQ ID NO: 2125438 - RNA, 19 nt, Homo sapiens
  misc_RNA (1)...(19): siRNA sense strand
gaccaaacgugggaauaau

SEQ ID NO: 2125439 - RNA, 19 nt, Homo sapiens
  misc_RNA (1)...(19): siRNA sense strand
uaagucuccuugaaagauu

SEQ ID NO: 2125440 - RNA, 19 nt, Homo sapiens
  misc_RNA (1)...(19): siRNA sense strand
aaauuuggcugaugaugga

SEQ ID NO: 2125441 - RNA, 19 nt, Homo sapiens
  misc_RNA (1)...(19): siRNA sense strand
gggcagaugaugauuauuc

SEQ ID NO: 2125442 - RNA, 19 nt, Homo sapiens
  misc_RNA (1)...(19): siRNA sense strand
gauagcacuggcaauguua

SEQ ID NO: 2125443 - RNA, 19 nt, Homo sapiens
  misc_RNA (1)...(19): siRNA sense strand
gaccaaugcucagauuuua

SEQ ID NO: 2125444 - RNA, 19 nt, Homo sapiens
  misc_RNA (1)...(19): siRNA sense strand
cauauaccaucacaguuug

SEQ ID NO: 2125445 - RNA, 19 nt, Homo sapiens
  misc_RNA (1)...(19): siRNA sense strand
uuacaagcuucaacucauu

SEQ ID NO: 2125446 - RNA, 19 nt, Homo sapiens
  misc_RNA (1)...(19): siRNA sense strand
gaaaagaacaugauucaca

SEQ ID NO: 2125447 - RNA, 19 nt, Homo sapiens
  misc_RNA (1)...(19): siRNA sense strand
gaauggagaggcacccaaa

SEQ ID NO: 2125448 - RNA, 19 nt, Homo sapiens
  misc_RNA (1)...(19): siRNA sense strand
agacuugcguggaucauga

SEQ ID NO: 2125449 - RNA, 19 nt, Homo sapiens
  misc_RNA (1)...(19): siRNA sense strand
gaaaguggcagccucugau

SEQ ID NO: 2125450 - RNA, 19 nt, Homo sapiens
  misc_RNA (1)...(19): siRNA sense strand
gauuggaccuccgaaacaa

SEQ ID NO: 2125451 - RNA, 19 nt, Homo sapiens
  misc_RNA (1)...(19): siRNA sense strand
cagaacggcuuaccuaaaa

SEQ ID NO: 2125452 - RNA, 19 nt, Homo sapiens
  misc_RNA (1)...(19): siRNA sense strand
gaauugccgucuuucuaca

SEQ ID NO: 2125453 - RNA, 19 nt, Homo sapiens
  misc_RNA (1)...(19): siRNA sense strand
guauuacccuuuggacuug

SEQ ID NO: 2125454 - RNA, 19 nt, Homo sapiens
  misc_RNA (1)...(19): siRNA sense strand
gcgcaaauaugagcuuaag

SEQ ID NO: 2125455 - RNA, 19 nt, Homo sapiens
  misc_RNA (1)...(19): siRNA sense strand
ggaggaauaacccagacua

SEQ ID NO: 2125456 - RNA, 19 nt, Homo sapiens
  misc_RNA (1)...(19): siRNA sense strand
ucaguuacauauaccauca

SEQ ID NO: 2125457 - RNA, 19 nt, Homo sapiens
  misc_RNA (1)...(19): siRNA sense strand
gccauauacucuauucaga

SEQ ID NO: 2125458 - RNA, 19 nt, Homo sapiens
  misc_RNA (1)...(19): siRNA sense strand
ucuggaagcuuaugucauc

SEQ ID NO: 2125459 - RNA, 19 nt, Homo sapiens
  misc_RNA (1)...(19): siRNA sense strand
auauugcucuggaagcuua

SEQ ID NO: 2125460 - RNA, 19 nt, Homo sapiens
  misc_RNA (1)...(19): siRNA sense strand
cgguggagcucacguuuau

SEQ ID NO: 2125461 - RNA, 19 nt, Homo sapiens
  misc_RNA (1)...(19): siRNA sense strand
cacaacugcuccuugauug

SEQ ID NO: 2125462 - RNA, 19 nt, Homo sapiens
  misc_RNA (1)...(19): siRNA sense strand
gaucaggacaugcaagugu

SEQ ID NO: 2125463 - RNA, 19 nt, Homo sapiens
  misc_RNA (1)...(19): siRNA sense strand
ggaauaauacgaggacugu

SEQ ID NO: 2125464 - RNA, 19 nt, Homo sapiens
  misc_RNA (1)...(19): siRNA sense strand
guuaauagggaggauguua

SEQ ID NO: 2125465 - RNA, 19 nt, Homo sapiens
  misc_RNA (1)...(19): siRNA sense strand
cagccuuacuuugcucuua

SEQ ID NO: 2125466 - RNA, 19 nt, Homo sapiens
  misc_RNA (1)...(19): siRNA sense strand
gaaaauggcgaaauaaauc

SEQ ID NO: 2125467 - RNA, 19 nt, Homo sapiens
  misc_RNA (1)...(19): siRNA sense strand
ccagccagcuucaucacuu

SEQ ID NO: 2125468 - RNA, 19 nt, Homo sapiens
  misc_RNA (1)...(19): siRNA sense strand
acauauaccaucacaguuu

SEQ ID NO: 2125469 - RNA, 19 nt, Homo sapiens
  misc_RNA (1)...(19): siRNA sense strand
guaucaggaugggagaaua

SEQ ID NO: 2125470 - RNA, 19 nt, Homo sapiens
  misc_RNA (1)...(19): siRNA sense strand
gguuaagucuccuugaaag

SEQ ID NO: 2125471 - RNA, 19 nt, Homo sapiens
  misc_RNA (1)...(19): siRNA sense strand
gcaguugggauaauucuuc

SEQ ID NO: 2125472 - RNA, 19 nt, Homo sapiens
  misc_RNA (1)...(19): siRNA sense strand
gagcucacguuuauucaac

SEQ ID NO: 2125473 - RNA, 19 nt, Homo sapiens
  misc_RNA (1)...(19): siRNA sense strand
ucacaacugcuccuugauu

SEQ ID NO: 2125474 - RNA, 19 nt, Homo sapiens
  misc_RNA (1)...(19): siRNA sense strand
gacuguggauauuguggua

SEQ ID NO: 2125475 - RNA, 19 nt, Homo sapiens
  misc_RNA (1)...(19): siRNA sense strand
aaagccggcugggcaauaa

SEQ ID NO: 2125476 - RNA, 19 nt, Homo sapiens
  misc_RNA (1)...(19): siRNA sense strand
ccaauucuuuaccuuugaa

SEQ ID NO: 2125477 - RNA, 19 nt, Homo sapiens
  misc_RNA (1)...(19): siRNA sense strand
uaaccuguguggucuuugu

SEQ ID NO: 2125478 - RNA, 19 nt, Homo sapiens
  misc_RNA (1)...(19): siRNA sense strand
ggacaaggaggcuggaagu

SEQ ID NO: 2125479 - RNA, 19 nt, Homo sapiens
  misc_RNA (1)...(19): siRNA sense strand
gugcagaacggcuuaccua

SEQ ID NO: 2125480 - RNA, 19 nt, Homo sapiens
  misc_RNA (1)...(19): siRNA sense strand
gcacccaaaugccccaaua

SEQ ID NO: 2125481 - RNA, 19 nt, Homo sapiens
  misc_RNA (1)...(19): siRNA sense strand
gagcucguauucagugcaa

SEQ ID NO: 2125482 - RNA, 19 nt, Homo sapiens
  misc_RNA (1)...(19): siRNA sense strand
cagcagcgaacauuaagaa

SEQ ID NO: 2125483 - RNA, 19 nt, Homo sapiens
  misc_RNA (1)...(19): siRNA sense strand
gauauugugguauuagaga

SEQ ID NO: 2125484 - RNA, 19 nt, Homo sapiens
  misc_RNA (1)...(19): siRNA sense strand
cagcugugguugaacuuga

SEQ ID NO: 2125485 - RNA, 19 nt, Homo sapiens
  misc_RNA (1)...(19): siRNA sense strand
cuacaaacaagucacuaaa

SEQ ID NO: 2125486 - RNA, 19 nt, Homo sapiens
  misc_RNA (1)...(19): siRNA sense strand
ugggauaauucuucacuau

SEQ ID NO: 2125487 - RNA, 19 nt, Homo sapiens
  misc_RNA (1)...(19): siRNA sense strand
uagccgucauugucaguua

SEQ ID NO: 2125488 - RNA, 19 nt, Homo sapiens
  misc_RNA (1)...(19): siRNA sense strand
ccgaaacaaucuuauuagu

SEQ ID NO: 2125489 - RNA, 19 nt, Homo sapiens
  misc_RNA (1)...(19): siRNA sense strand
cacuagaguucuuuauaug

SEQ ID NO: 2125490 - RNA, 19 nt, Homo sapiens
  misc_RNA (1)...(19): siRNA sense strand
gaagagggcuauuugcaua

SEQ ID NO: 2125491 - RNA, 19 nt, Homo sapiens
  misc_RNA (1)...(19): siRNA sense strand
gaacauggguuauauuugg

SEQ ID NO: 2125492 - RNA, 19 nt, Homo sapiens
  misc_RNA (1)...(19): siRNA sense strand
gaacagacggcuugccuua

SEQ ID NO: 2125493 - RNA, 19 nt, Homo sapiens
  misc_RNA (1)...(19): siRNA sense strand
gggaagaccuugcuguaaa

SEQ ID NO: 2125494 - RNA, 19 nt, Homo sapiens
  misc_RNA (1)...(19): siRNA sense strand
caaugaaucuuggguauaa

SEQ ID NO: 2125495 - RNA, 19 nt, Homo sapiens
  misc_RNA (1)...(19): siRNA sense strand
gggaggauuuccauuauaa

SEQ ID NO: 2125496 - RNA, 19 nt, Homo sapiens
  misc_RNA (1)...(19): siRNA sense strand
gcaaggagaucaggcauau

SEQ ID NO: 2125497 - RNA, 19 nt, Homo sapiens
  misc_RNA (1)...(19): siRNA sense strand
ugagaaagcuguuguaugg

SEQ ID NO: 2125498 - RNA, 19 nt, Homo sapiens
  misc_RNA (1)...(19): siRNA sense strand
ggcagagacuggaauguua

SEQ ID NO: 2125499 - RNA, 19 nt, Homo sapiens
  misc_RNA (1)...(19): siRNA sense strand
cggcacaccuucuguauuu

SEQ ID NO: 2125500 - RNA, 19 nt, Homo sapiens
  misc_RNA (1)...(19): siRNA sense strand
gaaguagcauucccgugua

SEQ ID NO: 2125501 - RNA, 19 nt, Homo sapiens
  misc_RNA (1)...(19): siRNA sense strand
gcaugaagcuuugcuguau

SEQ ID NO: 2125502 - RNA, 19 nt, Homo sapiens
  misc_RNA (1)...(19): siRNA sense strand
gagaggcugucuucaauga

SEQ ID NO: 2125503 - RNA, 19 nt, Homo sapiens
  misc_RNA (1)...(19): siRNA sense strand
ugagaaggcuguaaagaga

SEQ ID NO: 2125504 - RNA, 19 nt, Homo sapiens
  misc_RNA (1)...(19): siRNA sense strand
ggacacaaauaguacaugu

SEQ ID NO: 2125505 - RNA, 19 nt, Homo sapiens
  misc_RNA (1)...(19): siRNA sense strand
caaagaagauggagauguc

SEQ ID NO: 2125506 - RNA, 19 nt, Homo sapiens
  misc_RNA (1)...(19): siRNA sense strand
gguguucucucuacuauau

SEQ ID NO: 2125507 - RNA, 19 nt, Homo sapiens
  misc_RNA (1)...(19): siRNA sense strand
agaaggagcugaaagacaa

SEQ ID NO: 2125508 - RNA, 19 nt, Homo sapiens
  misc_RNA (1)...(19): siRNA sense strand
ccuuagagcugaugaagaa

SEQ ID NO: 2125509 - RNA, 19 nt, Homo sapiens
  misc_RNA (1)...(19): siRNA sense strand
ggagauacuuggguguuaa

SEQ ID NO: 2125510 - RNA, 19 nt, Homo sapiens
  misc_RNA (1)...(19): siRNA sense strand
gaaauaguaucuguguaug

SEQ ID NO: 2125511 - RNA, 19 nt, Homo sapiens
  misc_RNA (1)...(19): siRNA sense strand
agaaaucggugggaagaua

SEQ ID NO: 2125512 - RNA, 19 nt, Homo sapiens
  misc_RNA (1)...(19): siRNA sense strand
gagacuggauuaaauguuc

SEQ ID NO: 2125513 - RNA, 19 nt, Homo sapiens
  misc_RNA (1)...(19): siRNA sense strand
uggaaggaaucaaacuuua

SEQ ID NO: 2125514 - RNA, 19 nt, Homo sapiens
  misc_RNA (1)...(19): siRNA sense strand
ugggagaccuuuacuacua

SEQ ID NO: 2125515 - RNA, 19 nt, Homo sapiens
  misc_RNA (1)...(19): siRNA sense strand
gacggaggauccugcguua

SEQ ID NO: 2125516 - RNA, 19 nt, Homo sapiens
  misc_RNA (1)...(19): siRNA sense strand
acucaacucuccauucuaa

SEQ ID NO: 2125517 - RNA, 19 nt, Homo sapiens
  misc_RNA (1)...(19): siRNA sense strand
gcagcaaaguacugguuaa

SEQ ID NO: 2125518 - RNA, 19 nt, Homo sapiens
  misc_RNA (1)...(19): siRNA sense strand
ggaagcaguuguuucaucu

SEQ ID NO: 2125519 - RNA, 19 nt, Homo sapiens
  misc_RNA (1)...(19): siRNA sense strand
gaaccaaaaugaaucugua

SEQ ID NO: 2125520 - RNA, 19 nt, Homo sapiens
  misc_RNA (1)...(19): siRNA sense strand
guauguggcuggcauugaa

SEQ ID NO: 2125521 - RNA, 19 nt, Homo sapiens
  misc_RNA (1)...(19): siRNA sense strand
gagcguggcuuacaaagac

SEQ ID NO: 2125522 - RNA, 19 nt, Homo sapiens
  misc_RNA (1)...(19): siRNA sense strand
acacaggcauugucaagaa

SEQ ID NO: 2125523 - RNA, 19 nt, Homo sapiens
  misc_RNA (1)...(19): siRNA sense strand
uaacggaggccagauagua

SEQ ID NO: 2125524 - RNA, 19 nt, Homo sapiens
  misc_RNA (1)...(19): siRNA sense strand
gugcugagguucaagaaau

SEQ ID NO: 2125525 - RNA, 19 nt, Homo sapiens
  misc_RNA (1)...(19): siRNA sense strand
gcuggguacuucauuauug

SEQ ID NO: 2125526 - RNA, 19 nt, Homo sapiens
  misc_RNA (1)...(19): siRNA sense strand
ugacacagcuggguacuuc

SEQ ID NO: 2125527 - RNA, 19 nt, Homo sapiens
  misc_RNA (1)...(19): siRNA sense strand
ucaagaaguucccgagguu

SEQ ID NO: 2125528 - RNA, 19 nt, Homo sapiens
  misc_RNA (1)...(19): siRNA sense strand
gugagaggcugucuucaau

SEQ ID NO: 2125529 - RNA, 19 nt, Homo sapiens
  misc_RNA (1)...(19): siRNA sense strand
uaucuuggauuucuuggaa

SEQ ID NO: 2125530 - RNA, 19 nt, Homo sapiens
  misc_RNA (1)...(19): siRNA sense strand
gaucaggcauauguugaaa

SEQ ID NO: 2125531 - RNA, 19 nt, Homo sapiens
  misc_RNA (1)...(19): siRNA sense strand
cagcaggacacaaauagua

SEQ ID NO: 2125532 - RNA, 19 nt, Homo sapiens
  misc_RNA (1)...(19): siRNA sense strand
ugaaaggugugcugagguu

SEQ ID NO: 2125533 - RNA, 19 nt, Homo sapiens
  misc_RNA (1)...(19): siRNA sense strand
gcauuaugguuuacagaga

SEQ ID NO: 2125534 - RNA, 19 nt, Homo sapiens
  misc_RNA (1)...(19): siRNA sense strand
uuucaaagaucaucaagug

SEQ ID NO: 2125535 - RNA, 19 nt, Homo sapiens
  misc_RNA (1)...(19): siRNA sense strand
caucagacauuccaucucu

SEQ ID NO: 2125536 - RNA, 19 nt, Homo sapiens
  misc_RNA (1)...(19): siRNA sense strand
aagcagcaauugaguggua

SEQ ID NO: 2125537 - RNA, 19 nt, Homo sapiens
  misc_RNA (1)...(19): siRNA sense strand
gcagagacuggaauguuaa

SEQ ID NO: 2125538 - RNA, 19 nt, Homo sapiens
  misc_RNA (1)...(19): siRNA sense strand
gaaauacucaagguacaaa

SEQ ID NO: 2125539 - RNA, 19 nt, Homo sapiens
  misc_RNA (1)...(19): siRNA sense strand
gaaccuuucugcuauccau

SEQ ID NO: 2125540 - RNA, 19 nt, Homo sapiens
  misc_RNA (1)...(19): siRNA sense strand
caacucuccauucuaauaa

SEQ ID NO: 2125541 - RNA, 19 nt, Homo sapiens
  misc_RNA (1)...(19): siRNA sense strand
ucaauggccugggauggua

SEQ ID NO: 2125542 - RNA, 19 nt, Homo sapiens
  misc_RNA (1)...(19): siRNA sense strand
gggauucuguacuuuguug

SEQ ID NO: 2125543 - RNA, 19 nt, Homo sapiens
  misc_RNA (1)...(19): siRNA sense strand
ucaacucuccauucuaaua

SEQ ID NO: 2125544 - RNA, 19 nt, Homo sapiens
  misc_RNA (1)...(19): siRNA sense strand
aagcuuugcuguauuaugu

SEQ ID NO: 2125545 - RNA, 19 nt, Homo sapiens
  misc_RNA (1)...(19): siRNA sense strand
aacuuuagcuggugaauau

SEQ ID NO: 2125546 - RNA, 19 nt, Homo sapiens
  misc_RNA (1)...(19): siRNA sense strand
caagaaauaguaucugugu

SEQ ID NO: 2125547 - RNA, 19 nt, Homo sapiens
  misc_RNA (1)...(19): siRNA sense strand
cuacuaccuugcagucuuu

SEQ ID NO: 2125548 - RNA, 19 nt, Homo sapiens
  misc_RNA (1)...(19): siRNA sense strand
augaagcuuugcuguauua

SEQ ID NO: 2125549 - RNA, 19 nt, Homo sapiens
  misc_RNA (1)...(19): siRNA sense strand
gcuggugaauauuuccaua

SEQ ID NO: 2125550 - RNA, 19 nt, Homo sapiens
  misc_RNA (1)...(19): siRNA sense strand
acagcuggguacuucauua

SEQ ID NO: 2125551 - RNA, 19 nt, Homo sapiens
  misc_RNA (1)...(19): siRNA sense strand
cuaauaacaucuccauucu

SEQ ID NO: 2125552 - RNA, 19 nt, Homo sapiens
  misc_RNA (1)...(19): siRNA sense strand
aaucgaugcuccuuccuuu

SEQ ID NO: 2125553 - RNA, 19 nt, Homo sapiens
  misc_RNA (1)...(19): siRNA sense strand
gaacccagaugcgucauac

SEQ ID NO: 2125554 - RNA, 19 nt, Homo sapiens
  misc_RNA (1)...(19): siRNA sense strand
ggagaucaggcauauguug

SEQ ID NO: 2125555 - RNA, 19 nt, Homo sapiens
  misc_RNA (1)...(19): siRNA sense strand
gcaaacaggauuccacagu

SEQ ID NO: 2125556 - RNA, 19 nt, Homo sapiens
  misc_RNA (1)...(19): siRNA sense strand
ugacucaacucuccauucu

SEQ ID NO: 2125557 - RNA, 19 nt, Homo sapiens
  misc_RNA (1)...(19): siRNA sense strand
gggagaccuuuacuacuau

SEQ ID NO: 2125558 - RNA, 19 nt, Homo sapiens
  misc_RNA (1)...(19): siRNA sense strand
gcaaaguacugguuaaaag

SEQ ID NO: 2125559 - RNA, 19 nt, Homo sapiens
  misc_RNA (1)...(19): siRNA sense strand
acagacggcuugccuuaga

SEQ ID NO: 2125560 - RNA, 19 nt, Homo sapiens
  misc_RNA (1)...(19): siRNA sense strand
gugggaagauauuugagaa

SEQ ID NO: 2125561 - RNA, 19 nt, Homo sapiens
  misc_RNA (1)...(19): siRNA sense strand
aaacaggauuccacagugu

SEQ ID NO: 2125562 - RNA, 19 nt, Homo sapiens
  misc_RNA (1)...(19): siRNA sense strand
ugaauguuguaccaucuuu

SEQ ID NO: 2125563 - RNA, 19 nt, Homo sapiens
  misc_RNA (1)...(19): siRNA sense strand
gaagaugggagaccuuuac

SEQ ID NO: 2125564 - RNA, 19 nt, Homo sapiens
  misc_RNA (1)...(19): siRNA sense strand
gguguuaacuguguuugga

SEQ ID NO: 2125565 - RNA, 19 nt, Homo sapiens
  misc_RNA (1)...(19): siRNA sense strand
ccagaugcgucauacaauc

SEQ ID NO: 2125566 - RNA, 19 nt, Homo sapiens
  misc_RNA (1)...(19): siRNA sense strand
agauggagaugucuuuaug

SEQ ID NO: 2125567 - RNA, 19 nt, Homo sapiens
  misc_RNA (1)...(19): siRNA sense strand
ggagugagaggcugucuuc

SEQ ID NO: 2125568 - RNA, 19 nt, Homo sapiens
  misc_RNA (1)...(19): siRNA sense strand
ggcuuuauuuacuccauua

SEQ ID NO: 2125569 - RNA, 19 nt, Homo sapiens
  misc_RNA (1)...(19): siRNA sense strand
gauaguacgcgccuggauu

SEQ ID NO: 2125570 - RNA, 19 nt, Homo sapiens
  misc_RNA (1)...(19): siRNA sense strand
gaaauuuccaagcauuaug

SEQ ID NO: 2125571 - RNA, 19 nt, Homo sapiens
  misc_RNA (1)...(19): siRNA sense strand
ggaauugaagugucacaga

SEQ ID NO: 2125572 - RNA, 19 nt, Homo sapiens
  misc_RNA (1)...(19): siRNA sense strand
uaaagcauccuacuaccuu

SEQ ID NO: 2125573 - RNA, 19 nt, Homo sapiens
  misc_RNA (1)...(19): siRNA sense strand
gaaaucggugggaagauau

SEQ ID NO: 2125574 - RNA, 19 nt, Homo sapiens
  misc_RNA (1)...(19): siRNA sense strand
gcagagcguggcuuacaaa

SEQ ID NO: 2125575 - RNA, 19 nt, Homo sapiens
  misc_RNA (1)...(19): siRNA sense strand
gggagaaggagcugaaaga

SEQ ID NO: 2125576 - RNA, 19 nt, Homo sapiens
  misc_RNA (1)...(19): siRNA sense strand
cgggaggauuuccauuaua

SEQ ID NO: 2125577 - RNA, 19 nt, Homo sapiens
  misc_RNA (1)...(19): siRNA sense strand
ggaagaccuugcuguaaaa

SEQ ID NO: 2125578 - RNA, 19 nt, Homo sapiens
  misc_RNA (1)...(19): siRNA sense strand
ggaagaaugagaaacaucu

SEQ ID NO: 2125579 - RNA, 19 nt, Homo sapiens
  misc_RNA (1)...(19): siRNA sense strand
gcuuugcuguauuauguuu

SEQ ID NO: 2125580 - RNA, 19 nt, Homo sapiens
  misc_RNA (1)...(19): siRNA sense strand
gauccugcguuaaucuaug

SEQ ID NO: 2125581 - RNA, 19 nt, Homo sapiens
  misc_RNA (1)...(19): siRNA sense strand
cagggcauguuguauaguu

SEQ ID NO: 2125582 - RNA, 19 nt, Homo sapiens
  misc_RNA (1)...(19): siRNA sense strand
gcaguuguuucaucugagu

SEQ ID NO: 2125583 - RNA, 19 nt, Homo sapiens
  misc_RNA (1)...(19): siRNA sense strand
caugugaaauuuccaagca

SEQ ID NO: 2125584 - RNA, 19 nt, Homo sapiens
  misc_RNA (1)...(19): siRNA sense strand
caagaccagcccacaguaa

SEQ ID NO: 2125585 - RNA, 19 nt, Homo sapiens
  misc_RNA (1)...(19): siRNA sense strand
gagaugucuuuaugugguu

SEQ ID NO: 2125586 - RNA, 19 nt, Homo sapiens
  misc_RNA (1)...(19): siRNA sense strand
guacuuuguugacucuaau

SEQ ID NO: 2125587 - RNA, 19 nt, Homo sapiens
  misc_RNA (1)...(19): siRNA sense strand
cugcuuggcuuuccuuaug

SEQ ID NO: 2125588 - RNA, 19 nt, Homo sapiens
  misc_RNA (1)...(19): siRNA sense strand
agacuggaauguuaaaugg

SEQ ID NO: 2125589 - RNA, 19 nt, Homo sapiens
  misc_RNA (1)...(19): siRNA sense strand
cacaccauaucuuggauuu

SEQ ID NO: 2125590 - RNA, 19 nt, Homo sapiens
  misc_RNA (1)...(19): siRNA sense strand
ucuggcacaucaugagaua

SEQ ID NO: 2125591 - RNA, 19 nt, Homo sapiens
  misc_RNA (1)...(19): siRNA sense strand
auaaagcacuccuccucuu

SEQ ID NO: 2125592 - RNA, 19 nt, Homo sapiens
  misc_RNA (1)...(19): siRNA sense strand
uggcacaucaugagauaaa

SEQ ID NO: 2125593 - RNA, 19 nt, Homo sapiens
  misc_RNA (1)...(19): siRNA sense strand
uaaagcacuccuccucuuc

SEQ ID NO: 2125594 - RNA, 19 nt, Homo sapiens
  misc_RNA (1)...(19): siRNA sense strand
gcucuggcacaucaugaga

SEQ ID NO: 2125595 - RNA, 19 nt, Homo sapiens
  misc_RNA (1)...(19): siRNA sense strand
gcacagccuucaucgacuu

SEQ ID NO: 2125596 - RNA, 19 nt, Homo sapiens
  misc_RNA (1)...(19): siRNA sense strand
ugaggauucugacaaguuu

SEQ ID NO: 2125597 - RNA, 19 nt, Homo sapiens
  misc_RNA (1)...(19): siRNA sense strand
ccaaacaggccaucaucua

SEQ ID NO: 2125598 - RNA, 19 nt, Homo sapiens
  misc_RNA (1)...(19): siRNA sense strand
ccaaggaagugcugcugaa

SEQ ID NO: 2125599 - RNA, 19 nt, Homo sapiens
  misc_RNA (1)...(19): siRNA sense strand
ugaacgagcccaccauuga

SEQ ID NO: 2125600 - RNA, 19 nt, Homo sapiens
  misc_RNA (1)...(19): siRNA sense strand
aaccagaacugccugaaga

SEQ ID NO: 2125601 - RNA, 19 nt, Homo sapiens
  misc_RNA (1)...(19): siRNA sense strand
caaacaggccaucaucuau

SEQ ID NO: 2125602 - RNA, 19 nt, Homo sapiens
  misc_RNA (1)...(19): siRNA sense strand
gagugcugcucacccauga

SEQ ID NO: 2125603 - RNA, 19 nt, Homo sapiens
  misc_RNA (1)...(19): siRNA sense strand
gcacaacaacuccaagcau

SEQ ID NO: 2125604 - RNA, 19 nt, Homo sapiens
  misc_RNA (1)...(19): siRNA sense strand
caugaucuccgccgucaaa

SEQ ID NO: 2125605 - RNA, 19 nt, Homo sapiens
  misc_RNA (1)...(19): siRNA sense strand
caggaaauccaacuucuuc

SEQ ID NO: 2125606 - RNA, 19 nt, Homo sapiens
  misc_RNA (1)...(19): siRNA sense strand
gacagguucuuccucaagu

SEQ ID NO: 2125607 - RNA, 19 nt, Homo sapiens
  misc_RNA (1)...(19): siRNA sense strand
ucaaguucuuccucaaaug

SEQ ID NO: 2125608 - RNA, 19 nt, Homo sapiens
  misc_RNA (1)...(19): siRNA sense strand
gccuccggcugguguauaa

SEQ ID NO: 2125609 - RNA, 19 nt, Homo sapiens
  misc_RNA (1)...(19): siRNA sense strand
acaauggacugcggacaga

SEQ ID NO: 2125610 - RNA, 19 nt, Homo sapiens
  misc_RNA (1)...(19): siRNA sense strand
aaacaggccaucaucuaug

SEQ ID NO: 2125611 - RNA, 19 nt, Homo sapiens
  misc_RNA (1)...(19): siRNA sense strand
cuacaaguccaagcaguuu

SEQ ID NO: 2125612 - RNA, 19 nt, Homo sapiens
  misc_RNA (1)...(19): siRNA sense strand
gggccuggcauacuccuaa

SEQ ID NO: 2125613 - RNA, 19 nt, Homo sapiens
  misc_RNA (1)...(19): siRNA sense strand
agaacugccugaagaaugc

SEQ ID NO: 2125614 - RNA, 19 nt, Homo sapiens
  misc_RNA (1)...(19): siRNA sense strand
agaaagucauucccagaca

SEQ ID NO: 2125615 - RNA, 19 nt, Homo sapiens
  misc_RNA (1)...(19): siRNA sense strand
ggacaagaaccccgaaaug

SEQ ID NO: 2125616 - RNA, 19 nt, Homo sapiens
  misc_RNA (1)...(19): siRNA sense strand
ccaccagcguguucuccuu

SEQ ID NO: 2125617 - RNA, 19 nt, Homo sapiens
  misc_RNA (1)...(19): siRNA sense strand
cagaacugccugaagaaug

SEQ ID NO: 2125618 - RNA, 19 nt, Homo sapiens
  misc_RNA (1)...(19): siRNA sense strand
gcugguguauaacaaugga

SEQ ID NO: 2125619 - RNA, 19 nt, Homo sapiens
  misc_RNA (1)...(19): siRNA sense strand
agaagcagccucccuccaa

SEQ ID NO: 2125620 - RNA, 19 nt, Homo sapiens
  misc_RNA (1)...(19): siRNA sense strand
ccuccaaccucaggaaauc

SEQ ID NO: 2125621 - RNA, 19 nt, Homo sapiens
  misc_RNA (1)...(19): siRNA sense strand
gaacgagcccaccauugac

SEQ ID NO: 2125622 - RNA, 19 nt, Homo sapiens
  misc_RNA (1)...(19): siRNA sense strand
gaucuccgccgucaaacag

SEQ ID NO: 2125623 - RNA, 19 nt, Homo sapiens
  misc_RNA (1)...(19): siRNA sense strand
cggcugguguauaacaaug

SEQ ID NO: 2125624 - RNA, 19 nt, Homo sapiens
  misc_RNA (1)...(19): siRNA sense strand
ccucaaguucuuccucaaa

SEQ ID NO: 2125625 - RNA, 19 nt, Homo sapiens
  misc_RNA (1)...(19): siRNA sense strand
uccagaggcuacagaaagu

SEQ ID NO: 2125626 - RNA, 19 nt, Homo sapiens
  misc_RNA (1)...(19): siRNA sense strand
cuucaucgacuucguggaa

SEQ ID NO: 2125627 - RNA, 19 nt, Homo sapiens
  misc_RNA (1)...(19): siRNA sense strand
cucaaguucuuccucaaau

SEQ ID NO: 2125628 - RNA, 19 nt, Homo sapiens
  misc_RNA (1)...(19): siRNA sense strand
gagcacauuuugagaagca

SEQ ID NO: 2125629 - RNA, 19 nt, Homo sapiens
  misc_RNA (1)...(19): siRNA sense strand
cuucucgccugucaacaug

SEQ ID NO: 2125630 - RNA, 19 nt, Homo sapiens
  misc_RNA (1)...(19): siRNA sense strand
gaggcuacagaaagucauu

SEQ ID NO: 2125631 - RNA, 19 nt, Homo sapiens
  misc_RNA (1)...(19): siRNA sense strand
ucaaaugcaaccagaacug

SEQ ID NO: 2125632 - RNA, 19 nt, Homo sapiens
  misc_RNA (1)...(19): siRNA sense strand
aauccaacuucuuccacuu

SEQ ID NO: 2125633 - RNA, 19 nt, Homo sapiens
  misc_RNA (1)...(19): siRNA sense strand
gcucagugcgcuccuggau

SEQ ID NO: 2125634 - RNA, 19 nt, Homo sapiens
  misc_RNA (1)...(19): siRNA sense strand
caucggcgacaacuucuuc

SEQ ID NO: 2125635 - RNA, 19 nt, Homo sapiens
  misc_RNA (1)...(19): siRNA sense strand
acagguucuuccucaaguu

SEQ ID NO: 2125636 - RNA, 19 nt, Homo sapiens
  misc_RNA (1)...(19): siRNA sense strand
caaccagaacugccugaag

SEQ ID NO: 2125637 - RNA, 19 nt, Homo sapiens
  misc_RNA (1)...(19): siRNA sense strand
caccauugacuacggauuc

SEQ ID NO: 2125638 - RNA, 19 nt, Homo sapiens
  misc_RNA (1)...(19): siRNA sense strand
caaguucuuccucaaaugc

SEQ ID NO: 2125639 - RNA, 19 nt, Homo sapiens
  misc_RNA (1)...(19): siRNA sense strand
ucaggaaauccaacuucuu

SEQ ID NO: 2125640 - RNA, 19 nt, Homo sapiens
  misc_RNA (1)...(19): siRNA sense strand
gacaagaaccccgaaaugu

SEQ ID NO: 2125641 - RNA, 19 nt, Homo sapiens
  misc_RNA (1)...(19): siRNA sense strand
ggagcgcacagccuucauc

SEQ ID NO: 2125642 - RNA, 19 nt, Homo sapiens
  misc_RNA (1)...(19): siRNA sense strand
ggucuggcacgagcacauu

SEQ ID NO: 2125643 - RNA, 19 nt, Homo sapiens
  misc_RNA (1)...(19): siRNA sense strand
gugacccucuccuacaagu

SEQ ID NO: 2125644 - RNA, 19 nt, Homo sapiens
  misc_RNA (1)...(19): siRNA sense strand
gcuacgaucucgauauuua

SEQ ID NO: 2125645 - RNA, 19 nt, Homo sapiens
  misc_RNA (1)...(19): siRNA sense strand
gaagauauaccaagcauuu

SEQ ID NO: 2125646 - RNA, 19 nt, Homo sapiens
  misc_RNA (1)...(19): siRNA sense strand
caacacuacucacagaaua

SEQ ID NO: 2125647 - RNA, 19 nt, Homo sapiens
  misc_RNA (1)...(19): siRNA sense strand
gauauaugcugcuguuauu

SEQ ID NO: 2125648 - RNA, 19 nt, Homo sapiens
  misc_RNA (1)...(19): siRNA sense strand
gguggaagauaaugaagua

SEQ ID NO: 2125649 - RNA, 19 nt, Homo sapiens
  misc_RNA (1)...(19): siRNA sense strand
gaaagugacaagguaauua

SEQ ID NO: 2125650 - RNA, 19 nt, Homo sapiens
  misc_RNA (1)...(19): siRNA sense strand
gaaggagcauaucuuuauu

SEQ ID NO: 2125651 - RNA, 19 nt, Homo sapiens
  misc_RNA (1)...(19): siRNA sense strand
gagcacagauuucucuuuc

SEQ ID NO: 2125652 - RNA, 19 nt, Homo sapiens
  misc_RNA (1)...(19): siRNA sense strand
ggagaagacucgcuuugug

SEQ ID NO: 2125653 - RNA, 19 nt, Homo sapiens
  misc_RNA (1)...(19): siRNA sense strand
caagaaaacugaacaaaug

SEQ ID NO: 2125654 - RNA, 19 nt, Homo sapiens
  misc_RNA (1)...(19): siRNA sense strand
gcaauucaguccuccauca

SEQ ID NO: 2125655 - RNA, 19 nt, Homo sapiens
  misc_RNA (1)...(19): siRNA sense strand
gggaggcaaugguuguuua

SEQ ID NO: 2125656 - RNA, 19 nt, Homo sapiens
  misc_RNA (1)...(19): siRNA sense strand
ggacagugaagauagcuua

SEQ ID NO: 2125657 - RNA, 19 nt, Homo sapiens
  misc_RNA (1)...(19): siRNA sense strand
ggacagcucugaauguuuu

SEQ ID NO: 2125658 - RNA, 19 nt, Homo sapiens
  misc_RNA (1)...(19): siRNA sense strand
ggagaaggagcauaucuuu

SEQ ID NO: 2125659 - RNA, 19 nt, Homo sapiens
  misc_RNA (1)...(19): siRNA sense strand
acacagauguuauugaugu

SEQ ID NO: 2125660 - RNA, 19 nt, Homo sapiens
  misc_RNA (1)...(19): siRNA sense strand
ggaguaucaugaccucuuu

SEQ ID NO: 2125661 - RNA, 19 nt, Homo sapiens
  misc_RNA (1)...(19): siRNA sense strand
cacaaggccuggugaguaa

SEQ ID NO: 2125662 - RNA, 19 nt, Homo sapiens
  misc_RNA (1)...(19): siRNA sense strand
gaaacggaguucccuaaag

SEQ ID NO: 2125663 - RNA, 19 nt, Homo sapiens
  misc_RNA (1)...(19): siRNA sense strand
uaaauugaaugcuggauca

SEQ ID NO: 2125664 - RNA, 19 nt, Homo sapiens
  misc_RNA (1)...(19): siRNA sense strand
gagcuacucauguuccuua

SEQ ID NO: 2125665 - RNA, 19 nt, Homo sapiens
  misc_RNA (1)...(19): siRNA sense strand
gcagauggaugguguaucg

SEQ ID NO: 2125666 - RNA, 19 nt, Homo sapiens
  misc_RNA (1)...(19): siRNA sense strand
gagaaggagcauaucuuua

SEQ ID NO: 2125667 - RNA, 19 nt, Homo sapiens
  misc_RNA (1)...(19): siRNA sense strand
ggccaaauguaaagcaauu

SEQ ID NO: 2125668 - RNA, 19 nt, Homo sapiens
  misc_RNA (1)...(19): siRNA sense strand
aauagaaagugacaaggua

SEQ ID NO: 2125669 - RNA, 19 nt, Homo sapiens
  misc_RNA (1)...(19): siRNA sense strand
ccagauauaugcugcuguu

SEQ ID NO: 2125670 - RNA, 19 nt, Homo sapiens
  misc_RNA (1)...(19): siRNA sense strand
gaaguaucaucauuuccaa

SEQ ID NO: 2125671 - RNA, 19 nt, Homo sapiens
  misc_RNA (1)...(19): siRNA sense strand
gcccugcgcuccaagauga

SEQ ID NO: 2125672 - RNA, 19 nt, Homo sapiens
  misc_RNA (1)...(19): siRNA sense strand
gaaguaaaauugucugaga

SEQ ID NO: 2125673 - RNA, 19 nt, Homo sapiens
  misc_RNA (1)...(19): siRNA sense strand
ugaauuccauuuccuucua

SEQ ID NO: 2125674 - RNA, 19 nt, Homo sapiens
  misc_RNA (1)...(19): siRNA sense strand
aaacggaguucccuaaagu

SEQ ID NO: 2125675 - RNA, 19 nt, Homo sapiens
  misc_RNA (1)...(19): siRNA sense strand
cuacacagauguuauugau

SEQ ID NO: 2125676 - RNA, 19 nt, Homo sapiens
  misc_RNA (1)...(19): siRNA sense strand
gaaaucaacacuacucaca

SEQ ID NO: 2125677 - RNA, 19 nt, Homo sapiens
  misc_RNA (1)...(19): siRNA sense strand
uuacaaggcuacacagaug

SEQ ID NO: 2125678 - RNA, 19 nt, Homo sapiens
  misc_RNA (1)...(19): siRNA sense strand
acagauuucucuuuccuaa

SEQ ID NO: 2125679 - RNA, 19 nt, Homo sapiens
  misc_RNA (1)...(19): siRNA sense strand
ccaaggaucacaugaauuc

SEQ ID NO: 2125680 - RNA, 19 nt, Homo sapiens
  misc_RNA (1)...(19): siRNA sense strand
gagaaacggaguucccuaa

SEQ ID NO: 2125681 - RNA, 19 nt, Homo sapiens
  misc_RNA (1)...(19): siRNA sense strand
ggaaacagcaggauaacuc

SEQ ID NO: 2125682 - RNA, 19 nt, Homo sapiens
  misc_RNA (1)...(19): siRNA sense strand
gcacccaauuuguuaacuu

SEQ ID NO: 2125683 - RNA, 19 nt, Homo sapiens
  misc_RNA (1)...(19): siRNA sense strand
agaaggagcauaucuuuau

SEQ ID NO: 2125684 - RNA, 19 nt, Homo sapiens
  misc_RNA (1)...(19): siRNA sense strand
caagguaauuaucagcauu

SEQ ID NO: 2125685 - RNA, 19 nt, Homo sapiens
  misc_RNA (1)...(19): siRNA sense strand
uggcuggcauugcauguua

SEQ ID NO: 2125686 - RNA, 19 nt, Homo sapiens
  misc_RNA (1)...(19): siRNA sense strand
guucauuucuucucuagug

SEQ ID NO: 2125687 - RNA, 19 nt, Homo sapiens
  misc_RNA (1)...(19): siRNA sense strand
gcuccuggcugguggaaga

SEQ ID NO: 2125688 - RNA, 19 nt, Homo sapiens
  misc_RNA (1)...(19): siRNA sense strand
ucauauacaugcugugaau

SEQ ID NO: 2125689 - RNA, 19 nt, Homo sapiens
  misc_RNA (1)...(19): siRNA sense strand
aaagggaccucuugcuugu

SEQ ID NO: 2125690 - RNA, 19 nt, Homo sapiens
  misc_RNA (1)...(19): siRNA sense strand
acucagggaucucuuuaaa

SEQ ID NO: 2125691 - RNA, 19 nt, Homo sapiens
  misc_RNA (1)...(19): siRNA sense strand
gaauuccauuuccuucuau

SEQ ID NO: 2125692 - RNA, 19 nt, Homo sapiens
  misc_RNA (1)...(19): siRNA sense strand
gaucacaugaauuccauuu

SEQ ID NO: 2125693 - RNA, 19 nt, Homo sapiens
  misc_RNA (1)...(19): siRNA sense strand
gcuaaaacuuccagucuaa

SEQ ID NO: 2125694 - RNA, 19 nt, Homo sapiens
  misc_RNA (1)...(19): siRNA sense strand
gaugguguaucgccaaauc

SEQ ID NO: 2125695 - RNA, 19 nt, Homo sapiens
  misc_RNA (1)...(19): siRNA sense strand
uaacucagggaucucuuua

SEQ ID NO: 2125696 - RNA, 19 nt, Homo sapiens
  misc_RNA (1)...(19): siRNA sense strand
cuucucagaucuuaguuaa

SEQ ID NO: 2125697 - RNA, 19 nt, Homo sapiens
  misc_RNA (1)...(19): siRNA sense strand
ugacauuccugacuuacug

SEQ ID NO: 2125698 - RNA, 19 nt, Homo sapiens
  misc_RNA (1)...(19): siRNA sense strand
ucucagaucuuaguuaaag

SEQ ID NO: 2125699 - RNA, 19 nt, Homo sapiens
  misc_RNA (1)...(19): siRNA sense strand
uauaauggcacccaauuug

SEQ ID NO: 2125700 - RNA, 19 nt, Homo sapiens
  misc_RNA (1)...(19): siRNA sense strand
gaaggaagacagcaucaag

SEQ ID NO: 2125701 - RNA, 19 nt, Homo sapiens
  misc_RNA (1)...(19): siRNA sense strand
cuacauggagcacagauuu

SEQ ID NO: 2125702 - RNA, 19 nt, Homo sapiens
  misc_RNA (1)...(19): siRNA sense strand
cuacucauguuccuuacuu

SEQ ID NO: 2125703 - RNA, 19 nt, Homo sapiens
  misc_RNA (1)...(19): siRNA sense strand
gaacagcaggaguaucaug

SEQ ID NO: 2125704 - RNA, 19 nt, Homo sapiens
  misc_RNA (1)...(19): siRNA sense strand
gggaaauugagaaguauaa

SEQ ID NO: 2125705 - RNA, 19 nt, Homo sapiens
  misc_RNA (1)...(19): siRNA sense strand
gaagaagccaaccgggaaa

SEQ ID NO: 2125706 - RNA, 19 nt, Homo sapiens
  misc_RNA (1)...(19): siRNA sense strand
gcugcagccuucauucuug

SEQ ID NO: 2125707 - RNA, 19 nt, Homo sapiens
  misc_RNA (1)...(19): siRNA sense strand
gcacagauuucucuuuccu

SEQ ID NO: 2125708 - RNA, 19 nt, Homo sapiens
  misc_RNA (1)...(19): siRNA sense strand
aaucaacacuacucacaga

SEQ ID NO: 2125709 - RNA, 19 nt, Homo sapiens
  misc_RNA (1)...(19): siRNA sense strand
gaagccaaccgggaaauug

SEQ ID NO: 2125710 - RNA, 19 nt, Homo sapiens
  misc_RNA (1)...(19): siRNA sense strand
cuaugacauuccugacuua

SEQ ID NO: 2125711 - RNA, 19 nt, Homo sapiens
  misc_RNA (1)...(19): siRNA sense strand
gaucaggagcauccacgua

SEQ ID NO: 2125712 - RNA, 19 nt, Homo sapiens
  misc_RNA (1)...(19): siRNA sense strand
gaauagaaagugacaaggu

SEQ ID NO: 2125713 - RNA, 19 nt, Homo sapiens
  misc_RNA (1)...(19): siRNA sense strand
gaaaaggauggcacuguua

SEQ ID NO: 2125714 - RNA, 19 nt, Homo sapiens
  misc_RNA (1)...(19): siRNA sense strand
ggaguucccuaaaguuacu

SEQ ID NO: 2125715 - RNA, 19 nt, Homo sapiens
  misc_RNA (1)...(19): siRNA sense strand
cuagcgagcucugugcuuu

SEQ ID NO: 2125716 - RNA, 19 nt, Homo sapiens
  misc_RNA (1)...(19): siRNA sense strand
gcuauugucccagauauau

SEQ ID NO: 2125717 - RNA, 19 nt, Homo sapiens
  misc_RNA (1)...(19): siRNA sense strand
gcagucagcuaagcagaag

SEQ ID NO: 2125718 - RNA, 19 nt, Homo sapiens
  misc_RNA (1)...(19): siRNA sense strand
gaauaaucagggaagaauu

SEQ ID NO: 2125719 - RNA, 19 nt, Homo sapiens
  misc_RNA (1)...(19): siRNA sense strand
gguaugaagguaaauugaa

SEQ ID NO: 2125720 - RNA, 19 nt, Homo sapiens
  misc_RNA (1)...(19): siRNA sense strand
ggcaaugguuguuuaggau

SEQ ID NO: 2125721 - RNA, 19 nt, Homo sapiens
  misc_RNA (1)...(19): siRNA sense strand
ccaaagggaccucuugcuu

SEQ ID NO: 2125722 - RNA, 19 nt, Homo sapiens
  misc_RNA (1)...(19): siRNA sense strand
uggauuaucuguggaacaa

SEQ ID NO: 2125723 - RNA, 19 nt, Homo sapiens
  misc_RNA (1)...(19): siRNA sense strand
gaaacagcaggauaacuca

SEQ ID NO: 2125724 - RNA, 19 nt, Homo sapiens
  misc_RNA (1)...(19): siRNA sense strand
uacaugcugugaauaauca

SEQ ID NO: 2125725 - RNA, 19 nt, Homo sapiens
  misc_RNA (1)...(19): siRNA sense strand
cugcacacuuccagagaua

SEQ ID NO: 2125726 - RNA, 19 nt, Homo sapiens
  misc_RNA (1)...(19): siRNA sense strand
ggucuucucccucuggaaa

SEQ ID NO: 2125727 - RNA, 19 nt, Homo sapiens
  misc_RNA (1)...(19): siRNA sense strand
cgucauagaaguaucauca

SEQ ID NO: 2125728 - RNA, 19 nt, Homo sapiens
  misc_RNA (1)...(19): siRNA sense strand
caggauaacucagggaucu

SEQ ID NO: 2125729 - RNA, 19 nt, Homo sapiens
  misc_RNA (1)...(19): siRNA sense strand
ucaggagcauccacguaaa

SEQ ID NO: 2125730 - RNA, 19 nt, Homo sapiens
  misc_RNA (1)...(19): siRNA sense strand
gcugcucccugaaggaaga

SEQ ID NO: 2125731 - RNA, 19 nt, Homo sapiens
  misc_RNA (1)...(19): siRNA sense strand
ggagugcuaccuuguguuc

SEQ ID NO: 2125732 - RNA, 19 nt, Homo sapiens
  misc_RNA (1)...(19): siRNA sense strand
uaauguauccuggcuggua

SEQ ID NO: 2125733 - RNA, 19 nt, Homo sapiens
  misc_RNA (1)...(19): siRNA sense strand
ggagcacagauuucucuuu

SEQ ID NO: 2125734 - RNA, 19 nt, Homo sapiens
  misc_RNA (1)...(19): siRNA sense strand
ucuaugacauuccugacuu

SEQ ID NO: 2125735 - RNA, 19 nt, Homo sapiens
  misc_RNA (1)...(19): siRNA sense strand
ccauggaggucugcuacaa

SEQ ID NO: 2125736 - RNA, 19 nt, Homo sapiens
  misc_RNA (1)...(19): siRNA sense strand
ucagaucugcguaugguuu

SEQ ID NO: 2125737 - RNA, 19 nt, Homo sapiens
  misc_RNA (1)...(19): siRNA sense strand
guucagaucugcguauggu

SEQ ID NO: 2125738 - RNA, 19 nt, Homo sapiens
  misc_RNA (1)...(19): siRNA sense strand
aaacuuccagucuaacaaa

SEQ ID NO: 2125739 - RNA, 19 nt, Homo sapiens
  misc_RNA (1)...(19): siRNA sense strand
uaaaagugauccaggaaga

SEQ ID NO: 2125740 - RNA, 19 nt, Homo sapiens
  misc_RNA (1)...(19): siRNA sense strand
uauccuggcugguaugaag

SEQ ID NO: 2125741 - RNA, 19 nt, Homo sapiens
  misc_RNA (1)...(19): siRNA sense strand
cgaucucgauauuuaaugu

SEQ ID NO: 2125742 - RNA, 19 nt, Homo sapiens
  misc_RNA (1)...(19): siRNA sense strand
uaaaugucuugaccagugu

SEQ ID NO: 2125743 - RNA, 19 nt, Homo sapiens
  misc_RNA (1)...(19): siRNA sense strand
aagcugaaaucaacacuac

SEQ ID NO: 2125744 - RNA, 19 nt, Homo sapiens
  misc_RNA (1)...(19): siRNA sense strand
gagagaaggagccaaguua

SEQ ID NO: 2125745 - RNA, 19 nt, Homo sapiens
  misc_RNA (1)...(19): siRNA sense strand
gacagcagcucugagaaua

SEQ ID NO: 2125746 - RNA, 19 nt, Homo sapiens
  misc_RNA (1)...(19): siRNA sense strand
gaacacaguggcccugaaa

SEQ ID NO: 2125747 - RNA, 19 nt, Homo sapiens
  misc_RNA (1)...(19): siRNA sense strand
cagaggagaaugaguauaa

SEQ ID NO: 2125748 - RNA, 19 nt, Homo sapiens
  misc_RNA (1)...(19): siRNA sense strand
uacaacagcugcagagaga

SEQ ID NO: 2125749 - RNA, 19 nt, Homo sapiens
  misc_RNA (1)...(19): siRNA sense strand
aaguauaucugccgcaauu

SEQ ID NO: 2125750 - RNA, 19 nt, Homo sapiens
  misc_RNA (1)...(19): siRNA sense strand
agacaagaccuauaaguau

SEQ ID NO: 2125751 - RNA, 19 nt, Homo sapiens
  misc_RNA (1)...(19): siRNA sense strand
gaagacaagaccuauaagu

SEQ ID NO: 2125752 - RNA, 19 nt, Homo sapiens
  misc_RNA (1)...(19): siRNA sense strand
gcugugagcuaguugaucu

SEQ ID NO: 2125753 - RNA, 19 nt, Homo sapiens
  misc_RNA (1)...(19): siRNA sense strand
uuguagagauucugccuua

SEQ ID NO: 2125754 - RNA, 19 nt, Homo sapiens
  misc_RNA (1)...(19): siRNA sense strand
ccagagccaucccaaggaa

SEQ ID NO: 2125755 - RNA, 19 nt, Homo sapiens
  misc_RNA (1)...(19): siRNA sense strand
gcccagaggagaaugagua

SEQ ID NO: 2125756 - RNA, 19 nt, Homo sapiens
  misc_RNA (1)...(19): siRNA sense strand
aagacaagaccuauaagua

SEQ ID NO: 2125757 - RNA, 19 nt, Homo sapiens
  misc_RNA (1)...(19): siRNA sense strand
caauguggauguuguagag

SEQ ID NO: 2125758 - RNA, 19 nt, Homo sapiens
  misc_RNA (1)...(19): siRNA sense strand
caaauugcccaucaacuca

SEQ ID NO: 2125759 - RNA, 19 nt, Homo sapiens
  misc_RNA (1)...(19): siRNA sense strand
uaaacagggugcagagagu

SEQ ID NO: 2125760 - RNA, 19 nt, Homo sapiens
  misc_RNA (1)...(19): siRNA sense strand
ccaacucucugcccuccaa

SEQ ID NO: 2125761 - RNA, 19 nt, Homo sapiens
  misc_RNA (1)...(19): siRNA sense strand
gacgggagcagcagaaaug

SEQ ID NO: 2125762 - RNA, 19 nt, Homo sapiens
  misc_RNA (1)...(19): siRNA sense strand
cugaagacaagaccuauaa

SEQ ID NO: 2125763 - RNA, 19 nt, Homo sapiens
  misc_RNA (1)...(19): siRNA sense strand
cauccaaagugccuacuag

SEQ ID NO: 2125764 - RNA, 19 nt, Homo sapiens
  misc_RNA (1)...(19): siRNA sense strand
cuaaugcgcucaccaaucc

SEQ ID NO: 2125765 - RNA, 19 nt, Homo sapiens
  misc_RNA (1)...(19): siRNA sense strand
ccaaagugccuaccaccuu

SEQ ID NO: 2125766 - RNA, 19 nt, Homo sapiens
  misc_RNA (1)...(19): siRNA sense strand
cgaaguggccucugucuac

SEQ ID NO: 2125767 - RNA, 19 nt, Homo sapiens
  misc_RNA (1)...(19): siRNA sense strand
gcugaagacaagaccuaua

SEQ ID NO: 2125768 - RNA, 19 nt, Homo sapiens
  misc_RNA (1)...(19): siRNA sense strand
ccaaauugcccaucaacuc

SEQ ID NO: 2125769 - RNA, 19 nt, Homo sapiens
  misc_RNA (1)...(19): siRNA sense strand
ggauccacguggcugagaa

SEQ ID NO: 2125770 - RNA, 19 nt, Homo sapiens
  misc_RNA (1)...(19): siRNA sense strand
gcaauguggauguuguaga

SEQ ID NO: 2125771 - RNA, 19 nt, Homo sapiens
  misc_RNA (1)...(19): siRNA sense strand
ccaaagugccuacuagcau

SEQ ID NO: 2125772 - RNA, 19 nt, Homo sapiens
  misc_RNA (1)...(19): siRNA sense strand
cuagacagcagcucugaga

SEQ ID NO: 2125773 - RNA, 19 nt, Homo sapiens
  misc_RNA (1)...(19): siRNA sense strand
ccucuggcaucucuucaau

SEQ ID NO: 2125774 - RNA, 19 nt, Homo sapiens
  misc_RNA (1)...(19): siRNA sense strand
ccaccuugaugccugugaa

SEQ ID NO: 2125775 - RNA, 19 nt, Homo sapiens
  misc_RNA (1)...(19): siRNA sense strand
ucuggcaucucuucaauac

SEQ ID NO: 2125776 - RNA, 19 nt, Homo sapiens
  misc_RNA (1)...(19): siRNA sense strand
cauccaaauugcccaucaa

SEQ ID NO: 2125777 - RNA, 19 nt, Homo sapiens
  misc_RNA (1)...(19): siRNA sense strand
guauaucugccgcaauuuc

SEQ ID NO: 2125778 - RNA, 19 nt, Homo sapiens
  misc_RNA (1)...(19): siRNA sense strand
cagcagcucugagaauagg

SEQ ID NO: 2125779 - RNA, 19 nt, Homo sapiens
  misc_RNA (1)...(19): siRNA sense strand
caacagcugcagagagaag

SEQ ID NO: 2125780 - RNA, 19 nt, Homo sapiens
  misc_RNA (1)...(19): siRNA sense strand
cuggugcagugccuucuaa

SEQ ID NO: 2125781 - RNA, 19 nt, Homo sapiens
  misc_RNA (1)...(19): siRNA sense strand
ugaacacaguggcccugaa

SEQ ID NO: 2125782 - RNA, 19 nt, Homo sapiens
  misc_RNA (1)...(19): siRNA sense strand
gccguuugcugaagacaag

SEQ ID NO: 2125783 - RNA, 19 nt, Homo sapiens
  misc_RNA (1)...(19): siRNA sense strand
cacagugcccuccaaguug

SEQ ID NO: 2125784 - RNA, 19 nt, Homo sapiens
  misc_RNA (1)...(19): siRNA sense strand
caauccagcaccauccaaa

SEQ ID NO: 2125785 - RNA, 19 nt, Homo sapiens
  misc_RNA (1)...(19): siRNA sense strand
cagggucaguuguaucuac

SEQ ID NO: 2125786 - RNA, 19 nt, Homo sapiens
  misc_RNA (1)...(19): siRNA sense strand
agacagcagcucugagaau

SEQ ID NO: 2125787 - RNA, 19 nt, Homo sapiens
  misc_RNA (1)...(19): siRNA sense strand
ccauccaaauugcccauca

SEQ ID NO: 2125788 - RNA, 19 nt, Homo sapiens
  misc_RNA (1)...(19): siRNA sense strand
gaggagaaugaguauaagu

SEQ ID NO: 2125789 - RNA, 19 nt, Homo sapiens
  misc_RNA (1)...(19): siRNA sense strand
cggacgaaguggccucugu

SEQ ID NO: 2125790 - RNA, 19 nt, Homo sapiens
  misc_RNA (1)...(19): siRNA sense strand
gugcagugccuucuaaugc

SEQ ID NO: 2125791 - RNA, 19 nt, Homo sapiens
  misc_RNA (1)...(19): siRNA sense strand
ucgaggaucuugccaucag

SEQ ID NO: 2125792 - RNA, 19 nt, Homo sapiens
  misc_RNA (1)...(19): siRNA sense strand
uaaguccgagggcaccuuu

SEQ ID NO: 2125793 - RNA, 19 nt, Homo sapiens
  misc_RNA (1)...(19): siRNA sense strand
gacacccucuggcaucucu

SEQ ID NO: 2125794 - RNA, 19 nt, Homo sapiens
  misc_RNA (1)...(19): siRNA sense strand
uguggauguuguagagauu

SEQ ID NO: 2125795 - RNA, 19 nt, Homo sapiens
  misc_RNA (1)...(19): siRNA sense strand
agagagaaggagccaaguu

SEQ ID NO: 2125796 - RNA, 19 nt, Homo sapiens
  misc_RNA (1)...(19): siRNA sense strand
acacaguggcccugaaagu

SEQ ID NO: 2125797 - RNA, 19 nt, Homo sapiens
  misc_RNA (1)...(19): siRNA sense strand
uauaucugccgcaauuuca

SEQ ID NO: 2125798 - RNA, 19 nt, Homo sapiens
  misc_RNA (1)...(19): siRNA sense strand
aggagagaauucagagcaa

SEQ ID NO: 2125799 - RNA, 19 nt, Homo sapiens
  misc_RNA (1)...(19): siRNA sense strand
uggguggaguacuucauug

SEQ ID NO: 2125800 - RNA, 19 nt, Homo sapiens
  misc_RNA (1)...(19): siRNA sense strand
gggccugugucuccaucug

SEQ ID NO: 2125801 - RNA, 19 nt, Homo sapiens
  misc_RNA (1)...(19): siRNA sense strand
ggagcaggacacagaacug

SEQ ID NO: 2125802 - RNA, 19 nt, Homo sapiens
  misc_RNA (1)...(19): siRNA sense strand
gaacaaagaacaucuagua

SEQ ID NO: 2125803 - RNA, 19 nt, Homo sapiens
  misc_RNA (1)...(19): siRNA sense strand
gaagaagccuaccuacuuu

SEQ ID NO: 2125804 - RNA, 19 nt, Homo sapiens
  misc_RNA (1)...(19): siRNA sense strand
gaacugcuguggagcuuua

SEQ ID NO: 2125805 - RNA, 19 nt, Homo sapiens
  misc_RNA (1)...(19): siRNA sense strand
cuaaggcacugauauauua

SEQ ID NO: 2125806 - RNA, 19 nt, Homo sapiens
  misc_RNA (1)...(19): siRNA sense strand
gaauaggaauggaauauga

SEQ ID NO: 2125807 - RNA, 19 nt, Homo sapiens
  misc_RNA (1)...(19): siRNA sense strand
caaagaacaucuaguaaug

SEQ ID NO: 2125808 - RNA, 19 nt, Homo sapiens
  misc_RNA (1)...(19): siRNA sense strand
gaaaguggcagauuauauu

SEQ ID NO: 2125809 - RNA, 19 nt, Homo sapiens
  misc_RNA (1)...(19): siRNA sense strand
acaagaaaguggcagauua

SEQ ID NO: 2125810 - RNA, 19 nt, Homo sapiens
  misc_RNA (1)...(19): siRNA sense strand
ggacauauaccaauacuau

SEQ ID NO: 2125811 - RNA, 19 nt, Homo sapiens
  misc_RNA (1)...(19): siRNA sense strand
gcacuuaaauacuuucaga

SEQ ID NO: 2125812 - RNA, 19 nt, Homo sapiens
  misc_RNA (1)...(19): siRNA sense strand
gaaggagaccagcuauuua

SEQ ID NO: 2125813 - RNA, 19 nt, Homo sapiens
  misc_RNA (1)...(19): siRNA sense strand
gaacacggcuuaggcauca

SEQ ID NO: 2125814 - RNA, 19 nt, Homo sapiens
  misc_RNA (1)...(19): siRNA sense strand
guaguaagaucaugcagaa

SEQ ID NO: 2125815 - RNA, 19 nt, Homo sapiens
  misc_RNA (1)...(19): siRNA sense strand
gaaaauggcugacgcuuug

SEQ ID NO: 2125816 - RNA, 19 nt, Homo sapiens
  misc_RNA (1)...(19): siRNA sense strand
cagcagcuauccaauuaua

SEQ ID NO: 2125817 - RNA, 19 nt, Homo sapiens
  misc_RNA (1)...(19): siRNA sense strand
aagaggagauguucagaua

SEQ ID NO: 2125818 - RNA, 19 nt, Homo sapiens
  misc_RNA (1)...(19): siRNA sense strand
ugaaguagcucaaagcaau

SEQ ID NO: 2125819 - RNA, 19 nt, Homo sapiens
  misc_RNA (1)...(19): siRNA sense strand
gaaguugcccuaaguuauu

SEQ ID NO: 2125820 - RNA, 19 nt, Homo sapiens
  misc_RNA (1)...(19): siRNA sense strand
agaaauuccugacagcuua

SEQ ID NO: 2125821 - RNA, 19 nt, Homo sapiens
  misc_RNA (1)...(19): siRNA sense strand
gaacaggaguaguaagauc

SEQ ID NO: 2125822 - RNA, 19 nt, Homo sapiens
  misc_RNA (1)...(19): siRNA sense strand
cagcuuacuuugccuauaa

SEQ ID NO: 2125823 - RNA, 19 nt, Homo sapiens
  misc_RNA (1)...(19): siRNA sense strand
gcauuacacuacuucuuaa

SEQ ID NO: 2125824 - RNA, 19 nt, Homo sapiens
  misc_RNA (1)...(19): siRNA sense strand
aacagcagcuauccaauua

SEQ ID NO: 2125825 - RNA, 19 nt, Homo sapiens
  misc_RNA (1)...(19): siRNA sense strand
gagaagauguauccaaugg

SEQ ID NO: 2125826 - RNA, 19 nt, Homo sapiens
  misc_RNA (1)...(19): siRNA sense strand
gauauagauucuucucuug

SEQ ID NO: 2125827 - RNA, 19 nt, Homo sapiens
  misc_RNA (1)...(19): siRNA sense strand
caaucuggcuuauauguau

SEQ ID NO: 2125828 - RNA, 19 nt, Homo sapiens
  misc_RNA (1)...(19): siRNA sense strand
gcccuugucucuguuaaua

SEQ ID NO: 2125829 - RNA, 19 nt, Homo sapiens
  misc_RNA (1)...(19): siRNA sense strand
aaagaaggaucauguaaag

SEQ ID NO: 2125830 - RNA, 19 nt, Homo sapiens
  misc_RNA (1)...(19): siRNA sense strand
ccacugggcugagaaauuc

SEQ ID NO: 2125831 - RNA, 19 nt, Homo sapiens
  misc_RNA (1)...(19): siRNA sense strand
gaggagauguucagauaca

SEQ ID NO: 2125832 - RNA, 19 nt, Homo sapiens
  misc_RNA (1)...(19): siRNA sense strand
gagaccagcuauuuaagau

SEQ ID NO: 2125833 - RNA, 19 nt, Homo sapiens
  misc_RNA (1)...(19): siRNA sense strand
ggacuaagaaagacuauca

SEQ ID NO: 2125834 - RNA, 19 nt, Homo sapiens
  misc_RNA (1)...(19): siRNA sense strand
ucaaagcaauucagcauuc

SEQ ID NO: 2125835 - RNA, 19 nt, Homo sapiens
  misc_RNA (1)...(19): siRNA sense strand
ccgaagcacuuaaauacuu

SEQ ID NO: 2125836 - RNA, 19 nt, Homo sapiens
  misc_RNA (1)...(19): siRNA sense strand
gcauugcagccaacaaaua

SEQ ID NO: 2125837 - RNA, 19 nt, Homo sapiens
  misc_RNA (1)...(19): siRNA sense strand
ucacacauauuggaacaaa

SEQ ID NO: 2125838 - RNA, 19 nt, Homo sapiens
  misc_RNA (1)...(19): siRNA sense strand
cgacauggcugcucaaacg

SEQ ID NO: 2125839 - RNA, 19 nt, Homo sapiens
  misc_RNA (1)...(19): siRNA sense strand
aaagaaaugucaccacaca

SEQ ID NO: 2125840 - RNA, 19 nt, Homo sapiens
  misc_RNA (1)...(19): siRNA sense strand
cgaagcacuuaaauacuuu

SEQ ID NO: 2125841 - RNA, 19 nt, Homo sapiens
  misc_RNA (1)...(19): siRNA sense strand
ggaaagaccugaaaaucug

SEQ ID NO: 2125842 - RNA, 19 nt, Homo sapiens
  misc_RNA (1)...(19): siRNA sense strand
uaacagcagcuauccaauu

SEQ ID NO: 2125843 - RNA, 19 nt, Homo sapiens
  misc_RNA (1)...(19): siRNA sense strand
ugaaggagaccagcuauuu

SEQ ID NO: 2125844 - RNA, 19 nt, Homo sapiens
  misc_RNA (1)...(19): siRNA sense strand
ggauuacuacaaagcauua

SEQ ID NO: 2125845 - RNA, 19 nt, Homo sapiens
  misc_RNA (1)...(19): siRNA sense strand
ggaauaugaucaagcuaag

SEQ ID NO: 2125846 - RNA, 19 nt, Homo sapiens
  misc_RNA (1)...(19): siRNA sense strand
ccacacagguaucagugaa

SEQ ID NO: 2125847 - RNA, 19 nt, Homo sapiens
  misc_RNA (1)...(19): siRNA sense strand
agaagaagccuaccuacuu

SEQ ID NO: 2125848 - RNA, 19 nt, Homo sapiens
  misc_RNA (1)...(19): siRNA sense strand
gaguccagaugcccacaua

SEQ ID NO: 2125849 - RNA, 19 nt, Homo sapiens
  misc_RNA (1)...(19): siRNA sense strand
caauggcgcuucuccuaug

SEQ ID NO: 2125850 - RNA, 19 nt, Homo sapiens
  misc_RNA (1)...(19): siRNA sense strand
caagaaaguggcagauuau

SEQ ID NO: 2125851 - RNA, 19 nt, Homo sapiens
  misc_RNA (1)...(19): siRNA sense strand
caaugcauuugcuagagua

SEQ ID NO: 2125852 - RNA, 19 nt, Homo sapiens
  misc_RNA (1)...(19): siRNA sense strand
gcuaaggcacugauauauu

SEQ ID NO: 2125853 - RNA, 19 nt, Homo sapiens
  misc_RNA (1)...(19): siRNA sense strand
gcuaugggacuaagaaaga

SEQ ID NO: 2125854 - RNA, 19 nt, Homo sapiens
  misc_RNA (1)...(19): siRNA sense strand
cuacagaauugugaaguug

SEQ ID NO: 2125855 - RNA, 19 nt, Homo sapiens
  misc_RNA (1)...(19): siRNA sense strand
ggagaccagcuauuuaaga

SEQ ID NO: 2125856 - RNA, 19 nt, Homo sapiens
  misc_RNA (1)...(19): siRNA sense strand
gaaacuggacaacaccauu

SEQ ID NO: 2125857 - RNA, 19 nt, Homo sapiens
  misc_RNA (1)...(19): siRNA sense strand
gcuccgggauauccuguuu

SEQ ID NO: 2125858 - RNA, 19 nt, Homo sapiens
  misc_RNA (1)...(19): siRNA sense strand
cuacaaagcauuacacuac

SEQ ID NO: 2125859 - RNA, 19 nt, Homo sapiens
  misc_RNA (1)...(19): siRNA sense strand
ggaccacacugggacuuau

SEQ ID NO: 2125860 - RNA, 19 nt, Homo sapiens
  misc_RNA (1)...(19): siRNA sense strand
aagagaagauguauccaau

SEQ ID NO: 2125861 - RNA, 19 nt, Homo sapiens
  misc_RNA (1)...(19): siRNA sense strand
aagcagaggaacauaauaa

SEQ ID NO: 2125862 - RNA, 19 nt, Homo sapiens
  misc_RNA (1)...(19): siRNA sense strand
uaaggauggugauauagau

SEQ ID NO: 2125863 - RNA, 19 nt, Homo sapiens
  misc_RNA (1)...(19): siRNA sense strand
gaaaaggaguuccccugaa

SEQ ID NO: 2125864 - RNA, 19 nt, Homo sapiens
  misc_RNA (1)...(19): siRNA sense strand
ggcugacgcuuugcuauuu

SEQ ID NO: 2125865 - RNA, 19 nt, Homo sapiens
  misc_RNA (1)...(19): siRNA sense strand
uuauaaaggugucugugaa

SEQ ID NO: 2125866 - RNA, 19 nt, Homo sapiens
  misc_RNA (1)...(19): siRNA sense strand
cgacgcacaguuccaguua

SEQ ID NO: 2125867 - RNA, 19 nt, Homo sapiens
  misc_RNA (1)...(19): siRNA sense strand
aaagugagacuaacggaaa

SEQ ID NO: 2125868 - RNA, 19 nt, Homo sapiens
  misc_RNA (1)...(19): siRNA sense strand
gcccuaaguuauuacaaga

SEQ ID NO: 2125869 - RNA, 19 nt, Homo sapiens
  misc_RNA (1)...(19): siRNA sense strand
gcuaaagaaggaucaugua

SEQ ID NO: 2125870 - RNA, 19 nt, Homo sapiens
  misc_RNA (1)...(19): siRNA sense strand
gcagcuauccaauuauaug

SEQ ID NO: 2125871 - RNA, 19 nt, Homo sapiens
  misc_RNA (1)...(19): siRNA sense strand
cuaaagaaggaucauguaa

SEQ ID NO: 2125872 - RNA, 19 nt, Homo sapiens
  misc_RNA (1)...(19): siRNA sense strand
gcucuuugccgucaugaaa

SEQ ID NO: 2125873 - RNA, 19 nt, Homo sapiens
  misc_RNA (1)...(19): siRNA sense strand
gacauucacuuggccagaa

SEQ ID NO: 2125874 - RNA, 19 nt, Homo sapiens
  misc_RNA (1)...(19): siRNA sense strand
ucaaagcagaggaacauaa

SEQ ID NO: 2125875 - RNA, 19 nt, Homo sapiens
  misc_RNA (1)...(19): siRNA sense strand
gcagaaagaggagauguuc

SEQ ID NO: 2125876 - RNA, 19 nt, Homo sapiens
  misc_RNA (1)...(19): siRNA sense strand
ucaugaaacuggaaacuac

SEQ ID NO: 2125877 - RNA, 19 nt, Homo sapiens
  misc_RNA (1)...(19): siRNA sense strand
caaagcagaggaacauaau

SEQ ID NO: 2125878 - RNA, 19 nt, Homo sapiens
  misc_RNA (1)...(19): siRNA sense strand
ucacuuggccagaagauug

SEQ ID NO: 2125879 - RNA, 19 nt, Homo sapiens
  misc_RNA (1)...(19): siRNA sense strand
ucacaaaggacauucacuu

SEQ ID NO: 2125880 - RNA, 19 nt, Homo sapiens
  misc_RNA (1)...(19): siRNA sense strand
gccauggcauuuauaggaa

SEQ ID NO: 2125881 - RNA, 19 nt, Homo sapiens
  misc_RNA (1)...(19): siRNA sense strand
gggaaucaauguucuacag

SEQ ID NO: 2125882 - RNA, 19 nt, Homo sapiens
  misc_RNA (1)...(19): siRNA sense strand
cuugaaagcuauggagaaa

SEQ ID NO: 2125883 - RNA, 19 nt, Homo sapiens
  misc_RNA (1)...(19): siRNA sense strand
gguaugaaguagcucaaag

SEQ ID NO: 2125884 - RNA, 19 nt, Homo sapiens
  misc_RNA (1)...(19): siRNA sense strand
gaauuaugccgaagcacuu

SEQ ID NO: 2125885 - RNA, 19 nt, Homo sapiens
  misc_RNA (1)...(19): siRNA sense strand
gcaaugcaaucggccuuca

SEQ ID NO: 2125886 - RNA, 19 nt, Homo sapiens
  misc_RNA (1)...(19): siRNA sense strand
gaucaggauuacuacaaag

SEQ ID NO: 2125887 - RNA, 19 nt, Homo sapiens
  misc_RNA (1)...(19): siRNA sense strand
gugaaguugcccuaaguua

SEQ ID NO: 2125888 - RNA, 19 nt, Homo sapiens
  misc_RNA (1)...(19): siRNA sense strand
ccaaaacgcauuaggauuu

SEQ ID NO: 2125889 - RNA, 19 nt, Homo sapiens
  misc_RNA (1)...(19): siRNA sense strand
gggcugauuuuguugcuua

SEQ ID NO: 2125890 - RNA, 19 nt, Homo sapiens
  misc_RNA (1)...(19): siRNA sense strand
caaagcaauucagcauuca

SEQ ID NO: 2125891 - RNA, 19 nt, Homo sapiens
  misc_RNA (1)...(19): siRNA sense strand
gaaguagcucaaagcaauu

SEQ ID NO: 2125892 - RNA, 19 nt, Homo sapiens
  misc_RNA (1)...(19): siRNA sense strand
auucuucucuuguucagua

SEQ ID NO: 2125893 - RNA, 19 nt, Homo sapiens
  misc_RNA (1)...(19): siRNA sense strand
gagaaauuccugacagcuu

SEQ ID NO: 2125894 - RNA, 19 nt, Homo sapiens
  misc_RNA (1)...(19): siRNA sense strand
aaggagaccagcuauuuaa

SEQ ID NO: 2125895 - RNA, 19 nt, Homo sapiens
  misc_RNA (1)...(19): siRNA sense strand
gcaggaaaggucuagauca

SEQ ID NO: 2125896 - RNA, 19 nt, Homo sapiens
  misc_RNA (1)...(19): siRNA sense strand
aagcuaaggcacugauaua

SEQ ID NO: 2125897 - RNA, 19 nt, Homo sapiens
  misc_RNA (1)...(19): siRNA sense strand
uauaugaguccuuggcuaa

SEQ ID NO: 2125898 - RNA, 19 nt, Homo sapiens
  misc_RNA (1)...(19): siRNA sense strand
gcuuaggcaucacaaagga

SEQ ID NO: 2125899 - RNA, 19 nt, Homo sapiens
  misc_RNA (1)...(19): siRNA sense strand
aaacagcagccacacacua

SEQ ID NO: 2125900 - RNA, 19 nt, Homo sapiens
  misc_RNA (1)...(19): siRNA sense strand
guaagaucaugcagaacug

SEQ ID NO: 2125901 - RNA, 19 nt, Homo sapiens
  misc_RNA (1)...(19): siRNA sense strand
gugauuggccucauuguuc

SEQ ID NO: 2125902 - RNA, 19 nt, Homo sapiens
  misc_RNA (1)...(19): siRNA sense strand
ggagauguuucaaucauua

SEQ ID NO: 2125903 - RNA, 19 nt, Homo sapiens
  misc_RNA (1)...(19): siRNA sense strand
caaaugaucuuaagcaguu

SEQ ID NO: 2125904 - RNA, 19 nt, Homo sapiens
  misc_RNA (1)...(19): siRNA sense strand
gagagaacaugaaggaaua

SEQ ID NO: 2125905 - RNA, 19 nt, Homo sapiens
  misc_RNA (1)...(19): siRNA sense strand
ugagauagcuguaacaaga

SEQ ID NO: 2125906 - RNA, 19 nt, Homo sapiens
  misc_RNA (1)...(19): siRNA sense strand
ggacaaaccuguguucaug

SEQ ID NO: 2125907 - RNA, 19 nt, Homo sapiens
  misc_RNA (1)...(19): siRNA sense strand
gaccaacuauucucagaua

SEQ ID NO: 2125908 - RNA, 19 nt, Homo sapiens
  misc_RNA (1)...(19): siRNA sense strand
gggagaagcuucagauguu

SEQ ID NO: 2125909 - RNA, 19 nt, Homo sapiens
  misc_RNA (1)...(19): siRNA sense strand
gccaaaggauaaacaaaua

SEQ ID NO: 2125910 - RNA, 19 nt, Homo sapiens
  misc_RNA (1)...(19): siRNA sense strand
gagcaaaccucugugugua

SEQ ID NO: 2125911 - RNA, 19 nt, Homo sapiens
  misc_RNA (1)...(19): siRNA sense strand
gauaagaugugaaggaauc

SEQ ID NO: 2125912 - RNA, 19 nt, Homo sapiens
  misc_RNA (1)...(19): siRNA sense strand
gauuauaucuacaggguuu

SEQ ID NO: 2125913 - RNA, 19 nt, Homo sapiens
  misc_RNA (1)...(19): siRNA sense strand
uaauggagcuuacaaugaa

SEQ ID NO: 2125914 - RNA, 19 nt, Homo sapiens
  misc_RNA (1)...(19): siRNA sense strand
cugaagaugucaagcauua

SEQ ID NO: 2125915 - RNA, 19 nt, Homo sapiens
  misc_RNA (1)...(19): siRNA sense strand
ccaagcauaugaagacuuu

SEQ ID NO: 2125916 - RNA, 19 nt, Homo sapiens
  misc_RNA (1)...(19): siRNA sense strand
gagaagaaguuuggaguug

SEQ ID NO: 2125917 - RNA, 19 nt, Homo sapiens
  misc_RNA (1)...(19): siRNA sense strand
gaguauaggcucaacuuua

SEQ ID NO: 2125918 - RNA, 19 nt, Homo sapiens
  misc_RNA (1)...(19): siRNA sense strand
gaagagagaacaugaagga

SEQ ID NO: 2125919 - RNA, 19 nt, Homo sapiens
  misc_RNA (1)...(19): siRNA sense strand
gcaaggaggccucaucuga

SEQ ID NO: 2125920 - RNA, 19 nt, Homo sapiens
  misc_RNA (1)...(19): siRNA sense strand
caccgaugcuucaaauuua

SEQ ID NO: 2125921 - RNA, 19 nt, Homo sapiens
  misc_RNA (1)...(19): siRNA sense strand
ggaaugggaggaacuuaua

SEQ ID NO: 2125922 - RNA, 19 nt, Homo sapiens
  misc_RNA (1)...(19): siRNA sense strand
uaacuucgauucugcaaug

SEQ ID NO: 2125923 - RNA, 19 nt, Homo sapiens
  misc_RNA (1)...(19): siRNA sense strand
cagaagaaccaaaugaaua

SEQ ID NO: 2125924 - RNA, 19 nt, Homo sapiens
  misc_RNA (1)...(19): siRNA sense strand
gaaaagauguugcccaaga

SEQ ID NO: 2125925 - RNA, 19 nt, Homo sapiens
  misc_RNA (1)...(19): siRNA sense strand
gggaggaacuuauaaacga

SEQ ID NO: 2125926 - RNA, 19 nt, Homo sapiens
  misc_RNA (1)...(19): siRNA sense strand
ugaaaguucuggucauaaa

SEQ ID NO: 2125927 - RNA, 19 nt, Homo sapiens
  misc_RNA (1)...(19): siRNA sense strand
caggauaucuuaaauacga

SEQ ID NO: 2125928 - RNA, 19 nt, Homo sapiens
  misc_RNA (1)...(19): siRNA sense strand
agaaaucacuccacuccua

SEQ ID NO: 2125929 - RNA, 19 nt, Homo sapiens
  misc_RNA (1)...(19): siRNA sense strand
guucaauccucucuaauga

SEQ ID NO: 2125930 - RNA, 19 nt, Homo sapiens
  misc_RNA (1)...(19): siRNA sense strand
gaacaugaaggaauaacaa

SEQ ID NO: 2125931 - RNA, 19 nt, Homo sapiens
  misc_RNA (1)...(19): siRNA sense strand
gcaaauacuacucaggaua

SEQ ID NO: 2125932 - RNA, 19 nt, Homo sapiens
  misc_RNA (1)...(19): siRNA sense strand
cauaaacgaucuuccaguu

SEQ ID NO: 2125933 - RNA, 19 nt, Homo sapiens
  misc_RNA (1)...(19): siRNA sense strand
gaagagcagguucugauuu

SEQ ID NO: 2125934 - RNA, 19 nt, Homo sapiens
  misc_RNA (1)...(19): siRNA sense strand
ggaaaucauugaggucauu

SEQ ID NO: 2125935 - RNA, 19 nt, Homo sapiens
  misc_RNA (1)...(19): siRNA sense strand
gaagaaugccacagaagaa

SEQ ID NO: 2125936 - RNA, 19 nt, Homo sapiens
  misc_RNA (1)...(19): siRNA sense strand
caaauacuacucaggauaa

SEQ ID NO: 2125937 - RNA, 19 nt, Homo sapiens
  misc_RNA (1)...(19): siRNA sense strand
aguauaggcucaacuuuaa

SEQ ID NO: 2125938 - RNA, 19 nt, Homo sapiens
  misc_RNA (1)...(19): siRNA sense strand
caagaugcauugcuguuug

SEQ ID NO: 2125939 - RNA, 19 nt, Homo sapiens
  misc_RNA (1)...(19): siRNA sense strand
guacaaacuagcaaagaua

SEQ ID NO: 2125940 - RNA, 19 nt, Homo sapiens
  misc_RNA (1)...(19): siRNA sense strand
ggaaccaugugcugaaguu

SEQ ID NO: 2125941 - RNA, 19 nt, Homo sapiens
  misc_RNA (1)...(19): siRNA sense strand
gaagauugcugaggaccaa

SEQ ID NO: 2125942 - RNA, 19 nt, Homo sapiens
  misc_RNA (1)...(19): siRNA sense strand
guaaagauauauccagaag

SEQ ID NO: 2125943 - RNA, 19 nt, Homo sapiens
  misc_RNA (1)...(19): siRNA sense strand
gagaauaaaggacauguga

SEQ ID NO: 2125944 - RNA, 19 nt, Homo sapiens
  misc_RNA (1)...(19): siRNA sense strand
ucaauccucucuaaugaaa

SEQ ID NO: 2125945 - RNA, 19 nt, Homo sapiens
  misc_RNA (1)...(19): siRNA sense strand
gaguauauccagagucaua

SEQ ID NO: 2125946 - RNA, 19 nt, Homo sapiens
  misc_RNA (1)...(19): siRNA sense strand
ccaacagagucacuacaua

SEQ ID NO: 2125947 - RNA, 19 nt, Homo sapiens
  misc_RNA (1)...(19): siRNA sense strand
gcgagugccucacagauga

SEQ ID NO: 2125948 - RNA, 19 nt, Homo sapiens
  misc_RNA (1)...(19): siRNA sense strand
aaauggaguugauguauug

SEQ ID NO: 2125949 - RNA, 19 nt, Homo sapiens
  misc_RNA (1)...(19): siRNA sense strand
gaagaaguuuggaguugau

SEQ ID NO: 2125950 - RNA, 19 nt, Homo sapiens
  misc_RNA (1)...(19): siRNA sense strand
agacucugcugcuguguua

SEQ ID NO: 2125951 - RNA, 19 nt, Homo sapiens
  misc_RNA (1)...(19): siRNA sense strand
ggaagaauaaggagaauca

SEQ ID NO: 2125952 - RNA, 19 nt, Homo sapiens
  misc_RNA (1)...(19): siRNA sense strand
gaagugauuuuccauguuu

SEQ ID NO: 2125953 - RNA, 19 nt, Homo sapiens
  misc_RNA (1)...(19): siRNA sense strand
ggagaagcuucagauguuu

SEQ ID NO: 2125954 - RNA, 19 nt, Homo sapiens
  misc_RNA (1)...(19): siRNA sense strand
caagauccaugccagaguu

SEQ ID NO: 2125955 - RNA, 19 nt, Homo sapiens
  misc_RNA (1)...(19): siRNA sense strand
caaaggcuguguucuagau

SEQ ID NO: 2125956 - RNA, 19 nt, Homo sapiens
  misc_RNA (1)...(19): siRNA sense strand
gaagacaaguguucaaucc

SEQ ID NO: 2125957 - RNA, 19 nt, Homo sapiens
  misc_RNA (1)...(19): siRNA sense strand
gagaagaagagaagaaguu

SEQ ID NO: 2125958 - RNA, 19 nt, Homo sapiens
  misc_RNA (1)...(19): siRNA sense strand
gaaagaggccaucaaugug

SEQ ID NO: 2125959 - RNA, 19 nt, Homo sapiens
  misc_RNA (1)...(19): siRNA sense strand
ugaaagaggccaucaaugu

SEQ ID NO: 2125960 - RNA, 19 nt, Homo sapiens
  misc_RNA (1)...(19): siRNA sense strand
ggaauaacaaucuuaguuc

SEQ ID NO: 2125961 - RNA, 19 nt, Homo sapiens
  misc_RNA (1)...(19): siRNA sense strand
cgucacagcuaaaucuaaa

SEQ ID NO: 2125962 - RNA, 19 nt, Homo sapiens
  misc_RNA (1)...(19): siRNA sense strand
ugucaagcauuaccucaua

SEQ ID NO: 2125963 - RNA, 19 nt, Homo sapiens
  misc_RNA (1)...(19): siRNA sense strand
uagcaaagauacgggauaa

SEQ ID NO: 2125964 - RNA, 19 nt, Homo sapiens
  misc_RNA (1)...(19): siRNA sense strand
ggaaucaggcuguuucuuc

SEQ ID NO: 2125965 - RNA, 19 nt, Homo sapiens
  misc_RNA (1)...(19): siRNA sense strand
cagauuuccuggugcauuu

SEQ ID NO: 2125966 - RNA, 19 nt, Homo sapiens
  misc_RNA (1)...(19): siRNA sense strand
gaauuggauuugaaagaug

SEQ ID NO: 2125967 - RNA, 19 nt, Homo sapiens
  misc_RNA (1)...(19): siRNA sense strand
gaaccgaugcgauuuagga

SEQ ID NO: 2125968 - RNA, 19 nt, Homo sapiens
  misc_RNA (1)...(19): siRNA sense strand
aaaccuaccucuggauaaa

SEQ ID NO: 2125969 - RNA, 19 nt, Homo sapiens
  misc_RNA (1)...(19): siRNA sense strand
gggaugauguucuugacaa

SEQ ID NO: 2125970 - RNA, 19 nt, Homo sapiens
  misc_RNA (1)...(19): siRNA sense strand
uaaaggacaugugaagaga

SEQ ID NO: 2125971 - RNA, 19 nt, Homo sapiens
  misc_RNA (1)...(19): siRNA sense strand
gaccaaagccuguguacau

SEQ ID NO: 2125972 - RNA, 19 nt, Homo sapiens
  misc_RNA (1)...(19): siRNA sense strand
gaugugagaguaauuguga

SEQ ID NO: 2125973 - RNA, 19 nt, Homo sapiens
  misc_RNA (1)...(19): siRNA sense strand
gggauaaucuagcaauaag

SEQ ID NO: 2125974 - RNA, 19 nt, Homo sapiens
  misc_RNA (1)...(19): siRNA sense strand
ccaccgaugcuucaaauuu

SEQ ID NO: 2125975 - RNA, 19 nt, Homo sapiens
  misc_RNA (1)...(19): siRNA sense strand
ggaggagugucaacaguca

SEQ ID NO: 2125976 - RNA, 19 nt, Homo sapiens
  misc_RNA (1)...(19): siRNA sense strand
gagaacauuuacaguacaa

SEQ ID NO: 2125977 - RNA, 19 nt, Homo sapiens
  misc_RNA (1)...(19): siRNA sense strand
uaacaaacaucuacaaacc

SEQ ID NO: 2125978 - RNA, 19 nt, Homo sapiens
  misc_RNA (1)...(19): siRNA sense strand
cagcaggucuucccauuag

SEQ ID NO: 2125979 - RNA, 19 nt, Homo sapiens
  misc_RNA (1)...(19): siRNA sense strand
cagagucacuacauacuga

SEQ ID NO: 2125980 - RNA, 19 nt, Homo sapiens
  misc_RNA (1)...(19): siRNA sense strand
ccagguagcuugcgauguc

SEQ ID NO: 2125981 - RNA, 19 nt, Homo sapiens
  misc_RNA (1)...(19): siRNA sense strand
gcaaagauacgggauaauc

SEQ ID NO: 2125982 - RNA, 19 nt, Homo sapiens
  misc_RNA (1)...(19): siRNA sense strand
gaacucugcaaacaucuuu

SEQ ID NO: 2125983 - RNA, 19 nt, Homo sapiens
  misc_RNA (1)...(19): siRNA sense strand
gaaaaguaguucaagugua

SEQ ID NO: 2125984 - RNA, 19 nt, Homo sapiens
  misc_RNA (1)...(19): siRNA sense strand
gaaggaaucaggcuguuuc

SEQ ID NO: 2125985 - RNA, 19 nt, Homo sapiens
  misc_RNA (1)...(19): siRNA sense strand
cggcgacacugccaaauga

SEQ ID NO: 2125986 - RNA, 19 nt, Homo sapiens
  misc_RNA (1)...(19): siRNA sense strand
gaaaguaccaacagugaca

SEQ ID NO: 2125987 - RNA, 19 nt, Homo sapiens
  misc_RNA (1)...(19): siRNA sense strand
gauaauggagcuuacaaug

SEQ ID NO: 2125988 - RNA, 19 nt, Homo sapiens
  misc_RNA (1)...(19): siRNA sense strand
gaguugauguauugccuaa

SEQ ID NO: 2125989 - RNA, 19 nt, Homo sapiens
  misc_RNA (1)...(19): siRNA sense strand
gaauaaaggacaugugaag

SEQ ID NO: 2125990 - RNA, 19 nt, Homo sapiens
  misc_RNA (1)...(19): siRNA sense strand
ggaaugacgagguccauau

SEQ ID NO: 2125991 - RNA, 19 nt, Homo sapiens
  misc_RNA (1)...(19): siRNA sense strand
gaacugaagaugucaagca

SEQ ID NO: 2125992 - RNA, 19 nt, Homo sapiens
  misc_RNA (1)...(19): siRNA sense strand
gguacaaacuagcaaagau

SEQ ID NO: 2125993 - RNA, 19 nt, Homo sapiens
  misc_RNA (1)...(19): siRNA sense strand
gaacucugguacaaacuag

SEQ ID NO: 2125994 - RNA, 19 nt, Homo sapiens
  misc_RNA (1)...(19): siRNA sense strand
gaaucaggcuguuucuucu

SEQ ID NO: 2125995 - RNA, 19 nt, Homo sapiens
  misc_RNA (1)...(19): siRNA sense strand
cagaagcugucaugcagaa

SEQ ID NO: 2125996 - RNA, 19 nt, Homo sapiens
  misc_RNA (1)...(19): siRNA sense strand
gacgaacucugcaaacauc

SEQ ID NO: 2125997 - RNA, 19 nt, Homo sapiens
  misc_RNA (1)...(19): siRNA sense strand
ccaaagccuguguacauua

SEQ ID NO: 2125998 - RNA, 19 nt, Homo sapiens
  misc_RNA (1)...(19): siRNA sense strand
gcucugggaugacuuucuu

SEQ ID NO: 2125999 - RNA, 19 nt, Homo sapiens
  misc_RNA (1)...(19): siRNA sense strand
ggaugauguucuugacaaa

SEQ ID NO: 2126000 - RNA, 19 nt, Homo sapiens
  misc_RNA (1)...(19): siRNA sense strand
cgucauugguuacaacuga

SEQ ID NO: 2126001 - RNA, 19 nt, Homo sapiens
  misc_RNA (1)...(19): siRNA sense strand
gaaagacagaagagugaaa

SEQ ID NO: 2126002 - RNA, 19 nt, Homo sapiens
  misc_RNA (1)...(19): siRNA sense strand
ggacagaagugcacagaga

SEQ ID NO: 2126003 - RNA, 19 nt, Homo sapiens
  misc_RNA (1)...(19): siRNA sense strand
ccaaagaucagccagaaua

SEQ ID NO: 2126004 - RNA, 19 nt, Homo sapiens
  misc_RNA (1)...(19): siRNA sense strand
ggagaaagcacaacuugga

SEQ ID NO: 2126005 - RNA, 19 nt, Homo sapiens
  misc_RNA (1)...(19): siRNA sense strand
gaagggagacacagaauca

SEQ ID NO: 2126006 - RNA, 19 nt, Homo sapiens
  misc_RNA (1)...(19): siRNA sense strand
gaagugacaccacaucaga

SEQ ID NO: 2126007 - RNA, 19 nt, Homo sapiens
  misc_RNA (1)...(19): siRNA sense strand
ccaauaauccacacucauu

SEQ ID NO: 2126008 - RNA, 19 nt, Homo sapiens
  misc_RNA (1)...(19): siRNA sense strand
ccgcggagcuccacuacaa

SEQ ID NO: 2126009 - RNA, 19 nt, Homo sapiens
  misc_RNA (1)...(19): siRNA sense strand
aggagaagcuggagaucua

SEQ ID NO: 2126010 - RNA, 19 nt, Homo sapiens
  misc_RNA (1)...(19): siRNA sense strand
caaauuggguccuggaaac

SEQ ID NO: 2126011 - RNA, 19 nt, Homo sapiens
  misc_RNA (1)...(19): siRNA sense strand
cagaaucacugcaggagau

SEQ ID NO: 2126012 - RNA, 19 nt, Homo sapiens
  misc_RNA (1)...(19): siRNA sense strand
ggaguuuaaugccaccaaa

SEQ ID NO: 2126013 - RNA, 19 nt, Homo sapiens
  misc_RNA (1)...(19): siRNA sense strand
uuccaaagcugauaucaau

SEQ ID NO: 2126014 - RNA, 19 nt, Homo sapiens
  misc_RNA (1)...(19): siRNA sense strand
cuaccaaacuuuccagauc

SEQ ID NO: 2126015 - RNA, 19 nt, Homo sapiens
  misc_RNA (1)...(19): siRNA sense strand
ccaccaggcugcacaccaa

SEQ ID NO: 2126016 - RNA, 19 nt, Homo sapiens
  misc_RNA (1)...(19): siRNA sense strand
gaucuggugccucuucaaa

SEQ ID NO: 2126017 - RNA, 19 nt, Homo sapiens
  misc_RNA (1)...(19): siRNA sense strand
ucuggugccucuucaaauu

SEQ ID NO: 2126018 - RNA, 19 nt, Homo sapiens
  misc_RNA (1)...(19): siRNA sense strand
ccagauccuuucuccuuga

SEQ ID NO: 2126019 - RNA, 19 nt, Homo sapiens
  misc_RNA (1)...(19): siRNA sense strand
ggacgaggacuacaucaag

SEQ ID NO: 2126020 - RNA, 19 nt, Homo sapiens
  misc_RNA (1)...(19): siRNA sense strand
ugcacaaggugaugaauga

SEQ ID NO: 2126021 - RNA, 19 nt, Homo sapiens
  misc_RNA (1)...(19): siRNA sense strand
agaaguacaugcacaaggu

SEQ ID NO: 2126022 - RNA, 19 nt, Homo sapiens
  misc_RNA (1)...(19): siRNA sense strand
ucaaugggcagaauccaaa

SEQ ID NO: 2126023 - RNA, 19 nt, Homo sapiens
  misc_RNA (1)...(19): siRNA sense strand
ggacaaacccaagggaagu

SEQ ID NO: 2126024 - RNA, 19 nt, Homo sapiens
  misc_RNA (1)...(19): siRNA sense strand
cguccaaacugcccaggaa

SEQ ID NO: 2126025 - RNA, 19 nt, Homo sapiens
  misc_RNA (1)...(19): siRNA sense strand
aagaucagccagaauauga

SEQ ID NO: 2126026 - RNA, 19 nt, Homo sapiens
  misc_RNA (1)...(19): siRNA sense strand
gaucagcauccggagaaua

SEQ ID NO: 2126027 - RNA, 19 nt, Homo sapiens
  misc_RNA (1)...(19): siRNA sense strand
gcccugagcugaauaaccu

SEQ ID NO: 2126028 - RNA, 19 nt, Homo sapiens
  misc_RNA (1)...(19): siRNA sense strand
gagaaagcacaacuuggaa

SEQ ID NO: 2126029 - RNA, 19 nt, Homo sapiens
  misc_RNA (1)...(19): siRNA sense strand
gggaaguccugcucacaag

SEQ ID NO: 2126030 - RNA, 19 nt, Homo sapiens
  misc_RNA (1)...(19): siRNA sense strand
uaaagaagggagacacaga

SEQ ID NO: 2126031 - RNA, 19 nt, Homo sapiens
  misc_RNA (1)...(19): siRNA sense strand
cgacgguccugacucugaa

SEQ ID NO: 2126032 - RNA, 19 nt, Homo sapiens
  misc_RNA (1)...(19): siRNA sense strand
gaagcgaggaguuuaaugc

SEQ ID NO: 2126033 - RNA, 19 nt, Homo sapiens
  misc_RNA (1)...(19): siRNA sense strand
uaaagaaguacaugcacaa

SEQ ID NO: 2126034 - RNA, 19 nt, Homo sapiens
  misc_RNA (1)...(19): siRNA sense strand
ggucguaggaggacuuaga

SEQ ID NO: 2126035 - RNA, 19 nt, Homo sapiens
  misc_RNA (1)...(19): siRNA sense strand
ggacagcugccaccgaagu

SEQ ID NO: 2126036 - RNA, 19 nt, Homo sapiens
  misc_RNA (1)...(19): siRNA sense strand
cagaaucgaggaccuguga

SEQ ID NO: 2126037 - RNA, 19 nt, Homo sapiens
  misc_RNA (1)...(19): siRNA sense strand
ggucgacgguccugacucu

SEQ ID NO: 2126038 - RNA, 19 nt, Homo sapiens
  misc_RNA (1)...(19): siRNA sense strand
uaggaggacuuagauacuu

SEQ ID NO: 2126039 - RNA, 19 nt, Homo sapiens
  misc_RNA (1)...(19): siRNA sense strand
ggaaaccgaguccuagaca

SEQ ID NO: 2126040 - RNA, 19 nt, Homo sapiens
  misc_RNA (1)...(19): siRNA sense strand
caaagaucagccagaauau

SEQ ID NO: 2126041 - RNA, 19 nt, Homo sapiens
  misc_RNA (1)...(19): siRNA sense strand
aaccaaagaucagccagaa

SEQ ID NO: 2126042 - RNA, 19 nt, Homo sapiens
  misc_RNA (1)...(19): siRNA sense strand
gggcacccuucauugcaaa

SEQ ID NO: 2126043 - RNA, 19 nt, Homo sapiens
  misc_RNA (1)...(19): siRNA sense strand
auucugagcacucucuuua

SEQ ID NO: 2126044 - RNA, 19 nt, Homo sapiens
  misc_RNA (1)...(19): siRNA sense strand
aagaggccagggaauauua

SEQ ID NO: 2126045 - RNA, 19 nt, Homo sapiens
  misc_RNA (1)...(19): siRNA sense strand
ccaagaggccagggaauau

SEQ ID NO: 2126046 - RNA, 19 nt, Homo sapiens
  misc_RNA (1)...(19): siRNA sense strand
ccaaacugcccaggaauug

SEQ ID NO: 2126047 - RNA, 19 nt, Homo sapiens
  misc_RNA (1)...(19): siRNA sense strand
gagauuguuggaagaggua

SEQ ID NO: 2126048 - RNA, 19 nt, Homo sapiens
  misc_RNA (1)...(19): siRNA sense strand
gggaccaggacuacaagua

SEQ ID NO: 2126049 - RNA, 19 nt, Homo sapiens
  misc_RNA (1)...(19): siRNA sense strand
caagaggccagggaauauu

SEQ ID NO: 2126050 - RNA, 19 nt, Homo sapiens
  misc_RNA (1)...(19): siRNA sense strand
ggaccaggacuacaaguac

SEQ ID NO: 2126051 - RNA, 19 nt, Homo sapiens
  misc_RNA (1)...(19): siRNA sense strand
aaacugcccaggaauugaa

SEQ ID NO: 2126052 - RNA, 19 nt, Homo sapiens
  misc_RNA (1)...(19): siRNA sense strand
aaagaagggagacacagaa

SEQ ID NO: 2126053 - RNA, 19 nt, Homo sapiens
  misc_RNA (1)...(19): siRNA sense strand
gcaucaagcgcaaggacuu

SEQ ID NO: 2126054 - RNA, 19 nt, Homo sapiens
  misc_RNA (1)...(19): siRNA sense strand
cagcacggccgacaucuuc

SEQ ID NO: 2126055 - RNA, 19 nt, Homo sapiens
  misc_RNA (1)...(19): siRNA sense strand
ggaauugaagacacuuuua

SEQ ID NO: 2126056 - RNA, 19 nt, Homo sapiens
  misc_RNA (1)...(19): siRNA sense strand
ccaaagcugauaucaaugg

SEQ ID NO: 2126057 - RNA, 19 nt, Homo sapiens
  misc_RNA (1)...(19): siRNA sense strand
ucugagcacucucuuuaca

SEQ ID NO: 2126058 - RNA, 19 nt, Homo sapiens
  misc_RNA (1)...(19): siRNA sense strand
gcgggaagcgaggaguuua

SEQ ID NO: 2126059 - RNA, 19 nt, Homo sapiens
  misc_RNA (1)...(19): siRNA sense strand
gaaagcacaacuuggaaaa

SEQ ID NO: 2126060 - RNA, 19 nt, Homo sapiens
  misc_RNA (1)...(19): siRNA sense strand
guccugcccuggauuaucu

SEQ ID NO: 2126061 - RNA, 19 nt, Homo sapiens
  misc_RNA (1)...(19): siRNA sense strand
ccaaggagaagcuggagau

SEQ ID NO: 2126062 - RNA, 19 nt, Homo sapiens
  misc_RNA (1)...(19): siRNA sense strand
ggacuacaaguacgacagu

SEQ ID NO: 2126063 - RNA, 19 nt, Homo sapiens
  misc_RNA (1)...(19): siRNA sense strand
caccaauaauccacacuca

SEQ ID NO: 2126064 - RNA, 19 nt, Homo sapiens
  misc_RNA (1)...(19): siRNA sense strand
gcaaaagcgaguucuuaaa

SEQ ID NO: 2126065 - RNA, 19 nt, Homo sapiens
  misc_RNA (1)...(19): siRNA sense strand
uaccaaacuuuccagaucu

SEQ ID NO: 2126066 - RNA, 19 nt, Homo sapiens
  misc_RNA (1)...(19): siRNA sense strand
gacguccugcccuggauua

SEQ ID NO: 2126067 - RNA, 19 nt, Homo sapiens
  misc_RNA (1)...(19): siRNA sense strand
ucaaauuggguccuggaaa

SEQ ID NO: 2126068 - RNA, 19 nt, Homo sapiens
  misc_RNA (1)...(19): siRNA sense strand
gacuacaaguacgacagua

SEQ ID NO: 2126069 - RNA, 19 nt, Homo sapiens
  misc_RNA (1)...(19): siRNA sense strand
aaauauccaggucaccaua

SEQ ID NO: 2126070 - RNA, 19 nt, Homo sapiens
  misc_RNA (1)...(19): siRNA sense strand
guugguccuuucucuguau

SEQ ID NO: 2126071 - RNA, 19 nt, Homo sapiens
  misc_RNA (1)...(19): siRNA sense strand
agaaagcacaacuuggaaa

SEQ ID NO: 2126072 - RNA, 19 nt, Homo sapiens
  misc_RNA (1)...(19): siRNA sense strand
uuaccacucuguuuucuuu

SEQ ID NO: 2126073 - RNA, 19 nt, Homo sapiens
  misc_RNA (1)...(19): siRNA sense strand
gguaauggagaaagcacaa

SEQ ID NO: 2126074 - RNA, 19 nt, Homo sapiens
  misc_RNA (1)...(19): siRNA sense strand
uguuugaaguugacacaga

SEQ ID NO: 2126075 - RNA, 19 nt, Homo sapiens
  misc_RNA (1)...(19): siRNA sense strand
ggaagcgaggaguuuaaug

SEQ ID NO: 2126076 - RNA, 19 nt, Homo sapiens
  misc_RNA (1)...(19): siRNA sense strand
ugaagcagauaaagaucag

SEQ ID NO: 2126077 - RNA, 19 nt, Homo sapiens
  misc_RNA (1)...(19): siRNA sense strand
caaacugcccaggaauuga

SEQ ID NO: 2126078 - RNA, 19 nt, Homo sapiens
  misc_RNA (1)...(19): siRNA sense strand
uccaagaggccagggaaua

SEQ ID NO: 2126079 - RNA, 19 nt, Homo sapiens
  misc_RNA (1)...(19): siRNA sense strand
gacaacaugcagcucauca

SEQ ID NO: 2126080 - RNA, 19 nt, Homo sapiens
  misc_RNA (1)...(19): siRNA sense strand
uccuuucucuguauucuga

SEQ ID NO: 2126081 - RNA, 19 nt, Homo sapiens
  misc_RNA (1)...(19): siRNA sense strand
aggacuacaucaagcaguu

SEQ ID NO: 2126082 - RNA, 19 nt, Homo sapiens
  misc_RNA (1)...(19): siRNA sense strand
accgaguccuagacaguua

SEQ ID NO: 2126083 - RNA, 19 nt, Homo sapiens
  misc_RNA (1)...(19): siRNA sense strand
ggaagugacaccacaucag

SEQ ID NO: 2126084 - RNA, 19 nt, Homo sapiens
  misc_RNA (1)...(19): siRNA sense strand
uggagucucuggucugucu

SEQ ID NO: 2126085 - RNA, 19 nt, Homo sapiens
  misc_RNA (1)...(19): siRNA sense strand
agcacucucuuuacacuga

SEQ ID NO: 2126086 - RNA, 19 nt, Homo sapiens
  misc_RNA (1)...(19): siRNA sense strand
ugauaucaaugggcagaau

SEQ ID NO: 2126087 - RNA, 19 nt, Homo sapiens
  misc_RNA (1)...(19): siRNA sense strand
aggaggacuuagauacuug

SEQ ID NO: 2126088 - RNA, 19 nt, Homo sapiens
  misc_RNA (1)...(19): siRNA sense strand
ggacguccugcccuggauu

SEQ ID NO: 2126089 - RNA, 19 nt, Homo sapiens
  misc_RNA (1)...(19): siRNA sense strand
gcgacaacaugcagcucau

SEQ ID NO: 2126090 - RNA, 19 nt, Homo sapiens
  misc_RNA (1)...(19): siRNA sense strand
ugagcacucucuuuacacu

SEQ ID NO: 2126091 - RNA, 19 nt, Homo sapiens
  misc_RNA (1)...(19): siRNA sense strand
caaaagcgaguucuuaaag

SEQ ID NO: 2126092 - RNA, 19 nt, Homo sapiens
  misc_RNA (1)...(19): siRNA sense strand
aagaucagcauccggagaa

SEQ ID NO: 2126093 - RNA, 19 nt, Homo sapiens
  misc_RNA (1)...(19): siRNA sense strand
agaccgcgauuccgacaag

SEQ ID NO: 2126094 - RNA, 19 nt, Homo sapiens
  misc_RNA (1)...(19): siRNA sense strand
gaaaaucaccaauaaucca

SEQ ID NO: 2126095 - RNA, 19 nt, Homo sapiens
  misc_RNA (1)...(19): siRNA sense strand
ccuagacaguuaccacucu

SEQ ID NO: 2126096 - RNA, 19 nt, Homo sapiens
  misc_RNA (1)...(19): siRNA sense strand
guaggaggacuuagauacu

SEQ ID NO: 2126097 - RNA, 19 nt, Homo sapiens
  misc_RNA (1)...(19): siRNA sense strand
guacaugcacaaggugaug

SEQ ID NO: 2126098 - RNA, 19 nt, Homo sapiens
  misc_RNA (1)...(19): siRNA sense strand
cgacagcaacuuccucaac

SEQ ID NO: 2126099 - RNA, 19 nt, Homo sapiens
  misc_RNA (1)...(19): siRNA sense strand
gggaagugacaccacauca

SEQ ID NO: 2126100 - RNA, 19 nt, Homo sapiens
  misc_RNA (1)...(19): siRNA sense strand
gggcagaauccaaauaucc

SEQ ID NO: 2126101 - RNA, 19 nt, Homo sapiens
  misc_RNA (1)...(19): siRNA sense strand
gggaagcgaggaguuuaau

SEQ ID NO: 2126102 - RNA, 19 nt, Homo sapiens
  misc_RNA (1)...(19): siRNA sense strand
cagaugggcucgcaguaug

SEQ ID NO: 2126103 - RNA, 19 nt, Homo sapiens
  misc_RNA (1)...(19): siRNA sense strand
gcaucgacauugacaagau

SEQ ID NO: 2126104 - RNA, 19 nt, Homo sapiens
  misc_RNA (1)...(19): siRNA sense strand
uggaaagcaucgacauuga

SEQ ID NO: 2126105 - RNA, 19 nt, Homo sapiens
  misc_RNA (1)...(19): siRNA sense strand
gaaagcaucgacauugaca

SEQ ID NO: 2126106 - RNA, 19 nt, Homo sapiens
  misc_RNA (1)...(19): siRNA sense strand
aguaugaacugaaggacaa

SEQ ID NO: 2126107 - RNA, 19 nt, Homo sapiens
  misc_RNA (1)...(19): siRNA sense strand
gcagaugggcucgcaguau

SEQ ID NO: 2126108 - RNA, 19 nt, Homo sapiens
  misc_RNA (1)...(19): siRNA sense strand
gaggagaucgaccuggaaa

SEQ ID NO: 2126109 - RNA, 19 nt, Homo sapiens
  misc_RNA (1)...(19): siRNA sense strand
gcagcaaggaccaggaaga

SEQ ID NO: 2126110 - RNA, 19 nt, Homo sapiens
  misc_RNA (1)...(19): siRNA sense strand
caacgagcaccgcaagaau

SEQ ID NO: 2126111 - RNA, 19 nt, Homo sapiens
  misc_RNA (1)...(19): siRNA sense strand
ucaagaaggagaacaaggu

SEQ ID NO: 2126112 - RNA, 19 nt, Homo sapiens
  misc_RNA (1)...(19): siRNA sense strand
caucgacauugacaagauc

SEQ ID NO: 2126113 - RNA, 19 nt, Homo sapiens
  misc_RNA (1)...(19): siRNA sense strand
ucaacgagcaccgcaagaa

SEQ ID NO: 2126114 - RNA, 19 nt, Homo sapiens
  misc_RNA (1)...(19): siRNA sense strand
ccaccaagggcgagaagau

SEQ ID NO: 2126115 - RNA, 19 nt, Homo sapiens
  misc_RNA (1)...(19): siRNA sense strand
cggcacagcaguuaaaguc

SEQ ID NO: 2126116 - RNA, 19 nt, Homo sapiens
  misc_RNA (1)...(19): siRNA sense strand
gcacggcaagcccaagauc

SEQ ID NO: 2126117 - RNA, 19 nt, Homo sapiens
  misc_RNA (1)...(19): siRNA sense strand
ggaaagcaucgacauugac

SEQ ID NO: 2126118 - RNA, 19 nt, Homo sapiens
  misc_RNA (1)...(19): siRNA sense strand
gcgcagcaaggaccaggaa

SEQ ID NO: 2126119 - RNA, 19 nt, Homo sapiens
  misc_RNA (1)...(19): siRNA sense strand
ccuacggccaguuccaaua

SEQ ID NO: 2126120 - RNA, 19 nt, Homo sapiens
  misc_RNA (1)...(19): siRNA sense strand
ggagaucgaccuggaaagc

SEQ ID NO: 2126121 - RNA, 19 nt, Homo sapiens
  misc_RNA (1)...(19): siRNA sense strand
gaucaugcuggccaucauc

SEQ ID NO: 2126122 - RNA, 19 nt, Homo sapiens
  misc_RNA (1)...(19): siRNA sense strand
cagcaaggaccaggaagau

SEQ ID NO: 2126123 - RNA, 19 nt, Homo sapiens
  misc_RNA (1)...(19): siRNA sense strand
gcucaaggccuggcucaac

SEQ ID NO: 2126124 - RNA, 19 nt, Homo sapiens
  misc_RNA (1)...(19): siRNA sense strand
ccgcggaucucagccucuu

SEQ ID NO: 2126125 - RNA, 19 nt, Homo sapiens
  misc_RNA (1)...(19): siRNA sense strand
cuggaaagcaucgacauug

SEQ ID NO: 2126126 - RNA, 19 nt, Homo sapiens
  misc_RNA (1)...(19): siRNA sense strand
gaugggcucgcaguaugaa

SEQ ID NO: 2126127 - RNA, 19 nt, Homo sapiens
  misc_RNA (1)...(19): siRNA sense strand
ggcacucaauggagacaag

SEQ ID NO: 2126128 - RNA, 19 nt, Homo sapiens
  misc_RNA (1)...(19): siRNA sense strand
caaggaccaggaagaugga

SEQ ID NO: 2126129 - RNA, 19 nt, Homo sapiens
  misc_RNA (1)...(19): siRNA sense strand
gaaggagaacaaggugaca

SEQ ID NO: 2126130 - RNA, 19 nt, Homo sapiens
  misc_RNA (1)...(19): siRNA sense strand
agagaggacuugagaauuu

SEQ ID NO: 2126131 - RNA, 19 nt, Homo sapiens
  misc_RNA (1)...(19): siRNA sense strand
ggccaaaucugucacuauu

SEQ ID NO: 2126132 - RNA, 19 nt, Homo sapiens
  misc_RNA (1)...(19): siRNA sense strand
agaagaaacugauggaaga

SEQ ID NO: 2126133 - RNA, 19 nt, Homo sapiens
  misc_RNA (1)...(19): siRNA sense strand
guaagucaauuaucacaga

SEQ ID NO: 2126134 - RNA, 19 nt, Homo sapiens
  misc_RNA (1)...(19): siRNA sense strand
gaaguggacugcgagaaga

SEQ ID NO: 2126135 - RNA, 19 nt, Homo sapiens
  misc_RNA (1)...(19): siRNA sense strand
agaaagaugucaacacugu

SEQ ID NO: 2126136 - RNA, 19 nt, Homo sapiens
  misc_RNA (1)...(19): siRNA sense strand
ccaaugaagucgaugacaa

SEQ ID NO: 2126137 - RNA, 19 nt, Homo sapiens
  misc_RNA (1)...(19): siRNA sense strand
gaugacaacugugauaaca

SEQ ID NO: 2126138 - RNA, 19 nt, Homo sapiens
  misc_RNA (1)...(19): siRNA sense strand
gaaagaagaaacugaugga

SEQ ID NO: 2126139 - RNA, 19 nt, Homo sapiens
  misc_RNA (1)...(19): siRNA sense strand
ccaaaucugucacuauuac

SEQ ID NO: 2126140 - RNA, 19 nt, Homo sapiens
  misc_RNA (1)...(19): siRNA sense strand
ccagaaagaugucaacacu

SEQ ID NO: 2126141 - RNA, 19 nt, Homo sapiens
  misc_RNA (1)...(19): siRNA sense strand
ugaagucgaugacaacugu

SEQ ID NO: 2126142 - RNA, 19 nt, Homo sapiens
  misc_RNA (1)...(19): siRNA sense strand
ggaaggaaagggauaggaa

SEQ ID NO: 2126143 - RNA, 19 nt, Homo sapiens
  misc_RNA (1)...(19): siRNA sense strand
gaaagggaaaggaaggaaa

SEQ ID NO: 2126144 - RNA, 19 nt, Homo sapiens
  misc_RNA (1)...(19): siRNA sense strand
ggaaggaaagggaaaggaa

SEQ ID NO: 2126145 - RNA, 19 nt, Homo sapiens
  misc_RNA (1)...(19): siRNA sense strand
agaacugacucgcuucaaa

SEQ ID NO: 2126146 - RNA, 19 nt, Homo sapiens
  misc_RNA (1)...(19): siRNA sense strand
ugacaacugugauaacaag

SEQ ID NO: 2126147 - RNA, 19 nt, Homo sapiens
  misc_RNA (1)...(19): siRNA sense strand
gcaaguuacugggccaaau

SEQ ID NO: 2126148 - RNA, 19 nt, Homo sapiens
  misc_RNA (1)...(19): siRNA sense strand
gaacugacucgcuucaaag

SEQ ID NO: 2126149 - RNA, 19 nt, Homo sapiens
  misc_RNA (1)...(19): siRNA sense strand
ugaaacccauauggagaua

SEQ ID NO: 2126150 - RNA, 19 nt, Homo sapiens
  misc_RNA (1)...(19): siRNA sense strand
gagagaggacuugagaauu

SEQ ID NO: 2126151 - RNA, 19 nt, Homo sapiens
  misc_RNA (1)...(19): siRNA sense strand
gagaggaaggaaagggaua

SEQ ID NO: 2126152 - RNA, 19 nt, Homo sapiens
  misc_RNA (1)...(19): siRNA sense strand
ggaaguggacugcgagaag

SEQ ID NO: 2126153 - RNA, 19 nt, Homo sapiens
  misc_RNA (1)...(19): siRNA sense strand
ugucaacacuguggagauu

SEQ ID NO: 2126154 - RNA, 19 nt, Homo sapiens
  misc_RNA (1)...(19): siRNA sense strand
cugacucgcuucaaaguga

SEQ ID NO: 2126155 - RNA, 19 nt, Homo sapiens
  misc_RNA (1)...(19): siRNA sense strand
gagauugugcuaugaagau

SEQ ID NO: 2126156 - RNA, 19 nt, Homo sapiens
  misc_RNA (1)...(19): siRNA sense strand
agagauccaacacauauuu

SEQ ID NO: 2126157 - RNA, 19 nt, Homo sapiens
  misc_RNA (1)...(19): siRNA sense strand
gaaaagaaaggaaagugaa

SEQ ID NO: 2126158 - RNA, 19 nt, Homo sapiens
  misc_RNA (1)...(19): siRNA sense strand
gcuucaaagugacggauga

SEQ ID NO: 2126159 - RNA, 19 nt, Homo sapiens
  misc_RNA (1)...(19): siRNA sense strand
uuagagauccaacacauau

SEQ ID NO: 2126160 - RNA, 19 nt, Homo sapiens
  misc_RNA (1)...(19): siRNA sense strand
uacaaggucucaaagucaa

SEQ ID NO: 2126161 - RNA, 19 nt, Homo sapiens
  misc_RNA (1)...(19): siRNA sense strand
uaucacagcgucuccaaga

SEQ ID NO: 2126162 - RNA, 19 nt, Homo sapiens
  misc_RNA (1)...(19): siRNA sense strand
guuggaagacagaguguuu

SEQ ID NO: 2126163 - RNA, 19 nt, Homo sapiens
  misc_RNA (1)...(19): siRNA sense strand
ccuacaaggucucaaaguc

SEQ ID NO: 2126164 - RNA, 19 nt, Homo sapiens
  misc_RNA (1)...(19): siRNA sense strand
ugagagaggacuugagaau

SEQ ID NO: 2126165 - RNA, 19 nt, Homo sapiens
  misc_RNA (1)...(19): siRNA sense strand
gccaaaucugucacuauua

SEQ ID NO: 2126166 - RNA, 19 nt, Homo sapiens
  misc_RNA (1)...(19): siRNA sense strand
ucaacacuguggagauugu

SEQ ID NO: 2126167 - RNA, 19 nt, Homo sapiens
  misc_RNA (1)...(19): siRNA sense strand
guuagagauccaacacaua

SEQ ID NO: 2126168 - RNA, 19 nt, Homo sapiens
  misc_RNA (1)...(19): siRNA sense strand
gcaguugaaauaccauuag

SEQ ID NO: 2126169 - RNA, 19 nt, Homo sapiens
  misc_RNA (1)...(19): siRNA sense strand
ggaaagggaaaggaaggaa

SEQ ID NO: 2126170 - RNA, 19 nt, Homo sapiens
  misc_RNA (1)...(19): siRNA sense strand
gagaggacuugagaauuuu

SEQ ID NO: 2126171 - RNA, 19 nt, Homo sapiens
  misc_RNA (1)...(19): siRNA sense strand
ggagauugugcuaugaaga

SEQ ID NO: 2126172 - RNA, 19 nt, Homo sapiens
  misc_RNA (1)...(19): siRNA sense strand
cuacaaggucucaaaguca

SEQ ID NO: 2126173 - RNA, 19 nt, Homo sapiens
  misc_RNA (1)...(19): siRNA sense strand
ggaaaggaaggaaaagaaa

SEQ ID NO: 2126174 - RNA, 19 nt, Homo sapiens
  misc_RNA (1)...(19): siRNA sense strand
gcuaugaagauaccugugu

SEQ ID NO: 2126175 - RNA, 19 nt, Homo sapiens
  misc_RNA (1)...(19): siRNA sense strand
agauugugcuaugaagaua

SEQ ID NO: 2126176 - RNA, 19 nt, Homo sapiens
  misc_RNA (1)...(19): siRNA sense strand
ggaaaagaaaggaaaguga

SEQ ID NO: 2126177 - RNA, 19 nt, Homo sapiens
  misc_RNA (1)...(19): siRNA sense strand
cguuagagauccaacacau

SEQ ID NO: 2126178 - RNA, 19 nt, Homo sapiens
  misc_RNA (1)...(19): siRNA sense strand
gagaugaacaguggaugau

SEQ ID NO: 2126179 - RNA, 19 nt, Homo sapiens
  misc_RNA (1)...(19): siRNA sense strand
accauuaguuaacagauug

SEQ ID NO: 2126180 - RNA, 19 nt, Homo sapiens
  misc_RNA (1)...(19): siRNA sense strand
ggaaggaaaagaaaggaaa

SEQ ID NO: 2126181 - RNA, 19 nt, Homo sapiens
  misc_RNA (1)...(19): siRNA sense strand
gaaaagcaguugaaauacc

SEQ ID NO: 2126182 - RNA, 19 nt, Homo sapiens
  misc_RNA (1)...(19): siRNA sense strand
caaguuacugggccaaauc

SEQ ID NO: 2126183 - RNA, 19 nt, Homo sapiens
  misc_RNA (1)...(19): siRNA sense strand
caagagaugaacaguggau

SEQ ID NO: 2126184 - RNA, 19 nt, Homo sapiens
  misc_RNA (1)...(19): siRNA sense strand
ccugagagaggacuugaga

SEQ ID NO: 2126185 - RNA, 19 nt, Homo sapiens
  misc_RNA (1)...(19): siRNA sense strand
gggccaaaucugucacuau

SEQ ID NO: 2126186 - RNA, 19 nt, Homo sapiens
  misc_RNA (1)...(19): siRNA sense strand
gaaauccuacaaggucuca

SEQ ID NO: 2126187 - RNA, 19 nt, Homo sapiens
  misc_RNA (1)...(19): siRNA sense strand
ugacggaugaaacccauau

SEQ ID NO: 2126188 - RNA, 19 nt, Homo sapiens
  misc_RNA (1)...(19): siRNA sense strand
caguugaaauaccauuagu

SEQ ID NO: 2126189 - RNA, 19 nt, Homo sapiens
  misc_RNA (1)...(19): siRNA sense strand
caaguuacucacuaucaca

SEQ ID NO: 2126190 - RNA, 19 nt, Homo sapiens
  misc_RNA (1)...(19): siRNA sense strand
cugucacuauuacaacaua

SEQ ID NO: 2126191 - RNA, 19 nt, Homo sapiens
  misc_RNA (1)...(19): siRNA sense strand
agagaugaacaguggauga

SEQ ID NO: 2126192 - RNA, 19 nt, Homo sapiens
  misc_RNA (1)...(19): siRNA sense strand
gucgaugacaacugugaua

SEQ ID NO: 2126193 - RNA, 19 nt, Homo sapiens
  misc_RNA (1)...(19): siRNA sense strand
cugcuacaagggcaaguua

SEQ ID NO: 2126194 - RNA, 19 nt, Homo sapiens
  misc_RNA (1)...(19): siRNA sense strand
gauggaagacaggaagcaa

SEQ ID NO: 2126195 - RNA, 19 nt, Homo sapiens
  misc_RNA (1)...(19): siRNA sense strand
cggaugaaacccauaugga

SEQ ID NO: 2126196 - RNA, 19 nt, Homo sapiens
  misc_RNA (1)...(19): siRNA sense strand
caaugaagucgaugacaac

SEQ ID NO: 2126197 - RNA, 19 nt, Homo sapiens
  misc_RNA (1)...(19): siRNA sense strand
ggaagacagaguguuuaca

SEQ ID NO: 2126198 - RNA, 19 nt, Homo sapiens
  misc_RNA (1)...(19): siRNA sense strand
gggaaaggaaggaaaagaa

SEQ ID NO: 2126199 - RNA, 19 nt, Homo sapiens
  misc_RNA (1)...(19): siRNA sense strand
cugcagacaaccuccauga

SEQ ID NO: 2126200 - RNA, 19 nt, Homo sapiens
  misc_RNA (1)...(19): siRNA sense strand
caaagugacggaugaaacc

SEQ ID NO: 2126201 - RNA, 19 nt, Homo sapiens
  misc_RNA (1)...(19): siRNA sense strand
ggguaggccaguuggaaga

SEQ ID NO: 2126202 - RNA, 19 nt, Homo sapiens
  misc_RNA (1)...(19): siRNA sense strand
cuguggagauugugcuaug

SEQ ID NO: 2126203 - RNA, 19 nt, Homo sapiens
  misc_RNA (1)...(19): siRNA sense strand
ucaaagugacggaugaaac

SEQ ID NO: 2126204 - RNA, 19 nt, Homo sapiens
  misc_RNA (1)...(19): siRNA sense strand
ggaaagagcucguuuguuu

SEQ ID NO: 2126205 - RNA, 19 nt, Homo sapiens
  misc_RNA (1)...(19): siRNA sense strand
ggaaacaacuuggagaaua

SEQ ID NO: 2126206 - RNA, 19 nt, Homo sapiens
  misc_RNA (1)...(19): siRNA sense strand
gaauugagcucacacuaaa

SEQ ID NO: 2126207 - RNA, 19 nt, Homo sapiens
  misc_RNA (1)...(19): siRNA sense strand
ggaaagagaugauacaaca

SEQ ID NO: 2126208 - RNA, 19 nt, Homo sapiens
  misc_RNA (1)...(19): siRNA sense strand
ggaagaugauuauucguua

SEQ ID NO: 2126209 - RNA, 19 nt, Homo sapiens
  misc_RNA (1)...(19): siRNA sense strand
gaaggaaguuguuuaugaa

SEQ ID NO: 2126210 - RNA, 19 nt, Homo sapiens
  misc_RNA (1)...(19): siRNA sense strand
gcaccauagugauuuauua

SEQ ID NO: 2126211 - RNA, 19 nt, Homo sapiens
  misc_RNA (1)...(19): siRNA sense strand
ggcaagaacuucaaacaaa

SEQ ID NO: 2126212 - RNA, 19 nt, Homo sapiens
  misc_RNA (1)...(19): siRNA sense strand
ggagguggcugcugugaaa

SEQ ID NO: 2126213 - RNA, 19 nt, Homo sapiens
  misc_RNA (1)...(19): siRNA sense strand
caggauaccucccaaagua

SEQ ID NO: 2126214 - RNA, 19 nt, Homo sapiens
  misc_RNA (1)...(19): siRNA sense strand
gcagaguucuuuaaaguug

SEQ ID NO: 2126215 - RNA, 19 nt, Homo sapiens
  misc_RNA (1)...(19): siRNA sense strand
gauguuggcuucaugguuu

SEQ ID NO: 2126216 - RNA, 19 nt, Homo sapiens
  misc_RNA (1)...(19): siRNA sense strand
caaaguagccugccuggua

SEQ ID NO: 2126217 - RNA, 19 nt, Homo sapiens
  misc_RNA (1)...(19): siRNA sense strand
ugaagaagcugcaaggaaa

SEQ ID NO: 2126218 - RNA, 19 nt, Homo sapiens
  misc_RNA (1)...(19): siRNA sense strand
gaaacaacuuggagaauag

SEQ ID NO: 2126219 - RNA, 19 nt, Homo sapiens
  misc_RNA (1)...(19): siRNA sense strand
uaacaauccuguagaauuc

SEQ ID NO: 2126220 - RNA, 19 nt, Homo sapiens
  misc_RNA (1)...(19): siRNA sense strand
ggaauaugcucguguaaag

SEQ ID NO: 2126221 - RNA, 19 nt, Homo sapiens
  misc_RNA (1)...(19): siRNA sense strand
gaauggaaaucuugagguu

SEQ ID NO: 2126222 - RNA, 19 nt, Homo sapiens
  misc_RNA (1)...(19): siRNA sense strand
gcaagaacuucaaacaaau

SEQ ID NO: 2126223 - RNA, 19 nt, Homo sapiens
  misc_RNA (1)...(19): siRNA sense strand
caagacaagucaagagauu

SEQ ID NO: 2126224 - RNA, 19 nt, Homo sapiens
  misc_RNA (1)...(19): siRNA sense strand
agaaggaaguuguuuauga

SEQ ID NO: 2126225 - RNA, 19 nt, Homo sapiens
  misc_RNA (1)...(19): siRNA sense strand
caacugaaucacagaauua

SEQ ID NO: 2126226 - RNA, 19 nt, Homo sapiens
  misc_RNA (1)...(19): siRNA sense strand
ggacacgaauuaaugaaau

SEQ ID NO: 2126227 - RNA, 19 nt, Homo sapiens
  misc_RNA (1)...(19): siRNA sense strand
uagcagggcuugacauuga

SEQ ID NO: 2126228 - RNA, 19 nt, Homo sapiens
  misc_RNA (1)...(19): siRNA sense strand
ggaaguaaauaaagugaca

SEQ ID NO: 2126229 - RNA, 19 nt, Homo sapiens
  misc_RNA (1)...(19): siRNA sense strand
gaagaaaauugcagaguuu

SEQ ID NO: 2126230 - RNA, 19 nt, Homo sapiens
  misc_RNA (1)...(19): siRNA sense strand
ccacugauaucgaguucua

SEQ ID NO: 2126231 - RNA, 19 nt, Homo sapiens
  misc_RNA (1)...(19): siRNA sense strand
gaagagcagugggauagaa

SEQ ID NO: 2126232 - RNA, 19 nt, Homo sapiens
  misc_RNA (1)...(19): siRNA sense strand
agaagaaacuagaagcuaa

SEQ ID NO: 2126233 - RNA, 19 nt, Homo sapiens
  misc_RNA (1)...(19): siRNA sense strand
caccauguauccagaguua

SEQ ID NO: 2126234 - RNA, 19 nt, Homo sapiens
  misc_RNA (1)...(19): siRNA sense strand
guaaaaggcuugaccaaaa

SEQ ID NO: 2126235 - RNA, 19 nt, Homo sapiens
  misc_RNA (1)...(19): siRNA sense strand
ggagauggauaagucagua

SEQ ID NO: 2126236 - RNA, 19 nt, Homo sapiens
  misc_RNA (1)...(19): siRNA sense strand
cgucagcucugcaagauuu

SEQ ID NO: 2126237 - RNA, 19 nt, Homo sapiens
  misc_RNA (1)...(19): siRNA sense strand
guacugaauuuguugauca

SEQ ID NO: 2126238 - RNA, 19 nt, Homo sapiens
  misc_RNA (1)...(19): siRNA sense strand
caaagaagccaaacucaga

SEQ ID NO: 2126239 - RNA, 19 nt, Homo sapiens
  misc_RNA (1)...(19): siRNA sense strand
acagugaccucagaaguua

SEQ ID NO: 2126240 - RNA, 19 nt, Homo sapiens
  misc_RNA (1)...(19): siRNA sense strand
guaaaggaacccuaaguaa

SEQ ID NO: 2126241 - RNA, 19 nt, Homo sapiens
  misc_RNA (1)...(19): siRNA sense strand
gaaaauauccucauccaaa

SEQ ID NO: 2126242 - RNA, 19 nt, Homo sapiens
  misc_RNA (1)...(19): siRNA sense strand
gaacaugaacagaagacua

SEQ ID NO: 2126243 - RNA, 19 nt, Homo sapiens
  misc_RNA (1)...(19): siRNA sense strand
gaaccucccuccagcugaa

SEQ ID NO: 2126244 - RNA, 19 nt, Homo sapiens
  misc_RNA (1)...(19): siRNA sense strand
uaaaggaacccuaaguaaa

SEQ ID NO: 2126245 - RNA, 19 nt, Homo sapiens
  misc_RNA (1)...(19): siRNA sense strand
cgucugaucacacauauua

SEQ ID NO: 2126246 - RNA, 19 nt, Homo sapiens
  misc_RNA (1)...(19): siRNA sense strand
gugaagaccuaagugauaa

SEQ ID NO: 2126247 - RNA, 19 nt, Homo sapiens
  misc_RNA (1)...(19): siRNA sense strand
gcugauacauccacuccua

SEQ ID NO: 2126248 - RNA, 19 nt, Homo sapiens
  misc_RNA (1)...(19): siRNA sense strand
gaagagugaugcucagaag

SEQ ID NO: 2126249 - RNA, 19 nt, Homo sapiens
  misc_RNA (1)...(19): siRNA sense strand
cagcagaaauuuccaagau

SEQ ID NO: 2126250 - RNA, 19 nt, Homo sapiens
  misc_RNA (1)...(19): siRNA sense strand
gguguugccuaaucaagua

SEQ ID NO: 2126251 - RNA, 19 nt, Homo sapiens
  misc_RNA (1)...(19): siRNA sense strand
cagacuaucuagagaauug

SEQ ID NO: 2126252 - RNA, 19 nt, Homo sapiens
  misc_RNA (1)...(19): siRNA sense strand
cagcagaguucuuuaaagu

SEQ ID NO: 2126253 - RNA, 19 nt, Homo sapiens
  misc_RNA (1)...(19): siRNA sense strand
gaagacuagccaucaguua

SEQ ID NO: 2126254 - RNA, 19 nt, Homo sapiens
  misc_RNA (1)...(19): siRNA sense strand
ggugaagaccuaagugaua

SEQ ID NO: 2126255 - RNA, 19 nt, Homo sapiens
  misc_RNA (1)...(19): siRNA sense strand
gaaaccagcuguggagaca

SEQ ID NO: 2126256 - RNA, 19 nt, Homo sapiens
  misc_RNA (1)...(19): siRNA sense strand
ccaauuggguuugaaagaa

SEQ ID NO: 2126257 - RNA, 19 nt, Homo sapiens
  misc_RNA (1)...(19): siRNA sense strand
ggauagacuuuccacauca

SEQ ID NO: 2126258 - RNA, 19 nt, Homo sapiens
  misc_RNA (1)...(19): siRNA sense strand
cuaauggacuuuggaaauu

SEQ ID NO: 2126259 - RNA, 19 nt, Homo sapiens
  misc_RNA (1)...(19): siRNA sense strand
ccuaguauauggauuaguu

SEQ ID NO: 2126260 - RNA, 19 nt, Homo sapiens
  misc_RNA (1)...(19): siRNA sense strand
gagggcagcucucccauca

SEQ ID NO: 2126261 - RNA, 19 nt, Homo sapiens
  misc_RNA (1)...(19): siRNA sense strand
caugaccacugagaauuua

SEQ ID NO: 2126262 - RNA, 19 nt, Homo sapiens
  misc_RNA (1)...(19): siRNA sense strand
ugaaguugcucagucauuu

SEQ ID NO: 2126263 - RNA, 19 nt, Homo sapiens
  misc_RNA (1)...(19): siRNA sense strand
aagagucguuugcgaaaua

SEQ ID NO: 2126264 - RNA, 19 nt, Homo sapiens
  misc_RNA (1)...(19): siRNA sense strand
gaacucuggcucuguguaa

SEQ ID NO: 2126265 - RNA, 19 nt, Homo sapiens
  misc_RNA (1)...(19): siRNA sense strand
ggugagaccuuccuuagag

SEQ ID NO: 2126266 - RNA, 19 nt, Homo sapiens
  misc_RNA (1)...(19): siRNA sense strand
gcagugggauagaauauac

SEQ ID NO: 2126267 - RNA, 19 nt, Homo sapiens
  misc_RNA (1)...(19): siRNA sense strand
gaaauucugcugagugugu

SEQ ID NO: 2126268 - RNA, 19 nt, Homo sapiens
  misc_RNA (1)...(19): siRNA sense strand
ggucagagcaccaacuuug

SEQ ID NO: 2126269 - RNA, 19 nt, Homo sapiens
  misc_RNA (1)...(19): siRNA sense strand
gaauuaaaggcaagugaaa

SEQ ID NO: 2126270 - RNA, 19 nt, Homo sapiens
  misc_RNA (1)...(19): siRNA sense strand
aaucagaguuuacuaagug

SEQ ID NO: 2126271 - RNA, 19 nt, Homo sapiens
  misc_RNA (1)...(19): siRNA sense strand
ccaaaucagaguuuacuaa

SEQ ID NO: 2126272 - RNA, 19 nt, Homo sapiens
  misc_RNA (1)...(19): siRNA sense strand
gggagucacugcagaagga

SEQ ID NO: 2126273 - RNA, 19 nt, Homo sapiens
  misc_RNA (1)...(19): siRNA sense strand
aaggaaagguggcgaagaa

SEQ ID NO: 2126274 - RNA, 19 nt, Homo sapiens
  misc_RNA (1)...(19): siRNA sense strand
ugaaaucacuucugaacca

SEQ ID NO: 2126275 - RNA, 19 nt, Homo sapiens
  misc_RNA (1)...(19): siRNA sense strand
ucaggaauaugcucgugua

SEQ ID NO: 2126276 - RNA, 19 nt, Homo sapiens
  misc_RNA (1)...(19): siRNA sense strand
gccacugucuccacugaua

SEQ ID NO: 2126277 - RNA, 19 nt, Homo sapiens
  misc_RNA (1)...(19): siRNA sense strand
aaacaacauuucaguguca

SEQ ID NO: 2126278 - RNA, 19 nt, Homo sapiens
  misc_RNA (1)...(19): siRNA sense strand
cauuacaucugcagucuga

SEQ ID NO: 2126279 - RNA, 19 nt, Homo sapiens
  misc_RNA (1)...(19): siRNA sense strand
ugacucaggugauggaaug

SEQ ID NO: 2126280 - RNA, 19 nt, Homo sapiens
  misc_RNA (1)...(19): siRNA sense strand
gaugaugacucaggugaug

SEQ ID NO: 2126281 - RNA, 19 nt, Homo sapiens
  misc_RNA (1)...(19): siRNA sense strand
uaaacucacucgaggucua

SEQ ID NO: 2126282 - RNA, 19 nt, Homo sapiens
  misc_RNA (1)...(19): siRNA sense strand
gagaagaccauucauaaac

SEQ ID NO: 2126283 - RNA, 19 nt, Homo sapiens
  misc_RNA (1)...(19): siRNA sense strand
caaaucacaugaagcuauc

SEQ ID NO: 2126284 - RNA, 19 nt, Homo sapiens
  misc_RNA (1)...(19): siRNA sense strand
aaacaaagaucagucaaac

SEQ ID NO: 2126285 - RNA, 19 nt, Homo sapiens
  misc_RNA (1)...(19): siRNA sense strand
gaaaauaguggcaacaaaa

SEQ ID NO: 2126286 - RNA, 19 nt, Homo sapiens
  misc_RNA (1)...(19): siRNA sense strand
aaacacaaauggagguuag

SEQ ID NO: 2126287 - RNA, 19 nt, Homo sapiens
  misc_RNA (1)...(19): siRNA sense strand
gcaccaacuuugauaagag

SEQ ID NO: 2126288 - RNA, 19 nt, Homo sapiens
  misc_RNA (1)...(19): siRNA sense strand
ggaucagaaucuagucauu

SEQ ID NO: 2126289 - RNA, 19 nt, Homo sapiens
  misc_RNA (1)...(19): siRNA sense strand
ggaagaagaccugccagaa

SEQ ID NO: 2126290 - RNA, 19 nt, Homo sapiens
  misc_RNA (1)...(19): siRNA sense strand
ggacucuguuucugaaugu

SEQ ID NO: 2126291 - RNA, 19 nt, Homo sapiens
  misc_RNA (1)...(19): siRNA sense strand
uagccugccugguaccuua

SEQ ID NO: 2126292 - RNA, 19 nt, Homo sapiens
  misc_RNA (1)...(19): siRNA sense strand
gaaagucaagauccaagaa

SEQ ID NO: 2126293 - RNA, 19 nt, Homo sapiens
  misc_RNA (1)...(19): siRNA sense strand
aaaccuacuuuggagaaua

SEQ ID NO: 2126294 - RNA, 19 nt, Homo sapiens
  misc_RNA (1)...(19): siRNA sense strand
gcuacagccuacuuaaaga

SEQ ID NO: 2126295 - RNA, 19 nt, Homo sapiens
  misc_RNA (1)...(19): siRNA sense strand
ucaggagaauucugugaaa

SEQ ID NO: 2126296 - RNA, 19 nt, Homo sapiens
  misc_RNA (1)...(19): siRNA sense strand
gaacacuugaggccacaua

SEQ ID NO: 2126297 - RNA, 19 nt, Homo sapiens
  misc_RNA (1)...(19): siRNA sense strand
aaacagacaagaccugaaa

SEQ ID NO: 2126298 - RNA, 19 nt, Homo sapiens
  misc_RNA (1)...(19): siRNA sense strand
gguugagccuaccuuagua

SEQ ID NO: 2126299 - RNA, 19 nt, Homo sapiens
  misc_RNA (1)...(19): siRNA sense strand
acaaagaucagucaaacaa

SEQ ID NO: 2126300 - RNA, 19 nt, Homo sapiens
  misc_RNA (1)...(19): siRNA sense strand
guauauggauuaguucuca

SEQ ID NO: 2126301 - RNA, 19 nt, Homo sapiens
  misc_RNA (1)...(19): siRNA sense strand
caacaugaccacugagaau

SEQ ID NO: 2126302 - RNA, 19 nt, Homo sapiens
  misc_RNA (1)...(19): siRNA sense strand
ccugguaccuuacauuguu

SEQ ID NO: 2126303 - RNA, 19 nt, Homo sapiens
  misc_RNA (1)...(19): siRNA sense strand
gcuaauggacuuuggaaau

SEQ ID NO: 2126304 - RNA, 19 nt, Homo sapiens
  misc_RNA (1)...(19): siRNA sense strand
gcauggaucugccaaauuu

SEQ ID NO: 2126305 - RNA, 19 nt, Homo sapiens
  misc_RNA (1)...(19): siRNA sense strand
gaaagucagucaagacaug

SEQ ID NO: 2126306 - RNA, 19 nt, Homo sapiens
  misc_RNA (1)...(19): siRNA sense strand
gaagaaacuugaacgugaa

SEQ ID NO: 2126307 - RNA, 19 nt, Homo sapiens
  misc_RNA (1)...(19): siRNA sense strand
ggacggacgcauugucaua

SEQ ID NO: 2126308 - RNA, 19 nt, Homo sapiens
  misc_RNA (1)...(19): siRNA sense strand
ucucuuggauuucagauuu

SEQ ID NO: 2126309 - RNA, 19 nt, Homo sapiens
  misc_RNA (1)...(19): siRNA sense strand
gcaguugguuaugaauuaa

SEQ ID NO: 2126310 - RNA, 19 nt, Homo sapiens
  misc_RNA (1)...(19): siRNA sense strand
ucagauuuguggaagguua

SEQ ID NO: 2126311 - RNA, 19 nt, Homo sapiens
  misc_RNA (1)...(19): siRNA sense strand
ucacagcaguugguuauga

SEQ ID NO: 2126312 - RNA, 19 nt, Homo sapiens
  misc_RNA (1)...(19): siRNA sense strand
guacaucgaugcauuucca

SEQ ID NO: 2126313 - RNA, 19 nt, Homo sapiens
  misc_RNA (1)...(19): siRNA sense strand
caacuacgaagcagauuga

SEQ ID NO: 2126314 - RNA, 19 nt, Homo sapiens
  misc_RNA (1)...(19): siRNA sense strand
gaggaucccuuguggacau

SEQ ID NO: 2126315 - RNA, 19 nt, Homo sapiens
  misc_RNA (1)...(19): siRNA sense strand
agcaguugguuaugaauua

SEQ ID NO: 2126316 - RNA, 19 nt, Homo sapiens
  misc_RNA (1)...(19): siRNA sense strand
gaggaugaugcacgaguua

SEQ ID NO: 2126317 - RNA, 19 nt, Homo sapiens
  misc_RNA (1)...(19): siRNA sense strand
gauuucagauuuggugcua

SEQ ID NO: 2126318 - RNA, 19 nt, Homo sapiens
  misc_RNA (1)...(19): siRNA sense strand
ccuagaaacacuuaaagaa

SEQ ID NO: 2126319 - RNA, 19 nt, Homo sapiens
  misc_RNA (1)...(19): siRNA sense strand
aacgugaacuugaggauga

SEQ ID NO: 2126320 - RNA, 19 nt, Homo sapiens
  misc_RNA (1)...(19): siRNA sense strand
uaaagaagaaagucaguca

SEQ ID NO: 2126321 - RNA, 19 nt, Homo sapiens
  misc_RNA (1)...(19): siRNA sense strand
gaaaagaggcccuguacau

SEQ ID NO: 2126322 - RNA, 19 nt, Homo sapiens
  misc_RNA (1)...(19): siRNA sense strand
gcgagaaggugugcaugga

SEQ ID NO: 2126323 - RNA, 19 nt, Homo sapiens
  misc_RNA (1)...(19): siRNA sense strand
cauagcggcugcgaagaaa

SEQ ID NO: 2126324 - RNA, 19 nt, Homo sapiens
  misc_RNA (1)...(19): siRNA sense strand
gaagaaagucagucaagac

SEQ ID NO: 2126325 - RNA, 19 nt, Homo sapiens
  misc_RNA (1)...(19): siRNA sense strand
agaagaaagucagucaaga

SEQ ID NO: 2126326 - RNA, 19 nt, Homo sapiens
  misc_RNA (1)...(19): siRNA sense strand
cgaagcagauugaaaaugu

SEQ ID NO: 2126327 - RNA, 19 nt, Homo sapiens
  misc_RNA (1)...(19): siRNA sense strand
gaugaugcacgaguuauug

SEQ ID NO: 2126328 - RNA, 19 nt, Homo sapiens
  misc_RNA (1)...(19): siRNA sense strand
acccauggcuaguuuggua

SEQ ID NO: 2126329 - RNA, 19 nt, Homo sapiens
  misc_RNA (1)...(19): siRNA sense strand
cagauuuggugcuacaugu

SEQ ID NO: 2126330 - RNA, 19 nt, Homo sapiens
  misc_RNA (1)...(19): siRNA sense strand
gaaacuugaacgugaacuu

SEQ ID NO: 2126331 - RNA, 19 nt, Homo sapiens
  misc_RNA (1)...(19): siRNA sense strand
guacucgaacguuguuauu

SEQ ID NO: 2126332 - RNA, 19 nt, Homo sapiens
  misc_RNA (1)...(19): siRNA sense strand
gaaaggguucacagcaguu

SEQ ID NO: 2126333 - RNA, 19 nt, Homo sapiens
  misc_RNA (1)...(19): siRNA sense strand
ggaugaugcacgaguuauu

SEQ ID NO: 2126334 - RNA, 19 nt, Homo sapiens
  misc_RNA (1)...(19): siRNA sense strand
gugcauggaucugccaaau

SEQ ID NO: 2126335 - RNA, 19 nt, Homo sapiens
  misc_RNA (1)...(19): siRNA sense strand
guucacagcaguugguuau

SEQ ID NO: 2126336 - RNA, 19 nt, Homo sapiens
  misc_RNA (1)...(19): siRNA sense strand
gcaacuacgaagcagauug

SEQ ID NO: 2126337 - RNA, 19 nt, Homo sapiens
  misc_RNA (1)...(19): siRNA sense strand
cacagcaguugguuaugaa

SEQ ID NO: 2126338 - RNA, 19 nt, Homo sapiens
  misc_RNA (1)...(19): siRNA sense strand
ugaggaugaugcacgaguu

SEQ ID NO: 2126339 - RNA, 19 nt, Homo sapiens
  misc_RNA (1)...(19): siRNA sense strand
gcaguacucgaacguuguu

SEQ ID NO: 2126340 - RNA, 19 nt, Homo sapiens
  misc_RNA (1)...(19): siRNA sense strand
cuagaaacacuuaaagaag

SEQ ID NO: 2126341 - RNA, 19 nt, Homo sapiens
  misc_RNA (1)...(19): siRNA sense strand
guagccacgccguuuguaa

SEQ ID NO: 2126342 - RNA, 19 nt, Homo sapiens
  misc_RNA (1)...(19): siRNA sense strand
ucauagcggcugcgaagaa

SEQ ID NO: 2126343 - RNA, 19 nt, Homo sapiens
  misc_RNA (1)...(19): siRNA sense strand
acaugugucucuucugcuu

SEQ ID NO: 2126344 - RNA, 19 nt, Homo sapiens
  misc_RNA (1)...(19): siRNA sense strand
cauaugaugcaagcacuuu

SEQ ID NO: 2126345 - RNA, 19 nt, Homo sapiens
  misc_RNA (1)...(19): siRNA sense strand
agucaacaguuugcagaaa

SEQ ID NO: 2126346 - RNA, 19 nt, Homo sapiens
  misc_RNA (1)...(19): siRNA sense strand
aaacuugaacgugaacuug

SEQ ID NO: 2126347 - RNA, 19 nt, Homo sapiens
  misc_RNA (1)...(19): siRNA sense strand
cuacgaagcagauugaaaa

SEQ ID NO: 2126348 - RNA, 19 nt, Homo sapiens
  misc_RNA (1)...(19): siRNA sense strand
ugucucuucugcuugcuuu

SEQ ID NO: 2126349 - RNA, 19 nt, Homo sapiens
  misc_RNA (1)...(19): siRNA sense strand
ucugcuugcuuucaaucua

SEQ ID NO: 2126350 - RNA, 19 nt, Homo sapiens
  misc_RNA (1)...(19): siRNA sense strand
gaagcagauugaaaauguu

SEQ ID NO: 2126351 - RNA, 19 nt, Homo sapiens
  misc_RNA (1)...(19): siRNA sense strand
ggagaagaaacuugaacgu

SEQ ID NO: 2126352 - RNA, 19 nt, Homo sapiens
  misc_RNA (1)...(19): siRNA sense strand
aagaggcccuguacaucga

SEQ ID NO: 2126353 - RNA, 19 nt, Homo sapiens
  misc_RNA (1)...(19): siRNA sense strand
gucaagacauguucuaccu

SEQ ID NO: 2126354 - RNA, 19 nt, Homo sapiens
  misc_RNA (1)...(19): siRNA sense strand
agaugaugcugcaguugga

SEQ ID NO: 2126355 - RNA, 19 nt, Homo sapiens
  misc_RNA (1)...(19): siRNA sense strand
cagcaguugguuaugaauu

SEQ ID NO: 2126356 - RNA, 19 nt, Homo sapiens
  misc_RNA (1)...(19): siRNA sense strand
uaacgccagcccuucgaaa

SEQ ID NO: 2126357 - RNA, 19 nt, Homo sapiens
  misc_RNA (1)...(19): siRNA sense strand
acucgaacguuguuauuuu

SEQ ID NO: 2126358 - RNA, 19 nt, Homo sapiens
  misc_RNA (1)...(19): siRNA sense strand
ccgaagaggaucccuugug

SEQ ID NO: 2126359 - RNA, 19 nt, Homo sapiens
  misc_RNA (1)...(19): siRNA sense strand
gauuuggugcuacaugugu

SEQ ID NO: 2126360 - RNA, 19 nt, Homo sapiens
  misc_RNA (1)...(19): siRNA sense strand
gucaacaguuugcagaaaa

SEQ ID NO: 2126361 - RNA, 19 nt, Homo sapiens
  misc_RNA (1)...(19): siRNA sense strand
auaccgcgcuuggcgagaa

SEQ ID NO: 2126362 - RNA, 19 nt, Homo sapiens
  misc_RNA (1)...(19): siRNA sense strand
ucagucaagacauguucua

SEQ ID NO: 2126363 - RNA, 19 nt, Homo sapiens
  misc_RNA (1)...(19): siRNA sense strand
aagaaagucagucaagaca

SEQ ID NO: 2126364 - RNA, 19 nt, Homo sapiens
  misc_RNA (1)...(19): siRNA sense strand
ugcuuucaaucuagguaua

SEQ ID NO: 2126365 - RNA, 19 nt, Homo sapiens
  misc_RNA (1)...(19): siRNA sense strand
gaugcacgaguuauugcuu

SEQ ID NO: 2126366 - RNA, 19 nt, Homo sapiens
  misc_RNA (1)...(19): siRNA sense strand
uuucagauuuggugcuaca

SEQ ID NO: 2126367 - RNA, 19 nt, Homo sapiens
  misc_RNA (1)...(19): siRNA sense strand
cccuguacaucgaugcauu

SEQ ID NO: 2126368 - RNA, 19 nt, Homo sapiens
  misc_RNA (1)...(19): siRNA sense strand
cuaguuugguauuccagau

SEQ ID NO: 2126369 - RNA, 19 nt, Homo sapiens
  misc_RNA (1)...(19): siRNA sense strand
aagaagaaagucagucaag

SEQ ID NO: 2126370 - RNA, 19 nt, Homo sapiens
  misc_RNA (1)...(19): siRNA sense strand
agacauguucuaccugcaa

SEQ ID NO: 2126371 - RNA, 19 nt, Homo sapiens
  misc_RNA (1)...(19): siRNA sense strand
gagaaggacucggugauug

SEQ ID NO: 2126372 - RNA, 19 nt, Homo sapiens
  misc_RNA (1)...(19): siRNA sense strand
ucugugcucuucuucauua

SEQ ID NO: 2126373 - RNA, 19 nt, Homo sapiens
  misc_RNA (1)...(19): siRNA sense strand
gaacauggagggcgucguu

SEQ ID NO: 2126374 - RNA, 19 nt, Homo sapiens
  misc_RNA (1)...(19): siRNA sense strand
ucuacaagcucaucaggaa

SEQ ID NO: 2126375 - RNA, 19 nt, Homo sapiens
  misc_RNA (1)...(19): siRNA sense strand
gaucaugugguacuuauuc

SEQ ID NO: 2126376 - RNA, 19 nt, Homo sapiens
  misc_RNA (1)...(19): siRNA sense strand
ggacaucgaguucaugauc

SEQ ID NO: 2126377 - RNA, 19 nt, Homo sapiens
  misc_RNA (1)...(19): siRNA sense strand
caucaacgccuuccucuca

SEQ ID NO: 2126378 - RNA, 19 nt, Homo sapiens
  misc_RNA (1)...(19): siRNA sense strand
caacaaggcgcaguacaug

SEQ ID NO: 2126379 - RNA, 19 nt, Homo sapiens
  misc_RNA (1)...(19): siRNA sense strand
ggagaacuuuguggacaug

SEQ ID NO: 2126380 - RNA, 19 nt, Homo sapiens
  misc_RNA (1)...(19): siRNA sense strand
ggaggaggagccuucauga

SEQ ID NO: 2126381 - RNA, 19 nt, Homo sapiens
  misc_RNA (1)...(19): siRNA sense strand
ucaauaaggacaucgaguu

SEQ ID NO: 2126382 - RNA, 19 nt, Homo sapiens
  misc_RNA (1)...(19): siRNA sense strand
gguguggacagguucaaua

SEQ ID NO: 2126383 - RNA, 19 nt, Homo sapiens
  misc_RNA (1)...(19): siRNA sense strand
gaucaucuuccucuucuuc

SEQ ID NO: 2126384 - RNA, 19 nt, Homo sapiens
  misc_RNA (1)...(19): siRNA sense strand
gcgcacaggucuucuucuc

SEQ ID NO: 2126385 - RNA, 19 nt, Homo sapiens
  misc_RNA (1)...(19): siRNA sense strand
ccacaagcccaacaucuuc

SEQ ID NO: 2126386 - RNA, 19 nt, Homo sapiens
  misc_RNA (1)...(19): siRNA sense strand
ggucugugcucuucuucau

SEQ ID NO: 2126387 - RNA, 19 nt, Homo sapiens
  misc_RNA (1)...(19): siRNA sense strand
ccuccacgcugcccuaugu

SEQ ID NO: 2126388 - RNA, 19 nt, Homo sapiens
  misc_RNA (1)...(19): siRNA sense strand
ucuccuggaucauguggua

SEQ ID NO: 2126389 - RNA, 19 nt, Homo sapiens
  misc_RNA (1)...(19): siRNA sense strand
guggacagguucaauaagg

SEQ ID NO: 2126390 - RNA, 19 nt, Homo sapiens
  misc_RNA (1)...(19): siRNA sense strand
gggcugucaucuauguuug

SEQ ID NO: 2126391 - RNA, 19 nt, Homo sapiens
  misc_RNA (1)...(19): siRNA sense strand
ucaccaagaugccguuguc

SEQ ID NO: 2126392 - RNA, 19 nt, Homo sapiens
  misc_RNA (1)...(19): siRNA sense strand
ggucucgucugcagcaaca

SEQ ID NO: 2126393 - RNA, 19 nt, Homo sapiens
  misc_RNA (1)...(19): siRNA sense strand
gauguucucuguggucuac

SEQ ID NO: 2126394 - RNA, 19 nt, Homo sapiens
  misc_RNA (1)...(19): siRNA sense strand
ggagcguccuguacaugug

SEQ ID NO: 2126395 - RNA, 19 nt, Homo sapiens
  misc_RNA (1)...(19): siRNA sense strand
gcgcauggagcguccugua

SEQ ID NO: 2126396 - RNA, 19 nt, Homo sapiens
  misc_RNA (1)...(19): siRNA sense strand
uggcugagcuggagaccau

SEQ ID NO: 2126397 - RNA, 19 nt, Homo sapiens
  misc_RNA (1)...(19): siRNA sense strand
gggaaggccguguacauca

SEQ ID NO: 2126398 - RNA, 19 nt, Homo sapiens
  misc_RNA (1)...(19): siRNA sense strand
caauaaggacaucgaguuc

SEQ ID NO: 2126399 - RNA, 19 nt, Homo sapiens
  misc_RNA (1)...(19): siRNA sense strand
gcauggagcguccuguaca

SEQ ID NO: 2126400 - RNA, 19 nt, Homo sapiens
  misc_RNA (1)...(19): siRNA sense strand
ggaaggccguguacaucac

SEQ ID NO: 2126401 - RNA, 19 nt, Homo sapiens
  misc_RNA (1)...(19): siRNA sense strand
gcuaugccaucuacaagcu

SEQ ID NO: 2126402 - RNA, 19 nt, Homo sapiens
  misc_RNA (1)...(19): siRNA sense strand
gcaacgugacccaggagaa

SEQ ID NO: 2126403 - RNA, 19 nt, Homo sapiens
  misc_RNA (1)...(19): siRNA sense strand
uggaucaugugguacuuau

SEQ ID NO: 2126404 - RNA, 19 nt, Homo sapiens
  misc_RNA (1)...(19): siRNA sense strand
gccacaagcccaacaucuu

SEQ ID NO: 2126405 - RNA, 19 nt, Homo sapiens
  misc_RNA (1)...(19): siRNA sense strand
gcaacaacugcgagaagga

SEQ ID NO: 2126406 - RNA, 19 nt, Homo sapiens
  misc_RNA (1)...(19): siRNA sense strand
ggcaucgucuuccucuuca

SEQ ID NO: 2126407 - RNA, 19 nt, Homo sapiens
  misc_RNA (1)...(19): siRNA sense strand
caucaucuccuggaucaug

SEQ ID NO: 2126408 - RNA, 19 nt, Homo sapiens
  misc_RNA (1)...(19): siRNA sense strand
ucucuguggucuacgugua

SEQ ID NO: 2126409 - RNA, 19 nt, Homo sapiens
  misc_RNA (1)...(19): siRNA sense strand
cucauuggcuucaucuuca

SEQ ID NO: 2126410 - RNA, 19 nt, Homo sapiens
  misc_RNA (1)...(19): siRNA sense strand
cgagagacgcucaacaucu

SEQ ID NO: 2126411 - RNA, 19 nt, Homo sapiens
  misc_RNA (1)...(19): siRNA sense strand
gaaggacucggugauugug

SEQ ID NO: 2126412 - RNA, 19 nt, Homo sapiens
  misc_RNA (1)...(19): siRNA sense strand
gaacauccugacccucauc

SEQ ID NO: 2126413 - RNA, 19 nt, Homo sapiens
  misc_RNA (1)...(19): siRNA sense strand
gggacaacaaggcgcagua

SEQ ID NO: 2126414 - RNA, 19 nt, Homo sapiens
  misc_RNA (1)...(19): siRNA sense strand
auaaggacaucgaguucau

SEQ ID NO: 2126415 - RNA, 19 nt, Homo sapiens
  misc_RNA (1)...(19): siRNA sense strand
guguggacagguucaauaa

SEQ ID NO: 2126416 - RNA, 19 nt, Homo sapiens
  misc_RNA (1)...(19): siRNA sense strand
cagcuaugccggcuccauu

SEQ ID NO: 2126417 - RNA, 19 nt, Homo sapiens
  misc_RNA (1)...(19): siRNA sense strand
gaaccagacaggguaugug

SEQ ID NO: 2126418 - RNA, 19 nt, Homo sapiens
  misc_RNA (1)...(19): siRNA sense strand
gaggaggagccuucaugau

SEQ ID NO: 2126419 - RNA, 19 nt, Homo sapiens
  misc_RNA (1)...(19): siRNA sense strand
ccgaggccaucaccaagau

SEQ ID NO: 2126420 - RNA, 19 nt, Homo sapiens
  misc_RNA (1)...(19): siRNA sense strand
ucaacgccuuccucucaga

SEQ ID NO: 2126421 - RNA, 19 nt, Homo sapiens
  misc_RNA (1)...(19): siRNA sense strand
caucaucaacggcuucaca

SEQ ID NO: 2126422 - RNA, 19 nt, Homo sapiens
  misc_RNA (1)...(19): siRNA sense strand
ucaccgaggccaucaccaa

SEQ ID NO: 2126423 - RNA, 19 nt, Homo sapiens
  misc_RNA (1)...(19): siRNA sense strand
aggaggagccuucaugauc

SEQ ID NO: 2126424 - RNA, 19 nt, Homo sapiens
  misc_RNA (1)...(19): siRNA sense strand
ccaaaucccagaagaucuc

SEQ ID NO: 2126425 - RNA, 19 nt, Homo sapiens
  misc_RNA (1)...(19): siRNA sense strand
gcugaacuccggccaguac

SEQ ID NO: 2126426 - RNA, 19 nt, Homo sapiens
  misc_RNA (1)...(19): siRNA sense strand
accaucaucuccuggauca

SEQ ID NO: 2126427 - RNA, 19 nt, Homo sapiens
  misc_RNA (1)...(19): siRNA sense strand
gcugaucaucuuccucuuc

SEQ ID NO: 2126428 - RNA, 19 nt, Homo sapiens
  misc_RNA (1)...(19): siRNA sense strand
uggacagguucaauaagga

SEQ ID NO: 2126429 - RNA, 19 nt, Homo sapiens
  misc_RNA (1)...(19): siRNA sense strand
cauggagcguccuguacau

SEQ ID NO: 2126430 - RNA, 19 nt, Homo sapiens
  misc_RNA (1)...(19): siRNA sense strand
ccucauuggcuucaucuuc

SEQ ID NO: 2126431 - RNA, 19 nt, Homo sapiens
  misc_RNA (1)...(19): siRNA sense strand
gugcucuucuucauuaugc

SEQ ID NO: 2126432 - RNA, 19 nt, Homo sapiens
  misc_RNA (1)...(19): siRNA sense strand
ucauggugggacuguauua

SEQ ID NO: 2126433 - RNA, 19 nt, Homo sapiens
  misc_RNA (1)...(19): siRNA sense strand
ccuccaugcucacguccuu

SEQ ID NO: 2126434 - RNA, 19 nt, Homo sapiens
  misc_RNA (1)...(19): siRNA sense strand
caacaucuucuggcaaguc

SEQ ID NO: 2126435 - RNA, 19 nt, Homo sapiens
  misc_RNA (1)...(19): siRNA sense strand
cagcaacaacugcgagaag

SEQ ID NO: 2126436 - RNA, 19 nt, Homo sapiens
  misc_RNA (1)...(19): siRNA sense strand
cugaucaucuuccucuucu

SEQ ID NO: 2126437 - RNA, 19 nt, Homo sapiens
  misc_RNA (1)...(19): siRNA sense strand
gcucaacgagaaccagaca

SEQ ID NO: 2126438 - RNA, 19 nt, Homo sapiens
  misc_RNA (1)...(19): siRNA sense strand
acaacaaggcgcaguacau

SEQ ID NO: 2126439 - RNA, 19 nt, Homo sapiens
  misc_RNA (1)...(19): siRNA sense strand
ggacaacaaggcgcaguac

SEQ ID NO: 2126440 - RNA, 19 nt, Homo sapiens
  misc_RNA (1)...(19): siRNA sense strand
agaaggacucggugauugu

SEQ ID NO: 2126441 - RNA, 19 nt, Homo sapiens
  misc_RNA (1)...(19): siRNA sense strand
gacccuggcuacgaggaau

SEQ ID NO: 2126442 - RNA, 19 nt, Homo sapiens
  misc_RNA (1)...(19): siRNA sense strand
ggacccuggcuacgaggaa

SEQ ID NO: 2126443 - RNA, 19 nt, Homo sapiens
  misc_RNA (1)...(19): siRNA sense strand
ccucuucuucuucguggua

SEQ ID NO: 2126444 - RNA, 19 nt, Homo sapiens
  misc_RNA (1)...(19): siRNA sense strand
caucuuccucuucuucuuc

SEQ ID NO: 2126445 - RNA, 19 nt, Homo sapiens
  misc_RNA (1)...(19): siRNA sense strand
gguacuuauucaacuccuu

SEQ ID NO: 2126446 - RNA, 19 nt, Homo sapiens
  misc_RNA (1)...(19): siRNA sense strand
uuccagaccugcgacauca

SEQ ID NO: 2126447 - RNA, 19 nt, Homo sapiens
  misc_RNA (1)...(19): siRNA sense strand
ccaauggcaucgucuuccu

SEQ ID NO: 2126448 - RNA, 19 nt, Homo sapiens
  misc_RNA (1)...(19): siRNA sense strand
ggccgaagugggacaacaa

SEQ ID NO: 2126449 - RNA, 19 nt, Homo sapiens
  misc_RNA (1)...(19): siRNA sense strand
cugcaggaccucagaguca

SEQ ID NO: 2126450 - RNA, 19 nt, Homo sapiens
  misc_RNA (1)...(19): siRNA sense strand
cggaggaggagccuucaug

SEQ ID NO: 2126451 - RNA, 19 nt, Homo sapiens
  misc_RNA (1)...(19): siRNA sense strand
ggaaucaccuggaucauga

SEQ ID NO: 2126452 - RNA, 19 nt, Homo sapiens
  misc_RNA (1)...(19): siRNA sense strand
ggacaucgacaacaucuuu

SEQ ID NO: 2126453 - RNA, 19 nt, Homo sapiens
  misc_RNA (1)...(19): siRNA sense strand
gaagacacccugcauguug

SEQ ID NO: 2126454 - RNA, 19 nt, Homo sapiens
  misc_RNA (1)...(19): siRNA sense strand
gauaggaggccgcaaguuu

SEQ ID NO: 2126455 - RNA, 19 nt, Homo sapiens
  misc_RNA (1)...(19): siRNA sense strand
gcucagcguuacauugaaa

SEQ ID NO: 2126456 - RNA, 19 nt, Homo sapiens
  misc_RNA (1)...(19): siRNA sense strand
gcuuugaccucauguggaa

SEQ ID NO: 2126457 - RNA, 19 nt, Homo sapiens
  misc_RNA (1)...(19): siRNA sense strand
agaacuacauggugaagaa

SEQ ID NO: 2126458 - RNA, 19 nt, Homo sapiens
  misc_RNA (1)...(19): siRNA sense strand
gagcaucgauccgguucaa

SEQ ID NO: 2126459 - RNA, 19 nt, Homo sapiens
  misc_RNA (1)...(19): siRNA sense strand
ggaaugggaaacuuuguga

SEQ ID NO: 2126460 - RNA, 19 nt, Homo sapiens
  misc_RNA (1)...(19): siRNA sense strand
caagggccauggauuguca

SEQ ID NO: 2126461 - RNA, 19 nt, Homo sapiens
  misc_RNA (1)...(19): siRNA sense strand
ugaaaauccuuaccugaua

SEQ ID NO: 2126462 - RNA, 19 nt, Homo sapiens
  misc_RNA (1)...(19): siRNA sense strand
gaaaggcaucuuccucuuc

SEQ ID NO: 2126463 - RNA, 19 nt, Homo sapiens
  misc_RNA (1)...(19): siRNA sense strand
ggcaguaccuggcguccaa

SEQ ID NO: 2126464 - RNA, 19 nt, Homo sapiens
  misc_RNA (1)...(19): siRNA sense strand
cgucaacgaucggaagaaa

SEQ ID NO: 2126465 - RNA, 19 nt, Homo sapiens
  misc_RNA (1)...(19): siRNA sense strand
ggccauggauugucaaagg

SEQ ID NO: 2126466 - RNA, 19 nt, Homo sapiens
  misc_RNA (1)...(19): siRNA sense strand
ggaagacuaugagcucaag

SEQ ID NO: 2126467 - RNA, 19 nt, Homo sapiens
  misc_RNA (1)...(19): siRNA sense strand
ugagaugccuugcgaguac

SEQ ID NO: 2126468 - RNA, 19 nt, Homo sapiens
  misc_RNA (1)...(19): siRNA sense strand
caggauggguggaagugaa

SEQ ID NO: 2126469 - RNA, 19 nt, Homo sapiens
  misc_RNA (1)...(19): siRNA sense strand
ggaagacacccugcauguu

SEQ ID NO: 2126470 - RNA, 19 nt, Homo sapiens
  misc_RNA (1)...(19): siRNA sense strand
gaucggaagaaacaacuga

SEQ ID NO: 2126471 - RNA, 19 nt, Homo sapiens
  misc_RNA (1)...(19): siRNA sense strand
gcaucgauccgguucaaga

SEQ ID NO: 2126472 - RNA, 19 nt, Homo sapiens
  misc_RNA (1)...(19): siRNA sense strand
uuacaagggccauggauug

SEQ ID NO: 2126473 - RNA, 19 nt, Homo sapiens
  misc_RNA (1)...(19): siRNA sense strand
ggaagaacuacauggugaa

SEQ ID NO: 2126474 - RNA, 19 nt, Homo sapiens
  misc_RNA (1)...(19): siRNA sense strand
ggaaugauggcccuguuag

SEQ ID NO: 2126475 - RNA, 19 nt, Homo sapiens
  misc_RNA (1)...(19): siRNA sense strand
gaaaauccuuaccugauag

SEQ ID NO: 2126476 - RNA, 19 nt, Homo sapiens
  misc_RNA (1)...(19): siRNA sense strand
ggaggaaggacacaagaag

SEQ ID NO: 2126477 - RNA, 19 nt, Homo sapiens
  misc_RNA (1)...(19): siRNA sense strand
guagaggaguuucgcaaaa

SEQ ID NO: 2126478 - RNA, 19 nt, Homo sapiens
  misc_RNA (1)...(19): siRNA sense strand
ucagggacaucgacaacau

SEQ ID NO: 2126479 - RNA, 19 nt, Homo sapiens
  misc_RNA (1)...(19): siRNA sense strand
gcgaguaccaccuguuugu

SEQ ID NO: 2126480 - RNA, 19 nt, Homo sapiens
  misc_RNA (1)...(19): siRNA sense strand
agaccugccuccuggaaga

SEQ ID NO: 2126481 - RNA, 19 nt, Homo sapiens
  misc_RNA (1)...(19): siRNA sense strand
caaagaagggcugcaagug

SEQ ID NO: 2126482 - RNA, 19 nt, Homo sapiens
  misc_RNA (1)...(19): siRNA sense strand
acaccuacauggaugaaca

SEQ ID NO: 2126483 - RNA, 19 nt, Homo sapiens
  misc_RNA (1)...(19): siRNA sense strand
ccaagaaauuacagaacca

SEQ ID NO: 2126484 - RNA, 19 nt, Homo sapiens
  misc_RNA (1)...(19): siRNA sense strand
gagcugacccggaagaacu

SEQ ID NO: 2126485 - RNA, 19 nt, Homo sapiens
  misc_RNA (1)...(19): siRNA sense strand
aaacaucucccgacuacca

SEQ ID NO: 2126486 - RNA, 19 nt, Homo sapiens
  misc_RNA (1)...(19): siRNA sense strand
gaaacuuugugaccaacac

SEQ ID NO: 2126487 - RNA, 19 nt, Homo sapiens
  misc_RNA (1)...(19): siRNA sense strand
ucaaaagccugcagagugu

SEQ ID NO: 2126488 - RNA, 19 nt, Homo sapiens
  misc_RNA (1)...(19): siRNA sense strand
gcagccaggaagacuauga

SEQ ID NO: 2126489 - RNA, 19 nt, Homo sapiens
  misc_RNA (1)...(19): siRNA sense strand
ccaaagaagggcugcaagu

SEQ ID NO: 2126490 - RNA, 19 nt, Homo sapiens
  misc_RNA (1)...(19): siRNA sense strand
ucaacgaucggaagaaaca

SEQ ID NO: 2126491 - RNA, 19 nt, Homo sapiens
  misc_RNA (1)...(19): siRNA sense strand
gcacaggagacaggauguu

SEQ ID NO: 2126492 - RNA, 19 nt, Homo sapiens
  misc_RNA (1)...(19): siRNA sense strand
caacugaggcagcucuucu

SEQ ID NO: 2126493 - RNA, 19 nt, Homo sapiens
  misc_RNA (1)...(19): siRNA sense strand
uggcucagcguuacauuga

SEQ ID NO: 2126494 - RNA, 19 nt, Homo sapiens
  misc_RNA (1)...(19): siRNA sense strand
gaguaccaccuguuuguag

SEQ ID NO: 2126495 - RNA, 19 nt, Homo sapiens
  misc_RNA (1)...(19): siRNA sense strand
caagaccugccuccuggaa

SEQ ID NO: 2126496 - RNA, 19 nt, Homo sapiens
  misc_RNA (1)...(19): siRNA sense strand
ucaagaccacccucaugaa

SEQ ID NO: 2126497 - RNA, 19 nt, Homo sapiens
  misc_RNA (1)...(19): siRNA sense strand
gaccagaaagaugauauuc

SEQ ID NO: 2126498 - RNA, 19 nt, Homo sapiens
  misc_RNA (1)...(19): siRNA sense strand
gaagaacuacauggugaag

SEQ ID NO: 2126499 - RNA, 19 nt, Homo sapiens
  misc_RNA (1)...(19): siRNA sense strand
ugggaaacuuugugaccaa

SEQ ID NO: 2126500 - RNA, 19 nt, Homo sapiens
  misc_RNA (1)...(19): siRNA sense strand
guggaaugauggcccuguu

SEQ ID NO: 2126501 - RNA, 19 nt, Homo sapiens
  misc_RNA (1)...(19): siRNA sense strand
guucaagaccacccucaug

SEQ ID NO: 2126502 - RNA, 19 nt, Homo sapiens
  misc_RNA (1)...(19): siRNA sense strand
ugaccugcgugucuaugug

SEQ ID NO: 2126503 - RNA, 19 nt, Homo sapiens
  misc_RNA (1)...(19): siRNA sense strand
cgaccagaaagaugauauu

SEQ ID NO: 2126504 - RNA, 19 nt, Homo sapiens
  misc_RNA (1)...(19): siRNA sense strand
uaggaggccgcaaguuuga

SEQ ID NO: 2126505 - RNA, 19 nt, Homo sapiens
  misc_RNA (1)...(19): siRNA sense strand
uggaaugauggcccuguua

SEQ ID NO: 2126506 - RNA, 19 nt, Homo sapiens
  misc_RNA (1)...(19): siRNA sense strand
gccauuaggugccccaaga

SEQ ID NO: 2126507 - RNA, 19 nt, Homo sapiens
  misc_RNA (1)...(19): siRNA sense strand
cagcagccaggaagacuau

SEQ ID NO: 2126508 - RNA, 19 nt, Homo sapiens
  misc_RNA (1)...(19): siRNA sense strand
caagaaauuacagaaccaa

SEQ ID NO: 2126509 - RNA, 19 nt, Homo sapiens
  misc_RNA (1)...(19): siRNA sense strand
caagaccacccucaugaac

SEQ ID NO: 2126510 - RNA, 19 nt, Homo sapiens
  misc_RNA (1)...(19): siRNA sense strand
cgaccacaccuacauggau

SEQ ID NO: 2126511 - RNA, 19 nt, Homo sapiens
  misc_RNA (1)...(19): siRNA sense strand
cuucugcucccuucaaguu

SEQ ID NO: 2126512 - RNA, 19 nt, Homo sapiens
  misc_RNA (1)...(19): siRNA sense strand
gggaaugggaaacuuugug

SEQ ID NO: 2126513 - RNA, 19 nt, Homo sapiens
  misc_RNA (1)...(19): siRNA sense strand
gcuguacggcuaugacauc

SEQ ID NO: 2126514 - RNA, 19 nt, Homo sapiens
  misc_RNA (1)...(19): siRNA sense strand
ccgacuaccacccaaagaa

SEQ ID NO: 2126515 - RNA, 19 nt, Homo sapiens
  misc_RNA (1)...(19): siRNA sense strand
ucuaugugcuggugauguc

SEQ ID NO: 2126516 - RNA, 19 nt, Homo sapiens
  misc_RNA (1)...(19): siRNA sense strand
cgaguaccaccuguuugua

SEQ ID NO: 2126517 - RNA, 19 nt, Homo sapiens
  misc_RNA (1)...(19): siRNA sense strand
gaugaacaugugcggauca

SEQ ID NO: 2126518 - RNA, 19 nt, Homo sapiens
  misc_RNA (1)...(19): siRNA sense strand
gcucuucugcucccuucaa

SEQ ID NO: 2126519 - RNA, 19 nt, Homo sapiens
  misc_RNA (1)...(19): siRNA sense strand
gggagugggauuucuacug

SEQ ID NO: 2126520 - RNA, 19 nt, Homo sapiens
  misc_RNA (1)...(19): siRNA sense strand
aagacacccugcauguugu

SEQ ID NO: 2126521 - RNA, 19 nt, Homo sapiens
  misc_RNA (1)...(19): siRNA sense strand
uggaagacacccugcaugu

SEQ ID NO: 2126522 - RNA, 19 nt, Homo sapiens
  misc_RNA (1)...(19): siRNA sense strand
cgacuaccacccaaagaag

SEQ ID NO: 2126523 - RNA, 19 nt, Homo sapiens
  misc_RNA (1)...(19): siRNA sense strand
aguaccaccuguuuguaga

SEQ ID NO: 2126524 - RNA, 19 nt, Homo sapiens
  misc_RNA (1)...(19): siRNA sense strand
auaggaggccgcaaguuug

SEQ ID NO: 2126525 - RNA, 19 nt, Homo sapiens
  misc_RNA (1)...(19): siRNA sense strand
cuccugaccugucgggaau

SEQ ID NO: 2126526 - RNA, 19 nt, Homo sapiens
  misc_RNA (1)...(19): siRNA sense strand
gagcuguacggcuaugaca

SEQ ID NO: 2126527 - RNA, 19 nt, Homo sapiens
  misc_RNA (1)...(19): siRNA sense strand
ucaagggaaaggcaucuuc

SEQ ID NO: 2126528 - RNA, 19 nt, Homo sapiens
  misc_RNA (1)...(19): siRNA sense strand
acuauguggcucagcguua

SEQ ID NO: 2126529 - RNA, 19 nt, Homo sapiens
  misc_RNA (1)...(19): siRNA sense strand
gagagcagagagcaucgau

SEQ ID NO: 2126530 - RNA, 19 nt, Homo sapiens
  misc_RNA (1)...(19): siRNA sense strand
agucuuggcucccucagaa

SEQ ID NO: 2126531 - RNA, 19 nt, Homo sapiens
  misc_RNA (1)...(19): siRNA sense strand
gaauuugccaccaccaauc

SEQ ID NO: 2126532 - RNA, 19 nt, Homo sapiens
  misc_RNA (1)...(19): siRNA sense strand
ccucagaagcaucgugaaa

SEQ ID NO: 2126533 - RNA, 19 nt, Homo sapiens
  misc_RNA (1)...(19): siRNA sense strand
gaaaagccuccuucugguu

SEQ ID NO: 2126534 - RNA, 19 nt, Homo sapiens
  misc_RNA (1)...(19): siRNA sense strand
ccaccaaucagaucagucu

SEQ ID NO: 2126535 - RNA, 19 nt, Homo sapiens
  misc_RNA (1)...(19): siRNA sense strand
ugacagaggugcuuuucca

SEQ ID NO: 2126536 - RNA, 19 nt, Homo sapiens
  misc_RNA (1)...(19): siRNA sense strand
ugaauuugccaccaccaau

SEQ ID NO: 2126537 - RNA, 19 nt, Homo sapiens
  misc_RNA (1)...(19): siRNA sense strand
cgaaagugcgguuguggau

SEQ ID NO: 2126538 - RNA, 19 nt, Homo sapiens
  misc_RNA (1)...(19): siRNA sense strand
ccaggaagcugagaaauug

SEQ ID NO: 2126539 - RNA, 19 nt, Homo sapiens
  misc_RNA (1)...(19): siRNA sense strand
gcaaugaccuaagcaaugu

SEQ ID NO: 2126540 - RNA, 19 nt, Homo sapiens
  misc_RNA (1)...(19): siRNA sense strand
ggagauauguccacugauc

SEQ ID NO: 2126541 - RNA, 19 nt, Homo sapiens
  misc_RNA (1)...(19): siRNA sense strand
uaagcaaugucguggauaa

SEQ ID NO: 2126542 - RNA, 19 nt, Homo sapiens
  misc_RNA (1)...(19): siRNA sense strand
ggacaaacacagccaaauc

SEQ ID NO: 2126543 - RNA, 19 nt, Homo sapiens
  misc_RNA (1)...(19): siRNA sense strand
gcugagaaauugcugaaca

SEQ ID NO: 2126544 - RNA, 19 nt, Homo sapiens
  misc_RNA (1)...(19): siRNA sense strand
ucaacaaguucgugaauag

SEQ ID NO: 2126545 - RNA, 19 nt, Homo sapiens
  misc_RNA (1)...(19): siRNA sense strand
aaacacagccaaaucauca

SEQ ID NO: 2126546 - RNA, 19 nt, Homo sapiens
  misc_RNA (1)...(19): siRNA sense strand
aaggagauauguccacuga

SEQ ID NO: 2126547 - RNA, 19 nt, Homo sapiens
  misc_RNA (1)...(19): siRNA sense strand
ccaaccagcaucucacuuu

SEQ ID NO: 2126548 - RNA, 19 nt, Homo sapiens
  misc_RNA (1)...(19): siRNA sense strand
gccaaaucaucaacaaguu

SEQ ID NO: 2126549 - RNA, 19 nt, Homo sapiens
  misc_RNA (1)...(19): siRNA sense strand
gacaaacacagccaaauca

SEQ ID NO: 2126550 - RNA, 19 nt, Homo sapiens
  misc_RNA (1)...(19): siRNA sense strand
uaggagugcuucagaaauc

SEQ ID NO: 2126551 - RNA, 19 nt, Homo sapiens
  misc_RNA (1)...(19): siRNA sense strand
aaccugagcuucccuguca

SEQ ID NO: 2126552 - RNA, 19 nt, Homo sapiens
  misc_RNA (1)...(19): siRNA sense strand
gugaauagcgugaucaaca

SEQ ID NO: 2126553 - RNA, 19 nt, Homo sapiens
  misc_RNA (1)...(19): siRNA sense strand
gaugauggcaaaggccuua

SEQ ID NO: 2126554 - RNA, 19 nt, Homo sapiens
  misc_RNA (1)...(19): siRNA sense strand
ccacugauccgcaucuuca

SEQ ID NO: 2126555 - RNA, 19 nt, Homo sapiens
  misc_RNA (1)...(19): siRNA sense strand
caaccagcaucucacuuuc

SEQ ID NO: 2126556 - RNA, 19 nt, Homo sapiens
  misc_RNA (1)...(19): siRNA sense strand
gcccaucauuggccagauu

SEQ ID NO: 2126557 - RNA, 19 nt, Homo sapiens
  misc_RNA (1)...(19): siRNA sense strand
ggcaaugaccuaagcaaug

SEQ ID NO: 2126558 - RNA, 19 nt, Homo sapiens
  misc_RNA (1)...(19): siRNA sense strand
aagcugaaccgaucgauga

SEQ ID NO: 2126559 - RNA, 19 nt, Homo sapiens
  misc_RNA (1)...(19): siRNA sense strand
caacuaacacggacauuuu

SEQ ID NO: 2126560 - RNA, 19 nt, Homo sapiens
  misc_RNA (1)...(19): siRNA sense strand
gcugcaaacccucaucuga

SEQ ID NO: 2126561 - RNA, 19 nt, Homo sapiens
  misc_RNA (1)...(19): siRNA sense strand
acaguugacaauacucuua

SEQ ID NO: 2126562 - RNA, 19 nt, Homo sapiens
  misc_RNA (1)...(19): siRNA sense strand
cgauaauccucagcacaaa

SEQ ID NO: 2126563 - RNA, 19 nt, Homo sapiens
  misc_RNA (1)...(19): siRNA sense strand
ccaacuaacacggacauuu

SEQ ID NO: 2126564 - RNA, 19 nt, Homo sapiens
  misc_RNA (1)...(19): siRNA sense strand
cuucagaaauccagugcuu

SEQ ID NO: 2126565 - RNA, 19 nt, Homo sapiens
  misc_RNA (1)...(19): siRNA sense strand
gcaaugucguggauaagcu

SEQ ID NO: 2126566 - RNA, 19 nt, Homo sapiens
  misc_RNA (1)...(19): siRNA sense strand
uugacaaucuuggcaauga

SEQ ID NO: 2126567 - RNA, 19 nt, Homo sapiens
  misc_RNA (1)...(19): siRNA sense strand
ccuaagcaaugucguggau

SEQ ID NO: 2126568 - RNA, 19 nt, Homo sapiens
  misc_RNA (1)...(19): siRNA sense strand
cuucagcuuuggaaacuug

SEQ ID NO: 2126569 - RNA, 19 nt, Homo sapiens
  misc_RNA (1)...(19): siRNA sense strand
ugagacaguugacaauacu

SEQ ID NO: 2126570 - RNA, 19 nt, Homo sapiens
  misc_RNA (1)...(19): siRNA sense strand
cugagaaauugcugaacaa

SEQ ID NO: 2126571 - RNA, 19 nt, Homo sapiens
  misc_RNA (1)...(19): siRNA sense strand
uucagcaggucgucgauaa

SEQ ID NO: 2126572 - RNA, 19 nt, Homo sapiens
  misc_RNA (1)...(19): siRNA sense strand
cgagggacuugagacaguu

SEQ ID NO: 2126573 - RNA, 19 nt, Homo sapiens
  misc_RNA (1)...(19): siRNA sense strand
ccaaaucaucaacaaguuc

SEQ ID NO: 2126574 - RNA, 19 nt, Homo sapiens
  misc_RNA (1)...(19): siRNA sense strand
gaccuaggagugcuucaga

SEQ ID NO: 2126575 - RNA, 19 nt, Homo sapiens
  misc_RNA (1)...(19): siRNA sense strand
acagccaaaucaucaacaa

SEQ ID NO: 2126576 - RNA, 19 nt, Homo sapiens
  misc_RNA (1)...(19): siRNA sense strand
caaacacagccaaaucauc

SEQ ID NO: 2126577 - RNA, 19 nt, Homo sapiens
  misc_RNA (1)...(19): siRNA sense strand
cccaggaagcugagaaauu

SEQ ID NO: 2126578 - RNA, 19 nt, Homo sapiens
  misc_RNA (1)...(19): siRNA sense strand
gcagaaggcccaggaagcu

SEQ ID NO: 2126579 - RNA, 19 nt, Homo sapiens
  misc_RNA (1)...(19): siRNA sense strand
ucgauaauccucagcacaa

SEQ ID NO: 2126580 - RNA, 19 nt, Homo sapiens
  misc_RNA (1)...(19): siRNA sense strand
caucaacaaguucgugaau

SEQ ID NO: 2126581 - RNA, 19 nt, Homo sapiens
  misc_RNA (1)...(19): siRNA sense strand
ccuaggagugcuucagaaa

SEQ ID NO: 2126582 - RNA, 19 nt, Homo sapiens
  misc_RNA (1)...(19): siRNA sense strand
gcacaaaacccagcugcaa

SEQ ID NO: 2126583 - RNA, 19 nt, Homo sapiens
  misc_RNA (1)...(19): siRNA sense strand
ugaauagcgugaucaacac

SEQ ID NO: 2126584 - RNA, 19 nt, Homo sapiens
  misc_RNA (1)...(19): siRNA sense strand
gcaucucacuuuccuugcu

SEQ ID NO: 2126585 - RNA, 19 nt, Homo sapiens
  misc_RNA (1)...(19): siRNA sense strand
gccagauuaucaaccugaa

SEQ ID NO: 2126586 - RNA, 19 nt, Homo sapiens
  misc_RNA (1)...(19): siRNA sense strand
caguugacaauacucuuaa

SEQ ID NO: 2126587 - RNA, 19 nt, Homo sapiens
  misc_RNA (1)...(19): siRNA sense strand
accgaucgaugauggcaaa

SEQ ID NO: 2126588 - RNA, 19 nt, Homo sapiens
  misc_RNA (1)...(19): siRNA sense strand
guucgugaauagcgugauc

SEQ ID NO: 2126589 - RNA, 19 nt, Homo sapiens
  misc_RNA (1)...(19): siRNA sense strand
cagauuaucaaccugaaag

SEQ ID NO: 2126590 - RNA, 19 nt, Homo sapiens
  misc_RNA (1)...(19): siRNA sense strand
aucaacaaguucgugaaua

SEQ ID NO: 2126591 - RNA, 19 nt, Homo sapiens
  misc_RNA (1)...(19): siRNA sense strand
acgagggacuugagacagu

SEQ ID NO: 2126592 - RNA, 19 nt, Homo sapiens
  misc_RNA (1)...(19): siRNA sense strand
gcaacuggccaagcagaag

SEQ ID NO: 2126593 - RNA, 19 nt, Homo sapiens
  misc_RNA (1)...(19): siRNA sense strand
uugagacaguugacaauac

SEQ ID NO: 2126594 - RNA, 19 nt, Homo sapiens
  misc_RNA (1)...(19): siRNA sense strand
gaccgcagucacaauugaa

SEQ ID NO: 2126595 - RNA, 19 nt, Homo sapiens
  misc_RNA (1)...(19): siRNA sense strand
ggacuugagacaguugaca

SEQ ID NO: 2126596 - RNA, 19 nt, Homo sapiens
  misc_RNA (1)...(19): siRNA sense strand
gacuugagacaguugacaa

SEQ ID NO: 2126597 - RNA, 19 nt, Homo sapiens
  misc_RNA (1)...(19): siRNA sense strand
cagcaggucgucgauaauc

SEQ ID NO: 2126598 - RNA, 19 nt, Homo sapiens
  misc_RNA (1)...(19): siRNA sense strand
ugacgcagcucaucgauaa

SEQ ID NO: 2126599 - RNA, 19 nt, Homo sapiens
  misc_RNA (1)...(19): siRNA sense strand
gcacagaacuagggaguga

SEQ ID NO: 2126600 - RNA, 19 nt, Homo sapiens
  misc_RNA (1)...(19): siRNA sense strand
gcacaaacguguccucauc

SEQ ID NO: 2126601 - RNA, 19 nt, Homo sapiens
  misc_RNA (1)...(19): siRNA sense strand
guacaugaccacagugaua

SEQ ID NO: 2126602 - RNA, 19 nt, Homo sapiens
  misc_RNA (1)...(19): siRNA sense strand
gcacagagaaccaaacaca

SEQ ID NO: 2126603 - RNA, 19 nt, Homo sapiens
  misc_RNA (1)...(19): siRNA sense strand
ugaccacagugauagaaua

SEQ ID NO: 2126604 - RNA, 19 nt, Homo sapiens
  misc_RNA (1)...(19): siRNA sense strand
cauaaaggccugaagaaga

SEQ ID NO: 2126605 - RNA, 19 nt, Homo sapiens
  misc_RNA (1)...(19): siRNA sense strand
gcucaucgauaaguuagaa

SEQ ID NO: 2126606 - RNA, 19 nt, Homo sapiens
  misc_RNA (1)...(19): siRNA sense strand
gcuagaagguguggagcua

SEQ ID NO: 2126607 - RNA, 19 nt, Homo sapiens
  misc_RNA (1)...(19): siRNA sense strand
ucaagaacaugaggcagua

SEQ ID NO: 2126608 - RNA, 19 nt, Homo sapiens
  misc_RNA (1)...(19): siRNA sense strand
acgggaaggucgugucuua

SEQ ID NO: 2126609 - RNA, 19 nt, Homo sapiens
  misc_RNA (1)...(19): siRNA sense strand
gcagcucaucgauaaguua

SEQ ID NO: 2126610 - RNA, 19 nt, Homo sapiens
  misc_RNA (1)...(19): siRNA sense strand
gggacacccuggaguacaa

SEQ ID NO: 2126611 - RNA, 19 nt, Homo sapiens
  misc_RNA (1)...(19): siRNA sense strand
gagcuggcccuguaucuuc

SEQ ID NO: 2126612 - RNA, 19 nt, Homo sapiens
  misc_RNA (1)...(19): siRNA sense strand
ggaaggucgugucuuaugc

SEQ ID NO: 2126613 - RNA, 19 nt, Homo sapiens
  misc_RNA (1)...(19): siRNA sense strand
aaacguguccucaucuuug

SEQ ID NO: 2126614 - RNA, 19 nt, Homo sapiens
  misc_RNA (1)...(19): siRNA sense strand
ccuuggagcuggcccugua

SEQ ID NO: 2126615 - RNA, 19 nt, Homo sapiens
  misc_RNA (1)...(19): siRNA sense strand
gacauaaaggccugaagaa

SEQ ID NO: 2126616 - RNA, 19 nt, Homo sapiens
  misc_RNA (1)...(19): siRNA sense strand
cuuccgagauggucuuuga

SEQ ID NO: 2126617 - RNA, 19 nt, Homo sapiens
  misc_RNA (1)...(19): siRNA sense strand
aaccaaguguuaccucauu

SEQ ID NO: 2126618 - RNA, 19 nt, Homo sapiens
  misc_RNA (1)...(19): siRNA sense strand
cgagauggucuuugagcua

SEQ ID NO: 2126619 - RNA, 19 nt, Homo sapiens
  misc_RNA (1)...(19): siRNA sense strand
gggaaggucgugucuuaug

SEQ ID NO: 2126620 - RNA, 19 nt, Homo sapiens
  misc_RNA (1)...(19): siRNA sense strand
gauggucuuugagcuagaa

SEQ ID NO: 2126621 - RNA, 19 nt, Homo sapiens
  misc_RNA (1)...(19): siRNA sense strand
cugccagggucaagacaua

SEQ ID NO: 2126622 - RNA, 19 nt, Homo sapiens
  misc_RNA (1)...(19): siRNA sense strand
ccaacgcccuggucacaca

SEQ ID NO: 2126623 - RNA, 19 nt, Homo sapiens
  misc_RNA (1)...(19): siRNA sense strand
caaacacacaucuggauca

SEQ ID NO: 2126624 - RNA, 19 nt, Homo sapiens
  misc_RNA (1)...(19): siRNA sense strand
caaacguguccucaucuuu

SEQ ID NO: 2126625 - RNA, 19 nt, Homo sapiens
  misc_RNA (1)...(19): siRNA sense strand
agacauaaaggccugaaga

SEQ ID NO: 2126626 - RNA, 19 nt, Homo sapiens
  misc_RNA (1)...(19): siRNA sense strand
uggccuacguguacuuuga

SEQ ID NO: 2126627 - RNA, 19 nt, Homo sapiens
  misc_RNA (1)...(19): siRNA sense strand
gaagcccucagaccucaaa

SEQ ID NO: 2126628 - RNA, 19 nt, Homo sapiens
  misc_RNA (1)...(19): siRNA sense strand
auaaaggccugaagaagac

SEQ ID NO: 2126629 - RNA, 19 nt, Homo sapiens
  misc_RNA (1)...(19): siRNA sense strand
ccacagugauagaauacgu

SEQ ID NO: 2126630 - RNA, 19 nt, Homo sapiens
  misc_RNA (1)...(19): siRNA sense strand
acaaacguguccucaucuu

SEQ ID NO: 2126631 - RNA, 19 nt, Homo sapiens
  misc_RNA (1)...(19): siRNA sense strand
cgucguacaugaccacagu

SEQ ID NO: 2126632 - RNA, 19 nt, Homo sapiens
  misc_RNA (1)...(19): siRNA sense strand
agacccacuucaucaagaa

SEQ ID NO: 2126633 - RNA, 19 nt, Homo sapiens
  misc_RNA (1)...(19): siRNA sense strand
gauaggguuugaguucaca

SEQ ID NO: 2126634 - RNA, 19 nt, Homo sapiens
  misc_RNA (1)...(19): siRNA sense strand
ggcaagcucagcaaacaga

SEQ ID NO: 2126635 - RNA, 19 nt, Homo sapiens
  misc_RNA (1)...(19): siRNA sense strand
gcaggaucgugcucaucug

SEQ ID NO: 2126636 - RNA, 19 nt, Homo sapiens
  misc_RNA (1)...(19): siRNA sense strand
accaaguguuaccucauua

SEQ ID NO: 2126637 - RNA, 19 nt, Homo sapiens
  misc_RNA (1)...(19): siRNA sense strand
gaaccaaguguuaccucau

SEQ ID NO: 2126638 - RNA, 19 nt, Homo sapiens
  misc_RNA (1)...(19): siRNA sense strand
gcagggcaagcucagcaaa

SEQ ID NO: 2126639 - RNA, 19 nt, Homo sapiens
  misc_RNA (1)...(19): siRNA sense strand
acagagaaccaaacacaca

SEQ ID NO: 2126640 - RNA, 19 nt, Homo sapiens
  misc_RNA (1)...(19): siRNA sense strand
ccugauaggguuugaguuc

SEQ ID NO: 2126641 - RNA, 19 nt, Homo sapiens
  misc_RNA (1)...(19): siRNA sense strand
ucgauaaguuagaagaaag

SEQ ID NO: 2126642 - RNA, 19 nt, Homo sapiens
  misc_RNA (1)...(19): siRNA sense strand
cccuguaucuucccgagaa

SEQ ID NO: 2126643 - RNA, 19 nt, Homo sapiens
  misc_RNA (1)...(19): siRNA sense strand
aagacccacuucaucaaga

SEQ ID NO: 2126644 - RNA, 19 nt, Homo sapiens
  misc_RNA (1)...(19): siRNA sense strand
ggagcuggcccuguaucuu

SEQ ID NO: 2126645 - RNA, 19 nt, Homo sapiens
  misc_RNA (1)...(19): siRNA sense strand
ucccgagaaccaaguguua

SEQ ID NO: 2126646 - RNA, 19 nt, Homo sapiens
  misc_RNA (1)...(19): siRNA sense strand
caaacugacgcugagcaaa

SEQ ID NO: 2126647 - RNA, 19 nt, Homo sapiens
  misc_RNA (1)...(19): siRNA sense strand
cagcacagagaaccaaaca

SEQ ID NO: 2126648 - RNA, 19 nt, Homo sapiens
  misc_RNA (1)...(19): siRNA sense strand
gaccugauaggguuugagu

SEQ ID NO: 2126649 - RNA, 19 nt, Homo sapiens
  misc_RNA (1)...(19): siRNA sense strand
gcaaacagaaccgcaagcu

SEQ ID NO: 2126650 - RNA, 19 nt, Homo sapiens
  misc_RNA (1)...(19): siRNA sense strand
gcaagcucagcaaacagaa

SEQ ID NO: 2126651 - RNA, 19 nt, Homo sapiens
  misc_RNA (1)...(19): siRNA sense strand
caucgauaaguuagaagaa

SEQ ID NO: 2126652 - RNA, 19 nt, Homo sapiens
  misc_RNA (1)...(19): siRNA sense strand
gccagggucaagacauaaa

SEQ ID NO: 2126653 - RNA, 19 nt, Homo sapiens
  misc_RNA (1)...(19): siRNA sense strand
caaguguuaccucauuaca

SEQ ID NO: 2126654 - RNA, 19 nt, Homo sapiens
  misc_RNA (1)...(19): siRNA sense strand
aaacugacgcugagcaaaa

SEQ ID NO: 2126655 - RNA, 19 nt, Homo sapiens
  misc_RNA (1)...(19): siRNA sense strand
gagaaccaaacacacaucu

SEQ ID NO: 2126656 - RNA, 19 nt, Homo sapiens
  misc_RNA (1)...(19): siRNA sense strand
gaucaccgagacauaaagg

SEQ ID NO: 2126657 - RNA, 19 nt, Homo sapiens
  misc_RNA (1)...(19): siRNA sense strand
gugacgcagcucaucgaua

SEQ ID NO: 2126658 - RNA, 19 nt, Homo sapiens
  misc_RNA (1)...(19): siRNA sense strand
gaccacagugauagaauac

SEQ ID NO: 2126659 - RNA, 19 nt, Homo sapiens
  misc_RNA (1)...(19): siRNA sense strand
gcccuggucacacacaaga

SEQ ID NO: 2126660 - RNA, 19 nt, Homo sapiens
  misc_RNA (1)...(19): siRNA sense strand
uaugcgaaguuccuguauc

SEQ ID NO: 2126661 - RNA, 19 nt, Homo sapiens
  misc_RNA (1)...(19): siRNA sense strand
ggcaguacgacaccaggaa

SEQ ID NO: 2126662 - RNA, 19 nt, Homo sapiens
  misc_RNA (1)...(19): siRNA sense strand
ggagauggcuuccaagaug

SEQ ID NO: 2126663 - RNA, 19 nt, Homo sapiens
  misc_RNA (1)...(19): siRNA sense strand
gaagagaaacccaaaguau

SEQ ID NO: 2126664 - RNA, 19 nt, Homo sapiens
  misc_RNA (1)...(19): siRNA sense strand
gaaggucacuaccaucaug

SEQ ID NO: 2126665 - RNA, 19 nt, Homo sapiens
  misc_RNA (1)...(19): siRNA sense strand
gcacagugauggugauaca

SEQ ID NO: 2126666 - RNA, 19 nt, Homo sapiens
  misc_RNA (1)...(19): siRNA sense strand
caacagagcacuggacauu

SEQ ID NO: 2126667 - RNA, 19 nt, Homo sapiens
  misc_RNA (1)...(19): siRNA sense strand
gaaguccugugccagauug

SEQ ID NO: 2126668 - RNA, 19 nt, Homo sapiens
  misc_RNA (1)...(19): siRNA sense strand
ggaauauccucaucuacau

SEQ ID NO: 2126669 - RNA, 19 nt, Homo sapiens
  misc_RNA (1)...(19): siRNA sense strand
agagaaacccaaaguauuu

SEQ ID NO: 2126670 - RNA, 19 nt, Homo sapiens
  misc_RNA (1)...(19): siRNA sense strand
gagauggcuuccaagauga

SEQ ID NO: 2126671 - RNA, 19 nt, Homo sapiens
  misc_RNA (1)...(19): siRNA sense strand
gagaaacccaaaguauuua

SEQ ID NO: 2126672 - RNA, 19 nt, Homo sapiens
  misc_RNA (1)...(19): siRNA sense strand
caccauggcugcuggagaa

SEQ ID NO: 2126673 - RNA, 19 nt, Homo sapiens
  misc_RNA (1)...(19): siRNA sense strand
gaaagaaucaggcagaacu

SEQ ID NO: 2126674 - RNA, 19 nt, Homo sapiens
  misc_RNA (1)...(19): siRNA sense strand
ucaaagaccuggacaucag

SEQ ID NO: 2126675 - RNA, 19 nt, Homo sapiens
  misc_RNA (1)...(19): siRNA sense strand
gaacuauggcuucuacauc

SEQ ID NO: 2126676 - RNA, 19 nt, Homo sapiens
  misc_RNA (1)...(19): siRNA sense strand
gcccagcaaugccaccuuu

SEQ ID NO: 2126677 - RNA, 19 nt, Homo sapiens
  misc_RNA (1)...(19): siRNA sense strand
gagaaggucacuaccauca

SEQ ID NO: 2126678 - RNA, 19 nt, Homo sapiens
  misc_RNA (1)...(19): siRNA sense strand
gccauccucuccucauauu

SEQ ID NO: 2126679 - RNA, 19 nt, Homo sapiens
  misc_RNA (1)...(19): siRNA sense strand
gaagagaaggucacuacca

SEQ ID NO: 2126680 - RNA, 19 nt, Homo sapiens
  misc_RNA (1)...(19): siRNA sense strand
gcagcgucauccucaagaa

SEQ ID NO: 2126681 - RNA, 19 nt, Homo sapiens
  misc_RNA (1)...(19): siRNA sense strand
gcaucaccaucaagaacuu

SEQ ID NO: 2126682 - RNA, 19 nt, Homo sapiens
  misc_RNA (1)...(19): siRNA sense strand
gugccauccucuccucaua

SEQ ID NO: 2126683 - RNA, 19 nt, Homo sapiens
  misc_RNA (1)...(19): siRNA sense strand
gaagcacagugauggugau

SEQ ID NO: 2126684 - RNA, 19 nt, Homo sapiens
  misc_RNA (1)...(19): siRNA sense strand
gcacucaggucaacuuccu

SEQ ID NO: 2126685 - RNA, 19 nt, Homo sapiens
  misc_RNA (1)...(19): siRNA sense strand
aagagaaacccaaaguauu

SEQ ID NO: 2126686 - RNA, 19 nt, Homo sapiens
  misc_RNA (1)...(19): siRNA sense strand
cuacugcuccucccaagaa

SEQ ID NO: 2126687 - RNA, 19 nt, Homo sapiens
  misc_RNA (1)...(19): siRNA sense strand
gucguuaccucguccauca

SEQ ID NO: 2126688 - RNA, 19 nt, Homo sapiens
  misc_RNA (1)...(19): siRNA sense strand
caggucaacuuccucaaca

SEQ ID NO: 2126689 - RNA, 19 nt, Homo sapiens
  misc_RNA (1)...(19): siRNA sense strand
gaaagacacaggguucauc

SEQ ID NO: 2126690 - RNA, 19 nt, Homo sapiens
  misc_RNA (1)...(19): siRNA sense strand
gaaucaggcagaacuaugg

SEQ ID NO: 2126691 - RNA, 19 nt, Homo sapiens
  misc_RNA (1)...(19): siRNA sense strand
cauggcugcuggagaaguu

SEQ ID NO: 2126692 - RNA, 19 nt, Homo sapiens
  misc_RNA (1)...(19): siRNA sense strand
acagagcacuggacauuuu

SEQ ID NO: 2126693 - RNA, 19 nt, Homo sapiens
  misc_RNA (1)...(19): siRNA sense strand
gcaauguggugggcuggau

SEQ ID NO: 2126694 - RNA, 19 nt, Homo sapiens
  misc_RNA (1)...(19): siRNA sense strand
agaagagaaacccaaagua

SEQ ID NO: 2126695 - RNA, 19 nt, Homo sapiens
  misc_RNA (1)...(19): siRNA sense strand
aagagaaggucacuaccau

SEQ ID NO: 2126696 - RNA, 19 nt, Homo sapiens
  misc_RNA (1)...(19): siRNA sense strand
gaagcugggcugugugauc

SEQ ID NO: 2126697 - RNA, 19 nt, Homo sapiens
  misc_RNA (1)...(19): siRNA sense strand
gggcugggcaucaccauca

SEQ ID NO: 2126698 - RNA, 19 nt, Homo sapiens
  misc_RNA (1)...(19): siRNA sense strand
gaacuugccagcaccucau

SEQ ID NO: 2126699 - RNA, 19 nt, Homo sapiens
  misc_RNA (1)...(19): siRNA sense strand
ggccuggcauuccugucua

SEQ ID NO: 2126700 - RNA, 19 nt, Homo sapiens
  misc_RNA (1)...(19): siRNA sense strand
cagaagagaaacccaaagu

SEQ ID NO: 2126701 - RNA, 19 nt, Homo sapiens
  misc_RNA (1)...(19): siRNA sense strand
ggucaacuuccucaacaga

SEQ ID NO: 2126702 - RNA, 19 nt, Homo sapiens
  misc_RNA (1)...(19): siRNA sense strand
gcagcagcgucauccucaa

SEQ ID NO: 2126703 - RNA, 19 nt, Homo sapiens
  misc_RNA (1)...(19): siRNA sense strand
cuuuggagccuacgcauuu

SEQ ID NO: 2126704 - RNA, 19 nt, Homo sapiens
  misc_RNA (1)...(19): siRNA sense strand
gggaagcugggcuguguga

SEQ ID NO: 2126705 - RNA, 19 nt, Homo sapiens
  misc_RNA (1)...(19): siRNA sense strand
uggcauuccugucuagcuu

SEQ ID NO: 2126706 - RNA, 19 nt, Homo sapiens
  misc_RNA (1)...(19): siRNA sense strand
gcgucauccucaagaagaa

SEQ ID NO: 2126707 - RNA, 19 nt, Homo sapiens
  misc_RNA (1)...(19): siRNA sense strand
cauccucuccucauauuuc

SEQ ID NO: 2126708 - RNA, 19 nt, Homo sapiens
  misc_RNA (1)...(19): siRNA sense strand
gaauauccucaucuacauc

SEQ ID NO: 2126709 - RNA, 19 nt, Homo sapiens
  misc_RNA (1)...(19): siRNA sense strand
caucguguuugcugugcuu

SEQ ID NO: 2126710 - RNA, 19 nt, Homo sapiens
  misc_RNA (1)...(19): siRNA sense strand
ccucaucaccagaagagaa

SEQ ID NO: 2126711 - RNA, 19 nt, Homo sapiens
  misc_RNA (1)...(19): siRNA sense strand
aaagaaucaggcagaacua

SEQ ID NO: 2126712 - RNA, 19 nt, Homo sapiens
  misc_RNA (1)...(19): siRNA sense strand
guggugggcuggauuucuc

SEQ ID NO: 2126713 - RNA, 19 nt, Homo sapiens
  misc_RNA (1)...(19): siRNA sense strand
ggaagacaagaacguccuu

SEQ ID NO: 2126714 - RNA, 19 nt, Homo sapiens
  misc_RNA (1)...(19): siRNA sense strand
ugucaugccucauccucau

SEQ ID NO: 2126715 - RNA, 19 nt, Homo sapiens
  misc_RNA (1)...(19): siRNA sense strand
cccaaaguauuuauaaucc

SEQ ID NO: 2126716 - RNA, 19 nt, Homo sapiens
  misc_RNA (1)...(19): siRNA sense strand
aucaucaucugcucuguga

SEQ ID NO: 2126717 - RNA, 19 nt, Homo sapiens
  misc_RNA (1)...(19): siRNA sense strand
cagcaccucaucaccagaa

SEQ ID NO: 2126718 - RNA, 19 nt, Homo sapiens
  misc_RNA (1)...(19): siRNA sense strand
gggcuggauuucucaccau

SEQ ID NO: 2126719 - RNA, 19 nt, Homo sapiens
  misc_RNA (1)...(19): siRNA sense strand
ccagcaaugccaccuuuca

SEQ ID NO: 2126720 - RNA, 19 nt, Homo sapiens
  misc_RNA (1)...(19): siRNA sense strand
aagcugggcugugugaucu

SEQ ID NO: 2126721 - RNA, 19 nt, Homo sapiens
  misc_RNA (1)...(19): siRNA sense strand
ccacguuacgggcaaagga

SEQ ID NO: 2126722 - RNA, 19 nt, Homo sapiens
  misc_RNA (1)...(19): siRNA sense strand
aggaaagaaucaggcagaa

SEQ ID NO: 2126723 - RNA, 19 nt, Homo sapiens
  misc_RNA (1)...(19): siRNA sense strand
gggcaucaccaucaagaac

SEQ ID NO: 2126724 - RNA, 19 nt, Homo sapiens
  misc_RNA (1)...(19): siRNA sense strand
ucaucuacaucaucaucug

SEQ ID NO: 2126725 - RNA, 19 nt, Homo sapiens
  misc_RNA (1)...(19): siRNA sense strand
gcugggcugugugaucugu

SEQ ID NO: 2126726 - RNA, 19 nt, Homo sapiens
  misc_RNA (1)...(19): siRNA sense strand
acagugauggugauacaug

SEQ ID NO: 2126727 - RNA, 19 nt, Homo sapiens
  misc_RNA (1)...(19): siRNA sense strand
gcaccucaucaccagaaga

SEQ ID NO: 2126728 - RNA, 19 nt, Homo sapiens
  misc_RNA (1)...(19): siRNA sense strand
uguggacaauauagaacuu

SEQ ID NO: 2126729 - RNA, 19 nt, Homo sapiens
  misc_RNA (1)...(19): siRNA sense strand
ccucguccaucauccucuu

SEQ ID NO: 2126730 - RNA, 19 nt, Homo sapiens
  misc_RNA (1)...(19): siRNA sense strand
guucccugcuccaccucua

SEQ ID NO: 2126731 - RNA, 19 nt, Homo sapiens
  misc_RNA (1)...(19): siRNA sense strand
caacaccagcugcgagaac

SEQ ID NO: 2126732 - RNA, 19 nt, Homo sapiens
  misc_RNA (1)...(19): siRNA sense strand
ucacagcuggcaggaaaga

SEQ ID NO: 2126733 - RNA, 19 nt, Homo sapiens
  misc_RNA (1)...(19): siRNA sense strand
ggaaagaaucaggcagaac

SEQ ID NO: 2126734 - RNA, 19 nt, Homo sapiens
  misc_RNA (1)...(19): siRNA sense strand
ccucagcacucaggucaac

SEQ ID NO: 2126735 - RNA, 19 nt, Homo sapiens
  misc_RNA (1)...(19): siRNA sense strand
cauccucaucuuugucauu

SEQ ID NO: 2126736 - RNA, 19 nt, Homo sapiens
  misc_RNA (1)...(19): siRNA sense strand
ggacagaagucaaguguga

SEQ ID NO: 2126737 - RNA, 19 nt, Homo sapiens
  misc_RNA (1)...(19): siRNA sense strand
gaaaaugacucuucucuga

SEQ ID NO: 2126738 - RNA, 19 nt, Homo sapiens
  misc_RNA (1)...(19): siRNA sense strand
ggacacauauaaccaauca

SEQ ID NO: 2126739 - RNA, 19 nt, Homo sapiens
  misc_RNA (1)...(19): siRNA sense strand
gcaacugacucuucuaaau

SEQ ID NO: 2126740 - RNA, 19 nt, Homo sapiens
  misc_RNA (1)...(19): siRNA sense strand
gaacccacuucaauaauga

SEQ ID NO: 2126741 - RNA, 19 nt, Homo sapiens
  misc_RNA (1)...(19): siRNA sense strand
caacugacucuucuaaaua

SEQ ID NO: 2126742 - RNA, 19 nt, Homo sapiens
  misc_RNA (1)...(19): siRNA sense strand
caacaaauggcagcuauua

SEQ ID NO: 2126743 - RNA, 19 nt, Homo sapiens
  misc_RNA (1)...(19): siRNA sense strand
gcauugaaguuaacaguga

SEQ ID NO: 2126744 - RNA, 19 nt, Homo sapiens
  misc_RNA (1)...(19): siRNA sense strand
gaaaagaaaugcugugguu

SEQ ID NO: 2126745 - RNA, 19 nt, Homo sapiens
  misc_RNA (1)...(19): siRNA sense strand
gaaaugcugugguuaaggu

SEQ ID NO: 2126746 - RNA, 19 nt, Homo sapiens
  misc_RNA (1)...(19): siRNA sense strand
cagcaggucucaacaaaug

SEQ ID NO: 2126747 - RNA, 19 nt, Homo sapiens
  misc_RNA (1)...(19): siRNA sense strand
ccacagagguacaggaaug

SEQ ID NO: 2126748 - RNA, 19 nt, Homo sapiens
  misc_RNA (1)...(19): siRNA sense strand
gaagacaggacuugagaaa

SEQ ID NO: 2126749 - RNA, 19 nt, Homo sapiens
  misc_RNA (1)...(19): siRNA sense strand
gaaaguguaacuacuguga

SEQ ID NO: 2126750 - RNA, 19 nt, Homo sapiens
  misc_RNA (1)...(19): siRNA sense strand
gaaacgggcagcacaaaga

SEQ ID NO: 2126751 - RNA, 19 nt, Homo sapiens
  misc_RNA (1)...(19): siRNA sense strand
gaaaugaaaguguaacuac

SEQ ID NO: 2126752 - RNA, 19 nt, Homo sapiens
  misc_RNA (1)...(19): siRNA sense strand
ccaugccgcuccaaaguaa

SEQ ID NO: 2126753 - RNA, 19 nt, Homo sapiens
  misc_RNA (1)...(19): siRNA sense strand
aaagaaaugcugugguuaa

SEQ ID NO: 2126754 - RNA, 19 nt, Homo sapiens
  misc_RNA (1)...(19): siRNA sense strand
cagcagaggcagaguagua

SEQ ID NO: 2126755 - RNA, 19 nt, Homo sapiens
  misc_RNA (1)...(19): siRNA sense strand
ugaaaccucuacuuccaaa

SEQ ID NO: 2126756 - RNA, 19 nt, Homo sapiens
  misc_RNA (1)...(19): siRNA sense strand
gaagucaagugugaagcaa

SEQ ID NO: 2126757 - RNA, 19 nt, Homo sapiens
  misc_RNA (1)...(19): siRNA sense strand
gaaagcucgggaaguguua

SEQ ID NO: 2126758 - RNA, 19 nt, Homo sapiens
  misc_RNA (1)...(19): siRNA sense strand
gcugaaagccuguggacuu

SEQ ID NO: 2126759 - RNA, 19 nt, Homo sapiens
  misc_RNA (1)...(19): siRNA sense strand
ccaggcaaguucuguguga

SEQ ID NO: 2126760 - RNA, 19 nt, Homo sapiens
  misc_RNA (1)...(19): siRNA sense strand
caaguucugugugauaaau

SEQ ID NO: 2126761 - RNA, 19 nt, Homo sapiens
  misc_RNA (1)...(19): siRNA sense strand
ggcaaguucugugugauaa

SEQ ID NO: 2126762 - RNA, 19 nt, Homo sapiens
  misc_RNA (1)...(19): siRNA sense strand
gcuggaggcugaggagaaa

SEQ ID NO: 2126763 - RNA, 19 nt, Homo sapiens
  misc_RNA (1)...(19): siRNA sense strand
aaagcucaguuaaguacua

SEQ ID NO: 2126764 - RNA, 19 nt, Homo sapiens
  misc_RNA (1)...(19): siRNA sense strand
caccaccucucuuccauga

SEQ ID NO: 2126765 - RNA, 19 nt, Homo sapiens
  misc_RNA (1)...(19): siRNA sense strand
gcuccaaaguaauacauuc

SEQ ID NO: 2126766 - RNA, 19 nt, Homo sapiens
  misc_RNA (1)...(19): siRNA sense strand
guacaggaaugaagaaaau

SEQ ID NO: 2126767 - RNA, 19 nt, Homo sapiens
  misc_RNA (1)...(19): siRNA sense strand
gugguuaagguuucaaaua

SEQ ID NO: 2126768 - RNA, 19 nt, Homo sapiens
  misc_RNA (1)...(19): siRNA sense strand
agaacccacuucaauaaug

SEQ ID NO: 2126769 - RNA, 19 nt, Homo sapiens
  misc_RNA (1)...(19): siRNA sense strand
ccaaaguaauacauuccaa

SEQ ID NO: 2126770 - RNA, 19 nt, Homo sapiens
  misc_RNA (1)...(19): siRNA sense strand
acggagaaaugaaagugua

SEQ ID NO: 2126771 - RNA, 19 nt, Homo sapiens
  misc_RNA (1)...(19): siRNA sense strand
gggcagcacaaagacauua

SEQ ID NO: 2126772 - RNA, 19 nt, Homo sapiens
  misc_RNA (1)...(19): siRNA sense strand
uggcagcuauuacaucaga

SEQ ID NO: 2126773 - RNA, 19 nt, Homo sapiens
  misc_RNA (1)...(19): siRNA sense strand
gaguccugcugcucccuua

SEQ ID NO: 2126774 - RNA, 19 nt, Homo sapiens
  misc_RNA (1)...(19): siRNA sense strand
aguaauacauuccaagaag

SEQ ID NO: 2126775 - RNA, 19 nt, Homo sapiens
  misc_RNA (1)...(19): siRNA sense strand
agacaggacuugagaaaau

SEQ ID NO: 2126776 - RNA, 19 nt, Homo sapiens
  misc_RNA (1)...(19): siRNA sense strand
aauggcagcuauuacauca

SEQ ID NO: 2126777 - RNA, 19 nt, Homo sapiens
  misc_RNA (1)...(19): siRNA sense strand
acaaauggcagcuauuaca

SEQ ID NO: 2126778 - RNA, 19 nt, Homo sapiens
  misc_RNA (1)...(19): siRNA sense strand
gugcaacugacucuucuaa

SEQ ID NO: 2126779 - RNA, 19 nt, Homo sapiens
  misc_RNA (1)...(19): siRNA sense strand
aaaguucuccagaguaaga

SEQ ID NO: 2126780 - RNA, 19 nt, Homo sapiens
  misc_RNA (1)...(19): siRNA sense strand
acacgucgauaucagaauc

SEQ ID NO: 2126781 - RNA, 19 nt, Homo sapiens
  misc_RNA (1)...(19): siRNA sense strand
aaugaaaccucuacuucca

SEQ ID NO: 2126782 - RNA, 19 nt, Homo sapiens
  misc_RNA (1)...(19): siRNA sense strand
cgaaagcucgggaaguguu

SEQ ID NO: 2126783 - RNA, 19 nt, Homo sapiens
  misc_RNA (1)...(19): siRNA sense strand
gaagccaugccgcuccaaa

SEQ ID NO: 2126784 - RNA, 19 nt, Homo sapiens
  misc_RNA (1)...(19): siRNA sense strand
ucacagcagaggcagagua

SEQ ID NO: 2126785 - RNA, 19 nt, Homo sapiens
  misc_RNA (1)...(19): siRNA sense strand
ucagccaccuccucggaaa

SEQ ID NO: 2126786 - RNA, 19 nt, Homo sapiens
  misc_RNA (1)...(19): siRNA sense strand
gccaugccgcuccaaagua

SEQ ID NO: 2126787 - RNA, 19 nt, Homo sapiens
  misc_RNA (1)...(19): siRNA sense strand
gcaaguucugugugauaaa

SEQ ID NO: 2126788 - RNA, 19 nt, Homo sapiens
  misc_RNA (1)...(19): siRNA sense strand
agucaagugugaagcaaau

SEQ ID NO: 2126789 - RNA, 19 nt, Homo sapiens
  misc_RNA (1)...(19): siRNA sense strand
caaaccaccaccucucuuc

SEQ ID NO: 2126790 - RNA, 19 nt, Homo sapiens
  misc_RNA (1)...(19): siRNA sense strand
gagcauugaaguuaacagu

SEQ ID NO: 2126791 - RNA, 19 nt, Homo sapiens
  misc_RNA (1)...(19): siRNA sense strand
gcagaggcagaguaguaaa

SEQ ID NO: 2126792 - RNA, 19 nt, Homo sapiens
  misc_RNA (1)...(19): siRNA sense strand
guagugcaacugacucuuc

SEQ ID NO: 2126793 - RNA, 19 nt, Homo sapiens
  misc_RNA (1)...(19): siRNA sense strand
cucagcaggucucaacaaa

SEQ ID NO: 2126794 - RNA, 19 nt, Homo sapiens
  misc_RNA (1)...(19): siRNA sense strand
gcacaaaagaagcaaaaug

SEQ ID NO: 2126795 - RNA, 19 nt, Homo sapiens
  misc_RNA (1)...(19): siRNA sense strand
aagcucaguuaaguacuaa

SEQ ID NO: 2126796 - RNA, 19 nt, Homo sapiens
  misc_RNA (1)...(19): siRNA sense strand
acugggagcauugaaguua

SEQ ID NO: 2126797 - RNA, 19 nt, Homo sapiens
  misc_RNA (1)...(19): siRNA sense strand
caaauggcagcuauuacau

SEQ ID NO: 2126798 - RNA, 19 nt, Homo sapiens
  misc_RNA (1)...(19): siRNA sense strand
acugaaaacugaccauaaa

SEQ ID NO: 2126799 - RNA, 19 nt, Homo sapiens
  misc_RNA (1)...(19): siRNA sense strand
cauugaaguuaacagugaa

SEQ ID NO: 2126800 - RNA, 19 nt, Homo sapiens
  misc_RNA (1)...(19): siRNA sense strand
gcucagcaggucucaacaa

SEQ ID NO: 2126801 - RNA, 19 nt, Homo sapiens
  misc_RNA (1)...(19): siRNA sense strand
ugcgaaagcucgggaagug

SEQ ID NO: 2126802 - RNA, 19 nt, Homo sapiens
  misc_RNA (1)...(19): siRNA sense strand
agaguaagaacauggauca

SEQ ID NO: 2126803 - RNA, 19 nt, Homo sapiens
  misc_RNA (1)...(19): siRNA sense strand
gaaaacugaccauaaagug

SEQ ID NO: 2126804 - RNA, 19 nt, Homo sapiens
  misc_RNA (1)...(19): siRNA sense strand
caagaagggacagaaguca

SEQ ID NO: 2126805 - RNA, 19 nt, Homo sapiens
  misc_RNA (1)...(19): siRNA sense strand
gauucagacugggagcauu

SEQ ID NO: 2126806 - RNA, 19 nt, Homo sapiens
  misc_RNA (1)...(19): siRNA sense strand
aagaaaugcugugguuaag

SEQ ID NO: 2126807 - RNA, 19 nt, Homo sapiens
  misc_RNA (1)...(19): siRNA sense strand
caaaaugaaagccagaaaa

SEQ ID NO: 2126808 - RNA, 19 nt, Homo sapiens
  misc_RNA (1)...(19): siRNA sense strand
uguaacuacugugaacaaa

SEQ ID NO: 2126809 - RNA, 19 nt, Homo sapiens
  misc_RNA (1)...(19): siRNA sense strand
cugaaagccuguggacuuc

SEQ ID NO: 2126810 - RNA, 19 nt, Homo sapiens
  misc_RNA (1)...(19): siRNA sense strand
cugggagcauugaaguuaa

SEQ ID NO: 2126811 - RNA, 19 nt, Homo sapiens
  misc_RNA (1)...(19): siRNA sense strand
cagucucgcugcaccucua

SEQ ID NO: 2126812 - RNA, 19 nt, Homo sapiens
  misc_RNA (1)...(19): siRNA sense strand
ccaaagaaaaggcacaaaa

SEQ ID NO: 2126813 - RNA, 19 nt, Homo sapiens
  misc_RNA (1)...(19): siRNA sense strand
ccaagaagggacagaaguc

SEQ ID NO: 2126814 - RNA, 19 nt, Homo sapiens
  misc_RNA (1)...(19): siRNA sense strand
cacaaaagaagcaaaauga

SEQ ID NO: 2126815 - RNA, 19 nt, Homo sapiens
  misc_RNA (1)...(19): siRNA sense strand
ccauuucacacgucgauau

SEQ ID NO: 2126816 - RNA, 19 nt, Homo sapiens
  misc_RNA (1)...(19): siRNA sense strand
ggaauauaaggauaaacca

SEQ ID NO: 2126817 - RNA, 19 nt, Homo sapiens
  misc_RNA (1)...(19): siRNA sense strand
gagguacaggaaugaagaa

SEQ ID NO: 2126818 - RNA, 19 nt, Homo sapiens
  misc_RNA (1)...(19): siRNA sense strand
gaaaauuaagcgacccaaa

SEQ ID NO: 2126819 - RNA, 19 nt, Homo sapiens
  misc_RNA (1)...(19): siRNA sense strand
cucaacaaauggcagcuau

SEQ ID NO: 2126820 - RNA, 19 nt, Homo sapiens
  misc_RNA (1)...(19): siRNA sense strand
ucacacgucgauaucagaa

SEQ ID NO: 2126821 - RNA, 19 nt, Homo sapiens
  misc_RNA (1)...(19): siRNA sense strand
aggcaaguucugugugaua

SEQ ID NO: 2126822 - RNA, 19 nt, Homo sapiens
  misc_RNA (1)...(19): siRNA sense strand
uuaagcgacccaaacgaaa

SEQ ID NO: 2126823 - RNA, 19 nt, Homo sapiens
  misc_RNA (1)...(19): siRNA sense strand
gagaaaugaaaguguaacu

SEQ ID NO: 2126824 - RNA, 19 nt, Homo sapiens
  misc_RNA (1)...(19): siRNA sense strand
aaacggagaaaugaaagug

SEQ ID NO: 2126825 - RNA, 19 nt, Homo sapiens
  misc_RNA (1)...(19): siRNA sense strand
gaaugcuauuaaacuacga

SEQ ID NO: 2126826 - RNA, 19 nt, Homo sapiens
  misc_RNA (1)...(19): siRNA sense strand
uagcucagguucccuucca

SEQ ID NO: 2126827 - RNA, 19 nt, Homo sapiens
  misc_RNA (1)...(19): siRNA sense strand
gggaauauaaggauaaacc

SEQ ID NO: 2126828 - RNA, 19 nt, Homo sapiens
  misc_RNA (1)...(19): siRNA sense strand
cuacgacccaggcaaguuc

SEQ ID NO: 2126829 - RNA, 19 nt, Homo sapiens
  misc_RNA (1)...(19): siRNA sense strand
gugaaacgggcagcacaaa

SEQ ID NO: 2126830 - RNA, 19 nt, Homo sapiens
  misc_RNA (1)...(19): siRNA sense strand
agagguacaggaaugaaga

SEQ ID NO: 2126831 - RNA, 19 nt, Homo sapiens
  misc_RNA (1)...(19): siRNA sense strand
caaaaugaaaccucuacuu

SEQ ID NO: 2126832 - RNA, 19 nt, Homo sapiens
  misc_RNA (1)...(19): siRNA sense strand
caaaagggaauauaaggau

SEQ ID NO: 2126833 - RNA, 19 nt, Homo sapiens
  misc_RNA (1)...(19): siRNA sense strand
cggagaaaugaaaguguaa

SEQ ID NO: 2126834 - RNA, 19 nt, Homo sapiens
  misc_RNA (1)...(19): siRNA sense strand
aaaaugaaaccucuacuuc

SEQ ID NO: 2126835 - RNA, 19 nt, Homo sapiens
  misc_RNA (1)...(19): siRNA sense strand
gcagcuauuacaucagaca

SEQ ID NO: 2126836 - RNA, 19 nt, Homo sapiens
  misc_RNA (1)...(19): siRNA sense strand
gaaagcaggucacugguuu

SEQ ID NO: 2126837 - RNA, 19 nt, Homo sapiens
  misc_RNA (1)...(19): siRNA sense strand
ggagaaaucuauuaccauu

SEQ ID NO: 2126838 - RNA, 19 nt, Homo sapiens
  misc_RNA (1)...(19): siRNA sense strand
gagcaggaguuauauguuu

SEQ ID NO: 2126839 - RNA, 19 nt, Homo sapiens
  misc_RNA (1)...(19): siRNA sense strand
ugaagaagcccuccaaaua

SEQ ID NO: 2126840 - RNA, 19 nt, Homo sapiens
  misc_RNA (1)...(19): siRNA sense strand
gcagugagcuagauuugaa

SEQ ID NO: 2126841 - RNA, 19 nt, Homo sapiens
  misc_RNA (1)...(19): siRNA sense strand
ggucugacaucuucgaaua

SEQ ID NO: 2126842 - RNA, 19 nt, Homo sapiens
  misc_RNA (1)...(19): siRNA sense strand
ucaaggagguccaguauga

SEQ ID NO: 2126843 - RNA, 19 nt, Homo sapiens
  misc_RNA (1)...(19): siRNA sense strand
ggacagacaucgacaagca

SEQ ID NO: 2126844 - RNA, 19 nt, Homo sapiens
  misc_RNA (1)...(19): siRNA sense strand
ggaugacggugcaauauga

SEQ ID NO: 2126845 - RNA, 19 nt, Homo sapiens
  misc_RNA (1)...(19): siRNA sense strand
gagaugguuuccuucaaua

SEQ ID NO: 2126846 - RNA, 19 nt, Homo sapiens
  misc_RNA (1)...(19): siRNA sense strand
agaaaucucuuguccauug

SEQ ID NO: 2126847 - RNA, 19 nt, Homo sapiens
  misc_RNA (1)...(19): siRNA sense strand
gaaacuuccugugcugaua

SEQ ID NO: 2126848 - RNA, 19 nt, Homo sapiens
  misc_RNA (1)...(19): siRNA sense strand
gagauggccugguggauug

SEQ ID NO: 2126849 - RNA, 19 nt, Homo sapiens
  misc_RNA (1)...(19): siRNA sense strand
gggcacaccuuuaacaaug

SEQ ID NO: 2126850 - RNA, 19 nt, Homo sapiens
  misc_RNA (1)...(19): siRNA sense strand
gcuaccagcucuguaauaa

SEQ ID NO: 2126851 - RNA, 19 nt, Homo sapiens
  misc_RNA (1)...(19): siRNA sense strand
gaaggacgcucucuuuggu

SEQ ID NO: 2126852 - RNA, 19 nt, Homo sapiens
  misc_RNA (1)...(19): siRNA sense strand
gaaacaggauggacgacuu

SEQ ID NO: 2126853 - RNA, 19 nt, Homo sapiens
  misc_RNA (1)...(19): siRNA sense strand
acaaagagaugguuuccuu

SEQ ID NO: 2126854 - RNA, 19 nt, Homo sapiens
  misc_RNA (1)...(19): siRNA sense strand
gagagggucugacaucuuc

SEQ ID NO: 2126855 - RNA, 19 nt, Homo sapiens
  misc_RNA (1)...(19): siRNA sense strand
uaaugggaaucuccacuua

SEQ ID NO: 2126856 - RNA, 19 nt, Homo sapiens
  misc_RNA (1)...(19): siRNA sense strand
caacgucaguauauauuug

SEQ ID NO: 2126857 - RNA, 19 nt, Homo sapiens
  misc_RNA (1)...(19): siRNA sense strand
ggacgacuuucuaugacua

SEQ ID NO: 2126858 - RNA, 19 nt, Homo sapiens
  misc_RNA (1)...(19): siRNA sense strand
acaaugaugucacugaauu

SEQ ID NO: 2126859 - RNA, 19 nt, Homo sapiens
  misc_RNA (1)...(19): siRNA sense strand
gaaaggaacagauuaaagg

SEQ ID NO: 2126860 - RNA, 19 nt, Homo sapiens
  misc_RNA (1)...(19): siRNA sense strand
gaagaagcccuccaaauac

SEQ ID NO: 2126861 - RNA, 19 nt, Homo sapiens
  misc_RNA (1)...(19): siRNA sense strand
ggaauacuuucuccaggaa

SEQ ID NO: 2126862 - RNA, 19 nt, Homo sapiens
  misc_RNA (1)...(19): siRNA sense strand
uaucagagauugucuacga

SEQ ID NO: 2126863 - RNA, 19 nt, Homo sapiens
  misc_RNA (1)...(19): siRNA sense strand
gagccaacgucaguauaua

SEQ ID NO: 2126864 - RNA, 19 nt, Homo sapiens
  misc_RNA (1)...(19): siRNA sense strand
gcagaugggcacaccuuua

SEQ ID NO: 2126865 - RNA, 19 nt, Homo sapiens
  misc_RNA (1)...(19): siRNA sense strand
agaaugggcucauguacuu

SEQ ID NO: 2126866 - RNA, 19 nt, Homo sapiens
  misc_RNA (1)...(19): siRNA sense strand
uaucugagcucuagaacug

SEQ ID NO: 2126867 - RNA, 19 nt, Homo sapiens
  misc_RNA (1)...(19): siRNA sense strand
ggagagaacccuuucaaca

SEQ ID NO: 2126868 - RNA, 19 nt, Homo sapiens
  misc_RNA (1)...(19): siRNA sense strand
guaaagauggcaaauguga

SEQ ID NO: 2126869 - RNA, 19 nt, Homo sapiens
  misc_RNA (1)...(19): siRNA sense strand
cgacugcucuguugaagug

SEQ ID NO: 2126870 - RNA, 19 nt, Homo sapiens
  misc_RNA (1)...(19): siRNA sense strand
gaagaagauuaaccgucua

SEQ ID NO: 2126871 - RNA, 19 nt, Homo sapiens
  misc_RNA (1)...(19): siRNA sense strand
ccaccucuccugaucauua

SEQ ID NO: 2126872 - RNA, 19 nt, Homo sapiens
  misc_RNA (1)...(19): siRNA sense strand
aaggacaggucauuacuaa

SEQ ID NO: 2126873 - RNA, 19 nt, Homo sapiens
  misc_RNA (1)...(19): siRNA sense strand
ggaaguugauugcuuggau

SEQ ID NO: 2126874 - RNA, 19 nt, Homo sapiens
  misc_RNA (1)...(19): siRNA sense strand
caaggacacccacuacuuu

SEQ ID NO: 2126875 - RNA, 19 nt, Homo sapiens
  misc_RNA (1)...(19): siRNA sense strand
gaaaucucuuguccauuga

SEQ ID NO: 2126876 - RNA, 19 nt, Homo sapiens
  misc_RNA (1)...(19): siRNA sense strand
gauggacgacuuucuauga

SEQ ID NO: 2126877 - RNA, 19 nt, Homo sapiens
  misc_RNA (1)...(19): siRNA sense strand
uaccagcucuguaauaaug

SEQ ID NO: 2126878 - RNA, 19 nt, Homo sapiens
  misc_RNA (1)...(19): siRNA sense strand
ggauagcacccacaucauu

SEQ ID NO: 2126879 - RNA, 19 nt, Homo sapiens
  misc_RNA (1)...(19): siRNA sense strand
ggacuccucuggcuguguu

SEQ ID NO: 2126880 - RNA, 19 nt, Homo sapiens
  misc_RNA (1)...(19): siRNA sense strand
gagauuaccucacuguacu

SEQ ID NO: 2126881 - RNA, 19 nt, Homo sapiens
  misc_RNA (1)...(19): siRNA sense strand
ggaaauggagaaaucuauu

SEQ ID NO: 2126882 - RNA, 19 nt, Homo sapiens
  misc_RNA (1)...(19): siRNA sense strand
cagaugagaagaagauuaa

SEQ ID NO: 2126883 - RNA, 19 nt, Homo sapiens
  misc_RNA (1)...(19): siRNA sense strand
ggacaagacagaugcguau

SEQ ID NO: 2126884 - RNA, 19 nt, Homo sapiens
  misc_RNA (1)...(19): siRNA sense strand
gcaaggacacccacuacuu

SEQ ID NO: 2126885 - RNA, 19 nt, Homo sapiens
  misc_RNA (1)...(19): siRNA sense strand
ggaacucacugaccaaucg

SEQ ID NO: 2126886 - RNA, 19 nt, Homo sapiens
  misc_RNA (1)...(19): siRNA sense strand
gaaggacaggucauuacua

SEQ ID NO: 2126887 - RNA, 19 nt, Homo sapiens
  misc_RNA (1)...(19): siRNA sense strand
ugaugucacugaauugauu

SEQ ID NO: 2126888 - RNA, 19 nt, Homo sapiens
  misc_RNA (1)...(19): siRNA sense strand
caacugcuauucaggagau

SEQ ID NO: 2126889 - RNA, 19 nt, Homo sapiens
  misc_RNA (1)...(19): siRNA sense strand
caucuggccuucuacaaug

SEQ ID NO: 2126890 - RNA, 19 nt, Homo sapiens
  misc_RNA (1)...(19): siRNA sense strand
gcacgggaccuguaaagau

SEQ ID NO: 2126891 - RNA, 19 nt, Homo sapiens
  misc_RNA (1)...(19): siRNA sense strand
gaaguacaccuaugacuac

SEQ ID NO: 2126892 - RNA, 19 nt, Homo sapiens
  misc_RNA (1)...(19): siRNA sense strand
cauguucgcugacgggaaa

SEQ ID NO: 2126893 - RNA, 19 nt, Homo sapiens
  misc_RNA (1)...(19): siRNA sense strand
ccaacucccucaacaggaa

SEQ ID NO: 2126894 - RNA, 19 nt, Homo sapiens
  misc_RNA (1)...(19): siRNA sense strand
acaagcagaucuacagguu

SEQ ID NO: 2126895 - RNA, 19 nt, Homo sapiens
  misc_RNA (1)...(19): siRNA sense strand
caggacagcugggugcuaa

SEQ ID NO: 2126896 - RNA, 19 nt, Homo sapiens
  misc_RNA (1)...(19): siRNA sense strand
cuacagcuaugaccuuaau

SEQ ID NO: 2126897 - RNA, 19 nt, Homo sapiens
  misc_RNA (1)...(19): siRNA sense strand
cgaaguacaccuaugacua

SEQ ID NO: 2126898 - RNA, 19 nt, Homo sapiens
  misc_RNA (1)...(19): siRNA sense strand
gaucaaggagguccaguau

SEQ ID NO: 2126899 - RNA, 19 nt, Homo sapiens
  misc_RNA (1)...(19): siRNA sense strand
ucucuuugguguuuacaua

SEQ ID NO: 2126900 - RNA, 19 nt, Homo sapiens
  misc_RNA (1)...(19): siRNA sense strand
caacaccucccaucaaauc

SEQ ID NO: 2126901 - RNA, 19 nt, Homo sapiens
  misc_RNA (1)...(19): siRNA sense strand
ucaaacagcugcaguacac

SEQ ID NO: 2126902 - RNA, 19 nt, Homo sapiens
  misc_RNA (1)...(19): siRNA sense strand
ucacugaauugauugacaa

SEQ ID NO: 2126903 - RNA, 19 nt, Homo sapiens
  misc_RNA (1)...(19): siRNA sense strand
ccggagagcaggaguuaua

SEQ ID NO: 2126904 - RNA, 19 nt, Homo sapiens
  misc_RNA (1)...(19): siRNA sense strand
acaagucacugcugaagau

SEQ ID NO: 2126905 - RNA, 19 nt, Homo sapiens
  misc_RNA (1)...(19): siRNA sense strand
gaacgugucuuuugucaag

SEQ ID NO: 2126906 - RNA, 19 nt, Homo sapiens
  misc_RNA (1)...(19): siRNA sense strand
uagcguugcuggcacaauu

SEQ ID NO: 2126907 - RNA, 19 nt, Homo sapiens
  misc_RNA (1)...(19): siRNA sense strand
cauaauccuccaccaguua

SEQ ID NO: 2126908 - RNA, 19 nt, Homo sapiens
  misc_RNA (1)...(19): siRNA sense strand
caccaacccugaugaggaa

SEQ ID NO: 2126909 - RNA, 19 nt, Homo sapiens
  misc_RNA (1)...(19): siRNA sense strand
aaagugcccuggucguuga

SEQ ID NO: 2126910 - RNA, 19 nt, Homo sapiens
  misc_RNA (1)...(19): siRNA sense strand
uaacaagagccuacaacaa

SEQ ID NO: 2126911 - RNA, 19 nt, Homo sapiens
  misc_RNA (1)...(19): siRNA sense strand
ccacgaaguacaccuauga

SEQ ID NO: 2126912 - RNA, 19 nt, Homo sapiens
  misc_RNA (1)...(19): siRNA sense strand
ggagauggccugguggauu

SEQ ID NO: 2126913 - RNA, 19 nt, Homo sapiens
  misc_RNA (1)...(19): siRNA sense strand
cagaugggcacaccuuuaa

SEQ ID NO: 2126914 - RNA, 19 nt, Homo sapiens
  misc_RNA (1)...(19): siRNA sense strand
cgagggauauuacgugcuu

SEQ ID NO: 2126915 - RNA, 19 nt, Homo sapiens
  misc_RNA (1)...(19): siRNA sense strand
ggacaggucauuacuaaaa

SEQ ID NO: 2126916 - RNA, 19 nt, Homo sapiens
  misc_RNA (1)...(19): siRNA sense strand
ccaagggccuccuaacaag

SEQ ID NO: 2126917 - RNA, 19 nt, Homo sapiens
  misc_RNA (1)...(19): siRNA sense strand
gggaaucuccacuuacuga

SEQ ID NO: 2126918 - RNA, 19 nt, Homo sapiens
  misc_RNA (1)...(19): siRNA sense strand
guacaccuaugacuacgau

SEQ ID NO: 2126919 - RNA, 19 nt, Homo sapiens
  misc_RNA (1)...(19): siRNA sense strand
cuaagaaaggaacagauua

SEQ ID NO: 2126920 - RNA, 19 nt, Homo sapiens
  misc_RNA (1)...(19): siRNA sense strand
gaaugaagccguguuugug

SEQ ID NO: 2126921 - RNA, 19 nt, Homo sapiens
  misc_RNA (1)...(19): siRNA sense strand
auacagaccuugguucaga

SEQ ID NO: 2126922 - RNA, 19 nt, Homo sapiens
  misc_RNA (1)...(19): siRNA sense strand
cauccgaggccaaguagua

SEQ ID NO: 2126923 - RNA, 19 nt, Homo sapiens
  misc_RNA (1)...(19): siRNA sense strand
ggcuacauccguaauauuu

SEQ ID NO: 2126924 - RNA, 19 nt, Homo sapiens
  misc_RNA (1)...(19): siRNA sense strand
caacgugucauacuucuuc

SEQ ID NO: 2126925 - RNA, 19 nt, Homo sapiens
  misc_RNA (1)...(19): siRNA sense strand
ucaccaaccucucuucagu

SEQ ID NO: 2126926 - RNA, 19 nt, Homo sapiens
  misc_RNA (1)...(19): siRNA sense strand
cauauaguacugacaauga

SEQ ID NO: 2126927 - RNA, 19 nt, Homo sapiens
  misc_RNA (1)...(19): siRNA sense strand
uugcagaccuuggaaauau

SEQ ID NO: 2126928 - RNA, 19 nt, Homo sapiens
  misc_RNA (1)...(19): siRNA sense strand
cgagagguauugcaguaga

SEQ ID NO: 2126929 - RNA, 19 nt, Homo sapiens
  misc_RNA (1)...(19): siRNA sense strand
agacccagguucuucauga

SEQ ID NO: 2126930 - RNA, 19 nt, Homo sapiens
  misc_RNA (1)...(19): siRNA sense strand
agacaguggugaagcagaa

SEQ ID NO: 2126931 - RNA, 19 nt, Homo sapiens
  misc_RNA (1)...(19): siRNA sense strand
ccuuuaaccuguauauguu

SEQ ID NO: 2126932 - RNA, 19 nt, Homo sapiens
  misc_RNA (1)...(19): siRNA sense strand
ggaacagauuaaaggcaaa

SEQ ID NO: 2126933 - RNA, 19 nt, Homo sapiens
  misc_RNA (1)...(19): siRNA sense strand
ugagggugauguaugcuaa

SEQ ID NO: 2126934 - RNA, 19 nt, Homo sapiens
  misc_RNA (1)...(19): siRNA sense strand
ucaauacuguuguccuaga

SEQ ID NO: 2126935 - RNA, 19 nt, Homo sapiens
  misc_RNA (1)...(19): siRNA sense strand
ggacuuccaccaucucaug

SEQ ID NO: 2126936 - RNA, 19 nt, Homo sapiens
  misc_RNA (1)...(19): siRNA sense strand
gggcagagcuucagcauca

SEQ ID NO: 2126937 - RNA, 19 nt, Homo sapiens
  misc_RNA (1)...(19): siRNA sense strand
gcaccucccucgaguacaa

SEQ ID NO: 2126938 - RNA, 19 nt, Homo sapiens
  misc_RNA (1)...(19): siRNA sense strand
ccacgcagaucuucuucaa

SEQ ID NO: 2126939 - RNA, 19 nt, Homo sapiens
  misc_RNA (1)...(19): siRNA sense strand
ggacguggcccucuaugug

SEQ ID NO: 2126940 - RNA, 19 nt, Homo sapiens
  misc_RNA (1)...(19): siRNA sense strand
ccauggagguccgcauuaa

SEQ ID NO: 2126941 - RNA, 19 nt, Homo sapiens
  misc_RNA (1)...(19): siRNA sense strand
ccacagccaugauccucaa

SEQ ID NO: 2126942 - RNA, 19 nt, Homo sapiens
  misc_RNA (1)...(19): siRNA sense strand
acgcagaucuucuucaagu

SEQ ID NO: 2126943 - RNA, 19 nt, Homo sapiens
  misc_RNA (1)...(19): siRNA sense strand
cuagugaccuggccugcaa

SEQ ID NO: 2126944 - RNA, 19 nt, Homo sapiens
  misc_RNA (1)...(19): siRNA sense strand
caaggcagcaggucgagaa

SEQ ID NO: 2126945 - RNA, 19 nt, Homo sapiens
  misc_RNA (1)...(19): siRNA sense strand
cggcugaugaucccuaaua

SEQ ID NO: 2126946 - RNA, 19 nt, Homo sapiens
  misc_RNA (1)...(19): siRNA sense strand
ccagcaacaugaccuaugg

SEQ ID NO: 2126947 - RNA, 19 nt, Homo sapiens
  misc_RNA (1)...(19): siRNA sense strand
gaaggccuacauccgcaua

SEQ ID NO: 2126948 - RNA, 19 nt, Homo sapiens
  misc_RNA (1)...(19): siRNA sense strand
gcacgcagcgguacuugca

SEQ ID NO: 2126949 - RNA, 19 nt, Homo sapiens
  misc_RNA (1)...(19): siRNA sense strand
caaggacaguuaccacaac

SEQ ID NO: 2126950 - RNA, 19 nt, Homo sapiens
  misc_RNA (1)...(19): siRNA sense strand
uguucgggcuggaggaaua

SEQ ID NO: 2126951 - RNA, 19 nt, Homo sapiens
  misc_RNA (1)...(19): siRNA sense strand
gcuggccucuucacagugu

SEQ ID NO: 2126952 - RNA, 19 nt, Homo sapiens
  misc_RNA (1)...(19): siRNA sense strand
gcaccaccaccaccaccua

SEQ ID NO: 2126953 - RNA, 19 nt, Homo sapiens
  misc_RNA (1)...(19): siRNA sense strand
ccagugaccucuguguaca

SEQ ID NO: 2126954 - RNA, 19 nt, Homo sapiens
  misc_RNA (1)...(19): siRNA sense strand
acaccugcguggccaagaa

SEQ ID NO: 2126955 - RNA, 19 nt, Homo sapiens
  misc_RNA (1)...(19): siRNA sense strand
gcaccagcaacaugaccua

SEQ ID NO: 2126956 - RNA, 19 nt, Homo sapiens
  misc_RNA (1)...(19): siRNA sense strand
ggcagcaggucgagaaggu

SEQ ID NO: 2126957 - RNA, 19 nt, Homo sapiens
  misc_RNA (1)...(19): siRNA sense strand
ggaagaguaagcuccuugu

SEQ ID NO: 2126958 - RNA, 19 nt, Homo sapiens
  misc_RNA (1)...(19): siRNA sense strand
cgaggcaccagcaacauga

SEQ ID NO: 2126959 - RNA, 19 nt, Homo sapiens
  misc_RNA (1)...(19): siRNA sense strand
gagcuucagcaucaacuuc

SEQ ID NO: 2126960 - RNA, 19 nt, Homo sapiens
  misc_RNA (1)...(19): siRNA sense strand
caagauccccuuccucauu

SEQ ID NO: 2126961 - RNA, 19 nt, Homo sapiens
  misc_RNA (1)...(19): siRNA sense strand
caacaucaccaaggacaca

SEQ ID NO: 2126962 - RNA, 19 nt, Homo sapiens
  misc_RNA (1)...(19): siRNA sense strand
cgagggaagaucuaugaga

SEQ ID NO: 2126963 - RNA, 19 nt, Homo sapiens
  misc_RNA (1)...(19): siRNA sense strand
caccaaggacacaagguuu

SEQ ID NO: 2126964 - RNA, 19 nt, Homo sapiens
  misc_RNA (1)...(19): siRNA sense strand
agcaucaacuucaacauca

SEQ ID NO: 2126965 - RNA, 19 nt, Homo sapiens
  misc_RNA (1)...(19): siRNA sense strand
cagcaucaacuucaacauc

SEQ ID NO: 2126966 - RNA, 19 nt, Homo sapiens
  misc_RNA (1)...(19): siRNA sense strand
ccacggguccugcacuuca

SEQ ID NO: 2126967 - RNA, 19 nt, Homo sapiens
  misc_RNA (1)...(19): siRNA sense strand
ucaccaaggacacaagguu

SEQ ID NO: 2126968 - RNA, 19 nt, Homo sapiens
  misc_RNA (1)...(19): siRNA sense strand
ccgcugcugucaucgucua

SEQ ID NO: 2126969 - RNA, 19 nt, Homo sapiens
  misc_RNA (1)...(19): siRNA sense strand
ucaaggacaguuaccacaa

SEQ ID NO: 2126970 - RNA, 19 nt, Homo sapiens
  misc_RNA (1)...(19): siRNA sense strand
guggcugacucguccauuc

SEQ ID NO: 2126971 - RNA, 19 nt, Homo sapiens
  misc_RNA (1)...(19): siRNA sense strand
gcugacucguccauucuca

SEQ ID NO: 2126972 - RNA, 19 nt, Homo sapiens
  misc_RNA (1)...(19): siRNA sense strand
gagauccccuuuuaucaca

SEQ ID NO: 2126973 - RNA, 19 nt, Homo sapiens
  misc_RNA (1)...(19): siRNA sense strand
accaggagauccccuuuua

SEQ ID NO: 2126974 - RNA, 19 nt, Homo sapiens
  misc_RNA (1)...(19): siRNA sense strand
gcacuucaaggacaguuac

SEQ ID NO: 2126975 - RNA, 19 nt, Homo sapiens
  misc_RNA (1)...(19): siRNA sense strand
ccuaugggaccuucaacuu

SEQ ID NO: 2126976 - RNA, 19 nt, Homo sapiens
  misc_RNA (1)...(19): siRNA sense strand
uagccuauuugcgcaagaa

SEQ ID NO: 2126977 - RNA, 19 nt, Homo sapiens
  misc_RNA (1)...(19): siRNA sense strand
aagaguaagcuccuuguca

SEQ ID NO: 2126978 - RNA, 19 nt, Homo sapiens
  misc_RNA (1)...(19): siRNA sense strand
gaagaguaagcuccuuguc

SEQ ID NO: 2126979 - RNA, 19 nt, Homo sapiens
  misc_RNA (1)...(19): siRNA sense strand
ccucccaccucuacuacug

SEQ ID NO: 2126980 - RNA, 19 nt, Homo sapiens
  misc_RNA (1)...(19): siRNA sense strand
cagcaucaagcccagcaaa

SEQ ID NO: 2126981 - RNA, 19 nt, Homo sapiens
  misc_RNA (1)...(19): siRNA sense strand
caucaagcccagcaaagca

SEQ ID NO: 2126982 - RNA, 19 nt, Homo sapiens
  misc_RNA (1)...(19): siRNA sense strand
gccggcugaugaucccuaa

SEQ ID NO: 2126983 - RNA, 19 nt, Homo sapiens
  misc_RNA (1)...(19): siRNA sense strand
uaccacaaccugcgccuau

SEQ ID NO: 2126984 - RNA, 19 nt, Homo sapiens
  misc_RNA (1)...(19): siRNA sense strand
gagguccgcauuaaugucu

SEQ ID NO: 2126985 - RNA, 19 nt, Homo sapiens
  misc_RNA (1)...(19): siRNA sense strand
gguccgcauuaaugucuca

SEQ ID NO: 2126986 - RNA, 19 nt, Homo sapiens
  misc_RNA (1)...(19): siRNA sense strand
ccuauuugcgcaagaacuu

SEQ ID NO: 2126987 - RNA, 19 nt, Homo sapiens
  misc_RNA (1)...(19): siRNA sense strand
gcuucagcaucaacuucaa

SEQ ID NO: 2126988 - RNA, 19 nt, Homo sapiens
  misc_RNA (1)...(19): siRNA sense strand
cccgagggaagaucuauga

SEQ ID NO: 2126989 - RNA, 19 nt, Homo sapiens
  misc_RNA (1)...(19): siRNA sense strand
acgcuggccucuucacagu

SEQ ID NO: 2126990 - RNA, 19 nt, Homo sapiens
  misc_RNA (1)...(19): siRNA sense strand
caccauggagguccgcauu

SEQ ID NO: 2126991 - RNA, 19 nt, Homo sapiens
  misc_RNA (1)...(19): siRNA sense strand
gaaccucaauaucuacuuc

SEQ ID NO: 2126992 - RNA, 19 nt, Homo sapiens
  misc_RNA (1)...(19): siRNA sense strand
caacugcacugacuugaac

SEQ ID NO: 2126993 - RNA, 19 nt, Homo sapiens
  misc_RNA (1)...(19): siRNA sense strand
caacuggaauugggacuug

SEQ ID NO: 2126994 - RNA, 19 nt, Homo sapiens
  misc_RNA (1)...(19): siRNA sense strand
gggcuuugcuggcugcauu

SEQ ID NO: 2126995 - RNA, 19 nt, Homo sapiens
  misc_RNA (1)...(19): siRNA sense strand
gagaccagcucaaccucuu

SEQ ID NO: 2126996 - RNA, 19 nt, Homo sapiens
  misc_RNA (1)...(19): siRNA sense strand
agaaguggcugcaggacaa

SEQ ID NO: 2126997 - RNA, 19 nt, Homo sapiens
  misc_RNA (1)...(19): siRNA sense strand
cccagaaccucgugaguga

SEQ ID NO: 2126998 - RNA, 19 nt, Homo sapiens
  misc_RNA (1)...(19): siRNA sense strand
gauccuggccuuugucuuc

SEQ ID NO: 2126999 - RNA, 19 nt, Homo sapiens
  misc_RNA (1)...(19): siRNA sense strand
acuggaaccucaauaucua

SEQ ID NO: 2127000 - RNA, 19 nt, Homo sapiens
  misc_RNA (1)...(19): siRNA sense strand
ugacuuugcucaggaauac

SEQ ID NO: 2127001 - RNA, 19 nt, Homo sapiens
  misc_RNA (1)...(19): siRNA sense strand
ugacaucaaggcagugaaa

SEQ ID NO: 2127002 - RNA, 19 nt, Homo sapiens
  misc_RNA (1)...(19): siRNA sense strand
acaccuuccugcucaaguu

SEQ ID NO: 2127003 - RNA, 19 nt, Homo sapiens
  misc_RNA (1)...(19): siRNA sense strand
uccagaaccucauugacuu

SEQ ID NO: 2127004 - RNA, 19 nt, Homo sapiens
  misc_RNA (1)...(19): siRNA sense strand
guuccucggucucaucuuc

SEQ ID NO: 2127005 - RNA, 19 nt, Homo sapiens
  misc_RNA (1)...(19): siRNA sense strand
cagcucaaccucuucauca

SEQ ID NO: 2127006 - RNA, 19 nt, Homo sapiens
  misc_RNA (1)...(19): siRNA sense strand
gcucaggaauacuggucuu

SEQ ID NO: 2127007 - RNA, 19 nt, Homo sapiens
  misc_RNA (1)...(19): siRNA sense strand
gaaccucauugacuuugcu

SEQ ID NO: 2127008 - RNA, 19 nt, Homo sapiens
  misc_RNA (1)...(19): siRNA sense strand
gcaucgcccuccuccagau

SEQ ID NO: 2127009 - RNA, 19 nt, Homo sapiens
  misc_RNA (1)...(19): siRNA sense strand
ccagaaccucauugacuuu

SEQ ID NO: 2127010 - RNA, 19 nt, Homo sapiens
  misc_RNA (1)...(19): siRNA sense strand
gacuggaaccucaauaucu

SEQ ID NO: 2127011 - RNA, 19 nt, Homo sapiens
  misc_RNA (1)...(19): siRNA sense strand
gugaaagccaacuggaauu

SEQ ID NO: 2127012 - RNA, 19 nt, Homo sapiens
  misc_RNA (1)...(19): siRNA sense strand
ugaaagccaacuggaauug

SEQ ID NO: 2127013 - RNA, 19 nt, Homo sapiens
  misc_RNA (1)...(19): siRNA sense strand
ccggcaagcaccagcauuu

SEQ ID NO: 2127014 - RNA, 19 nt, Homo sapiens
  misc_RNA (1)...(19): siRNA sense strand
gcaagcaccagcauuucca

SEQ ID NO: 2127015 - RNA, 19 nt, Homo sapiens
  misc_RNA (1)...(19): siRNA sense strand
cucaauaucuacuucaacu

SEQ ID NO: 2127016 - RNA, 19 nt, Homo sapiens
  misc_RNA (1)...(19): siRNA sense strand
ugacuggaaccucaauauc

SEQ ID NO: 2127017 - RNA, 19 nt, Homo sapiens
  misc_RNA (1)...(19): siRNA sense strand
ccucgugagugacaucaag

SEQ ID NO: 2127018 - RNA, 19 nt, Homo sapiens
  misc_RNA (1)...(19): siRNA sense strand
gcuucaacauugucuucug

SEQ ID NO: 2127019 - RNA, 19 nt, Homo sapiens
  misc_RNA (1)...(19): siRNA sense strand
cauugacuuugcucaggaa

SEQ ID NO: 2127020 - RNA, 19 nt, Homo sapiens
  misc_RNA (1)...(19): siRNA sense strand
gggcuucauccacaccaaa

SEQ ID NO: 2127021 - RNA, 19 nt, Homo sapiens
  misc_RNA (1)...(19): siRNA sense strand
gaacaccuuccugcucaag

SEQ ID NO: 2127022 - RNA, 19 nt, Homo sapiens
  misc_RNA (1)...(19): siRNA sense strand
gaaccucgugagugacauc

SEQ ID NO: 2127023 - RNA, 19 nt, Homo sapiens
  misc_RNA (1)...(19): siRNA sense strand
cgacauugaccuccagaac

SEQ ID NO: 2127024 - RNA, 19 nt, Homo sapiens
  misc_RNA (1)...(19): siRNA sense strand
gaccagcucaaccucuuca

SEQ ID NO: 2127025 - RNA, 19 nt, Homo sapiens
  misc_RNA (1)...(19): siRNA sense strand
cucaaccucuucaucaaca

SEQ ID NO: 2127026 - RNA, 19 nt, Homo sapiens
  misc_RNA (1)...(19): siRNA sense strand
acauugaccuccagaaccu

SEQ ID NO: 2127027 - RNA, 19 nt, Homo sapiens
  misc_RNA (1)...(19): siRNA sense strand
ggacaucacuccauuagua

SEQ ID NO: 2127028 - RNA, 19 nt, Homo sapiens
  misc_RNA (1)...(19): siRNA sense strand
gaaagggauuggcagaaua

SEQ ID NO: 2127029 - RNA, 19 nt, Homo sapiens
  misc_RNA (1)...(19): siRNA sense strand
gaacuaaccacuggaaaua

SEQ ID NO: 2127030 - RNA, 19 nt, Homo sapiens
  misc_RNA (1)...(19): siRNA sense strand
aaacugcacuggaagauuu

SEQ ID NO: 2127031 - RNA, 19 nt, Homo sapiens
  misc_RNA (1)...(19): siRNA sense strand
gauggaagguuaacauuuc

SEQ ID NO: 2127032 - RNA, 19 nt, Homo sapiens
  misc_RNA (1)...(19): siRNA sense strand
gacaagagauguugcuuuc

SEQ ID NO: 2127033 - RNA, 19 nt, Homo sapiens
  misc_RNA (1)...(19): siRNA sense strand
gaagcuucauuccauuaua

SEQ ID NO: 2127034 - RNA, 19 nt, Homo sapiens
  misc_RNA (1)...(19): siRNA sense strand
gaaggcaggcccaugguua

SEQ ID NO: 2127035 - RNA, 19 nt, Homo sapiens
  misc_RNA (1)...(19): siRNA sense strand
ccagaugaauuaacaaaug

SEQ ID NO: 2127036 - RNA, 19 nt, Homo sapiens
  misc_RNA (1)...(19): siRNA sense strand
ggaaagggauuggcagaau

SEQ ID NO: 2127037 - RNA, 19 nt, Homo sapiens
  misc_RNA (1)...(19): siRNA sense strand
uacacaaacucuccaauuu

SEQ ID NO: 2127038 - RNA, 19 nt, Homo sapiens
  misc_RNA (1)...(19): siRNA sense strand
gaauacagacaaagcagua

SEQ ID NO: 2127039 - RNA, 19 nt, Homo sapiens
  misc_RNA (1)...(19): siRNA sense strand
aauauugccucaacucuuu

SEQ ID NO: 2127040 - RNA, 19 nt, Homo sapiens
  misc_RNA (1)...(19): siRNA sense strand
gaaaugcacccuguagauu

SEQ ID NO: 2127041 - RNA, 19 nt, Homo sapiens
  misc_RNA (1)...(19): siRNA sense strand
ucacacaucucuuuauugg

SEQ ID NO: 2127042 - RNA, 19 nt, Homo sapiens
  misc_RNA (1)...(19): siRNA sense strand
cauggaacaucgacaguuu

SEQ ID NO: 2127043 - RNA, 19 nt, Homo sapiens
  misc_RNA (1)...(19): siRNA sense strand
gaaccaaggaaguaugaaa

SEQ ID NO: 2127044 - RNA, 19 nt, Homo sapiens
  misc_RNA (1)...(19): siRNA sense strand
gaacaucgacaguuuuaua

SEQ ID NO: 2127045 - RNA, 19 nt, Homo sapiens
  misc_RNA (1)...(19): siRNA sense strand
caaaguauaggacagaauu

SEQ ID NO: 2127046 - RNA, 19 nt, Homo sapiens
  misc_RNA (1)...(19): siRNA sense strand
ggacaagagauguugcuuu

SEQ ID NO: 2127047 - RNA, 19 nt, Homo sapiens
  misc_RNA (1)...(19): siRNA sense strand
gaagucagguagugaaacu

SEQ ID NO: 2127048 - RNA, 19 nt, Homo sapiens
  misc_RNA (1)...(19): siRNA sense strand
acuaaccacuggaaauaua

SEQ ID NO: 2127049 - RNA, 19 nt, Homo sapiens
  misc_RNA (1)...(19): siRNA sense strand
gaaacuggacuauacuuca

SEQ ID NO: 2127050 - RNA, 19 nt, Homo sapiens
  misc_RNA (1)...(19): siRNA sense strand
caaaugugguuucucuugu

SEQ ID NO: 2127051 - RNA, 19 nt, Homo sapiens
  misc_RNA (1)...(19): siRNA sense strand
ggacuauacuucaggacau

SEQ ID NO: 2127052 - RNA, 19 nt, Homo sapiens
  misc_RNA (1)...(19): siRNA sense strand
ggauccagaugaauuaaca

SEQ ID NO: 2127053 - RNA, 19 nt, Homo sapiens
  misc_RNA (1)...(19): siRNA sense strand
aaaugcacccuguagauua

SEQ ID NO: 2127054 - RNA, 19 nt, Homo sapiens
  misc_RNA (1)...(19): siRNA sense strand
gaugggaccaggaauuaaa

SEQ ID NO: 2127055 - RNA, 19 nt, Homo sapiens
  misc_RNA (1)...(19): siRNA sense strand
gcaauuaauuacacugaac

SEQ ID NO: 2127056 - RNA, 19 nt, Homo sapiens
  misc_RNA (1)...(19): siRNA sense strand
gcaauugaucaguggcuua

SEQ ID NO: 2127057 - RNA, 19 nt, Homo sapiens
  misc_RNA (1)...(19): siRNA sense strand
uaucaaaugugguuucucu

SEQ ID NO: 2127058 - RNA, 19 nt, Homo sapiens
  misc_RNA (1)...(19): siRNA sense strand
uaaauuuaccacacccuua

SEQ ID NO: 2127059 - RNA, 19 nt, Homo sapiens
  misc_RNA (1)...(19): siRNA sense strand
ucaauuagaucuucuucag

SEQ ID NO: 2127060 - RNA, 19 nt, Homo sapiens
  misc_RNA (1)...(19): siRNA sense strand
ggacuuccuuucugaaugc

SEQ ID NO: 2127061 - RNA, 19 nt, Homo sapiens
  misc_RNA (1)...(19): siRNA sense strand
gggucuagauccaaauuau

SEQ ID NO: 2127062 - RNA, 19 nt, Homo sapiens
  misc_RNA (1)...(19): siRNA sense strand
ugguuaaucuuauccguaa

SEQ ID NO: 2127063 - RNA, 19 nt, Homo sapiens
  misc_RNA (1)...(19): siRNA sense strand
ugagacagaugccaugcuu

SEQ ID NO: 2127064 - RNA, 19 nt, Homo sapiens
  misc_RNA (1)...(19): siRNA sense strand
guaaacugguuaagaaagg

SEQ ID NO: 2127065 - RNA, 19 nt, Homo sapiens
  misc_RNA (1)...(19): siRNA sense strand
ccucuucacucacuuaaca

SEQ ID NO: 2127066 - RNA, 19 nt, Homo sapiens
  misc_RNA (1)...(19): siRNA sense strand
aaagagcaguuuaucaagu

SEQ ID NO: 2127067 - RNA, 19 nt, Homo sapiens
  misc_RNA (1)...(19): siRNA sense strand
guacgaggcuagugcacau

SEQ ID NO: 2127068 - RNA, 19 nt, Homo sapiens
  misc_RNA (1)...(19): siRNA sense strand
ggucuagauccaaauuaua

SEQ ID NO: 2127069 - RNA, 19 nt, Homo sapiens
  misc_RNA (1)...(19): siRNA sense strand
gauguugcuuucuuacuca

SEQ ID NO: 2127070 - RNA, 19 nt, Homo sapiens
  misc_RNA (1)...(19): siRNA sense strand
guuaagaaaggaagcaauu

SEQ ID NO: 2127071 - RNA, 19 nt, Homo sapiens
  misc_RNA (1)...(19): siRNA sense strand
gaugaugggaccaggaauu

SEQ ID NO: 2127072 - RNA, 19 nt, Homo sapiens
  misc_RNA (1)...(19): siRNA sense strand
gcacuggaagauuuacaaa

SEQ ID NO: 2127073 - RNA, 19 nt, Homo sapiens
  misc_RNA (1)...(19): siRNA sense strand
caaguggaaacaaaguaua

SEQ ID NO: 2127074 - RNA, 19 nt, Homo sapiens
  misc_RNA (1)...(19): siRNA sense strand
ugaauuccauggauguaau

SEQ ID NO: 2127075 - RNA, 19 nt, Homo sapiens
  misc_RNA (1)...(19): siRNA sense strand
cuacacaaacucuccaauu

SEQ ID NO: 2127076 - RNA, 19 nt, Homo sapiens
  misc_RNA (1)...(19): siRNA sense strand
gaaggaaccaaggaaguau

SEQ ID NO: 2127077 - RNA, 19 nt, Homo sapiens
  misc_RNA (1)...(19): siRNA sense strand
cagaagcuucauuccauua

SEQ ID NO: 2127078 - RNA, 19 nt, Homo sapiens
  misc_RNA (1)...(19): siRNA sense strand
ucagaagcuucauuccauu

SEQ ID NO: 2127079 - RNA, 19 nt, Homo sapiens
  misc_RNA (1)...(19): siRNA sense strand
gggauuggcagaauacaga

SEQ ID NO: 2127080 - RNA, 19 nt, Homo sapiens
  misc_RNA (1)...(19): siRNA sense strand
uuaagggucuagauccaaa

SEQ ID NO: 2127081 - RNA, 19 nt, Homo sapiens
  misc_RNA (1)...(19): siRNA sense strand
guagugaaacuuccuuuua

SEQ ID NO: 2127082 - RNA, 19 nt, Homo sapiens
  misc_RNA (1)...(19): siRNA sense strand
gcaggcccaugguuaaucu

SEQ ID NO: 2127083 - RNA, 19 nt, Homo sapiens
  misc_RNA (1)...(19): siRNA sense strand
gacaucacuccauuaguaa

SEQ ID NO: 2127084 - RNA, 19 nt, Homo sapiens
  misc_RNA (1)...(19): siRNA sense strand
gugaaugccuccaccuaca

SEQ ID NO: 2127085 - RNA, 19 nt, Homo sapiens
  misc_RNA (1)...(19): siRNA sense strand
ucaaaugugguuucucuug

SEQ ID NO: 2127086 - RNA, 19 nt, Homo sapiens
  misc_RNA (1)...(19): siRNA sense strand
ggaagcaauuaauuacacu

SEQ ID NO: 2127087 - RNA, 19 nt, Homo sapiens
  misc_RNA (1)...(19): siRNA sense strand
gggacuuccuuucugaaug

SEQ ID NO: 2127088 - RNA, 19 nt, Homo sapiens
  misc_RNA (1)...(19): siRNA sense strand
ggaaacuggacuauacuuc

SEQ ID NO: 2127089 - RNA, 19 nt, Homo sapiens
  misc_RNA (1)...(19): siRNA sense strand
agaaggaaccaaggaagua

SEQ ID NO: 2127090 - RNA, 19 nt, Homo sapiens
  misc_RNA (1)...(19): siRNA sense strand
gaucagaagcuucauucca

SEQ ID NO: 2127091 - RNA, 19 nt, Homo sapiens
  misc_RNA (1)...(19): siRNA sense strand
gagcgacuccuucgaugga

SEQ ID NO: 2127092 - RNA, 19 nt, Homo sapiens
  misc_RNA (1)...(19): siRNA sense strand
uuccauggauguaauguga

SEQ ID NO: 2127093 - RNA, 19 nt, Homo sapiens
  misc_RNA (1)...(19): siRNA sense strand
ggucaccuuugucagaaau

SEQ ID NO: 2127094 - RNA, 19 nt, Homo sapiens
  misc_RNA (1)...(19): siRNA sense strand
acacugaaccauuuguuau

SEQ ID NO: 2127095 - RNA, 19 nt, Homo sapiens
  misc_RNA (1)...(19): siRNA sense strand
ccauggauguaaugugaau

SEQ ID NO: 2127096 - RNA, 19 nt, Homo sapiens
  misc_RNA (1)...(19): siRNA sense strand
cacccuggauucugaguga

SEQ ID NO: 2127097 - RNA, 19 nt, Homo sapiens
  misc_RNA (1)...(19): siRNA sense strand
cgauggaagguuaacauuu

SEQ ID NO: 2127098 - RNA, 19 nt, Homo sapiens
  misc_RNA (1)...(19): siRNA sense strand
cuaccgaacacagaaauuu

SEQ ID NO: 2127099 - RNA, 19 nt, Homo sapiens
  misc_RNA (1)...(19): siRNA sense strand
aagagcaguuuaucaagug

SEQ ID NO: 2127100 - RNA, 19 nt, Homo sapiens
  misc_RNA (1)...(19): siRNA sense strand
gcaucaauauugccucaac

SEQ ID NO: 2127101 - RNA, 19 nt, Homo sapiens
  misc_RNA (1)...(19): siRNA sense strand
ccuacaugcuucgaacuaa

SEQ ID NO: 2127102 - RNA, 19 nt, Homo sapiens
  misc_RNA (1)...(19): siRNA sense strand
caugcuuggugaaauuauu

SEQ ID NO: 2127103 - RNA, 19 nt, Homo sapiens
  misc_RNA (1)...(19): siRNA sense strand
caauugaucaguggcuuaa

SEQ ID NO: 2127104 - RNA, 19 nt, Homo sapiens
  misc_RNA (1)...(19): siRNA sense strand
gcagaauacagacaaagca

SEQ ID NO: 2127105 - RNA, 19 nt, Homo sapiens
  misc_RNA (1)...(19): siRNA sense strand
aaacaaaguauaggacaga

SEQ ID NO: 2127106 - RNA, 19 nt, Homo sapiens
  misc_RNA (1)...(19): siRNA sense strand
cgaacuaaccacuggaaau

SEQ ID NO: 2127107 - RNA, 19 nt, Homo sapiens
  misc_RNA (1)...(19): siRNA sense strand
caacauuucacacaucucu

SEQ ID NO: 2127108 - RNA, 19 nt, Homo sapiens
  misc_RNA (1)...(19): siRNA sense strand
acacagaaauuugggaaac

SEQ ID NO: 2127109 - RNA, 19 nt, Homo sapiens
  misc_RNA (1)...(19): siRNA sense strand
ccucggauccagaugaauu

SEQ ID NO: 2127110 - RNA, 19 nt, Homo sapiens
  misc_RNA (1)...(19): siRNA sense strand
cgugggacuuccuuucuga

SEQ ID NO: 2127111 - RNA, 19 nt, Homo sapiens
  misc_RNA (1)...(19): siRNA sense strand
gcccaugguuaaucuuauc

SEQ ID NO: 2127112 - RNA, 19 nt, Homo sapiens
  misc_RNA (1)...(19): siRNA sense strand
gagaaaauuuuggaucuuc

SEQ ID NO: 2127113 - RNA, 19 nt, Homo sapiens
  misc_RNA (1)...(19): siRNA sense strand
caaacguuauagcaaaucu

SEQ ID NO: 2127114 - RNA, 19 nt, Homo sapiens
  misc_RNA (1)...(19): siRNA sense strand
cugcuucuguccaccagua

SEQ ID NO: 2127115 - RNA, 19 nt, Homo sapiens
  misc_RNA (1)...(19): siRNA sense strand
caauauugccucaacucuu

SEQ ID NO: 2127116 - RNA, 19 nt, Homo sapiens
  misc_RNA (1)...(19): siRNA sense strand
acaaguaucaaaugugguu

SEQ ID NO: 2127117 - RNA, 19 nt, Homo sapiens
  misc_RNA (1)...(19): siRNA sense strand
ugccaugcuuggugaaauu

SEQ ID NO: 2127118 - RNA, 19 nt, Homo sapiens
  misc_RNA (1)...(19): siRNA sense strand
aaacuggacuauacuucag

SEQ ID NO: 2127119 - RNA, 19 nt, Homo sapiens
  misc_RNA (1)...(19): siRNA sense strand
aaugcacccuguagauuau

SEQ ID NO: 2127120 - RNA, 19 nt, Homo sapiens
  misc_RNA (1)...(19): siRNA sense strand
uaaacugguuaagaaagga

SEQ ID NO: 2127121 - RNA, 19 nt, Homo sapiens
  misc_RNA (1)...(19): siRNA sense strand
gaauccaagagcaguuuga

SEQ ID NO: 2127122 - RNA, 19 nt, Homo sapiens
  misc_RNA (1)...(19): siRNA sense strand
ugguuucucuuguggauau

SEQ ID NO: 2127123 - RNA, 19 nt, Homo sapiens
  misc_RNA (1)...(19): siRNA sense strand
uacacugaaccauuuguua

SEQ ID NO: 2127124 - RNA, 19 nt, Homo sapiens
  misc_RNA (1)...(19): siRNA sense strand
uacccuaccaugcuugaua

SEQ ID NO: 2127125 - RNA, 19 nt, Homo sapiens
  misc_RNA (1)...(19): siRNA sense strand
ucaaguggaaacaaaguau

SEQ ID NO: 2127126 - RNA, 19 nt, Homo sapiens
  misc_RNA (1)...(19): siRNA sense strand
ccaccaguauaauaaagag

SEQ ID NO: 2127127 - RNA, 19 nt, Homo sapiens
  misc_RNA (1)...(19): siRNA sense strand
ccaaggaggcccuguacua

SEQ ID NO: 2127128 - RNA, 19 nt, Homo sapiens
  misc_RNA (1)...(19): siRNA sense strand
ggagcaggcuggacaacau

SEQ ID NO: 2127129 - RNA, 19 nt, Homo sapiens
  misc_RNA (1)...(19): siRNA sense strand
gcugaaggaugcccaugau

SEQ ID NO: 2127130 - RNA, 19 nt, Homo sapiens
  misc_RNA (1)...(19): siRNA sense strand
gagcuucaggacaccauua

SEQ ID NO: 2127131 - RNA, 19 nt, Homo sapiens
  misc_RNA (1)...(19): siRNA sense strand
gaggacugcuaccugaaga

SEQ ID NO: 2127132 - RNA, 19 nt, Homo sapiens
  misc_RNA (1)...(19): siRNA sense strand
caaggaggcccuguacuau

SEQ ID NO: 2127133 - RNA, 19 nt, Homo sapiens
  misc_RNA (1)...(19): siRNA sense strand
acuacucccugcacaugua

SEQ ID NO: 2127134 - RNA, 19 nt, Homo sapiens
  misc_RNA (1)...(19): siRNA sense strand
guacuacucccugcacaug

SEQ ID NO: 2127135 - RNA, 19 nt, Homo sapiens
  misc_RNA (1)...(19): siRNA sense strand
acuaugccaagguguauua

SEQ ID NO: 2127136 - RNA, 19 nt, Homo sapiens
  misc_RNA (1)...(19): siRNA sense strand
guacuaugccaagguguau

SEQ ID NO: 2127137 - RNA, 19 nt, Homo sapiens
  misc_RNA (1)...(19): siRNA sense strand
cccaugaugccacugagua

SEQ ID NO: 2127138 - RNA, 19 nt, Homo sapiens
  misc_RNA (1)...(19): siRNA sense strand
gaagacccugucccucugu

SEQ ID NO: 2127139 - RNA, 19 nt, Homo sapiens
  misc_RNA (1)...(19): siRNA sense strand
gcaagagcugguggccuuu

SEQ ID NO: 2127140 - RNA, 19 nt, Homo sapiens
  misc_RNA (1)...(19): siRNA sense strand
aggaggcccuguacuaugc

SEQ ID NO: 2127141 - RNA, 19 nt, Homo sapiens
  misc_RNA (1)...(19): siRNA sense strand
gagcaggcuggacaacauc

SEQ ID NO: 2127142 - RNA, 19 nt, Homo sapiens
  misc_RNA (1)...(19): siRNA sense strand
ccaaggaggcccuguacua

SEQ ID NO: 2127143 - RNA, 19 nt, Homo sapiens
  misc_RNA (1)...(19): siRNA sense strand
ggagcaggcuggacaacau

SEQ ID NO: 2127144 - RNA, 19 nt, Homo sapiens
  misc_RNA (1)...(19): siRNA sense strand
gcugaaggaugcccaugau

SEQ ID NO: 2127145 - RNA, 19 nt, Homo sapiens
  misc_RNA (1)...(19): siRNA sense strand
gagcuucaggacaccauua

SEQ ID NO: 2127146 - RNA, 19 nt, Homo sapiens
  misc_RNA (1)...(19): siRNA sense strand
gaggacugcuaccugaaga

SEQ ID NO: 2127147 - RNA, 19 nt, Homo sapiens
  misc_RNA (1)...(19): siRNA sense strand
caaggaggcccuguacuau

SEQ ID NO: 2127148 - RNA, 19 nt, Homo sapiens
  misc_RNA (1)...(19): siRNA sense strand
acuacucccugcacaugua

SEQ ID NO: 2127149 - RNA, 19 nt, Homo sapiens
  misc_RNA (1)...(19): siRNA sense strand
guacuacucccugcacaug

SEQ ID NO: 2127150 - RNA, 19 nt, Homo sapiens
  misc_RNA (1)...(19): siRNA sense strand
acuaugccaagguguauua

SEQ ID NO: 2127151 - RNA, 19 nt, Homo sapiens
  misc_RNA (1)...(19): siRNA sense strand
guacuaugccaagguguau

SEQ ID NO: 2127152 - RNA, 19 nt, Homo sapiens
  misc_RNA (1)...(19): siRNA sense strand
cccaugaugccacugagua

SEQ ID NO: 2127153 - RNA, 19 nt, Homo sapiens
  misc_RNA (1)...(19): siRNA sense strand
gaagacccugucccucugu

SEQ ID NO: 2127154 - RNA, 19 nt, Homo sapiens
  misc_RNA (1)...(19): siRNA sense strand
gcaagagcugguggccuuu

SEQ ID NO: 2127155 - RNA, 19 nt, Homo sapiens
  misc_RNA (1)...(19): siRNA sense strand
aggaggcccuguacuaugc

SEQ ID NO: 2127156 - RNA, 19 nt, Homo sapiens
  misc_RNA (1)...(19): siRNA sense strand
gagcaggcuggacaacauc

SEQ ID NO: 2127157 - RNA, 19 nt, Homo sapiens
  misc_RNA (1)...(19): siRNA sense strand
gaacuuacaaucagcauua

SEQ ID NO: 2127158 - RNA, 19 nt, Homo sapiens
  misc_RNA (1)...(19): siRNA sense strand
gaacaacugccgccucauu

SEQ ID NO: 2127159 - RNA, 19 nt, Homo sapiens
  misc_RNA (1)...(19): siRNA sense strand
gcaccuguguccuggagua

SEQ ID NO: 2127160 - RNA, 19 nt, Homo sapiens
  misc_RNA (1)...(19): siRNA sense strand
ugagaucucugcagugugu

SEQ ID NO: 2127161 - RNA, 19 nt, Homo sapiens
  misc_RNA (1)...(19): siRNA sense strand
aacauucgcuuccuggaua

SEQ ID NO: 2127162 - RNA, 19 nt, Homo sapiens
  misc_RNA (1)...(19): siRNA sense strand
gggcuggcauggucauauu

SEQ ID NO: 2127163 - RNA, 19 nt, Homo sapiens
  misc_RNA (1)...(19): siRNA sense strand
gcugagaucucugcagugu

SEQ ID NO: 2127164 - RNA, 19 nt, Homo sapiens
  misc_RNA (1)...(19): siRNA sense strand
ggucauauuacaucggaua

SEQ ID NO: 2127165 - RNA, 19 nt, Homo sapiens
  misc_RNA (1)...(19): siRNA sense strand
ccucaucaguggaauggaa

SEQ ID NO: 2127166 - RNA, 19 nt, Homo sapiens
  misc_RNA (1)...(19): siRNA sense strand
acaaucagcauuacaacaa

SEQ ID NO: 2127167 - RNA, 19 nt, Homo sapiens
  misc_RNA (1)...(19): siRNA sense strand
ccgcacggauuucucuuga

SEQ ID NO: 2127168 - RNA, 19 nt, Homo sapiens
  misc_RNA (1)...(19): siRNA sense strand
caacagcaucuaugagcuu

SEQ ID NO: 2127169 - RNA, 19 nt, Homo sapiens
  misc_RNA (1)...(19): siRNA sense strand
cccaguaccuccacgaugu

SEQ ID NO: 2127170 - RNA, 19 nt, Homo sapiens
  misc_RNA (1)...(19): siRNA sense strand
caucaaggaucggguuuac

SEQ ID NO: 2127171 - RNA, 19 nt, Homo sapiens
  misc_RNA (1)...(19): siRNA sense strand
ccugauaaccugaguaugg

SEQ ID NO: 2127172 - RNA, 19 nt, Homo sapiens
  misc_RNA (1)...(19): siRNA sense strand
gcaucaaggaucggguuua

SEQ ID NO: 2127173 - RNA, 19 nt, Homo sapiens
  misc_RNA (1)...(19): siRNA sense strand
guccaucuauuucuacuac

SEQ ID NO: 2127174 - RNA, 19 nt, Homo sapiens
  misc_RNA (1)...(19): siRNA sense strand
uguuugccaugucacaaua

SEQ ID NO: 2127175 - RNA, 19 nt, Homo sapiens
  misc_RNA (1)...(19): siRNA sense strand
uguauauucuccucccauu

SEQ ID NO: 2127176 - RNA, 19 nt, Homo sapiens
  misc_RNA (1)...(19): siRNA sense strand
gcagaccggugaccaugcu

SEQ ID NO: 2127177 - RNA, 19 nt, Homo sapiens
  misc_RNA (1)...(19): siRNA sense strand
gaucggguuuacagcaaca

SEQ ID NO: 2127178 - RNA, 19 nt, Homo sapiens
  misc_RNA (1)...(19): siRNA sense strand
cuacuacucccucccaaau

SEQ ID NO: 2127179 - RNA, 19 nt, Homo sapiens
  misc_RNA (1)...(19): siRNA sense strand
ccucauugccuaccaggaa

SEQ ID NO: 2127180 - RNA, 19 nt, Homo sapiens
  misc_RNA (1)...(19): siRNA sense strand
gcagaugacagcagcuucu

SEQ ID NO: 2127181 - RNA, 19 nt, Homo sapiens
  misc_RNA (1)...(19): siRNA sense strand
gagcuccucaucaguggaa

SEQ ID NO: 2127182 - RNA, 19 nt, Homo sapiens
  misc_RNA (1)...(19): siRNA sense strand
ccuccacgaugucccaaga

SEQ ID NO: 2127183 - RNA, 19 nt, Homo sapiens
  misc_RNA (1)...(19): siRNA sense strand
gcauuacaacaaccugcua

SEQ ID NO: 2127184 - RNA, 19 nt, Homo sapiens
  misc_RNA (1)...(19): siRNA sense strand
caacauucgcuuccuggau

SEQ ID NO: 2127185 - RNA, 19 nt, Homo sapiens
  misc_RNA (1)...(19): siRNA sense strand
gcccuucacuuggaugcuu

SEQ ID NO: 2127186 - RNA, 19 nt, Homo sapiens
  misc_RNA (1)...(19): siRNA sense strand
ucaaggaucggguuuacag

SEQ ID NO: 2127187 - RNA, 19 nt, Homo sapiens
  misc_RNA (1)...(19): siRNA sense strand
gacuuuguuugccauguca

SEQ ID NO: 2127188 - RNA, 19 nt, Homo sapiens
  misc_RNA (1)...(19): siRNA sense strand
cagcaucuaugagcuucug

SEQ ID NO: 2127189 - RNA, 19 nt, Homo sapiens
  misc_RNA (1)...(19): siRNA sense strand
uuacagcaacagcaucuau

SEQ ID NO: 2127190 - RNA, 19 nt, Homo sapiens
  misc_RNA (1)...(19): siRNA sense strand
caaucagcauuacaacaac

SEQ ID NO: 2127191 - RNA, 19 nt, Homo sapiens
  misc_RNA (1)...(19): siRNA sense strand
acagcaacagcaucuauga

SEQ ID NO: 2127192 - RNA, 19 nt, Homo sapiens
  misc_RNA (1)...(19): siRNA sense strand
uauauucuccucccauugg

SEQ ID NO: 2127193 - RNA, 19 nt, Homo sapiens
  misc_RNA (1)...(19): siRNA sense strand
acauucgcuuccuggauaa

SEQ ID NO: 2127194 - RNA, 19 nt, Homo sapiens
  misc_RNA (1)...(19): siRNA sense strand
gccggacacuugaggacau

SEQ ID NO: 2127195 - RNA, 19 nt, Homo sapiens
  misc_RNA (1)...(19): siRNA sense strand
ggcauggucauauuacauc

SEQ ID NO: 2127196 - RNA, 19 nt, Homo sapiens
  misc_RNA (1)...(19): siRNA sense strand
uugcugcuguccaucuauu

SEQ ID NO: 2127197 - RNA, 19 nt, Homo sapiens
  misc_RNA (1)...(19): siRNA sense strand
ccaucuauuucuacuacuc

SEQ ID NO: 2127198 - RNA, 19 nt, Homo sapiens
  misc_RNA (1)...(19): siRNA sense strand
guauauucuccucccauug

SEQ ID NO: 2127199 - RNA, 19 nt, Homo sapiens
  misc_RNA (1)...(19): siRNA sense strand
gagcaggccaaacucuucu

SEQ ID NO: 2127200 - RNA, 19 nt, Homo sapiens
  misc_RNA (1)...(19): siRNA sense strand
agacuuuguuugccauguc

SEQ ID NO: 2127201 - RNA, 19 nt, Homo sapiens
  misc_RNA (1)...(19): siRNA sense strand
gaacuuacaaucagcauua

SEQ ID NO: 2127202 - RNA, 19 nt, Homo sapiens
  misc_RNA (1)...(19): siRNA sense strand
gaacaacugccgccucauu

SEQ ID NO: 2127203 - RNA, 19 nt, Homo sapiens
  misc_RNA (1)...(19): siRNA sense strand
gcaccuguguccuggagua

SEQ ID NO: 2127204 - RNA, 19 nt, Homo sapiens
  misc_RNA (1)...(19): siRNA sense strand
ugagaucucugcagugugu

SEQ ID NO: 2127205 - RNA, 19 nt, Homo sapiens
  misc_RNA (1)...(19): siRNA sense strand
aacauucgcuuccuggaua

SEQ ID NO: 2127206 - RNA, 19 nt, Homo sapiens
  misc_RNA (1)...(19): siRNA sense strand
gggcuggcauggucauauu

SEQ ID NO: 2127207 - RNA, 19 nt, Homo sapiens
  misc_RNA (1)...(19): siRNA sense strand
gcugagaucucugcagugu

SEQ ID NO: 2127208 - RNA, 19 nt, Homo sapiens
  misc_RNA (1)...(19): siRNA sense strand
ggucauauuacaucggaua

SEQ ID NO: 2127209 - RNA, 19 nt, Homo sapiens
  misc_RNA (1)...(19): siRNA sense strand
ccucaucaguggaauggaa

SEQ ID NO: 2127210 - RNA, 19 nt, Homo sapiens
  misc_RNA (1)...(19): siRNA sense strand
acaaucagcauuacaacaa

SEQ ID NO: 2127211 - RNA, 19 nt, Homo sapiens
  misc_RNA (1)...(19): siRNA sense strand
ccgcacggauuucucuuga

SEQ ID NO: 2127212 - RNA, 19 nt, Homo sapiens
  misc_RNA (1)...(19): siRNA sense strand
caacagcaucuaugagcuu

SEQ ID NO: 2127213 - RNA, 19 nt, Homo sapiens
  misc_RNA (1)...(19): siRNA sense strand
cccaguaccuccacgaugu

SEQ ID NO: 2127214 - RNA, 19 nt, Homo sapiens
  misc_RNA (1)...(19): siRNA sense strand
caucaaggaucggguuuac

SEQ ID NO: 2127215 - RNA, 19 nt, Homo sapiens
  misc_RNA (1)...(19): siRNA sense strand
ccugauaaccugaguaugg

SEQ ID NO: 2127216 - RNA, 19 nt, Homo sapiens
  misc_RNA (1)...(19): siRNA sense strand
gcaucaaggaucggguuua

SEQ ID NO: 2127217 - RNA, 19 nt, Homo sapiens
  misc_RNA (1)...(19): siRNA sense strand
guccaucuauuucuacuac

SEQ ID NO: 2127218 - RNA, 19 nt, Homo sapiens
  misc_RNA (1)...(19): siRNA sense strand
uguuugccaugucacaaua

SEQ ID NO: 2127219 - RNA, 19 nt, Homo sapiens
  misc_RNA (1)...(19): siRNA sense strand
uguauauucuccucccauu

SEQ ID NO: 2127220 - RNA, 19 nt, Homo sapiens
  misc_RNA (1)...(19): siRNA sense strand
gcagaccggugaccaugcu

SEQ ID NO: 2127221 - RNA, 19 nt, Homo sapiens
  misc_RNA (1)...(19): siRNA sense strand
gaucggguuuacagcaaca

SEQ ID NO: 2127222 - RNA, 19 nt, Homo sapiens
  misc_RNA (1)...(19): siRNA sense strand
cuacuacucccucccaaau

SEQ ID NO: 2127223 - RNA, 19 nt, Homo sapiens
  misc_RNA (1)...(19): siRNA sense strand
ccucauugccuaccaggaa

SEQ ID NO: 2127224 - RNA, 19 nt, Homo sapiens
  misc_RNA (1)...(19): siRNA sense strand
gcagaugacagcagcuucu

SEQ ID NO: 2127225 - RNA, 19 nt, Homo sapiens
  misc_RNA (1)...(19): siRNA sense strand
gagcuccucaucaguggaa

SEQ ID NO: 2127226 - RNA, 19 nt, Homo sapiens
  misc_RNA (1)...(19): siRNA sense strand
ccuccacgaugucccaaga

SEQ ID NO: 2127227 - RNA, 19 nt, Homo sapiens
  misc_RNA (1)...(19): siRNA sense strand
gcauuacaacaaccugcua

SEQ ID NO: 2127228 - RNA, 19 nt, Homo sapiens
  misc_RNA (1)...(19): siRNA sense strand
caacauucgcuuccuggau

SEQ ID NO: 2127229 - RNA, 19 nt, Homo sapiens
  misc_RNA (1)...(19): siRNA sense strand
gcccuucacuuggaugcuu

SEQ ID NO: 2127230 - RNA, 19 nt, Homo sapiens
  misc_RNA (1)...(19): siRNA sense strand
ucaaggaucggguuuacag

SEQ ID NO: 2127231 - RNA, 19 nt, Homo sapiens
  misc_RNA (1)...(19): siRNA sense strand
gacuuuguuugccauguca

SEQ ID NO: 2127232 - RNA, 19 nt, Homo sapiens
  misc_RNA (1)...(19): siRNA sense strand
cagcaucuaugagcuucug

SEQ ID NO: 2127233 - RNA, 19 nt, Homo sapiens
  misc_RNA (1)...(19): siRNA sense strand
uuacagcaacagcaucuau

SEQ ID NO: 2127234 - RNA, 19 nt, Homo sapiens
  misc_RNA (1)...(19): siRNA sense strand
caaucagcauuacaacaac

SEQ ID NO: 2127235 - RNA, 19 nt, Homo sapiens
  misc_RNA (1)...(19): siRNA sense strand
acagcaacagcaucuauga

SEQ ID NO: 2127236 - RNA, 19 nt, Homo sapiens
  misc_RNA (1)...(19): siRNA sense strand
uauauucuccucccauugg

SEQ ID NO: 2127237 - RNA, 19 nt, Homo sapiens
  misc_RNA (1)...(19): siRNA sense strand
acauucgcuuccuggauaa

SEQ ID NO: 2127238 - RNA, 19 nt, Homo sapiens
  misc_RNA (1)...(19): siRNA sense strand
gccggacacuugaggacau

SEQ ID NO: 2127239 - RNA, 19 nt, Homo sapiens
  misc_RNA (1)...(19): siRNA sense strand
ggcauggucauauuacauc

SEQ ID NO: 2127240 - RNA, 19 nt, Homo sapiens
  misc_RNA (1)...(19): siRNA sense strand
uugcugcuguccaucuauu

SEQ ID NO: 2127241 - RNA, 19 nt, Homo sapiens
  misc_RNA (1)...(19): siRNA sense strand
ccaucuauuucuacuacuc

SEQ ID NO: 2127242 - RNA, 19 nt, Homo sapiens
  misc_RNA (1)...(19): siRNA sense strand
guauauucuccucccauug

SEQ ID NO: 2127243 - RNA, 19 nt, Homo sapiens
  misc_RNA (1)...(19): siRNA sense strand
gagcaggccaaacucuucu

SEQ ID NO: 2127244 - RNA, 19 nt, Homo sapiens
  misc_RNA (1)...(19): siRNA sense strand
agacuuuguuugccauguc

SEQ ID NO: 2127245 - RNA, 19 nt, Homo sapiens
  misc_RNA (1)...(19): siRNA sense strand
ggacaaaccugagaaagaa

SEQ ID NO: 2127246 - RNA, 19 nt, Homo sapiens
  misc_RNA (1)...(19): siRNA sense strand
gaaagucucuauacuaaga

SEQ ID NO: 2127247 - RNA, 19 nt, Homo sapiens
  misc_RNA (1)...(19): siRNA sense strand
ggaaugaccuggagaguuc

SEQ ID NO: 2127248 - RNA, 19 nt, Homo sapiens
  misc_RNA (1)...(19): siRNA sense strand
aaucauagcucuuccaauu

SEQ ID NO: 2127249 - RNA, 19 nt, Homo sapiens
  misc_RNA (1)...(19): siRNA sense strand
gaucgaaguuuaagaguga

SEQ ID NO: 2127250 - RNA, 19 nt, Homo sapiens
  misc_RNA (1)...(19): siRNA sense strand
cagaaggaguuauuagaua

SEQ ID NO: 2127251 - RNA, 19 nt, Homo sapiens
  misc_RNA (1)...(19): siRNA sense strand
gaaagaccauguccucuca

SEQ ID NO: 2127252 - RNA, 19 nt, Homo sapiens
  misc_RNA (1)...(19): siRNA sense strand
gcaaugaaguuacaacaag

SEQ ID NO: 2127253 - RNA, 19 nt, Homo sapiens
  misc_RNA (1)...(19): siRNA sense strand
ugaaagagcuuggagagaa

SEQ ID NO: 2127254 - RNA, 19 nt, Homo sapiens
  misc_RNA (1)...(19): siRNA sense strand
caacauaaccagaguaguu

SEQ ID NO: 2127255 - RNA, 19 nt, Homo sapiens
  misc_RNA (1)...(19): siRNA sense strand
gaaccuccuuuacacagua

SEQ ID NO: 2127256 - RNA, 19 nt, Homo sapiens
  misc_RNA (1)...(19): siRNA sense strand
gcaaggaaauaacaaucaa

SEQ ID NO: 2127257 - RNA, 19 nt, Homo sapiens
  misc_RNA (1)...(19): siRNA sense strand
caacaacagcaaacacuua

SEQ ID NO: 2127258 - RNA, 19 nt, Homo sapiens
  misc_RNA (1)...(19): siRNA sense strand
uccaauaucuuaccaauga

SEQ ID NO: 2127259 - RNA, 19 nt, Homo sapiens
  misc_RNA (1)...(19): siRNA sense strand
caucuaaagugaagacaaa

SEQ ID NO: 2127260 - RNA, 19 nt, Homo sapiens
  misc_RNA (1)...(19): siRNA sense strand
aaacagaaaccucagauuu

SEQ ID NO: 2127261 - RNA, 19 nt, Homo sapiens
  misc_RNA (1)...(19): siRNA sense strand
gcaaagaccgggauccaaa

SEQ ID NO: 2127262 - RNA, 19 nt, Homo sapiens
  misc_RNA (1)...(19): siRNA sense strand
gaaaaucccucaggaauug

SEQ ID NO: 2127263 - RNA, 19 nt, Homo sapiens
  misc_RNA (1)...(19): siRNA sense strand
uggagaagauugccagaua

SEQ ID NO: 2127264 - RNA, 19 nt, Homo sapiens
  misc_RNA (1)...(19): siRNA sense strand
gagaagacaccacagaauu

SEQ ID NO: 2127265 - RNA, 19 nt, Homo sapiens
  misc_RNA (1)...(19): siRNA sense strand
ccagaagacucguucagaa

SEQ ID NO: 2127266 - RNA, 19 nt, Homo sapiens
  misc_RNA (1)...(19): siRNA sense strand
uuacagcuccucaaacuua

SEQ ID NO: 2127267 - RNA, 19 nt, Homo sapiens
  misc_RNA (1)...(19): siRNA sense strand
ggagaagauugccagauau

SEQ ID NO: 2127268 - RNA, 19 nt, Homo sapiens
  misc_RNA (1)...(19): siRNA sense strand
uccaagagcugcuaacauu

SEQ ID NO: 2127269 - RNA, 19 nt, Homo sapiens
  misc_RNA (1)...(19): siRNA sense strand
ggaaauggagagacuauga

SEQ ID NO: 2127270 - RNA, 19 nt, Homo sapiens
  misc_RNA (1)...(19): siRNA sense strand
gaacgaaggacacgugaga

SEQ ID NO: 2127271 - RNA, 19 nt, Homo sapiens
  misc_RNA (1)...(19): siRNA sense strand
agggaaagaucgaaguuua

SEQ ID NO: 2127272 - RNA, 19 nt, Homo sapiens
  misc_RNA (1)...(19): siRNA sense strand
gguugaggcugcacgguua

SEQ ID NO: 2127273 - RNA, 19 nt, Homo sapiens
  misc_RNA (1)...(19): siRNA sense strand
gcccuaauccaauaucuua

SEQ ID NO: 2127274 - RNA, 19 nt, Homo sapiens
  misc_RNA (1)...(19): siRNA sense strand
aagacuaccuccuccuuua

SEQ ID NO: 2127275 - RNA, 19 nt, Homo sapiens
  misc_RNA (1)...(19): siRNA sense strand
gcacggagguauccagaag

SEQ ID NO: 2127276 - RNA, 19 nt, Homo sapiens
  misc_RNA (1)...(19): siRNA sense strand
cagcaaauuuggaacuauu

SEQ ID NO: 2127277 - RNA, 19 nt, Homo sapiens
  misc_RNA (1)...(19): siRNA sense strand
cgaugaagaugaagaugaa

SEQ ID NO: 2127278 - RNA, 19 nt, Homo sapiens
  misc_RNA (1)...(19): siRNA sense strand
ggagguauccagaagauga

SEQ ID NO: 2127279 - RNA, 19 nt, Homo sapiens
  misc_RNA (1)...(19): siRNA sense strand
aagcagcccuaauccaaua

SEQ ID NO: 2127280 - RNA, 19 nt, Homo sapiens
  misc_RNA (1)...(19): siRNA sense strand
ccagaagcuccuaguauua

SEQ ID NO: 2127281 - RNA, 19 nt, Homo sapiens
  misc_RNA (1)...(19): siRNA sense strand
agaagacaccacagaauua

SEQ ID NO: 2127282 - RNA, 19 nt, Homo sapiens
  misc_RNA (1)...(19): siRNA sense strand
gagcaaauauaaugaagac

SEQ ID NO: 2127283 - RNA, 19 nt, Homo sapiens
  misc_RNA (1)...(19): siRNA sense strand
gaaguuacaacaagauaug

SEQ ID NO: 2127284 - RNA, 19 nt, Homo sapiens
  misc_RNA (1)...(19): siRNA sense strand
gaaguugcucugccaagua

SEQ ID NO: 2127285 - RNA, 19 nt, Homo sapiens
  misc_RNA (1)...(19): siRNA sense strand
gaaagagcuuggagagaag

SEQ ID NO: 2127286 - RNA, 19 nt, Homo sapiens
  misc_RNA (1)...(19): siRNA sense strand
gaacacuucagcaaauuug

SEQ ID NO: 2127287 - RNA, 19 nt, Homo sapiens
  misc_RNA (1)...(19): siRNA sense strand
caucacauuuguugaauca

SEQ ID NO: 2127288 - RNA, 19 nt, Homo sapiens
  misc_RNA (1)...(19): siRNA sense strand
cccagaagcuccuaguauu

SEQ ID NO: 2127289 - RNA, 19 nt, Homo sapiens
  misc_RNA (1)...(19): siRNA sense strand
ccacugagacugaagaaga

SEQ ID NO: 2127290 - RNA, 19 nt, Homo sapiens
  misc_RNA (1)...(19): siRNA sense strand
ggaaggggcucacuaaauc

SEQ ID NO: 2127291 - RNA, 19 nt, Homo sapiens
  misc_RNA (1)...(19): siRNA sense strand
gaguuggucuaauuacuau

SEQ ID NO: 2127292 - RNA, 19 nt, Homo sapiens
  misc_RNA (1)...(19): siRNA sense strand
caaugaaguuacaacaaga

SEQ ID NO: 2127293 - RNA, 19 nt, Homo sapiens
  misc_RNA (1)...(19): siRNA sense strand
uuaccaagcucaaugaaca

SEQ ID NO: 2127294 - RNA, 19 nt, Homo sapiens
  misc_RNA (1)...(19): siRNA sense strand
ggaaagcaaggaaauaaca

SEQ ID NO: 2127295 - RNA, 19 nt, Homo sapiens
  misc_RNA (1)...(19): siRNA sense strand
gaagggccacucacaaaga

SEQ ID NO: 2127296 - RNA, 19 nt, Homo sapiens
  misc_RNA (1)...(19): siRNA sense strand
ggaguaagagucggaguaa

SEQ ID NO: 2127297 - RNA, 19 nt, Homo sapiens
  misc_RNA (1)...(19): siRNA sense strand
guuccuguuucgauuaaua

SEQ ID NO: 2127298 - RNA, 19 nt, Homo sapiens
  misc_RNA (1)...(19): siRNA sense strand
gaagacucguucagaaucu

SEQ ID NO: 2127299 - RNA, 19 nt, Homo sapiens
  misc_RNA (1)...(19): siRNA sense strand
gagaagauugccagauauu

SEQ ID NO: 2127300 - RNA, 19 nt, Homo sapiens
  misc_RNA (1)...(19): siRNA sense strand
ggacaccgccuccucuguu

SEQ ID NO: 2127301 - RNA, 19 nt, Homo sapiens
  misc_RNA (1)...(19): siRNA sense strand
gaaagaggauuuuguguac

SEQ ID NO: 2127302 - RNA, 19 nt, Homo sapiens
  misc_RNA (1)...(19): siRNA sense strand
acugagaguuggucuaauu

SEQ ID NO: 2127303 - RNA, 19 nt, Homo sapiens
  misc_RNA (1)...(19): siRNA sense strand
gaaacagaaaccucagauu

SEQ ID NO: 2127304 - RNA, 19 nt, Homo sapiens
  misc_RNA (1)...(19): siRNA sense strand
gaggauucauugaggaaga

SEQ ID NO: 2127305 - RNA, 19 nt, Homo sapiens
  misc_RNA (1)...(19): siRNA sense strand
guuauuagauacugaacug

SEQ ID NO: 2127306 - RNA, 19 nt, Homo sapiens
  misc_RNA (1)...(19): siRNA sense strand
gaaggacaaaccugagaaa

SEQ ID NO: 2127307 - RNA, 19 nt, Homo sapiens
  misc_RNA (1)...(19): siRNA sense strand
gggaaagaucgaaguuuaa

SEQ ID NO: 2127308 - RNA, 19 nt, Homo sapiens
  misc_RNA (1)...(19): siRNA sense strand
acagaaaccucagauuugu

SEQ ID NO: 2127309 - RNA, 19 nt, Homo sapiens
  misc_RNA (1)...(19): siRNA sense strand
caugaaaccagaagaaaga

SEQ ID NO: 2127310 - RNA, 19 nt, Homo sapiens
  misc_RNA (1)...(19): siRNA sense strand
gaaagcaaggaaauaacaa

SEQ ID NO: 2127311 - RNA, 19 nt, Homo sapiens
  misc_RNA (1)...(19): siRNA sense strand
gucuaaaucucaugauguu

SEQ ID NO: 2127312 - RNA, 19 nt, Homo sapiens
  misc_RNA (1)...(19): siRNA sense strand
cuaaacaaccgauucauuc

SEQ ID NO: 2127313 - RNA, 19 nt, Homo sapiens
  misc_RNA (1)...(19): siRNA sense strand
augcagagauuaugaugaa

SEQ ID NO: 2127314 - RNA, 19 nt, Homo sapiens
  misc_RNA (1)...(19): siRNA sense strand
ggagaagacaccacagaau

SEQ ID NO: 2127315 - RNA, 19 nt, Homo sapiens
  misc_RNA (1)...(19): siRNA sense strand
caaauagaaugccaaaaga

SEQ ID NO: 2127316 - RNA, 19 nt, Homo sapiens
  misc_RNA (1)...(19): siRNA sense strand
aaagagcuaugagugguuu

SEQ ID NO: 2127317 - RNA, 19 nt, Homo sapiens
  misc_RNA (1)...(19): siRNA sense strand
cagagauuaugaugaaaga

SEQ ID NO: 2127318 - RNA, 19 nt, Homo sapiens
  misc_RNA (1)...(19): siRNA sense strand
caagcucaaugaacacuuc

SEQ ID NO: 2127319 - RNA, 19 nt, Homo sapiens
  misc_RNA (1)...(19): siRNA sense strand
gcugcacgguuagguauuu

SEQ ID NO: 2127320 - RNA, 19 nt, Homo sapiens
  misc_RNA (1)...(19): siRNA sense strand
gaacuaccuuccacuuuug

SEQ ID NO: 2127321 - RNA, 19 nt, Homo sapiens
  misc_RNA (1)...(19): siRNA sense strand
gaagauugccagauauuuu

SEQ ID NO: 2127322 - RNA, 19 nt, Homo sapiens
  misc_RNA (1)...(19): siRNA sense strand
aagaggcgaugcagagauu

SEQ ID NO: 2127323 - RNA, 19 nt, Homo sapiens
  misc_RNA (1)...(19): siRNA sense strand
caguaaagccugagccaaa

SEQ ID NO: 2127324 - RNA, 19 nt, Homo sapiens
  misc_RNA (1)...(19): siRNA sense strand
auaccaagaccaccuauaa

SEQ ID NO: 2127325 - RNA, 19 nt, Homo sapiens
  misc_RNA (1)...(19): siRNA sense strand
caagugcagugcccaaucu

SEQ ID NO: 2127326 - RNA, 19 nt, Homo sapiens
  misc_RNA (1)...(19): siRNA sense strand
aaacaugaaaccagaagaa

SEQ ID NO: 2127327 - RNA, 19 nt, Homo sapiens
  misc_RNA (1)...(19): siRNA sense strand
ucaggugcauauguucuua

SEQ ID NO: 2127328 - RNA, 19 nt, Homo sapiens
  misc_RNA (1)...(19): siRNA sense strand
gagcaaaccacagacauca

SEQ ID NO: 2127329 - RNA, 19 nt, Homo sapiens
  misc_RNA (1)...(19): siRNA sense strand
ggauguggaugcccucaag

SEQ ID NO: 2127330 - RNA, 19 nt, Homo sapiens
  misc_RNA (1)...(19): siRNA sense strand
ugaugacgaugaagaugaa

SEQ ID NO: 2127331 - RNA, 19 nt, Homo sapiens
  misc_RNA (1)...(19): siRNA sense strand
aaacggaggcccagaagga

SEQ ID NO: 2127332 - RNA, 19 nt, Homo sapiens
  misc_RNA (1)...(19): siRNA sense strand
ggucgaaaccuaccaccaa

SEQ ID NO: 2127333 - RNA, 19 nt, Homo sapiens
  misc_RNA (1)...(19): siRNA sense strand
gaaagaucgaaguuuaaga

SEQ ID NO: 2127334 - RNA, 19 nt, Homo sapiens
  misc_RNA (1)...(19): siRNA sense strand
cagaagaaagagcaaauau

SEQ ID NO: 2127335 - RNA, 19 nt, Homo sapiens
  misc_RNA (1)...(19): siRNA sense strand
cgaaagaaucaguauacaa

SEQ ID NO: 2127336 - RNA, 19 nt, Homo sapiens
  misc_RNA (1)...(19): siRNA sense strand
gaauguuaaugccuccaau

SEQ ID NO: 2127337 - RNA, 19 nt, Homo sapiens
  misc_RNA (1)...(19): siRNA sense strand
ggaaagaucgaaguuuaag

SEQ ID NO: 2127338 - RNA, 19 nt, Homo sapiens
  misc_RNA (1)...(19): siRNA sense strand
gacaggaaguguuagaaaa

SEQ ID NO: 2127339 - RNA, 19 nt, Homo sapiens
  misc_RNA (1)...(19): siRNA sense strand
ucacauuuguugaaucagu

SEQ ID NO: 2127340 - RNA, 19 nt, Homo sapiens
  misc_RNA (1)...(19): siRNA sense strand
uaaccagaguaguucuuga

SEQ ID NO: 2127341 - RNA, 19 nt, Homo sapiens
  misc_RNA (1)...(19): siRNA sense strand
caagagcugcuaacauugu

SEQ ID NO: 2127342 - RNA, 19 nt, Homo sapiens
  misc_RNA (1)...(19): siRNA sense strand
gaaaugauccccuaguugu

SEQ ID NO: 2127343 - RNA, 19 nt, Homo sapiens
  misc_RNA (1)...(19): siRNA sense strand
gucgaaaccuaccaccaaa

SEQ ID NO: 2127344 - RNA, 19 nt, Homo sapiens
  misc_RNA (1)...(19): siRNA sense strand
gagaguuggucuaauuacu

SEQ ID NO: 2127345 - RNA, 19 nt, Homo sapiens
  misc_RNA (1)...(19): siRNA sense strand
cuuaagagcuccuauaaug

SEQ ID NO: 2127346 - RNA, 19 nt, Homo sapiens
  misc_RNA (1)...(19): siRNA sense strand
gaacugaagggcucaauga

SEQ ID NO: 2127347 - RNA, 19 nt, Homo sapiens
  misc_RNA (1)...(19): siRNA sense strand
gagaugggcuccagaguca

SEQ ID NO: 2127348 - RNA, 19 nt, Homo sapiens
  misc_RNA (1)...(19): siRNA sense strand
aagagaagcuggagaaaga

SEQ ID NO: 2127349 - RNA, 19 nt, Homo sapiens
  misc_RNA (1)...(19): siRNA sense strand
gaagugagcaagccaguug

SEQ ID NO: 2127350 - RNA, 19 nt, Homo sapiens
  misc_RNA (1)...(19): siRNA sense strand
caagaucacccguaucauu

SEQ ID NO: 2127351 - RNA, 19 nt, Homo sapiens
  misc_RNA (1)...(19): siRNA sense strand
ggauugaccuggagcugaa

SEQ ID NO: 2127352 - RNA, 19 nt, Homo sapiens
  misc_RNA (1)...(19): siRNA sense strand
cggaggcgcugcacuauga

SEQ ID NO: 2127353 - RNA, 19 nt, Homo sapiens
  misc_RNA (1)...(19): siRNA sense strand
gcgcaacuccuuccuauau

SEQ ID NO: 2127354 - RNA, 19 nt, Homo sapiens
  misc_RNA (1)...(19): siRNA sense strand
acaagaggcugucccaaga

SEQ ID NO: 2127355 - RNA, 19 nt, Homo sapiens
  misc_RNA (1)...(19): siRNA sense strand
gcaagauccugccagaauc

SEQ ID NO: 2127356 - RNA, 19 nt, Homo sapiens
  misc_RNA (1)...(19): siRNA sense strand
agaagacacuggccgauga

SEQ ID NO: 2127357 - RNA, 19 nt, Homo sapiens
  misc_RNA (1)...(19): siRNA sense strand
gcaagucgccugaguacau

SEQ ID NO: 2127358 - RNA, 19 nt, Homo sapiens
  misc_RNA (1)...(19): siRNA sense strand
gauuguggauggcuacuau

SEQ ID NO: 2127359 - RNA, 19 nt, Homo sapiens
  misc_RNA (1)...(19): siRNA sense strand
gggcgcaacuccuuccuau

SEQ ID NO: 2127360 - RNA, 19 nt, Homo sapiens
  misc_RNA (1)...(19): siRNA sense strand
uaaugacucugacgcaaug

SEQ ID NO: 2127361 - RNA, 19 nt, Homo sapiens
  misc_RNA (1)...(19): siRNA sense strand
gcaacacucuguauuucca

SEQ ID NO: 2127362 - RNA, 19 nt, Homo sapiens
  misc_RNA (1)...(19): siRNA sense strand
gccaaggaaugggaaauga

SEQ ID NO: 2127363 - RNA, 19 nt, Homo sapiens
  misc_RNA (1)...(19): siRNA sense strand
uacaucagcucccacaaug

SEQ ID NO: 2127364 - RNA, 19 nt, Homo sapiens
  misc_RNA (1)...(19): siRNA sense strand
gaagggugcuacagaaagc

SEQ ID NO: 2127365 - RNA, 19 nt, Homo sapiens
  misc_RNA (1)...(19): siRNA sense strand
gaggagcccauccaucgua

SEQ ID NO: 2127366 - RNA, 19 nt, Homo sapiens
  misc_RNA (1)...(19): siRNA sense strand
gaugauguuccuuaugaaa

SEQ ID NO: 2127367 - RNA, 19 nt, Homo sapiens
  misc_RNA (1)...(19): siRNA sense strand
gugcaacacucuguauuuc

SEQ ID NO: 2127368 - RNA, 19 nt, Homo sapiens
  misc_RNA (1)...(19): siRNA sense strand
caucguagccuccaaccaa

SEQ ID NO: 2127369 - RNA, 19 nt, Homo sapiens
  misc_RNA (1)...(19): siRNA sense strand
gagaagcagaccucagauu

SEQ ID NO: 2127370 - RNA, 19 nt, Homo sapiens
  misc_RNA (1)...(19): siRNA sense strand
gaagagggaacugaaggaa

SEQ ID NO: 2127371 - RNA, 19 nt, Homo sapiens
  misc_RNA (1)...(19): siRNA sense strand
gaaccgagccgaggaggau

SEQ ID NO: 2127372 - RNA, 19 nt, Homo sapiens
  misc_RNA (1)...(19): siRNA sense strand
augaugauguuccuuauga

SEQ ID NO: 2127373 - RNA, 19 nt, Homo sapiens
  misc_RNA (1)...(19): siRNA sense strand
uugaagaauuugacuguga

SEQ ID NO: 2127374 - RNA, 19 nt, Homo sapiens
  misc_RNA (1)...(19): siRNA sense strand
caaggaagggugcuacaga

SEQ ID NO: 2127375 - RNA, 19 nt, Homo sapiens
  misc_RNA (1)...(19): siRNA sense strand
gaccugugaucacggcaaa

SEQ ID NO: 2127376 - RNA, 19 nt, Homo sapiens
  misc_RNA (1)...(19): siRNA sense strand
guacaucagcucccacaau

SEQ ID NO: 2127377 - RNA, 19 nt, Homo sapiens
  misc_RNA (1)...(19): siRNA sense strand
gcacugagacaggagaaga

SEQ ID NO: 2127378 - RNA, 19 nt, Homo sapiens
  misc_RNA (1)...(19): siRNA sense strand
ggcaggagguggccaucuu

SEQ ID NO: 2127379 - RNA, 19 nt, Homo sapiens
  misc_RNA (1)...(19): siRNA sense strand
gugagggaaugcaggauau

SEQ ID NO: 2127380 - RNA, 19 nt, Homo sapiens
  misc_RNA (1)...(19): siRNA sense strand
gcccugagcuagccaagag

SEQ ID NO: 2127381 - RNA, 19 nt, Homo sapiens
  misc_RNA (1)...(19): siRNA sense strand
ggagguacuugguagaaaa

SEQ ID NO: 2127382 - RNA, 19 nt, Homo sapiens
  misc_RNA (1)...(19): siRNA sense strand
cuggauaccugcagcauca

SEQ ID NO: 2127383 - RNA, 19 nt, Homo sapiens
  misc_RNA (1)...(19): siRNA sense strand
gaucggcagccacaucuga

SEQ ID NO: 2127384 - RNA, 19 nt, Homo sapiens
  misc_RNA (1)...(19): siRNA sense strand
gaagcuggagaaagagaaa

SEQ ID NO: 2127385 - RNA, 19 nt, Homo sapiens
  misc_RNA (1)...(19): siRNA sense strand
aaggaagggugcuacagaa

SEQ ID NO: 2127386 - RNA, 19 nt, Homo sapiens
  misc_RNA (1)...(19): siRNA sense strand
gaaagagaaagagacgauu

SEQ ID NO: 2127387 - RNA, 19 nt, Homo sapiens
  misc_RNA (1)...(19): siRNA sense strand
ggugagggaaugcaggaua

SEQ ID NO: 2127388 - RNA, 19 nt, Homo sapiens
  misc_RNA (1)...(19): siRNA sense strand
gcaacuccuuccuauaugc

SEQ ID NO: 2127389 - RNA, 19 nt, Homo sapiens
  misc_RNA (1)...(19): siRNA sense strand
gaagagcagccuggcagaa

SEQ ID NO: 2127390 - RNA, 19 nt, Homo sapiens
  misc_RNA (1)...(19): siRNA sense strand
auuaaaggcucuggaagaa

SEQ ID NO: 2127391 - RNA, 19 nt, Homo sapiens
  misc_RNA (1)...(19): siRNA sense strand
gaaggucauccgagaagug

SEQ ID NO: 2127392 - RNA, 19 nt, Homo sapiens
  misc_RNA (1)...(19): siRNA sense strand
gaaugggaaaugaagaaga

SEQ ID NO: 2127393 - RNA, 19 nt, Homo sapiens
  misc_RNA (1)...(19): siRNA sense strand
ucuaugaugauguuccuua

SEQ ID NO: 2127394 - RNA, 19 nt, Homo sapiens
  misc_RNA (1)...(19): siRNA sense strand
ccgagucuaugaugauguu

SEQ ID NO: 2127395 - RNA, 19 nt, Homo sapiens
  misc_RNA (1)...(19): siRNA sense strand
gaagcagaccucagauucu

SEQ ID NO: 2127396 - RNA, 19 nt, Homo sapiens
  misc_RNA (1)...(19): siRNA sense strand
ucuccuaccuguaugugaa

SEQ ID NO: 2127397 - RNA, 19 nt, Homo sapiens
  misc_RNA (1)...(19): siRNA sense strand
ggaagggugcuacagaaag

SEQ ID NO: 2127398 - RNA, 19 nt, Homo sapiens
  misc_RNA (1)...(19): siRNA sense strand
gcacuaugacuacguggau

SEQ ID NO: 2127399 - RNA, 19 nt, Homo sapiens
  misc_RNA (1)...(19): siRNA sense strand
caagagcccacgccugaga

SEQ ID NO: 2127400 - RNA, 19 nt, Homo sapiens
  misc_RNA (1)...(19): siRNA sense strand
gaccagcuccuguguuaca

SEQ ID NO: 2127401 - RNA, 19 nt, Homo sapiens
  misc_RNA (1)...(19): siRNA sense strand
gugccaaucaauacaagua

SEQ ID NO: 2127402 - RNA, 19 nt, Homo sapiens
  misc_RNA (1)...(19): siRNA sense strand
gaacugaaggaagccauuc

SEQ ID NO: 2127403 - RNA, 19 nt, Homo sapiens
  misc_RNA (1)...(19): siRNA sense strand
ccuaugaguccuacgauga

SEQ ID NO: 2127404 - RNA, 19 nt, Homo sapiens
  misc_RNA (1)...(19): siRNA sense strand
gggaaaugaagaagaccua

SEQ ID NO: 2127405 - RNA, 19 nt, Homo sapiens
  misc_RNA (1)...(19): siRNA sense strand
gcuccuauaaugacucuga

SEQ ID NO: 2127406 - RNA, 19 nt, Homo sapiens
  misc_RNA (1)...(19): siRNA sense strand
aagagaagcagaccucaga

SEQ ID NO: 2127407 - RNA, 19 nt, Homo sapiens
  misc_RNA (1)...(19): siRNA sense strand
gggugugggugacaacugu

SEQ ID NO: 2127408 - RNA, 19 nt, Homo sapiens
  misc_RNA (1)...(19): siRNA sense strand
gcaaauaaaccccagaaca

SEQ ID NO: 2127409 - RNA, 19 nt, Homo sapiens
  misc_RNA (1)...(19): siRNA sense strand
aagaucacccguaucauug

SEQ ID NO: 2127410 - RNA, 19 nt, Homo sapiens
  misc_RNA (1)...(19): siRNA sense strand
gccgcaagaucacccguau

SEQ ID NO: 2127411 - RNA, 19 nt, Homo sapiens
  misc_RNA (1)...(19): siRNA sense strand
gaccugcgaacccauguga

SEQ ID NO: 2127412 - RNA, 19 nt, Homo sapiens
  misc_RNA (1)...(19): siRNA sense strand
gagcaaccucucccuguca

SEQ ID NO: 2127413 - RNA, 19 nt, Homo sapiens
  misc_RNA (1)...(19): siRNA sense strand
ggacaugccagaggaugau

SEQ ID NO: 2127414 - RNA, 19 nt, Homo sapiens
  misc_RNA (1)...(19): siRNA sense strand
ggaacugaaggaagccauu

SEQ ID NO: 2127415 - RNA, 19 nt, Homo sapiens
  misc_RNA (1)...(19): siRNA sense strand
gcaggagguggccaucuug

SEQ ID NO: 2127416 - RNA, 19 nt, Homo sapiens
  misc_RNA (1)...(19): siRNA sense strand
uuaagagcuccuauaauga

SEQ ID NO: 2127417 - RNA, 19 nt, Homo sapiens
  misc_RNA (1)...(19): siRNA sense strand
ccaaggaaugggaaaugaa

SEQ ID NO: 2127418 - RNA, 19 nt, Homo sapiens
  misc_RNA (1)...(19): siRNA sense strand
gagaagcuggagaaagaga

SEQ ID NO: 2127419 - RNA, 19 nt, Homo sapiens
  misc_RNA (1)...(19): siRNA sense strand
caagauccugccagaauca

SEQ ID NO: 2127420 - RNA, 19 nt, Homo sapiens
  misc_RNA (1)...(19): siRNA sense strand
caagucgccugaguacauc

SEQ ID NO: 2127421 - RNA, 19 nt, Homo sapiens
  misc_RNA (1)...(19): siRNA sense strand
agaagcagaccucagauuc

SEQ ID NO: 2127422 - RNA, 19 nt, Homo sapiens
  misc_RNA (1)...(19): siRNA sense strand
gagcuccuauaaugacucu

SEQ ID NO: 2127423 - RNA, 19 nt, Homo sapiens
  misc_RNA (1)...(19): siRNA sense strand
caaggaaugggaaaugaag

SEQ ID NO: 2127424 - RNA, 19 nt, Homo sapiens
  misc_RNA (1)...(19): siRNA sense strand
cguggaaucccucuuugaa

SEQ ID NO: 2127425 - RNA, 19 nt, Homo sapiens
  misc_RNA (1)...(19): siRNA sense strand
uaagagcuccuauaaugac

SEQ ID NO: 2127426 - RNA, 19 nt, Homo sapiens
  misc_RNA (1)...(19): siRNA sense strand
ggagaagagggaacugaag

SEQ ID NO: 2127427 - RNA, 19 nt, Homo sapiens
  misc_RNA (1)...(19): siRNA sense strand
cgcaagaucacccguauca

SEQ ID NO: 2127428 - RNA, 19 nt, Homo sapiens
  misc_RNA (1)...(19): siRNA sense strand
aagaggcugucccaagaga

SEQ ID NO: 2127429 - RNA, 19 nt, Homo sapiens
  misc_RNA (1)...(19): siRNA sense strand
gcaaguuggaccuggacaa

SEQ ID NO: 2127430 - RNA, 19 nt, Homo sapiens
  misc_RNA (1)...(19): siRNA sense strand
gggcccagcuucguggaau

SEQ ID NO: 2127431 - RNA, 19 nt, Homo sapiens
  misc_RNA (1)...(19): siRNA sense strand
ggaagaggagcccauccau

SEQ ID NO: 2127432 - RNA, 19 nt, Homo sapiens
  misc_RNA (1)...(19): siRNA sense strand
aauuaaaggcucuggaaga

SEQ ID NO: 2127433 - RNA, 19 nt, Homo sapiens
  misc_RNA (1)...(19): siRNA sense strand
aaagagaaagagacgauuc

SEQ ID NO: 2127434 - RNA, 19 nt, Homo sapiens
  misc_RNA (1)...(19): siRNA sense strand
cggagguacuugguagaaa

SEQ ID NO: 2127435 - RNA, 19 nt, Homo sapiens
  misc_RNA (1)...(19): siRNA sense strand
ucaucuacgugcccaagga

SEQ ID NO: 2127436 - RNA, 19 nt, Homo sapiens
  misc_RNA (1)...(19): siRNA sense strand
ccugaggacuacuaugaag

SEQ ID NO: 2127437 - RNA, 19 nt, Homo sapiens
  misc_RNA (1)...(19): siRNA sense strand
cuacagaaagccaaggaau

SEQ ID NO: 2127438 - RNA, 19 nt, Homo sapiens
  misc_RNA (1)...(19): siRNA sense strand
aagagacgauucggacaga

SEQ ID NO: 2127439 - RNA, 19 nt, Homo sapiens
  misc_RNA (1)...(19): siRNA sense strand
cuaugaugauguuccuuau

SEQ ID NO: 2127440 - RNA, 19 nt, Homo sapiens
  misc_RNA (1)...(19): siRNA sense strand
cgacacccauuugccuuca

SEQ ID NO: 2127441 - RNA, 19 nt, Homo sapiens
  misc_RNA (1)...(19): siRNA sense strand
aaggacagccggcacaaga

SEQ ID NO: 2127442 - RNA, 19 nt, Homo sapiens
  misc_RNA (1)...(19): siRNA sense strand
ugaugauguuccuuaugaa

SEQ ID NO: 2127443 - RNA, 19 nt, Homo sapiens
  misc_RNA (1)...(19): siRNA sense strand
ugagugaccuucgggacau

SEQ ID NO: 2127444 - RNA, 19 nt, Homo sapiens
  misc_RNA (1)...(19): siRNA sense strand
agaaagagaaagagacgau

SEQ ID NO: 2127445 - RNA, 19 nt, Homo sapiens
  misc_RNA (1)...(19): siRNA sense strand
gaagaugccucccaaggaa

SEQ ID NO: 2127446 - RNA, 19 nt, Homo sapiens
  misc_RNA (1)...(19): siRNA sense strand
ggagaaacuuugaaugaaa

SEQ ID NO: 2127447 - RNA, 19 nt, Homo sapiens
  misc_RNA (1)...(19): siRNA sense strand
ugacagagauggauucuug

SEQ ID NO: 2127448 - RNA, 19 nt, Homo sapiens
  misc_RNA (1)...(19): siRNA sense strand
gcaaugaccucuccacauc

SEQ ID NO: 2127449 - RNA, 19 nt, Homo sapiens
  misc_RNA (1)...(19): siRNA sense strand
gcaaagcccagaugaauuc

SEQ ID NO: 2127450 - RNA, 19 nt, Homo sapiens
  misc_RNA (1)...(19): siRNA sense strand
uggcaaaggugacaaagaa

SEQ ID NO: 2127451 - RNA, 19 nt, Homo sapiens
  misc_RNA (1)...(19): siRNA sense strand
gaaacuguagucguuauua

SEQ ID NO: 2127452 - RNA, 19 nt, Homo sapiens
  misc_RNA (1)...(19): siRNA sense strand
gguccugccugaucacuuu

SEQ ID NO: 2127453 - RNA, 19 nt, Homo sapiens
  misc_RNA (1)...(19): siRNA sense strand
ccagaucgguuuccugaga

SEQ ID NO: 2127454 - RNA, 19 nt, Homo sapiens
  misc_RNA (1)...(19): siRNA sense strand
gacaagaucuggucaagcu

SEQ ID NO: 2127455 - RNA, 19 nt, Homo sapiens
  misc_RNA (1)...(19): siRNA sense strand
cuaaugaucuagccaagga

SEQ ID NO: 2127456 - RNA, 19 nt, Homo sapiens
  misc_RNA (1)...(19): siRNA sense strand
caucuuucaucaaccaaua

SEQ ID NO: 2127457 - RNA, 19 nt, Homo sapiens
  misc_RNA (1)...(19): siRNA sense strand
aggaggagcuggagaaaug

SEQ ID NO: 2127458 - RNA, 19 nt, Homo sapiens
  misc_RNA (1)...(19): siRNA sense strand
agacacggcuaaugaucua

SEQ ID NO: 2127459 - RNA, 19 nt, Homo sapiens
  misc_RNA (1)...(19): siRNA sense strand
aagaaaagcucucaauuga

SEQ ID NO: 2127460 - RNA, 19 nt, Homo sapiens
  misc_RNA (1)...(19): siRNA sense strand
caaggaagcgacacaagaa

SEQ ID NO: 2127461 - RNA, 19 nt, Homo sapiens
  misc_RNA (1)...(19): siRNA sense strand
aaagauacaccuccagauu

SEQ ID NO: 2127462 - RNA, 19 nt, Homo sapiens
  misc_RNA (1)...(19): siRNA sense strand
ggauucuuguuccguuaua

SEQ ID NO: 2127463 - RNA, 19 nt, Homo sapiens
  misc_RNA (1)...(19): siRNA sense strand
ucacuaagcagcagcagaa

SEQ ID NO: 2127464 - RNA, 19 nt, Homo sapiens
  misc_RNA (1)...(19): siRNA sense strand
agagagacacggcuaauga

SEQ ID NO: 2127465 - RNA, 19 nt, Homo sapiens
  misc_RNA (1)...(19): siRNA sense strand
gacagcaucuuucaucaac

SEQ ID NO: 2127466 - RNA, 19 nt, Homo sapiens
  misc_RNA (1)...(19): siRNA sense strand
uggagaaacuuugaaugaa

SEQ ID NO: 2127467 - RNA, 19 nt, Homo sapiens
  misc_RNA (1)...(19): siRNA sense strand
caagcuacacugaauaugu

SEQ ID NO: 2127468 - RNA, 19 nt, Homo sapiens
  misc_RNA (1)...(19): siRNA sense strand
ccaaggaagcgacacaaga

SEQ ID NO: 2127469 - RNA, 19 nt, Homo sapiens
  misc_RNA (1)...(19): siRNA sense strand
caaagagagacacggcuaa

SEQ ID NO: 2127470 - RNA, 19 nt, Homo sapiens
  misc_RNA (1)...(19): siRNA sense strand
ggucaagcuacacugaaua

SEQ ID NO: 2127471 - RNA, 19 nt, Homo sapiens
  misc_RNA (1)...(19): siRNA sense strand
cuaagcagcagcagaagaa

SEQ ID NO: 2127472 - RNA, 19 nt, Homo sapiens
  misc_RNA (1)...(19): siRNA sense strand
aagauacaccuccagauuu

SEQ ID NO: 2127473 - RNA, 19 nt, Homo sapiens
  misc_RNA (1)...(19): siRNA sense strand
guuauauucuggacuaucu

SEQ ID NO: 2127474 - RNA, 19 nt, Homo sapiens
  misc_RNA (1)...(19): siRNA sense strand
caauggcucugaguggaaa

SEQ ID NO: 2127475 - RNA, 19 nt, Homo sapiens
  misc_RNA (1)...(19): siRNA sense strand
gaaagauacaccuccagau

SEQ ID NO: 2127476 - RNA, 19 nt, Homo sapiens
  misc_RNA (1)...(19): siRNA sense strand
gaauggcaaaggugacaaa

SEQ ID NO: 2127477 - RNA, 19 nt, Homo sapiens
  misc_RNA (1)...(19): siRNA sense strand
ugauaagcaucccucauuc

SEQ ID NO: 2127478 - RNA, 19 nt, Homo sapiens
  misc_RNA (1)...(19): siRNA sense strand
aguggaaacuguagucguu

SEQ ID NO: 2127479 - RNA, 19 nt, Homo sapiens
  misc_RNA (1)...(19): siRNA sense strand
caaauucaagcaccuggaa

SEQ ID NO: 2127480 - RNA, 19 nt, Homo sapiens
  misc_RNA (1)...(19): siRNA sense strand
gaaagcagagacccugauc

SEQ ID NO: 2127481 - RNA, 19 nt, Homo sapiens
  misc_RNA (1)...(19): siRNA sense strand
ccacagugacuuugaagau

SEQ ID NO: 2127482 - RNA, 19 nt, Homo sapiens
  misc_RNA (1)...(19): siRNA sense strand
ccgaugaaaucaagcaaag

SEQ ID NO: 2127483 - RNA, 19 nt, Homo sapiens
  misc_RNA (1)...(19): siRNA sense strand
ggaaacuguagucguuauu

SEQ ID NO: 2127484 - RNA, 19 nt, Homo sapiens
  misc_RNA (1)...(19): siRNA sense strand
aaugaccucuccacaucua

SEQ ID NO: 2127485 - RNA, 19 nt, Homo sapiens
  misc_RNA (1)...(19): siRNA sense strand
gcucugaguggaaacugua

SEQ ID NO: 2127486 - RNA, 19 nt, Homo sapiens
  misc_RNA (1)...(19): siRNA sense strand
aaagggaagcugaauacuu

SEQ ID NO: 2127487 - RNA, 19 nt, Homo sapiens
  misc_RNA (1)...(19): siRNA sense strand
aaacauccuuggcaaucug

SEQ ID NO: 2127488 - RNA, 19 nt, Homo sapiens
  misc_RNA (1)...(19): siRNA sense strand
ggacuccaagggaagguuu

SEQ ID NO: 2127489 - RNA, 19 nt, Homo sapiens
  misc_RNA (1)...(19): siRNA sense strand
ggugacagcaucuuucauc

SEQ ID NO: 2127490 - RNA, 19 nt, Homo sapiens
  misc_RNA (1)...(19): siRNA sense strand
ggaagcgacacaagaaucu

SEQ ID NO: 2127491 - RNA, 19 nt, Homo sapiens
  misc_RNA (1)...(19): siRNA sense strand
gaaaagggaagcugaauac

SEQ ID NO: 2127492 - RNA, 19 nt, Homo sapiens
  misc_RNA (1)...(19): siRNA sense strand
aagcaaagcccagaugaau

SEQ ID NO: 2127493 - RNA, 19 nt, Homo sapiens
  misc_RNA (1)...(19): siRNA sense strand
caagcaaagcccagaugaa

SEQ ID NO: 2127494 - RNA, 19 nt, Homo sapiens
  misc_RNA (1)...(19): siRNA sense strand
cacagugacuuugaagaug

SEQ ID NO: 2127495 - RNA, 19 nt, Homo sapiens
  misc_RNA (1)...(19): siRNA sense strand
aagcuacacugaauauguc

SEQ ID NO: 2127496 - RNA, 19 nt, Homo sapiens
  misc_RNA (1)...(19): siRNA sense strand
caaccaauauacagaugac

SEQ ID NO: 2127497 - RNA, 19 nt, Homo sapiens
  misc_RNA (1)...(19): siRNA sense strand
ugaagaugccucccaagga

SEQ ID NO: 2127498 - RNA, 19 nt, Homo sapiens
  misc_RNA (1)...(19): siRNA sense strand
caugguggccuguaacuca

SEQ ID NO: 2127499 - RNA, 19 nt, Homo sapiens
  misc_RNA (1)...(19): siRNA sense strand
uugauaagcaucccucauu

SEQ ID NO: 2127500 - RNA, 19 nt, Homo sapiens
  misc_RNA (1)...(19): siRNA sense strand
gaggagcuggagaaaugua

SEQ ID NO: 2127501 - RNA, 19 nt, Homo sapiens
  misc_RNA (1)...(19): siRNA sense strand
aaagaaaagcucucaauug

SEQ ID NO: 2127502 - RNA, 19 nt, Homo sapiens
  misc_RNA (1)...(19): siRNA sense strand
gauccaacagucagagaug

SEQ ID NO: 2127503 - RNA, 19 nt, Homo sapiens
  misc_RNA (1)...(19): siRNA sense strand
gugacagcaucuuucauca

SEQ ID NO: 2127504 - RNA, 19 nt, Homo sapiens
  misc_RNA (1)...(19): siRNA sense strand
cagaagaaagggacaaugg

SEQ ID NO: 2127505 - RNA, 19 nt, Homo sapiens
  misc_RNA (1)...(19): siRNA sense strand
uuggagaaacuuugaauga

SEQ ID NO: 2127506 - RNA, 19 nt, Homo sapiens
  misc_RNA (1)...(19): siRNA sense strand
gagagacacggcuaaugau

SEQ ID NO: 2127507 - RNA, 19 nt, Homo sapiens
  misc_RNA (1)...(19): siRNA sense strand
uccguuauauucuggacua

SEQ ID NO: 2127508 - RNA, 19 nt, Homo sapiens
  misc_RNA (1)...(19): siRNA sense strand
auauacagaugacaagauc

SEQ ID NO: 2127509 - RNA, 19 nt, Homo sapiens
  misc_RNA (1)...(19): siRNA sense strand
cagcaucuuucaucaacca

SEQ ID NO: 2127510 - RNA, 19 nt, Homo sapiens
  misc_RNA (1)...(19): siRNA sense strand
agauacaccuccagauuuu

SEQ ID NO: 2127511 - RNA, 19 nt, Homo sapiens
  misc_RNA (1)...(19): siRNA sense strand
uggaaacuguagucguuau

SEQ ID NO: 2127512 - RNA, 19 nt, Homo sapiens
  misc_RNA (1)...(19): siRNA sense strand
gaaaacauccuuggcaauc

SEQ ID NO: 2127513 - RNA, 19 nt, Homo sapiens
  misc_RNA (1)...(19): siRNA sense strand
agaccaacauccagacucu

SEQ ID NO: 2127514 - RNA, 19 nt, Homo sapiens
  misc_RNA (1)...(19): siRNA sense strand
ucaagcaaagcccagauga

SEQ ID NO: 2127515 - RNA, 19 nt, Homo sapiens
  misc_RNA (1)...(19): siRNA sense strand
gacuuacuccggacucuga

SEQ ID NO: 2127516 - RNA, 19 nt, Homo sapiens
  misc_RNA (1)...(19): siRNA sense strand
gagacacggcuaaugaucu

SEQ ID NO: 2127517 - RNA, 19 nt, Homo sapiens
  misc_RNA (1)...(19): siRNA sense strand
uccagggaaucgaacauga

SEQ ID NO: 2127518 - RNA, 19 nt, Homo sapiens
  misc_RNA (1)...(19): siRNA sense strand
caucuguggucccgugaca

SEQ ID NO: 2127519 - RNA, 19 nt, Homo sapiens
  misc_RNA (1)...(19): siRNA sense strand
gagcggcacgucuugcaau

SEQ ID NO: 2127520 - RNA, 19 nt, Homo sapiens
  misc_RNA (1)...(19): siRNA sense strand
uuugauauguugucagagu

SEQ ID NO: 2127521 - RNA, 19 nt, Homo sapiens
  misc_RNA (1)...(19): siRNA sense strand
gcagaagaaagggacaaug

SEQ ID NO: 2127522 - RNA, 19 nt, Homo sapiens
  misc_RNA (1)...(19): siRNA sense strand
ugacagcaucuuucaucaa

SEQ ID NO: 2127523 - RNA, 19 nt, Homo sapiens
  misc_RNA (1)...(19): siRNA sense strand
uuauuauccucgagaacaa

SEQ ID NO: 2127524 - RNA, 19 nt, Homo sapiens
  misc_RNA (1)...(19): siRNA sense strand
acacugaauaugucuucua

SEQ ID NO: 2127525 - RNA, 19 nt, Homo sapiens
  misc_RNA (1)...(19): siRNA sense strand
guuauuauccucgagaaca

SEQ ID NO: 2127526 - RNA, 19 nt, Homo sapiens
  misc_RNA (1)...(19): siRNA sense strand
agaagucuuuggagaaacu

SEQ ID NO: 2127527 - RNA, 19 nt, Homo sapiens
  misc_RNA (1)...(19): siRNA sense strand
caucggugacagcaucuuu

SEQ ID NO: 2127528 - RNA, 19 nt, Homo sapiens
  misc_RNA (1)...(19): siRNA sense strand
gucaagcuacacugaauau

SEQ ID NO: 2127529 - RNA, 19 nt, Homo sapiens
  misc_RNA (1)...(19): siRNA sense strand
caaaauuccagaucgguuu

SEQ ID NO: 2127530 - RNA, 19 nt, Homo sapiens
  misc_RNA (1)...(19): siRNA sense strand
aaucgaacaugagcagcaa

SEQ ID NO: 2127531 - RNA, 19 nt, Homo sapiens
  misc_RNA (1)...(19): siRNA sense strand
ggucuccagcacucacuaa

SEQ ID NO: 2127532 - RNA, 19 nt, Homo sapiens
  misc_RNA (1)...(19): siRNA sense strand
uuggcaaucugaacuuuua

SEQ ID NO: 2127533 - RNA, 19 nt, Homo sapiens
  misc_RNA (1)...(19): siRNA sense strand
cugcaagaauggcaaaggu

SEQ ID NO: 2127534 - RNA, 19 nt, Homo sapiens
  misc_RNA (1)...(19): siRNA sense strand
caucaaccaauauacagau

SEQ ID NO: 2127535 - RNA, 19 nt, Homo sapiens
  misc_RNA (1)...(19): siRNA sense strand
aagcagagacccugaucga

SEQ ID NO: 2127536 - RNA, 19 nt, Homo sapiens
  misc_RNA (1)...(19): siRNA sense strand
cuccagcacucacuaagca

SEQ ID NO: 2127537 - RNA, 19 nt, Homo sapiens
  misc_RNA (1)...(19): siRNA sense strand
gauucuuguuccguuauau

SEQ ID NO: 2127538 - RNA, 19 nt, Homo sapiens
  misc_RNA (1)...(19): siRNA sense strand
cgccauuccacauugauaa

SEQ ID NO: 2127539 - RNA, 19 nt, Homo sapiens
  misc_RNA (1)...(19): siRNA sense strand
cacugaauaugucuucuac

SEQ ID NO: 2127540 - RNA, 19 nt, Homo sapiens
  misc_RNA (1)...(19): siRNA sense strand
ggauuuccuuggcaaaaga

SEQ ID NO: 2127541 - RNA, 19 nt, Homo sapiens
  misc_RNA (1)...(19): siRNA sense strand
ccaauauacagaugacaag

SEQ ID NO: 2127542 - RNA, 19 nt, Homo sapiens
  misc_RNA (1)...(19): siRNA sense strand
ccaggagacggucaucugu

SEQ ID NO: 2127543 - RNA, 19 nt, Homo sapiens
  misc_RNA (1)...(19): siRNA sense strand
guggaaacuguagucguua

SEQ ID NO: 2127544 - RNA, 19 nt, Homo sapiens
  misc_RNA (1)...(19): siRNA sense strand
caauauacagaugacaaga

SEQ ID NO: 2127545 - RNA, 19 nt, Homo sapiens
  misc_RNA (1)...(19): siRNA sense strand
gcgccgagcuuauggaaca

SEQ ID NO: 2127546 - RNA, 19 nt, Homo sapiens
  misc_RNA (1)...(19): siRNA sense strand
gcagguggagucaggauca

SEQ ID NO: 2127547 - RNA, 19 nt, Homo sapiens
  misc_RNA (1)...(19): siRNA sense strand
gagcuuauggaacaucuuc

SEQ ID NO: 2127548 - RNA, 19 nt, Homo sapiens
  misc_RNA (1)...(19): siRNA sense strand
ucgaugagcccuugucaca

SEQ ID NO: 2127549 - RNA, 19 nt, Homo sapiens
  misc_RNA (1)...(19): siRNA sense strand
ccugggagccuucacuuca

SEQ ID NO: 2127550 - RNA, 19 nt, Homo sapiens
  misc_RNA (1)...(19): siRNA sense strand
ggagucaggaucaaaauag

SEQ ID NO: 2127551 - RNA, 19 nt, Homo sapiens
  misc_RNA (1)...(19): siRNA sense strand
gaaugaaccuugugaaguu

SEQ ID NO: 2127552 - RNA, 19 nt, Homo sapiens
  misc_RNA (1)...(19): siRNA sense strand
gaaaggagcacagcagaua

SEQ ID NO: 2127553 - RNA, 19 nt, Homo sapiens
  misc_RNA (1)...(19): siRNA sense strand
caaagaaacugagacagaa

SEQ ID NO: 2127554 - RNA, 19 nt, Homo sapiens
  misc_RNA (1)...(19): siRNA sense strand
gcaaugggacuuugacuug

SEQ ID NO: 2127555 - RNA, 19 nt, Homo sapiens
  misc_RNA (1)...(19): siRNA sense strand
gcauggaucugcuuaccuu

SEQ ID NO: 2127556 - RNA, 19 nt, Homo sapiens
  misc_RNA (1)...(19): siRNA sense strand
gacagaaaguggaaaugaa

SEQ ID NO: 2127557 - RNA, 19 nt, Homo sapiens
  misc_RNA (1)...(19): siRNA sense strand
gcuggaagcucaucaugug

SEQ ID NO: 2127558 - RNA, 19 nt, Homo sapiens
  misc_RNA (1)...(19): siRNA sense strand
ccagguguauuaucaaguu

SEQ ID NO: 2127559 - RNA, 19 nt, Homo sapiens
  misc_RNA (1)...(19): siRNA sense strand
ggucagccauucaagcuau

SEQ ID NO: 2127560 - RNA, 19 nt, Homo sapiens
  misc_RNA (1)...(19): siRNA sense strand
gagaaggucaguaauacaa

SEQ ID NO: 2127561 - RNA, 19 nt, Homo sapiens
  misc_RNA (1)...(19): siRNA sense strand
ccgcaagucugcaacugua

SEQ ID NO: 2127562 - RNA, 19 nt, Homo sapiens
  misc_RNA (1)...(19): siRNA sense strand
ggucugcgaugguggcaaa

SEQ ID NO: 2127563 - RNA, 19 nt, Homo sapiens
  misc_RNA (1)...(19): siRNA sense strand
gagaagacaaacaaagaaa

SEQ ID NO: 2127564 - RNA, 19 nt, Homo sapiens
  misc_RNA (1)...(19): siRNA sense strand
gaacaaagaaacaguagcu

SEQ ID NO: 2127565 - RNA, 19 nt, Homo sapiens
  misc_RNA (1)...(19): siRNA sense strand
gaacuucaccucggagaug

SEQ ID NO: 2127566 - RNA, 19 nt, Homo sapiens
  misc_RNA (1)...(19): siRNA sense strand
uaccuuaccguccaaguua

SEQ ID NO: 2127567 - RNA, 19 nt, Homo sapiens
  misc_RNA (1)...(19): siRNA sense strand
uaucaaguuuaccgaguuu

SEQ ID NO: 2127568 - RNA, 19 nt, Homo sapiens
  misc_RNA (1)...(19): siRNA sense strand
acaaagaaacugagacaga

SEQ ID NO: 2127569 - RNA, 19 nt, Homo sapiens
  misc_RNA (1)...(19): siRNA sense strand
gcaggcaccaugcuucuga

SEQ ID NO: 2127570 - RNA, 19 nt, Homo sapiens
  misc_RNA (1)...(19): siRNA sense strand
gaaggucaguaauacaacu

SEQ ID NO: 2127571 - RNA, 19 nt, Homo sapiens
  misc_RNA (1)...(19): siRNA sense strand
gaggauuucguauucaauu

SEQ ID NO: 2127572 - RNA, 19 nt, Homo sapiens
  misc_RNA (1)...(19): siRNA sense strand
ggaggugguauuaauauuc

SEQ ID NO: 2127573 - RNA, 19 nt, Homo sapiens
  misc_RNA (1)...(19): siRNA sense strand
acgccgacguguacucuua

SEQ ID NO: 2127574 - RNA, 19 nt, Homo sapiens
  misc_RNA (1)...(19): siRNA sense strand
gaagacaaacaaagaaacu

SEQ ID NO: 2127575 - RNA, 19 nt, Homo sapiens
  misc_RNA (1)...(19): siRNA sense strand
gcaagucugcaacuguaaa

SEQ ID NO: 2127576 - RNA, 19 nt, Homo sapiens
  misc_RNA (1)...(19): siRNA sense strand
aaaagaggauuucguauuc

SEQ ID NO: 2127577 - RNA, 19 nt, Homo sapiens
  misc_RNA (1)...(19): siRNA sense strand
gccauucaagcuauuauuu

SEQ ID NO: 2127578 - RNA, 19 nt, Homo sapiens
  misc_RNA (1)...(19): siRNA sense strand
gagaaugaaccuugugaag

SEQ ID NO: 2127579 - RNA, 19 nt, Homo sapiens
  misc_RNA (1)...(19): siRNA sense strand
aaugaaccuugugaaguua

SEQ ID NO: 2127580 - RNA, 19 nt, Homo sapiens
  misc_RNA (1)...(19): siRNA sense strand
acagaaaguggaaaugaaa

SEQ ID NO: 2127581 - RNA, 19 nt, Homo sapiens
  misc_RNA (1)...(19): siRNA sense strand
aaacaaagaaacugagaca

SEQ ID NO: 2127582 - RNA, 19 nt, Homo sapiens
  misc_RNA (1)...(19): siRNA sense strand
uguagucgcugagaaugaa

SEQ ID NO: 2127583 - RNA, 19 nt, Homo sapiens
  misc_RNA (1)...(19): siRNA sense strand
ccagugauccugaacaaag

SEQ ID NO: 2127584 - RNA, 19 nt, Homo sapiens
  misc_RNA (1)...(19): siRNA sense strand
agacagaaaguggaaauga

SEQ ID NO: 2127585 - RNA, 19 nt, Homo sapiens
  misc_RNA (1)...(19): siRNA sense strand
agacaaacaaagaaacuga

SEQ ID NO: 2127586 - RNA, 19 nt, Homo sapiens
  misc_RNA (1)...(19): siRNA sense strand
gacacuggaggugguauua

SEQ ID NO: 2127587 - RNA, 19 nt, Homo sapiens
  misc_RNA (1)...(19): siRNA sense strand
aagagaagacaaacaaaga

SEQ ID NO: 2127588 - RNA, 19 nt, Homo sapiens
  misc_RNA (1)...(19): siRNA sense strand
ggaaaggagcacagcagau

SEQ ID NO: 2127589 - RNA, 19 nt, Homo sapiens
  misc_RNA (1)...(19): siRNA sense strand
cagugauccugaacaaaga

SEQ ID NO: 2127590 - RNA, 19 nt, Homo sapiens
  misc_RNA (1)...(19): siRNA sense strand
ccacagacaccgcuucucu

SEQ ID NO: 2127591 - RNA, 19 nt, Homo sapiens
  misc_RNA (1)...(19): siRNA sense strand
aagaggauuucguauucaa

SEQ ID NO: 2127592 - RNA, 19 nt, Homo sapiens
  misc_RNA (1)...(19): siRNA sense strand
ugccggaucuggaggaaug

SEQ ID NO: 2127593 - RNA, 19 nt, Homo sapiens
  misc_RNA (1)...(19): siRNA sense strand
ugaauccagugauccugaa

SEQ ID NO: 2127594 - RNA, 19 nt, Homo sapiens
  misc_RNA (1)...(19): siRNA sense strand
gagcccagcgaccuucaaa

SEQ ID NO: 2127595 - RNA, 19 nt, Homo sapiens
  misc_RNA (1)...(19): siRNA sense strand
aaagaggauuucguauuca

SEQ ID NO: 2127596 - RNA, 19 nt, Homo sapiens
  misc_RNA (1)...(19): siRNA sense strand
cacuggaggugguauuaau

SEQ ID NO: 2127597 - RNA, 19 nt, Homo sapiens
  misc_RNA (1)...(19): siRNA sense strand
uuacuugucuacccucaca

SEQ ID NO: 2127598 - RNA, 19 nt, Homo sapiens
  misc_RNA (1)...(19): siRNA sense strand
gaacaaaagaccacagaca

SEQ ID NO: 2127599 - RNA, 19 nt, Homo sapiens
  misc_RNA (1)...(19): siRNA sense strand
uauuccagguguauuauca

SEQ ID NO: 2127600 - RNA, 19 nt, Homo sapiens
  misc_RNA (1)...(19): siRNA sense strand
ccagaacagucgccugcau

SEQ ID NO: 2127601 - RNA, 19 nt, Homo sapiens
  misc_RNA (1)...(19): siRNA sense strand
ggauuucguauucaauuuc

SEQ ID NO: 2127602 - RNA, 19 nt, Homo sapiens
  misc_RNA (1)...(19): siRNA sense strand
gaggugguauuaauauucc

SEQ ID NO: 2127603 - RNA, 19 nt, Homo sapiens
  misc_RNA (1)...(19): siRNA sense strand
ugggagagcuguucauucc

SEQ ID NO: 2127604 - RNA, 19 nt, Homo sapiens
  misc_RNA (1)...(19): siRNA sense strand
aaacuccggcuacaauuca

SEQ ID NO: 2127605 - RNA, 19 nt, Homo sapiens
  misc_RNA (1)...(19): siRNA sense strand
agagaagacaaacaaagaa

SEQ ID NO: 2127606 - RNA, 19 nt, Homo sapiens
  misc_RNA (1)...(19): siRNA sense strand
aaagagaagacaaacaaag

SEQ ID NO: 2127607 - RNA, 19 nt, Homo sapiens
  misc_RNA (1)...(19): siRNA sense strand
uggaggugguauuaauauu

SEQ ID NO: 2127608 - RNA, 19 nt, Homo sapiens
  misc_RNA (1)...(19): siRNA sense strand
ccacagagcaaugggacuu

SEQ ID NO: 2127609 - RNA, 19 nt, Homo sapiens
  misc_RNA (1)...(19): siRNA sense strand
gaugcagccuccagaacag

SEQ ID NO: 2127610 - RNA, 19 nt, Homo sapiens
  misc_RNA (1)...(19): siRNA sense strand
aaagaaacugagacagaaa

SEQ ID NO: 2127611 - RNA, 19 nt, Homo sapiens
  misc_RNA (1)...(19): siRNA sense strand
gguguauuaucaaguuuac

SEQ ID NO: 2127612 - RNA, 19 nt, Homo sapiens
  misc_RNA (1)...(19): siRNA sense strand
gagcccaucaucaccaaug

SEQ ID NO: 2127613 - RNA, 19 nt, Homo sapiens
  misc_RNA (1)...(19): siRNA sense strand
gcccagcgaccuucaaagu

SEQ ID NO: 2127614 - RNA, 19 nt, Homo sapiens
  misc_RNA (1)...(19): siRNA sense strand
gaacagucgccugcaugga

SEQ ID NO: 2127615 - RNA, 19 nt, Homo sapiens
  misc_RNA (1)...(19): siRNA sense strand
gaaacugagacagaaagug

SEQ ID NO: 2127616 - RNA, 19 nt, Homo sapiens
  misc_RNA (1)...(19): siRNA sense strand
gcuguucauucccaguguu

SEQ ID NO: 2127617 - RNA, 19 nt, Homo sapiens
  misc_RNA (1)...(19): siRNA sense strand
uuaucaaguuuaccgaguu

SEQ ID NO: 2127618 - RNA, 19 nt, Homo sapiens
  misc_RNA (1)...(19): siRNA sense strand
cagguguauuaucaaguuu

SEQ ID NO: 2127619 - RNA, 19 nt, Homo sapiens
  misc_RNA (1)...(19): siRNA sense strand
acagagcaaugggacuuug

SEQ ID NO: 2127620 - RNA, 19 nt, Homo sapiens
  misc_RNA (1)...(19): siRNA sense strand
gaaaacuccggcuacaauu

SEQ ID NO: 2127621 - RNA, 19 nt, Homo sapiens
  misc_RNA (1)...(19): siRNA sense strand
agaaugaaccuugugaagu

SEQ ID NO: 2127622 - RNA, 19 nt, Homo sapiens
  misc_RNA (1)...(19): siRNA sense strand
ccacaggcuucuuuuaauc

SEQ ID NO: 2127623 - RNA, 19 nt, Homo sapiens
  misc_RNA (1)...(19): siRNA sense strand
ccugaacaaagaaacagua

SEQ ID NO: 2127624 - RNA, 19 nt, Homo sapiens
  misc_RNA (1)...(19): siRNA sense strand
caacuguaaaucucacugu

SEQ ID NO: 2127625 - RNA, 19 nt, Homo sapiens
  misc_RNA (1)...(19): siRNA sense strand
ucaugugggcucucaguga

SEQ ID NO: 2127626 - RNA, 19 nt, Homo sapiens
  misc_RNA (1)...(19): siRNA sense strand
gauccugaacaaagaaaca

SEQ ID NO: 2127627 - RNA, 19 nt, Homo sapiens
  misc_RNA (1)...(19): siRNA sense strand
caagucugcaacuguaaau

SEQ ID NO: 2127628 - RNA, 19 nt, Homo sapiens
  misc_RNA (1)...(19): siRNA sense strand
ccucccaaauccugugaau

SEQ ID NO: 2127629 - RNA, 19 nt, Homo sapiens
  misc_RNA (1)...(19): siRNA sense strand
acaaacaaagaaacugaga

SEQ ID NO: 2127630 - RNA, 19 nt, Homo sapiens
  misc_RNA (1)...(19): siRNA sense strand
ucccaguguuaaucuugua

SEQ ID NO: 2127631 - RNA, 19 nt, Homo sapiens
  misc_RNA (1)...(19): siRNA sense strand
gguucugggucugguaaug

SEQ ID NO: 2127632 - RNA, 19 nt, Homo sapiens
  misc_RNA (1)...(19): siRNA sense strand
guucugggucugguaauga

SEQ ID NO: 2127633 - RNA, 19 nt, Homo sapiens
  misc_RNA (1)...(19): siRNA sense strand
caagacacuggagguggua

SEQ ID NO: 2127634 - RNA, 19 nt, Homo sapiens
  misc_RNA (1)...(19): siRNA sense strand
ugagacagaaaguggaaau

SEQ ID NO: 2127635 - RNA, 19 nt, Homo sapiens
  misc_RNA (1)...(19): siRNA sense strand
guucauucccaguguuaau

SEQ ID NO: 2127636 - RNA, 19 nt, Homo sapiens
  misc_RNA (1)...(19): siRNA sense strand
gggcuggaagcucaucaug

SEQ ID NO: 2127637 - RNA, 19 nt, Homo sapiens
  misc_RNA (1)...(19): siRNA sense strand
ucagaugcagccuccagaa

SEQ ID NO: 2127638 - RNA, 19 nt, Homo sapiens
  misc_RNA (1)...(19): siRNA sense strand
ucaaguuuaccgaguuuag

SEQ ID NO: 2127639 - RNA, 19 nt, Homo sapiens
  misc_RNA (1)...(19): siRNA sense strand
ggaugucacucagccauau

SEQ ID NO: 2127640 - RNA, 19 nt, Homo sapiens
  misc_RNA (1)...(19): siRNA sense strand
gcaaacucauccuuacaca

SEQ ID NO: 2127641 - RNA, 19 nt, Homo sapiens
  misc_RNA (1)...(19): siRNA sense strand
gaaggaaagacuccagugu

SEQ ID NO: 2127642 - RNA, 19 nt, Homo sapiens
  misc_RNA (1)...(19): siRNA sense strand
gaaaauggucuaaaguuga

SEQ ID NO: 2127643 - RNA, 19 nt, Homo sapiens
  misc_RNA (1)...(19): siRNA sense strand
gcgauggcccaguuucuuu

SEQ ID NO: 2127644 - RNA, 19 nt, Homo sapiens
  misc_RNA (1)...(19): siRNA sense strand
caaacgggcagaugcaaug

SEQ ID NO: 2127645 - RNA, 19 nt, Homo sapiens
  misc_RNA (1)...(19): siRNA sense strand
aaaguugacuguggugaug

SEQ ID NO: 2127646 - RNA, 19 nt, Homo sapiens
  misc_RNA (1)...(19): siRNA sense strand
ggacaaacgggcagaugca

SEQ ID NO: 2127647 - RNA, 19 nt, Homo sapiens
  misc_RNA (1)...(19): siRNA sense strand
ugaaaauggucuaaaguug

SEQ ID NO: 2127648 - RNA, 19 nt, Homo sapiens
  misc_RNA (1)...(19): siRNA sense strand
gggaugucacucagccaua

SEQ ID NO: 2127649 - RNA, 19 nt, Homo sapiens
  misc_RNA (1)...(19): siRNA sense strand
cguaacacauggccagaac

SEQ ID NO: 2127650 - RNA, 19 nt, Homo sapiens
  misc_RNA (1)...(19): siRNA sense strand
ccugcaaacucauccuuac

SEQ ID NO: 2127651 - RNA, 19 nt, Homo sapiens
  misc_RNA (1)...(19): siRNA sense strand
uaaaguugacuguggugau

SEQ ID NO: 2127652 - RNA, 19 nt, Homo sapiens
  misc_RNA (1)...(19): siRNA sense strand
gcugcgugaucccguaaca

SEQ ID NO: 2127653 - RNA, 19 nt, Homo sapiens
  misc_RNA (1)...(19): siRNA sense strand
ucagccauaugaaggaaag

SEQ ID NO: 2127654 - RNA, 19 nt, Homo sapiens
  misc_RNA (1)...(19): siRNA sense strand
acagcagcgugacucaaga

SEQ ID NO: 2127655 - RNA, 19 nt, Homo sapiens
  misc_RNA (1)...(19): siRNA sense strand
uaacacauggccagaacag

SEQ ID NO: 2127656 - RNA, 19 nt, Homo sapiens
  misc_RNA (1)...(19): siRNA sense strand
aaaggaagcucagaacuua

SEQ ID NO: 2127657 - RNA, 19 nt, Homo sapiens
  misc_RNA (1)...(19): siRNA sense strand
cagauuagcuggucuuuca

SEQ ID NO: 2127658 - RNA, 19 nt, Homo sapiens
  misc_RNA (1)...(19): siRNA sense strand
ggaaauggccguuaauauc

SEQ ID NO: 2127659 - RNA, 19 nt, Homo sapiens
  misc_RNA (1)...(19): siRNA sense strand
gaagaggaauucaccuugu

SEQ ID NO: 2127660 - RNA, 19 nt, Homo sapiens
  misc_RNA (1)...(19): siRNA sense strand
ggaauccuguccuccuaaa

SEQ ID NO: 2127661 - RNA, 19 nt, Homo sapiens
  misc_RNA (1)...(19): siRNA sense strand
uaaaggaagcucagaacuu

SEQ ID NO: 2127662 - RNA, 19 nt, Homo sapiens
  misc_RNA (1)...(19): siRNA sense strand
aaggacaucuugaagcauu

SEQ ID NO: 2127663 - RNA, 19 nt, Homo sapiens
  misc_RNA (1)...(19): siRNA sense strand
gcccacgacuguaaaggaa

SEQ ID NO: 2127664 - RNA, 19 nt, Homo sapiens
  misc_RNA (1)...(19): siRNA sense strand
gaaauggccguuaauaucc

SEQ ID NO: 2127665 - RNA, 19 nt, Homo sapiens
  misc_RNA (1)...(19): siRNA sense strand
gcucuccccuuuccauuua

SEQ ID NO: 2127666 - RNA, 19 nt, Homo sapiens
  misc_RNA (1)...(19): siRNA sense strand
uagcuggucuuucaucagu

SEQ ID NO: 2127667 - RNA, 19 nt, Homo sapiens
  misc_RNA (1)...(19): siRNA sense strand
ugucugacguucucaagga

SEQ ID NO: 2127668 - RNA, 19 nt, Homo sapiens
  misc_RNA (1)...(19): siRNA sense strand
ugaagcuacuggugaggaa

SEQ ID NO: 2127669 - RNA, 19 nt, Homo sapiens
  misc_RNA (1)...(19): siRNA sense strand
ccagguggcugagacaagu

SEQ ID NO: 2127670 - RNA, 19 nt, Homo sapiens
  misc_RNA (1)...(19): siRNA sense strand
ugaggaacauccacgucuu

SEQ ID NO: 2127671 - RNA, 19 nt, Homo sapiens
  misc_RNA (1)...(19): siRNA sense strand
gaggaacauccacgucuug

SEQ ID NO: 2127672 - RNA, 19 nt, Homo sapiens
  misc_RNA (1)...(19): siRNA sense strand
cggaaauggccguuaauau

SEQ ID NO: 2127673 - RNA, 19 nt, Homo sapiens
  misc_RNA (1)...(19): siRNA sense strand
ugccggaaauggccguuaa

SEQ ID NO: 2127674 - RNA, 19 nt, Homo sapiens
  misc_RNA (1)...(19): siRNA sense strand
gggaagaggaauucaccuu

SEQ ID NO: 2127675 - RNA, 19 nt, Homo sapiens
  misc_RNA (1)...(19): siRNA sense strand
guuaauauccagcccaaag

SEQ ID NO: 2127676 - RNA, 19 nt, Homo sapiens
  misc_RNA (1)...(19): siRNA sense strand
gcuggucuuucaucagugu

SEQ ID NO: 2127677 - RNA, 19 nt, Homo sapiens
  misc_RNA (1)...(19): siRNA sense strand
uuaccaagcccacgacugu

SEQ ID NO: 2127678 - RNA, 19 nt, Homo sapiens
  misc_RNA (1)...(19): siRNA sense strand
ccggaaauggccguuaaua

SEQ ID NO: 2127679 - RNA, 19 nt, Homo sapiens
  misc_RNA (1)...(19): siRNA sense strand
aagaggaauucaccuugug

SEQ ID NO: 2127680 - RNA, 19 nt, Homo sapiens
  misc_RNA (1)...(19): siRNA sense strand
ggacaucuugaagcauuug

SEQ ID NO: 2127681 - RNA, 19 nt, Homo sapiens
  misc_RNA (1)...(19): siRNA sense strand
guaaaggaagcucagaacu

SEQ ID NO: 2127682 - RNA, 19 nt, Homo sapiens
  misc_RNA (1)...(19): siRNA sense strand
ccaagcccacgacuguaaa

SEQ ID NO: 2127683 - RNA, 19 nt, Homo sapiens
  misc_RNA (1)...(19): siRNA sense strand
gcagcugaacgauccuguu

SEQ ID NO: 2127684 - RNA, 19 nt, Homo sapiens
  misc_RNA (1)...(19): siRNA sense strand
ccacaugaaggagaagaga

SEQ ID NO: 2127685 - RNA, 19 nt, Homo sapiens
  misc_RNA (1)...(19): siRNA sense strand
acaugaaggagaagagaga

SEQ ID NO: 2127686 - RNA, 19 nt, Homo sapiens
  misc_RNA (1)...(19): siRNA sense strand
caucuacugcucaggaauc

SEQ ID NO: 2127687 - RNA, 19 nt, Homo sapiens
  misc_RNA (1)...(19): siRNA sense strand
gauuagcuggucuuucauc

SEQ ID NO: 2127688 - RNA, 19 nt, Homo sapiens
  misc_RNA (1)...(19): siRNA sense strand
gcagagaacucaaagauau

SEQ ID NO: 2127689 - RNA, 19 nt, Homo sapiens
  misc_RNA (1)...(19): siRNA sense strand
gaugagaugugauaaagua

SEQ ID NO: 2127690 - RNA, 19 nt, Homo sapiens
  misc_RNA (1)...(19): siRNA sense strand
ucacugaacuggauaauga

SEQ ID NO: 2127691 - RNA, 19 nt, Homo sapiens
  misc_RNA (1)...(19): siRNA sense strand
gcaggucacugaugaauug

SEQ ID NO: 2127692 - RNA, 19 nt, Homo sapiens
  misc_RNA (1)...(19): siRNA sense strand
gauaauggcguauguguuu

SEQ ID NO: 2127693 - RNA, 19 nt, Homo sapiens
  misc_RNA (1)...(19): siRNA sense strand
caacagaggccaauaucua

SEQ ID NO: 2127694 - RNA, 19 nt, Homo sapiens
  misc_RNA (1)...(19): siRNA sense strand
ggaagcagcuggaucuuag

SEQ ID NO: 2127695 - RNA, 19 nt, Homo sapiens
  misc_RNA (1)...(19): siRNA sense strand
gcuaagggcugucugaaau

SEQ ID NO: 2127696 - RNA, 19 nt, Homo sapiens
  misc_RNA (1)...(19): siRNA sense strand
ugucugaacuggaucauaa

SEQ ID NO: 2127697 - RNA, 19 nt, Homo sapiens
  misc_RNA (1)...(19): siRNA sense strand
uaagggcugucugaaauua

SEQ ID NO: 2127698 - RNA, 19 nt, Homo sapiens
  misc_RNA (1)...(19): siRNA sense strand
caaacucacugaugaagga

SEQ ID NO: 2127699 - RNA, 19 nt, Homo sapiens
  misc_RNA (1)...(19): siRNA sense strand
ugaaagagcuauauuuggu

SEQ ID NO: 2127700 - RNA, 19 nt, Homo sapiens
  misc_RNA (1)...(19): siRNA sense strand
ccacaaacaucagcauuau

SEQ ID NO: 2127701 - RNA, 19 nt, Homo sapiens
  misc_RNA (1)...(19): siRNA sense strand
guuguuugcuuucuacaua

SEQ ID NO: 2127702 - RNA, 19 nt, Homo sapiens
  misc_RNA (1)...(19): siRNA sense strand
guccugagcuucaauaugu

SEQ ID NO: 2127703 - RNA, 19 nt, Homo sapiens
  misc_RNA (1)...(19): siRNA sense strand
guuaauagcuugaugucau

SEQ ID NO: 2127704 - RNA, 19 nt, Homo sapiens
  misc_RNA (1)...(19): siRNA sense strand
gagaugugauaaaguaaga

SEQ ID NO: 2127705 - RNA, 19 nt, Homo sapiens
  misc_RNA (1)...(19): siRNA sense strand
gcaauuauagcuaugcauu

SEQ ID NO: 2127706 - RNA, 19 nt, Homo sapiens
  misc_RNA (1)...(19): siRNA sense strand
aaucuuagcucucucaauc

SEQ ID NO: 2127707 - RNA, 19 nt, Homo sapiens
  misc_RNA (1)...(19): siRNA sense strand
ucugacaccucuauuauug

SEQ ID NO: 2127708 - RNA, 19 nt, Homo sapiens
  misc_RNA (1)...(19): siRNA sense strand
caucauugguuugcaagua

SEQ ID NO: 2127709 - RNA, 19 nt, Homo sapiens
  misc_RNA (1)...(19): siRNA sense strand
ucaagcagcugggcucaaa

SEQ ID NO: 2127710 - RNA, 19 nt, Homo sapiens
  misc_RNA (1)...(19): siRNA sense strand
uauauuugguguccuguaa

SEQ ID NO: 2127711 - RNA, 19 nt, Homo sapiens
  misc_RNA (1)...(19): siRNA sense strand
ggucacugaugaauuguug

SEQ ID NO: 2127712 - RNA, 19 nt, Homo sapiens
  misc_RNA (1)...(19): siRNA sense strand
gcaucaagaagucagaaua

SEQ ID NO: 2127713 - RNA, 19 nt, Homo sapiens
  misc_RNA (1)...(19): siRNA sense strand
ccaaggagccacccugauu

SEQ ID NO: 2127714 - RNA, 19 nt, Homo sapiens
  misc_RNA (1)...(19): siRNA sense strand
gauacagcaugacaauaga

SEQ ID NO: 2127715 - RNA, 19 nt, Homo sapiens
  misc_RNA (1)...(19): siRNA sense strand
gcagugaccacaaacauca

SEQ ID NO: 2127716 - RNA, 19 nt, Homo sapiens
  misc_RNA (1)...(19): siRNA sense strand
ggaggucauugcaaaggaa

SEQ ID NO: 2127717 - RNA, 19 nt, Homo sapiens
  misc_RNA (1)...(19): siRNA sense strand
ggacaaacucacugaugaa

SEQ ID NO: 2127718 - RNA, 19 nt, Homo sapiens
  misc_RNA (1)...(19): siRNA sense strand
caauagagacuguggaugu

SEQ ID NO: 2127719 - RNA, 19 nt, Homo sapiens
  misc_RNA (1)...(19): siRNA sense strand
guuguucagucacuucuaa

SEQ ID NO: 2127720 - RNA, 19 nt, Homo sapiens
  misc_RNA (1)...(19): siRNA sense strand
ggauauacaugcaggaaaa

SEQ ID NO: 2127721 - RNA, 19 nt, Homo sapiens
  misc_RNA (1)...(19): siRNA sense strand
guacuggcgugaccuuugu

SEQ ID NO: 2127722 - RNA, 19 nt, Homo sapiens
  misc_RNA (1)...(19): siRNA sense strand
ggaccuacgucauaucacu

SEQ ID NO: 2127723 - RNA, 19 nt, Homo sapiens
  misc_RNA (1)...(19): siRNA sense strand
gggcugaugagaugugaua

SEQ ID NO: 2127724 - RNA, 19 nt, Homo sapiens
  misc_RNA (1)...(19): siRNA sense strand
ugucugaaauuacaaagga

SEQ ID NO: 2127725 - RNA, 19 nt, Homo sapiens
  misc_RNA (1)...(19): siRNA sense strand
gagcaacagaggccaauau

SEQ ID NO: 2127726 - RNA, 19 nt, Homo sapiens
  misc_RNA (1)...(19): siRNA sense strand
gguguaaacagcuuucuga

SEQ ID NO: 2127727 - RNA, 19 nt, Homo sapiens
  misc_RNA (1)...(19): siRNA sense strand
ucaaguuguuugcuuucua

SEQ ID NO: 2127728 - RNA, 19 nt, Homo sapiens
  misc_RNA (1)...(19): siRNA sense strand
uaaaggagucauucaccua

SEQ ID NO: 2127729 - RNA, 19 nt, Homo sapiens
  misc_RNA (1)...(19): siRNA sense strand
gaugucggaugguguaaag

SEQ ID NO: 2127730 - RNA, 19 nt, Homo sapiens
  misc_RNA (1)...(19): siRNA sense strand
aaccaggugugaccagaua

SEQ ID NO: 2127731 - RNA, 19 nt, Homo sapiens
  misc_RNA (1)...(19): siRNA sense strand
aggacaaacucacugauga

SEQ ID NO: 2127732 - RNA, 19 nt, Homo sapiens
  misc_RNA (1)...(19): siRNA sense strand
cacagauuaugcacugaua

SEQ ID NO: 2127733 - RNA, 19 nt, Homo sapiens
  misc_RNA (1)...(19): siRNA sense strand
acaaauuagugacagauca

SEQ ID NO: 2127734 - RNA, 19 nt, Homo sapiens
  misc_RNA (1)...(19): siRNA sense strand
ggugugaccagauauauca

SEQ ID NO: 2127735 - RNA, 19 nt, Homo sapiens
  misc_RNA (1)...(19): siRNA sense strand
ucauaucacugaacuggau

SEQ ID NO: 2127736 - RNA, 19 nt, Homo sapiens
  misc_RNA (1)...(19): siRNA sense strand
gcagcuggaucuuaguagu

SEQ ID NO: 2127737 - RNA, 19 nt, Homo sapiens
  misc_RNA (1)...(19): siRNA sense strand
caucaagaagucagaauau

SEQ ID NO: 2127738 - RNA, 19 nt, Homo sapiens
  misc_RNA (1)...(19): siRNA sense strand
guguggaggucauugcaaa

SEQ ID NO: 2127739 - RNA, 19 nt, Homo sapiens
  misc_RNA (1)...(19): siRNA sense strand
cgauacagcaugacaauag

SEQ ID NO: 2127740 - RNA, 19 nt, Homo sapiens
  misc_RNA (1)...(19): siRNA sense strand
uaucuaaacagcccaguga

SEQ ID NO: 2127741 - RNA, 19 nt, Homo sapiens
  misc_RNA (1)...(19): siRNA sense strand
caaguuguuugcuuucuac

SEQ ID NO: 2127742 - RNA, 19 nt, Homo sapiens
  misc_RNA (1)...(19): siRNA sense strand
cuaucaaguuguuugcuuu

SEQ ID NO: 2127743 - RNA, 19 nt, Homo sapiens
  misc_RNA (1)...(19): siRNA sense strand
gcaugacaauagagacugu

SEQ ID NO: 2127744 - RNA, 19 nt, Homo sapiens
  misc_RNA (1)...(19): siRNA sense strand
ggcgugaccuuuguuuaga

SEQ ID NO: 2127745 - RNA, 19 nt, Homo sapiens
  misc_RNA (1)...(19): siRNA sense strand
ccugaaagagcuauauuug

SEQ ID NO: 2127746 - RNA, 19 nt, Homo sapiens
  misc_RNA (1)...(19): siRNA sense strand
cagaagaggccucgcuguu

SEQ ID NO: 2127747 - RNA, 19 nt, Homo sapiens
  misc_RNA (1)...(19): siRNA sense strand
aaaggagucauucaccuaa

SEQ ID NO: 2127748 - RNA, 19 nt, Homo sapiens
  misc_RNA (1)...(19): siRNA sense strand
uauccucucuccuucucua

SEQ ID NO: 2127749 - RNA, 19 nt, Homo sapiens
  misc_RNA (1)...(19): siRNA sense strand
caaggagccacccugauug

SEQ ID NO: 2127750 - RNA, 19 nt, Homo sapiens
  misc_RNA (1)...(19): siRNA sense strand
aaaccgugauggaaauugu

SEQ ID NO: 2127751 - RNA, 19 nt, Homo sapiens
  misc_RNA (1)...(19): siRNA sense strand
ccagauauaucagcagcau

SEQ ID NO: 2127752 - RNA, 19 nt, Homo sapiens
  misc_RNA (1)...(19): siRNA sense strand
gugauaaaguaagaguuga

SEQ ID NO: 2127753 - RNA, 19 nt, Homo sapiens
  misc_RNA (1)...(19): siRNA sense strand
agaaaucacagaccaagga

SEQ ID NO: 2127754 - RNA, 19 nt, Homo sapiens
  misc_RNA (1)...(19): siRNA sense strand
ugauggaaauugucaagag

SEQ ID NO: 2127755 - RNA, 19 nt, Homo sapiens
  misc_RNA (1)...(19): siRNA sense strand
ccccguguauuauauauua

SEQ ID NO: 2127756 - RNA, 19 nt, Homo sapiens
  misc_RNA (1)...(19): siRNA sense strand
ugucauauccucucuccuu

SEQ ID NO: 2127757 - RNA, 19 nt, Homo sapiens
  misc_RNA (1)...(19): siRNA sense strand
aaguaagaguugacuauca

SEQ ID NO: 2127758 - RNA, 19 nt, Homo sapiens
  misc_RNA (1)...(19): siRNA sense strand
gcugaugagaugugauaaa

SEQ ID NO: 2127759 - RNA, 19 nt, Homo sapiens
  misc_RNA (1)...(19): siRNA sense strand
ccaggugugaccagauaua

SEQ ID NO: 2127760 - RNA, 19 nt, Homo sapiens
  misc_RNA (1)...(19): siRNA sense strand
ugauagccauugggcgaua

SEQ ID NO: 2127761 - RNA, 19 nt, Homo sapiens
  misc_RNA (1)...(19): siRNA sense strand
acugaugaauuguuggaaa

SEQ ID NO: 2127762 - RNA, 19 nt, Homo sapiens
  misc_RNA (1)...(19): siRNA sense strand
gcuuggaccuacgucauau

SEQ ID NO: 2127763 - RNA, 19 nt, Homo sapiens
  misc_RNA (1)...(19): siRNA sense strand
cagcagggccgaagucucu

SEQ ID NO: 2127764 - RNA, 19 nt, Homo sapiens
  misc_RNA (1)...(19): siRNA sense strand
cugaugagaugugauaaag

SEQ ID NO: 2127765 - RNA, 19 nt, Homo sapiens
  misc_RNA (1)...(19): siRNA sense strand
aacagaggccaauaucuaa

SEQ ID NO: 2127766 - RNA, 19 nt, Homo sapiens
  misc_RNA (1)...(19): siRNA sense strand
gacaauagagacuguggau

SEQ ID NO: 2127767 - RNA, 19 nt, Homo sapiens
  misc_RNA (1)...(19): siRNA sense strand
aaugaaaccgugauggaaa

SEQ ID NO: 2127768 - RNA, 19 nt, Homo sapiens
  misc_RNA (1)...(19): siRNA sense strand
uaaugaaaccgugauggaa

SEQ ID NO: 2127769 - RNA, 19 nt, Homo sapiens
  misc_RNA (1)...(19): siRNA sense strand
ugaccuuuguuuagacuuc

SEQ ID NO: 2127770 - RNA, 19 nt, Homo sapiens
  misc_RNA (1)...(19): siRNA sense strand
gaaaccgugauggaaauug

SEQ ID NO: 2127771 - RNA, 19 nt, Homo sapiens
  misc_RNA (1)...(19): siRNA sense strand
uaaccaagcuaagaaaccu

SEQ ID NO: 2127772 - RNA, 19 nt, Homo sapiens
  misc_RNA (1)...(19): siRNA sense strand
gaccacaaacaucagcauu

SEQ ID NO: 2127773 - RNA, 19 nt, Homo sapiens
  misc_RNA (1)...(19): siRNA sense strand
cgcaguaugucugauaaug

SEQ ID NO: 2127774 - RNA, 19 nt, Homo sapiens
  misc_RNA (1)...(19): siRNA sense strand
gcaguaugucugauaaugg

SEQ ID NO: 2127775 - RNA, 19 nt, Homo sapiens
  misc_RNA (1)...(19): siRNA sense strand
uaaagaaaucacagaccaa

SEQ ID NO: 2127776 - RNA, 19 nt, Homo sapiens
  misc_RNA (1)...(19): siRNA sense strand
cagcagaggccagggaaga

SEQ ID NO: 2127777 - RNA, 19 nt, Homo sapiens
  misc_RNA (1)...(19): siRNA sense strand
ugaacacuguccugagcuu

SEQ ID NO: 2127778 - RNA, 19 nt, Homo sapiens
  misc_RNA (1)...(19): siRNA sense strand
cagagaacucaaagauauu

SEQ ID NO: 2127779 - RNA, 19 nt, Homo sapiens
  misc_RNA (1)...(19): siRNA sense strand
ccgcaucauugguuugcaa

SEQ ID NO: 2127780 - RNA, 19 nt, Homo sapiens
  misc_RNA (1)...(19): siRNA sense strand
cacaaacaucagcauuaua

SEQ ID NO: 2127781 - RNA, 19 nt, Homo sapiens
  misc_RNA (1)...(19): siRNA sense strand
agaagaggccucgcuguug

SEQ ID NO: 2127782 - RNA, 19 nt, Homo sapiens
  misc_RNA (1)...(19): siRNA sense strand
gucggaugguguaaagaaa

SEQ ID NO: 2127783 - RNA, 19 nt, Homo sapiens
  misc_RNA (1)...(19): siRNA sense strand
gucgcaguaugucugauaa

SEQ ID NO: 2127784 - RNA, 19 nt, Homo sapiens
  misc_RNA (1)...(19): siRNA sense strand
uaaacagcccagugaggaa

SEQ ID NO: 2127785 - RNA, 19 nt, Homo sapiens
  misc_RNA (1)...(19): siRNA sense strand
ugugauaaaguaagaguug

SEQ ID NO: 2127786 - RNA, 19 nt, Homo sapiens
  misc_RNA (1)...(19): siRNA sense strand
cggaugguguaaagaaauc

SEQ ID NO: 2127787 - RNA, 19 nt, Homo sapiens
  misc_RNA (1)...(19): siRNA sense strand
gcgauacagcaugacaaua

SEQ ID NO: 2127788 - RNA, 19 nt, Homo sapiens
  misc_RNA (1)...(19): siRNA sense strand
ccagagggcugcagaauaa

SEQ ID NO: 2127789 - RNA, 19 nt, Homo sapiens
  misc_RNA (1)...(19): siRNA sense strand
gcacaaguguaucugcuua

SEQ ID NO: 2127790 - RNA, 19 nt, Homo sapiens
  misc_RNA (1)...(19): siRNA sense strand
gaaugaagaucaagaagga

SEQ ID NO: 2127791 - RNA, 19 nt, Homo sapiens
  misc_RNA (1)...(19): siRNA sense strand
ggaggaaacuaaacagaaa

SEQ ID NO: 2127792 - RNA, 19 nt, Homo sapiens
  misc_RNA (1)...(19): siRNA sense strand
gacccaaccucgagauuua

SEQ ID NO: 2127793 - RNA, 19 nt, Homo sapiens
  misc_RNA (1)...(19): siRNA sense strand
ccacaauucugcauccuua

SEQ ID NO: 2127794 - RNA, 19 nt, Homo sapiens
  misc_RNA (1)...(19): siRNA sense strand
cagaagaacuugauagaga

SEQ ID NO: 2127795 - RNA, 19 nt, Homo sapiens
  misc_RNA (1)...(19): siRNA sense strand
gaacaaccuuccaguaauc

SEQ ID NO: 2127796 - RNA, 19 nt, Homo sapiens
  misc_RNA (1)...(19): siRNA sense strand
ccaguaaucuccaacauga

SEQ ID NO: 2127797 - RNA, 19 nt, Homo sapiens
  misc_RNA (1)...(19): siRNA sense strand
gaggaaggauugaguaaug

SEQ ID NO: 2127798 - RNA, 19 nt, Homo sapiens
  misc_RNA (1)...(19): siRNA sense strand
gaaacucuauguugguaaa

SEQ ID NO: 2127799 - RNA, 19 nt, Homo sapiens
  misc_RNA (1)...(19): siRNA sense strand
uaaggaggcuguagaaaug

SEQ ID NO: 2127800 - RNA, 19 nt, Homo sapiens
  misc_RNA (1)...(19): siRNA sense strand
gcacaaucaucucaacuga

SEQ ID NO: 2127801 - RNA, 19 nt, Homo sapiens
  misc_RNA (1)...(19): siRNA sense strand
caaccaaagcccacaauua

SEQ ID NO: 2127802 - RNA, 19 nt, Homo sapiens
  misc_RNA (1)...(19): siRNA sense strand
gcagaaggauuaauugaca

SEQ ID NO: 2127803 - RNA, 19 nt, Homo sapiens
  misc_RNA (1)...(19): siRNA sense strand
ccgauaagguuuacacuuu

SEQ ID NO: 2127804 - RNA, 19 nt, Homo sapiens
  misc_RNA (1)...(19): siRNA sense strand
caacaugacggcugcguua

SEQ ID NO: 2127805 - RNA, 19 nt, Homo sapiens
  misc_RNA (1)...(19): siRNA sense strand
ucaagaacauggcaucauu

SEQ ID NO: 2127806 - RNA, 19 nt, Homo sapiens
  misc_RNA (1)...(19): siRNA sense strand
ggccaucagugccuaauaa

SEQ ID NO: 2127807 - RNA, 19 nt, Homo sapiens
  misc_RNA (1)...(19): siRNA sense strand
ugaaagagcugggcaagga

SEQ ID NO: 2127808 - RNA, 19 nt, Homo sapiens
  misc_RNA (1)...(19): siRNA sense strand
ggaagcagaaggauuaauu

SEQ ID NO: 2127809 - RNA, 19 nt, Homo sapiens
  misc_RNA (1)...(19): siRNA sense strand
gcuaugauccuuauuauuc

SEQ ID NO: 2127810 - RNA, 19 nt, Homo sapiens
  misc_RNA (1)...(19): siRNA sense strand
acaaucaucucaacugaaa

SEQ ID NO: 2127811 - RNA, 19 nt, Homo sapiens
  misc_RNA (1)...(19): siRNA sense strand
ggaaagagagagcugauga

SEQ ID NO: 2127812 - RNA, 19 nt, Homo sapiens
  misc_RNA (1)...(19): siRNA sense strand
caauggagcuggaccugaa

SEQ ID NO: 2127813 - RNA, 19 nt, Homo sapiens
  misc_RNA (1)...(19): siRNA sense strand
ggacugcccucccucacaa

SEQ ID NO: 2127814 - RNA, 19 nt, Homo sapiens
  misc_RNA (1)...(19): siRNA sense strand
agagagagcugaugagcaa

SEQ ID NO: 2127815 - RNA, 19 nt, Homo sapiens
  misc_RNA (1)...(19): siRNA sense strand
caaagaguccuccguuaaa

SEQ ID NO: 2127816 - RNA, 19 nt, Homo sapiens
  misc_RNA (1)...(19): siRNA sense strand
gaaaaccaccagcuuauua

SEQ ID NO: 2127817 - RNA, 19 nt, Homo sapiens
  misc_RNA (1)...(19): siRNA sense strand
agacagaaauuugagauga

SEQ ID NO: 2127818 - RNA, 19 nt, Homo sapiens
  misc_RNA (1)...(19): siRNA sense strand
gaaagacuccugugaacug

SEQ ID NO: 2127819 - RNA, 19 nt, Homo sapiens
  misc_RNA (1)...(19): siRNA sense strand
gaaggagucugaggaagau

SEQ ID NO: 2127820 - RNA, 19 nt, Homo sapiens
  misc_RNA (1)...(19): siRNA sense strand
ccacagcuaugauccuuau

SEQ ID NO: 2127821 - RNA, 19 nt, Homo sapiens
  misc_RNA (1)...(19): siRNA sense strand
aaacaaccacugaaucuaa

SEQ ID NO: 2127822 - RNA, 19 nt, Homo sapiens
  misc_RNA (1)...(19): siRNA sense strand
gggaaacucuauguuggua

SEQ ID NO: 2127823 - RNA, 19 nt, Homo sapiens
  misc_RNA (1)...(19): siRNA sense strand
gcauaucucucuccaggau

SEQ ID NO: 2127824 - RNA, 19 nt, Homo sapiens
  misc_RNA (1)...(19): siRNA sense strand
ggaagaugcugaaaagaaa

SEQ ID NO: 2127825 - RNA, 19 nt, Homo sapiens
  misc_RNA (1)...(19): siRNA sense strand
ccaaagaguccuccguuaa

SEQ ID NO: 2127826 - RNA, 19 nt, Homo sapiens
  misc_RNA (1)...(19): siRNA sense strand
agaagaagguguccuagug

SEQ ID NO: 2127827 - RNA, 19 nt, Homo sapiens
  misc_RNA (1)...(19): siRNA sense strand
gacagaaauuugagaugaa

SEQ ID NO: 2127828 - RNA, 19 nt, Homo sapiens
  misc_RNA (1)...(19): siRNA sense strand
gaaaagguguggauccaaa

SEQ ID NO: 2127829 - RNA, 19 nt, Homo sapiens
  misc_RNA (1)...(19): siRNA sense strand
gaccaccacugggacaaua

SEQ ID NO: 2127830 - RNA, 19 nt, Homo sapiens
  misc_RNA (1)...(19): siRNA sense strand
gaaagcguguccgcacaaa

SEQ ID NO: 2127831 - RNA, 19 nt, Homo sapiens
  misc_RNA (1)...(19): siRNA sense strand
uaaaggaucaucucaacaa

SEQ ID NO: 2127832 - RNA, 19 nt, Homo sapiens
  misc_RNA (1)...(19): siRNA sense strand
ggagaaggacagacagaaa

SEQ ID NO: 2127833 - RNA, 19 nt, Homo sapiens
  misc_RNA (1)...(19): siRNA sense strand
gagaagagacagagaaagu

SEQ ID NO: 2127834 - RNA, 19 nt, Homo sapiens
  misc_RNA (1)...(19): siRNA sense strand
caagaacauggcaucauua

SEQ ID NO: 2127835 - RNA, 19 nt, Homo sapiens
  misc_RNA (1)...(19): siRNA sense strand
aaaccucucuaaacugaaa

SEQ ID NO: 2127836 - RNA, 19 nt, Homo sapiens
  misc_RNA (1)...(19): siRNA sense strand
ucaagaaacugaaaacuga

SEQ ID NO: 2127837 - RNA, 19 nt, Homo sapiens
  misc_RNA (1)...(19): siRNA sense strand
ggaaaacuccuaauaaaga

SEQ ID NO: 2127838 - RNA, 19 nt, Homo sapiens
  misc_RNA (1)...(19): siRNA sense strand
gauaagguuuacacuuuca

SEQ ID NO: 2127839 - RNA, 19 nt, Homo sapiens
  misc_RNA (1)...(19): siRNA sense strand
ggaaaccagagacuacuuu

SEQ ID NO: 2127840 - RNA, 19 nt, Homo sapiens
  misc_RNA (1)...(19): siRNA sense strand
caagugaccuggagaugag

SEQ ID NO: 2127841 - RNA, 19 nt, Homo sapiens
  misc_RNA (1)...(19): siRNA sense strand
gagccaagcacaaguguau

SEQ ID NO: 2127842 - RNA, 19 nt, Homo sapiens
  misc_RNA (1)...(19): siRNA sense strand
ggaccagugugaauuugga

SEQ ID NO: 2127843 - RNA, 19 nt, Homo sapiens
  misc_RNA (1)...(19): siRNA sense strand
gaguucagcugcaaagaca

SEQ ID NO: 2127844 - RNA, 19 nt, Homo sapiens
  misc_RNA (1)...(19): siRNA sense strand
ugaacaaccuuccaguaau

SEQ ID NO: 2127845 - RNA, 19 nt, Homo sapiens
  misc_RNA (1)...(19): siRNA sense strand
ugaguaauguggcacuuga

SEQ ID NO: 2127846 - RNA, 19 nt, Homo sapiens
  misc_RNA (1)...(19): siRNA sense strand
caaagagaccagcaaauca

SEQ ID NO: 2127847 - RNA, 19 nt, Homo sapiens
  misc_RNA (1)...(19): siRNA sense strand
gcuaaucccgggucaauau

SEQ ID NO: 2127848 - RNA, 19 nt, Homo sapiens
  misc_RNA (1)...(19): siRNA sense strand
gaagagacagagaaaguca

SEQ ID NO: 2127849 - RNA, 19 nt, Homo sapiens
  misc_RNA (1)...(19): siRNA sense strand
ggagagaagagacagagaa

SEQ ID NO: 2127850 - RNA, 19 nt, Homo sapiens
  misc_RNA (1)...(19): siRNA sense strand
uacaguacuugcaugcuua

SEQ ID NO: 2127851 - RNA, 19 nt, Homo sapiens
  misc_RNA (1)...(19): siRNA sense strand
cagcuaugauccuuauuau

SEQ ID NO: 2127852 - RNA, 19 nt, Homo sapiens
  misc_RNA (1)...(19): siRNA sense strand
ugagaugccuaaacuggaa

SEQ ID NO: 2127853 - RNA, 19 nt, Homo sapiens
  misc_RNA (1)...(19): siRNA sense strand
gaaggacagacagaaauuu

SEQ ID NO: 2127854 - RNA, 19 nt, Homo sapiens
  misc_RNA (1)...(19): siRNA sense strand
caauacaugugaaguugga

SEQ ID NO: 2127855 - RNA, 19 nt, Homo sapiens
  misc_RNA (1)...(19): siRNA sense strand
gaagcagaaggauuaauug

SEQ ID NO: 2127856 - RNA, 19 nt, Homo sapiens
  misc_RNA (1)...(19): siRNA sense strand
gagagaagagacagagaaa

SEQ ID NO: 2127857 - RNA, 19 nt, Homo sapiens
  misc_RNA (1)...(19): siRNA sense strand
ugagucagcaucagucaua

SEQ ID NO: 2127858 - RNA, 19 nt, Homo sapiens
  misc_RNA (1)...(19): siRNA sense strand
cagccuuccuguaucguua

SEQ ID NO: 2127859 - RNA, 19 nt, Homo sapiens
  misc_RNA (1)...(19): siRNA sense strand
aaacugaggagacagguaa

SEQ ID NO: 2127860 - RNA, 19 nt, Homo sapiens
  misc_RNA (1)...(19): siRNA sense strand
gcaaggaggaaacuaaaca

SEQ ID NO: 2127861 - RNA, 19 nt, Homo sapiens
  misc_RNA (1)...(19): siRNA sense strand
agacaaggcagagcaguua

SEQ ID NO: 2127862 - RNA, 19 nt, Homo sapiens
  misc_RNA (1)...(19): siRNA sense strand
gaccaaggcugcucuucuc

SEQ ID NO: 2127863 - RNA, 19 nt, Homo sapiens
  misc_RNA (1)...(19): siRNA sense strand
gauucuacccuccuacuuu

SEQ ID NO: 2127864 - RNA, 19 nt, Homo sapiens
  misc_RNA (1)...(19): siRNA sense strand
gaucgaaagacuccuguga

SEQ ID NO: 2127865 - RNA, 19 nt, Homo sapiens
  misc_RNA (1)...(19): siRNA sense strand
uaaacaagacccagauuca

SEQ ID NO: 2127866 - RNA, 19 nt, Homo sapiens
  misc_RNA (1)...(19): siRNA sense strand
gagaaggacagacagaaau

SEQ ID NO: 2127867 - RNA, 19 nt, Homo sapiens
  misc_RNA (1)...(19): siRNA sense strand
aaccaaagcccacaauuau

SEQ ID NO: 2127868 - RNA, 19 nt, Homo sapiens
  misc_RNA (1)...(19): siRNA sense strand
aaagggcauucuucaacua

SEQ ID NO: 2127869 - RNA, 19 nt, Homo sapiens
  misc_RNA (1)...(19): siRNA sense strand
gucaauacaugugaaguug

SEQ ID NO: 2127870 - RNA, 19 nt, Homo sapiens
  misc_RNA (1)...(19): siRNA sense strand
gaagaugucagggagagaa

SEQ ID NO: 2127871 - RNA, 19 nt, Homo sapiens
  misc_RNA (1)...(19): siRNA sense strand
caccagcccugccuauaga

SEQ ID NO: 2127872 - RNA, 19 nt, Homo sapiens
  misc_RNA (1)...(19): siRNA sense strand
guaaggacaguguuguaaa

SEQ ID NO: 2127873 - RNA, 19 nt, Homo sapiens
  misc_RNA (1)...(19): siRNA sense strand
aggaucaucucaacaagaa

SEQ ID NO: 2127874 - RNA, 19 nt, Homo sapiens
  misc_RNA (1)...(19): siRNA sense strand
gaucaucucaacaagaaug

SEQ ID NO: 2127875 - RNA, 19 nt, Homo sapiens
  misc_RNA (1)...(19): siRNA sense strand
gagaggagacugugaaagg

SEQ ID NO: 2127876 - RNA, 19 nt, Homo sapiens
  misc_RNA (1)...(19): siRNA sense strand
cuucuaaggaugcuaauaa

SEQ ID NO: 2127877 - RNA, 19 nt, Homo sapiens
  misc_RNA (1)...(19): siRNA sense strand
gcagcaugcuaaccaauac

SEQ ID NO: 2127878 - RNA, 19 nt, Homo sapiens
  misc_RNA (1)...(19): siRNA sense strand
cagcaucagucauacauac

SEQ ID NO: 2127879 - RNA, 19 nt, Homo sapiens
  misc_RNA (1)...(19): siRNA sense strand
ccaagcauccugauucuca

SEQ ID NO: 2127880 - RNA, 19 nt, Homo sapiens
  misc_RNA (1)...(19): siRNA sense strand
uuaaagaggagcccaaaga

SEQ ID NO: 2127881 - RNA, 19 nt, Homo sapiens
  misc_RNA (1)...(19): siRNA sense strand
aaucgcagcuucucuccaa

SEQ ID NO: 2127882 - RNA, 19 nt, Homo sapiens
  misc_RNA (1)...(19): siRNA sense strand
caagaaggagucugaggaa

SEQ ID NO: 2127883 - RNA, 19 nt, Homo sapiens
  misc_RNA (1)...(19): siRNA sense strand
ccaggcucaugcacacuua

SEQ ID NO: 2127884 - RNA, 19 nt, Homo sapiens
  misc_RNA (1)...(19): siRNA sense strand
gaggccagcuucacagagu

SEQ ID NO: 2127885 - RNA, 19 nt, Homo sapiens
  misc_RNA (1)...(19): siRNA sense strand
gggaucguguggcaugaaa

SEQ ID NO: 2127886 - RNA, 19 nt, Homo sapiens
  misc_RNA (1)...(19): siRNA sense strand
ggacaaagaagggaaagag

SEQ ID NO: 2127887 - RNA, 19 nt, Homo sapiens
  misc_RNA (1)...(19): siRNA sense strand
acagcuaugauccuuauua

SEQ ID NO: 2127888 - RNA, 19 nt, Homo sapiens
  misc_RNA (1)...(19): siRNA sense strand
gaacagaucagauauagga

SEQ ID NO: 2127889 - RNA, 19 nt, Homo sapiens
  misc_RNA (1)...(19): siRNA sense strand
uaagugagcugcagaggaa

SEQ ID NO: 2127890 - RNA, 19 nt, Homo sapiens
  misc_RNA (1)...(19): siRNA sense strand
gcaaggaacacuuaauaaa

SEQ ID NO: 2127891 - RNA, 19 nt, Homo sapiens
  misc_RNA (1)...(19): siRNA sense strand
gaagaacagaucagauaua

SEQ ID NO: 2127892 - RNA, 19 nt, Homo sapiens
  misc_RNA (1)...(19): siRNA sense strand
aaagggagcuccaugagaa

SEQ ID NO: 2127893 - RNA, 19 nt, Homo sapiens
  misc_RNA (1)...(19): siRNA sense strand
gaugagaggcccauaguug

SEQ ID NO: 2127894 - RNA, 19 nt, Homo sapiens
  misc_RNA (1)...(19): siRNA sense strand
gaacauuauucccaucauc

SEQ ID NO: 2127895 - RNA, 19 nt, Homo sapiens
  misc_RNA (1)...(19): siRNA sense strand
cuacaucgaugcgcaguuu

SEQ ID NO: 2127896 - RNA, 19 nt, Homo sapiens
  misc_RNA (1)...(19): siRNA sense strand
acacaaggauccacguuug

SEQ ID NO: 2127897 - RNA, 19 nt, Homo sapiens
  misc_RNA (1)...(19): siRNA sense strand
aagaagaacagaucagaua

SEQ ID NO: 2127898 - RNA, 19 nt, Homo sapiens
  misc_RNA (1)...(19): siRNA sense strand
ggaaggacaaggacaagaa

SEQ ID NO: 2127899 - RNA, 19 nt, Homo sapiens
  misc_RNA (1)...(19): siRNA sense strand
ugaagaaacuagacagcaa

SEQ ID NO: 2127900 - RNA, 19 nt, Homo sapiens
  misc_RNA (1)...(19): siRNA sense strand
gaagagaugaggcagaugu

SEQ ID NO: 2127901 - RNA, 19 nt, Homo sapiens
  misc_RNA (1)...(19): siRNA sense strand
gaaagggagcuccaugaga

SEQ ID NO: 2127902 - RNA, 19 nt, Homo sapiens
  misc_RNA (1)...(19): siRNA sense strand
ggagguguauuccguucaa

SEQ ID NO: 2127903 - RNA, 19 nt, Homo sapiens
  misc_RNA (1)...(19): siRNA sense strand
ccugaagucucuagaucua

SEQ ID NO: 2127904 - RNA, 19 nt, Homo sapiens
  misc_RNA (1)...(19): siRNA sense strand
gaaugcacaucugcccuuu

SEQ ID NO: 2127905 - RNA, 19 nt, Homo sapiens
  misc_RNA (1)...(19): siRNA sense strand
gcaaauccacacugaugaa

SEQ ID NO: 2127906 - RNA, 19 nt, Homo sapiens
  misc_RNA (1)...(19): siRNA sense strand
ggaaguggccauauuggau

SEQ ID NO: 2127907 - RNA, 19 nt, Homo sapiens
  misc_RNA (1)...(19): siRNA sense strand
ggagcuccaugagaaguuu

SEQ ID NO: 2127908 - RNA, 19 nt, Homo sapiens
  misc_RNA (1)...(19): siRNA sense strand
gagauuaacgcagucauga

SEQ ID NO: 2127909 - RNA, 19 nt, Homo sapiens
  misc_RNA (1)...(19): siRNA sense strand
acagcaaggugaacauuau

SEQ ID NO: 2127910 - RNA, 19 nt, Homo sapiens
  misc_RNA (1)...(19): siRNA sense strand
gacagcaaggugaacauua

SEQ ID NO: 2127911 - RNA, 19 nt, Homo sapiens
  misc_RNA (1)...(19): siRNA sense strand
gagaugaggcagauguuug

SEQ ID NO: 2127912 - RNA, 19 nt, Homo sapiens
  misc_RNA (1)...(19): siRNA sense strand
ggcaaggaacacuuaauaa

SEQ ID NO: 2127913 - RNA, 19 nt, Homo sapiens
  misc_RNA (1)...(19): siRNA sense strand
gcucuaaggugaugaugac

SEQ ID NO: 2127914 - RNA, 19 nt, Homo sapiens
  misc_RNA (1)...(19): siRNA sense strand
aagaacagaucagauauag

SEQ ID NO: 2127915 - RNA, 19 nt, Homo sapiens
  misc_RNA (1)...(19): siRNA sense strand
gaaguucugccgugaaugg

SEQ ID NO: 2127916 - RNA, 19 nt, Homo sapiens
  misc_RNA (1)...(19): siRNA sense strand
caaggaacacuuaauaaac

SEQ ID NO: 2127917 - RNA, 19 nt, Homo sapiens
  misc_RNA (1)...(19): siRNA sense strand
gauuaacgcagucaugaau

SEQ ID NO: 2127918 - RNA, 19 nt, Homo sapiens
  misc_RNA (1)...(19): siRNA sense strand
ggacaagaagaacagauca

SEQ ID NO: 2127919 - RNA, 19 nt, Homo sapiens
  misc_RNA (1)...(19): siRNA sense strand
aggcaaggaacacuuaaua

SEQ ID NO: 2127920 - RNA, 19 nt, Homo sapiens
  misc_RNA (1)...(19): siRNA sense strand
acucagggcuucagcuuca

SEQ ID NO: 2127921 - RNA, 19 nt, Homo sapiens
  misc_RNA (1)...(19): siRNA sense strand
gguccuggaucaacaaguc

SEQ ID NO: 2127922 - RNA, 19 nt, Homo sapiens
  misc_RNA (1)...(19): siRNA sense strand
ccaggaaguggccauauug

SEQ ID NO: 2127923 - RNA, 19 nt, Homo sapiens
  misc_RNA (1)...(19): siRNA sense strand
gcuagguccuggaucaaca

SEQ ID NO: 2127924 - RNA, 19 nt, Homo sapiens
  misc_RNA (1)...(19): siRNA sense strand
cuggagcgcuucucgaaug

SEQ ID NO: 2127925 - RNA, 19 nt, Homo sapiens
  misc_RNA (1)...(19): siRNA sense strand
gccgcucgcucuucgacua

SEQ ID NO: 2127926 - RNA, 19 nt, Homo sapiens
  misc_RNA (1)...(19): siRNA sense strand
ugaggcagauguuugucaa

SEQ ID NO: 2127927 - RNA, 19 nt, Homo sapiens
  misc_RNA (1)...(19): siRNA sense strand
gaggaaggaggaagagaug

SEQ ID NO: 2127928 - RNA, 19 nt, Homo sapiens
  misc_RNA (1)...(19): siRNA sense strand
acacgaccuucgagacuga

SEQ ID NO: 2127929 - RNA, 19 nt, Homo sapiens
  misc_RNA (1)...(19): siRNA sense strand
cuaaggugaugaugaccaa

SEQ ID NO: 2127930 - RNA, 19 nt, Homo sapiens
  misc_RNA (1)...(19): siRNA sense strand
gacacaaggauccacguuu

SEQ ID NO: 2127931 - RNA, 19 nt, Homo sapiens
  misc_RNA (1)...(19): siRNA sense strand
ggaagccagucaccaugag

SEQ ID NO: 2127932 - RNA, 19 nt, Homo sapiens
  misc_RNA (1)...(19): siRNA sense strand
ggaaagggagcuccaugag

SEQ ID NO: 2127933 - RNA, 19 nt, Homo sapiens
  misc_RNA (1)...(19): siRNA sense strand
gauccacguuugccucuac

SEQ ID NO: 2127934 - RNA, 19 nt, Homo sapiens
  misc_RNA (1)...(19): siRNA sense strand
gguuaccacuccuucacaa

SEQ ID NO: 2127935 - RNA, 19 nt, Homo sapiens
  misc_RNA (1)...(19): siRNA sense strand
gaucuagugaccaugaaga

SEQ ID NO: 2127936 - RNA, 19 nt, Homo sapiens
  misc_RNA (1)...(19): siRNA sense strand
guucaaccuucuuccacuu

SEQ ID NO: 2127937 - RNA, 19 nt, Homo sapiens
  misc_RNA (1)...(19): siRNA sense strand
uccaggaaguggccauauu

SEQ ID NO: 2127938 - RNA, 19 nt, Homo sapiens
  misc_RNA (1)...(19): siRNA sense strand
ggagaccggcauuggcaaa

SEQ ID NO: 2127939 - RNA, 19 nt, Homo sapiens
  misc_RNA (1)...(19): siRNA sense strand
gagcugaaggagaaggaaa

SEQ ID NO: 2127940 - RNA, 19 nt, Homo sapiens
  misc_RNA (1)...(19): siRNA sense strand
ggagaccaacgccuucaau

SEQ ID NO: 2127941 - RNA, 19 nt, Homo sapiens
  misc_RNA (1)...(19): siRNA sense strand
gaucaacaagucccaaguc

SEQ ID NO: 2127942 - RNA, 19 nt, Homo sapiens
  misc_RNA (1)...(19): siRNA sense strand
gcugacaccaucuccaaga

SEQ ID NO: 2127943 - RNA, 19 nt, Homo sapiens
  misc_RNA (1)...(19): siRNA sense strand
gaaggacaaggacaagaag

SEQ ID NO: 2127944 - RNA, 19 nt, Homo sapiens
  misc_RNA (1)...(19): siRNA sense strand
cauacgaggccaagaggaa

SEQ ID NO: 2127945 - RNA, 19 nt, Homo sapiens
  misc_RNA (1)...(19): siRNA sense strand
gcaggcaaggaacacuuaa

SEQ ID NO: 2127946 - RNA, 19 nt, Homo sapiens
  misc_RNA (1)...(19): siRNA sense strand
uggugcagguggagaauga

SEQ ID NO: 2127947 - RNA, 19 nt, Homo sapiens
  misc_RNA (1)...(19): siRNA sense strand
gcuucaacauccucugugu

SEQ ID NO: 2127948 - RNA, 19 nt, Homo sapiens
  misc_RNA (1)...(19): siRNA sense strand
cgacguggagggaaggauu

SEQ ID NO: 2127949 - RNA, 19 nt, Homo sapiens
  misc_RNA (1)...(19): siRNA sense strand
ggaaggaggaagagaugag

SEQ ID NO: 2127950 - RNA, 19 nt, Homo sapiens
  misc_RNA (1)...(19): siRNA sense strand
uggcaguucuggaccauag

SEQ ID NO: 2127951 - RNA, 19 nt, Homo sapiens
  misc_RNA (1)...(19): siRNA sense strand
gcugcaaguuggaggagau

SEQ ID NO: 2127952 - RNA, 19 nt, Homo sapiens
  misc_RNA (1)...(19): siRNA sense strand
caagaucaugggcgaguug

SEQ ID NO: 2127953 - RNA, 19 nt, Homo sapiens
  misc_RNA (1)...(19): siRNA sense strand
caacacgaccuucgagacu

SEQ ID NO: 2127954 - RNA, 19 nt, Homo sapiens
  misc_RNA (1)...(19): siRNA sense strand
ccacacugaugaacacacu

SEQ ID NO: 2127955 - RNA, 19 nt, Homo sapiens
  misc_RNA (1)...(19): siRNA sense strand
uggcaaauccacacugaug

SEQ ID NO: 2127956 - RNA, 19 nt, Homo sapiens
  misc_RNA (1)...(19): siRNA sense strand
caagaagaacagaucagau

SEQ ID NO: 2127957 - RNA, 19 nt, Homo sapiens
  misc_RNA (1)...(19): siRNA sense strand
gaaguuugagcaccugaag

SEQ ID NO: 2127958 - RNA, 19 nt, Homo sapiens
  misc_RNA (1)...(19): siRNA sense strand
guucuggaccauagaguug

SEQ ID NO: 2127959 - RNA, 19 nt, Homo sapiens
  misc_RNA (1)...(19): siRNA sense strand
uggaggagaugggcuuuca

SEQ ID NO: 2127960 - RNA, 19 nt, Homo sapiens
  misc_RNA (1)...(19): siRNA sense strand
gcagguggagaaugagaau

SEQ ID NO: 2127961 - RNA, 19 nt, Homo sapiens
  misc_RNA (1)...(19): siRNA sense strand
ggguccagaucuaccaguu

SEQ ID NO: 2127962 - RNA, 19 nt, Homo sapiens
  misc_RNA (1)...(19): siRNA sense strand
ggcaaauccacacugauga

SEQ ID NO: 2127963 - RNA, 19 nt, Homo sapiens
  misc_RNA (1)...(19): siRNA sense strand
ggaugagaggcccauaguu

SEQ ID NO: 2127964 - RNA, 19 nt, Homo sapiens
  misc_RNA (1)...(19): siRNA sense strand
gguggucccagcacauuug

SEQ ID NO: 2127965 - RNA, 19 nt, Homo sapiens
  misc_RNA (1)...(19): siRNA sense strand
agaagaacagaucagauau

SEQ ID NO: 2127966 - RNA, 19 nt, Homo sapiens
  misc_RNA (1)...(19): siRNA sense strand
ggacaaggacaagaagaac

SEQ ID NO: 2127967 - RNA, 19 nt, Homo sapiens
  misc_RNA (1)...(19): siRNA sense strand
aggaagagaugaggcagau

SEQ ID NO: 2127968 - RNA, 19 nt, Homo sapiens
  misc_RNA (1)...(19): siRNA sense strand
cagcaaggugaacauuauu

SEQ ID NO: 2127969 - RNA, 19 nt, Homo sapiens
  misc_RNA (1)...(19): siRNA sense strand
cuccacaaguucaagauca

SEQ ID NO: 2127970 - RNA, 19 nt, Homo sapiens
  misc_RNA (1)...(19): siRNA sense strand
acaagaagaacagaucaga

SEQ ID NO: 2127971 - RNA, 19 nt, Homo sapiens
  misc_RNA (1)...(19): siRNA sense strand
gacaaggacaagaagaaca

SEQ ID NO: 2127972 - RNA, 19 nt, Homo sapiens
  misc_RNA (1)...(19): siRNA sense strand
ggugacagccagcccuuca

SEQ ID NO: 2127973 - RNA, 19 nt, Homo sapiens
  misc_RNA (1)...(19): siRNA sense strand
ggcacucccugaagucucu

SEQ ID NO: 2127974 - RNA, 19 nt, Homo sapiens
  misc_RNA (1)...(19): siRNA sense strand
ugaggaaggacaaggacaa

SEQ ID NO: 2127975 - RNA, 19 nt, Homo sapiens
  misc_RNA (1)...(19): siRNA sense strand
caacaaagugaaggagaca

SEQ ID NO: 2127976 - RNA, 19 nt, Homo sapiens
  misc_RNA (1)...(19): siRNA sense strand
gagcuccacaaguucaaga

SEQ ID NO: 2127977 - RNA, 19 nt, Homo sapiens
  misc_RNA (1)...(19): siRNA sense strand
ggccauauuggauccauuc

SEQ ID NO: 2127978 - RNA, 19 nt, Homo sapiens
  misc_RNA (1)...(19): siRNA sense strand
gagaccaacgccuucaauc

SEQ ID NO: 2127979 - RNA, 19 nt, Homo sapiens
  misc_RNA (1)...(19): siRNA sense strand
ugaggcuguugcagagauu

SEQ ID NO: 2127980 - RNA, 19 nt, Homo sapiens
  misc_RNA (1)...(19): siRNA sense strand
gggcuucagcuucaacauc

SEQ ID NO: 2127981 - RNA, 19 nt, Homo sapiens
  misc_RNA (1)...(19): siRNA sense strand
ggaacacuuaauaaacaga

SEQ ID NO: 2127982 - RNA, 19 nt, Homo sapiens
  misc_RNA (1)...(19): siRNA sense strand
acaaagugaaggagacaga

SEQ ID NO: 2127983 - RNA, 19 nt, Homo sapiens
  misc_RNA (1)...(19): siRNA sense strand
ucccugaagucucuagauc

SEQ ID NO: 2127984 - RNA, 19 nt, Homo sapiens
  misc_RNA (1)...(19): siRNA sense strand
augcgcaguuugaaaauua

SEQ ID NO: 2127985 - RNA, 19 nt, Homo sapiens
  misc_RNA (1)...(19): siRNA sense strand
ucaagaucaugggcgaguu

SEQ ID NO: 2127986 - RNA, 19 nt, Homo sapiens
  misc_RNA (1)...(19): siRNA sense strand
uagaucuagugaccaugaa

SEQ ID NO: 2127987 - RNA, 19 nt, Homo sapiens
  misc_RNA (1)...(19): siRNA sense strand
ggauccacguuugccucua

SEQ ID NO: 2127988 - RNA, 19 nt, Homo sapiens
  misc_RNA (1)...(19): siRNA sense strand
gaagaaaucuguccucaaa

SEQ ID NO: 2127989 - RNA, 19 nt, Homo sapiens
  misc_RNA (1)...(19): siRNA sense strand
ggaccuggaugaagacuua

SEQ ID NO: 2127990 - RNA, 19 nt, Homo sapiens
  misc_RNA (1)...(19): siRNA sense strand
caacaaaccucaucaucaa

SEQ ID NO: 2127991 - RNA, 19 nt, Homo sapiens
  misc_RNA (1)...(19): siRNA sense strand
gaaagacccuugcaaacau

SEQ ID NO: 2127992 - RNA, 19 nt, Homo sapiens
  misc_RNA (1)...(19): siRNA sense strand
cggcuaagcuguccuauga

SEQ ID NO: 2127993 - RNA, 19 nt, Homo sapiens
  misc_RNA (1)...(19): siRNA sense strand
gaugaagacuuacuugguu

SEQ ID NO: 2127994 - RNA, 19 nt, Homo sapiens
  misc_RNA (1)...(19): siRNA sense strand
caacucagauguccaaaca

SEQ ID NO: 2127995 - RNA, 19 nt, Homo sapiens
  misc_RNA (1)...(19): siRNA sense strand
uguaugaccugcaaauaaa

SEQ ID NO: 2127996 - RNA, 19 nt, Homo sapiens
  misc_RNA (1)...(19): siRNA sense strand
gcaacgggcucacccugaa

SEQ ID NO: 2127997 - RNA, 19 nt, Homo sapiens
  misc_RNA (1)...(19): siRNA sense strand
gaaagaggaucaccgucau

SEQ ID NO: 2127998 - RNA, 19 nt, Homo sapiens
  misc_RNA (1)...(19): siRNA sense strand
agaaaucuguccucaaaga

SEQ ID NO: 2127999 - RNA, 19 nt, Homo sapiens
  misc_RNA (1)...(19): siRNA sense strand
caaauaaacucgggcaucu

SEQ ID NO: 2128000 - RNA, 19 nt, Homo sapiens
  misc_RNA (1)...(19): siRNA sense strand
cagaaucacuuggcugaaa

SEQ ID NO: 2128001 - RNA, 19 nt, Homo sapiens
  misc_RNA (1)...(19): siRNA sense strand
ccaaacagcucucccuuuu

SEQ ID NO: 2128002 - RNA, 19 nt, Homo sapiens
  misc_RNA (1)...(19): siRNA sense strand
ucacugaaagcaaucaaua

SEQ ID NO: 2128003 - RNA, 19 nt, Homo sapiens
  misc_RNA (1)...(19): siRNA sense strand
ggugugaggugucagguau

SEQ ID NO: 2128004 - RNA, 19 nt, Homo sapiens
  misc_RNA (1)...(19): siRNA sense strand
gaugggagguuuuaugaaa

SEQ ID NO: 2128005 - RNA, 19 nt, Homo sapiens
  misc_RNA (1)...(19): siRNA sense strand
gcacaagucccgaccaagu

SEQ ID NO: 2128006 - RNA, 19 nt, Homo sapiens
  misc_RNA (1)...(19): siRNA sense strand
guggaugucucaacucaga

SEQ ID NO: 2128007 - RNA, 19 nt, Homo sapiens
  misc_RNA (1)...(19): siRNA sense strand
ggaagacaucaaugacuuu

SEQ ID NO: 2128008 - RNA, 19 nt, Homo sapiens
  misc_RNA (1)...(19): siRNA sense strand
cuacauggccuuccaagug

SEQ ID NO: 2128009 - RNA, 19 nt, Homo sapiens
  misc_RNA (1)...(19): siRNA sense strand
guggguaucugcagucaau

SEQ ID NO: 2128010 - RNA, 19 nt, Homo sapiens
  misc_RNA (1)...(19): siRNA sense strand
caugagcuaugaagaaauc

SEQ ID NO: 2128011 - RNA, 19 nt, Homo sapiens
  misc_RNA (1)...(19): siRNA sense strand
caucagcaguguucgguau

SEQ ID NO: 2128012 - RNA, 19 nt, Homo sapiens
  misc_RNA (1)...(19): siRNA sense strand
agacaucaaugacuuugga

SEQ ID NO: 2128013 - RNA, 19 nt, Homo sapiens
  misc_RNA (1)...(19): siRNA sense strand
ggacuuggaagacaucaau

SEQ ID NO: 2128014 - RNA, 19 nt, Homo sapiens
  misc_RNA (1)...(19): siRNA sense strand
gaccugaggccaccaauca

SEQ ID NO: 2128015 - RNA, 19 nt, Homo sapiens
  misc_RNA (1)...(19): siRNA sense strand
ccaacaaaccucaucauca

SEQ ID NO: 2128016 - RNA, 19 nt, Homo sapiens
  misc_RNA (1)...(19): siRNA sense strand
gaccaagucuccaggugau

SEQ ID NO: 2128017 - RNA, 19 nt, Homo sapiens
  misc_RNA (1)...(19): siRNA sense strand
cuagaaagacccuugcaaa

SEQ ID NO: 2128018 - RNA, 19 nt, Homo sapiens
  misc_RNA (1)...(19): siRNA sense strand
ugaaagcaaucaauacaac

SEQ ID NO: 2128019 - RNA, 19 nt, Homo sapiens
  misc_RNA (1)...(19): siRNA sense strand
uggaagacaucaaugacuu

SEQ ID NO: 2128020 - RNA, 19 nt, Homo sapiens
  misc_RNA (1)...(19): siRNA sense strand
gagagucacuguuccucau

SEQ ID NO: 2128021 - RNA, 19 nt, Homo sapiens
  misc_RNA (1)...(19): siRNA sense strand
ucuccucgcucuucauuga

SEQ ID NO: 2128022 - RNA, 19 nt, Homo sapiens
  misc_RNA (1)...(19): siRNA sense strand
gagaggaugauucccugua

SEQ ID NO: 2128023 - RNA, 19 nt, Homo sapiens
  misc_RNA (1)...(19): siRNA sense strand
gcaaucaauacaacaucua

SEQ ID NO: 2128024 - RNA, 19 nt, Homo sapiens
  misc_RNA (1)...(19): siRNA sense strand
gaggacagggucaguguga

SEQ ID NO: 2128025 - RNA, 19 nt, Homo sapiens
  misc_RNA (1)...(19): siRNA sense strand
gaagacaucaaugacuuug

SEQ ID NO: 2128026 - RNA, 19 nt, Homo sapiens
  misc_RNA (1)...(19): siRNA sense strand
uugcaggaguggaugauuu

SEQ ID NO: 2128027 - RNA, 19 nt, Homo sapiens
  misc_RNA (1)...(19): siRNA sense strand
ugaaguggguguggaugaa

SEQ ID NO: 2128028 - RNA, 19 nt, Homo sapiens
  misc_RNA (1)...(19): siRNA sense strand
cccagaagcuuugaaguca

SEQ ID NO: 2128029 - RNA, 19 nt, Homo sapiens
  misc_RNA (1)...(19): siRNA sense strand
gauaucuccucgcucuuca

SEQ ID NO: 2128030 - RNA, 19 nt, Homo sapiens
  misc_RNA (1)...(19): siRNA sense strand
gaaagcaaucaauacaaca

SEQ ID NO: 2128031 - RNA, 19 nt, Homo sapiens
  misc_RNA (1)...(19): siRNA sense strand
gaaaguccuacaguccaua

SEQ ID NO: 2128032 - RNA, 19 nt, Homo sapiens
  misc_RNA (1)...(19): siRNA sense strand
gaaggagacagcagacaag

SEQ ID NO: 2128033 - RNA, 19 nt, Homo sapiens
  misc_RNA (1)...(19): siRNA sense strand
gcguggaugucucaacuca

SEQ ID NO: 2128034 - RNA, 19 nt, Homo sapiens
  misc_RNA (1)...(19): siRNA sense strand
cagaagcuuugaagucaca

SEQ ID NO: 2128035 - RNA, 19 nt, Homo sapiens
  misc_RNA (1)...(19): siRNA sense strand
ugugaggugucagguauaa

SEQ ID NO: 2128036 - RNA, 19 nt, Homo sapiens
  misc_RNA (1)...(19): siRNA sense strand
cccgacagcugcucguuga

SEQ ID NO: 2128037 - RNA, 19 nt, Homo sapiens
  misc_RNA (1)...(19): siRNA sense strand
cgacauccaagcccagaaa

SEQ ID NO: 2128038 - RNA, 19 nt, Homo sapiens
  misc_RNA (1)...(19): siRNA sense strand
agaaagacccuugcaaaca

SEQ ID NO: 2128039 - RNA, 19 nt, Homo sapiens
  misc_RNA (1)...(19): siRNA sense strand
gaagacucagcuagaaaga

SEQ ID NO: 2128040 - RNA, 19 nt, Homo sapiens
  misc_RNA (1)...(19): siRNA sense strand
cgaacuggcucagcaugug

SEQ ID NO: 2128041 - RNA, 19 nt, Homo sapiens
  misc_RNA (1)...(19): siRNA sense strand
aaucuguccucaaagagaa

SEQ ID NO: 2128042 - RNA, 19 nt, Homo sapiens
  misc_RNA (1)...(19): siRNA sense strand
aaacagcucucccuuuuag

SEQ ID NO: 2128043 - RNA, 19 nt, Homo sapiens
  misc_RNA (1)...(19): siRNA sense strand
ggccaccaaucaucuggaa

SEQ ID NO: 2128044 - RNA, 19 nt, Homo sapiens
  misc_RNA (1)...(19): siRNA sense strand
ggaugaagacuuacuuggu

SEQ ID NO: 2128045 - RNA, 19 nt, Homo sapiens
  misc_RNA (1)...(19): siRNA sense strand
gugcacaagucccgaccaa

SEQ ID NO: 2128046 - RNA, 19 nt, Homo sapiens
  misc_RNA (1)...(19): siRNA sense strand
gaggagcccagaagcuuug

SEQ ID NO: 2128047 - RNA, 19 nt, Homo sapiens
  misc_RNA (1)...(19): siRNA sense strand
caucagguuuggcuucauc

SEQ ID NO: 2128048 - RNA, 19 nt, Homo sapiens
  misc_RNA (1)...(19): siRNA sense strand
gcuuugaagucacaagaag

SEQ ID NO: 2128049 - RNA, 19 nt, Homo sapiens
  misc_RNA (1)...(19): siRNA sense strand
gaggaugauucccuguaca

SEQ ID NO: 2128050 - RNA, 19 nt, Homo sapiens
  misc_RNA (1)...(19): siRNA sense strand
gugggugggugagguauga

SEQ ID NO: 2128051 - RNA, 19 nt, Homo sapiens
  misc_RNA (1)...(19): siRNA sense strand
aggaguggaugauuucuuc

SEQ ID NO: 2128052 - RNA, 19 nt, Homo sapiens
  misc_RNA (1)...(19): siRNA sense strand
gcaguguucgguaugaaga

SEQ ID NO: 2128053 - RNA, 19 nt, Homo sapiens
  misc_RNA (1)...(19): siRNA sense strand
gaagucacaagaagagaag

SEQ ID NO: 2128054 - RNA, 19 nt, Homo sapiens
  misc_RNA (1)...(19): siRNA sense strand
ggguguggaugaagauauc

SEQ ID NO: 2128055 - RNA, 19 nt, Homo sapiens
  misc_RNA (1)...(19): siRNA sense strand
ggugaccuccuccgauuug

SEQ ID NO: 2128056 - RNA, 19 nt, Homo sapiens
  misc_RNA (1)...(19): siRNA sense strand
cuguaugaccugcaaauaa

SEQ ID NO: 2128057 - RNA, 19 nt, Homo sapiens
  misc_RNA (1)...(19): siRNA sense strand
gagcuaugaagaaaucugu

SEQ ID NO: 2128058 - RNA, 19 nt, Homo sapiens
  misc_RNA (1)...(19): siRNA sense strand
cugcuugccuccugggaaa

SEQ ID NO: 2128059 - RNA, 19 nt, Homo sapiens
  misc_RNA (1)...(19): siRNA sense strand
ugaacuuccuggacuugga

SEQ ID NO: 2128060 - RNA, 19 nt, Homo sapiens
  misc_RNA (1)...(19): siRNA sense strand
ucacuguuccucaucaaug

SEQ ID NO: 2128061 - RNA, 19 nt, Homo sapiens
  misc_RNA (1)...(19): siRNA sense strand
gagucacuguuccucauca

SEQ ID NO: 2128062 - RNA, 19 nt, Homo sapiens
  misc_RNA (1)...(19): siRNA sense strand
gacccuguaugaccugcaa

SEQ ID NO: 2128063 - RNA, 19 nt, Homo sapiens
  misc_RNA (1)...(19): siRNA sense strand
ggaccuggaaacaaugaug

SEQ ID NO: 2128064 - RNA, 19 nt, Homo sapiens
  misc_RNA (1)...(19): siRNA sense strand
gcccagaagcuuugaaguc

SEQ ID NO: 2128065 - RNA, 19 nt, Homo sapiens
  misc_RNA (1)...(19): siRNA sense strand
gaaugugccgccagucauc

SEQ ID NO: 2128066 - RNA, 19 nt, Homo sapiens
  misc_RNA (1)...(19): siRNA sense strand
ucagcaguguucgguauga

SEQ ID NO: 2128067 - RNA, 19 nt, Homo sapiens
  misc_RNA (1)...(19): siRNA sense strand
gaaaucuguccucaaagag

SEQ ID NO: 2128068 - RNA, 19 nt, Homo sapiens
  misc_RNA (1)...(19): siRNA sense strand
caaugacuuuggagaggau

SEQ ID NO: 2128069 - RNA, 19 nt, Homo sapiens
  misc_RNA (1)...(19): siRNA sense strand
uaaacucgggcaucucaga

SEQ ID NO: 2128070 - RNA, 19 nt, Homo sapiens
  misc_RNA (1)...(19): siRNA sense strand
cagaggagcccagaagcuu

SEQ ID NO: 2128071 - RNA, 19 nt, Homo sapiens
  misc_RNA (1)...(19): siRNA sense strand
aauuacaccugccaugcuu

SEQ ID NO: 2128072 - RNA, 19 nt, Homo sapiens
  misc_RNA (1)...(19): siRNA sense strand
gcuagaaagacccuugcaa

SEQ ID NO: 2128073 - RNA, 19 nt, Homo sapiens
  misc_RNA (1)...(19): siRNA sense strand
ugaagucacaagaagagaa

SEQ ID NO: 2128074 - RNA, 19 nt, Homo sapiens
  misc_RNA (1)...(19): siRNA sense strand
ggaaggugggcaugcugaa

SEQ ID NO: 2128075 - RNA, 19 nt, Homo sapiens
  misc_RNA (1)...(19): siRNA sense strand
ggcuucaucuucaacaagu

SEQ ID NO: 2128076 - RNA, 19 nt, Homo sapiens
  misc_RNA (1)...(19): siRNA sense strand
cagcaguguucgguaugaa

SEQ ID NO: 2128077 - RNA, 19 nt, Homo sapiens
  misc_RNA (1)...(19): siRNA sense strand
aaagacccuugcaaacauc

SEQ ID NO: 2128078 - RNA, 19 nt, Homo sapiens
  misc_RNA (1)...(19): siRNA sense strand
agaaggagacagcagacaa

SEQ ID NO: 2128079 - RNA, 19 nt, Homo sapiens
  misc_RNA (1)...(19): siRNA sense strand
aauaaacucgggcaucuca

SEQ ID NO: 2128080 - RNA, 19 nt, Homo sapiens
  misc_RNA (1)...(19): siRNA sense strand
ggaugucucaacucagaug

SEQ ID NO: 2128081 - RNA, 19 nt, Homo sapiens
  misc_RNA (1)...(19): siRNA sense strand
ccucaucaaugggagacaa

SEQ ID NO: 2128082 - RNA, 19 nt, Homo sapiens
  misc_RNA (1)...(19): siRNA sense strand
agaaaguccuacaguccau

SEQ ID NO: 2128083 - RNA, 19 nt, Homo sapiens
  misc_RNA (1)...(19): siRNA sense strand
cauugaagacucagcuaga

SEQ ID NO: 2128084 - RNA, 19 nt, Homo sapiens
  misc_RNA (1)...(19): siRNA sense strand
gggcaugcugaagaacuua

SEQ ID NO: 2128085 - RNA, 19 nt, Homo sapiens
  misc_RNA (1)...(19): siRNA sense strand
cggaaccgguacaucuaug

SEQ ID NO: 2128086 - RNA, 19 nt, Homo sapiens
  misc_RNA (1)...(19): siRNA sense strand
uagaaagacccuugcaaac

SEQ ID NO: 2128087 - RNA, 19 nt, Homo sapiens
  misc_RNA (1)...(19): siRNA sense strand
ugaagacucagcuagaaag

SEQ ID NO: 2128088 - RNA, 19 nt, Homo sapiens
  misc_RNA (1)...(19): siRNA sense strand
ccagagaacuuauuaguaa

SEQ ID NO: 2128089 - RNA, 19 nt, Homo sapiens
  misc_RNA (1)...(19): siRNA sense strand
guaaagagcucgugcaaga

SEQ ID NO: 2128090 - RNA, 19 nt, Homo sapiens
  misc_RNA (1)...(19): siRNA sense strand
cauggaaacuucuuuguua

SEQ ID NO: 2128091 - RNA, 19 nt, Homo sapiens
  misc_RNA (1)...(19): siRNA sense strand
ggacguacaucaauccuuu

SEQ ID NO: 2128092 - RNA, 19 nt, Homo sapiens
  misc_RNA (1)...(19): siRNA sense strand
caaaggagauggaagugua

SEQ ID NO: 2128093 - RNA, 19 nt, Homo sapiens
  misc_RNA (1)...(19): siRNA sense strand
gaaacuggauacuugaauu

SEQ ID NO: 2128094 - RNA, 19 nt, Homo sapiens
  misc_RNA (1)...(19): siRNA sense strand
ugaaggagguggcuuauug

SEQ ID NO: 2128095 - RNA, 19 nt, Homo sapiens
  misc_RNA (1)...(19): siRNA sense strand
ccacaaauguuuaccaaga

SEQ ID NO: 2128096 - RNA, 19 nt, Homo sapiens
  misc_RNA (1)...(19): siRNA sense strand
gagcagagauggagcuuuc

SEQ ID NO: 2128097 - RNA, 19 nt, Homo sapiens
  misc_RNA (1)...(19): siRNA sense strand
agaaggaacuacagagaua

SEQ ID NO: 2128098 - RNA, 19 nt, Homo sapiens
  misc_RNA (1)...(19): siRNA sense strand
ccacaagccuuuacucaga

SEQ ID NO: 2128099 - RNA, 19 nt, Homo sapiens
  misc_RNA (1)...(19): siRNA sense strand
gaaagaagaauucguguuc

SEQ ID NO: 2128100 - RNA, 19 nt, Homo sapiens
  misc_RNA (1)...(19): siRNA sense strand
gcacaacccaguccaagua

SEQ ID NO: 2128101 - RNA, 19 nt, Homo sapiens
  misc_RNA (1)...(19): siRNA sense strand
gaaauuagccuuggacugu

SEQ ID NO: 2128102 - RNA, 19 nt, Homo sapiens
  misc_RNA (1)...(19): siRNA sense strand
gaacuacagagauaccuua

SEQ ID NO: 2128103 - RNA, 19 nt, Homo sapiens
  misc_RNA (1)...(19): siRNA sense strand
gaccagaguuuauggagaa

SEQ ID NO: 2128104 - RNA, 19 nt, Homo sapiens
  misc_RNA (1)...(19): siRNA sense strand
gaauucguguucauacuuu

SEQ ID NO: 2128105 - RNA, 19 nt, Homo sapiens
  misc_RNA (1)...(19): siRNA sense strand
gaagaaugguccuguccaa

SEQ ID NO: 2128106 - RNA, 19 nt, Homo sapiens
  misc_RNA (1)...(19): siRNA sense strand
aaagcaaacuuccuucaaa

SEQ ID NO: 2128107 - RNA, 19 nt, Homo sapiens
  misc_RNA (1)...(19): siRNA sense strand
ccaagaagguauuacauca

SEQ ID NO: 2128108 - RNA, 19 nt, Homo sapiens
  misc_RNA (1)...(19): siRNA sense strand
ccacaaaucaucaauaugu

SEQ ID NO: 2128109 - RNA, 19 nt, Homo sapiens
  misc_RNA (1)...(19): siRNA sense strand
caccacagcuuacuaacaa

SEQ ID NO: 2128110 - RNA, 19 nt, Homo sapiens
  misc_RNA (1)...(19): siRNA sense strand
gcuuucaucucuuggcuua

SEQ ID NO: 2128111 - RNA, 19 nt, Homo sapiens
  misc_RNA (1)...(19): siRNA sense strand
ucaaugauguuccugaaga

SEQ ID NO: 2128112 - RNA, 19 nt, Homo sapiens
  misc_RNA (1)...(19): siRNA sense strand
ggauauccuucacuucaaa

SEQ ID NO: 2128113 - RNA, 19 nt, Homo sapiens
  misc_RNA (1)...(19): siRNA sense strand
guucuucagucuuaaguaa

SEQ ID NO: 2128114 - RNA, 19 nt, Homo sapiens
  misc_RNA (1)...(19): siRNA sense strand
gagccgaaguguuggauau

SEQ ID NO: 2128115 - RNA, 19 nt, Homo sapiens
  misc_RNA (1)...(19): siRNA sense strand
ucaagcaauuucaggguua

SEQ ID NO: 2128116 - RNA, 19 nt, Homo sapiens
  misc_RNA (1)...(19): siRNA sense strand
gagcugauguucaagcaau

SEQ ID NO: 2128117 - RNA, 19 nt, Homo sapiens
  misc_RNA (1)...(19): siRNA sense strand
gaagacauccagaaacuca

SEQ ID NO: 2128118 - RNA, 19 nt, Homo sapiens
  misc_RNA (1)...(19): siRNA sense strand
ggaugagaguccaaugaaa

SEQ ID NO: 2128119 - RNA, 19 nt, Homo sapiens
  misc_RNA (1)...(19): siRNA sense strand
ucaaagacuuagugcaauu

SEQ ID NO: 2128120 - RNA, 19 nt, Homo sapiens
  misc_RNA (1)...(19): siRNA sense strand
caacaccacagcuuacuaa

SEQ ID NO: 2128121 - RNA, 19 nt, Homo sapiens
  misc_RNA (1)...(19): siRNA sense strand
acacucaguugguuucuuu

SEQ ID NO: 2128122 - RNA, 19 nt, Homo sapiens
  misc_RNA (1)...(19): siRNA sense strand
uccagaaacucaacuguaa

SEQ ID NO: 2128123 - RNA, 19 nt, Homo sapiens
  misc_RNA (1)...(19): siRNA sense strand
ccaacuguaucuggaaaua

SEQ ID NO: 2128124 - RNA, 19 nt, Homo sapiens
  misc_RNA (1)...(19): siRNA sense strand
gcaagaugaugaaaaguaa

SEQ ID NO: 2128125 - RNA, 19 nt, Homo sapiens
  misc_RNA (1)...(19): siRNA sense strand
caaccgacuuacugucuuu

SEQ ID NO: 2128126 - RNA, 19 nt, Homo sapiens
  misc_RNA (1)...(19): siRNA sense strand
ggacuguucuggucagcaa

SEQ ID NO: 2128127 - RNA, 19 nt, Homo sapiens
  misc_RNA (1)...(19): siRNA sense strand
aaacacaacucccaacucu

SEQ ID NO: 2128128 - RNA, 19 nt, Homo sapiens
  misc_RNA (1)...(19): siRNA sense strand
gaaacaugcuuccgucaac

SEQ ID NO: 2128129 - RNA, 19 nt, Homo sapiens
  misc_RNA (1)...(19): siRNA sense strand
cagcagguagugucuauua

SEQ ID NO: 2128130 - RNA, 19 nt, Homo sapiens
  misc_RNA (1)...(19): siRNA sense strand
uaauucagcugucaaccaa

SEQ ID NO: 2128131 - RNA, 19 nt, Homo sapiens
  misc_RNA (1)...(19): siRNA sense strand
gaaagcaaacuuccuucaa

SEQ ID NO: 2128132 - RNA, 19 nt, Homo sapiens
  misc_RNA (1)...(19): siRNA sense strand
ugacagaccuuccagaacu

SEQ ID NO: 2128133 - RNA, 19 nt, Homo sapiens
  misc_RNA (1)...(19): siRNA sense strand
caaaugcacgucuagauga

SEQ ID NO: 2128134 - RNA, 19 nt, Homo sapiens
  misc_RNA (1)...(19): siRNA sense strand
guaccacccucuuccuuga

SEQ ID NO: 2128135 - RNA, 19 nt, Homo sapiens
  misc_RNA (1)...(19): siRNA sense strand
gauagaagacagaacagaa

SEQ ID NO: 2128136 - RNA, 19 nt, Homo sapiens
  misc_RNA (1)...(19): siRNA sense strand
caguguaucucuuuguauu

SEQ ID NO: 2128137 - RNA, 19 nt, Homo sapiens
  misc_RNA (1)...(19): siRNA sense strand
gcaacaagugaauaaauga

SEQ ID NO: 2128138 - RNA, 19 nt, Homo sapiens
  misc_RNA (1)...(19): siRNA sense strand
uuaccguucuucagucuua

SEQ ID NO: 2128139 - RNA, 19 nt, Homo sapiens
  misc_RNA (1)...(19): siRNA sense strand
gaaauuacagaaggaacua

SEQ ID NO: 2128140 - RNA, 19 nt, Homo sapiens
  misc_RNA (1)...(19): siRNA sense strand
guuuauggcuccuucagaa

SEQ ID NO: 2128141 - RNA, 19 nt, Homo sapiens
  misc_RNA (1)...(19): siRNA sense strand
ccucagaugcuaauaguuu

SEQ ID NO: 2128142 - RNA, 19 nt, Homo sapiens
  misc_RNA (1)...(19): siRNA sense strand
agucgaaacuggauacuug

SEQ ID NO: 2128143 - RNA, 19 nt, Homo sapiens
  misc_RNA (1)...(19): siRNA sense strand
ggaaauacaaguuuaacca

SEQ ID NO: 2128144 - RNA, 19 nt, Homo sapiens
  misc_RNA (1)...(19): siRNA sense strand
agauggagcuuuccucaug

SEQ ID NO: 2128145 - RNA, 19 nt, Homo sapiens
  misc_RNA (1)...(19): siRNA sense strand
cagcaaaggcgaaagaaga

SEQ ID NO: 2128146 - RNA, 19 nt, Homo sapiens
  misc_RNA (1)...(19): siRNA sense strand
gugguuaccuccaguacaa

SEQ ID NO: 2128147 - RNA, 19 nt, Homo sapiens
  misc_RNA (1)...(19): siRNA sense strand
gcuaaucauuuaaccacaa

SEQ ID NO: 2128148 - RNA, 19 nt, Homo sapiens
  misc_RNA (1)...(19): siRNA sense strand
gaauucaguuugccagagu

SEQ ID NO: 2128149 - RNA, 19 nt, Homo sapiens
  misc_RNA (1)...(19): siRNA sense strand
uaauagcuuucaucucuug

SEQ ID NO: 2128150 - RNA, 19 nt, Homo sapiens
  misc_RNA (1)...(19): siRNA sense strand
gcaugaagacauccagaaa

SEQ ID NO: 2128151 - RNA, 19 nt, Homo sapiens
  misc_RNA (1)...(19): siRNA sense strand
gaauuccuguugcauauac

SEQ ID NO: 2128152 - RNA, 19 nt, Homo sapiens
  misc_RNA (1)...(19): siRNA sense strand
uggagaaccucacagaaga

SEQ ID NO: 2128153 - RNA, 19 nt, Homo sapiens
  misc_RNA (1)...(19): siRNA sense strand
gaucaaaggagauggaagu

SEQ ID NO: 2128154 - RNA, 19 nt, Homo sapiens
  misc_RNA (1)...(19): siRNA sense strand
caauauaacuauccaucca

SEQ ID NO: 2128155 - RNA, 19 nt, Homo sapiens
  misc_RNA (1)...(19): siRNA sense strand
uguguuggcucuccuuaaa

SEQ ID NO: 2128156 - RNA, 19 nt, Homo sapiens
  misc_RNA (1)...(19): siRNA sense strand
cgugcaagauuuacugaaa

SEQ ID NO: 2128157 - RNA, 19 nt, Homo sapiens
  misc_RNA (1)...(19): siRNA sense strand
gauugaaggagguggcuua

SEQ ID NO: 2128158 - RNA, 19 nt, Homo sapiens
  misc_RNA (1)...(19): siRNA sense strand
ccaguacaauugugagaug

SEQ ID NO: 2128159 - RNA, 19 nt, Homo sapiens
  misc_RNA (1)...(19): siRNA sense strand
cuacagagauaccuuacuc

SEQ ID NO: 2128160 - RNA, 19 nt, Homo sapiens
  misc_RNA (1)...(19): siRNA sense strand
uaacaagaaucccaaaaug

SEQ ID NO: 2128161 - RNA, 19 nt, Homo sapiens
  misc_RNA (1)...(19): siRNA sense strand
ggaaacuucuuuguuaggu

SEQ ID NO: 2128162 - RNA, 19 nt, Homo sapiens
  misc_RNA (1)...(19): siRNA sense strand
acacaacucccaacucuug

SEQ ID NO: 2128163 - RNA, 19 nt, Homo sapiens
  misc_RNA (1)...(19): siRNA sense strand
gaaugucugucuuucaaac

SEQ ID NO: 2128164 - RNA, 19 nt, Homo sapiens
  misc_RNA (1)...(19): siRNA sense strand
ucgaaugucugucuuucaa

SEQ ID NO: 2128165 - RNA, 19 nt, Homo sapiens
  misc_RNA (1)...(19): siRNA sense strand
gaaguguuggauauucaua

SEQ ID NO: 2128166 - RNA, 19 nt, Homo sapiens
  misc_RNA (1)...(19): siRNA sense strand
ggucaucugcuaaggauau

SEQ ID NO: 2128167 - RNA, 19 nt, Homo sapiens
  misc_RNA (1)...(19): siRNA sense strand
ucacagaagaccagaaguu

SEQ ID NO: 2128168 - RNA, 19 nt, Homo sapiens
  misc_RNA (1)...(19): siRNA sense strand
caaugauguuccugaagaa

SEQ ID NO: 2128169 - RNA, 19 nt, Homo sapiens
  misc_RNA (1)...(19): siRNA sense strand
gcauauacagcaacaagug

SEQ ID NO: 2128170 - RNA, 19 nt, Homo sapiens
  misc_RNA (1)...(19): siRNA sense strand
ccaguaguuucgacucuga

SEQ ID NO: 2128171 - RNA, 19 nt, Homo sapiens
  misc_RNA (1)...(19): siRNA sense strand
gaagaauucguguucauac

SEQ ID NO: 2128172 - RNA, 19 nt, Homo sapiens
  misc_RNA (1)...(19): siRNA sense strand
caaaggcgaaagaagaauu

SEQ ID NO: 2128173 - RNA, 19 nt, Homo sapiens
  misc_RNA (1)...(19): siRNA sense strand
gccagagaacuuauuagua

SEQ ID NO: 2128174 - RNA, 19 nt, Homo sapiens
  misc_RNA (1)...(19): siRNA sense strand
acaguacaauccauuucua

SEQ ID NO: 2128175 - RNA, 19 nt, Homo sapiens
  misc_RNA (1)...(19): siRNA sense strand
cagccaaguucuaggaguu

SEQ ID NO: 2128176 - RNA, 19 nt, Homo sapiens
  misc_RNA (1)...(19): siRNA sense strand
guauagaguugacaaucuc

SEQ ID NO: 2128177 - RNA, 19 nt, Homo sapiens
  misc_RNA (1)...(19): siRNA sense strand
gaugagaguccaaugaaag

SEQ ID NO: 2128178 - RNA, 19 nt, Homo sapiens
  misc_RNA (1)...(19): siRNA sense strand
gggaugagaguccaaugaa

SEQ ID NO: 2128179 - RNA, 19 nt, Homo sapiens
  misc_RNA (1)...(19): siRNA sense strand
uggagaagcugagcagaga

SEQ ID NO: 2128180 - RNA, 19 nt, Homo sapiens
  misc_RNA (1)...(19): siRNA sense strand
acaccaaugccuucuagua

SEQ ID NO: 2128181 - RNA, 19 nt, Homo sapiens
  misc_RNA (1)...(19): siRNA sense strand
gaacuugauacaccagaau

SEQ ID NO: 2128182 - RNA, 19 nt, Homo sapiens
  misc_RNA (1)...(19): siRNA sense strand
aaccacaggucaucugcua

SEQ ID NO: 2128183 - RNA, 19 nt, Homo sapiens
  misc_RNA (1)...(19): siRNA sense strand
gagccaaggauacaauuuc

SEQ ID NO: 2128184 - RNA, 19 nt, Homo sapiens
  misc_RNA (1)...(19): siRNA sense strand
aaagagcucgugcaagauu

SEQ ID NO: 2128185 - RNA, 19 nt, Homo sapiens
  misc_RNA (1)...(19): siRNA sense strand
guguaucucuuuguauuug

SEQ ID NO: 2128186 - RNA, 19 nt, Homo sapiens
  misc_RNA (1)...(19): siRNA sense strand
guaguuacgacgagauuga

SEQ ID NO: 2128187 - RNA, 19 nt, Homo sapiens
  misc_RNA (1)...(19): siRNA sense strand
caauauguuucuucuggau

SEQ ID NO: 2128188 - RNA, 19 nt, Homo sapiens
  misc_RNA (1)...(19): siRNA sense strand
gcaaagagaaugagauuaa

SEQ ID NO: 2128189 - RNA, 19 nt, Homo sapiens
  misc_RNA (1)...(19): siRNA sense strand
ccaagcagcuggagaaaga

SEQ ID NO: 2128190 - RNA, 19 nt, Homo sapiens
  misc_RNA (1)...(19): siRNA sense strand
aaacagaucuucaggaauc

SEQ ID NO: 2128191 - RNA, 19 nt, Homo sapiens
  misc_RNA (1)...(19): siRNA sense strand
agaagaagcugguggaaga

SEQ ID NO: 2128192 - RNA, 19 nt, Homo sapiens
  misc_RNA (1)...(19): siRNA sense strand
gaggagaaguuacaguuug

SEQ ID NO: 2128193 - RNA, 19 nt, Homo sapiens
  misc_RNA (1)...(19): siRNA sense strand
aagagaagcuggccuuuga

SEQ ID NO: 2128194 - RNA, 19 nt, Homo sapiens
  misc_RNA (1)...(19): siRNA sense strand
agaaacagaucuucaggaa

SEQ ID NO: 2128195 - RNA, 19 nt, Homo sapiens
  misc_RNA (1)...(19): siRNA sense strand
ggaaucacaugucugacuu

SEQ ID NO: 2128196 - RNA, 19 nt, Homo sapiens
  misc_RNA (1)...(19): siRNA sense strand
caaggaagaggagaaguua

SEQ ID NO: 2128197 - RNA, 19 nt, Homo sapiens
  misc_RNA (1)...(19): siRNA sense strand
gaaugagauuaaagaguug

SEQ ID NO: 2128198 - RNA, 19 nt, Homo sapiens
  misc_RNA (1)...(19): siRNA sense strand
gaaagcugcccaugccaaa

SEQ ID NO: 2128199 - RNA, 19 nt, Homo sapiens
  misc_RNA (1)...(19): siRNA sense strand
gagaagcuggccuuugaaa

SEQ ID NO: 2128200 - RNA, 19 nt, Homo sapiens
  misc_RNA (1)...(19): siRNA sense strand
ggacgaaaauuuugucagu

SEQ ID NO: 2128201 - RNA, 19 nt, Homo sapiens
  misc_RNA (1)...(19): siRNA sense strand
ccaaggaagaggagaaguu

SEQ ID NO: 2128202 - RNA, 19 nt, Homo sapiens
  misc_RNA (1)...(19): siRNA sense strand
ggaccagaagcauaagaaa

SEQ ID NO: 2128203 - RNA, 19 nt, Homo sapiens
  misc_RNA (1)...(19): siRNA sense strand
gaagcugguggaagagaaa

SEQ ID NO: 2128204 - RNA, 19 nt, Homo sapiens
  misc_RNA (1)...(19): siRNA sense strand
aaagcgcucuccaguguca

SEQ ID NO: 2128205 - RNA, 19 nt, Homo sapiens
  misc_RNA (1)...(19): siRNA sense strand
gagaaugagauuaaagagu

SEQ ID NO: 2128206 - RNA, 19 nt, Homo sapiens
  misc_RNA (1)...(19): siRNA sense strand
gaaacagaucuucaggaau

SEQ ID NO: 2128207 - RNA, 19 nt, Homo sapiens
  misc_RNA (1)...(19): siRNA sense strand
agaagcagcaggagagcua

SEQ ID NO: 2128208 - RNA, 19 nt, Homo sapiens
  misc_RNA (1)...(19): siRNA sense strand
gcaagaaggaccagcucau

SEQ ID NO: 2128209 - RNA, 19 nt, Homo sapiens
  misc_RNA (1)...(19): siRNA sense strand
gaagaggagaaguuacagu

SEQ ID NO: 2128210 - RNA, 19 nt, Homo sapiens
  misc_RNA (1)...(19): siRNA sense strand
cuucaggaguccagcaaga

SEQ ID NO: 2128211 - RNA, 19 nt, Homo sapiens
  misc_RNA (1)...(19): siRNA sense strand
gaccagaagcauaagaaag

SEQ ID NO: 2128212 - RNA, 19 nt, Homo sapiens
  misc_RNA (1)...(19): siRNA sense strand
uggcaaagagaaugagauu

SEQ ID NO: 2128213 - RNA, 19 nt, Homo sapiens
  misc_RNA (1)...(19): siRNA sense strand
agaagcugguggaagagaa

SEQ ID NO: 2128214 - RNA, 19 nt, Homo sapiens
  misc_RNA (1)...(19): siRNA sense strand
gugucucgcuuuagaucaa

SEQ ID NO: 2128215 - RNA, 19 nt, Homo sapiens
  misc_RNA (1)...(19): siRNA sense strand
cagcagaaacagaucuuca

SEQ ID NO: 2128216 - RNA, 19 nt, Homo sapiens
  misc_RNA (1)...(19): siRNA sense strand
caagaaggaccagcucauc

SEQ ID NO: 2128217 - RNA, 19 nt, Homo sapiens
  misc_RNA (1)...(19): siRNA sense strand
aagaggagaaguuacaguu

SEQ ID NO: 2128218 - RNA, 19 nt, Homo sapiens
  misc_RNA (1)...(19): siRNA sense strand
gaucugugugucucgcuuu

SEQ ID NO: 2128219 - RNA, 19 nt, Homo sapiens
  misc_RNA (1)...(19): siRNA sense strand
ggcaaagagaaugagauua

SEQ ID NO: 2128220 - RNA, 19 nt, Homo sapiens
  misc_RNA (1)...(19): siRNA sense strand
gaccagcucaucaccaagu

SEQ ID NO: 2128221 - RNA, 19 nt, Homo sapiens
  misc_RNA (1)...(19): siRNA sense strand
gacgaaaauuuugucagua

SEQ ID NO: 2128222 - RNA, 19 nt, Homo sapiens
  misc_RNA (1)...(19): siRNA sense strand
agguagaggugcuauccaa

SEQ ID NO: 2128223 - RNA, 19 nt, Homo sapiens
  misc_RNA (1)...(19): siRNA sense strand
ggagaagaagcugguggaa

SEQ ID NO: 2128224 - RNA, 19 nt, Homo sapiens
  misc_RNA (1)...(19): siRNA sense strand
agaggagaaguuacaguuu

SEQ ID NO: 2128225 - RNA, 19 nt, Homo sapiens
  misc_RNA (1)...(19): siRNA sense strand
gaucuucaggaaucacaug

SEQ ID NO: 2128226 - RNA, 19 nt, Homo sapiens
  misc_RNA (1)...(19): siRNA sense strand
aggaccagcucaucaccaa

SEQ ID NO: 2128227 - RNA, 19 nt, Homo sapiens
  misc_RNA (1)...(19): siRNA sense strand
cuucaggaaucacaugucu

SEQ ID NO: 2128228 - RNA, 19 nt, Homo sapiens
  misc_RNA (1)...(19): siRNA sense strand
agucucacauuauaaagca

SEQ ID NO: 2128229 - RNA, 19 nt, Homo sapiens
  misc_RNA (1)...(19): siRNA sense strand
caccaagugcaaugagauu

SEQ ID NO: 2128230 - RNA, 19 nt, Homo sapiens
  misc_RNA (1)...(19): siRNA sense strand
caacugcgggacgugauug

SEQ ID NO: 2128231 - RNA, 19 nt, Homo sapiens
  misc_RNA (1)...(19): siRNA sense strand
uuaauggcaaagagaauga

SEQ ID NO: 2128232 - RNA, 19 nt, Homo sapiens
  misc_RNA (1)...(19): siRNA sense strand
aagaaggaccagcucauca

SEQ ID NO: 2128233 - RNA, 19 nt, Homo sapiens
  misc_RNA (1)...(19): siRNA sense strand
cugugugucucgcuuuaga

SEQ ID NO: 2128234 - RNA, 19 nt, Homo sapiens
  misc_RNA (1)...(19): siRNA sense strand
ggaagaaagucguggauuu

SEQ ID NO: 2128235 - RNA, 19 nt, Homo sapiens
  misc_RNA (1)...(19): siRNA sense strand
gaauuuagaugaugcugua

SEQ ID NO: 2128236 - RNA, 19 nt, Homo sapiens
  misc_RNA (1)...(19): siRNA sense strand
gaagaucuauccuugugua

SEQ ID NO: 2128237 - RNA, 19 nt, Homo sapiens
  misc_RNA (1)...(19): siRNA sense strand
ggaauaaucuuugcugaga

SEQ ID NO: 2128238 - RNA, 19 nt, Homo sapiens
  misc_RNA (1)...(19): siRNA sense strand
caagaagucugaagaucua

SEQ ID NO: 2128239 - RNA, 19 nt, Homo sapiens
  misc_RNA (1)...(19): siRNA sense strand
caaacuauauggaaagaga

SEQ ID NO: 2128240 - RNA, 19 nt, Homo sapiens
  misc_RNA (1)...(19): siRNA sense strand
ggaaagagacaagaaauau

SEQ ID NO: 2128241 - RNA, 19 nt, Homo sapiens
  misc_RNA (1)...(19): siRNA sense strand
caagaaauaugguacaaag

SEQ ID NO: 2128242 - RNA, 19 nt, Homo sapiens
  misc_RNA (1)...(19): siRNA sense strand
gaucuauccuuguguaaug

SEQ ID NO: 2128243 - RNA, 19 nt, Homo sapiens
  misc_RNA (1)...(19): siRNA sense strand
caagaugacuuugguauca

SEQ ID NO: 2128244 - RNA, 19 nt, Homo sapiens
  misc_RNA (1)...(19): siRNA sense strand
gaagagauguuugaagaag

SEQ ID NO: 2128245 - RNA, 19 nt, Homo sapiens
  misc_RNA (1)...(19): siRNA sense strand
ggauacaaguccaggauau

SEQ ID NO: 2128246 - RNA, 19 nt, Homo sapiens
  misc_RNA (1)...(19): siRNA sense strand
gaaauaugguacaaagaca

SEQ ID NO: 2128247 - RNA, 19 nt, Homo sapiens
  misc_RNA (1)...(19): siRNA sense strand
gcagacagcauuuacagaa

SEQ ID NO: 2128248 - RNA, 19 nt, Homo sapiens
  misc_RNA (1)...(19): siRNA sense strand
agaagaagcugaagaagag

SEQ ID NO: 2128249 - RNA, 19 nt, Homo sapiens
  misc_RNA (1)...(19): siRNA sense strand
uggaagagauguuugaaga

SEQ ID NO: 2128250 - RNA, 19 nt, Homo sapiens
  misc_RNA (1)...(19): siRNA sense strand
agagauacuugguguaauu

SEQ ID NO: 2128251 - RNA, 19 nt, Homo sapiens
  misc_RNA (1)...(19): siRNA sense strand
gauauugcaugcagaagau

SEQ ID NO: 2128252 - RNA, 19 nt, Homo sapiens
  misc_RNA (1)...(19): siRNA sense strand
gacagcauuuacagaauuu

SEQ ID NO: 2128253 - RNA, 19 nt, Homo sapiens
  misc_RNA (1)...(19): siRNA sense strand
gaaagagacaagaaauaug

SEQ ID NO: 2128254 - RNA, 19 nt, Homo sapiens
  misc_RNA (1)...(19): siRNA sense strand
uggacaaucuuauuacuga

SEQ ID NO: 2128255 - RNA, 19 nt, Homo sapiens
  misc_RNA (1)...(19): siRNA sense strand
auaaauuccugcccucuuu

SEQ ID NO: 2128256 - RNA, 19 nt, Homo sapiens
  misc_RNA (1)...(19): siRNA sense strand
agacagcauuuacagaauu

SEQ ID NO: 2128257 - RNA, 19 nt, Homo sapiens
  misc_RNA (1)...(19): siRNA sense strand
uaagagauacuugguguaa

SEQ ID NO: 2128258 - RNA, 19 nt, Homo sapiens
  misc_RNA (1)...(19): siRNA sense strand
guaaaugggucugcaugga

SEQ ID NO: 2128259 - RNA, 19 nt, Homo sapiens
  misc_RNA (1)...(19): siRNA sense strand
cuaaugaacuccguuaaca

SEQ ID NO: 2128260 - RNA, 19 nt, Homo sapiens
  misc_RNA (1)...(19): siRNA sense strand
ccucaaauuugugauauug

SEQ ID NO: 2128261 - RNA, 19 nt, Homo sapiens
  misc_RNA (1)...(19): siRNA sense strand
gguguaauuuccaguucua

SEQ ID NO: 2128262 - RNA, 19 nt, Homo sapiens
  misc_RNA (1)...(19): siRNA sense strand
uaucaaacccggaauaauc

SEQ ID NO: 2128263 - RNA, 19 nt, Homo sapiens
  misc_RNA (1)...(19): siRNA sense strand
gacaagaaauaugguacaa

SEQ ID NO: 2128264 - RNA, 19 nt, Homo sapiens
  misc_RNA (1)...(19): siRNA sense strand
ugaagaagaagcugaagaa

SEQ ID NO: 2128265 - RNA, 19 nt, Homo sapiens
  misc_RNA (1)...(19): siRNA sense strand
uuaacaggcagcauaaaua

SEQ ID NO: 2128266 - RNA, 19 nt, Homo sapiens
  misc_RNA (1)...(19): siRNA sense strand
agagauguuugaagaagaa

SEQ ID NO: 2128267 - RNA, 19 nt, Homo sapiens
  misc_RNA (1)...(19): siRNA sense strand
ggaagagauguuugaagaa

SEQ ID NO: 2128268 - RNA, 19 nt, Homo sapiens
  misc_RNA (1)...(19): siRNA sense strand
gcuacaagaugacuuuggu

SEQ ID NO: 2128269 - RNA, 19 nt, Homo sapiens
  misc_RNA (1)...(19): siRNA sense strand
cagaagaugacacagauga

SEQ ID NO: 2128270 - RNA, 19 nt, Homo sapiens
  misc_RNA (1)...(19): siRNA sense strand
caucaaugccuuagaggaa

SEQ ID NO: 2128271 - RNA, 19 nt, Homo sapiens
  misc_RNA (1)...(19): siRNA sense strand
gcauaaauacaacucuguu

SEQ ID NO: 2128272 - RNA, 19 nt, Homo sapiens
  misc_RNA (1)...(19): siRNA sense strand
caacaaacuauauggaaag

SEQ ID NO: 2128273 - RNA, 19 nt, Homo sapiens
  misc_RNA (1)...(19): siRNA sense strand
caggauaucaugagucaga

SEQ ID NO: 2128274 - RNA, 19 nt, Homo sapiens
  misc_RNA (1)...(19): siRNA sense strand
uggaaagagacaagaaaua

SEQ ID NO: 2128275 - RNA, 19 nt, Homo sapiens
  misc_RNA (1)...(19): siRNA sense strand
uggauuuccuacacaagua

SEQ ID NO: 2128276 - RNA, 19 nt, Homo sapiens
  misc_RNA (1)...(19): siRNA sense strand
gguaucaaacccggaauaa

SEQ ID NO: 2128277 - RNA, 19 nt, Homo sapiens
  misc_RNA (1)...(19): siRNA sense strand
ugagucagauuccaagaag

SEQ ID NO: 2128278 - RNA, 19 nt, Homo sapiens
  misc_RNA (1)...(19): siRNA sense strand
cugaagaucuauccuugug

SEQ ID NO: 2128279 - RNA, 19 nt, Homo sapiens
  misc_RNA (1)...(19): siRNA sense strand
gagcguggaagagauguuu

SEQ ID NO: 2128280 - RNA, 19 nt, Homo sapiens
  misc_RNA (1)...(19): siRNA sense strand
gaagaugacacagaugaag

SEQ ID NO: 2128281 - RNA, 19 nt, Homo sapiens
  misc_RNA (1)...(19): siRNA sense strand
uaacaggcagcauaaauac

SEQ ID NO: 2128282 - RNA, 19 nt, Homo sapiens
  misc_RNA (1)...(19): siRNA sense strand
aagaagaagcugaagaaga

SEQ ID NO: 2128283 - RNA, 19 nt, Homo sapiens
  misc_RNA (1)...(19): siRNA sense strand
aaagagacaagaaauaugg

SEQ ID NO: 2128284 - RNA, 19 nt, Homo sapiens
  misc_RNA (1)...(19): siRNA sense strand
gauaucaugagucagauuc

SEQ ID NO: 2128285 - RNA, 19 nt, Homo sapiens
  misc_RNA (1)...(19): siRNA sense strand
gagauacuugguguaauuu

SEQ ID NO: 2128286 - RNA, 19 nt, Homo sapiens
  misc_RNA (1)...(19): siRNA sense strand
cagacagcauuuacagaau

SEQ ID NO: 2128287 - RNA, 19 nt, Homo sapiens
  misc_RNA (1)...(19): siRNA sense strand
guuaacaggcagcauaaau

SEQ ID NO: 2128288 - RNA, 19 nt, Homo sapiens
  misc_RNA (1)...(19): siRNA sense strand
ccaagaagucugaagaucu

SEQ ID NO: 2128289 - RNA, 19 nt, Homo sapiens
  misc_RNA (1)...(19): siRNA sense strand
ccaaaccaucaaugccuua

SEQ ID NO: 2128290 - RNA, 19 nt, Homo sapiens
  misc_RNA (1)...(19): siRNA sense strand
guaauuuccaguucuauac

SEQ ID NO: 2128291 - RNA, 19 nt, Homo sapiens
  misc_RNA (1)...(19): siRNA sense strand
cacaacaaacuauauggaa

SEQ ID NO: 2128292 - RNA, 19 nt, Homo sapiens
  misc_RNA (1)...(19): siRNA sense strand
gagcacagcaauacaacag

SEQ ID NO: 2128293 - RNA, 19 nt, Homo sapiens
  misc_RNA (1)...(19): siRNA sense strand
ucaaugccuuagaggaaga

SEQ ID NO: 2128294 - RNA, 19 nt, Homo sapiens
  misc_RNA (1)...(19): siRNA sense strand
caaacccggaauaaucuuu

SEQ ID NO: 2128295 - RNA, 19 nt, Homo sapiens
  misc_RNA (1)...(19): siRNA sense strand
ugcagaagaugacacagau

SEQ ID NO: 2128296 - RNA, 19 nt, Homo sapiens
  misc_RNA (1)...(19): siRNA sense strand
acaggcagcauaaauacaa

SEQ ID NO: 2128297 - RNA, 19 nt, Homo sapiens
  misc_RNA (1)...(19): siRNA sense strand
uccaggauaucaugaguca

SEQ ID NO: 2128298 - RNA, 19 nt, Homo sapiens
  misc_RNA (1)...(19): siRNA sense strand
ugcauggacaaucuuauua

SEQ ID NO: 2128299 - RNA, 19 nt, Homo sapiens
  misc_RNA (1)...(19): siRNA sense strand
uagaugaugcuguaaaugg

SEQ ID NO: 2128300 - RNA, 19 nt, Homo sapiens
  misc_RNA (1)...(19): siRNA sense strand
agacacaacaaacuauaug

SEQ ID NO: 2128301 - RNA, 19 nt, Homo sapiens
  misc_RNA (1)...(19): siRNA sense strand
aagagauguuugaagaaga

SEQ ID NO: 2128302 - RNA, 19 nt, Homo sapiens
  misc_RNA (1)...(19): siRNA sense strand
gaagaagaagcugaagaag

SEQ ID NO: 2128303 - RNA, 19 nt, Homo sapiens
  misc_RNA (1)...(19): siRNA sense strand
guuccucaaauuugugaua

SEQ ID NO: 2128304 - RNA, 19 nt, Homo sapiens
  misc_RNA (1)...(19): siRNA sense strand
ucaggagucuguguauaag

SEQ ID NO: 2128305 - RNA, 19 nt, Homo sapiens
  misc_RNA (1)...(19): siRNA sense strand
uuucaggagucuguguaua

SEQ ID NO: 2128306 - RNA, 19 nt, Homo sapiens
  misc_RNA (1)...(19): siRNA sense strand
uucuauacgucccuaauga

SEQ ID NO: 2128307 - RNA, 19 nt, Homo sapiens
  misc_RNA (1)...(19): siRNA sense strand
gcauggacaaucuuauuac

SEQ ID NO: 2128308 - RNA, 19 nt, Homo sapiens
  misc_RNA (1)...(19): siRNA sense strand
guauaagacacaacaaacu

SEQ ID NO: 2128309 - RNA, 19 nt, Homo sapiens
  misc_RNA (1)...(19): siRNA sense strand
uauggaaagagacaagaaa

SEQ ID NO: 2128310 - RNA, 19 nt, Homo sapiens
  misc_RNA (1)...(19): siRNA sense strand
gauacuugguguaauuucc

SEQ ID NO: 2128311 - RNA, 19 nt, Homo sapiens
  misc_RNA (1)...(19): siRNA sense strand
ggauaucaugagucagauu

SEQ ID NO: 2128312 - RNA, 19 nt, Homo sapiens
  misc_RNA (1)...(19): siRNA sense strand
uucaggagucuguguauaa

SEQ ID NO: 2128313 - RNA, 19 nt, Homo sapiens
  misc_RNA (1)...(19): siRNA sense strand
cauggacaaucuuauuacu

SEQ ID NO: 2128314 - RNA, 19 nt, Homo sapiens
  misc_RNA (1)...(19): siRNA sense strand
ccauguggcagacagcauu

SEQ ID NO: 2128315 - RNA, 19 nt, Homo sapiens
  misc_RNA (1)...(19): siRNA sense strand
ugauauugcaugcagaaga

SEQ ID NO: 2128316 - RNA, 19 nt, Homo sapiens
  misc_RNA (1)...(19): siRNA sense strand
agaaauaugguacaaagac

SEQ ID NO: 2128317 - RNA, 19 nt, Homo sapiens
  misc_RNA (1)...(19): siRNA sense strand
acacaacaaacuauaugga

SEQ ID NO: 2128318 - RNA, 19 nt, Homo sapiens
  misc_RNA (1)...(19): siRNA sense strand
cugcauggacaaucuuauu

SEQ ID NO: 2128319 - RNA, 19 nt, Homo sapiens
  misc_RNA (1)...(19): siRNA sense strand
gcaugcagaagaugacaca

SEQ ID NO: 2128320 - RNA, 19 nt, Homo sapiens
  misc_RNA (1)...(19): siRNA sense strand
gcagaagaugacacagaug

SEQ ID NO: 2128321 - RNA, 19 nt, Homo sapiens
  misc_RNA (1)...(19): siRNA sense strand
agagacaagaaauauggua

SEQ ID NO: 2128322 - RNA, 19 nt, Homo sapiens
  misc_RNA (1)...(19): siRNA sense strand
uacaagaugacuuugguau

SEQ ID NO: 2128323 - RNA, 19 nt, Homo sapiens
  misc_RNA (1)...(19): siRNA sense strand
cagaugaagcccucagagu

SEQ ID NO: 2128324 - RNA, 19 nt, Homo sapiens
  misc_RNA (1)...(19): siRNA sense strand
gcguggaagagauguuuga

SEQ ID NO: 2128325 - RNA, 19 nt, Homo sapiens
  misc_RNA (1)...(19): siRNA sense strand
aaccaucaaugccuuagag

SEQ ID NO: 2128326 - RNA, 19 nt, Homo sapiens
  misc_RNA (1)...(19): siRNA sense strand
cuacaagaugacuuuggua

SEQ ID NO: 2128327 - RNA, 19 nt, Homo sapiens
  misc_RNA (1)...(19): siRNA sense strand
guucuauacgucccuaaug

SEQ ID NO: 2128328 - RNA, 19 nt, Homo sapiens
  misc_RNA (1)...(19): siRNA sense strand
gaggaagaaagucguggau

SEQ ID NO: 2128329 - RNA, 19 nt, Homo sapiens
  misc_RNA (1)...(19): siRNA sense strand
aagaugacuuugguaucaa

SEQ ID NO: 2128330 - RNA, 19 nt, Homo sapiens
  misc_RNA (1)...(19): siRNA sense strand
auacgucccuaaugaacuc

SEQ ID NO: 2128331 - RNA, 19 nt, Homo sapiens
  misc_RNA (1)...(19): siRNA sense strand
caaucuuauuacugacuga

SEQ ID NO: 2128332 - RNA, 19 nt, Homo sapiens
  misc_RNA (1)...(19): siRNA sense strand
guaucaaacccggaauaau

SEQ ID NO: 2128333 - RNA, 19 nt, Homo sapiens
  misc_RNA (1)...(19): siRNA sense strand
uccaagaagucugaagauc

SEQ ID NO: 2128334 - RNA, 19 nt, Homo sapiens
  misc_RNA (1)...(19): siRNA sense strand
ggaagaaagucguggauuu

SEQ ID NO: 2128335 - RNA, 19 nt, Homo sapiens
  misc_RNA (1)...(19): siRNA sense strand
gaauuuagaugaugcugua

SEQ ID NO: 2128336 - RNA, 19 nt, Homo sapiens
  misc_RNA (1)...(19): siRNA sense strand
gaagaucuauccuugugua

SEQ ID NO: 2128337 - RNA, 19 nt, Homo sapiens
  misc_RNA (1)...(19): siRNA sense strand
ggaauaaucuuugcugaga

SEQ ID NO: 2128338 - RNA, 19 nt, Homo sapiens
  misc_RNA (1)...(19): siRNA sense strand
caagaagucugaagaucua

SEQ ID NO: 2128339 - RNA, 19 nt, Homo sapiens
  misc_RNA (1)...(19): siRNA sense strand
caaacuauauggaaagaga

SEQ ID NO: 2128340 - RNA, 19 nt, Homo sapiens
  misc_RNA (1)...(19): siRNA sense strand
ggaaagagacaagaaauau

SEQ ID NO: 2128341 - RNA, 19 nt, Homo sapiens
  misc_RNA (1)...(19): siRNA sense strand
caagaaauaugguacaaag

SEQ ID NO: 2128342 - RNA, 19 nt, Homo sapiens
  misc_RNA (1)...(19): siRNA sense strand
gaucuauccuuguguaaug

SEQ ID NO: 2128343 - RNA, 19 nt, Homo sapiens
  misc_RNA (1)...(19): siRNA sense strand
caagaugacuuugguauca

SEQ ID NO: 2128344 - RNA, 19 nt, Homo sapiens
  misc_RNA (1)...(19): siRNA sense strand
gaagagauguuugaagaag

SEQ ID NO: 2128345 - RNA, 19 nt, Homo sapiens
  misc_RNA (1)...(19): siRNA sense strand
ggauacaaguccaggauau

SEQ ID NO: 2128346 - RNA, 19 nt, Homo sapiens
  misc_RNA (1)...(19): siRNA sense strand
gaaauaugguacaaagaca

SEQ ID NO: 2128347 - RNA, 19 nt, Homo sapiens
  misc_RNA (1)...(19): siRNA sense strand
gcagacagcauuuacagaa

SEQ ID NO: 2128348 - RNA, 19 nt, Homo sapiens
  misc_RNA (1)...(19): siRNA sense strand
agaagaagcugaagaagag

SEQ ID NO: 2128349 - RNA, 19 nt, Homo sapiens
  misc_RNA (1)...(19): siRNA sense strand
uggaagagauguuugaaga

SEQ ID NO: 2128350 - RNA, 19 nt, Homo sapiens
  misc_RNA (1)...(19): siRNA sense strand
agagauacuugguguaauu

SEQ ID NO: 2128351 - RNA, 19 nt, Homo sapiens
  misc_RNA (1)...(19): siRNA sense strand
gauauugcaugcagaagau

SEQ ID NO: 2128352 - RNA, 19 nt, Homo sapiens
  misc_RNA (1)...(19): siRNA sense strand
gacagcauuuacagaauuu

SEQ ID NO: 2128353 - RNA, 19 nt, Homo sapiens
  misc_RNA (1)...(19): siRNA sense strand
gaaagagacaagaaauaug

SEQ ID NO: 2128354 - RNA, 19 nt, Homo sapiens
  misc_RNA (1)...(19): siRNA sense strand
uggacaaucuuauuacuga

SEQ ID NO: 2128355 - RNA, 19 nt, Homo sapiens
  misc_RNA (1)...(19): siRNA sense strand
auaaauuccugcccucuuu

SEQ ID NO: 2128356 - RNA, 19 nt, Homo sapiens
  misc_RNA (1)...(19): siRNA sense strand
agacagcauuuacagaauu

SEQ ID NO: 2128357 - RNA, 19 nt, Homo sapiens
  misc_RNA (1)...(19): siRNA sense strand
uaagagauacuugguguaa

SEQ ID NO: 2128358 - RNA, 19 nt, Homo sapiens
  misc_RNA (1)...(19): siRNA sense strand
guaaaugggucugcaugga

SEQ ID NO: 2128359 - RNA, 19 nt, Homo sapiens
  misc_RNA (1)...(19): siRNA sense strand
cuaaugaacuccguuaaca

SEQ ID NO: 2128360 - RNA, 19 nt, Homo sapiens
  misc_RNA (1)...(19): siRNA sense strand
ccucaaauuugugauauug

SEQ ID NO: 2128361 - RNA, 19 nt, Homo sapiens
  misc_RNA (1)...(19): siRNA sense strand
gguguaauuuccaguucua

SEQ ID NO: 2128362 - RNA, 19 nt, Homo sapiens
  misc_RNA (1)...(19): siRNA sense strand
uaucaaacccggaauaauc

SEQ ID NO: 2128363 - RNA, 19 nt, Homo sapiens
  misc_RNA (1)...(19): siRNA sense strand
gacaagaaauaugguacaa

SEQ ID NO: 2128364 - RNA, 19 nt, Homo sapiens
  misc_RNA (1)...(19): siRNA sense strand
ugaagaagaagcugaagaa

SEQ ID NO: 2128365 - RNA, 19 nt, Homo sapiens
  misc_RNA (1)...(19): siRNA sense strand
uuaacaggcagcauaaaua

SEQ ID NO: 2128366 - RNA, 19 nt, Homo sapiens
  misc_RNA (1)...(19): siRNA sense strand
agagauguuugaagaagaa

SEQ ID NO: 2128367 - RNA, 19 nt, Homo sapiens
  misc_RNA (1)...(19): siRNA sense strand
ggaagagauguuugaagaa

SEQ ID NO: 2128368 - RNA, 19 nt, Homo sapiens
  misc_RNA (1)...(19): siRNA sense strand
gcuacaagaugacuuuggu

SEQ ID NO: 2128369 - RNA, 19 nt, Homo sapiens
  misc_RNA (1)...(19): siRNA sense strand
cagaagaugacacagauga

SEQ ID NO: 2128370 - RNA, 19 nt, Homo sapiens
  misc_RNA (1)...(19): siRNA sense strand
caucaaugccuuagaggaa

SEQ ID NO: 2128371 - RNA, 19 nt, Homo sapiens
  misc_RNA (1)...(19): siRNA sense strand
gcauaaauacaacucuguu

SEQ ID NO: 2128372 - RNA, 19 nt, Homo sapiens
  misc_RNA (1)...(19): siRNA sense strand
caacaaacuauauggaaag

SEQ ID NO: 2128373 - RNA, 19 nt, Homo sapiens
  misc_RNA (1)...(19): siRNA sense strand
caggauaucaugagucaga

SEQ ID NO: 2128374 - RNA, 19 nt, Homo sapiens
  misc_RNA (1)...(19): siRNA sense strand
uggaaagagacaagaaaua

SEQ ID NO: 2128375 - RNA, 19 nt, Homo sapiens
  misc_RNA (1)...(19): siRNA sense strand
uggauuuccuacacaagua

SEQ ID NO: 2128376 - RNA, 19 nt, Homo sapiens
  misc_RNA (1)...(19): siRNA sense strand
gguaucaaacccggaauaa

SEQ ID NO: 2128377 - RNA, 19 nt, Homo sapiens
  misc_RNA (1)...(19): siRNA sense strand
ugagucagauuccaagaag

SEQ ID NO: 2128378 - RNA, 19 nt, Homo sapiens
  misc_RNA (1)...(19): siRNA sense strand
cugaagaucuauccuugug

SEQ ID NO: 2128379 - RNA, 19 nt, Homo sapiens
  misc_RNA (1)...(19): siRNA sense strand
gagcguggaagagauguuu

SEQ ID NO: 2128380 - RNA, 19 nt, Homo sapiens
  misc_RNA (1)...(19): siRNA sense strand
gaagaugacacagaugaag

SEQ ID NO: 2128381 - RNA, 19 nt, Homo sapiens
  misc_RNA (1)...(19): siRNA sense strand
uaacaggcagcauaaauac

SEQ ID NO: 2128382 - RNA, 19 nt, Homo sapiens
  misc_RNA (1)...(19): siRNA sense strand
aagaagaagcugaagaaga

SEQ ID NO: 2128383 - RNA, 19 nt, Homo sapiens
  misc_RNA (1)...(19): siRNA sense strand
aaagagacaagaaauaugg

SEQ ID NO: 2128384 - RNA, 19 nt, Homo sapiens
  misc_RNA (1)...(19): siRNA sense strand
gauaucaugagucagauuc

SEQ ID NO: 2128385 - RNA, 19 nt, Homo sapiens
  misc_RNA (1)...(19): siRNA sense strand
gagauacuugguguaauuu

SEQ ID NO: 2128386 - RNA, 19 nt, Homo sapiens
  misc_RNA (1)...(19): siRNA sense strand
cagacagcauuuacagaau

SEQ ID NO: 2128387 - RNA, 19 nt, Homo sapiens
  misc_RNA (1)...(19): siRNA sense strand
guuaacaggcagcauaaau

SEQ ID NO: 2128388 - RNA, 19 nt, Homo sapiens
  misc_RNA (1)...(19): siRNA sense strand
ccaagaagucugaagaucu

SEQ ID NO: 2128389 - RNA, 19 nt, Homo sapiens
  misc_RNA (1)...(19): siRNA sense strand
ccaaaccaucaaugccuua

SEQ ID NO: 2128390 - RNA, 19 nt, Homo sapiens
  misc_RNA (1)...(19): siRNA sense strand
guaauuuccaguucuauac

SEQ ID NO: 2128391 - RNA, 19 nt, Homo sapiens
  misc_RNA (1)...(19): siRNA sense strand
cacaacaaacuauauggaa

SEQ ID NO: 2128392 - RNA, 19 nt, Homo sapiens
  misc_RNA (1)...(19): siRNA sense strand
gagcacagcaauacaacag

SEQ ID NO: 2128393 - RNA, 19 nt, Homo sapiens
  misc_RNA (1)...(19): siRNA sense strand
ucaaugccuuagaggaaga

SEQ ID NO: 2128394 - RNA, 19 nt, Homo sapiens
  misc_RNA (1)...(19): siRNA sense strand
caaacccggaauaaucuuu

SEQ ID NO: 2128395 - RNA, 19 nt, Homo sapiens
  misc_RNA (1)...(19): siRNA sense strand
ugcagaagaugacacagau

SEQ ID NO: 2128396 - RNA, 19 nt, Homo sapiens
  misc_RNA (1)...(19): siRNA sense strand
acaggcagcauaaauacaa

SEQ ID NO: 2128397 - RNA, 19 nt, Homo sapiens
  misc_RNA (1)...(19): siRNA sense strand
uccaggauaucaugaguca

SEQ ID NO: 2128398 - RNA, 19 nt, Homo sapiens
  misc_RNA (1)...(19): siRNA sense strand
ugcauggacaaucuuauua

SEQ ID NO: 2128399 - RNA, 19 nt, Homo sapiens
  misc_RNA (1)...(19): siRNA sense strand
uagaugaugcuguaaaugg

SEQ ID NO: 2128400 - RNA, 19 nt, Homo sapiens
  misc_RNA (1)...(19): siRNA sense strand
agacacaacaaacuauaug

SEQ ID NO: 2128401 - RNA, 19 nt, Homo sapiens
  misc_RNA (1)...(19): siRNA sense strand
aagagauguuugaagaaga

SEQ ID NO: 2128402 - RNA, 19 nt, Homo sapiens
  misc_RNA (1)...(19): siRNA sense strand
gaagaagaagcugaagaag

SEQ ID NO: 2128403 - RNA, 19 nt, Homo sapiens
  misc_RNA (1)...(19): siRNA sense strand
guuccucaaauuugugaua

SEQ ID NO: 2128404 - RNA, 19 nt, Homo sapiens
  misc_RNA (1)...(19): siRNA sense strand
ucaggagucuguguauaag

SEQ ID NO: 2128405 - RNA, 19 nt, Homo sapiens
  misc_RNA (1)...(19): siRNA sense strand
uuucaggagucuguguaua

SEQ ID NO: 2128406 - RNA, 19 nt, Homo sapiens
  misc_RNA (1)...(19): siRNA sense strand
uucuauacgucccuaauga

SEQ ID NO: 2128407 - RNA, 19 nt, Homo sapiens
  misc_RNA (1)...(19): siRNA sense strand
gcauggacaaucuuauuac

SEQ ID NO: 2128408 - RNA, 19 nt, Homo sapiens
  misc_RNA (1)...(19): siRNA sense strand
guauaagacacaacaaacu

SEQ ID NO: 2128409 - RNA, 19 nt, Homo sapiens
  misc_RNA (1)...(19): siRNA sense strand
uauggaaagagacaagaaa

SEQ ID NO: 2128410 - RNA, 19 nt, Homo sapiens
  misc_RNA (1)...(19): siRNA sense strand
gauacuugguguaauuucc

SEQ ID NO: 2128411 - RNA, 19 nt, Homo sapiens
  misc_RNA (1)...(19): siRNA sense strand
ggauaucaugagucagauu

SEQ ID NO: 2128412 - RNA, 19 nt, Homo sapiens
  misc_RNA (1)...(19): siRNA sense strand
uucaggagucuguguauaa

SEQ ID NO: 2128413 - RNA, 19 nt, Homo sapiens
  misc_RNA (1)...(19): siRNA sense strand
cauggacaaucuuauuacu

SEQ ID NO: 2128414 - RNA, 19 nt, Homo sapiens
  misc_RNA (1)...(19): siRNA sense strand
ccauguggcagacagcauu

SEQ ID NO: 2128415 - RNA, 19 nt, Homo sapiens
  misc_RNA (1)...(19): siRNA sense strand
ugauauugcaugcagaaga

SEQ ID NO: 2128416 - RNA, 19 nt, Homo sapiens
  misc_RNA (1)...(19): siRNA sense strand
agaaauaugguacaaagac

SEQ ID NO: 2128417 - RNA, 19 nt, Homo sapiens
  misc_RNA (1)...(19): siRNA sense strand
acacaacaaacuauaugga

SEQ ID NO: 2128418 - RNA, 19 nt, Homo sapiens
  misc_RNA (1)...(19): siRNA sense strand
cugcauggacaaucuuauu

SEQ ID NO: 2128419 - RNA, 19 nt, Homo sapiens
  misc_RNA (1)...(19): siRNA sense strand
gcaugcagaagaugacaca

SEQ ID NO: 2128420 - RNA, 19 nt, Homo sapiens
  misc_RNA (1)...(19): siRNA sense strand
gcagaagaugacacagaug

SEQ ID NO: 2128421 - RNA, 19 nt, Homo sapiens
  misc_RNA (1)...(19): siRNA sense strand
agagacaagaaauauggua

SEQ ID NO: 2128422 - RNA, 19 nt, Homo sapiens
  misc_RNA (1)...(19): siRNA sense strand
uacaagaugacuuugguau

SEQ ID NO: 2128423 - RNA, 19 nt, Homo sapiens
  misc_RNA (1)...(19): siRNA sense strand
cagaugaagcccucagagu

SEQ ID NO: 2128424 - RNA, 19 nt, Homo sapiens
  misc_RNA (1)...(19): siRNA sense strand
gcguggaagagauguuuga

SEQ ID NO: 2128425 - RNA, 19 nt, Homo sapiens
  misc_RNA (1)...(19): siRNA sense strand
aaccaucaaugccuuagag

SEQ ID NO: 2128426 - RNA, 19 nt, Homo sapiens
  misc_RNA (1)...(19): siRNA sense strand
cuacaagaugacuuuggua

SEQ ID NO: 2128427 - RNA, 19 nt, Homo sapiens
  misc_RNA (1)...(19): siRNA sense strand
guucuauacgucccuaaug

SEQ ID NO: 2128428 - RNA, 19 nt, Homo sapiens
  misc_RNA (1)...(19): siRNA sense strand
gaggaagaaagucguggau

SEQ ID NO: 2128429 - RNA, 19 nt, Homo sapiens
  misc_RNA (1)...(19): siRNA sense strand
aagaugacuuugguaucaa

SEQ ID NO: 2128430 - RNA, 19 nt, Homo sapiens
  misc_RNA (1)...(19): siRNA sense strand
auacgucccuaaugaacuc

SEQ ID NO: 2128431 - RNA, 19 nt, Homo sapiens
  misc_RNA (1)...(19): siRNA sense strand
caaucuuauuacugacuga

SEQ ID NO: 2128432 - RNA, 19 nt, Homo sapiens
  misc_RNA (1)...(19): siRNA sense strand
guaucaaacccggaauaau

SEQ ID NO: 2128433 - RNA, 19 nt, Homo sapiens
  misc_RNA (1)...(19): siRNA sense strand
uccaagaagucugaagauc

SEQ ID NO: 2128434 - RNA, 19 nt, Homo sapiens
  misc_RNA (1)...(19): siRNA sense strand
cagaggagcuggacuauua

SEQ ID NO: 2128435 - RNA, 19 nt, Homo sapiens
  misc_RNA (1)...(19): siRNA sense strand
ccaaaucucucccaugaua

SEQ ID NO: 2128436 - RNA, 19 nt, Homo sapiens
  misc_RNA (1)...(19): siRNA sense strand
gaacuucucucuucuggau

SEQ ID NO: 2128437 - RNA, 19 nt, Homo sapiens
  misc_RNA (1)...(19): siRNA sense strand
gcgagcagauuaauugaaa

SEQ ID NO: 2128438 - RNA, 19 nt, Homo sapiens
  misc_RNA (1)...(19): siRNA sense strand
gcaggcagcugaccgcaaa

SEQ ID NO: 2128439 - RNA, 19 nt, Homo sapiens
  misc_RNA (1)...(19): siRNA sense strand
ggaaagagcccuccagaag

SEQ ID NO: 2128440 - RNA, 19 nt, Homo sapiens
  misc_RNA (1)...(19): siRNA sense strand
ggagauauaugaccaggau

SEQ ID NO: 2128441 - RNA, 19 nt, Homo sapiens
  misc_RNA (1)...(19): siRNA sense strand
gaacagaaucuaacaguag

SEQ ID NO: 2128442 - RNA, 19 nt, Homo sapiens
  misc_RNA (1)...(19): siRNA sense strand
cuacagcacuuuauugaug

SEQ ID NO: 2128443 - RNA, 19 nt, Homo sapiens
  misc_RNA (1)...(19): siRNA sense strand
gaaagagcccuccagaaga

SEQ ID NO: 2128444 - RNA, 19 nt, Homo sapiens
  misc_RNA (1)...(19): siRNA sense strand
gaagauaguuggcagucau

SEQ ID NO: 2128445 - RNA, 19 nt, Homo sapiens
  misc_RNA (1)...(19): siRNA sense strand
cagcagcgcuccguuguuu

SEQ ID NO: 2128446 - RNA, 19 nt, Homo sapiens
  misc_RNA (1)...(19): siRNA sense strand
ggagggagcuuuggcuuca

SEQ ID NO: 2128447 - RNA, 19 nt, Homo sapiens
  misc_RNA (1)...(19): siRNA sense strand
aaccaaaucucucccauga

SEQ ID NO: 2128448 - RNA, 19 nt, Homo sapiens
  misc_RNA (1)...(19): siRNA sense strand
ugagaaagagcauuuguuu

SEQ ID NO: 2128449 - RNA, 19 nt, Homo sapiens
  misc_RNA (1)...(19): siRNA sense strand
aaacuuaaaugucccuuca

SEQ ID NO: 2128450 - RNA, 19 nt, Homo sapiens
  misc_RNA (1)...(19): siRNA sense strand
gggcagugcuuuaagacuu

SEQ ID NO: 2128451 - RNA, 19 nt, Homo sapiens
  misc_RNA (1)...(19): siRNA sense strand
ccaacaaccucccaagugu

SEQ ID NO: 2128452 - RNA, 19 nt, Homo sapiens
  misc_RNA (1)...(19): siRNA sense strand
gcaccuggauuggaccuuu

SEQ ID NO: 2128453 - RNA, 19 nt, Homo sapiens
  misc_RNA (1)...(19): siRNA sense strand
uaccgagccuguauagaua

SEQ ID NO: 2128454 - RNA, 19 nt, Homo sapiens
  misc_RNA (1)...(19): siRNA sense strand
caguacaggucgaauauau

SEQ ID NO: 2128455 - RNA, 19 nt, Homo sapiens
  misc_RNA (1)...(19): siRNA sense strand
gaaauaaggaugagaagac

SEQ ID NO: 2128456 - RNA, 19 nt, Homo sapiens
  misc_RNA (1)...(19): siRNA sense strand
ggaguguccugguuucuca

SEQ ID NO: 2128457 - RNA, 19 nt, Homo sapiens
  misc_RNA (1)...(19): siRNA sense strand
ggauaagucugggcccauu

SEQ ID NO: 2128458 - RNA, 19 nt, Homo sapiens
  misc_RNA (1)...(19): siRNA sense strand
agaacagaaucuaacagua

SEQ ID NO: 2128459 - RNA, 19 nt, Homo sapiens
  misc_RNA (1)...(19): siRNA sense strand
ugacuggcaucuuuggaaa

SEQ ID NO: 2128460 - RNA, 19 nt, Homo sapiens
  misc_RNA (1)...(19): siRNA sense strand
aaacgggccuggaacuuca

SEQ ID NO: 2128461 - RNA, 19 nt, Homo sapiens
  misc_RNA (1)...(19): siRNA sense strand
gaugagguauauccgaugu

SEQ ID NO: 2128462 - RNA, 19 nt, Homo sapiens
  misc_RNA (1)...(19): siRNA sense strand
gcuggacuauuaccuguau

SEQ ID NO: 2128463 - RNA, 19 nt, Homo sapiens
  misc_RNA (1)...(19): siRNA sense strand
gaaacgggccuggaacuuc

SEQ ID NO: 2128464 - RNA, 19 nt, Homo sapiens
  misc_RNA (1)...(19): siRNA sense strand
gagaaaagcccuucaagug

SEQ ID NO: 2128465 - RNA, 19 nt, Homo sapiens
  misc_RNA (1)...(19): siRNA sense strand
cgacagacccuaccaaugc

SEQ ID NO: 2128466 - RNA, 19 nt, Homo sapiens
  misc_RNA (1)...(19): siRNA sense strand
ggcagugcuuuaagacuuu

SEQ ID NO: 2128467 - RNA, 19 nt, Homo sapiens
  misc_RNA (1)...(19): siRNA sense strand
gaagccaugugcagacaag

SEQ ID NO: 2128468 - RNA, 19 nt, Homo sapiens
  misc_RNA (1)...(19): siRNA sense strand
gcagucauccauaaucuca

SEQ ID NO: 2128469 - RNA, 19 nt, Homo sapiens
  misc_RNA (1)...(19): siRNA sense strand
cagcaaggcaccuggauug

SEQ ID NO: 2128470 - RNA, 19 nt, Homo sapiens
  misc_RNA (1)...(19): siRNA sense strand
gcgcagaggagcuggacua

SEQ ID NO: 2128471 - RNA, 19 nt, Homo sapiens
  misc_RNA (1)...(19): siRNA sense strand
gaagacaccagaggaagga

SEQ ID NO: 2128472 - RNA, 19 nt, Homo sapiens
  misc_RNA (1)...(19): siRNA sense strand
cuacuguggucgugccuuu

SEQ ID NO: 2128473 - RNA, 19 nt, Homo sapiens
  misc_RNA (1)...(19): siRNA sense strand
cagcggauccucuuacaga

SEQ ID NO: 2128474 - RNA, 19 nt, Homo sapiens
  misc_RNA (1)...(19): siRNA sense strand
gagaacagaaucuaacagu

SEQ ID NO: 2128475 - RNA, 19 nt, Homo sapiens
  misc_RNA (1)...(19): siRNA sense strand
ggaaauaaggaugagaaga

SEQ ID NO: 2128476 - RNA, 19 nt, Homo sapiens
  misc_RNA (1)...(19): siRNA sense strand
gcaggaacuucucucuucu

SEQ ID NO: 2128477 - RNA, 19 nt, Homo sapiens
  misc_RNA (1)...(19): siRNA sense strand
gcacugcggagaacagaau

SEQ ID NO: 2128478 - RNA, 19 nt, Homo sapiens
  misc_RNA (1)...(19): siRNA sense strand
ggacacuacagcacuuuau

SEQ ID NO: 2128479 - RNA, 19 nt, Homo sapiens
  misc_RNA (1)...(19): siRNA sense strand
ggccacgccucaugucaga

SEQ ID NO: 2128480 - RNA, 19 nt, Homo sapiens
  misc_RNA (1)...(19): siRNA sense strand
aaagagcccuccagaagac

SEQ ID NO: 2128481 - RNA, 19 nt, Homo sapiens
  misc_RNA (1)...(19): siRNA sense strand
uaacugagagcccagaauc

SEQ ID NO: 2128482 - RNA, 19 nt, Homo sapiens
  misc_RNA (1)...(19): siRNA sense strand
gaaaugugggcagugcuuu

SEQ ID NO: 2128483 - RNA, 19 nt, Homo sapiens
  misc_RNA (1)...(19): siRNA sense strand
ggaaaugugggcagugcuu

SEQ ID NO: 2128484 - RNA, 19 nt, Homo sapiens
  misc_RNA (1)...(19): siRNA sense strand
cuaccgagccuguauagau

SEQ ID NO: 2128485 - RNA, 19 nt, Homo sapiens
  misc_RNA (1)...(19): siRNA sense strand
uaacaguaguucaguacag

SEQ ID NO: 2128486 - RNA, 19 nt, Homo sapiens
  misc_RNA (1)...(19): siRNA sense strand
gcaaggcacugcggagaac

SEQ ID NO: 2128487 - RNA, 19 nt, Homo sapiens
  misc_RNA (1)...(19): siRNA sense strand
cgagcuggaugagguauau

SEQ ID NO: 2128488 - RNA, 19 nt, Homo sapiens
  misc_RNA (1)...(19): siRNA sense strand
ccagcgagcgccuuagauu

SEQ ID NO: 2128489 - RNA, 19 nt, Homo sapiens
  misc_RNA (1)...(19): siRNA sense strand
guucaguacaggucgaaua

SEQ ID NO: 2128490 - RNA, 19 nt, Homo sapiens
  misc_RNA (1)...(19): siRNA sense strand
gaaccaggagagugugaga

SEQ ID NO: 2128491 - RNA, 19 nt, Homo sapiens
  misc_RNA (1)...(19): siRNA sense strand
gacccucccugacauccuu

SEQ ID NO: 2128492 - RNA, 19 nt, Homo sapiens
  misc_RNA (1)...(19): siRNA sense strand
guuuggcccucagaagaua

SEQ ID NO: 2128493 - RNA, 19 nt, Homo sapiens
  misc_RNA (1)...(19): siRNA sense strand
gggaaagagcccuccagaa

SEQ ID NO: 2128494 - RNA, 19 nt, Homo sapiens
  misc_RNA (1)...(19): siRNA sense strand
aaauaaggaugagaagaca

SEQ ID NO: 2128495 - RNA, 19 nt, Homo sapiens
  misc_RNA (1)...(19): siRNA sense strand
cagcuauacgucuuucuuu

SEQ ID NO: 2128496 - RNA, 19 nt, Homo sapiens
  misc_RNA (1)...(19): siRNA sense strand
gcaaggcaccuggauugga

SEQ ID NO: 2128497 - RNA, 19 nt, Homo sapiens
  misc_RNA (1)...(19): siRNA sense strand
caaugaaccaggagagugu

SEQ ID NO: 2128498 - RNA, 19 nt, Homo sapiens
  misc_RNA (1)...(19): siRNA sense strand
ccaccacccucaacaacca

SEQ ID NO: 2128499 - RNA, 19 nt, Homo sapiens
  misc_RNA (1)...(19): siRNA sense strand
agcaggaacuucucucuuc

SEQ ID NO: 2128500 - RNA, 19 nt, Homo sapiens
  misc_RNA (1)...(19): siRNA sense strand
acguaacacuggauacuug

SEQ ID NO: 2128501 - RNA, 19 nt, Homo sapiens
  misc_RNA (1)...(19): siRNA sense strand
ugcggacacugccugguua

SEQ ID NO: 2128502 - RNA, 19 nt, Homo sapiens
  misc_RNA (1)...(19): siRNA sense strand
caggagagugugagaaaga

SEQ ID NO: 2128503 - RNA, 19 nt, Homo sapiens
  misc_RNA (1)...(19): siRNA sense strand
ugaccaggaugggacacua

SEQ ID NO: 2128504 - RNA, 19 nt, Homo sapiens
  misc_RNA (1)...(19): siRNA sense strand
ccagaggaaggaagagauu

SEQ ID NO: 2128505 - RNA, 19 nt, Homo sapiens
  misc_RNA (1)...(19): siRNA sense strand
aaugacagcuauacgucuu

SEQ ID NO: 2128506 - RNA, 19 nt, Homo sapiens
  misc_RNA (1)...(19): siRNA sense strand
gacacuacagcacuuuauu

SEQ ID NO: 2128507 - RNA, 19 nt, Homo sapiens
  misc_RNA (1)...(19): siRNA sense strand
gcagaggagcuggacuauu

SEQ ID NO: 2128508 - RNA, 19 nt, Homo sapiens
  misc_RNA (1)...(19): siRNA sense strand
gugguacaaugacagcuau

SEQ ID NO: 2128509 - RNA, 19 nt, Homo sapiens
  misc_RNA (1)...(19): siRNA sense strand
gggcucucccucaaacuuu

SEQ ID NO: 2128510 - RNA, 19 nt, Homo sapiens
  misc_RNA (1)...(19): siRNA sense strand
gagcccagaaucaaucgaa

SEQ ID NO: 2128511 - RNA, 19 nt, Homo sapiens
  misc_RNA (1)...(19): siRNA sense strand
aaaugugggcagugcuuua

SEQ ID NO: 2128512 - RNA, 19 nt, Homo sapiens
  misc_RNA (1)...(19): siRNA sense strand
ugagaagacaccagaggaa

SEQ ID NO: 2128513 - RNA, 19 nt, Homo sapiens
  misc_RNA (1)...(19): siRNA sense strand
acacuacagcacuuuauug

SEQ ID NO: 2128514 - RNA, 19 nt, Homo sapiens
  misc_RNA (1)...(19): siRNA sense strand
ccggaggauuuauguuaga

SEQ ID NO: 2128515 - RNA, 19 nt, Homo sapiens
  misc_RNA (1)...(19): siRNA sense strand
ccgagcuucugguguggua

SEQ ID NO: 2128516 - RNA, 19 nt, Homo sapiens
  misc_RNA (1)...(19): siRNA sense strand
gaccagcgagcgccuuaga

SEQ ID NO: 2128517 - RNA, 19 nt, Homo sapiens
  misc_RNA (1)...(19): siRNA sense strand
gggacacuacagcacuuua

SEQ ID NO: 2128518 - RNA, 19 nt, Homo sapiens
  misc_RNA (1)...(19): siRNA sense strand
guggaaauaaggaugagaa

SEQ ID NO: 2128519 - RNA, 19 nt, Homo sapiens
  misc_RNA (1)...(19): siRNA sense strand
cacuacagcacuuuauuga

SEQ ID NO: 2128520 - RNA, 19 nt, Homo sapiens
  misc_RNA (1)...(19): siRNA sense strand
caacggcgagugcccuaug

SEQ ID NO: 2128521 - RNA, 19 nt, Homo sapiens
  misc_RNA (1)...(19): siRNA sense strand
ugugggcagugcuuuaaga

SEQ ID NO: 2128522 - RNA, 19 nt, Homo sapiens
  misc_RNA (1)...(19): siRNA sense strand
ccugguuucucagcaauga

SEQ ID NO: 2128523 - RNA, 19 nt, Homo sapiens
  misc_RNA (1)...(19): siRNA sense strand
aaugagugcaagccaauaa

SEQ ID NO: 2128524 - RNA, 19 nt, Homo sapiens
  misc_RNA (1)...(19): siRNA sense strand
ccaaugagugcaagccaau

SEQ ID NO: 2128525 - RNA, 19 nt, Homo sapiens
  misc_RNA (1)...(19): siRNA sense strand
ugacagcuauacgucuuuc

SEQ ID NO: 2128526 - RNA, 19 nt, Homo sapiens
  misc_RNA (1)...(19): siRNA sense strand
caagaaggagagggaaaga

SEQ ID NO: 2128527 - RNA, 19 nt, Homo sapiens
  misc_RNA (1)...(19): siRNA sense strand
gugagaaagagcauuuguu

SEQ ID NO: 2128528 - RNA, 19 nt, Homo sapiens
  misc_RNA (1)...(19): siRNA sense strand
cagcgagcgccuuagauug

SEQ ID NO: 2128529 - RNA, 19 nt, Homo sapiens
  misc_RNA (1)...(19): siRNA sense strand
acuucucucuucuggauaa

SEQ ID NO: 2128530 - RNA, 19 nt, Homo sapiens
  misc_RNA (1)...(19): siRNA sense strand
ccagaagacaacccgagaa

SEQ ID NO: 2128531 - RNA, 19 nt, Homo sapiens
  misc_RNA (1)...(19): siRNA sense strand
gcuauacgucuuucuuugg

SEQ ID NO: 2128532 - RNA, 19 nt, Homo sapiens
  misc_RNA (1)...(19): siRNA sense strand
cuucuggugugguacaaug

SEQ ID NO: 2128533 - RNA, 19 nt, Homo sapiens
  misc_RNA (1)...(19): siRNA sense strand
gcagugcuuuaagacuuuc

SEQ ID NO: 2128534 - RNA, 19 nt, Homo sapiens
  misc_RNA (1)...(19): siRNA sense strand
ggaaucagcucuucuguuc

SEQ ID NO: 2128535 - RNA, 19 nt, Homo sapiens
  misc_RNA (1)...(19): siRNA sense strand
gugcugagcuggaugauga

SEQ ID NO: 2128536 - RNA, 19 nt, Homo sapiens
  misc_RNA (1)...(19): siRNA sense strand
gaaacaagaaggagaagaa

SEQ ID NO: 2128537 - RNA, 19 nt, Homo sapiens
  misc_RNA (1)...(19): siRNA sense strand
ccagauggcucuuucacuu

SEQ ID NO: 2128538 - RNA, 19 nt, Homo sapiens
  misc_RNA (1)...(19): siRNA sense strand
gacgugcacuggacucaua

SEQ ID NO: 2128539 - RNA, 19 nt, Homo sapiens
  misc_RNA (1)...(19): siRNA sense strand
gaagaaggccgacgacaag

SEQ ID NO: 2128540 - RNA, 19 nt, Homo sapiens
  misc_RNA (1)...(19): siRNA sense strand
gcuccaaccuccuagaaga

SEQ ID NO: 2128541 - RNA, 19 nt, Homo sapiens
  misc_RNA (1)...(19): siRNA sense strand
gaggaguucuggaugaaga

SEQ ID NO: 2128542 - RNA, 19 nt, Homo sapiens
  misc_RNA (1)...(19): siRNA sense strand
caaauccuauuccguugaa

SEQ ID NO: 2128543 - RNA, 19 nt, Homo sapiens
  misc_RNA (1)...(19): siRNA sense strand
agaaugaccuagaggaaga

SEQ ID NO: 2128544 - RNA, 19 nt, Homo sapiens
  misc_RNA (1)...(19): siRNA sense strand
aagaucaccuuaagacuga

SEQ ID NO: 2128545 - RNA, 19 nt, Homo sapiens
  misc_RNA (1)...(19): siRNA sense strand
gagaaguccucacagaagu

SEQ ID NO: 2128546 - RNA, 19 nt, Homo sapiens
  misc_RNA (1)...(19): siRNA sense strand
gagauucccuuugcugaug

SEQ ID NO: 2128547 - RNA, 19 nt, Homo sapiens
  misc_RNA (1)...(19): siRNA sense strand
gcagaaacaagaaggagaa

SEQ ID NO: 2128548 - RNA, 19 nt, Homo sapiens
  misc_RNA (1)...(19): siRNA sense strand
ggacaccuaugacgacaag

SEQ ID NO: 2128549 - RNA, 19 nt, Homo sapiens
  misc_RNA (1)...(19): siRNA sense strand
aggaggagcugucagaaga

SEQ ID NO: 2128550 - RNA, 19 nt, Homo sapiens
  misc_RNA (1)...(19): siRNA sense strand
gcgacgauguccuugagaa

SEQ ID NO: 2128551 - RNA, 19 nt, Homo sapiens
  misc_RNA (1)...(19): siRNA sense strand
gagaggaggugcggaaguc

SEQ ID NO: 2128552 - RNA, 19 nt, Homo sapiens
  misc_RNA (1)...(19): siRNA sense strand
gcauggcaguggaagauca

SEQ ID NO: 2128553 - RNA, 19 nt, Homo sapiens
  misc_RNA (1)...(19): siRNA sense strand
guggaggaguucuggauga

SEQ ID NO: 2128554 - RNA, 19 nt, Homo sapiens
  misc_RNA (1)...(19): siRNA sense strand
agucggagcugaugaucuu

SEQ ID NO: 2128555 - RNA, 19 nt, Homo sapiens
  misc_RNA (1)...(19): siRNA sense strand
acaagaaggacaagaagaa

SEQ ID NO: 2128556 - RNA, 19 nt, Homo sapiens
  misc_RNA (1)...(19): siRNA sense strand
gaggagcugucagaagaga

SEQ ID NO: 2128557 - RNA, 19 nt, Homo sapiens
  misc_RNA (1)...(19): siRNA sense strand
aggaagauguggacucaga

SEQ ID NO: 2128558 - RNA, 19 nt, Homo sapiens
  misc_RNA (1)...(19): siRNA sense strand
gcaguggaagaucaccuua

SEQ ID NO: 2128559 - RNA, 19 nt, Homo sapiens
  misc_RNA (1)...(19): siRNA sense strand
gguacaagaaggacaagaa

SEQ ID NO: 2128560 - RNA, 19 nt, Homo sapiens
  misc_RNA (1)...(19): siRNA sense strand
cagugucccucaaauccua

SEQ ID NO: 2128561 - RNA, 19 nt, Homo sapiens
  misc_RNA (1)...(19): siRNA sense strand
ggaugagaaugaccuagag

SEQ ID NO: 2128562 - RNA, 19 nt, Homo sapiens
  misc_RNA (1)...(19): siRNA sense strand
acucaagccugcaggagaa

SEQ ID NO: 2128563 - RNA, 19 nt, Homo sapiens
  misc_RNA (1)...(19): siRNA sense strand
gcaagaagaggucgucacu

SEQ ID NO: 2128564 - RNA, 19 nt, Homo sapiens
  misc_RNA (1)...(19): siRNA sense strand
aaucagcucuucuguucau

SEQ ID NO: 2128565 - RNA, 19 nt, Homo sapiens
  misc_RNA (1)...(19): siRNA sense strand
ccaagucccuguggaaguc

SEQ ID NO: 2128566 - RNA, 19 nt, Homo sapiens
  misc_RNA (1)...(19): siRNA sense strand
agaggaagauguggacuca

SEQ ID NO: 2128567 - RNA, 19 nt, Homo sapiens
  misc_RNA (1)...(19): siRNA sense strand
agaaggacaagaagaagaa

SEQ ID NO: 2128568 - RNA, 19 nt, Homo sapiens
  misc_RNA (1)...(19): siRNA sense strand
gaugaagagugcggagauc

SEQ ID NO: 2128569 - RNA, 19 nt, Homo sapiens
  misc_RNA (1)...(19): siRNA sense strand
gcaggagugguucaagcua

SEQ ID NO: 2128570 - RNA, 19 nt, Homo sapiens
  misc_RNA (1)...(19): siRNA sense strand
gggcccagauggcucuuuc

SEQ ID NO: 2128571 - RNA, 19 nt, Homo sapiens
  misc_RNA (1)...(19): siRNA sense strand
ccaaagagaagcccaaagc

SEQ ID NO: 2128572 - RNA, 19 nt, Homo sapiens
  misc_RNA (1)...(19): siRNA sense strand
ccaggcagcugagcaggau

SEQ ID NO: 2128573 - RNA, 19 nt, Homo sapiens
  misc_RNA (1)...(19): siRNA sense strand
ucugaaagcugugcacucu

SEQ ID NO: 2128574 - RNA, 19 nt, Homo sapiens
  misc_RNA (1)...(19): siRNA sense strand
ggagauucccuuugcugau

SEQ ID NO: 2128575 - RNA, 19 nt, Homo sapiens
  misc_RNA (1)...(19): siRNA sense strand
gaagcaggcaugggcaaga

SEQ ID NO: 2128576 - RNA, 19 nt, Homo sapiens
  misc_RNA (1)...(19): siRNA sense strand
agaagaaggccgacgacaa

SEQ ID NO: 2128577 - RNA, 19 nt, Homo sapiens
  misc_RNA (1)...(19): siRNA sense strand
guacaagaaggacaagaag

SEQ ID NO: 2128578 - RNA, 19 nt, Homo sapiens
  misc_RNA (1)...(19): siRNA sense strand
guccaaagccaaagugaca

SEQ ID NO: 2128579 - RNA, 19 nt, Homo sapiens
  misc_RNA (1)...(19): siRNA sense strand
ggagagagaggaggacaag

SEQ ID NO: 2128580 - RNA, 19 nt, Homo sapiens
  misc_RNA (1)...(19): siRNA sense strand
ggaagauguggacucagaa

SEQ ID NO: 2128581 - RNA, 19 nt, Homo sapiens
  misc_RNA (1)...(19): siRNA sense strand
ggacgcugcagccacagaa

SEQ ID NO: 2128582 - RNA, 19 nt, Homo sapiens
  misc_RNA (1)...(19): siRNA sense strand
ugacagagagcugcguuug

SEQ ID NO: 2128583 - RNA, 19 nt, Homo sapiens
  misc_RNA (1)...(19): siRNA sense strand
agagagaggaggacaagga

SEQ ID NO: 2128584 - RNA, 19 nt, Homo sapiens
  misc_RNA (1)...(19): siRNA sense strand
cagcgacgauguccuugag

SEQ ID NO: 2128585 - RNA, 19 nt, Homo sapiens
  misc_RNA (1)...(19): siRNA sense strand
gagcuucuccgaggacuca

SEQ ID NO: 2128586 - RNA, 19 nt, Homo sapiens
  misc_RNA (1)...(19): siRNA sense strand
ggaugaagagugcggagau

SEQ ID NO: 2128587 - RNA, 19 nt, Homo sapiens
  misc_RNA (1)...(19): siRNA sense strand
ugagaaugaccuagaggaa

SEQ ID NO: 2128588 - RNA, 19 nt, Homo sapiens
  misc_RNA (1)...(19): siRNA sense strand
aagcaggcaugggcaagaa

SEQ ID NO: 2128589 - RNA, 19 nt, Homo sapiens
  misc_RNA (1)...(19): siRNA sense strand
cagggugcuucccgucgua

SEQ ID NO: 2128590 - RNA, 19 nt, Homo sapiens
  misc_RNA (1)...(19): siRNA sense strand
agaaggagaagaaguccaa

SEQ ID NO: 2128591 - RNA, 19 nt, Homo sapiens
  misc_RNA (1)...(19): siRNA sense strand
agauggcucuuucacuuca

SEQ ID NO: 2128592 - RNA, 19 nt, Homo sapiens
  misc_RNA (1)...(19): siRNA sense strand
gcaggaugcagcagaugga

SEQ ID NO: 2128593 - RNA, 19 nt, Homo sapiens
  misc_RNA (1)...(19): siRNA sense strand
ccagugacccugccagaag

SEQ ID NO: 2128594 - RNA, 19 nt, Homo sapiens
  misc_RNA (1)...(19): siRNA sense strand
ggagagcguggaggagauu

SEQ ID NO: 2128595 - RNA, 19 nt, Homo sapiens
  misc_RNA (1)...(19): siRNA sense strand
gaaccagccgagauagaag

SEQ ID NO: 2128596 - RNA, 19 nt, Homo sapiens
  misc_RNA (1)...(19): siRNA sense strand
acaagaaggagaagaaguc

SEQ ID NO: 2128597 - RNA, 19 nt, Homo sapiens
  misc_RNA (1)...(19): siRNA sense strand
uggaggagauucccuuugc

SEQ ID NO: 2128598 - RNA, 19 nt, Homo sapiens
  misc_RNA (1)...(19): siRNA sense strand
gagaggaggaagagaggau

SEQ ID NO: 2128599 - RNA, 19 nt, Homo sapiens
  misc_RNA (1)...(19): siRNA sense strand
gagggacuccaccuucuca

SEQ ID NO: 2128600 - RNA, 19 nt, Homo sapiens
  misc_RNA (1)...(19): siRNA sense strand
aguggaagaucaccuuaag

SEQ ID NO: 2128601 - RNA, 19 nt, Homo sapiens
  misc_RNA (1)...(19): siRNA sense strand
ucaagcuagugcaggagaa

SEQ ID NO: 2128602 - RNA, 19 nt, Homo sapiens
  misc_RNA (1)...(19): siRNA sense strand
ggcgagagccaagaaccua

SEQ ID NO: 2128603 - RNA, 19 nt, Homo sapiens
  misc_RNA (1)...(19): siRNA sense strand
gcccagcuccaaccuccua

SEQ ID NO: 2128604 - RNA, 19 nt, Homo sapiens
  misc_RNA (1)...(19): siRNA sense strand
gggagaaguccgugaagag

SEQ ID NO: 2128605 - RNA, 19 nt, Homo sapiens
  misc_RNA (1)...(19): siRNA sense strand
caagccugcaggagaaauu

SEQ ID NO: 2128606 - RNA, 19 nt, Homo sapiens
  misc_RNA (1)...(19): siRNA sense strand
ccuaugacgacaagacuga

SEQ ID NO: 2128607 - RNA, 19 nt, Homo sapiens
  misc_RNA (1)...(19): siRNA sense strand
uggaggaguucuggaugaa

SEQ ID NO: 2128608 - RNA, 19 nt, Homo sapiens
  misc_RNA (1)...(19): siRNA sense strand
agaaccagccgagauagaa

SEQ ID NO: 2128609 - RNA, 19 nt, Homo sapiens
  misc_RNA (1)...(19): siRNA sense strand
gcaucgagcccagaucauc

SEQ ID NO: 2128610 - RNA, 19 nt, Homo sapiens
  misc_RNA (1)...(19): siRNA sense strand
ugagcaggaugcagcagau

SEQ ID NO: 2128611 - RNA, 19 nt, Homo sapiens
  misc_RNA (1)...(19): siRNA sense strand
ccagggagaaguccgugaa

SEQ ID NO: 2128612 - RNA, 19 nt, Homo sapiens
  misc_RNA (1)...(19): siRNA sense strand
gaggaggagcugucagaag

SEQ ID NO: 2128613 - RNA, 19 nt, Homo sapiens
  misc_RNA (1)...(19): siRNA sense strand
gagaagcccaaagcugaug

SEQ ID NO: 2128614 - RNA, 19 nt, Homo sapiens
  misc_RNA (1)...(19): siRNA sense strand
gaagauguggacucagaac

SEQ ID NO: 2128615 - RNA, 19 nt, Homo sapiens
  misc_RNA (1)...(19): siRNA sense strand
acacggaggaggaacugaa

SEQ ID NO: 2128616 - RNA, 19 nt, Homo sapiens
  misc_RNA (1)...(19): siRNA sense strand
ggaggagauucccuuugcu

SEQ ID NO: 2128617 - RNA, 19 nt, Homo sapiens
  misc_RNA (1)...(19): siRNA sense strand
gcacucucccauccgauca

SEQ ID NO: 2128618 - RNA, 19 nt, Homo sapiens
  misc_RNA (1)...(19): siRNA sense strand
ccaggaaucagcucuucug

SEQ ID NO: 2128619 - RNA, 19 nt, Homo sapiens
  misc_RNA (1)...(19): siRNA sense strand
ggaagaucaccuuaagacu

SEQ ID NO: 2128620 - RNA, 19 nt, Homo sapiens
  misc_RNA (1)...(19): siRNA sense strand
cgucggaugcugacagaga

SEQ ID NO: 2128621 - RNA, 19 nt, Homo sapiens
  misc_RNA (1)...(19): siRNA sense strand
ugaccuagaggaagaugug

SEQ ID NO: 2128622 - RNA, 19 nt, Homo sapiens
  misc_RNA (1)...(19): siRNA sense strand
gaaggagaagaaguccaaa

SEQ ID NO: 2128623 - RNA, 19 nt, Homo sapiens
  misc_RNA (1)...(19): siRNA sense strand
cucagaaccagccgagaua

SEQ ID NO: 2128624 - RNA, 19 nt, Homo sapiens
  misc_RNA (1)...(19): siRNA sense strand
caagaaggacaagaagaag

SEQ ID NO: 2128625 - RNA, 19 nt, Homo sapiens
  misc_RNA (1)...(19): siRNA sense strand
ggagcugucagaagagaag

SEQ ID NO: 2128626 - RNA, 19 nt, Homo sapiens
  misc_RNA (1)...(19): siRNA sense strand
cagaaccagccgagauaga

SEQ ID NO: 2128627 - RNA, 19 nt, Homo sapiens
  misc_RNA (1)...(19): siRNA sense strand
ucccuuugcugaugaugug

SEQ ID NO: 2128628 - RNA, 19 nt, Homo sapiens
  misc_RNA (1)...(19): siRNA sense strand
gccaaagugacaccaagga

SEQ ID NO: 2128629 - RNA, 19 nt, Homo sapiens
  misc_RNA (1)...(19): siRNA sense strand
aagaaggacaagaagaaga

SEQ ID NO: 2128630 - RNA, 19 nt, Homo sapiens
  misc_RNA (1)...(19): siRNA sense strand
cagcuccaaccuccuagaa

SEQ ID NO: 2128631 - RNA, 19 nt, Homo sapiens
  misc_RNA (1)...(19): siRNA sense strand
cggcggauccucuggagau

SEQ ID NO: 2128632 - RNA, 19 nt, Homo sapiens
  misc_RNA (1)...(19): siRNA sense strand
ggaugagggacuccaccuu

SEQ ID NO: 2128633 - RNA, 19 nt, Homo sapiens
  misc_RNA (1)...(19): siRNA sense strand
gcgaccugguggaggaguu

SEQ ID NO: 2128634 - RNA, 19 nt, Homo sapiens
  misc_RNA (1)...(19): siRNA sense strand
gaacaucguuuacuacaaa

SEQ ID NO: 2128635 - RNA, 19 nt, Homo sapiens
  misc_RNA (1)...(19): siRNA sense strand
ggagaaagcaguccugaua

SEQ ID NO: 2128636 - RNA, 19 nt, Homo sapiens
  misc_RNA (1)...(19): siRNA sense strand
ggagacagcugacacaaga

SEQ ID NO: 2128637 - RNA, 19 nt, Homo sapiens
  misc_RNA (1)...(19): siRNA sense strand
gaaaguagccuugauccua

SEQ ID NO: 2128638 - RNA, 19 nt, Homo sapiens
  misc_RNA (1)...(19): siRNA sense strand
aaacagggcuccaugaaga

SEQ ID NO: 2128639 - RNA, 19 nt, Homo sapiens
  misc_RNA (1)...(19): siRNA sense strand
ggaucgagcuggagaacua

SEQ ID NO: 2128640 - RNA, 19 nt, Homo sapiens
  misc_RNA (1)...(19): siRNA sense strand
gcccugaccugauagauuu

SEQ ID NO: 2128641 - RNA, 19 nt, Homo sapiens
  misc_RNA (1)...(19): siRNA sense strand
gaugguaaauucuacugua

SEQ ID NO: 2128642 - RNA, 19 nt, Homo sapiens
  misc_RNA (1)...(19): siRNA sense strand
gcagagagggaaaguauuu

SEQ ID NO: 2128643 - RNA, 19 nt, Homo sapiens
  misc_RNA (1)...(19): siRNA sense strand
gaaguucuauggcaaguuc

SEQ ID NO: 2128644 - RNA, 19 nt, Homo sapiens
  misc_RNA (1)...(19): siRNA sense strand
gcagaacggacaccaguua

SEQ ID NO: 2128645 - RNA, 19 nt, Homo sapiens
  misc_RNA (1)...(19): siRNA sense strand
ugacuucacuuguauguau

SEQ ID NO: 2128646 - RNA, 19 nt, Homo sapiens
  misc_RNA (1)...(19): siRNA sense strand
acacagagcuccugcuuuc

SEQ ID NO: 2128647 - RNA, 19 nt, Homo sapiens
  misc_RNA (1)...(19): siRNA sense strand
gagaaggaauugggcauuu

SEQ ID NO: 2128648 - RNA, 19 nt, Homo sapiens
  misc_RNA (1)...(19): siRNA sense strand
ccaagagaaugaacggaua

SEQ ID NO: 2128649 - RNA, 19 nt, Homo sapiens
  misc_RNA (1)...(19): siRNA sense strand
ggacaaaggagugauacua

SEQ ID NO: 2128650 - RNA, 19 nt, Homo sapiens
  misc_RNA (1)...(19): siRNA sense strand
caacuggccuuugacauug

SEQ ID NO: 2128651 - RNA, 19 nt, Homo sapiens
  misc_RNA (1)...(19): siRNA sense strand
gggaaaguauuuacagguu

SEQ ID NO: 2128652 - RNA, 19 nt, Homo sapiens
  misc_RNA (1)...(19): siRNA sense strand
gacacacacuauuucguua

SEQ ID NO: 2128653 - RNA, 19 nt, Homo sapiens
  misc_RNA (1)...(19): siRNA sense strand
gaacggacaccaguuacua

SEQ ID NO: 2128654 - RNA, 19 nt, Homo sapiens
  misc_RNA (1)...(19): siRNA sense strand
ggaauuccaaggacuuaua

SEQ ID NO: 2128655 - RNA, 19 nt, Homo sapiens
  misc_RNA (1)...(19): siRNA sense strand
gaaagaauuccguggcaaa

SEQ ID NO: 2128656 - RNA, 19 nt, Homo sapiens
  misc_RNA (1)...(19): siRNA sense strand
ccaaggugguuguuauuga

SEQ ID NO: 2128657 - RNA, 19 nt, Homo sapiens
  misc_RNA (1)...(19): siRNA sense strand
gcagacagauggcuaugca

SEQ ID NO: 2128658 - RNA, 19 nt, Homo sapiens
  misc_RNA (1)...(19): siRNA sense strand
guaagaacuucagccagua

SEQ ID NO: 2128659 - RNA, 19 nt, Homo sapiens
  misc_RNA (1)...(19): siRNA sense strand
guacagccaucgacuuauc

SEQ ID NO: 2128660 - RNA, 19 nt, Homo sapiens
  misc_RNA (1)...(19): siRNA sense strand
gagaaagaccagucaauca

SEQ ID NO: 2128661 - RNA, 19 nt, Homo sapiens
  misc_RNA (1)...(19): siRNA sense strand
ccacagguauugacuugga

SEQ ID NO: 2128662 - RNA, 19 nt, Homo sapiens
  misc_RNA (1)...(19): siRNA sense strand
ggaaacagggcuccaugaa

SEQ ID NO: 2128663 - RNA, 19 nt, Homo sapiens
  misc_RNA (1)...(19): siRNA sense strand
gaacgagcccuuuggaagu

SEQ ID NO: 2128664 - RNA, 19 nt, Homo sapiens
  misc_RNA (1)...(19): siRNA sense strand
uggagaacaucguuuacua

SEQ ID NO: 2128665 - RNA, 19 nt, Homo sapiens
  misc_RNA (1)...(19): siRNA sense strand
gggcauuucucccaucaug

SEQ ID NO: 2128666 - RNA, 19 nt, Homo sapiens
  misc_RNA (1)...(19): siRNA sense strand
ggagaagaauaaccaacug

SEQ ID NO: 2128667 - RNA, 19 nt, Homo sapiens
  misc_RNA (1)...(19): siRNA sense strand
gaaagaccagucaaucaga

SEQ ID NO: 2128668 - RNA, 19 nt, Homo sapiens
  misc_RNA (1)...(19): siRNA sense strand
gggccaaggugguuguuau

SEQ ID NO: 2128669 - RNA, 19 nt, Homo sapiens
  misc_RNA (1)...(19): siRNA sense strand
ugacauugcugagaaggaa

SEQ ID NO: 2128670 - RNA, 19 nt, Homo sapiens
  misc_RNA (1)...(19): siRNA sense strand
gaguaugaauuugaaguga

SEQ ID NO: 2128671 - RNA, 19 nt, Homo sapiens
  misc_RNA (1)...(19): siRNA sense strand
ggccaaauuugaagagaau

SEQ ID NO: 2128672 - RNA, 19 nt, Homo sapiens
  misc_RNA (1)...(19): siRNA sense strand
cgaaguuggucucuaggaa

SEQ ID NO: 2128673 - RNA, 19 nt, Homo sapiens
  misc_RNA (1)...(19): siRNA sense strand
caccaagugucucaucauu

SEQ ID NO: 2128674 - RNA, 19 nt, Homo sapiens
  misc_RNA (1)...(19): siRNA sense strand
ccaacuggccuuugacauu

SEQ ID NO: 2128675 - RNA, 19 nt, Homo sapiens
  misc_RNA (1)...(19): siRNA sense strand
cagcucauguccucuuuga

SEQ ID NO: 2128676 - RNA, 19 nt, Homo sapiens
  misc_RNA (1)...(19): siRNA sense strand
ggacuaccgcuccuucuau

SEQ ID NO: 2128677 - RNA, 19 nt, Homo sapiens
  misc_RNA (1)...(19): siRNA sense strand
gaacaaagugaaguacaug

SEQ ID NO: 2128678 - RNA, 19 nt, Homo sapiens
  misc_RNA (1)...(19): siRNA sense strand
caccauacaugaucuacga

SEQ ID NO: 2128679 - RNA, 19 nt, Homo sapiens
  misc_RNA (1)...(19): siRNA sense strand
agaaggaguucccgcagaa

SEQ ID NO: 2128680 - RNA, 19 nt, Homo sapiens
  misc_RNA (1)...(19): siRNA sense strand
gagggaagccacagguauu

SEQ ID NO: 2128681 - RNA, 19 nt, Homo sapiens
  misc_RNA (1)...(19): siRNA sense strand
caccggagcugcuucaagu

SEQ ID NO: 2128682 - RNA, 19 nt, Homo sapiens
  misc_RNA (1)...(19): siRNA sense strand
ggagaaagaccagucaauc

SEQ ID NO: 2128683 - RNA, 19 nt, Homo sapiens
  misc_RNA (1)...(19): siRNA sense strand
caagccaggugcgccauuu

SEQ ID NO: 2128684 - RNA, 19 nt, Homo sapiens
  misc_RNA (1)...(19): siRNA sense strand
ggaaaagcgugcacuaaca

SEQ ID NO: 2128685 - RNA, 19 nt, Homo sapiens
  misc_RNA (1)...(19): siRNA sense strand
gaagcguucucccaaggau

SEQ ID NO: 2128686 - RNA, 19 nt, Homo sapiens
  misc_RNA (1)...(19): siRNA sense strand
ucuacgagauguuuaagga

SEQ ID NO: 2128687 - RNA, 19 nt, Homo sapiens
  misc_RNA (1)...(19): siRNA sense strand
caucaugacaggcaaagaa

SEQ ID NO: 2128688 - RNA, 19 nt, Homo sapiens
  misc_RNA (1)...(19): siRNA sense strand
auaccgcccugaccugaua

SEQ ID NO: 2128689 - RNA, 19 nt, Homo sapiens
  misc_RNA (1)...(19): siRNA sense strand
gugcgccauuuauaugaua

SEQ ID NO: 2128690 - RNA, 19 nt, Homo sapiens
  misc_RNA (1)...(19): siRNA sense strand
gaaacagggcuccaugaag

SEQ ID NO: 2128691 - RNA, 19 nt, Homo sapiens
  misc_RNA (1)...(19): siRNA sense strand
guaugaauuugaagugauc

SEQ ID NO: 2128692 - RNA, 19 nt, Homo sapiens
  misc_RNA (1)...(19): siRNA sense strand
uggagagccuggugaauuc

SEQ ID NO: 2128693 - RNA, 19 nt, Homo sapiens
  misc_RNA (1)...(19): siRNA sense strand
gguauugacuuggagaaca

SEQ ID NO: 2128694 - RNA, 19 nt, Homo sapiens
  misc_RNA (1)...(19): siRNA sense strand
gagaacaucguuuacuaca

SEQ ID NO: 2128695 - RNA, 19 nt, Homo sapiens
  misc_RNA (1)...(19): siRNA sense strand
ugacacacacuauuucguu

SEQ ID NO: 2128696 - RNA, 19 nt, Homo sapiens
  misc_RNA (1)...(19): siRNA sense strand
gauccuaggcauugaaauc

SEQ ID NO: 2128697 - RNA, 19 nt, Homo sapiens
  misc_RNA (1)...(19): siRNA sense strand
auaaccaacuggccuuuga

SEQ ID NO: 2128698 - RNA, 19 nt, Homo sapiens
  misc_RNA (1)...(19): siRNA sense strand
gaaugugaguaagaacuuc

SEQ ID NO: 2128699 - RNA, 19 nt, Homo sapiens
  misc_RNA (1)...(19): siRNA sense strand
acaaagaugacacacacua

SEQ ID NO: 2128700 - RNA, 19 nt, Homo sapiens
  misc_RNA (1)...(19): siRNA sense strand
gugaccaccuggaacuaaa

SEQ ID NO: 2128701 - RNA, 19 nt, Homo sapiens
  misc_RNA (1)...(19): siRNA sense strand
caaggugguuguuauugag

SEQ ID NO: 2128702 - RNA, 19 nt, Homo sapiens
  misc_RNA (1)...(19): siRNA sense strand
ugacucaguucuacgagau

SEQ ID NO: 2128703 - RNA, 19 nt, Homo sapiens
  misc_RNA (1)...(19): siRNA sense strand
gagugauacuacaugacua

SEQ ID NO: 2128704 - RNA, 19 nt, Homo sapiens
  misc_RNA (1)...(19): siRNA sense strand
acaaaggagugauacuaca

SEQ ID NO: 2128705 - RNA, 19 nt, Homo sapiens
  misc_RNA (1)...(19): siRNA sense strand
aagaugacacacacuauuu

SEQ ID NO: 2128706 - RNA, 19 nt, Homo sapiens
  misc_RNA (1)...(19): siRNA sense strand
aaagaugacacacacuauu

SEQ ID NO: 2128707 - RNA, 19 nt, Homo sapiens
  misc_RNA (1)...(19): siRNA sense strand
caagacucauccuguguca

SEQ ID NO: 2128708 - RNA, 19 nt, Homo sapiens
  misc_RNA (1)...(19): siRNA sense strand
agaacaaagugaaguacau

SEQ ID NO: 2128709 - RNA, 19 nt, Homo sapiens
  misc_RNA (1)...(19): siRNA sense strand
aguccaagcuuaacuacug

SEQ ID NO: 2128710 - RNA, 19 nt, Homo sapiens
  misc_RNA (1)...(19): siRNA sense strand
ggguaaacgugacagaucu

SEQ ID NO: 2128711 - RNA, 19 nt, Homo sapiens
  misc_RNA (1)...(19): siRNA sense strand
caauaucaacgucaacuuc

SEQ ID NO: 2128712 - RNA, 19 nt, Homo sapiens
  misc_RNA (1)...(19): siRNA sense strand
gagccuuucuggccaaugg

SEQ ID NO: 2128713 - RNA, 19 nt, Homo sapiens
  misc_RNA (1)...(19): siRNA sense strand
caaagaugacacacacuau

SEQ ID NO: 2128714 - RNA, 19 nt, Homo sapiens
  misc_RNA (1)...(19): siRNA sense strand
gucagaguaugaauuugaa

SEQ ID NO: 2128715 - RNA, 19 nt, Homo sapiens
  misc_RNA (1)...(19): siRNA sense strand
ccguacagccaucgacuua

SEQ ID NO: 2128716 - RNA, 19 nt, Homo sapiens
  misc_RNA (1)...(19): siRNA sense strand
aagcuuaacuacuggaaag

SEQ ID NO: 2128717 - RNA, 19 nt, Homo sapiens
  misc_RNA (1)...(19): siRNA sense strand
gaggagaggaagcaugaga

SEQ ID NO: 2128718 - RNA, 19 nt, Homo sapiens
  misc_RNA (1)...(19): siRNA sense strand
cugauaagcuguccauggu

SEQ ID NO: 2128719 - RNA, 19 nt, Homo sapiens
  misc_RNA (1)...(19): siRNA sense strand
cagcugccgucucuggauu

SEQ ID NO: 2128720 - RNA, 19 nt, Homo sapiens
  misc_RNA (1)...(19): siRNA sense strand
agcagaagcuaaaguggaa

SEQ ID NO: 2128721 - RNA, 19 nt, Homo sapiens
  misc_RNA (1)...(19): siRNA sense strand
gguaaauucuacuguaagc

SEQ ID NO: 2128722 - RNA, 19 nt, Homo sapiens
  misc_RNA (1)...(19): siRNA sense strand
ggaaccagaacaaagugaa

SEQ ID NO: 2128723 - RNA, 19 nt, Homo sapiens
  misc_RNA (1)...(19): siRNA sense strand
gagaaagcaguccugauag

SEQ ID NO: 2128724 - RNA, 19 nt, Homo sapiens
  misc_RNA (1)...(19): siRNA sense strand
gauauucaccuggaaaugg

SEQ ID NO: 2128725 - RNA, 19 nt, Homo sapiens
  misc_RNA (1)...(19): siRNA sense strand
gccaaugggaacaggaaua

SEQ ID NO: 2128726 - RNA, 19 nt, Homo sapiens
  misc_RNA (1)...(19): siRNA sense strand
aagcuaaaguggaagagau

SEQ ID NO: 2128727 - RNA, 19 nt, Homo sapiens
  misc_RNA (1)...(19): siRNA sense strand
guauugacuuggagaacau

SEQ ID NO: 2128728 - RNA, 19 nt, Homo sapiens
  misc_RNA (1)...(19): siRNA sense strand
ccaggugcgccauuuauau

SEQ ID NO: 2128729 - RNA, 19 nt, Homo sapiens
  misc_RNA (1)...(19): siRNA sense strand
gucacucgguaucccaaua

SEQ ID NO: 2128730 - RNA, 19 nt, Homo sapiens
  misc_RNA (1)...(19): siRNA sense strand
ggagugauacuacaugacu

SEQ ID NO: 2128731 - RNA, 19 nt, Homo sapiens
  misc_RNA (1)...(19): siRNA sense strand
gaauaaccaacuggccuuu

SEQ ID NO: 2128732 - RNA, 19 nt, Homo sapiens
  misc_RNA (1)...(19): siRNA sense strand
guaagccacacuacugcua

SEQ ID NO: 2128733 - RNA, 19 nt, Homo sapiens
  misc_RNA (1)...(19): siRNA sense strand
ucaaguccaagcuuaacua

SEQ ID NO: 2128734 - RNA, 19 nt, Homo sapiens
  misc_RNA (1)...(19): siRNA sense strand
gaagacagcuuauuaucug

SEQ ID NO: 2128735 - RNA, 19 nt, Homo sapiens
  misc_RNA (1)...(19): siRNA sense strand
ggaggaagacagcuuauua

SEQ ID NO: 2128736 - RNA, 19 nt, Homo sapiens
  misc_RNA (1)...(19): siRNA sense strand
ggacagagcagacugauag

SEQ ID NO: 2128737 - RNA, 19 nt, Homo sapiens
  misc_RNA (1)...(19): siRNA sense strand
gaaagaaccgugucaggaa

SEQ ID NO: 2128738 - RNA, 19 nt, Homo sapiens
  misc_RNA (1)...(19): siRNA sense strand
uagcagcucuggacuauga

SEQ ID NO: 2128739 - RNA, 19 nt, Homo sapiens
  misc_RNA (1)...(19): siRNA sense strand
gaaggagaauguccgaguu

SEQ ID NO: 2128740 - RNA, 19 nt, Homo sapiens
  misc_RNA (1)...(19): siRNA sense strand
gcagaugggcuuaagguuu

SEQ ID NO: 2128741 - RNA, 19 nt, Homo sapiens
  misc_RNA (1)...(19): siRNA sense strand
ggaugaagcucuggaggaa

SEQ ID NO: 2128742 - RNA, 19 nt, Homo sapiens
  misc_RNA (1)...(19): siRNA sense strand
cagaugggcuuaagguuug

SEQ ID NO: 2128743 - RNA, 19 nt, Homo sapiens
  misc_RNA (1)...(19): siRNA sense strand
ggaugaggauggcuucuau

SEQ ID NO: 2128744 - RNA, 19 nt, Homo sapiens
  misc_RNA (1)...(19): siRNA sense strand
ugaagcggcucaagguaaa

SEQ ID NO: 2128745 - RNA, 19 nt, Homo sapiens
  misc_RNA (1)...(19): siRNA sense strand
ggacacccaugauuucuac

SEQ ID NO: 2128746 - RNA, 19 nt, Homo sapiens
  misc_RNA (1)...(19): siRNA sense strand
gcucaacgucagagacuua

SEQ ID NO: 2128747 - RNA, 19 nt, Homo sapiens
  misc_RNA (1)...(19): siRNA sense strand
gccaaccucuguccaagaa

SEQ ID NO: 2128748 - RNA, 19 nt, Homo sapiens
  misc_RNA (1)...(19): siRNA sense strand
caacucggaucucuagaca

SEQ ID NO: 2128749 - RNA, 19 nt, Homo sapiens
  misc_RNA (1)...(19): siRNA sense strand
aaagaaccgugucaggaaa

SEQ ID NO: 2128750 - RNA, 19 nt, Homo sapiens
  misc_RNA (1)...(19): siRNA sense strand
gccagagacuccacccuuu

SEQ ID NO: 2128751 - RNA, 19 nt, Homo sapiens
  misc_RNA (1)...(19): siRNA sense strand
agacagaaguagcaacaga

SEQ ID NO: 2128752 - RNA, 19 nt, Homo sapiens
  misc_RNA (1)...(19): siRNA sense strand
gaguccaggucaccgguua

SEQ ID NO: 2128753 - RNA, 19 nt, Homo sapiens
  misc_RNA (1)...(19): siRNA sense strand
gcacaugggcaccagcaaa

SEQ ID NO: 2128754 - RNA, 19 nt, Homo sapiens
  misc_RNA (1)...(19): siRNA sense strand
gauaggagguggcguucuc

SEQ ID NO: 2128755 - RNA, 19 nt, Homo sapiens
  misc_RNA (1)...(19): siRNA sense strand
gaggaagacagcuuauuau

SEQ ID NO: 2128756 - RNA, 19 nt, Homo sapiens
  misc_RNA (1)...(19): siRNA sense strand
ccagagacuccacccuuua

SEQ ID NO: 2128757 - RNA, 19 nt, Homo sapiens
  misc_RNA (1)...(19): siRNA sense strand
ggaagacagcuuauuaucu

SEQ ID NO: 2128758 - RNA, 19 nt, Homo sapiens
  misc_RNA (1)...(19): siRNA sense strand
gggacuugcugcaggugua

SEQ ID NO: 2128759 - RNA, 19 nt, Homo sapiens
  misc_RNA (1)...(19): siRNA sense strand
ugaagucgcccacaggaaa

SEQ ID NO: 2128760 - RNA, 19 nt, Homo sapiens
  misc_RNA (1)...(19): siRNA sense strand
ccaaguuccuagaagcauu

SEQ ID NO: 2128761 - RNA, 19 nt, Homo sapiens
  misc_RNA (1)...(19): siRNA sense strand
acagagacauacaggagaa

SEQ ID NO: 2128762 - RNA, 19 nt, Homo sapiens
  misc_RNA (1)...(19): siRNA sense strand
gaagguggaggcugagaau

SEQ ID NO: 2128763 - RNA, 19 nt, Homo sapiens
  misc_RNA (1)...(19): siRNA sense strand
caaguuaaagguagcagaa

SEQ ID NO: 2128764 - RNA, 19 nt, Homo sapiens
  misc_RNA (1)...(19): siRNA sense strand
gugaagcggcucaagguaa

SEQ ID NO: 2128765 - RNA, 19 nt, Homo sapiens
  misc_RNA (1)...(19): siRNA sense strand
ggagcugugccaagucuuu

SEQ ID NO: 2128766 - RNA, 19 nt, Homo sapiens
  misc_RNA (1)...(19): siRNA sense strand
aaacugaugguaguccuua

SEQ ID NO: 2128767 - RNA, 19 nt, Homo sapiens
  misc_RNA (1)...(19): siRNA sense strand
gggacuacauauauaucuu

SEQ ID NO: 2128768 - RNA, 19 nt, Homo sapiens
  misc_RNA (1)...(19): siRNA sense strand
gcagaaggcccaaguucca

SEQ ID NO: 2128769 - RNA, 19 nt, Homo sapiens
  misc_RNA (1)...(19): siRNA sense strand
guauaacuacaacccauuu

SEQ ID NO: 2128770 - RNA, 19 nt, Homo sapiens
  misc_RNA (1)...(19): siRNA sense strand
ggacuacauauauaucuuc

SEQ ID NO: 2128771 - RNA, 19 nt, Homo sapiens
  misc_RNA (1)...(19): siRNA sense strand
caagacagaaguagcaaca

SEQ ID NO: 2128772 - RNA, 19 nt, Homo sapiens
  misc_RNA (1)...(19): siRNA sense strand
gagaggguacuucggcaaa

SEQ ID NO: 2128773 - RNA, 19 nt, Homo sapiens
  misc_RNA (1)...(19): siRNA sense strand
gugagucccuggauucagu

SEQ ID NO: 2128774 - RNA, 19 nt, Homo sapiens
  misc_RNA (1)...(19): siRNA sense strand
caaccugggcucagaagga

SEQ ID NO: 2128775 - RNA, 19 nt, Homo sapiens
  misc_RNA (1)...(19): siRNA sense strand
guaugcaucugacuuccau

SEQ ID NO: 2128776 - RNA, 19 nt, Homo sapiens
  misc_RNA (1)...(19): siRNA sense strand
ugucacagcccaacagaga

SEQ ID NO: 2128777 - RNA, 19 nt, Homo sapiens
  misc_RNA (1)...(19): siRNA sense strand
caacaucaccugggucuac

SEQ ID NO: 2128778 - RNA, 19 nt, Homo sapiens
  misc_RNA (1)...(19): siRNA sense strand
ccacuguguuaaacugaug

SEQ ID NO: 2128779 - RNA, 19 nt, Homo sapiens
  misc_RNA (1)...(19): siRNA sense strand
uuguggcccucucugauua

SEQ ID NO: 2128780 - RNA, 19 nt, Homo sapiens
  misc_RNA (1)...(19): siRNA sense strand
guagaaaggaccugcucuu

SEQ ID NO: 2128781 - RNA, 19 nt, Homo sapiens
  misc_RNA (1)...(19): siRNA sense strand
gcucucaggacacccauga

SEQ ID NO: 2128782 - RNA, 19 nt, Homo sapiens
  misc_RNA (1)...(19): siRNA sense strand
ggaagguggaggcugagaa

SEQ ID NO: 2128783 - RNA, 19 nt, Homo sapiens
  misc_RNA (1)...(19): siRNA sense strand
gagggugccagcuccauga

SEQ ID NO: 2128784 - RNA, 19 nt, Homo sapiens
  misc_RNA (1)...(19): siRNA sense strand
gcaucugacuuccauaacg

SEQ ID NO: 2128785 - RNA, 19 nt, Homo sapiens
  misc_RNA (1)...(19): siRNA sense strand
ugggagggcuguagaaagg

SEQ ID NO: 2128786 - RNA, 19 nt, Homo sapiens
  misc_RNA (1)...(19): siRNA sense strand
cagcuacaccugcagaaug

SEQ ID NO: 2128787 - RNA, 19 nt, Homo sapiens
  misc_RNA (1)...(19): siRNA sense strand
gcuggggacuacauauaua

SEQ ID NO: 2128788 - RNA, 19 nt, Homo sapiens
  misc_RNA (1)...(19): siRNA sense strand
gauacaggcgcuccagugu

SEQ ID NO: 2128789 - RNA, 19 nt, Homo sapiens
  misc_RNA (1)...(19): siRNA sense strand
caaccucuguccaagaaaa

SEQ ID NO: 2128790 - RNA, 19 nt, Homo sapiens
  misc_RNA (1)...(19): siRNA sense strand
guguuaaacugaugguagu

SEQ ID NO: 2128791 - RNA, 19 nt, Homo sapiens
  misc_RNA (1)...(19): siRNA sense strand
ccgccaaagucaucaagau

SEQ ID NO: 2128792 - RNA, 19 nt, Homo sapiens
  misc_RNA (1)...(19): siRNA sense strand
gggcucagaaggagaaugu

SEQ ID NO: 2128793 - RNA, 19 nt, Homo sapiens
  misc_RNA (1)...(19): siRNA sense strand
ucagcuggguccuccaaug

SEQ ID NO: 2128794 - RNA, 19 nt, Homo sapiens
  misc_RNA (1)...(19): siRNA sense strand
caugugguauaucuugaug

SEQ ID NO: 2128795 - RNA, 19 nt, Homo sapiens
  misc_RNA (1)...(19): siRNA sense strand
ccaaaggggugcuccguau

SEQ ID NO: 2128796 - RNA, 19 nt, Homo sapiens
  misc_RNA (1)...(19): siRNA sense strand
augaagcucuggaggaaga

SEQ ID NO: 2128797 - RNA, 19 nt, Homo sapiens
  misc_RNA (1)...(19): siRNA sense strand
cccgaggacuucuucaugu

SEQ ID NO: 2128798 - RNA, 19 nt, Homo sapiens
  misc_RNA (1)...(19): siRNA sense strand
caucugacuuccauaacgu

SEQ ID NO: 2128799 - RNA, 19 nt, Homo sapiens
  misc_RNA (1)...(19): siRNA sense strand
ugucaccgauggccagaga

SEQ ID NO: 2128800 - RNA, 19 nt, Homo sapiens
  misc_RNA (1)...(19): siRNA sense strand
ucaggacacccaugauuuc

SEQ ID NO: 2128801 - RNA, 19 nt, Homo sapiens
  misc_RNA (1)...(19): siRNA sense strand
ggugaagcggcucaaggua

SEQ ID NO: 2128802 - RNA, 19 nt, Homo sapiens
  misc_RNA (1)...(19): siRNA sense strand
gccaacaguaugcaucuga

SEQ ID NO: 2128803 - RNA, 19 nt, Homo sapiens
  misc_RNA (1)...(19): siRNA sense strand
cgccagcucuuccucaagu

SEQ ID NO: 2128804 - RNA, 19 nt, Homo sapiens
  misc_RNA (1)...(19): siRNA sense strand
agaaguagcaacagagauc

SEQ ID NO: 2128805 - RNA, 19 nt, Homo sapiens
  misc_RNA (1)...(19): siRNA sense strand
ggaggagaaggcucugaga

SEQ ID NO: 2128806 - RNA, 19 nt, Homo sapiens
  misc_RNA (1)...(19): siRNA sense strand
gaucuucauggcucaguau

SEQ ID NO: 2128807 - RNA, 19 nt, Homo sapiens
  misc_RNA (1)...(19): siRNA sense strand
gccggagucccaaguuaaa

SEQ ID NO: 2128808 - RNA, 19 nt, Homo sapiens
  misc_RNA (1)...(19): siRNA sense strand
acaggcaagugggcaauau

SEQ ID NO: 2128809 - RNA, 19 nt, Homo sapiens
  misc_RNA (1)...(19): siRNA sense strand
cggcagugcuggagaacca

SEQ ID NO: 2128810 - RNA, 19 nt, Homo sapiens
  misc_RNA (1)...(19): siRNA sense strand
ucauggcucaguauaacua

SEQ ID NO: 2128811 - RNA, 19 nt, Homo sapiens
  misc_RNA (1)...(19): siRNA sense strand
gcaagcugcaggagaccaa

SEQ ID NO: 2128812 - RNA, 19 nt, Homo sapiens
  misc_RNA (1)...(19): siRNA sense strand
agacuccacccuuuagcua

SEQ ID NO: 2128813 - RNA, 19 nt, Homo sapiens
  misc_RNA (1)...(19): siRNA sense strand
ccgaggacuucuucaugug

SEQ ID NO: 2128814 - RNA, 19 nt, Homo sapiens
  misc_RNA (1)...(19): siRNA sense strand
ggaauucucccagcuacag

SEQ ID NO: 2128815 - RNA, 19 nt, Homo sapiens
  misc_RNA (1)...(19): siRNA sense strand
caacuucguggagcagauu

SEQ ID NO: 2128816 - RNA, 19 nt, Homo sapiens
  misc_RNA (1)...(19): siRNA sense strand
ugaagacuacgcaguguca

SEQ ID NO: 2128817 - RNA, 19 nt, Homo sapiens
  misc_RNA (1)...(19): siRNA sense strand
ggacaagcagaucgaagag

SEQ ID NO: 2128818 - RNA, 19 nt, Homo sapiens
  misc_RNA (1)...(19): siRNA sense strand
gcuggugcccuccaacuuc

SEQ ID NO: 2128819 - RNA, 19 nt, Homo sapiens
  misc_RNA (1)...(19): siRNA sense strand
gggacagagcagacugaua

SEQ ID NO: 2128820 - RNA, 19 nt, Homo sapiens
  misc_RNA (1)...(19): siRNA sense strand
ucucaggacacccaugauu

SEQ ID NO: 2128821 - RNA, 19 nt, Homo sapiens
  misc_RNA (1)...(19): siRNA sense strand
gaaccacaggccaccuuca

SEQ ID NO: 2128822 - RNA, 19 nt, Homo sapiens
  misc_RNA (1)...(19): siRNA sense strand
agaggcaguugaugcuuca

SEQ ID NO: 2128823 - RNA, 19 nt, Homo sapiens
  misc_RNA (1)...(19): siRNA sense strand
aggaggagcuggucuucca

SEQ ID NO: 2128824 - RNA, 19 nt, Homo sapiens
  misc_RNA (1)...(19): siRNA sense strand
uggcagaaggucucaguga

SEQ ID NO: 2128825 - RNA, 19 nt, Homo sapiens
  misc_RNA (1)...(19): siRNA sense strand
caccgguuaugcuguguau

SEQ ID NO: 2128826 - RNA, 19 nt, Homo sapiens
  misc_RNA (1)...(19): siRNA sense strand
gcugucgccugcaggaagu

SEQ ID NO: 2128827 - RNA, 19 nt, Homo sapiens
  misc_RNA (1)...(19): siRNA sense strand
uaacuacaacccauuugag

SEQ ID NO: 2128828 - RNA, 19 nt, Homo sapiens
  misc_RNA (1)...(19): siRNA sense strand
uagcagaaggcccaaguuc

SEQ ID NO: 2128829 - RNA, 19 nt, Homo sapiens
  misc_RNA (1)...(19): siRNA sense strand
cgcagaaggcccuguguga

SEQ ID NO: 2128830 - RNA, 19 nt, Homo sapiens
  misc_RNA (1)...(19): siRNA sense strand
cuucauggcucaguauaac

SEQ ID NO: 2128831 - RNA, 19 nt, Homo sapiens
  misc_RNA (1)...(19): siRNA sense strand
guaugcagaugggcuuaag

SEQ ID NO: 2128832 - RNA, 19 nt, Homo sapiens
  misc_RNA (1)...(19): siRNA sense strand
gccagcucuuccucaagua

SEQ ID NO: 2128833 - RNA, 19 nt, Homo sapiens
  misc_RNA (1)...(19): siRNA sense strand
cagcuuauuaucugggaaa

SEQ ID NO: 2128834 - RNA, 19 nt, Homo sapiens
  misc_RNA (1)...(19): siRNA sense strand
gaacacgaauguacaaaga

SEQ ID NO: 2128835 - RNA, 19 nt, Homo sapiens
  misc_RNA (1)...(19): siRNA sense strand
agacacagaugaagaauuu

SEQ ID NO: 2128836 - RNA, 19 nt, Homo sapiens
  misc_RNA (1)...(19): siRNA sense strand
gcagguagcucacccaaug

SEQ ID NO: 2128837 - RNA, 19 nt, Homo sapiens
  misc_RNA (1)...(19): siRNA sense strand
ggagaaagcucagggaaga

SEQ ID NO: 2128838 - RNA, 19 nt, Homo sapiens
  misc_RNA (1)...(19): siRNA sense strand
gaauggagguuuauacugu

SEQ ID NO: 2128839 - RNA, 19 nt, Homo sapiens
  misc_RNA (1)...(19): siRNA sense strand
gagaugacguggaguuuau

SEQ ID NO: 2128840 - RNA, 19 nt, Homo sapiens
  misc_RNA (1)...(19): siRNA sense strand
gagauucuguugagugaaa

SEQ ID NO: 2128841 - RNA, 19 nt, Homo sapiens
  misc_RNA (1)...(19): siRNA sense strand
gaacaaauuggcacuagaa

SEQ ID NO: 2128842 - RNA, 19 nt, Homo sapiens
  misc_RNA (1)...(19): siRNA sense strand
ggaauugucgaaaguauaa

SEQ ID NO: 2128843 - RNA, 19 nt, Homo sapiens
  misc_RNA (1)...(19): siRNA sense strand
ggacaacuguaaagcaaug

SEQ ID NO: 2128844 - RNA, 19 nt, Homo sapiens
  misc_RNA (1)...(19): siRNA sense strand
gcaaagaggaggaagaaga

SEQ ID NO: 2128845 - RNA, 19 nt, Homo sapiens
  misc_RNA (1)...(19): siRNA sense strand
gguaaaggcucacaaggau

SEQ ID NO: 2128846 - RNA, 19 nt, Homo sapiens
  misc_RNA (1)...(19): siRNA sense strand
gaauucagcugcccauuac

SEQ ID NO: 2128847 - RNA, 19 nt, Homo sapiens
  misc_RNA (1)...(19): siRNA sense strand
ggaagaagagcgucagauu

SEQ ID NO: 2128848 - RNA, 19 nt, Homo sapiens
  misc_RNA (1)...(19): siRNA sense strand
cacaagagccugagaauga

SEQ ID NO: 2128849 - RNA, 19 nt, Homo sapiens
  misc_RNA (1)...(19): siRNA sense strand
gcagauaaguggcccaagu

SEQ ID NO: 2128850 - RNA, 19 nt, Homo sapiens
  misc_RNA (1)...(19): siRNA sense strand
ccugagaucugcaacauga

SEQ ID NO: 2128851 - RNA, 19 nt, Homo sapiens
  misc_RNA (1)...(19): siRNA sense strand
gaagcuggaugaaucuaug

SEQ ID NO: 2128852 - RNA, 19 nt, Homo sapiens
  misc_RNA (1)...(19): siRNA sense strand
uagaggacaucaucaacua

SEQ ID NO: 2128853 - RNA, 19 nt, Homo sapiens
  misc_RNA (1)...(19): siRNA sense strand
caaggucccucuucucaga

SEQ ID NO: 2128854 - RNA, 19 nt, Homo sapiens
  misc_RNA (1)...(19): siRNA sense strand
ggagaacagugaagcacaa

SEQ ID NO: 2128855 - RNA, 19 nt, Homo sapiens
  misc_RNA (1)...(19): siRNA sense strand
auaccaagaugucugauaa

SEQ ID NO: 2128856 - RNA, 19 nt, Homo sapiens
  misc_RNA (1)...(19): siRNA sense strand
ugacacaccuuucuaacau

SEQ ID NO: 2128857 - RNA, 19 nt, Homo sapiens
  misc_RNA (1)...(19): siRNA sense strand
gaugaugauuucacugcua

SEQ ID NO: 2128858 - RNA, 19 nt, Homo sapiens
  misc_RNA (1)...(19): siRNA sense strand
gaaauuccucccagccaua

SEQ ID NO: 2128859 - RNA, 19 nt, Homo sapiens
  misc_RNA (1)...(19): siRNA sense strand
gcacccaguucuuuguuug

SEQ ID NO: 2128860 - RNA, 19 nt, Homo sapiens
  misc_RNA (1)...(19): siRNA sense strand
guacagaccaucaggaaug

SEQ ID NO: 2128861 - RNA, 19 nt, Homo sapiens
  misc_RNA (1)...(19): siRNA sense strand
cgaauucagcugcccauua

SEQ ID NO: 2128862 - RNA, 19 nt, Homo sapiens
  misc_RNA (1)...(19): siRNA sense strand
gaagaagagcgucagauuc

SEQ ID NO: 2128863 - RNA, 19 nt, Homo sapiens
  misc_RNA (1)...(19): siRNA sense strand
ucuacaagcuccucaguga

SEQ ID NO: 2128864 - RNA, 19 nt, Homo sapiens
  misc_RNA (1)...(19): siRNA sense strand
ggaacaaauuggcacuaga

SEQ ID NO: 2128865 - RNA, 19 nt, Homo sapiens
  misc_RNA (1)...(19): siRNA sense strand
aagagaagcuggaugaauc

SEQ ID NO: 2128866 - RNA, 19 nt, Homo sapiens
  misc_RNA (1)...(19): siRNA sense strand
gacacugaaugcugccuua

SEQ ID NO: 2128867 - RNA, 19 nt, Homo sapiens
  misc_RNA (1)...(19): siRNA sense strand
ggaaacagcagcccaugga

SEQ ID NO: 2128868 - RNA, 19 nt, Homo sapiens
  misc_RNA (1)...(19): siRNA sense strand
uaaaugacaugaagaccau

SEQ ID NO: 2128869 - RNA, 19 nt, Homo sapiens
  misc_RNA (1)...(19): siRNA sense strand
gaaggaacacgccauguca

SEQ ID NO: 2128870 - RNA, 19 nt, Homo sapiens
  misc_RNA (1)...(19): siRNA sense strand
ucagcgaacuccuuacuau

SEQ ID NO: 2128871 - RNA, 19 nt, Homo sapiens
  misc_RNA (1)...(19): siRNA sense strand
gcggacaacuguaaagcaa

SEQ ID NO: 2128872 - RNA, 19 nt, Homo sapiens
  misc_RNA (1)...(19): siRNA sense strand
gcagagcucaccacaagaa

SEQ ID NO: 2128873 - RNA, 19 nt, Homo sapiens
  misc_RNA (1)...(19): siRNA sense strand
gcaacaugaucgcccagaa

SEQ ID NO: 2128874 - RNA, 19 nt, Homo sapiens
  misc_RNA (1)...(19): siRNA sense strand
ugaguuggaugaugauuuc

SEQ ID NO: 2128875 - RNA, 19 nt, Homo sapiens
  misc_RNA (1)...(19): siRNA sense strand
gaagagaagcuggaugaau

SEQ ID NO: 2128876 - RNA, 19 nt, Homo sapiens
  misc_RNA (1)...(19): siRNA sense strand
ugauuucacugcuauguau

SEQ ID NO: 2128877 - RNA, 19 nt, Homo sapiens
  misc_RNA (1)...(19): siRNA sense strand
cugcuaaagucccaaauga

SEQ ID NO: 2128878 - RNA, 19 nt, Homo sapiens
  misc_RNA (1)...(19): siRNA sense strand
ucacugcuauguauaaagu

SEQ ID NO: 2128879 - RNA, 19 nt, Homo sapiens
  misc_RNA (1)...(19): siRNA sense strand
ccaagaugucugauaauuu

SEQ ID NO: 2128880 - RNA, 19 nt, Homo sapiens
  misc_RNA (1)...(19): siRNA sense strand
ggaaauguacagaccauca

SEQ ID NO: 2128881 - RNA, 19 nt, Homo sapiens
  misc_RNA (1)...(19): siRNA sense strand
gcacaaaggcagaguugca

SEQ ID NO: 2128882 - RNA, 19 nt, Homo sapiens
  misc_RNA (1)...(19): siRNA sense strand
ggaaugggauuugguucau

SEQ ID NO: 2128883 - RNA, 19 nt, Homo sapiens
  misc_RNA (1)...(19): siRNA sense strand
gcagaacguugcaggaaac

SEQ ID NO: 2128884 - RNA, 19 nt, Homo sapiens
  misc_RNA (1)...(19): siRNA sense strand
ggcagaacguugcaggaaa

SEQ ID NO: 2128885 - RNA, 19 nt, Homo sapiens
  misc_RNA (1)...(19): siRNA sense strand
gggcugcuaucaacgaaga

SEQ ID NO: 2128886 - RNA, 19 nt, Homo sapiens
  misc_RNA (1)...(19): siRNA sense strand
ggacagcccagagaugauu

SEQ ID NO: 2128887 - RNA, 19 nt, Homo sapiens
  misc_RNA (1)...(19): siRNA sense strand
gaagauggagacacagaug

SEQ ID NO: 2128888 - RNA, 19 nt, Homo sapiens
  misc_RNA (1)...(19): siRNA sense strand
caucaaacccgucaagcaa

SEQ ID NO: 2128889 - RNA, 19 nt, Homo sapiens
  misc_RNA (1)...(19): siRNA sense strand
ucaggagggucccaucuau

SEQ ID NO: 2128890 - RNA, 19 nt, Homo sapiens
  misc_RNA (1)...(19): siRNA sense strand
ucacucagccuuuguguuc

SEQ ID NO: 2128891 - RNA, 19 nt, Homo sapiens
  misc_RNA (1)...(19): siRNA sense strand
gacgaugucuucgaucuuc

SEQ ID NO: 2128892 - RNA, 19 nt, Homo sapiens
  misc_RNA (1)...(19): siRNA sense strand
guauaugccuggccuagag

SEQ ID NO: 2128893 - RNA, 19 nt, Homo sapiens
  misc_RNA (1)...(19): siRNA sense strand
ucaaacccgucaagcaaga

SEQ ID NO: 2128894 - RNA, 19 nt, Homo sapiens
  misc_RNA (1)...(19): siRNA sense strand
gagaacggcagcucuacaa

SEQ ID NO: 2128895 - RNA, 19 nt, Homo sapiens
  misc_RNA (1)...(19): siRNA sense strand
aggcagagcucaccacaag

SEQ ID NO: 2128896 - RNA, 19 nt, Homo sapiens
  misc_RNA (1)...(19): siRNA sense strand
cagagagucccaaagaauu

SEQ ID NO: 2128897 - RNA, 19 nt, Homo sapiens
  misc_RNA (1)...(19): siRNA sense strand
gccagagagucccaaagaa

SEQ ID NO: 2128898 - RNA, 19 nt, Homo sapiens
  misc_RNA (1)...(19): siRNA sense strand
ccacaaggaaugagguauu

SEQ ID NO: 2128899 - RNA, 19 nt, Homo sapiens
  misc_RNA (1)...(19): siRNA sense strand
gcaaugaagggcaagaauc

SEQ ID NO: 2128900 - RNA, 19 nt, Homo sapiens
  misc_RNA (1)...(19): siRNA sense strand
gcacuauauugguauuucu

SEQ ID NO: 2128901 - RNA, 19 nt, Homo sapiens
  misc_RNA (1)...(19): siRNA sense strand
ucauaagccuccaacacuu

SEQ ID NO: 2128902 - RNA, 19 nt, Homo sapiens
  misc_RNA (1)...(19): siRNA sense strand
gaacagugaagcacaagag

SEQ ID NO: 2128903 - RNA, 19 nt, Homo sapiens
  misc_RNA (1)...(19): siRNA sense strand
gugcugaccagaauagaaa

SEQ ID NO: 2128904 - RNA, 19 nt, Homo sapiens
  misc_RNA (1)...(19): siRNA sense strand
ggccagagagucccaaaga

SEQ ID NO: 2128905 - RNA, 19 nt, Homo sapiens
  misc_RNA (1)...(19): siRNA sense strand
gcgcaaagaggaggaagaa

SEQ ID NO: 2128906 - RNA, 19 nt, Homo sapiens
  misc_RNA (1)...(19): siRNA sense strand
ccagagagucccaaagaau

SEQ ID NO: 2128907 - RNA, 19 nt, Homo sapiens
  misc_RNA (1)...(19): siRNA sense strand
gcacaagagccugagaaug

SEQ ID NO: 2128908 - RNA, 19 nt, Homo sapiens
  misc_RNA (1)...(19): siRNA sense strand
gagaagauggagacacaga

SEQ ID NO: 2128909 - RNA, 19 nt, Homo sapiens
  misc_RNA (1)...(19): siRNA sense strand
gaaaguagugaguauacca

SEQ ID NO: 2128910 - RNA, 19 nt, Homo sapiens
  misc_RNA (1)...(19): siRNA sense strand
caggaauugucgaaaguau

SEQ ID NO: 2128911 - RNA, 19 nt, Homo sapiens
  misc_RNA (1)...(19): siRNA sense strand
guucaggaauugucgaaag

SEQ ID NO: 2128912 - RNA, 19 nt, Homo sapiens
  misc_RNA (1)...(19): siRNA sense strand
ccaaggaggaauuuguaaa

SEQ ID NO: 2128913 - RNA, 19 nt, Homo sapiens
  misc_RNA (1)...(19): siRNA sense strand
uaaaggcucacaaggauuc

SEQ ID NO: 2128914 - RNA, 19 nt, Homo sapiens
  misc_RNA (1)...(19): siRNA sense strand
cagggaaagugaaggacaa

SEQ ID NO: 2128915 - RNA, 19 nt, Homo sapiens
  misc_RNA (1)...(19): siRNA sense strand
gaacguugcaggaaaccau

SEQ ID NO: 2128916 - RNA, 19 nt, Homo sapiens
  misc_RNA (1)...(19): siRNA sense strand
gcaguaccaggaacauuug

SEQ ID NO: 2128917 - RNA, 19 nt, Homo sapiens
  misc_RNA (1)...(19): siRNA sense strand
uggagaagauggagacaca

SEQ ID NO: 2128918 - RNA, 19 nt, Homo sapiens
  misc_RNA (1)...(19): siRNA sense strand
ugucuucgaucuucuaaag

SEQ ID NO: 2128919 - RNA, 19 nt, Homo sapiens
  misc_RNA (1)...(19): siRNA sense strand
gaaggucaaggcaguggaa

SEQ ID NO: 2128920 - RNA, 19 nt, Homo sapiens
  misc_RNA (1)...(19): siRNA sense strand
gcauggagaagaaacugaa

SEQ ID NO: 2128921 - RNA, 19 nt, Homo sapiens
  misc_RNA (1)...(19): siRNA sense strand
gaagaaggccugggucacu

SEQ ID NO: 2128922 - RNA, 19 nt, Homo sapiens
  misc_RNA (1)...(19): siRNA sense strand
guaccaaggaggaauuugu

SEQ ID NO: 2128923 - RNA, 19 nt, Homo sapiens
  misc_RNA (1)...(19): siRNA sense strand
cagcgaguaucucuaugga

SEQ ID NO: 2128924 - RNA, 19 nt, Homo sapiens
  misc_RNA (1)...(19): siRNA sense strand
ccaccaaggucccucuucu

SEQ ID NO: 2128925 - RNA, 19 nt, Homo sapiens
  misc_RNA (1)...(19): siRNA sense strand
ccaaggggcuuucagucua

SEQ ID NO: 2128926 - RNA, 19 nt, Homo sapiens
  misc_RNA (1)...(19): siRNA sense strand
accaagaugucugauaauu

SEQ ID NO: 2128927 - RNA, 19 nt, Homo sapiens
  misc_RNA (1)...(19): siRNA sense strand
gcaggaggagauucuguug

SEQ ID NO: 2128928 - RNA, 19 nt, Homo sapiens
  misc_RNA (1)...(19): siRNA sense strand
ggauuugguucaucugcau

SEQ ID NO: 2128929 - RNA, 19 nt, Homo sapiens
  misc_RNA (1)...(19): siRNA sense strand
uaacuucuccaacccguau

SEQ ID NO: 2128930 - RNA, 19 nt, Homo sapiens
  misc_RNA (1)...(19): siRNA sense strand
ugaacaaucaggcuuccua

SEQ ID NO: 2128931 - RNA, 19 nt, Homo sapiens
  misc_RNA (1)...(19): siRNA sense strand
gcugcuggcucaaggaaag

SEQ ID NO: 2128932 - RNA, 19 nt, Homo sapiens
  misc_RNA (1)...(19): siRNA sense strand
caguggaagugaugaagga

SEQ ID NO: 2128933 - RNA, 19 nt, Homo sapiens
  misc_RNA (1)...(19): siRNA sense strand
agagagucccaaagaauuu

SEQ ID NO: 2128934 - RNA, 19 nt, Homo sapiens
  misc_RNA (1)...(19): siRNA sense strand
caaacaggcuggugaauua

SEQ ID NO: 2128935 - RNA, 19 nt, Homo sapiens
  misc_RNA (1)...(19): siRNA sense strand
gauaggagcaacccuguaa

SEQ ID NO: 2128936 - RNA, 19 nt, Homo sapiens
  misc_RNA (1)...(19): siRNA sense strand
gcaguaaccaguucaaguu

SEQ ID NO: 2128937 - RNA, 19 nt, Homo sapiens
  misc_RNA (1)...(19): siRNA sense strand
gugaacagcuacuacucuu

SEQ ID NO: 2128938 - RNA, 19 nt, Homo sapiens
  misc_RNA (1)...(19): siRNA sense strand
guaaccaguucaaguugga

SEQ ID NO: 2128939 - RNA, 19 nt, Homo sapiens
  misc_RNA (1)...(19): siRNA sense strand
caagugcaguaaccaguuc

SEQ ID NO: 2128940 - RNA, 19 nt, Homo sapiens
  misc_RNA (1)...(19): siRNA sense strand
aaaccagccuuagacuauu

SEQ ID NO: 2128941 - RNA, 19 nt, Homo sapiens
  misc_RNA (1)...(19): siRNA sense strand
ggaagugugucuuuugaau

SEQ ID NO: 2128942 - RNA, 19 nt, Homo sapiens
  misc_RNA (1)...(19): siRNA sense strand
ucaaacaggcuggugaauu

SEQ ID NO: 2128943 - RNA, 19 nt, Homo sapiens
  misc_RNA (1)...(19): siRNA sense strand
aaccagccuuagacuauuu

SEQ ID NO: 2128944 - RNA, 19 nt, Homo sapiens
  misc_RNA (1)...(19): siRNA sense strand
gagcaacccuguaaaacca

SEQ ID NO: 2128945 - RNA, 19 nt, Homo sapiens
  misc_RNA (1)...(19): siRNA sense strand
uaccagaucuccgucaagu

SEQ ID NO: 2128946 - RNA, 19 nt, Homo sapiens
  misc_RNA (1)...(19): siRNA sense strand
ggauaggagcaacccugua

SEQ ID NO: 2128947 - RNA, 19 nt, Homo sapiens
  misc_RNA (1)...(19): siRNA sense strand
gaugugauccgugugaaca

SEQ ID NO: 2128948 - RNA, 19 nt, Homo sapiens
  misc_RNA (1)...(19): siRNA sense strand
cagcuacuacucuugguau

SEQ ID NO: 2128949 - RNA, 19 nt, Homo sapiens
  misc_RNA (1)...(19): siRNA sense strand
ucaagugcaguaaccaguu

SEQ ID NO: 2128950 - RNA, 19 nt, Homo sapiens
  misc_RNA (1)...(19): siRNA sense strand
acaaagucguggacaacca

SEQ ID NO: 2128951 - RNA, 19 nt, Homo sapiens
  misc_RNA (1)...(19): siRNA sense strand
aaacaaagucguggacaac

SEQ ID NO: 2128952 - RNA, 19 nt, Homo sapiens
  misc_RNA (1)...(19): siRNA sense strand
aaaaccagccuuagacuau

SEQ ID NO: 2128953 - RNA, 19 nt, Homo sapiens
  misc_RNA (1)...(19): siRNA sense strand
aaaacaaagucguggacaa

SEQ ID NO: 2128954 - RNA, 19 nt, Homo sapiens
  misc_RNA (1)...(19): siRNA sense strand
gugggaggauggugauugc

SEQ ID NO: 2128955 - RNA, 19 nt, Homo sapiens
  misc_RNA (1)...(19): siRNA sense strand
gaacagauguguccuauuu

SEQ ID NO: 2128956 - RNA, 19 nt, Homo sapiens
  misc_RNA (1)...(19): siRNA sense strand
ggacagaccuccaucaaga

SEQ ID NO: 2128957 - RNA, 19 nt, Homo sapiens
  misc_RNA (1)...(19): siRNA sense strand
gauggaagcugaagaagaa

SEQ ID NO: 2128958 - RNA, 19 nt, Homo sapiens
  misc_RNA (1)...(19): siRNA sense strand
gcugaaaggucaacagaua

SEQ ID NO: 2128959 - RNA, 19 nt, Homo sapiens
  misc_RNA (1)...(19): siRNA sense strand
ggaaggagcugugauguau

SEQ ID NO: 2128960 - RNA, 19 nt, Homo sapiens
  misc_RNA (1)...(19): siRNA sense strand
agaagaagcuuuagcaauu

SEQ ID NO: 2128961 - RNA, 19 nt, Homo sapiens
  misc_RNA (1)...(19): siRNA sense strand
gagcucaacuccaguauug

SEQ ID NO: 2128962 - RNA, 19 nt, Homo sapiens
  misc_RNA (1)...(19): siRNA sense strand
gcagaagaguguagaagaa

SEQ ID NO: 2128963 - RNA, 19 nt, Homo sapiens
  misc_RNA (1)...(19): siRNA sense strand
gaugauaccuacaaagaug

SEQ ID NO: 2128964 - RNA, 19 nt, Homo sapiens
  misc_RNA (1)...(19): siRNA sense strand
gaagagauaagaaugauga

SEQ ID NO: 2128965 - RNA, 19 nt, Homo sapiens
  misc_RNA (1)...(19): siRNA sense strand
gaacuccucuccuuuaucu

SEQ ID NO: 2128966 - RNA, 19 nt, Homo sapiens
  misc_RNA (1)...(19): siRNA sense strand
ggucagagacuaagaauug

SEQ ID NO: 2128967 - RNA, 19 nt, Homo sapiens
  misc_RNA (1)...(19): siRNA sense strand
cuacaaagaugaugugaau

SEQ ID NO: 2128968 - RNA, 19 nt, Homo sapiens
  misc_RNA (1)...(19): siRNA sense strand
caacagaugucucuaagca

SEQ ID NO: 2128969 - RNA, 19 nt, Homo sapiens
  misc_RNA (1)...(19): siRNA sense strand
ggaacucguuggcugcuua

SEQ ID NO: 2128970 - RNA, 19 nt, Homo sapiens
  misc_RNA (1)...(19): siRNA sense strand
caagagagcuacugaagca

SEQ ID NO: 2128971 - RNA, 19 nt, Homo sapiens
  misc_RNA (1)...(19): siRNA sense strand
gaagacggcugcaggaaca

SEQ ID NO: 2128972 - RNA, 19 nt, Homo sapiens
  misc_RNA (1)...(19): siRNA sense strand
gcaagaagaaguaguagaa

SEQ ID NO: 2128973 - RNA, 19 nt, Homo sapiens
  misc_RNA (1)...(19): siRNA sense strand
gaagaagcuuuagcaauug

SEQ ID NO: 2128974 - RNA, 19 nt, Homo sapiens
  misc_RNA (1)...(19): siRNA sense strand
caaaugugaugacagcuuu

SEQ ID NO: 2128975 - RNA, 19 nt, Homo sapiens
  misc_RNA (1)...(19): siRNA sense strand
gaucugaaaugaaucacuu

SEQ ID NO: 2128976 - RNA, 19 nt, Homo sapiens
  misc_RNA (1)...(19): siRNA sense strand
ggagacagcccagacaaua

SEQ ID NO: 2128977 - RNA, 19 nt, Homo sapiens
  misc_RNA (1)...(19): siRNA sense strand
gaaagaaucaaacuucaga

SEQ ID NO: 2128978 - RNA, 19 nt, Homo sapiens
  misc_RNA (1)...(19): siRNA sense strand
gaagaguguagaagaaaua

SEQ ID NO: 2128979 - RNA, 19 nt, Homo sapiens
  misc_RNA (1)...(19): siRNA sense strand
gauuagaugucaauacaga

SEQ ID NO: 2128980 - RNA, 19 nt, Homo sapiens
  misc_RNA (1)...(19): siRNA sense strand
acagaugucucuaagcaua

SEQ ID NO: 2128981 - RNA, 19 nt, Homo sapiens
  misc_RNA (1)...(19): siRNA sense strand
cauaaaggaugaagaggaa

SEQ ID NO: 2128982 - RNA, 19 nt, Homo sapiens
  misc_RNA (1)...(19): siRNA sense strand
aaacacaucuucugagcaa

SEQ ID NO: 2128983 - RNA, 19 nt, Homo sapiens
  misc_RNA (1)...(19): siRNA sense strand
gaagauggaagcugaagaa

SEQ ID NO: 2128984 - RNA, 19 nt, Homo sapiens
  misc_RNA (1)...(19): siRNA sense strand
gaggagaaaugcagauuag

SEQ ID NO: 2128985 - RNA, 19 nt, Homo sapiens
  misc_RNA (1)...(19): siRNA sense strand
gcaaaucccuccugcuuac

SEQ ID NO: 2128986 - RNA, 19 nt, Homo sapiens
  misc_RNA (1)...(19): siRNA sense strand
ggagagcacuggaaauucu

SEQ ID NO: 2128987 - RNA, 19 nt, Homo sapiens
  misc_RNA (1)...(19): siRNA sense strand
ucacagagaugucaaaggu

SEQ ID NO: 2128988 - RNA, 19 nt, Homo sapiens
  misc_RNA (1)...(19): siRNA sense strand
gaagaaauagagaaccuuu

SEQ ID NO: 2128989 - RNA, 19 nt, Homo sapiens
  misc_RNA (1)...(19): siRNA sense strand
ggaaaaggauuaugugcua

SEQ ID NO: 2128990 - RNA, 19 nt, Homo sapiens
  misc_RNA (1)...(19): siRNA sense strand
caagucagcuguccauauc

SEQ ID NO: 2128991 - RNA, 19 nt, Homo sapiens
  misc_RNA (1)...(19): siRNA sense strand
ggagaagauaucaucauua

SEQ ID NO: 2128992 - RNA, 19 nt, Homo sapiens
  misc_RNA (1)...(19): siRNA sense strand
uuaaacaggugacuuaugu

SEQ ID NO: 2128993 - RNA, 19 nt, Homo sapiens
  misc_RNA (1)...(19): siRNA sense strand
ucuagaaacuggaauguga

SEQ ID NO: 2128994 - RNA, 19 nt, Homo sapiens
  misc_RNA (1)...(19): siRNA sense strand
gucgugagauggagaauaa

SEQ ID NO: 2128995 - RNA, 19 nt, Homo sapiens
  misc_RNA (1)...(19): siRNA sense strand
ugaagaagaagaagcuuua

SEQ ID NO: 2128996 - RNA, 19 nt, Homo sapiens
  misc_RNA (1)...(19): siRNA sense strand
gaaaccaaacugaaucaaa

SEQ ID NO: 2128997 - RNA, 19 nt, Homo sapiens
  misc_RNA (1)...(19): siRNA sense strand
guggagaucucaugauuuc

SEQ ID NO: 2128998 - RNA, 19 nt, Homo sapiens
  misc_RNA (1)...(19): siRNA sense strand
gauaggccuuggagcauuu

SEQ ID NO: 2128999 - RNA, 19 nt, Homo sapiens
  misc_RNA (1)...(19): siRNA sense strand
cagauuagaugucaauaca

SEQ ID NO: 2129000 - RNA, 19 nt, Homo sapiens
  misc_RNA (1)...(19): siRNA sense strand
ugugggaacuggaacuuua

SEQ ID NO: 2129001 - RNA, 19 nt, Homo sapiens
  misc_RNA (1)...(19): siRNA sense strand
gaagagcaauuacaaucuc

SEQ ID NO: 2129002 - RNA, 19 nt, Homo sapiens
  misc_RNA (1)...(19): siRNA sense strand
ggagaucucaugauuucua

SEQ ID NO: 2129003 - RNA, 19 nt, Homo sapiens
  misc_RNA (1)...(19): siRNA sense strand
gacuaagaauugcagauuu

SEQ ID NO: 2129004 - RNA, 19 nt, Homo sapiens
  misc_RNA (1)...(19): siRNA sense strand
gagaagagauaagaaugau

SEQ ID NO: 2129005 - RNA, 19 nt, Homo sapiens
  misc_RNA (1)...(19): siRNA sense strand
gcaugacacuugaucugaa

SEQ ID NO: 2129006 - RNA, 19 nt, Homo sapiens
  misc_RNA (1)...(19): siRNA sense strand
acuaagaggucaacaguau

SEQ ID NO: 2129007 - RNA, 19 nt, Homo sapiens
  misc_RNA (1)...(19): siRNA sense strand
agaaggaucuacuugaguu

SEQ ID NO: 2129008 - RNA, 19 nt, Homo sapiens
  misc_RNA (1)...(19): siRNA sense strand
cauccagucuuucguacua

SEQ ID NO: 2129009 - RNA, 19 nt, Homo sapiens
  misc_RNA (1)...(19): siRNA sense strand
gagaagagcaauuacaauc

SEQ ID NO: 2129010 - RNA, 19 nt, Homo sapiens
  misc_RNA (1)...(19): siRNA sense strand
ggaacauucuguauucauc

SEQ ID NO: 2129011 - RNA, 19 nt, Homo sapiens
  misc_RNA (1)...(19): siRNA sense strand
acauuugucuccugguuua

SEQ ID NO: 2129012 - RNA, 19 nt, Homo sapiens
  misc_RNA (1)...(19): siRNA sense strand
gcacuaagagaagagauaa

SEQ ID NO: 2129013 - RNA, 19 nt, Homo sapiens
  misc_RNA (1)...(19): siRNA sense strand
gaaucaaacuucagagacu

SEQ ID NO: 2129014 - RNA, 19 nt, Homo sapiens
  misc_RNA (1)...(19): siRNA sense strand
ugagagccaugcugguaua

SEQ ID NO: 2129015 - RNA, 19 nt, Homo sapiens
  misc_RNA (1)...(19): siRNA sense strand
gggcaugcuugaugaagaa

SEQ ID NO: 2129016 - RNA, 19 nt, Homo sapiens
  misc_RNA (1)...(19): siRNA sense strand
guaacaccauccagaaguu

SEQ ID NO: 2129017 - RNA, 19 nt, Homo sapiens
  misc_RNA (1)...(19): siRNA sense strand
ugaaaugaaucacuuagca

SEQ ID NO: 2129018 - RNA, 19 nt, Homo sapiens
  misc_RNA (1)...(19): siRNA sense strand
guauucaucugcuauuugu

SEQ ID NO: 2129019 - RNA, 19 nt, Homo sapiens
  misc_RNA (1)...(19): siRNA sense strand
guacguugcugcuuuaaaa

SEQ ID NO: 2129020 - RNA, 19 nt, Homo sapiens
  misc_RNA (1)...(19): siRNA sense strand
caagaaugguuacuacagu

SEQ ID NO: 2129021 - RNA, 19 nt, Homo sapiens
  misc_RNA (1)...(19): siRNA sense strand
gauagacuguuguuggaau

SEQ ID NO: 2129022 - RNA, 19 nt, Homo sapiens
  misc_RNA (1)...(19): siRNA sense strand
gcacguggaacauucugua

SEQ ID NO: 2129023 - RNA, 19 nt, Homo sapiens
  misc_RNA (1)...(19): siRNA sense strand
aguguuggcugugcuauua

SEQ ID NO: 2129024 - RNA, 19 nt, Homo sapiens
  misc_RNA (1)...(19): siRNA sense strand
aaagcuggauccauuggua

SEQ ID NO: 2129025 - RNA, 19 nt, Homo sapiens
  misc_RNA (1)...(19): siRNA sense strand
ucaaaggguugcacaagau

SEQ ID NO: 2129026 - RNA, 19 nt, Homo sapiens
  misc_RNA (1)...(19): siRNA sense strand
gacccaauguuauggagaa

SEQ ID NO: 2129027 - RNA, 19 nt, Homo sapiens
  misc_RNA (1)...(19): siRNA sense strand
uggagaagauaucaucauu

SEQ ID NO: 2129028 - RNA, 19 nt, Homo sapiens
  misc_RNA (1)...(19): siRNA sense strand
gagaaaugcagauuagaug

SEQ ID NO: 2129029 - RNA, 19 nt, Homo sapiens
  misc_RNA (1)...(19): siRNA sense strand
caaagacucagauaaacuu

SEQ ID NO: 2129030 - RNA, 19 nt, Homo sapiens
  misc_RNA (1)...(19): siRNA sense strand
gagccaugcugguauauac

SEQ ID NO: 2129031 - RNA, 19 nt, Homo sapiens
  misc_RNA (1)...(19): siRNA sense strand
gucaaauucucauacauug

SEQ ID NO: 2129032 - RNA, 19 nt, Homo sapiens
  misc_RNA (1)...(19): siRNA sense strand
agaguuuguuccagaaaua

SEQ ID NO: 2129033 - RNA, 19 nt, Homo sapiens
  misc_RNA (1)...(19): siRNA sense strand
ggaaucaagagagcaauuu

SEQ ID NO: 2129034 - RNA, 19 nt, Homo sapiens
  misc_RNA (1)...(19): siRNA sense strand
agaaauggcuugugcaaaa

SEQ ID NO: 2129035 - RNA, 19 nt, Homo sapiens
  misc_RNA (1)...(19): siRNA sense strand
ggagaaaugcagauuagau

SEQ ID NO: 2129036 - RNA, 19 nt, Homo sapiens
  misc_RNA (1)...(19): siRNA sense strand
aaaccaaacugaaucaaac

SEQ ID NO: 2129037 - RNA, 19 nt, Homo sapiens
  misc_RNA (1)...(19): siRNA sense strand
gaaacuggaaugugagaga

SEQ ID NO: 2129038 - RNA, 19 nt, Homo sapiens
  misc_RNA (1)...(19): siRNA sense strand
gccuaacucuuuccugauu

SEQ ID NO: 2129039 - RNA, 19 nt, Homo sapiens
  misc_RNA (1)...(19): siRNA sense strand
gagacagcccagacaauaa

SEQ ID NO: 2129040 - RNA, 19 nt, Homo sapiens
  misc_RNA (1)...(19): siRNA sense strand
ucucaucauucccaauuaa

SEQ ID NO: 2129041 - RNA, 19 nt, Homo sapiens
  misc_RNA (1)...(19): siRNA sense strand
gaagaagaagcuuuagcaa

SEQ ID NO: 2129042 - RNA, 19 nt, Homo sapiens
  misc_RNA (1)...(19): siRNA sense strand
aaaccgccguguuaacaaa

SEQ ID NO: 2129043 - RNA, 19 nt, Homo sapiens
  misc_RNA (1)...(19): siRNA sense strand
ccaaaucauucacagagau

SEQ ID NO: 2129044 - RNA, 19 nt, Homo sapiens
  misc_RNA (1)...(19): siRNA sense strand
uuagaaaugcugaguguuu

SEQ ID NO: 2129045 - RNA, 19 nt, Homo sapiens
  misc_RNA (1)...(19): siRNA sense strand
guugaaaucagguauaaga

SEQ ID NO: 2129046 - RNA, 19 nt, Homo sapiens
  misc_RNA (1)...(19): siRNA sense strand
gaaggaaucaagagagcaa

SEQ ID NO: 2129047 - RNA, 19 nt, Homo sapiens
  misc_RNA (1)...(19): siRNA sense strand
aggcguagcucaaggauca

SEQ ID NO: 2129048 - RNA, 19 nt, Homo sapiens
  misc_RNA (1)...(19): siRNA sense strand
gagaguuuguuccagaaau

SEQ ID NO: 2129049 - RNA, 19 nt, Homo sapiens
  misc_RNA (1)...(19): siRNA sense strand
caauaaauaccggguguuu

SEQ ID NO: 2129050 - RNA, 19 nt, Homo sapiens
  misc_RNA (1)...(19): siRNA sense strand
uagauagacuguuguugga

SEQ ID NO: 2129051 - RNA, 19 nt, Homo sapiens
  misc_RNA (1)...(19): siRNA sense strand
gcaggagaguuggcaguug

SEQ ID NO: 2129052 - RNA, 19 nt, Homo sapiens
  misc_RNA (1)...(19): siRNA sense strand
ucaaagcuccaucucguaa

SEQ ID NO: 2129053 - RNA, 19 nt, Homo sapiens
  misc_RNA (1)...(19): siRNA sense strand
uaaccuuacucauuaugga

SEQ ID NO: 2129054 - RNA, 19 nt, Homo sapiens
  misc_RNA (1)...(19): siRNA sense strand
gccaauagccgcacaaguc

SEQ ID NO: 2129055 - RNA, 19 nt, Homo sapiens
  misc_RNA (1)...(19): siRNA sense strand
gcaaugcgguuacuaguau

SEQ ID NO: 2129056 - RNA, 19 nt, Homo sapiens
  misc_RNA (1)...(19): siRNA sense strand
gcaagcagucuuccuauua

SEQ ID NO: 2129057 - RNA, 19 nt, Homo sapiens
  misc_RNA (1)...(19): siRNA sense strand
gcacacauuugccaaguau

SEQ ID NO: 2129058 - RNA, 19 nt, Homo sapiens
  misc_RNA (1)...(19): siRNA sense strand
gacagaaccugcaauacaa

SEQ ID NO: 2129059 - RNA, 19 nt, Homo sapiens
  misc_RNA (1)...(19): siRNA sense strand
cgagagaccuucuuaaugg

SEQ ID NO: 2129060 - RNA, 19 nt, Homo sapiens
  misc_RNA (1)...(19): siRNA sense strand
gaaggcaguuugcaguuga

SEQ ID NO: 2129061 - RNA, 19 nt, Homo sapiens
  misc_RNA (1)...(19): siRNA sense strand
gcaucuaccugcacacaaa

SEQ ID NO: 2129062 - RNA, 19 nt, Homo sapiens
  misc_RNA (1)...(19): siRNA sense strand
acacagcucuuuacaauag

SEQ ID NO: 2129063 - RNA, 19 nt, Homo sapiens
  misc_RNA (1)...(19): siRNA sense strand
gagcugggccugcagguua

SEQ ID NO: 2129064 - RNA, 19 nt, Homo sapiens
  misc_RNA (1)...(19): siRNA sense strand
uaaaacagcugaagaaaug

SEQ ID NO: 2129065 - RNA, 19 nt, Homo sapiens
  misc_RNA (1)...(19): siRNA sense strand
gaucuccacuggcaggaua

SEQ ID NO: 2129066 - RNA, 19 nt, Homo sapiens
  misc_RNA (1)...(19): siRNA sense strand
gcagugaccuauacaccaa

SEQ ID NO: 2129067 - RNA, 19 nt, Homo sapiens
  misc_RNA (1)...(19): siRNA sense strand
gaaauggaauaguguugau

SEQ ID NO: 2129068 - RNA, 19 nt, Homo sapiens
  misc_RNA (1)...(19): siRNA sense strand
gcaagucucuggaauacca

SEQ ID NO: 2129069 - RNA, 19 nt, Homo sapiens
  misc_RNA (1)...(19): siRNA sense strand
gaauagagaccaacugcaa

SEQ ID NO: 2129070 - RNA, 19 nt, Homo sapiens
  misc_RNA (1)...(19): siRNA sense strand
gcacugcaaugacugacaa

SEQ ID NO: 2129071 - RNA, 19 nt, Homo sapiens
  misc_RNA (1)...(19): siRNA sense strand
auacacagcucuuuacaau

SEQ ID NO: 2129072 - RNA, 19 nt, Homo sapiens
  misc_RNA (1)...(19): siRNA sense strand
caacaaggcacugcaauga

SEQ ID NO: 2129073 - RNA, 19 nt, Homo sapiens
  misc_RNA (1)...(19): siRNA sense strand
gcgcuaacccuuugugaaa

SEQ ID NO: 2129074 - RNA, 19 nt, Homo sapiens
  misc_RNA (1)...(19): siRNA sense strand
gcaaaugccaaccaagauu

SEQ ID NO: 2129075 - RNA, 19 nt, Homo sapiens
  misc_RNA (1)...(19): siRNA sense strand
ggaaggcaguuugcaguug

SEQ ID NO: 2129076 - RNA, 19 nt, Homo sapiens
  misc_RNA (1)...(19): siRNA sense strand
gaauaguguugaugucugu

SEQ ID NO: 2129077 - RNA, 19 nt, Homo sapiens
  misc_RNA (1)...(19): siRNA sense strand
gagaaaguuugccggaaug

SEQ ID NO: 2129078 - RNA, 19 nt, Homo sapiens
  misc_RNA (1)...(19): siRNA sense strand
gaaggggaauccuauuuaa

SEQ ID NO: 2129079 - RNA, 19 nt, Homo sapiens
  misc_RNA (1)...(19): siRNA sense strand
gcacugagacuagcaauag

SEQ ID NO: 2129080 - RNA, 19 nt, Homo sapiens
  misc_RNA (1)...(19): siRNA sense strand
caacguggccaucagcuuu

SEQ ID NO: 2129081 - RNA, 19 nt, Homo sapiens
  misc_RNA (1)...(19): siRNA sense strand
gauggacacauucaguuua

SEQ ID NO: 2129082 - RNA, 19 nt, Homo sapiens
  misc_RNA (1)...(19): siRNA sense strand
ggaaucuacugcuccauca

SEQ ID NO: 2129083 - RNA, 19 nt, Homo sapiens
  misc_RNA (1)...(19): siRNA sense strand
guugauaguuuccacuuga

SEQ ID NO: 2129084 - RNA, 19 nt, Homo sapiens
  misc_RNA (1)...(19): siRNA sense strand
cgggagauguuaaagauga

SEQ ID NO: 2129085 - RNA, 19 nt, Homo sapiens
  misc_RNA (1)...(19): siRNA sense strand
caaacugcaucuuccuauu

SEQ ID NO: 2129086 - RNA, 19 nt, Homo sapiens
  misc_RNA (1)...(19): siRNA sense strand
caacuaccgugauguccaa

SEQ ID NO: 2129087 - RNA, 19 nt, Homo sapiens
  misc_RNA (1)...(19): siRNA sense strand
ggucaagagugucaagugu

SEQ ID NO: 2129088 - RNA, 19 nt, Homo sapiens
  misc_RNA (1)...(19): siRNA sense strand
gauaacagagcaauucaug

SEQ ID NO: 2129089 - RNA, 19 nt, Homo sapiens
  misc_RNA (1)...(19): siRNA sense strand
gcagugaauuacccaacuu

SEQ ID NO: 2129090 - RNA, 19 nt, Homo sapiens
  misc_RNA (1)...(19): siRNA sense strand
ugaaacaaaucuacaaagg

SEQ ID NO: 2129091 - RNA, 19 nt, Homo sapiens
  misc_RNA (1)...(19): siRNA sense strand
acacacacccugccauuaa

SEQ ID NO: 2129092 - RNA, 19 nt, Homo sapiens
  misc_RNA (1)...(19): siRNA sense strand
caagcagucuuccuauuag

SEQ ID NO: 2129093 - RNA, 19 nt, Homo sapiens
  misc_RNA (1)...(19): siRNA sense strand
gaagaaauggaauaguguu

SEQ ID NO: 2129094 - RNA, 19 nt, Homo sapiens
  misc_RNA (1)...(19): siRNA sense strand
ggacacacacccugccauu

SEQ ID NO: 2129095 - RNA, 19 nt, Homo sapiens
  misc_RNA (1)...(19): siRNA sense strand
uuugaucguugcaagauua

SEQ ID NO: 2129096 - RNA, 19 nt, Homo sapiens
  misc_RNA (1)...(19): siRNA sense strand
ugacagaaccugcaauaca

SEQ ID NO: 2129097 - RNA, 19 nt, Homo sapiens
  misc_RNA (1)...(19): siRNA sense strand
cagcuuaauuugcucuuug

SEQ ID NO: 2129098 - RNA, 19 nt, Homo sapiens
  misc_RNA (1)...(19): siRNA sense strand
gaaaucaaccaaguucaug

SEQ ID NO: 2129099 - RNA, 19 nt, Homo sapiens
  misc_RNA (1)...(19): siRNA sense strand
caagcaagcagucuuccua

SEQ ID NO: 2129100 - RNA, 19 nt, Homo sapiens
  misc_RNA (1)...(19): siRNA sense strand
aaacugcaucuuccuauuu

SEQ ID NO: 2129101 - RNA, 19 nt, Homo sapiens
  misc_RNA (1)...(19): siRNA sense strand
gagacggcguaccaaauug

SEQ ID NO: 2129102 - RNA, 19 nt, Homo sapiens
  misc_RNA (1)...(19): siRNA sense strand
gcuggaaacaguauuagaa

SEQ ID NO: 2129103 - RNA, 19 nt, Homo sapiens
  misc_RNA (1)...(19): siRNA sense strand
cugaagaaauggaauagug

SEQ ID NO: 2129104 - RNA, 19 nt, Homo sapiens
  misc_RNA (1)...(19): siRNA sense strand
ucaaaugaauagagaccaa

SEQ ID NO: 2129105 - RNA, 19 nt, Homo sapiens
  misc_RNA (1)...(19): siRNA sense strand
caugcuaacugcagccaaa

SEQ ID NO: 2129106 - RNA, 19 nt, Homo sapiens
  misc_RNA (1)...(19): siRNA sense strand
gaaaucauggcagugaauu

SEQ ID NO: 2129107 - RNA, 19 nt, Homo sapiens
  misc_RNA (1)...(19): siRNA sense strand
gacccucgccugucacuuu

SEQ ID NO: 2129108 - RNA, 19 nt, Homo sapiens
  misc_RNA (1)...(19): siRNA sense strand
ggaggaggaacucugguaa

SEQ ID NO: 2129109 - RNA, 19 nt, Homo sapiens
  misc_RNA (1)...(19): siRNA sense strand
cagaaacaguuggaaaugu

SEQ ID NO: 2129110 - RNA, 19 nt, Homo sapiens
  misc_RNA (1)...(19): siRNA sense strand
gcagaaacaguuggaaaug

SEQ ID NO: 2129111 - RNA, 19 nt, Homo sapiens
  misc_RNA (1)...(19): siRNA sense strand
caagccagaucaggucaaa

SEQ ID NO: 2129112 - RNA, 19 nt, Homo sapiens
  misc_RNA (1)...(19): siRNA sense strand
gaccugguuuacacucuuu

SEQ ID NO: 2129113 - RNA, 19 nt, Homo sapiens
  misc_RNA (1)...(19): siRNA sense strand
agacaucacucuuuugaaa

SEQ ID NO: 2129114 - RNA, 19 nt, Homo sapiens
  misc_RNA (1)...(19): siRNA sense strand
gcaacaaggcacugcaaug

SEQ ID NO: 2129115 - RNA, 19 nt, Homo sapiens
  misc_RNA (1)...(19): siRNA sense strand
gugcaagaguggacgcauu

SEQ ID NO: 2129116 - RNA, 19 nt, Homo sapiens
  misc_RNA (1)...(19): siRNA sense strand
gugcaacgguacugucaga

SEQ ID NO: 2129117 - RNA, 19 nt, Homo sapiens
  misc_RNA (1)...(19): siRNA sense strand
gaggcuggaaacaguauua

SEQ ID NO: 2129118 - RNA, 19 nt, Homo sapiens
  misc_RNA (1)...(19): siRNA sense strand
gugcuaguauagaugauga

SEQ ID NO: 2129119 - RNA, 19 nt, Homo sapiens
  misc_RNA (1)...(19): siRNA sense strand
ccacauugcaucaguuguu

SEQ ID NO: 2129120 - RNA, 19 nt, Homo sapiens
  misc_RNA (1)...(19): siRNA sense strand
agagaaaguuugccggaau

SEQ ID NO: 2129121 - RNA, 19 nt, Homo sapiens
  misc_RNA (1)...(19): siRNA sense strand
uaaccucgauaaccaaucu

SEQ ID NO: 2129122 - RNA, 19 nt, Homo sapiens
  misc_RNA (1)...(19): siRNA sense strand
uaucagcagugaccuauac

SEQ ID NO: 2129123 - RNA, 19 nt, Homo sapiens
  misc_RNA (1)...(19): siRNA sense strand
gcagcuuaauuugcucuuu

SEQ ID NO: 2129124 - RNA, 19 nt, Homo sapiens
  misc_RNA (1)...(19): siRNA sense strand
gaaaacugcuggcacuuag

SEQ ID NO: 2129125 - RNA, 19 nt, Homo sapiens
  misc_RNA (1)...(19): siRNA sense strand
gguaacgugugcuacugaa

SEQ ID NO: 2129126 - RNA, 19 nt, Homo sapiens
  misc_RNA (1)...(19): siRNA sense strand
uuacccaacuuaaccaaug

SEQ ID NO: 2129127 - RNA, 19 nt, Homo sapiens
  misc_RNA (1)...(19): siRNA sense strand
ugagacggcguaccaaauu

SEQ ID NO: 2129128 - RNA, 19 nt, Homo sapiens
  misc_RNA (1)...(19): siRNA sense strand
acaggcagcucugggauga

SEQ ID NO: 2129129 - RNA, 19 nt, Homo sapiens
  misc_RNA (1)...(19): siRNA sense strand
ccaccgaggccacaaguau

SEQ ID NO: 2129130 - RNA, 19 nt, Homo sapiens
  misc_RNA (1)...(19): siRNA sense strand
gugcaagucucuggaauac

SEQ ID NO: 2129131 - RNA, 19 nt, Homo sapiens
  misc_RNA (1)...(19): siRNA sense strand
gacagcagcagaaacaguu

SEQ ID NO: 2129132 - RNA, 19 nt, Homo sapiens
  misc_RNA (1)...(19): siRNA sense strand
caacuacuguuaccaugac

SEQ ID NO: 2129133 - RNA, 19 nt, Homo sapiens
  misc_RNA (1)...(19): siRNA sense strand
cagguuaaacuguuccuuu

SEQ ID NO: 2129134 - RNA, 19 nt, Homo sapiens
  misc_RNA (1)...(19): siRNA sense strand
gaacucugguaagcucaug

SEQ ID NO: 2129135 - RNA, 19 nt, Homo sapiens
  misc_RNA (1)...(19): siRNA sense strand
ugcccaagaugcauuuaaa

SEQ ID NO: 2129136 - RNA, 19 nt, Homo sapiens
  misc_RNA (1)...(19): siRNA sense strand
gaaacaguauuagaaucca

SEQ ID NO: 2129137 - RNA, 19 nt, Homo sapiens
  misc_RNA (1)...(19): siRNA sense strand
gugcaaaugccaaccaaga

SEQ ID NO: 2129138 - RNA, 19 nt, Homo sapiens
  misc_RNA (1)...(19): siRNA sense strand
ggaaaucauggcagugaau

SEQ ID NO: 2129139 - RNA, 19 nt, Homo sapiens
  misc_RNA (1)...(19): siRNA sense strand
ugcaaugacugacaaauac

SEQ ID NO: 2129140 - RNA, 19 nt, Homo sapiens
  misc_RNA (1)...(19): siRNA sense strand
cugcaaugacugacaaaua

SEQ ID NO: 2129141 - RNA, 19 nt, Homo sapiens
  misc_RNA (1)...(19): siRNA sense strand
caaaggugcgggagauguu

SEQ ID NO: 2129142 - RNA, 19 nt, Homo sapiens
  misc_RNA (1)...(19): siRNA sense strand
uauagugguuuaggugaaa

SEQ ID NO: 2129143 - RNA, 19 nt, Homo sapiens
  misc_RNA (1)...(19): siRNA sense strand
uuagaagccggaccauaua

SEQ ID NO: 2129144 - RNA, 19 nt, Homo sapiens
  misc_RNA (1)...(19): siRNA sense strand
cagcugaagaaauggaaua

SEQ ID NO: 2129145 - RNA, 19 nt, Homo sapiens
  misc_RNA (1)...(19): siRNA sense strand
uggaaacaaggacauauuu

SEQ ID NO: 2129146 - RNA, 19 nt, Homo sapiens
  misc_RNA (1)...(19): siRNA sense strand
gcaaagcccgagagaccuu

SEQ ID NO: 2129147 - RNA, 19 nt, Homo sapiens
  misc_RNA (1)...(19): siRNA sense strand
gacacacacccugccauua

SEQ ID NO: 2129148 - RNA, 19 nt, Homo sapiens
  misc_RNA (1)...(19): siRNA sense strand
ugguuuaggugaaauaauc

SEQ ID NO: 2129149 - RNA, 19 nt, Homo sapiens
  misc_RNA (1)...(19): siRNA sense strand
caaaugccaaccaagauuc

SEQ ID NO: 2129150 - RNA, 19 nt, Homo sapiens
  misc_RNA (1)...(19): siRNA sense strand
caucaguccucggcacuau

SEQ ID NO: 2129151 - RNA, 19 nt, Homo sapiens
  misc_RNA (1)...(19): siRNA sense strand
gggaggaggaacucuggua

SEQ ID NO: 2129152 - RNA, 19 nt, Homo sapiens
  misc_RNA (1)...(19): siRNA sense strand
gagcuacaaucaggacaca

SEQ ID NO: 2129153 - RNA, 19 nt, Homo sapiens
  misc_RNA (1)...(19): siRNA sense strand
uauggaagccugccgcauu

SEQ ID NO: 2129154 - RNA, 19 nt, Homo sapiens
  misc_RNA (1)...(19): siRNA sense strand
cagcagaaacaguuggaaa

SEQ ID NO: 2129155 - RNA, 19 nt, Homo sapiens
  misc_RNA (1)...(19): siRNA sense strand
gaaagaaagucucgaaaga

SEQ ID NO: 2129156 - RNA, 19 nt, Homo sapiens
  misc_RNA (1)...(19): siRNA sense strand
cgaaagauccuaauuguua

SEQ ID NO: 2129157 - RNA, 19 nt, Homo sapiens
  misc_RNA (1)...(19): siRNA sense strand
gaagauauguuugcuguuu

SEQ ID NO: 2129158 - RNA, 19 nt, Homo sapiens
  misc_RNA (1)...(19): siRNA sense strand
ggaagaagaugacacaaau

SEQ ID NO: 2129159 - RNA, 19 nt, Homo sapiens
  misc_RNA (1)...(19): siRNA sense strand
ggacagaguugccgaacaa

SEQ ID NO: 2129160 - RNA, 19 nt, Homo sapiens
  misc_RNA (1)...(19): siRNA sense strand
gaaaugcacugaagcacuu

SEQ ID NO: 2129161 - RNA, 19 nt, Homo sapiens
  misc_RNA (1)...(19): siRNA sense strand
ggaagaacgucuaaaggaa

SEQ ID NO: 2129162 - RNA, 19 nt, Homo sapiens
  misc_RNA (1)...(19): siRNA sense strand
acauaaagcugacagauuu

SEQ ID NO: 2129163 - RNA, 19 nt, Homo sapiens
  misc_RNA (1)...(19): siRNA sense strand
gcaaagagccugccacuca

SEQ ID NO: 2129164 - RNA, 19 nt, Homo sapiens
  misc_RNA (1)...(19): siRNA sense strand
ugacaacguucuacccuua

SEQ ID NO: 2129165 - RNA, 19 nt, Homo sapiens
  misc_RNA (1)...(19): siRNA sense strand
gaaagauggugccaaggaa

SEQ ID NO: 2129166 - RNA, 19 nt, Homo sapiens
  misc_RNA (1)...(19): siRNA sense strand
ggaagacucuguggacaaa

SEQ ID NO: 2129167 - RNA, 19 nt, Homo sapiens
  misc_RNA (1)...(19): siRNA sense strand
gggaagaacuacggcuuua

SEQ ID NO: 2129168 - RNA, 19 nt, Homo sapiens
  misc_RNA (1)...(19): siRNA sense strand
gaacagguggugcauauga

SEQ ID NO: 2129169 - RNA, 19 nt, Homo sapiens
  misc_RNA (1)...(19): siRNA sense strand
gcacuuggaucagauaaau

SEQ ID NO: 2129170 - RNA, 19 nt, Homo sapiens
  misc_RNA (1)...(19): siRNA sense strand
gagcuggaguucagaauau

SEQ ID NO: 2129171 - RNA, 19 nt, Homo sapiens
  misc_RNA (1)...(19): siRNA sense strand
gcagacggcuucccagaga

SEQ ID NO: 2129172 - RNA, 19 nt, Homo sapiens
  misc_RNA (1)...(19): siRNA sense strand
cuagagaguuccuggauaa

SEQ ID NO: 2129173 - RNA, 19 nt, Homo sapiens
  misc_RNA (1)...(19): siRNA sense strand
gaacagucauggaaagcaa

SEQ ID NO: 2129174 - RNA, 19 nt, Homo sapiens
  misc_RNA (1)...(19): siRNA sense strand
ggagaauuggcauuuauua

SEQ ID NO: 2129175 - RNA, 19 nt, Homo sapiens
  misc_RNA (1)...(19): siRNA sense strand
ggagaagccugugcauuug

SEQ ID NO: 2129176 - RNA, 19 nt, Homo sapiens
  misc_RNA (1)...(19): siRNA sense strand
gagaauuguuugcaacuug

SEQ ID NO: 2129177 - RNA, 19 nt, Homo sapiens
  misc_RNA (1)...(19): siRNA sense strand
gggaacagguggugcauau

SEQ ID NO: 2129178 - RNA, 19 nt, Homo sapiens
  misc_RNA (1)...(19): siRNA sense strand
gagaucaacuggccugaga

SEQ ID NO: 2129179 - RNA, 19 nt, Homo sapiens
  misc_RNA (1)...(19): siRNA sense strand
gggagacugugcuacuuua

SEQ ID NO: 2129180 - RNA, 19 nt, Homo sapiens
  misc_RNA (1)...(19): siRNA sense strand
gagaacagaugcaggaaca

SEQ ID NO: 2129181 - RNA, 19 nt, Homo sapiens
  misc_RNA (1)...(19): siRNA sense strand
gaaggaugcuagagaguuc

SEQ ID NO: 2129182 - RNA, 19 nt, Homo sapiens
  misc_RNA (1)...(19): siRNA sense strand
gaaagaaaaugucacuuga

SEQ ID NO: 2129183 - RNA, 19 nt, Homo sapiens
  misc_RNA (1)...(19): siRNA sense strand
gaaguaucaucauauggaa

SEQ ID NO: 2129184 - RNA, 19 nt, Homo sapiens
  misc_RNA (1)...(19): siRNA sense strand
gcacaaauuagauaaguug

SEQ ID NO: 2129185 - RNA, 19 nt, Homo sapiens
  misc_RNA (1)...(19): siRNA sense strand
caacagacauaaacucagu

SEQ ID NO: 2129186 - RNA, 19 nt, Homo sapiens
  misc_RNA (1)...(19): siRNA sense strand
gaagaugacacaaaugaug

SEQ ID NO: 2129187 - RNA, 19 nt, Homo sapiens
  misc_RNA (1)...(19): siRNA sense strand
gaagaacgucuaaaggaaa

SEQ ID NO: 2129188 - RNA, 19 nt, Homo sapiens
  misc_RNA (1)...(19): siRNA sense strand
gcagagagcccuccaugga

SEQ ID NO: 2129189 - RNA, 19 nt, Homo sapiens
  misc_RNA (1)...(19): siRNA sense strand
gaagaaagaaagucucgaa

SEQ ID NO: 2129190 - RNA, 19 nt, Homo sapiens
  misc_RNA (1)...(19): siRNA sense strand
gaacgucuaaaggaaauua

SEQ ID NO: 2129191 - RNA, 19 nt, Homo sapiens
  misc_RNA (1)...(19): siRNA sense strand
gugaaaagcucuccaguuu

SEQ ID NO: 2129192 - RNA, 19 nt, Homo sapiens
  misc_RNA (1)...(19): siRNA sense strand
gcaagaaauccaagaagaa

SEQ ID NO: 2129193 - RNA, 19 nt, Homo sapiens
  misc_RNA (1)...(19): siRNA sense strand
guacagauaauuccucaaa

SEQ ID NO: 2129194 - RNA, 19 nt, Homo sapiens
  misc_RNA (1)...(19): siRNA sense strand
gaucgaaucacucagaauu

SEQ ID NO: 2129195 - RNA, 19 nt, Homo sapiens
  misc_RNA (1)...(19): siRNA sense strand
gcaacucguucauuagaug

SEQ ID NO: 2129196 - RNA, 19 nt, Homo sapiens
  misc_RNA (1)...(19): siRNA sense strand
gaaggacccacccagauuu

SEQ ID NO: 2129197 - RNA, 19 nt, Homo sapiens
  misc_RNA (1)...(19): siRNA sense strand
gcuagagaguuccuggaua

SEQ ID NO: 2129198 - RNA, 19 nt, Homo sapiens
  misc_RNA (1)...(19): siRNA sense strand
ggaauuugauccggaagaa

SEQ ID NO: 2129199 - RNA, 19 nt, Homo sapiens
  misc_RNA (1)...(19): siRNA sense strand
gagcaugacuaccaaccuu

SEQ ID NO: 2129200 - RNA, 19 nt, Homo sapiens
  misc_RNA (1)...(19): siRNA sense strand
ggaaggacccacccagauu

SEQ ID NO: 2129201 - RNA, 19 nt, Homo sapiens
  misc_RNA (1)...(19): siRNA sense strand
guggaaaggucaaguacuu

SEQ ID NO: 2129202 - RNA, 19 nt, Homo sapiens
  misc_RNA (1)...(19): siRNA sense strand
cacaaaugaugaagacuuu

SEQ ID NO: 2129203 - RNA, 19 nt, Homo sapiens
  misc_RNA (1)...(19): siRNA sense strand
ggagaaguugcaucaguua

SEQ ID NO: 2129204 - RNA, 19 nt, Homo sapiens
  misc_RNA (1)...(19): siRNA sense strand
ggaauaaggugucaaucac

SEQ ID NO: 2129205 - RNA, 19 nt, Homo sapiens
  misc_RNA (1)...(19): siRNA sense strand
caaacuggcuauuucaaca

SEQ ID NO: 2129206 - RNA, 19 nt, Homo sapiens
  misc_RNA (1)...(19): siRNA sense strand
gcugacagauuuuggauua

SEQ ID NO: 2129207 - RNA, 19 nt, Homo sapiens
  misc_RNA (1)...(19): siRNA sense strand
aaaccgacauucccaggua

SEQ ID NO: 2129208 - RNA, 19 nt, Homo sapiens
  misc_RNA (1)...(19): siRNA sense strand
cagauggagugcuuaguuu

SEQ ID NO: 2129209 - RNA, 19 nt, Homo sapiens
  misc_RNA (1)...(19): siRNA sense strand
gaaagcaucgccacugaga

SEQ ID NO: 2129210 - RNA, 19 nt, Homo sapiens
  misc_RNA (1)...(19): siRNA sense strand
gggaagaaaugcacugaag

SEQ ID NO: 2129211 - RNA, 19 nt, Homo sapiens
  misc_RNA (1)...(19): siRNA sense strand
caagaucgcgcaagccuuu

SEQ ID NO: 2129212 - RNA, 19 nt, Homo sapiens
  misc_RNA (1)...(19): siRNA sense strand
gcacagaugggaagauaug

SEQ ID NO: 2129213 - RNA, 19 nt, Homo sapiens
  misc_RNA (1)...(19): siRNA sense strand
gagaguuccuggauaaaca

SEQ ID NO: 2129214 - RNA, 19 nt, Homo sapiens
  misc_RNA (1)...(19): siRNA sense strand
uagagugccuggaauuuga

SEQ ID NO: 2129215 - RNA, 19 nt, Homo sapiens
  misc_RNA (1)...(19): siRNA sense strand
gagcuucuccgaugugaaa

SEQ ID NO: 2129216 - RNA, 19 nt, Homo sapiens
  misc_RNA (1)...(19): siRNA sense strand
gccauaaacuucugcuuuc

SEQ ID NO: 2129217 - RNA, 19 nt, Homo sapiens
  misc_RNA (1)...(19): siRNA sense strand
ggacuaaugagcaugacua

SEQ ID NO: 2129218 - RNA, 19 nt, Homo sapiens
  misc_RNA (1)...(19): siRNA sense strand
gcagauggagugcuuaguu

SEQ ID NO: 2129219 - RNA, 19 nt, Homo sapiens
  misc_RNA (1)...(19): siRNA sense strand
ccaucucucuuucuaauga

SEQ ID NO: 2129220 - RNA, 19 nt, Homo sapiens
  misc_RNA (1)...(19): siRNA sense strand
gaacccacaugacaaagag

SEQ ID NO: 2129221 - RNA, 19 nt, Homo sapiens
  misc_RNA (1)...(19): siRNA sense strand
ccaaggaaccugaaaggaa

SEQ ID NO: 2129222 - RNA, 19 nt, Homo sapiens
  misc_RNA (1)...(19): siRNA sense strand
gaucuuaucacucacauca

SEQ ID NO: 2129223 - RNA, 19 nt, Homo sapiens
  misc_RNA (1)...(19): siRNA sense strand
uggcacaccugaauacauu

SEQ ID NO: 2129224 - RNA, 19 nt, Homo sapiens
  misc_RNA (1)...(19): siRNA sense strand
cgagauugcuuggauaaau

SEQ ID NO: 2129225 - RNA, 19 nt, Homo sapiens
  misc_RNA (1)...(19): siRNA sense strand
caagaaauccaagaagaaa

SEQ ID NO: 2129226 - RNA, 19 nt, Homo sapiens
  misc_RNA (1)...(19): siRNA sense strand
ccacacagaaguuauagaa

SEQ ID NO: 2129227 - RNA, 19 nt, Homo sapiens
  misc_RNA (1)...(19): siRNA sense strand
ggaaaccucgggaaaguga

SEQ ID NO: 2129228 - RNA, 19 nt, Homo sapiens
  misc_RNA (1)...(19): siRNA sense strand
caaacagcaucgauucuuc

SEQ ID NO: 2129229 - RNA, 19 nt, Homo sapiens
  misc_RNA (1)...(19): siRNA sense strand
ccaaggugguggugaagaa

SEQ ID NO: 2129230 - RNA, 19 nt, Homo sapiens
  misc_RNA (1)...(19): siRNA sense strand
gaaagcaacagacauaaac

SEQ ID NO: 2129231 - RNA, 19 nt, Homo sapiens
  misc_RNA (1)...(19): siRNA sense strand
ugagaaguaucaucauaug

SEQ ID NO: 2129232 - RNA, 19 nt, Homo sapiens
  misc_RNA (1)...(19): siRNA sense strand
ucugagaaguaucaucaua

SEQ ID NO: 2129233 - RNA, 19 nt, Homo sapiens
  misc_RNA (1)...(19): siRNA sense strand
gaguuacacuucuuaucaa

SEQ ID NO: 2129234 - RNA, 19 nt, Homo sapiens
  misc_RNA (1)...(19): siRNA sense strand
aaagagaguuugcguagca

SEQ ID NO: 2129235 - RNA, 19 nt, Homo sapiens
  misc_RNA (1)...(19): siRNA sense strand
gggagacagugacaucuau

SEQ ID NO: 2129236 - RNA, 19 nt, Homo sapiens
  misc_RNA (1)...(19): siRNA sense strand
gaugagauacuaaauugga

SEQ ID NO: 2129237 - RNA, 19 nt, Homo sapiens
  misc_RNA (1)...(19): siRNA sense strand
gaagaaaugcacugaagca

SEQ ID NO: 2129238 - RNA, 19 nt, Homo sapiens
  misc_RNA (1)...(19): siRNA sense strand
uggagaagccugugcauuu

SEQ ID NO: 2129239 - RNA, 19 nt, Homo sapiens
  misc_RNA (1)...(19): siRNA sense strand
ggugagagccucccagguu

SEQ ID NO: 2129240 - RNA, 19 nt, Homo sapiens
  misc_RNA (1)...(19): siRNA sense strand
gaggaugacacaaguuauu

SEQ ID NO: 2129241 - RNA, 19 nt, Homo sapiens
  misc_RNA (1)...(19): siRNA sense strand
ggaagaauuuuacuaccua

SEQ ID NO: 2129242 - RNA, 19 nt, Homo sapiens
  misc_RNA (1)...(19): siRNA sense strand
gcucgagauugcuuggaua

SEQ ID NO: 2129243 - RNA, 19 nt, Homo sapiens
  misc_RNA (1)...(19): siRNA sense strand
ucuugcaacucguucauua

SEQ ID NO: 2129244 - RNA, 19 nt, Homo sapiens
  misc_RNA (1)...(19): siRNA sense strand
ugacagggcuccucuagac

SEQ ID NO: 2129245 - RNA, 19 nt, Homo sapiens
  misc_RNA (1)...(19): siRNA sense strand
gagggaaucgucugaaaga

SEQ ID NO: 2129246 - RNA, 19 nt, Homo sapiens
  misc_RNA (1)...(19): siRNA sense strand
gccgaggucuccagaauuc

SEQ ID NO: 2129247 - RNA, 19 nt, Homo sapiens
  misc_RNA (1)...(19): siRNA sense strand
gaagagagagagaagaaag

SEQ ID NO: 2129248 - RNA, 19 nt, Homo sapiens
  misc_RNA (1)...(19): siRNA sense strand
aauaaggugucaaucacua

SEQ ID NO: 2129249 - RNA, 19 nt, Homo sapiens
  misc_RNA (1)...(19): siRNA sense strand
gcaugacuaccaaccuuua

SEQ ID NO: 2129250 - RNA, 19 nt, Homo sapiens
  misc_RNA (1)...(19): siRNA sense strand
aaagaaggacaggguauua

SEQ ID NO: 2129251 - RNA, 19 nt, Homo sapiens
  misc_RNA (1)...(19): siRNA sense strand
ugagaaggacuuuguggua

SEQ ID NO: 2129252 - RNA, 19 nt, Homo sapiens
  misc_RNA (1)...(19): siRNA sense strand
gggaagggccacaguaaga

SEQ ID NO: 2129253 - RNA, 19 nt, Homo sapiens
  misc_RNA (1)...(19): siRNA sense strand
caacagcuaucaacaucca

SEQ ID NO: 2129254 - RNA, 19 nt, Homo sapiens
  misc_RNA (1)...(19): siRNA sense strand
agacugugcuacuuuaaug

SEQ ID NO: 2129255 - RNA, 19 nt, Homo sapiens
  misc_RNA (1)...(19): siRNA sense strand
gaagacaccuacuuugaua

SEQ ID NO: 2129256 - RNA, 19 nt, Homo sapiens
  misc_RNA (1)...(19): siRNA sense strand
gaagagaauuggaguguuu

SEQ ID NO: 2129257 - RNA, 19 nt, Homo sapiens
  misc_RNA (1)...(19): siRNA sense strand
guacacaucuucaguauau

SEQ ID NO: 2129258 - RNA, 19 nt, Homo sapiens
  misc_RNA (1)...(19): siRNA sense strand
guacucaccucagcaauua

SEQ ID NO: 2129259 - RNA, 19 nt, Homo sapiens
  misc_RNA (1)...(19): siRNA sense strand
gaauacagauauagaagga

SEQ ID NO: 2129260 - RNA, 19 nt, Homo sapiens
  misc_RNA (1)...(19): siRNA sense strand
gcaaguuuaugugaucuua

SEQ ID NO: 2129261 - RNA, 19 nt, Homo sapiens
  misc_RNA (1)...(19): siRNA sense strand
gccaaaugcuccuuuaauu

SEQ ID NO: 2129262 - RNA, 19 nt, Homo sapiens
  misc_RNA (1)...(19): siRNA sense strand
gauauuaacucucuuugca

SEQ ID NO: 2129263 - RNA, 19 nt, Homo sapiens
  misc_RNA (1)...(19): siRNA sense strand
ggaacgugguacuuaguua

SEQ ID NO: 2129264 - RNA, 19 nt, Homo sapiens
  misc_RNA (1)...(19): siRNA sense strand
ugaaugacuuccuuaauga

SEQ ID NO: 2129265 - RNA, 19 nt, Homo sapiens
  misc_RNA (1)...(19): siRNA sense strand
caggagauauugcuguaua

SEQ ID NO: 2129266 - RNA, 19 nt, Homo sapiens
  misc_RNA (1)...(19): siRNA sense strand
gaaggaacgugguacuuag

SEQ ID NO: 2129267 - RNA, 19 nt, Homo sapiens
  misc_RNA (1)...(19): siRNA sense strand
gaaggaaucgacacaacua

SEQ ID NO: 2129268 - RNA, 19 nt, Homo sapiens
  misc_RNA (1)...(19): siRNA sense strand
gaacagagacaaucaucga

SEQ ID NO: 2129269 - RNA, 19 nt, Homo sapiens
  misc_RNA (1)...(19): siRNA sense strand
uuacaagccugauaugcua

SEQ ID NO: 2129270 - RNA, 19 nt, Homo sapiens
  misc_RNA (1)...(19): siRNA sense strand
gaaagagggaaaugauaaa

SEQ ID NO: 2129271 - RNA, 19 nt, Homo sapiens
  misc_RNA (1)...(19): siRNA sense strand
gagaggacacccaucauuu

SEQ ID NO: 2129272 - RNA, 19 nt, Homo sapiens
  misc_RNA (1)...(19): siRNA sense strand
gaauuggaguguuuucuua

SEQ ID NO: 2129273 - RNA, 19 nt, Homo sapiens
  misc_RNA (1)...(19): siRNA sense strand
gaguaggacuugugcauuc

SEQ ID NO: 2129274 - RNA, 19 nt, Homo sapiens
  misc_RNA (1)...(19): siRNA sense strand
gcacagauagagaagauau

SEQ ID NO: 2129275 - RNA, 19 nt, Homo sapiens
  misc_RNA (1)...(19): siRNA sense strand
aagcagcugucauuaguaa

SEQ ID NO: 2129276 - RNA, 19 nt, Homo sapiens
  misc_RNA (1)...(19): siRNA sense strand
ugaagcagcugucauuagu

SEQ ID NO: 2129277 - RNA, 19 nt, Homo sapiens
  misc_RNA (1)...(19): siRNA sense strand
guaaacugguucagaaauc

SEQ ID NO: 2129278 - RNA, 19 nt, Homo sapiens
  misc_RNA (1)...(19): siRNA sense strand
ccagaugucuucgcugaaa

SEQ ID NO: 2129279 - RNA, 19 nt, Homo sapiens
  misc_RNA (1)...(19): siRNA sense strand
gcaauuagcagggaagaga

SEQ ID NO: 2129280 - RNA, 19 nt, Homo sapiens
  misc_RNA (1)...(19): siRNA sense strand
gcucggauguugcugaaug

SEQ ID NO: 2129281 - RNA, 19 nt, Homo sapiens
  misc_RNA (1)...(19): siRNA sense strand
gcuguuaacuggauugagu

SEQ ID NO: 2129282 - RNA, 19 nt, Homo sapiens
  misc_RNA (1)...(19): siRNA sense strand
cugaaugacuuccuuaaug

SEQ ID NO: 2129283 - RNA, 19 nt, Homo sapiens
  misc_RNA (1)...(19): siRNA sense strand
ggauguugcugaaugacuu

SEQ ID NO: 2129284 - RNA, 19 nt, Homo sapiens
  misc_RNA (1)...(19): siRNA sense strand
agaaagagggaaaugauaa

SEQ ID NO: 2129285 - RNA, 19 nt, Homo sapiens
  misc_RNA (1)...(19): siRNA sense strand
ugaaggaacgugguacuua

SEQ ID NO: 2129286 - RNA, 19 nt, Homo sapiens
  misc_RNA (1)...(19): siRNA sense strand
ggagaaggcauuuaugaag

SEQ ID NO: 2129287 - RNA, 19 nt, Homo sapiens
  misc_RNA (1)...(19): siRNA sense strand
gcuggaaaguauaccauug

SEQ ID NO: 2129288 - RNA, 19 nt, Homo sapiens
  misc_RNA (1)...(19): siRNA sense strand
uaacagcaaguuuauguga

SEQ ID NO: 2129289 - RNA, 19 nt, Homo sapiens
  misc_RNA (1)...(19): siRNA sense strand
gcagaaagagggaaaugau

SEQ ID NO: 2129290 - RNA, 19 nt, Homo sapiens
  misc_RNA (1)...(19): siRNA sense strand
ugaugcagcuguuugaaga

SEQ ID NO: 2129291 - RNA, 19 nt, Homo sapiens
  misc_RNA (1)...(19): siRNA sense strand
gcaugacugugguucagaa

SEQ ID NO: 2129292 - RNA, 19 nt, Homo sapiens
  misc_RNA (1)...(19): siRNA sense strand
cauagcaacugagcauauu

SEQ ID NO: 2129293 - RNA, 19 nt, Homo sapiens
  misc_RNA (1)...(19): siRNA sense strand
ggaaucgacacaacuaaug

SEQ ID NO: 2129294 - RNA, 19 nt, Homo sapiens
  misc_RNA (1)...(19): siRNA sense strand
ggaagagaauuggaguguu

SEQ ID NO: 2129295 - RNA, 19 nt, Homo sapiens
  misc_RNA (1)...(19): siRNA sense strand
ggaaaacucuccauacagu

SEQ ID NO: 2129296 - RNA, 19 nt, Homo sapiens
  misc_RNA (1)...(19): siRNA sense strand
uagaagacaccuacuuuga

SEQ ID NO: 2129297 - RNA, 19 nt, Homo sapiens
  misc_RNA (1)...(19): siRNA sense strand
gcuauucugucuacugcaa

SEQ ID NO: 2129298 - RNA, 19 nt, Homo sapiens
  misc_RNA (1)...(19): siRNA sense strand
agagggaaaugauaaagau

SEQ ID NO: 2129299 - RNA, 19 nt, Homo sapiens
  misc_RNA (1)...(19): siRNA sense strand
cagaaagagggaaaugaua

SEQ ID NO: 2129300 - RNA, 19 nt, Homo sapiens
  misc_RNA (1)...(19): siRNA sense strand
ucaauagauucacucuuug

SEQ ID NO: 2129301 - RNA, 19 nt, Homo sapiens
  misc_RNA (1)...(19): siRNA sense strand
uguagaugcuggaaaguau

SEQ ID NO: 2129302 - RNA, 19 nt, Homo sapiens
  misc_RNA (1)...(19): siRNA sense strand
gccacucuguacucucuua

SEQ ID NO: 2129303 - RNA, 19 nt, Homo sapiens
  misc_RNA (1)...(19): siRNA sense strand
uaugaaggcuagcucugaa

SEQ ID NO: 2129304 - RNA, 19 nt, Homo sapiens
  misc_RNA (1)...(19): siRNA sense strand
ucaaugcuguuaacuggau

SEQ ID NO: 2129305 - RNA, 19 nt, Homo sapiens
  misc_RNA (1)...(19): siRNA sense strand
gaagcagcugucauuagua

SEQ ID NO: 2129306 - RNA, 19 nt, Homo sapiens
  misc_RNA (1)...(19): siRNA sense strand
gaaaagcacagaagaacuu

SEQ ID NO: 2129307 - RNA, 19 nt, Homo sapiens
  misc_RNA (1)...(19): siRNA sense strand
agacaaucaucgacaaauc

SEQ ID NO: 2129308 - RNA, 19 nt, Homo sapiens
  misc_RNA (1)...(19): siRNA sense strand
uccaagcccugccaagaaa

SEQ ID NO: 2129309 - RNA, 19 nt, Homo sapiens
  misc_RNA (1)...(19): siRNA sense strand
gaacgugguacuuaguuag

SEQ ID NO: 2129310 - RNA, 19 nt, Homo sapiens
  misc_RNA (1)...(19): siRNA sense strand
ugaccagaauagagauaaa

SEQ ID NO: 2129311 - RNA, 19 nt, Homo sapiens
  misc_RNA (1)...(19): siRNA sense strand
gcauuagaccgcugcuauu

SEQ ID NO: 2129312 - RNA, 19 nt, Homo sapiens
  misc_RNA (1)...(19): siRNA sense strand
ugacugugguucagaaucu

SEQ ID NO: 2129313 - RNA, 19 nt, Homo sapiens
  misc_RNA (1)...(19): siRNA sense strand
ggacuugugcauucaaaca

SEQ ID NO: 2129314 - RNA, 19 nt, Homo sapiens
  misc_RNA (1)...(19): siRNA sense strand
cagagacaaucaucgacaa

SEQ ID NO: 2129315 - RNA, 19 nt, Homo sapiens
  misc_RNA (1)...(19): siRNA sense strand
gacaaucaucgacaaauca

SEQ ID NO: 2129316 - RNA, 19 nt, Homo sapiens
  misc_RNA (1)...(19): siRNA sense strand
caauagauucacucuuuga

SEQ ID NO: 2129317 - RNA, 19 nt, Homo sapiens
  misc_RNA (1)...(19): siRNA sense strand
ggucugcucuugauaaaau

SEQ ID NO: 2129318 - RNA, 19 nt, Homo sapiens
  misc_RNA (1)...(19): siRNA sense strand
guggagaaggcauuuauga

SEQ ID NO: 2129319 - RNA, 19 nt, Homo sapiens
  misc_RNA (1)...(19): siRNA sense strand
ugugaagacuaauuugaug

SEQ ID NO: 2129320 - RNA, 19 nt, Homo sapiens
  misc_RNA (1)...(19): siRNA sense strand
cacuuuggaugaaggagua

SEQ ID NO: 2129321 - RNA, 19 nt, Homo sapiens
  misc_RNA (1)...(19): siRNA sense strand
cuggaucacuuccuuugaa

SEQ ID NO: 2129322 - RNA, 19 nt, Homo sapiens
  misc_RNA (1)...(19): siRNA sense strand
ggcuagcucugaacucuuc

SEQ ID NO: 2129323 - RNA, 19 nt, Homo sapiens
  misc_RNA (1)...(19): siRNA sense strand
acaccuacuuugauagaga

SEQ ID NO: 2129324 - RNA, 19 nt, Homo sapiens
  misc_RNA (1)...(19): siRNA sense strand
uuaaugaccagaauagaga

SEQ ID NO: 2129325 - RNA, 19 nt, Homo sapiens
  misc_RNA (1)...(19): siRNA sense strand
ucacucaccauauuguaaa

SEQ ID NO: 2129326 - RNA, 19 nt, Homo sapiens
  misc_RNA (1)...(19): siRNA sense strand
gguaguugcaggagauauu

SEQ ID NO: 2129327 - RNA, 19 nt, Homo sapiens
  misc_RNA (1)...(19): siRNA sense strand
cuaauuugaugcagcuguu

SEQ ID NO: 2129328 - RNA, 19 nt, Homo sapiens
  misc_RNA (1)...(19): siRNA sense strand
guagaugcuggaaaguaua

SEQ ID NO: 2129329 - RNA, 19 nt, Homo sapiens
  misc_RNA (1)...(19): siRNA sense strand
ccaagaaaguaccaagacu

SEQ ID NO: 2129330 - RNA, 19 nt, Homo sapiens
  misc_RNA (1)...(19): siRNA sense strand
aaacauagcaacugagcau

SEQ ID NO: 2129331 - RNA, 19 nt, Homo sapiens
  misc_RNA (1)...(19): siRNA sense strand
caaaagaugugggaauugu

SEQ ID NO: 2129332 - RNA, 19 nt, Homo sapiens
  misc_RNA (1)...(19): siRNA sense strand
cugaauauccuauaguaga

SEQ ID NO: 2129333 - RNA, 19 nt, Homo sapiens
  misc_RNA (1)...(19): siRNA sense strand
ggccaaaugcuccuuuaau

SEQ ID NO: 2129334 - RNA, 19 nt, Homo sapiens
  misc_RNA (1)...(19): siRNA sense strand
ugaagagucugggaauaca

SEQ ID NO: 2129335 - RNA, 19 nt, Homo sapiens
  misc_RNA (1)...(19): siRNA sense strand
gaucuuucacucaccauau

SEQ ID NO: 2129336 - RNA, 19 nt, Homo sapiens
  misc_RNA (1)...(19): siRNA sense strand
auucaaacauagcaacuga

SEQ ID NO: 2129337 - RNA, 19 nt, Homo sapiens
  misc_RNA (1)...(19): siRNA sense strand
ggaguaggacuugugcauu

SEQ ID NO: 2129338 - RNA, 19 nt, Homo sapiens
  misc_RNA (1)...(19): siRNA sense strand
guacuuaguuaggguggau

SEQ ID NO: 2129339 - RNA, 19 nt, Homo sapiens
  misc_RNA (1)...(19): siRNA sense strand
gcaacaugccuaugauuuu

SEQ ID NO: 2129340 - RNA, 19 nt, Homo sapiens
  misc_RNA (1)...(19): siRNA sense strand
agaaucuuauggagagaaa

SEQ ID NO: 2129341 - RNA, 19 nt, Homo sapiens
  misc_RNA (1)...(19): siRNA sense strand
ggaugaaggaguaggacuu

SEQ ID NO: 2129342 - RNA, 19 nt, Homo sapiens
  misc_RNA (1)...(19): siRNA sense strand
ugauagagauguggagaag

SEQ ID NO: 2129343 - RNA, 19 nt, Homo sapiens
  misc_RNA (1)...(19): siRNA sense strand
aaagaugugggaauuguug

SEQ ID NO: 2129344 - RNA, 19 nt, Homo sapiens
  misc_RNA (1)...(19): siRNA sense strand
auuguaaacugguucagaa

SEQ ID NO: 2129345 - RNA, 19 nt, Homo sapiens
  misc_RNA (1)...(19): siRNA sense strand
gggcuucgugggacacaua

SEQ ID NO: 2129346 - RNA, 19 nt, Homo sapiens
  misc_RNA (1)...(19): siRNA sense strand
ugcaggagauauugcugua

SEQ ID NO: 2129347 - RNA, 19 nt, Homo sapiens
  misc_RNA (1)...(19): siRNA sense strand
uaaacugguucagaaaucu

SEQ ID NO: 2129348 - RNA, 19 nt, Homo sapiens
  misc_RNA (1)...(19): siRNA sense strand
gaucaagcagaguuggaaa

SEQ ID NO: 2129349 - RNA, 19 nt, Homo sapiens
  misc_RNA (1)...(19): siRNA sense strand
gaugaaggaguaggacuug

SEQ ID NO: 2129350 - RNA, 19 nt, Homo sapiens
  misc_RNA (1)...(19): siRNA sense strand
ucagagaggacacccauca

SEQ ID NO: 2129351 - RNA, 19 nt, Homo sapiens
  misc_RNA (1)...(19): siRNA sense strand
guauaugguucccuugcau

SEQ ID NO: 2129352 - RNA, 19 nt, Homo sapiens
  misc_RNA (1)...(19): siRNA sense strand
ggaauuguugcccuugaga

SEQ ID NO: 2129353 - RNA, 19 nt, Homo sapiens
  misc_RNA (1)...(19): siRNA sense strand
gggaagagaauuggagugu

SEQ ID NO: 2129354 - RNA, 19 nt, Homo sapiens
  misc_RNA (1)...(19): siRNA sense strand
gccaaaagaugugggaauu

SEQ ID NO: 2129355 - RNA, 19 nt, Homo sapiens
  misc_RNA (1)...(19): siRNA sense strand
gaacagcuguggaaagaag

SEQ ID NO: 2129356 - RNA, 19 nt, Homo sapiens
  misc_RNA (1)...(19): siRNA sense strand
gcaguaaccaguucaaguu

SEQ ID NO: 2129357 - RNA, 19 nt, Homo sapiens
  misc_RNA (1)...(19): siRNA sense strand
ggaaagaaguugcaaaaca

SEQ ID NO: 2129358 - RNA, 19 nt, Homo sapiens
  misc_RNA (1)...(19): siRNA sense strand
ugaacaaacucgaagaaca

SEQ ID NO: 2129359 - RNA, 19 nt, Homo sapiens
  misc_RNA (1)...(19): siRNA sense strand
aagaacagcuguggaaaga

SEQ ID NO: 2129360 - RNA, 19 nt, Homo sapiens
  misc_RNA (1)...(19): siRNA sense strand
gaacaaacucgaagaacag

SEQ ID NO: 2129361 - RNA, 19 nt, Homo sapiens
  misc_RNA (1)...(19): siRNA sense strand
ggaagugugucuuuugaaa

SEQ ID NO: 2129362 - RNA, 19 nt, Homo sapiens
  misc_RNA (1)...(19): siRNA sense strand
gaagaacagcuguggaaag

SEQ ID NO: 2129363 - RNA, 19 nt, Homo sapiens
  misc_RNA (1)...(19): siRNA sense strand
ugacuuggaagcaauguuu

SEQ ID NO: 2129364 - RNA, 19 nt, Homo sapiens
  misc_RNA (1)...(19): siRNA sense strand
gugaacagcuacuacucuu

SEQ ID NO: 2129365 - RNA, 19 nt, Homo sapiens
  misc_RNA (1)...(19): siRNA sense strand
guaaccaguucaaguugga

SEQ ID NO: 2129366 - RNA, 19 nt, Homo sapiens
  misc_RNA (1)...(19): siRNA sense strand
caagugcaguaaccaguuc

SEQ ID NO: 2129367 - RNA, 19 nt, Homo sapiens
  misc_RNA (1)...(19): siRNA sense strand
gaaagaaguugcaaaacac

SEQ ID NO: 2129368 - RNA, 19 nt, Homo sapiens
  misc_RNA (1)...(19): siRNA sense strand
cacuggggcuggugaauua

SEQ ID NO: 2129369 - RNA, 19 nt, Homo sapiens
  misc_RNA (1)...(19): siRNA sense strand
ucgcacauuugacuuggaa

SEQ ID NO: 2129370 - RNA, 19 nt, Homo sapiens
  misc_RNA (1)...(19): siRNA sense strand
uaccagaucuccgucaagu

SEQ ID NO: 2129371 - RNA, 19 nt, Homo sapiens
  misc_RNA (1)...(19): siRNA sense strand
ucgaagaacagcuguggaa

SEQ ID NO: 2129372 - RNA, 19 nt, Homo sapiens
  misc_RNA (1)...(19): siRNA sense strand
gaugugauccgugugaaca

SEQ ID NO: 2129373 - RNA, 19 nt, Homo sapiens
  misc_RNA (1)...(19): siRNA sense strand
cagcuacuacucuugguau

SEQ ID NO: 2129374 - RNA, 19 nt, Homo sapiens
  misc_RNA (1)...(19): siRNA sense strand
cgaagaacagcuguggaaa

SEQ ID NO: 2129375 - RNA, 19 nt, Homo sapiens
  misc_RNA (1)...(19): siRNA sense strand
cauuugacuuggaagcaau

SEQ ID NO: 2129376 - RNA, 19 nt, Homo sapiens
  misc_RNA (1)...(19): siRNA sense strand
ucaagugcaguaaccaguu

SEQ ID NO: 2129377 - RNA, 19 nt, Homo sapiens
  misc_RNA (1)...(19): siRNA sense strand
acaaagucguggacaacca

SEQ ID NO: 2129378 - RNA, 19 nt, Homo sapiens
  misc_RNA (1)...(19): siRNA sense strand
acauuugacuuggaagcaa

SEQ ID NO: 2129379 - RNA, 19 nt, Homo sapiens
  misc_RNA (1)...(19): siRNA sense strand
aaacaaagucguggacaac

SEQ ID NO: 2129380 - RNA, 19 nt, Homo sapiens
  misc_RNA (1)...(19): siRNA sense strand
gaaaucagaaaacaaaguc

SEQ ID NO: 2129381 - RNA, 19 nt, Homo sapiens
  misc_RNA (1)...(19): siRNA sense strand
aaaacaaagucguggacaa

SEQ ID NO: 2129382 - RNA, 19 nt, Homo sapiens
  misc_RNA (1)...(19): siRNA sense strand
gugggaggauggugauugc

SEQ ID NO: 2129383 - RNA, 19 nt, Homo sapiens
  misc_RNA (1)...(19): siRNA sense strand
gaacagagcuggaugacua

SEQ ID NO: 2129384 - RNA, 19 nt, Homo sapiens
  misc_RNA (1)...(19): siRNA sense strand
ggaagaacaugaacucaaa

SEQ ID NO: 2129385 - RNA, 19 nt, Homo sapiens
  misc_RNA (1)...(19): siRNA sense strand
ggaugacuauggccaauuu

SEQ ID NO: 2129386 - RNA, 19 nt, Homo sapiens
  misc_RNA (1)...(19): siRNA sense strand
gaacaugaacucaaagaug

SEQ ID NO: 2129387 - RNA, 19 nt, Homo sapiens
  misc_RNA (1)...(19): siRNA sense strand
ggaagagguugaugauuuc

SEQ ID NO: 2129388 - RNA, 19 nt, Homo sapiens
  misc_RNA (1)...(19): siRNA sense strand
ggagauggaucggaugaaa

SEQ ID NO: 2129389 - RNA, 19 nt, Homo sapiens
  misc_RNA (1)...(19): siRNA sense strand
aggaagagguugaugauuu

SEQ ID NO: 2129390 - RNA, 19 nt, Homo sapiens
  misc_RNA (1)...(19): siRNA sense strand
gaggaaagccgaagagaug

SEQ ID NO: 2129391 - RNA, 19 nt, Homo sapiens
  misc_RNA (1)...(19): siRNA sense strand
gcaagaaagagaaacguaa

SEQ ID NO: 2129392 - RNA, 19 nt, Homo sapiens
  misc_RNA (1)...(19): siRNA sense strand
acgcugagcucuaugauga

SEQ ID NO: 2129393 - RNA, 19 nt, Homo sapiens
  misc_RNA (1)...(19): siRNA sense strand
uccagaagauacuaacuua

SEQ ID NO: 2129394 - RNA, 19 nt, Homo sapiens
  misc_RNA (1)...(19): siRNA sense strand
gagaaggaguaaagguuga

SEQ ID NO: 2129395 - RNA, 19 nt, Homo sapiens
  misc_RNA (1)...(19): siRNA sense strand
gaaggaagaauaugauaca

SEQ ID NO: 2129396 - RNA, 19 nt, Homo sapiens
  misc_RNA (1)...(19): siRNA sense strand
uuaaacagcgcaacaagua

SEQ ID NO: 2129397 - RNA, 19 nt, Homo sapiens
  misc_RNA (1)...(19): siRNA sense strand
aacaugaacucaaagauga

SEQ ID NO: 2129398 - RNA, 19 nt, Homo sapiens
  misc_RNA (1)...(19): siRNA sense strand
gaacuagaaucuguguuag

SEQ ID NO: 2129399 - RNA, 19 nt, Homo sapiens
  misc_RNA (1)...(19): siRNA sense strand
gaaaugguggccuugcuaa

SEQ ID NO: 2129400 - RNA, 19 nt, Homo sapiens
  misc_RNA (1)...(19): siRNA sense strand
ucaagacagugccaaagaa

SEQ ID NO: 2129401 - RNA, 19 nt, Homo sapiens
  misc_RNA (1)...(19): siRNA sense strand
caaggaaagagaagaauga

SEQ ID NO: 2129402 - RNA, 19 nt, Homo sapiens
  misc_RNA (1)...(19): siRNA sense strand
acaaaucguucaagacaga

SEQ ID NO: 2129403 - RNA, 19 nt, Homo sapiens
  misc_RNA (1)...(19): siRNA sense strand
agaacuagaaucuguguua

SEQ ID NO: 2129404 - RNA, 19 nt, Homo sapiens
  misc_RNA (1)...(19): siRNA sense strand
ggaaagaaaaccaaagaua

SEQ ID NO: 2129405 - RNA, 19 nt, Homo sapiens
  misc_RNA (1)...(19): siRNA sense strand
gaaggaguuuggagaugga

SEQ ID NO: 2129406 - RNA, 19 nt, Homo sapiens
  misc_RNA (1)...(19): siRNA sense strand
ucacagagaucauuaaacc

SEQ ID NO: 2129407 - RNA, 19 nt, Homo sapiens
  misc_RNA (1)...(19): siRNA sense strand
gagaaggaguuuggagaug

SEQ ID NO: 2129408 - RNA, 19 nt, Homo sapiens
  misc_RNA (1)...(19): siRNA sense strand
caagaaagagaaacguaaa

SEQ ID NO: 2129409 - RNA, 19 nt, Homo sapiens
  misc_RNA (1)...(19): siRNA sense strand
ggccacaggucaugcaaga

SEQ ID NO: 2129410 - RNA, 19 nt, Homo sapiens
  misc_RNA (1)...(19): siRNA sense strand
aaauggaccuggagaagga

SEQ ID NO: 2129411 - RNA, 19 nt, Homo sapiens
  misc_RNA (1)...(19): siRNA sense strand
ggaaaugguggccuugcua

SEQ ID NO: 2129412 - RNA, 19 nt, Homo sapiens
  misc_RNA (1)...(19): siRNA sense strand
gcugguagcuuucauucgu

SEQ ID NO: 2129413 - RNA, 19 nt, Homo sapiens
  misc_RNA (1)...(19): siRNA sense strand
caaagaagcaucgggaaau

SEQ ID NO: 2129414 - RNA, 19 nt, Homo sapiens
  misc_RNA (1)...(19): siRNA sense strand
cgaggacgcugagcucuau

SEQ ID NO: 2129415 - RNA, 19 nt, Homo sapiens
  misc_RNA (1)...(19): siRNA sense strand
ugacaaaucguucaagaca

SEQ ID NO: 2129416 - RNA, 19 nt, Homo sapiens
  misc_RNA (1)...(19): siRNA sense strand
caagagcaccuucaucauc

SEQ ID NO: 2129417 - RNA, 19 nt, Homo sapiens
  misc_RNA (1)...(19): siRNA sense strand
cagaguaccugcugaacca

SEQ ID NO: 2129418 - RNA, 19 nt, Homo sapiens
  misc_RNA (1)...(19): siRNA sense strand
ggacaaagcaaggaaagag

SEQ ID NO: 2129419 - RNA, 19 nt, Homo sapiens
  misc_RNA (1)...(19): siRNA sense strand
aggaagaacuagaaucugu

SEQ ID NO: 2129420 - RNA, 19 nt, Homo sapiens
  misc_RNA (1)...(19): siRNA sense strand
caaggaagaacuagaaucu

SEQ ID NO: 2129421 - RNA, 19 nt, Homo sapiens
  misc_RNA (1)...(19): siRNA sense strand
ugaaauggaagaacaugaa

SEQ ID NO: 2129422 - RNA, 19 nt, Homo sapiens
  misc_RNA (1)...(19): siRNA sense strand
gcaaggaaagagaagaaug

SEQ ID NO: 2129423 - RNA, 19 nt, Homo sapiens
  misc_RNA (1)...(19): siRNA sense strand
aaagaagcaucgggaaaug

SEQ ID NO: 2129424 - RNA, 19 nt, Homo sapiens
  misc_RNA (1)...(19): siRNA sense strand
agacagugccaaagaauug

SEQ ID NO: 2129425 - RNA, 19 nt, Homo sapiens
  misc_RNA (1)...(19): siRNA sense strand
ggaggaagaagaaaauuuu

SEQ ID NO: 2129426 - RNA, 19 nt, Homo sapiens
  misc_RNA (1)...(19): siRNA sense strand
caacaaguagucaaagcaa

SEQ ID NO: 2129427 - RNA, 19 nt, Homo sapiens
  misc_RNA (1)...(19): siRNA sense strand
gaagaacuagaaucugugu

SEQ ID NO: 2129428 - RNA, 19 nt, Homo sapiens
  misc_RNA (1)...(19): siRNA sense strand
gaaaauccauuagaugaca

SEQ ID NO: 2129429 - RNA, 19 nt, Homo sapiens
  misc_RNA (1)...(19): siRNA sense strand
ggaugaaaaugaaauggaa

SEQ ID NO: 2129430 - RNA, 19 nt, Homo sapiens
  misc_RNA (1)...(19): siRNA sense strand
gaagaugcaccaaaacaaa

SEQ ID NO: 2129431 - RNA, 19 nt, Homo sapiens
  misc_RNA (1)...(19): siRNA sense strand
uugaugauuucccaacuuu

SEQ ID NO: 2129432 - RNA, 19 nt, Homo sapiens
  misc_RNA (1)...(19): siRNA sense strand
gcucuaugaugaccuuuac

SEQ ID NO: 2129433 - RNA, 19 nt, Homo sapiens
  misc_RNA (1)...(19): siRNA sense strand
uguacaaccugccauagug

SEQ ID NO: 2129434 - RNA, 19 nt, Homo sapiens
  misc_RNA (1)...(19): siRNA sense strand
aaagguugauccagaagau

SEQ ID NO: 2129435 - RNA, 19 nt, Homo sapiens
  misc_RNA (1)...(19): siRNA sense strand
ucaaagaagcaucgggaaa

SEQ ID NO: 2129436 - RNA, 19 nt, Homo sapiens
  misc_RNA (1)...(19): siRNA sense strand
gaaagagaagaaugagcuu

SEQ ID NO: 2129437 - RNA, 19 nt, Homo sapiens
  misc_RNA (1)...(19): siRNA sense strand
guucuuaucagcuguacaa

SEQ ID NO: 2129438 - RNA, 19 nt, Homo sapiens
  misc_RNA (1)...(19): siRNA sense strand
gcugaaccacaaacaauga

SEQ ID NO: 2129439 - RNA, 19 nt, Homo sapiens
  misc_RNA (1)...(19): siRNA sense strand
gaagauaguccccaggaaa

SEQ ID NO: 2129440 - RNA, 19 nt, Homo sapiens
  misc_RNA (1)...(19): siRNA sense strand
ggaggaugguaaagacagu

SEQ ID NO: 2129441 - RNA, 19 nt, Homo sapiens
  misc_RNA (1)...(19): siRNA sense strand
guacaaccugccauaguga

SEQ ID NO: 2129442 - RNA, 19 nt, Homo sapiens
  misc_RNA (1)...(19): siRNA sense strand
acaaugaguguucuuauca

SEQ ID NO: 2129443 - RNA, 19 nt, Homo sapiens
  misc_RNA (1)...(19): siRNA sense strand
aguaaagguugauccagaa

SEQ ID NO: 2129444 - RNA, 19 nt, Homo sapiens
  misc_RNA (1)...(19): siRNA sense strand
cauggaaggaagaauauga

SEQ ID NO: 2129445 - RNA, 19 nt, Homo sapiens
  misc_RNA (1)...(19): siRNA sense strand
caugaagaaucacgagaag

SEQ ID NO: 2129446 - RNA, 19 nt, Homo sapiens
  misc_RNA (1)...(19): siRNA sense strand
ggaaggaagaauaugauac

SEQ ID NO: 2129447 - RNA, 19 nt, Homo sapiens
  misc_RNA (1)...(19): siRNA sense strand
gcagagaaggcgaggaaag

SEQ ID NO: 2129448 - RNA, 19 nt, Homo sapiens
  misc_RNA (1)...(19): siRNA sense strand
guagucaaagcaagaaaga

SEQ ID NO: 2129449 - RNA, 19 nt, Homo sapiens
  misc_RNA (1)...(19): siRNA sense strand
gcaacaaguagucaaagca

SEQ ID NO: 2129450 - RNA, 19 nt, Homo sapiens
  misc_RNA (1)...(19): siRNA sense strand
aaccugccauagugaauuu

SEQ ID NO: 2129451 - RNA, 19 nt, Homo sapiens
  misc_RNA (1)...(19): siRNA sense strand
ugaagaaucacgagaaguc

SEQ ID NO: 2129452 - RNA, 19 nt, Homo sapiens
  misc_RNA (1)...(19): siRNA sense strand
ugugacaaaucguucaaga

SEQ ID NO: 2129453 - RNA, 19 nt, Homo sapiens
  misc_RNA (1)...(19): siRNA sense strand
gaaaaggccaugaagaauc

SEQ ID NO: 2129454 - RNA, 19 nt, Homo sapiens
  misc_RNA (1)...(19): siRNA sense strand
ucaaagcaagaaagagaaa

SEQ ID NO: 2129455 - RNA, 19 nt, Homo sapiens
  misc_RNA (1)...(19): siRNA sense strand
caaagaauuggaagauagu

SEQ ID NO: 2129456 - RNA, 19 nt, Homo sapiens
  misc_RNA (1)...(19): siRNA sense strand
caagacagugccaaagaau

SEQ ID NO: 2129457 - RNA, 19 nt, Homo sapiens
  misc_RNA (1)...(19): siRNA sense strand
uccauuagaugacaauucu

SEQ ID NO: 2129458 - RNA, 19 nt, Homo sapiens
  misc_RNA (1)...(19): siRNA sense strand
gaagaaucacgagaaguca

SEQ ID NO: 2129459 - RNA, 19 nt, Homo sapiens
  misc_RNA (1)...(19): siRNA sense strand
gacaaagcaaggaaagaga

SEQ ID NO: 2129460 - RNA, 19 nt, Homo sapiens
  misc_RNA (1)...(19): siRNA sense strand
gcaccuucaucaucgucuu

SEQ ID NO: 2129461 - RNA, 19 nt, Homo sapiens
  misc_RNA (1)...(19): siRNA sense strand
ccagaagauacuaacuuaa

SEQ ID NO: 2129462 - RNA, 19 nt, Homo sapiens
  misc_RNA (1)...(19): siRNA sense strand
cauuagaugacaauucuga

SEQ ID NO: 2129463 - RNA, 19 nt, Homo sapiens
  misc_RNA (1)...(19): siRNA sense strand
aagaugaggaggaugguaa

SEQ ID NO: 2129464 - RNA, 19 nt, Homo sapiens
  misc_RNA (1)...(19): siRNA sense strand
cagaaaaggccaugaagaa

SEQ ID NO: 2129465 - RNA, 19 nt, Homo sapiens
  misc_RNA (1)...(19): siRNA sense strand
gcaagagcaccuucaucau

SEQ ID NO: 2129466 - RNA, 19 nt, Homo sapiens
  misc_RNA (1)...(19): siRNA sense strand
guaaauggaccuggagaag

SEQ ID NO: 2129467 - RNA, 19 nt, Homo sapiens
  misc_RNA (1)...(19): siRNA sense strand
gaaaacuuguggaagaaca

SEQ ID NO: 2129468 - RNA, 19 nt, Homo sapiens
  misc_RNA (1)...(19): siRNA sense strand
ggaagaaauggaagaugca

SEQ ID NO: 2129469 - RNA, 19 nt, Homo sapiens
  misc_RNA (1)...(19): siRNA sense strand
ccaugaagaaucacgagaa

SEQ ID NO: 2129470 - RNA, 19 nt, Homo sapiens
  misc_RNA (1)...(19): siRNA sense strand
ugaggaggaugguaaagac

SEQ ID NO: 2129471 - RNA, 19 nt, Homo sapiens
  misc_RNA (1)...(19): siRNA sense strand
aaaaggccaugaagaauca

SEQ ID NO: 2129472 - RNA, 19 nt, Homo sapiens
  misc_RNA (1)...(19): siRNA sense strand
agucaaagcaagaaagaga

SEQ ID NO: 2129473 - RNA, 19 nt, Homo sapiens
  misc_RNA (1)...(19): siRNA sense strand
caaccugccauagugaauu

SEQ ID NO: 2129474 - RNA, 19 nt, Homo sapiens
  misc_RNA (1)...(19): siRNA sense strand
uagaggaagagguugauga

SEQ ID NO: 2129475 - RNA, 19 nt, Homo sapiens
  misc_RNA (1)...(19): siRNA sense strand
uugcauggaaggaagaaua

SEQ ID NO: 2129476 - RNA, 19 nt, Homo sapiens
  misc_RNA (1)...(19): siRNA sense strand
agaugacaauucugaggaa

SEQ ID NO: 2129477 - RNA, 19 nt, Homo sapiens
  misc_RNA (1)...(19): siRNA sense strand
gaaauggaagaacaugaac

SEQ ID NO: 2129478 - RNA, 19 nt, Homo sapiens
  misc_RNA (1)...(19): siRNA sense strand
acaaguagucaaagcaaga

SEQ ID NO: 2129479 - RNA, 19 nt, Homo sapiens
  misc_RNA (1)...(19): siRNA sense strand
cauagugaauuuccaucuc

SEQ ID NO: 2129480 - RNA, 19 nt, Homo sapiens
  misc_RNA (1)...(19): siRNA sense strand
uaaaccaugugaugaucca

SEQ ID NO: 2129481 - RNA, 19 nt, Homo sapiens
  misc_RNA (1)...(19): siRNA sense strand
gcuggaggaggaagaagaa

SEQ ID NO: 2129482 - RNA, 19 nt, Homo sapiens
  misc_RNA (1)...(19): siRNA sense strand
acaaagcaaggaaagagaa

SEQ ID NO: 2129483 - RNA, 19 nt, Homo sapiens
  misc_RNA (1)...(19): siRNA sense strand
gaacagagcuggaugacua

SEQ ID NO: 2129484 - RNA, 19 nt, Homo sapiens
  misc_RNA (1)...(19): siRNA sense strand
ggaagaacaugaacucaaa

SEQ ID NO: 2129485 - RNA, 19 nt, Homo sapiens
  misc_RNA (1)...(19): siRNA sense strand
ggaugacuauggccaauuu

SEQ ID NO: 2129486 - RNA, 19 nt, Homo sapiens
  misc_RNA (1)...(19): siRNA sense strand
gaacaugaacucaaagaug

SEQ ID NO: 2129487 - RNA, 19 nt, Homo sapiens
  misc_RNA (1)...(19): siRNA sense strand
ggaagagguugaugauuuc

SEQ ID NO: 2129488 - RNA, 19 nt, Homo sapiens
  misc_RNA (1)...(19): siRNA sense strand
ggagauggaucggaugaaa

SEQ ID NO: 2129489 - RNA, 19 nt, Homo sapiens
  misc_RNA (1)...(19): siRNA sense strand
aggaagagguugaugauuu

SEQ ID NO: 2129490 - RNA, 19 nt, Homo sapiens
  misc_RNA (1)...(19): siRNA sense strand
gaggaaagccgaagagaug

SEQ ID NO: 2129491 - RNA, 19 nt, Homo sapiens
  misc_RNA (1)...(19): siRNA sense strand
gcaagaaagagaaacguaa

SEQ ID NO: 2129492 - RNA, 19 nt, Homo sapiens
  misc_RNA (1)...(19): siRNA sense strand
acgcugagcucuaugauga

SEQ ID NO: 2129493 - RNA, 19 nt, Homo sapiens
  misc_RNA (1)...(19): siRNA sense strand
uccagaagauacuaacuua

SEQ ID NO: 2129494 - RNA, 19 nt, Homo sapiens
  misc_RNA (1)...(19): siRNA sense strand
gagaaggaguaaagguuga

SEQ ID NO: 2129495 - RNA, 19 nt, Homo sapiens
  misc_RNA (1)...(19): siRNA sense strand
gaaggaagaauaugauaca

SEQ ID NO: 2129496 - RNA, 19 nt, Homo sapiens
  misc_RNA (1)...(19): siRNA sense strand
uuaaacagcgcaacaagua

SEQ ID NO: 2129497 - RNA, 19 nt, Homo sapiens
  misc_RNA (1)...(19): siRNA sense strand
gaacuagaaucuguguuag

SEQ ID NO: 2129498 - RNA, 19 nt, Homo sapiens
  misc_RNA (1)...(19): siRNA sense strand
aacaugaacucaaagauga

SEQ ID NO: 2129499 - RNA, 19 nt, Homo sapiens
  misc_RNA (1)...(19): siRNA sense strand
gaaaugguggccuugcuaa

SEQ ID NO: 2129500 - RNA, 19 nt, Homo sapiens
  misc_RNA (1)...(19): siRNA sense strand
ucaagacagugccaaagaa

SEQ ID NO: 2129501 - RNA, 19 nt, Homo sapiens
  misc_RNA (1)...(19): siRNA sense strand
caaggaaagagaagaauga

SEQ ID NO: 2129502 - RNA, 19 nt, Homo sapiens
  misc_RNA (1)...(19): siRNA sense strand
acaaaucguucaagacaga

SEQ ID NO: 2129503 - RNA, 19 nt, Homo sapiens
  misc_RNA (1)...(19): siRNA sense strand
agaacuagaaucuguguua

SEQ ID NO: 2129504 - RNA, 19 nt, Homo sapiens
  misc_RNA (1)...(19): siRNA sense strand
ggaaagaaaaccaaagaua

SEQ ID NO: 2129505 - RNA, 19 nt, Homo sapiens
  misc_RNA (1)...(19): siRNA sense strand
gaaggaguuuggagaugga

SEQ ID NO: 2129506 - RNA, 19 nt, Homo sapiens
  misc_RNA (1)...(19): siRNA sense strand
ucacagagaucauuaaacc

SEQ ID NO: 2129507 - RNA, 19 nt, Homo sapiens
  misc_RNA (1)...(19): siRNA sense strand
gagaaggaguuuggagaug

SEQ ID NO: 2129508 - RNA, 19 nt, Homo sapiens
  misc_RNA (1)...(19): siRNA sense strand
caagaaagagaaacguaaa

SEQ ID NO: 2129509 - RNA, 19 nt, Homo sapiens
  misc_RNA (1)...(19): siRNA sense strand
ggccacaggucaugcaaga

SEQ ID NO: 2129510 - RNA, 19 nt, Homo sapiens
  misc_RNA (1)...(19): siRNA sense strand
aaauggaccuggagaagga

SEQ ID NO: 2129511 - RNA, 19 nt, Homo sapiens
  misc_RNA (1)...(19): siRNA sense strand
ugaaaugauugccaaggaa

SEQ ID NO: 2129512 - RNA, 19 nt, Homo sapiens
  misc_RNA (1)...(19): siRNA sense strand
ggaaaugguggccuugcua

SEQ ID NO: 2129513 - RNA, 19 nt, Homo sapiens
  misc_RNA (1)...(19): siRNA sense strand
gcugguagcuuucauucgu

SEQ ID NO: 2129514 - RNA, 19 nt, Homo sapiens
  misc_RNA (1)...(19): siRNA sense strand
caaagaagcaucgggaaau

SEQ ID NO: 2129515 - RNA, 19 nt, Homo sapiens
  misc_RNA (1)...(19): siRNA sense strand
cgaggacgcugagcucuau

SEQ ID NO: 2129516 - RNA, 19 nt, Homo sapiens
  misc_RNA (1)...(19): siRNA sense strand
ugacaaaucguucaagaca

SEQ ID NO: 2129517 - RNA, 19 nt, Homo sapiens
  misc_RNA (1)...(19): siRNA sense strand
caagagcaccuucaucauc

SEQ ID NO: 2129518 - RNA, 19 nt, Homo sapiens
  misc_RNA (1)...(19): siRNA sense strand
cagaguaccugcugaacca

SEQ ID NO: 2129519 - RNA, 19 nt, Homo sapiens
  misc_RNA (1)...(19): siRNA sense strand
ggacaaagcaaggaaagag

SEQ ID NO: 2129520 - RNA, 19 nt, Homo sapiens
  misc_RNA (1)...(19): siRNA sense strand
caaggaagaacuagaaucu

SEQ ID NO: 2129521 - RNA, 19 nt, Homo sapiens
  misc_RNA (1)...(19): siRNA sense strand
aggaagaacuagaaucugu

SEQ ID NO: 2129522 - RNA, 19 nt, Homo sapiens
  misc_RNA (1)...(19): siRNA sense strand
ugaaauggaagaacaugaa

SEQ ID NO: 2129523 - RNA, 19 nt, Homo sapiens
  misc_RNA (1)...(19): siRNA sense strand
gcaaggaaagagaagaaug

SEQ ID NO: 2129524 - RNA, 19 nt, Homo sapiens
  misc_RNA (1)...(19): siRNA sense strand
aaagaagcaucgggaaaug

SEQ ID NO: 2129525 - RNA, 19 nt, Homo sapiens
  misc_RNA (1)...(19): siRNA sense strand
agacagugccaaagaauug

SEQ ID NO: 2129526 - RNA, 19 nt, Homo sapiens
  misc_RNA (1)...(19): siRNA sense strand
gaagaacuagaaucugugu

SEQ ID NO: 2129527 - RNA, 19 nt, Homo sapiens
  misc_RNA (1)...(19): siRNA sense strand
caacaaguagucaaagcaa

SEQ ID NO: 2129528 - RNA, 19 nt, Homo sapiens
  misc_RNA (1)...(19): siRNA sense strand
ggaggaagaagaaaauuuu

SEQ ID NO: 2129529 - RNA, 19 nt, Homo sapiens
  misc_RNA (1)...(19): siRNA sense strand
gaaaauccauuagaugaca

SEQ ID NO: 2129530 - RNA, 19 nt, Homo sapiens
  misc_RNA (1)...(19): siRNA sense strand
ggaugaaaaugaaauggaa

SEQ ID NO: 2129531 - RNA, 19 nt, Homo sapiens
  misc_RNA (1)...(19): siRNA sense strand
uugaugauuucccaacuuu

SEQ ID NO: 2129532 - RNA, 19 nt, Homo sapiens
  misc_RNA (1)...(19): siRNA sense strand
gaagaugcaccaaaacaaa

SEQ ID NO: 2129533 - RNA, 19 nt, Homo sapiens
  misc_RNA (1)...(19): siRNA sense strand
gcucuaugaugaccuuuac

SEQ ID NO: 2129534 - RNA, 19 nt, Homo sapiens
  misc_RNA (1)...(19): siRNA sense strand
uguacaaccugccauagug

SEQ ID NO: 2129535 - RNA, 19 nt, Homo sapiens
  misc_RNA (1)...(19): siRNA sense strand
aaagguugauccagaagau

SEQ ID NO: 2129536 - RNA, 19 nt, Homo sapiens
  misc_RNA (1)...(19): siRNA sense strand
ucaaagaagcaucgggaaa

SEQ ID NO: 2129537 - RNA, 19 nt, Homo sapiens
  misc_RNA (1)...(19): siRNA sense strand
gaaagagaagaaugagcuu

SEQ ID NO: 2129538 - RNA, 19 nt, Homo sapiens
  misc_RNA (1)...(19): siRNA sense strand
guucuuaucagcuguacaa

SEQ ID NO: 2129539 - RNA, 19 nt, Homo sapiens
  misc_RNA (1)...(19): siRNA sense strand
gcugaaccacaaacaauga

SEQ ID NO: 2129540 - RNA, 19 nt, Homo sapiens
  misc_RNA (1)...(19): siRNA sense strand
gaagauaguccccaggaaa

SEQ ID NO: 2129541 - RNA, 19 nt, Homo sapiens
  misc_RNA (1)...(19): siRNA sense strand
ggaggaugguaaagacagu

SEQ ID NO: 2129542 - RNA, 19 nt, Homo sapiens
  misc_RNA (1)...(19): siRNA sense strand
guacaaccugccauaguga

SEQ ID NO: 2129543 - RNA, 19 nt, Homo sapiens
  misc_RNA (1)...(19): siRNA sense strand
acaaugaguguucuuauca

SEQ ID NO: 2129544 - RNA, 19 nt, Homo sapiens
  misc_RNA (1)...(19): siRNA sense strand
aguaaagguugauccagaa

SEQ ID NO: 2129545 - RNA, 19 nt, Homo sapiens
  misc_RNA (1)...(19): siRNA sense strand
cauggaaggaagaauauga

SEQ ID NO: 2129546 - RNA, 19 nt, Homo sapiens
  misc_RNA (1)...(19): siRNA sense strand
caugaagaaucacgagaag

SEQ ID NO: 2129547 - RNA, 19 nt, Homo sapiens
  misc_RNA (1)...(19): siRNA sense strand
ggaaggaagaauaugauac

SEQ ID NO: 2129548 - RNA, 19 nt, Homo sapiens
  misc_RNA (1)...(19): siRNA sense strand
gcagagaaggcgaggaaag

SEQ ID NO: 2129549 - RNA, 19 nt, Homo sapiens
  misc_RNA (1)...(19): siRNA sense strand
guagucaaagcaagaaaga

SEQ ID NO: 2129550 - RNA, 19 nt, Homo sapiens
  misc_RNA (1)...(19): siRNA sense strand
gcaacaaguagucaaagca

SEQ ID NO: 2129551 - RNA, 19 nt, Homo sapiens
  misc_RNA (1)...(19): siRNA sense strand
aaccugccauagugaauuu

SEQ ID NO: 2129552 - RNA, 19 nt, Homo sapiens
  misc_RNA (1)...(19): siRNA sense strand
ugaagaaucacgagaaguc

SEQ ID NO: 2129553 - RNA, 19 nt, Homo sapiens
  misc_RNA (1)...(19): siRNA sense strand
ugugacaaaucguucaaga

SEQ ID NO: 2129554 - RNA, 19 nt, Homo sapiens
  misc_RNA (1)...(19): siRNA sense strand
gaaaaggccaugaagaauc

SEQ ID NO: 2129555 - RNA, 19 nt, Homo sapiens
  misc_RNA (1)...(19): siRNA sense strand
ucaaagcaagaaagagaaa

SEQ ID NO: 2129556 - RNA, 19 nt, Homo sapiens
  misc_RNA (1)...(19): siRNA sense strand
caaagaauuggaagauagu

SEQ ID NO: 2129557 - RNA, 19 nt, Homo sapiens
  misc_RNA (1)...(19): siRNA sense strand
caagacagugccaaagaau

SEQ ID NO: 2129558 - RNA, 19 nt, Homo sapiens
  misc_RNA (1)...(19): siRNA sense strand
uccauuagaugacaauucu

SEQ ID NO: 2129559 - RNA, 19 nt, Homo sapiens
  misc_RNA (1)...(19): siRNA sense strand
gaagaaucacgagaaguca

SEQ ID NO: 2129560 - RNA, 19 nt, Homo sapiens
  misc_RNA (1)...(19): siRNA sense strand
gacaaagcaaggaaagaga

SEQ ID NO: 2129561 - RNA, 19 nt, Homo sapiens
  misc_RNA (1)...(19): siRNA sense strand
gcaccuucaucaucgucuu

SEQ ID NO: 2129562 - RNA, 19 nt, Homo sapiens
  misc_RNA (1)...(19): siRNA sense strand
ccagaagauacuaacuuaa

SEQ ID NO: 2129563 - RNA, 19 nt, Homo sapiens
  misc_RNA (1)...(19): siRNA sense strand
cauuagaugacaauucuga

SEQ ID NO: 2129564 - RNA, 19 nt, Homo sapiens
  misc_RNA (1)...(19): siRNA sense strand
aagaugaggaggaugguaa

SEQ ID NO: 2129565 - RNA, 19 nt, Homo sapiens
  misc_RNA (1)...(19): siRNA sense strand
cagaaaaggccaugaagaa

SEQ ID NO: 2129566 - RNA, 19 nt, Homo sapiens
  misc_RNA (1)...(19): siRNA sense strand
gcaagagcaccuucaucau

SEQ ID NO: 2129567 - RNA, 19 nt, Homo sapiens
  misc_RNA (1)...(19): siRNA sense strand
guaaauggaccuggagaag

SEQ ID NO: 2129568 - RNA, 19 nt, Homo sapiens
  misc_RNA (1)...(19): siRNA sense strand
gaaaacuuguggaagaaca

SEQ ID NO: 2129569 - RNA, 19 nt, Homo sapiens
  misc_RNA (1)...(19): siRNA sense strand
ggaagaaauggaagaugca

SEQ ID NO: 2129570 - RNA, 19 nt, Homo sapiens
  misc_RNA (1)...(19): siRNA sense strand
ccaugaagaaucacgagaa

SEQ ID NO: 2129571 - RNA, 19 nt, Homo sapiens
  misc_RNA (1)...(19): siRNA sense strand
ugaggaggaugguaaagac

SEQ ID NO: 2129572 - RNA, 19 nt, Homo sapiens
  misc_RNA (1)...(19): siRNA sense strand
uugaaaugauugccaagga

SEQ ID NO: 2129573 - RNA, 19 nt, Homo sapiens
  misc_RNA (1)...(19): siRNA sense strand
agucaaagcaagaaagaga

SEQ ID NO: 2129574 - RNA, 19 nt, Homo sapiens
  misc_RNA (1)...(19): siRNA sense strand
uugcauggaaggaagaaua

SEQ ID NO: 2129575 - RNA, 19 nt, Homo sapiens
  misc_RNA (1)...(19): siRNA sense strand
caaccugccauagugaauu

SEQ ID NO: 2129576 - RNA, 19 nt, Homo sapiens
  misc_RNA (1)...(19): siRNA sense strand
agaugacaauucugaggaa

SEQ ID NO: 2129577 - RNA, 19 nt, Homo sapiens
  misc_RNA (1)...(19): siRNA sense strand
aaaaggccaugaagaauca

SEQ ID NO: 2129578 - RNA, 19 nt, Homo sapiens
  misc_RNA (1)...(19): siRNA sense strand
uagaggaagagguugauga

SEQ ID NO: 2129579 - RNA, 19 nt, Homo sapiens
  misc_RNA (1)...(19): siRNA sense strand
uaaaccaugugaugaucca

SEQ ID NO: 2129580 - RNA, 19 nt, Homo sapiens
  misc_RNA (1)...(19): siRNA sense strand
acaaguagucaaagcaaga

SEQ ID NO: 2129581 - RNA, 19 nt, Homo sapiens
  misc_RNA (1)...(19): siRNA sense strand
cauagugaauuuccaucuc

SEQ ID NO: 2129582 - RNA, 19 nt, Homo sapiens
  misc_RNA (1)...(19): siRNA sense strand
acaaagcaaggaaagagaa

SEQ ID NO: 2129583 - RNA, 19 nt, Homo sapiens
  misc_RNA (1)...(19): siRNA sense strand
gaacauggaugauuaugaa

SEQ ID NO: 2129584 - RNA, 19 nt, Homo sapiens
  misc_RNA (1)...(19): siRNA sense strand
gcagauggauucuauauau

SEQ ID NO: 2129585 - RNA, 19 nt, Homo sapiens
  misc_RNA (1)...(19): siRNA sense strand
gaacacugcuugcuuggua

SEQ ID NO: 2129586 - RNA, 19 nt, Homo sapiens
  misc_RNA (1)...(19): siRNA sense strand
guaggaacauggaugauua

SEQ ID NO: 2129587 - RNA, 19 nt, Homo sapiens
  misc_RNA (1)...(19): siRNA sense strand
gcagugacauauuuaauga

SEQ ID NO: 2129588 - RNA, 19 nt, Homo sapiens
  misc_RNA (1)...(19): siRNA sense strand
gcagaaacauucacugaug

SEQ ID NO: 2129589 - RNA, 19 nt, Homo sapiens
  misc_RNA (1)...(19): siRNA sense strand
gaucaaaacugcacuaauu

SEQ ID NO: 2129590 - RNA, 19 nt, Homo sapiens
  misc_RNA (1)...(19): siRNA sense strand
guaauucucugcauugcua

SEQ ID NO: 2129591 - RNA, 19 nt, Homo sapiens
  misc_RNA (1)...(19): siRNA sense strand
gagauugccugcuuccuuu

SEQ ID NO: 2129592 - RNA, 19 nt, Homo sapiens
  misc_RNA (1)...(19): siRNA sense strand
gaaagcagaugcagaagag

SEQ ID NO: 2129593 - RNA, 19 nt, Homo sapiens
  misc_RNA (1)...(19): siRNA sense strand
ggaaccagcuucagacaau

SEQ ID NO: 2129594 - RNA, 19 nt, Homo sapiens
  misc_RNA (1)...(19): siRNA sense strand
gaagagaauuuggaagaug

SEQ ID NO: 2129595 - RNA, 19 nt, Homo sapiens
  misc_RNA (1)...(19): siRNA sense strand
gauggaaucaugccaauuu

SEQ ID NO: 2129596 - RNA, 19 nt, Homo sapiens
  misc_RNA (1)...(19): siRNA sense strand
cagcauagacuugugauua

SEQ ID NO: 2129597 - RNA, 19 nt, Homo sapiens
  misc_RNA (1)...(19): siRNA sense strand
caucagacuuaguuaauga

SEQ ID NO: 2129598 - RNA, 19 nt, Homo sapiens
  misc_RNA (1)...(19): siRNA sense strand
gcuaauaacaggacugaaa

SEQ ID NO: 2129599 - RNA, 19 nt, Homo sapiens
  misc_RNA (1)...(19): siRNA sense strand
guucaggauucguguauuu

SEQ ID NO: 2129600 - RNA, 19 nt, Homo sapiens
  misc_RNA (1)...(19): siRNA sense strand
gcagucauaugcaagauca

SEQ ID NO: 2129601 - RNA, 19 nt, Homo sapiens
  misc_RNA (1)...(19): siRNA sense strand
ucaaacuucucagauguua

SEQ ID NO: 2129602 - RNA, 19 nt, Homo sapiens
  misc_RNA (1)...(19): siRNA sense strand
gagaauggaaagaacguua

SEQ ID NO: 2129603 - RNA, 19 nt, Homo sapiens
  misc_RNA (1)...(19): siRNA sense strand
gaacaagcauuuuaucuag

SEQ ID NO: 2129604 - RNA, 19 nt, Homo sapiens
  misc_RNA (1)...(19): siRNA sense strand
caaccguucugcauucaaa

SEQ ID NO: 2129605 - RNA, 19 nt, Homo sapiens
  misc_RNA (1)...(19): siRNA sense strand
uagcacuacuccugucuua

SEQ ID NO: 2129606 - RNA, 19 nt, Homo sapiens
  misc_RNA (1)...(19): siRNA sense strand
gcauagacuugugauuauu

SEQ ID NO: 2129607 - RNA, 19 nt, Homo sapiens
  misc_RNA (1)...(19): siRNA sense strand
aaacugcacuaauugagaa

SEQ ID NO: 2129608 - RNA, 19 nt, Homo sapiens
  misc_RNA (1)...(19): siRNA sense strand
ugguaucucugcuuucuua

SEQ ID NO: 2129609 - RNA, 19 nt, Homo sapiens
  misc_RNA (1)...(19): siRNA sense strand
ggaggagguucguaaagug

SEQ ID NO: 2129610 - RNA, 19 nt, Homo sapiens
  misc_RNA (1)...(19): siRNA sense strand
gaaagcaucaaguauaauc

SEQ ID NO: 2129611 - RNA, 19 nt, Homo sapiens
  misc_RNA (1)...(19): siRNA sense strand
uaucucugcuuucuuauug

SEQ ID NO: 2129612 - RNA, 19 nt, Homo sapiens
  misc_RNA (1)...(19): siRNA sense strand
cagaaacauucacugauga

SEQ ID NO: 2129613 - RNA, 19 nt, Homo sapiens
  misc_RNA (1)...(19): siRNA sense strand
gcuuauacaucuauuaugg

SEQ ID NO: 2129614 - RNA, 19 nt, Homo sapiens
  misc_RNA (1)...(19): siRNA sense strand
caaguacaauggcagauuc

SEQ ID NO: 2129615 - RNA, 19 nt, Homo sapiens
  misc_RNA (1)...(19): siRNA sense strand
cagccaaacugaugacaga

SEQ ID NO: 2129616 - RNA, 19 nt, Homo sapiens
  misc_RNA (1)...(19): siRNA sense strand
gacgauaucucucgauguc

SEQ ID NO: 2129617 - RNA, 19 nt, Homo sapiens
  misc_RNA (1)...(19): siRNA sense strand
ugaaugaaagcaucaagua

SEQ ID NO: 2129618 - RNA, 19 nt, Homo sapiens
  misc_RNA (1)...(19): siRNA sense strand
ugggauagcugcugcaaau

SEQ ID NO: 2129619 - RNA, 19 nt, Homo sapiens
  misc_RNA (1)...(19): siRNA sense strand
gagucaaacuucucagaug

SEQ ID NO: 2129620 - RNA, 19 nt, Homo sapiens
  misc_RNA (1)...(19): siRNA sense strand
caaguauaaucacccauug

SEQ ID NO: 2129621 - RNA, 19 nt, Homo sapiens
  misc_RNA (1)...(19): siRNA sense strand
gaaacagcauagacuugug

SEQ ID NO: 2129622 - RNA, 19 nt, Homo sapiens
  misc_RNA (1)...(19): siRNA sense strand
uaugggagaugaugauaug

SEQ ID NO: 2129623 - RNA, 19 nt, Homo sapiens
  misc_RNA (1)...(19): siRNA sense strand
guuugaaucugcucgguuu

SEQ ID NO: 2129624 - RNA, 19 nt, Homo sapiens
  misc_RNA (1)...(19): siRNA sense strand
gcacuacuccugucuuauc

SEQ ID NO: 2129625 - RNA, 19 nt, Homo sapiens
  misc_RNA (1)...(19): siRNA sense strand
guacaauggcagauucuuu

SEQ ID NO: 2129626 - RNA, 19 nt, Homo sapiens
  misc_RNA (1)...(19): siRNA sense strand
ccaaacugaugacagagaa

SEQ ID NO: 2129627 - RNA, 19 nt, Homo sapiens
  misc_RNA (1)...(19): siRNA sense strand
gaaccagcuucagacaauu

SEQ ID NO: 2129628 - RNA, 19 nt, Homo sapiens
  misc_RNA (1)...(19): siRNA sense strand
gaauggaaccagcuucaga

SEQ ID NO: 2129629 - RNA, 19 nt, Homo sapiens
  misc_RNA (1)...(19): siRNA sense strand
gaacguuauggacacaaua

SEQ ID NO: 2129630 - RNA, 19 nt, Homo sapiens
  misc_RNA (1)...(19): siRNA sense strand
acaccuccuuuaugucuua

SEQ ID NO: 2129631 - RNA, 19 nt, Homo sapiens
  misc_RNA (1)...(19): siRNA sense strand
gaaugaaagcaucaaguau

SEQ ID NO: 2129632 - RNA, 19 nt, Homo sapiens
  misc_RNA (1)...(19): siRNA sense strand
gauguuaguacgacaauau

SEQ ID NO: 2129633 - RNA, 19 nt, Homo sapiens
  misc_RNA (1)...(19): siRNA sense strand
agacuuaguuaaugaagga

SEQ ID NO: 2129634 - RNA, 19 nt, Homo sapiens
  misc_RNA (1)...(19): siRNA sense strand
gauaugacaucagacuuag

SEQ ID NO: 2129635 - RNA, 19 nt, Homo sapiens
  misc_RNA (1)...(19): siRNA sense strand
gauagcugcugcaaauaca

SEQ ID NO: 2129636 - RNA, 19 nt, Homo sapiens
  misc_RNA (1)...(19): siRNA sense strand
cagaagagaauuuggaaga

SEQ ID NO: 2129637 - RNA, 19 nt, Homo sapiens
  misc_RNA (1)...(19): siRNA sense strand
aaauauaccagggcuaaua

SEQ ID NO: 2129638 - RNA, 19 nt, Homo sapiens
  misc_RNA (1)...(19): siRNA sense strand
ucucagauguuaauaccaa

SEQ ID NO: 2129639 - RNA, 19 nt, Homo sapiens
  misc_RNA (1)...(19): siRNA sense strand
ggauucguguauuuaacua

SEQ ID NO: 2129640 - RNA, 19 nt, Homo sapiens
  misc_RNA (1)...(19): siRNA sense strand
ucagagugcacauucuuua

SEQ ID NO: 2129641 - RNA, 19 nt, Homo sapiens
  misc_RNA (1)...(19): siRNA sense strand
gaaagggaccggauagaac

SEQ ID NO: 2129642 - RNA, 19 nt, Homo sapiens
  misc_RNA (1)...(19): siRNA sense strand
gagaauagcaacauuacag

SEQ ID NO: 2129643 - RNA, 19 nt, Homo sapiens
  misc_RNA (1)...(19): siRNA sense strand
caagaauacucaaccaacu

SEQ ID NO: 2129644 - RNA, 19 nt, Homo sapiens
  misc_RNA (1)...(19): siRNA sense strand
ggaacauggaugauuauga

SEQ ID NO: 2129645 - RNA, 19 nt, Homo sapiens
  misc_RNA (1)...(19): siRNA sense strand
aaagugcccuacagaguau

SEQ ID NO: 2129646 - RNA, 19 nt, Homo sapiens
  misc_RNA (1)...(19): siRNA sense strand
ucaucgauauggagacuuu

SEQ ID NO: 2129647 - RNA, 19 nt, Homo sapiens
  misc_RNA (1)...(19): siRNA sense strand
gcaccuauuugcugauuuu

SEQ ID NO: 2129648 - RNA, 19 nt, Homo sapiens
  misc_RNA (1)...(19): siRNA sense strand
cauggauucucuuaccuuu

SEQ ID NO: 2129649 - RNA, 19 nt, Homo sapiens
  misc_RNA (1)...(19): siRNA sense strand
gauauggagacuuuaagaa

SEQ ID NO: 2129650 - RNA, 19 nt, Homo sapiens
  misc_RNA (1)...(19): siRNA sense strand
ggugguaauucucugcauu

SEQ ID NO: 2129651 - RNA, 19 nt, Homo sapiens
  misc_RNA (1)...(19): siRNA sense strand
ucaucuaucucucacaaga

SEQ ID NO: 2129652 - RNA, 19 nt, Homo sapiens
  misc_RNA (1)...(19): siRNA sense strand
ucaccagacugaugcuuau

SEQ ID NO: 2129653 - RNA, 19 nt, Homo sapiens
  misc_RNA (1)...(19): siRNA sense strand
gagaaaauguguugauaca

SEQ ID NO: 2129654 - RNA, 19 nt, Homo sapiens
  misc_RNA (1)...(19): siRNA sense strand
uauaaucacccauugagaa

SEQ ID NO: 2129655 - RNA, 19 nt, Homo sapiens
  misc_RNA (1)...(19): siRNA sense strand
agagaaagcagaugcagaa

SEQ ID NO: 2129656 - RNA, 19 nt, Homo sapiens
  misc_RNA (1)...(19): siRNA sense strand
gcaugcugcugcaaauuca

SEQ ID NO: 2129657 - RNA, 19 nt, Homo sapiens
  misc_RNA (1)...(19): siRNA sense strand
gaaacuagugcuacucauc

SEQ ID NO: 2129658 - RNA, 19 nt, Homo sapiens
  misc_RNA (1)...(19): siRNA sense strand
ucaaauauaccagggcuaa

SEQ ID NO: 2129659 - RNA, 19 nt, Homo sapiens
  misc_RNA (1)...(19): siRNA sense strand
caucuucucugugauuguu

SEQ ID NO: 2129660 - RNA, 19 nt, Homo sapiens
  misc_RNA (1)...(19): siRNA sense strand
uaacauggauucucuuacc

SEQ ID NO: 2129661 - RNA, 19 nt, Homo sapiens
  misc_RNA (1)...(19): siRNA sense strand
gcagaaccuuuggauuuua

SEQ ID NO: 2129662 - RNA, 19 nt, Homo sapiens
  misc_RNA (1)...(19): siRNA sense strand
gggaacccguuguuugaau

SEQ ID NO: 2129663 - RNA, 19 nt, Homo sapiens
  misc_RNA (1)...(19): siRNA sense strand
ucaaccaacugcuuauaca

SEQ ID NO: 2129664 - RNA, 19 nt, Homo sapiens
  misc_RNA (1)...(19): siRNA sense strand
ccauauggauucaucuauc

SEQ ID NO: 2129665 - RNA, 19 nt, Homo sapiens
  misc_RNA (1)...(19): siRNA sense strand
ggguauggcuugguggaaa

SEQ ID NO: 2129666 - RNA, 19 nt, Homo sapiens
  misc_RNA (1)...(19): siRNA sense strand
agaaugcaaucuacuaugg

SEQ ID NO: 2129667 - RNA, 19 nt, Homo sapiens
  misc_RNA (1)...(19): siRNA sense strand
ggaacaagcauuuuaucua

SEQ ID NO: 2129668 - RNA, 19 nt, Homo sapiens
  misc_RNA (1)...(19): siRNA sense strand
gacaucagacuuaguuaau

SEQ ID NO: 2129669 - RNA, 19 nt, Homo sapiens
  misc_RNA (1)...(19): siRNA sense strand
ugacaucagacuuaguuaa

SEQ ID NO: 2129670 - RNA, 19 nt, Homo sapiens
  misc_RNA (1)...(19): siRNA sense strand
gggagaugaugauaugaca

SEQ ID NO: 2129671 - RNA, 19 nt, Homo sapiens
  misc_RNA (1)...(19): siRNA sense strand
uggauucucuuaccuuuua

SEQ ID NO: 2129672 - RNA, 19 nt, Homo sapiens
  misc_RNA (1)...(19): siRNA sense strand
ggaacccguuguuugaauc

SEQ ID NO: 2129673 - RNA, 19 nt, Homo sapiens
  misc_RNA (1)...(19): siRNA sense strand
aaaagggguuaucuacuua

SEQ ID NO: 2129674 - RNA, 19 nt, Homo sapiens
  misc_RNA (1)...(19): siRNA sense strand
gaaaaucgaagaagagaau

SEQ ID NO: 2129675 - RNA, 19 nt, Homo sapiens
  misc_RNA (1)...(19): siRNA sense strand
augcagaaccuuuggauuu

SEQ ID NO: 2129676 - RNA, 19 nt, Homo sapiens
  misc_RNA (1)...(19): siRNA sense strand
gcaaauacauggggucugu

SEQ ID NO: 2129677 - RNA, 19 nt, Homo sapiens
  misc_RNA (1)...(19): siRNA sense strand
caaagagucaaacuucuca

SEQ ID NO: 2129678 - RNA, 19 nt, Homo sapiens
  misc_RNA (1)...(19): siRNA sense strand
uauugcagauggauucuau

SEQ ID NO: 2129679 - RNA, 19 nt, Homo sapiens
  misc_RNA (1)...(19): siRNA sense strand
ucaguuuguucacaccuuu

SEQ ID NO: 2129680 - RNA, 19 nt, Homo sapiens
  misc_RNA (1)...(19): siRNA sense strand
uaagaaacagcauagacuu

SEQ ID NO: 2129681 - RNA, 19 nt, Homo sapiens
  misc_RNA (1)...(19): siRNA sense strand
gguaggaacauggaugauu

SEQ ID NO: 2129682 - RNA, 19 nt, Homo sapiens
  misc_RNA (1)...(19): siRNA sense strand
gcaaaggcaagaagaaggu

SEQ ID NO: 2129683 - RNA, 19 nt, Homo sapiens
  misc_RNA (1)...(19): siRNA sense strand
gaauauggcugcauccuuu

SEQ ID NO: 2129684 - RNA, 19 nt, Homo sapiens
  misc_RNA (1)...(19): siRNA sense strand
gaauggaauuggaaucuua

SEQ ID NO: 2129685 - RNA, 19 nt, Homo sapiens
  misc_RNA (1)...(19): siRNA sense strand
gaaguauccucaaacauuu

SEQ ID NO: 2129686 - RNA, 19 nt, Homo sapiens
  misc_RNA (1)...(19): siRNA sense strand
gaauacaacuccaaauaug

SEQ ID NO: 2129687 - RNA, 19 nt, Homo sapiens
  misc_RNA (1)...(19): siRNA sense strand
gaacaacucuguaaugaac

SEQ ID NO: 2129688 - RNA, 19 nt, Homo sapiens
  misc_RNA (1)...(19): siRNA sense strand
ucaacgagcucacauauga

SEQ ID NO: 2129689 - RNA, 19 nt, Homo sapiens
  misc_RNA (1)...(19): siRNA sense strand
ggaauugaguuguuaguga

SEQ ID NO: 2129690 - RNA, 19 nt, Homo sapiens
  misc_RNA (1)...(19): siRNA sense strand
ggccagaccucauggauaa

SEQ ID NO: 2129691 - RNA, 19 nt, Homo sapiens
  misc_RNA (1)...(19): siRNA sense strand
gaaacaugcuugcagagaa

SEQ ID NO: 2129692 - RNA, 19 nt, Homo sapiens
  misc_RNA (1)...(19): siRNA sense strand
ggaauaagcacauugaaga

SEQ ID NO: 2129693 - RNA, 19 nt, Homo sapiens
  misc_RNA (1)...(19): siRNA sense strand
gaagauuuauugaguccua

SEQ ID NO: 2129694 - RNA, 19 nt, Homo sapiens
  misc_RNA (1)...(19): siRNA sense strand
ucaaccagcucuagacaua

SEQ ID NO: 2129695 - RNA, 19 nt, Homo sapiens
  misc_RNA (1)...(19): siRNA sense strand
gaugugcuauuuacugaua

SEQ ID NO: 2129696 - RNA, 19 nt, Homo sapiens
  misc_RNA (1)...(19): siRNA sense strand
gaagauacguagccaaagu

SEQ ID NO: 2129697 - RNA, 19 nt, Homo sapiens
  misc_RNA (1)...(19): siRNA sense strand
aaacaaggcugugauauuc

SEQ ID NO: 2129698 - RNA, 19 nt, Homo sapiens
  misc_RNA (1)...(19): siRNA sense strand
gauacucucugcauuuauu

SEQ ID NO: 2129699 - RNA, 19 nt, Homo sapiens
  misc_RNA (1)...(19): siRNA sense strand
gacauucaguuggaaauua

SEQ ID NO: 2129700 - RNA, 19 nt, Homo sapiens
  misc_RNA (1)...(19): siRNA sense strand
ucaaugagcucaaguccuu

SEQ ID NO: 2129701 - RNA, 19 nt, Homo sapiens
  misc_RNA (1)...(19): siRNA sense strand
guacgaagacuacuuuauu

SEQ ID NO: 2129702 - RNA, 19 nt, Homo sapiens
  misc_RNA (1)...(19): siRNA sense strand
cuaguaaacuugugaagaa

SEQ ID NO: 2129703 - RNA, 19 nt, Homo sapiens
  misc_RNA (1)...(19): siRNA sense strand
ugaaagagguuauguagca

SEQ ID NO: 2129704 - RNA, 19 nt, Homo sapiens
  misc_RNA (1)...(19): siRNA sense strand
gaagaucuaguaaaggaua

SEQ ID NO: 2129705 - RNA, 19 nt, Homo sapiens
  misc_RNA (1)...(19): siRNA sense strand
ggagaaguauccucaaaca

SEQ ID NO: 2129706 - RNA, 19 nt, Homo sapiens
  misc_RNA (1)...(19): siRNA sense strand
ccaaauauguugacuugau

SEQ ID NO: 2129707 - RNA, 19 nt, Homo sapiens
  misc_RNA (1)...(19): siRNA sense strand
gggaauacaacuccaaaua

SEQ ID NO: 2129708 - RNA, 19 nt, Homo sapiens
  misc_RNA (1)...(19): siRNA sense strand
gagcuaauguugaauucuu

SEQ ID NO: 2129709 - RNA, 19 nt, Homo sapiens
  misc_RNA (1)...(19): siRNA sense strand
caagacaguuggaggcuuu

SEQ ID NO: 2129710 - RNA, 19 nt, Homo sapiens
  misc_RNA (1)...(19): siRNA sense strand
ccaaacagcucacgguugu

SEQ ID NO: 2129711 - RNA, 19 nt, Homo sapiens
  misc_RNA (1)...(19): siRNA sense strand
ggaauacaacuccaaauau

SEQ ID NO: 2129712 - RNA, 19 nt, Homo sapiens
  misc_RNA (1)...(19): siRNA sense strand
ggaaauaucggcucaucaa

SEQ ID NO: 2129713 - RNA, 19 nt, Homo sapiens
  misc_RNA (1)...(19): siRNA sense strand
gaagagcacagucccuuaa

SEQ ID NO: 2129714 - RNA, 19 nt, Homo sapiens
  misc_RNA (1)...(19): siRNA sense strand
ugaccgaucuggacccaua

SEQ ID NO: 2129715 - RNA, 19 nt, Homo sapiens
  misc_RNA (1)...(19): siRNA sense strand
guauugaaauucuggguuu

SEQ ID NO: 2129716 - RNA, 19 nt, Homo sapiens
  misc_RNA (1)...(19): siRNA sense strand
gccaaguccuucaacauaa

SEQ ID NO: 2129717 - RNA, 19 nt, Homo sapiens
  misc_RNA (1)...(19): siRNA sense strand
aaacgugauuccagauaua

SEQ ID NO: 2129718 - RNA, 19 nt, Homo sapiens
  misc_RNA (1)...(19): siRNA sense strand
gguuguagguugccaguuu

SEQ ID NO: 2129719 - RNA, 19 nt, Homo sapiens
  misc_RNA (1)...(19): siRNA sense strand
gauccagucucuaauagga

SEQ ID NO: 2129720 - RNA, 19 nt, Homo sapiens
  misc_RNA (1)...(19): siRNA sense strand
ggacaacuaguacaccaua

SEQ ID NO: 2129721 - RNA, 19 nt, Homo sapiens
  misc_RNA (1)...(19): siRNA sense strand
augaagcacuuacuacuua

SEQ ID NO: 2129722 - RNA, 19 nt, Homo sapiens
  misc_RNA (1)...(19): siRNA sense strand
ugacccagcuacaugauaa

SEQ ID NO: 2129723 - RNA, 19 nt, Homo sapiens
  misc_RNA (1)...(19): siRNA sense strand
guauuucagugucuccuua

SEQ ID NO: 2129724 - RNA, 19 nt, Homo sapiens
  misc_RNA (1)...(19): siRNA sense strand
caaacaaggcugugauauu

SEQ ID NO: 2129725 - RNA, 19 nt, Homo sapiens
  misc_RNA (1)...(19): siRNA sense strand
aagaaugcauccauccuua

SEQ ID NO: 2129726 - RNA, 19 nt, Homo sapiens
  misc_RNA (1)...(19): siRNA sense strand
gggaaauuaucaucugaaa

SEQ ID NO: 2129727 - RNA, 19 nt, Homo sapiens
  misc_RNA (1)...(19): siRNA sense strand
aauaucggcucaucaaauu

SEQ ID NO: 2129728 - RNA, 19 nt, Homo sapiens
  misc_RNA (1)...(19): siRNA sense strand
guacagagaaucacagaga

SEQ ID NO: 2129729 - RNA, 19 nt, Homo sapiens
  misc_RNA (1)...(19): siRNA sense strand
caacugagugcaauaugua

SEQ ID NO: 2129730 - RNA, 19 nt, Homo sapiens
  misc_RNA (1)...(19): siRNA sense strand
caagagcauuugcccauga

SEQ ID NO: 2129731 - RNA, 19 nt, Homo sapiens
  misc_RNA (1)...(19): siRNA sense strand
gguaaaggauauucccuau

SEQ ID NO: 2129732 - RNA, 19 nt, Homo sapiens
  misc_RNA (1)...(19): siRNA sense strand
gaaugaaagagguuaugua

SEQ ID NO: 2129733 - RNA, 19 nt, Homo sapiens
  misc_RNA (1)...(19): siRNA sense strand
caugaaagccuuaaguuau

SEQ ID NO: 2129734 - RNA, 19 nt, Homo sapiens
  misc_RNA (1)...(19): siRNA sense strand
ucuagcagauuguaacuuu

SEQ ID NO: 2129735 - RNA, 19 nt, Homo sapiens
  misc_RNA (1)...(19): siRNA sense strand
ggagggaaauuaucaucug

SEQ ID NO: 2129736 - RNA, 19 nt, Homo sapiens
  misc_RNA (1)...(19): siRNA sense strand
ccucauggauaauuauuug

SEQ ID NO: 2129737 - RNA, 19 nt, Homo sapiens
  misc_RNA (1)...(19): siRNA sense strand
acucugagguuucccauuu

SEQ ID NO: 2129738 - RNA, 19 nt, Homo sapiens
  misc_RNA (1)...(19): siRNA sense strand
agaaguauccucaaacauu

SEQ ID NO: 2129739 - RNA, 19 nt, Homo sapiens
  misc_RNA (1)...(19): siRNA sense strand
gagcucacauaugaagaua

SEQ ID NO: 2129740 - RNA, 19 nt, Homo sapiens
  misc_RNA (1)...(19): siRNA sense strand
cauauccacuguacagaaa

SEQ ID NO: 2129741 - RNA, 19 nt, Homo sapiens
  misc_RNA (1)...(19): siRNA sense strand
ggaaauaaggcgaggucua

SEQ ID NO: 2129742 - RNA, 19 nt, Homo sapiens
  misc_RNA (1)...(19): siRNA sense strand
ucaacuaaaugucaugaga

SEQ ID NO: 2129743 - RNA, 19 nt, Homo sapiens
  misc_RNA (1)...(19): siRNA sense strand
caagaaggcucagcuagca

SEQ ID NO: 2129744 - RNA, 19 nt, Homo sapiens
  misc_RNA (1)...(19): siRNA sense strand
ggaaauuagucacguaaaa

SEQ ID NO: 2129745 - RNA, 19 nt, Homo sapiens
  misc_RNA (1)...(19): siRNA sense strand
gaaaguaagacaagcaaca

SEQ ID NO: 2129746 - RNA, 19 nt, Homo sapiens
  misc_RNA (1)...(19): siRNA sense strand
ccaaguccuucaacauaaa

SEQ ID NO: 2129747 - RNA, 19 nt, Homo sapiens
  misc_RNA (1)...(19): siRNA sense strand
agacagagaagcacgauuu

SEQ ID NO: 2129748 - RNA, 19 nt, Homo sapiens
  misc_RNA (1)...(19): siRNA sense strand
acauaugccuuuacucuga

SEQ ID NO: 2129749 - RNA, 19 nt, Homo sapiens
  misc_RNA (1)...(19): siRNA sense strand
caaaagcacagaauuguua

SEQ ID NO: 2129750 - RNA, 19 nt, Homo sapiens
  misc_RNA (1)...(19): siRNA sense strand
cgagagagguuaguaguag

SEQ ID NO: 2129751 - RNA, 19 nt, Homo sapiens
  misc_RNA (1)...(19): siRNA sense strand
gagggaaauuaucaucuga

SEQ ID NO: 2129752 - RNA, 19 nt, Homo sapiens
  misc_RNA (1)...(19): siRNA sense strand
gcucauagcuaaaaccaaa

SEQ ID NO: 2129753 - RNA, 19 nt, Homo sapiens
  misc_RNA (1)...(19): siRNA sense strand
ggaaugaaacccgaaagaa

SEQ ID NO: 2129754 - RNA, 19 nt, Homo sapiens
  misc_RNA (1)...(19): siRNA sense strand
gggcaaggcuacuuagaag

SEQ ID NO: 2129755 - RNA, 19 nt, Homo sapiens
  misc_RNA (1)...(19): siRNA sense strand
aaggacagcucaaagaaga

SEQ ID NO: 2129756 - RNA, 19 nt, Homo sapiens
  misc_RNA (1)...(19): siRNA sense strand
gacuauccauaauccuuua

SEQ ID NO: 2129757 - RNA, 19 nt, Homo sapiens
  misc_RNA (1)...(19): siRNA sense strand
cuacaacuauggacacaga

SEQ ID NO: 2129758 - RNA, 19 nt, Homo sapiens
  misc_RNA (1)...(19): siRNA sense strand
acacaauucuuccucauuc

SEQ ID NO: 2129759 - RNA, 19 nt, Homo sapiens
  misc_RNA (1)...(19): siRNA sense strand
ggguucagaugauuacauu

SEQ ID NO: 2129760 - RNA, 19 nt, Homo sapiens
  misc_RNA (1)...(19): siRNA sense strand
uggaacaacucuguaauga

SEQ ID NO: 2129761 - RNA, 19 nt, Homo sapiens
  misc_RNA (1)...(19): siRNA sense strand
gaaugaaacccgaaagaag

SEQ ID NO: 2129762 - RNA, 19 nt, Homo sapiens
  misc_RNA (1)...(19): siRNA sense strand
gcccagcaguaaauuauau

SEQ ID NO: 2129763 - RNA, 19 nt, Homo sapiens
  misc_RNA (1)...(19): siRNA sense strand
gcucaaagaagacagagaa

SEQ ID NO: 2129764 - RNA, 19 nt, Homo sapiens
  misc_RNA (1)...(19): siRNA sense strand
gaaauaaggcgaggucuac

SEQ ID NO: 2129765 - RNA, 19 nt, Homo sapiens
  misc_RNA (1)...(19): siRNA sense strand
gagguucauacaagaauua

SEQ ID NO: 2129766 - RNA, 19 nt, Homo sapiens
  misc_RNA (1)...(19): siRNA sense strand
cauucagacuuucaagaua

SEQ ID NO: 2129767 - RNA, 19 nt, Homo sapiens
  misc_RNA (1)...(19): siRNA sense strand
ucaugaaagccuuaaguua

SEQ ID NO: 2129768 - RNA, 19 nt, Homo sapiens
  misc_RNA (1)...(19): siRNA sense strand
ccaagcagguucaugaaag

SEQ ID NO: 2129769 - RNA, 19 nt, Homo sapiens
  misc_RNA (1)...(19): siRNA sense strand
gaaagagguuauguagcaa

SEQ ID NO: 2129770 - RNA, 19 nt, Homo sapiens
  misc_RNA (1)...(19): siRNA sense strand
gugcagccuugaacuguuu

SEQ ID NO: 2129771 - RNA, 19 nt, Homo sapiens
  misc_RNA (1)...(19): siRNA sense strand
gaucuggacccauaaagga

SEQ ID NO: 2129772 - RNA, 19 nt, Homo sapiens
  misc_RNA (1)...(19): siRNA sense strand
guacuugggcucauagcua

SEQ ID NO: 2129773 - RNA, 19 nt, Homo sapiens
  misc_RNA (1)...(19): siRNA sense strand
ucaauuugcuacaggaaga

SEQ ID NO: 2129774 - RNA, 19 nt, Homo sapiens
  misc_RNA (1)...(19): siRNA sense strand
gauaagugggaagaaauua

SEQ ID NO: 2129775 - RNA, 19 nt, Homo sapiens
  misc_RNA (1)...(19): siRNA sense strand
guuguagguugccaguuua

SEQ ID NO: 2129776 - RNA, 19 nt, Homo sapiens
  misc_RNA (1)...(19): siRNA sense strand
ccagggagguuccaagaca

SEQ ID NO: 2129777 - RNA, 19 nt, Homo sapiens
  misc_RNA (1)...(19): siRNA sense strand
ggagguucauacaagaauu

SEQ ID NO: 2129778 - RNA, 19 nt, Homo sapiens
  misc_RNA (1)...(19): siRNA sense strand
gaaauaucggcucaucaaa

SEQ ID NO: 2129779 - RNA, 19 nt, Homo sapiens
  misc_RNA (1)...(19): siRNA sense strand
ucacauagccaucauuuac

SEQ ID NO: 2129780 - RNA, 19 nt, Homo sapiens
  misc_RNA (1)...(19): siRNA sense strand
cugauacucucugcauuua

SEQ ID NO: 2129781 - RNA, 19 nt, Homo sapiens
  misc_RNA (1)...(19): siRNA sense strand
caacaaagaaugcauccau

SEQ ID NO: 2129782 - RNA, 19 nt, Homo sapiens
  misc_RNA (1)...(19): siRNA sense strand
ccaacugagugcaauaugu

SEQ ID NO: 2129783 - RNA, 19 nt, Homo sapiens
  misc_RNA (1)...(19): siRNA sense strand
gaauuuaacccgucucuua

SEQ ID NO: 2129784 - RNA, 19 nt, Homo sapiens
  misc_RNA (1)...(19): siRNA sense strand
gaucagaagccaucaguua

SEQ ID NO: 2129785 - RNA, 19 nt, Homo sapiens
  misc_RNA (1)...(19): siRNA sense strand
caaugaagcuuuaguacaa

SEQ ID NO: 2129786 - RNA, 19 nt, Homo sapiens
  misc_RNA (1)...(19): siRNA sense strand
gaaagaagcauuagucaca

SEQ ID NO: 2129787 - RNA, 19 nt, Homo sapiens
  misc_RNA (1)...(19): siRNA sense strand
aaaggacucuguuauauga

SEQ ID NO: 2129788 - RNA, 19 nt, Homo sapiens
  misc_RNA (1)...(19): siRNA sense strand
cuagagaaguugcuaauga

SEQ ID NO: 2129789 - RNA, 19 nt, Homo sapiens
  misc_RNA (1)...(19): siRNA sense strand
ucagcaaugucaagaaaua

SEQ ID NO: 2129790 - RNA, 19 nt, Homo sapiens
  misc_RNA (1)...(19): siRNA sense strand
gaagaaaggacucuguuau

SEQ ID NO: 2129791 - RNA, 19 nt, Homo sapiens
  misc_RNA (1)...(19): siRNA sense strand
ggaaccacaucuacuuuga

SEQ ID NO: 2129792 - RNA, 19 nt, Homo sapiens
  misc_RNA (1)...(19): siRNA sense strand
ggcuugagauccuaaauaa

SEQ ID NO: 2129793 - RNA, 19 nt, Homo sapiens
  misc_RNA (1)...(19): siRNA sense strand
uauccuagcucuacuucua

SEQ ID NO: 2129794 - RNA, 19 nt, Homo sapiens
  misc_RNA (1)...(19): siRNA sense strand
gaacuuaaucgaucugaga

SEQ ID NO: 2129795 - RNA, 19 nt, Homo sapiens
  misc_RNA (1)...(19): siRNA sense strand
uaaccaagaccaacaaauu

SEQ ID NO: 2129796 - RNA, 19 nt, Homo sapiens
  misc_RNA (1)...(19): siRNA sense strand
agaaaggacucuguuauau

SEQ ID NO: 2129797 - RNA, 19 nt, Homo sapiens
  misc_RNA (1)...(19): siRNA sense strand
gggagaagguggaauguag

SEQ ID NO: 2129798 - RNA, 19 nt, Homo sapiens
  misc_RNA (1)...(19): siRNA sense strand
gaaaggacucuguuauaug

SEQ ID NO: 2129799 - RNA, 19 nt, Homo sapiens
  misc_RNA (1)...(19): siRNA sense strand
gaccagaaauacaucuuug

SEQ ID NO: 2129800 - RNA, 19 nt, Homo sapiens
  misc_RNA (1)...(19): siRNA sense strand
gagaguuuaugucaugaaa

SEQ ID NO: 2129801 - RNA, 19 nt, Homo sapiens
  misc_RNA (1)...(19): siRNA sense strand
cagaagccaucaguuauuu

SEQ ID NO: 2129802 - RNA, 19 nt, Homo sapiens
  misc_RNA (1)...(19): siRNA sense strand
guagaaaguuguccugaag

SEQ ID NO: 2129803 - RNA, 19 nt, Homo sapiens
  misc_RNA (1)...(19): siRNA sense strand
gucaagaaauacucacuaa

SEQ ID NO: 2129804 - RNA, 19 nt, Homo sapiens
  misc_RNA (1)...(19): siRNA sense strand
uaaucgaucugagaguuua

SEQ ID NO: 2129805 - RNA, 19 nt, Homo sapiens
  misc_RNA (1)...(19): siRNA sense strand
aggagaagcugcauaucua

SEQ ID NO: 2129806 - RNA, 19 nt, Homo sapiens
  misc_RNA (1)...(19): siRNA sense strand
caacugcaggcguuuauaa

SEQ ID NO: 2129807 - RNA, 19 nt, Homo sapiens
  misc_RNA (1)...(19): siRNA sense strand
ggagauggagccaaagaaa

SEQ ID NO: 2129808 - RNA, 19 nt, Homo sapiens
  misc_RNA (1)...(19): siRNA sense strand
acaggucguuucaaagaua

SEQ ID NO: 2129809 - RNA, 19 nt, Homo sapiens
  misc_RNA (1)...(19): siRNA sense strand
gaucugagaguuuauguca

SEQ ID NO: 2129810 - RNA, 19 nt, Homo sapiens
  misc_RNA (1)...(19): siRNA sense strand
ucaguuauuucccuucaaa

SEQ ID NO: 2129811 - RNA, 19 nt, Homo sapiens
  misc_RNA (1)...(19): siRNA sense strand
ccacuuacccuacaacuca

SEQ ID NO: 2129812 - RNA, 19 nt, Homo sapiens
  misc_RNA (1)...(19): siRNA sense strand
aagaaaggacucuguuaua

SEQ ID NO: 2129813 - RNA, 19 nt, Homo sapiens
  misc_RNA (1)...(19): siRNA sense strand
gauacuuccuuuccaugaa

SEQ ID NO: 2129814 - RNA, 19 nt, Homo sapiens
  misc_RNA (1)...(19): siRNA sense strand
uaacugaugugcugcucuu

SEQ ID NO: 2129815 - RNA, 19 nt, Homo sapiens
  misc_RNA (1)...(19): siRNA sense strand
gaaggacaagugaaucuga

SEQ ID NO: 2129816 - RNA, 19 nt, Homo sapiens
  misc_RNA (1)...(19): siRNA sense strand
uaacagaagcaaagcuaaa

SEQ ID NO: 2129817 - RNA, 19 nt, Homo sapiens
  misc_RNA (1)...(19): siRNA sense strand
uacaagccauacagaauuu

SEQ ID NO: 2129818 - RNA, 19 nt, Homo sapiens
  misc_RNA (1)...(19): siRNA sense strand
gaagguggaauguagaaau

SEQ ID NO: 2129819 - RNA, 19 nt, Homo sapiens
  misc_RNA (1)...(19): siRNA sense strand
gcuuauugcuagagaaguu

SEQ ID NO: 2129820 - RNA, 19 nt, Homo sapiens
  misc_RNA (1)...(19): siRNA sense strand
guccugagauguaugaaau

SEQ ID NO: 2129821 - RNA, 19 nt, Homo sapiens
  misc_RNA (1)...(19): siRNA sense strand
gagagaggaauguuucuga

SEQ ID NO: 2129822 - RNA, 19 nt, Homo sapiens
  misc_RNA (1)...(19): siRNA sense strand
ugaagaaaggacucuguua

SEQ ID NO: 2129823 - RNA, 19 nt, Homo sapiens
  misc_RNA (1)...(19): siRNA sense strand
gccaucagauacuuccuuu

SEQ ID NO: 2129824 - RNA, 19 nt, Homo sapiens
  misc_RNA (1)...(19): siRNA sense strand
ggacaagugaaucugauga

SEQ ID NO: 2129825 - RNA, 19 nt, Homo sapiens
  misc_RNA (1)...(19): siRNA sense strand
agaaaguuguccugaagaa

SEQ ID NO: 2129826 - RNA, 19 nt, Homo sapiens
  misc_RNA (1)...(19): siRNA sense strand
caugaaagcagcaaggauu

SEQ ID NO: 2129827 - RNA, 19 nt, Homo sapiens
  misc_RNA (1)...(19): siRNA sense strand
agaggaauguuucugauca

SEQ ID NO: 2129828 - RNA, 19 nt, Homo sapiens
  misc_RNA (1)...(19): siRNA sense strand
caacucaaucucauucuga

SEQ ID NO: 2129829 - RNA, 19 nt, Homo sapiens
  misc_RNA (1)...(19): siRNA sense strand
caucaaugaagcuuuagua

SEQ ID NO: 2129830 - RNA, 19 nt, Homo sapiens
  misc_RNA (1)...(19): siRNA sense strand
uauaugauggccuuguuua

SEQ ID NO: 2129831 - RNA, 19 nt, Homo sapiens
  misc_RNA (1)...(19): siRNA sense strand
caaggacaaugaccagaca

SEQ ID NO: 2129832 - RNA, 19 nt, Homo sapiens
  misc_RNA (1)...(19): siRNA sense strand
gaagcaaagcuaaaucuac

SEQ ID NO: 2129833 - RNA, 19 nt, Homo sapiens
  misc_RNA (1)...(19): siRNA sense strand
aaccacaucuacuuugaaa

SEQ ID NO: 2129834 - RNA, 19 nt, Homo sapiens
  misc_RNA (1)...(19): siRNA sense strand
cuacaggucguuucaaaga

SEQ ID NO: 2129835 - RNA, 19 nt, Homo sapiens
  misc_RNA (1)...(19): siRNA sense strand
gaaccacaucuacuuugaa

SEQ ID NO: 2129836 - RNA, 19 nt, Homo sapiens
  misc_RNA (1)...(19): siRNA sense strand
ucugagaguuuaugucaug

SEQ ID NO: 2129837 - RNA, 19 nt, Homo sapiens
  misc_RNA (1)...(19): siRNA sense strand
uaucuaugcugaacuugga

SEQ ID NO: 2129838 - RNA, 19 nt, Homo sapiens
  misc_RNA (1)...(19): siRNA sense strand
gaaaguuguccugaagaaa

SEQ ID NO: 2129839 - RNA, 19 nt, Homo sapiens
  misc_RNA (1)...(19): siRNA sense strand
gaggagagaggaauguuuc

SEQ ID NO: 2129840 - RNA, 19 nt, Homo sapiens
  misc_RNA (1)...(19): siRNA sense strand
aagguggaauguagaaauu

SEQ ID NO: 2129841 - RNA, 19 nt, Homo sapiens
  misc_RNA (1)...(19): siRNA sense strand
gaggagaagcugcauaucu

SEQ ID NO: 2129842 - RNA, 19 nt, Homo sapiens
  misc_RNA (1)...(19): siRNA sense strand
cuugagauccuaaauaaga

SEQ ID NO: 2129843 - RNA, 19 nt, Homo sapiens
  misc_RNA (1)...(19): siRNA sense strand
caagugaaucugaugaaga

SEQ ID NO: 2129844 - RNA, 19 nt, Homo sapiens
  misc_RNA (1)...(19): siRNA sense strand
gugcguauuuggaggagaa

SEQ ID NO: 2129845 - RNA, 19 nt, Homo sapiens
  misc_RNA (1)...(19): siRNA sense strand
ggacaaugaccagacaaga

SEQ ID NO: 2129846 - RNA, 19 nt, Homo sapiens
  misc_RNA (1)...(19): siRNA sense strand
guuauaugauggccuuguu

SEQ ID NO: 2129847 - RNA, 19 nt, Homo sapiens
  misc_RNA (1)...(19): siRNA sense strand
augaggagcuggccaaugu

SEQ ID NO: 2129848 - RNA, 19 nt, Homo sapiens
  misc_RNA (1)...(19): siRNA sense strand
ucagaagccaucaguuauu

SEQ ID NO: 2129849 - RNA, 19 nt, Homo sapiens
  misc_RNA (1)...(19): siRNA sense strand
gcuccaguaugacaaagug

SEQ ID NO: 2129850 - RNA, 19 nt, Homo sapiens
  misc_RNA (1)...(19): siRNA sense strand
ggugaggacuagugaacau

SEQ ID NO: 2129851 - RNA, 19 nt, Homo sapiens
  misc_RNA (1)...(19): siRNA sense strand
uugcaacaguggauuuaaa

SEQ ID NO: 2129852 - RNA, 19 nt, Homo sapiens
  misc_RNA (1)...(19): siRNA sense strand
gaaaacucauucuucauca

SEQ ID NO: 2129853 - RNA, 19 nt, Homo sapiens
  misc_RNA (1)...(19): siRNA sense strand
aaacauacacgaagcucaa

SEQ ID NO: 2129854 - RNA, 19 nt, Homo sapiens
  misc_RNA (1)...(19): siRNA sense strand
gaacgcaauaacuggauga

SEQ ID NO: 2129855 - RNA, 19 nt, Homo sapiens
  misc_RNA (1)...(19): siRNA sense strand
ccaaggaggaacgcaauaa

SEQ ID NO: 2129856 - RNA, 19 nt, Homo sapiens
  misc_RNA (1)...(19): siRNA sense strand
uagcucuacuucuaacuga

SEQ ID NO: 2129857 - RNA, 19 nt, Homo sapiens
  misc_RNA (1)...(19): siRNA sense strand
gaaagcagcaaggauucuu

SEQ ID NO: 2129858 - RNA, 19 nt, Homo sapiens
  misc_RNA (1)...(19): siRNA sense strand
gagaagguggaauguagaa

SEQ ID NO: 2129859 - RNA, 19 nt, Homo sapiens
  misc_RNA (1)...(19): siRNA sense strand
uguagaaaguuguccugaa

SEQ ID NO: 2129860 - RNA, 19 nt, Homo sapiens
  misc_RNA (1)...(19): siRNA sense strand
uauaacagaagcaaagcua

SEQ ID NO: 2129861 - RNA, 19 nt, Homo sapiens
  misc_RNA (1)...(19): siRNA sense strand
caacaaacugaauccauca

SEQ ID NO: 2129862 - RNA, 19 nt, Homo sapiens
  misc_RNA (1)...(19): siRNA sense strand
gauugcaacaguggauuua

SEQ ID NO: 2129863 - RNA, 19 nt, Homo sapiens
  misc_RNA (1)...(19): siRNA sense strand
ggagaagcugcauaucuau

SEQ ID NO: 2129864 - RNA, 19 nt, Homo sapiens
  misc_RNA (1)...(19): siRNA sense strand
aaccaagaccaacaaauuu

SEQ ID NO: 2129865 - RNA, 19 nt, Homo sapiens
  misc_RNA (1)...(19): siRNA sense strand
caucaguuauuucccuuca

SEQ ID NO: 2129866 - RNA, 19 nt, Homo sapiens
  misc_RNA (1)...(19): siRNA sense strand
gacaaugaccagacaagau

SEQ ID NO: 2129867 - RNA, 19 nt, Homo sapiens
  misc_RNA (1)...(19): siRNA sense strand
ucaaucucauucugacuug

SEQ ID NO: 2129868 - RNA, 19 nt, Homo sapiens
  misc_RNA (1)...(19): siRNA sense strand
guaauggaacuuaaucgau

SEQ ID NO: 2129869 - RNA, 19 nt, Homo sapiens
  misc_RNA (1)...(19): siRNA sense strand
ggacagccacauugagauc

SEQ ID NO: 2129870 - RNA, 19 nt, Homo sapiens
  misc_RNA (1)...(19): siRNA sense strand
caagccauacagaauuuaa

SEQ ID NO: 2129871 - RNA, 19 nt, Homo sapiens
  misc_RNA (1)...(19): siRNA sense strand
acaaugaccagacaagaug

SEQ ID NO: 2129872 - RNA, 19 nt, Homo sapiens
  misc_RNA (1)...(19): siRNA sense strand
ggacuggaaccacaucuac

SEQ ID NO: 2129873 - RNA, 19 nt, Homo sapiens
  misc_RNA (1)...(19): siRNA sense strand
ucagauacuuccuuuccau

SEQ ID NO: 2129874 - RNA, 19 nt, Homo sapiens
  misc_RNA (1)...(19): siRNA sense strand
uagagaaguugcuaaugag

SEQ ID NO: 2129875 - RNA, 19 nt, Homo sapiens
  misc_RNA (1)...(19): siRNA sense strand
cuaaaucuaccgacaagga

SEQ ID NO: 2129876 - RNA, 19 nt, Homo sapiens
  misc_RNA (1)...(19): siRNA sense strand
gcaggcguuuauaacagaa

SEQ ID NO: 2129877 - RNA, 19 nt, Homo sapiens
  misc_RNA (1)...(19): siRNA sense strand
auacaagccauacagaauu

SEQ ID NO: 2129878 - RNA, 19 nt, Homo sapiens
  misc_RNA (1)...(19): siRNA sense strand
ggagaagguggaauguaga

SEQ ID NO: 2129879 - RNA, 19 nt, Homo sapiens
  misc_RNA (1)...(19): siRNA sense strand
auucagcaaugucaagaaa

SEQ ID NO: 2129880 - RNA, 19 nt, Homo sapiens
  misc_RNA (1)...(19): siRNA sense strand
gaagaggcuguucggaugu

SEQ ID NO: 2129881 - RNA, 19 nt, Homo sapiens
  misc_RNA (1)...(19): siRNA sense strand
gcaguuguacguugacauc

SEQ ID NO: 2129882 - RNA, 19 nt, Homo sapiens
  misc_RNA (1)...(19): siRNA sense strand
ggaugccacuuacccuaca

SEQ ID NO: 2129883 - RNA, 19 nt, Homo sapiens
  misc_RNA (1)...(19): siRNA sense strand
gaagaaggcuacaguauua

SEQ ID NO: 2129884 - RNA, 19 nt, Homo sapiens
  misc_RNA (1)...(19): siRNA sense strand
ggaaagaccuggccucauu

SEQ ID NO: 2129885 - RNA, 19 nt, Homo sapiens
  misc_RNA (1)...(19): siRNA sense strand
ggaaggagcuacacaaaga

SEQ ID NO: 2129886 - RNA, 19 nt, Homo sapiens
  misc_RNA (1)...(19): siRNA sense strand
gcucagaaauuucaagaua

SEQ ID NO: 2129887 - RNA, 19 nt, Homo sapiens
  misc_RNA (1)...(19): siRNA sense strand
uaaaggaaguucagaagua

SEQ ID NO: 2129888 - RNA, 19 nt, Homo sapiens
  misc_RNA (1)...(19): siRNA sense strand
agaaacagcucagaaauuu

SEQ ID NO: 2129889 - RNA, 19 nt, Homo sapiens
  misc_RNA (1)...(19): siRNA sense strand
ugaagaaacucaucucauu

SEQ ID NO: 2129890 - RNA, 19 nt, Homo sapiens
  misc_RNA (1)...(19): siRNA sense strand
ccaaauaacucacaucaca

SEQ ID NO: 2129891 - RNA, 19 nt, Homo sapiens
  misc_RNA (1)...(19): siRNA sense strand
uaugaaacauggacagaua

SEQ ID NO: 2129892 - RNA, 19 nt, Homo sapiens
  misc_RNA (1)...(19): siRNA sense strand
gaacaaguaaagucucaua

SEQ ID NO: 2129893 - RNA, 19 nt, Homo sapiens
  misc_RNA (1)...(19): siRNA sense strand
caaaagaacuagcagauuu

SEQ ID NO: 2129894 - RNA, 19 nt, Homo sapiens
  misc_RNA (1)...(19): siRNA sense strand
gcuauaggcuuuccuuaau

SEQ ID NO: 2129895 - RNA, 19 nt, Homo sapiens
  misc_RNA (1)...(19): siRNA sense strand
gauguccucuaccauaaua

SEQ ID NO: 2129896 - RNA, 19 nt, Homo sapiens
  misc_RNA (1)...(19): siRNA sense strand
gacgauaccuggcggauug

SEQ ID NO: 2129897 - RNA, 19 nt, Homo sapiens
  misc_RNA (1)...(19): siRNA sense strand
ccagguccaugaagaauuu

SEQ ID NO: 2129898 - RNA, 19 nt, Homo sapiens
  misc_RNA (1)...(19): siRNA sense strand
uaacauggcuaauacuaca

SEQ ID NO: 2129899 - RNA, 19 nt, Homo sapiens
  misc_RNA (1)...(19): siRNA sense strand
ggaacgagcuaccauagag

SEQ ID NO: 2129900 - RNA, 19 nt, Homo sapiens
  misc_RNA (1)...(19): siRNA sense strand
gaccuggccucauugaauu

SEQ ID NO: 2129901 - RNA, 19 nt, Homo sapiens
  misc_RNA (1)...(19): siRNA sense strand
gaccaucucuugauucauc

SEQ ID NO: 2129902 - RNA, 19 nt, Homo sapiens
  misc_RNA (1)...(19): siRNA sense strand
gagcagaucccaccaagug

SEQ ID NO: 2129903 - RNA, 19 nt, Homo sapiens
  misc_RNA (1)...(19): siRNA sense strand
ucacuuggaucuuguuaga

SEQ ID NO: 2129904 - RNA, 19 nt, Homo sapiens
  misc_RNA (1)...(19): siRNA sense strand
gaucuuagaguggauuaua

SEQ ID NO: 2129905 - RNA, 19 nt, Homo sapiens
  misc_RNA (1)...(19): siRNA sense strand
aaaggcagcuguuaaaucu

SEQ ID NO: 2129906 - RNA, 19 nt, Homo sapiens
  misc_RNA (1)...(19): siRNA sense strand
ucagaaguauggagaagaa

SEQ ID NO: 2129907 - RNA, 19 nt, Homo sapiens
  misc_RNA (1)...(19): siRNA sense strand
uaucagguaucaucaaaug

SEQ ID NO: 2129908 - RNA, 19 nt, Homo sapiens
  misc_RNA (1)...(19): siRNA sense strand
ggacagauaucaacaaaag

SEQ ID NO: 2129909 - RNA, 19 nt, Homo sapiens
  misc_RNA (1)...(19): siRNA sense strand
gaaaguucuucuucuaucu

SEQ ID NO: 2129910 - RNA, 19 nt, Homo sapiens
  misc_RNA (1)...(19): siRNA sense strand
gaaauuauaggauccuugu

SEQ ID NO: 2129911 - RNA, 19 nt, Homo sapiens
  misc_RNA (1)...(19): siRNA sense strand
ggaauguccugaugcagau

SEQ ID NO: 2129912 - RNA, 19 nt, Homo sapiens
  misc_RNA (1)...(19): siRNA sense strand
gagcagauucuuccaaaug

SEQ ID NO: 2129913 - RNA, 19 nt, Homo sapiens
  misc_RNA (1)...(19): siRNA sense strand
gaaauacccaggccauuca

SEQ ID NO: 2129914 - RNA, 19 nt, Homo sapiens
  misc_RNA (1)...(19): siRNA sense strand
caaaacaucuacagagaaa

SEQ ID NO: 2129915 - RNA, 19 nt, Homo sapiens
  misc_RNA (1)...(19): siRNA sense strand
ccaaguguauugugaagau

SEQ ID NO: 2129916 - RNA, 19 nt, Homo sapiens
  misc_RNA (1)...(19): siRNA sense strand
cuauaggcuuuccuuaaua

SEQ ID NO: 2129917 - RNA, 19 nt, Homo sapiens
  misc_RNA (1)...(19): siRNA sense strand
gaaugcagaacaaaugaaa

SEQ ID NO: 2129918 - RNA, 19 nt, Homo sapiens
  misc_RNA (1)...(19): siRNA sense strand
gaagaaacucaucucauuc

SEQ ID NO: 2129919 - RNA, 19 nt, Homo sapiens
  misc_RNA (1)...(19): siRNA sense strand
guauggagaagaacaagua

SEQ ID NO: 2129920 - RNA, 19 nt, Homo sapiens
  misc_RNA (1)...(19): siRNA sense strand
gaacagaaaaugacagaaa

SEQ ID NO: 2129921 - RNA, 19 nt, Homo sapiens
  misc_RNA (1)...(19): siRNA sense strand
uagagcagauucuuccaaa

SEQ ID NO: 2129922 - RNA, 19 nt, Homo sapiens
  misc_RNA (1)...(19): siRNA sense strand
gcagaucccaccaagugua

SEQ ID NO: 2129923 - RNA, 19 nt, Homo sapiens
  misc_RNA (1)...(19): siRNA sense strand
ucagugggauuaaugaaau

SEQ ID NO: 2129924 - RNA, 19 nt, Homo sapiens
  misc_RNA (1)...(19): siRNA sense strand
gaagaugaagaaccaaaga

SEQ ID NO: 2129925 - RNA, 19 nt, Homo sapiens
  misc_RNA (1)...(19): siRNA sense strand
gcuguuaaaucuaagaaag

SEQ ID NO: 2129926 - RNA, 19 nt, Homo sapiens
  misc_RNA (1)...(19): siRNA sense strand
ugaagaaggcuacaguauu

SEQ ID NO: 2129927 - RNA, 19 nt, Homo sapiens
  misc_RNA (1)...(19): siRNA sense strand
aaacucaucucauucacau

SEQ ID NO: 2129928 - RNA, 19 nt, Homo sapiens
  misc_RNA (1)...(19): siRNA sense strand
gacagaaacagcucagaaa

SEQ ID NO: 2129929 - RNA, 19 nt, Homo sapiens
  misc_RNA (1)...(19): siRNA sense strand
aggcagcuguuaaaucuaa

SEQ ID NO: 2129930 - RNA, 19 nt, Homo sapiens
  misc_RNA (1)...(19): siRNA sense strand
ccacaacuccucuuucugu

SEQ ID NO: 2129931 - RNA, 19 nt, Homo sapiens
  misc_RNA (1)...(19): siRNA sense strand
cagaaacagcucagaaauu

SEQ ID NO: 2129932 - RNA, 19 nt, Homo sapiens
  misc_RNA (1)...(19): siRNA sense strand
guacagaugaaucggaauu

SEQ ID NO: 2129933 - RNA, 19 nt, Homo sapiens
  misc_RNA (1)...(19): siRNA sense strand
caacauacaggugguggua

SEQ ID NO: 2129934 - RNA, 19 nt, Homo sapiens
  misc_RNA (1)...(19): siRNA sense strand
uaaaguaucagguaucauc

SEQ ID NO: 2129935 - RNA, 19 nt, Homo sapiens
  misc_RNA (1)...(19): siRNA sense strand
cuaaugaggaguuaacaaa

SEQ ID NO: 2129936 - RNA, 19 nt, Homo sapiens
  misc_RNA (1)...(19): siRNA sense strand
aaaggaaguucagaaguau

SEQ ID NO: 2129937 - RNA, 19 nt, Homo sapiens
  misc_RNA (1)...(19): siRNA sense strand
ccagcugcuucuuauuaua

SEQ ID NO: 2129938 - RNA, 19 nt, Homo sapiens
  misc_RNA (1)...(19): siRNA sense strand
gcaguugcccuuacagaau

SEQ ID NO: 2129939 - RNA, 19 nt, Homo sapiens
  misc_RNA (1)...(19): siRNA sense strand
cguauuucgucgagaauuu

SEQ ID NO: 2129940 - RNA, 19 nt, Homo sapiens
  misc_RNA (1)...(19): siRNA sense strand
acagauaccuauaaacucu

SEQ ID NO: 2129941 - RNA, 19 nt, Homo sapiens
  misc_RNA (1)...(19): siRNA sense strand
gagaagaacaaguaaaguc

SEQ ID NO: 2129942 - RNA, 19 nt, Homo sapiens
  misc_RNA (1)...(19): siRNA sense strand
gcaccaguaugggauguau

SEQ ID NO: 2129943 - RNA, 19 nt, Homo sapiens
  misc_RNA (1)...(19): siRNA sense strand
ggaguagauuucgaacuug

SEQ ID NO: 2129944 - RNA, 19 nt, Homo sapiens
  misc_RNA (1)...(19): siRNA sense strand
ccauucagcccaccuguaa

SEQ ID NO: 2129945 - RNA, 19 nt, Homo sapiens
  misc_RNA (1)...(19): siRNA sense strand
uaagaaagcuacagauacc

SEQ ID NO: 2129946 - RNA, 19 nt, Homo sapiens
  misc_RNA (1)...(19): siRNA sense strand
aguaugggauguauucaaa

SEQ ID NO: 2129947 - RNA, 19 nt, Homo sapiens
  misc_RNA (1)...(19): siRNA sense strand
aaacagcucagaaauuuca

SEQ ID NO: 2129948 - RNA, 19 nt, Homo sapiens
  misc_RNA (1)...(19): siRNA sense strand
aggaguagauuucgaacuu

SEQ ID NO: 2129949 - RNA, 19 nt, Homo sapiens
  misc_RNA (1)...(19): siRNA sense strand
ccacgacacuugcaguaca

SEQ ID NO: 2129950 - RNA, 19 nt, Homo sapiens
  misc_RNA (1)...(19): siRNA sense strand
aaucggaauuugucuaaug

SEQ ID NO: 2129951 - RNA, 19 nt, Homo sapiens
  misc_RNA (1)...(19): siRNA sense strand
cagaaacaaaucagaauga

SEQ ID NO: 2129952 - RNA, 19 nt, Homo sapiens
  misc_RNA (1)...(19): siRNA sense strand
gaacaggagcguuugaaaa

SEQ ID NO: 2129953 - RNA, 19 nt, Homo sapiens
  misc_RNA (1)...(19): siRNA sense strand
gaguagauuucgaacuugu

SEQ ID NO: 2129954 - RNA, 19 nt, Homo sapiens
  misc_RNA (1)...(19): siRNA sense strand
gaugaagaaggcuacagua

SEQ ID NO: 2129955 - RNA, 19 nt, Homo sapiens
  misc_RNA (1)...(19): siRNA sense strand
gucaaaugcuauaaaggaa

SEQ ID NO: 2129956 - RNA, 19 nt, Homo sapiens
  misc_RNA (1)...(19): siRNA sense strand
ucuaagaaagcuacagaua

SEQ ID NO: 2129957 - RNA, 19 nt, Homo sapiens
  misc_RNA (1)...(19): siRNA sense strand
gaaagaccuggccucauug

SEQ ID NO: 2129958 - RNA, 19 nt, Homo sapiens
  misc_RNA (1)...(19): siRNA sense strand
ggcacuggcuauaggcuuu

SEQ ID NO: 2129959 - RNA, 19 nt, Homo sapiens
  misc_RNA (1)...(19): siRNA sense strand
uaaauacaauccagaagcu

SEQ ID NO: 2129960 - RNA, 19 nt, Homo sapiens
  misc_RNA (1)...(19): siRNA sense strand
gaaguauggagaagaacaa

SEQ ID NO: 2129961 - RNA, 19 nt, Homo sapiens
  misc_RNA (1)...(19): siRNA sense strand
ugacaaaacuagcaaaauc

SEQ ID NO: 2129962 - RNA, 19 nt, Homo sapiens
  misc_RNA (1)...(19): siRNA sense strand
gcuagcaccacagaucuua

SEQ ID NO: 2129963 - RNA, 19 nt, Homo sapiens
  misc_RNA (1)...(19): siRNA sense strand
gcccacaacuccucuuucu

SEQ ID NO: 2129964 - RNA, 19 nt, Homo sapiens
  misc_RNA (1)...(19): siRNA sense strand
caucuucacuaacuucauc

SEQ ID NO: 2129965 - RNA, 19 nt, Homo sapiens
  misc_RNA (1)...(19): siRNA sense strand
ccaaaccauucagagcaua

SEQ ID NO: 2129966 - RNA, 19 nt, Homo sapiens
  misc_RNA (1)...(19): siRNA sense strand
aaauccagcugcuucuuau

SEQ ID NO: 2129967 - RNA, 19 nt, Homo sapiens
  misc_RNA (1)...(19): siRNA sense strand
aaaaggaaccagugauuua

SEQ ID NO: 2129968 - RNA, 19 nt, Homo sapiens
  misc_RNA (1)...(19): siRNA sense strand
uaacucaggcccuccagaa

SEQ ID NO: 2129969 - RNA, 19 nt, Homo sapiens
  misc_RNA (1)...(19): siRNA sense strand
cuacagagaaauuagcaaa

SEQ ID NO: 2129970 - RNA, 19 nt, Homo sapiens
  misc_RNA (1)...(19): siRNA sense strand
ggcaaacucagugggauua

SEQ ID NO: 2129971 - RNA, 19 nt, Homo sapiens
  misc_RNA (1)...(19): siRNA sense strand
agaaugauaccaaagagaa

SEQ ID NO: 2129972 - RNA, 19 nt, Homo sapiens
  misc_RNA (1)...(19): siRNA sense strand
ggagcuacacaaagagaaa

SEQ ID NO: 2129973 - RNA, 19 nt, Homo sapiens
  misc_RNA (1)...(19): siRNA sense strand
uggaacauuugcaccagua

SEQ ID NO: 2129974 - RNA, 19 nt, Homo sapiens
  misc_RNA (1)...(19): siRNA sense strand
acuuggaucuuguuagaaa

SEQ ID NO: 2129975 - RNA, 19 nt, Homo sapiens
  misc_RNA (1)...(19): siRNA sense strand
gaagcuguccaaaccauuc

SEQ ID NO: 2129976 - RNA, 19 nt, Homo sapiens
  misc_RNA (1)...(19): siRNA sense strand
ggcuauaggcuuuccuuaa

SEQ ID NO: 2129977 - RNA, 19 nt, Homo sapiens
  misc_RNA (1)...(19): siRNA sense strand
cucugaaucuugcaacaua

SEQ ID NO: 2129978 - RNA, 19 nt, Homo sapiens
  misc_RNA (1)...(19): siRNA sense strand
cagguaucaucaaauggua

SEQ ID NO: 2129979 - RNA, 19 nt, Homo sapiens
  misc_RNA (1)...(19): siRNA sense strand
ugaaucggaauuugucuaa

SEQ ID NO: 2129980 - RNA, 19 nt, Homo sapiens
  misc_RNA (1)...(19): siRNA sense strand
ccagcaauaucuagacaca

SEQ ID NO: 2129981 - RNA, 19 nt, Homo sapiens
  misc_RNA (1)...(19): siRNA sense strand
gaaagcuacagauaccuau

SEQ ID NO: 2129982 - RNA, 19 nt, Homo sapiens
  misc_RNA (1)...(19): siRNA sense strand
aauauggaaugcagaacaa

SEQ ID NO: 2129983 - RNA, 19 nt, Homo sapiens
  misc_RNA (1)...(19): siRNA sense strand
gaacagagagggauugaau

SEQ ID NO: 2129984 - RNA, 19 nt, Homo sapiens
  misc_RNA (1)...(19): siRNA sense strand
ugacagcuguggcacuuua

SEQ ID NO: 2129985 - RNA, 19 nt, Homo sapiens
  misc_RNA (1)...(19): siRNA sense strand
ggacuuuguugauuccuuu

SEQ ID NO: 2129986 - RNA, 19 nt, Homo sapiens
  misc_RNA (1)...(19): siRNA sense strand
agaaagaaauacagaggua

SEQ ID NO: 2129987 - RNA, 19 nt, Homo sapiens
  misc_RNA (1)...(19): siRNA sense strand
uaaaggaccugcuaagaag

SEQ ID NO: 2129988 - RNA, 19 nt, Homo sapiens
  misc_RNA (1)...(19): siRNA sense strand
gaaaagaccucccagacuu

SEQ ID NO: 2129989 - RNA, 19 nt, Homo sapiens
  misc_RNA (1)...(19): siRNA sense strand
gaggaagacuccacuagug

SEQ ID NO: 2129990 - RNA, 19 nt, Homo sapiens
  misc_RNA (1)...(19): siRNA sense strand
ggaaacaucuacugcucuu

SEQ ID NO: 2129991 - RNA, 19 nt, Homo sapiens
  misc_RNA (1)...(19): siRNA sense strand
agaagaaccugaacagaga

SEQ ID NO: 2129992 - RNA, 19 nt, Homo sapiens
  misc_RNA (1)...(19): siRNA sense strand
gauagcagcucagaggaaa

SEQ ID NO: 2129993 - RNA, 19 nt, Homo sapiens
  misc_RNA (1)...(19): siRNA sense strand
ggauugaauuugaggauga

SEQ ID NO: 2129994 - RNA, 19 nt, Homo sapiens
  misc_RNA (1)...(19): siRNA sense strand
gauagagguugaacuugaa

SEQ ID NO: 2129995 - RNA, 19 nt, Homo sapiens
  misc_RNA (1)...(19): siRNA sense strand
guagacaggcggaauuuaa

SEQ ID NO: 2129996 - RNA, 19 nt, Homo sapiens
  misc_RNA (1)...(19): siRNA sense strand
gaagauuacaugucagauu

SEQ ID NO: 2129997 - RNA, 19 nt, Homo sapiens
  misc_RNA (1)...(19): siRNA sense strand
ugauagagguugaacuuga

SEQ ID NO: 2129998 - RNA, 19 nt, Homo sapiens
  misc_RNA (1)...(19): siRNA sense strand
agagagggauugaauuuga

SEQ ID NO: 2129999 - RNA, 19 nt, Homo sapiens
  misc_RNA (1)...(19): siRNA sense strand
ucagagagcucagaagaau

SEQ ID NO: 2130000 - RNA, 19 nt, Homo sapiens
  misc_RNA (1)...(19): siRNA sense strand
gacaaucagucuagugaga

SEQ ID NO: 2130001 - RNA, 19 nt, Homo sapiens
  misc_RNA (1)...(19): siRNA sense strand
aaaggaaucugaauuagag

SEQ ID NO: 2130002 - RNA, 19 nt, Homo sapiens
  misc_RNA (1)...(19): siRNA sense strand
gaucaguggugggcuauug

SEQ ID NO: 2130003 - RNA, 19 nt, Homo sapiens
  misc_RNA (1)...(19): siRNA sense strand
gcacauggaagagaaauug

SEQ ID NO: 2130004 - RNA, 19 nt, Homo sapiens
  misc_RNA (1)...(19): siRNA sense strand
ucacuuacagcuucaauaa

SEQ ID NO: 2130005 - RNA, 19 nt, Homo sapiens
  misc_RNA (1)...(19): siRNA sense strand
gaauuugucuccuaauacu

SEQ ID NO: 2130006 - RNA, 19 nt, Homo sapiens
  misc_RNA (1)...(19): siRNA sense strand
gagaaauugucccuacuuc

SEQ ID NO: 2130007 - RNA, 19 nt, Homo sapiens
  misc_RNA (1)...(19): siRNA sense strand
gaauuuagcaguucucaag

SEQ ID NO: 2130008 - RNA, 19 nt, Homo sapiens
  misc_RNA (1)...(19): siRNA sense strand
ggaaauagaaguggaagug

SEQ ID NO: 2130009 - RNA, 19 nt, Homo sapiens
  misc_RNA (1)...(19): siRNA sense strand
ccuauuagccugucaaaug

SEQ ID NO: 2130010 - RNA, 19 nt, Homo sapiens
  misc_RNA (1)...(19): siRNA sense strand
gagaugcagcuaacuauug

SEQ ID NO: 2130011 - RNA, 19 nt, Homo sapiens
  misc_RNA (1)...(19): siRNA sense strand
gaaauggagagaaaugaga

SEQ ID NO: 2130012 - RNA, 19 nt, Homo sapiens
  misc_RNA (1)...(19): siRNA sense strand
gaaaauucuugcucucuuu

SEQ ID NO: 2130013 - RNA, 19 nt, Homo sapiens
  misc_RNA (1)...(19): siRNA sense strand
ggagagagugguucuguau

SEQ ID NO: 2130014 - RNA, 19 nt, Homo sapiens
  misc_RNA (1)...(19): siRNA sense strand
gcagcuaacuauugauucu

SEQ ID NO: 2130015 - RNA, 19 nt, Homo sapiens
  misc_RNA (1)...(19): siRNA sense strand
acaaagagaagcacuuaaa

SEQ ID NO: 2130016 - RNA, 19 nt, Homo sapiens
  misc_RNA (1)...(19): siRNA sense strand
gaagaaaggagaggccauu

SEQ ID NO: 2130017 - RNA, 19 nt, Homo sapiens
  misc_RNA (1)...(19): siRNA sense strand
ccucagaguucuuugauag

SEQ ID NO: 2130018 - RNA, 19 nt, Homo sapiens
  misc_RNA (1)...(19): siRNA sense strand
cagaaauguugauggauga

SEQ ID NO: 2130019 - RNA, 19 nt, Homo sapiens
  misc_RNA (1)...(19): siRNA sense strand
caccagagcauuacaaaga

SEQ ID NO: 2130020 - RNA, 19 nt, Homo sapiens
  misc_RNA (1)...(19): siRNA sense strand
gaaauacagagguaaagau

SEQ ID NO: 2130021 - RNA, 19 nt, Homo sapiens
  misc_RNA (1)...(19): siRNA sense strand
gaaagaaauacagagguaa

SEQ ID NO: 2130022 - RNA, 19 nt, Homo sapiens
  misc_RNA (1)...(19): siRNA sense strand
cagacaauguugcuacuau

SEQ ID NO: 2130023 - RNA, 19 nt, Homo sapiens
  misc_RNA (1)...(19): siRNA sense strand
gggagagagugguucugua

SEQ ID NO: 2130024 - RNA, 19 nt, Homo sapiens
  misc_RNA (1)...(19): siRNA sense strand
ugucauagcaguacugauu

SEQ ID NO: 2130025 - RNA, 19 nt, Homo sapiens
  misc_RNA (1)...(19): siRNA sense strand
gccuaugaauggugagaua

SEQ ID NO: 2130026 - RNA, 19 nt, Homo sapiens
  misc_RNA (1)...(19): siRNA sense strand
ugaaagcagugauagagau

SEQ ID NO: 2130027 - RNA, 19 nt, Homo sapiens
  misc_RNA (1)...(19): siRNA sense strand
gaggaugaaagcagugaua

SEQ ID NO: 2130028 - RNA, 19 nt, Homo sapiens
  misc_RNA (1)...(19): siRNA sense strand
gaaauugucccuacuucca

SEQ ID NO: 2130029 - RNA, 19 nt, Homo sapiens
  misc_RNA (1)...(19): siRNA sense strand
uaauacuacuuccucauug

SEQ ID NO: 2130030 - RNA, 19 nt, Homo sapiens
  misc_RNA (1)...(19): siRNA sense strand
ggugggcuauugaugauau

SEQ ID NO: 2130031 - RNA, 19 nt, Homo sapiens
  misc_RNA (1)...(19): siRNA sense strand
agaccucacuuauaacaga

SEQ ID NO: 2130032 - RNA, 19 nt, Homo sapiens
  misc_RNA (1)...(19): siRNA sense strand
gauaauggacgauucucuu

SEQ ID NO: 2130033 - RNA, 19 nt, Homo sapiens
  misc_RNA (1)...(19): siRNA sense strand
gcgcuuggcuugcgguauc

SEQ ID NO: 2130034 - RNA, 19 nt, Homo sapiens
  misc_RNA (1)...(19): siRNA sense strand
ccgaagaaccggucucuga

SEQ ID NO: 2130035 - RNA, 19 nt, Homo sapiens
  misc_RNA (1)...(19): siRNA sense strand
ggaaaauucugcugaagau

SEQ ID NO: 2130036 - RNA, 19 nt, Homo sapiens
  misc_RNA (1)...(19): siRNA sense strand
ugagguagaugcaccagau

SEQ ID NO: 2130037 - RNA, 19 nt, Homo sapiens
  misc_RNA (1)...(19): siRNA sense strand
acagagagggauugaauuu

SEQ ID NO: 2130038 - RNA, 19 nt, Homo sapiens
  misc_RNA (1)...(19): siRNA sense strand
gaagaagaaccugaacaga

SEQ ID NO: 2130039 - RNA, 19 nt, Homo sapiens
  misc_RNA (1)...(19): siRNA sense strand
cuaaagcggccaaagauug

SEQ ID NO: 2130040 - RNA, 19 nt, Homo sapiens
  misc_RNA (1)...(19): siRNA sense strand
gagagugguucuguauguu

SEQ ID NO: 2130041 - RNA, 19 nt, Homo sapiens
  misc_RNA (1)...(19): siRNA sense strand
ggagcagucugaagcaucu

SEQ ID NO: 2130042 - RNA, 19 nt, Homo sapiens
  misc_RNA (1)...(19): siRNA sense strand
gcuacuaugucaaaugaag

SEQ ID NO: 2130043 - RNA, 19 nt, Homo sapiens
  misc_RNA (1)...(19): siRNA sense strand
caauguugcuacuauguca

SEQ ID NO: 2130044 - RNA, 19 nt, Homo sapiens
  misc_RNA (1)...(19): siRNA sense strand
gaagcaagauggugaaaag

SEQ ID NO: 2130045 - RNA, 19 nt, Homo sapiens
  misc_RNA (1)...(19): siRNA sense strand
gcaguacugauuaugcuaa

SEQ ID NO: 2130046 - RNA, 19 nt, Homo sapiens
  misc_RNA (1)...(19): siRNA sense strand
uacccaaaguuaccaauug

SEQ ID NO: 2130047 - RNA, 19 nt, Homo sapiens
  misc_RNA (1)...(19): siRNA sense strand
gaauuagagccuaugaaug

SEQ ID NO: 2130048 - RNA, 19 nt, Homo sapiens
  misc_RNA (1)...(19): siRNA sense strand
gaaaaggaaucugaauuag

SEQ ID NO: 2130049 - RNA, 19 nt, Homo sapiens
  misc_RNA (1)...(19): siRNA sense strand
agaugcagcuaacuauuga

SEQ ID NO: 2130050 - RNA, 19 nt, Homo sapiens
  misc_RNA (1)...(19): siRNA sense strand
cuauuagccugucaaaugu

SEQ ID NO: 2130051 - RNA, 19 nt, Homo sapiens
  misc_RNA (1)...(19): siRNA sense strand
ggaagacuccacuagugaa

SEQ ID NO: 2130052 - RNA, 19 nt, Homo sapiens
  misc_RNA (1)...(19): siRNA sense strand
caucagagagcucagaaga

SEQ ID NO: 2130053 - RNA, 19 nt, Homo sapiens
  misc_RNA (1)...(19): siRNA sense strand
uaaacaaauuggagucuac

SEQ ID NO: 2130054 - RNA, 19 nt, Homo sapiens
  misc_RNA (1)...(19): siRNA sense strand
uuacaaagagaagcacuua

SEQ ID NO: 2130055 - RNA, 19 nt, Homo sapiens
  misc_RNA (1)...(19): siRNA sense strand
gcuaagauucuguggaaga

SEQ ID NO: 2130056 - RNA, 19 nt, Homo sapiens
  misc_RNA (1)...(19): siRNA sense strand
agagagugguucuguaugu

SEQ ID NO: 2130057 - RNA, 19 nt, Homo sapiens
  misc_RNA (1)...(19): siRNA sense strand
gacagaagaaucagucaga

SEQ ID NO: 2130058 - RNA, 19 nt, Homo sapiens
  misc_RNA (1)...(19): siRNA sense strand
gaagaggaagacuccacua

SEQ ID NO: 2130059 - RNA, 19 nt, Homo sapiens
  misc_RNA (1)...(19): siRNA sense strand
ugaauuagagccuaugaau

SEQ ID NO: 2130060 - RNA, 19 nt, Homo sapiens
  misc_RNA (1)...(19): siRNA sense strand
agcaagaacugaagacaau

SEQ ID NO: 2130061 - RNA, 19 nt, Homo sapiens
  misc_RNA (1)...(19): siRNA sense strand
aacaggaaauggagagaaa

SEQ ID NO: 2130062 - RNA, 19 nt, Homo sapiens
  misc_RNA (1)...(19): siRNA sense strand
ggaagaagaaccugaacag

SEQ ID NO: 2130063 - RNA, 19 nt, Homo sapiens
  misc_RNA (1)...(19): siRNA sense strand
auaaaggaccugcuaagaa

SEQ ID NO: 2130064 - RNA, 19 nt, Homo sapiens
  misc_RNA (1)...(19): siRNA sense strand
gggcauaaaggaccugcua

SEQ ID NO: 2130065 - RNA, 19 nt, Homo sapiens
  misc_RNA (1)...(19): siRNA sense strand
ggaagugccugugguagac

SEQ ID NO: 2130066 - RNA, 19 nt, Homo sapiens
  misc_RNA (1)...(19): siRNA sense strand
gaacagaauccugcgaagu

SEQ ID NO: 2130067 - RNA, 19 nt, Homo sapiens
  misc_RNA (1)...(19): siRNA sense strand
gaaagcagugauagagaug

SEQ ID NO: 2130068 - RNA, 19 nt, Homo sapiens
  misc_RNA (1)...(19): siRNA sense strand
ugucuucucucauguauac

SEQ ID NO: 2130069 - RNA, 19 nt, Homo sapiens
  misc_RNA (1)...(19): siRNA sense strand
ggaagcauaugugccucuu

SEQ ID NO: 2130070 - RNA, 19 nt, Homo sapiens
  misc_RNA (1)...(19): siRNA sense strand
uugcuacuaugucaaauga

SEQ ID NO: 2130071 - RNA, 19 nt, Homo sapiens
  misc_RNA (1)...(19): siRNA sense strand
acucagaaauguugaugga

SEQ ID NO: 2130072 - RNA, 19 nt, Homo sapiens
  misc_RNA (1)...(19): siRNA sense strand
agacuccacuagugaaguu

SEQ ID NO: 2130073 - RNA, 19 nt, Homo sapiens
  misc_RNA (1)...(19): siRNA sense strand
uagcaguucucaaggugaa

SEQ ID NO: 2130074 - RNA, 19 nt, Homo sapiens
  misc_RNA (1)...(19): siRNA sense strand
caauugccaguucuugaua

SEQ ID NO: 2130075 - RNA, 19 nt, Homo sapiens
  misc_RNA (1)...(19): siRNA sense strand
uagcagcucagaggaaaua

SEQ ID NO: 2130076 - RNA, 19 nt, Homo sapiens
  misc_RNA (1)...(19): siRNA sense strand
gcaagauggugaaaaggaa

SEQ ID NO: 2130077 - RNA, 19 nt, Homo sapiens
  misc_RNA (1)...(19): siRNA sense strand
gaugaaagcagugauagag

SEQ ID NO: 2130078 - RNA, 19 nt, Homo sapiens
  misc_RNA (1)...(19): siRNA sense strand
gguauccacugucuucucu

SEQ ID NO: 2130079 - RNA, 19 nt, Homo sapiens
  misc_RNA (1)...(19): siRNA sense strand
agugaagacucuacaaauc

SEQ ID NO: 2130080 - RNA, 19 nt, Homo sapiens
  misc_RNA (1)...(19): siRNA sense strand
ggccaaagggcauaaagga

SEQ ID NO: 2130081 - RNA, 19 nt, Homo sapiens
  misc_RNA (1)...(19): siRNA sense strand
gaaaggccaaagggcauaa

SEQ ID NO: 2130082 - RNA, 19 nt, Homo sapiens
  misc_RNA (1)...(19): siRNA sense strand
cuaauacuacuuccucauu

SEQ ID NO: 2130083 - RNA, 19 nt, Homo sapiens
  misc_RNA (1)...(19): siRNA sense strand
ggagagaacuuaguauaua

SEQ ID NO: 2130084 - RNA, 19 nt, Homo sapiens
  misc_RNA (1)...(19): siRNA sense strand
caagaaagaucaagagaaa

SEQ ID NO: 2130085 - RNA, 19 nt, Homo sapiens
  misc_RNA (1)...(19): siRNA sense strand
gaucagaaaucucuaguga

SEQ ID NO: 2130086 - RNA, 19 nt, Homo sapiens
  misc_RNA (1)...(19): siRNA sense strand
gaaaucaaguuaccaguug

SEQ ID NO: 2130087 - RNA, 19 nt, Homo sapiens
  misc_RNA (1)...(19): siRNA sense strand
gcacagagaagaauaaauu

SEQ ID NO: 2130088 - RNA, 19 nt, Homo sapiens
  misc_RNA (1)...(19): siRNA sense strand
ggaauuacauugacagaga

SEQ ID NO: 2130089 - RNA, 19 nt, Homo sapiens
  misc_RNA (1)...(19): siRNA sense strand
gaaggaaauuucucacaaa

SEQ ID NO: 2130090 - RNA, 19 nt, Homo sapiens
  misc_RNA (1)...(19): siRNA sense strand
gacagcaagugaacuauua

SEQ ID NO: 2130091 - RNA, 19 nt, Homo sapiens
  misc_RNA (1)...(19): siRNA sense strand
gcccauccaucaaauauua

SEQ ID NO: 2130092 - RNA, 19 nt, Homo sapiens
  misc_RNA (1)...(19): siRNA sense strand
ucagaaaucucuagugaaa

SEQ ID NO: 2130093 - RNA, 19 nt, Homo sapiens
  misc_RNA (1)...(19): siRNA sense strand
gaggaaagauuguuugaau

SEQ ID NO: 2130094 - RNA, 19 nt, Homo sapiens
  misc_RNA (1)...(19): siRNA sense strand
ggaaggagcuuuuaaggua

SEQ ID NO: 2130095 - RNA, 19 nt, Homo sapiens
  misc_RNA (1)...(19): siRNA sense strand
gaagguugcuguuugauca

SEQ ID NO: 2130096 - RNA, 19 nt, Homo sapiens
  misc_RNA (1)...(19): siRNA sense strand
gaccaugaauucuauguuu

SEQ ID NO: 2130097 - RNA, 19 nt, Homo sapiens
  misc_RNA (1)...(19): siRNA sense strand
gugaggaccuaacaaauaa

SEQ ID NO: 2130098 - RNA, 19 nt, Homo sapiens
  misc_RNA (1)...(19): siRNA sense strand
ggagaagguugcuguuuga

SEQ ID NO: 2130099 - RNA, 19 nt, Homo sapiens
  misc_RNA (1)...(19): siRNA sense strand
gacagaagcuggaacaugu

SEQ ID NO: 2130100 - RNA, 19 nt, Homo sapiens
  misc_RNA (1)...(19): siRNA sense strand
guacucagaucacauguau

SEQ ID NO: 2130101 - RNA, 19 nt, Homo sapiens
  misc_RNA (1)...(19): siRNA sense strand
uagcgaggauacaauauua

SEQ ID NO: 2130102 - RNA, 19 nt, Homo sapiens
  misc_RNA (1)...(19): siRNA sense strand
caaauucagugacaaauag

SEQ ID NO: 2130103 - RNA, 19 nt, Homo sapiens
  misc_RNA (1)...(19): siRNA sense strand
caaagaccaugaauucuau

SEQ ID NO: 2130104 - RNA, 19 nt, Homo sapiens
  misc_RNA (1)...(19): siRNA sense strand
gaagagugcuuuggaugaa

SEQ ID NO: 2130105 - RNA, 19 nt, Homo sapiens
  misc_RNA (1)...(19): siRNA sense strand
gugcuaagguuaauuguga

SEQ ID NO: 2130106 - RNA, 19 nt, Homo sapiens
  misc_RNA (1)...(19): siRNA sense strand
gaaaguggucagauuuaua

SEQ ID NO: 2130107 - RNA, 19 nt, Homo sapiens
  misc_RNA (1)...(19): siRNA sense strand
gaaccuggauuuaucagau

SEQ ID NO: 2130108 - RNA, 19 nt, Homo sapiens
  misc_RNA (1)...(19): siRNA sense strand
cugaacauguugcaaauua

SEQ ID NO: 2130109 - RNA, 19 nt, Homo sapiens
  misc_RNA (1)...(19): siRNA sense strand
gaacaacaccauguacuuu

SEQ ID NO: 2130110 - RNA, 19 nt, Homo sapiens
  misc_RNA (1)...(19): siRNA sense strand
gcaaagcgaguuuauuuau

SEQ ID NO: 2130111 - RNA, 19 nt, Homo sapiens
  misc_RNA (1)...(19): siRNA sense strand
gguagaaaguggucagauu

SEQ ID NO: 2130112 - RNA, 19 nt, Homo sapiens
  misc_RNA (1)...(19): siRNA sense strand
ucaaagaucccaacacaaa

SEQ ID NO: 2130113 - RNA, 19 nt, Homo sapiens
  misc_RNA (1)...(19): siRNA sense strand
gagcagauguaaauaucaa

SEQ ID NO: 2130114 - RNA, 19 nt, Homo sapiens
  misc_RNA (1)...(19): siRNA sense strand
ggagguagcagucucauug

SEQ ID NO: 2130115 - RNA, 19 nt, Homo sapiens
  misc_RNA (1)...(19): siRNA sense strand
ggaguaagguaacguaucu

SEQ ID NO: 2130116 - RNA, 19 nt, Homo sapiens
  misc_RNA (1)...(19): siRNA sense strand
ggaaauuucucacaaacca

SEQ ID NO: 2130117 - RNA, 19 nt, Homo sapiens
  misc_RNA (1)...(19): siRNA sense strand
gcugauccauuauuuagaa

SEQ ID NO: 2130118 - RNA, 19 nt, Homo sapiens
  misc_RNA (1)...(19): siRNA sense strand
gaaagggcaaucuccauaa

SEQ ID NO: 2130119 - RNA, 19 nt, Homo sapiens
  misc_RNA (1)...(19): siRNA sense strand
gaaguugcuuguuuagaug

SEQ ID NO: 2130120 - RNA, 19 nt, Homo sapiens
  misc_RNA (1)...(19): siRNA sense strand
uaacguaucuugggaagga

SEQ ID NO: 2130121 - RNA, 19 nt, Homo sapiens
  misc_RNA (1)...(19): siRNA sense strand
ggaauuaugcuuggaguaa

SEQ ID NO: 2130122 - RNA, 19 nt, Homo sapiens
  misc_RNA (1)...(19): siRNA sense strand
gaauuaacccaggaaauaa

SEQ ID NO: 2130123 - RNA, 19 nt, Homo sapiens
  misc_RNA (1)...(19): siRNA sense strand
ucauuuagcugucagaaga

SEQ ID NO: 2130124 - RNA, 19 nt, Homo sapiens
  misc_RNA (1)...(19): siRNA sense strand
gaaguucaaugcuuggaau

SEQ ID NO: 2130125 - RNA, 19 nt, Homo sapiens
  misc_RNA (1)...(19): siRNA sense strand
ucaagggauugcugucuua

SEQ ID NO: 2130126 - RNA, 19 nt, Homo sapiens
  misc_RNA (1)...(19): siRNA sense strand
gccaagagcucacuagucu

SEQ ID NO: 2130127 - RNA, 19 nt, Homo sapiens
  misc_RNA (1)...(19): siRNA sense strand
ugccagaaaugaauguuua

SEQ ID NO: 2130128 - RNA, 19 nt, Homo sapiens
  misc_RNA (1)...(19): siRNA sense strand
ggagcaaacccuaaucaaa

SEQ ID NO: 2130129 - RNA, 19 nt, Homo sapiens
  misc_RNA (1)...(19): siRNA sense strand
uuacuuacaucaccagaaa

SEQ ID NO: 2130130 - RNA, 19 nt, Homo sapiens
  misc_RNA (1)...(19): siRNA sense strand
gaaccaaacaaaucaaugu

SEQ ID NO: 2130131 - RNA, 19 nt, Homo sapiens
  misc_RNA (1)...(19): siRNA sense strand
ccacaaagccaguauuuua

SEQ ID NO: 2130132 - RNA, 19 nt, Homo sapiens
  misc_RNA (1)...(19): siRNA sense strand
ugaaagcccugauagaauc

SEQ ID NO: 2130133 - RNA, 19 nt, Homo sapiens
  misc_RNA (1)...(19): siRNA sense strand
guaaagaauuggccaacau

SEQ ID NO: 2130134 - RNA, 19 nt, Homo sapiens
  misc_RNA (1)...(19): siRNA sense strand
aaaugagccuuuauccaua

SEQ ID NO: 2130135 - RNA, 19 nt, Homo sapiens
  misc_RNA (1)...(19): siRNA sense strand
caaaugagccuuuauccau

SEQ ID NO: 2130136 - RNA, 19 nt, Homo sapiens
  misc_RNA (1)...(19): siRNA sense strand
gauguagacuguaauccaa

SEQ ID NO: 2130137 - RNA, 19 nt, Homo sapiens
  misc_RNA (1)...(19): siRNA sense strand
aaaccaaaguucaguucua

SEQ ID NO: 2130138 - RNA, 19 nt, Homo sapiens
  misc_RNA (1)...(19): siRNA sense strand
agaauuaacccaggaaaua

SEQ ID NO: 2130139 - RNA, 19 nt, Homo sapiens
  misc_RNA (1)...(19): siRNA sense strand
agacaaagaccaugaauuc

SEQ ID NO: 2130140 - RNA, 19 nt, Homo sapiens
  misc_RNA (1)...(19): siRNA sense strand
ucacaaaccaggaaugaaa

SEQ ID NO: 2130141 - RNA, 19 nt, Homo sapiens
  misc_RNA (1)...(19): siRNA sense strand
gugugaaccuuccagcuua

SEQ ID NO: 2130142 - RNA, 19 nt, Homo sapiens
  misc_RNA (1)...(19): siRNA sense strand
ggauccggcuuuaaugauu

SEQ ID NO: 2130143 - RNA, 19 nt, Homo sapiens
  misc_RNA (1)...(19): siRNA sense strand
guagaaaguggucagauuu

SEQ ID NO: 2130144 - RNA, 19 nt, Homo sapiens
  misc_RNA (1)...(19): siRNA sense strand
uacagaagcuacagacaaa

SEQ ID NO: 2130145 - RNA, 19 nt, Homo sapiens
  misc_RNA (1)...(19): siRNA sense strand
gagaacaauuggccaacuu

SEQ ID NO: 2130146 - RNA, 19 nt, Homo sapiens
  misc_RNA (1)...(19): siRNA sense strand
gccaacaucucaaaacuua

SEQ ID NO: 2130147 - RNA, 19 nt, Homo sapiens
  misc_RNA (1)...(19): siRNA sense strand
uagaugauguagacuguaa

SEQ ID NO: 2130148 - RNA, 19 nt, Homo sapiens
  misc_RNA (1)...(19): siRNA sense strand
aagcaaagcgaguuuauuu

SEQ ID NO: 2130149 - RNA, 19 nt, Homo sapiens
  misc_RNA (1)...(19): siRNA sense strand
gccaaggauuuauguauga

SEQ ID NO: 2130150 - RNA, 19 nt, Homo sapiens
  misc_RNA (1)...(19): siRNA sense strand
ccaaguagaugauguagac

SEQ ID NO: 2130151 - RNA, 19 nt, Homo sapiens
  misc_RNA (1)...(19): siRNA sense strand
ugacucaucuucccuuuca

SEQ ID NO: 2130152 - RNA, 19 nt, Homo sapiens
  misc_RNA (1)...(19): siRNA sense strand
agagauauaucccuaaaca

SEQ ID NO: 2130153 - RNA, 19 nt, Homo sapiens
  misc_RNA (1)...(19): siRNA sense strand
gagauucaacuuggauuua

SEQ ID NO: 2130154 - RNA, 19 nt, Homo sapiens
  misc_RNA (1)...(19): siRNA sense strand
aaauagcucugaucaggaa

SEQ ID NO: 2130155 - RNA, 19 nt, Homo sapiens
  misc_RNA (1)...(19): siRNA sense strand
gaacauguugcaaauuaug

SEQ ID NO: 2130156 - RNA, 19 nt, Homo sapiens
  misc_RNA (1)...(19): siRNA sense strand
gagaauaaacagauugguu

SEQ ID NO: 2130157 - RNA, 19 nt, Homo sapiens
  misc_RNA (1)...(19): siRNA sense strand
gcucaaaggaguagcauug

SEQ ID NO: 2130158 - RNA, 19 nt, Homo sapiens
  misc_RNA (1)...(19): siRNA sense strand
gcaaaguacucagaucaca

SEQ ID NO: 2130159 - RNA, 19 nt, Homo sapiens
  misc_RNA (1)...(19): siRNA sense strand
gaggagaucauccagacua

SEQ ID NO: 2130160 - RNA, 19 nt, Homo sapiens
  misc_RNA (1)...(19): siRNA sense strand
acgcaucucuuaaaucuga

SEQ ID NO: 2130161 - RNA, 19 nt, Homo sapiens
  misc_RNA (1)...(19): siRNA sense strand
ucacuagucuggaaaauuu

SEQ ID NO: 2130162 - RNA, 19 nt, Homo sapiens
  misc_RNA (1)...(19): siRNA sense strand
ggaugaagcagaugaugaa

SEQ ID NO: 2130163 - RNA, 19 nt, Homo sapiens
  misc_RNA (1)...(19): siRNA sense strand
ccacugacaauaugaguaa

SEQ ID NO: 2130164 - RNA, 19 nt, Homo sapiens
  misc_RNA (1)...(19): siRNA sense strand
ugagagauauaucccuaaa

SEQ ID NO: 2130165 - RNA, 19 nt, Homo sapiens
  misc_RNA (1)...(19): siRNA sense strand
gaaaucaagcucuguuaca

SEQ ID NO: 2130166 - RNA, 19 nt, Homo sapiens
  misc_RNA (1)...(19): siRNA sense strand
uaugugaccuggaauuaug

SEQ ID NO: 2130167 - RNA, 19 nt, Homo sapiens
  misc_RNA (1)...(19): siRNA sense strand
gaucuuauggugcuauuga

SEQ ID NO: 2130168 - RNA, 19 nt, Homo sapiens
  misc_RNA (1)...(19): siRNA sense strand
cgucaaagaucccaacaca

SEQ ID NO: 2130169 - RNA, 19 nt, Homo sapiens
  misc_RNA (1)...(19): siRNA sense strand
gaaguggaguucaauacgu

SEQ ID NO: 2130170 - RNA, 19 nt, Homo sapiens
  misc_RNA (1)...(19): siRNA sense strand
caaugaccaugacuucuga

SEQ ID NO: 2130171 - RNA, 19 nt, Homo sapiens
  misc_RNA (1)...(19): siRNA sense strand
uggaagcccugaacacauu

SEQ ID NO: 2130172 - RNA, 19 nt, Homo sapiens
  misc_RNA (1)...(19): siRNA sense strand
agaaguugcuuguuuagau

SEQ ID NO: 2130173 - RNA, 19 nt, Homo sapiens
  misc_RNA (1)...(19): siRNA sense strand
acaaagaccaugaauucua

SEQ ID NO: 2130174 - RNA, 19 nt, Homo sapiens
  misc_RNA (1)...(19): siRNA sense strand
gaaauaagaaacccugaag

SEQ ID NO: 2130175 - RNA, 19 nt, Homo sapiens
  misc_RNA (1)...(19): siRNA sense strand
caauauagauucucauucc

SEQ ID NO: 2130176 - RNA, 19 nt, Homo sapiens
  misc_RNA (1)...(19): siRNA sense strand
gcaguuauuucugaacaug

SEQ ID NO: 2130177 - RNA, 19 nt, Homo sapiens
  misc_RNA (1)...(19): siRNA sense strand
agaaggcuauaacaucuaa

SEQ ID NO: 2130178 - RNA, 19 nt, Homo sapiens
  misc_RNA (1)...(19): siRNA sense strand
ugaccaaacugaagcuguu

SEQ ID NO: 2130179 - RNA, 19 nt, Homo sapiens
  misc_RNA (1)...(19): siRNA sense strand
ggccaaggauuuauguaug

SEQ ID NO: 2130180 - RNA, 19 nt, Homo sapiens
  misc_RNA (1)...(19): siRNA sense strand
gaaacugcguguguguuga

SEQ ID NO: 2130181 - RNA, 19 nt, Homo sapiens
  misc_RNA (1)...(19): siRNA sense strand
caucuggauugcaaacuuu

SEQ ID NO: 2130182 - RNA, 19 nt, Homo sapiens
  misc_RNA (1)...(19): siRNA sense strand
ccaaucagguucacuuucu

SEQ ID NO: 2130183 - RNA, 19 nt, Homo sapiens
  misc_RNA (1)...(19): siRNA sense strand
gaaacagucucuucugauu

SEQ ID NO: 2130184 - RNA, 19 nt, Homo sapiens
  misc_RNA (1)...(19): siRNA sense strand
ggacagaauugggcgcuua

SEQ ID NO: 2130185 - RNA, 19 nt, Homo sapiens
  misc_RNA (1)...(19): siRNA sense strand
gcaccgagcuguacggaau

SEQ ID NO: 2130186 - RNA, 19 nt, Homo sapiens
  misc_RNA (1)...(19): siRNA sense strand
gaugucagauuaccuuuga

SEQ ID NO: 2130187 - RNA, 19 nt, Homo sapiens
  misc_RNA (1)...(19): siRNA sense strand
uagaugagcugauugaaau

SEQ ID NO: 2130188 - RNA, 19 nt, Homo sapiens
  misc_RNA (1)...(19): siRNA sense strand
gauaggacuucacugauga

SEQ ID NO: 2130189 - RNA, 19 nt, Homo sapiens
  misc_RNA (1)...(19): siRNA sense strand
guucaaaucuguaacuuuc

SEQ ID NO: 2130190 - RNA, 19 nt, Homo sapiens
  misc_RNA (1)...(19): siRNA sense strand
ccagagaggugaagaaaca

SEQ ID NO: 2130191 - RNA, 19 nt, Homo sapiens
  misc_RNA (1)...(19): siRNA sense strand
ggauaggacuucacugaug

SEQ ID NO: 2130192 - RNA, 19 nt, Homo sapiens
  misc_RNA (1)...(19): siRNA sense strand
acaaauagaugagcugauu

SEQ ID NO: 2130193 - RNA, 19 nt, Homo sapiens
  misc_RNA (1)...(19): siRNA sense strand
uucaagaacugcacauuua

SEQ ID NO: 2130194 - RNA, 19 nt, Homo sapiens
  misc_RNA (1)...(19): siRNA sense strand
ggagagagauaaauaugca

SEQ ID NO: 2130195 - RNA, 19 nt, Homo sapiens
  misc_RNA (1)...(19): siRNA sense strand
ggaauuugguugacuuuua

SEQ ID NO: 2130196 - RNA, 19 nt, Homo sapiens
  misc_RNA (1)...(19): siRNA sense strand
gcacauuuauugacacugu

SEQ ID NO: 2130197 - RNA, 19 nt, Homo sapiens
  misc_RNA (1)...(19): siRNA sense strand
ccagaaauguggagagaga

SEQ ID NO: 2130198 - RNA, 19 nt, Homo sapiens
  misc_RNA (1)...(19): siRNA sense strand
gaucagcuguuucuuccuu

SEQ ID NO: 2130199 - RNA, 19 nt, Homo sapiens
  misc_RNA (1)...(19): siRNA sense strand
ccaaggacauugccagaga

SEQ ID NO: 2130200 - RNA, 19 nt, Homo sapiens
  misc_RNA (1)...(19): siRNA sense strand
gaaacaaacaguaaagaag

SEQ ID NO: 2130201 - RNA, 19 nt, Homo sapiens
  misc_RNA (1)...(19): siRNA sense strand
aaggagagcugacgaggaa

SEQ ID NO: 2130202 - RNA, 19 nt, Homo sapiens
  misc_RNA (1)...(19): siRNA sense strand
ccaagguuauggcuucuuu

SEQ ID NO: 2130203 - RNA, 19 nt, Homo sapiens
  misc_RNA (1)...(19): siRNA sense strand
gaauaugcauugcuaacca

SEQ ID NO: 2130204 - RNA, 19 nt, Homo sapiens
  misc_RNA (1)...(19): siRNA sense strand
ugaugaagcuuggaugauu

SEQ ID NO: 2130205 - RNA, 19 nt, Homo sapiens
  misc_RNA (1)...(19): siRNA sense strand
uauagugccuacuggauuu

SEQ ID NO: 2130206 - RNA, 19 nt, Homo sapiens
  misc_RNA (1)...(19): siRNA sense strand
cagauuaccuuugaugaug

SEQ ID NO: 2130207 - RNA, 19 nt, Homo sapiens
  misc_RNA (1)...(19): siRNA sense strand
aagacgggaugucagauua

SEQ ID NO: 2130208 - RNA, 19 nt, Homo sapiens
  misc_RNA (1)...(19): siRNA sense strand
gacgaaggcucaagugaag

SEQ ID NO: 2130209 - RNA, 19 nt, Homo sapiens
  misc_RNA (1)...(19): siRNA sense strand
cgaugaauaugcauugcua

SEQ ID NO: 2130210 - RNA, 19 nt, Homo sapiens
  misc_RNA (1)...(19): siRNA sense strand
agucagggauaauacaaua

SEQ ID NO: 2130211 - RNA, 19 nt, Homo sapiens
  misc_RNA (1)...(19): siRNA sense strand
ugauugaaauugagaguga

SEQ ID NO: 2130212 - RNA, 19 nt, Homo sapiens
  misc_RNA (1)...(19): siRNA sense strand
ggcgggagcuggaaucaga

SEQ ID NO: 2130213 - RNA, 19 nt, Homo sapiens
  misc_RNA (1)...(19): siRNA sense strand
gaagaaacaaacaguaaag

SEQ ID NO: 2130214 - RNA, 19 nt, Homo sapiens
  misc_RNA (1)...(19): siRNA sense strand
ggaugauucugaaguuaau

SEQ ID NO: 2130215 - RNA, 19 nt, Homo sapiens
  misc_RNA (1)...(19): siRNA sense strand
gaugaagcuuggaugauuc

SEQ ID NO: 2130216 - RNA, 19 nt, Homo sapiens
  misc_RNA (1)...(19): siRNA sense strand
cugggaaacuuaauauuug

SEQ ID NO: 2130217 - RNA, 19 nt, Homo sapiens
  misc_RNA (1)...(19): siRNA sense strand
gguuauggcuucuuucucu

SEQ ID NO: 2130218 - RNA, 19 nt, Homo sapiens
  misc_RNA (1)...(19): siRNA sense strand
gugaagaaacaaacaguaa

SEQ ID NO: 2130219 - RNA, 19 nt, Homo sapiens
  misc_RNA (1)...(19): siRNA sense strand
ggcuuuggcuucuuaaaug

SEQ ID NO: 2130220 - RNA, 19 nt, Homo sapiens
  misc_RNA (1)...(19): siRNA sense strand
gaaauguggagagagauaa

SEQ ID NO: 2130221 - RNA, 19 nt, Homo sapiens
  misc_RNA (1)...(19): siRNA sense strand
guuccaagaugaagaagau

SEQ ID NO: 2130222 - RNA, 19 nt, Homo sapiens
  misc_RNA (1)...(19): siRNA sense strand
gcaugucugucaacggauu

SEQ ID NO: 2130223 - RNA, 19 nt, Homo sapiens
  misc_RNA (1)...(19): siRNA sense strand
cgacaauggcagauucaua

SEQ ID NO: 2130224 - RNA, 19 nt, Homo sapiens
  misc_RNA (1)...(19): siRNA sense strand
gggaucggccuaccaguuu

SEQ ID NO: 2130225 - RNA, 19 nt, Homo sapiens
  misc_RNA (1)...(19): siRNA sense strand
gacaauggcagauucauag

SEQ ID NO: 2130226 - RNA, 19 nt, Homo sapiens
  misc_RNA (1)...(19): siRNA sense strand
ugaagaagaugaugaugac

SEQ ID NO: 2130227 - RNA, 19 nt, Homo sapiens
  misc_RNA (1)...(19): siRNA sense strand
ggaauggaauacgacaaug

SEQ ID NO: 2130228 - RNA, 19 nt, Homo sapiens
  misc_RNA (1)...(19): siRNA sense strand
ggaccgagcccaggaugaa

SEQ ID NO: 2130229 - RNA, 19 nt, Homo sapiens
  misc_RNA (1)...(19): siRNA sense strand
ccugggaaacuuaauauuu

SEQ ID NO: 2130230 - RNA, 19 nt, Homo sapiens
  misc_RNA (1)...(19): siRNA sense strand
caagaacugcacauuuauu

SEQ ID NO: 2130231 - RNA, 19 nt, Homo sapiens
  misc_RNA (1)...(19): siRNA sense strand
acaggaacaugguauagga

SEQ ID NO: 2130232 - RNA, 19 nt, Homo sapiens
  misc_RNA (1)...(19): siRNA sense strand
ugaugaagaugaugagauc

SEQ ID NO: 2130233 - RNA, 19 nt, Homo sapiens
  misc_RNA (1)...(19): siRNA sense strand
gagcuggaaucagaaagga

SEQ ID NO: 2130234 - RNA, 19 nt, Homo sapiens
  misc_RNA (1)...(19): siRNA sense strand
uaugagauguuucaacuac

SEQ ID NO: 2130235 - RNA, 19 nt, Homo sapiens
  misc_RNA (1)...(19): siRNA sense strand
cuucauuuguccaagguua

SEQ ID NO: 2130236 - RNA, 19 nt, Homo sapiens
  misc_RNA (1)...(19): siRNA sense strand
guaaagaaggugaaucaag

SEQ ID NO: 2130237 - RNA, 19 nt, Homo sapiens
  misc_RNA (1)...(19): siRNA sense strand
gcaguccgaugaauaugca

SEQ ID NO: 2130238 - RNA, 19 nt, Homo sapiens
  misc_RNA (1)...(19): siRNA sense strand
ggucuucacgguaaacaaa

SEQ ID NO: 2130239 - RNA, 19 nt, Homo sapiens
  misc_RNA (1)...(19): siRNA sense strand
ugaaagcccacgauucuug

SEQ ID NO: 2130240 - RNA, 19 nt, Homo sapiens
  misc_RNA (1)...(19): siRNA sense strand
ggaaacagucucuucugau

SEQ ID NO: 2130241 - RNA, 19 nt, Homo sapiens
  misc_RNA (1)...(19): siRNA sense strand
cagcagccguccugggaaa

SEQ ID NO: 2130242 - RNA, 19 nt, Homo sapiens
  misc_RNA (1)...(19): siRNA sense strand
aacagucucuucugauuug

SEQ ID NO: 2130243 - RNA, 19 nt, Homo sapiens
  misc_RNA (1)...(19): siRNA sense strand
gagcugauaauccaagaau

SEQ ID NO: 2130244 - RNA, 19 nt, Homo sapiens
  misc_RNA (1)...(19): siRNA sense strand
gcaacaggcuuuggcuucu

SEQ ID NO: 2130245 - RNA, 19 nt, Homo sapiens
  misc_RNA (1)...(19): siRNA sense strand
aggaaacagucucuucuga

SEQ ID NO: 2130246 - RNA, 19 nt, Homo sapiens
  misc_RNA (1)...(19): siRNA sense strand
gaacugcacauuuauugac

SEQ ID NO: 2130247 - RNA, 19 nt, Homo sapiens
  misc_RNA (1)...(19): siRNA sense strand
gaacaccuacuucaagaac

SEQ ID NO: 2130248 - RNA, 19 nt, Homo sapiens
  misc_RNA (1)...(19): siRNA sense strand
gaggauguaacuucaguga

SEQ ID NO: 2130249 - RNA, 19 nt, Homo sapiens
  misc_RNA (1)...(19): siRNA sense strand
ugacgaaggcucaagugaa

SEQ ID NO: 2130250 - RNA, 19 nt, Homo sapiens
  misc_RNA (1)...(19): siRNA sense strand
ccacuguguucucguacuu

SEQ ID NO: 2130251 - RNA, 19 nt, Homo sapiens
  misc_RNA (1)...(19): siRNA sense strand
gaggagccauacccacugu

SEQ ID NO: 2130252 - RNA, 19 nt, Homo sapiens
  misc_RNA (1)...(19): siRNA sense strand
ggugaagaaacaaacagua

SEQ ID NO: 2130253 - RNA, 19 nt, Homo sapiens
  misc_RNA (1)...(19): siRNA sense strand
aagcuuggaugauucugaa

SEQ ID NO: 2130254 - RNA, 19 nt, Homo sapiens
  misc_RNA (1)...(19): siRNA sense strand
aaacagucucuucugauuu

SEQ ID NO: 2130255 - RNA, 19 nt, Homo sapiens
  misc_RNA (1)...(19): siRNA sense strand
aacaggcuuuggcuucuua

SEQ ID NO: 2130256 - RNA, 19 nt, Homo sapiens
  misc_RNA (1)...(19): siRNA sense strand
caacaggcuuuggcuucuu

SEQ ID NO: 2130257 - RNA, 19 nt, Homo sapiens
  misc_RNA (1)...(19): siRNA sense strand
caagacgggaugucagauu

SEQ ID NO: 2130258 - RNA, 19 nt, Homo sapiens
  misc_RNA (1)...(19): siRNA sense strand
gaagcuuggaugauucuga

SEQ ID NO: 2130259 - RNA, 19 nt, Homo sapiens
  misc_RNA (1)...(19): siRNA sense strand
gagcugacgaggaagaguu

SEQ ID NO: 2130260 - RNA, 19 nt, Homo sapiens
  misc_RNA (1)...(19): siRNA sense strand
gaaagcccacgauucuugu

SEQ ID NO: 2130261 - RNA, 19 nt, Homo sapiens
  misc_RNA (1)...(19): siRNA sense strand
aguaugagcugauaaucca

SEQ ID NO: 2130262 - RNA, 19 nt, Homo sapiens
  misc_RNA (1)...(19): siRNA sense strand
acacagauuuugagccaua

SEQ ID NO: 2130263 - RNA, 19 nt, Homo sapiens
  misc_RNA (1)...(19): siRNA sense strand
gaagggugccaaggacauu

SEQ ID NO: 2130264 - RNA, 19 nt, Homo sapiens
  misc_RNA (1)...(19): siRNA sense strand
aaauagaugagcugauuga

SEQ ID NO: 2130265 - RNA, 19 nt, Homo sapiens
  misc_RNA (1)...(19): siRNA sense strand
caagggcgaugaguacaag

SEQ ID NO: 2130266 - RNA, 19 nt, Homo sapiens
  misc_RNA (1)...(19): siRNA sense strand
uaccuuugaugaugacuau

SEQ ID NO: 2130267 - RNA, 19 nt, Homo sapiens
  misc_RNA (1)...(19): siRNA sense strand
gaugagcugauugaaauug

SEQ ID NO: 2130268 - RNA, 19 nt, Homo sapiens
  misc_RNA (1)...(19): siRNA sense strand
caguaaagaaggugaauca

SEQ ID NO: 2130269 - RNA, 19 nt, Homo sapiens
  misc_RNA (1)...(19): siRNA sense strand
uacagucgguuccaagaug

SEQ ID NO: 2130270 - RNA, 19 nt, Homo sapiens
  misc_RNA (1)...(19): siRNA sense strand
agacaaagugggaaggaaa

SEQ ID NO: 2130271 - RNA, 19 nt, Homo sapiens
  misc_RNA (1)...(19): siRNA sense strand
ggagagcugacgaggaaga

SEQ ID NO: 2130272 - RNA, 19 nt, Homo sapiens
  misc_RNA (1)...(19): siRNA sense strand
agaaauguggagagagaua

SEQ ID NO: 2130273 - RNA, 19 nt, Homo sapiens
  misc_RNA (1)...(19): siRNA sense strand
aagaagaugaugaugacua

SEQ ID NO: 2130274 - RNA, 19 nt, Homo sapiens
  misc_RNA (1)...(19): siRNA sense strand
gugaauccaugaugauagg

SEQ ID NO: 2130275 - RNA, 19 nt, Homo sapiens
  misc_RNA (1)...(19): siRNA sense strand
agaauugggcgcuuaacaa

SEQ ID NO: 2130276 - RNA, 19 nt, Homo sapiens
  misc_RNA (1)...(19): siRNA sense strand
agaagaugaugaugacuac

SEQ ID NO: 2130277 - RNA, 19 nt, Homo sapiens
  misc_RNA (1)...(19): siRNA sense strand
ccuaccaguuucacaguug

SEQ ID NO: 2130278 - RNA, 19 nt, Homo sapiens
  misc_RNA (1)...(19): siRNA sense strand
cuucaagaacugcacauuu

SEQ ID NO: 2130279 - RNA, 19 nt, Homo sapiens
  misc_RNA (1)...(19): siRNA sense strand
gggucaaguucaaaucugu

SEQ ID NO: 2130280 - RNA, 19 nt, Homo sapiens
  misc_RNA (1)...(19): siRNA sense strand
auacgacaauggcagauuc

SEQ ID NO: 2130281 - RNA, 19 nt, Homo sapiens
  misc_RNA (1)...(19): siRNA sense strand
aaggauaggacuucacuga

SEQ ID NO: 2130282 - RNA, 19 nt, Homo sapiens
  misc_RNA (1)...(19): siRNA sense strand
gacacaggaacaugguaua

SEQ ID NO: 2130283 - RNA, 19 nt, Homo sapiens
  misc_RNA (1)...(19): siRNA sense strand
caacagaggugaacauuug

SEQ ID NO: 2130284 - RNA, 19 nt, Homo sapiens
  misc_RNA (1)...(19): siRNA sense strand
cgaaagaacuccuuacauu

SEQ ID NO: 2130285 - RNA, 19 nt, Homo sapiens
  misc_RNA (1)...(19): siRNA sense strand
gaaagaacuccuuacauua

SEQ ID NO: 2130286 - RNA, 19 nt, Homo sapiens
  misc_RNA (1)...(19): siRNA sense strand
gaagagaauuccaaaguca

SEQ ID NO: 2130287 - RNA, 19 nt, Homo sapiens
  misc_RNA (1)...(19): siRNA sense strand
gaaggaacaccaaacuuua

SEQ ID NO: 2130288 - RNA, 19 nt, Homo sapiens
  misc_RNA (1)...(19): siRNA sense strand
ugacagaccuggcauuuau

SEQ ID NO: 2130289 - RNA, 19 nt, Homo sapiens
  misc_RNA (1)...(19): siRNA sense strand
ugacaaagaccuuaucaua

SEQ ID NO: 2130290 - RNA, 19 nt, Homo sapiens
  misc_RNA (1)...(19): siRNA sense strand
acaaagaccuuaucauaga

SEQ ID NO: 2130291 - RNA, 19 nt, Homo sapiens
  misc_RNA (1)...(19): siRNA sense strand
gaggaacuauccagaguaa

SEQ ID NO: 2130292 - RNA, 19 nt, Homo sapiens
  misc_RNA (1)...(19): siRNA sense strand
uauaugagcugucacuaaa

SEQ ID NO: 2130293 - RNA, 19 nt, Homo sapiens
  misc_RNA (1)...(19): siRNA sense strand
gaugaugacucuaaagguu

SEQ ID NO: 2130294 - RNA, 19 nt, Homo sapiens
  misc_RNA (1)...(19): siRNA sense strand
gaaguacauucaucuaguu

SEQ ID NO: 2130295 - RNA, 19 nt, Homo sapiens
  misc_RNA (1)...(19): siRNA sense strand
ggaggaugcuggagacauu

SEQ ID NO: 2130296 - RNA, 19 nt, Homo sapiens
  misc_RNA (1)...(19): siRNA sense strand
uagcugaucuguuugauau

SEQ ID NO: 2130297 - RNA, 19 nt, Homo sapiens
  misc_RNA (1)...(19): siRNA sense strand
gagacaaugcuucuuauuu

SEQ ID NO: 2130298 - RNA, 19 nt, Homo sapiens
  misc_RNA (1)...(19): siRNA sense strand
gcacaguacuugcuugaca

SEQ ID NO: 2130299 - RNA, 19 nt, Homo sapiens
  misc_RNA (1)...(19): siRNA sense strand
cuaauagacugcacauuga

SEQ ID NO: 2130300 - RNA, 19 nt, Homo sapiens
  misc_RNA (1)...(19): siRNA sense strand
gaauagaucaucagccaaa

SEQ ID NO: 2130301 - RNA, 19 nt, Homo sapiens
  misc_RNA (1)...(19): siRNA sense strand
gaaaguaugaggaagagaa

SEQ ID NO: 2130302 - RNA, 19 nt, Homo sapiens
  misc_RNA (1)...(19): siRNA sense strand
gaacaugugauaaagaguu

SEQ ID NO: 2130303 - RNA, 19 nt, Homo sapiens
  misc_RNA (1)...(19): siRNA sense strand
gcugaucuguuugauauuu

SEQ ID NO: 2130304 - RNA, 19 nt, Homo sapiens
  misc_RNA (1)...(19): siRNA sense strand
ucgaaaggcuuaaaucaga

SEQ ID NO: 2130305 - RNA, 19 nt, Homo sapiens
  misc_RNA (1)...(19): siRNA sense strand
aggaaggccuugucaauuu

SEQ ID NO: 2130306 - RNA, 19 nt, Homo sapiens
  misc_RNA (1)...(19): siRNA sense strand
gacaauauacgauguaaug

SEQ ID NO: 2130307 - RNA, 19 nt, Homo sapiens
  misc_RNA (1)...(19): siRNA sense strand
gagaacaugugauaaagag

SEQ ID NO: 2130308 - RNA, 19 nt, Homo sapiens
  misc_RNA (1)...(19): siRNA sense strand
ggagggcugugacaucuug

SEQ ID NO: 2130309 - RNA, 19 nt, Homo sapiens
  misc_RNA (1)...(19): siRNA sense strand
gagagacaaugcuucuuau

SEQ ID NO: 2130310 - RNA, 19 nt, Homo sapiens
  misc_RNA (1)...(19): siRNA sense strand
gaacaccaaacuuuacuga

SEQ ID NO: 2130311 - RNA, 19 nt, Homo sapiens
  misc_RNA (1)...(19): siRNA sense strand
ggaacuauccagaguaaug

SEQ ID NO: 2130312 - RNA, 19 nt, Homo sapiens
  misc_RNA (1)...(19): siRNA sense strand
aaacagaagugccaucuac

SEQ ID NO: 2130313 - RNA, 19 nt, Homo sapiens
  misc_RNA (1)...(19): siRNA sense strand
gagaucaccucggccuuaa

SEQ ID NO: 2130314 - RNA, 19 nt, Homo sapiens
  misc_RNA (1)...(19): siRNA sense strand
gacuugcgguuucuuagua

SEQ ID NO: 2130315 - RNA, 19 nt, Homo sapiens
  misc_RNA (1)...(19): siRNA sense strand
gggaaacucuccgacauau

SEQ ID NO: 2130316 - RNA, 19 nt, Homo sapiens
  misc_RNA (1)...(19): siRNA sense strand
gcagacuuccuacagaaua

SEQ ID NO: 2130317 - RNA, 19 nt, Homo sapiens
  misc_RNA (1)...(19): siRNA sense strand
ggaaggccuugucaauuuc

SEQ ID NO: 2130318 - RNA, 19 nt, Homo sapiens
  misc_RNA (1)...(19): siRNA sense strand
ggagaucaccucggccuua

SEQ ID NO: 2130319 - RNA, 19 nt, Homo sapiens
  misc_RNA (1)...(19): siRNA sense strand
gaacucaacaaugaacuaa

SEQ ID NO: 2130320 - RNA, 19 nt, Homo sapiens
  misc_RNA (1)...(19): siRNA sense strand
cgagagaacaugugauaaa

SEQ ID NO: 2130321 - RNA, 19 nt, Homo sapiens
  misc_RNA (1)...(19): siRNA sense strand
uagaagagaaugucgauaa

SEQ ID NO: 2130322 - RNA, 19 nt, Homo sapiens
  misc_RNA (1)...(19): siRNA sense strand
gcaaacuggcccacuuuaa

SEQ ID NO: 2130323 - RNA, 19 nt, Homo sapiens
  misc_RNA (1)...(19): siRNA sense strand
gaaacucuccgacauauac

SEQ ID NO: 2130324 - RNA, 19 nt, Homo sapiens
  misc_RNA (1)...(19): siRNA sense strand
gcugaacauuuaucaagaa

SEQ ID NO: 2130325 - RNA, 19 nt, Homo sapiens
  misc_RNA (1)...(19): siRNA sense strand
ccagacaucaagaagauua

SEQ ID NO: 2130326 - RNA, 19 nt, Homo sapiens
  misc_RNA (1)...(19): siRNA sense strand
gagagaacaugugauaaag

SEQ ID NO: 2130327 - RNA, 19 nt, Homo sapiens
  misc_RNA (1)...(19): siRNA sense strand
cugcacaccuaucguauuu

SEQ ID NO: 2130328 - RNA, 19 nt, Homo sapiens
  misc_RNA (1)...(19): siRNA sense strand
gccgaugccugcacaacua

SEQ ID NO: 2130329 - RNA, 19 nt, Homo sapiens
  misc_RNA (1)...(19): siRNA sense strand
ccaccaggcuuuaacaaca

SEQ ID NO: 2130330 - RNA, 19 nt, Homo sapiens
  misc_RNA (1)...(19): siRNA sense strand
cagcagacuuccuacagaa

SEQ ID NO: 2130331 - RNA, 19 nt, Homo sapiens
  misc_RNA (1)...(19): siRNA sense strand
gaagaucaagacacagaaa

SEQ ID NO: 2130332 - RNA, 19 nt, Homo sapiens
  misc_RNA (1)...(19): siRNA sense strand
agaaggaacaccaaacuuu

SEQ ID NO: 2130333 - RNA, 19 nt, Homo sapiens
  misc_RNA (1)...(19): siRNA sense strand
gcacaggauuucgaacuca

SEQ ID NO: 2130334 - RNA, 19 nt, Homo sapiens
  misc_RNA (1)...(19): siRNA sense strand
ggaccgagcaggaguggaa

SEQ ID NO: 2130335 - RNA, 19 nt, Homo sapiens
  misc_RNA (1)...(19): siRNA sense strand
agagagacaaugcuucuua

SEQ ID NO: 2130336 - RNA, 19 nt, Homo sapiens
  misc_RNA (1)...(19): siRNA sense strand
agacgaagauccagacauc

SEQ ID NO: 2130337 - RNA, 19 nt, Homo sapiens
  misc_RNA (1)...(19): siRNA sense strand
ccaagguucucuuauucaa

SEQ ID NO: 2130338 - RNA, 19 nt, Homo sapiens
  misc_RNA (1)...(19): siRNA sense strand
gacaaagaccuuaucauag

SEQ ID NO: 2130339 - RNA, 19 nt, Homo sapiens
  misc_RNA (1)...(19): siRNA sense strand
uaucacacaucaucagaga

SEQ ID NO: 2130340 - RNA, 19 nt, Homo sapiens
  misc_RNA (1)...(19): siRNA sense strand
gagacgcgcuggacaagca

SEQ ID NO: 2130341 - RNA, 19 nt, Homo sapiens
  misc_RNA (1)...(19): siRNA sense strand
gaggaaggccuugucaauu

SEQ ID NO: 2130342 - RNA, 19 nt, Homo sapiens
  misc_RNA (1)...(19): siRNA sense strand
ccauggagcuggcagaaca

SEQ ID NO: 2130343 - RNA, 19 nt, Homo sapiens
  misc_RNA (1)...(19): siRNA sense strand
caugaaggccgaaugcuuu

SEQ ID NO: 2130344 - RNA, 19 nt, Homo sapiens
  misc_RNA (1)...(19): siRNA sense strand
caaacuggcccacuuuaau

SEQ ID NO: 2130345 - RNA, 19 nt, Homo sapiens
  misc_RNA (1)...(19): siRNA sense strand
gagaacggcuaccaaucga

SEQ ID NO: 2130346 - RNA, 19 nt, Homo sapiens
  misc_RNA (1)...(19): siRNA sense strand
ccagauauaucaucacacu

SEQ ID NO: 2130347 - RNA, 19 nt, Homo sapiens
  misc_RNA (1)...(19): siRNA sense strand
caaguucucgccaauugua

SEQ ID NO: 2130348 - RNA, 19 nt, Homo sapiens
  misc_RNA (1)...(19): siRNA sense strand
gaaaucgaaaggcuuaaau

SEQ ID NO: 2130349 - RNA, 19 nt, Homo sapiens
  misc_RNA (1)...(19): siRNA sense strand
ccgccaagguucucuuauu

SEQ ID NO: 2130350 - RNA, 19 nt, Homo sapiens
  misc_RNA (1)...(19): siRNA sense strand
ccagaguaaugcacgauga

SEQ ID NO: 2130351 - RNA, 19 nt, Homo sapiens
  misc_RNA (1)...(19): siRNA sense strand
gauugagagggaaguauua

SEQ ID NO: 2130352 - RNA, 19 nt, Homo sapiens
  misc_RNA (1)...(19): siRNA sense strand
gaagagaaaccagauugug

SEQ ID NO: 2130353 - RNA, 19 nt, Homo sapiens
  misc_RNA (1)...(19): siRNA sense strand
gcagaaguacauucaucua

SEQ ID NO: 2130354 - RNA, 19 nt, Homo sapiens
  misc_RNA (1)...(19): siRNA sense strand
gaacaacagaggugaacau

SEQ ID NO: 2130355 - RNA, 19 nt, Homo sapiens
  misc_RNA (1)...(19): siRNA sense strand
gacauuugcuucaguaaaa

SEQ ID NO: 2130356 - RNA, 19 nt, Homo sapiens
  misc_RNA (1)...(19): siRNA sense strand
aaacuggcccacuuuaauu

SEQ ID NO: 2130357 - RNA, 19 nt, Homo sapiens
  misc_RNA (1)...(19): siRNA sense strand
ggacuaaaggcaaggauag

SEQ ID NO: 2130358 - RNA, 19 nt, Homo sapiens
  misc_RNA (1)...(19): siRNA sense strand
acagaaaucgaaaggcuua

SEQ ID NO: 2130359 - RNA, 19 nt, Homo sapiens
  misc_RNA (1)...(19): siRNA sense strand
gaaaccagauuguguucac

SEQ ID NO: 2130360 - RNA, 19 nt, Homo sapiens
  misc_RNA (1)...(19): siRNA sense strand
caaagaccuuaucauagau

SEQ ID NO: 2130361 - RNA, 19 nt, Homo sapiens
  misc_RNA (1)...(19): siRNA sense strand
agccaaaggucgcacagua

SEQ ID NO: 2130362 - RNA, 19 nt, Homo sapiens
  misc_RNA (1)...(19): siRNA sense strand
gaagaaggaacaccaaacu

SEQ ID NO: 2130363 - RNA, 19 nt, Homo sapiens
  misc_RNA (1)...(19): siRNA sense strand
ucagggcccuuucacaaga

SEQ ID NO: 2130364 - RNA, 19 nt, Homo sapiens
  misc_RNA (1)...(19): siRNA sense strand
caacaaugaacuaaagaug

SEQ ID NO: 2130365 - RNA, 19 nt, Homo sapiens
  misc_RNA (1)...(19): siRNA sense strand
ggacaccacagaacuuuca

SEQ ID NO: 2130366 - RNA, 19 nt, Homo sapiens
  misc_RNA (1)...(19): siRNA sense strand
cacauaugauuaagucuga

SEQ ID NO: 2130367 - RNA, 19 nt, Homo sapiens
  misc_RNA (1)...(19): siRNA sense strand
uaaagacgacacugacauu

SEQ ID NO: 2130368 - RNA, 19 nt, Homo sapiens
  misc_RNA (1)...(19): siRNA sense strand
ccaacgccaucgagaaaug

SEQ ID NO: 2130369 - RNA, 19 nt, Homo sapiens
  misc_RNA (1)...(19): siRNA sense strand
cauuggaccugacaacuuc

SEQ ID NO: 2130370 - RNA, 19 nt, Homo sapiens
  misc_RNA (1)...(19): siRNA sense strand
ccacgucugugucgcaaau

SEQ ID NO: 2130371 - RNA, 19 nt, Homo sapiens
  misc_RNA (1)...(19): siRNA sense strand
ggagcaggaugguaaagag

SEQ ID NO: 2130372 - RNA, 19 nt, Homo sapiens
  misc_RNA (1)...(19): siRNA sense strand
aaucaaagcuagaggaacu

SEQ ID NO: 2130373 - RNA, 19 nt, Homo sapiens
  misc_RNA (1)...(19): siRNA sense strand
gggccaaggucucuaagca

SEQ ID NO: 2130374 - RNA, 19 nt, Homo sapiens
  misc_RNA (1)...(19): siRNA sense strand
caaagcacgcacaggauuu

SEQ ID NO: 2130375 - RNA, 19 nt, Homo sapiens
  misc_RNA (1)...(19): siRNA sense strand
ggaaacucuccgacauaua

SEQ ID NO: 2130376 - RNA, 19 nt, Homo sapiens
  misc_RNA (1)...(19): siRNA sense strand
ugaagagaauuccaaaguc

SEQ ID NO: 2130377 - RNA, 19 nt, Homo sapiens
  misc_RNA (1)...(19): siRNA sense strand
gacaaugcuucuuauuuac

SEQ ID NO: 2130378 - RNA, 19 nt, Homo sapiens
  misc_RNA (1)...(19): siRNA sense strand
cgaaugcgaccuuaccaaa

SEQ ID NO: 2130379 - RNA, 19 nt, Homo sapiens
  misc_RNA (1)...(19): siRNA sense strand
ccagcagacuuccuacaga

SEQ ID NO: 2130380 - RNA, 19 nt, Homo sapiens
  misc_RNA (1)...(19): siRNA sense strand
ugacauccaccuaaaauua

SEQ ID NO: 2130381 - RNA, 19 nt, Homo sapiens
  misc_RNA (1)...(19): siRNA sense strand
ugacuauaguguuugaaga

SEQ ID NO: 2130382 - RNA, 19 nt, Homo sapiens
  misc_RNA (1)...(19): siRNA sense strand
cagcgacacugaaaacaua

SEQ ID NO: 2130383 - RNA, 19 nt, Homo sapiens
  misc_RNA (1)...(19): siRNA sense strand
caacagaggugaacauuug

SEQ ID NO: 2130384 - RNA, 19 nt, Homo sapiens
  misc_RNA (1)...(19): siRNA sense strand
cgaaagaacuccuuacauu

SEQ ID NO: 2130385 - RNA, 19 nt, Homo sapiens
  misc_RNA (1)...(19): siRNA sense strand
gaaagaacuccuuacauua

SEQ ID NO: 2130386 - RNA, 19 nt, Homo sapiens
  misc_RNA (1)...(19): siRNA sense strand
gaagagaauuccaaaguca

SEQ ID NO: 2130387 - RNA, 19 nt, Homo sapiens
  misc_RNA (1)...(19): siRNA sense strand
gaaggaacaccaaacuuua

SEQ ID NO: 2130388 - RNA, 19 nt, Homo sapiens
  misc_RNA (1)...(19): siRNA sense strand
ugacagaccuggcauuuau

SEQ ID NO: 2130389 - RNA, 19 nt, Homo sapiens
  misc_RNA (1)...(19): siRNA sense strand
ugacaaagaccuuaucaua

SEQ ID NO: 2130390 - RNA, 19 nt, Homo sapiens
  misc_RNA (1)...(19): siRNA sense strand
acaaagaccuuaucauaga

SEQ ID NO: 2130391 - RNA, 19 nt, Homo sapiens
  misc_RNA (1)...(19): siRNA sense strand
gaggaacuauccagaguaa

SEQ ID NO: 2130392 - RNA, 19 nt, Homo sapiens
  misc_RNA (1)...(19): siRNA sense strand
uauaugagcugucacuaaa

SEQ ID NO: 2130393 - RNA, 19 nt, Homo sapiens
  misc_RNA (1)...(19): siRNA sense strand
gaugaugacucuaaagguu

SEQ ID NO: 2130394 - RNA, 19 nt, Homo sapiens
  misc_RNA (1)...(19): siRNA sense strand
gaaguacauucaucuaguu

SEQ ID NO: 2130395 - RNA, 19 nt, Homo sapiens
  misc_RNA (1)...(19): siRNA sense strand
ggaggaugcuggagacauu

SEQ ID NO: 2130396 - RNA, 19 nt, Homo sapiens
  misc_RNA (1)...(19): siRNA sense strand
uagcugaucuguuugauau

SEQ ID NO: 2130397 - RNA, 19 nt, Homo sapiens
  misc_RNA (1)...(19): siRNA sense strand
gagacaaugcuucuuauuu

SEQ ID NO: 2130398 - RNA, 19 nt, Homo sapiens
  misc_RNA (1)...(19): siRNA sense strand
gcacaguacuugcuugaca

SEQ ID NO: 2130399 - RNA, 19 nt, Homo sapiens
  misc_RNA (1)...(19): siRNA sense strand
cuaauagacugcacauuga

SEQ ID NO: 2130400 - RNA, 19 nt, Homo sapiens
  misc_RNA (1)...(19): siRNA sense strand
gaauagaucaucagccaaa

SEQ ID NO: 2130401 - RNA, 19 nt, Homo sapiens
  misc_RNA (1)...(19): siRNA sense strand
gaaaguaugaggaagagaa

SEQ ID NO: 2130402 - RNA, 19 nt, Homo sapiens
  misc_RNA (1)...(19): siRNA sense strand
gaacaugugauaaagaguu

SEQ ID NO: 2130403 - RNA, 19 nt, Homo sapiens
  misc_RNA (1)...(19): siRNA sense strand
gcugaucuguuugauauuu

SEQ ID NO: 2130404 - RNA, 19 nt, Homo sapiens
  misc_RNA (1)...(19): siRNA sense strand
ucgaaaggcuuaaaucaga

SEQ ID NO: 2130405 - RNA, 19 nt, Homo sapiens
  misc_RNA (1)...(19): siRNA sense strand
aggaaggccuugucaauuu

SEQ ID NO: 2130406 - RNA, 19 nt, Homo sapiens
  misc_RNA (1)...(19): siRNA sense strand
gacaauauacgauguaaug

SEQ ID NO: 2130407 - RNA, 19 nt, Homo sapiens
  misc_RNA (1)...(19): siRNA sense strand
gagaacaugugauaaagag

SEQ ID NO: 2130408 - RNA, 19 nt, Homo sapiens
  misc_RNA (1)...(19): siRNA sense strand
ggagggcugugacaucuug

SEQ ID NO: 2130409 - RNA, 19 nt, Homo sapiens
  misc_RNA (1)...(19): siRNA sense strand
gagagacaaugcuucuuau

SEQ ID NO: 2130410 - RNA, 19 nt, Homo sapiens
  misc_RNA (1)...(19): siRNA sense strand
gaacaccaaacuuuacuga

SEQ ID NO: 2130411 - RNA, 19 nt, Homo sapiens
  misc_RNA (1)...(19): siRNA sense strand
ggaacuauccagaguaaug

SEQ ID NO: 2130412 - RNA, 19 nt, Homo sapiens
  misc_RNA (1)...(19): siRNA sense strand
aaacagaagugccaucuac

SEQ ID NO: 2130413 - RNA, 19 nt, Homo sapiens
  misc_RNA (1)...(19): siRNA sense strand
gagaucaccucggccuuaa

SEQ ID NO: 2130414 - RNA, 19 nt, Homo sapiens
  misc_RNA (1)...(19): siRNA sense strand
gacuugcgguuucuuagua

SEQ ID NO: 2130415 - RNA, 19 nt, Homo sapiens
  misc_RNA (1)...(19): siRNA sense strand
gggaaacucuccgacauau

SEQ ID NO: 2130416 - RNA, 19 nt, Homo sapiens
  misc_RNA (1)...(19): siRNA sense strand
gcagacuuccuacagaaua

SEQ ID NO: 2130417 - RNA, 19 nt, Homo sapiens
  misc_RNA (1)...(19): siRNA sense strand
ggaaggccuugucaauuuc

SEQ ID NO: 2130418 - RNA, 19 nt, Homo sapiens
  misc_RNA (1)...(19): siRNA sense strand
ggagaucaccucggccuua

SEQ ID NO: 2130419 - RNA, 19 nt, Homo sapiens
  misc_RNA (1)...(19): siRNA sense strand
gaacucaacaaugaacuaa

SEQ ID NO: 2130420 - RNA, 19 nt, Homo sapiens
  misc_RNA (1)...(19): siRNA sense strand
cgagagaacaugugauaaa

SEQ ID NO: 2130421 - RNA, 19 nt, Homo sapiens
  misc_RNA (1)...(19): siRNA sense strand
uagaagagaaugucgauaa

SEQ ID NO: 2130422 - RNA, 19 nt, Homo sapiens
  misc_RNA (1)...(19): siRNA sense strand
gcaaacuggcccacuuuaa

SEQ ID NO: 2130423 - RNA, 19 nt, Homo sapiens
  misc_RNA (1)...(19): siRNA sense strand
gaaacucuccgacauauac

SEQ ID NO: 2130424 - RNA, 19 nt, Homo sapiens
  misc_RNA (1)...(19): siRNA sense strand
gcugaacauuuaucaagaa

SEQ ID NO: 2130425 - RNA, 19 nt, Homo sapiens
  misc_RNA (1)...(19): siRNA sense strand
ccagacaucaagaagauua

SEQ ID NO: 2130426 - RNA, 19 nt, Homo sapiens
  misc_RNA (1)...(19): siRNA sense strand
gagagaacaugugauaaag

SEQ ID NO: 2130427 - RNA, 19 nt, Homo sapiens
  misc_RNA (1)...(19): siRNA sense strand
cugcacaccuaucguauuu

SEQ ID NO: 2130428 - RNA, 19 nt, Homo sapiens
  misc_RNA (1)...(19): siRNA sense strand
gccgaugccugcacaacua

SEQ ID NO: 2130429 - RNA, 19 nt, Homo sapiens
  misc_RNA (1)...(19): siRNA sense strand
ccaccaggcuuuaacaaca

SEQ ID NO: 2130430 - RNA, 19 nt, Homo sapiens
  misc_RNA (1)...(19): siRNA sense strand
cagcagacuuccuacagaa

SEQ ID NO: 2130431 - RNA, 19 nt, Homo sapiens
  misc_RNA (1)...(19): siRNA sense strand
gaagaucaagacacagaaa

SEQ ID NO: 2130432 - RNA, 19 nt, Homo sapiens
  misc_RNA (1)...(19): siRNA sense strand
agaaggaacaccaaacuuu

SEQ ID NO: 2130433 - RNA, 19 nt, Homo sapiens
  misc_RNA (1)...(19): siRNA sense strand
gcacaggauuucgaacuca

SEQ ID NO: 2130434 - RNA, 19 nt, Homo sapiens
  misc_RNA (1)...(19): siRNA sense strand
ggaccgagcaggaguggaa

SEQ ID NO: 2130435 - RNA, 19 nt, Homo sapiens
  misc_RNA (1)...(19): siRNA sense strand
agagagacaaugcuucuua

SEQ ID NO: 2130436 - RNA, 19 nt, Homo sapiens
  misc_RNA (1)...(19): siRNA sense strand
agacgaagauccagacauc

SEQ ID NO: 2130437 - RNA, 19 nt, Homo sapiens
  misc_RNA (1)...(19): siRNA sense strand
ccaagguucucuuauucaa

SEQ ID NO: 2130438 - RNA, 19 nt, Homo sapiens
  misc_RNA (1)...(19): siRNA sense strand
gacaaagaccuuaucauag

SEQ ID NO: 2130439 - RNA, 19 nt, Homo sapiens
  misc_RNA (1)...(19): siRNA sense strand
uaucacacaucaucagaga

SEQ ID NO: 2130440 - RNA, 19 nt, Homo sapiens
  misc_RNA (1)...(19): siRNA sense strand
gagacgcgcuggacaagca

SEQ ID NO: 2130441 - RNA, 19 nt, Homo sapiens
  misc_RNA (1)...(19): siRNA sense strand
gaggaaggccuugucaauu

SEQ ID NO: 2130442 - RNA, 19 nt, Homo sapiens
  misc_RNA (1)...(19): siRNA sense strand
ccauggagcuggcagaaca

SEQ ID NO: 2130443 - RNA, 19 nt, Homo sapiens
  misc_RNA (1)...(19): siRNA sense strand
caugaaggccgaaugcuuu

SEQ ID NO: 2130444 - RNA, 19 nt, Homo sapiens
  misc_RNA (1)...(19): siRNA sense strand
caaacuggcccacuuuaau

SEQ ID NO: 2130445 - RNA, 19 nt, Homo sapiens
  misc_RNA (1)...(19): siRNA sense strand
gagaacggcuaccaaucga

SEQ ID NO: 2130446 - RNA, 19 nt, Homo sapiens
  misc_RNA (1)...(19): siRNA sense strand
ccagauauaucaucacacu

SEQ ID NO: 2130447 - RNA, 19 nt, Homo sapiens
  misc_RNA (1)...(19): siRNA sense strand
caaguucucgccaauugua

SEQ ID NO: 2130448 - RNA, 19 nt, Homo sapiens
  misc_RNA (1)...(19): siRNA sense strand
gaaaucgaaaggcuuaaau

SEQ ID NO: 2130449 - RNA, 19 nt, Homo sapiens
  misc_RNA (1)...(19): siRNA sense strand
ccgccaagguucucuuauu

SEQ ID NO: 2130450 - RNA, 19 nt, Homo sapiens
  misc_RNA (1)...(19): siRNA sense strand
ccagaguaaugcacgauga

SEQ ID NO: 2130451 - RNA, 19 nt, Homo sapiens
  misc_RNA (1)...(19): siRNA sense strand
gauugagagggaaguauua

SEQ ID NO: 2130452 - RNA, 19 nt, Homo sapiens
  misc_RNA (1)...(19): siRNA sense strand
gaagagaaaccagauugug

SEQ ID NO: 2130453 - RNA, 19 nt, Homo sapiens
  misc_RNA (1)...(19): siRNA sense strand
gcagaaguacauucaucua

SEQ ID NO: 2130454 - RNA, 19 nt, Homo sapiens
  misc_RNA (1)...(19): siRNA sense strand
gaacaacagaggugaacau

SEQ ID NO: 2130455 - RNA, 19 nt, Homo sapiens
  misc_RNA (1)...(19): siRNA sense strand
gacauuugcuucaguaaaa

SEQ ID NO: 2130456 - RNA, 19 nt, Homo sapiens
  misc_RNA (1)...(19): siRNA sense strand
aaacuggcccacuuuaauu

SEQ ID NO: 2130457 - RNA, 19 nt, Homo sapiens
  misc_RNA (1)...(19): siRNA sense strand
ggacuaaaggcaaggauag

SEQ ID NO: 2130458 - RNA, 19 nt, Homo sapiens
  misc_RNA (1)...(19): siRNA sense strand
acagaaaucgaaaggcuua

SEQ ID NO: 2130459 - RNA, 19 nt, Homo sapiens
  misc_RNA (1)...(19): siRNA sense strand
gaaaccagauuguguucac

SEQ ID NO: 2130460 - RNA, 19 nt, Homo sapiens
  misc_RNA (1)...(19): siRNA sense strand
caaagaccuuaucauagau

SEQ ID NO: 2130461 - RNA, 19 nt, Homo sapiens
  misc_RNA (1)...(19): siRNA sense strand
agccaaaggucgcacagua

SEQ ID NO: 2130462 - RNA, 19 nt, Homo sapiens
  misc_RNA (1)...(19): siRNA sense strand
gaagaaggaacaccaaacu

SEQ ID NO: 2130463 - RNA, 19 nt, Homo sapiens
  misc_RNA (1)...(19): siRNA sense strand
ucagggcccuuucacaaga

SEQ ID NO: 2130464 - RNA, 19 nt, Homo sapiens
  misc_RNA (1)...(19): siRNA sense strand
caacaaugaacuaaagaug

SEQ ID NO: 2130465 - RNA, 19 nt, Homo sapiens
  misc_RNA (1)...(19): siRNA sense strand
ggacaccacagaacuuuca

SEQ ID NO: 2130466 - RNA, 19 nt, Homo sapiens
  misc_RNA (1)...(19): siRNA sense strand
cacauaugauuaagucuga

SEQ ID NO: 2130467 - RNA, 19 nt, Homo sapiens
  misc_RNA (1)...(19): siRNA sense strand
uaaagacgacacugacauu

SEQ ID NO: 2130468 - RNA, 19 nt, Homo sapiens
  misc_RNA (1)...(19): siRNA sense strand
ccaacgccaucgagaaaug

SEQ ID NO: 2130469 - RNA, 19 nt, Homo sapiens
  misc_RNA (1)...(19): siRNA sense strand
cauuggaccugacaacuuc

SEQ ID NO: 2130470 - RNA, 19 nt, Homo sapiens
  misc_RNA (1)...(19): siRNA sense strand
ccacgucugugucgcaaau

SEQ ID NO: 2130471 - RNA, 19 nt, Homo sapiens
  misc_RNA (1)...(19): siRNA sense strand
ggagcaggaugguaaagag

SEQ ID NO: 2130472 - RNA, 19 nt, Homo sapiens
  misc_RNA (1)...(19): siRNA sense strand
aaucaaagcuagaggaacu

SEQ ID NO: 2130473 - RNA, 19 nt, Homo sapiens
  misc_RNA (1)...(19): siRNA sense strand
gggccaaggucucuaagca

SEQ ID NO: 2130474 - RNA, 19 nt, Homo sapiens
  misc_RNA (1)...(19): siRNA sense strand
caaagcacgcacaggauuu

SEQ ID NO: 2130475 - RNA, 19 nt, Homo sapiens
  misc_RNA (1)...(19): siRNA sense strand
ggaaacucuccgacauaua

SEQ ID NO: 2130476 - RNA, 19 nt, Homo sapiens
  misc_RNA (1)...(19): siRNA sense strand
ugaagagaauuccaaaguc

SEQ ID NO: 2130477 - RNA, 19 nt, Homo sapiens
  misc_RNA (1)...(19): siRNA sense strand
gacaaugcuucuuauuuac

SEQ ID NO: 2130478 - RNA, 19 nt, Homo sapiens
  misc_RNA (1)...(19): siRNA sense strand
cgaaugcgaccuuaccaaa

SEQ ID NO: 2130479 - RNA, 19 nt, Homo sapiens
  misc_RNA (1)...(19): siRNA sense strand
ccagcagacuuccuacaga

SEQ ID NO: 2130480 - RNA, 19 nt, Homo sapiens
  misc_RNA (1)...(19): siRNA sense strand
ugacauccaccuaaaauua

SEQ ID NO: 2130481 - RNA, 19 nt, Homo sapiens
  misc_RNA (1)...(19): siRNA sense strand
ugacuauaguguuugaaga

SEQ ID NO: 2130482 - RNA, 19 nt, Homo sapiens
  misc_RNA (1)...(19): siRNA sense strand
cagcgacacugaaaacaua

SEQ ID NO: 2130483 - RNA, 19 nt, Homo sapiens
  misc_RNA (1)...(19): siRNA sense strand
gcugaaagcucgagacaca

SEQ ID NO: 2130484 - RNA, 19 nt, Homo sapiens
  misc_RNA (1)...(19): siRNA sense strand
gauucauccuuaccaauua

SEQ ID NO: 2130485 - RNA, 19 nt, Homo sapiens
  misc_RNA (1)...(19): siRNA sense strand
uaacccaacuggcguauau

SEQ ID NO: 2130486 - RNA, 19 nt, Homo sapiens
  misc_RNA (1)...(19): siRNA sense strand
gagaucauuuccaacaauu

SEQ ID NO: 2130487 - RNA, 19 nt, Homo sapiens
  misc_RNA (1)...(19): siRNA sense strand
gcugaaugcuauaaacuga

SEQ ID NO: 2130488 - RNA, 19 nt, Homo sapiens
  misc_RNA (1)...(19): siRNA sense strand
gaaagcaaggguucucaaa

SEQ ID NO: 2130489 - RNA, 19 nt, Homo sapiens
  misc_RNA (1)...(19): siRNA sense strand
ccagaagucuugcuauaag

SEQ ID NO: 2130490 - RNA, 19 nt, Homo sapiens
  misc_RNA (1)...(19): siRNA sense strand
uauaugcucccucugguua

SEQ ID NO: 2130491 - RNA, 19 nt, Homo sapiens
  misc_RNA (1)...(19): siRNA sense strand
gagucgagaucauuuccaa

SEQ ID NO: 2130492 - RNA, 19 nt, Homo sapiens
  misc_RNA (1)...(19): siRNA sense strand
ugaaugcuauaaacugaga

SEQ ID NO: 2130493 - RNA, 19 nt, Homo sapiens
  misc_RNA (1)...(19): siRNA sense strand
cgagaucauuuccaacaau

SEQ ID NO: 2130494 - RNA, 19 nt, Homo sapiens
  misc_RNA (1)...(19): siRNA sense strand
ggucucaacuccaaauggu

SEQ ID NO: 2130495 - RNA, 19 nt, Homo sapiens
  misc_RNA (1)...(19): siRNA sense strand
gaucauuuccaacaauuca

SEQ ID NO: 2130496 - RNA, 19 nt, Homo sapiens
  misc_RNA (1)...(19): siRNA sense strand
aaacugagaagccaacaga

SEQ ID NO: 2130497 - RNA, 19 nt, Homo sapiens
  misc_RNA (1)...(19): siRNA sense strand
aagcaaggguucucaaacu

SEQ ID NO: 2130498 - RNA, 19 nt, Homo sapiens
  misc_RNA (1)...(19): siRNA sense strand
gaccaacaauaugaucuca

SEQ ID NO: 2130499 - RNA, 19 nt, Homo sapiens
  misc_RNA (1)...(19): siRNA sense strand
ggaaagcaaggguucucaa

SEQ ID NO: 2130500 - RNA, 19 nt, Homo sapiens
  misc_RNA (1)...(19): siRNA sense strand
agacacagccgaagagaag

SEQ ID NO: 2130501 - RNA, 19 nt, Homo sapiens
  misc_RNA (1)...(19): siRNA sense strand
ggaggucacuuuuauugau

SEQ ID NO: 2130502 - RNA, 19 nt, Homo sapiens
  misc_RNA (1)...(19): siRNA sense strand
gaagccaacagaucagcaa

SEQ ID NO: 2130503 - RNA, 19 nt, Homo sapiens
  misc_RNA (1)...(19): siRNA sense strand
guaucuggaccaacaauau

SEQ ID NO: 2130504 - RNA, 19 nt, Homo sapiens
  misc_RNA (1)...(19): siRNA sense strand
auccagaguugguuuaguu

SEQ ID NO: 2130505 - RNA, 19 nt, Homo sapiens
  misc_RNA (1)...(19): siRNA sense strand
agauucauccuuaccaauu

SEQ ID NO: 2130506 - RNA, 19 nt, Homo sapiens
  misc_RNA (1)...(19): siRNA sense strand
gguaucuggaccaacaaua

SEQ ID NO: 2130507 - RNA, 19 nt, Homo sapiens
  misc_RNA (1)...(19): siRNA sense strand
caacaauucaauccaagca

SEQ ID NO: 2130508 - RNA, 19 nt, Homo sapiens
  misc_RNA (1)...(19): siRNA sense strand
ccacuucucgcagcugaaa

SEQ ID NO: 2130509 - RNA, 19 nt, Homo sapiens
  misc_RNA (1)...(19): siRNA sense strand
gagacacagccgaagagaa

SEQ ID NO: 2130510 - RNA, 19 nt, Homo sapiens
  misc_RNA (1)...(19): siRNA sense strand
cagaguugguuuaguuugc

SEQ ID NO: 2130511 - RNA, 19 nt, Homo sapiens
  misc_RNA (1)...(19): siRNA sense strand
gaggucacuuuuauugauu

SEQ ID NO: 2130512 - RNA, 19 nt, Homo sapiens
  misc_RNA (1)...(19): siRNA sense strand
cccagaagucuugcuauaa

SEQ ID NO: 2130513 - RNA, 19 nt, Homo sapiens
  misc_RNA (1)...(19): siRNA sense strand
caaguuguccauccagagu

SEQ ID NO: 2130514 - RNA, 19 nt, Homo sapiens
  misc_RNA (1)...(19): siRNA sense strand
cugagaagccaacagauca

SEQ ID NO: 2130515 - RNA, 19 nt, Homo sapiens
  misc_RNA (1)...(19): siRNA sense strand
ggaaaccccagaagucuug

SEQ ID NO: 2130516 - RNA, 19 nt, Homo sapiens
  misc_RNA (1)...(19): siRNA sense strand
uaucuggaccaacaauaug

SEQ ID NO: 2130517 - RNA, 19 nt, Homo sapiens
  misc_RNA (1)...(19): siRNA sense strand
caauccaagcagucuuuaa

SEQ ID NO: 2130518 - RNA, 19 nt, Homo sapiens
  misc_RNA (1)...(19): siRNA sense strand
ccccagaagucuugcuaua

SEQ ID NO: 2130519 - RNA, 19 nt, Homo sapiens
  misc_RNA (1)...(19): siRNA sense strand
ucgagaucauuuccaacaa

SEQ ID NO: 2130520 - RNA, 19 nt, Homo sapiens
  misc_RNA (1)...(19): siRNA sense strand
ggaccaacaauaugaucuc

SEQ ID NO: 2130521 - RNA, 19 nt, Homo sapiens
  misc_RNA (1)...(19): siRNA sense strand
ugcgguaucuggaccaaca

SEQ ID NO: 2130522 - RNA, 19 nt, Homo sapiens
  misc_RNA (1)...(19): siRNA sense strand
guauaugcucccucugguu

SEQ ID NO: 2130523 - RNA, 19 nt, Homo sapiens
  misc_RNA (1)...(19): siRNA sense strand
uuccaacaauucaauccaa

SEQ ID NO: 2130524 - RNA, 19 nt, Homo sapiens
  misc_RNA (1)...(19): siRNA sense strand
gccaacagaucagcaaaau

SEQ ID NO: 2130525 - RNA, 19 nt, Homo sapiens
  misc_RNA (1)...(19): siRNA sense strand
ucaauccaagcagucuuua

SEQ ID NO: 2130526 - RNA, 19 nt, Homo sapiens
  misc_RNA (1)...(19): siRNA sense strand
ccagaguugguuuaguuug

SEQ ID NO: 2130527 - RNA, 19 nt, Homo sapiens
  misc_RNA (1)...(19): siRNA sense strand
gucgagaucauuuccaaca

SEQ ID NO: 2130528 - RNA, 19 nt, Homo sapiens
  misc_RNA (1)...(19): siRNA sense strand
gcgccgagucgagaucauu

SEQ ID NO: 2130529 - RNA, 19 nt, Homo sapiens
  misc_RNA (1)...(19): siRNA sense strand
ccaaccagcugaagaaaua

SEQ ID NO: 2130530 - RNA, 19 nt, Homo sapiens
  misc_RNA (1)...(19): siRNA sense strand
ggucagagguucaaauuuc

SEQ ID NO: 2130531 - RNA, 19 nt, Homo sapiens
  misc_RNA (1)...(19): siRNA sense strand
gaaaggacaagaaacaguu

SEQ ID NO: 2130532 - RNA, 19 nt, Homo sapiens
  misc_RNA (1)...(19): siRNA sense strand
ggagcacuuuguacucuuu

SEQ ID NO: 2130533 - RNA, 19 nt, Homo sapiens
  misc_RNA (1)...(19): siRNA sense strand
ggauguugcuugacuccuu

SEQ ID NO: 2130534 - RNA, 19 nt, Homo sapiens
  misc_RNA (1)...(19): siRNA sense strand
uuacuugacucccucaguu

SEQ ID NO: 2130535 - RNA, 19 nt, Homo sapiens
  misc_RNA (1)...(19): siRNA sense strand
ccagaggacuccgugaaug

SEQ ID NO: 2130536 - RNA, 19 nt, Homo sapiens
  misc_RNA (1)...(19): siRNA sense strand
gcagcaccuuguccucauu

SEQ ID NO: 2130537 - RNA, 19 nt, Homo sapiens
  misc_RNA (1)...(19): siRNA sense strand
gaggugaaaggacaagaaa

SEQ ID NO: 2130538 - RNA, 19 nt, Homo sapiens
  misc_RNA (1)...(19): siRNA sense strand
cagcuuggcucuuguagac

SEQ ID NO: 2130539 - RNA, 19 nt, Homo sapiens
  misc_RNA (1)...(19): siRNA sense strand
ggugaaaggacaagaaaca

SEQ ID NO: 2130540 - RNA, 19 nt, Homo sapiens
  misc_RNA (1)...(19): siRNA sense strand
ggauggauguugcuugacu

SEQ ID NO: 2130541 - RNA, 19 nt, Homo sapiens
  misc_RNA (1)...(19): siRNA sense strand
uccgagaccucaaagagaa

SEQ ID NO: 2130542 - RNA, 19 nt, Homo sapiens
  misc_RNA (1)...(19): siRNA sense strand
gagaguagacaaguaugaa

SEQ ID NO: 2130543 - RNA, 19 nt, Homo sapiens
  misc_RNA (1)...(19): siRNA sense strand
ccacaaacgucagcauggu

SEQ ID NO: 2130544 - RNA, 19 nt, Homo sapiens
  misc_RNA (1)...(19): siRNA sense strand
gaacauccuagaaaucaac

SEQ ID NO: 2130545 - RNA, 19 nt, Homo sapiens
  misc_RNA (1)...(19): siRNA sense strand
cagaggacuccgugaauga

SEQ ID NO: 2130546 - RNA, 19 nt, Homo sapiens
  misc_RNA (1)...(19): siRNA sense strand
gcaguuccgagaccucaaa

SEQ ID NO: 2130547 - RNA, 19 nt, Homo sapiens
  misc_RNA (1)...(19): siRNA sense strand
gaguagacaaguaugaaau

SEQ ID NO: 2130548 - RNA, 19 nt, Homo sapiens
  misc_RNA (1)...(19): siRNA sense strand
ccaauugucugcgacuaca

SEQ ID NO: 2130549 - RNA, 19 nt, Homo sapiens
  misc_RNA (1)...(19): siRNA sense strand
agaaaucaaccaggaauug

SEQ ID NO: 2130550 - RNA, 19 nt, Homo sapiens
  misc_RNA (1)...(19): siRNA sense strand
gacuuggaguggagacuug

SEQ ID NO: 2130551 - RNA, 19 nt, Homo sapiens
  misc_RNA (1)...(19): siRNA sense strand
cuggauggauguugcuuga

SEQ ID NO: 2130552 - RNA, 19 nt, Homo sapiens
  misc_RNA (1)...(19): siRNA sense strand
gucagagguucaaauuuca

SEQ ID NO: 2130553 - RNA, 19 nt, Homo sapiens
  misc_RNA (1)...(19): siRNA sense strand
ggagguagaagaccaaagc

SEQ ID NO: 2130554 - RNA, 19 nt, Homo sapiens
  misc_RNA (1)...(19): siRNA sense strand
gaaaucaaccaggaauugc

SEQ ID NO: 2130555 - RNA, 19 nt, Homo sapiens
  misc_RNA (1)...(19): siRNA sense strand
uuccuuauaucucaagcua

SEQ ID NO: 2130556 - RNA, 19 nt, Homo sapiens
  misc_RNA (1)...(19): siRNA sense strand
ccuccuaccacccuuauug

SEQ ID NO: 2130557 - RNA, 19 nt, Homo sapiens
  misc_RNA (1)...(19): siRNA sense strand
ugaacauccuagaaaucaa

SEQ ID NO: 2130558 - RNA, 19 nt, Homo sapiens
  misc_RNA (1)...(19): siRNA sense strand
ggacuccgugaaugaaguu

SEQ ID NO: 2130559 - RNA, 19 nt, Homo sapiens
  misc_RNA (1)...(19): siRNA sense strand
agagagcaaucagcaguuc

SEQ ID NO: 2130560 - RNA, 19 nt, Homo sapiens
  misc_RNA (1)...(19): siRNA sense strand
ggaucaaggguuccacugu

SEQ ID NO: 2130561 - RNA, 19 nt, Homo sapiens
  misc_RNA (1)...(19): siRNA sense strand
ggacuuggaguggagacuu

SEQ ID NO: 2130562 - RNA, 19 nt, Homo sapiens
  misc_RNA (1)...(19): siRNA sense strand
ugagaguagacaaguauga

SEQ ID NO: 2130563 - RNA, 19 nt, Homo sapiens
  misc_RNA (1)...(19): siRNA sense strand
ccuuauaucucaagcuacu

SEQ ID NO: 2130564 - RNA, 19 nt, Homo sapiens
  misc_RNA (1)...(19): siRNA sense strand
cacugagaguagacaagua

SEQ ID NO: 2130565 - RNA, 19 nt, Homo sapiens
  misc_RNA (1)...(19): siRNA sense strand
gcacagcuggaaccaagca

SEQ ID NO: 2130566 - RNA, 19 nt, Homo sapiens
  misc_RNA (1)...(19): siRNA sense strand
ggaucaagaggagguagaa

SEQ ID NO: 2130567 - RNA, 19 nt, Homo sapiens
  misc_RNA (1)...(19): siRNA sense strand
ccucaaagagaaauuccuu

SEQ ID NO: 2130568 - RNA, 19 nt, Homo sapiens
  misc_RNA (1)...(19): siRNA sense strand
gcgagagggcagagaugaa

SEQ ID NO: 2130569 - RNA, 19 nt, Homo sapiens
  misc_RNA (1)...(19): siRNA sense strand
ugaaaggacaagaaacagu

SEQ ID NO: 2130570 - RNA, 19 nt, Homo sapiens
  misc_RNA (1)...(19): siRNA sense strand
gguaucugccgacccuuug

SEQ ID NO: 2130571 - RNA, 19 nt, Homo sapiens
  misc_RNA (1)...(19): siRNA sense strand
gcccaauugucugcgacua

SEQ ID NO: 2130572 - RNA, 19 nt, Homo sapiens
  misc_RNA (1)...(19): siRNA sense strand
cuuauuggagcacuuugua

SEQ ID NO: 2130573 - RNA, 19 nt, Homo sapiens
  misc_RNA (1)...(19): siRNA sense strand
cuagaaaucaaccaggaau

SEQ ID NO: 2130574 - RNA, 19 nt, Homo sapiens
  misc_RNA (1)...(19): siRNA sense strand
ccggucagagguucaaauu

SEQ ID NO: 2130575 - RNA, 19 nt, Homo sapiens
  misc_RNA (1)...(19): siRNA sense strand
agaguagacaaguaugaaa

SEQ ID NO: 2130576 - RNA, 19 nt, Homo sapiens
  misc_RNA (1)...(19): siRNA sense strand
ccacugagaguagacaagu

SEQ ID NO: 2130577 - RNA, 19 nt, Homo sapiens
  misc_RNA (1)...(19): siRNA sense strand
guagacaaguaugaaaucc

SEQ ID NO: 2130578 - RNA, 19 nt, Homo sapiens
  misc_RNA (1)...(19): siRNA sense strand
gucccuggcucuaccucuu

SEQ ID NO: 2130579 - RNA, 19 nt, Homo sapiens
  misc_RNA (1)...(19): siRNA sense strand
uagaaaucaaccaggaauu

SEQ ID NO: 2130580 - RNA, 19 nt, Homo sapiens
  misc_RNA (1)...(19): siRNA sense strand
ggagucacuggauggaugu

SEQ ID NO: 2130581 - RNA, 19 nt, Homo sapiens
  misc_RNA (1)...(19): siRNA sense strand
gcaccuuguccucauugga

SEQ ID NO: 2130582 - RNA, 19 nt, Homo sapiens
  misc_RNA (1)...(19): siRNA sense strand
gaagaccaaagcccaccau

SEQ ID NO: 2130583 - RNA, 19 nt, Homo sapiens
  misc_RNA (1)...(19): siRNA sense strand
ccuuauagcagcaccuugu

SEQ ID NO: 2130584 - RNA, 19 nt, Homo sapiens
  misc_RNA (1)...(19): siRNA sense strand
uccaugaccugcagcuucu

SEQ ID NO: 2130585 - RNA, 19 nt, Homo sapiens
  misc_RNA (1)...(19): siRNA sense strand
ggagauaauuucugcauuu

SEQ ID NO: 2130586 - RNA, 19 nt, Homo sapiens
  misc_RNA (1)...(19): siRNA sense strand
aaagauggcugaauaggaa

SEQ ID NO: 2130587 - RNA, 19 nt, Homo sapiens
  misc_RNA (1)...(19): siRNA sense strand
guacccagcucaucucauu

SEQ ID NO: 2130588 - RNA, 19 nt, Homo sapiens
  misc_RNA (1)...(19): siRNA sense strand
cagcaaauuucaaacugua

SEQ ID NO: 2130589 - RNA, 19 nt, Homo sapiens
  misc_RNA (1)...(19): siRNA sense strand
cuggaaagauggcugaaua

SEQ ID NO: 2130590 - RNA, 19 nt, Homo sapiens
  misc_RNA (1)...(19): siRNA sense strand
gaaagauggcugaauagga

SEQ ID NO: 2130591 - RNA, 19 nt, Homo sapiens
  misc_RNA (1)...(19): siRNA sense strand
gcagcaaauuucaaacugu

SEQ ID NO: 2130592 - RNA, 19 nt, Homo sapiens
  misc_RNA (1)...(19): siRNA sense strand
gagauaauuucugcauuuc

SEQ ID NO: 2130593 - RNA, 19 nt, Homo sapiens
  misc_RNA (1)...(19): siRNA sense strand
ugaggugucuggaaagaug

SEQ ID NO: 2130594 - RNA, 19 nt, Homo sapiens
  misc_RNA (1)...(19): siRNA sense strand
gaucaacgcagaaggagau

SEQ ID NO: 2130595 - RNA, 19 nt, Homo sapiens
  misc_RNA (1)...(19): siRNA sense strand
ggacucuggcagcaaauuu

SEQ ID NO: 2130596 - RNA, 19 nt, Homo sapiens
  misc_RNA (1)...(19): siRNA sense strand
ccacagaaggcaagcagaa

SEQ ID NO: 2130597 - RNA, 19 nt, Homo sapiens
  misc_RNA (1)...(19): siRNA sense strand
caacgcagaaggagauaau

SEQ ID NO: 2130598 - RNA, 19 nt, Homo sapiens
  misc_RNA (1)...(19): siRNA sense strand
gcaaauuucaaacuguaug

SEQ ID NO: 2130599 - RNA, 19 nt, Homo sapiens
  misc_RNA (1)...(19): siRNA sense strand
uaaaguacccagcucaucu

SEQ ID NO: 2130600 - RNA, 19 nt, Homo sapiens
  misc_RNA (1)...(19): siRNA sense strand
ggcagcaaauuucaaacug

SEQ ID NO: 2130601 - RNA, 19 nt, Homo sapiens
  misc_RNA (1)...(19): siRNA sense strand
cgagaucaacgcagaagga

SEQ ID NO: 2130602 - RNA, 19 nt, Homo sapiens
  misc_RNA (1)...(19): siRNA sense strand
gcccuuugcagugauauaa

SEQ ID NO: 2130603 - RNA, 19 nt, Homo sapiens
  misc_RNA (1)...(19): siRNA sense strand
ggaaagauggcugaauagg

SEQ ID NO: 2130604 - RNA, 19 nt, Homo sapiens
  misc_RNA (1)...(19): siRNA sense strand
cauugggacugguuagaca

SEQ ID NO: 2130605 - RNA, 19 nt, Homo sapiens
  misc_RNA (1)...(19): siRNA sense strand
acgcagaaggagauaauuu

SEQ ID NO: 2130606 - RNA, 19 nt, Homo sapiens
  misc_RNA (1)...(19): siRNA sense strand
aggagauaauuucugcauu

SEQ ID NO: 2130607 - RNA, 19 nt, Homo sapiens
  misc_RNA (1)...(19): siRNA sense strand
cgcagaaggagauaauuuc

SEQ ID NO: 2130608 - RNA, 19 nt, Homo sapiens
  misc_RNA (1)...(19): siRNA sense strand
cuugaggugucuggaaaga

SEQ ID NO: 2130609 - RNA, 19 nt, Homo sapiens
  misc_RNA (1)...(19): siRNA sense strand
ggagauaauuucugcauuu

SEQ ID NO: 2130610 - RNA, 19 nt, Homo sapiens
  misc_RNA (1)...(19): siRNA sense strand
aaagauggcugaauaggaa

SEQ ID NO: 2130611 - RNA, 19 nt, Homo sapiens
  misc_RNA (1)...(19): siRNA sense strand
guacccagcucaucucauu

SEQ ID NO: 2130612 - RNA, 19 nt, Homo sapiens
  misc_RNA (1)...(19): siRNA sense strand
cagcaaauuucaaacugua

SEQ ID NO: 2130613 - RNA, 19 nt, Homo sapiens
  misc_RNA (1)...(19): siRNA sense strand
cuggaaagauggcugaaua

SEQ ID NO: 2130614 - RNA, 19 nt, Homo sapiens
  misc_RNA (1)...(19): siRNA sense strand
gaaagauggcugaauagga

SEQ ID NO: 2130615 - RNA, 19 nt, Homo sapiens
  misc_RNA (1)...(19): siRNA sense strand
gcagcaaauuucaaacugu

SEQ ID NO: 2130616 - RNA, 19 nt, Homo sapiens
  misc_RNA (1)...(19): siRNA sense strand
gagauaauuucugcauuuc

SEQ ID NO: 2130617 - RNA, 19 nt, Homo sapiens
  misc_RNA (1)...(19): siRNA sense strand
ugaggugucuggaaagaug

SEQ ID NO: 2130618 - RNA, 19 nt, Homo sapiens
  misc_RNA (1)...(19): siRNA sense strand
gaucaacgcagaaggagau

SEQ ID NO: 2130619 - RNA, 19 nt, Homo sapiens
  misc_RNA (1)...(19): siRNA sense strand
ggacucuggcagcaaauuu

SEQ ID NO: 2130620 - RNA, 19 nt, Homo sapiens
  misc_RNA (1)...(19): siRNA sense strand
ccacagaaggcaagcagaa

SEQ ID NO: 2130621 - RNA, 19 nt, Homo sapiens
  misc_RNA (1)...(19): siRNA sense strand
caacgcagaaggagauaau

SEQ ID NO: 2130622 - RNA, 19 nt, Homo sapiens
  misc_RNA (1)...(19): siRNA sense strand
gcaaauuucaaacuguaug

SEQ ID NO: 2130623 - RNA, 19 nt, Homo sapiens
  misc_RNA (1)...(19): siRNA sense strand
uaaaguacccagcucaucu

SEQ ID NO: 2130624 - RNA, 19 nt, Homo sapiens
  misc_RNA (1)...(19): siRNA sense strand
ggcagcaaauuucaaacug

SEQ ID NO: 2130625 - RNA, 19 nt, Homo sapiens
  misc_RNA (1)...(19): siRNA sense strand
cgagaucaacgcagaagga

SEQ ID NO: 2130626 - RNA, 19 nt, Homo sapiens
  misc_RNA (1)...(19): siRNA sense strand
gcccuuugcagugauauaa

SEQ ID NO: 2130627 - RNA, 19 nt, Homo sapiens
  misc_RNA (1)...(19): siRNA sense strand
ggaaagauggcugaauagg

SEQ ID NO: 2130628 - RNA, 19 nt, Homo sapiens
  misc_RNA (1)...(19): siRNA sense strand
cauugggacugguuagaca

SEQ ID NO: 2130629 - RNA, 19 nt, Homo sapiens
  misc_RNA (1)...(19): siRNA sense strand
acgcagaaggagauaauuu

SEQ ID NO: 2130630 - RNA, 19 nt, Homo sapiens
  misc_RNA (1)...(19): siRNA sense strand
aggagauaauuucugcauu

SEQ ID NO: 2130631 - RNA, 19 nt, Homo sapiens
  misc_RNA (1)...(19): siRNA sense strand
cgcagaaggagauaauuuc

SEQ ID NO: 2130632 - RNA, 19 nt, Homo sapiens
  misc_RNA (1)...(19): siRNA sense strand
cuugaggugucuggaaaga

SEQ ID NO: 2130633 - RNA, 19 nt, Homo sapiens
  misc_RNA (1)...(19): siRNA sense strand
gaacuucgauccagaggaa

SEQ ID NO: 2130634 - RNA, 19 nt, Homo sapiens
  misc_RNA (1)...(19): siRNA sense strand
gagaaaguccgaagaagua

SEQ ID NO: 2130635 - RNA, 19 nt, Homo sapiens
  misc_RNA (1)...(19): siRNA sense strand
agaaguacaucaagagaua

SEQ ID NO: 2130636 - RNA, 19 nt, Homo sapiens
  misc_RNA (1)...(19): siRNA sense strand
ggaggaugcugaaguguau

SEQ ID NO: 2130637 - RNA, 19 nt, Homo sapiens
  misc_RNA (1)...(19): siRNA sense strand
acaagaaggagauacauua

SEQ ID NO: 2130638 - RNA, 19 nt, Homo sapiens
  misc_RNA (1)...(19): siRNA sense strand
ggaggaggaugcugaagug

SEQ ID NO: 2130639 - RNA, 19 nt, Homo sapiens
  misc_RNA (1)...(19): siRNA sense strand
ucaauacucuuccgaacaa

SEQ ID NO: 2130640 - RNA, 19 nt, Homo sapiens
  misc_RNA (1)...(19): siRNA sense strand
ucagucaaguggucaagua

SEQ ID NO: 2130641 - RNA, 19 nt, Homo sapiens
  misc_RNA (1)...(19): siRNA sense strand
agacagacuucacgucauu

SEQ ID NO: 2130642 - RNA, 19 nt, Homo sapiens
  misc_RNA (1)...(19): siRNA sense strand
ucaaguacaugcauuugga

SEQ ID NO: 2130643 - RNA, 19 nt, Homo sapiens
  misc_RNA (1)...(19): siRNA sense strand
gagauagacuugacgacau

SEQ ID NO: 2130644 - RNA, 19 nt, Homo sapiens
  misc_RNA (1)...(19): siRNA sense strand
caauagcccuucaguacug

SEQ ID NO: 2130645 - RNA, 19 nt, Homo sapiens
  misc_RNA (1)...(19): siRNA sense strand
caagaaggagauacauuaa

SEQ ID NO: 2130646 - RNA, 19 nt, Homo sapiens
  misc_RNA (1)...(19): siRNA sense strand
gaagaaguacaucaagaga

SEQ ID NO: 2130647 - RNA, 19 nt, Homo sapiens
  misc_RNA (1)...(19): siRNA sense strand
gaaacacuuuguccuccaa

SEQ ID NO: 2130648 - RNA, 19 nt, Homo sapiens
  misc_RNA (1)...(19): siRNA sense strand
gaaauuguucagacaguga

SEQ ID NO: 2130649 - RNA, 19 nt, Homo sapiens
  misc_RNA (1)...(19): siRNA sense strand
ccgaagaaguacaucaaga

SEQ ID NO: 2130650 - RNA, 19 nt, Homo sapiens
  misc_RNA (1)...(19): siRNA sense strand
uguggacgcuggacaaaga

SEQ ID NO: 2130651 - RNA, 19 nt, Homo sapiens
  misc_RNA (1)...(19): siRNA sense strand
ucauucaucuguucaauac

SEQ ID NO: 2130652 - RNA, 19 nt, Homo sapiens
  misc_RNA (1)...(19): siRNA sense strand
aaagagaaaguccgaagaa

SEQ ID NO: 2130653 - RNA, 19 nt, Homo sapiens
  misc_RNA (1)...(19): siRNA sense strand
agauagacuugacgacauu

SEQ ID NO: 2130654 - RNA, 19 nt, Homo sapiens
  misc_RNA (1)...(19): siRNA sense strand
acaaagacgcagccaguuu

SEQ ID NO: 2130655 - RNA, 19 nt, Homo sapiens
  misc_RNA (1)...(19): siRNA sense strand
uaaaugcaauagcccuuca

SEQ ID NO: 2130656 - RNA, 19 nt, Homo sapiens
  misc_RNA (1)...(19): siRNA sense strand
ggggacagauuuuaacauu

SEQ ID NO: 2130657 - RNA, 19 nt, Homo sapiens
  misc_RNA (1)...(19): siRNA sense strand
gcccuucaguacuguugua

SEQ ID NO: 2130658 - RNA, 19 nt, Homo sapiens
  misc_RNA (1)...(19): siRNA sense strand
ucacgucauucaucuguuc

SEQ ID NO: 2130659 - RNA, 19 nt, Homo sapiens
  misc_RNA (1)...(19): siRNA sense strand
gcagggaggcaucagaauc

SEQ ID NO: 2130660 - RNA, 19 nt, Homo sapiens
  misc_RNA (1)...(19): siRNA sense strand
gggacagauuuuaacauua

SEQ ID NO: 2130661 - RNA, 19 nt, Homo sapiens
  misc_RNA (1)...(19): siRNA sense strand
gcaauagcccuucaguacu

SEQ ID NO: 2130662 - RNA, 19 nt, Homo sapiens
  misc_RNA (1)...(19): siRNA sense strand
gauauacaagaaggagaua

SEQ ID NO: 2130663 - RNA, 19 nt, Homo sapiens
  misc_RNA (1)...(19): siRNA sense strand
gcagaggcucggccaugaa

SEQ ID NO: 2130664 - RNA, 19 nt, Homo sapiens
  misc_RNA (1)...(19): siRNA sense strand
uagacuugacgacauuaua

SEQ ID NO: 2130665 - RNA, 19 nt, Homo sapiens
  misc_RNA (1)...(19): siRNA sense strand
cgaagaaguacaucaagag

SEQ ID NO: 2130666 - RNA, 19 nt, Homo sapiens
  misc_RNA (1)...(19): siRNA sense strand
gauagacuugacgacauua

SEQ ID NO: 2130667 - RNA, 19 nt, Homo sapiens
  misc_RNA (1)...(19): siRNA sense strand
ugcaauagcccuucaguac

SEQ ID NO: 2130668 - RNA, 19 nt, Homo sapiens
  misc_RNA (1)...(19): siRNA sense strand
gucauucaucuguucaaua

SEQ ID NO: 2130669 - RNA, 19 nt, Homo sapiens
  misc_RNA (1)...(19): siRNA sense strand
gucaaguggucaaguacau

SEQ ID NO: 2130670 - RNA, 19 nt, Homo sapiens
  misc_RNA (1)...(19): siRNA sense strand
gaaaguccgaagaaguaca

SEQ ID NO: 2130671 - RNA, 19 nt, Homo sapiens
  misc_RNA (1)...(19): siRNA sense strand
guggucaaguacaugcauu

SEQ ID NO: 2130672 - RNA, 19 nt, Homo sapiens
  misc_RNA (1)...(19): siRNA sense strand
agagaaaguccgaagaagu

SEQ ID NO: 2130673 - RNA, 19 nt, Homo sapiens
  misc_RNA (1)...(19): siRNA sense strand
caaguacaugcauuuggaa

SEQ ID NO: 2130674 - RNA, 19 nt, Homo sapiens
  misc_RNA (1)...(19): siRNA sense strand
ggucaaguacaugcauuug

SEQ ID NO: 2130675 - RNA, 19 nt, Homo sapiens
  misc_RNA (1)...(19): siRNA sense strand
ggcaucagaaucguaguuu

SEQ ID NO: 2130676 - RNA, 19 nt, Homo sapiens
  misc_RNA (1)...(19): siRNA sense strand
guuguacggucuaucaaaa

SEQ ID NO: 2130677 - RNA, 19 nt, Homo sapiens
  misc_RNA (1)...(19): siRNA sense strand
gacaaagacgcagccaguu

SEQ ID NO: 2130678 - RNA, 19 nt, Homo sapiens
  misc_RNA (1)...(19): siRNA sense strand
agacuugacgacauuauag

SEQ ID NO: 2130679 - RNA, 19 nt, Homo sapiens
  misc_RNA (1)...(19): siRNA sense strand
uaacggggacagauuuuaa

SEQ ID NO: 2130680 - RNA, 19 nt, Homo sapiens
  misc_RNA (1)...(19): siRNA sense strand
gaggcucggccaugaacuu

SEQ ID NO: 2130681 - RNA, 19 nt, Homo sapiens
  misc_RNA (1)...(19): siRNA sense strand
gcaucagaaucguaguuuu

SEQ ID NO: 2130682 - RNA, 19 nt, Homo sapiens
  misc_RNA (1)...(19): siRNA sense strand
uacaagaaggagauacauu

SEQ ID NO: 2130683 - RNA, 19 nt, Homo sapiens
  misc_RNA (1)...(19): siRNA sense strand
guucagacagugauauuuu

SEQ ID NO: 2130684 - RNA, 19 nt, Homo sapiens
  misc_RNA (1)...(19): siRNA sense strand
caggaaauuuugccagcua

SEQ ID NO: 2130685 - RNA, 19 nt, Homo sapiens
  misc_RNA (1)...(19): siRNA sense strand
gacuucacgucauucaucu

SEQ ID NO: 2130686 - RNA, 19 nt, Homo sapiens
  misc_RNA (1)...(19): siRNA sense strand
uggaaauuguucagacagu

SEQ ID NO: 2130687 - RNA, 19 nt, Homo sapiens
  misc_RNA (1)...(19): siRNA sense strand
gggaggcaucagaaucgua

SEQ ID NO: 2130688 - RNA, 19 nt, Homo sapiens
  misc_RNA (1)...(19): siRNA sense strand
agacuucacgucauucauc

SEQ ID NO: 2130689 - RNA, 19 nt, Homo sapiens
  misc_RNA (1)...(19): siRNA sense strand
aagagaaaguccgaagaag

SEQ ID NO: 2130690 - RNA, 19 nt, Homo sapiens
  misc_RNA (1)...(19): siRNA sense strand
cgucauucaucuguucaau

SEQ ID NO: 2130691 - RNA, 19 nt, Homo sapiens
  misc_RNA (1)...(19): siRNA sense strand
gaaguacaucaagagauag

SEQ ID NO: 2130692 - RNA, 19 nt, Homo sapiens
  misc_RNA (1)...(19): siRNA sense strand
aggaggaugcugaagugua

SEQ ID NO: 2130693 - RNA, 19 nt, Homo sapiens
  misc_RNA (1)...(19): siRNA sense strand
uauacaagaaggagauaca

SEQ ID NO: 2130694 - RNA, 19 nt, Homo sapiens
  misc_RNA (1)...(19): siRNA sense strand
agcagaggcucggccauga

SEQ ID NO: 2130695 - RNA, 19 nt, Homo sapiens
  misc_RNA (1)...(19): siRNA sense strand
gcacgcagaucaccacaga

SEQ ID NO: 2130696 - RNA, 19 nt, Homo sapiens
  misc_RNA (1)...(19): siRNA sense strand
caacaugaccucugaguuc

SEQ ID NO: 2130697 - RNA, 19 nt, Homo sapiens
  misc_RNA (1)...(19): siRNA sense strand
cguagaggcuuuccgguuu

SEQ ID NO: 2130698 - RNA, 19 nt, Homo sapiens
  misc_RNA (1)...(19): siRNA sense strand
ggaaccugcuggcuacuga

SEQ ID NO: 2130699 - RNA, 19 nt, Homo sapiens
  misc_RNA (1)...(19): siRNA sense strand
caaggaaccugacaaccau

SEQ ID NO: 2130700 - RNA, 19 nt, Homo sapiens
  misc_RNA (1)...(19): siRNA sense strand
cugaggaccugaacaacua

SEQ ID NO: 2130701 - RNA, 19 nt, Homo sapiens
  misc_RNA (1)...(19): siRNA sense strand
gugggauccuguucaauaa

SEQ ID NO: 2130702 - RNA, 19 nt, Homo sapiens
  misc_RNA (1)...(19): siRNA sense strand
ucacgacaguggagagaaa

SEQ ID NO: 2130703 - RNA, 19 nt, Homo sapiens
  misc_RNA (1)...(19): siRNA sense strand
cagcaccacucaugagguu

SEQ ID NO: 2130704 - RNA, 19 nt, Homo sapiens
  misc_RNA (1)...(19): siRNA sense strand
gggauccuguucaauaaug

SEQ ID NO: 2130705 - RNA, 19 nt, Homo sapiens
  misc_RNA (1)...(19): siRNA sense strand
ggaagcagccgcucuuguc

SEQ ID NO: 2130706 - RNA, 19 nt, Homo sapiens
  misc_RNA (1)...(19): siRNA sense strand
guagaggcuuuccgguuug

SEQ ID NO: 2130707 - RNA, 19 nt, Homo sapiens
  misc_RNA (1)...(19): siRNA sense strand
ccacucacccgaucuccua

SEQ ID NO: 2130708 - RNA, 19 nt, Homo sapiens
  misc_RNA (1)...(19): siRNA sense strand
gcacugcucaccugucugu

SEQ ID NO: 2130709 - RNA, 19 nt, Homo sapiens
  misc_RNA (1)...(19): siRNA sense strand
gcggcuggcugacaccuau

SEQ ID NO: 2130710 - RNA, 19 nt, Homo sapiens
  misc_RNA (1)...(19): siRNA sense strand
cuucagcucucccagcauu

SEQ ID NO: 2130711 - RNA, 19 nt, Homo sapiens
  misc_RNA (1)...(19): siRNA sense strand
aauaaugaauggacgacuu

SEQ ID NO: 2130712 - RNA, 19 nt, Homo sapiens
  misc_RNA (1)...(19): siRNA sense strand
ucagugggauccuguucaa

SEQ ID NO: 2130713 - RNA, 19 nt, Homo sapiens
  misc_RNA (1)...(19): siRNA sense strand
gagacgcggugcuguacau

SEQ ID NO: 2130714 - RNA, 19 nt, Homo sapiens
  misc_RNA (1)...(19): siRNA sense strand
aagcugaggucaucaaugc

SEQ ID NO: 2130715 - RNA, 19 nt, Homo sapiens
  misc_RNA (1)...(19): siRNA sense strand
caccaucaaccucuacuuu

SEQ ID NO: 2130716 - RNA, 19 nt, Homo sapiens
  misc_RNA (1)...(19): siRNA sense strand
ggauccuguucaauaauga

SEQ ID NO: 2130717 - RNA, 19 nt, Homo sapiens
  misc_RNA (1)...(19): siRNA sense strand
ccaaggaaccugacaacca

SEQ ID NO: 2130718 - RNA, 19 nt, Homo sapiens
  misc_RNA (1)...(19): siRNA sense strand
gcaacaugaccucugaguu

SEQ ID NO: 2130719 - RNA, 19 nt, Homo sapiens
  misc_RNA (1)...(19): siRNA sense strand
agugggauccuguucaaua

SEQ ID NO: 2130720 - RNA, 19 nt, Homo sapiens
  misc_RNA (1)...(19): siRNA sense strand
gaaccugacaaccaugugu

SEQ ID NO: 2130721 - RNA, 19 nt, Homo sapiens
  misc_RNA (1)...(19): siRNA sense strand
ccaucaaccucuacuuugg

SEQ ID NO: 2130722 - RNA, 19 nt, Homo sapiens
  misc_RNA (1)...(19): siRNA sense strand
ccucaaaggguacaacuuc

SEQ ID NO: 2130723 - RNA, 19 nt, Homo sapiens
  misc_RNA (1)...(19): siRNA sense strand
cagccgcucuuguccaugu

SEQ ID NO: 2130724 - RNA, 19 nt, Homo sapiens
  misc_RNA (1)...(19): siRNA sense strand
gggcacugcucaccugucu

SEQ ID NO: 2130725 - RNA, 19 nt, Homo sapiens
  misc_RNA (1)...(19): siRNA sense strand
gaaaacaagcggacuguca

SEQ ID NO: 2130726 - RNA, 19 nt, Homo sapiens
  misc_RNA (1)...(19): siRNA sense strand
cagccugucuugugguaug

SEQ ID NO: 2130727 - RNA, 19 nt, Homo sapiens
  misc_RNA (1)...(19): siRNA sense strand
gcacuggccaucaucuaca

SEQ ID NO: 2130728 - RNA, 19 nt, Homo sapiens
  misc_RNA (1)...(19): siRNA sense strand
gcaggugguccgcaacaug

SEQ ID NO: 2130729 - RNA, 19 nt, Homo sapiens
  misc_RNA (1)...(19): siRNA sense strand
caacagcaccacucaugag

SEQ ID NO: 2130730 - RNA, 19 nt, Homo sapiens
  misc_RNA (1)...(19): siRNA sense strand
cagcugaggaccugaacaa

SEQ ID NO: 2130731 - RNA, 19 nt, Homo sapiens
  misc_RNA (1)...(19): siRNA sense strand
uugcagcccuguugugugu

SEQ ID NO: 2130732 - RNA, 19 nt, Homo sapiens
  misc_RNA (1)...(19): siRNA sense strand
acacugcacuggccaucau

SEQ ID NO: 2130733 - RNA, 19 nt, Homo sapiens
  misc_RNA (1)...(19): siRNA sense strand
caugaccucugaguucuuc

SEQ ID NO: 2130734 - RNA, 19 nt, Homo sapiens
  misc_RNA (1)...(19): siRNA sense strand
agaagggccugacguacca

SEQ ID NO: 2130735 - RNA, 19 nt, Homo sapiens
  misc_RNA (1)...(19): siRNA sense strand
gagcacccgcugaacauca

SEQ ID NO: 2130736 - RNA, 19 nt, Homo sapiens
  misc_RNA (1)...(19): siRNA sense strand
caggugguccgcaacauga

SEQ ID NO: 2130737 - RNA, 19 nt, Homo sapiens
  misc_RNA (1)...(19): siRNA sense strand
gacaguggagagaaacauu

SEQ ID NO: 2130738 - RNA, 19 nt, Homo sapiens
  misc_RNA (1)...(19): siRNA sense strand
ccagcaccaucaaccucua

SEQ ID NO: 2130739 - RNA, 19 nt, Homo sapiens
  misc_RNA (1)...(19): siRNA sense strand
ggaugugacugagaauucg

SEQ ID NO: 2130740 - RNA, 19 nt, Homo sapiens
  misc_RNA (1)...(19): siRNA sense strand
gcagaucaccacagacacu

SEQ ID NO: 2130741 - RNA, 19 nt, Homo sapiens
  misc_RNA (1)...(19): siRNA sense strand
uacaacagcaccacucaug

SEQ ID NO: 2130742 - RNA, 19 nt, Homo sapiens
  misc_RNA (1)...(19): siRNA sense strand
guucggcuaugacgugaag

SEQ ID NO: 2130743 - RNA, 19 nt, Homo sapiens
  misc_RNA (1)...(19): siRNA sense strand
acuacaagcccgaguucua

SEQ ID NO: 2130744 - RNA, 19 nt, Homo sapiens
  misc_RNA (1)...(19): siRNA sense strand
cacccgaucuccuacuaca

SEQ ID NO: 2130745 - RNA, 19 nt, Homo sapiens
  misc_RNA (1)...(19): siRNA sense strand
gacguaccaccgcaucgua

SEQ ID NO: 2130746 - RNA, 19 nt, Homo sapiens
  misc_RNA (1)...(19): siRNA sense strand
uggcccagauugugaagga

SEQ ID NO: 2130747 - RNA, 19 nt, Homo sapiens
  misc_RNA (1)...(19): siRNA sense strand
ccaugugccugacgaucau

SEQ ID NO: 2130748 - RNA, 19 nt, Homo sapiens
  misc_RNA (1)...(19): siRNA sense strand
cuaccugcuucuucuagga

SEQ ID NO: 2130749 - RNA, 19 nt, Homo sapiens
  misc_RNA (1)...(19): siRNA sense strand
cuacaacggcagccucaug

SEQ ID NO: 2130750 - RNA, 19 nt, Homo sapiens
  misc_RNA (1)...(19): siRNA sense strand
ugacugagaauucgauugc

SEQ ID NO: 2130751 - RNA, 19 nt, Homo sapiens
  misc_RNA (1)...(19): siRNA sense strand
gaaaagcugaggucaucaa

SEQ ID NO: 2130752 - RNA, 19 nt, Homo sapiens
  misc_RNA (1)...(19): siRNA sense strand
cagcuccggucccagaucu

SEQ ID NO: 2130753 - RNA, 19 nt, Homo sapiens
  misc_RNA (1)...(19): siRNA sense strand
ugugguaugucuguggaaa

SEQ ID NO: 2130754 - RNA, 19 nt, Homo sapiens
  misc_RNA (1)...(19): siRNA sense strand
gggaagcagccgcucuugu

SEQ ID NO: 2130755 - RNA, 19 nt, Homo sapiens
  misc_RNA (1)...(19): siRNA sense strand
gcugaggaccugaacaacu

SEQ ID NO: 2130756 - RNA, 19 nt, Homo sapiens
  misc_RNA (1)...(19): siRNA sense strand
acaacagcaccacucauga

SEQ ID NO: 2130757 - RNA, 19 nt, Homo sapiens
  misc_RNA (1)...(19): siRNA sense strand
ggucauugucggccucugu

SEQ ID NO: 2130758 - RNA, 19 nt, Homo sapiens
  misc_RNA (1)...(19): siRNA sense strand
ggagauccgaggcuaugag

SEQ ID NO: 2130759 - RNA, 19 nt, Homo sapiens
  misc_RNA (1)...(19): siRNA sense strand
caguggagagaaacauuga

SEQ ID NO: 2130760 - RNA, 19 nt, Homo sapiens
  misc_RNA (1)...(19): siRNA sense strand
gcaccacucaugagguuuu

SEQ ID NO: 2130761 - RNA, 19 nt, Homo sapiens
  misc_RNA (1)...(19): siRNA sense strand
gcaccaucaaccucuacuu

SEQ ID NO: 2130762 - RNA, 19 nt, Homo sapiens
  misc_RNA (1)...(19): siRNA sense strand
ugacagcugaggaccugaa

SEQ ID NO: 2130763 - RNA, 19 nt, Homo sapiens
  misc_RNA (1)...(19): siRNA sense strand
ccucauggcccagauugug

SEQ ID NO: 2130764 - RNA, 19 nt, Homo sapiens
  misc_RNA (1)...(19): siRNA sense strand
gagcagcagccugucuugu

SEQ ID NO: 2130765 - RNA, 19 nt, Homo sapiens
  misc_RNA (1)...(19): siRNA sense strand
ggucaccgcggacgacuuu

SEQ ID NO: 2130766 - RNA, 19 nt, Homo sapiens
  misc_RNA (1)...(19): siRNA sense strand
ggaacccucccuacucuga

SEQ ID NO: 2130767 - RNA, 19 nt, Homo sapiens
  misc_RNA (1)...(19): siRNA sense strand
caggauggcgugcagcuuu

SEQ ID NO: 2130768 - RNA, 19 nt, Homo sapiens
  misc_RNA (1)...(19): siRNA sense strand
ggagcucgaggcccaacua

SEQ ID NO: 2130769 - RNA, 19 nt, Homo sapiens
  misc_RNA (1)...(19): siRNA sense strand
ccgcggacgacuuugguua

SEQ ID NO: 2130770 - RNA, 19 nt, Homo sapiens
  misc_RNA (1)...(19): siRNA sense strand
gagcucgaggcccaacuaa

SEQ ID NO: 2130771 - RNA, 19 nt, Homo sapiens
  misc_RNA (1)...(19): siRNA sense strand
gcucgaggcccaacuaagc

SEQ ID NO: 2130772 - RNA, 19 nt, Homo sapiens
  misc_RNA (1)...(19): siRNA sense strand
ggccggagacguggauuug

SEQ ID NO: 2130773 - RNA, 19 nt, Homo sapiens
  misc_RNA (1)...(19): siRNA sense strand
gcgugucccugcuggucaa

SEQ ID NO: 2130774 - RNA, 19 nt, Homo sapiens
  misc_RNA (1)...(19): siRNA sense strand
cuugggagcggcugcauga

SEQ ID NO: 2130775 - RNA, 19 nt, Homo sapiens
  misc_RNA (1)...(19): siRNA sense strand
cuggaacccucccuacucu

SEQ ID NO: 2130776 - RNA, 19 nt, Homo sapiens
  misc_RNA (1)...(19): siRNA sense strand
ucacagacaucaucaaauu

SEQ ID NO: 2130777 - RNA, 19 nt, Homo sapiens
  misc_RNA (1)...(19): siRNA sense strand
aaacuucucugugacaaua

SEQ ID NO: 2130778 - RNA, 19 nt, Homo sapiens
  misc_RNA (1)...(19): siRNA sense strand
gcacagccuuguuugagaa

SEQ ID NO: 2130779 - RNA, 19 nt, Homo sapiens
  misc_RNA (1)...(19): siRNA sense strand
gaagacagcagccacauca

SEQ ID NO: 2130780 - RNA, 19 nt, Homo sapiens
  misc_RNA (1)...(19): siRNA sense strand
ucacggagcucaugaagag

SEQ ID NO: 2130781 - RNA, 19 nt, Homo sapiens
  misc_RNA (1)...(19): siRNA sense strand
uaucagcccuggucaauca

SEQ ID NO: 2130782 - RNA, 19 nt, Homo sapiens
  misc_RNA (1)...(19): siRNA sense strand
ggacuauacucacuucuac

SEQ ID NO: 2130783 - RNA, 19 nt, Homo sapiens
  misc_RNA (1)...(19): siRNA sense strand
ugaagaggaugaaccagaa

SEQ ID NO: 2130784 - RNA, 19 nt, Homo sapiens
  misc_RNA (1)...(19): siRNA sense strand
guccacaucuucagacaaa

SEQ ID NO: 2130785 - RNA, 19 nt, Homo sapiens
  misc_RNA (1)...(19): siRNA sense strand
gcaaguuuguccacgaaga

SEQ ID NO: 2130786 - RNA, 19 nt, Homo sapiens
  misc_RNA (1)...(19): siRNA sense strand
ggucauccuuccucccaua

SEQ ID NO: 2130787 - RNA, 19 nt, Homo sapiens
  misc_RNA (1)...(19): siRNA sense strand
agacaaagaugaugaugag

SEQ ID NO: 2130788 - RNA, 19 nt, Homo sapiens
  misc_RNA (1)...(19): siRNA sense strand
gagaacucgucuaugauga

SEQ ID NO: 2130789 - RNA, 19 nt, Homo sapiens
  misc_RNA (1)...(19): siRNA sense strand
gauuauguguucaggauca

SEQ ID NO: 2130790 - RNA, 19 nt, Homo sapiens
  misc_RNA (1)...(19): siRNA sense strand
aaaggacgauguugugaug

SEQ ID NO: 2130791 - RNA, 19 nt, Homo sapiens
  misc_RNA (1)...(19): siRNA sense strand
gcaaacaugagaucguuga

SEQ ID NO: 2130792 - RNA, 19 nt, Homo sapiens
  misc_RNA (1)...(19): siRNA sense strand
ggaggagccugagauggaa

SEQ ID NO: 2130793 - RNA, 19 nt, Homo sapiens
  misc_RNA (1)...(19): siRNA sense strand
gcugguuccugcuggauuu

SEQ ID NO: 2130794 - RNA, 19 nt, Homo sapiens
  misc_RNA (1)...(19): siRNA sense strand
guaaauacuaugagaagga

SEQ ID NO: 2130795 - RNA, 19 nt, Homo sapiens
  misc_RNA (1)...(19): siRNA sense strand
gaagcugcguaacaucaug

SEQ ID NO: 2130796 - RNA, 19 nt, Homo sapiens
  misc_RNA (1)...(19): siRNA sense strand
ggacauggcccugccugaa

SEQ ID NO: 2130797 - RNA, 19 nt, Homo sapiens
  misc_RNA (1)...(19): siRNA sense strand
gagaagcugcguaacauca

SEQ ID NO: 2130798 - RNA, 19 nt, Homo sapiens
  misc_RNA (1)...(19): siRNA sense strand
gaacaacauggauuucaca

SEQ ID NO: 2130799 - RNA, 19 nt, Homo sapiens
  misc_RNA (1)...(19): siRNA sense strand
gggcaaaguguuuccuaaa

SEQ ID NO: 2130800 - RNA, 19 nt, Homo sapiens
  misc_RNA (1)...(19): siRNA sense strand
ggccacggauuauguguuc

SEQ ID NO: 2130801 - RNA, 19 nt, Homo sapiens
  misc_RNA (1)...(19): siRNA sense strand
gagcagcgagacagagaaa

SEQ ID NO: 2130802 - RNA, 19 nt, Homo sapiens
  misc_RNA (1)...(19): siRNA sense strand
gcacuuugcaaacaugaga

SEQ ID NO: 2130803 - RNA, 19 nt, Homo sapiens
  misc_RNA (1)...(19): siRNA sense strand
ugccgaagcugcccaacuu

SEQ ID NO: 2130804 - RNA, 19 nt, Homo sapiens
  misc_RNA (1)...(19): siRNA sense strand
gcacuacguccuguucauu

SEQ ID NO: 2130805 - RNA, 19 nt, Homo sapiens
  misc_RNA (1)...(19): siRNA sense strand
gggcaugugugaucuucug

SEQ ID NO: 2130806 - RNA, 19 nt, Homo sapiens
  misc_RNA (1)...(19): siRNA sense strand
gacauggcccugccugaaa

SEQ ID NO: 2130807 - RNA, 19 nt, Homo sapiens
  misc_RNA (1)...(19): siRNA sense strand
ggagaaacagcccaagauc

SEQ ID NO: 2130808 - RNA, 19 nt, Homo sapiens
  misc_RNA (1)...(19): siRNA sense strand
gcagccacaucaucuccuu

SEQ ID NO: 2130809 - RNA, 19 nt, Homo sapiens
  misc_RNA (1)...(19): siRNA sense strand
ggacucaaccaucagcaau

SEQ ID NO: 2130810 - RNA, 19 nt, Homo sapiens
  misc_RNA (1)...(19): siRNA sense strand
cacagggacucaaccauca

SEQ ID NO: 2130811 - RNA, 19 nt, Homo sapiens
  misc_RNA (1)...(19): siRNA sense strand
cagaguggcucggcugaug

SEQ ID NO: 2130812 - RNA, 19 nt, Homo sapiens
  misc_RNA (1)...(19): siRNA sense strand
caucaagcaucuguggauu

SEQ ID NO: 2130813 - RNA, 19 nt, Homo sapiens
  misc_RNA (1)...(19): siRNA sense strand
gauugcagcccucuuuaug

SEQ ID NO: 2130814 - RNA, 19 nt, Homo sapiens
  misc_RNA (1)...(19): siRNA sense strand
uugcagcccucuuuaugaa

SEQ ID NO: 2130815 - RNA, 19 nt, Homo sapiens
  misc_RNA (1)...(19): siRNA sense strand
gagaacaacauggauuuca

SEQ ID NO: 2130816 - RNA, 19 nt, Homo sapiens
  misc_RNA (1)...(19): siRNA sense strand
ggaagucuaccgugacauc

SEQ ID NO: 2130817 - RNA, 19 nt, Homo sapiens
  misc_RNA (1)...(19): siRNA sense strand
gcacagaccauggcugagu

SEQ ID NO: 2130818 - RNA, 19 nt, Homo sapiens
  misc_RNA (1)...(19): siRNA sense strand
cgugagaacccaccuauca

SEQ ID NO: 2130819 - RNA, 19 nt, Homo sapiens
  misc_RNA (1)...(19): siRNA sense strand
gaugaagacugcagaucac

SEQ ID NO: 2130820 - RNA, 19 nt, Homo sapiens
  misc_RNA (1)...(19): siRNA sense strand
cggauuauguguucaggau

SEQ ID NO: 2130821 - RNA, 19 nt, Homo sapiens
  misc_RNA (1)...(19): siRNA sense strand
uggagucccugcaucagaa

SEQ ID NO: 2130822 - RNA, 19 nt, Homo sapiens
  misc_RNA (1)...(19): siRNA sense strand
gggacuauacucacuucua

SEQ ID NO: 2130823 - RNA, 19 nt, Homo sapiens
  misc_RNA (1)...(19): siRNA sense strand
gaggagaaacagcccaaga

SEQ ID NO: 2130824 - RNA, 19 nt, Homo sapiens
  misc_RNA (1)...(19): siRNA sense strand
gacggaaacagaaaggaaa

SEQ ID NO: 2130825 - RNA, 19 nt, Homo sapiens
  misc_RNA (1)...(19): siRNA sense strand
gaccuggacuaugagaaga

SEQ ID NO: 2130826 - RNA, 19 nt, Homo sapiens
  misc_RNA (1)...(19): siRNA sense strand
cccugaaacuucucuguga

SEQ ID NO: 2130827 - RNA, 19 nt, Homo sapiens
  misc_RNA (1)...(19): siRNA sense strand
ggaccuggacuaugagaag

SEQ ID NO: 2130828 - RNA, 19 nt, Homo sapiens
  misc_RNA (1)...(19): siRNA sense strand
gcagcgagacagagaaaca

SEQ ID NO: 2130829 - RNA, 19 nt, Homo sapiens
  misc_RNA (1)...(19): siRNA sense strand
gcagauuggaggagaaaca

SEQ ID NO: 2130830 - RNA, 19 nt, Homo sapiens
  misc_RNA (1)...(19): siRNA sense strand
augaugaggccacggauua

SEQ ID NO: 2130831 - RNA, 19 nt, Homo sapiens
  misc_RNA (1)...(19): siRNA sense strand
gcacugccaccagcaaguu

SEQ ID NO: 2130832 - RNA, 19 nt, Homo sapiens
  misc_RNA (1)...(19): siRNA sense strand
uugcaucuuuguuggagua

SEQ ID NO: 2130833 - RNA, 19 nt, Homo sapiens
  misc_RNA (1)...(19): siRNA sense strand
agacucugauugagaacaa

SEQ ID NO: 2130834 - RNA, 19 nt, Homo sapiens
  misc_RNA (1)...(19): siRNA sense strand
gacacgcacuuugcaaaca

SEQ ID NO: 2130835 - RNA, 19 nt, Homo sapiens
  misc_RNA (1)...(19): siRNA sense strand
gcacauugagaucggcuau

SEQ ID NO: 2130836 - RNA, 19 nt, Homo sapiens
  misc_RNA (1)...(19): siRNA sense strand
uggagaagcugcguaacau

SEQ ID NO: 2130837 - RNA, 19 nt, Homo sapiens
  misc_RNA (1)...(19): siRNA sense strand
acucaaccaucagcaauga

SEQ ID NO: 2130838 - RNA, 19 nt, Homo sapiens
  misc_RNA (1)...(19): siRNA sense strand
ggacugacagccaggaucu

SEQ ID NO: 2130839 - RNA, 19 nt, Homo sapiens
  misc_RNA (1)...(19): siRNA sense strand
ggguaagggcaaaguguuu

SEQ ID NO: 2130840 - RNA, 19 nt, Homo sapiens
  misc_RNA (1)...(19): siRNA sense strand
gcgagaaaccagauucaag

SEQ ID NO: 2130841 - RNA, 19 nt, Homo sapiens
  misc_RNA (1)...(19): siRNA sense strand
cggcugacgucaugaccuu

SEQ ID NO: 2130842 - RNA, 19 nt, Homo sapiens
  misc_RNA (1)...(19): siRNA sense strand
gugccacccuucucuaugg

SEQ ID NO: 2130843 - RNA, 19 nt, Homo sapiens
  misc_RNA (1)...(19): siRNA sense strand
ccaagcaaguccugaagcu

SEQ ID NO: 2130844 - RNA, 19 nt, Homo sapiens
  misc_RNA (1)...(19): siRNA sense strand
agucuaccgugacaucauu

SEQ ID NO: 2130845 - RNA, 19 nt, Homo sapiens
  misc_RNA (1)...(19): siRNA sense strand
cggaggagccugagaugga

SEQ ID NO: 2130846 - RNA, 19 nt, Homo sapiens
  misc_RNA (1)...(19): siRNA sense strand
ugacggaaacagaaaggaa

SEQ ID NO: 2130847 - RNA, 19 nt, Homo sapiens
  misc_RNA (1)...(19): siRNA sense strand
caagcguccugcccucugu

SEQ ID NO: 2130848 - RNA, 19 nt, Homo sapiens
  misc_RNA (1)...(19): siRNA sense strand
gcugugacacgcaaguuug

SEQ ID NO: 2130849 - RNA, 19 nt, Homo sapiens
  misc_RNA (1)...(19): siRNA sense strand
gggaugacggaaacagaaa

SEQ ID NO: 2130850 - RNA, 19 nt, Homo sapiens
  misc_RNA (1)...(19): siRNA sense strand
caagaaggagccugaaagg

SEQ ID NO: 2130851 - RNA, 19 nt, Homo sapiens
  misc_RNA (1)...(19): siRNA sense strand
gugacaauaugaaguacca

SEQ ID NO: 2130852 - RNA, 19 nt, Homo sapiens
  misc_RNA (1)...(19): siRNA sense strand
ccacaucaucuccuucugu

SEQ ID NO: 2130853 - RNA, 19 nt, Homo sapiens
  misc_RNA (1)...(19): siRNA sense strand
cagacaaagaugaugauga

SEQ ID NO: 2130854 - RNA, 19 nt, Homo sapiens
  misc_RNA (1)...(19): siRNA sense strand
cgcgggaccucguguacaa

SEQ ID NO: 2130855 - RNA, 19 nt, Homo sapiens
  misc_RNA (1)...(19): siRNA sense strand
ggauuucacagacaucauc

SEQ ID NO: 2130856 - RNA, 19 nt, Homo sapiens
  misc_RNA (1)...(19): siRNA sense strand
uggagaacaacauggauuu

SEQ ID NO: 2130857 - RNA, 19 nt, Homo sapiens
  misc_RNA (1)...(19): siRNA sense strand
guggaagucuaccgugaca

SEQ ID NO: 2130858 - RNA, 19 nt, Homo sapiens
  misc_RNA (1)...(19): siRNA sense strand
ugaaacuucucugugacaa

SEQ ID NO: 2130859 - RNA, 19 nt, Homo sapiens
  misc_RNA (1)...(19): siRNA sense strand
gaugaugaggccacggauu

SEQ ID NO: 2130860 - RNA, 19 nt, Homo sapiens
  misc_RNA (1)...(19): siRNA sense strand
ccaaugggaaccuagugaa

SEQ ID NO: 2130861 - RNA, 19 nt, Homo sapiens
  misc_RNA (1)...(19): siRNA sense strand
ucugugacaauaugaagua

SEQ ID NO: 2130862 - RNA, 19 nt, Homo sapiens
  misc_RNA (1)...(19): siRNA sense strand
gaaacuucucugugacaau

SEQ ID NO: 2130863 - RNA, 19 nt, Homo sapiens
  misc_RNA (1)...(19): siRNA sense strand
ucaagaaggagccugaaag

SEQ ID NO: 2130864 - RNA, 19 nt, Homo sapiens
  misc_RNA (1)...(19): siRNA sense strand
ggagaacaacauggauuuc

SEQ ID NO: 2130865 - RNA, 19 nt, Homo sapiens
  misc_RNA (1)...(19): siRNA sense strand
uauacucacuucuacuucu

SEQ ID NO: 2130866 - RNA, 19 nt, Homo sapiens
  misc_RNA (1)...(19): siRNA sense strand
uugcaaacaugagaucguu

SEQ ID NO: 2130867 - RNA, 19 nt, Homo sapiens
  misc_RNA (1)...(19): siRNA sense strand
ggacacgcacuuugcaaac

SEQ ID NO: 2130868 - RNA, 19 nt, Homo sapiens
  misc_RNA (1)...(19): siRNA sense strand
gauucgcacagccuuguuu

SEQ ID NO: 2130869 - RNA, 19 nt, Homo sapiens
  misc_RNA (1)...(19): siRNA sense strand
ggaaacagaaaggaaagag

SEQ ID NO: 2130870 - RNA, 19 nt, Homo sapiens
  misc_RNA (1)...(19): siRNA sense strand
uuaugaaagugggcaagaa

SEQ ID NO: 2130871 - RNA, 19 nt, Homo sapiens
  misc_RNA (1)...(19): siRNA sense strand
agggcaaaguguuuccuaa

SEQ ID NO: 2130872 - RNA, 19 nt, Homo sapiens
  misc_RNA (1)...(19): siRNA sense strand
uguacaaggugcagacucu

SEQ ID NO: 2130873 - RNA, 19 nt, Homo sapiens
  misc_RNA (1)...(19): siRNA sense strand
gaggaugaaccagaacuuc

SEQ ID NO: 2130874 - RNA, 19 nt, Homo sapiens
  misc_RNA (1)...(19): siRNA sense strand
gaaaaggacgauguuguga

SEQ ID NO: 2130875 - RNA, 19 nt, Homo sapiens
  misc_RNA (1)...(19): siRNA sense strand
aggacagccuggagaguga

SEQ ID NO: 2130876 - RNA, 19 nt, Homo sapiens
  misc_RNA (1)...(19): siRNA sense strand
gcaacgaagucaaauauga

SEQ ID NO: 2130877 - RNA, 19 nt, Homo sapiens
  misc_RNA (1)...(19): siRNA sense strand
gaauugagcccagauauga

SEQ ID NO: 2130878 - RNA, 19 nt, Homo sapiens
  misc_RNA (1)...(19): siRNA sense strand
gaacugagaccguaucaca

SEQ ID NO: 2130879 - RNA, 19 nt, Homo sapiens
  misc_RNA (1)...(19): siRNA sense strand
ggccaguucugccgaaaua

SEQ ID NO: 2130880 - RNA, 19 nt, Homo sapiens
  misc_RNA (1)...(19): siRNA sense strand
caaaggaucuggacaacag

SEQ ID NO: 2130881 - RNA, 19 nt, Homo sapiens
  misc_RNA (1)...(19): siRNA sense strand
gaagguggccgaugaagga

SEQ ID NO: 2130882 - RNA, 19 nt, Homo sapiens
  misc_RNA (1)...(19): siRNA sense strand
guagaugacuucuccuuca

SEQ ID NO: 2130883 - RNA, 19 nt, Homo sapiens
  misc_RNA (1)...(19): siRNA sense strand
ugacaaaacugaagaaaga

SEQ ID NO: 2130884 - RNA, 19 nt, Homo sapiens
  misc_RNA (1)...(19): siRNA sense strand
ggaaggaggagucggauga

SEQ ID NO: 2130885 - RNA, 19 nt, Homo sapiens
  misc_RNA (1)...(19): siRNA sense strand
aaucagagauggcuacaga

SEQ ID NO: 2130886 - RNA, 19 nt, Homo sapiens
  misc_RNA (1)...(19): siRNA sense strand
gcagucaccuaucagauuc

SEQ ID NO: 2130887 - RNA, 19 nt, Homo sapiens
  misc_RNA (1)...(19): siRNA sense strand
ggucuuggcucucacugaa

SEQ ID NO: 2130888 - RNA, 19 nt, Homo sapiens
  misc_RNA (1)...(19): siRNA sense strand
ugaggaagguggccgauga

SEQ ID NO: 2130889 - RNA, 19 nt, Homo sapiens
  misc_RNA (1)...(19): siRNA sense strand
acacguggauguucaaaga

SEQ ID NO: 2130890 - RNA, 19 nt, Homo sapiens
  misc_RNA (1)...(19): siRNA sense strand
caaagcaauuggaaggaaa

SEQ ID NO: 2130891 - RNA, 19 nt, Homo sapiens
  misc_RNA (1)...(19): siRNA sense strand
ggagauggcaggcaguaaa

SEQ ID NO: 2130892 - RNA, 19 nt, Homo sapiens
  misc_RNA (1)...(19): siRNA sense strand
ggaggagccugaaggagau

SEQ ID NO: 2130893 - RNA, 19 nt, Homo sapiens
  misc_RNA (1)...(19): siRNA sense strand
gaucaccuuuggaggauga

SEQ ID NO: 2130894 - RNA, 19 nt, Homo sapiens
  misc_RNA (1)...(19): siRNA sense strand
gaagucaaauaugagaaga

SEQ ID NO: 2130895 - RNA, 19 nt, Homo sapiens
  misc_RNA (1)...(19): siRNA sense strand
gagagcagaucaccuuugg

SEQ ID NO: 2130896 - RNA, 19 nt, Homo sapiens
  misc_RNA (1)...(19): siRNA sense strand
caguuucacuccuggcuua

SEQ ID NO: 2130897 - RNA, 19 nt, Homo sapiens
  misc_RNA (1)...(19): siRNA sense strand
gaaggaagacugaugugau

SEQ ID NO: 2130898 - RNA, 19 nt, Homo sapiens
  misc_RNA (1)...(19): siRNA sense strand
gaaggaaagugcgaacaag

SEQ ID NO: 2130899 - RNA, 19 nt, Homo sapiens
  misc_RNA (1)...(19): siRNA sense strand
gcacagacgaacagauuau

SEQ ID NO: 2130900 - RNA, 19 nt, Homo sapiens
  misc_RNA (1)...(19): siRNA sense strand
caacagaccguccaucauc

SEQ ID NO: 2130901 - RNA, 19 nt, Homo sapiens
  misc_RNA (1)...(19): siRNA sense strand
ggaaggagaagaugcuuuc

SEQ ID NO: 2130902 - RNA, 19 nt, Homo sapiens
  misc_RNA (1)...(19): siRNA sense strand
ugaaggagaugcccgauac

SEQ ID NO: 2130903 - RNA, 19 nt, Homo sapiens
  misc_RNA (1)...(19): siRNA sense strand
gaccguccaucaucucuug

SEQ ID NO: 2130904 - RNA, 19 nt, Homo sapiens
  misc_RNA (1)...(19): siRNA sense strand
uaauaacaccuuccucaaa

SEQ ID NO: 2130905 - RNA, 19 nt, Homo sapiens
  misc_RNA (1)...(19): siRNA sense strand
gcccagauaugacauugug

SEQ ID NO: 2130906 - RNA, 19 nt, Homo sapiens
  misc_RNA (1)...(19): siRNA sense strand
ggaaggaaagugcgaacaa

SEQ ID NO: 2130907 - RNA, 19 nt, Homo sapiens
  misc_RNA (1)...(19): siRNA sense strand
gggcacagacgaacagauu

SEQ ID NO: 2130908 - RNA, 19 nt, Homo sapiens
  misc_RNA (1)...(19): siRNA sense strand
gagcaugcaucccgagaag

SEQ ID NO: 2130909 - RNA, 19 nt, Homo sapiens
  misc_RNA (1)...(19): siRNA sense strand
ggauauggcugggcuagag

SEQ ID NO: 2130910 - RNA, 19 nt, Homo sapiens
  misc_RNA (1)...(19): siRNA sense strand
gcacagcgaggccaucuca

SEQ ID NO: 2130911 - RNA, 19 nt, Homo sapiens
  misc_RNA (1)...(19): siRNA sense strand
cagcaacgaagucaaauau

SEQ ID NO: 2130912 - RNA, 19 nt, Homo sapiens
  misc_RNA (1)...(19): siRNA sense strand
uugcaaagugucagaauua

SEQ ID NO: 2130913 - RNA, 19 nt, Homo sapiens
  misc_RNA (1)...(19): siRNA sense strand
ggaaagugcgaacaagaug

SEQ ID NO: 2130914 - RNA, 19 nt, Homo sapiens
  misc_RNA (1)...(19): siRNA sense strand
ucaaagcaauuggaaggaa

SEQ ID NO: 2130915 - RNA, 19 nt, Homo sapiens
  misc_RNA (1)...(19): siRNA sense strand
ccacaucgcagagaauuga

SEQ ID NO: 2130916 - RNA, 19 nt, Homo sapiens
  misc_RNA (1)...(19): siRNA sense strand
gcaagggucaccuguggaa

SEQ ID NO: 2130917 - RNA, 19 nt, Homo sapiens
  misc_RNA (1)...(19): siRNA sense strand
aggagaagaugcuuucgaa

SEQ ID NO: 2130918 - RNA, 19 nt, Homo sapiens
  misc_RNA (1)...(19): siRNA sense strand
gagagggccuguccaucau

SEQ ID NO: 2130919 - RNA, 19 nt, Homo sapiens
  misc_RNA (1)...(19): siRNA sense strand
gaaggaggagccugaagga

SEQ ID NO: 2130920 - RNA, 19 nt, Homo sapiens
  misc_RNA (1)...(19): siRNA sense strand
gaaggagcaggacgugaaa

SEQ ID NO: 2130921 - RNA, 19 nt, Homo sapiens
  misc_RNA (1)...(19): siRNA sense strand
cgugaaauuugauacauuc

SEQ ID NO: 2130922 - RNA, 19 nt, Homo sapiens
  misc_RNA (1)...(19): siRNA sense strand
guggugagcucgcacaaag

SEQ ID NO: 2130923 - RNA, 19 nt, Homo sapiens
  misc_RNA (1)...(19): siRNA sense strand
ggaagugcaucagccuguu

SEQ ID NO: 2130924 - RNA, 19 nt, Homo sapiens
  misc_RNA (1)...(19): siRNA sense strand
cgagagggccuguccauca

SEQ ID NO: 2130925 - RNA, 19 nt, Homo sapiens
  misc_RNA (1)...(19): siRNA sense strand
ugacgucacuccagaggau

SEQ ID NO: 2130926 - RNA, 19 nt, Homo sapiens
  misc_RNA (1)...(19): siRNA sense strand
gaagugcaucagccuguuu

SEQ ID NO: 2130927 - RNA, 19 nt, Homo sapiens
  misc_RNA (1)...(19): siRNA sense strand
cgaaggagcaggacgugaa

SEQ ID NO: 2130928 - RNA, 19 nt, Homo sapiens
  misc_RNA (1)...(19): siRNA sense strand
guugcaaagugucagaauu

SEQ ID NO: 2130929 - RNA, 19 nt, Homo sapiens
  misc_RNA (1)...(19): siRNA sense strand
ccuaucagauucccaauac

SEQ ID NO: 2130930 - RNA, 19 nt, Homo sapiens
  misc_RNA (1)...(19): siRNA sense strand
ggccugagaugggcucuug

SEQ ID NO: 2130931 - RNA, 19 nt, Homo sapiens
  misc_RNA (1)...(19): siRNA sense strand
gcaccaugauucucuucga

SEQ ID NO: 2130932 - RNA, 19 nt, Homo sapiens
  misc_RNA (1)...(19): siRNA sense strand
uaacauccacuuugguuuc

SEQ ID NO: 2130933 - RNA, 19 nt, Homo sapiens
  misc_RNA (1)...(19): siRNA sense strand
gagaauugagcccagauau

SEQ ID NO: 2130934 - RNA, 19 nt, Homo sapiens
  misc_RNA (1)...(19): siRNA sense strand
gaagagaaggcccgugucu

SEQ ID NO: 2130935 - RNA, 19 nt, Homo sapiens
  misc_RNA (1)...(19): siRNA sense strand
ccagcguucuugacauuga

SEQ ID NO: 2130936 - RNA, 19 nt, Homo sapiens
  misc_RNA (1)...(19): siRNA sense strand
aaagcuugcuggaacauuc

SEQ ID NO: 2130937 - RNA, 19 nt, Homo sapiens
  misc_RNA (1)...(19): siRNA sense strand
ggaggagugucaggaagug

SEQ ID NO: 2130938 - RNA, 19 nt, Homo sapiens
  misc_RNA (1)...(19): siRNA sense strand
gggagagcuuggccacuga

SEQ ID NO: 2130939 - RNA, 19 nt, Homo sapiens
  misc_RNA (1)...(19): siRNA sense strand
ccucgucuccucauucuuu

SEQ ID NO: 2130940 - RNA, 19 nt, Homo sapiens
  misc_RNA (1)...(19): siRNA sense strand
gagcccagauaugacauug

SEQ ID NO: 2130941 - RNA, 19 nt, Homo sapiens
  misc_RNA (1)...(19): siRNA sense strand
ccuggagucuggacccuuu

SEQ ID NO: 2130942 - RNA, 19 nt, Homo sapiens
  misc_RNA (1)...(19): siRNA sense strand
ggaggagacggcauccaaa

SEQ ID NO: 2130943 - RNA, 19 nt, Homo sapiens
  misc_RNA (1)...(19): siRNA sense strand
aauaacaccuuccucaaac

SEQ ID NO: 2130944 - RNA, 19 nt, Homo sapiens
  misc_RNA (1)...(19): siRNA sense strand
cacgggaccuggagaagga

SEQ ID NO: 2130945 - RNA, 19 nt, Homo sapiens
  misc_RNA (1)...(19): siRNA sense strand
gaaagugcgaacaagaugu

SEQ ID NO: 2130946 - RNA, 19 nt, Homo sapiens
  misc_RNA (1)...(19): siRNA sense strand
gcuaguggaccgaaguuug

SEQ ID NO: 2130947 - RNA, 19 nt, Homo sapiens
  misc_RNA (1)...(19): siRNA sense strand
cgacucaagugcccucaag

SEQ ID NO: 2130948 - RNA, 19 nt, Homo sapiens
  misc_RNA (1)...(19): siRNA sense strand
aaggaagacugaugugauc

SEQ ID NO: 2130949 - RNA, 19 nt, Homo sapiens
  misc_RNA (1)...(19): siRNA sense strand
ccuagaacuugcugagguu

SEQ ID NO: 2130950 - RNA, 19 nt, Homo sapiens
  misc_RNA (1)...(19): siRNA sense strand
aaagagaguagaugacuuc

SEQ ID NO: 2130951 - RNA, 19 nt, Homo sapiens
  misc_RNA (1)...(19): siRNA sense strand
gaaagggaccccaaggaaa

SEQ ID NO: 2130952 - RNA, 19 nt, Homo sapiens
  misc_RNA (1)...(19): siRNA sense strand
cagcaaaggaucuggacaa

SEQ ID NO: 2130953 - RNA, 19 nt, Homo sapiens
  misc_RNA (1)...(19): siRNA sense strand
caccaugauucucuucgaa

SEQ ID NO: 2130954 - RNA, 19 nt, Homo sapiens
  misc_RNA (1)...(19): siRNA sense strand
aaauacccuuugucugaaa

SEQ ID NO: 2130955 - RNA, 19 nt, Homo sapiens
  misc_RNA (1)...(19): siRNA sense strand
ccaguucugccgaaauaaa

SEQ ID NO: 2130956 - RNA, 19 nt, Homo sapiens
  misc_RNA (1)...(19): siRNA sense strand
gcuggaacauucuagaaaa

SEQ ID NO: 2130957 - RNA, 19 nt, Homo sapiens
  misc_RNA (1)...(19): siRNA sense strand
ugauguggaugccuuaugg

SEQ ID NO: 2130958 - RNA, 19 nt, Homo sapiens
  misc_RNA (1)...(19): siRNA sense strand
ucaagagggccuacucaga

SEQ ID NO: 2130959 - RNA, 19 nt, Homo sapiens
  misc_RNA (1)...(19): siRNA sense strand
cuacagauccagcguucuu

SEQ ID NO: 2130960 - RNA, 19 nt, Homo sapiens
  misc_RNA (1)...(19): siRNA sense strand
gugacacguucccagguaa

SEQ ID NO: 2130961 - RNA, 19 nt, Homo sapiens
  misc_RNA (1)...(19): siRNA sense strand
caccagagccggagaaagg

SEQ ID NO: 2130962 - RNA, 19 nt, Homo sapiens
  misc_RNA (1)...(19): siRNA sense strand
ugacuucuccuucauugau

SEQ ID NO: 2130963 - RNA, 19 nt, Homo sapiens
  misc_RNA (1)...(19): siRNA sense strand
ccacugaccagaagaaagg

SEQ ID NO: 2130964 - RNA, 19 nt, Homo sapiens
  misc_RNA (1)...(19): siRNA sense strand
gaagggacgagagcaugaa

SEQ ID NO: 2130965 - RNA, 19 nt, Homo sapiens
  misc_RNA (1)...(19): siRNA sense strand
caacgugaaauuugauaca

SEQ ID NO: 2130966 - RNA, 19 nt, Homo sapiens
  misc_RNA (1)...(19): siRNA sense strand
gccacagccugcagucaga

SEQ ID NO: 2130967 - RNA, 19 nt, Homo sapiens
  misc_RNA (1)...(19): siRNA sense strand
ccucaggucuuggcucuca

SEQ ID NO: 2130968 - RNA, 19 nt, Homo sapiens
  misc_RNA (1)...(19): siRNA sense strand
ccagcaacgaagucaaaua

SEQ ID NO: 2130969 - RNA, 19 nt, Homo sapiens
  misc_RNA (1)...(19): siRNA sense strand
gauacauucaguucucuug

SEQ ID NO: 2130970 - RNA, 19 nt, Homo sapiens
  misc_RNA (1)...(19): siRNA sense strand
gccaugggcaccaaaucua

SEQ ID NO: 2130971 - RNA, 19 nt, Homo sapiens
  misc_RNA (1)...(19): siRNA sense strand
ccuaaggaaccgagagaaa

SEQ ID NO: 2130972 - RNA, 19 nt, Homo sapiens
  misc_RNA (1)...(19): siRNA sense strand
uaaaggcucagcugcacaa

SEQ ID NO: 2130973 - RNA, 19 nt, Homo sapiens
  misc_RNA (1)...(19): siRNA sense strand
gauccagcguucuugacau

SEQ ID NO: 2130974 - RNA, 19 nt, Homo sapiens
  misc_RNA (1)...(19): siRNA sense strand
gccaacagaccguccauca

SEQ ID NO: 2130975 - RNA, 19 nt, Homo sapiens
  misc_RNA (1)...(19): siRNA sense strand
ccagaggguuugacaaucc

SEQ ID NO: 2130976 - RNA, 19 nt, Homo sapiens
  misc_RNA (1)...(19): siRNA sense strand
ggacaucgguuugauugua

SEQ ID NO: 2130977 - RNA, 19 nt, Homo sapiens
  misc_RNA (1)...(19): siRNA sense strand
agaagaagcugcccaguuu

SEQ ID NO: 2130978 - RNA, 19 nt, Homo sapiens
  misc_RNA (1)...(19): siRNA sense strand
gcaggaaagugacguuuga

SEQ ID NO: 2130979 - RNA, 19 nt, Homo sapiens
  misc_RNA (1)...(19): siRNA sense strand
gaacgugugaugaccauua

SEQ ID NO: 2130980 - RNA, 19 nt, Homo sapiens
  misc_RNA (1)...(19): siRNA sense strand
gcaaauguaucgaauugug

SEQ ID NO: 2130981 - RNA, 19 nt, Homo sapiens
  misc_RNA (1)...(19): siRNA sense strand
ugaagaagaugcccacauu

SEQ ID NO: 2130982 - RNA, 19 nt, Homo sapiens
  misc_RNA (1)...(19): siRNA sense strand
ucacugugcuccagauaua

SEQ ID NO: 2130983 - RNA, 19 nt, Homo sapiens
  misc_RNA (1)...(19): siRNA sense strand
gugcaaauguaucgaauug

SEQ ID NO: 2130984 - RNA, 19 nt, Homo sapiens
  misc_RNA (1)...(19): siRNA sense strand
gaagguugauuccagguau

SEQ ID NO: 2130985 - RNA, 19 nt, Homo sapiens
  misc_RNA (1)...(19): siRNA sense strand
gcagguggcuggagcugaa

SEQ ID NO: 2130986 - RNA, 19 nt, Homo sapiens
  misc_RNA (1)...(19): siRNA sense strand
ggaccaaacuucagaugca

SEQ ID NO: 2130987 - RNA, 19 nt, Homo sapiens
  misc_RNA (1)...(19): siRNA sense strand
aaacggagauuucuaaagg

SEQ ID NO: 2130988 - RNA, 19 nt, Homo sapiens
  misc_RNA (1)...(19): siRNA sense strand
gaggaaagcugacguugac

SEQ ID NO: 2130989 - RNA, 19 nt, Homo sapiens
  misc_RNA (1)...(19): siRNA sense strand
ccacguggcuggccuuugu

SEQ ID NO: 2130990 - RNA, 19 nt, Homo sapiens
  misc_RNA (1)...(19): siRNA sense strand
aagaagaugcccacauuua

SEQ ID NO: 2130991 - RNA, 19 nt, Homo sapiens
  misc_RNA (1)...(19): siRNA sense strand
ccagucaucuagugcagua

SEQ ID NO: 2130992 - RNA, 19 nt, Homo sapiens
  misc_RNA (1)...(19): siRNA sense strand
cuaaaggccuggcuugaau

SEQ ID NO: 2130993 - RNA, 19 nt, Homo sapiens
  misc_RNA (1)...(19): siRNA sense strand
gaguuuaggcaacggauua

SEQ ID NO: 2130994 - RNA, 19 nt, Homo sapiens
  misc_RNA (1)...(19): siRNA sense strand
cuacagcucuggaguuuag

SEQ ID NO: 2130995 - RNA, 19 nt, Homo sapiens
  misc_RNA (1)...(19): siRNA sense strand
gacuacagcucuggaguuu

SEQ ID NO: 2130996 - RNA, 19 nt, Homo sapiens
  misc_RNA (1)...(19): siRNA sense strand
gaagaagaugcccacauuu

SEQ ID NO: 2130997 - RNA, 19 nt, Homo sapiens
  misc_RNA (1)...(19): siRNA sense strand
uuacgucgcuggaaagaga

SEQ ID NO: 2130998 - RNA, 19 nt, Homo sapiens
  misc_RNA (1)...(19): siRNA sense strand
gcugagcgauuccaucaug

SEQ ID NO: 2130999 - RNA, 19 nt, Homo sapiens
  misc_RNA (1)...(19): siRNA sense strand
cggauuaucuuacggaugu

SEQ ID NO: 2131000 - RNA, 19 nt, Homo sapiens
  misc_RNA (1)...(19): siRNA sense strand
aaagaggagugguggguuu

SEQ ID NO: 2131001 - RNA, 19 nt, Homo sapiens
  misc_RNA (1)...(19): siRNA sense strand
cagcaacacugcccacuca

SEQ ID NO: 2131002 - RNA, 19 nt, Homo sapiens
  misc_RNA (1)...(19): siRNA sense strand
gaauggagaagaagguuga

SEQ ID NO: 2131003 - RNA, 19 nt, Homo sapiens
  misc_RNA (1)...(19): siRNA sense strand
gcacagcgggcuacuccua

SEQ ID NO: 2131004 - RNA, 19 nt, Homo sapiens
  misc_RNA (1)...(19): siRNA sense strand
gaacagacggaaggaugua

SEQ ID NO: 2131005 - RNA, 19 nt, Homo sapiens
  misc_RNA (1)...(19): siRNA sense strand
gaauuguggcuacaguaua

SEQ ID NO: 2131006 - RNA, 19 nt, Homo sapiens
  misc_RNA (1)...(19): siRNA sense strand
gcacccagcaggaaaguga

SEQ ID NO: 2131007 - RNA, 19 nt, Homo sapiens
  misc_RNA (1)...(19): siRNA sense strand
ugucagugcagauguauua

SEQ ID NO: 2131008 - RNA, 19 nt, Homo sapiens
  misc_RNA (1)...(19): siRNA sense strand
ucagaugcguggccagaaa

SEQ ID NO: 2131009 - RNA, 19 nt, Homo sapiens
  misc_RNA (1)...(19): siRNA sense strand
gguugucucugcagugaaa

SEQ ID NO: 2131010 - RNA, 19 nt, Homo sapiens
  misc_RNA (1)...(19): siRNA sense strand
cggagggaguuaccuagua

SEQ ID NO: 2131011 - RNA, 19 nt, Homo sapiens
  misc_RNA (1)...(19): siRNA sense strand
ugagauggcugagcgauuc

SEQ ID NO: 2131012 - RNA, 19 nt, Homo sapiens
  misc_RNA (1)...(19): siRNA sense strand
ggcauuacgucgcuggaaa

SEQ ID NO: 2131013 - RNA, 19 nt, Homo sapiens
  misc_RNA (1)...(19): siRNA sense strand
guauaucaagccacaauuu

SEQ ID NO: 2131014 - RNA, 19 nt, Homo sapiens
  misc_RNA (1)...(19): siRNA sense strand
ggagggaguuaccuaguac

SEQ ID NO: 2131015 - RNA, 19 nt, Homo sapiens
  misc_RNA (1)...(19): siRNA sense strand
ggcuggagcugaacagaga

SEQ ID NO: 2131016 - RNA, 19 nt, Homo sapiens
  misc_RNA (1)...(19): siRNA sense strand
gcaaguacucauuacagaa

SEQ ID NO: 2131017 - RNA, 19 nt, Homo sapiens
  misc_RNA (1)...(19): siRNA sense strand
guauaggucuugguucaug

SEQ ID NO: 2131018 - RNA, 19 nt, Homo sapiens
  misc_RNA (1)...(19): siRNA sense strand
gacaucgguuugauuguau

SEQ ID NO: 2131019 - RNA, 19 nt, Homo sapiens
  misc_RNA (1)...(19): siRNA sense strand
guccaugucugaagaagau

SEQ ID NO: 2131020 - RNA, 19 nt, Homo sapiens
  misc_RNA (1)...(19): siRNA sense strand
ggauguggguugacaguac

SEQ ID NO: 2131021 - RNA, 19 nt, Homo sapiens
  misc_RNA (1)...(19): siRNA sense strand
ugaagagacagcagaauga

SEQ ID NO: 2131022 - RNA, 19 nt, Homo sapiens
  misc_RNA (1)...(19): siRNA sense strand
gaagcuccgugcagaugug

SEQ ID NO: 2131023 - RNA, 19 nt, Homo sapiens
  misc_RNA (1)...(19): siRNA sense strand
agaaguccaugucugaaga

SEQ ID NO: 2131024 - RNA, 19 nt, Homo sapiens
  misc_RNA (1)...(19): siRNA sense strand
gaaaauguccucagugcaa

SEQ ID NO: 2131025 - RNA, 19 nt, Homo sapiens
  misc_RNA (1)...(19): siRNA sense strand
gagcaggaguggcaaacag

SEQ ID NO: 2131026 - RNA, 19 nt, Homo sapiens
  misc_RNA (1)...(19): siRNA sense strand
gguugacaguacacucaua

SEQ ID NO: 2131027 - RNA, 19 nt, Homo sapiens
  misc_RNA (1)...(19): siRNA sense strand
ccucaucccuggccagugu

SEQ ID NO: 2131028 - RNA, 19 nt, Homo sapiens
  misc_RNA (1)...(19): siRNA sense strand
ccgaguggaugaagccaaa

SEQ ID NO: 2131029 - RNA, 19 nt, Homo sapiens
  misc_RNA (1)...(19): siRNA sense strand
gaagaugcccacauuuacu

SEQ ID NO: 2131030 - RNA, 19 nt, Homo sapiens
  misc_RNA (1)...(19): siRNA sense strand
gaaggaccauauguuccaa

SEQ ID NO: 2131031 - RNA, 19 nt, Homo sapiens
  misc_RNA (1)...(19): siRNA sense strand
ggauggugcaguuaagaaa

SEQ ID NO: 2131032 - RNA, 19 nt, Homo sapiens
  misc_RNA (1)...(19): siRNA sense strand
cgagguucauggugagaaa

SEQ ID NO: 2131033 - RNA, 19 nt, Homo sapiens
  misc_RNA (1)...(19): siRNA sense strand
gaaaccuuauucugcaaag

SEQ ID NO: 2131034 - RNA, 19 nt, Homo sapiens
  misc_RNA (1)...(19): siRNA sense strand
gaugagauggaacguguga

SEQ ID NO: 2131035 - RNA, 19 nt, Homo sapiens
  misc_RNA (1)...(19): siRNA sense strand
gggcuacuccuagggauaa

SEQ ID NO: 2131036 - RNA, 19 nt, Homo sapiens
  misc_RNA (1)...(19): siRNA sense strand
gcgucagucucccuauaaa

SEQ ID NO: 2131037 - RNA, 19 nt, Homo sapiens
  misc_RNA (1)...(19): siRNA sense strand
ggaggcagaagauguuuca

SEQ ID NO: 2131038 - RNA, 19 nt, Homo sapiens
  misc_RNA (1)...(19): siRNA sense strand
gacauuagagaagcaagua

SEQ ID NO: 2131039 - RNA, 19 nt, Homo sapiens
  misc_RNA (1)...(19): siRNA sense strand
cagaagaagcugcccaguu

SEQ ID NO: 2131040 - RNA, 19 nt, Homo sapiens
  misc_RNA (1)...(19): siRNA sense strand
caagaccacuggccaccau

SEQ ID NO: 2131041 - RNA, 19 nt, Homo sapiens
  misc_RNA (1)...(19): siRNA sense strand
uaaaggccuggcuugaaua

SEQ ID NO: 2131042 - RNA, 19 nt, Homo sapiens
  misc_RNA (1)...(19): siRNA sense strand
cagagcggauggucauuuc

SEQ ID NO: 2131043 - RNA, 19 nt, Homo sapiens
  misc_RNA (1)...(19): siRNA sense strand
gaagcugcccaguuugaga

SEQ ID NO: 2131044 - RNA, 19 nt, Homo sapiens
  misc_RNA (1)...(19): siRNA sense strand
uaagagaacugcgcaucag

SEQ ID NO: 2131045 - RNA, 19 nt, Homo sapiens
  misc_RNA (1)...(19): siRNA sense strand
gaagaagcugcccaguuug

SEQ ID NO: 2131046 - RNA, 19 nt, Homo sapiens
  misc_RNA (1)...(19): siRNA sense strand
gugaagagacagcagaaug

SEQ ID NO: 2131047 - RNA, 19 nt, Homo sapiens
  misc_RNA (1)...(19): siRNA sense strand
gaagauucaggcccauaga

SEQ ID NO: 2131048 - RNA, 19 nt, Homo sapiens
  misc_RNA (1)...(19): siRNA sense strand
ccacauuuacuuugcagaa

SEQ ID NO: 2131049 - RNA, 19 nt, Homo sapiens
  misc_RNA (1)...(19): siRNA sense strand
gaggaacaaguacauuaga

SEQ ID NO: 2131050 - RNA, 19 nt, Homo sapiens
  misc_RNA (1)...(19): siRNA sense strand
gcagaagaugcaaagcaaa

SEQ ID NO: 2131051 - RNA, 19 nt, Homo sapiens
  misc_RNA (1)...(19): siRNA sense strand
cagaauccaugccaguaca

SEQ ID NO: 2131052 - RNA, 19 nt, Homo sapiens
  misc_RNA (1)...(19): siRNA sense strand
ggaaguccugguugaucua

SEQ ID NO: 2131053 - RNA, 19 nt, Homo sapiens
  misc_RNA (1)...(19): siRNA sense strand
uggcgucagucucccuaua

SEQ ID NO: 2131054 - RNA, 19 nt, Homo sapiens
  misc_RNA (1)...(19): siRNA sense strand
uaaggauggugcaguuaag

SEQ ID NO: 2131055 - RNA, 19 nt, Homo sapiens
  misc_RNA (1)...(19): siRNA sense strand
ugaugaccauuaugcagaa

SEQ ID NO: 2131056 - RNA, 19 nt, Homo sapiens
  misc_RNA (1)...(19): siRNA sense strand
gauguggguugacaguaca

SEQ ID NO: 2131057 - RNA, 19 nt, Homo sapiens
  misc_RNA (1)...(19): siRNA sense strand
cccaagggcucagaacaga

SEQ ID NO: 2131058 - RNA, 19 nt, Homo sapiens
  misc_RNA (1)...(19): siRNA sense strand
ggagauccagcagcaacua

SEQ ID NO: 2131059 - RNA, 19 nt, Homo sapiens
  misc_RNA (1)...(19): siRNA sense strand
caagggcucagaacagaga

SEQ ID NO: 2131060 - RNA, 19 nt, Homo sapiens
  misc_RNA (1)...(19): siRNA sense strand
acauuuacuuugcagaaga

SEQ ID NO: 2131061 - RNA, 19 nt, Homo sapiens
  misc_RNA (1)...(19): siRNA sense strand
aggcugaacuugaggagau

SEQ ID NO: 2131062 - RNA, 19 nt, Homo sapiens
  misc_RNA (1)...(19): siRNA sense strand
acagaaggaccauauguuc

SEQ ID NO: 2131063 - RNA, 19 nt, Homo sapiens
  misc_RNA (1)...(19): siRNA sense strand
gcagauguggagcgacuga

SEQ ID NO: 2131064 - RNA, 19 nt, Homo sapiens
  misc_RNA (1)...(19): siRNA sense strand
gagauggaacgugugauga

SEQ ID NO: 2131065 - RNA, 19 nt, Homo sapiens
  misc_RNA (1)...(19): siRNA sense strand
gaaguccaugucugaagaa

SEQ ID NO: 2131066 - RNA, 19 nt, Homo sapiens
  misc_RNA (1)...(19): siRNA sense strand
caaguacucauuacagaag

SEQ ID NO: 2131067 - RNA, 19 nt, Homo sapiens
  misc_RNA (1)...(19): siRNA sense strand
cauuagagaagcaaguauu

SEQ ID NO: 2131068 - RNA, 19 nt, Homo sapiens
  misc_RNA (1)...(19): siRNA sense strand
cgaauuguggcuacaguau

SEQ ID NO: 2131069 - RNA, 19 nt, Homo sapiens
  misc_RNA (1)...(19): siRNA sense strand
gacggaaggauguaaagga

SEQ ID NO: 2131070 - RNA, 19 nt, Homo sapiens
  misc_RNA (1)...(19): siRNA sense strand
ucacugaggaugagaugga

SEQ ID NO: 2131071 - RNA, 19 nt, Homo sapiens
  misc_RNA (1)...(19): siRNA sense strand
ccauguuucuuuccagcaa

SEQ ID NO: 2131072 - RNA, 19 nt, Homo sapiens
  misc_RNA (1)...(19): siRNA sense strand
ucaagcaaguacucauuac

SEQ ID NO: 2131073 - RNA, 19 nt, Homo sapiens
  misc_RNA (1)...(19): siRNA sense strand
gcgauuccaucaugucacu

SEQ ID NO: 2131074 - RNA, 19 nt, Homo sapiens
  misc_RNA (1)...(19): siRNA sense strand
ggcgucagucucccuauaa

SEQ ID NO: 2131075 - RNA, 19 nt, Homo sapiens
  misc_RNA (1)...(19): siRNA sense strand
uggaacagguggaaaugca

SEQ ID NO: 2131076 - RNA, 19 nt, Homo sapiens
  misc_RNA (1)...(19): siRNA sense strand
gagaauaugacaucagaua

SEQ ID NO: 2131077 - RNA, 19 nt, Homo sapiens
  misc_RNA (1)...(19): siRNA sense strand
gagaauauaacgucagaua

SEQ ID NO: 2131078 - RNA, 19 nt, Homo sapiens
  misc_RNA (1)...(19): siRNA sense strand
ggucgaagaucucagugaa

SEQ ID NO: 2131079 - RNA, 19 nt, Homo sapiens
  misc_RNA (1)...(19): siRNA sense strand
aaauauaggucccacugaa

SEQ ID NO: 2131080 - RNA, 19 nt, Homo sapiens
  misc_RNA (1)...(19): siRNA sense strand
cugcaaagccugccaaauu

SEQ ID NO: 2131081 - RNA, 19 nt, Homo sapiens
  misc_RNA (1)...(19): siRNA sense strand
uaagaaggcccaacucaug

SEQ ID NO: 2131082 - RNA, 19 nt, Homo sapiens
  misc_RNA (1)...(19): siRNA sense strand
gacaucaggucucagugaa

SEQ ID NO: 2131083 - RNA, 19 nt, Homo sapiens
  misc_RNA (1)...(19): siRNA sense strand
ugcaaagccugccaaauug

SEQ ID NO: 2131084 - RNA, 19 nt, Homo sapiens
  misc_RNA (1)...(19): siRNA sense strand
cgaagaugcugaagauguc

SEQ ID NO: 2131085 - RNA, 19 nt, Homo sapiens
  misc_RNA (1)...(19): siRNA sense strand
cugaagauguccaaagguu

SEQ ID NO: 2131086 - RNA, 19 nt, Homo sapiens
  misc_RNA (1)...(19): siRNA sense strand
ugacaucggaucucaguga

SEQ ID NO: 2131087 - RNA, 19 nt, Homo sapiens
  misc_RNA (1)...(19): siRNA sense strand
gacaucggaucucagugaa

SEQ ID NO: 2131088 - RNA, 19 nt, Homo sapiens
  misc_RNA (1)...(19): siRNA sense strand
cggagaugcuguacuggaa

SEQ ID NO: 2131089 - RNA, 19 nt, Homo sapiens
  misc_RNA (1)...(19): siRNA sense strand
caucggaucucagugaaag

SEQ ID NO: 2131090 - RNA, 19 nt, Homo sapiens
  misc_RNA (1)...(19): siRNA sense strand
aggagaauaugacaucaga

SEQ ID NO: 2131091 - RNA, 19 nt, Homo sapiens
  misc_RNA (1)...(19): siRNA sense strand
caccggagaugcuguacug

SEQ ID NO: 2131092 - RNA, 19 nt, Homo sapiens
  misc_RNA (1)...(19): siRNA sense strand
ggaggagaauaugacauca

SEQ ID NO: 2131093 - RNA, 19 nt, Homo sapiens
  misc_RNA (1)...(19): siRNA sense strand
caucaggucucagugaaag

SEQ ID NO: 2131094 - RNA, 19 nt, Homo sapiens
  misc_RNA (1)...(19): siRNA sense strand
gcuaagaaggcccaacuca

SEQ ID NO: 2131095 - RNA, 19 nt, Homo sapiens
  misc_RNA (1)...(19): siRNA sense strand
cgccgaagaugcugaagau

SEQ ID NO: 2131096 - RNA, 19 nt, Homo sapiens
  misc_RNA (1)...(19): siRNA sense strand
gcacgggauuuggccucua

SEQ ID NO: 2131097 - RNA, 19 nt, Homo sapiens
  misc_RNA (1)...(19): siRNA sense strand
ucgaagaucucagugaaag

SEQ ID NO: 2131098 - RNA, 19 nt, Homo sapiens
  misc_RNA (1)...(19): siRNA sense strand
caagcacgaccaccauuug

SEQ ID NO: 2131099 - RNA, 19 nt, Homo sapiens
  misc_RNA (1)...(19): siRNA sense strand
gggauuuggccucuagaaa

SEQ ID NO: 2131100 - RNA, 19 nt, Homo sapiens
  misc_RNA (1)...(19): siRNA sense strand
ugacaucaggucucaguga

SEQ ID NO: 2131101 - RNA, 19 nt, Homo sapiens
  misc_RNA (1)...(19): siRNA sense strand
ccaagcacgaccaccauuu

SEQ ID NO: 2131102 - RNA, 19 nt, Homo sapiens
  misc_RNA (1)...(19): siRNA sense strand
ggagacggcacgggauuug

SEQ ID NO: 2131103 - RNA, 19 nt, Homo sapiens
  misc_RNA (1)...(19): siRNA sense strand
gcuccaagcgcugguuaaa

SEQ ID NO: 2131104 - RNA, 19 nt, Homo sapiens
  misc_RNA (1)...(19): siRNA sense strand
aggcccaacucaugcagua

SEQ ID NO: 2131105 - RNA, 19 nt, Homo sapiens
  misc_RNA (1)...(19): siRNA sense strand
gccuaucugucucucuuga

SEQ ID NO: 2131106 - RNA, 19 nt, Homo sapiens
  misc_RNA (1)...(19): siRNA sense strand
gccuaucugucucucuuga

SEQ ID NO: 2131107 - RNA, 19 nt, Homo sapiens
  misc_RNA (1)...(19): siRNA sense strand
ggauuuggccucuagaaaa

SEQ ID NO: 2131108 - RNA, 19 nt, Homo sapiens
  misc_RNA (1)...(19): siRNA sense strand
ccgaagaugcugaagaugu

SEQ ID NO: 2131109 - RNA, 19 nt, Homo sapiens
  misc_RNA (1)...(19): siRNA sense strand
cagcauccaccacugcaaa

SEQ ID NO: 2131110 - RNA, 19 nt, Homo sapiens
  misc_RNA (1)...(19): siRNA sense strand
aagccuaucugucucucuu

SEQ ID NO: 2131111 - RNA, 19 nt, Homo sapiens
  misc_RNA (1)...(19): siRNA sense strand
aagccuaucugucucucuu

SEQ ID NO: 2131112 - RNA, 19 nt, Homo sapiens
  misc_RNA (1)...(19): siRNA sense strand
aagccuaucugucugucuu

SEQ ID NO: 2131113 - RNA, 19 nt, Homo sapiens
  misc_RNA (1)...(19): siRNA sense strand
aggagaauauaacgucaga

SEQ ID NO: 2131114 - RNA, 19 nt, Homo sapiens
  misc_RNA (1)...(19): siRNA sense strand
ugaagauguccaaagguuu

SEQ ID NO: 2131115 - RNA, 19 nt, Homo sapiens
  misc_RNA (1)...(19): siRNA sense strand
gguguggaggagaauauaa

SEQ ID NO: 2131116 - RNA, 19 nt, Homo sapiens
  misc_RNA (1)...(19): siRNA sense strand
cgaccaccgucccacugaa

SEQ ID NO: 2131117 - RNA, 19 nt, Homo sapiens
  misc_RNA (1)...(19): siRNA sense strand
ugacaccggagaugcugua

SEQ ID NO: 2131118 - RNA, 19 nt, Homo sapiens
  misc_RNA (1)...(19): siRNA sense strand
agugaaagccuaucugucu

SEQ ID NO: 2131119 - RNA, 19 nt, Homo sapiens
  misc_RNA (1)...(19): siRNA sense strand
agugaaagccuaucugucu

SEQ ID NO: 2131120 - RNA, 19 nt, Homo sapiens
  misc_RNA (1)...(19): siRNA sense strand
agugaaagccuaucugucu

SEQ ID NO: 2131121 - RNA, 19 nt, Homo sapiens
  misc_RNA (1)...(19): siRNA sense strand
gugggacccugccaugagu

SEQ ID NO: 2131122 - RNA, 19 nt, Homo sapiens
  misc_RNA (1)...(19): siRNA sense strand
gacccugccaugaguguga

SEQ ID NO: 2131123 - RNA, 19 nt, Homo sapiens
  misc_RNA (1)...(19): siRNA sense strand
uaccucagccucccgaaga

SEQ ID NO: 2131124 - RNA, 19 nt, Homo sapiens
  misc_RNA (1)...(19): siRNA sense strand
cgaagacgccgaagaugcu

SEQ ID NO: 2131125 - RNA, 19 nt, Homo sapiens
  misc_RNA (1)...(19): siRNA sense strand
gaucucagugaaagccuau

SEQ ID NO: 2131126 - RNA, 19 nt, Homo sapiens
  misc_RNA (1)...(19): siRNA sense strand
ucagugaaagccuaucugu

SEQ ID NO: 2131127 - RNA, 19 nt, Homo sapiens
  misc_RNA (1)...(19): siRNA sense strand
ucagugaaagccuaucugu

SEQ ID NO: 2131128 - RNA, 19 nt, Homo sapiens
  misc_RNA (1)...(19): siRNA sense strand
gaucucagugaaagccuau

SEQ ID NO: 2131129 - RNA, 19 nt, Homo sapiens
  misc_RNA (1)...(19): siRNA sense strand
ucagugaaagccuaucugu

SEQ ID NO: 2131130 - RNA, 19 nt, Homo sapiens
  misc_RNA (1)...(19): siRNA sense strand
gguguggaggagaauauga

SEQ ID NO: 2131131 - RNA, 19 nt, Homo sapiens
  misc_RNA (1)...(19): siRNA sense strand
cuaagaaggcccaacucau

SEQ ID NO: 2131132 - RNA, 19 nt, Homo sapiens
  misc_RNA (1)...(19): siRNA sense strand
cuaucugucucucuugaag

SEQ ID NO: 2131133 - RNA, 19 nt, Homo sapiens
  misc_RNA (1)...(19): siRNA sense strand
cuaucugucucucuugaag

SEQ ID NO: 2131134 - RNA, 19 nt, Homo sapiens
  misc_RNA (1)...(19): siRNA sense strand
cuaucugucugucuugaag

SEQ ID NO: 2131135 - RNA, 19 nt, Homo sapiens
  misc_RNA (1)...(19): siRNA sense strand
ggauuugaaagcuaagaag

SEQ ID NO: 2131136 - RNA, 19 nt, Homo sapiens
  misc_RNA (1)...(19): siRNA sense strand
cacgggauuuggccucuag

SEQ ID NO: 2131137 - RNA, 19 nt, Homo sapiens
  misc_RNA (1)...(19): siRNA sense strand
caugacaucggaucucagu

SEQ ID NO: 2131138 - RNA, 19 nt, Homo sapiens
  misc_RNA (1)...(19): siRNA sense strand
gccuaucugucugucuuga

SEQ ID NO: 2131139 - RNA, 19 nt, Homo sapiens
  misc_RNA (1)...(19): siRNA sense strand
ugaaagccuaucugucugu

SEQ ID NO: 2131140 - RNA, 19 nt, Homo sapiens
  misc_RNA (1)...(19): siRNA sense strand
gcgguguggaggagaauau

SEQ ID NO: 2131141 - RNA, 19 nt, Homo sapiens
  misc_RNA (1)...(19): siRNA sense strand
gcgguguggaggagaauau

SEQ ID NO: 2131142 - RNA, 19 nt, Homo sapiens
  misc_RNA (1)...(19): siRNA sense strand
gcagagaucuccaccauug

SEQ ID NO: 2131143 - RNA, 19 nt, Homo sapiens
  misc_RNA (1)...(19): siRNA sense strand
uuaaaguccuguagaauug

SEQ ID NO: 2131144 - RNA, 19 nt, Homo sapiens
  misc_RNA (1)...(19): siRNA sense strand
ugcaugacauccuugauua

SEQ ID NO: 2131145 - RNA, 19 nt, Homo sapiens
  misc_RNA (1)...(19): siRNA sense strand
ccaaggagguggacaaggu

SEQ ID NO: 2131146 - RNA, 19 nt, Homo sapiens
  misc_RNA (1)...(19): siRNA sense strand
ucaaccagaucauuaacaa

SEQ ID NO: 2131147 - RNA, 19 nt, Homo sapiens
  misc_RNA (1)...(19): siRNA sense strand
gaauggaggagguacagaa

SEQ ID NO: 2131148 - RNA, 19 nt, Homo sapiens
  misc_RNA (1)...(19): siRNA sense strand
ccacagaggccaagacaca

SEQ ID NO: 2131149 - RNA, 19 nt, Homo sapiens
  misc_RNA (1)...(19): siRNA sense strand
ucaugacccucaagaacaa

SEQ ID NO: 2131150 - RNA, 19 nt, Homo sapiens
  misc_RNA (1)...(19): siRNA sense strand
gagagaaggagaggacuug

SEQ ID NO: 2131151 - RNA, 19 nt, Homo sapiens
  misc_RNA (1)...(19): siRNA sense strand
guacaacaacagcuacuuc

SEQ ID NO: 2131152 - RNA, 19 nt, Homo sapiens
  misc_RNA (1)...(19): siRNA sense strand
cuuaaaguccuguagaauu

SEQ ID NO: 2131153 - RNA, 19 nt, Homo sapiens
  misc_RNA (1)...(19): siRNA sense strand
ccaccaaaggcaacuauau

SEQ ID NO: 2131154 - RNA, 19 nt, Homo sapiens
  misc_RNA (1)...(19): siRNA sense strand
ggucaggacagcuuaaagu

SEQ ID NO: 2131155 - RNA, 19 nt, Homo sapiens
  misc_RNA (1)...(19): siRNA sense strand
ggacaaggucaaccagauc

SEQ ID NO: 2131156 - RNA, 19 nt, Homo sapiens
  misc_RNA (1)...(19): siRNA sense strand
aaggucaaccagaucauua

SEQ ID NO: 2131157 - RNA, 19 nt, Homo sapiens
  misc_RNA (1)...(19): siRNA sense strand
ggacgaggaucugcaugac

SEQ ID NO: 2131158 - RNA, 19 nt, Homo sapiens
  misc_RNA (1)...(19): siRNA sense strand
gaucgugacgcuggacaaa

SEQ ID NO: 2131159 - RNA, 19 nt, Homo sapiens
  misc_RNA (1)...(19): siRNA sense strand
ggagagaaggagaggacuu

SEQ ID NO: 2131160 - RNA, 19 nt, Homo sapiens
  misc_RNA (1)...(19): siRNA sense strand
cugcagagaucuccaccau

SEQ ID NO: 2131161 - RNA, 19 nt, Homo sapiens
  misc_RNA (1)...(19): siRNA sense strand
cuacuucuccgacgucaug

SEQ ID NO: 2131162 - RNA, 19 nt, Homo sapiens
  misc_RNA (1)...(19): siRNA sense strand
cauccugggcugccucuuu

SEQ ID NO: 2131163 - RNA, 19 nt, Homo sapiens
  misc_RNA (1)...(19): siRNA sense strand
gcuggacacacccaaggua

SEQ ID NO: 2131164 - RNA, 19 nt, Homo sapiens
  misc_RNA (1)...(19): siRNA sense strand
agaagaccauccuggagau

SEQ ID NO: 2131165 - RNA, 19 nt, Homo sapiens
  misc_RNA (1)...(19): siRNA sense strand
agaagucugucaacgucaa

SEQ ID NO: 2131166 - RNA, 19 nt, Homo sapiens
  misc_RNA (1)...(19): siRNA sense strand
caaggucaaccagaucauu

SEQ ID NO: 2131167 - RNA, 19 nt, Homo sapiens
  misc_RNA (1)...(19): siRNA sense strand
guucuuggguacucacagu

SEQ ID NO: 2131168 - RNA, 19 nt, Homo sapiens
  misc_RNA (1)...(19): siRNA sense strand
cuaagggcgacuccaagua

SEQ ID NO: 2131169 - RNA, 19 nt, Homo sapiens
  misc_RNA (1)...(19): siRNA sense strand
gacaaggucaaccagauca

SEQ ID NO: 2131170 - RNA, 19 nt, Homo sapiens
  misc_RNA (1)...(19): siRNA sense strand
uguacauccucgugcagua

SEQ ID NO: 2131171 - RNA, 19 nt, Homo sapiens
  misc_RNA (1)...(19): siRNA sense strand
agagggagccagacgagaa

SEQ ID NO: 2131172 - RNA, 19 nt, Homo sapiens
  misc_RNA (1)...(19): siRNA sense strand
uggacaaggucaaccagau

SEQ ID NO: 2131173 - RNA, 19 nt, Homo sapiens
  misc_RNA (1)...(19): siRNA sense strand
cugcguaccugggaaagga

SEQ ID NO: 2131174 - RNA, 19 nt, Homo sapiens
  misc_RNA (1)...(19): siRNA sense strand
acgaggaucugcaugacau

SEQ ID NO: 2131175 - RNA, 19 nt, Homo sapiens
  misc_RNA (1)...(19): siRNA sense strand
caccaaaggcaacuauauc

SEQ ID NO: 2131176 - RNA, 19 nt, Homo sapiens
  misc_RNA (1)...(19): siRNA sense strand
gcuaagggcgacuccaagu

SEQ ID NO: 2131177 - RNA, 19 nt, Homo sapiens
  misc_RNA (1)...(19): siRNA sense strand
gcgcaagaagguccaguuc

SEQ ID NO: 2131178 - RNA, 19 nt, Homo sapiens
  misc_RNA (1)...(19): siRNA sense strand
ucaagaacaagaaggagau

SEQ ID NO: 2131179 - RNA, 19 nt, Homo sapiens
  misc_RNA (1)...(19): siRNA sense strand
cugcaugacauccuugauu

SEQ ID NO: 2131180 - RNA, 19 nt, Homo sapiens
  misc_RNA (1)...(19): siRNA sense strand
cgagagcacgcacaagauc

SEQ ID NO: 2131181 - RNA, 19 nt, Homo sapiens
  misc_RNA (1)...(19): siRNA sense strand
gagcucccaccacccacua

SEQ ID NO: 2131182 - RNA, 19 nt, Homo sapiens
  misc_RNA (1)...(19): siRNA sense strand
cagcuuaaaguccuguaga

SEQ ID NO: 2131183 - RNA, 19 nt, Homo sapiens
  misc_RNA (1)...(19): siRNA sense strand
gcgcguguccuuccucaag

SEQ ID NO: 2131184 - RNA, 19 nt, Homo sapiens
  misc_RNA (1)...(19): siRNA sense strand
uaagggcgacuccaaguac

SEQ ID NO: 2131185 - RNA, 19 nt, Homo sapiens
  misc_RNA (1)...(19): siRNA sense strand
ccaaaggcaacuauaucga

SEQ ID NO: 2131186 - RNA, 19 nt, Homo sapiens
  misc_RNA (1)...(19): siRNA sense strand
gucaugacccucaagaaca

SEQ ID NO: 2131187 - RNA, 19 nt, Homo sapiens
  misc_RNA (1)...(19): siRNA sense strand
guccagugguuccaucaag

SEQ ID NO: 2131188 - RNA, 19 nt, Homo sapiens
  misc_RNA (1)...(19): siRNA sense strand
gcugggagccguguacuac

SEQ ID NO: 2131189 - RNA, 19 nt, Homo sapiens
  misc_RNA (1)...(19): siRNA sense strand
gagcaccggcacagcuuuc

SEQ ID NO: 2131190 - RNA, 19 nt, Homo sapiens
  misc_RNA (1)...(19): siRNA sense strand
cacccaagguagccaccaa

SEQ ID NO: 2131191 - RNA, 19 nt, Homo sapiens
  misc_RNA (1)...(19): siRNA sense strand
gcagacuguccuuguucuu

SEQ ID NO: 2131192 - RNA, 19 nt, Homo sapiens
  misc_RNA (1)...(19): siRNA sense strand
uccagugguuccaucaaga

SEQ ID NO: 2131193 - RNA, 19 nt, Homo sapiens
  misc_RNA (1)...(19): siRNA sense strand
caggccaagugucggaaug

SEQ ID NO: 2131194 - RNA, 19 nt, Homo sapiens
  misc_RNA (1)...(19): siRNA sense strand
gcuuaaaguccuguagaau

SEQ ID NO: 2131195 - RNA, 19 nt, Homo sapiens
  misc_RNA (1)...(19): siRNA sense strand
ggcagacuguccuuguucu

SEQ ID NO: 2131196 - RNA, 19 nt, Homo sapiens
  misc_RNA (1)...(19): siRNA sense strand
cagacuguccuuguucuug

SEQ ID NO: 2131197 - RNA, 19 nt, Homo sapiens
  misc_RNA (1)...(19): siRNA sense strand
gagggucaggacagcuuaa

SEQ ID NO: 2131198 - RNA, 19 nt, Homo sapiens
  misc_RNA (1)...(19): siRNA sense strand
gcaugcaggaggagaagca

SEQ ID NO: 2131199 - RNA, 19 nt, Homo sapiens
  misc_RNA (1)...(19): siRNA sense strand
ggagguacagaaggcgaaa

SEQ ID NO: 2131200 - RNA, 19 nt, Homo sapiens
  misc_RNA (1)...(19): siRNA sense strand
ccacaccccuacagcaaga

SEQ ID NO: 2131201 - RNA, 19 nt, Homo sapiens
  misc_RNA (1)...(19): siRNA sense strand
agcuuaaaguccuguagaa

SEQ ID NO: 2131202 - RNA, 19 nt, Homo sapiens
  misc_RNA (1)...(19): siRNA sense strand
ggaagacgaaggcaauuca

SEQ ID NO: 2131203 - RNA, 19 nt, Homo sapiens
  misc_RNA (1)...(19): siRNA sense strand
cgagaccaccucagaguaa

SEQ ID NO: 2131204 - RNA, 19 nt, Homo sapiens
  misc_RNA (1)...(19): siRNA sense strand
gagaccaccucagaguaaa

SEQ ID NO: 2131205 - RNA, 19 nt, Homo sapiens
  misc_RNA (1)...(19): siRNA sense strand
ggaacucggccaagggaaa

SEQ ID NO: 2131206 - RNA, 19 nt, Homo sapiens
  misc_RNA (1)...(19): siRNA sense strand
agucggcacuggacgagua

SEQ ID NO: 2131207 - RNA, 19 nt, Homo sapiens
  misc_RNA (1)...(19): siRNA sense strand
ccaagaccaagaagaagaa

SEQ ID NO: 2131208 - RNA, 19 nt, Homo sapiens
  misc_RNA (1)...(19): siRNA sense strand
gccaagaccaagaagaaga

SEQ ID NO: 2131209 - RNA, 19 nt, Homo sapiens
  misc_RNA (1)...(19): siRNA sense strand
gagaggggcuccggugaaa

SEQ ID NO: 2131210 - RNA, 19 nt, Homo sapiens
  misc_RNA (1)...(19): siRNA sense strand
agggaaaggugcccaaguc

SEQ ID NO: 2131211 - RNA, 19 nt, Homo sapiens
  misc_RNA (1)...(19): siRNA sense strand
gaacucggccaagggaaag

SEQ ID NO: 2131212 - RNA, 19 nt, Homo sapiens
  misc_RNA (1)...(19): siRNA sense strand
uggccaagaccaagaagaa

SEQ ID NO: 2131213 - RNA, 19 nt, Homo sapiens
  misc_RNA (1)...(19): siRNA sense strand
gcaccguggcugagucugu

SEQ ID NO: 2131214 - RNA, 19 nt, Homo sapiens
  misc_RNA (1)...(19): siRNA sense strand
gcaauucaggcccagaaac

SEQ ID NO: 2131215 - RNA, 19 nt, Homo sapiens
  misc_RNA (1)...(19): siRNA sense strand
aggaauacuucggcagcua

SEQ ID NO: 2131216 - RNA, 19 nt, Homo sapiens
  misc_RNA (1)...(19): siRNA sense strand
caauucaggcccagaaacu

SEQ ID NO: 2131217 - RNA, 19 nt, Homo sapiens
  misc_RNA (1)...(19): siRNA sense strand
ucgagaccaccucagagua

SEQ ID NO: 2131218 - RNA, 19 nt, Homo sapiens
  misc_RNA (1)...(19): siRNA sense strand
ggaagacgaaggcaauuca

SEQ ID NO: 2131219 - RNA, 19 nt, Homo sapiens
  misc_RNA (1)...(19): siRNA sense strand
cgagaccaccucagaguaa

SEQ ID NO: 2131220 - RNA, 19 nt, Homo sapiens
  misc_RNA (1)...(19): siRNA sense strand
gagaccaccucagaguaaa

SEQ ID NO: 2131221 - RNA, 19 nt, Homo sapiens
  misc_RNA (1)...(19): siRNA sense strand
ggaacucggccaagggaaa

SEQ ID NO: 2131222 - RNA, 19 nt, Homo sapiens
  misc_RNA (1)...(19): siRNA sense strand
agucggcacuggacgagua

SEQ ID NO: 2131223 - RNA, 19 nt, Homo sapiens
  misc_RNA (1)...(19): siRNA sense strand
ccaagaccaagaagaagaa

SEQ ID NO: 2131224 - RNA, 19 nt, Homo sapiens
  misc_RNA (1)...(19): siRNA sense strand
gccaagaccaagaagaaga

SEQ ID NO: 2131225 - RNA, 19 nt, Homo sapiens
  misc_RNA (1)...(19): siRNA sense strand
gagaggggcuccggugaaa

SEQ ID NO: 2131226 - RNA, 19 nt, Homo sapiens
  misc_RNA (1)...(19): siRNA sense strand
agggaaaggugcccaaguc

SEQ ID NO: 2131227 - RNA, 19 nt, Homo sapiens
  misc_RNA (1)...(19): siRNA sense strand
gaacucggccaagggaaag

SEQ ID NO: 2131228 - RNA, 19 nt, Homo sapiens
  misc_RNA (1)...(19): siRNA sense strand
uggccaagaccaagaagaa

SEQ ID NO: 2131229 - RNA, 19 nt, Homo sapiens
  misc_RNA (1)...(19): siRNA sense strand
gcaccguggcugagucugu

SEQ ID NO: 2131230 - RNA, 19 nt, Homo sapiens
  misc_RNA (1)...(19): siRNA sense strand
gcaauucaggcccagaaac

SEQ ID NO: 2131231 - RNA, 19 nt, Homo sapiens
  misc_RNA (1)...(19): siRNA sense strand
aggaauacuucggcagcua

SEQ ID NO: 2131232 - RNA, 19 nt, Homo sapiens
  misc_RNA (1)...(19): siRNA sense strand
caauucaggcccagaaacu

SEQ ID NO: 2131233 - RNA, 19 nt, Homo sapiens
  misc_RNA (1)...(19): siRNA sense strand
ucgagaccaccucagagua

SEQ ID NO: 2131234 - RNA, 19 nt, Homo sapiens
  misc_RNA (1)...(19): siRNA sense strand
gaacaacaauggacuagga

SEQ ID NO: 2131235 - RNA, 19 nt, Homo sapiens
  misc_RNA (1)...(19): siRNA sense strand
cagcaaaguucccugauua

SEQ ID NO: 2131236 - RNA, 19 nt, Homo sapiens
  misc_RNA (1)...(19): siRNA sense strand
gcacugcccugauccgaua

SEQ ID NO: 2131237 - RNA, 19 nt, Homo sapiens
  misc_RNA (1)...(19): siRNA sense strand
gaaaggagcuucuguucag

SEQ ID NO: 2131238 - RNA, 19 nt, Homo sapiens
  misc_RNA (1)...(19): siRNA sense strand
ggaaaguucugcaaguaaa

SEQ ID NO: 2131239 - RNA, 19 nt, Homo sapiens
  misc_RNA (1)...(19): siRNA sense strand
ggaaguaaauccagcaaug

SEQ ID NO: 2131240 - RNA, 19 nt, Homo sapiens
  misc_RNA (1)...(19): siRNA sense strand
guaggaagccuuucagaua

SEQ ID NO: 2131241 - RNA, 19 nt, Homo sapiens
  misc_RNA (1)...(19): siRNA sense strand
ggacaaagcaauucuggaa

SEQ ID NO: 2131242 - RNA, 19 nt, Homo sapiens
  misc_RNA (1)...(19): siRNA sense strand
gaacaggcucaaauucaua

SEQ ID NO: 2131243 - RNA, 19 nt, Homo sapiens
  misc_RNA (1)...(19): siRNA sense strand
ccaguuaucuccucaacaa

SEQ ID NO: 2131244 - RNA, 19 nt, Homo sapiens
  misc_RNA (1)...(19): siRNA sense strand
gaaagaaacaaaugaagug

SEQ ID NO: 2131245 - RNA, 19 nt, Homo sapiens
  misc_RNA (1)...(19): siRNA sense strand
ggagugccauggaaaggua

SEQ ID NO: 2131246 - RNA, 19 nt, Homo sapiens
  misc_RNA (1)...(19): siRNA sense strand
gaagaguggccuuguauug

SEQ ID NO: 2131247 - RNA, 19 nt, Homo sapiens
  misc_RNA (1)...(19): siRNA sense strand
aaaguucccugauuacaaa

SEQ ID NO: 2131248 - RNA, 19 nt, Homo sapiens
  misc_RNA (1)...(19): siRNA sense strand
uaggaagccuuucagauaa

SEQ ID NO: 2131249 - RNA, 19 nt, Homo sapiens
  misc_RNA (1)...(19): siRNA sense strand
ccacucaucucuccaacaa

SEQ ID NO: 2131250 - RNA, 19 nt, Homo sapiens
  misc_RNA (1)...(19): siRNA sense strand
ccaggaagcaccacuagua

SEQ ID NO: 2131251 - RNA, 19 nt, Homo sapiens
  misc_RNA (1)...(19): siRNA sense strand
gaugaauccucuugccaaa

SEQ ID NO: 2131252 - RNA, 19 nt, Homo sapiens
  misc_RNA (1)...(19): siRNA sense strand
aaagauuucucaagcugua

SEQ ID NO: 2131253 - RNA, 19 nt, Homo sapiens
  misc_RNA (1)...(19): siRNA sense strand
cuaaaucuguucaaucuuc

SEQ ID NO: 2131254 - RNA, 19 nt, Homo sapiens
  misc_RNA (1)...(19): siRNA sense strand
agaaagggaagaacaguua

SEQ ID NO: 2131255 - RNA, 19 nt, Homo sapiens
  misc_RNA (1)...(19): siRNA sense strand
ggacucuaaugacaacaaa

SEQ ID NO: 2131256 - RNA, 19 nt, Homo sapiens
  misc_RNA (1)...(19): siRNA sense strand
ggaaugcccuuuggaaugg

SEQ ID NO: 2131257 - RNA, 19 nt, Homo sapiens
  misc_RNA (1)...(19): siRNA sense strand
ggaagaacaguuaauggaa

SEQ ID NO: 2131258 - RNA, 19 nt, Homo sapiens
  misc_RNA (1)...(19): siRNA sense strand
gggaacgaauguaaucuug

SEQ ID NO: 2131259 - RNA, 19 nt, Homo sapiens
  misc_RNA (1)...(19): siRNA sense strand
gcagagaacaggcucaaau

SEQ ID NO: 2131260 - RNA, 19 nt, Homo sapiens
  misc_RNA (1)...(19): siRNA sense strand
ccaaagcaaucaaaugaag

SEQ ID NO: 2131261 - RNA, 19 nt, Homo sapiens
  misc_RNA (1)...(19): siRNA sense strand
gagaacaggcucaaauuca

SEQ ID NO: 2131262 - RNA, 19 nt, Homo sapiens
  misc_RNA (1)...(19): siRNA sense strand
ggaaauuggaggaauguga

SEQ ID NO: 2131263 - RNA, 19 nt, Homo sapiens
  misc_RNA (1)...(19): siRNA sense strand
gcaagugccuccccaguuu

SEQ ID NO: 2131264 - RNA, 19 nt, Homo sapiens
  misc_RNA (1)...(19): siRNA sense strand
ggaaagaaacaaaugaagu

SEQ ID NO: 2131265 - RNA, 19 nt, Homo sapiens
  misc_RNA (1)...(19): siRNA sense strand
gaaaucaacugggucaaaa

SEQ ID NO: 2131266 - RNA, 19 nt, Homo sapiens
  misc_RNA (1)...(19): siRNA sense strand
gcaggaccacaaaguguua

SEQ ID NO: 2131267 - RNA, 19 nt, Homo sapiens
  misc_RNA (1)...(19): siRNA sense strand
gcucaguucguccuaguua

SEQ ID NO: 2131268 - RNA, 19 nt, Homo sapiens
  misc_RNA (1)...(19): siRNA sense strand
ccaaacaacgcacaaguga

SEQ ID NO: 2131269 - RNA, 19 nt, Homo sapiens
  misc_RNA (1)...(19): siRNA sense strand
ccaaaucuccaccaacaaa

SEQ ID NO: 2131270 - RNA, 19 nt, Homo sapiens
  misc_RNA (1)...(19): siRNA sense strand
gagaagggcgguagucaug

SEQ ID NO: 2131271 - RNA, 19 nt, Homo sapiens
  misc_RNA (1)...(19): siRNA sense strand
ggaaugagaaucccagcaa

SEQ ID NO: 2131272 - RNA, 19 nt, Homo sapiens
  misc_RNA (1)...(19): siRNA sense strand
gggccaaacucaaauuaag

SEQ ID NO: 2131273 - RNA, 19 nt, Homo sapiens
  misc_RNA (1)...(19): siRNA sense strand
gugcugcugcuucaaauua

SEQ ID NO: 2131274 - RNA, 19 nt, Homo sapiens
  misc_RNA (1)...(19): siRNA sense strand
ccacacauccugauuguca

SEQ ID NO: 2131275 - RNA, 19 nt, Homo sapiens
  misc_RNA (1)...(19): siRNA sense strand
gggaaacacuaccauccuu

SEQ ID NO: 2131276 - RNA, 19 nt, Homo sapiens
  misc_RNA (1)...(19): siRNA sense strand
gaaagggaagaacaguuaa

SEQ ID NO: 2131277 - RNA, 19 nt, Homo sapiens
  misc_RNA (1)...(19): siRNA sense strand
gccaauaccuggauauggu

SEQ ID NO: 2131278 - RNA, 19 nt, Homo sapiens
  misc_RNA (1)...(19): siRNA sense strand
cagcagcaguuguuacaga

SEQ ID NO: 2131279 - RNA, 19 nt, Homo sapiens
  misc_RNA (1)...(19): siRNA sense strand
ggaggaaagaaacaaauga

SEQ ID NO: 2131280 - RNA, 19 nt, Homo sapiens
  misc_RNA (1)...(19): siRNA sense strand
gaacacaggaggcuggaau

SEQ ID NO: 2131281 - RNA, 19 nt, Homo sapiens
  misc_RNA (1)...(19): siRNA sense strand
ggcuaaaucuguucaaucu

SEQ ID NO: 2131282 - RNA, 19 nt, Homo sapiens
  misc_RNA (1)...(19): siRNA sense strand
gagccagcuuccacaaauu

SEQ ID NO: 2131283 - RNA, 19 nt, Homo sapiens
  misc_RNA (1)...(19): siRNA sense strand
caaggauggucuucuggaa

SEQ ID NO: 2131284 - RNA, 19 nt, Homo sapiens
  misc_RNA (1)...(19): siRNA sense strand
ggaaacagcacagcacaau

SEQ ID NO: 2131285 - RNA, 19 nt, Homo sapiens
  misc_RNA (1)...(19): siRNA sense strand
gaccacaaaguguuacuaa

SEQ ID NO: 2131286 - RNA, 19 nt, Homo sapiens
  misc_RNA (1)...(19): siRNA sense strand
ccaguuggccuccagaauu

SEQ ID NO: 2131287 - RNA, 19 nt, Homo sapiens
  misc_RNA (1)...(19): siRNA sense strand
guuaucuccucaacaaauu

SEQ ID NO: 2131288 - RNA, 19 nt, Homo sapiens
  misc_RNA (1)...(19): siRNA sense strand
ggaauaaacaacaccaaca

SEQ ID NO: 2131289 - RNA, 19 nt, Homo sapiens
  misc_RNA (1)...(19): siRNA sense strand
ggaaaggagcuucuguuca

SEQ ID NO: 2131290 - RNA, 19 nt, Homo sapiens
  misc_RNA (1)...(19): siRNA sense strand
gaaacaaugggaacaaugg

SEQ ID NO: 2131291 - RNA, 19 nt, Homo sapiens
  misc_RNA (1)...(19): siRNA sense strand
ggaagcaccacuaguaaca

SEQ ID NO: 2131292 - RNA, 19 nt, Homo sapiens
  misc_RNA (1)...(19): siRNA sense strand
gcacagcaccuggagcaaa

SEQ ID NO: 2131293 - RNA, 19 nt, Homo sapiens
  misc_RNA (1)...(19): siRNA sense strand
gaagugacgaaaccaaguu

SEQ ID NO: 2131294 - RNA, 19 nt, Homo sapiens
  misc_RNA (1)...(19): siRNA sense strand
gaaugugaguggucaggau

SEQ ID NO: 2131295 - RNA, 19 nt, Homo sapiens
  misc_RNA (1)...(19): siRNA sense strand
uuacagaaccagagaaaga

SEQ ID NO: 2131296 - RNA, 19 nt, Homo sapiens
  misc_RNA (1)...(19): siRNA sense strand
ugaauccucuugccaaaca

SEQ ID NO: 2131297 - RNA, 19 nt, Homo sapiens
  misc_RNA (1)...(19): siRNA sense strand
gggaagaacaguuaaugga

SEQ ID NO: 2131298 - RNA, 19 nt, Homo sapiens
  misc_RNA (1)...(19): siRNA sense strand
gaggaaagaaacaaaugaa

SEQ ID NO: 2131299 - RNA, 19 nt, Homo sapiens
  misc_RNA (1)...(19): siRNA sense strand
ggaccuggcucuggcuuca

SEQ ID NO: 2131300 - RNA, 19 nt, Homo sapiens
  misc_RNA (1)...(19): siRNA sense strand
caaaguucccugauuacaa

SEQ ID NO: 2131301 - RNA, 19 nt, Homo sapiens
  misc_RNA (1)...(19): siRNA sense strand
ccacaucucccauuguaga

SEQ ID NO: 2131302 - RNA, 19 nt, Homo sapiens
  misc_RNA (1)...(19): siRNA sense strand
uaucaucccuggugacaca

SEQ ID NO: 2131303 - RNA, 19 nt, Homo sapiens
  misc_RNA (1)...(19): siRNA sense strand
gggaaaguucugcaaguaa

SEQ ID NO: 2131304 - RNA, 19 nt, Homo sapiens
  misc_RNA (1)...(19): siRNA sense strand
ggaaugacuacaagaacaa

SEQ ID NO: 2131305 - RNA, 19 nt, Homo sapiens
  misc_RNA (1)...(19): siRNA sense strand
gguccaaaccaaccaaauu

SEQ ID NO: 2131306 - RNA, 19 nt, Homo sapiens
  misc_RNA (1)...(19): siRNA sense strand
gggaaugcccuuuggaaug

SEQ ID NO: 2131307 - RNA, 19 nt, Homo sapiens
  misc_RNA (1)...(19): siRNA sense strand
gggaacagcagucaaagau

SEQ ID NO: 2131308 - RNA, 19 nt, Homo sapiens
  misc_RNA (1)...(19): siRNA sense strand
guucauagcacuucagcaa

SEQ ID NO: 2131309 - RNA, 19 nt, Homo sapiens
  misc_RNA (1)...(19): siRNA sense strand
gacaugggaaccacagaua

SEQ ID NO: 2131310 - RNA, 19 nt, Homo sapiens
  misc_RNA (1)...(19): siRNA sense strand
ccacaaagcaggaaguagu

SEQ ID NO: 2131311 - RNA, 19 nt, Homo sapiens
  misc_RNA (1)...(19): siRNA sense strand
acaaagcacuggagaucga

SEQ ID NO: 2131312 - RNA, 19 nt, Homo sapiens
  misc_RNA (1)...(19): siRNA sense strand
gacugggucugaugaguug

SEQ ID NO: 2131313 - RNA, 19 nt, Homo sapiens
  misc_RNA (1)...(19): siRNA sense strand
acucaucucuccaacaaga

SEQ ID NO: 2131314 - RNA, 19 nt, Homo sapiens
  misc_RNA (1)...(19): siRNA sense strand
aaaggaagaaagaggauaa

SEQ ID NO: 2131315 - RNA, 19 nt, Homo sapiens
  misc_RNA (1)...(19): siRNA sense strand
ggaagccaauaugcacaaa

SEQ ID NO: 2131316 - RNA, 19 nt, Homo sapiens
  misc_RNA (1)...(19): siRNA sense strand
ugagccagcuuccacaaau

SEQ ID NO: 2131317 - RNA, 19 nt, Homo sapiens
  misc_RNA (1)...(19): siRNA sense strand
gaagggcgguagucauggu

SEQ ID NO: 2131318 - RNA, 19 nt, Homo sapiens
  misc_RNA (1)...(19): siRNA sense strand
ugggaaaguucugcaagua

SEQ ID NO: 2131319 - RNA, 19 nt, Homo sapiens
  misc_RNA (1)...(19): siRNA sense strand
aaacagcaauugggaaagu

SEQ ID NO: 2131320 - RNA, 19 nt, Homo sapiens
  misc_RNA (1)...(19): siRNA sense strand
guuaauggaagacaagaaa

SEQ ID NO: 2131321 - RNA, 19 nt, Homo sapiens
  misc_RNA (1)...(19): siRNA sense strand
ggagaugcacccagccaaa

SEQ ID NO: 2131322 - RNA, 19 nt, Homo sapiens
  misc_RNA (1)...(19): siRNA sense strand
gaaacacuaacuccuugaa

SEQ ID NO: 2131323 - RNA, 19 nt, Homo sapiens
  misc_RNA (1)...(19): siRNA sense strand
aaacaacgcacaagugaca

SEQ ID NO: 2131324 - RNA, 19 nt, Homo sapiens
  misc_RNA (1)...(19): siRNA sense strand
ggaccugcucugaaucuuu

SEQ ID NO: 2131325 - RNA, 19 nt, Homo sapiens
  misc_RNA (1)...(19): siRNA sense strand
gagucucgcuuuaaacagu

SEQ ID NO: 2131326 - RNA, 19 nt, Homo sapiens
  misc_RNA (1)...(19): siRNA sense strand
gugaaucugugggauaaga

SEQ ID NO: 2131327 - RNA, 19 nt, Homo sapiens
  misc_RNA (1)...(19): siRNA sense strand
ggaagucgaucagacaaaa

SEQ ID NO: 2131328 - RNA, 19 nt, Homo sapiens
  misc_RNA (1)...(19): siRNA sense strand
ggaaacaaugggaacaaug

SEQ ID NO: 2131329 - RNA, 19 nt, Homo sapiens
  misc_RNA (1)...(19): siRNA sense strand
aaucugacccuaaggcuaa

SEQ ID NO: 2131330 - RNA, 19 nt, Homo sapiens
  misc_RNA (1)...(19): siRNA sense strand
ggggaaaucugacaaagga

SEQ ID NO: 2131331 - RNA, 19 nt, Homo sapiens
  misc_RNA (1)...(19): siRNA sense strand
ggaggagggucggauucaa

SEQ ID NO: 2131332 - RNA, 19 nt, Homo sapiens
  misc_RNA (1)...(19): siRNA sense strand
cugcugacauuccaucuga

SEQ ID NO: 2131333 - RNA, 19 nt, Homo sapiens
  misc_RNA (1)...(19): siRNA sense strand
ccacagggucuaauucuuc

SEQ ID NO: 2131334 - RNA, 19 nt, Homo sapiens
  misc_RNA (1)...(19): siRNA sense strand
guacagaagucacagaaga

SEQ ID NO: 2131335 - RNA, 19 nt, Homo sapiens
  misc_RNA (1)...(19): siRNA sense strand
gcacaaggaugaguucuuc

SEQ ID NO: 2131336 - RNA, 19 nt, Homo sapiens
  misc_RNA (1)...(19): siRNA sense strand
gcaacgaaguggcacaguu

SEQ ID NO: 2131337 - RNA, 19 nt, Homo sapiens
  misc_RNA (1)...(19): siRNA sense strand
gaaggcaucuggcacacau

SEQ ID NO: 2131338 - RNA, 19 nt, Homo sapiens
  misc_RNA (1)...(19): siRNA sense strand
cggugaagcucuacgugua

SEQ ID NO: 2131339 - RNA, 19 nt, Homo sapiens
  misc_RNA (1)...(19): siRNA sense strand
caaccucuuugaacacaau

SEQ ID NO: 2131340 - RNA, 19 nt, Homo sapiens
  misc_RNA (1)...(19): siRNA sense strand
uggcacacauccauaguug

SEQ ID NO: 2131341 - RNA, 19 nt, Homo sapiens
  misc_RNA (1)...(19): siRNA sense strand
ccuacaaccucuuugaaca

SEQ ID NO: 2131342 - RNA, 19 nt, Homo sapiens
  misc_RNA (1)...(19): siRNA sense strand
caacgaaguggcacaguuc

SEQ ID NO: 2131343 - RNA, 19 nt, Homo sapiens
  misc_RNA (1)...(19): siRNA sense strand
gaccugcccucugaaguuc

SEQ ID NO: 2131344 - RNA, 19 nt, Homo sapiens
  misc_RNA (1)...(19): siRNA sense strand
gaguacagaagucacagaa

SEQ ID NO: 2131345 - RNA, 19 nt, Homo sapiens
  misc_RNA (1)...(19): siRNA sense strand
agaagucacagaagaaauc

SEQ ID NO: 2131346 - RNA, 19 nt, Homo sapiens
  misc_RNA (1)...(19): siRNA sense strand
uguacgaccuguccaaagg

SEQ ID NO: 2131347 - RNA, 19 nt, Homo sapiens
  misc_RNA (1)...(19): siRNA sense strand
caaggaugaguucuucuuc

SEQ ID NO: 2131348 - RNA, 19 nt, Homo sapiens
  misc_RNA (1)...(19): siRNA sense strand
caucuggcacacauccaua

SEQ ID NO: 2131349 - RNA, 19 nt, Homo sapiens
  misc_RNA (1)...(19): siRNA sense strand
agaccugcccucugaaguu

SEQ ID NO: 2131350 - RNA, 19 nt, Homo sapiens
  misc_RNA (1)...(19): siRNA sense strand
ucuauccggugaagcucua

SEQ ID NO: 2131351 - RNA, 19 nt, Homo sapiens
  misc_RNA (1)...(19): siRNA sense strand
gaaucucuauccggugaag

SEQ ID NO: 2131352 - RNA, 19 nt, Homo sapiens
  misc_RNA (1)...(19): siRNA sense strand
ggaguacagaagucacaga

SEQ ID NO: 2131353 - RNA, 19 nt, Homo sapiens
  misc_RNA (1)...(19): siRNA sense strand
gcuugggccuccagacucu

SEQ ID NO: 2131354 - RNA, 19 nt, Homo sapiens
  misc_RNA (1)...(19): siRNA sense strand
acagaagucacagaagaaa

SEQ ID NO: 2131355 - RNA, 19 nt, Homo sapiens
  misc_RNA (1)...(19): siRNA sense strand
ggccuacaaccucuuugaa

SEQ ID NO: 2131356 - RNA, 19 nt, Homo sapiens
  misc_RNA (1)...(19): siRNA sense strand
acaaggaugaguucuucuu

SEQ ID NO: 2131357 - RNA, 19 nt, Homo sapiens
  misc_RNA (1)...(19): siRNA sense strand
uacagaagucacagaagaa

SEQ ID NO: 2131358 - RNA, 19 nt, Homo sapiens
  misc_RNA (1)...(19): siRNA sense strand
uacaaccucuuugaacaca

SEQ ID NO: 2131359 - RNA, 19 nt, Homo sapiens
  misc_RNA (1)...(19): siRNA sense strand
guaacaccuucagcaacga

SEQ ID NO: 2131360 - RNA, 19 nt, Homo sapiens
  misc_RNA (1)...(19): siRNA sense strand
uaacaccuucagcaacgaa

SEQ ID NO: 2131361 - RNA, 19 nt, Homo sapiens
  misc_RNA (1)...(19): siRNA sense strand
gaagucacagaagaaaucu

SEQ ID NO: 2131362 - RNA, 19 nt, Homo sapiens
  misc_RNA (1)...(19): siRNA sense strand
gauuccuucuuacaucaca

SEQ ID NO: 2131363 - RNA, 19 nt, Homo sapiens
  misc_RNA (1)...(19): siRNA sense strand
caaaggagcugcagauuaa

SEQ ID NO: 2131364 - RNA, 19 nt, Homo sapiens
  misc_RNA (1)...(19): siRNA sense strand
ugaggcagcuguugaagua

SEQ ID NO: 2131365 - RNA, 19 nt, Homo sapiens
  misc_RNA (1)...(19): siRNA sense strand
ggagaaagugcuaagaaua

SEQ ID NO: 2131366 - RNA, 19 nt, Homo sapiens
  misc_RNA (1)...(19): siRNA sense strand
gaagggucaucaggaaaua

SEQ ID NO: 2131367 - RNA, 19 nt, Homo sapiens
  misc_RNA (1)...(19): siRNA sense strand
gagaaagugcuaagaauau

SEQ ID NO: 2131368 - RNA, 19 nt, Homo sapiens
  misc_RNA (1)...(19): siRNA sense strand
gaaguaugaucucuuugug

SEQ ID NO: 2131369 - RNA, 19 nt, Homo sapiens
  misc_RNA (1)...(19): siRNA sense strand
cauacaagcuucugucugu

SEQ ID NO: 2131370 - RNA, 19 nt, Homo sapiens
  misc_RNA (1)...(19): siRNA sense strand
guugaaguaugaucucuuu

SEQ ID NO: 2131371 - RNA, 19 nt, Homo sapiens
  misc_RNA (1)...(19): siRNA sense strand
acaaagagcuguguaacau

SEQ ID NO: 2131372 - RNA, 19 nt, Homo sapiens
  misc_RNA (1)...(19): siRNA sense strand
gggagaaagugcuaagaau

SEQ ID NO: 2131373 - RNA, 19 nt, Homo sapiens
  misc_RNA (1)...(19): siRNA sense strand
cagacgagcuuguaaugga

SEQ ID NO: 2131374 - RNA, 19 nt, Homo sapiens
  misc_RNA (1)...(19): siRNA sense strand
gcaagaagcacauguuguc

SEQ ID NO: 2131375 - RNA, 19 nt, Homo sapiens
  misc_RNA (1)...(19): siRNA sense strand
acaaaggagcugcagauua

SEQ ID NO: 2131376 - RNA, 19 nt, Homo sapiens
  misc_RNA (1)...(19): siRNA sense strand
cagaggagaucaagcuguu

SEQ ID NO: 2131377 - RNA, 19 nt, Homo sapiens
  misc_RNA (1)...(19): siRNA sense strand
cagguuggcuauagaauuc

SEQ ID NO: 2131378 - RNA, 19 nt, Homo sapiens
  misc_RNA (1)...(19): siRNA sense strand
ucacgcaacuggugucuca

SEQ ID NO: 2131379 - RNA, 19 nt, Homo sapiens
  misc_RNA (1)...(19): siRNA sense strand
acauagagcugcacaagca

SEQ ID NO: 2131380 - RNA, 19 nt, Homo sapiens
  misc_RNA (1)...(19): siRNA sense strand
gaaauaccucacugccuuu

SEQ ID NO: 2131381 - RNA, 19 nt, Homo sapiens
  misc_RNA (1)...(19): siRNA sense strand
ucaggacacuuccgugaga

SEQ ID NO: 2131382 - RNA, 19 nt, Homo sapiens
  misc_RNA (1)...(19): siRNA sense strand
cuauagaauuccagaguga

SEQ ID NO: 2131383 - RNA, 19 nt, Homo sapiens
  misc_RNA (1)...(19): siRNA sense strand
gcagguuggcuauagaauu

SEQ ID NO: 2131384 - RNA, 19 nt, Homo sapiens
  misc_RNA (1)...(19): siRNA sense strand
caguagagauucagagaag

SEQ ID NO: 2131385 - RNA, 19 nt, Homo sapiens
  misc_RNA (1)...(19): siRNA sense strand
ugacacuccugguagaaga

SEQ ID NO: 2131386 - RNA, 19 nt, Homo sapiens
  misc_RNA (1)...(19): siRNA sense strand
gcuucugucuguuaccuuu

SEQ ID NO: 2131387 - RNA, 19 nt, Homo sapiens
  misc_RNA (1)...(19): siRNA sense strand
gaagaugaacaacauagag

SEQ ID NO: 2131388 - RNA, 19 nt, Homo sapiens
  misc_RNA (1)...(19): siRNA sense strand
ggacugggagaaagugcua

SEQ ID NO: 2131389 - RNA, 19 nt, Homo sapiens
  misc_RNA (1)...(19): siRNA sense strand
ggccaugccuccaguagag

SEQ ID NO: 2131390 - RNA, 19 nt, Homo sapiens
  misc_RNA (1)...(19): siRNA sense strand
gcucagccaugugcagaga

SEQ ID NO: 2131391 - RNA, 19 nt, Homo sapiens
  misc_RNA (1)...(19): siRNA sense strand
guugagaggcuuaguauac

SEQ ID NO: 2131392 - RNA, 19 nt, Homo sapiens
  misc_RNA (1)...(19): siRNA sense strand
gagcaucuuucuucuucca

SEQ ID NO: 2131393 - RNA, 19 nt, Homo sapiens
  misc_RNA (1)...(19): siRNA sense strand
caacauagagcugcacaag

SEQ ID NO: 2131394 - RNA, 19 nt, Homo sapiens
  misc_RNA (1)...(19): siRNA sense strand
uacaagcuucugucuguua

SEQ ID NO: 2131395 - RNA, 19 nt, Homo sapiens
  misc_RNA (1)...(19): siRNA sense strand
ucagcacucuggagggauu

SEQ ID NO: 2131396 - RNA, 19 nt, Homo sapiens
  misc_RNA (1)...(19): siRNA sense strand
gagaucaagcuguucacaa

SEQ ID NO: 2131397 - RNA, 19 nt, Homo sapiens
  misc_RNA (1)...(19): siRNA sense strand
gcgcaagaagcacauguug

SEQ ID NO: 2131398 - RNA, 19 nt, Homo sapiens
  misc_RNA (1)...(19): siRNA sense strand
agaucaagcuguucacaag

SEQ ID NO: 2131399 - RNA, 19 nt, Homo sapiens
  misc_RNA (1)...(19): siRNA sense strand
gaauaucgaagggucauca

SEQ ID NO: 2131400 - RNA, 19 nt, Homo sapiens
  misc_RNA (1)...(19): siRNA sense strand
uugagcaucuuucuucuuc

SEQ ID NO: 2131401 - RNA, 19 nt, Homo sapiens
  misc_RNA (1)...(19): siRNA sense strand
gcuugacacuccugguaga

SEQ ID NO: 2131402 - RNA, 19 nt, Homo sapiens
  misc_RNA (1)...(19): siRNA sense strand
ugaaguaugaucucuuugu

SEQ ID NO: 2131403 - RNA, 19 nt, Homo sapiens
  misc_RNA (1)...(19): siRNA sense strand
cuggagggauuuagaagug

SEQ ID NO: 2131404 - RNA, 19 nt, Homo sapiens
  misc_RNA (1)...(19): siRNA sense strand
gaggagaucaagcuguuca

SEQ ID NO: 2131405 - RNA, 19 nt, Homo sapiens
  misc_RNA (1)...(19): siRNA sense strand
gccugaagaugaacaacau

SEQ ID NO: 2131406 - RNA, 19 nt, Homo sapiens
  misc_RNA (1)...(19): siRNA sense strand
agggaagccugaagaugaa

SEQ ID NO: 2131407 - RNA, 19 nt, Homo sapiens
  misc_RNA (1)...(19): siRNA sense strand
agaaagugcuaagaauauc

SEQ ID NO: 2131408 - RNA, 19 nt, Homo sapiens
  misc_RNA (1)...(19): siRNA sense strand
ggcagcuguugaaguauga

SEQ ID NO: 2131409 - RNA, 19 nt, Homo sapiens
  misc_RNA (1)...(19): siRNA sense strand
ggaacugcaggcuuugcua

SEQ ID NO: 2131410 - RNA, 19 nt, Homo sapiens
  misc_RNA (1)...(19): siRNA sense strand
cgaagggucaucaggaaau

SEQ ID NO: 2131411 - RNA, 19 nt, Homo sapiens
  misc_RNA (1)...(19): siRNA sense strand
gccugugacucgcugugua

SEQ ID NO: 2131412 - RNA, 19 nt, Homo sapiens
  misc_RNA (1)...(19): siRNA sense strand
gacaaaggagcugcagauu

SEQ ID NO: 2131413 - RNA, 19 nt, Homo sapiens
  misc_RNA (1)...(19): siRNA sense strand
agacaaaggagcugcagau

SEQ ID NO: 2131414 - RNA, 19 nt, Homo sapiens
  misc_RNA (1)...(19): siRNA sense strand
acgcugacaucccagaguu

SEQ ID NO: 2131415 - RNA, 19 nt, Homo sapiens
  misc_RNA (1)...(19): siRNA sense strand
caaagagcuguguaacaug

SEQ ID NO: 2131416 - RNA, 19 nt, Homo sapiens
  misc_RNA (1)...(19): siRNA sense strand
gaucaugaaccaggaugga

SEQ ID NO: 2131417 - RNA, 19 nt, Homo sapiens
  misc_RNA (1)...(19): siRNA sense strand
gagagucugcauccacuuc

SEQ ID NO: 2131418 - RNA, 19 nt, Homo sapiens
  misc_RNA (1)...(19): siRNA sense strand
gcuagaagccaugcuaaac

SEQ ID NO: 2131419 - RNA, 19 nt, Homo sapiens
  misc_RNA (1)...(19): siRNA sense strand
gaaguccuuauucagauca

SEQ ID NO: 2131420 - RNA, 19 nt, Homo sapiens
  misc_RNA (1)...(19): siRNA sense strand
ggcagacgagcuuguaaug

SEQ ID NO: 2131421 - RNA, 19 nt, Homo sapiens
  misc_RNA (1)...(19): siRNA sense strand
ucagccaugugcagagaug

SEQ ID NO: 2131422 - RNA, 19 nt, Homo sapiens
  misc_RNA (1)...(19): siRNA sense strand
uauucgagagggcccauua

SEQ ID NO: 2131423 - RNA, 19 nt, Homo sapiens
  misc_RNA (1)...(19): siRNA sense strand
ugaagaugaacaacauaga

SEQ ID NO: 2131424 - RNA, 19 nt, Homo sapiens
  misc_RNA (1)...(19): siRNA sense strand
gaucacaacgcagcugaag

SEQ ID NO: 2131425 - RNA, 19 nt, Homo sapiens
  misc_RNA (1)...(19): siRNA sense strand
uccguugccugcuggauga

SEQ ID NO: 2131426 - RNA, 19 nt, Homo sapiens
  misc_RNA (1)...(19): siRNA sense strand
gaaagugcuaagaauaucg

SEQ ID NO: 2131427 - RNA, 19 nt, Homo sapiens
  misc_RNA (1)...(19): siRNA sense strand
caggauggacugggagaaa

SEQ ID NO: 2131428 - RNA, 19 nt, Homo sapiens
  misc_RNA (1)...(19): siRNA sense strand
aggcagcuguugaaguaug

SEQ ID NO: 2131429 - RNA, 19 nt, Homo sapiens
  misc_RNA (1)...(19): siRNA sense strand
ugggagaaagugcuaagaa

SEQ ID NO: 2131430 - RNA, 19 nt, Homo sapiens
  misc_RNA (1)...(19): siRNA sense strand
ccaguagagauucagagaa

SEQ ID NO: 2131431 - RNA, 19 nt, Homo sapiens
  misc_RNA (1)...(19): siRNA sense strand
cauguuguccugcuuccaa

SEQ ID NO: 2131432 - RNA, 19 nt, Homo sapiens
  misc_RNA (1)...(19): siRNA sense strand
gaagccugaagaugaacaa

SEQ ID NO: 2131433 - RNA, 19 nt, Homo sapiens
  misc_RNA (1)...(19): siRNA sense strand
gcagacgagcuuguaaugg

SEQ ID NO: 2131434 - RNA, 19 nt, Homo sapiens
  misc_RNA (1)...(19): siRNA sense strand
ggagaucaagcuguucaca

SEQ ID NO: 2131435 - RNA, 19 nt, Homo sapiens
  misc_RNA (1)...(19): siRNA sense strand
gcaacuggugucucaggau

SEQ ID NO: 2131436 - RNA, 19 nt, Homo sapiens
  misc_RNA (1)...(19): siRNA sense strand
ucuuugagcaucuuucuuc

SEQ ID NO: 2131437 - RNA, 19 nt, Homo sapiens
  misc_RNA (1)...(19): siRNA sense strand
guauaacugcggugcuugu

SEQ ID NO: 2131438 - RNA, 19 nt, Homo sapiens
  misc_RNA (1)...(19): siRNA sense strand
uggaugagugccacaaaga

SEQ ID NO: 2131439 - RNA, 19 nt, Homo sapiens
  misc_RNA (1)...(19): siRNA sense strand
ggaugagugccacaaagag

SEQ ID NO: 2131440 - RNA, 19 nt, Homo sapiens
  misc_RNA (1)...(19): siRNA sense strand
gauuaacugcuuggguuug

SEQ ID NO: 2131441 - RNA, 19 nt, Homo sapiens
  misc_RNA (1)...(19): siRNA sense strand
caggacacuuccgugagaa

SEQ ID NO: 2131442 - RNA, 19 nt, Homo sapiens
  misc_RNA (1)...(19): siRNA sense strand
ggauggacugggagaaagu

SEQ ID NO: 2131443 - RNA, 19 nt, Homo sapiens
  misc_RNA (1)...(19): siRNA sense strand
acugcaggcuuugcuagaa

SEQ ID NO: 2131444 - RNA, 19 nt, Homo sapiens
  misc_RNA (1)...(19): siRNA sense strand
ggaagaugggagugugaca

SEQ ID NO: 2131445 - RNA, 19 nt, Homo sapiens
  misc_RNA (1)...(19): siRNA sense strand
ggacacagcucacaaggua

SEQ ID NO: 2131446 - RNA, 19 nt, Homo sapiens
  misc_RNA (1)...(19): siRNA sense strand
ggaaauggaccaaguauug

SEQ ID NO: 2131447 - RNA, 19 nt, Homo sapiens
  misc_RNA (1)...(19): siRNA sense strand
ggacaaagacaauacacua

SEQ ID NO: 2131448 - RNA, 19 nt, Homo sapiens
  misc_RNA (1)...(19): siRNA sense strand
gaagaacucucugcagugu

SEQ ID NO: 2131449 - RNA, 19 nt, Homo sapiens
  misc_RNA (1)...(19): siRNA sense strand
gcagaaggacccucuauug

SEQ ID NO: 2131450 - RNA, 19 nt, Homo sapiens
  misc_RNA (1)...(19): siRNA sense strand
acucucagcugccaucuua

SEQ ID NO: 2131451 - RNA, 19 nt, Homo sapiens
  misc_RNA (1)...(19): siRNA sense strand
gcaguguccucucucauga

SEQ ID NO: 2131452 - RNA, 19 nt, Homo sapiens
  misc_RNA (1)...(19): siRNA sense strand
gaaugaggauauccaagug

SEQ ID NO: 2131453 - RNA, 19 nt, Homo sapiens
  misc_RNA (1)...(19): siRNA sense strand
gcucacaagguacugauua

SEQ ID NO: 2131454 - RNA, 19 nt, Homo sapiens
  misc_RNA (1)...(19): siRNA sense strand
gaaauggaccaaguauuga

SEQ ID NO: 2131455 - RNA, 19 nt, Homo sapiens
  misc_RNA (1)...(19): siRNA sense strand
ggacagcccugcgacaaag

SEQ ID NO: 2131456 - RNA, 19 nt, Homo sapiens
  misc_RNA (1)...(19): siRNA sense strand
ggaaugaggauauccaagu

SEQ ID NO: 2131457 - RNA, 19 nt, Homo sapiens
  misc_RNA (1)...(19): siRNA sense strand
gacaauacacuacgugaga

SEQ ID NO: 2131458 - RNA, 19 nt, Homo sapiens
  misc_RNA (1)...(19): siRNA sense strand
cuucaaagccuccaucuau

SEQ ID NO: 2131459 - RNA, 19 nt, Homo sapiens
  misc_RNA (1)...(19): siRNA sense strand
gggaagagagcagcuauga

SEQ ID NO: 2131460 - RNA, 19 nt, Homo sapiens
  misc_RNA (1)...(19): siRNA sense strand
gagcagcuaugaggaacug

SEQ ID NO: 2131461 - RNA, 19 nt, Homo sapiens
  misc_RNA (1)...(19): siRNA sense strand
gacacucucuguggaaaug

SEQ ID NO: 2131462 - RNA, 19 nt, Homo sapiens
  misc_RNA (1)...(19): siRNA sense strand
auugaaggcucucagcuuu

SEQ ID NO: 2131463 - RNA, 19 nt, Homo sapiens
  misc_RNA (1)...(19): siRNA sense strand
caaagacaauacacuacgu

SEQ ID NO: 2131464 - RNA, 19 nt, Homo sapiens
  misc_RNA (1)...(19): siRNA sense strand
gagcagcacaggccugaug

SEQ ID NO: 2131465 - RNA, 19 nt, Homo sapiens
  misc_RNA (1)...(19): siRNA sense strand
ccaucuaucugcuugcaau

SEQ ID NO: 2131466 - RNA, 19 nt, Homo sapiens
  misc_RNA (1)...(19): siRNA sense strand
cagaaggacccucuauugu

SEQ ID NO: 2131467 - RNA, 19 nt, Homo sapiens
  misc_RNA (1)...(19): siRNA sense strand
gacaggaccaccuuccaaa

SEQ ID NO: 2131468 - RNA, 19 nt, Homo sapiens
  misc_RNA (1)...(19): siRNA sense strand
gcuaugaggaacuggauga

SEQ ID NO: 2131469 - RNA, 19 nt, Homo sapiens
  misc_RNA (1)...(19): siRNA sense strand
gagaagacaggaccaccuu

SEQ ID NO: 2131470 - RNA, 19 nt, Homo sapiens
  misc_RNA (1)...(19): siRNA sense strand
gcauccugcuccucuucua

SEQ ID NO: 2131471 - RNA, 19 nt, Homo sapiens
  misc_RNA (1)...(19): siRNA sense strand
ggagaucgagaccaucaug

SEQ ID NO: 2131472 - RNA, 19 nt, Homo sapiens
  misc_RNA (1)...(19): siRNA sense strand
gaaugugucagagcaagaa

SEQ ID NO: 2131473 - RNA, 19 nt, Homo sapiens
  misc_RNA (1)...(19): siRNA sense strand
ugaugcagcucaggaaugu

SEQ ID NO: 2131474 - RNA, 19 nt, Homo sapiens
  misc_RNA (1)...(19): siRNA sense strand
gcucagguucuuucuguug

SEQ ID NO: 2131475 - RNA, 19 nt, Homo sapiens
  misc_RNA (1)...(19): siRNA sense strand
auccagagcucaugaguag

SEQ ID NO: 2131476 - RNA, 19 nt, Homo sapiens
  misc_RNA (1)...(19): siRNA sense strand
cagcugccaucuuaugcuu

SEQ ID NO: 2131477 - RNA, 19 nt, Homo sapiens
  misc_RNA (1)...(19): siRNA sense strand
caagggcaguuugcagguu

SEQ ID NO: 2131478 - RNA, 19 nt, Homo sapiens
  misc_RNA (1)...(19): siRNA sense strand
gaggaggaaugaggauauc

SEQ ID NO: 2131479 - RNA, 19 nt, Homo sapiens
  misc_RNA (1)...(19): siRNA sense strand
gcucaugacccuguuuaug

SEQ ID NO: 2131480 - RNA, 19 nt, Homo sapiens
  misc_RNA (1)...(19): siRNA sense strand
guagcaguguccucucuca

SEQ ID NO: 2131481 - RNA, 19 nt, Homo sapiens
  misc_RNA (1)...(19): siRNA sense strand
ucagguucuuucuguugua

SEQ ID NO: 2131482 - RNA, 19 nt, Homo sapiens
  misc_RNA (1)...(19): siRNA sense strand
gaguagcaguguccucucu

SEQ ID NO: 2131483 - RNA, 19 nt, Homo sapiens
  misc_RNA (1)...(19): siRNA sense strand
uauuggagccuucaucaga

SEQ ID NO: 2131484 - RNA, 19 nt, Homo sapiens
  misc_RNA (1)...(19): siRNA sense strand
uauggucagugcaaucaga

SEQ ID NO: 2131485 - RNA, 19 nt, Homo sapiens
  misc_RNA (1)...(19): siRNA sense strand
gaagaggugggugauguuc

SEQ ID NO: 2131486 - RNA, 19 nt, Homo sapiens
  misc_RNA (1)...(19): siRNA sense strand
augaggaacuggaugaugu

SEQ ID NO: 2131487 - RNA, 19 nt, Homo sapiens
  misc_RNA (1)...(19): siRNA sense strand
cugcucagguucuuucugu

SEQ ID NO: 2131488 - RNA, 19 nt, Homo sapiens
  misc_RNA (1)...(19): siRNA sense strand
ggugggugauguucugcaa

SEQ ID NO: 2131489 - RNA, 19 nt, Homo sapiens
  misc_RNA (1)...(19): siRNA sense strand
ggacagcguggccaugaag

SEQ ID NO: 2131490 - RNA, 19 nt, Homo sapiens
  misc_RNA (1)...(19): siRNA sense strand
aggaccaccuuccaaagaa

SEQ ID NO: 2131491 - RNA, 19 nt, Homo sapiens
  misc_RNA (1)...(19): siRNA sense strand
uggccuacauccaugaaga

SEQ ID NO: 2131492 - RNA, 19 nt, Homo sapiens
  misc_RNA (1)...(19): siRNA sense strand
ccaagugggcggucuuauc

SEQ ID NO: 2131493 - RNA, 19 nt, Homo sapiens
  misc_RNA (1)...(19): siRNA sense strand
caggaccaccuuccaaaga

SEQ ID NO: 2131494 - RNA, 19 nt, Homo sapiens
  misc_RNA (1)...(19): siRNA sense strand
agaacucucugcagugucu

SEQ ID NO: 2131495 - RNA, 19 nt, Homo sapiens
  misc_RNA (1)...(19): siRNA sense strand
ccuguaaucccagcucuuu

SEQ ID NO: 2131496 - RNA, 19 nt, Homo sapiens
  misc_RNA (1)...(19): siRNA sense strand
agaaggacccucuauuguc

SEQ ID NO: 2131497 - RNA, 19 nt, Homo sapiens
  misc_RNA (1)...(19): siRNA sense strand
ggaaugugucagagcaaga

SEQ ID NO: 2131498 - RNA, 19 nt, Homo sapiens
  misc_RNA (1)...(19): siRNA sense strand
uaguaguccuguuccaguu

SEQ ID NO: 2131499 - RNA, 19 nt, Homo sapiens
  misc_RNA (1)...(19): siRNA sense strand
gucaggagaucgagaccau

SEQ ID NO: 2131500 - RNA, 19 nt, Homo sapiens
  misc_RNA (1)...(19): siRNA sense strand
ugcuggaccucaucuauuc

SEQ ID NO: 2131501 - RNA, 19 nt, Homo sapiens
  misc_RNA (1)...(19): siRNA sense strand
uuuaugcgguaccggagua

SEQ ID NO: 2131502 - RNA, 19 nt, Homo sapiens
  misc_RNA (1)...(19): siRNA sense strand
gcuagucuauacucaccau

SEQ ID NO: 2131503 - RNA, 19 nt, Homo sapiens
  misc_RNA (1)...(19): siRNA sense strand
gcagcccuccuucaacuuc

SEQ ID NO: 2131504 - RNA, 19 nt, Homo sapiens
  misc_RNA (1)...(19): siRNA sense strand
cuacuuggccuacauccau

SEQ ID NO: 2131505 - RNA, 19 nt, Homo sapiens
  misc_RNA (1)...(19): siRNA sense strand
gacaaagacaauacacuac

SEQ ID NO: 2131506 - RNA, 19 nt, Homo sapiens
  misc_RNA (1)...(19): siRNA sense strand
gaggaaugaggauauccaa

SEQ ID NO: 2131507 - RNA, 19 nt, Homo sapiens
  misc_RNA (1)...(19): siRNA sense strand
ugaggaggaaugaggauau

SEQ ID NO: 2131508 - RNA, 19 nt, Homo sapiens
  misc_RNA (1)...(19): siRNA sense strand
cagcuuaguaguccuguuc

SEQ ID NO: 2131509 - RNA, 19 nt, Homo sapiens
  misc_RNA (1)...(19): siRNA sense strand
gaccugcagcuagucuaua

SEQ ID NO: 2131510 - RNA, 19 nt, Homo sapiens
  misc_RNA (1)...(19): siRNA sense strand
gagacuauggucagugcaa

SEQ ID NO: 2131511 - RNA, 19 nt, Homo sapiens
  misc_RNA (1)...(19): siRNA sense strand
ucccagaccugcagcuagu

SEQ ID NO: 2131512 - RNA, 19 nt, Homo sapiens
  misc_RNA (1)...(19): siRNA sense strand
ggcuuuggcugaccugucu

SEQ ID NO: 2131513 - RNA, 19 nt, Homo sapiens
  misc_RNA (1)...(19): siRNA sense strand
agaggugggugauguucug

SEQ ID NO: 2131514 - RNA, 19 nt, Homo sapiens
  misc_RNA (1)...(19): siRNA sense strand
agagaauuccuuccucaga

SEQ ID NO: 2131515 - RNA, 19 nt, Homo sapiens
  misc_RNA (1)...(19): siRNA sense strand
ccuucaacuuccuguauug

SEQ ID NO: 2131516 - RNA, 19 nt, Homo sapiens
  misc_RNA (1)...(19): siRNA sense strand
ucaaagccuccaucuaucu

SEQ ID NO: 2131517 - RNA, 19 nt, Homo sapiens
  misc_RNA (1)...(19): siRNA sense strand
caggagaucgagaccauca

SEQ ID NO: 2131518 - RNA, 19 nt, Homo sapiens
  misc_RNA (1)...(19): siRNA sense strand
cgcccuuccugccagcuua

SEQ ID NO: 2131519 - RNA, 19 nt, Homo sapiens
  misc_RNA (1)...(19): siRNA sense strand
gagcucaugaguagguaug

SEQ ID NO: 2131520 - RNA, 19 nt, Homo sapiens
  misc_RNA (1)...(19): siRNA sense strand
ccagagcucaugaguaggu

SEQ ID NO: 2131521 - RNA, 19 nt, Homo sapiens
  misc_RNA (1)...(19): siRNA sense strand
caaucugccaggacaaaga

SEQ ID NO: 2131522 - RNA, 19 nt, Homo sapiens
  misc_RNA (1)...(19): siRNA sense strand
agagagcagcuaugaggaa

SEQ ID NO: 2131523 - RNA, 19 nt, Homo sapiens
  misc_RNA (1)...(19): siRNA sense strand
aaauggaccaaguauugaa

SEQ ID NO: 2131524 - RNA, 19 nt, Homo sapiens
  misc_RNA (1)...(19): siRNA sense strand
cagguucuuucuguuguau

SEQ ID NO: 2131525 - RNA, 19 nt, Homo sapiens
  misc_RNA (1)...(19): siRNA sense strand
ggcccugcauggcuucuuc

SEQ ID NO: 2131526 - RNA, 19 nt, Homo sapiens
  misc_RNA (1)...(19): siRNA sense strand
gcgguggcuuacuccugua

SEQ ID NO: 2131527 - RNA, 19 nt, Homo sapiens
  misc_RNA (1)...(19): siRNA sense strand
augaagaggugggugaugu

SEQ ID NO: 2131528 - RNA, 19 nt, Homo sapiens
  misc_RNA (1)...(19): siRNA sense strand
agacaggaccaccuuccaa

SEQ ID NO: 2131529 - RNA, 19 nt, Homo sapiens
  misc_RNA (1)...(19): siRNA sense strand
caagugggcggucuuaucc

SEQ ID NO: 2131530 - RNA, 19 nt, Homo sapiens
  misc_RNA (1)...(19): siRNA sense strand
caccguguccuggaacuuu

SEQ ID NO: 2131531 - RNA, 19 nt, Homo sapiens
  misc_RNA (1)...(19): siRNA sense strand
uauccagagcucaugagua

SEQ ID NO: 2131532 - RNA, 19 nt, Homo sapiens
  misc_RNA (1)...(19): siRNA sense strand
ggaggaaugaggauaucca

SEQ ID NO: 2131533 - RNA, 19 nt, Homo sapiens
  misc_RNA (1)...(19): siRNA sense strand
cuuggaugcuggagagaau

SEQ ID NO: 2131534 - RNA, 19 nt, Homo sapiens
  misc_RNA (1)...(19): siRNA sense strand
uggaggccuugcuugacua

SEQ ID NO: 2131535 - RNA, 19 nt, Homo sapiens
  misc_RNA (1)...(19): siRNA sense strand
gugcagaaggacccucuau

SEQ ID NO: 2131536 - RNA, 19 nt, Homo sapiens
  misc_RNA (1)...(19): siRNA sense strand
ggaagagagcagcuaugag

SEQ ID NO: 2131537 - RNA, 19 nt, Homo sapiens
  misc_RNA (1)...(19): siRNA sense strand
ucauugggcugcagaaccu

SEQ ID NO: 2131538 - RNA, 19 nt, Homo sapiens
  misc_RNA (1)...(19): siRNA sense strand
gcucacugccuccuucucu

SEQ ID NO: 2131539 - RNA, 19 nt, Homo sapiens
  misc_RNA (1)...(19): siRNA sense strand
caaagccuccaucuaucug

SEQ ID NO: 2131540 - RNA, 19 nt, Homo sapiens
  misc_RNA (1)...(19): siRNA sense strand
cagagcucaugaguaggua

SEQ ID NO: 2131541 - RNA, 19 nt, Homo sapiens
  misc_RNA (1)...(19): siRNA sense strand
ugaagaggugggugauguu

SEQ ID NO: 2131542 - RNA, 19 nt, Homo sapiens
  misc_RNA (1)...(19): siRNA sense strand
guggaaauggaccaaguau

SEQ ID NO: 2131543 - RNA, 19 nt, Homo sapiens
  misc_RNA (1)...(19): siRNA sense strand
cugcagcccuccuucaacu

SEQ ID NO: 2131544 - RNA, 19 nt, Homo sapiens
  misc_RNA (1)...(19): siRNA sense strand
ugauuagccugaggaccuu

SEQ ID NO: 2131545 - RNA, 19 nt, Homo sapiens
  misc_RNA (1)...(19): siRNA sense strand
ggccgaagaugcugguuug

SEQ ID NO: 2131546 - RNA, 19 nt, Homo sapiens
  misc_RNA (1)...(19): siRNA sense strand
gcaaccugcuauucuccuu

SEQ ID NO: 2131547 - RNA, 19 nt, Homo sapiens
  misc_RNA (1)...(19): siRNA sense strand
ggcaagcuuuggcuacaug

SEQ ID NO: 2131548 - RNA, 19 nt, Homo sapiens
  misc_RNA (1)...(19): siRNA sense strand
ggaaggcugcacaguggaa

SEQ ID NO: 2131549 - RNA, 19 nt, Homo sapiens
  misc_RNA (1)...(19): siRNA sense strand
gccacugccucuccaagga

SEQ ID NO: 2131550 - RNA, 19 nt, Homo sapiens
  misc_RNA (1)...(19): siRNA sense strand
ccugagaccuccugcuucu

SEQ ID NO: 2131551 - RNA, 19 nt, Homo sapiens
  misc_RNA (1)...(19): siRNA sense strand
gaugcugguuuguccucaa

SEQ ID NO: 2131552 - RNA, 19 nt, Homo sapiens
  misc_RNA (1)...(19): siRNA sense strand
cggcaguguuggcagaaga

SEQ ID NO: 2131553 - RNA, 19 nt, Homo sapiens
  misc_RNA (1)...(19): siRNA sense strand
gaguuugccuuugccaucu

SEQ ID NO: 2131554 - RNA, 19 nt, Homo sapiens
  misc_RNA (1)...(19): siRNA sense strand
caaccugcuauucuccuuu

SEQ ID NO: 2131555 - RNA, 19 nt, Homo sapiens
  misc_RNA (1)...(19): siRNA sense strand
caagggcaaccugcuauuc

SEQ ID NO: 2131556 - RNA, 19 nt, Homo sapiens
  misc_RNA (1)...(19): siRNA sense strand
gcccgaggaguuugccuuu

SEQ ID NO: 2131557 - RNA, 19 nt, Homo sapiens
  misc_RNA (1)...(19): siRNA sense strand
aaccugcuauucuccuuug

SEQ ID NO: 2131558 - RNA, 19 nt, Homo sapiens
  misc_RNA (1)...(19): siRNA sense strand
ccgaggaguuugccuuugc

SEQ ID NO: 2131559 - RNA, 19 nt, Homo sapiens
  misc_RNA (1)...(19): siRNA sense strand
cuacaugcgccugguggua

SEQ ID NO: 2131560 - RNA, 19 nt, Homo sapiens
  misc_RNA (1)...(19): siRNA sense strand
ccucaagggcaaccugcua

SEQ ID NO: 2131561 - RNA, 19 nt, Homo sapiens
  misc_RNA (1)...(19): siRNA sense strand
gggcaagcuuuggcuacau

SEQ ID NO: 2131562 - RNA, 19 nt, Homo sapiens
  misc_RNA (1)...(19): siRNA sense strand
cgaguuggagagccaguug

SEQ ID NO: 2131563 - RNA, 19 nt, Homo sapiens
  misc_RNA (1)...(19): siRNA sense strand
ucaagggcaaccugcuauu

SEQ ID NO: 2131564 - RNA, 19 nt, Homo sapiens
  misc_RNA (1)...(19): siRNA sense strand
ccugugggcuugguugaag

SEQ ID NO: 2131565 - RNA, 19 nt, Homo sapiens
  misc_RNA (1)...(19): siRNA sense strand
cgagcgaggugaagaaguu

SEQ ID NO: 2131566 - RNA, 19 nt, Homo sapiens
  misc_RNA (1)...(19): siRNA sense strand
ggagaacuaugagaaugug

SEQ ID NO: 2131567 - RNA, 19 nt, Homo sapiens
  misc_RNA (1)...(19): siRNA sense strand
ucaucgagguggacgagua

SEQ ID NO: 2131568 - RNA, 19 nt, Homo sapiens
  misc_RNA (1)...(19): siRNA sense strand
cagcacagccggcucauca

SEQ ID NO: 2131569 - RNA, 19 nt, Homo sapiens
  misc_RNA (1)...(19): siRNA sense strand
accacgagcugaccuuuga

SEQ ID NO: 2131570 - RNA, 19 nt, Homo sapiens
  misc_RNA (1)...(19): siRNA sense strand
guucauggccgaccucauc

SEQ ID NO: 2131571 - RNA, 19 nt, Homo sapiens
  misc_RNA (1)...(19): siRNA sense strand
ccaacugcaucuaccuuca

SEQ ID NO: 2131572 - RNA, 19 nt, Homo sapiens
  misc_RNA (1)...(19): siRNA sense strand
gcacagccggcucaucauc

SEQ ID NO: 2131573 - RNA, 19 nt, Homo sapiens
  misc_RNA (1)...(19): siRNA sense strand
ccggagaacuaugagaaug

SEQ ID NO: 2131574 - RNA, 19 nt, Homo sapiens
  misc_RNA (1)...(19): siRNA sense strand
ugaagccggagaacuauga

SEQ ID NO: 2131575 - RNA, 19 nt, Homo sapiens
  misc_RNA (1)...(19): siRNA sense strand
gccuucaccuucuacaaca

SEQ ID NO: 2131576 - RNA, 19 nt, Homo sapiens
  misc_RNA (1)...(19): siRNA sense strand
uggccgaccucaucaagca

SEQ ID NO: 2131577 - RNA, 19 nt, Homo sapiens
  misc_RNA (1)...(19): siRNA sense strand
gcaggacuuuuacuacuuc

SEQ ID NO: 2131578 - RNA, 19 nt, Homo sapiens
  misc_RNA (1)...(19): siRNA sense strand
caaccacgagcugaccuuu

SEQ ID NO: 2131579 - RNA, 19 nt, Homo sapiens
  misc_RNA (1)...(19): siRNA sense strand
ggacggaccccauccagau

SEQ ID NO: 2131580 - RNA, 19 nt, Homo sapiens
  misc_RNA (1)...(19): siRNA sense strand
gcugaagccggagaacuau

SEQ ID NO: 2131581 - RNA, 19 nt, Homo sapiens
  misc_RNA (1)...(19): siRNA sense strand
gaccaacugcaucuaccuu

SEQ ID NO: 2131582 - RNA, 19 nt, Homo sapiens
  misc_RNA (1)...(19): siRNA sense strand
ucaucaagcaggacuuuua

SEQ ID NO: 2131583 - RNA, 19 nt, Homo sapiens
  misc_RNA (1)...(19): siRNA sense strand
guacggcgacgugcugauc

SEQ ID NO: 2131584 - RNA, 19 nt, Homo sapiens
  misc_RNA (1)...(19): siRNA sense strand
ccacccaggccuucaccuu

SEQ ID NO: 2131585 - RNA, 19 nt, Homo sapiens
  misc_RNA (1)...(19): siRNA sense strand
gcaaccacgagcugaccuu

SEQ ID NO: 2131586 - RNA, 19 nt, Homo sapiens
  misc_RNA (1)...(19): siRNA sense strand
cgagcgaggugaagaaguu

SEQ ID NO: 2131587 - RNA, 19 nt, Homo sapiens
  misc_RNA (1)...(19): siRNA sense strand
ggagaacuaugagaaugug

SEQ ID NO: 2131588 - RNA, 19 nt, Homo sapiens
  misc_RNA (1)...(19): siRNA sense strand
ucaucgagguggacgagua

SEQ ID NO: 2131589 - RNA, 19 nt, Homo sapiens
  misc_RNA (1)...(19): siRNA sense strand
cagcacagccggcucauca

SEQ ID NO: 2131590 - RNA, 19 nt, Homo sapiens
  misc_RNA (1)...(19): siRNA sense strand
accacgagcugaccuuuga

SEQ ID NO: 2131591 - RNA, 19 nt, Homo sapiens
  misc_RNA (1)...(19): siRNA sense strand
guucauggccgaccucauc

SEQ ID NO: 2131592 - RNA, 19 nt, Homo sapiens
  misc_RNA (1)...(19): siRNA sense strand
ccaacugcaucuaccuuca

SEQ ID NO: 2131593 - RNA, 19 nt, Homo sapiens
  misc_RNA (1)...(19): siRNA sense strand
gcacagccggcucaucauc

SEQ ID NO: 2131594 - RNA, 19 nt, Homo sapiens
  misc_RNA (1)...(19): siRNA sense strand
ccggagaacuaugagaaug

SEQ ID NO: 2131595 - RNA, 19 nt, Homo sapiens
  misc_RNA (1)...(19): siRNA sense strand
ugaagccggagaacuauga

SEQ ID NO: 2131596 - RNA, 19 nt, Homo sapiens
  misc_RNA (1)...(19): siRNA sense strand
gccuucaccuucuacaaca

SEQ ID NO: 2131597 - RNA, 19 nt, Homo sapiens
  misc_RNA (1)...(19): siRNA sense strand
uggccgaccucaucaagca

SEQ ID NO: 2131598 - RNA, 19 nt, Homo sapiens
  misc_RNA (1)...(19): siRNA sense strand
gcaggacuuuuacuacuuc

SEQ ID NO: 2131599 - RNA, 19 nt, Homo sapiens
  misc_RNA (1)...(19): siRNA sense strand
caaccacgagcugaccuuu

SEQ ID NO: 2131600 - RNA, 19 nt, Homo sapiens
  misc_RNA (1)...(19): siRNA sense strand
ggacggaccccauccagau

SEQ ID NO: 2131601 - RNA, 19 nt, Homo sapiens
  misc_RNA (1)...(19): siRNA sense strand
gcugaagccggagaacuau

SEQ ID NO: 2131602 - RNA, 19 nt, Homo sapiens
  misc_RNA (1)...(19): siRNA sense strand
gaccaacugcaucuaccuu

SEQ ID NO: 2131603 - RNA, 19 nt, Homo sapiens
  misc_RNA (1)...(19): siRNA sense strand
ucaucaagcaggacuuuua

SEQ ID NO: 2131604 - RNA, 19 nt, Homo sapiens
  misc_RNA (1)...(19): siRNA sense strand
guacggcgacgugcugauc

SEQ ID NO: 2131605 - RNA, 19 nt, Homo sapiens
  misc_RNA (1)...(19): siRNA sense strand
ccacccaggccuucaccuu

SEQ ID NO: 2131606 - RNA, 19 nt, Homo sapiens
  misc_RNA (1)...(19): siRNA sense strand
gcaaccacgagcugaccuu

SEQ ID NO: 2131607 - RNA, 19 nt, Homo sapiens
  misc_RNA (1)...(19): siRNA sense strand
uaaggaagcucaagaaaug

SEQ ID NO: 2131608 - RNA, 19 nt, Homo sapiens
  misc_RNA (1)...(19): siRNA sense strand
gaagagaaccaacacagua

SEQ ID NO: 2131609 - RNA, 19 nt, Homo sapiens
  misc_RNA (1)...(19): siRNA sense strand
gagcagagguuagacaauu

SEQ ID NO: 2131610 - RNA, 19 nt, Homo sapiens
  misc_RNA (1)...(19): siRNA sense strand
gaacugaacagccaggaua

SEQ ID NO: 2131611 - RNA, 19 nt, Homo sapiens
  misc_RNA (1)...(19): siRNA sense strand
gcagagacauuccauaagu

SEQ ID NO: 2131612 - RNA, 19 nt, Homo sapiens
  misc_RNA (1)...(19): siRNA sense strand
ggaaaucccuguucaagag

SEQ ID NO: 2131613 - RNA, 19 nt, Homo sapiens
  misc_RNA (1)...(19): siRNA sense strand
gaaaccaucuuugaacuug

SEQ ID NO: 2131614 - RNA, 19 nt, Homo sapiens
  misc_RNA (1)...(19): siRNA sense strand
gaaaugaugccaaucgauu

SEQ ID NO: 2131615 - RNA, 19 nt, Homo sapiens
  misc_RNA (1)...(19): siRNA sense strand
acagaaggcuaucagaaua

SEQ ID NO: 2131616 - RNA, 19 nt, Homo sapiens
  misc_RNA (1)...(19): siRNA sense strand
guaacuccauggacaauuu

SEQ ID NO: 2131617 - RNA, 19 nt, Homo sapiens
  misc_RNA (1)...(19): siRNA sense strand
ugacggcgaucuacaagua

SEQ ID NO: 2131618 - RNA, 19 nt, Homo sapiens
  misc_RNA (1)...(19): siRNA sense strand
gcagagacuuuggcuagua

SEQ ID NO: 2131619 - RNA, 19 nt, Homo sapiens
  misc_RNA (1)...(19): siRNA sense strand
uggcagagcuguauucuau

SEQ ID NO: 2131620 - RNA, 19 nt, Homo sapiens
  misc_RNA (1)...(19): siRNA sense strand
uaaagugucugcaauaagu

SEQ ID NO: 2131621 - RNA, 19 nt, Homo sapiens
  misc_RNA (1)...(19): siRNA sense strand
gaaaugaacugcgagacau

SEQ ID NO: 2131622 - RNA, 19 nt, Homo sapiens
  misc_RNA (1)...(19): siRNA sense strand
ggaagaaucugcggaaugg

SEQ ID NO: 2131623 - RNA, 19 nt, Homo sapiens
  misc_RNA (1)...(19): siRNA sense strand
gaggaacucugacuucuuc

SEQ ID NO: 2131624 - RNA, 19 nt, Homo sapiens
  misc_RNA (1)...(19): siRNA sense strand
gaucagaccuggaugaaaa

SEQ ID NO: 2131625 - RNA, 19 nt, Homo sapiens
  misc_RNA (1)...(19): siRNA sense strand
ggagacaaaucugauauuc

SEQ ID NO: 2131626 - RNA, 19 nt, Homo sapiens
  misc_RNA (1)...(19): siRNA sense strand
cagcagcauuuaagcaaua

SEQ ID NO: 2131627 - RNA, 19 nt, Homo sapiens
  misc_RNA (1)...(19): siRNA sense strand
gauaagagaccaaacuaug

SEQ ID NO: 2131628 - RNA, 19 nt, Homo sapiens
  misc_RNA (1)...(19): siRNA sense strand
ggaaugggacugaguagaa

SEQ ID NO: 2131629 - RNA, 19 nt, Homo sapiens
  misc_RNA (1)...(19): siRNA sense strand
ccauaacucuggagacaaa

SEQ ID NO: 2131630 - RNA, 19 nt, Homo sapiens
  misc_RNA (1)...(19): siRNA sense strand
gaaguggugucagaagaaa

SEQ ID NO: 2131631 - RNA, 19 nt, Homo sapiens
  misc_RNA (1)...(19): siRNA sense strand
ugcaagagcuagcugauuu

SEQ ID NO: 2131632 - RNA, 19 nt, Homo sapiens
  misc_RNA (1)...(19): siRNA sense strand
agaaaggagugacaugaaa

SEQ ID NO: 2131633 - RNA, 19 nt, Homo sapiens
  misc_RNA (1)...(19): siRNA sense strand
gaauauggaggaucaaaga

SEQ ID NO: 2131634 - RNA, 19 nt, Homo sapiens
  misc_RNA (1)...(19): siRNA sense strand
cgacauggaaagagaaaua

SEQ ID NO: 2131635 - RNA, 19 nt, Homo sapiens
  misc_RNA (1)...(19): siRNA sense strand
gaaaacagcucuucagcau

SEQ ID NO: 2131636 - RNA, 19 nt, Homo sapiens
  misc_RNA (1)...(19): siRNA sense strand
gagcagugaugaccuuuua

SEQ ID NO: 2131637 - RNA, 19 nt, Homo sapiens
  misc_RNA (1)...(19): siRNA sense strand
gaaagugucggcaucaaau

SEQ ID NO: 2131638 - RNA, 19 nt, Homo sapiens
  misc_RNA (1)...(19): siRNA sense strand
gaaugugacguucguauga

SEQ ID NO: 2131639 - RNA, 19 nt, Homo sapiens
  misc_RNA (1)...(19): siRNA sense strand
aaacagcucuucagcaucu

SEQ ID NO: 2131640 - RNA, 19 nt, Homo sapiens
  misc_RNA (1)...(19): siRNA sense strand
gaacagccaggauaagaga

SEQ ID NO: 2131641 - RNA, 19 nt, Homo sapiens
  misc_RNA (1)...(19): siRNA sense strand
uaaagacacuccacagaag

SEQ ID NO: 2131642 - RNA, 19 nt, Homo sapiens
  misc_RNA (1)...(19): siRNA sense strand
ggaaagagaaauaaagaca

SEQ ID NO: 2131643 - RNA, 19 nt, Homo sapiens
  misc_RNA (1)...(19): siRNA sense strand
guaaaugcaucacgaagag

SEQ ID NO: 2131644 - RNA, 19 nt, Homo sapiens
  misc_RNA (1)...(19): siRNA sense strand
gaacugcuacagaauguga

SEQ ID NO: 2131645 - RNA, 19 nt, Homo sapiens
  misc_RNA (1)...(19): siRNA sense strand
ucagggagcuaaugacaug

SEQ ID NO: 2131646 - RNA, 19 nt, Homo sapiens
  misc_RNA (1)...(19): siRNA sense strand
gcaagagcuagcugauuua

SEQ ID NO: 2131647 - RNA, 19 nt, Homo sapiens
  misc_RNA (1)...(19): siRNA sense strand
ggaccaaucucaacaucca

SEQ ID NO: 2131648 - RNA, 19 nt, Homo sapiens
  misc_RNA (1)...(19): siRNA sense strand
ccaagaagaagcuaagaaa

SEQ ID NO: 2131649 - RNA, 19 nt, Homo sapiens
  misc_RNA (1)...(19): siRNA sense strand
gaaaguggcagagcuguau

SEQ ID NO: 2131650 - RNA, 19 nt, Homo sapiens
  misc_RNA (1)...(19): siRNA sense strand
ggagugacaugaaagaaac

SEQ ID NO: 2131651 - RNA, 19 nt, Homo sapiens
  misc_RNA (1)...(19): siRNA sense strand
ccuaaagugucugcaauaa

SEQ ID NO: 2131652 - RNA, 19 nt, Homo sapiens
  misc_RNA (1)...(19): siRNA sense strand
cagagaauauggaggauca

SEQ ID NO: 2131653 - RNA, 19 nt, Homo sapiens
  misc_RNA (1)...(19): siRNA sense strand
gagcccaaguccuaugaaa

SEQ ID NO: 2131654 - RNA, 19 nt, Homo sapiens
  misc_RNA (1)...(19): siRNA sense strand
agaagaagcuaagaaacaa

SEQ ID NO: 2131655 - RNA, 19 nt, Homo sapiens
  misc_RNA (1)...(19): siRNA sense strand
caagagcagugaugaccuu

SEQ ID NO: 2131656 - RNA, 19 nt, Homo sapiens
  misc_RNA (1)...(19): siRNA sense strand
ugacagugcaucucaagua

SEQ ID NO: 2131657 - RNA, 19 nt, Homo sapiens
  misc_RNA (1)...(19): siRNA sense strand
gagcuguauucuauccaua

SEQ ID NO: 2131658 - RNA, 19 nt, Homo sapiens
  misc_RNA (1)...(19): siRNA sense strand
aaagaacgcagucaccaua

SEQ ID NO: 2131659 - RNA, 19 nt, Homo sapiens
  misc_RNA (1)...(19): siRNA sense strand
gagcaucacauuucuuaug

SEQ ID NO: 2131660 - RNA, 19 nt, Homo sapiens
  misc_RNA (1)...(19): siRNA sense strand
gcagagcgauaaguuggaa

SEQ ID NO: 2131661 - RNA, 19 nt, Homo sapiens
  misc_RNA (1)...(19): siRNA sense strand
cccaggaacugaauaguga

SEQ ID NO: 2131662 - RNA, 19 nt, Homo sapiens
  misc_RNA (1)...(19): siRNA sense strand
aggcucagcuggagaauga

SEQ ID NO: 2131663 - RNA, 19 nt, Homo sapiens
  misc_RNA (1)...(19): siRNA sense strand
ggaacuucaugcuggcuuu

SEQ ID NO: 2131664 - RNA, 19 nt, Homo sapiens
  misc_RNA (1)...(19): siRNA sense strand
gaucuagagaauacaguua

SEQ ID NO: 2131665 - RNA, 19 nt, Homo sapiens
  misc_RNA (1)...(19): siRNA sense strand
cuaaugguguuaaaggaaa

SEQ ID NO: 2131666 - RNA, 19 nt, Homo sapiens
  misc_RNA (1)...(19): siRNA sense strand
gcgcugggauuugcuugua

SEQ ID NO: 2131667 - RNA, 19 nt, Homo sapiens
  misc_RNA (1)...(19): siRNA sense strand
gaagcuaagaaacaaauug

SEQ ID NO: 2131668 - RNA, 19 nt, Homo sapiens
  misc_RNA (1)...(19): siRNA sense strand
ccaaagacguagaaauuuu

SEQ ID NO: 2131669 - RNA, 19 nt, Homo sapiens
  misc_RNA (1)...(19): siRNA sense strand
gaacguacccgauuaaacc

SEQ ID NO: 2131670 - RNA, 19 nt, Homo sapiens
  misc_RNA (1)...(19): siRNA sense strand
gcacuucuacagguaauaa

SEQ ID NO: 2131671 - RNA, 19 nt, Homo sapiens
  misc_RNA (1)...(19): siRNA sense strand
ggcagaacgugaugcugua

SEQ ID NO: 2131672 - RNA, 19 nt, Homo sapiens
  misc_RNA (1)...(19): siRNA sense strand
gaacaacaucgugcuguga

SEQ ID NO: 2131673 - RNA, 19 nt, Homo sapiens
  misc_RNA (1)...(19): siRNA sense strand
aaccaaagacguagaaauu

SEQ ID NO: 2131674 - RNA, 19 nt, Homo sapiens
  misc_RNA (1)...(19): siRNA sense strand
gcagcaucauugucaaaga

SEQ ID NO: 2131675 - RNA, 19 nt, Homo sapiens
  misc_RNA (1)...(19): siRNA sense strand
gaacgggagcagcuucuug

SEQ ID NO: 2131676 - RNA, 19 nt, Homo sapiens
  misc_RNA (1)...(19): siRNA sense strand
uggaggaucucuugaguca

SEQ ID NO: 2131677 - RNA, 19 nt, Homo sapiens
  misc_RNA (1)...(19): siRNA sense strand
agagaaagauuacgugaac

SEQ ID NO: 2131678 - RNA, 19 nt, Homo sapiens
  misc_RNA (1)...(19): siRNA sense strand
caccauauggagcgaauua

SEQ ID NO: 2131679 - RNA, 19 nt, Homo sapiens
  misc_RNA (1)...(19): siRNA sense strand
ugaaugccguugagagaga

SEQ ID NO: 2131680 - RNA, 19 nt, Homo sapiens
  misc_RNA (1)...(19): siRNA sense strand
ggaauuagagcaacguuac

SEQ ID NO: 2131681 - RNA, 19 nt, Homo sapiens
  misc_RNA (1)...(19): siRNA sense strand
aaacagaaggcuaucagaa

SEQ ID NO: 2131682 - RNA, 19 nt, Homo sapiens
  misc_RNA (1)...(19): siRNA sense strand
caagagcaucuguuaagaa

SEQ ID NO: 2131683 - RNA, 19 nt, Homo sapiens
  misc_RNA (1)...(19): siRNA sense strand
gcugggauuugcuuguaaa

SEQ ID NO: 2131684 - RNA, 19 nt, Homo sapiens
  misc_RNA (1)...(19): siRNA sense strand
uggcagaacaagacaauaa

SEQ ID NO: 2131685 - RNA, 19 nt, Homo sapiens
  misc_RNA (1)...(19): siRNA sense strand
ccacauuccauaucaagaa

SEQ ID NO: 2131686 - RNA, 19 nt, Homo sapiens
  misc_RNA (1)...(19): siRNA sense strand
ucaagagcaucuguuaaga

SEQ ID NO: 2131687 - RNA, 19 nt, Homo sapiens
  misc_RNA (1)...(19): siRNA sense strand
gaaugggacugaguagaag

SEQ ID NO: 2131688 - RNA, 19 nt, Homo sapiens
  misc_RNA (1)...(19): siRNA sense strand
caaaagaauuggaggaaau

SEQ ID NO: 2131689 - RNA, 19 nt, Homo sapiens
  misc_RNA (1)...(19): siRNA sense strand
gaagaagcuaagaaacaaa

SEQ ID NO: 2131690 - RNA, 19 nt, Homo sapiens
  misc_RNA (1)...(19): siRNA sense strand
caauaaggaagcucaagaa

SEQ ID NO: 2131691 - RNA, 19 nt, Homo sapiens
  misc_RNA (1)...(19): siRNA sense strand
agagccaacuccuacagua

SEQ ID NO: 2131692 - RNA, 19 nt, Homo sapiens
  misc_RNA (1)...(19): siRNA sense strand
gagccaacuccuacaguaa

SEQ ID NO: 2131693 - RNA, 19 nt, Homo sapiens
  misc_RNA (1)...(19): siRNA sense strand
ggguaacggugacuaaugg

SEQ ID NO: 2131694 - RNA, 19 nt, Homo sapiens
  misc_RNA (1)...(19): siRNA sense strand
gaagaggcagcccagaaug

SEQ ID NO: 2131695 - RNA, 19 nt, Homo sapiens
  misc_RNA (1)...(19): siRNA sense strand
ggaacgccuugcugaagug

SEQ ID NO: 2131696 - RNA, 19 nt, Homo sapiens
  misc_RNA (1)...(19): siRNA sense strand
cauauggagcgaauuauug

SEQ ID NO: 2131697 - RNA, 19 nt, Homo sapiens
  misc_RNA (1)...(19): siRNA sense strand
gucgacagauugaauacuu

SEQ ID NO: 2131698 - RNA, 19 nt, Homo sapiens
  misc_RNA (1)...(19): siRNA sense strand
gacuaaugguguuaaagga

SEQ ID NO: 2131699 - RNA, 19 nt, Homo sapiens
  misc_RNA (1)...(19): siRNA sense strand
guuggagccuggauuugaa

SEQ ID NO: 2131700 - RNA, 19 nt, Homo sapiens
  misc_RNA (1)...(19): siRNA sense strand
gaagaaaacagaaggcuau

SEQ ID NO: 2131701 - RNA, 19 nt, Homo sapiens
  misc_RNA (1)...(19): siRNA sense strand
uaaagucacgcaagcaaga

SEQ ID NO: 2131702 - RNA, 19 nt, Homo sapiens
  misc_RNA (1)...(19): siRNA sense strand
gaaaggagugacaugaaag

SEQ ID NO: 2131703 - RNA, 19 nt, Homo sapiens
  misc_RNA (1)...(19): siRNA sense strand
ggaugccauugcuaaggua

SEQ ID NO: 2131704 - RNA, 19 nt, Homo sapiens
  misc_RNA (1)...(19): siRNA sense strand
aaaugaugccaaucgauua

SEQ ID NO: 2131705 - RNA, 19 nt, Homo sapiens
  misc_RNA (1)...(19): siRNA sense strand
ggauacaccagauggaaga

SEQ ID NO: 2131706 - RNA, 19 nt, Homo sapiens
  misc_RNA (1)...(19): siRNA sense strand
gcacagcuucuucaaccaa

SEQ ID NO: 2131707 - RNA, 19 nt, Homo sapiens
  misc_RNA (1)...(19): siRNA sense strand
gagaagagcuugugaaaga

SEQ ID NO: 2131708 - RNA, 19 nt, Homo sapiens
  misc_RNA (1)...(19): siRNA sense strand
gagaggaaguaacuaauaa

SEQ ID NO: 2131709 - RNA, 19 nt, Homo sapiens
  misc_RNA (1)...(19): siRNA sense strand
gaauagaaacugcuuauga

SEQ ID NO: 2131710 - RNA, 19 nt, Homo sapiens
  misc_RNA (1)...(19): siRNA sense strand
guacagcguuuaacauauu

SEQ ID NO: 2131711 - RNA, 19 nt, Homo sapiens
  misc_RNA (1)...(19): siRNA sense strand
caacauagaaggaaauuug

SEQ ID NO: 2131712 - RNA, 19 nt, Homo sapiens
  misc_RNA (1)...(19): siRNA sense strand
gaacaguuauugauguaga

SEQ ID NO: 2131713 - RNA, 19 nt, Homo sapiens
  misc_RNA (1)...(19): siRNA sense strand
gagaagccauguccuuaaa

SEQ ID NO: 2131714 - RNA, 19 nt, Homo sapiens
  misc_RNA (1)...(19): siRNA sense strand
caaaucagauggcagcaaa

SEQ ID NO: 2131715 - RNA, 19 nt, Homo sapiens
  misc_RNA (1)...(19): siRNA sense strand
gcagaugaauugcaagaug

SEQ ID NO: 2131716 - RNA, 19 nt, Homo sapiens
  misc_RNA (1)...(19): siRNA sense strand
gaaaccagcagaaaugauu

SEQ ID NO: 2131717 - RNA, 19 nt, Homo sapiens
  misc_RNA (1)...(19): siRNA sense strand
ugaaagagcuggagaucug

SEQ ID NO: 2131718 - RNA, 19 nt, Homo sapiens
  misc_RNA (1)...(19): siRNA sense strand
gaugcuaacuccuauauag

SEQ ID NO: 2131719 - RNA, 19 nt, Homo sapiens
  misc_RNA (1)...(19): siRNA sense strand
gaagauuacaguugaguuu

SEQ ID NO: 2131720 - RNA, 19 nt, Homo sapiens
  misc_RNA (1)...(19): siRNA sense strand
aaagaaggccauucaguua

SEQ ID NO: 2131721 - RNA, 19 nt, Homo sapiens
  misc_RNA (1)...(19): siRNA sense strand
caagauaugaagcauguua

SEQ ID NO: 2131722 - RNA, 19 nt, Homo sapiens
  misc_RNA (1)...(19): siRNA sense strand
gaaauauacuagaccaaca

SEQ ID NO: 2131723 - RNA, 19 nt, Homo sapiens
  misc_RNA (1)...(19): siRNA sense strand
ggagagcgccauauauuug

SEQ ID NO: 2131724 - RNA, 19 nt, Homo sapiens
  misc_RNA (1)...(19): siRNA sense strand
ggagacagacguacaaaga

SEQ ID NO: 2131725 - RNA, 19 nt, Homo sapiens
  misc_RNA (1)...(19): siRNA sense strand
cagauugccuacgcuauua

SEQ ID NO: 2131726 - RNA, 19 nt, Homo sapiens
  misc_RNA (1)...(19): siRNA sense strand
gaaugaaugguaugacuuu

SEQ ID NO: 2131727 - RNA, 19 nt, Homo sapiens
  misc_RNA (1)...(19): siRNA sense strand
agaaggccauucaguuaua

SEQ ID NO: 2131728 - RNA, 19 nt, Homo sapiens
  misc_RNA (1)...(19): siRNA sense strand
uaucguaaaucgacagaaa

SEQ ID NO: 2131729 - RNA, 19 nt, Homo sapiens
  misc_RNA (1)...(19): siRNA sense strand
gagaauuacccuuacuuaa

SEQ ID NO: 2131730 - RNA, 19 nt, Homo sapiens
  misc_RNA (1)...(19): siRNA sense strand
ggagacuggucaagagaaa

SEQ ID NO: 2131731 - RNA, 19 nt, Homo sapiens
  misc_RNA (1)...(19): siRNA sense strand
cagaguagaugauauugau

SEQ ID NO: 2131732 - RNA, 19 nt, Homo sapiens
  misc_RNA (1)...(19): siRNA sense strand
gcagaauccugaagacaca

SEQ ID NO: 2131733 - RNA, 19 nt, Homo sapiens
  misc_RNA (1)...(19): siRNA sense strand
ggcaagauaugaagcaugu

SEQ ID NO: 2131734 - RNA, 19 nt, Homo sapiens
  misc_RNA (1)...(19): siRNA sense strand
caacaaaaccuacagagua

SEQ ID NO: 2131735 - RNA, 19 nt, Homo sapiens
  misc_RNA (1)...(19): siRNA sense strand
gagcacaaccaaagacaaa

SEQ ID NO: 2131736 - RNA, 19 nt, Homo sapiens
  misc_RNA (1)...(19): siRNA sense strand
gagaaggauugguggaguu

SEQ ID NO: 2131737 - RNA, 19 nt, Homo sapiens
  misc_RNA (1)...(19): siRNA sense strand
cagcagaaaugauugaagu

SEQ ID NO: 2131738 - RNA, 19 nt, Homo sapiens
  misc_RNA (1)...(19): siRNA sense strand
cuacaaaccagacauagaa

SEQ ID NO: 2131739 - RNA, 19 nt, Homo sapiens
  misc_RNA (1)...(19): siRNA sense strand
cgagaggaaguaacuaaua

SEQ ID NO: 2131740 - RNA, 19 nt, Homo sapiens
  misc_RNA (1)...(19): siRNA sense strand
ucaccuauauagacuacua

SEQ ID NO: 2131741 - RNA, 19 nt, Homo sapiens
  misc_RNA (1)...(19): siRNA sense strand
gauguagaguugacuagga

SEQ ID NO: 2131742 - RNA, 19 nt, Homo sapiens
  misc_RNA (1)...(19): siRNA sense strand
auacaacguugacuacaaa

SEQ ID NO: 2131743 - RNA, 19 nt, Homo sapiens
  misc_RNA (1)...(19): siRNA sense strand
caauuucacucuagcuuuc

SEQ ID NO: 2131744 - RNA, 19 nt, Homo sapiens
  misc_RNA (1)...(19): siRNA sense strand
cuacauaguuggcucauac

SEQ ID NO: 2131745 - RNA, 19 nt, Homo sapiens
  misc_RNA (1)...(19): siRNA sense strand
aaacugcuccgaauagaaa

SEQ ID NO: 2131746 - RNA, 19 nt, Homo sapiens
  misc_RNA (1)...(19): siRNA sense strand
ccacaaacugcuccgaaua

SEQ ID NO: 2131747 - RNA, 19 nt, Homo sapiens
  misc_RNA (1)...(19): siRNA sense strand
aaagaugucgaccuacuua

SEQ ID NO: 2131748 - RNA, 19 nt, Homo sapiens
  misc_RNA (1)...(19): siRNA sense strand
gaggaagucccagugguua

SEQ ID NO: 2131749 - RNA, 19 nt, Homo sapiens
  misc_RNA (1)...(19): siRNA sense strand
gaugccacauucuguuauu

SEQ ID NO: 2131750 - RNA, 19 nt, Homo sapiens
  misc_RNA (1)...(19): siRNA sense strand
cagaaaugauugaaguaga

SEQ ID NO: 2131751 - RNA, 19 nt, Homo sapiens
  misc_RNA (1)...(19): siRNA sense strand
caaggagacuggucaagag

SEQ ID NO: 2131752 - RNA, 19 nt, Homo sapiens
  misc_RNA (1)...(19): siRNA sense strand
uaaagccaauucacaagga

SEQ ID NO: 2131753 - RNA, 19 nt, Homo sapiens
  misc_RNA (1)...(19): siRNA sense strand
ucaguggguugcauauaaa

SEQ ID NO: 2131754 - RNA, 19 nt, Homo sapiens
  misc_RNA (1)...(19): siRNA sense strand
aaucaucgaugccacauuc

SEQ ID NO: 2131755 - RNA, 19 nt, Homo sapiens
  misc_RNA (1)...(19): siRNA sense strand
uaacaaagugguacucuca

SEQ ID NO: 2131756 - RNA, 19 nt, Homo sapiens
  misc_RNA (1)...(19): siRNA sense strand
ggaagcagaauccugaaga

SEQ ID NO: 2131757 - RNA, 19 nt, Homo sapiens
  misc_RNA (1)...(19): siRNA sense strand
aaguaccaaugcugaauua

SEQ ID NO: 2131758 - RNA, 19 nt, Homo sapiens
  misc_RNA (1)...(19): siRNA sense strand
caguacagcguuuaacaua

SEQ ID NO: 2131759 - RNA, 19 nt, Homo sapiens
  misc_RNA (1)...(19): siRNA sense strand
uaccaaugcugaauuaaca

SEQ ID NO: 2131760 - RNA, 19 nt, Homo sapiens
  misc_RNA (1)...(19): siRNA sense strand
ggaaaucuggcuugguuau

SEQ ID NO: 2131761 - RNA, 19 nt, Homo sapiens
  misc_RNA (1)...(19): siRNA sense strand
gaagguggagacagacgua

SEQ ID NO: 2131762 - RNA, 19 nt, Homo sapiens
  misc_RNA (1)...(19): siRNA sense strand
aaagauaccuauguaccaa

SEQ ID NO: 2131763 - RNA, 19 nt, Homo sapiens
  misc_RNA (1)...(19): siRNA sense strand
cagagaagccauguccuua

SEQ ID NO: 2131764 - RNA, 19 nt, Homo sapiens
  misc_RNA (1)...(19): siRNA sense strand
gugaacaccaggcaagaua

SEQ ID NO: 2131765 - RNA, 19 nt, Homo sapiens
  misc_RNA (1)...(19): siRNA sense strand
guaaaucgacagaaaucaa

SEQ ID NO: 2131766 - RNA, 19 nt, Homo sapiens
  misc_RNA (1)...(19): siRNA sense strand
cucaguggguugcauauaa

SEQ ID NO: 2131767 - RNA, 19 nt, Homo sapiens
  misc_RNA (1)...(19): siRNA sense strand
caggaacaguuauugaugu

SEQ ID NO: 2131768 - RNA, 19 nt, Homo sapiens
  misc_RNA (1)...(19): siRNA sense strand
gaacaccaggcaagauaug

SEQ ID NO: 2131769 - RNA, 19 nt, Homo sapiens
  misc_RNA (1)...(19): siRNA sense strand
gaguagaugauauugauug

SEQ ID NO: 2131770 - RNA, 19 nt, Homo sapiens
  misc_RNA (1)...(19): siRNA sense strand
ucgcaacuauuauaccaaa

SEQ ID NO: 2131771 - RNA, 19 nt, Homo sapiens
  misc_RNA (1)...(19): siRNA sense strand
gcagcaaaaucaccuauau

SEQ ID NO: 2131772 - RNA, 19 nt, Homo sapiens
  misc_RNA (1)...(19): siRNA sense strand
gugaagaaacgaauaaaca

SEQ ID NO: 2131773 - RNA, 19 nt, Homo sapiens
  misc_RNA (1)...(19): siRNA sense strand
ggaggaagucccagugguu

SEQ ID NO: 2131774 - RNA, 19 nt, Homo sapiens
  misc_RNA (1)...(19): siRNA sense strand
agacauagaagauggaaau

SEQ ID NO: 2131775 - RNA, 19 nt, Homo sapiens
  misc_RNA (1)...(19): siRNA sense strand
ugacuaggaaugaauggua

SEQ ID NO: 2131776 - RNA, 19 nt, Homo sapiens
  misc_RNA (1)...(19): siRNA sense strand
caaggaccaucgucaccaa

SEQ ID NO: 2131777 - RNA, 19 nt, Homo sapiens
  misc_RNA (1)...(19): siRNA sense strand
gaugacaaacguagauaug

SEQ ID NO: 2131778 - RNA, 19 nt, Homo sapiens
  misc_RNA (1)...(19): siRNA sense strand
auaguuggcucauacucua

SEQ ID NO: 2131779 - RNA, 19 nt, Homo sapiens
  misc_RNA (1)...(19): siRNA sense strand
cagauacaguacagcguuu

SEQ ID NO: 2131780 - RNA, 19 nt, Homo sapiens
  misc_RNA (1)...(19): siRNA sense strand
cuugucaacucgucucuuu

SEQ ID NO: 2131781 - RNA, 19 nt, Homo sapiens
  misc_RNA (1)...(19): siRNA sense strand
cuuucaagcugcuggauuu

SEQ ID NO: 2131782 - RNA, 19 nt, Homo sapiens
  misc_RNA (1)...(19): siRNA sense strand
ccaucucuccuaacaauuu

SEQ ID NO: 2131783 - RNA, 19 nt, Homo sapiens
  misc_RNA (1)...(19): siRNA sense strand
gagacagacguacaaagaa

SEQ ID NO: 2131784 - RNA, 19 nt, Homo sapiens
  misc_RNA (1)...(19): siRNA sense strand
ugaaguagauggugaugcu

SEQ ID NO: 2131785 - RNA, 19 nt, Homo sapiens
  misc_RNA (1)...(19): siRNA sense strand
agagaauuacccuuacuua

SEQ ID NO: 2131786 - RNA, 19 nt, Homo sapiens
  misc_RNA (1)...(19): siRNA sense strand
agacuggucaagagaaaua

SEQ ID NO: 2131787 - RNA, 19 nt, Homo sapiens
  misc_RNA (1)...(19): siRNA sense strand
gagagcgccauauauuuga

SEQ ID NO: 2131788 - RNA, 19 nt, Homo sapiens
  misc_RNA (1)...(19): siRNA sense strand
ggaaugaaugguaugacuu

SEQ ID NO: 2131789 - RNA, 19 nt, Homo sapiens
  misc_RNA (1)...(19): siRNA sense strand
gacuaggaaugaaugguau

SEQ ID NO: 2131790 - RNA, 19 nt, Homo sapiens
  misc_RNA (1)...(19): siRNA sense strand
aaccaucucuccuaacaau

SEQ ID NO: 2131791 - RNA, 19 nt, Homo sapiens
  misc_RNA (1)...(19): siRNA sense strand
cuugaaagcugcccuggau

SEQ ID NO: 2131792 - RNA, 19 nt, Homo sapiens
  misc_RNA (1)...(19): siRNA sense strand
gaagcauguuaaagacuca

SEQ ID NO: 2131793 - RNA, 19 nt, Homo sapiens
  misc_RNA (1)...(19): siRNA sense strand
agaugggaaugucauguuu

SEQ ID NO: 2131794 - RNA, 19 nt, Homo sapiens
  misc_RNA (1)...(19): siRNA sense strand
ugacuacaaaccagacaua

SEQ ID NO: 2131795 - RNA, 19 nt, Homo sapiens
  misc_RNA (1)...(19): siRNA sense strand
uaugaaaccagcagaaaug

SEQ ID NO: 2131796 - RNA, 19 nt, Homo sapiens
  misc_RNA (1)...(19): siRNA sense strand
caggagcagucacagagaa

SEQ ID NO: 2131797 - RNA, 19 nt, Homo sapiens
  misc_RNA (1)...(19): siRNA sense strand
gguuaaagccaauucacaa

SEQ ID NO: 2131798 - RNA, 19 nt, Homo sapiens
  misc_RNA (1)...(19): siRNA sense strand
gaagcagaauccugaagac

SEQ ID NO: 2131799 - RNA, 19 nt, Homo sapiens
  misc_RNA (1)...(19): siRNA sense strand
uuggaaaucuggcuugguu

SEQ ID NO: 2131800 - RNA, 19 nt, Homo sapiens
  misc_RNA (1)...(19): siRNA sense strand
ccagauugccuacgcuauu

SEQ ID NO: 2131801 - RNA, 19 nt, Homo sapiens
  misc_RNA (1)...(19): siRNA sense strand
ggucgcaacuauuauacca

SEQ ID NO: 2131802 - RNA, 19 nt, Homo sapiens
  misc_RNA (1)...(19): siRNA sense strand
gcaguccauucaccaggaa

SEQ ID NO: 2131803 - RNA, 19 nt, Homo sapiens
  misc_RNA (1)...(19): siRNA sense strand
aggaacaguuauugaugua

SEQ ID NO: 2131804 - RNA, 19 nt, Homo sapiens
  misc_RNA (1)...(19): siRNA sense strand
ggaccaucgucaccaagau

SEQ ID NO: 2131805 - RNA, 19 nt, Homo sapiens
  misc_RNA (1)...(19): siRNA sense strand
gcagaaaugauugaaguag

SEQ ID NO: 2131806 - RNA, 19 nt, Homo sapiens
  misc_RNA (1)...(19): siRNA sense strand
aauacaacguugacuacaa

SEQ ID NO: 2131807 - RNA, 19 nt, Homo sapiens
  misc_RNA (1)...(19): siRNA sense strand
gaagaggacuuguaugaau

SEQ ID NO: 2131808 - RNA, 19 nt, Homo sapiens
  misc_RNA (1)...(19): siRNA sense strand
ccacugggccuauguaaua

SEQ ID NO: 2131809 - RNA, 19 nt, Homo sapiens
  misc_RNA (1)...(19): siRNA sense strand
gaggaacucuuaccuggaa

SEQ ID NO: 2131810 - RNA, 19 nt, Homo sapiens
  misc_RNA (1)...(19): siRNA sense strand
ccauuaagcugaugaacau

SEQ ID NO: 2131811 - RNA, 19 nt, Homo sapiens
  misc_RNA (1)...(19): siRNA sense strand
cagaggauguggacuguga

SEQ ID NO: 2131812 - RNA, 19 nt, Homo sapiens
  misc_RNA (1)...(19): siRNA sense strand
aagaggacuuguaugaaua

SEQ ID NO: 2131813 - RNA, 19 nt, Homo sapiens
  misc_RNA (1)...(19): siRNA sense strand
caauagcucuaccucagaa

SEQ ID NO: 2131814 - RNA, 19 nt, Homo sapiens
  misc_RNA (1)...(19): siRNA sense strand
ccaucugucuggagaagua

SEQ ID NO: 2131815 - RNA, 19 nt, Homo sapiens
  misc_RNA (1)...(19): siRNA sense strand
cuacugcagucaucuuuga

SEQ ID NO: 2131816 - RNA, 19 nt, Homo sapiens
  misc_RNA (1)...(19): siRNA sense strand
gagaucaccuacacaccuu

SEQ ID NO: 2131817 - RNA, 19 nt, Homo sapiens
  misc_RNA (1)...(19): siRNA sense strand
ggacagauggggugaaaua

SEQ ID NO: 2131818 - RNA, 19 nt, Homo sapiens
  misc_RNA (1)...(19): siRNA sense strand
ucacuucugucauccuauu

SEQ ID NO: 2131819 - RNA, 19 nt, Homo sapiens
  misc_RNA (1)...(19): siRNA sense strand
acaacccacugaauacuuu

SEQ ID NO: 2131820 - RNA, 19 nt, Homo sapiens
  misc_RNA (1)...(19): siRNA sense strand
guaauaacaaugacgaaga

SEQ ID NO: 2131821 - RNA, 19 nt, Homo sapiens
  misc_RNA (1)...(19): siRNA sense strand
ggcugcagaucuuagguua

SEQ ID NO: 2131822 - RNA, 19 nt, Homo sapiens
  misc_RNA (1)...(19): siRNA sense strand
gaaauugggaacuguaugg

SEQ ID NO: 2131823 - RNA, 19 nt, Homo sapiens
  misc_RNA (1)...(19): siRNA sense strand
ucaagaggccgguggugua

SEQ ID NO: 2131824 - RNA, 19 nt, Homo sapiens
  misc_RNA (1)...(19): siRNA sense strand
gcagaucuuagguuaggua

SEQ ID NO: 2131825 - RNA, 19 nt, Homo sapiens
  misc_RNA (1)...(19): siRNA sense strand
gauggaaaccagaaaguuc

SEQ ID NO: 2131826 - RNA, 19 nt, Homo sapiens
  misc_RNA (1)...(19): siRNA sense strand
gaagggugcagaugccauu

SEQ ID NO: 2131827 - RNA, 19 nt, Homo sapiens
  misc_RNA (1)...(19): siRNA sense strand
ugacgaagaggacuuguau

SEQ ID NO: 2131828 - RNA, 19 nt, Homo sapiens
  misc_RNA (1)...(19): siRNA sense strand
gcacaacaucauagaacaa

SEQ ID NO: 2131829 - RNA, 19 nt, Homo sapiens
  misc_RNA (1)...(19): siRNA sense strand
gcagucagaauuccaugaa

SEQ ID NO: 2131830 - RNA, 19 nt, Homo sapiens
  misc_RNA (1)...(19): siRNA sense strand
uaauaacaaugacgaagag

SEQ ID NO: 2131831 - RNA, 19 nt, Homo sapiens
  misc_RNA (1)...(19): siRNA sense strand
guucacuucugucauccua

SEQ ID NO: 2131832 - RNA, 19 nt, Homo sapiens
  misc_RNA (1)...(19): siRNA sense strand
gagaagauggaaaccagaa

SEQ ID NO: 2131833 - RNA, 19 nt, Homo sapiens
  misc_RNA (1)...(19): siRNA sense strand
gggccuauguaauaacaau

SEQ ID NO: 2131834 - RNA, 19 nt, Homo sapiens
  misc_RNA (1)...(19): siRNA sense strand
cagcuugcuucucccagua

SEQ ID NO: 2131835 - RNA, 19 nt, Homo sapiens
  misc_RNA (1)...(19): siRNA sense strand
gagaggagcugcgggucau

SEQ ID NO: 2131836 - RNA, 19 nt, Homo sapiens
  misc_RNA (1)...(19): siRNA sense strand
gaagauggaaaccagaaag

SEQ ID NO: 2131837 - RNA, 19 nt, Homo sapiens
  misc_RNA (1)...(19): siRNA sense strand
gucauccuauugcuaaauu

SEQ ID NO: 2131838 - RNA, 19 nt, Homo sapiens
  misc_RNA (1)...(19): siRNA sense strand
gaacucuuaccuggaaauu

SEQ ID NO: 2131839 - RNA, 19 nt, Homo sapiens
  misc_RNA (1)...(19): siRNA sense strand
acgaagaggacuuguauga

SEQ ID NO: 2131840 - RNA, 19 nt, Homo sapiens
  misc_RNA (1)...(19): siRNA sense strand
ccauguaccagcacuacua

SEQ ID NO: 2131841 - RNA, 19 nt, Homo sapiens
  misc_RNA (1)...(19): siRNA sense strand
ggcgacaccugugcaagaa

SEQ ID NO: 2131842 - RNA, 19 nt, Homo sapiens
  misc_RNA (1)...(19): siRNA sense strand
cagcgacgcagucagaauu

SEQ ID NO: 2131843 - RNA, 19 nt, Homo sapiens
  misc_RNA (1)...(19): siRNA sense strand
ggagaaguacauugaugga

SEQ ID NO: 2131844 - RNA, 19 nt, Homo sapiens
  misc_RNA (1)...(19): siRNA sense strand
acucuuaccuggaaauugg

SEQ ID NO: 2131845 - RNA, 19 nt, Homo sapiens
  misc_RNA (1)...(19): siRNA sense strand
ggcacaacaucauagaaca

SEQ ID NO: 2131846 - RNA, 19 nt, Homo sapiens
  misc_RNA (1)...(19): siRNA sense strand
gcuaaauuacuuugucuca

SEQ ID NO: 2131847 - RNA, 19 nt, Homo sapiens
  misc_RNA (1)...(19): siRNA sense strand
ccacugaggcugcagaucu

SEQ ID NO: 2131848 - RNA, 19 nt, Homo sapiens
  misc_RNA (1)...(19): siRNA sense strand
ucaccuugcugaccaugga

SEQ ID NO: 2131849 - RNA, 19 nt, Homo sapiens
  misc_RNA (1)...(19): siRNA sense strand
gaauuggacccgaaaccau

SEQ ID NO: 2131850 - RNA, 19 nt, Homo sapiens
  misc_RNA (1)...(19): siRNA sense strand
ggucugcccugcugcuucu

SEQ ID NO: 2131851 - RNA, 19 nt, Homo sapiens
  misc_RNA (1)...(19): siRNA sense strand
ugacccugccggugcauua

SEQ ID NO: 2131852 - RNA, 19 nt, Homo sapiens
  misc_RNA (1)...(19): siRNA sense strand
gcagacuucauacagagaa

SEQ ID NO: 2131853 - RNA, 19 nt, Homo sapiens
  misc_RNA (1)...(19): siRNA sense strand
gaaccagggcucugaagac

SEQ ID NO: 2131854 - RNA, 19 nt, Homo sapiens
  misc_RNA (1)...(19): siRNA sense strand
cgaagaggacuuguaugaa

SEQ ID NO: 2131855 - RNA, 19 nt, Homo sapiens
  misc_RNA (1)...(19): siRNA sense strand
ggaaauugggaacuguaug

SEQ ID NO: 2131856 - RNA, 19 nt, Homo sapiens
  misc_RNA (1)...(19): siRNA sense strand
cuucagugcagacuucaua

SEQ ID NO: 2131857 - RNA, 19 nt, Homo sapiens
  misc_RNA (1)...(19): siRNA sense strand
cuacacaccuucuguucac

SEQ ID NO: 2131858 - RNA, 19 nt, Homo sapiens
  misc_RNA (1)...(19): siRNA sense strand
cagaugccauuaagcugau

SEQ ID NO: 2131859 - RNA, 19 nt, Homo sapiens
  misc_RNA (1)...(19): siRNA sense strand
cgacaccugugcaagaacu

SEQ ID NO: 2131860 - RNA, 19 nt, Homo sapiens
  misc_RNA (1)...(19): siRNA sense strand
agucagaauuccaugaaca

SEQ ID NO: 2131861 - RNA, 19 nt, Homo sapiens
  misc_RNA (1)...(19): siRNA sense strand
gacaacccacugaauacuu

SEQ ID NO: 2131862 - RNA, 19 nt, Homo sapiens
  misc_RNA (1)...(19): siRNA sense strand
caagaggccggugguguau

SEQ ID NO: 2131863 - RNA, 19 nt, Homo sapiens
  misc_RNA (1)...(19): siRNA sense strand
guaccagcacuacuacuuc

SEQ ID NO: 2131864 - RNA, 19 nt, Homo sapiens
  misc_RNA (1)...(19): siRNA sense strand
agaggccggugguguaugu

SEQ ID NO: 2131865 - RNA, 19 nt, Homo sapiens
  misc_RNA (1)...(19): siRNA sense strand
gggugcagaugccauuaag

SEQ ID NO: 2131866 - RNA, 19 nt, Homo sapiens
  misc_RNA (1)...(19): siRNA sense strand
ucuguucacuucugucauc

SEQ ID NO: 2131867 - RNA, 19 nt, Homo sapiens
  misc_RNA (1)...(19): siRNA sense strand
ccucugagaucaccuacac

SEQ ID NO: 2131868 - RNA, 19 nt, Homo sapiens
  misc_RNA (1)...(19): siRNA sense strand
cuggagaaguacauugaug

SEQ ID NO: 2131869 - RNA, 19 nt, Homo sapiens
  misc_RNA (1)...(19): siRNA sense strand
gggagcuacugcagucauc

SEQ ID NO: 2131870 - RNA, 19 nt, Homo sapiens
  misc_RNA (1)...(19): siRNA sense strand
ucugucauccuauugcuaa

SEQ ID NO: 2131871 - RNA, 19 nt, Homo sapiens
  misc_RNA (1)...(19): siRNA sense strand
ccaauagcucuaccucaga

SEQ ID NO: 2131872 - RNA, 19 nt, Homo sapiens
  misc_RNA (1)...(19): siRNA sense strand
cacaacaucauagaacaaa

SEQ ID NO: 2131873 - RNA, 19 nt, Homo sapiens
  misc_RNA (1)...(19): siRNA sense strand
gccauuaagcugaugaaca

SEQ ID NO: 2131874 - RNA, 19 nt, Homo sapiens
  misc_RNA (1)...(19): siRNA sense strand
gccuauguaauaacaauga

SEQ ID NO: 2131875 - RNA, 19 nt, Homo sapiens
  misc_RNA (1)...(19): siRNA sense strand
cacugggccuauguaauaa

SEQ ID NO: 2131876 - RNA, 19 nt, Homo sapiens
  misc_RNA (1)...(19): siRNA sense strand
ggccggugguguaugugaa

SEQ ID NO: 2131877 - RNA, 19 nt, Homo sapiens
  misc_RNA (1)...(19): siRNA sense strand
cagacuucauacagagaaa

SEQ ID NO: 2131878 - RNA, 19 nt, Homo sapiens
  misc_RNA (1)...(19): siRNA sense strand
cacugaggcugcagaucuu

SEQ ID NO: 2131879 - RNA, 19 nt, Homo sapiens
  misc_RNA (1)...(19): siRNA sense strand
gcugcuacacugaggacua

SEQ ID NO: 2131880 - RNA, 19 nt, Homo sapiens
  misc_RNA (1)...(19): siRNA sense strand
cucgacaacccacugaaua

SEQ ID NO: 2131881 - RNA, 19 nt, Homo sapiens
  misc_RNA (1)...(19): siRNA sense strand
ggauguggacugugaucug

SEQ ID NO: 2131882 - RNA, 19 nt, Homo sapiens
  misc_RNA (1)...(19): siRNA sense strand
gaccugcccugugcuucga

SEQ ID NO: 2131883 - RNA, 19 nt, Homo sapiens
  misc_RNA (1)...(19): siRNA sense strand
ggcagcacguccagcuuca

SEQ ID NO: 2131884 - RNA, 19 nt, Homo sapiens
  misc_RNA (1)...(19): siRNA sense strand
aagcagcgacgcagucaga

SEQ ID NO: 2131885 - RNA, 19 nt, Homo sapiens
  misc_RNA (1)...(19): siRNA sense strand
ccucauccuccuugucaaa

SEQ ID NO: 2131886 - RNA, 19 nt, Homo sapiens
  misc_RNA (1)...(19): siRNA sense strand
gagcucaggaggaacucuu

SEQ ID NO: 2131887 - RNA, 19 nt, Homo sapiens
  misc_RNA (1)...(19): siRNA sense strand
cugcagaucuuagguuagg

SEQ ID NO: 2131888 - RNA, 19 nt, Homo sapiens
  misc_RNA (1)...(19): siRNA sense strand
ccugcagccuggagaugaa

SEQ ID NO: 2131889 - RNA, 19 nt, Homo sapiens
  misc_RNA (1)...(19): siRNA sense strand
caaggccaagcgagcagua

SEQ ID NO: 2131890 - RNA, 19 nt, Homo sapiens
  misc_RNA (1)...(19): siRNA sense strand
gccuggagaugaacuacag

SEQ ID NO: 2131891 - RNA, 19 nt, Homo sapiens
  misc_RNA (1)...(19): siRNA sense strand
gcagcgacgcagucagaau

SEQ ID NO: 2131892 - RNA, 19 nt, Homo sapiens
  misc_RNA (1)...(19): siRNA sense strand
uggaacagccagaauugga

SEQ ID NO: 2131893 - RNA, 19 nt, Homo sapiens
  misc_RNA (1)...(19): siRNA sense strand
cccagaagcuauugaucag

SEQ ID NO: 2131894 - RNA, 19 nt, Homo sapiens
  misc_RNA (1)...(19): siRNA sense strand
gagcuacugcagucaucuu

SEQ ID NO: 2131895 - RNA, 19 nt, Homo sapiens
  misc_RNA (1)...(19): siRNA sense strand
guccgacugugccaucugu

SEQ ID NO: 2131896 - RNA, 19 nt, Homo sapiens
  misc_RNA (1)...(19): siRNA sense strand
ggaacucuuaccuggaaau

SEQ ID NO: 2131897 - RNA, 19 nt, Homo sapiens
  misc_RNA (1)...(19): siRNA sense strand
gugcagaugccauuaagcu

SEQ ID NO: 2131898 - RNA, 19 nt, Homo sapiens
  misc_RNA (1)...(19): siRNA sense strand
agugcagacuucauacaga

SEQ ID NO: 2131899 - RNA, 19 nt, Homo sapiens
  misc_RNA (1)...(19): siRNA sense strand
caccuucuguucacuucug

SEQ ID NO: 2131900 - RNA, 19 nt, Homo sapiens
  misc_RNA (1)...(19): siRNA sense strand
ugaacaucgucaacaagca

SEQ ID NO: 2131901 - RNA, 19 nt, Homo sapiens
  misc_RNA (1)...(19): siRNA sense strand
ucugaagacccgcucaaga

SEQ ID NO: 2131902 - RNA, 19 nt, Homo sapiens
  misc_RNA (1)...(19): siRNA sense strand
gcccugcugcuucuaugaa

SEQ ID NO: 2131903 - RNA, 19 nt, Homo sapiens
  misc_RNA (1)...(19): siRNA sense strand
ccagugacucugugguaga

SEQ ID NO: 2131904 - RNA, 19 nt, Homo sapiens
  misc_RNA (1)...(19): siRNA sense strand
cugaagacccgcucaagag

SEQ ID NO: 2131905 - RNA, 19 nt, Homo sapiens
  misc_RNA (1)...(19): siRNA sense strand
cccaguaugagaccaugua

SEQ ID NO: 2131906 - RNA, 19 nt, Homo sapiens
  misc_RNA (1)...(19): siRNA sense strand
caaugacgaagaggacuug

SEQ ID NO: 2131907 - RNA, 19 nt, Homo sapiens
  misc_RNA (1)...(19): siRNA sense strand
caacagagccuaauuguag

SEQ ID NO: 2131908 - RNA, 19 nt, Homo sapiens
  misc_RNA (1)...(19): siRNA sense strand
ccaacaagcaauaauagua

SEQ ID NO: 2131909 - RNA, 19 nt, Homo sapiens
  misc_RNA (1)...(19): siRNA sense strand
cauauuacauccacaagau

SEQ ID NO: 2131910 - RNA, 19 nt, Homo sapiens
  misc_RNA (1)...(19): siRNA sense strand
ggagacaggccugacuuua

SEQ ID NO: 2131911 - RNA, 19 nt, Homo sapiens
  misc_RNA (1)...(19): siRNA sense strand
gaaacucccuuagagaaag

SEQ ID NO: 2131912 - RNA, 19 nt, Homo sapiens
  misc_RNA (1)...(19): siRNA sense strand
gaacccaucccucaucgaa

SEQ ID NO: 2131913 - RNA, 19 nt, Homo sapiens
  misc_RNA (1)...(19): siRNA sense strand
gacuaagaaugguaacaaa

SEQ ID NO: 2131914 - RNA, 19 nt, Homo sapiens
  misc_RNA (1)...(19): siRNA sense strand
cuacagcugucuucagaug

SEQ ID NO: 2131915 - RNA, 19 nt, Homo sapiens
  misc_RNA (1)...(19): siRNA sense strand
gaaaguuccuuggcucucu

SEQ ID NO: 2131916 - RNA, 19 nt, Homo sapiens
  misc_RNA (1)...(19): siRNA sense strand
gggccuaccucaagaugug

SEQ ID NO: 2131917 - RNA, 19 nt, Homo sapiens
  misc_RNA (1)...(19): siRNA sense strand
caacaagcaauaauaguag

SEQ ID NO: 2131918 - RNA, 19 nt, Homo sapiens
  misc_RNA (1)...(19): siRNA sense strand
ucaaccaccucaagaagug

SEQ ID NO: 2131919 - RNA, 19 nt, Homo sapiens
  misc_RNA (1)...(19): siRNA sense strand
cuagagacaucccucacuu

SEQ ID NO: 2131920 - RNA, 19 nt, Homo sapiens
  misc_RNA (1)...(19): siRNA sense strand
ccucaaagcauauuacauc

SEQ ID NO: 2131921 - RNA, 19 nt, Homo sapiens
  misc_RNA (1)...(19): siRNA sense strand
agacaucccucacuuacca

SEQ ID NO: 2131922 - RNA, 19 nt, Homo sapiens
  misc_RNA (1)...(19): siRNA sense strand
caucgaagacuaagaaugg

SEQ ID NO: 2131923 - RNA, 19 nt, Homo sapiens
  misc_RNA (1)...(19): siRNA sense strand
gaagaaaacaccuuuguag

SEQ ID NO: 2131924 - RNA, 19 nt, Homo sapiens
  misc_RNA (1)...(19): siRNA sense strand
gucuacagcugucuucaga

SEQ ID NO: 2131925 - RNA, 19 nt, Homo sapiens
  misc_RNA (1)...(19): siRNA sense strand
uggcauaccugcaagacau

SEQ ID NO: 2131926 - RNA, 19 nt, Homo sapiens
  misc_RNA (1)...(19): siRNA sense strand
uaacucaaccaccucaaga

SEQ ID NO: 2131927 - RNA, 19 nt, Homo sapiens
  misc_RNA (1)...(19): siRNA sense strand
ucagccacauucacaggua

SEQ ID NO: 2131928 - RNA, 19 nt, Homo sapiens
  misc_RNA (1)...(19): siRNA sense strand
cgaagacuaagaaugguaa

SEQ ID NO: 2131929 - RNA, 19 nt, Homo sapiens
  misc_RNA (1)...(19): siRNA sense strand
agaaugauguacagaacug

SEQ ID NO: 2131930 - RNA, 19 nt, Homo sapiens
  misc_RNA (1)...(19): siRNA sense strand
ggccugacuuuacccagaa

SEQ ID NO: 2131931 - RNA, 19 nt, Homo sapiens
  misc_RNA (1)...(19): siRNA sense strand
gcuaauaccggauaaagac

SEQ ID NO: 2131932 - RNA, 19 nt, Homo sapiens
  misc_RNA (1)...(19): siRNA sense strand
ggauaaagacacgagagaa

SEQ ID NO: 2131933 - RNA, 19 nt, Homo sapiens
  misc_RNA (1)...(19): siRNA sense strand
ccaacagagccuaauugua

SEQ ID NO: 2131934 - RNA, 19 nt, Homo sapiens
  misc_RNA (1)...(19): siRNA sense strand
ugaaacucccuuagagaaa

SEQ ID NO: 2131935 - RNA, 19 nt, Homo sapiens
  misc_RNA (1)...(19): siRNA sense strand
gcauauuacauccacaaga

SEQ ID NO: 2131936 - RNA, 19 nt, Homo sapiens
  misc_RNA (1)...(19): siRNA sense strand
ugacaugccuauggauauc

SEQ ID NO: 2131937 - RNA, 19 nt, Homo sapiens
  misc_RNA (1)...(19): siRNA sense strand
ccagaaugauguacagaac

SEQ ID NO: 2131938 - RNA, 19 nt, Homo sapiens
  misc_RNA (1)...(19): siRNA sense strand
acagcugucuucagauguu

SEQ ID NO: 2131939 - RNA, 19 nt, Homo sapiens
  misc_RNA (1)...(19): siRNA sense strand
ggaagaaaacaccuuugua

SEQ ID NO: 2131940 - RNA, 19 nt, Homo sapiens
  misc_RNA (1)...(19): siRNA sense strand
gauaaagacacgagagaac

SEQ ID NO: 2131941 - RNA, 19 nt, Homo sapiens
  misc_RNA (1)...(19): siRNA sense strand
gagacaggccugacuuuac

SEQ ID NO: 2131942 - RNA, 19 nt, Homo sapiens
  misc_RNA (1)...(19): siRNA sense strand
uagagacaucccucacuua

SEQ ID NO: 2131943 - RNA, 19 nt, Homo sapiens
  misc_RNA (1)...(19): siRNA sense strand
cagcugucuucagauguua

SEQ ID NO: 2131944 - RNA, 19 nt, Homo sapiens
  misc_RNA (1)...(19): siRNA sense strand
caaacuaccagcucuaacu

SEQ ID NO: 2131945 - RNA, 19 nt, Homo sapiens
  misc_RNA (1)...(19): siRNA sense strand
ccucaucgaagacuaagaa

SEQ ID NO: 2131946 - RNA, 19 nt, Homo sapiens
  misc_RNA (1)...(19): siRNA sense strand
uaaagacacgagagaacaa

SEQ ID NO: 2131947 - RNA, 19 nt, Homo sapiens
  misc_RNA (1)...(19): siRNA sense strand
ugcauagacugaaguacuu

SEQ ID NO: 2131948 - RNA, 19 nt, Homo sapiens
  misc_RNA (1)...(19): siRNA sense strand
acacucaccuagagacauc

SEQ ID NO: 2131949 - RNA, 19 nt, Homo sapiens
  misc_RNA (1)...(19): siRNA sense strand
cagugauccuguagauuug

SEQ ID NO: 2131950 - RNA, 19 nt, Homo sapiens
  misc_RNA (1)...(19): siRNA sense strand
cagccacauucacagguaa

SEQ ID NO: 2131951 - RNA, 19 nt, Homo sapiens
  misc_RNA (1)...(19): siRNA sense strand
gaccuccgguucaucaucu

SEQ ID NO: 2131952 - RNA, 19 nt, Homo sapiens
  misc_RNA (1)...(19): siRNA sense strand
ucaccaagcccaccucaag

SEQ ID NO: 2131953 - RNA, 19 nt, Homo sapiens
  misc_RNA (1)...(19): siRNA sense strand
gugccacggucaccaggaa

SEQ ID NO: 2131954 - RNA, 19 nt, Homo sapiens
  misc_RNA (1)...(19): siRNA sense strand
cagaagcucucagccuaca

SEQ ID NO: 2131955 - RNA, 19 nt, Homo sapiens
  misc_RNA (1)...(19): siRNA sense strand
agacaugccacacucauca

SEQ ID NO: 2131956 - RNA, 19 nt, Homo sapiens
  misc_RNA (1)...(19): siRNA sense strand
cgagagaacaagggucaaa

SEQ ID NO: 2131957 - RNA, 19 nt, Homo sapiens
  misc_RNA (1)...(19): siRNA sense strand
acccaucccucaucgaaga

SEQ ID NO: 2131958 - RNA, 19 nt, Homo sapiens
  misc_RNA (1)...(19): siRNA sense strand
gcaagacaugccacaguca

SEQ ID NO: 2131959 - RNA, 19 nt, Homo sapiens
  misc_RNA (1)...(19): siRNA sense strand
cugaaacucccuuagagaa

SEQ ID NO: 2131960 - RNA, 19 nt, Homo sapiens
  misc_RNA (1)...(19): siRNA sense strand
ucaguggaggcucuguuua

SEQ ID NO: 2131961 - RNA, 19 nt, Homo sapiens
  misc_RNA (1)...(19): siRNA sense strand
caguggaggcucuguuuau

SEQ ID NO: 2131962 - RNA, 19 nt, Homo sapiens
  misc_RNA (1)...(19): siRNA sense strand
ccacguacaaucacgaaca

SEQ ID NO: 2131963 - RNA, 19 nt, Homo sapiens
  misc_RNA (1)...(19): siRNA sense strand
agacuaagaaugguaacaa

SEQ ID NO: 2131964 - RNA, 19 nt, Homo sapiens
  misc_RNA (1)...(19): siRNA sense strand
gcaagucuacagcugucuu

SEQ ID NO: 2131965 - RNA, 19 nt, Homo sapiens
  misc_RNA (1)...(19): siRNA sense strand
agacgcuaauaccggauaa

SEQ ID NO: 2131966 - RNA, 19 nt, Homo sapiens
  misc_RNA (1)...(19): siRNA sense strand
uucaucaucuguucuuuca

SEQ ID NO: 2131967 - RNA, 19 nt, Homo sapiens
  misc_RNA (1)...(19): siRNA sense strand
gacuuuacccagaaugaug

SEQ ID NO: 2131968 - RNA, 19 nt, Homo sapiens
  misc_RNA (1)...(19): siRNA sense strand
acacuuaccgggagaugug

SEQ ID NO: 2131969 - RNA, 19 nt, Homo sapiens
  misc_RNA (1)...(19): siRNA sense strand
gugacaugccuauggauau

SEQ ID NO: 2131970 - RNA, 19 nt, Homo sapiens
  misc_RNA (1)...(19): siRNA sense strand
agacaggccugacuuuacc

SEQ ID NO: 2131971 - RNA, 19 nt, Homo sapiens
  misc_RNA (1)...(19): siRNA sense strand
ggaaaccccagccagaaaa

SEQ ID NO: 2131972 - RNA, 19 nt, Homo sapiens
  misc_RNA (1)...(19): siRNA sense strand
ugugacaugccuauggaua

SEQ ID NO: 2131973 - RNA, 19 nt, Homo sapiens
  misc_RNA (1)...(19): siRNA sense strand
gaacugugacaugccuaug

SEQ ID NO: 2131974 - RNA, 19 nt, Homo sapiens
  misc_RNA (1)...(19): siRNA sense strand
acuaccagcucuaacucaa

SEQ ID NO: 2131975 - RNA, 19 nt, Homo sapiens
  misc_RNA (1)...(19): siRNA sense strand
gucugaaacucccuuagag

SEQ ID NO: 2131976 - RNA, 19 nt, Homo sapiens
  misc_RNA (1)...(19): siRNA sense strand
ggagacaugccacacucau

SEQ ID NO: 2131977 - RNA, 19 nt, Homo sapiens
  misc_RNA (1)...(19): siRNA sense strand
aaacucccuuagagaaagu

SEQ ID NO: 2131978 - RNA, 19 nt, Homo sapiens
  misc_RNA (1)...(19): siRNA sense strand
ggucugcccacguacaauc

SEQ ID NO: 2131979 - RNA, 19 nt, Homo sapiens
  misc_RNA (1)...(19): siRNA sense strand
uagcucagccacauucaca

SEQ ID NO: 2131980 - RNA, 19 nt, Homo sapiens
  misc_RNA (1)...(19): siRNA sense strand
caccaagcccaccucaaga

SEQ ID NO: 2131981 - RNA, 19 nt, Homo sapiens
  misc_RNA (1)...(19): siRNA sense strand
cggauaaagacacgagaga

SEQ ID NO: 2131982 - RNA, 19 nt, Homo sapiens
  misc_RNA (1)...(19): siRNA sense strand
guucaucaucuguucuuuc

SEQ ID NO: 2131983 - RNA, 19 nt, Homo sapiens
  misc_RNA (1)...(19): siRNA sense strand
acugugacaugccuaugga

SEQ ID NO: 2131984 - RNA, 19 nt, Homo sapiens
  misc_RNA (1)...(19): siRNA sense strand
gugcaaacuaccagcucua

SEQ ID NO: 2131985 - RNA, 19 nt, Homo sapiens
  misc_RNA (1)...(19): siRNA sense strand
uauccaacagagccuaauu

SEQ ID NO: 2131986 - RNA, 19 nt, Homo sapiens
  misc_RNA (1)...(19): siRNA sense strand
ugacacacucaccuagaga

SEQ ID NO: 2131987 - RNA, 19 nt, Homo sapiens
  misc_RNA (1)...(19): siRNA sense strand
gagacaugccacacucauc

SEQ ID NO: 2131988 - RNA, 19 nt, Homo sapiens
  misc_RNA (1)...(19): siRNA sense strand
caacgcugcuggacgcaua

SEQ ID NO: 2131989 - RNA, 19 nt, Homo sapiens
  misc_RNA (1)...(19): siRNA sense strand
uggagaaccuugagaucua

SEQ ID NO: 2131990 - RNA, 19 nt, Homo sapiens
  misc_RNA (1)...(19): siRNA sense strand
cgacauccacgaacaauug

SEQ ID NO: 2131991 - RNA, 19 nt, Homo sapiens
  misc_RNA (1)...(19): siRNA sense strand
ugaaagaacuggagaaccu

SEQ ID NO: 2131992 - RNA, 19 nt, Homo sapiens
  misc_RNA (1)...(19): siRNA sense strand
cgagaaugaucaagcugaa

SEQ ID NO: 2131993 - RNA, 19 nt, Homo sapiens
  misc_RNA (1)...(19): siRNA sense strand
ggacaguguuauugguaca

SEQ ID NO: 2131994 - RNA, 19 nt, Homo sapiens
  misc_RNA (1)...(19): siRNA sense strand
ggacagcgagaaugaucaa

SEQ ID NO: 2131995 - RNA, 19 nt, Homo sapiens
  misc_RNA (1)...(19): siRNA sense strand
ggacgcauaagacaccaaa

SEQ ID NO: 2131996 - RNA, 19 nt, Homo sapiens
  misc_RNA (1)...(19): siRNA sense strand
uaucuuacgccucuacauu

SEQ ID NO: 2131997 - RNA, 19 nt, Homo sapiens
  misc_RNA (1)...(19): siRNA sense strand
gaacuggagaaccuugaga

SEQ ID NO: 2131998 - RNA, 19 nt, Homo sapiens
  misc_RNA (1)...(19): siRNA sense strand
gauuacagaauucucuuga

SEQ ID NO: 2131999 - RNA, 19 nt, Homo sapiens
  misc_RNA (1)...(19): siRNA sense strand
gcucaggaucggaaauaaa

SEQ ID NO: 2132000 - RNA, 19 nt, Homo sapiens
  misc_RNA (1)...(19): siRNA sense strand
ggagaaccuugagaucuac

SEQ ID NO: 2132001 - RNA, 19 nt, Homo sapiens
  misc_RNA (1)...(19): siRNA sense strand
ccgaccagcuccacagaau

SEQ ID NO: 2132002 - RNA, 19 nt, Homo sapiens
  misc_RNA (1)...(19): siRNA sense strand
ggugauccugauuaucuua

SEQ ID NO: 2132003 - RNA, 19 nt, Homo sapiens
  misc_RNA (1)...(19): siRNA sense strand
cgagcacccuaucaccaaa

SEQ ID NO: 2132004 - RNA, 19 nt, Homo sapiens
  misc_RNA (1)...(19): siRNA sense strand
ccgaagaccuccguagagu

SEQ ID NO: 2132005 - RNA, 19 nt, Homo sapiens
  misc_RNA (1)...(19): siRNA sense strand
gggcagcucccaucaccuu

SEQ ID NO: 2132006 - RNA, 19 nt, Homo sapiens
  misc_RNA (1)...(19): siRNA sense strand
caggaucggaaauaaauau

SEQ ID NO: 2132007 - RNA, 19 nt, Homo sapiens
  misc_RNA (1)...(19): siRNA sense strand
accuugagaucuacacuuu

SEQ ID NO: 2132008 - RNA, 19 nt, Homo sapiens
  misc_RNA (1)...(19): siRNA sense strand
gaaagaacuggagaaccuu

SEQ ID NO: 2132009 - RNA, 19 nt, Homo sapiens
  misc_RNA (1)...(19): siRNA sense strand
gaggacagcgagaaugauc

SEQ ID NO: 2132010 - RNA, 19 nt, Homo sapiens
  misc_RNA (1)...(19): siRNA sense strand
gagaggaggacagcgagaa

SEQ ID NO: 2132011 - RNA, 19 nt, Homo sapiens
  misc_RNA (1)...(19): siRNA sense strand
gcgagcacccuaucaccaa

SEQ ID NO: 2132012 - RNA, 19 nt, Homo sapiens
  misc_RNA (1)...(19): siRNA sense strand
uauccgacauccacgaaca

SEQ ID NO: 2132013 - RNA, 19 nt, Homo sapiens
  misc_RNA (1)...(19): siRNA sense strand
ggcucaggaucggaaauaa

SEQ ID NO: 2132014 - RNA, 19 nt, Homo sapiens
  misc_RNA (1)...(19): siRNA sense strand
cccaccagcuuccaugugu

SEQ ID NO: 2132015 - RNA, 19 nt, Homo sapiens
  misc_RNA (1)...(19): siRNA sense strand
ccucagugccucccagaga

SEQ ID NO: 2132016 - RNA, 19 nt, Homo sapiens
  misc_RNA (1)...(19): siRNA sense strand
cagcgagaaugaucaagcu

SEQ ID NO: 2132017 - RNA, 19 nt, Homo sapiens
  misc_RNA (1)...(19): siRNA sense strand
gaaagauuacagaauucuc

SEQ ID NO: 2132018 - RNA, 19 nt, Homo sapiens
  misc_RNA (1)...(19): siRNA sense strand
gccuggugauccugauuau

SEQ ID NO: 2132019 - RNA, 19 nt, Homo sapiens
  misc_RNA (1)...(19): siRNA sense strand
ucaggaucggaaauaaaua

SEQ ID NO: 2132020 - RNA, 19 nt, Homo sapiens
  misc_RNA (1)...(19): siRNA sense strand
gaaugaucaagcugaagug

SEQ ID NO: 2132021 - RNA, 19 nt, Homo sapiens
  misc_RNA (1)...(19): siRNA sense strand
gaggaggacagcgagaaug

SEQ ID NO: 2132022 - RNA, 19 nt, Homo sapiens
  misc_RNA (1)...(19): siRNA sense strand
cgucaucagucccgaagac

SEQ ID NO: 2132023 - RNA, 19 nt, Homo sapiens
  misc_RNA (1)...(19): siRNA sense strand
agaaugaucaagcugaagu

SEQ ID NO: 2132024 - RNA, 19 nt, Homo sapiens
  misc_RNA (1)...(19): siRNA sense strand
uggcucaggaucggaaaua

SEQ ID NO: 2132025 - RNA, 19 nt, Homo sapiens
  misc_RNA (1)...(19): siRNA sense strand
ccauuucguccucuuuguu

SEQ ID NO: 2132026 - RNA, 19 nt, Homo sapiens
  misc_RNA (1)...(19): siRNA sense strand
cauuucguccucuuuguug

SEQ ID NO: 2132027 - RNA, 19 nt, Homo sapiens
  misc_RNA (1)...(19): siRNA sense strand
ccucuggacaguguuauug

SEQ ID NO: 2132028 - RNA, 19 nt, Homo sapiens
  misc_RNA (1)...(19): siRNA sense strand
gaacgagccugccgacuau

SEQ ID NO: 2132029 - RNA, 19 nt, Homo sapiens
  misc_RNA (1)...(19): siRNA sense strand
ggaacgagccugccgacua

SEQ ID NO: 2132030 - RNA, 19 nt, Homo sapiens
  misc_RNA (1)...(19): siRNA sense strand
ggacuuggcaggaggagaa

SEQ ID NO: 2132031 - RNA, 19 nt, Homo sapiens
  misc_RNA (1)...(19): siRNA sense strand
gaugggaggugugccagaa

SEQ ID NO: 2132032 - RNA, 19 nt, Homo sapiens
  misc_RNA (1)...(19): siRNA sense strand
gcgggugacuucagcaaga

SEQ ID NO: 2132033 - RNA, 19 nt, Homo sapiens
  misc_RNA (1)...(19): siRNA sense strand
cagaagacagcagagauua

SEQ ID NO: 2132034 - RNA, 19 nt, Homo sapiens
  misc_RNA (1)...(19): siRNA sense strand
ccagaagacagcagagauu

SEQ ID NO: 2132035 - RNA, 19 nt, Homo sapiens
  misc_RNA (1)...(19): siRNA sense strand
gagcugaagcgccuguaug

SEQ ID NO: 2132036 - RNA, 19 nt, Homo sapiens
  misc_RNA (1)...(19): siRNA sense strand
uggcggagaucuucagucu

SEQ ID NO: 2132037 - RNA, 19 nt, Homo sapiens
  misc_RNA (1)...(19): siRNA sense strand
gaagacagcagagauuagc

SEQ ID NO: 2132038 - RNA, 19 nt, Homo sapiens
  misc_RNA (1)...(19): siRNA sense strand
gcucgaguccuccaagauc

SEQ ID NO: 2132039 - RNA, 19 nt, Homo sapiens
  misc_RNA (1)...(19): siRNA sense strand
agauuagccucuugaagca

SEQ ID NO: 2132040 - RNA, 19 nt, Homo sapiens
  misc_RNA (1)...(19): siRNA sense strand
gcagcugugagacugauga

SEQ ID NO: 2132041 - RNA, 19 nt, Homo sapiens
  misc_RNA (1)...(19): siRNA sense strand
ugggaggugugccagaaga

SEQ ID NO: 2132042 - RNA, 19 nt, Homo sapiens
  misc_RNA (1)...(19): siRNA sense strand
gcaagagcaccaagaacac

SEQ ID NO: 2132043 - RNA, 19 nt, Homo sapiens
  misc_RNA (1)...(19): siRNA sense strand
ugcacgaggugacccagaa

SEQ ID NO: 2132044 - RNA, 19 nt, Homo sapiens
  misc_RNA (1)...(19): siRNA sense strand
acagcaagagcaccaagaa

SEQ ID NO: 2132045 - RNA, 19 nt, Homo sapiens
  misc_RNA (1)...(19): siRNA sense strand
gacagcaagagcaccaaga

SEQ ID NO: 2132046 - RNA, 19 nt, Homo sapiens
  misc_RNA (1)...(19): siRNA sense strand
uuugacaagugccgcauuc

SEQ ID NO: 2132047 - RNA, 19 nt, Homo sapiens
  misc_RNA (1)...(19): siRNA sense strand
cggcucgaguccuccaaga

SEQ ID NO: 2132048 - RNA, 19 nt, Homo sapiens
  misc_RNA (1)...(19): siRNA sense strand
gccagaagacagcagagau

SEQ ID NO: 2132049 - RNA, 19 nt, Homo sapiens
  misc_RNA (1)...(19): siRNA sense strand
ccaagaaggacagcaagag

SEQ ID NO: 2132050 - RNA, 19 nt, Homo sapiens
  misc_RNA (1)...(19): siRNA sense strand
gaagaaaucucagcaagug

SEQ ID NO: 2132051 - RNA, 19 nt, Homo sapiens
  misc_RNA (1)...(19): siRNA sense strand
gaacagagcagauggaaac

SEQ ID NO: 2132052 - RNA, 19 nt, Homo sapiens
  misc_RNA (1)...(19): siRNA sense strand
ucaagaagguguaugacaa

SEQ ID NO: 2132053 - RNA, 19 nt, Homo sapiens
  misc_RNA (1)...(19): siRNA sense strand
uaacagacauccuggaagu

SEQ ID NO: 2132054 - RNA, 19 nt, Homo sapiens
  misc_RNA (1)...(19): siRNA sense strand
gcacagaagaugucguuug

SEQ ID NO: 2132055 - RNA, 19 nt, Homo sapiens
  misc_RNA (1)...(19): siRNA sense strand
gaaacuuccuucucuaugc

SEQ ID NO: 2132056 - RNA, 19 nt, Homo sapiens
  misc_RNA (1)...(19): siRNA sense strand
caacaucuucuucaugauu

SEQ ID NO: 2132057 - RNA, 19 nt, Homo sapiens
  misc_RNA (1)...(19): siRNA sense strand
gcugguggcuagugacaaa

SEQ ID NO: 2132058 - RNA, 19 nt, Homo sapiens
  misc_RNA (1)...(19): siRNA sense strand
cccaacaucuucuucauga

SEQ ID NO: 2132059 - RNA, 19 nt, Homo sapiens
  misc_RNA (1)...(19): siRNA sense strand
caaccggccugccuucuuc

SEQ ID NO: 2132060 - RNA, 19 nt, Homo sapiens
  misc_RNA (1)...(19): siRNA sense strand
gagccgaucugcacaaugc

SEQ ID NO: 2132061 - RNA, 19 nt, Homo sapiens
  misc_RNA (1)...(19): siRNA sense strand
cagagcagauggaaacuuc

SEQ ID NO: 2132062 - RNA, 19 nt, Homo sapiens
  misc_RNA (1)...(19): siRNA sense strand
gguccuggcugaagcugaa

SEQ ID NO: 2132063 - RNA, 19 nt, Homo sapiens
  misc_RNA (1)...(19): siRNA sense strand
gagagcgucugccugaauc

SEQ ID NO: 2132064 - RNA, 19 nt, Homo sapiens
  misc_RNA (1)...(19): siRNA sense strand
aaggagagauggucugugu

SEQ ID NO: 2132065 - RNA, 19 nt, Homo sapiens
  misc_RNA (1)...(19): siRNA sense strand
ucacauccauaagaagaaa

SEQ ID NO: 2132066 - RNA, 19 nt, Homo sapiens
  misc_RNA (1)...(19): siRNA sense strand
ccaccuacuucauggagaa

SEQ ID NO: 2132067 - RNA, 19 nt, Homo sapiens
  misc_RNA (1)...(19): siRNA sense strand
gacauucacauccauaaga

SEQ ID NO: 2132068 - RNA, 19 nt, Homo sapiens
  misc_RNA (1)...(19): siRNA sense strand
cacagaagaugucguuugg

SEQ ID NO: 2132069 - RNA, 19 nt, Homo sapiens
  misc_RNA (1)...(19): siRNA sense strand
gcuacgaggcgcucaagaa

SEQ ID NO: 2132070 - RNA, 19 nt, Homo sapiens
  misc_RNA (1)...(19): siRNA sense strand
ggaaccggaucgcugagau

SEQ ID NO: 2132071 - RNA, 19 nt, Homo sapiens
  misc_RNA (1)...(19): siRNA sense strand
ucgcugagaugaagaaguc

SEQ ID NO: 2132072 - RNA, 19 nt, Homo sapiens
  misc_RNA (1)...(19): siRNA sense strand
ggagagcgucugccugaau

SEQ ID NO: 2132073 - RNA, 19 nt, Homo sapiens
  misc_RNA (1)...(19): siRNA sense strand
acauucacauccauaagaa

SEQ ID NO: 2132074 - RNA, 19 nt, Homo sapiens
  misc_RNA (1)...(19): siRNA sense strand
guacagcaacauggaguuu

SEQ ID NO: 2132075 - RNA, 19 nt, Homo sapiens
  misc_RNA (1)...(19): siRNA sense strand
ugcagaagcuggacuacau

SEQ ID NO: 2132076 - RNA, 19 nt, Homo sapiens
  misc_RNA (1)...(19): siRNA sense strand
ccuucucuaugcacacuua

SEQ ID NO: 2132077 - RNA, 19 nt, Homo sapiens
  misc_RNA (1)...(19): siRNA sense strand
gauguucuccaccuacuuc

SEQ ID NO: 2132078 - RNA, 19 nt, Homo sapiens
  misc_RNA (1)...(19): siRNA sense strand
gaaccggaucgcugagaug

SEQ ID NO: 2132079 - RNA, 19 nt, Homo sapiens
  misc_RNA (1)...(19): siRNA sense strand
acagcaacauggaguuugu

SEQ ID NO: 2132080 - RNA, 19 nt, Homo sapiens
  misc_RNA (1)...(19): siRNA sense strand
agaaaucucagcaaguguu

SEQ ID NO: 2132081 - RNA, 19 nt, Homo sapiens
  misc_RNA (1)...(19): siRNA sense strand
aaacuuccuucucuaugca

SEQ ID NO: 2132082 - RNA, 19 nt, Homo sapiens
  misc_RNA (1)...(19): siRNA sense strand
ggaaggagagauggucugu

SEQ ID NO: 2132083 - RNA, 19 nt, Homo sapiens
  misc_RNA (1)...(19): siRNA sense strand
gaaaucucagcaaguguuc

SEQ ID NO: 2132084 - RNA, 19 nt, Homo sapiens
  misc_RNA (1)...(19): siRNA sense strand
gcagaagcuggacuacaug

SEQ ID NO: 2132085 - RNA, 19 nt, Homo sapiens
  misc_RNA (1)...(19): siRNA sense strand
uaagaagaaaucucagcaa

SEQ ID NO: 2132086 - RNA, 19 nt, Homo sapiens
  misc_RNA (1)...(19): siRNA sense strand
ugaaucucauccugcagaa

SEQ ID NO: 2132087 - RNA, 19 nt, Homo sapiens
  misc_RNA (1)...(19): siRNA sense strand
ggcagaagcccauccugau

SEQ ID NO: 2132088 - RNA, 19 nt, Homo sapiens
  misc_RNA (1)...(19): siRNA sense strand
cguuuggcuucuacaagua

SEQ ID NO: 2132089 - RNA, 19 nt, Homo sapiens
  misc_RNA (1)...(19): siRNA sense strand
gggacauucacauccauaa

SEQ ID NO: 2132090 - RNA, 19 nt, Homo sapiens
  misc_RNA (1)...(19): siRNA sense strand
ggacauucacauccauaag

SEQ ID NO: 2132091 - RNA, 19 nt, Homo sapiens
  misc_RNA (1)...(19): siRNA sense strand
acgaggcgcucaagaaggu

SEQ ID NO: 2132092 - RNA, 19 nt, Homo sapiens
  misc_RNA (1)...(19): siRNA sense strand
aacaucuucuucaugauug

SEQ ID NO: 2132093 - RNA, 19 nt, Homo sapiens
  misc_RNA (1)...(19): siRNA sense strand
ccggaucgcugagaugaag

SEQ ID NO: 2132094 - RNA, 19 nt, Homo sapiens
  misc_RNA (1)...(19): siRNA sense strand
cuacaaguacagcaacaug

SEQ ID NO: 2132095 - RNA, 19 nt, Homo sapiens
  misc_RNA (1)...(19): siRNA sense strand
ucguuuggcuucuacaagu

SEQ ID NO: 2132096 - RNA, 19 nt, Homo sapiens
  misc_RNA (1)...(19): siRNA sense strand
cgacagcgaggaguucuuc

SEQ ID NO: 2132097 - RNA, 19 nt, Homo sapiens
  misc_RNA (1)...(19): siRNA sense strand
ccuacuucauggagaaaug

SEQ ID NO: 2132098 - RNA, 19 nt, Homo sapiens
  misc_RNA (1)...(19): siRNA sense strand
caacgacagcgaggaguuc

SEQ ID NO: 2132099 - RNA, 19 nt, Homo sapiens
  misc_RNA (1)...(19): siRNA sense strand
agguggagguggaggugua

SEQ ID NO: 2132100 - RNA, 19 nt, Homo sapiens
  misc_RNA (1)...(19): siRNA sense strand
ucuaugcacacuuaaccua

SEQ ID NO: 2132101 - RNA, 19 nt, Homo sapiens
  misc_RNA (1)...(19): siRNA sense strand
cuucuggacuuggauguuc

SEQ ID NO: 2132102 - RNA, 19 nt, Homo sapiens
  misc_RNA (1)...(19): siRNA sense strand
gaugucguuuggcuucuac

SEQ ID NO: 2132103 - RNA, 19 nt, Homo sapiens
  misc_RNA (1)...(19): siRNA sense strand
guucuccaccuacuucaug

SEQ ID NO: 2132104 - RNA, 19 nt, Homo sapiens
  misc_RNA (1)...(19): siRNA sense strand
caagaagguguaugacaac

SEQ ID NO: 2132105 - RNA, 19 nt, Homo sapiens
  misc_RNA (1)...(19): siRNA sense strand
ccaacgacagcgaggaguu

SEQ ID NO: 2132106 - RNA, 19 nt, Homo sapiens
  misc_RNA (1)...(19): siRNA sense strand
acaaguacagcaacaugga

SEQ ID NO: 2132107 - RNA, 19 nt, Homo sapiens
  misc_RNA (1)...(19): siRNA sense strand
cuacgaggcgcucaagaag

SEQ ID NO: 2132108 - RNA, 19 nt, Homo sapiens
  misc_RNA (1)...(19): siRNA sense strand
gaagcugaacagagcagau

SEQ ID NO: 2132109 - RNA, 19 nt, Homo sapiens
  misc_RNA (1)...(19): siRNA sense strand
ggaucgcugagaugaagaa

SEQ ID NO: 2132110 - RNA, 19 nt, Homo sapiens
  misc_RNA (1)...(19): siRNA sense strand
agaagaaaucucagcaagu

SEQ ID NO: 2132111 - RNA, 19 nt, Homo sapiens
  misc_RNA (1)...(19): siRNA sense strand
acagacauccuggaaguuc

SEQ ID NO: 2132112 - RNA, 19 nt, Homo sapiens
  misc_RNA (1)...(19): siRNA sense strand
cggcaggacgacaugcuuu

SEQ ID NO: 2132113 - RNA, 19 nt, Homo sapiens
  misc_RNA (1)...(19): siRNA sense strand
uccauaagaagaaaucuca

SEQ ID NO: 2132114 - RNA, 19 nt, Homo sapiens
  misc_RNA (1)...(19): siRNA sense strand
gcggucagccgagugucua

SEQ ID NO: 2132115 - RNA, 19 nt, Homo sapiens
  misc_RNA (1)...(19): siRNA sense strand
uggcacagaagaugucguu

SEQ ID NO: 2132116 - RNA, 19 nt, Homo sapiens
  misc_RNA (1)...(19): siRNA sense strand
gagcugguggcuagugaca

SEQ ID NO: 2132117 - RNA, 19 nt, Homo sapiens
  misc_RNA (1)...(19): siRNA sense strand
uggagcugguggcuaguga

SEQ ID NO: 2132118 - RNA, 19 nt, Homo sapiens
  misc_RNA (1)...(19): siRNA sense strand
ccaacaucuucuucaugau

SEQ ID NO: 2132119 - RNA, 19 nt, Homo sapiens
  misc_RNA (1)...(19): siRNA sense strand
ggugaugccugaagcucaa

SEQ ID NO: 2132120 - RNA, 19 nt, Homo sapiens
  misc_RNA (1)...(19): siRNA sense strand
gagcaccacccgagacauc

SEQ ID NO: 2132121 - RNA, 19 nt, Homo sapiens
  misc_RNA (1)...(19): siRNA sense strand
gaagauccuccgggaccua

SEQ ID NO: 2132122 - RNA, 19 nt, Homo sapiens
  misc_RNA (1)...(19): siRNA sense strand
gaagcucaagggacugugu

SEQ ID NO: 2132123 - RNA, 19 nt, Homo sapiens
  misc_RNA (1)...(19): siRNA sense strand
aacauuccgucaccacgaa

SEQ ID NO: 2132124 - RNA, 19 nt, Homo sapiens
  misc_RNA (1)...(19): siRNA sense strand
gaaauugccuuauuggaaa

SEQ ID NO: 2132125 - RNA, 19 nt, Homo sapiens
  misc_RNA (1)...(19): siRNA sense strand
ggauggagcuggagcagaa

SEQ ID NO: 2132126 - RNA, 19 nt, Homo sapiens
  misc_RNA (1)...(19): siRNA sense strand
gaacaaagucaucaagcua

SEQ ID NO: 2132127 - RNA, 19 nt, Homo sapiens
  misc_RNA (1)...(19): siRNA sense strand
ucacggacauccagaagua

SEQ ID NO: 2132128 - RNA, 19 nt, Homo sapiens
  misc_RNA (1)...(19): siRNA sense strand
ggaaauugccuuauuggaa

SEQ ID NO: 2132129 - RNA, 19 nt, Homo sapiens
  misc_RNA (1)...(19): siRNA sense strand
guucagaggucacaagaga

SEQ ID NO: 2132130 - RNA, 19 nt, Homo sapiens
  misc_RNA (1)...(19): siRNA sense strand
gaagaaccucucugccuua

SEQ ID NO: 2132131 - RNA, 19 nt, Homo sapiens
  misc_RNA (1)...(19): siRNA sense strand
ccucauugauuucaucuuu

SEQ ID NO: 2132132 - RNA, 19 nt, Homo sapiens
  misc_RNA (1)...(19): siRNA sense strand
gaaccucucugccuuaucc

SEQ ID NO: 2132133 - RNA, 19 nt, Homo sapiens
  misc_RNA (1)...(19): siRNA sense strand
ggaagaugcccacggacua

SEQ ID NO: 2132134 - RNA, 19 nt, Homo sapiens
  misc_RNA (1)...(19): siRNA sense strand
ggagaacacuguggagaca

SEQ ID NO: 2132135 - RNA, 19 nt, Homo sapiens
  misc_RNA (1)...(19): siRNA sense strand
gcaccaagaagggcaauuu

SEQ ID NO: 2132136 - RNA, 19 nt, Homo sapiens
  misc_RNA (1)...(19): siRNA sense strand
gcccgcagguuaacugaaa

SEQ ID NO: 2132137 - RNA, 19 nt, Homo sapiens
  misc_RNA (1)...(19): siRNA sense strand
uggagaagaucaagaacuu

SEQ ID NO: 2132138 - RNA, 19 nt, Homo sapiens
  misc_RNA (1)...(19): siRNA sense strand
ggaacaaagucaucaagcu

SEQ ID NO: 2132139 - RNA, 19 nt, Homo sapiens
  misc_RNA (1)...(19): siRNA sense strand
gugccaagccggucacuaa

SEQ ID NO: 2132140 - RNA, 19 nt, Homo sapiens
  misc_RNA (1)...(19): siRNA sense strand
ccaagccggucacuaacuu

SEQ ID NO: 2132141 - RNA, 19 nt, Homo sapiens
  misc_RNA (1)...(19): siRNA sense strand
gggaguacguggaggacuu

SEQ ID NO: 2132142 - RNA, 19 nt, Homo sapiens
  misc_RNA (1)...(19): siRNA sense strand
ccuggaaauugccuuauug

SEQ ID NO: 2132143 - RNA, 19 nt, Homo sapiens
  misc_RNA (1)...(19): siRNA sense strand
ggccaucccauuguucuua

SEQ ID NO: 2132144 - RNA, 19 nt, Homo sapiens
  misc_RNA (1)...(19): siRNA sense strand
ccaaaucuggguccucaaa

SEQ ID NO: 2132145 - RNA, 19 nt, Homo sapiens
  misc_RNA (1)...(19): siRNA sense strand
ccauuguucuuauuucuag

SEQ ID NO: 2132146 - RNA, 19 nt, Homo sapiens
  misc_RNA (1)...(19): siRNA sense strand
ucaaagaggaacaaaguca

SEQ ID NO: 2132147 - RNA, 19 nt, Homo sapiens
  misc_RNA (1)...(19): siRNA sense strand
ccagaaagcccagaaccuu

SEQ ID NO: 2132148 - RNA, 19 nt, Homo sapiens
  misc_RNA (1)...(19): siRNA sense strand
caaaggaagaccugacugu

SEQ ID NO: 2132149 - RNA, 19 nt, Homo sapiens
  misc_RNA (1)...(19): siRNA sense strand
caacagggaccggaagaug

SEQ ID NO: 2132150 - RNA, 19 nt, Homo sapiens
  misc_RNA (1)...(19): siRNA sense strand
aaaucuggguccucaaaga

SEQ ID NO: 2132151 - RNA, 19 nt, Homo sapiens
  misc_RNA (1)...(19): siRNA sense strand
uggcugacauccuggagaa

SEQ ID NO: 2132152 - RNA, 19 nt, Homo sapiens
  misc_RNA (1)...(19): siRNA sense strand
cagguuaacugaaaauaug

SEQ ID NO: 2132153 - RNA, 19 nt, Homo sapiens
  misc_RNA (1)...(19): siRNA sense strand
gcaauuuccacgagaucuu

SEQ ID NO: 2132154 - RNA, 19 nt, Homo sapiens
  misc_RNA (1)...(19): siRNA sense strand
cgacacgcccuauaucauc

SEQ ID NO: 2132155 - RNA, 19 nt, Homo sapiens
  misc_RNA (1)...(19): siRNA sense strand
ucacggagaauuacuugug

SEQ ID NO: 2132156 - RNA, 19 nt, Homo sapiens
  misc_RNA (1)...(19): siRNA sense strand
agaguuugaucgacugaau

SEQ ID NO: 2132157 - RNA, 19 nt, Homo sapiens
  misc_RNA (1)...(19): siRNA sense strand
uaucaaguucuuccucauu

SEQ ID NO: 2132158 - RNA, 19 nt, Homo sapiens
  misc_RNA (1)...(19): siRNA sense strand
ucagaggucacaagagaga

SEQ ID NO: 2132159 - RNA, 19 nt, Homo sapiens
  misc_RNA (1)...(19): siRNA sense strand
cgaaugcagcgacgaaauc

SEQ ID NO: 2132160 - RNA, 19 nt, Homo sapiens
  misc_RNA (1)...(19): siRNA sense strand
guacgacacgcccuauauc

SEQ ID NO: 2132161 - RNA, 19 nt, Homo sapiens
  misc_RNA (1)...(19): siRNA sense strand
gagcaucgugcccgaagug

SEQ ID NO: 2132162 - RNA, 19 nt, Homo sapiens
  misc_RNA (1)...(19): siRNA sense strand
ucacaagagagaugacuuc

SEQ ID NO: 2132163 - RNA, 19 nt, Homo sapiens
  misc_RNA (1)...(19): siRNA sense strand
gaaguacaagguccugucu

SEQ ID NO: 2132164 - RNA, 19 nt, Homo sapiens
  misc_RNA (1)...(19): siRNA sense strand
gaauuacuugugcuucgaa

SEQ ID NO: 2132165 - RNA, 19 nt, Homo sapiens
  misc_RNA (1)...(19): siRNA sense strand
agccggagaucacacagaa

SEQ ID NO: 2132166 - RNA, 19 nt, Homo sapiens
  misc_RNA (1)...(19): siRNA sense strand
ucuagcaauucugagguua

SEQ ID NO: 2132167 - RNA, 19 nt, Homo sapiens
  misc_RNA (1)...(19): siRNA sense strand
gccaucccauuguucuuau

SEQ ID NO: 2132168 - RNA, 19 nt, Homo sapiens
  misc_RNA (1)...(19): siRNA sense strand
ucaccuggaaauugccuua

SEQ ID NO: 2132169 - RNA, 19 nt, Homo sapiens
  misc_RNA (1)...(19): siRNA sense strand
aguacaagguccugucugu

SEQ ID NO: 2132170 - RNA, 19 nt, Homo sapiens
  misc_RNA (1)...(19): siRNA sense strand
gaagaugcccacggacuac

SEQ ID NO: 2132171 - RNA, 19 nt, Homo sapiens
  misc_RNA (1)...(19): siRNA sense strand
gguuaucccucaauuaccu

SEQ ID NO: 2132172 - RNA, 19 nt, Homo sapiens
  misc_RNA (1)...(19): siRNA sense strand
ccauugccuucaccgugua

SEQ ID NO: 2132173 - RNA, 19 nt, Homo sapiens
  misc_RNA (1)...(19): siRNA sense strand
cuaaggagguuggacaaaa

SEQ ID NO: 2132174 - RNA, 19 nt, Homo sapiens
  misc_RNA (1)...(19): siRNA sense strand
gacacgcccuauaucaucu

SEQ ID NO: 2132175 - RNA, 19 nt, Homo sapiens
  misc_RNA (1)...(19): siRNA sense strand
gacugugucugagaaguuc

SEQ ID NO: 2132176 - RNA, 19 nt, Homo sapiens
  misc_RNA (1)...(19): siRNA sense strand
uagcaauucugagguuauc

SEQ ID NO: 2132177 - RNA, 19 nt, Homo sapiens
  misc_RNA (1)...(19): siRNA sense strand
gagagaugacuuccucgau

SEQ ID NO: 2132178 - RNA, 19 nt, Homo sapiens
  misc_RNA (1)...(19): siRNA sense strand
agaccauucucagccagua

SEQ ID NO: 2132179 - RNA, 19 nt, Homo sapiens
  misc_RNA (1)...(19): siRNA sense strand
uucgaaagcuccaaaucug

SEQ ID NO: 2132180 - RNA, 19 nt, Homo sapiens
  misc_RNA (1)...(19): siRNA sense strand
gugggacucuaugcuggua

SEQ ID NO: 2132181 - RNA, 19 nt, Homo sapiens
  misc_RNA (1)...(19): siRNA sense strand
gcugacauccuggagaaga

SEQ ID NO: 2132182 - RNA, 19 nt, Homo sapiens
  misc_RNA (1)...(19): siRNA sense strand
caucccauuguucuuauuu

SEQ ID NO: 2132183 - RNA, 19 nt, Homo sapiens
  misc_RNA (1)...(19): siRNA sense strand
acaaagucaucaagcuagu

SEQ ID NO: 2132184 - RNA, 19 nt, Homo sapiens
  misc_RNA (1)...(19): siRNA sense strand
uaaggagguuggacaaaau

SEQ ID NO: 2132185 - RNA, 19 nt, Homo sapiens
  misc_RNA (1)...(19): siRNA sense strand
ucaucaagcuaguggacau

SEQ ID NO: 2132186 - RNA, 19 nt, Homo sapiens
  misc_RNA (1)...(19): siRNA sense strand
caaagaggaacaaagucau

SEQ ID NO: 2132187 - RNA, 19 nt, Homo sapiens
  misc_RNA (1)...(19): siRNA sense strand
ccacggacuacaucaggaa

SEQ ID NO: 2132188 - RNA, 19 nt, Homo sapiens
  misc_RNA (1)...(19): siRNA sense strand
ugacugugucugagaaguu

SEQ ID NO: 2132189 - RNA, 19 nt, Homo sapiens
  misc_RNA (1)...(19): siRNA sense strand
gcuaaggagguuggacaaa

SEQ ID NO: 2132190 - RNA, 19 nt, Homo sapiens
  misc_RNA (1)...(19): siRNA sense strand
aagaaccucucugccuuau

SEQ ID NO: 2132191 - RNA, 19 nt, Homo sapiens
  misc_RNA (1)...(19): siRNA sense strand
gccggucacuaacuuugug

SEQ ID NO: 2132192 - RNA, 19 nt, Homo sapiens
  misc_RNA (1)...(19): siRNA sense strand
gaggaacaaagucaucaag

SEQ ID NO: 2132193 - RNA, 19 nt, Homo sapiens
  misc_RNA (1)...(19): siRNA sense strand
ccaagaagggcaauuucca

SEQ ID NO: 2132194 - RNA, 19 nt, Homo sapiens
  misc_RNA (1)...(19): siRNA sense strand
acucuaugcugguaucaag

SEQ ID NO: 2132195 - RNA, 19 nt, Homo sapiens
  misc_RNA (1)...(19): siRNA sense strand
gggacucuaugcugguauc

SEQ ID NO: 2132196 - RNA, 19 nt, Homo sapiens
  misc_RNA (1)...(19): siRNA sense strand
gacuuuaaccggacagagu

SEQ ID NO: 2132197 - RNA, 19 nt, Homo sapiens
  misc_RNA (1)...(19): siRNA sense strand
guaucaaguucuuccucau

SEQ ID NO: 2132198 - RNA, 19 nt, Homo sapiens
  misc_RNA (1)...(19): siRNA sense strand
uccggaagcugcgagaaga

SEQ ID NO: 2132199 - RNA, 19 nt, Homo sapiens
  misc_RNA (1)...(19): siRNA sense strand
aucaaguucuuccucauug

SEQ ID NO: 2132200 - RNA, 19 nt, Homo sapiens
  misc_RNA (1)...(19): siRNA sense strand
gaccugacugugucugaga

SEQ ID NO: 2132201 - RNA, 19 nt, Homo sapiens
  misc_RNA (1)...(19): siRNA sense strand
agaauuacuugugcuucga

SEQ ID NO: 2132202 - RNA, 19 nt, Homo sapiens
  misc_RNA (1)...(19): siRNA sense strand
ucuacgucacggagaauua

SEQ ID NO: 2132203 - RNA, 19 nt, Homo sapiens
  misc_RNA (1)...(19): siRNA sense strand
gcugcugccucaucaacag

SEQ ID NO: 2132204 - RNA, 19 nt, Homo sapiens
  misc_RNA (1)...(19): siRNA sense strand
caaguucuuccucauugau

SEQ ID NO: 2132205 - RNA, 19 nt, Homo sapiens
  misc_RNA (1)...(19): siRNA sense strand
ggagcaucgugcccgaagu

SEQ ID NO: 2132206 - RNA, 19 nt, Homo sapiens
  misc_RNA (1)...(19): siRNA sense strand
gccaguacaucaagaucac

SEQ ID NO: 2132207 - RNA, 19 nt, Homo sapiens
  misc_RNA (1)...(19): siRNA sense strand
ucgggaagauggcugacau

SEQ ID NO: 2132208 - RNA, 19 nt, Homo sapiens
  misc_RNA (1)...(19): siRNA sense strand
aaggaagaccugacugugu

SEQ ID NO: 2132209 - RNA, 19 nt, Homo sapiens
  misc_RNA (1)...(19): siRNA sense strand
cgacugguacuccgucuac

SEQ ID NO: 2132210 - RNA, 19 nt, Homo sapiens
  misc_RNA (1)...(19): siRNA sense strand
aaagaggaacaaagucauc

SEQ ID NO: 2132211 - RNA, 19 nt, Homo sapiens
  misc_RNA (1)...(19): siRNA sense strand
gcagguuaacugaaaauau

SEQ ID NO: 2132212 - RNA, 19 nt, Homo sapiens
  misc_RNA (1)...(19): siRNA sense strand
ucgacugaaugagaucaaa

SEQ ID NO: 2132213 - RNA, 19 nt, Homo sapiens
  misc_RNA (1)...(19): siRNA sense strand
caucgugcccgaagugucu

SEQ ID NO: 2132214 - RNA, 19 nt, Homo sapiens
  misc_RNA (1)...(19): siRNA sense strand
ccaucccauuguucuuauu

SEQ ID NO: 2132215 - RNA, 19 nt, Homo sapiens
  misc_RNA (1)...(19): siRNA sense strand
caagccggucacuaacuuu

SEQ ID NO: 2132216 - RNA, 19 nt, Homo sapiens
  misc_RNA (1)...(19): siRNA sense strand
cacugugccuccucccaaa

SEQ ID NO: 2132217 - RNA, 19 nt, Homo sapiens
  misc_RNA (1)...(19): siRNA sense strand
cgauugcgcucgugacaaa

SEQ ID NO: 2132218 - RNA, 19 nt, Homo sapiens
  misc_RNA (1)...(19): siRNA sense strand
gaaagacaaauaccacguu

SEQ ID NO: 2132219 - RNA, 19 nt, Homo sapiens
  misc_RNA (1)...(19): siRNA sense strand
agacacagaaagacaaaua

SEQ ID NO: 2132220 - RNA, 19 nt, Homo sapiens
  misc_RNA (1)...(19): siRNA sense strand
agacaaauaccacguucua

SEQ ID NO: 2132221 - RNA, 19 nt, Homo sapiens
  misc_RNA (1)...(19): siRNA sense strand
cagcaggcguguccacaga

SEQ ID NO: 2132222 - RNA, 19 nt, Homo sapiens
  misc_RNA (1)...(19): siRNA sense strand
cuucugcucucaguucaua

SEQ ID NO: 2132223 - RNA, 19 nt, Homo sapiens
  misc_RNA (1)...(19): siRNA sense strand
cgaagaaaaugucgaaugg

SEQ ID NO: 2132224 - RNA, 19 nt, Homo sapiens
  misc_RNA (1)...(19): siRNA sense strand
gacaaauaccacguucuaa

SEQ ID NO: 2132225 - RNA, 19 nt, Homo sapiens
  misc_RNA (1)...(19): siRNA sense strand
gacaaaagccagacacaga

SEQ ID NO: 2132226 - RNA, 19 nt, Homo sapiens
  misc_RNA (1)...(19): siRNA sense strand
gcaaggggccuggauagaa

SEQ ID NO: 2132227 - RNA, 19 nt, Homo sapiens
  misc_RNA (1)...(19): siRNA sense strand
ccagacacagaaagacaaa

SEQ ID NO: 2132228 - RNA, 19 nt, Homo sapiens
  misc_RNA (1)...(19): siRNA sense strand
gaagggccagugaggagau

SEQ ID NO: 2132229 - RNA, 19 nt, Homo sapiens
  misc_RNA (1)...(19): siRNA sense strand
cacugugccuccucccaaa

SEQ ID NO: 2132230 - RNA, 19 nt, Homo sapiens
  misc_RNA (1)...(19): siRNA sense strand
gagggcagcuacgacaacu

SEQ ID NO: 2132231 - RNA, 19 nt, Homo sapiens
  misc_RNA (1)...(19): siRNA sense strand
aaagccagacacagaaaga

SEQ ID NO: 2132232 - RNA, 19 nt, Homo sapiens
  misc_RNA (1)...(19): siRNA sense strand
caaggggccuggauagaag

SEQ ID NO: 2132233 - RNA, 19 nt, Homo sapiens
  misc_RNA (1)...(19): siRNA sense strand
gccagacacagaaagacaa

SEQ ID NO: 2132234 - RNA, 19 nt, Homo sapiens
  misc_RNA (1)...(19): siRNA sense strand
gcgccgagcucuuccguaa

SEQ ID NO: 2132235 - RNA, 19 nt, Homo sapiens
  misc_RNA (1)...(19): siRNA sense strand
ccaccgaccuucuuuguug

SEQ ID NO: 2132236 - RNA, 19 nt, Homo sapiens
  misc_RNA (1)...(19): siRNA sense strand
cuacggaccuguucgauga

SEQ ID NO: 2132237 - RNA, 19 nt, Homo sapiens
  misc_RNA (1)...(19): siRNA sense strand
gcacugcuguuuccucuca

SEQ ID NO: 2132238 - RNA, 19 nt, Homo sapiens
  misc_RNA (1)...(19): siRNA sense strand
gaacagccuuggccucauc

SEQ ID NO: 2132239 - RNA, 19 nt, Homo sapiens
  misc_RNA (1)...(19): siRNA sense strand
ucaccaacgugcugucuuu

SEQ ID NO: 2132240 - RNA, 19 nt, Homo sapiens
  misc_RNA (1)...(19): siRNA sense strand
ucaagaagcugcugaaagc

SEQ ID NO: 2132241 - RNA, 19 nt, Homo sapiens
  misc_RNA (1)...(19): siRNA sense strand
gcaagggugucaucgacuu

SEQ ID NO: 2132242 - RNA, 19 nt, Homo sapiens
  misc_RNA (1)...(19): siRNA sense strand
ggacaaagcccagcucaag

SEQ ID NO: 2132243 - RNA, 19 nt, Homo sapiens
  misc_RNA (1)...(19): siRNA sense strand
gcaggucugugugggagua

SEQ ID NO: 2132244 - RNA, 19 nt, Homo sapiens
  misc_RNA (1)...(19): siRNA sense strand
ccaacgugcugucuuuguu

SEQ ID NO: 2132245 - RNA, 19 nt, Homo sapiens
  misc_RNA (1)...(19): siRNA sense strand
cagaguggcugauccagau

SEQ ID NO: 2132246 - RNA, 19 nt, Homo sapiens
  misc_RNA (1)...(19): siRNA sense strand
ggacaucagggccaccuuu

SEQ ID NO: 2132247 - RNA, 19 nt, Homo sapiens
  misc_RNA (1)...(19): siRNA sense strand
ucugagcccuuccgcauuu

SEQ ID NO: 2132248 - RNA, 19 nt, Homo sapiens
  misc_RNA (1)...(19): siRNA sense strand
ccacagagagggaggaaga

SEQ ID NO: 2132249 - RNA, 19 nt, Homo sapiens
  misc_RNA (1)...(19): siRNA sense strand
gcaugucacucgcaagaag

SEQ ID NO: 2132250 - RNA, 19 nt, Homo sapiens
  misc_RNA (1)...(19): siRNA sense strand
agauacagcuucaccuaug

SEQ ID NO: 2132251 - RNA, 19 nt, Homo sapiens
  misc_RNA (1)...(19): siRNA sense strand
gcagcgagcagcccucuau

SEQ ID NO: 2132252 - RNA, 19 nt, Homo sapiens
  misc_RNA (1)...(19): siRNA sense strand
gauacagcuucaccuaugu

SEQ ID NO: 2132253 - RNA, 19 nt, Homo sapiens
  misc_RNA (1)...(19): siRNA sense strand
gcaagaggacgccuguguu

SEQ ID NO: 2132254 - RNA, 19 nt, Homo sapiens
  misc_RNA (1)...(19): siRNA sense strand
cugcagcgcuucccagaga

SEQ ID NO: 2132255 - RNA, 19 nt, Homo sapiens
  misc_RNA (1)...(19): siRNA sense strand
cuaagacuguggacgagaa

SEQ ID NO: 2132256 - RNA, 19 nt, Homo sapiens
  misc_RNA (1)...(19): siRNA sense strand
ggaagaacggucugaugga

SEQ ID NO: 2132257 - RNA, 19 nt, Homo sapiens
  misc_RNA (1)...(19): siRNA sense strand
gauuguugcugaucuggau

SEQ ID NO: 2132258 - RNA, 19 nt, Homo sapiens
  misc_RNA (1)...(19): siRNA sense strand
guuccacaauuacauguau

SEQ ID NO: 2132259 - RNA, 19 nt, Homo sapiens
  misc_RNA (1)...(19): siRNA sense strand
gcucgacucugacuaugag

SEQ ID NO: 2132260 - RNA, 19 nt, Homo sapiens
  misc_RNA (1)...(19): siRNA sense strand
gagcagcccucuauauccu

SEQ ID NO: 2132261 - RNA, 19 nt, Homo sapiens
  misc_RNA (1)...(19): siRNA sense strand
uggcugcgcugaccaagga

SEQ ID NO: 2132262 - RNA, 19 nt, Homo sapiens
  misc_RNA (1)...(19): siRNA sense strand
ggagagcggcuucgaggau

SEQ ID NO: 2132263 - RNA, 19 nt, Homo sapiens
  misc_RNA (1)...(19): siRNA sense strand
caagaggacgccuguguuc

SEQ ID NO: 2132264 - RNA, 19 nt, Homo sapiens
  misc_RNA (1)...(19): siRNA sense strand
ggaauccaccgaccuucuu

SEQ ID NO: 2132265 - RNA, 19 nt, Homo sapiens
  misc_RNA (1)...(19): siRNA sense strand
cccggaaccuggucaagaa

SEQ ID NO: 2132266 - RNA, 19 nt, Homo sapiens
  misc_RNA (1)...(19): siRNA sense strand
gcaacugcaucuccuacgu

SEQ ID NO: 2132267 - RNA, 19 nt, Homo sapiens
  misc_RNA (1)...(19): siRNA sense strand
cagagccacugcagaguca

SEQ ID NO: 2132268 - RNA, 19 nt, Homo sapiens
  misc_RNA (1)...(19): siRNA sense strand
gcgagcagcccucuauauc

SEQ ID NO: 2132269 - RNA, 19 nt, Homo sapiens
  misc_RNA (1)...(19): siRNA sense strand
cagcugcgcuccugcacau

SEQ ID NO: 2132270 - RNA, 19 nt, Homo sapiens
  misc_RNA (1)...(19): siRNA sense strand
agcaggagcuggugcagaa

SEQ ID NO: 2132271 - RNA, 19 nt, Homo sapiens
  misc_RNA (1)...(19): siRNA sense strand
cugcaucuccuacguguuu

SEQ ID NO: 2132272 - RNA, 19 nt, Homo sapiens
  misc_RNA (1)...(19): siRNA sense strand
ucagauacagcuucaccua

SEQ ID NO: 2132273 - RNA, 19 nt, Homo sapiens
  misc_RNA (1)...(19): siRNA sense strand
gaggaagaacggucugaug

SEQ ID NO: 2132274 - RNA, 19 nt, Homo sapiens
  misc_RNA (1)...(19): siRNA sense strand
gcggagccuucacaggaaa

SEQ ID NO: 2132275 - RNA, 19 nt, Homo sapiens
  misc_RNA (1)...(19): siRNA sense strand
gaauccaccgaccuucuuu

SEQ ID NO: 2132276 - RNA, 19 nt, Homo sapiens
  misc_RNA (1)...(19): siRNA sense strand
gggagcuggugcccauuga

SEQ ID NO: 2132277 - RNA, 19 nt, Homo sapiens
  misc_RNA (1)...(19): siRNA sense strand
ggccuuugcuggcuuugug

SEQ ID NO: 2132278 - RNA, 19 nt, Homo sapiens
  misc_RNA (1)...(19): siRNA sense strand
ggagggacggucaccauuc

SEQ ID NO: 2132279 - RNA, 19 nt, Homo sapiens
  misc_RNA (1)...(19): siRNA sense strand
ugguggagcuccuggauuc

SEQ ID NO: 2132280 - RNA, 19 nt, Homo sapiens
  misc_RNA (1)...(19): siRNA sense strand
ggucaccauuccugagugu

SEQ ID NO: 2132281 - RNA, 19 nt, Homo sapiens
  misc_RNA (1)...(19): siRNA sense strand
ugcagaggcuggagacaga

SEQ ID NO: 2132282 - RNA, 19 nt, Homo sapiens
  misc_RNA (1)...(19): siRNA sense strand
ccacguaccgggucaucuu

SEQ ID NO: 2132283 - RNA, 19 nt, Homo sapiens
  misc_RNA (1)...(19): siRNA sense strand
gcaguguggccgagagcua

SEQ ID NO: 2132284 - RNA, 19 nt, Homo sapiens
  misc_RNA (1)...(19): siRNA sense strand
gggugacgcaguuugcaua

SEQ ID NO: 2132285 - RNA, 19 nt, Homo sapiens
  misc_RNA (1)...(19): siRNA sense strand
gcagagcagcggcuucaca

SEQ ID NO: 2132286 - RNA, 19 nt, Homo sapiens
  misc_RNA (1)...(19): siRNA sense strand
cagcaugucacucgcaaga

SEQ ID NO: 2132287 - RNA, 19 nt, Homo sapiens
  misc_RNA (1)...(19): siRNA sense strand
gucaagaacgccaagaaga

SEQ ID NO: 2132288 - RNA, 19 nt, Homo sapiens
  misc_RNA (1)...(19): siRNA sense strand
ugacagcgccgagcucuuc

SEQ ID NO: 2132289 - RNA, 19 nt, Homo sapiens
  misc_RNA (1)...(19): siRNA sense strand
gaggagagcacgguguuca

SEQ ID NO: 2132290 - RNA, 19 nt, Homo sapiens
  misc_RNA (1)...(19): siRNA sense strand
guggagggccugaaugugu

SEQ ID NO: 2132291 - RNA, 19 nt, Homo sapiens
  misc_RNA (1)...(19): siRNA sense strand
gcuguuuccucucagauac

SEQ ID NO: 2132292 - RNA, 19 nt, Homo sapiens
  misc_RNA (1)...(19): siRNA sense strand
gcugguagaggacgauuuc

SEQ ID NO: 2132293 - RNA, 19 nt, Homo sapiens
  misc_RNA (1)...(19): siRNA sense strand
caacguguccaaccugaag

SEQ ID NO: 2132294 - RNA, 19 nt, Homo sapiens
  misc_RNA (1)...(19): siRNA sense strand
ccaccagcaguuugacuuu

SEQ ID NO: 2132295 - RNA, 19 nt, Homo sapiens
  misc_RNA (1)...(19): siRNA sense strand
ggacagcgaccagaguagu

SEQ ID NO: 2132296 - RNA, 19 nt, Homo sapiens
  misc_RNA (1)...(19): siRNA sense strand
ugugggacuucuacacuga

SEQ ID NO: 2132297 - RNA, 19 nt, Homo sapiens
  misc_RNA (1)...(19): siRNA sense strand
gcuggugcccauugaggua

SEQ ID NO: 2132298 - RNA, 19 nt, Homo sapiens
  misc_RNA (1)...(19): siRNA sense strand
ugacgcaguuugcauacag

SEQ ID NO: 2132299 - RNA, 19 nt, Homo sapiens
  misc_RNA (1)...(19): siRNA sense strand
gacuuugucguccguauga

SEQ ID NO: 2132300 - RNA, 19 nt, Homo sapiens
  misc_RNA (1)...(19): siRNA sense strand
cccacgcccuucaucauug

SEQ ID NO: 2132301 - RNA, 19 nt, Homo sapiens
  misc_RNA (1)...(19): siRNA sense strand
guacagccaguuccagaca

SEQ ID NO: 2132302 - RNA, 19 nt, Homo sapiens
  misc_RNA (1)...(19): siRNA sense strand
ucaagggugugcggucaga

SEQ ID NO: 2132303 - RNA, 19 nt, Homo sapiens
  misc_RNA (1)...(19): siRNA sense strand
gcugugguccgcuucauca

SEQ ID NO: 2132304 - RNA, 19 nt, Homo sapiens
  misc_RNA (1)...(19): siRNA sense strand
cccuagacguggcuucuga

SEQ ID NO: 2132305 - RNA, 19 nt, Homo sapiens
  misc_RNA (1)...(19): siRNA sense strand
caccagcaguuugacuuug

SEQ ID NO: 2132306 - RNA, 19 nt, Homo sapiens
  misc_RNA (1)...(19): siRNA sense strand
ccugucauccgcuuccaua

SEQ ID NO: 2132307 - RNA, 19 nt, Homo sapiens
  misc_RNA (1)...(19): siRNA sense strand
ugaagaugcaggacaagga

SEQ ID NO: 2132308 - RNA, 19 nt, Homo sapiens
  misc_RNA (1)...(19): siRNA sense strand
ucacggagcacaagguucu

SEQ ID NO: 2132309 - RNA, 19 nt, Homo sapiens
  misc_RNA (1)...(19): siRNA sense strand
cgagggcacucuguacaag

SEQ ID NO: 2132310 - RNA, 19 nt, Homo sapiens
  misc_RNA (1)...(19): siRNA sense strand
ccaguucuaccucaaguuc

SEQ ID NO: 2132311 - RNA, 19 nt, Homo sapiens
  misc_RNA (1)...(19): siRNA sense strand
ggucaagaacgccaagaag

SEQ ID NO: 2132312 - RNA, 19 nt, Homo sapiens
  misc_RNA (1)...(19): siRNA sense strand
uccguaagcagcugcauaa

SEQ ID NO: 2132313 - RNA, 19 nt, Homo sapiens
  misc_RNA (1)...(19): siRNA sense strand
gucauccgcuuccauaagg

SEQ ID NO: 2132314 - RNA, 19 nt, Homo sapiens
  misc_RNA (1)...(19): siRNA sense strand
gcugcucgaugugauuguu

SEQ ID NO: 2132315 - RNA, 19 nt, Homo sapiens
  misc_RNA (1)...(19): siRNA sense strand
ccucucagauacagcuuca

SEQ ID NO: 2132316 - RNA, 19 nt, Homo sapiens
  misc_RNA (1)...(19): siRNA sense strand
caacgugcugucuuuguuc

SEQ ID NO: 2132317 - RNA, 19 nt, Homo sapiens
  misc_RNA (1)...(19): siRNA sense strand
uggugcagcugcucucaga

SEQ ID NO: 2132318 - RNA, 19 nt, Homo sapiens
  misc_RNA (1)...(19): siRNA sense strand
gccgagcucuuccguaagc

SEQ ID NO: 2132319 - RNA, 19 nt, Homo sapiens
  misc_RNA (1)...(19): siRNA sense strand
agcaagagccgccuacuuc

SEQ ID NO: 2132320 - RNA, 19 nt, Homo sapiens
  misc_RNA (1)...(19): siRNA sense strand
cagcaagagccgccuacuu

SEQ ID NO: 2132321 - RNA, 19 nt, Homo sapiens
  misc_RNA (1)...(19): siRNA sense strand
ggaacagccuuggccucau

SEQ ID NO: 2132322 - RNA, 19 nt, Homo sapiens
  misc_RNA (1)...(19): siRNA sense strand
cagauacagcuucaccuau

SEQ ID NO: 2132323 - RNA, 19 nt, Homo sapiens
  misc_RNA (1)...(19): siRNA sense strand
ggaccaggaggacgagauc

SEQ ID NO: 2132324 - RNA, 19 nt, Homo sapiens
  misc_RNA (1)...(19): siRNA sense strand
gacaucagggccaccuuug

SEQ ID NO: 2132325 - RNA, 19 nt, Homo sapiens
  misc_RNA (1)...(19): siRNA sense strand
gagggacggucaccauucc

SEQ ID NO: 2132326 - RNA, 19 nt, Homo sapiens
  misc_RNA (1)...(19): siRNA sense strand
ugagcagccugguggaaag

SEQ ID NO: 2132327 - RNA, 19 nt, Homo sapiens
  misc_RNA (1)...(19): siRNA sense strand
cagcagagagugagaacag

SEQ ID NO: 2132328 - RNA, 19 nt, Homo sapiens
  misc_RNA (1)...(19): siRNA sense strand
ccacguggagggccugaau

SEQ ID NO: 2132329 - RNA, 19 nt, Homo sapiens
  misc_RNA (1)...(19): siRNA sense strand
agggcacucuguacaagaa

SEQ ID NO: 2132330 - RNA, 19 nt, Homo sapiens
  misc_RNA (1)...(19): siRNA sense strand
cagccaggccauccacuau

SEQ ID NO: 2132331 - RNA, 19 nt, Homo sapiens
  misc_RNA (1)...(19): siRNA sense strand
ccauggaguuugaguucag

SEQ ID NO: 2132332 - RNA, 19 nt, Homo sapiens
  misc_RNA (1)...(19): siRNA sense strand
gccaggccauccacuaugc

SEQ ID NO: 2132333 - RNA, 19 nt, Homo sapiens
  misc_RNA (1)...(19): siRNA sense strand
gagggcacucuguacaaga

SEQ ID NO: 2132334 - RNA, 19 nt, Homo sapiens
  misc_RNA (1)...(19): siRNA sense strand
gcgccgagcucuuccguaa

SEQ ID NO: 2132335 - RNA, 19 nt, Homo sapiens
  misc_RNA (1)...(19): siRNA sense strand
ccaccgaccuucuuuguug

SEQ ID NO: 2132336 - RNA, 19 nt, Homo sapiens
  misc_RNA (1)...(19): siRNA sense strand
cuacggaccuguucgauga

SEQ ID NO: 2132337 - RNA, 19 nt, Homo sapiens
  misc_RNA (1)...(19): siRNA sense strand
gcacugcuguuuccucuca

SEQ ID NO: 2132338 - RNA, 19 nt, Homo sapiens
  misc_RNA (1)...(19): siRNA sense strand
gaacagccuuggccucauc

SEQ ID NO: 2132339 - RNA, 19 nt, Homo sapiens
  misc_RNA (1)...(19): siRNA sense strand
ucaccaacgugcugucuuu

SEQ ID NO: 2132340 - RNA, 19 nt, Homo sapiens
  misc_RNA (1)...(19): siRNA sense strand
ucaagaagcugcugaaagc

SEQ ID NO: 2132341 - RNA, 19 nt, Homo sapiens
  misc_RNA (1)...(19): siRNA sense strand
gcaagggugucaucgacuu

SEQ ID NO: 2132342 - RNA, 19 nt, Homo sapiens
  misc_RNA (1)...(19): siRNA sense strand
ggacaaagcccagcucaag

SEQ ID NO: 2132343 - RNA, 19 nt, Homo sapiens
  misc_RNA (1)...(19): siRNA sense strand
gcaggucugugugggagua

SEQ ID NO: 2132344 - RNA, 19 nt, Homo sapiens
  misc_RNA (1)...(19): siRNA sense strand
ccaacgugcugucuuuguu

SEQ ID NO: 2132345 - RNA, 19 nt, Homo sapiens
  misc_RNA (1)...(19): siRNA sense strand
cagaguggcugauccagau

SEQ ID NO: 2132346 - RNA, 19 nt, Homo sapiens
  misc_RNA (1)...(19): siRNA sense strand
ggacaucagggccaccuuu

SEQ ID NO: 2132347 - RNA, 19 nt, Homo sapiens
  misc_RNA (1)...(19): siRNA sense strand
ucugagcccuuccgcauuu

SEQ ID NO: 2132348 - RNA, 19 nt, Homo sapiens
  misc_RNA (1)...(19): siRNA sense strand
ccacagagagggaggaaga

SEQ ID NO: 2132349 - RNA, 19 nt, Homo sapiens
  misc_RNA (1)...(19): siRNA sense strand
gcaugucacucgcaagaag

SEQ ID NO: 2132350 - RNA, 19 nt, Homo sapiens
  misc_RNA (1)...(19): siRNA sense strand
agauacagcuucaccuaug

SEQ ID NO: 2132351 - RNA, 19 nt, Homo sapiens
  misc_RNA (1)...(19): siRNA sense strand
gcagcgagcagcccucuau

SEQ ID NO: 2132352 - RNA, 19 nt, Homo sapiens
  misc_RNA (1)...(19): siRNA sense strand
gauacagcuucaccuaugu

SEQ ID NO: 2132353 - RNA, 19 nt, Homo sapiens
  misc_RNA (1)...(19): siRNA sense strand
gcaagaggacgccuguguu

SEQ ID NO: 2132354 - RNA, 19 nt, Homo sapiens
  misc_RNA (1)...(19): siRNA sense strand
cugcagcgcuucccagaga

SEQ ID NO: 2132355 - RNA, 19 nt, Homo sapiens
  misc_RNA (1)...(19): siRNA sense strand
cuaagacuguggacgagaa

SEQ ID NO: 2132356 - RNA, 19 nt, Homo sapiens
  misc_RNA (1)...(19): siRNA sense strand
ggaagaacggucugaugga

SEQ ID NO: 2132357 - RNA, 19 nt, Homo sapiens
  misc_RNA (1)...(19): siRNA sense strand
gauuguugcugaucuggau

SEQ ID NO: 2132358 - RNA, 19 nt, Homo sapiens
  misc_RNA (1)...(19): siRNA sense strand
guuccacaauuacauguau

SEQ ID NO: 2132359 - RNA, 19 nt, Homo sapiens
  misc_RNA (1)...(19): siRNA sense strand
gcucgacucugacuaugag

SEQ ID NO: 2132360 - RNA, 19 nt, Homo sapiens
  misc_RNA (1)...(19): siRNA sense strand
gagcagcccucuauauccu

SEQ ID NO: 2132361 - RNA, 19 nt, Homo sapiens
  misc_RNA (1)...(19): siRNA sense strand
uggcugcgcugaccaagga

SEQ ID NO: 2132362 - RNA, 19 nt, Homo sapiens
  misc_RNA (1)...(19): siRNA sense strand
ggagagcggcuucgaggau

SEQ ID NO: 2132363 - RNA, 19 nt, Homo sapiens
  misc_RNA (1)...(19): siRNA sense strand
caagaggacgccuguguuc

SEQ ID NO: 2132364 - RNA, 19 nt, Homo sapiens
  misc_RNA (1)...(19): siRNA sense strand
ggaauccaccgaccuucuu

SEQ ID NO: 2132365 - RNA, 19 nt, Homo sapiens
  misc_RNA (1)...(19): siRNA sense strand
cccggaaccuggucaagaa

SEQ ID NO: 2132366 - RNA, 19 nt, Homo sapiens
  misc_RNA (1)...(19): siRNA sense strand
gcaacugcaucuccuacgu

SEQ ID NO: 2132367 - RNA, 19 nt, Homo sapiens
  misc_RNA (1)...(19): siRNA sense strand
cagagccacugcagaguca

SEQ ID NO: 2132368 - RNA, 19 nt, Homo sapiens
  misc_RNA (1)...(19): siRNA sense strand
gcgagcagcccucuauauc

SEQ ID NO: 2132369 - RNA, 19 nt, Homo sapiens
  misc_RNA (1)...(19): siRNA sense strand
cagcugcgcuccugcacau

SEQ ID NO: 2132370 - RNA, 19 nt, Homo sapiens
  misc_RNA (1)...(19): siRNA sense strand
agcaggagcuggugcagaa

SEQ ID NO: 2132371 - RNA, 19 nt, Homo sapiens
  misc_RNA (1)...(19): siRNA sense strand
cugcaucuccuacguguuu

SEQ ID NO: 2132372 - RNA, 19 nt, Homo sapiens
  misc_RNA (1)...(19): siRNA sense strand
ucagauacagcuucaccua

SEQ ID NO: 2132373 - RNA, 19 nt, Homo sapiens
  misc_RNA (1)...(19): siRNA sense strand
gaggaagaacggucugaug

SEQ ID NO: 2132374 - RNA, 19 nt, Homo sapiens
  misc_RNA (1)...(19): siRNA sense strand
gcggagccuucacaggaaa

SEQ ID NO: 2132375 - RNA, 19 nt, Homo sapiens
  misc_RNA (1)...(19): siRNA sense strand
gaauccaccgaccuucuuu

SEQ ID NO: 2132376 - RNA, 19 nt, Homo sapiens
  misc_RNA (1)...(19): siRNA sense strand
gggagcuggugcccauuga

SEQ ID NO: 2132377 - RNA, 19 nt, Homo sapiens
  misc_RNA (1)...(19): siRNA sense strand
ggccuuugcuggcuuugug

SEQ ID NO: 2132378 - RNA, 19 nt, Homo sapiens
  misc_RNA (1)...(19): siRNA sense strand
ggagggacggucaccauuc

SEQ ID NO: 2132379 - RNA, 19 nt, Homo sapiens
  misc_RNA (1)...(19): siRNA sense strand
ugguggagcuccuggauuc

SEQ ID NO: 2132380 - RNA, 19 nt, Homo sapiens
  misc_RNA (1)...(19): siRNA sense strand
ggucaccauuccugagugu

SEQ ID NO: 2132381 - RNA, 19 nt, Homo sapiens
  misc_RNA (1)...(19): siRNA sense strand
ugcagaggcuggagacaga

SEQ ID NO: 2132382 - RNA, 19 nt, Homo sapiens
  misc_RNA (1)...(19): siRNA sense strand
ccacguaccgggucaucuu

SEQ ID NO: 2132383 - RNA, 19 nt, Homo sapiens
  misc_RNA (1)...(19): siRNA sense strand
gcaguguggccgagagcua

SEQ ID NO: 2132384 - RNA, 19 nt, Homo sapiens
  misc_RNA (1)...(19): siRNA sense strand
gggugacgcaguuugcaua

SEQ ID NO: 2132385 - RNA, 19 nt, Homo sapiens
  misc_RNA (1)...(19): siRNA sense strand
gcagagcagcggcuucaca

SEQ ID NO: 2132386 - RNA, 19 nt, Homo sapiens
  misc_RNA (1)...(19): siRNA sense strand
cagcaugucacucgcaaga

SEQ ID NO: 2132387 - RNA, 19 nt, Homo sapiens
  misc_RNA (1)...(19): siRNA sense strand
gucaagaacgccaagaaga

SEQ ID NO: 2132388 - RNA, 19 nt, Homo sapiens
  misc_RNA (1)...(19): siRNA sense strand
ugacagcgccgagcucuuc

SEQ ID NO: 2132389 - RNA, 19 nt, Homo sapiens
  misc_RNA (1)...(19): siRNA sense strand
gaggagagcacgguguuca

SEQ ID NO: 2132390 - RNA, 19 nt, Homo sapiens
  misc_RNA (1)...(19): siRNA sense strand
guggagggccugaaugugu

SEQ ID NO: 2132391 - RNA, 19 nt, Homo sapiens
  misc_RNA (1)...(19): siRNA sense strand
gcuguuuccucucagauac

SEQ ID NO: 2132392 - RNA, 19 nt, Homo sapiens
  misc_RNA (1)...(19): siRNA sense strand
gcugguagaggacgauuuc

SEQ ID NO: 2132393 - RNA, 19 nt, Homo sapiens
  misc_RNA (1)...(19): siRNA sense strand
caacguguccaaccugaag

SEQ ID NO: 2132394 - RNA, 19 nt, Homo sapiens
  misc_RNA (1)...(19): siRNA sense strand
ccaccagcaguuugacuuu

SEQ ID NO: 2132395 - RNA, 19 nt, Homo sapiens
  misc_RNA (1)...(19): siRNA sense strand
ggacagcgaccagaguagu

SEQ ID NO: 2132396 - RNA, 19 nt, Homo sapiens
  misc_RNA (1)...(19): siRNA sense strand
ugugggacuucuacacuga

SEQ ID NO: 2132397 - RNA, 19 nt, Homo sapiens
  misc_RNA (1)...(19): siRNA sense strand
gcuggugcccauugaggua

SEQ ID NO: 2132398 - RNA, 19 nt, Homo sapiens
  misc_RNA (1)...(19): siRNA sense strand
ugacgcaguuugcauacag

SEQ ID NO: 2132399 - RNA, 19 nt, Homo sapiens
  misc_RNA (1)...(19): siRNA sense strand
gacuuugucguccguauga

SEQ ID NO: 2132400 - RNA, 19 nt, Homo sapiens
  misc_RNA (1)...(19): siRNA sense strand
cccacgcccuucaucauug

SEQ ID NO: 2132401 - RNA, 19 nt, Homo sapiens
  misc_RNA (1)...(19): siRNA sense strand
guacagccaguuccagaca

SEQ ID NO: 2132402 - RNA, 19 nt, Homo sapiens
  misc_RNA (1)...(19): siRNA sense strand
ucaagggugugcggucaga

SEQ ID NO: 2132403 - RNA, 19 nt, Homo sapiens
  misc_RNA (1)...(19): siRNA sense strand
gcugugguccgcuucauca

SEQ ID NO: 2132404 - RNA, 19 nt, Homo sapiens
  misc_RNA (1)...(19): siRNA sense strand
cccuagacguggcuucuga

SEQ ID NO: 2132405 - RNA, 19 nt, Homo sapiens
  misc_RNA (1)...(19): siRNA sense strand
caccagcaguuugacuuug

SEQ ID NO: 2132406 - RNA, 19 nt, Homo sapiens
  misc_RNA (1)...(19): siRNA sense strand
ccugucauccgcuuccaua

SEQ ID NO: 2132407 - RNA, 19 nt, Homo sapiens
  misc_RNA (1)...(19): siRNA sense strand
ugaagaugcaggacaagga

SEQ ID NO: 2132408 - RNA, 19 nt, Homo sapiens
  misc_RNA (1)...(19): siRNA sense strand
ucacggagcacaagguucu

SEQ ID NO: 2132409 - RNA, 19 nt, Homo sapiens
  misc_RNA (1)...(19): siRNA sense strand
cgagggcacucuguacaag

SEQ ID NO: 2132410 - RNA, 19 nt, Homo sapiens
  misc_RNA (1)...(19): siRNA sense strand
ccaguucuaccucaaguuc

SEQ ID NO: 2132411 - RNA, 19 nt, Homo sapiens
  misc_RNA (1)...(19): siRNA sense strand
ggucaagaacgccaagaag

SEQ ID NO: 2132412 - RNA, 19 nt, Homo sapiens
  misc_RNA (1)...(19): siRNA sense strand
uccguaagcagcugcauaa

SEQ ID NO: 2132413 - RNA, 19 nt, Homo sapiens
  misc_RNA (1)...(19): siRNA sense strand
gucauccgcuuccauaagg

SEQ ID NO: 2132414 - RNA, 19 nt, Homo sapiens
  misc_RNA (1)...(19): siRNA sense strand
gcugcucgaugugauuguu

SEQ ID NO: 2132415 - RNA, 19 nt, Homo sapiens
  misc_RNA (1)...(19): siRNA sense strand
ccucucagauacagcuuca

SEQ ID NO: 2132416 - RNA, 19 nt, Homo sapiens
  misc_RNA (1)...(19): siRNA sense strand
caacgugcugucuuuguuc

SEQ ID NO: 2132417 - RNA, 19 nt, Homo sapiens
  misc_RNA (1)...(19): siRNA sense strand
uggugcagcugcucucaga

SEQ ID NO: 2132418 - RNA, 19 nt, Homo sapiens
  misc_RNA (1)...(19): siRNA sense strand
gccgagcucuuccguaagc

SEQ ID NO: 2132419 - RNA, 19 nt, Homo sapiens
  misc_RNA (1)...(19): siRNA sense strand
agcaagagccgccuacuuc

SEQ ID NO: 2132420 - RNA, 19 nt, Homo sapiens
  misc_RNA (1)...(19): siRNA sense strand
cagcaagagccgccuacuu

SEQ ID NO: 2132421 - RNA, 19 nt, Homo sapiens
  misc_RNA (1)...(19): siRNA sense strand
ggaacagccuuggccucau

SEQ ID NO: 2132422 - RNA, 19 nt, Homo sapiens
  misc_RNA (1)...(19): siRNA sense strand
cagauacagcuucaccuau

SEQ ID NO: 2132423 - RNA, 19 nt, Homo sapiens
  misc_RNA (1)...(19): siRNA sense strand
ggaccaggaggacgagauc

SEQ ID NO: 2132424 - RNA, 19 nt, Homo sapiens
  misc_RNA (1)...(19): siRNA sense strand
gacaucagggccaccuuug

SEQ ID NO: 2132425 - RNA, 19 nt, Homo sapiens
  misc_RNA (1)...(19): siRNA sense strand
gagggacggucaccauucc

SEQ ID NO: 2132426 - RNA, 19 nt, Homo sapiens
  misc_RNA (1)...(19): siRNA sense strand
ugagcagccugguggaaag

SEQ ID NO: 2132427 - RNA, 19 nt, Homo sapiens
  misc_RNA (1)...(19): siRNA sense strand
ccacguggagggccugaau

SEQ ID NO: 2132428 - RNA, 19 nt, Homo sapiens
  misc_RNA (1)...(19): siRNA sense strand
agggcacucuguacaagaa

SEQ ID NO: 2132429 - RNA, 19 nt, Homo sapiens
  misc_RNA (1)...(19): siRNA sense strand
cagccaggccauccacuau

SEQ ID NO: 2132430 - RNA, 19 nt, Homo sapiens
  misc_RNA (1)...(19): siRNA sense strand
ccauggaguuugaguucag

SEQ ID NO: 2132431 - RNA, 19 nt, Homo sapiens
  misc_RNA (1)...(19): siRNA sense strand
gccaggccauccacuaugc

SEQ ID NO: 2132432 - RNA, 19 nt, Homo sapiens
  misc_RNA (1)...(19): siRNA sense strand
cagcgagcagcccucuaua

SEQ ID NO: 2132433 - RNA, 19 nt, Homo sapiens
  misc_RNA (1)...(19): siRNA sense strand
gagggcacucuguacaaga

SEQ ID NO: 2132434 - RNA, 19 nt, Homo sapiens
  misc_RNA (1)...(19): siRNA sense strand
gagauuagcucauuguuug

SEQ ID NO: 2132435 - RNA, 19 nt, Homo sapiens
  misc_RNA (1)...(19): siRNA sense strand
caacaucaguggcccuuua

SEQ ID NO: 2132436 - RNA, 19 nt, Homo sapiens
  misc_RNA (1)...(19): siRNA sense strand
gcagagccaugaagaaguu

SEQ ID NO: 2132437 - RNA, 19 nt, Homo sapiens
  misc_RNA (1)...(19): siRNA sense strand
acacagcgauuaugucauu

SEQ ID NO: 2132438 - RNA, 19 nt, Homo sapiens
  misc_RNA (1)...(19): siRNA sense strand
uugcaaagcuucacacaaa

SEQ ID NO: 2132439 - RNA, 19 nt, Homo sapiens
  misc_RNA (1)...(19): siRNA sense strand
uaaaggugcugaagaaugg

SEQ ID NO: 2132440 - RNA, 19 nt, Homo sapiens
  misc_RNA (1)...(19): siRNA sense strand
cagagaagguccaagcuau

SEQ ID NO: 2132441 - RNA, 19 nt, Homo sapiens
  misc_RNA (1)...(19): siRNA sense strand
gaacacagcccugcacauc

SEQ ID NO: 2132442 - RNA, 19 nt, Homo sapiens
  misc_RNA (1)...(19): siRNA sense strand
caaagacucggauguugua

SEQ ID NO: 2132443 - RNA, 19 nt, Homo sapiens
  misc_RNA (1)...(19): siRNA sense strand
gauacaagcggcgaguuua

SEQ ID NO: 2132444 - RNA, 19 nt, Homo sapiens
  misc_RNA (1)...(19): siRNA sense strand
gcaaccgccucgucaugaa

SEQ ID NO: 2132445 - RNA, 19 nt, Homo sapiens
  misc_RNA (1)...(19): siRNA sense strand
caaaggcgaaccugaagaa

SEQ ID NO: 2132446 - RNA, 19 nt, Homo sapiens
  misc_RNA (1)...(19): siRNA sense strand
gagcugguguuugcuguga

SEQ ID NO: 2132447 - RNA, 19 nt, Homo sapiens
  misc_RNA (1)...(19): siRNA sense strand
gccguaaccugaacaagau

SEQ ID NO: 2132448 - RNA, 19 nt, Homo sapiens
  misc_RNA (1)...(19): siRNA sense strand
aggcgaaccugaagaaguu

SEQ ID NO: 2132449 - RNA, 19 nt, Homo sapiens
  misc_RNA (1)...(19): siRNA sense strand
ggaagucacccgaggacaa

SEQ ID NO: 2132450 - RNA, 19 nt, Homo sapiens
  misc_RNA (1)...(19): siRNA sense strand
ucaugaagguugugucugu

SEQ ID NO: 2132451 - RNA, 19 nt, Homo sapiens
  misc_RNA (1)...(19): siRNA sense strand
gggaugcccucugcuguga

SEQ ID NO: 2132452 - RNA, 19 nt, Homo sapiens
  misc_RNA (1)...(19): siRNA sense strand
ccacaaagacucggauguu

SEQ ID NO: 2132453 - RNA, 19 nt, Homo sapiens
  misc_RNA (1)...(19): siRNA sense strand
cacaaagacucggauguug

SEQ ID NO: 2132454 - RNA, 19 nt, Homo sapiens
  misc_RNA (1)...(19): siRNA sense strand
caaggccucccucuucuuu

SEQ ID NO: 2132455 - RNA, 19 nt, Homo sapiens
  misc_RNA (1)...(19): siRNA sense strand
caagguggcacgccuguug

SEQ ID NO: 2132456 - RNA, 19 nt, Homo sapiens
  misc_RNA (1)...(19): siRNA sense strand
acacaaaggcgaaccugaa

SEQ ID NO: 2132457 - RNA, 19 nt, Homo sapiens
  misc_RNA (1)...(19): siRNA sense strand
caucaucgcagggaacuuu

SEQ ID NO: 2132458 - RNA, 19 nt, Homo sapiens
  misc_RNA (1)...(19): siRNA sense strand
cgagauuagcucauuguuu

SEQ ID NO: 2132459 - RNA, 19 nt, Homo sapiens
  misc_RNA (1)...(19): siRNA sense strand
gcgcucaacuaugggcuuu

SEQ ID NO: 2132460 - RNA, 19 nt, Homo sapiens
  misc_RNA (1)...(19): siRNA sense strand
gaugauaagcaguuugcaa

SEQ ID NO: 2132461 - RNA, 19 nt, Homo sapiens
  misc_RNA (1)...(19): siRNA sense strand
ucacacagcgauuauguca

SEQ ID NO: 2132462 - RNA, 19 nt, Homo sapiens
  misc_RNA (1)...(19): siRNA sense strand
ccagcgauaucaaccugaa

SEQ ID NO: 2132463 - RNA, 19 nt, Homo sapiens
  misc_RNA (1)...(19): siRNA sense strand
acacagcccugcacaucug

SEQ ID NO: 2132464 - RNA, 19 nt, Homo sapiens
  misc_RNA (1)...(19): siRNA sense strand
gggcuucaccugacuacaa

SEQ ID NO: 2132465 - RNA, 19 nt, Homo sapiens
  misc_RNA (1)...(19): siRNA sense strand
gauaagcaguuugcaaagc

SEQ ID NO: 2132466 - RNA, 19 nt, Homo sapiens
  misc_RNA (1)...(19): siRNA sense strand
cgaggaccaugagauagaa

SEQ ID NO: 2132467 - RNA, 19 nt, Homo sapiens
  misc_RNA (1)...(19): siRNA sense strand
cagcuggccucaucguugu

SEQ ID NO: 2132468 - RNA, 19 nt, Homo sapiens
  misc_RNA (1)...(19): siRNA sense strand
ugcuaaaggugcugaagaa

SEQ ID NO: 2132469 - RNA, 19 nt, Homo sapiens
  misc_RNA (1)...(19): siRNA sense strand
cgacaaaccaacugugauc

SEQ ID NO: 2132470 - RNA, 19 nt, Homo sapiens
  misc_RNA (1)...(19): siRNA sense strand
gacgacaaaccaacuguga

SEQ ID NO: 2132471 - RNA, 19 nt, Homo sapiens
  misc_RNA (1)...(19): siRNA sense strand
ccagagaagguccaagcua

SEQ ID NO: 2132472 - RNA, 19 nt, Homo sapiens
  misc_RNA (1)...(19): siRNA sense strand
uugagaagcuggacgagau

SEQ ID NO: 2132473 - RNA, 19 nt, Homo sapiens
  misc_RNA (1)...(19): siRNA sense strand
ugacaaggaagccagaaga

SEQ ID NO: 2132474 - RNA, 19 nt, Homo sapiens
  misc_RNA (1)...(19): siRNA sense strand
acagggauguccgcaacua

SEQ ID NO: 2132475 - RNA, 19 nt, Homo sapiens
  misc_RNA (1)...(19): siRNA sense strand
gaggagcuggcccgaauug

SEQ ID NO: 2132476 - RNA, 19 nt, Homo sapiens
  misc_RNA (1)...(19): siRNA sense strand
caucgaugauaagcaguuu

SEQ ID NO: 2132477 - RNA, 19 nt, Homo sapiens
  misc_RNA (1)...(19): siRNA sense strand
ccaggacgcgcucaacuau

SEQ ID NO: 2132478 - RNA, 19 nt, Homo sapiens
  misc_RNA (1)...(19): siRNA sense strand
guuguaccauucagggaaa

SEQ ID NO: 2132479 - RNA, 19 nt, Homo sapiens
  misc_RNA (1)...(19): siRNA sense strand
acucggauguuguaccauu

SEQ ID NO: 2132480 - RNA, 19 nt, Homo sapiens
  misc_RNA (1)...(19): siRNA sense strand
cuaaaggugcugaagaaug

SEQ ID NO: 2132481 - RNA, 19 nt, Homo sapiens
  misc_RNA (1)...(19): siRNA sense strand
gcgacuggcuggagagcau

SEQ ID NO: 2132482 - RNA, 19 nt, Homo sapiens
  misc_RNA (1)...(19): siRNA sense strand
gcuggacccugccaagaag

SEQ ID NO: 2132483 - RNA, 19 nt, Homo sapiens
  misc_RNA (1)...(19): siRNA sense strand
cgauacaagcggcgaguuu

SEQ ID NO: 2132484 - RNA, 19 nt, Homo sapiens
  misc_RNA (1)...(19): siRNA sense strand
gcaggugguggcucugauu

SEQ ID NO: 2132485 - RNA, 19 nt, Homo sapiens
  misc_RNA (1)...(19): siRNA sense strand
ccgccgagauuagcucauu

SEQ ID NO: 2132486 - RNA, 19 nt, Homo sapiens
  misc_RNA (1)...(19): siRNA sense strand
gaagacgacaaaccaacug

SEQ ID NO: 2132487 - RNA, 19 nt, Homo sapiens
  misc_RNA (1)...(19): siRNA sense strand
gcagggaggcagagaaggu

SEQ ID NO: 2132488 - RNA, 19 nt, Homo sapiens
  misc_RNA (1)...(19): siRNA sense strand
cuucgaggaccaugagaua

SEQ ID NO: 2132489 - RNA, 19 nt, Homo sapiens
  misc_RNA (1)...(19): siRNA sense strand
cagggaagcccagcaguga

SEQ ID NO: 2132490 - RNA, 19 nt, Homo sapiens
  misc_RNA (1)...(19): siRNA sense strand
caacgccacggaccugcua

SEQ ID NO: 2132491 - RNA, 19 nt, Homo sapiens
  misc_RNA (1)...(19): siRNA sense strand
gaagucacccgaggacaag

SEQ ID NO: 2132492 - RNA, 19 nt, Homo sapiens
  misc_RNA (1)...(19): siRNA sense strand
ucgaggaacuugagaagcu

SEQ ID NO: 2132493 - RNA, 19 nt, Homo sapiens
  misc_RNA (1)...(19): siRNA sense strand
ccuggacccucgcugagaa

SEQ ID NO: 2132494 - RNA, 19 nt, Homo sapiens
  misc_RNA (1)...(19): siRNA sense strand
uugcagagguuaucaagac

SEQ ID NO: 2132495 - RNA, 19 nt, Homo sapiens
  misc_RNA (1)...(19): siRNA sense strand
ucaccucacacagcgauua

SEQ ID NO: 2132496 - RNA, 19 nt, Homo sapiens
  misc_RNA (1)...(19): siRNA sense strand
ccggcaaguuccuggauga

SEQ ID NO: 2132497 - RNA, 19 nt, Homo sapiens
  misc_RNA (1)...(19): siRNA sense strand
guccaaggccucccucuuc

SEQ ID NO: 2132498 - RNA, 19 nt, Homo sapiens
  misc_RNA (1)...(19): siRNA sense strand
gcgcagagccaugaagaag

SEQ ID NO: 2132499 - RNA, 19 nt, Homo sapiens
  misc_RNA (1)...(19): siRNA sense strand
caugacacacggccugaaa

SEQ ID NO: 2132500 - RNA, 19 nt, Homo sapiens
  misc_RNA (1)...(19): siRNA sense strand
gcaaagcuucacacaaagg

SEQ ID NO: 2132501 - RNA, 19 nt, Homo sapiens
  misc_RNA (1)...(19): siRNA sense strand
gagaagguccaagcuaugg

SEQ ID NO: 2132502 - RNA, 19 nt, Homo sapiens
  misc_RNA (1)...(19): siRNA sense strand
ccacggaccaagucuguag

SEQ ID NO: 2132503 - RNA, 19 nt, Homo sapiens
  misc_RNA (1)...(19): siRNA sense strand
cagcgauuaugucauugau

SEQ ID NO: 2132504 - RNA, 19 nt, Homo sapiens
  misc_RNA (1)...(19): siRNA sense strand
gauuagcucauuguuugaa

SEQ ID NO: 2132505 - RNA, 19 nt, Homo sapiens
  misc_RNA (1)...(19): siRNA sense strand
gggugaacguggugaaggu

SEQ ID NO: 2132506 - RNA, 19 nt, Homo sapiens
  misc_RNA (1)...(19): siRNA sense strand
uggcacgccuguuggacaa

SEQ ID NO: 2132507 - RNA, 19 nt, Homo sapiens
  misc_RNA (1)...(19): siRNA sense strand
ccaaggaggugcgcuucgu

SEQ ID NO: 2132508 - RNA, 19 nt, Homo sapiens
  misc_RNA (1)...(19): siRNA sense strand
caacuacaacagccagaca

SEQ ID NO: 2132509 - RNA, 19 nt, Homo sapiens
  misc_RNA (1)...(19): siRNA sense strand
ggcaaccgccucgucauga

SEQ ID NO: 2132510 - RNA, 19 nt, Homo sapiens
  misc_RNA (1)...(19): siRNA sense strand
gaccaggagagcaacauca

SEQ ID NO: 2132511 - RNA, 19 nt, Homo sapiens
  misc_RNA (1)...(19): siRNA sense strand
agacucggauguuguacca

SEQ ID NO: 2132512 - RNA, 19 nt, Homo sapiens
  misc_RNA (1)...(19): siRNA sense strand
aggacgcgcucaacuaugg

SEQ ID NO: 2132513 - RNA, 19 nt, Homo sapiens
  misc_RNA (1)...(19): siRNA sense strand
augauaagcaguuugcaaa

SEQ ID NO: 2132514 - RNA, 19 nt, Homo sapiens
  misc_RNA (1)...(19): siRNA sense strand
uaucaagacccacaaagac

SEQ ID NO: 2132515 - RNA, 19 nt, Homo sapiens
  misc_RNA (1)...(19): siRNA sense strand
cagagccgccaccgucaaa

SEQ ID NO: 2132516 - RNA, 19 nt, Homo sapiens
  misc_RNA (1)...(19): siRNA sense strand
cagaugaggcagcaugaca

SEQ ID NO: 2132517 - RNA, 19 nt, Homo sapiens
  misc_RNA (1)...(19): siRNA sense strand
gcucagccagcgauaucaa

SEQ ID NO: 2132518 - RNA, 19 nt, Homo sapiens
  misc_RNA (1)...(19): siRNA sense strand
ucgaggaccaugagauaga

SEQ ID NO: 2132519 - RNA, 19 nt, Homo sapiens
  misc_RNA (1)...(19): siRNA sense strand
ggaggagcuggcccgaauu

SEQ ID NO: 2132520 - RNA, 19 nt, Homo sapiens
  misc_RNA (1)...(19): siRNA sense strand
ggcuucaccugacuacaag

SEQ ID NO: 2132521 - RNA, 19 nt, Homo sapiens
  misc_RNA (1)...(19): siRNA sense strand
uaccuggaguuucgauaca

SEQ ID NO: 2132522 - RNA, 19 nt, Homo sapiens
  misc_RNA (1)...(19): siRNA sense strand
gaugaggcagcaugacaca

SEQ ID NO: 2132523 - RNA, 19 nt, Homo sapiens
  misc_RNA (1)...(19): siRNA sense strand
uuaucaagacccacaaaga

SEQ ID NO: 2132524 - RNA, 19 nt, Homo sapiens
  misc_RNA (1)...(19): siRNA sense strand
gggauguccgcaacuacaa

SEQ ID NO: 2132525 - RNA, 19 nt, Homo sapiens
  misc_RNA (1)...(19): siRNA sense strand
ccucacacagcgauuaugu

SEQ ID NO: 2132526 - RNA, 19 nt, Homo sapiens
  misc_RNA (1)...(19): siRNA sense strand
caucaguggcccuuuagca

SEQ ID NO: 2132527 - RNA, 19 nt, Homo sapiens
  misc_RNA (1)...(19): siRNA sense strand
gcgaguuuaugcccagaac

SEQ ID NO: 2132528 - RNA, 19 nt, Homo sapiens
  misc_RNA (1)...(19): siRNA sense strand
ccagggcagcucagaggaa

SEQ ID NO: 2132529 - RNA, 19 nt, Homo sapiens
  misc_RNA (1)...(19): siRNA sense strand
gagccgccaccgucaaaca

SEQ ID NO: 2132530 - RNA, 19 nt, Homo sapiens
  misc_RNA (1)...(19): siRNA sense strand
gcucgaggaacuugagaag

SEQ ID NO: 2132531 - RNA, 19 nt, Homo sapiens
  misc_RNA (1)...(19): siRNA sense strand
gacuacguccagcugcaua

SEQ ID NO: 2132532 - RNA, 19 nt, Homo sapiens
  misc_RNA (1)...(19): siRNA sense strand
uggaggaagugcagaugag

SEQ ID NO: 2132533 - RNA, 19 nt, Homo sapiens
  misc_RNA (1)...(19): siRNA sense strand
acggugcgcuccagcuuca

SEQ ID NO: 2132534 - RNA, 19 nt, Homo sapiens
  misc_RNA (1)...(19): siRNA sense strand
gaaaucaccucuuaucaua

SEQ ID NO: 2132535 - RNA, 19 nt, Homo sapiens
  misc_RNA (1)...(19): siRNA sense strand
gcacagaccuugcuccuuu

SEQ ID NO: 2132536 - RNA, 19 nt, Homo sapiens
  misc_RNA (1)...(19): siRNA sense strand
gaaaauagcuugaagucua

SEQ ID NO: 2132537 - RNA, 19 nt, Homo sapiens
  misc_RNA (1)...(19): siRNA sense strand
ggagaaaccuuaucagugu

SEQ ID NO: 2132538 - RNA, 19 nt, Homo sapiens
  misc_RNA (1)...(19): siRNA sense strand
ggaaaggccuucuguggaa

SEQ ID NO: 2132539 - RNA, 19 nt, Homo sapiens
  misc_RNA (1)...(19): siRNA sense strand
ggaaagacaccuuguauau

SEQ ID NO: 2132540 - RNA, 19 nt, Homo sapiens
  misc_RNA (1)...(19): siRNA sense strand
ggaagaagcccuaugaaug

SEQ ID NO: 2132541 - RNA, 19 nt, Homo sapiens
  misc_RNA (1)...(19): siRNA sense strand
gaaagacaccuuguauaua

SEQ ID NO: 2132542 - RNA, 19 nt, Homo sapiens
  misc_RNA (1)...(19): siRNA sense strand
gaagucacaucucauucua

SEQ ID NO: 2132543 - RNA, 19 nt, Homo sapiens
  misc_RNA (1)...(19): siRNA sense strand
ggagaaacccuaugaaugu

SEQ ID NO: 2132544 - RNA, 19 nt, Homo sapiens
  misc_RNA (1)...(19): siRNA sense strand
ucucagaaaucaccucuua

SEQ ID NO: 2132545 - RNA, 19 nt, Homo sapiens
  misc_RNA (1)...(19): siRNA sense strand
gaagucaccuuucacuguu

SEQ ID NO: 2132546 - RNA, 19 nt, Homo sapiens
  misc_RNA (1)...(19): siRNA sense strand
gaagaagcccuaugaaugu

SEQ ID NO: 2132547 - RNA, 19 nt, Homo sapiens
  misc_RNA (1)...(19): siRNA sense strand
ggacaucaaagaauucaua

SEQ ID NO: 2132548 - RNA, 19 nt, Homo sapiens
  misc_RNA (1)...(19): siRNA sense strand
ggagaccaccuaaguauaa

SEQ ID NO: 2132549 - RNA, 19 nt, Homo sapiens
  misc_RNA (1)...(19): siRNA sense strand
agaaaucacuccucauuau

SEQ ID NO: 2132550 - RNA, 19 nt, Homo sapiens
  misc_RNA (1)...(19): siRNA sense strand
gagaaacccuaugaaugua

SEQ ID NO: 2132551 - RNA, 19 nt, Homo sapiens
  misc_RNA (1)...(19): siRNA sense strand
gagaaacccuaugaaugua

SEQ ID NO: 2132552 - RNA, 19 nt, Homo sapiens
  misc_RNA (1)...(19): siRNA sense strand
gagagaagcccuauaagug

SEQ ID NO: 2132553 - RNA, 19 nt, Homo sapiens
  misc_RNA (1)...(19): siRNA sense strand
gagagaagcccuuugaaug

SEQ ID NO: 2132554 - RNA, 19 nt, Homo sapiens
  misc_RNA (1)...(19): siRNA sense strand
ugaaaggccuugaaucuuc

SEQ ID NO: 2132555 - RNA, 19 nt, Homo sapiens
  misc_RNA (1)...(19): siRNA sense strand
ggagagaaaccuuauaugu

SEQ ID NO: 2132556 - RNA, 19 nt, Homo sapiens
  misc_RNA (1)...(19): siRNA sense strand
cauaggacaucaaagaauu

SEQ ID NO: 2132557 - RNA, 19 nt, Homo sapiens
  misc_RNA (1)...(19): siRNA sense strand
ggagagaaaccauauguau

SEQ ID NO: 2132558 - RNA, 19 nt, Homo sapiens
  misc_RNA (1)...(19): siRNA sense strand
agagaaaccuuauaugugu

SEQ ID NO: 2132559 - RNA, 19 nt, Homo sapiens
  misc_RNA (1)...(19): siRNA sense strand
ggagaaacccuaugagugu

SEQ ID NO: 2132560 - RNA, 19 nt, Homo sapiens
  misc_RNA (1)...(19): siRNA sense strand
gaaagucuccacucauuau

SEQ ID NO: 2132561 - RNA, 19 nt, Homo sapiens
  misc_RNA (1)...(19): siRNA sense strand
ggaaaggacccauggauca

SEQ ID NO: 2132562 - RNA, 19 nt, Homo sapiens
  misc_RNA (1)...(19): siRNA sense strand
ucaaggaaaucaagacaga

SEQ ID NO: 2132563 - RNA, 19 nt, Homo sapiens
  misc_RNA (1)...(19): siRNA sense strand
ggaaagucuccacucauua

SEQ ID NO: 2132564 - RNA, 19 nt, Homo sapiens
  misc_RNA (1)...(19): siRNA sense strand
gagagaaacccuaugaaug

SEQ ID NO: 2132565 - RNA, 19 nt, Homo sapiens
  misc_RNA (1)...(19): siRNA sense strand
gaagucacagcucauuaua

SEQ ID NO: 2132566 - RNA, 19 nt, Homo sapiens
  misc_RNA (1)...(19): siRNA sense strand
ggagauagucaaugugaaa

SEQ ID NO: 2132567 - RNA, 19 nt, Homo sapiens
  misc_RNA (1)...(19): siRNA sense strand
gaaaucacuccucauuauu

SEQ ID NO: 2132568 - RNA, 19 nt, Homo sapiens
  misc_RNA (1)...(19): siRNA sense strand
gcaagcccauguucaguau

SEQ ID NO: 2132569 - RNA, 19 nt, Homo sapiens
  misc_RNA (1)...(19): siRNA sense strand
gagaaaccuuauaugugua

SEQ ID NO: 2132570 - RNA, 19 nt, Homo sapiens
  misc_RNA (1)...(19): siRNA sense strand
gagaaacccuaugagugua

SEQ ID NO: 2132571 - RNA, 19 nt, Homo sapiens
  misc_RNA (1)...(19): siRNA sense strand
gagagaaaccuuauaugug

SEQ ID NO: 2132572 - RNA, 19 nt, Homo sapiens
  misc_RNA (1)...(19): siRNA sense strand
gagaaacccuccagaugca

SEQ ID NO: 2132573 - RNA, 19 nt, Homo sapiens
  misc_RNA (1)...(19): siRNA sense strand
gaucauagagagugaguug

SEQ ID NO: 2132574 - RNA, 19 nt, Homo sapiens
  misc_RNA (1)...(19): siRNA sense strand
ggagagaaacccuaugaau

SEQ ID NO: 2132575 - RNA, 19 nt, Homo sapiens
  misc_RNA (1)...(19): siRNA sense strand
ggaaaucaagacagaguuu

SEQ ID NO: 2132576 - RNA, 19 nt, Homo sapiens
  misc_RNA (1)...(19): siRNA sense strand
ggaagucaccuuucacugu

SEQ ID NO: 2132577 - RNA, 19 nt, Homo sapiens
  misc_RNA (1)...(19): siRNA sense strand
gcaggaaagccuucuguga

SEQ ID NO: 2132578 - RNA, 19 nt, Homo sapiens
  misc_RNA (1)...(19): siRNA sense strand
ggagagaagcccuauaagu

SEQ ID NO: 2132579 - RNA, 19 nt, Homo sapiens
  misc_RNA (1)...(19): siRNA sense strand
ccagaaaucacuccucauu

SEQ ID NO: 2132580 - RNA, 19 nt, Homo sapiens
  misc_RNA (1)...(19): siRNA sense strand
ggaaagccuucagugagaa

SEQ ID NO: 2132581 - RNA, 19 nt, Homo sapiens
  misc_RNA (1)...(19): siRNA sense strand
gaaaggccuucuguggaaa

SEQ ID NO: 2132582 - RNA, 19 nt, Homo sapiens
  misc_RNA (1)...(19): siRNA sense strand
ccagaagucacaucuaauu

SEQ ID NO: 2132583 - RNA, 19 nt, Homo sapiens
  misc_RNA (1)...(19): siRNA sense strand
ucccagaagucacaucuaa

SEQ ID NO: 2132584 - RNA, 19 nt, Homo sapiens
  misc_RNA (1)...(19): siRNA sense strand
gugaaacauugacugauga

SEQ ID NO: 2132585 - RNA, 19 nt, Homo sapiens
  misc_RNA (1)...(19): siRNA sense strand
gggagaaacccuaugaaug

SEQ ID NO: 2132586 - RNA, 19 nt, Homo sapiens
  misc_RNA (1)...(19): siRNA sense strand
agagaaacccuaugaaugu

SEQ ID NO: 2132587 - RNA, 19 nt, Homo sapiens
  misc_RNA (1)...(19): siRNA sense strand
ggauguggcuguggacuuc

SEQ ID NO: 2132588 - RNA, 19 nt, Homo sapiens
  misc_RNA (1)...(19): siRNA sense strand
cagaaaucacuccucauua

SEQ ID NO: 2132589 - RNA, 19 nt, Homo sapiens
  misc_RNA (1)...(19): siRNA sense strand
caucaaagacuucauacug

SEQ ID NO: 2132590 - RNA, 19 nt, Homo sapiens
  misc_RNA (1)...(19): siRNA sense strand
gaaagagccccaaaggaua

SEQ ID NO: 2132591 - RNA, 19 nt, Homo sapiens
  misc_RNA (1)...(19): siRNA sense strand
ggaaaauccuucucucaga

SEQ ID NO: 2132592 - RNA, 19 nt, Homo sapiens
  misc_RNA (1)...(19): siRNA sense strand
ccaacagucccaccucaua

SEQ ID NO: 2132593 - RNA, 19 nt, Homo sapiens
  misc_RNA (1)...(19): siRNA sense strand
cagaagucacaucuaauua

SEQ ID NO: 2132594 - RNA, 19 nt, Homo sapiens
  misc_RNA (1)...(19): siRNA sense strand
gagaaacccuaugaguguu

SEQ ID NO: 2132595 - RNA, 19 nt, Homo sapiens
  misc_RNA (1)...(19): siRNA sense strand
ggagagaaacccuaugagu

SEQ ID NO: 2132596 - RNA, 19 nt, Homo sapiens
  misc_RNA (1)...(19): siRNA sense strand
guacagugcauuugggaaa

SEQ ID NO: 2132597 - RNA, 19 nt, Homo sapiens
  misc_RNA (1)...(19): siRNA sense strand
caucagucgugaaacauug

SEQ ID NO: 2132598 - RNA, 19 nt, Homo sapiens
  misc_RNA (1)...(19): siRNA sense strand
gagagugaguugucaaggu

SEQ ID NO: 2132599 - RNA, 19 nt, Homo sapiens
  misc_RNA (1)...(19): siRNA sense strand
gcucagaagacccugcaua

SEQ ID NO: 2132600 - RNA, 19 nt, Homo sapiens
  misc_RNA (1)...(19): siRNA sense strand
gagaagcccuuugaaugca

SEQ ID NO: 2132601 - RNA, 19 nt, Homo sapiens
  misc_RNA (1)...(19): siRNA sense strand
ccagagagaagcccuuuga

SEQ ID NO: 2132602 - RNA, 19 nt, Homo sapiens
  misc_RNA (1)...(19): siRNA sense strand
guaggaaagccuucaguga

SEQ ID NO: 2132603 - RNA, 19 nt, Homo sapiens
  misc_RNA (1)...(19): siRNA sense strand
cgugaaacauugacugaug

SEQ ID NO: 2132604 - RNA, 19 nt, Homo sapiens
  misc_RNA (1)...(19): siRNA sense strand
uaacaggagcuaugcaaga

SEQ ID NO: 2132605 - RNA, 19 nt, Homo sapiens
  misc_RNA (1)...(19): siRNA sense strand
agucacagcucauuauaca

SEQ ID NO: 2132606 - RNA, 19 nt, Homo sapiens
  misc_RNA (1)...(19): siRNA sense strand
caaagggagauacuagaaa

SEQ ID NO: 2132607 - RNA, 19 nt, Homo sapiens
  misc_RNA (1)...(19): siRNA sense strand
aagcccauguucaguauaa

SEQ ID NO: 2132608 - RNA, 19 nt, Homo sapiens
  misc_RNA (1)...(19): siRNA sense strand
aaagggagauacuagaaag

SEQ ID NO: 2132609 - RNA, 19 nt, Homo sapiens
  misc_RNA (1)...(19): siRNA sense strand
gaaacccuaugaauguagu

SEQ ID NO: 2132610 - RNA, 19 nt, Homo sapiens
  misc_RNA (1)...(19): siRNA sense strand
gggaagaagcccuaugaau

SEQ ID NO: 2132611 - RNA, 19 nt, Homo sapiens
  misc_RNA (1)...(19): siRNA sense strand
ugagauggguuccaaguac

SEQ ID NO: 2132612 - RNA, 19 nt, Homo sapiens
  misc_RNA (1)...(19): siRNA sense strand
cccaaaggauaauucauug

SEQ ID NO: 2132613 - RNA, 19 nt, Homo sapiens
  misc_RNA (1)...(19): siRNA sense strand
caucaaagaauucauacug

SEQ ID NO: 2132614 - RNA, 19 nt, Homo sapiens
  misc_RNA (1)...(19): siRNA sense strand
gauuacauaucagagaaga

SEQ ID NO: 2132615 - RNA, 19 nt, Homo sapiens
  misc_RNA (1)...(19): siRNA sense strand
ccucauaggacaucaaaga

SEQ ID NO: 2132616 - RNA, 19 nt, Homo sapiens
  misc_RNA (1)...(19): siRNA sense strand
gaacgcauacuggagagaa

SEQ ID NO: 2132617 - RNA, 19 nt, Homo sapiens
  misc_RNA (1)...(19): siRNA sense strand
gagauggguuccaaguaca

SEQ ID NO: 2132618 - RNA, 19 nt, Homo sapiens
  misc_RNA (1)...(19): siRNA sense strand
ggagaaaaccccugaaugu

SEQ ID NO: 2132619 - RNA, 19 nt, Homo sapiens
  misc_RNA (1)...(19): siRNA sense strand
ggaaagccuucugugagau

SEQ ID NO: 2132620 - RNA, 19 nt, Homo sapiens
  misc_RNA (1)...(19): siRNA sense strand
ccaccuaaguauaaugcuu

SEQ ID NO: 2132621 - RNA, 19 nt, Homo sapiens
  misc_RNA (1)...(19): siRNA sense strand
gaagaguggcagcaguuga

SEQ ID NO: 2132622 - RNA, 19 nt, Homo sapiens
  misc_RNA (1)...(19): siRNA sense strand
aggaaagccuucugugaga

SEQ ID NO: 2132623 - RNA, 19 nt, Homo sapiens
  misc_RNA (1)...(19): siRNA sense strand
agagaaacccuaugagugu

SEQ ID NO: 2132624 - RNA, 19 nt, Homo sapiens
  misc_RNA (1)...(19): siRNA sense strand
aggaaagccuucagugaga

SEQ ID NO: 2132625 - RNA, 19 nt, Homo sapiens
  misc_RNA (1)...(19): siRNA sense strand
guauaaugcuuccuguucu

SEQ ID NO: 2132626 - RNA, 19 nt, Homo sapiens
  misc_RNA (1)...(19): siRNA sense strand
cacagaccuugcuccuuua

SEQ ID NO: 2132627 - RNA, 19 nt, Homo sapiens
  misc_RNA (1)...(19): siRNA sense strand
cuauaaguguggugaaugu

SEQ ID NO: 2132628 - RNA, 19 nt, Homo sapiens
  misc_RNA (1)...(19): siRNA sense strand
aagaagcccuaugaaugua

SEQ ID NO: 2132629 - RNA, 19 nt, Homo sapiens
  misc_RNA (1)...(19): siRNA sense strand
gggagaccaccuaaguaua

SEQ ID NO: 2132630 - RNA, 19 nt, Homo sapiens
  misc_RNA (1)...(19): siRNA sense strand
ggccaucaaagacuucaua

SEQ ID NO: 2132631 - RNA, 19 nt, Homo sapiens
  misc_RNA (1)...(19): siRNA sense strand
caucagaauccauauagga

SEQ ID NO: 2132632 - RNA, 19 nt, Homo sapiens
  misc_RNA (1)...(19): siRNA sense strand
cagcauguauacuuuacug

SEQ ID NO: 2132633 - RNA, 19 nt, Homo sapiens
  misc_RNA (1)...(19): siRNA sense strand
ccuuauauguguacugaau

SEQ ID NO: 2132634 - RNA, 19 nt, Homo sapiens
  misc_RNA (1)...(19): siRNA sense strand
gcaaugggcuggauuauaa

SEQ ID NO: 2132635 - RNA, 19 nt, Homo sapiens
  misc_RNA (1)...(19): siRNA sense strand
gagaaacggucaucacuga

SEQ ID NO: 2132636 - RNA, 19 nt, Homo sapiens
  misc_RNA (1)...(19): siRNA sense strand
gcaauugcguguagauauu

SEQ ID NO: 2132637 - RNA, 19 nt, Homo sapiens
  misc_RNA (1)...(19): siRNA sense strand
gcaagagccgcgaguauga

SEQ ID NO: 2132638 - RNA, 19 nt, Homo sapiens
  misc_RNA (1)...(19): siRNA sense strand
cuagaagacugggacauaa

SEQ ID NO: 2132639 - RNA, 19 nt, Homo sapiens
  misc_RNA (1)...(19): siRNA sense strand
gugcugagcuggucguaug

SEQ ID NO: 2132640 - RNA, 19 nt, Homo sapiens
  misc_RNA (1)...(19): siRNA sense strand
gaugaccucuucuucuguu

SEQ ID NO: 2132641 - RNA, 19 nt, Homo sapiens
  misc_RNA (1)...(19): siRNA sense strand
ccugagcgaugcugaguuu

SEQ ID NO: 2132642 - RNA, 19 nt, Homo sapiens
  misc_RNA (1)...(19): siRNA sense strand
gcuagaagacugggacaua

SEQ ID NO: 2132643 - RNA, 19 nt, Homo sapiens
  misc_RNA (1)...(19): siRNA sense strand
cauccgagccuuugauuug

SEQ ID NO: 2132644 - RNA, 19 nt, Homo sapiens
  misc_RNA (1)...(19): siRNA sense strand
aagaagaacuuuggcauca

SEQ ID NO: 2132645 - RNA, 19 nt, Homo sapiens
  misc_RNA (1)...(19): siRNA sense strand
ggacagcccauugcuagaa

SEQ ID NO: 2132646 - RNA, 19 nt, Homo sapiens
  misc_RNA (1)...(19): siRNA sense strand
gcggauggacuacaugaaa

SEQ ID NO: 2132647 - RNA, 19 nt, Homo sapiens
  misc_RNA (1)...(19): siRNA sense strand
gaaaugugagagcuucuug

SEQ ID NO: 2132648 - RNA, 19 nt, Homo sapiens
  misc_RNA (1)...(19): siRNA sense strand
ccacccagcugcccuuauc

SEQ ID NO: 2132649 - RNA, 19 nt, Homo sapiens
  misc_RNA (1)...(19): siRNA sense strand
ucucugagccuuuauugaa

SEQ ID NO: 2132650 - RNA, 19 nt, Homo sapiens
  misc_RNA (1)...(19): siRNA sense strand
acaggaaguuuaccucuca

SEQ ID NO: 2132651 - RNA, 19 nt, Homo sapiens
  misc_RNA (1)...(19): siRNA sense strand
auaaugagcuggccaugca

SEQ ID NO: 2132652 - RNA, 19 nt, Homo sapiens
  misc_RNA (1)...(19): siRNA sense strand
ucaccucgcucgacguguu

SEQ ID NO: 2132653 - RNA, 19 nt, Homo sapiens
  misc_RNA (1)...(19): siRNA sense strand
gggcucucuuugcugauua

SEQ ID NO: 2132654 - RNA, 19 nt, Homo sapiens
  misc_RNA (1)...(19): siRNA sense strand
gagagcggauggacuacau

SEQ ID NO: 2132655 - RNA, 19 nt, Homo sapiens
  misc_RNA (1)...(19): siRNA sense strand
ggccacagccgcaucuuga

SEQ ID NO: 2132656 - RNA, 19 nt, Homo sapiens
  misc_RNA (1)...(19): siRNA sense strand
ccacugccuccaaaccuua

SEQ ID NO: 2132657 - RNA, 19 nt, Homo sapiens
  misc_RNA (1)...(19): siRNA sense strand
ugucuaagguccaacaagu

SEQ ID NO: 2132658 - RNA, 19 nt, Homo sapiens
  misc_RNA (1)...(19): siRNA sense strand
guuuaccucucacuucuau

SEQ ID NO: 2132659 - RNA, 19 nt, Homo sapiens
  misc_RNA (1)...(19): siRNA sense strand
gcaccgcgaccacaucaug

SEQ ID NO: 2132660 - RNA, 19 nt, Homo sapiens
  misc_RNA (1)...(19): siRNA sense strand
cgaaagacccuggaaaguc

SEQ ID NO: 2132661 - RNA, 19 nt, Homo sapiens
  misc_RNA (1)...(19): siRNA sense strand
gguaccugcugaacgugua

SEQ ID NO: 2132662 - RNA, 19 nt, Homo sapiens
  misc_RNA (1)...(19): siRNA sense strand
ggaggacagcccauugcua

SEQ ID NO: 2132663 - RNA, 19 nt, Homo sapiens
  misc_RNA (1)...(19): siRNA sense strand
gccgagagcggauggacua

SEQ ID NO: 2132664 - RNA, 19 nt, Homo sapiens
  misc_RNA (1)...(19): siRNA sense strand
cuccaaaccuuaccugcaa

SEQ ID NO: 2132665 - RNA, 19 nt, Homo sapiens
  misc_RNA (1)...(19): siRNA sense strand
ccacugcucuccuccuuuu

SEQ ID NO: 2132666 - RNA, 19 nt, Homo sapiens
  misc_RNA (1)...(19): siRNA sense strand
gagcggauggacuacauga

SEQ ID NO: 2132667 - RNA, 19 nt, Homo sapiens
  misc_RNA (1)...(19): siRNA sense strand
gaccacaucaugcgcaaug

SEQ ID NO: 2132668 - RNA, 19 nt, Homo sapiens
  misc_RNA (1)...(19): siRNA sense strand
gcccugcccuuuacacagu

SEQ ID NO: 2132669 - RNA, 19 nt, Homo sapiens
  misc_RNA (1)...(19): siRNA sense strand
gagcuggccaugcacuuug

SEQ ID NO: 2132670 - RNA, 19 nt, Homo sapiens
  misc_RNA (1)...(19): siRNA sense strand
augcugaguuucacacgua

SEQ ID NO: 2132671 - RNA, 19 nt, Homo sapiens
  misc_RNA (1)...(19): siRNA sense strand
gaagacugggacauaauca

SEQ ID NO: 2132672 - RNA, 19 nt, Homo sapiens
  misc_RNA (1)...(19): siRNA sense strand
gcaagaggcaggcgcugau

SEQ ID NO: 2132673 - RNA, 19 nt, Homo sapiens
  misc_RNA (1)...(19): siRNA sense strand
ugagggccaugccuuuguu

SEQ ID NO: 2132674 - RNA, 19 nt, Homo sapiens
  misc_RNA (1)...(19): siRNA sense strand
gcuccaagucccucucuga

SEQ ID NO: 2132675 - RNA, 19 nt, Homo sapiens
  misc_RNA (1)...(19): siRNA sense strand
gcacuuugaccgccuugug

SEQ ID NO: 2132676 - RNA, 19 nt, Homo sapiens
  misc_RNA (1)...(19): siRNA sense strand
ggaacccauucaugcuguu

SEQ ID NO: 2132677 - RNA, 19 nt, Homo sapiens
  misc_RNA (1)...(19): siRNA sense strand
cgccauggccaccaaguuu

SEQ ID NO: 2132678 - RNA, 19 nt, Homo sapiens
  misc_RNA (1)...(19): siRNA sense strand
gcaacucagggauaacaug

SEQ ID NO: 2132679 - RNA, 19 nt, Homo sapiens
  misc_RNA (1)...(19): siRNA sense strand
cugaugaccucuucuucug

SEQ ID NO: 2132680 - RNA, 19 nt, Homo sapiens
  misc_RNA (1)...(19): siRNA sense strand
ggcuaggacaggaaguuua

SEQ ID NO: 2132681 - RNA, 19 nt, Homo sapiens
  misc_RNA (1)...(19): siRNA sense strand
gucccucucugagccuuua

SEQ ID NO: 2132682 - RNA, 19 nt, Homo sapiens
  misc_RNA (1)...(19): siRNA sense strand
ggaccucagcacagccuuu

SEQ ID NO: 2132683 - RNA, 19 nt, Homo sapiens
  misc_RNA (1)...(19): siRNA sense strand
cacaguccauccucacuca

SEQ ID NO: 2132684 - RNA, 19 nt, Homo sapiens
  misc_RNA (1)...(19): siRNA sense strand
gagcaccgcgaccacauca

SEQ ID NO: 2132685 - RNA, 19 nt, Homo sapiens
  misc_RNA (1)...(19): siRNA sense strand
uccagcaacucagggauaa

SEQ ID NO: 2132686 - RNA, 19 nt, Homo sapiens
  misc_RNA (1)...(19): siRNA sense strand
gccacugccuccaaaccuu

SEQ ID NO: 2132687 - RNA, 19 nt, Homo sapiens
  misc_RNA (1)...(19): siRNA sense strand
ggcgguaccugcugaacgu

SEQ ID NO: 2132688 - RNA, 19 nt, Homo sapiens
  misc_RNA (1)...(19): siRNA sense strand
gauuugagugggaagaaga

SEQ ID NO: 2132689 - RNA, 19 nt, Homo sapiens
  misc_RNA (1)...(19): siRNA sense strand
cugaggaccuggaauucau

SEQ ID NO: 2132690 - RNA, 19 nt, Homo sapiens
  misc_RNA (1)...(19): siRNA sense strand
ccaugccuuuguuugcuuu

SEQ ID NO: 2132691 - RNA, 19 nt, Homo sapiens
  misc_RNA (1)...(19): siRNA sense strand
ugaguucgccuucgacgau

SEQ ID NO: 2132692 - RNA, 19 nt, Homo sapiens
  misc_RNA (1)...(19): siRNA sense strand
gacagcccauugcuagaag

SEQ ID NO: 2132693 - RNA, 19 nt, Homo sapiens
  misc_RNA (1)...(19): siRNA sense strand
cgcaaugggcuggauuaua

SEQ ID NO: 2132694 - RNA, 19 nt, Homo sapiens
  misc_RNA (1)...(19): siRNA sense strand
gccaugccuuuguuugcuu

SEQ ID NO: 2132695 - RNA, 19 nt, Homo sapiens
  misc_RNA (1)...(19): siRNA sense strand
ccaaaccuuaccugcaauu

SEQ ID NO: 2132696 - RNA, 19 nt, Homo sapiens
  misc_RNA (1)...(19): siRNA sense strand
gagacaggccagcuuggau

SEQ ID NO: 2132697 - RNA, 19 nt, Homo sapiens
  misc_RNA (1)...(19): siRNA sense strand
gcugaugaccucuucuucu

SEQ ID NO: 2132698 - RNA, 19 nt, Homo sapiens
  misc_RNA (1)...(19): siRNA sense strand
uaccugcaauugcguguag

SEQ ID NO: 2132699 - RNA, 19 nt, Homo sapiens
  misc_RNA (1)...(19): siRNA sense strand
gcuaggacaggaaguuuac

SEQ ID NO: 2132700 - RNA, 19 nt, Homo sapiens
  misc_RNA (1)...(19): siRNA sense strand
gacccugacuuuuaucaau

SEQ ID NO: 2132701 - RNA, 19 nt, Homo sapiens
  misc_RNA (1)...(19): siRNA sense strand
gagguaggcuccccgaaag

SEQ ID NO: 2132702 - RNA, 19 nt, Homo sapiens
  misc_RNA (1)...(19): siRNA sense strand
ugagugggaagaagaacuu

SEQ ID NO: 2132703 - RNA, 19 nt, Homo sapiens
  misc_RNA (1)...(19): siRNA sense strand
gcugguggaggagguagua

SEQ ID NO: 2132704 - RNA, 19 nt, Homo sapiens
  misc_RNA (1)...(19): siRNA sense strand
gcgcugaugaccucuucuu

SEQ ID NO: 2132705 - RNA, 19 nt, Homo sapiens
  misc_RNA (1)...(19): siRNA sense strand
gaccucagcacagccuuug

SEQ ID NO: 2132706 - RNA, 19 nt, Homo sapiens
  misc_RNA (1)...(19): siRNA sense strand
gcccuuaucagcuccaagu

SEQ ID NO: 2132707 - RNA, 19 nt, Homo sapiens
  misc_RNA (1)...(19): siRNA sense strand
gaguugcgccugcggaucu

SEQ ID NO: 2132708 - RNA, 19 nt, Homo sapiens
  misc_RNA (1)...(19): siRNA sense strand
uagaagacugggacauaau

SEQ ID NO: 2132709 - RNA, 19 nt, Homo sapiens
  misc_RNA (1)...(19): siRNA sense strand
cggauggacuacaugaaac

SEQ ID NO: 2132710 - RNA, 19 nt, Homo sapiens
  misc_RNA (1)...(19): siRNA sense strand
ucaagaaaugugagagcuu

SEQ ID NO: 2132711 - RNA, 19 nt, Homo sapiens
  misc_RNA (1)...(19): siRNA sense strand
ggacauaaucagccccaaa

SEQ ID NO: 2132712 - RNA, 19 nt, Homo sapiens
  misc_RNA (1)...(19): siRNA sense strand
cauuggcuccgacguguug

SEQ ID NO: 2132713 - RNA, 19 nt, Homo sapiens
  misc_RNA (1)...(19): siRNA sense strand
ggcuagggcucucuuugcu

SEQ ID NO: 2132714 - RNA, 19 nt, Homo sapiens
  misc_RNA (1)...(19): siRNA sense strand
cagcaacucagggauaaca

SEQ ID NO: 2132715 - RNA, 19 nt, Homo sapiens
  misc_RNA (1)...(19): siRNA sense strand
acacgcugacccugacuuu

SEQ ID NO: 2132716 - RNA, 19 nt, Homo sapiens
  misc_RNA (1)...(19): siRNA sense strand
gaccugcucaccaccuaug

SEQ ID NO: 2132717 - RNA, 19 nt, Homo sapiens
  misc_RNA (1)...(19): siRNA sense strand
gagcgaugcugaguuucac

SEQ ID NO: 2132718 - RNA, 19 nt, Homo sapiens
  misc_RNA (1)...(19): siRNA sense strand
ugagcgaugcugaguuuca

SEQ ID NO: 2132719 - RNA, 19 nt, Homo sapiens
  misc_RNA (1)...(19): siRNA sense strand
acgcugacccugacuuuua

SEQ ID NO: 2132720 - RNA, 19 nt, Homo sapiens
  misc_RNA (1)...(19): siRNA sense strand
gccauggccaccaaguuug

SEQ ID NO: 2132721 - RNA, 19 nt, Homo sapiens
  misc_RNA (1)...(19): siRNA sense strand
cgaagaacauggaugauaa

SEQ ID NO: 2132722 - RNA, 19 nt, Homo sapiens
  misc_RNA (1)...(19): siRNA sense strand
gcacaugaauagggugaua

SEQ ID NO: 2132723 - RNA, 19 nt, Homo sapiens
  misc_RNA (1)...(19): siRNA sense strand
ggaaucgccuccagaaauc

SEQ ID NO: 2132724 - RNA, 19 nt, Homo sapiens
  misc_RNA (1)...(19): siRNA sense strand
cgaagacccugaugaugaa

SEQ ID NO: 2132725 - RNA, 19 nt, Homo sapiens
  misc_RNA (1)...(19): siRNA sense strand
ggacagaagcccagauaga

SEQ ID NO: 2132726 - RNA, 19 nt, Homo sapiens
  misc_RNA (1)...(19): siRNA sense strand
ggacgacgauggcgaggau

SEQ ID NO: 2132727 - RNA, 19 nt, Homo sapiens
  misc_RNA (1)...(19): siRNA sense strand
gcagagggcucaggaugug

SEQ ID NO: 2132728 - RNA, 19 nt, Homo sapiens
  misc_RNA (1)...(19): siRNA sense strand
gcguggagcucaucaagga

SEQ ID NO: 2132729 - RNA, 19 nt, Homo sapiens
  misc_RNA (1)...(19): siRNA sense strand
gcaaggacaccagcucuuu

SEQ ID NO: 2132730 - RNA, 19 nt, Homo sapiens
  misc_RNA (1)...(19): siRNA sense strand
gaacugaagacgaagaaca

SEQ ID NO: 2132731 - RNA, 19 nt, Homo sapiens
  misc_RNA (1)...(19): siRNA sense strand
ccgaagacccugaugauga

SEQ ID NO: 2132732 - RNA, 19 nt, Homo sapiens
  misc_RNA (1)...(19): siRNA sense strand
cagcuuggaucccauaucu

SEQ ID NO: 2132733 - RNA, 19 nt, Homo sapiens
  misc_RNA (1)...(19): siRNA sense strand
caaggaaucgccuccagaa

SEQ ID NO: 2132734 - RNA, 19 nt, Homo sapiens
  misc_RNA (1)...(19): siRNA sense strand
gccgaagucugucucucua

SEQ ID NO: 2132735 - RNA, 19 nt, Homo sapiens
  misc_RNA (1)...(19): siRNA sense strand
aggaggaacugaagacgaa

SEQ ID NO: 2132736 - RNA, 19 nt, Homo sapiens
  misc_RNA (1)...(19): siRNA sense strand
cagaugacacuucagguuu

SEQ ID NO: 2132737 - RNA, 19 nt, Homo sapiens
  misc_RNA (1)...(19): siRNA sense strand
agacgaagaacauggauga

SEQ ID NO: 2132738 - RNA, 19 nt, Homo sapiens
  misc_RNA (1)...(19): siRNA sense strand
agaaagggaugggcaagga

SEQ ID NO: 2132739 - RNA, 19 nt, Homo sapiens
  misc_RNA (1)...(19): siRNA sense strand
guacagagggucaguucau

SEQ ID NO: 2132740 - RNA, 19 nt, Homo sapiens
  misc_RNA (1)...(19): siRNA sense strand
ggagaucacgcugcacuau

SEQ ID NO: 2132741 - RNA, 19 nt, Homo sapiens
  misc_RNA (1)...(19): siRNA sense strand
ccagaugacacuucagguu

SEQ ID NO: 2132742 - RNA, 19 nt, Homo sapiens
  misc_RNA (1)...(19): siRNA sense strand
cgaagucugucucucuagu

SEQ ID NO: 2132743 - RNA, 19 nt, Homo sapiens
  misc_RNA (1)...(19): siRNA sense strand
gcucuuugcacaugaauag

SEQ ID NO: 2132744 - RNA, 19 nt, Homo sapiens
  misc_RNA (1)...(19): siRNA sense strand
cauggaugauaacaccuuu

SEQ ID NO: 2132745 - RNA, 19 nt, Homo sapiens
  misc_RNA (1)...(19): siRNA sense strand
caccagcucuuugcacaug

SEQ ID NO: 2132746 - RNA, 19 nt, Homo sapiens
  misc_RNA (1)...(19): siRNA sense strand
acgaagaacauggaugaua

SEQ ID NO: 2132747 - RNA, 19 nt, Homo sapiens
  misc_RNA (1)...(19): siRNA sense strand
gacagaagcccagauagag

SEQ ID NO: 2132748 - RNA, 19 nt, Homo sapiens
  misc_RNA (1)...(19): siRNA sense strand
caaggacaccagcucuuug

SEQ ID NO: 2132749 - RNA, 19 nt, Homo sapiens
  misc_RNA (1)...(19): siRNA sense strand
ggaccgcgaccugaucuug

SEQ ID NO: 2132750 - RNA, 19 nt, Homo sapiens
  misc_RNA (1)...(19): siRNA sense strand
gcaccggccaucaggauuc

SEQ ID NO: 2132751 - RNA, 19 nt, Homo sapiens
  misc_RNA (1)...(19): siRNA sense strand
guagccaggccucauguga

SEQ ID NO: 2132752 - RNA, 19 nt, Homo sapiens
  misc_RNA (1)...(19): siRNA sense strand
gggaguaucgagugagaau

SEQ ID NO: 2132753 - RNA, 19 nt, Homo sapiens
  misc_RNA (1)...(19): siRNA sense strand
uacagagggucaguucauu

SEQ ID NO: 2132754 - RNA, 19 nt, Homo sapiens
  misc_RNA (1)...(19): siRNA sense strand
agaugacacuucagguuuc

SEQ ID NO: 2132755 - RNA, 19 nt, Homo sapiens
  misc_RNA (1)...(19): siRNA sense strand
gagaucacgcugcacuaug

SEQ ID NO: 2132756 - RNA, 19 nt, Homo sapiens
  misc_RNA (1)...(19): siRNA sense strand
gaagaacauggaugauaac

SEQ ID NO: 2132757 - RNA, 19 nt, Homo sapiens
  misc_RNA (1)...(19): siRNA sense strand
gaguaucgagugagaaugg

SEQ ID NO: 2132758 - RNA, 19 nt, Homo sapiens
  misc_RNA (1)...(19): siRNA sense strand
gaagucugucucucuagug

SEQ ID NO: 2132759 - RNA, 19 nt, Homo sapiens
  misc_RNA (1)...(19): siRNA sense strand
cgggacagaagcccagaua

SEQ ID NO: 2132760 - RNA, 19 nt, Homo sapiens
  misc_RNA (1)...(19): siRNA sense strand
aggaaucgccuccagaaau

SEQ ID NO: 2132761 - RNA, 19 nt, Homo sapiens
  misc_RNA (1)...(19): siRNA sense strand
ccagcucuuugcacaugaa

SEQ ID NO: 2132762 - RNA, 19 nt, Homo sapiens
  misc_RNA (1)...(19): siRNA sense strand
gaugacacuucagguuucu

SEQ ID NO: 2132763 - RNA, 19 nt, Homo sapiens
  misc_RNA (1)...(19): siRNA sense strand
gaccgcgaccugaucuuga

SEQ ID NO: 2132764 - RNA, 19 nt, Homo sapiens
  misc_RNA (1)...(19): siRNA sense strand
ugaagacgaagaacaugga

SEQ ID NO: 2132765 - RNA, 19 nt, Homo sapiens
  misc_RNA (1)...(19): siRNA sense strand
ggacaccgaagacccugau

SEQ ID NO: 2132766 - RNA, 19 nt, Homo sapiens
  misc_RNA (1)...(19): siRNA sense strand
cgacggcugggcuuccuuu

SEQ ID NO: 2132767 - RNA, 19 nt, Homo sapiens
  misc_RNA (1)...(19): siRNA sense strand
gcgaccugaucuugaagug

SEQ ID NO: 2132768 - RNA, 19 nt, Homo sapiens
  misc_RNA (1)...(19): siRNA sense strand
gaagacgaagaacauggau

SEQ ID NO: 2132769 - RNA, 19 nt, Homo sapiens
  misc_RNA (1)...(19): siRNA sense strand
gaggaacugaagacgaaga

SEQ ID NO: 2132770 - RNA, 19 nt, Homo sapiens
  misc_RNA (1)...(19): siRNA sense strand
ugacggcccugugguucug

SEQ ID NO: 2132771 - RNA, 19 nt, Homo sapiens
  misc_RNA (1)...(19): siRNA sense strand
gcucugaacagcggugugu

SEQ ID NO: 2132772 - RNA, 19 nt, Homo sapiens
  misc_RNA (1)...(19): siRNA sense strand
agaucacgcugcacuaugc

SEQ ID NO: 2132773 - RNA, 19 nt, Homo sapiens
  misc_RNA (1)...(19): siRNA sense strand
gucugucucucuaguguag

SEQ ID NO: 2132774 - RNA, 19 nt, Homo sapiens
  misc_RNA (1)...(19): siRNA sense strand
caccgaagacccugaugau

SEQ ID NO: 2132775 - RNA, 19 nt, Homo sapiens
  misc_RNA (1)...(19): siRNA sense strand
gcugaagagcugcaugaag

SEQ ID NO: 2132776 - RNA, 19 nt, Homo sapiens
  misc_RNA (1)...(19): siRNA sense strand
acagagggucaguucauug

SEQ ID NO: 2132777 - RNA, 19 nt, Homo sapiens
  misc_RNA (1)...(19): siRNA sense strand
ggcagagggcucaggaugu

SEQ ID NO: 2132778 - RNA, 19 nt, Homo sapiens
  misc_RNA (1)...(19): siRNA sense strand
acaccgaagacccugauga

SEQ ID NO: 2132779 - RNA, 19 nt, Homo sapiens
  misc_RNA (1)...(19): siRNA sense strand
gccucucucuggcuugguu

SEQ ID NO: 2132780 - RNA, 19 nt, Homo sapiens
  misc_RNA (1)...(19): siRNA sense strand
gcacuuucugggccaacaa

SEQ ID NO: 2132781 - RNA, 19 nt, Homo sapiens
  misc_RNA (1)...(19): siRNA sense strand
gagaaacccuauaaaugua

SEQ ID NO: 2132782 - RNA, 19 nt, Homo sapiens
  misc_RNA (1)...(19): siRNA sense strand
ucaaagaacucauacagaa

SEQ ID NO: 2132783 - RNA, 19 nt, Homo sapiens
  misc_RNA (1)...(19): siRNA sense strand
caacugucaucauacauua

SEQ ID NO: 2132784 - RNA, 19 nt, Homo sapiens
  misc_RNA (1)...(19): siRNA sense strand
gagaaacccuuugaaugua

SEQ ID NO: 2132785 - RNA, 19 nt, Homo sapiens
  misc_RNA (1)...(19): siRNA sense strand
caaaguucauggcacauua

SEQ ID NO: 2132786 - RNA, 19 nt, Homo sapiens
  misc_RNA (1)...(19): siRNA sense strand
gagaaacccuuugaaugua

SEQ ID NO: 2132787 - RNA, 19 nt, Homo sapiens
  misc_RNA (1)...(19): siRNA sense strand
aaagucaacugucaucaua

SEQ ID NO: 2132788 - RNA, 19 nt, Homo sapiens
  misc_RNA (1)...(19): siRNA sense strand
ggaaaggucuuaggcgaaa

SEQ ID NO: 2132789 - RNA, 19 nt, Homo sapiens
  misc_RNA (1)...(19): siRNA sense strand
agagaaaccucauaaaugu

SEQ ID NO: 2132790 - RNA, 19 nt, Homo sapiens
  misc_RNA (1)...(19): siRNA sense strand
agagaaaccuuaugaaugu

SEQ ID NO: 2132791 - RNA, 19 nt, Homo sapiens
  misc_RNA (1)...(19): siRNA sense strand
gagagaaaccucauaaaug

SEQ ID NO: 2132792 - RNA, 19 nt, Homo sapiens
  misc_RNA (1)...(19): siRNA sense strand
gagagaaacccuauaaaug

SEQ ID NO: 2132793 - RNA, 19 nt, Homo sapiens
  misc_RNA (1)...(19): siRNA sense strand
ucacagaaaucauaucuca

SEQ ID NO: 2132794 - RNA, 19 nt, Homo sapiens
  misc_RNA (1)...(19): siRNA sense strand
ggaaacauacuucaucuga

SEQ ID NO: 2132795 - RNA, 19 nt, Homo sapiens
  misc_RNA (1)...(19): siRNA sense strand
gaagucacagcucauaaua

SEQ ID NO: 2132796 - RNA, 19 nt, Homo sapiens
  misc_RNA (1)...(19): siRNA sense strand
ggaaaagccuucagagaaa

SEQ ID NO: 2132797 - RNA, 19 nt, Homo sapiens
  misc_RNA (1)...(19): siRNA sense strand
ggagagaaacccuauaaau

SEQ ID NO: 2132798 - RNA, 19 nt, Homo sapiens
  misc_RNA (1)...(19): siRNA sense strand
ggagagaaaccucauaaau

SEQ ID NO: 2132799 - RNA, 19 nt, Homo sapiens
  misc_RNA (1)...(19): siRNA sense strand
gagaaucuuucauacagaa

SEQ ID NO: 2132800 - RNA, 19 nt, Homo sapiens
  misc_RNA (1)...(19): siRNA sense strand
ggaagucuuucaaugagaa

SEQ ID NO: 2132801 - RNA, 19 nt, Homo sapiens
  misc_RNA (1)...(19): siRNA sense strand
gagagaaaccuuaugaaug

SEQ ID NO: 2132802 - RNA, 19 nt, Homo sapiens
  misc_RNA (1)...(19): siRNA sense strand
ggcaaagccuucagagaaa

SEQ ID NO: 2132803 - RNA, 19 nt, Homo sapiens
  misc_RNA (1)...(19): siRNA sense strand
caagagugcucgugacugu

SEQ ID NO: 2132804 - RNA, 19 nt, Homo sapiens
  misc_RNA (1)...(19): siRNA sense strand
aaagaaagcccauggaaga

SEQ ID NO: 2132805 - RNA, 19 nt, Homo sapiens
  misc_RNA (1)...(19): siRNA sense strand
guacaucaaagaacucaua

SEQ ID NO: 2132806 - RNA, 19 nt, Homo sapiens
  misc_RNA (1)...(19): siRNA sense strand
ggcaaagccuuccgagaaa

SEQ ID NO: 2132807 - RNA, 19 nt, Homo sapiens
  misc_RNA (1)...(19): siRNA sense strand
gagagaaacccuuugaaug

SEQ ID NO: 2132808 - RNA, 19 nt, Homo sapiens
  misc_RNA (1)...(19): siRNA sense strand
gagagaaacccuaugaaug

SEQ ID NO: 2132809 - RNA, 19 nt, Homo sapiens
  misc_RNA (1)...(19): siRNA sense strand
gagagaaacccuuugaaug

SEQ ID NO: 2132810 - RNA, 19 nt, Homo sapiens
  misc_RNA (1)...(19): siRNA sense strand
gaagucacaccucauugua

SEQ ID NO: 2132811 - RNA, 19 nt, Homo sapiens
  misc_RNA (1)...(19): siRNA sense strand
ggagagaaaccuuaugaau

SEQ ID NO: 2132812 - RNA, 19 nt, Homo sapiens
  misc_RNA (1)...(19): siRNA sense strand
gaaaacaaauccuggaaug

SEQ ID NO: 2132813 - RNA, 19 nt, Homo sapiens
  misc_RNA (1)...(19): siRNA sense strand
ggaaagaaagcccauggaa

SEQ ID NO: 2132814 - RNA, 19 nt, Homo sapiens
  misc_RNA (1)...(19): siRNA sense strand
agucaaagcucauuauaca

SEQ ID NO: 2132815 - RNA, 19 nt, Homo sapiens
  misc_RNA (1)...(19): siRNA sense strand
gauaagucaacucucauua

SEQ ID NO: 2132816 - RNA, 19 nt, Homo sapiens
  misc_RNA (1)...(19): siRNA sense strand
ggagagaaacccuuugaau

SEQ ID NO: 2132817 - RNA, 19 nt, Homo sapiens
  misc_RNA (1)...(19): siRNA sense strand
ggagagaaacccuuugaau

SEQ ID NO: 2132818 - RNA, 19 nt, Homo sapiens
  misc_RNA (1)...(19): siRNA sense strand
ggagagaaacccuaugaau

SEQ ID NO: 2132819 - RNA, 19 nt, Homo sapiens
  misc_RNA (1)...(19): siRNA sense strand
ccucauaaauguacugaau

SEQ ID NO: 2132820 - RNA, 19 nt, Homo sapiens
  misc_RNA (1)...(19): siRNA sense strand
ggaaaagccuucacucaga

SEQ ID NO: 2132821 - RNA, 19 nt, Homo sapiens
  misc_RNA (1)...(19): siRNA sense strand
guacauuggagaacucaua

SEQ ID NO: 2132822 - RNA, 19 nt, Homo sapiens
  misc_RNA (1)...(19): siRNA sense strand
aaacauacuucaucugagu

SEQ ID NO: 2132823 - RNA, 19 nt, Homo sapiens
  misc_RNA (1)...(19): siRNA sense strand
aaacacgaaucauuuggaa

SEQ ID NO: 2132824 - RNA, 19 nt, Homo sapiens
  misc_RNA (1)...(19): siRNA sense strand
cgauaaacacgaaucauuu

SEQ ID NO: 2132825 - RNA, 19 nt, Homo sapiens
  misc_RNA (1)...(19): siRNA sense strand
gauaaacacgaaucauuug

SEQ ID NO: 2132826 - RNA, 19 nt, Homo sapiens
  misc_RNA (1)...(19): siRNA sense strand
ggagagagacccuuugagu

SEQ ID NO: 2132827 - RNA, 19 nt, Homo sapiens
  misc_RNA (1)...(19): siRNA sense strand
gcaaaauuguucuuccaua

SEQ ID NO: 2132828 - RNA, 19 nt, Homo sapiens
  misc_RNA (1)...(19): siRNA sense strand
agagaaacccuauaaaugu

SEQ ID NO: 2132829 - RNA, 19 nt, Homo sapiens
  misc_RNA (1)...(19): siRNA sense strand
uacagaagcuugaucuaau

SEQ ID NO: 2132830 - RNA, 19 nt, Homo sapiens
  misc_RNA (1)...(19): siRNA sense strand
ggagaaucuuucauacaga

SEQ ID NO: 2132831 - RNA, 19 nt, Homo sapiens
  misc_RNA (1)...(19): siRNA sense strand
aaacaaauccuggaaugaa

SEQ ID NO: 2132832 - RNA, 19 nt, Homo sapiens
  misc_RNA (1)...(19): siRNA sense strand
gaagucaacccucauugug

SEQ ID NO: 2132833 - RNA, 19 nt, Homo sapiens
  misc_RNA (1)...(19): siRNA sense strand
caagaagucacaccucauu

SEQ ID NO: 2132834 - RNA, 19 nt, Homo sapiens
  misc_RNA (1)...(19): siRNA sense strand
aaaccuuguugcuucaaua

SEQ ID NO: 2132835 - RNA, 19 nt, Homo sapiens
  misc_RNA (1)...(19): siRNA sense strand
agaaacccuuugaauguaa

SEQ ID NO: 2132836 - RNA, 19 nt, Homo sapiens
  misc_RNA (1)...(19): siRNA sense strand
acagaagcuugaucuaauu

SEQ ID NO: 2132837 - RNA, 19 nt, Homo sapiens
  misc_RNA (1)...(19): siRNA sense strand
aaagaaaggccuuagucua

SEQ ID NO: 2132838 - RNA, 19 nt, Homo sapiens
  misc_RNA (1)...(19): siRNA sense strand
agagaaacccuuugaaugu

SEQ ID NO: 2132839 - RNA, 19 nt, Homo sapiens
  misc_RNA (1)...(19): siRNA sense strand
agagaaacccuaugaaugu

SEQ ID NO: 2132840 - RNA, 19 nt, Homo sapiens
  misc_RNA (1)...(19): siRNA sense strand
gaaagaaaccccaugaaug

SEQ ID NO: 2132841 - RNA, 19 nt, Homo sapiens
  misc_RNA (1)...(19): siRNA sense strand
agagaaacccuuugaaugu

SEQ ID NO: 2132842 - RNA, 19 nt, Homo sapiens
  misc_RNA (1)...(19): siRNA sense strand
cgucacacaucucugcuuu

SEQ ID NO: 2132843 - RNA, 19 nt, Homo sapiens
  misc_RNA (1)...(19): siRNA sense strand
aaucucagcucauuauaca

SEQ ID NO: 2132844 - RNA, 19 nt, Homo sapiens
  misc_RNA (1)...(19): siRNA sense strand
gaaagaaaggccuuagucu

SEQ ID NO: 2132845 - RNA, 19 nt, Homo sapiens
  misc_RNA (1)...(19): siRNA sense strand
gaaaggccuuagucuacau

SEQ ID NO: 2132846 - RNA, 19 nt, Homo sapiens
  misc_RNA (1)...(19): siRNA sense strand
guacaucagagaacucauu

SEQ ID NO: 2132847 - RNA, 19 nt, Homo sapiens
  misc_RNA (1)...(19): siRNA sense strand
gagaaacccuaugaaugug

SEQ ID NO: 2132848 - RNA, 19 nt, Homo sapiens
  misc_RNA (1)...(19): siRNA sense strand
gaaaagccuucacucagaa

SEQ ID NO: 2132849 - RNA, 19 nt, Homo sapiens
  misc_RNA (1)...(19): siRNA sense strand
ccacugagcgugcgcagaa

SEQ ID NO: 2132850 - RNA, 19 nt, Homo sapiens
  misc_RNA (1)...(19): siRNA sense strand
uggcaaagccuucagagaa

SEQ ID NO: 2132851 - RNA, 19 nt, Homo sapiens
  misc_RNA (1)...(19): siRNA sense strand
gagaaaccucauaaaugua

SEQ ID NO: 2132852 - RNA, 19 nt, Homo sapiens
  misc_RNA (1)...(19): siRNA sense strand
gaacucauacuggagagaa

SEQ ID NO: 2132853 - RNA, 19 nt, Homo sapiens
  misc_RNA (1)...(19): siRNA sense strand
agucacagcucauaauaca

SEQ ID NO: 2132854 - RNA, 19 nt, Homo sapiens
  misc_RNA (1)...(19): siRNA sense strand
caaagcucauuauacauca

SEQ ID NO: 2132855 - RNA, 19 nt, Homo sapiens
  misc_RNA (1)...(19): siRNA sense strand
caaguuggagguagaagaa

SEQ ID NO: 2132856 - RNA, 19 nt, Homo sapiens
  misc_RNA (1)...(19): siRNA sense strand
uggcaaagccuuccgagaa

SEQ ID NO: 2132857 - RNA, 19 nt, Homo sapiens
  misc_RNA (1)...(19): siRNA sense strand
gaaacccuuugaauguaau

SEQ ID NO: 2132858 - RNA, 19 nt, Homo sapiens
  misc_RNA (1)...(19): siRNA sense strand
gaaacccuaugaaugugau

SEQ ID NO: 2132859 - RNA, 19 nt, Homo sapiens
  misc_RNA (1)...(19): siRNA sense strand
gaacucauacgggagagaa

SEQ ID NO: 2132860 - RNA, 19 nt, Homo sapiens
  misc_RNA (1)...(19): siRNA sense strand
gaacucauacgggagagaa

SEQ ID NO: 2132861 - RNA, 19 nt, Homo sapiens
  misc_RNA (1)...(19): siRNA sense strand
cagaagcuugaucuaauua

SEQ ID NO: 2132862 - RNA, 19 nt, Homo sapiens
  misc_RNA (1)...(19): siRNA sense strand
gaaaagccuucagagaaaa

SEQ ID NO: 2132863 - RNA, 19 nt, Homo sapiens
  misc_RNA (1)...(19): siRNA sense strand
aaacaauuaucaccaagag

SEQ ID NO: 2132864 - RNA, 19 nt, Homo sapiens
  misc_RNA (1)...(19): siRNA sense strand
caacauucacuguacauca

SEQ ID NO: 2132865 - RNA, 19 nt, Homo sapiens
  misc_RNA (1)...(19): siRNA sense strand
gauaauggaugugcaaaau

SEQ ID NO: 2132866 - RNA, 19 nt, Homo sapiens
  misc_RNA (1)...(19): siRNA sense strand
ggagagaaacccuaugcau

SEQ ID NO: 2132867 - RNA, 19 nt, Homo sapiens
  misc_RNA (1)...(19): siRNA sense strand
cgagugcaaugaaugugaa

SEQ ID NO: 2132868 - RNA, 19 nt, Homo sapiens
  misc_RNA (1)...(19): siRNA sense strand
gugcaucaaagaacucaua

SEQ ID NO: 2132869 - RNA, 19 nt, Homo sapiens
  misc_RNA (1)...(19): siRNA sense strand
agucaacucucauuauaca

SEQ ID NO: 2132870 - RNA, 19 nt, Homo sapiens
  misc_RNA (1)...(19): siRNA sense strand
caucaaagaacucauacug

SEQ ID NO: 2132871 - RNA, 19 nt, Homo sapiens
  misc_RNA (1)...(19): siRNA sense strand
agaggacccuguacagaga

SEQ ID NO: 2132872 - RNA, 19 nt, Homo sapiens
  misc_RNA (1)...(19): siRNA sense strand
caggagagaaaccuuauga

SEQ ID NO: 2132873 - RNA, 19 nt, Homo sapiens
  misc_RNA (1)...(19): siRNA sense strand
aaagaacucauacagaaga

SEQ ID NO: 2132874 - RNA, 19 nt, Homo sapiens
  misc_RNA (1)...(19): siRNA sense strand
gggaagucuuucaaugaga

SEQ ID NO: 2132875 - RNA, 19 nt, Homo sapiens
  misc_RNA (1)...(19): siRNA sense strand
ccgauaaacacgaaucauu

SEQ ID NO: 2132876 - RNA, 19 nt, Homo sapiens
  misc_RNA (1)...(19): siRNA sense strand
gaaacccuauaaauguaca

SEQ ID NO: 2132877 - RNA, 19 nt, Homo sapiens
  misc_RNA (1)...(19): siRNA sense strand
agauguagcuguggauuuc

SEQ ID NO: 2132878 - RNA, 19 nt, Homo sapiens
  misc_RNA (1)...(19): siRNA sense strand
gugggaagucuuucaauga

SEQ ID NO: 2132879 - RNA, 19 nt, Homo sapiens
  misc_RNA (1)...(19): siRNA sense strand
ccagaagucacagcucaua

SEQ ID NO: 2132880 - RNA, 19 nt, Homo sapiens
  misc_RNA (1)...(19): siRNA sense strand
ucaaagcucauuauacauc

SEQ ID NO: 2132881 - RNA, 19 nt, Homo sapiens
  misc_RNA (1)...(19): siRNA sense strand
gcuaugaacucuccacaga

SEQ ID NO: 2132882 - RNA, 19 nt, Homo sapiens
  misc_RNA (1)...(19): siRNA sense strand
ccacagaccugcaggacaa

SEQ ID NO: 2132883 - RNA, 19 nt, Homo sapiens
  misc_RNA (1)...(19): siRNA sense strand
ccacgacccuccagagaaa

SEQ ID NO: 2132884 - RNA, 19 nt, Homo sapiens
  misc_RNA (1)...(19): siRNA sense strand
caccacaucuggagaguuu

SEQ ID NO: 2132885 - RNA, 19 nt, Homo sapiens
  misc_RNA (1)...(19): siRNA sense strand
cgucaaagcugaacgaaag

SEQ ID NO: 2132886 - RNA, 19 nt, Homo sapiens
  misc_RNA (1)...(19): siRNA sense strand
ugcaggagauggagaaaua

SEQ ID NO: 2132887 - RNA, 19 nt, Homo sapiens
  misc_RNA (1)...(19): siRNA sense strand
uaaagucucuggcugaauc

SEQ ID NO: 2132888 - RNA, 19 nt, Homo sapiens
  misc_RNA (1)...(19): siRNA sense strand
gaacgaaagaugaaacuag

SEQ ID NO: 2132889 - RNA, 19 nt, Homo sapiens
  misc_RNA (1)...(19): siRNA sense strand
cuugagagcuccagcaauu

SEQ ID NO: 2132890 - RNA, 19 nt, Homo sapiens
  misc_RNA (1)...(19): siRNA sense strand
ggaaggcgccuaccagaau

SEQ ID NO: 2132891 - RNA, 19 nt, Homo sapiens
  misc_RNA (1)...(19): siRNA sense strand
ggaugcaguucuccuuuga

SEQ ID NO: 2132892 - RNA, 19 nt, Homo sapiens
  misc_RNA (1)...(19): siRNA sense strand
gaccaacgaugaccaugug

SEQ ID NO: 2132893 - RNA, 19 nt, Homo sapiens
  misc_RNA (1)...(19): siRNA sense strand
gaacucugaugguggagau

SEQ ID NO: 2132894 - RNA, 19 nt, Homo sapiens
  misc_RNA (1)...(19): siRNA sense strand
gaaagaugaaacuagauga

SEQ ID NO: 2132895 - RNA, 19 nt, Homo sapiens
  misc_RNA (1)...(19): siRNA sense strand
ccaaacagguaaagucucu

SEQ ID NO: 2132896 - RNA, 19 nt, Homo sapiens
  misc_RNA (1)...(19): siRNA sense strand
gaaaaguccucaucaucuu

SEQ ID NO: 2132897 - RNA, 19 nt, Homo sapiens
  misc_RNA (1)...(19): siRNA sense strand
ccauugagccuccuaguga

SEQ ID NO: 2132898 - RNA, 19 nt, Homo sapiens
  misc_RNA (1)...(19): siRNA sense strand
gguaaagucucuggcugaa

SEQ ID NO: 2132899 - RNA, 19 nt, Homo sapiens
  misc_RNA (1)...(19): siRNA sense strand
gccaucauccuccucaaua

SEQ ID NO: 2132900 - RNA, 19 nt, Homo sapiens
  misc_RNA (1)...(19): siRNA sense strand
gaaaguggagcgacucauc

SEQ ID NO: 2132901 - RNA, 19 nt, Homo sapiens
  misc_RNA (1)...(19): siRNA sense strand
ggacuucuccuccauggau

SEQ ID NO: 2132902 - RNA, 19 nt, Homo sapiens
  misc_RNA (1)...(19): siRNA sense strand
caugauuguuggaaagaaa

SEQ ID NO: 2132903 - RNA, 19 nt, Homo sapiens
  misc_RNA (1)...(19): siRNA sense strand
ugacaauggugaagacauc

SEQ ID NO: 2132904 - RNA, 19 nt, Homo sapiens
  misc_RNA (1)...(19): siRNA sense strand
gaaggcgccuaccagaauc

SEQ ID NO: 2132905 - RNA, 19 nt, Homo sapiens
  misc_RNA (1)...(19): siRNA sense strand
cagagaaggguauccagua

SEQ ID NO: 2132906 - RNA, 19 nt, Homo sapiens
  misc_RNA (1)...(19): siRNA sense strand
ccaaugagaccaucaacug

SEQ ID NO: 2132907 - RNA, 19 nt, Homo sapiens
  misc_RNA (1)...(19): siRNA sense strand
gaaggaagcgggcuauucg

SEQ ID NO: 2132908 - RNA, 19 nt, Homo sapiens
  misc_RNA (1)...(19): siRNA sense strand
gagcacagcgguugauagu

SEQ ID NO: 2132909 - RNA, 19 nt, Homo sapiens
  misc_RNA (1)...(19): siRNA sense strand
agagaaggguauccaguau

SEQ ID NO: 2132910 - RNA, 19 nt, Homo sapiens
  misc_RNA (1)...(19): siRNA sense strand
gaagcuccgucaccacauc

SEQ ID NO: 2132911 - RNA, 19 nt, Homo sapiens
  misc_RNA (1)...(19): siRNA sense strand
caucauccuuuccaacaug

SEQ ID NO: 2132912 - RNA, 19 nt, Homo sapiens
  misc_RNA (1)...(19): siRNA sense strand
gcaugaacaagaacuuuga

SEQ ID NO: 2132913 - RNA, 19 nt, Homo sapiens
  misc_RNA (1)...(19): siRNA sense strand
uggaaaugcuggagaggaa

SEQ ID NO: 2132914 - RNA, 19 nt, Homo sapiens
  misc_RNA (1)...(19): siRNA sense strand
agaagcaguucaacagaga

SEQ ID NO: 2132915 - RNA, 19 nt, Homo sapiens
  misc_RNA (1)...(19): siRNA sense strand
gaacccagacaccaucuuc

SEQ ID NO: 2132916 - RNA, 19 nt, Homo sapiens
  misc_RNA (1)...(19): siRNA sense strand
caucgaagggucuguuauu

SEQ ID NO: 2132917 - RNA, 19 nt, Homo sapiens
  misc_RNA (1)...(19): siRNA sense strand
acaugcagcucuuccagaa

SEQ ID NO: 2132918 - RNA, 19 nt, Homo sapiens
  misc_RNA (1)...(19): siRNA sense strand
gaaucggccucaaccucuu

SEQ ID NO: 2132919 - RNA, 19 nt, Homo sapiens
  misc_RNA (1)...(19): siRNA sense strand
gccaaggacucagugaaug

SEQ ID NO: 2132920 - RNA, 19 nt, Homo sapiens
  misc_RNA (1)...(19): siRNA sense strand
aacgaaagaugaaacuaga

SEQ ID NO: 2132921 - RNA, 19 nt, Homo sapiens
  misc_RNA (1)...(19): siRNA sense strand
gcagaagcaguucaacaga

SEQ ID NO: 2132922 - RNA, 19 nt, Homo sapiens
  misc_RNA (1)...(19): siRNA sense strand
ggacaagaagguggaaaug

SEQ ID NO: 2132923 - RNA, 19 nt, Homo sapiens
  misc_RNA (1)...(19): siRNA sense strand
cuaccuggaugacacaguu

SEQ ID NO: 2132924 - RNA, 19 nt, Homo sapiens
  misc_RNA (1)...(19): siRNA sense strand
gaggacagcucagccacau

SEQ ID NO: 2132925 - RNA, 19 nt, Homo sapiens
  misc_RNA (1)...(19): siRNA sense strand
cgaagggucuguuauuagc

SEQ ID NO: 2132926 - RNA, 19 nt, Homo sapiens
  misc_RNA (1)...(19): siRNA sense strand
gcaggaggaggaggagaua

SEQ ID NO: 2132927 - RNA, 19 nt, Homo sapiens
  misc_RNA (1)...(19): siRNA sense strand
augcagcucuuccagaauu

SEQ ID NO: 2132928 - RNA, 19 nt, Homo sapiens
  misc_RNA (1)...(19): siRNA sense strand
gcgcaugauuguuggaaag

SEQ ID NO: 2132929 - RNA, 19 nt, Homo sapiens
  misc_RNA (1)...(19): siRNA sense strand
cgaaagaugaaacuagaug

SEQ ID NO: 2132930 - RNA, 19 nt, Homo sapiens
  misc_RNA (1)...(19): siRNA sense strand
guacagucccagcgucaaa

SEQ ID NO: 2132931 - RNA, 19 nt, Homo sapiens
  misc_RNA (1)...(19): siRNA sense strand
cuaaugacaucacagaacu

SEQ ID NO: 2132932 - RNA, 19 nt, Homo sapiens
  misc_RNA (1)...(19): siRNA sense strand
gaagcgggagucaaaggaa

SEQ ID NO: 2132933 - RNA, 19 nt, Homo sapiens
  misc_RNA (1)...(19): siRNA sense strand
agucggagcuggagaagca

SEQ ID NO: 2132934 - RNA, 19 nt, Homo sapiens
  misc_RNA (1)...(19): siRNA sense strand
cgccagcuuucaacaauga

SEQ ID NO: 2132935 - RNA, 19 nt, Homo sapiens
  misc_RNA (1)...(19): siRNA sense strand
agaaggguauccaguaucu

SEQ ID NO: 2132936 - RNA, 19 nt, Homo sapiens
  misc_RNA (1)...(19): siRNA sense strand
gcaugauuguuggaaagaa

SEQ ID NO: 2132937 - RNA, 19 nt, Homo sapiens
  misc_RNA (1)...(19): siRNA sense strand
gaugaaacuagaugacuuc

SEQ ID NO: 2132938 - RNA, 19 nt, Homo sapiens
  misc_RNA (1)...(19): siRNA sense strand
acaagaagguggaaaugcu

SEQ ID NO: 2132939 - RNA, 19 nt, Homo sapiens
  misc_RNA (1)...(19): siRNA sense strand
uggagaagcgggagucaaa

SEQ ID NO: 2132940 - RNA, 19 nt, Homo sapiens
  misc_RNA (1)...(19): siRNA sense strand
ggacacuaccgguuacaca

SEQ ID NO: 2132941 - RNA, 19 nt, Homo sapiens
  misc_RNA (1)...(19): siRNA sense strand
ggaggccacagcaccagua

SEQ ID NO: 2132942 - RNA, 19 nt, Homo sapiens
  misc_RNA (1)...(19): siRNA sense strand
guggagcgcaugauuguug

SEQ ID NO: 2132943 - RNA, 19 nt, Homo sapiens
  misc_RNA (1)...(19): siRNA sense strand
agaugaaacuagaugacuu

SEQ ID NO: 2132944 - RNA, 19 nt, Homo sapiens
  misc_RNA (1)...(19): siRNA sense strand
ggaaccggcagaagcaguu

SEQ ID NO: 2132945 - RNA, 19 nt, Homo sapiens
  misc_RNA (1)...(19): siRNA sense strand
gcaccguggucugaugaau

SEQ ID NO: 2132946 - RNA, 19 nt, Homo sapiens
  misc_RNA (1)...(19): siRNA sense strand
ggaccaacgaugaccaugu

SEQ ID NO: 2132947 - RNA, 19 nt, Homo sapiens
  misc_RNA (1)...(19): siRNA sense strand
gccucaaccucuucaacaa

SEQ ID NO: 2132948 - RNA, 19 nt, Homo sapiens
  misc_RNA (1)...(19): siRNA sense strand
ggcaggcgaugggcucaaa

SEQ ID NO: 2132949 - RNA, 19 nt, Homo sapiens
  misc_RNA (1)...(19): siRNA sense strand
gaagcagaaagguaugaug

SEQ ID NO: 2132950 - RNA, 19 nt, Homo sapiens
  misc_RNA (1)...(19): siRNA sense strand
agaagaucuuggugacgua

SEQ ID NO: 2132951 - RNA, 19 nt, Homo sapiens
  misc_RNA (1)...(19): siRNA sense strand
gaaguuccagucccauauc

SEQ ID NO: 2132952 - RNA, 19 nt, Homo sapiens
  misc_RNA (1)...(19): siRNA sense strand
cggaugcaguucuccuuug

SEQ ID NO: 2132953 - RNA, 19 nt, Homo sapiens
  misc_RNA (1)...(19): siRNA sense strand
aucgaagggucuguuauua

SEQ ID NO: 2132954 - RNA, 19 nt, Homo sapiens
  misc_RNA (1)...(19): siRNA sense strand
aaagaaaccaguccugucu

SEQ ID NO: 2132955 - RNA, 19 nt, Homo sapiens
  misc_RNA (1)...(19): siRNA sense strand
caacaagaagccagagaag

SEQ ID NO: 2132956 - RNA, 19 nt, Homo sapiens
  misc_RNA (1)...(19): siRNA sense strand
gccaguaccgcaugaacaa

SEQ ID NO: 2132957 - RNA, 19 nt, Homo sapiens
  misc_RNA (1)...(19): siRNA sense strand
gggaaggcgccuaccagaa

SEQ ID NO: 2132958 - RNA, 19 nt, Homo sapiens
  misc_RNA (1)...(19): siRNA sense strand
ggccaaggacucagugaau

SEQ ID NO: 2132959 - RNA, 19 nt, Homo sapiens
  misc_RNA (1)...(19): siRNA sense strand
gagaagcagaaagguauga

SEQ ID NO: 2132960 - RNA, 19 nt, Homo sapiens
  misc_RNA (1)...(19): siRNA sense strand
caggaccggcugcgcuuua

SEQ ID NO: 2132961 - RNA, 19 nt, Homo sapiens
  misc_RNA (1)...(19): siRNA sense strand
ccucuucaaugaucuccuu

SEQ ID NO: 2132962 - RNA, 19 nt, Homo sapiens
  misc_RNA (1)...(19): siRNA sense strand
ucaacaagaagccagagaa

SEQ ID NO: 2132963 - RNA, 19 nt, Homo sapiens
  misc_RNA (1)...(19): siRNA sense strand
gcaucauccuuuccaacau

SEQ ID NO: 2132964 - RNA, 19 nt, Homo sapiens
  misc_RNA (1)...(19): siRNA sense strand
gaaucgggaggcuguguau

SEQ ID NO: 2132965 - RNA, 19 nt, Homo sapiens
  misc_RNA (1)...(19): siRNA sense strand
uuccugggcucccuauuug

SEQ ID NO: 2132966 - RNA, 19 nt, Homo sapiens
  misc_RNA (1)...(19): siRNA sense strand
uggagaagcagaaagguau

SEQ ID NO: 2132967 - RNA, 19 nt, Homo sapiens
  misc_RNA (1)...(19): siRNA sense strand
gagacguguuggacugugu

SEQ ID NO: 2132968 - RNA, 19 nt, Homo sapiens
  misc_RNA (1)...(19): siRNA sense strand
agacagccuuccgccagua

SEQ ID NO: 2132969 - RNA, 19 nt, Homo sapiens
  misc_RNA (1)...(19): siRNA sense strand
gaaaugcuggagaggaagu

SEQ ID NO: 2132970 - RNA, 19 nt, Homo sapiens
  misc_RNA (1)...(19): siRNA sense strand
gaccugcgcgaguccauug

SEQ ID NO: 2132971 - RNA, 19 nt, Homo sapiens
  misc_RNA (1)...(19): siRNA sense strand
cagcgguacugugucugua

SEQ ID NO: 2132972 - RNA, 19 nt, Homo sapiens
  misc_RNA (1)...(19): siRNA sense strand
gauaacgagagccuugaga

SEQ ID NO: 2132973 - RNA, 19 nt, Homo sapiens
  misc_RNA (1)...(19): siRNA sense strand
gcgagagccaguaccagaa

SEQ ID NO: 2132974 - RNA, 19 nt, Homo sapiens
  misc_RNA (1)...(19): siRNA sense strand
caaguugcugucugcagua

SEQ ID NO: 2132975 - RNA, 19 nt, Homo sapiens
  misc_RNA (1)...(19): siRNA sense strand
gcggaugcaguucuccuuu

SEQ ID NO: 2132976 - RNA, 19 nt, Homo sapiens
  misc_RNA (1)...(19): siRNA sense strand
gagauaacgagagccuuga

SEQ ID NO: 2132977 - RNA, 19 nt, Homo sapiens
  misc_RNA (1)...(19): siRNA sense strand
ggagucaaaggaacagcaa

SEQ ID NO: 2132978 - RNA, 19 nt, Homo sapiens
  misc_RNA (1)...(19): siRNA sense strand
agaaaccaguccugucucu

SEQ ID NO: 2132979 - RNA, 19 nt, Homo sapiens
  misc_RNA (1)...(19): siRNA sense strand
ccaaaauuuuccagaagaa

SEQ ID NO: 2132980 - RNA, 19 nt, Homo sapiens
  misc_RNA (1)...(19): siRNA sense strand
ucaccaaaauuuuccagaa

SEQ ID NO: 2132981 - RNA, 19 nt, Homo sapiens
  misc_RNA (1)...(19): siRNA sense strand
ugagaaagauccuguauua

SEQ ID NO: 2132982 - RNA, 19 nt, Homo sapiens
  misc_RNA (1)...(19): siRNA sense strand
gcaaagcaguggaacauau

SEQ ID NO: 2132983 - RNA, 19 nt, Homo sapiens
  misc_RNA (1)...(19): siRNA sense strand
gaacuggcauggucauuca

SEQ ID NO: 2132984 - RNA, 19 nt, Homo sapiens
  misc_RNA (1)...(19): siRNA sense strand
gacgauggcuccaagagaa

SEQ ID NO: 2132985 - RNA, 19 nt, Homo sapiens
  misc_RNA (1)...(19): siRNA sense strand
guaaaucccucucuguauc

SEQ ID NO: 2132986 - RNA, 19 nt, Homo sapiens
  misc_RNA (1)...(19): siRNA sense strand
gauuggaacuucacagaga

SEQ ID NO: 2132987 - RNA, 19 nt, Homo sapiens
  misc_RNA (1)...(19): siRNA sense strand
gaggaaggcugcacacaag

SEQ ID NO: 2132988 - RNA, 19 nt, Homo sapiens
  misc_RNA (1)...(19): siRNA sense strand
gagaugaaccucuaacaca

SEQ ID NO: 2132989 - RNA, 19 nt, Homo sapiens
  misc_RNA (1)...(19): siRNA sense strand
gauacacacuuggcagaaa

SEQ ID NO: 2132990 - RNA, 19 nt, Homo sapiens
  misc_RNA (1)...(19): siRNA sense strand
ggauuugacuguguuuaug

SEQ ID NO: 2132991 - RNA, 19 nt, Homo sapiens
  misc_RNA (1)...(19): siRNA sense strand
gaugaugauuuccauaucu

SEQ ID NO: 2132992 - RNA, 19 nt, Homo sapiens
  misc_RNA (1)...(19): siRNA sense strand
uaauagaguugcaucaucu

SEQ ID NO: 2132993 - RNA, 19 nt, Homo sapiens
  misc_RNA (1)...(19): siRNA sense strand
uguaccagcucuuagauga

SEQ ID NO: 2132994 - RNA, 19 nt, Homo sapiens
  misc_RNA (1)...(19): siRNA sense strand
ggaauacgccaaagacgau

SEQ ID NO: 2132995 - RNA, 19 nt, Homo sapiens
  misc_RNA (1)...(19): siRNA sense strand
cagcacggauggaaagaug

SEQ ID NO: 2132996 - RNA, 19 nt, Homo sapiens
  misc_RNA (1)...(19): siRNA sense strand
ugacuguguuuauggauug

SEQ ID NO: 2132997 - RNA, 19 nt, Homo sapiens
  misc_RNA (1)...(19): siRNA sense strand
agaguugcaucaucuagaa

SEQ ID NO: 2132998 - RNA, 19 nt, Homo sapiens
  misc_RNA (1)...(19): siRNA sense strand
ggagccaggagaagucaua

SEQ ID NO: 2132999 - RNA, 19 nt, Homo sapiens
  misc_RNA (1)...(19): siRNA sense strand
caaagcaguggaacauauu

SEQ ID NO: 2133000 - RNA, 19 nt, Homo sapiens
  misc_RNA (1)...(19): siRNA sense strand
acacuuggcagaaauaaug

SEQ ID NO: 2133001 - RNA, 19 nt, Homo sapiens
  misc_RNA (1)...(19): siRNA sense strand
ggaaggcugcacacaagaa

SEQ ID NO: 2133002 - RNA, 19 nt, Homo sapiens
  misc_RNA (1)...(19): siRNA sense strand
uaccagcucuuagaugauu

SEQ ID NO: 2133003 - RNA, 19 nt, Homo sapiens
  misc_RNA (1)...(19): siRNA sense strand
gaacacaugguuuuacauu

SEQ ID NO: 2133004 - RNA, 19 nt, Homo sapiens
  misc_RNA (1)...(19): siRNA sense strand
ggucauucaucagguagaa

SEQ ID NO: 2133005 - RNA, 19 nt, Homo sapiens
  misc_RNA (1)...(19): siRNA sense strand
agauggagaugaaccucua

SEQ ID NO: 2133006 - RNA, 19 nt, Homo sapiens
  misc_RNA (1)...(19): siRNA sense strand
gaaauaaugguuggcaaag

SEQ ID NO: 2133007 - RNA, 19 nt, Homo sapiens
  misc_RNA (1)...(19): siRNA sense strand
cuaauagaguugcaucauc

SEQ ID NO: 2133008 - RNA, 19 nt, Homo sapiens
  misc_RNA (1)...(19): siRNA sense strand
cauggucauucaucaggua

SEQ ID NO: 2133009 - RNA, 19 nt, Homo sapiens
  misc_RNA (1)...(19): siRNA sense strand
gcacacaagaagcauagga

SEQ ID NO: 2133010 - RNA, 19 nt, Homo sapiens
  misc_RNA (1)...(19): siRNA sense strand
cuucaagauuccaaugauu

SEQ ID NO: 2133011 - RNA, 19 nt, Homo sapiens
  misc_RNA (1)...(19): siRNA sense strand
gaauucagcacggauggaa

SEQ ID NO: 2133012 - RNA, 19 nt, Homo sapiens
  misc_RNA (1)...(19): siRNA sense strand
caucgugggcugcagaauu

SEQ ID NO: 2133013 - RNA, 19 nt, Homo sapiens
  misc_RNA (1)...(19): siRNA sense strand
aauaaugguuggcaaagca

SEQ ID NO: 2133014 - RNA, 19 nt, Homo sapiens
  misc_RNA (1)...(19): siRNA sense strand
cuaacacaguggaaaggaa

SEQ ID NO: 2133015 - RNA, 19 nt, Homo sapiens
  misc_RNA (1)...(19): siRNA sense strand
auggaaagauggagaugaa

SEQ ID NO: 2133016 - RNA, 19 nt, Homo sapiens
  misc_RNA (1)...(19): siRNA sense strand
gguuuuacauuaccuauga

SEQ ID NO: 2133017 - RNA, 19 nt, Homo sapiens
  misc_RNA (1)...(19): siRNA sense strand
gagaaagauccuguauuau

SEQ ID NO: 2133018 - RNA, 19 nt, Homo sapiens
  misc_RNA (1)...(19): siRNA sense strand
gcacggauggaaagaugga

SEQ ID NO: 2133019 - RNA, 19 nt, Homo sapiens
  misc_RNA (1)...(19): siRNA sense strand
agaaauaaugguuggcaaa

SEQ ID NO: 2133020 - RNA, 19 nt, Homo sapiens
  misc_RNA (1)...(19): siRNA sense strand
agucauagacagccuggua

SEQ ID NO: 2133021 - RNA, 19 nt, Homo sapiens
  misc_RNA (1)...(19): siRNA sense strand
uaggcaaacagguggaaua

SEQ ID NO: 2133022 - RNA, 19 nt, Homo sapiens
  misc_RNA (1)...(19): siRNA sense strand
guuuauggauuggaacuuc

SEQ ID NO: 2133023 - RNA, 19 nt, Homo sapiens
  misc_RNA (1)...(19): siRNA sense strand
auacacacuuggcagaaau

SEQ ID NO: 2133024 - RNA, 19 nt, Homo sapiens
  misc_RNA (1)...(19): siRNA sense strand
gauggaaagauggagauga

SEQ ID NO: 2133025 - RNA, 19 nt, Homo sapiens
  misc_RNA (1)...(19): siRNA sense strand
ucuguuaccaugauaaaga

SEQ ID NO: 2133026 - RNA, 19 nt, Homo sapiens
  misc_RNA (1)...(19): siRNA sense strand
ugauggauuugacuguguu

SEQ ID NO: 2133027 - RNA, 19 nt, Homo sapiens
  misc_RNA (1)...(19): siRNA sense strand
cuguguacuucaucaaauu

SEQ ID NO: 2133028 - RNA, 19 nt, Homo sapiens
  misc_RNA (1)...(19): siRNA sense strand
caucaucuagaaucaguga

SEQ ID NO: 2133029 - RNA, 19 nt, Homo sapiens
  misc_RNA (1)...(19): siRNA sense strand
ccacggcagugugucuguu

SEQ ID NO: 2133030 - RNA, 19 nt, Homo sapiens
  misc_RNA (1)...(19): siRNA sense strand
ugaugaugauuuccauauc

SEQ ID NO: 2133031 - RNA, 19 nt, Homo sapiens
  misc_RNA (1)...(19): siRNA sense strand
ggagaugaaccucuaacac

SEQ ID NO: 2133032 - RNA, 19 nt, Homo sapiens
  misc_RNA (1)...(19): siRNA sense strand
gaaggcugcacacaagaag

SEQ ID NO: 2133033 - RNA, 19 nt, Homo sapiens
  misc_RNA (1)...(19): siRNA sense strand
uguaaaucccucucuguau

SEQ ID NO: 2133034 - RNA, 19 nt, Homo sapiens
  misc_RNA (1)...(19): siRNA sense strand
ggcaaagcaguggaacaua

SEQ ID NO: 2133035 - RNA, 19 nt, Homo sapiens
  misc_RNA (1)...(19): siRNA sense strand
ucuguguacuucaucaaau

SEQ ID NO: 2133036 - RNA, 19 nt, Homo sapiens
  misc_RNA (1)...(19): siRNA sense strand
gcaccugucaugaacacau

SEQ ID NO: 2133037 - RNA, 19 nt, Homo sapiens
  misc_RNA (1)...(19): siRNA sense strand
gaugaaccucuaacacagu

SEQ ID NO: 2133038 - RNA, 19 nt, Homo sapiens
  misc_RNA (1)...(19): siRNA sense strand
agaggaaggcugcacacaa

SEQ ID NO: 2133039 - RNA, 19 nt, Homo sapiens
  misc_RNA (1)...(19): siRNA sense strand
cuguaaaucccucucugua

SEQ ID NO: 2133040 - RNA, 19 nt, Homo sapiens
  misc_RNA (1)...(19): siRNA sense strand
uuaccaugauaaagaggaa

SEQ ID NO: 2133041 - RNA, 19 nt, Homo sapiens
  misc_RNA (1)...(19): siRNA sense strand
cuaugucuacgauuuggua

SEQ ID NO: 2133042 - RNA, 19 nt, Homo sapiens
  misc_RNA (1)...(19): siRNA sense strand
uacauuaccuaugagaaag

SEQ ID NO: 2133043 - RNA, 19 nt, Homo sapiens
  misc_RNA (1)...(19): siRNA sense strand
gaaagauggagaugaaccu

SEQ ID NO: 2133044 - RNA, 19 nt, Homo sapiens
  misc_RNA (1)...(19): siRNA sense strand
gauggagaugaaccucuaa

SEQ ID NO: 2133045 - RNA, 19 nt, Homo sapiens
  misc_RNA (1)...(19): siRNA sense strand
ccuucaagauuccaaugau

SEQ ID NO: 2133046 - RNA, 19 nt, Homo sapiens
  misc_RNA (1)...(19): siRNA sense strand
uaugagaaagauccuguau

SEQ ID NO: 2133047 - RNA, 19 nt, Homo sapiens
  misc_RNA (1)...(19): siRNA sense strand
aaagcaguggaacauauuu

SEQ ID NO: 2133048 - RNA, 19 nt, Homo sapiens
  misc_RNA (1)...(19): siRNA sense strand
guugcaucaucuagaauca

SEQ ID NO: 2133049 - RNA, 19 nt, Homo sapiens
  misc_RNA (1)...(19): siRNA sense strand
uaucuaugucuacgauuug

SEQ ID NO: 2133050 - RNA, 19 nt, Homo sapiens
  misc_RNA (1)...(19): siRNA sense strand
ccaaagacgauggcuccaa

SEQ ID NO: 2133051 - RNA, 19 nt, Homo sapiens
  misc_RNA (1)...(19): siRNA sense strand
cacggcagugugucuguua

SEQ ID NO: 2133052 - RNA, 19 nt, Homo sapiens
  misc_RNA (1)...(19): siRNA sense strand
auauauguaccagcucuua

SEQ ID NO: 2133053 - RNA, 19 nt, Homo sapiens
  misc_RNA (1)...(19): siRNA sense strand
uggauuugacuguguuuau

SEQ ID NO: 2133054 - RNA, 19 nt, Homo sapiens
  misc_RNA (1)...(19): siRNA sense strand
gcaaaacccucuguguacu

SEQ ID NO: 2133055 - RNA, 19 nt, Homo sapiens
  misc_RNA (1)...(19): siRNA sense strand
aagcaaaacccucugugua

SEQ ID NO: 2133056 - RNA, 19 nt, Homo sapiens
  misc_RNA (1)...(19): siRNA sense strand
gagggagccaggagaaguc

SEQ ID NO: 2133057 - RNA, 19 nt, Homo sapiens
  misc_RNA (1)...(19): siRNA sense strand
agagagggagccaggagaa

SEQ ID NO: 2133058 - RNA, 19 nt, Homo sapiens
  misc_RNA (1)...(19): siRNA sense strand
gauuugacuguguuuaugg

SEQ ID NO: 2133059 - RNA, 19 nt, Homo sapiens
  misc_RNA (1)...(19): siRNA sense strand
gaaauaugaugccaaauug

SEQ ID NO: 2133060 - RNA, 19 nt, Homo sapiens
  misc_RNA (1)...(19): siRNA sense strand
gaugacaggucuuuaguuu

SEQ ID NO: 2133061 - RNA, 19 nt, Homo sapiens
  misc_RNA (1)...(19): siRNA sense strand
gaaaucugcucucaucauu

SEQ ID NO: 2133062 - RNA, 19 nt, Homo sapiens
  misc_RNA (1)...(19): siRNA sense strand
gugaugagcuggugaauau

SEQ ID NO: 2133063 - RNA, 19 nt, Homo sapiens
  misc_RNA (1)...(19): siRNA sense strand
ggagggagcucuuuagcaa

SEQ ID NO: 2133064 - RNA, 19 nt, Homo sapiens
  misc_RNA (1)...(19): siRNA sense strand
gagacaagcucuucaacaa

SEQ ID NO: 2133065 - RNA, 19 nt, Homo sapiens
  misc_RNA (1)...(19): siRNA sense strand
uaacacaucucuucuaucu

SEQ ID NO: 2133066 - RNA, 19 nt, Homo sapiens
  misc_RNA (1)...(19): siRNA sense strand
ggaggaaguugaccaugaa

SEQ ID NO: 2133067 - RNA, 19 nt, Homo sapiens
  misc_RNA (1)...(19): siRNA sense strand
ggacaucaaugccaauucu

SEQ ID NO: 2133068 - RNA, 19 nt, Homo sapiens
  misc_RNA (1)...(19): siRNA sense strand
acacaucucuucuaucuuc

SEQ ID NO: 2133069 - RNA, 19 nt, Homo sapiens
  misc_RNA (1)...(19): siRNA sense strand
ggaggaagaagaagaagaa

SEQ ID NO: 2133070 - RNA, 19 nt, Homo sapiens
  misc_RNA (1)...(19): siRNA sense strand
agagaaauaugaugccaaa

SEQ ID NO: 2133071 - RNA, 19 nt, Homo sapiens
  misc_RNA (1)...(19): siRNA sense strand
ggagguggaggccaacuua

SEQ ID NO: 2133072 - RNA, 19 nt, Homo sapiens
  misc_RNA (1)...(19): siRNA sense strand
gcaaaggucuagaaaauuc

SEQ ID NO: 2133073 - RNA, 19 nt, Homo sapiens
  misc_RNA (1)...(19): siRNA sense strand
ucaaggagcucuaguccau

SEQ ID NO: 2133074 - RNA, 19 nt, Homo sapiens
  misc_RNA (1)...(19): siRNA sense strand
cuaccaaucugcguaauga

SEQ ID NO: 2133075 - RNA, 19 nt, Homo sapiens
  misc_RNA (1)...(19): siRNA sense strand
gggaagagcaacucaaaug

SEQ ID NO: 2133076 - RNA, 19 nt, Homo sapiens
  misc_RNA (1)...(19): siRNA sense strand
aggaccagcuccaagauua

SEQ ID NO: 2133077 - RNA, 19 nt, Homo sapiens
  misc_RNA (1)...(19): siRNA sense strand
gcaaauccuuaucuacauc

SEQ ID NO: 2133078 - RNA, 19 nt, Homo sapiens
  misc_RNA (1)...(19): siRNA sense strand
ggaauccaauaacaggaaa

SEQ ID NO: 2133079 - RNA, 19 nt, Homo sapiens
  misc_RNA (1)...(19): siRNA sense strand
aaucugcucucaucauuga

SEQ ID NO: 2133080 - RNA, 19 nt, Homo sapiens
  misc_RNA (1)...(19): siRNA sense strand
gagacaggguucacaaagu

SEQ ID NO: 2133081 - RNA, 19 nt, Homo sapiens
  misc_RNA (1)...(19): siRNA sense strand
gagaguagcaaauccuuau

SEQ ID NO: 2133082 - RNA, 19 nt, Homo sapiens
  misc_RNA (1)...(19): siRNA sense strand
ggagaaguugguacugaua

SEQ ID NO: 2133083 - RNA, 19 nt, Homo sapiens
  misc_RNA (1)...(19): siRNA sense strand
ggaagaagaagaagaagag

SEQ ID NO: 2133084 - RNA, 19 nt, Homo sapiens
  misc_RNA (1)...(19): siRNA sense strand
ccacagaccaaucauauca

SEQ ID NO: 2133085 - RNA, 19 nt, Homo sapiens
  misc_RNA (1)...(19): siRNA sense strand
gagcuuagagccugugcua

SEQ ID NO: 2133086 - RNA, 19 nt, Homo sapiens
  misc_RNA (1)...(19): siRNA sense strand
gcaagcaaaggucuagaaa

SEQ ID NO: 2133087 - RNA, 19 nt, Homo sapiens
  misc_RNA (1)...(19): siRNA sense strand
gaaagaaagaccagacaag

SEQ ID NO: 2133088 - RNA, 19 nt, Homo sapiens
  misc_RNA (1)...(19): siRNA sense strand
gagcccaacuccucaaugg

SEQ ID NO: 2133089 - RNA, 19 nt, Homo sapiens
  misc_RNA (1)...(19): siRNA sense strand
gacaagcucuucaacaaaa

SEQ ID NO: 2133090 - RNA, 19 nt, Homo sapiens
  misc_RNA (1)...(19): siRNA sense strand
gaugaggacuggugaugag

SEQ ID NO: 2133091 - RNA, 19 nt, Homo sapiens
  misc_RNA (1)...(19): siRNA sense strand
ucuaacacaucucuucuau

SEQ ID NO: 2133092 - RNA, 19 nt, Homo sapiens
  misc_RNA (1)...(19): siRNA sense strand
gaaagaccaaccugagaug

SEQ ID NO: 2133093 - RNA, 19 nt, Homo sapiens
  misc_RNA (1)...(19): siRNA sense strand
gaacaaacugaaagaccaa

SEQ ID NO: 2133094 - RNA, 19 nt, Homo sapiens
  misc_RNA (1)...(19): siRNA sense strand
agacaggguucacaaagug

SEQ ID NO: 2133095 - RNA, 19 nt, Homo sapiens
  misc_RNA (1)...(19): siRNA sense strand
ggaggaggaagaagaagaa

SEQ ID NO: 2133096 - RNA, 19 nt, Homo sapiens
  misc_RNA (1)...(19): siRNA sense strand
caugauccuugcauuuauu

SEQ ID NO: 2133097 - RNA, 19 nt, Homo sapiens
  misc_RNA (1)...(19): siRNA sense strand
agucagaaacucccacuua

SEQ ID NO: 2133098 - RNA, 19 nt, Homo sapiens
  misc_RNA (1)...(19): siRNA sense strand
gaaggagaaacugagcuua

SEQ ID NO: 2133099 - RNA, 19 nt, Homo sapiens
  misc_RNA (1)...(19): siRNA sense strand
gggagaaguugguguuugg

SEQ ID NO: 2133100 - RNA, 19 nt, Homo sapiens
  misc_RNA (1)...(19): siRNA sense strand
caggagaaguugguacuga

SEQ ID NO: 2133101 - RNA, 19 nt, Homo sapiens
  misc_RNA (1)...(19): siRNA sense strand
caggaaucccuaccucuua

SEQ ID NO: 2133102 - RNA, 19 nt, Homo sapiens
  misc_RNA (1)...(19): siRNA sense strand
caacccaggugacaacaag

SEQ ID NO: 2133103 - RNA, 19 nt, Homo sapiens
  misc_RNA (1)...(19): siRNA sense strand
ucucuucuaucuucaugua

SEQ ID NO: 2133104 - RNA, 19 nt, Homo sapiens
  misc_RNA (1)...(19): siRNA sense strand
gcacagaggcaggugaaga

SEQ ID NO: 2133105 - RNA, 19 nt, Homo sapiens
  misc_RNA (1)...(19): siRNA sense strand
ugacaggucuuuaguuuug

SEQ ID NO: 2133106 - RNA, 19 nt, Homo sapiens
  misc_RNA (1)...(19): siRNA sense strand
gauggucuccagagcauaa

SEQ ID NO: 2133107 - RNA, 19 nt, Homo sapiens
  misc_RNA (1)...(19): siRNA sense strand
gaagagcaacucaaauguc

SEQ ID NO: 2133108 - RNA, 19 nt, Homo sapiens
  misc_RNA (1)...(19): siRNA sense strand
ggaagagcaacucaaaugu

SEQ ID NO: 2133109 - RNA, 19 nt, Homo sapiens
  misc_RNA (1)...(19): siRNA sense strand
ggaggaggaggaagaagaa

SEQ ID NO: 2133110 - RNA, 19 nt, Homo sapiens
  misc_RNA (1)...(19): siRNA sense strand
cgagcaauuucuucucuug

SEQ ID NO: 2133111 - RNA, 19 nt, Homo sapiens
  misc_RNA (1)...(19): siRNA sense strand
gagaaaagcagcuccauug

SEQ ID NO: 2133112 - RNA, 19 nt, Homo sapiens
  misc_RNA (1)...(19): siRNA sense strand
acagaccaaucauaucauu

SEQ ID NO: 2133113 - RNA, 19 nt, Homo sapiens
  misc_RNA (1)...(19): siRNA sense strand
cagagcagccagugaauug

SEQ ID NO: 2133114 - RNA, 19 nt, Homo sapiens
  misc_RNA (1)...(19): siRNA sense strand
ucaguuugcuaucauaauc

SEQ ID NO: 2133115 - RNA, 19 nt, Homo sapiens
  misc_RNA (1)...(19): siRNA sense strand
gaaaauuccauguguugua

SEQ ID NO: 2133116 - RNA, 19 nt, Homo sapiens
  misc_RNA (1)...(19): siRNA sense strand
ccacuuacucagaauguuu

SEQ ID NO: 2133117 - RNA, 19 nt, Homo sapiens
  misc_RNA (1)...(19): siRNA sense strand
caucucauuugccagguuu

SEQ ID NO: 2133118 - RNA, 19 nt, Homo sapiens
  misc_RNA (1)...(19): siRNA sense strand
caaucugcguaaugaaauu

SEQ ID NO: 2133119 - RNA, 19 nt, Homo sapiens
  misc_RNA (1)...(19): siRNA sense strand
caagugagggccaucagaa

SEQ ID NO: 2133120 - RNA, 19 nt, Homo sapiens
  misc_RNA (1)...(19): siRNA sense strand
gcucugaacagcaucgauu

SEQ ID NO: 2133121 - RNA, 19 nt, Homo sapiens
  misc_RNA (1)...(19): siRNA sense strand
ccucuuacucagcuuauua

SEQ ID NO: 2133122 - RNA, 19 nt, Homo sapiens
  misc_RNA (1)...(19): siRNA sense strand
ugcauucgguguucaguuu

SEQ ID NO: 2133123 - RNA, 19 nt, Homo sapiens
  misc_RNA (1)...(19): siRNA sense strand
ggaaggcccagcuccagaa

SEQ ID NO: 2133124 - RNA, 19 nt, Homo sapiens
  misc_RNA (1)...(19): siRNA sense strand
ccacagaaggagaaacuga

SEQ ID NO: 2133125 - RNA, 19 nt, Homo sapiens
  misc_RNA (1)...(19): siRNA sense strand
ggacaggaagccacugaau

SEQ ID NO: 2133126 - RNA, 19 nt, Homo sapiens
  misc_RNA (1)...(19): siRNA sense strand
cauaggagggagcucuuua

SEQ ID NO: 2133127 - RNA, 19 nt, Homo sapiens
  misc_RNA (1)...(19): siRNA sense strand
aaucugcccugccuugcua

SEQ ID NO: 2133128 - RNA, 19 nt, Homo sapiens
  misc_RNA (1)...(19): siRNA sense strand
ccaugauccuugcauuuau

SEQ ID NO: 2133129 - RNA, 19 nt, Homo sapiens
  misc_RNA (1)...(19): siRNA sense strand
cuaaggagccaguggaaga

SEQ ID NO: 2133130 - RNA, 19 nt, Homo sapiens
  misc_RNA (1)...(19): siRNA sense strand
gagcaacucaaaugucuca

SEQ ID NO: 2133131 - RNA, 19 nt, Homo sapiens
  misc_RNA (1)...(19): siRNA sense strand
acaaaguggucaaccuguu

SEQ ID NO: 2133132 - RNA, 19 nt, Homo sapiens
  misc_RNA (1)...(19): siRNA sense strand
ccagaaaguccuccacuca

SEQ ID NO: 2133133 - RNA, 19 nt, Homo sapiens
  misc_RNA (1)...(19): siRNA sense strand
aggaggaaguugaccauga

SEQ ID NO: 2133134 - RNA, 19 nt, Homo sapiens
  misc_RNA (1)...(19): siRNA sense strand
gcucacagugucuaagauu

SEQ ID NO: 2133135 - RNA, 19 nt, Homo sapiens
  misc_RNA (1)...(19): siRNA sense strand
uagcaaauccuuaucuaca

SEQ ID NO: 2133136 - RNA, 19 nt, Homo sapiens
  misc_RNA (1)...(19): siRNA sense strand
gaugcaggccucaaccaaa

SEQ ID NO: 2133137 - RNA, 19 nt, Homo sapiens
  misc_RNA (1)...(19): siRNA sense strand
gaugagcuggugaauauca

SEQ ID NO: 2133138 - RNA, 19 nt, Homo sapiens
  misc_RNA (1)...(19): siRNA sense strand
aaggagcucuaguccauga

SEQ ID NO: 2133139 - RNA, 19 nt, Homo sapiens
  misc_RNA (1)...(19): siRNA sense strand
gcagaccaaccauaucaug

SEQ ID NO: 2133140 - RNA, 19 nt, Homo sapiens
  misc_RNA (1)...(19): siRNA sense strand
cagcaugugcaccuugaua

SEQ ID NO: 2133141 - RNA, 19 nt, Homo sapiens
  misc_RNA (1)...(19): siRNA sense strand
gcagagcagccagugaauu

SEQ ID NO: 2133142 - RNA, 19 nt, Homo sapiens
  misc_RNA (1)...(19): siRNA sense strand
agaagaagaagaagaggaa

SEQ ID NO: 2133143 - RNA, 19 nt, Homo sapiens
  misc_RNA (1)...(19): siRNA sense strand
ggagaaguacaggcucuuu

SEQ ID NO: 2133144 - RNA, 19 nt, Homo sapiens
  misc_RNA (1)...(19): siRNA sense strand
aagcaaaggucuagaaaau

SEQ ID NO: 2133145 - RNA, 19 nt, Homo sapiens
  misc_RNA (1)...(19): siRNA sense strand
gaggacaucgggacaggaa

SEQ ID NO: 2133146 - RNA, 19 nt, Homo sapiens
  misc_RNA (1)...(19): siRNA sense strand
agcgagagcuggaggagaa

SEQ ID NO: 2133147 - RNA, 19 nt, Homo sapiens
  misc_RNA (1)...(19): siRNA sense strand
aacaagaguuucagcacuu

SEQ ID NO: 2133148 - RNA, 19 nt, Homo sapiens
  misc_RNA (1)...(19): siRNA sense strand
gggcaccaguggacucugu

SEQ ID NO: 2133149 - RNA, 19 nt, Homo sapiens
  misc_RNA (1)...(19): siRNA sense strand
acaagaguuucagcacuuu

SEQ ID NO: 2133150 - RNA, 19 nt, Homo sapiens
  misc_RNA (1)...(19): siRNA sense strand
cagcagagcaagaauccuu

SEQ ID NO: 2133151 - RNA, 19 nt, Homo sapiens
  misc_RNA (1)...(19): siRNA sense strand
agaagaagaggaagaggaa

SEQ ID NO: 2133152 - RNA, 19 nt, Homo sapiens
  misc_RNA (1)...(19): siRNA sense strand
gguguucaguuugcuauca

SEQ ID NO: 2133153 - RNA, 19 nt, Homo sapiens
  misc_RNA (1)...(19): siRNA sense strand
ucacagugucuaagauuga

SEQ ID NO: 2133154 - RNA, 19 nt, Homo sapiens
  misc_RNA (1)...(19): siRNA sense strand
gauccuugcauuuauuguu

SEQ ID NO: 2133155 - RNA, 19 nt, Homo sapiens
  misc_RNA (1)...(19): siRNA sense strand
gcagcuuugucccagaaga

SEQ ID NO: 2133156 - RNA, 19 nt, Homo sapiens
  misc_RNA (1)...(19): siRNA sense strand
ccauuccagugauuucuug

SEQ ID NO: 2133157 - RNA, 19 nt, Homo sapiens
  misc_RNA (1)...(19): siRNA sense strand
aagagcaacucaaaugucu

SEQ ID NO: 2133158 - RNA, 19 nt, Homo sapiens
  misc_RNA (1)...(19): siRNA sense strand
uaccagcacuuugucaaga

SEQ ID NO: 2133159 - RNA, 19 nt, Homo sapiens
  misc_RNA (1)...(19): siRNA sense strand
gcacagaacguacguguau

SEQ ID NO: 2133160 - RNA, 19 nt, Homo sapiens
  misc_RNA (1)...(19): siRNA sense strand
ccgaauaucuggagaaacu

SEQ ID NO: 2133161 - RNA, 19 nt, Homo sapiens
  misc_RNA (1)...(19): siRNA sense strand
gaauaucuggagaaacuaa

SEQ ID NO: 2133162 - RNA, 19 nt, Homo sapiens
  misc_RNA (1)...(19): siRNA sense strand
gaagauucgguuagcauug

SEQ ID NO: 2133163 - RNA, 19 nt, Homo sapiens
  misc_RNA (1)...(19): siRNA sense strand
ggaggaagcgagagugguu

SEQ ID NO: 2133164 - RNA, 19 nt, Homo sapiens
  misc_RNA (1)...(19): siRNA sense strand
gacgagguccuguuaguga

SEQ ID NO: 2133165 - RNA, 19 nt, Homo sapiens
  misc_RNA (1)...(19): siRNA sense strand
ggaagauucgguuagcauu

SEQ ID NO: 2133166 - RNA, 19 nt, Homo sapiens
  misc_RNA (1)...(19): siRNA sense strand
gaagcgagagugguucaaa

SEQ ID NO: 2133167 - RNA, 19 nt, Homo sapiens
  misc_RNA (1)...(19): siRNA sense strand
gagguccuguuagugagua

SEQ ID NO: 2133168 - RNA, 19 nt, Homo sapiens
  misc_RNA (1)...(19): siRNA sense strand
ccucgaggaugaagugcaa

SEQ ID NO: 2133169 - RNA, 19 nt, Homo sapiens
  misc_RNA (1)...(19): siRNA sense strand
uccgagagguguacgaaga

SEQ ID NO: 2133170 - RNA, 19 nt, Homo sapiens
  misc_RNA (1)...(19): siRNA sense strand
cggagcugcuggaggauug

SEQ ID NO: 2133171 - RNA, 19 nt, Homo sapiens
  misc_RNA (1)...(19): siRNA sense strand
gcuggaggauugggaagau

SEQ ID NO: 2133172 - RNA, 19 nt, Homo sapiens
  misc_RNA (1)...(19): siRNA sense strand
cgccgaauaucuggagaaa

SEQ ID NO: 2133173 - RNA, 19 nt, Homo sapiens
  misc_RNA (1)...(19): siRNA sense strand
cgaagaggcgggagucaag

SEQ ID NO: 2133174 - RNA, 19 nt, Homo sapiens
  misc_RNA (1)...(19): siRNA sense strand
uaagccagaaugguugaua

SEQ ID NO: 2133175 - RNA, 19 nt, Homo sapiens
  misc_RNA (1)...(19): siRNA sense strand
gauugggaagauucgguua

SEQ ID NO: 2133176 - RNA, 19 nt, Homo sapiens
  misc_RNA (1)...(19): siRNA sense strand
gggaagauucgguuagcau

SEQ ID NO: 2133177 - RNA, 19 nt, Homo sapiens
  misc_RNA (1)...(19): siRNA sense strand
gcuccugggcgucuucgaa

SEQ ID NO: 2133178 - RNA, 19 nt, Homo sapiens
  misc_RNA (1)...(19): siRNA sense strand
ugaugacgacgcugccuuu

SEQ ID NO: 2133179 - RNA, 19 nt, Homo sapiens
  misc_RNA (1)...(19): siRNA sense strand
cagaacguacguguaugua

SEQ ID NO: 2133180 - RNA, 19 nt, Homo sapiens
  misc_RNA (1)...(19): siRNA sense strand
gcccgugcacgccgaauau

SEQ ID NO: 2133181 - RNA, 19 nt, Homo sapiens
  misc_RNA (1)...(19): siRNA sense strand
aagccagaaugguugauag

SEQ ID NO: 2133182 - RNA, 19 nt, Homo sapiens
  misc_RNA (1)...(19): siRNA sense strand
aagcgagagugguucaaag

SEQ ID NO: 2133183 - RNA, 19 nt, Homo sapiens
  misc_RNA (1)...(19): siRNA sense strand
ggagugagaggagaaacgu

SEQ ID NO: 2133184 - RNA, 19 nt, Homo sapiens
  misc_RNA (1)...(19): siRNA sense strand
aagauucgguuagcauugg

SEQ ID NO: 2133185 - RNA, 19 nt, Homo sapiens
  misc_RNA (1)...(19): siRNA sense strand
acagaacguacguguaugu

SEQ ID NO: 2133186 - RNA, 19 nt, Homo sapiens
  misc_RNA (1)...(19): siRNA sense strand
acaacugccuguggguuuc

SEQ ID NO: 2133187 - RNA, 19 nt, Homo sapiens
  misc_RNA (1)...(19): siRNA sense strand
caagaaguaugcugaauug

SEQ ID NO: 2133188 - RNA, 19 nt, Homo sapiens
  misc_RNA (1)...(19): siRNA sense strand
gaauaugagugcuuuguga

SEQ ID NO: 2133189 - RNA, 19 nt, Homo sapiens
  misc_RNA (1)...(19): siRNA sense strand
ggacaugauugaagagaaa

SEQ ID NO: 2133190 - RNA, 19 nt, Homo sapiens
  misc_RNA (1)...(19): siRNA sense strand
gaaggaagauggccaggau

SEQ ID NO: 2133191 - RNA, 19 nt, Homo sapiens
  misc_RNA (1)...(19): siRNA sense strand
caacaagacucugaaggaa

SEQ ID NO: 2133192 - RNA, 19 nt, Homo sapiens
  misc_RNA (1)...(19): siRNA sense strand
caacguggcugacaccaau

SEQ ID NO: 2133193 - RNA, 19 nt, Homo sapiens
  misc_RNA (1)...(19): siRNA sense strand
ugaagaggcuggaagagaa

SEQ ID NO: 2133194 - RNA, 19 nt, Homo sapiens
  misc_RNA (1)...(19): siRNA sense strand
aaucagagacgcagaaaua

SEQ ID NO: 2133195 - RNA, 19 nt, Homo sapiens
  misc_RNA (1)...(19): siRNA sense strand
gaacacagagcuugcagaa

SEQ ID NO: 2133196 - RNA, 19 nt, Homo sapiens
  misc_RNA (1)...(19): siRNA sense strand
caaagaagccaaccugcua

SEQ ID NO: 2133197 - RNA, 19 nt, Homo sapiens
  misc_RNA (1)...(19): siRNA sense strand
ggacacagccacauggaaa

SEQ ID NO: 2133198 - RNA, 19 nt, Homo sapiens
  misc_RNA (1)...(19): siRNA sense strand
ggccacagccuucaugaua

SEQ ID NO: 2133199 - RNA, 19 nt, Homo sapiens
  misc_RNA (1)...(19): siRNA sense strand
cagaggagguuaauagugu

SEQ ID NO: 2133200 - RNA, 19 nt, Homo sapiens
  misc_RNA (1)...(19): siRNA sense strand
gaagacaucauuaacacuu

SEQ ID NO: 2133201 - RNA, 19 nt, Homo sapiens
  misc_RNA (1)...(19): siRNA sense strand
gaaccucugccgugcuuua

SEQ ID NO: 2133202 - RNA, 19 nt, Homo sapiens
  misc_RNA (1)...(19): siRNA sense strand
acugagagcuaaagaauau

SEQ ID NO: 2133203 - RNA, 19 nt, Homo sapiens
  misc_RNA (1)...(19): siRNA sense strand
gcacugagagcuaaagaau

SEQ ID NO: 2133204 - RNA, 19 nt, Homo sapiens
  misc_RNA (1)...(19): siRNA sense strand
acacagagcuugcagaaaa

SEQ ID NO: 2133205 - RNA, 19 nt, Homo sapiens
  misc_RNA (1)...(19): siRNA sense strand
gagaaacgaacuccacaaa

SEQ ID NO: 2133206 - RNA, 19 nt, Homo sapiens
  misc_RNA (1)...(19): siRNA sense strand
ucaaagagcccgucagcaa

SEQ ID NO: 2133207 - RNA, 19 nt, Homo sapiens
  misc_RNA (1)...(19): siRNA sense strand
agaaagcacugagagcuaa

SEQ ID NO: 2133208 - RNA, 19 nt, Homo sapiens
  misc_RNA (1)...(19): siRNA sense strand
acaagacucugaaggaaga

SEQ ID NO: 2133209 - RNA, 19 nt, Homo sapiens
  misc_RNA (1)...(19): siRNA sense strand
gccacagccuucaugauaa

SEQ ID NO: 2133210 - RNA, 19 nt, Homo sapiens
  misc_RNA (1)...(19): siRNA sense strand
gcacaacuccgaugaagag

SEQ ID NO: 2133211 - RNA, 19 nt, Homo sapiens
  misc_RNA (1)...(19): siRNA sense strand
caggaagguuugaagaauu

SEQ ID NO: 2133212 - RNA, 19 nt, Homo sapiens
  misc_RNA (1)...(19): siRNA sense strand
agaaacagguacaaauuca

SEQ ID NO: 2133213 - RNA, 19 nt, Homo sapiens
  misc_RNA (1)...(19): siRNA sense strand
gagaaccucugccgugcuu

SEQ ID NO: 2133214 - RNA, 19 nt, Homo sapiens
  misc_RNA (1)...(19): siRNA sense strand
gagaggagcaucuggacaa

SEQ ID NO: 2133215 - RNA, 19 nt, Homo sapiens
  misc_RNA (1)...(19): siRNA sense strand
gagaaagcacugagagcua

SEQ ID NO: 2133216 - RNA, 19 nt, Homo sapiens
  misc_RNA (1)...(19): siRNA sense strand
ggaaagcccgauuugagaa

SEQ ID NO: 2133217 - RNA, 19 nt, Homo sapiens
  misc_RNA (1)...(19): siRNA sense strand
gaagcaaauuggagagucu

SEQ ID NO: 2133218 - RNA, 19 nt, Homo sapiens
  misc_RNA (1)...(19): siRNA sense strand
ccacagccuucaugauaau

SEQ ID NO: 2133219 - RNA, 19 nt, Homo sapiens
  misc_RNA (1)...(19): siRNA sense strand
ugaagaagcuggaaaagga

SEQ ID NO: 2133220 - RNA, 19 nt, Homo sapiens
  misc_RNA (1)...(19): siRNA sense strand
gaaauaugaagcucuguca

SEQ ID NO: 2133221 - RNA, 19 nt, Homo sapiens
  misc_RNA (1)...(19): siRNA sense strand
aaagagcccgucagcaaua

SEQ ID NO: 2133222 - RNA, 19 nt, Homo sapiens
  misc_RNA (1)...(19): siRNA sense strand
acaauggccuggagaagga

SEQ ID NO: 2133223 - RNA, 19 nt, Homo sapiens
  misc_RNA (1)...(19): siRNA sense strand
gaaguuaaagcuccuccaa

SEQ ID NO: 2133224 - RNA, 19 nt, Homo sapiens
  misc_RNA (1)...(19): siRNA sense strand
gaagauggaggcagaugug

SEQ ID NO: 2133225 - RNA, 19 nt, Homo sapiens
  misc_RNA (1)...(19): siRNA sense strand
uauccucgcucgaagcaaa

SEQ ID NO: 2133226 - RNA, 19 nt, Homo sapiens
  misc_RNA (1)...(19): siRNA sense strand
gcagcagaguggaaacuuc

SEQ ID NO: 2133227 - RNA, 19 nt, Homo sapiens
  misc_RNA (1)...(19): siRNA sense strand
cccaagaaaugaugaagga

SEQ ID NO: 2133228 - RNA, 19 nt, Homo sapiens
  misc_RNA (1)...(19): siRNA sense strand
cagcagagugagcgaaaua

SEQ ID NO: 2133229 - RNA, 19 nt, Homo sapiens
  misc_RNA (1)...(19): siRNA sense strand
gaacaucguacugagcaaa

SEQ ID NO: 2133230 - RNA, 19 nt, Homo sapiens
  misc_RNA (1)...(19): siRNA sense strand
gagcaggcccaagaaauga

SEQ ID NO: 2133231 - RNA, 19 nt, Homo sapiens
  misc_RNA (1)...(19): siRNA sense strand
acaaagcucuguuggacau

SEQ ID NO: 2133232 - RNA, 19 nt, Homo sapiens
  misc_RNA (1)...(19): siRNA sense strand
ggacaaaacaacuaagaaa

SEQ ID NO: 2133233 - RNA, 19 nt, Homo sapiens
  misc_RNA (1)...(19): siRNA sense strand
ucaggaagguuugaagaau

SEQ ID NO: 2133234 - RNA, 19 nt, Homo sapiens
  misc_RNA (1)...(19): siRNA sense strand
uaugagugcuuugugauga

SEQ ID NO: 2133235 - RNA, 19 nt, Homo sapiens
  misc_RNA (1)...(19): siRNA sense strand
aaagaaacccaacccgaaa

SEQ ID NO: 2133236 - RNA, 19 nt, Homo sapiens
  misc_RNA (1)...(19): siRNA sense strand
ucaagaaguaugcugaauu

SEQ ID NO: 2133237 - RNA, 19 nt, Homo sapiens
  misc_RNA (1)...(19): siRNA sense strand
ccagugagcagccugagaa

SEQ ID NO: 2133238 - RNA, 19 nt, Homo sapiens
  misc_RNA (1)...(19): siRNA sense strand
ggugacaguucaucauuac

SEQ ID NO: 2133239 - RNA, 19 nt, Homo sapiens
  misc_RNA (1)...(19): siRNA sense strand
cagagugagcgaaauauga

SEQ ID NO: 2133240 - RNA, 19 nt, Homo sapiens
  misc_RNA (1)...(19): siRNA sense strand
gcagaggagguuaauagug

SEQ ID NO: 2133241 - RNA, 19 nt, Homo sapiens
  misc_RNA (1)...(19): siRNA sense strand
aaacgucucuguggaucaa

SEQ ID NO: 2133242 - RNA, 19 nt, Homo sapiens
  misc_RNA (1)...(19): siRNA sense strand
gcugguggaugcaaagcuu

SEQ ID NO: 2133243 - RNA, 19 nt, Homo sapiens
  misc_RNA (1)...(19): siRNA sense strand
caaagagcccgucagcaau

SEQ ID NO: 2133244 - RNA, 19 nt, Homo sapiens
  misc_RNA (1)...(19): siRNA sense strand
cagaaaagcugaaaagcau

SEQ ID NO: 2133245 - RNA, 19 nt, Homo sapiens
  misc_RNA (1)...(19): siRNA sense strand
gaacacagcagagcuaucc

SEQ ID NO: 2133246 - RNA, 19 nt, Homo sapiens
  misc_RNA (1)...(19): siRNA sense strand
gaaacagguacaaauucaa

SEQ ID NO: 2133247 - RNA, 19 nt, Homo sapiens
  misc_RNA (1)...(19): siRNA sense strand
ggagagccacccacuguca

SEQ ID NO: 2133248 - RNA, 19 nt, Homo sapiens
  misc_RNA (1)...(19): siRNA sense strand
ccagagcacacuaacuaaa

SEQ ID NO: 2133249 - RNA, 19 nt, Homo sapiens
  misc_RNA (1)...(19): siRNA sense strand
gagcgacacaaacgagaaa

SEQ ID NO: 2133250 - RNA, 19 nt, Homo sapiens
  misc_RNA (1)...(19): siRNA sense strand
gaaauggacaaaacaacua

SEQ ID NO: 2133251 - RNA, 19 nt, Homo sapiens
  misc_RNA (1)...(19): siRNA sense strand
ucagcucacucucuacuca

SEQ ID NO: 2133252 - RNA, 19 nt, Homo sapiens
  misc_RNA (1)...(19): siRNA sense strand
cagaaucaccugacaacga

SEQ ID NO: 2133253 - RNA, 19 nt, Homo sapiens
  misc_RNA (1)...(19): siRNA sense strand
ccgcaccaguccaaagaaa

SEQ ID NO: 2133254 - RNA, 19 nt, Homo sapiens
  misc_RNA (1)...(19): siRNA sense strand
gaauuccagagcacacuaa

SEQ ID NO: 2133255 - RNA, 19 nt, Homo sapiens
  misc_RNA (1)...(19): siRNA sense strand
gcagagugagcgaaauaug

SEQ ID NO: 2133256 - RNA, 19 nt, Homo sapiens
  misc_RNA (1)...(19): siRNA sense strand
gaagccaaccugcuaaugc

SEQ ID NO: 2133257 - RNA, 19 nt, Homo sapiens
  misc_RNA (1)...(19): siRNA sense strand
aggcucagcucacucucua

SEQ ID NO: 2133258 - RNA, 19 nt, Homo sapiens
  misc_RNA (1)...(19): siRNA sense strand
agaaacccaacccgaaaua

SEQ ID NO: 2133259 - RNA, 19 nt, Homo sapiens
  misc_RNA (1)...(19): siRNA sense strand
cugaauugcuggaugaaca

SEQ ID NO: 2133260 - RNA, 19 nt, Homo sapiens
  misc_RNA (1)...(19): siRNA sense strand
ggagguuaauaguguccaa

SEQ ID NO: 2133261 - RNA, 19 nt, Homo sapiens
  misc_RNA (1)...(19): siRNA sense strand
cagcacaacuccgaugaag

SEQ ID NO: 2133262 - RNA, 19 nt, Homo sapiens
  misc_RNA (1)...(19): siRNA sense strand
ugaaaaggaugaccaaagu

SEQ ID NO: 2133263 - RNA, 19 nt, Homo sapiens
  misc_RNA (1)...(19): siRNA sense strand
aaagcaucaucgaucagua

SEQ ID NO: 2133264 - RNA, 19 nt, Homo sapiens
  misc_RNA (1)...(19): siRNA sense strand
acaagccauuuccagagua

SEQ ID NO: 2133265 - RNA, 19 nt, Homo sapiens
  misc_RNA (1)...(19): siRNA sense strand
gaagagaaaaggaaggaaa

SEQ ID NO: 2133266 - RNA, 19 nt, Homo sapiens
  misc_RNA (1)...(19): siRNA sense strand
aaaagaaaaggaccaguua

SEQ ID NO: 2133267 - RNA, 19 nt, Homo sapiens
  misc_RNA (1)...(19): siRNA sense strand
aggugacaguucaucauua

SEQ ID NO: 2133268 - RNA, 19 nt, Homo sapiens
  misc_RNA (1)...(19): siRNA sense strand
acaacaagacucugaagga

SEQ ID NO: 2133269 - RNA, 19 nt, Homo sapiens
  misc_RNA (1)...(19): siRNA sense strand
ggugaacacagcagagcua

SEQ ID NO: 2133270 - RNA, 19 nt, Homo sapiens
  misc_RNA (1)...(19): siRNA sense strand
ggacauccagggccagauc

SEQ ID NO: 2133271 - RNA, 19 nt, Homo sapiens
  misc_RNA (1)...(19): siRNA sense strand
gaaagcacugagagcuaaa

SEQ ID NO: 2133272 - RNA, 19 nt, Homo sapiens
  misc_RNA (1)...(19): siRNA sense strand
cagcuggaagacaucauua

SEQ ID NO: 2133273 - RNA, 19 nt, Homo sapiens
  misc_RNA (1)...(19): siRNA sense strand
aggaagguuugaagaauuc

SEQ ID NO: 2133274 - RNA, 19 nt, Homo sapiens
  misc_RNA (1)...(19): siRNA sense strand
aaagaagccaaccugcuaa

SEQ ID NO: 2133275 - RNA, 19 nt, Homo sapiens
  misc_RNA (1)...(19): siRNA sense strand
cagagacgcagaaauaucu

SEQ ID NO: 2133276 - RNA, 19 nt, Homo sapiens
  misc_RNA (1)...(19): siRNA sense strand
ccucugccgugcuuuacaa

SEQ ID NO: 2133277 - RNA, 19 nt, Homo sapiens
  misc_RNA (1)...(19): siRNA sense strand
ggaggcuaaucacucugaa

SEQ ID NO: 2133278 - RNA, 19 nt, Homo sapiens
  misc_RNA (1)...(19): siRNA sense strand
ugagcaggcccaagaaaug

SEQ ID NO: 2133279 - RNA, 19 nt, Homo sapiens
  misc_RNA (1)...(19): siRNA sense strand
agacacaacaagacucuga

SEQ ID NO: 2133280 - RNA, 19 nt, Homo sapiens
  misc_RNA (1)...(19): siRNA sense strand
ugcaaaaucugaacaaguu

SEQ ID NO: 2133281 - RNA, 19 nt, Homo sapiens
  misc_RNA (1)...(19): siRNA sense strand
guacugagcaaaagaaguu

SEQ ID NO: 2133282 - RNA, 19 nt, Homo sapiens
  misc_RNA (1)...(19): siRNA sense strand
ucuggaaggcgucgacuaa

SEQ ID NO: 2133283 - RNA, 19 nt, Homo sapiens
  misc_RNA (1)...(19): siRNA sense strand
ugagagcuaaagaauauga

SEQ ID NO: 2133284 - RNA, 19 nt, Homo sapiens
  misc_RNA (1)...(19): siRNA sense strand
agagugagcgaaauaugaa

SEQ ID NO: 2133285 - RNA, 19 nt, Homo sapiens
  misc_RNA (1)...(19): siRNA sense strand
cacaagccauuuccagagu

SEQ ID NO: 2133286 - RNA, 19 nt, Homo sapiens
  misc_RNA (1)...(19): siRNA sense strand
augaagagccagagucaaa

SEQ ID NO: 2133287 - RNA, 19 nt, Homo sapiens
  misc_RNA (1)...(19): siRNA sense strand
gcacguggcugauuuauga

SEQ ID NO: 2133288 - RNA, 19 nt, Homo sapiens
  misc_RNA (1)...(19): siRNA sense strand
uaaggaaacugcuauagaa

SEQ ID NO: 2133289 - RNA, 19 nt, Homo sapiens
  misc_RNA (1)...(19): siRNA sense strand
gaagaaugaugauauggaa

SEQ ID NO: 2133290 - RNA, 19 nt, Homo sapiens
  misc_RNA (1)...(19): siRNA sense strand
ggagggaggugaaacagaa

SEQ ID NO: 2133291 - RNA, 19 nt, Homo sapiens
  misc_RNA (1)...(19): siRNA sense strand
ccaaauagguucucuacga

SEQ ID NO: 2133292 - RNA, 19 nt, Homo sapiens
  misc_RNA (1)...(19): siRNA sense strand
gaaagguagugauauauag

SEQ ID NO: 2133293 - RNA, 19 nt, Homo sapiens
  misc_RNA (1)...(19): siRNA sense strand
gcauuuggguugcauauga

SEQ ID NO: 2133294 - RNA, 19 nt, Homo sapiens
  misc_RNA (1)...(19): siRNA sense strand
caagaaggauguaucaaau

SEQ ID NO: 2133295 - RNA, 19 nt, Homo sapiens
  misc_RNA (1)...(19): siRNA sense strand
ggaaagguagugauauaua

SEQ ID NO: 2133296 - RNA, 19 nt, Homo sapiens
  misc_RNA (1)...(19): siRNA sense strand
gaagaaacaacaagucaaa

SEQ ID NO: 2133297 - RNA, 19 nt, Homo sapiens
  misc_RNA (1)...(19): siRNA sense strand
ggaaggagaagaaacagua

SEQ ID NO: 2133298 - RNA, 19 nt, Homo sapiens
  misc_RNA (1)...(19): siRNA sense strand
gcagcuggguuguauauga

SEQ ID NO: 2133299 - RNA, 19 nt, Homo sapiens
  misc_RNA (1)...(19): siRNA sense strand
gagccucucuccagugaua

SEQ ID NO: 2133300 - RNA, 19 nt, Homo sapiens
  misc_RNA (1)...(19): siRNA sense strand
cagcagagcucgcggcaaa

SEQ ID NO: 2133301 - RNA, 19 nt, Homo sapiens
  misc_RNA (1)...(19): siRNA sense strand
ggaaaucaaugacaaagag

SEQ ID NO: 2133302 - RNA, 19 nt, Homo sapiens
  misc_RNA (1)...(19): siRNA sense strand
aaacaaagcaacaggguua

SEQ ID NO: 2133303 - RNA, 19 nt, Homo sapiens
  misc_RNA (1)...(19): siRNA sense strand
caaagguaguuguuuauga

SEQ ID NO: 2133304 - RNA, 19 nt, Homo sapiens
  misc_RNA (1)...(19): siRNA sense strand
gacaugugguucaggauua

SEQ ID NO: 2133305 - RNA, 19 nt, Homo sapiens
  misc_RNA (1)...(19): siRNA sense strand
uaaagcagauguacaaaca

SEQ ID NO: 2133306 - RNA, 19 nt, Homo sapiens
  misc_RNA (1)...(19): siRNA sense strand
gaaacaacaagucaaauug

SEQ ID NO: 2133307 - RNA, 19 nt, Homo sapiens
  misc_RNA (1)...(19): siRNA sense strand
caaccuauauguuuggauu

SEQ ID NO: 2133308 - RNA, 19 nt, Homo sapiens
  misc_RNA (1)...(19): siRNA sense strand
ggaaaaggcuaaucauauu

SEQ ID NO: 2133309 - RNA, 19 nt, Homo sapiens
  misc_RNA (1)...(19): siRNA sense strand
caaagaagaucuggauuca

SEQ ID NO: 2133310 - RNA, 19 nt, Homo sapiens
  misc_RNA (1)...(19): siRNA sense strand
gaacagggacgucacaaau

SEQ ID NO: 2133311 - RNA, 19 nt, Homo sapiens
  misc_RNA (1)...(19): siRNA sense strand
gaacauuucugcugguagu

SEQ ID NO: 2133312 - RNA, 19 nt, Homo sapiens
  misc_RNA (1)...(19): siRNA sense strand
gaagcgaauuuauuucaga

SEQ ID NO: 2133313 - RNA, 19 nt, Homo sapiens
  misc_RNA (1)...(19): siRNA sense strand
ccaaacauguggaacuaaa

SEQ ID NO: 2133314 - RNA, 19 nt, Homo sapiens
  misc_RNA (1)...(19): siRNA sense strand
gcaacaggguuauucaugu

SEQ ID NO: 2133315 - RNA, 19 nt, Homo sapiens
  misc_RNA (1)...(19): siRNA sense strand
gaagacuuguuccaugaaa

SEQ ID NO: 2133316 - RNA, 19 nt, Homo sapiens
  misc_RNA (1)...(19): siRNA sense strand
gcagggauuugguguaaug

SEQ ID NO: 2133317 - RNA, 19 nt, Homo sapiens
  misc_RNA (1)...(19): siRNA sense strand
guuagaggauguuggauuu

SEQ ID NO: 2133318 - RNA, 19 nt, Homo sapiens
  misc_RNA (1)...(19): siRNA sense strand
gaacaaagaacagucaaau

SEQ ID NO: 2133319 - RNA, 19 nt, Homo sapiens
  misc_RNA (1)...(19): siRNA sense strand
gaaggaaagucagccagaa

SEQ ID NO: 2133320 - RNA, 19 nt, Homo sapiens
  misc_RNA (1)...(19): siRNA sense strand
gggaagccaugguccuaua

SEQ ID NO: 2133321 - RNA, 19 nt, Homo sapiens
  misc_RNA (1)...(19): siRNA sense strand
gcaaagagaaguuuacaca

SEQ ID NO: 2133322 - RNA, 19 nt, Homo sapiens
  misc_RNA (1)...(19): siRNA sense strand
gggcaaagcugaauuuagc

SEQ ID NO: 2133323 - RNA, 19 nt, Homo sapiens
  misc_RNA (1)...(19): siRNA sense strand
gaaguccgauggcaggauu

SEQ ID NO: 2133324 - RNA, 19 nt, Homo sapiens
  misc_RNA (1)...(19): siRNA sense strand
gcaaugggugugcuaauaa

SEQ ID NO: 2133325 - RNA, 19 nt, Homo sapiens
  misc_RNA (1)...(19): siRNA sense strand
guacaucacacuccaguuu

SEQ ID NO: 2133326 - RNA, 19 nt, Homo sapiens
  misc_RNA (1)...(19): siRNA sense strand
uaaccaagaugauaaagca

SEQ ID NO: 2133327 - RNA, 19 nt, Homo sapiens
  misc_RNA (1)...(19): siRNA sense strand
cagaagacuuguuccauga

SEQ ID NO: 2133328 - RNA, 19 nt, Homo sapiens
  misc_RNA (1)...(19): siRNA sense strand
ggaggcagcuggguuguau

SEQ ID NO: 2133329 - RNA, 19 nt, Homo sapiens
  misc_RNA (1)...(19): siRNA sense strand
gaaaauggguggccguaaa

SEQ ID NO: 2133330 - RNA, 19 nt, Homo sapiens
  misc_RNA (1)...(19): siRNA sense strand
gcaaguugaagccaaauuu

SEQ ID NO: 2133331 - RNA, 19 nt, Homo sapiens
  misc_RNA (1)...(19): siRNA sense strand
gcaaaagccuuguacuuga

SEQ ID NO: 2133332 - RNA, 19 nt, Homo sapiens
  misc_RNA (1)...(19): siRNA sense strand
gaguauggguagccuauga

SEQ ID NO: 2133333 - RNA, 19 nt, Homo sapiens
  misc_RNA (1)...(19): siRNA sense strand
ggaagaagaaggaaaguca

SEQ ID NO: 2133334 - RNA, 19 nt, Homo sapiens
  misc_RNA (1)...(19): siRNA sense strand
cugcuaaggugcuaacuuu

SEQ ID NO: 2133335 - RNA, 19 nt, Homo sapiens
  misc_RNA (1)...(19): siRNA sense strand
gacgaucauuugccguuua

SEQ ID NO: 2133336 - RNA, 19 nt, Homo sapiens
  misc_RNA (1)...(19): siRNA sense strand
gaaacaggaauguguaguu

SEQ ID NO: 2133337 - RNA, 19 nt, Homo sapiens
  misc_RNA (1)...(19): siRNA sense strand
gaagaagcguacauuggau

SEQ ID NO: 2133338 - RNA, 19 nt, Homo sapiens
  misc_RNA (1)...(19): siRNA sense strand
ucacgaagaccauuuagaa

SEQ ID NO: 2133339 - RNA, 19 nt, Homo sapiens
  misc_RNA (1)...(19): siRNA sense strand
ucagugacauucaggauug

SEQ ID NO: 2133340 - RNA, 19 nt, Homo sapiens
  misc_RNA (1)...(19): siRNA sense strand
caaguugaagccaaauuua

SEQ ID NO: 2133341 - RNA, 19 nt, Homo sapiens
  misc_RNA (1)...(19): siRNA sense strand
gacacagucuauuaaugua

SEQ ID NO: 2133342 - RNA, 19 nt, Homo sapiens
  misc_RNA (1)...(19): siRNA sense strand
uuacagaguuagucacauu

SEQ ID NO: 2133343 - RNA, 19 nt, Homo sapiens
  misc_RNA (1)...(19): siRNA sense strand
guucaggauuacagaguua

SEQ ID NO: 2133344 - RNA, 19 nt, Homo sapiens
  misc_RNA (1)...(19): siRNA sense strand
gaaauggagcaaccugaaa

SEQ ID NO: 2133345 - RNA, 19 nt, Homo sapiens
  misc_RNA (1)...(19): siRNA sense strand
aaagagaaguuuacacaag

SEQ ID NO: 2133346 - RNA, 19 nt, Homo sapiens
  misc_RNA (1)...(19): siRNA sense strand
gucaaccaauggaaacuua

SEQ ID NO: 2133347 - RNA, 19 nt, Homo sapiens
  misc_RNA (1)...(19): siRNA sense strand
auggagagcuucagucuuu

SEQ ID NO: 2133348 - RNA, 19 nt, Homo sapiens
  misc_RNA (1)...(19): siRNA sense strand
gagcacaaccuccagaaga

SEQ ID NO: 2133349 - RNA, 19 nt, Homo sapiens
  misc_RNA (1)...(19): siRNA sense strand
gcuauagaaaccaaaguua

SEQ ID NO: 2133350 - RNA, 19 nt, Homo sapiens
  misc_RNA (1)...(19): siRNA sense strand
ccucaacacugucagcaaa

SEQ ID NO: 2133351 - RNA, 19 nt, Homo sapiens
  misc_RNA (1)...(19): siRNA sense strand
cuggaaagguagugauaua

SEQ ID NO: 2133352 - RNA, 19 nt, Homo sapiens
  misc_RNA (1)...(19): siRNA sense strand
gcccaaacauguggaacua

SEQ ID NO: 2133353 - RNA, 19 nt, Homo sapiens
  misc_RNA (1)...(19): siRNA sense strand
ccaaggagacgaaaucaga

SEQ ID NO: 2133354 - RNA, 19 nt, Homo sapiens
  misc_RNA (1)...(19): siRNA sense strand
gaaaauguguggaacuaga

SEQ ID NO: 2133355 - RNA, 19 nt, Homo sapiens
  misc_RNA (1)...(19): siRNA sense strand
gaggaaguguccaaaauaa

SEQ ID NO: 2133356 - RNA, 19 nt, Homo sapiens
  misc_RNA (1)...(19): siRNA sense strand
ggaauacuccugccucuag

SEQ ID NO: 2133357 - RNA, 19 nt, Homo sapiens
  misc_RNA (1)...(19): siRNA sense strand
ggagagccuuucccagaug

SEQ ID NO: 2133358 - RNA, 19 nt, Homo sapiens
  misc_RNA (1)...(19): siRNA sense strand
ucaagaaggauguaucaaa

SEQ ID NO: 2133359 - RNA, 19 nt, Homo sapiens
  misc_RNA (1)...(19): siRNA sense strand
gauauggagugaagacaca

SEQ ID NO: 2133360 - RNA, 19 nt, Homo sapiens
  misc_RNA (1)...(19): siRNA sense strand
ccagaaacagguacuauga

SEQ ID NO: 2133361 - RNA, 19 nt, Homo sapiens
  misc_RNA (1)...(19): siRNA sense strand
gaagagauucugccagcaa

SEQ ID NO: 2133362 - RNA, 19 nt, Homo sapiens
  misc_RNA (1)...(19): siRNA sense strand
guucagaagcgaauuuauu

SEQ ID NO: 2133363 - RNA, 19 nt, Homo sapiens
  misc_RNA (1)...(19): siRNA sense strand
gauguuggauuuuguauga

SEQ ID NO: 2133364 - RNA, 19 nt, Homo sapiens
  misc_RNA (1)...(19): siRNA sense strand
gaucagacuguuacaaaug

SEQ ID NO: 2133365 - RNA, 19 nt, Homo sapiens
  misc_RNA (1)...(19): siRNA sense strand
gugcagcagugccaugaaa

SEQ ID NO: 2133366 - RNA, 19 nt, Homo sapiens
  misc_RNA (1)...(19): siRNA sense strand
gagaagugcauugaaguuu

SEQ ID NO: 2133367 - RNA, 19 nt, Homo sapiens
  misc_RNA (1)...(19): siRNA sense strand
uaagagaucgagacuagaa

SEQ ID NO: 2133368 - RNA, 19 nt, Homo sapiens
  misc_RNA (1)...(19): siRNA sense strand
ggagcaaccugaaaagaaa

SEQ ID NO: 2133369 - RNA, 19 nt, Homo sapiens
  misc_RNA (1)...(19): siRNA sense strand
ggagggcaaagcugaauuu

SEQ ID NO: 2133370 - RNA, 19 nt, Homo sapiens
  misc_RNA (1)...(19): siRNA sense strand
agaauggugugcugguuaa

SEQ ID NO: 2133371 - RNA, 19 nt, Homo sapiens
  misc_RNA (1)...(19): siRNA sense strand
gaagccaugguccuauaua

SEQ ID NO: 2133372 - RNA, 19 nt, Homo sapiens
  misc_RNA (1)...(19): siRNA sense strand
gggauucaacacacaaaua

SEQ ID NO: 2133373 - RNA, 19 nt, Homo sapiens
  misc_RNA (1)...(19): siRNA sense strand
gagaauacagggacuggaa

SEQ ID NO: 2133374 - RNA, 19 nt, Homo sapiens
  misc_RNA (1)...(19): siRNA sense strand
ugucaaaacugaagaauga

SEQ ID NO: 2133375 - RNA, 19 nt, Homo sapiens
  misc_RNA (1)...(19): siRNA sense strand
caacuugucacaguaauga

SEQ ID NO: 2133376 - RNA, 19 nt, Homo sapiens
  misc_RNA (1)...(19): siRNA sense strand
gcaggaaggagaagaaaca

SEQ ID NO: 2133377 - RNA, 19 nt, Homo sapiens
  misc_RNA (1)...(19): siRNA sense strand
gguuguauaugauggagaa

SEQ ID NO: 2133378 - RNA, 19 nt, Homo sapiens
  misc_RNA (1)...(19): siRNA sense strand
uucaaaugcucacaugaua

SEQ ID NO: 2133379 - RNA, 19 nt, Homo sapiens
  misc_RNA (1)...(19): siRNA sense strand
aauuucaacucgucaagua

SEQ ID NO: 2133380 - RNA, 19 nt, Homo sapiens
  misc_RNA (1)...(19): siRNA sense strand
ugcagaaccuugacacaaa

SEQ ID NO: 2133381 - RNA, 19 nt, Homo sapiens
  misc_RNA (1)...(19): siRNA sense strand
gaaagucagccagaaaugu

SEQ ID NO: 2133382 - RNA, 19 nt, Homo sapiens
  misc_RNA (1)...(19): siRNA sense strand
cauguggaacuaaaucuua

SEQ ID NO: 2133383 - RNA, 19 nt, Homo sapiens
  misc_RNA (1)...(19): siRNA sense strand
aaaggagacuggauaugga

SEQ ID NO: 2133384 - RNA, 19 nt, Homo sapiens
  misc_RNA (1)...(19): siRNA sense strand
caacaggguuauucauguc

SEQ ID NO: 2133385 - RNA, 19 nt, Homo sapiens
  misc_RNA (1)...(19): siRNA sense strand
gcgaauuuauuucagacuu

SEQ ID NO: 2133386 - RNA, 19 nt, Homo sapiens
  misc_RNA (1)...(19): siRNA sense strand
cugcagaaguaccuaauug

SEQ ID NO: 2133387 - RNA, 19 nt, Homo sapiens
  misc_RNA (1)...(19): siRNA sense strand
gaaacacgaccucucuuga

SEQ ID NO: 2133388 - RNA, 19 nt, Homo sapiens
  misc_RNA (1)...(19): siRNA sense strand
cgaccucucuugaaggaaa

SEQ ID NO: 2133389 - RNA, 19 nt, Homo sapiens
  misc_RNA (1)...(19): siRNA sense strand
ggcccuaucuggagaggaa

SEQ ID NO: 2133390 - RNA, 19 nt, Homo sapiens
  misc_RNA (1)...(19): siRNA sense strand
gggcuaugguggugagaug

SEQ ID NO: 2133391 - RNA, 19 nt, Homo sapiens
  misc_RNA (1)...(19): siRNA sense strand
aaacacgaccucucuugaa

SEQ ID NO: 2133392 - RNA, 19 nt, Homo sapiens
  misc_RNA (1)...(19): siRNA sense strand
gaacagcaucggcuauguc

SEQ ID NO: 2133393 - RNA, 19 nt, Homo sapiens
  misc_RNA (1)...(19): siRNA sense strand
gaucaagucucggguucuc

SEQ ID NO: 2133394 - RNA, 19 nt, Homo sapiens
  misc_RNA (1)...(19): siRNA sense strand
gauggaaucagucaagaca

SEQ ID NO: 2133395 - RNA, 19 nt, Homo sapiens
  misc_RNA (1)...(19): siRNA sense strand
guggugagauggugucagu

SEQ ID NO: 2133396 - RNA, 19 nt, Homo sapiens
  misc_RNA (1)...(19): siRNA sense strand
gaagccuccugugcgauga

SEQ ID NO: 2133397 - RNA, 19 nt, Homo sapiens
  misc_RNA (1)...(19): siRNA sense strand
cugagaaaguccaggagaa

SEQ ID NO: 2133398 - RNA, 19 nt, Homo sapiens
  misc_RNA (1)...(19): siRNA sense strand
ugagaaaguccaggagaaa

SEQ ID NO: 2133399 - RNA, 19 nt, Homo sapiens
  misc_RNA (1)...(19): siRNA sense strand
ccuccucgcuguacugcaa

SEQ ID NO: 2133400 - RNA, 19 nt, Homo sapiens
  misc_RNA (1)...(19): siRNA sense strand
cacgaccucucuugaagga

SEQ ID NO: 2133401 - RNA, 19 nt, Homo sapiens
  misc_RNA (1)...(19): siRNA sense strand
ccugugcgaugaccucuuc

SEQ ID NO: 2133402 - RNA, 19 nt, Homo sapiens
  misc_RNA (1)...(19): siRNA sense strand
agaaaguccaggagaaaga

SEQ ID NO: 2133403 - RNA, 19 nt, Homo sapiens
  misc_RNA (1)...(19): siRNA sense strand
uggaaucagucaagacagu

SEQ ID NO: 2133404 - RNA, 19 nt, Homo sapiens
  misc_RNA (1)...(19): siRNA sense strand
gaggauggaaucagucaag

SEQ ID NO: 2133405 - RNA, 19 nt, Homo sapiens
  misc_RNA (1)...(19): siRNA sense strand
agaaacacgaccucucuug

SEQ ID NO: 2133406 - RNA, 19 nt, Homo sapiens
  misc_RNA (1)...(19): siRNA sense strand
gaggaagggaggauggaau

SEQ ID NO: 2133407 - RNA, 19 nt, Homo sapiens
  misc_RNA (1)...(19): siRNA sense strand
ucaacaagcaggccaaugc

SEQ ID NO: 2133408 - RNA, 19 nt, Homo sapiens
  misc_RNA (1)...(19): siRNA sense strand
gaaaguccaggagaaagag

SEQ ID NO: 2133409 - RNA, 19 nt, Homo sapiens
  misc_RNA (1)...(19): siRNA sense strand
gcagugccucugagaaagu

SEQ ID NO: 2133410 - RNA, 19 nt, Homo sapiens
  misc_RNA (1)...(19): siRNA sense strand
cugcagugccucugagaaa

SEQ ID NO: 2133411 - RNA, 19 nt, Homo sapiens
  misc_RNA (1)...(19): siRNA sense strand
ugaacagcaucggcuaugu

SEQ ID NO: 2133412 - RNA, 19 nt, Homo sapiens
  misc_RNA (1)...(19): siRNA sense strand
gagaaaguccaggagaaag

SEQ ID NO: 2133413 - RNA, 19 nt, Homo sapiens
  misc_RNA (1)...(19): siRNA sense strand
gcacuagccccaugucuuc

SEQ ID NO: 2133414 - RNA, 19 nt, Homo sapiens
  misc_RNA (1)...(19): siRNA sense strand
gaaucagucaagacaguca

SEQ ID NO: 2133415 - RNA, 19 nt, Homo sapiens
  misc_RNA (1)...(19): siRNA sense strand
caccuccgccuccaccuuu

SEQ ID NO: 2133416 - RNA, 19 nt, Homo sapiens
  misc_RNA (1)...(19): siRNA sense strand
agucucggcuuccuuugau

SEQ ID NO: 2133417 - RNA, 19 nt, Homo sapiens
  misc_RNA (1)...(19): siRNA sense strand
aacacgaccucucuugaag

SEQ ID NO: 2133418 - RNA, 19 nt, Homo sapiens
  misc_RNA (1)...(19): siRNA sense strand
aagggaggauggaaucagu

SEQ ID NO: 2133419 - RNA, 19 nt, Homo sapiens
  misc_RNA (1)...(19): siRNA sense strand
gagccugccuguggugaac

SEQ ID NO: 2133420 - RNA, 19 nt, Homo sapiens
  misc_RNA (1)...(19): siRNA sense strand
gggaggauggaaucaguca

SEQ ID NO: 2133421 - RNA, 19 nt, Homo sapiens
  misc_RNA (1)...(19): siRNA sense strand
ggaagggaggauggaauca

SEQ ID NO: 2133422 - RNA, 19 nt, Homo sapiens
  misc_RNA (1)...(19): siRNA sense strand
cagucugccucuacaucaa

SEQ ID NO: 2133423 - RNA, 19 nt, Homo sapiens
  misc_RNA (1)...(19): siRNA sense strand
ggugagauggugucagucu

SEQ ID NO: 2133424 - RNA, 19 nt, Homo sapiens
  misc_RNA (1)...(19): siRNA sense strand
gaagggaggauggaaucag

SEQ ID NO: 2133425 - RNA, 19 nt, Homo sapiens
  misc_RNA (1)...(19): siRNA sense strand
gucagucucggcuuccuuu

SEQ ID NO: 2133426 - RNA, 19 nt, Homo sapiens
  misc_RNA (1)...(19): siRNA sense strand
gaaacacgaccucucuuga

SEQ ID NO: 2133427 - RNA, 19 nt, Homo sapiens
  misc_RNA (1)...(19): siRNA sense strand
cgaccucucuugaaggaaa

SEQ ID NO: 2133428 - RNA, 19 nt, Homo sapiens
  misc_RNA (1)...(19): siRNA sense strand
cagugaagaucccaaagaa

SEQ ID NO: 2133429 - RNA, 19 nt, Homo sapiens
  misc_RNA (1)...(19): siRNA sense strand
gcagugaagaucccaaaga

SEQ ID NO: 2133430 - RNA, 19 nt, Homo sapiens
  misc_RNA (1)...(19): siRNA sense strand
ggcccuaucuggagaggaa

SEQ ID NO: 2133431 - RNA, 19 nt, Homo sapiens
  misc_RNA (1)...(19): siRNA sense strand
gggcuaugguggugagaug

SEQ ID NO: 2133432 - RNA, 19 nt, Homo sapiens
  misc_RNA (1)...(19): siRNA sense strand
aaacacgaccucucuugaa

SEQ ID NO: 2133433 - RNA, 19 nt, Homo sapiens
  misc_RNA (1)...(19): siRNA sense strand
gaucaagucucggguucuc

SEQ ID NO: 2133434 - RNA, 19 nt, Homo sapiens
  misc_RNA (1)...(19): siRNA sense strand
gaacagcaucggcuauguc

SEQ ID NO: 2133435 - RNA, 19 nt, Homo sapiens
  misc_RNA (1)...(19): siRNA sense strand
gauggaaucagucaagaca

SEQ ID NO: 2133436 - RNA, 19 nt, Homo sapiens
  misc_RNA (1)...(19): siRNA sense strand
ugcuucagcuggcucuuua

SEQ ID NO: 2133437 - RNA, 19 nt, Homo sapiens
  misc_RNA (1)...(19): siRNA sense strand
guggugagauggugucagu

SEQ ID NO: 2133438 - RNA, 19 nt, Homo sapiens
  misc_RNA (1)...(19): siRNA sense strand
gaagccuccugugcgauga

SEQ ID NO: 2133439 - RNA, 19 nt, Homo sapiens
  misc_RNA (1)...(19): siRNA sense strand
cugagaaaguccaggagaa

SEQ ID NO: 2133440 - RNA, 19 nt, Homo sapiens
  misc_RNA (1)...(19): siRNA sense strand
ugagaaaguccaggagaaa

SEQ ID NO: 2133441 - RNA, 19 nt, Homo sapiens
  misc_RNA (1)...(19): siRNA sense strand
uaaccuuuauucugcuuca

SEQ ID NO: 2133442 - RNA, 19 nt, Homo sapiens
  misc_RNA (1)...(19): siRNA sense strand
ccuccucgcuguacugcaa

SEQ ID NO: 2133443 - RNA, 19 nt, Homo sapiens
  misc_RNA (1)...(19): siRNA sense strand
gugaagaucccaaagaaaa

SEQ ID NO: 2133444 - RNA, 19 nt, Homo sapiens
  misc_RNA (1)...(19): siRNA sense strand
cacgaccucucuugaagga

SEQ ID NO: 2133445 - RNA, 19 nt, Homo sapiens
  misc_RNA (1)...(19): siRNA sense strand
ccugugcgaugaccucuuc

SEQ ID NO: 2133446 - RNA, 19 nt, Homo sapiens
  misc_RNA (1)...(19): siRNA sense strand
agaaaguccaggagaaaga

SEQ ID NO: 2133447 - RNA, 19 nt, Homo sapiens
  misc_RNA (1)...(19): siRNA sense strand
uggaaucagucaagacagu

SEQ ID NO: 2133448 - RNA, 19 nt, Homo sapiens
  misc_RNA (1)...(19): siRNA sense strand
gaggauggaaucagucaag

SEQ ID NO: 2133449 - RNA, 19 nt, Homo sapiens
  misc_RNA (1)...(19): siRNA sense strand
agaaacacgaccucucuug

SEQ ID NO: 2133450 - RNA, 19 nt, Homo sapiens
  misc_RNA (1)...(19): siRNA sense strand
gaggaagggaggauggaau

SEQ ID NO: 2133451 - RNA, 19 nt, Homo sapiens
  misc_RNA (1)...(19): siRNA sense strand
ucaacaagcaggccaaugc

SEQ ID NO: 2133452 - RNA, 19 nt, Homo sapiens
  misc_RNA (1)...(19): siRNA sense strand
gaaaguccaggagaaagag

SEQ ID NO: 2133453 - RNA, 19 nt, Homo sapiens
  misc_RNA (1)...(19): siRNA sense strand
gcagugccucugagaaagu

SEQ ID NO: 2133454 - RNA, 19 nt, Homo sapiens
  misc_RNA (1)...(19): siRNA sense strand
cugcagugccucugagaaa

SEQ ID NO: 2133455 - RNA, 19 nt, Homo sapiens
  misc_RNA (1)...(19): siRNA sense strand
ugaacagcaucggcuaugu

SEQ ID NO: 2133456 - RNA, 19 nt, Homo sapiens
  misc_RNA (1)...(19): siRNA sense strand
gagaaaguccaggagaaag

SEQ ID NO: 2133457 - RNA, 19 nt, Homo sapiens
  misc_RNA (1)...(19): siRNA sense strand
gcacuagccccaugucuuc

SEQ ID NO: 2133458 - RNA, 19 nt, Homo sapiens
  misc_RNA (1)...(19): siRNA sense strand
gaaucagucaagacaguca

SEQ ID NO: 2133459 - RNA, 19 nt, Homo sapiens
  misc_RNA (1)...(19): siRNA sense strand
cggaaacccggguacaaga

SEQ ID NO: 2133460 - RNA, 19 nt, Homo sapiens
  misc_RNA (1)...(19): siRNA sense strand
caccuccgccuccaccuuu

SEQ ID NO: 2133461 - RNA, 19 nt, Homo sapiens
  misc_RNA (1)...(19): siRNA sense strand
agucucggcuuccuuugau

SEQ ID NO: 2133462 - RNA, 19 nt, Homo sapiens
  misc_RNA (1)...(19): siRNA sense strand
aacacgaccucucuugaag

SEQ ID NO: 2133463 - RNA, 19 nt, Homo sapiens
  misc_RNA (1)...(19): siRNA sense strand
aagggaggauggaaucagu

SEQ ID NO: 2133464 - RNA, 19 nt, Homo sapiens
  misc_RNA (1)...(19): siRNA sense strand
cagcagugaagaucccaaa

SEQ ID NO: 2133465 - RNA, 19 nt, Homo sapiens
  misc_RNA (1)...(19): siRNA sense strand
cagucugccucuacaucaa

SEQ ID NO: 2133466 - RNA, 19 nt, Homo sapiens
  misc_RNA (1)...(19): siRNA sense strand
gggaggauggaaucaguca

SEQ ID NO: 2133467 - RNA, 19 nt, Homo sapiens
  misc_RNA (1)...(19): siRNA sense strand
ggaagggaggauggaauca

SEQ ID NO: 2133468 - RNA, 19 nt, Homo sapiens
  misc_RNA (1)...(19): siRNA sense strand
gcggaaacccggguacaag

SEQ ID NO: 2133469 - RNA, 19 nt, Homo sapiens
  misc_RNA (1)...(19): siRNA sense strand
gagccugccuguggugaac

SEQ ID NO: 2133470 - RNA, 19 nt, Homo sapiens
  misc_RNA (1)...(19): siRNA sense strand
ggugagauggugucagucu

SEQ ID NO: 2133471 - RNA, 19 nt, Homo sapiens
  misc_RNA (1)...(19): siRNA sense strand
gaagaucccaaagaaaaga

SEQ ID NO: 2133472 - RNA, 19 nt, Homo sapiens
  misc_RNA (1)...(19): siRNA sense strand
gaagggaggauggaaucag

SEQ ID NO: 2133473 - RNA, 19 nt, Homo sapiens
  misc_RNA (1)...(19): siRNA sense strand
gucagucucggcuuccuuu

SEQ ID NO: 2133474 - RNA, 19 nt, Homo sapiens
  misc_RNA (1)...(19): siRNA sense strand
gaagucagauuguucuuua

SEQ ID NO: 2133475 - RNA, 19 nt, Homo sapiens
  misc_RNA (1)...(19): siRNA sense strand
gaaccgaaacucaaugaaa

SEQ ID NO: 2133476 - RNA, 19 nt, Homo sapiens
  misc_RNA (1)...(19): siRNA sense strand
gaacaccacggauugaauu

SEQ ID NO: 2133477 - RNA, 19 nt, Homo sapiens
  misc_RNA (1)...(19): siRNA sense strand
gcuauaaguugcuguugaa

SEQ ID NO: 2133478 - RNA, 19 nt, Homo sapiens
  misc_RNA (1)...(19): siRNA sense strand
gaagcgaccugcagaaagg

SEQ ID NO: 2133479 - RNA, 19 nt, Homo sapiens
  misc_RNA (1)...(19): siRNA sense strand
gaagcaagaccuaagcaaa

SEQ ID NO: 2133480 - RNA, 19 nt, Homo sapiens
  misc_RNA (1)...(19): siRNA sense strand
aguaauaggucguauguau

SEQ ID NO: 2133481 - RNA, 19 nt, Homo sapiens
  misc_RNA (1)...(19): siRNA sense strand
ucaaagaagucagauuguu

SEQ ID NO: 2133482 - RNA, 19 nt, Homo sapiens
  misc_RNA (1)...(19): siRNA sense strand
gcacugaaugggaagauuu

SEQ ID NO: 2133483 - RNA, 19 nt, Homo sapiens
  misc_RNA (1)...(19): siRNA sense strand
gauauuugcuggcgaugau

SEQ ID NO: 2133484 - RNA, 19 nt, Homo sapiens
  misc_RNA (1)...(19): siRNA sense strand
auaagaagcggccaaauaa

SEQ ID NO: 2133485 - RNA, 19 nt, Homo sapiens
  misc_RNA (1)...(19): siRNA sense strand
gcacaaagcccaaaacgaa

SEQ ID NO: 2133486 - RNA, 19 nt, Homo sapiens
  misc_RNA (1)...(19): siRNA sense strand
aauaagaagcggccaaaua

SEQ ID NO: 2133487 - RNA, 19 nt, Homo sapiens
  misc_RNA (1)...(19): siRNA sense strand
cagaaaggauaacagaaga

SEQ ID NO: 2133488 - RNA, 19 nt, Homo sapiens
  misc_RNA (1)...(19): siRNA sense strand
gggaagauuuacuuucgaa

SEQ ID NO: 2133489 - RNA, 19 nt, Homo sapiens
  misc_RNA (1)...(19): siRNA sense strand
caaaagcucucaagccaaa

SEQ ID NO: 2133490 - RNA, 19 nt, Homo sapiens
  misc_RNA (1)...(19): siRNA sense strand
auaaguugcuguugaagaa

SEQ ID NO: 2133491 - RNA, 19 nt, Homo sapiens
  misc_RNA (1)...(19): siRNA sense strand
gaccuaagcaaacuacaaa

SEQ ID NO: 2133492 - RNA, 19 nt, Homo sapiens
  misc_RNA (1)...(19): siRNA sense strand
gcagaaaggauaacagaag

SEQ ID NO: 2133493 - RNA, 19 nt, Homo sapiens
  misc_RNA (1)...(19): siRNA sense strand
uaauaggucguauguauga

SEQ ID NO: 2133494 - RNA, 19 nt, Homo sapiens
  misc_RNA (1)...(19): siRNA sense strand
caaagaagucagauuguuc

SEQ ID NO: 2133495 - RNA, 19 nt, Homo sapiens
  misc_RNA (1)...(19): siRNA sense strand
uaacagaagaccacgagaa

SEQ ID NO: 2133496 - RNA, 19 nt, Homo sapiens
  misc_RNA (1)...(19): siRNA sense strand
ggauaugauugaauuaggu

SEQ ID NO: 2133497 - RNA, 19 nt, Homo sapiens
  misc_RNA (1)...(19): siRNA sense strand
ugauuucgauguaacagaa

SEQ ID NO: 2133498 - RNA, 19 nt, Homo sapiens
  misc_RNA (1)...(19): siRNA sense strand
ggauugaauuggaagagau

SEQ ID NO: 2133499 - RNA, 19 nt, Homo sapiens
  misc_RNA (1)...(19): siRNA sense strand
gaaggauucauaugcagaa

SEQ ID NO: 2133500 - RNA, 19 nt, Homo sapiens
  misc_RNA (1)...(19): siRNA sense strand
gaagaagcgaccugcagaa

SEQ ID NO: 2133501 - RNA, 19 nt, Homo sapiens
  misc_RNA (1)...(19): siRNA sense strand
caaaugcaacagugacaaa

SEQ ID NO: 2133502 - RNA, 19 nt, Homo sapiens
  misc_RNA (1)...(19): siRNA sense strand
ggauucauaugcagaagca

SEQ ID NO: 2133503 - RNA, 19 nt, Homo sapiens
  misc_RNA (1)...(19): siRNA sense strand
uagaguauguucugcacuu

SEQ ID NO: 2133504 - RNA, 19 nt, Homo sapiens
  misc_RNA (1)...(19): siRNA sense strand
gagaaccgaaacucaauga

SEQ ID NO: 2133505 - RNA, 19 nt, Homo sapiens
  misc_RNA (1)...(19): siRNA sense strand
gaaaagagccaagagauuc

SEQ ID NO: 2133506 - RNA, 19 nt, Homo sapiens
  misc_RNA (1)...(19): siRNA sense strand
gaaugggaagauuuacuuu

SEQ ID NO: 2133507 - RNA, 19 nt, Homo sapiens
  misc_RNA (1)...(19): siRNA sense strand
auguuuggcucccauaaua

SEQ ID NO: 2133508 - RNA, 19 nt, Homo sapiens
  misc_RNA (1)...(19): siRNA sense strand
gaacaaaacccaugcugau

SEQ ID NO: 2133509 - RNA, 19 nt, Homo sapiens
  misc_RNA (1)...(19): siRNA sense strand
gcggccaaauaaucuagua

SEQ ID NO: 2133510 - RNA, 19 nt, Homo sapiens
  misc_RNA (1)...(19): siRNA sense strand
gagagaaccgaaacucaau

SEQ ID NO: 2133511 - RNA, 19 nt, Homo sapiens
  misc_RNA (1)...(19): siRNA sense strand
aaaaugccaugcugauuaa

SEQ ID NO: 2133512 - RNA, 19 nt, Homo sapiens
  misc_RNA (1)...(19): siRNA sense strand
gcagaacaccacggauuga

SEQ ID NO: 2133513 - RNA, 19 nt, Homo sapiens
  misc_RNA (1)...(19): siRNA sense strand
caaaacccaugcugauauu

SEQ ID NO: 2133514 - RNA, 19 nt, Homo sapiens
  misc_RNA (1)...(19): siRNA sense strand
gaagagagaaccgaaacuc

SEQ ID NO: 2133515 - RNA, 19 nt, Homo sapiens
  misc_RNA (1)...(19): siRNA sense strand
gagauuccuugagaagaga

SEQ ID NO: 2133516 - RNA, 19 nt, Homo sapiens
  misc_RNA (1)...(19): siRNA sense strand
gaugggacccucauuggau

SEQ ID NO: 2133517 - RNA, 19 nt, Homo sapiens
  misc_RNA (1)...(19): siRNA sense strand
gaagcuauaaguugcuguu

SEQ ID NO: 2133518 - RNA, 19 nt, Homo sapiens
  misc_RNA (1)...(19): siRNA sense strand
cgauguaacagaagauuau

SEQ ID NO: 2133519 - RNA, 19 nt, Homo sapiens
  misc_RNA (1)...(19): siRNA sense strand
aaagauguguaugcacuga

SEQ ID NO: 2133520 - RNA, 19 nt, Homo sapiens
  misc_RNA (1)...(19): siRNA sense strand
uggcgaugauuucgaugua

SEQ ID NO: 2133521 - RNA, 19 nt, Homo sapiens
  misc_RNA (1)...(19): siRNA sense strand
gaagcggccaaauaaucua

SEQ ID NO: 2133522 - RNA, 19 nt, Homo sapiens
  misc_RNA (1)...(19): siRNA sense strand
gauuuacuuucgaagcuau

SEQ ID NO: 2133523 - RNA, 19 nt, Homo sapiens
  misc_RNA (1)...(19): siRNA sense strand
guaauaggucguauguaug

SEQ ID NO: 2133524 - RNA, 19 nt, Homo sapiens
  misc_RNA (1)...(19): siRNA sense strand
agauguguaugcacugaaa

SEQ ID NO: 2133525 - RNA, 19 nt, Homo sapiens
  misc_RNA (1)...(19): siRNA sense strand
ugaaugggaagauuuacuu

SEQ ID NO: 2133526 - RNA, 19 nt, Homo sapiens
  misc_RNA (1)...(19): siRNA sense strand
uaaauguccugagggaaca

SEQ ID NO: 2133527 - RNA, 19 nt, Homo sapiens
  misc_RNA (1)...(19): siRNA sense strand
gcaagaccuaagcaaacua

SEQ ID NO: 2133528 - RNA, 19 nt, Homo sapiens
  misc_RNA (1)...(19): siRNA sense strand
caccacggauugaauugga

SEQ ID NO: 2133529 - RNA, 19 nt, Homo sapiens
  misc_RNA (1)...(19): siRNA sense strand
ggcgaugauuucgauguaa

SEQ ID NO: 2133530 - RNA, 19 nt, Homo sapiens
  misc_RNA (1)...(19): siRNA sense strand
cuacaaaccaggaaaauga

SEQ ID NO: 2133531 - RNA, 19 nt, Homo sapiens
  misc_RNA (1)...(19): siRNA sense strand
uuucaaagaagucagauug

SEQ ID NO: 2133532 - RNA, 19 nt, Homo sapiens
  misc_RNA (1)...(19): siRNA sense strand
agagauuccuugagaagag

SEQ ID NO: 2133533 - RNA, 19 nt, Homo sapiens
  misc_RNA (1)...(19): siRNA sense strand
gcucucaagccaaagaaga

SEQ ID NO: 2133534 - RNA, 19 nt, Homo sapiens
  misc_RNA (1)...(19): siRNA sense strand
gagaugggacccucauugg

SEQ ID NO: 2133535 - RNA, 19 nt, Homo sapiens
  misc_RNA (1)...(19): siRNA sense strand
gaagagaugggacccucau

SEQ ID NO: 2133536 - RNA, 19 nt, Homo sapiens
  misc_RNA (1)...(19): siRNA sense strand
agagagaaccgaaacucaa

SEQ ID NO: 2133537 - RNA, 19 nt, Homo sapiens
  misc_RNA (1)...(19): siRNA sense strand
gucagauuguucuuuauuc

SEQ ID NO: 2133538 - RNA, 19 nt, Homo sapiens
  misc_RNA (1)...(19): siRNA sense strand
gcaaaugcaacagugacaa

SEQ ID NO: 2133539 - RNA, 19 nt, Homo sapiens
  misc_RNA (1)...(19): siRNA sense strand
gcaaacuacaaaccaggaa

SEQ ID NO: 2133540 - RNA, 19 nt, Homo sapiens
  misc_RNA (1)...(19): siRNA sense strand
aaacccaugcugauauuug

SEQ ID NO: 2133541 - RNA, 19 nt, Homo sapiens
  misc_RNA (1)...(19): siRNA sense strand
gagaagagagaaccgaaac

SEQ ID NO: 2133542 - RNA, 19 nt, Homo sapiens
  misc_RNA (1)...(19): siRNA sense strand
aagaagcggccaaauaauc

SEQ ID NO: 2133543 - RNA, 19 nt, Homo sapiens
  misc_RNA (1)...(19): siRNA sense strand
aacagaagaccacgagaaa

SEQ ID NO: 2133544 - RNA, 19 nt, Homo sapiens
  misc_RNA (1)...(19): siRNA sense strand
caaacuacaaaccaggaaa

SEQ ID NO: 2133545 - RNA, 19 nt, Homo sapiens
  misc_RNA (1)...(19): siRNA sense strand
gcgaugauuucgauguaac

SEQ ID NO: 2133546 - RNA, 19 nt, Homo sapiens
  misc_RNA (1)...(19): siRNA sense strand
uaagaagcggccaaauaau

SEQ ID NO: 2133547 - RNA, 19 nt, Homo sapiens
  misc_RNA (1)...(19): siRNA sense strand
uaggucguauguaugacua

SEQ ID NO: 2133548 - RNA, 19 nt, Homo sapiens
  misc_RNA (1)...(19): siRNA sense strand
ggccaaauaaucuaguaau

SEQ ID NO: 2133549 - RNA, 19 nt, Homo sapiens
  misc_RNA (1)...(19): siRNA sense strand
cacugaaugggaagauuua

SEQ ID NO: 2133550 - RNA, 19 nt, Homo sapiens
  misc_RNA (1)...(19): siRNA sense strand
aaccgaaacucaaugaaaa

SEQ ID NO: 2133551 - RNA, 19 nt, Homo sapiens
  misc_RNA (1)...(19): siRNA sense strand
cuaguaauaggucguaugu

SEQ ID NO: 2133552 - RNA, 19 nt, Homo sapiens
  misc_RNA (1)...(19): siRNA sense strand
ccgccuggcuggauuagag

SEQ ID NO: 2133553 - RNA, 19 nt, Homo sapiens
  misc_RNA (1)...(19): siRNA sense strand
ugcuggauaugauugaauu

SEQ ID NO: 2133554 - RNA, 19 nt, Homo sapiens
  misc_RNA (1)...(19): siRNA sense strand
agagaugggacccucauug

SEQ ID NO: 2133555 - RNA, 19 nt, Homo sapiens
  misc_RNA (1)...(19): siRNA sense strand
cggauugaauuggaagaga

SEQ ID NO: 2133556 - RNA, 19 nt, Homo sapiens
  misc_RNA (1)...(19): siRNA sense strand
guauguaugacuaccaugu

SEQ ID NO: 2133557 - RNA, 19 nt, Homo sapiens
  misc_RNA (1)...(19): siRNA sense strand
caacuuauggaaggauuca

SEQ ID NO: 2133558 - RNA, 19 nt, Homo sapiens
  misc_RNA (1)...(19): siRNA sense strand
gcuggauaugauugaauua

SEQ ID NO: 2133559 - RNA, 19 nt, Homo sapiens
  misc_RNA (1)...(19): siRNA sense strand
uauaaguugcuguugaaga

SEQ ID NO: 2133560 - RNA, 19 nt, Homo sapiens
  misc_RNA (1)...(19): siRNA sense strand
ugacuaccaugugcuggau

SEQ ID NO: 2133561 - RNA, 19 nt, Homo sapiens
  misc_RNA (1)...(19): siRNA sense strand
ugagaagagagaaccgaaa

SEQ ID NO: 2133562 - RNA, 19 nt, Homo sapiens
  misc_RNA (1)...(19): siRNA sense strand
agauuuacuuucgaagcua

SEQ ID NO: 2133563 - RNA, 19 nt, Homo sapiens
  misc_RNA (1)...(19): siRNA sense strand
cgaaaagagccaagagauu

SEQ ID NO: 2133564 - RNA, 19 nt, Homo sapiens
  misc_RNA (1)...(19): siRNA sense strand
uacaagaccuuuugaggau

SEQ ID NO: 2133565 - RNA, 19 nt, Homo sapiens
  misc_RNA (1)...(19): siRNA sense strand
aagaagcgaccugcagaaa

SEQ ID NO: 2133566 - RNA, 19 nt, Homo sapiens
  misc_RNA (1)...(19): siRNA sense strand
uacaacuuauggaaggauu

SEQ ID NO: 2133567 - RNA, 19 nt, Homo sapiens
  misc_RNA (1)...(19): siRNA sense strand
gguacaacuuauggaagga

SEQ ID NO: 2133568 - RNA, 19 nt, Homo sapiens
  misc_RNA (1)...(19): siRNA sense strand
ucaagccaaagaagaagaa

SEQ ID NO: 2133569 - RNA, 19 nt, Homo sapiens
  misc_RNA (1)...(19): siRNA sense strand
ucgauguaacagaagauua

SEQ ID NO: 2133570 - RNA, 19 nt, Homo sapiens
  misc_RNA (1)...(19): siRNA sense strand
cgaccugcagaaaggauaa

SEQ ID NO: 2133571 - RNA, 19 nt, Homo sapiens
  misc_RNA (1)...(19): siRNA sense strand
gcagaagcaagaccuaagc

SEQ ID NO: 2133572 - RNA, 19 nt, Homo sapiens
  misc_RNA (1)...(19): siRNA sense strand
gauugaauuggaagagaug

SEQ ID NO: 2133573 - RNA, 19 nt, Homo sapiens
  misc_RNA (1)...(19): siRNA sense strand
cagaacaccacggauugaa

SEQ ID NO: 2133574 - RNA, 19 nt, Homo sapiens
  misc_RNA (1)...(19): siRNA sense strand
gaacaggugccaacaaaua

SEQ ID NO: 2133575 - RNA, 19 nt, Homo sapiens
  misc_RNA (1)...(19): siRNA sense strand
uaacaacgcuaaacagaaa

SEQ ID NO: 2133576 - RNA, 19 nt, Homo sapiens
  misc_RNA (1)...(19): siRNA sense strand
ggaagaugauuaugacuaa

SEQ ID NO: 2133577 - RNA, 19 nt, Homo sapiens
  misc_RNA (1)...(19): siRNA sense strand
ggaaggaguugaccaagaa

SEQ ID NO: 2133578 - RNA, 19 nt, Homo sapiens
  misc_RNA (1)...(19): siRNA sense strand
gaagggacgugagcuauaa

SEQ ID NO: 2133579 - RNA, 19 nt, Homo sapiens
  misc_RNA (1)...(19): siRNA sense strand
cgaaauagcuuugaggaaa

SEQ ID NO: 2133580 - RNA, 19 nt, Homo sapiens
  misc_RNA (1)...(19): siRNA sense strand
gaaguuaccaccaguuaua

SEQ ID NO: 2133581 - RNA, 19 nt, Homo sapiens
  misc_RNA (1)...(19): siRNA sense strand
gaagaugaauuaccaaagu

SEQ ID NO: 2133582 - RNA, 19 nt, Homo sapiens
  misc_RNA (1)...(19): siRNA sense strand
agaaagagcugagauuuga

SEQ ID NO: 2133583 - RNA, 19 nt, Homo sapiens
  misc_RNA (1)...(19): siRNA sense strand
gagcugagauuugacguuu

SEQ ID NO: 2133584 - RNA, 19 nt, Homo sapiens
  misc_RNA (1)...(19): siRNA sense strand
gaccagaaauuacagaaau

SEQ ID NO: 2133585 - RNA, 19 nt, Homo sapiens
  misc_RNA (1)...(19): siRNA sense strand
gcauaugccuucuccaaug

SEQ ID NO: 2133586 - RNA, 19 nt, Homo sapiens
  misc_RNA (1)...(19): siRNA sense strand
ccaagugauugaucuagua

SEQ ID NO: 2133587 - RNA, 19 nt, Homo sapiens
  misc_RNA (1)...(19): siRNA sense strand
caaaucucauuccacaaua

SEQ ID NO: 2133588 - RNA, 19 nt, Homo sapiens
  misc_RNA (1)...(19): siRNA sense strand
gaugagacauaccgcauau

SEQ ID NO: 2133589 - RNA, 19 nt, Homo sapiens
  misc_RNA (1)...(19): siRNA sense strand
uagaaucccuauccaauug

SEQ ID NO: 2133590 - RNA, 19 nt, Homo sapiens
  misc_RNA (1)...(19): siRNA sense strand
gagaaugaguugcuuccaa

SEQ ID NO: 2133591 - RNA, 19 nt, Homo sapiens
  misc_RNA (1)...(19): siRNA sense strand
uagaacaggugccaacaaa

SEQ ID NO: 2133592 - RNA, 19 nt, Homo sapiens
  misc_RNA (1)...(19): siRNA sense strand
ccaauuggguucaucaugu

SEQ ID NO: 2133593 - RNA, 19 nt, Homo sapiens
  misc_RNA (1)...(19): siRNA sense strand
agacgauucugacuacaua

SEQ ID NO: 2133594 - RNA, 19 nt, Homo sapiens
  misc_RNA (1)...(19): siRNA sense strand
gcagaaggugggcgaaaua

SEQ ID NO: 2133595 - RNA, 19 nt, Homo sapiens
  misc_RNA (1)...(19): siRNA sense strand
gaucuugggucuggaaaug

SEQ ID NO: 2133596 - RNA, 19 nt, Homo sapiens
  misc_RNA (1)...(19): siRNA sense strand
caacacgguuauccucaaa

SEQ ID NO: 2133597 - RNA, 19 nt, Homo sapiens
  misc_RNA (1)...(19): siRNA sense strand
caauuggguucaucaugua

SEQ ID NO: 2133598 - RNA, 19 nt, Homo sapiens
  misc_RNA (1)...(19): siRNA sense strand
ucuaauauguugaccaaga

SEQ ID NO: 2133599 - RNA, 19 nt, Homo sapiens
  misc_RNA (1)...(19): siRNA sense strand
gaaugaagaaucugaggaa

SEQ ID NO: 2133600 - RNA, 19 nt, Homo sapiens
  misc_RNA (1)...(19): siRNA sense strand
gagcacaaauugcccgaau

SEQ ID NO: 2133601 - RNA, 19 nt, Homo sapiens
  misc_RNA (1)...(19): siRNA sense strand
uauuguagcugaaguggaa

SEQ ID NO: 2133602 - RNA, 19 nt, Homo sapiens
  misc_RNA (1)...(19): siRNA sense strand
ggaagaagaagaggaagaa

SEQ ID NO: 2133603 - RNA, 19 nt, Homo sapiens
  misc_RNA (1)...(19): siRNA sense strand
aguuauaccugcacaaauu

SEQ ID NO: 2133604 - RNA, 19 nt, Homo sapiens
  misc_RNA (1)...(19): siRNA sense strand
gaaauagcuuugaggaaaa

SEQ ID NO: 2133605 - RNA, 19 nt, Homo sapiens
  misc_RNA (1)...(19): siRNA sense strand
ugagacauaccgcauauuu

SEQ ID NO: 2133606 - RNA, 19 nt, Homo sapiens
  misc_RNA (1)...(19): siRNA sense strand
uuucagggcugcacaagaa

SEQ ID NO: 2133607 - RNA, 19 nt, Homo sapiens
  misc_RNA (1)...(19): siRNA sense strand
gagcauaugccuucuccaa

SEQ ID NO: 2133608 - RNA, 19 nt, Homo sapiens
  misc_RNA (1)...(19): siRNA sense strand
ggaggaagacucaaacagu

SEQ ID NO: 2133609 - RNA, 19 nt, Homo sapiens
  misc_RNA (1)...(19): siRNA sense strand
caggaaaugagaguaauua

SEQ ID NO: 2133610 - RNA, 19 nt, Homo sapiens
  misc_RNA (1)...(19): siRNA sense strand
gaagaugaaauagcagaaa

SEQ ID NO: 2133611 - RNA, 19 nt, Homo sapiens
  misc_RNA (1)...(19): siRNA sense strand
gagaaucaacuccucauca

SEQ ID NO: 2133612 - RNA, 19 nt, Homo sapiens
  misc_RNA (1)...(19): siRNA sense strand
guagaaucccuauccaauu

SEQ ID NO: 2133613 - RNA, 19 nt, Homo sapiens
  misc_RNA (1)...(19): siRNA sense strand
ugaacaagcuggaguuggu

SEQ ID NO: 2133614 - RNA, 19 nt, Homo sapiens
  misc_RNA (1)...(19): siRNA sense strand
agaggaagauguagcugaa

SEQ ID NO: 2133615 - RNA, 19 nt, Homo sapiens
  misc_RNA (1)...(19): siRNA sense strand
ugacaccaaucucugaaga

SEQ ID NO: 2133616 - RNA, 19 nt, Homo sapiens
  misc_RNA (1)...(19): siRNA sense strand
ugaggaagaugaauuacca

SEQ ID NO: 2133617 - RNA, 19 nt, Homo sapiens
  misc_RNA (1)...(19): siRNA sense strand
gcaauucgggcuuuaaucu

SEQ ID NO: 2133618 - RNA, 19 nt, Homo sapiens
  misc_RNA (1)...(19): siRNA sense strand
ggucuggaaaugaauuaua

SEQ ID NO: 2133619 - RNA, 19 nt, Homo sapiens
  misc_RNA (1)...(19): siRNA sense strand
gcauauuucuugcccucaa

SEQ ID NO: 2133620 - RNA, 19 nt, Homo sapiens
  misc_RNA (1)...(19): siRNA sense strand
gagggacaauggagaaagu

SEQ ID NO: 2133621 - RNA, 19 nt, Homo sapiens
  misc_RNA (1)...(19): siRNA sense strand
guaauugguucaacuccau

SEQ ID NO: 2133622 - RNA, 19 nt, Homo sapiens
  misc_RNA (1)...(19): siRNA sense strand
caccuuauccugauccuuu

SEQ ID NO: 2133623 - RNA, 19 nt, Homo sapiens
  misc_RNA (1)...(19): siRNA sense strand
caaacagugacuaugauuu

SEQ ID NO: 2133624 - RNA, 19 nt, Homo sapiens
  misc_RNA (1)...(19): siRNA sense strand
cgaagggacgugagcuaua

SEQ ID NO: 2133625 - RNA, 19 nt, Homo sapiens
  misc_RNA (1)...(19): siRNA sense strand
aagaugaggaagaugauua

SEQ ID NO: 2133626 - RNA, 19 nt, Homo sapiens
  misc_RNA (1)...(19): siRNA sense strand
aagugaagcucaugaagau

SEQ ID NO: 2133627 - RNA, 19 nt, Homo sapiens
  misc_RNA (1)...(19): siRNA sense strand
gacaggaccacgaguguga

SEQ ID NO: 2133628 - RNA, 19 nt, Homo sapiens
  misc_RNA (1)...(19): siRNA sense strand
ugaggaagaugaagaugag

SEQ ID NO: 2133629 - RNA, 19 nt, Homo sapiens
  misc_RNA (1)...(19): siRNA sense strand
ggaccagaaauuacagaaa

SEQ ID NO: 2133630 - RNA, 19 nt, Homo sapiens
  misc_RNA (1)...(19): siRNA sense strand
aguauaguccagacaauua

SEQ ID NO: 2133631 - RNA, 19 nt, Homo sapiens
  misc_RNA (1)...(19): siRNA sense strand
gaaggcauccaagugauug

SEQ ID NO: 2133632 - RNA, 19 nt, Homo sapiens
  misc_RNA (1)...(19): siRNA sense strand
gugaaguuaccaccaguua

SEQ ID NO: 2133633 - RNA, 19 nt, Homo sapiens
  misc_RNA (1)...(19): siRNA sense strand
ggacaauggagaaagugaa

SEQ ID NO: 2133634 - RNA, 19 nt, Homo sapiens
  misc_RNA (1)...(19): siRNA sense strand
ucaaaucucauuccacaau

SEQ ID NO: 2133635 - RNA, 19 nt, Homo sapiens
  misc_RNA (1)...(19): siRNA sense strand
agaugaggaagaugaauua

SEQ ID NO: 2133636 - RNA, 19 nt, Homo sapiens
  misc_RNA (1)...(19): siRNA sense strand
gaaagugaagcucaugaag

SEQ ID NO: 2133637 - RNA, 19 nt, Homo sapiens
  misc_RNA (1)...(19): siRNA sense strand
cagaaagagcugagauuug

SEQ ID NO: 2133638 - RNA, 19 nt, Homo sapiens
  misc_RNA (1)...(19): siRNA sense strand
ggaagaugaagaugaggaa

SEQ ID NO: 2133639 - RNA, 19 nt, Homo sapiens
  misc_RNA (1)...(19): siRNA sense strand
ggaaggagaggaggaggaa

SEQ ID NO: 2133640 - RNA, 19 nt, Homo sapiens
  misc_RNA (1)...(19): siRNA sense strand
ggaagaccaugggugaagu

SEQ ID NO: 2133641 - RNA, 19 nt, Homo sapiens
  misc_RNA (1)...(19): siRNA sense strand
uaaaugagcguccugaaaa

SEQ ID NO: 2133642 - RNA, 19 nt, Homo sapiens
  misc_RNA (1)...(19): siRNA sense strand
gggcacagaugagacauac

SEQ ID NO: 2133643 - RNA, 19 nt, Homo sapiens
  misc_RNA (1)...(19): siRNA sense strand
agaaaacgcucuuccaaau

SEQ ID NO: 2133644 - RNA, 19 nt, Homo sapiens
  misc_RNA (1)...(19): siRNA sense strand
cgaagcagccguccuugga

SEQ ID NO: 2133645 - RNA, 19 nt, Homo sapiens
  misc_RNA (1)...(19): siRNA sense strand
ugaggaagaugauuaugac

SEQ ID NO: 2133646 - RNA, 19 nt, Homo sapiens
  misc_RNA (1)...(19): siRNA sense strand
uaaguauaguccagacaau

SEQ ID NO: 2133647 - RNA, 19 nt, Homo sapiens
  misc_RNA (1)...(19): siRNA sense strand
guccuucaauccaaccuuu

SEQ ID NO: 2133648 - RNA, 19 nt, Homo sapiens
  misc_RNA (1)...(19): siRNA sense strand
ucaguuuggugaagaggaa

SEQ ID NO: 2133649 - RNA, 19 nt, Homo sapiens
  misc_RNA (1)...(19): siRNA sense strand
gagaaagugaagcucauga

SEQ ID NO: 2133650 - RNA, 19 nt, Homo sapiens
  misc_RNA (1)...(19): siRNA sense strand
gaagauguagcugaagaga

SEQ ID NO: 2133651 - RNA, 19 nt, Homo sapiens
  misc_RNA (1)...(19): siRNA sense strand
ccagggacauuuggaagga

SEQ ID NO: 2133652 - RNA, 19 nt, Homo sapiens
  misc_RNA (1)...(19): siRNA sense strand
uauaacaacgcuaaacaga

SEQ ID NO: 2133653 - RNA, 19 nt, Homo sapiens
  misc_RNA (1)...(19): siRNA sense strand
aaagugaagcucaugaaga

SEQ ID NO: 2133654 - RNA, 19 nt, Homo sapiens
  misc_RNA (1)...(19): siRNA sense strand
gcuguugacaucuuugaaa

SEQ ID NO: 2133655 - RNA, 19 nt, Homo sapiens
  misc_RNA (1)...(19): siRNA sense strand
acagaaagagcugagauuu

SEQ ID NO: 2133656 - RNA, 19 nt, Homo sapiens
  misc_RNA (1)...(19): siRNA sense strand
gaagaugaggaagaugauu

SEQ ID NO: 2133657 - RNA, 19 nt, Homo sapiens
  misc_RNA (1)...(19): siRNA sense strand
gaagauuuagagauucaga

SEQ ID NO: 2133658 - RNA, 19 nt, Homo sapiens
  misc_RNA (1)...(19): siRNA sense strand
uggaaggaguugaccaaga

SEQ ID NO: 2133659 - RNA, 19 nt, Homo sapiens
  misc_RNA (1)...(19): siRNA sense strand
gcuuccaacauaugaaaua

SEQ ID NO: 2133660 - RNA, 19 nt, Homo sapiens
  misc_RNA (1)...(19): siRNA sense strand
uuaaaugagcguccugaaa

SEQ ID NO: 2133661 - RNA, 19 nt, Homo sapiens
  misc_RNA (1)...(19): siRNA sense strand
uagcagcaauucgggcuuu

SEQ ID NO: 2133662 - RNA, 19 nt, Homo sapiens
  misc_RNA (1)...(19): siRNA sense strand
gcuauaacaacgcuaaaca

SEQ ID NO: 2133663 - RNA, 19 nt, Homo sapiens
  misc_RNA (1)...(19): siRNA sense strand
ccaguuccaccaccaguuu

SEQ ID NO: 2133664 - RNA, 19 nt, Homo sapiens
  misc_RNA (1)...(19): siRNA sense strand
agaggaagaagaugaagaa

SEQ ID NO: 2133665 - RNA, 19 nt, Homo sapiens
  misc_RNA (1)...(19): siRNA sense strand
gaaggugggcgaaauagcu

SEQ ID NO: 2133666 - RNA, 19 nt, Homo sapiens
  misc_RNA (1)...(19): siRNA sense strand
ggaggaagaggcagaaggu

SEQ ID NO: 2133667 - RNA, 19 nt, Homo sapiens
  misc_RNA (1)...(19): siRNA sense strand
gaagaccaugggugaaguu

SEQ ID NO: 2133668 - RNA, 19 nt, Homo sapiens
  misc_RNA (1)...(19): siRNA sense strand
gaaaauauuagccaagaug

SEQ ID NO: 2133669 - RNA, 19 nt, Homo sapiens
  misc_RNA (1)...(19): siRNA sense strand
gggcuuuaaucuauaugau

SEQ ID NO: 2133670 - RNA, 19 nt, Homo sapiens
  misc_RNA (1)...(19): siRNA sense strand
agacauaccgcauauuucu

SEQ ID NO: 2133671 - RNA, 19 nt, Homo sapiens
  misc_RNA (1)...(19): siRNA sense strand
caccaccaguuuaucaaga

SEQ ID NO: 2133672 - RNA, 19 nt, Homo sapiens
  misc_RNA (1)...(19): siRNA sense strand
cagggucgcuguaauuggu

SEQ ID NO: 2133673 - RNA, 19 nt, Homo sapiens
  misc_RNA (1)...(19): siRNA sense strand
ggcagaaggugggcgaaau

SEQ ID NO: 2133674 - RNA, 19 nt, Homo sapiens
  misc_RNA (1)...(19): siRNA sense strand
aaacaaagcucgagugaaa

SEQ ID NO: 2133675 - RNA, 19 nt, Homo sapiens
  misc_RNA (1)...(19): siRNA sense strand
agugaaagcuuguuacaua

SEQ ID NO: 2133676 - RNA, 19 nt, Homo sapiens
  misc_RNA (1)...(19): siRNA sense strand
gaaagcuuguuacauaaug

SEQ ID NO: 2133677 - RNA, 19 nt, Homo sapiens
  misc_RNA (1)...(19): siRNA sense strand
cgacaugaauccuuaacaa

SEQ ID NO: 2133678 - RNA, 19 nt, Homo sapiens
  misc_RNA (1)...(19): siRNA sense strand
ggacagggcguuucaaauc

SEQ ID NO: 2133679 - RNA, 19 nt, Homo sapiens
  misc_RNA (1)...(19): siRNA sense strand
agaacgacaugaauccuua

SEQ ID NO: 2133680 - RNA, 19 nt, Homo sapiens
  misc_RNA (1)...(19): siRNA sense strand
gugaaagcuuguuacauaa

SEQ ID NO: 2133681 - RNA, 19 nt, Homo sapiens
  misc_RNA (1)...(19): siRNA sense strand
caugaauccuuaacaaguu

SEQ ID NO: 2133682 - RNA, 19 nt, Homo sapiens
  misc_RNA (1)...(19): siRNA sense strand
ucaaaucgauggaggagau

SEQ ID NO: 2133683 - RNA, 19 nt, Homo sapiens
  misc_RNA (1)...(19): siRNA sense strand
caaaagggcuguagaacga

SEQ ID NO: 2133684 - RNA, 19 nt, Homo sapiens
  misc_RNA (1)...(19): siRNA sense strand
gcaaacacacagagaaugg

SEQ ID NO: 2133685 - RNA, 19 nt, Homo sapiens
  misc_RNA (1)...(19): siRNA sense strand
gaacgacaugaauccuuaa

SEQ ID NO: 2133686 - RNA, 19 nt, Homo sapiens
  misc_RNA (1)...(19): siRNA sense strand
guuggaacuuggcaaagaa

SEQ ID NO: 2133687 - RNA, 19 nt, Homo sapiens
  misc_RNA (1)...(19): siRNA sense strand
acacagagaauggcaauug

SEQ ID NO: 2133688 - RNA, 19 nt, Homo sapiens
  misc_RNA (1)...(19): siRNA sense strand
gaaacaaagcucgagugaa

SEQ ID NO: 2133689 - RNA, 19 nt, Homo sapiens
  misc_RNA (1)...(19): siRNA sense strand
cauaaugauuggacucaca

SEQ ID NO: 2133690 - RNA, 19 nt, Homo sapiens
  misc_RNA (1)...(19): siRNA sense strand
gaucccgccagaaaugaua

SEQ ID NO: 2133691 - RNA, 19 nt, Homo sapiens
  misc_RNA (1)...(19): siRNA sense strand
ucacaauuaucgccugcuu

SEQ ID NO: 2133692 - RNA, 19 nt, Homo sapiens
  misc_RNA (1)...(19): siRNA sense strand
ugauagacaccgcaagaaa

SEQ ID NO: 2133693 - RNA, 19 nt, Homo sapiens
  misc_RNA (1)...(19): siRNA sense strand
acaauuaucgccugcuuug

SEQ ID NO: 2133694 - RNA, 19 nt, Homo sapiens
  misc_RNA (1)...(19): siRNA sense strand
gagacugcauuccgagaca

SEQ ID NO: 2133695 - RNA, 19 nt, Homo sapiens
  misc_RNA (1)...(19): siRNA sense strand
ccucggaucccgccagaaa

SEQ ID NO: 2133696 - RNA, 19 nt, Homo sapiens
  misc_RNA (1)...(19): siRNA sense strand
gacagggcguuucaaaucg

SEQ ID NO: 2133697 - RNA, 19 nt, Homo sapiens
  misc_RNA (1)...(19): siRNA sense strand
gauagacaccgcaagaaac

SEQ ID NO: 2133698 - RNA, 19 nt, Homo sapiens
  misc_RNA (1)...(19): siRNA sense strand
agaaacaaagcucgaguga

SEQ ID NO: 2133699 - RNA, 19 nt, Homo sapiens
  misc_RNA (1)...(19): siRNA sense strand
agacaccgcaagaaacaaa

SEQ ID NO: 2133700 - RNA, 19 nt, Homo sapiens
  misc_RNA (1)...(19): siRNA sense strand
cugcacaggcuaaagcuaa

SEQ ID NO: 2133701 - RNA, 19 nt, Homo sapiens
  misc_RNA (1)...(19): siRNA sense strand
aaagcuaaguggcgugaag

SEQ ID NO: 2133702 - RNA, 19 nt, Homo sapiens
  misc_RNA (1)...(19): siRNA sense strand
cgccugcuuugcugugaua

SEQ ID NO: 2133703 - RNA, 19 nt, Homo sapiens
  misc_RNA (1)...(19): siRNA sense strand
gaacuuggcaaagaaagcu

SEQ ID NO: 2133704 - RNA, 19 nt, Homo sapiens
  misc_RNA (1)...(19): siRNA sense strand
uaaguggcgugaagaagcu

SEQ ID NO: 2133705 - RNA, 19 nt, Homo sapiens
  misc_RNA (1)...(19): siRNA sense strand
gcgugaagaagcugcauug

SEQ ID NO: 2133706 - RNA, 19 nt, Homo sapiens
  misc_RNA (1)...(19): siRNA sense strand
gacaugaauccuuaacaag

SEQ ID NO: 2133707 - RNA, 19 nt, Homo sapiens
  misc_RNA (1)...(19): siRNA sense strand
guggacagggcguuucaaa

SEQ ID NO: 2133708 - RNA, 19 nt, Homo sapiens
  misc_RNA (1)...(19): siRNA sense strand
aaugauagacaccgcaaga

SEQ ID NO: 2133709 - RNA, 19 nt, Homo sapiens
  misc_RNA (1)...(19): siRNA sense strand
acaugaauccuuaacaagu

SEQ ID NO: 2133710 - RNA, 19 nt, Homo sapiens
  misc_RNA (1)...(19): siRNA sense strand
cgagugaaagcuuguuaca

SEQ ID NO: 2133711 - RNA, 19 nt, Homo sapiens
  misc_RNA (1)...(19): siRNA sense strand
gcuguagaacgacaugaau

SEQ ID NO: 2133712 - RNA, 19 nt, Homo sapiens
  misc_RNA (1)...(19): siRNA sense strand
ugcacaggcuaaagcuaaa

SEQ ID NO: 2133713 - RNA, 19 nt, Homo sapiens
  misc_RNA (1)...(19): siRNA sense strand
uggcaaagaaagcuaagug

SEQ ID NO: 2133714 - RNA, 19 nt, Homo sapiens
  misc_RNA (1)...(19): siRNA sense strand
gcacaggcuaaagcuaaau

SEQ ID NO: 2133715 - RNA, 19 nt, Homo sapiens
  misc_RNA (1)...(19): siRNA sense strand
acagggcguuucaaaucga

SEQ ID NO: 2133716 - RNA, 19 nt, Homo sapiens
  misc_RNA (1)...(19): siRNA sense strand
gcuuguuacauaaugauug

SEQ ID NO: 2133717 - RNA, 19 nt, Homo sapiens
  misc_RNA (1)...(19): siRNA sense strand
cugcuuugcugugauagug

SEQ ID NO: 2133718 - RNA, 19 nt, Homo sapiens
  misc_RNA (1)...(19): siRNA sense strand
uaugcaaacacacagagaa

SEQ ID NO: 2133719 - RNA, 19 nt, Homo sapiens
  misc_RNA (1)...(19): siRNA sense strand
gaagagaucucaaucagua

SEQ ID NO: 2133720 - RNA, 19 nt, Homo sapiens
  misc_RNA (1)...(19): siRNA sense strand
gaacacugcuagaccauga

SEQ ID NO: 2133721 - RNA, 19 nt, Homo sapiens
  misc_RNA (1)...(19): siRNA sense strand
uaacuucacuuucaagcaa

SEQ ID NO: 2133722 - RNA, 19 nt, Homo sapiens
  misc_RNA (1)...(19): siRNA sense strand
ggaguaacuucacuuucaa

SEQ ID NO: 2133723 - RNA, 19 nt, Homo sapiens
  misc_RNA (1)...(19): siRNA sense strand
guaacaaccugaacagucu

SEQ ID NO: 2133724 - RNA, 19 nt, Homo sapiens
  misc_RNA (1)...(19): siRNA sense strand
caaaguccaugaagagauc

SEQ ID NO: 2133725 - RNA, 19 nt, Homo sapiens
  misc_RNA (1)...(19): siRNA sense strand
gauugaagauccugagcuu

SEQ ID NO: 2133726 - RNA, 19 nt, Homo sapiens
  misc_RNA (1)...(19): siRNA sense strand
gguacacacugguggauau

SEQ ID NO: 2133727 - RNA, 19 nt, Homo sapiens
  misc_RNA (1)...(19): siRNA sense strand
uggaguaacuucacuuuca

SEQ ID NO: 2133728 - RNA, 19 nt, Homo sapiens
  misc_RNA (1)...(19): siRNA sense strand
uagaagccaugauugaaga

SEQ ID NO: 2133729 - RNA, 19 nt, Homo sapiens
  misc_RNA (1)...(19): siRNA sense strand
gaaugcugccuccuuauga

SEQ ID NO: 2133730 - RNA, 19 nt, Homo sapiens
  misc_RNA (1)...(19): siRNA sense strand
gcaagccucuaaacucaca

SEQ ID NO: 2133731 - RNA, 19 nt, Homo sapiens
  misc_RNA (1)...(19): siRNA sense strand
aagcaagccucuaaacuca

SEQ ID NO: 2133732 - RNA, 19 nt, Homo sapiens
  misc_RNA (1)...(19): siRNA sense strand
gauccugcccucugaguuu

SEQ ID NO: 2133733 - RNA, 19 nt, Homo sapiens
  misc_RNA (1)...(19): siRNA sense strand
ugaaggaaguagagaagga

SEQ ID NO: 2133734 - RNA, 19 nt, Homo sapiens
  misc_RNA (1)...(19): siRNA sense strand
gaacagucuacaccaacua

SEQ ID NO: 2133735 - RNA, 19 nt, Homo sapiens
  misc_RNA (1)...(19): siRNA sense strand
caagugaauggguuuguuu

SEQ ID NO: 2133736 - RNA, 19 nt, Homo sapiens
  misc_RNA (1)...(19): siRNA sense strand
cagcaugccugugaaggaa

SEQ ID NO: 2133737 - RNA, 19 nt, Homo sapiens
  misc_RNA (1)...(19): siRNA sense strand
ggaaugcugccuccuuaug

SEQ ID NO: 2133738 - RNA, 19 nt, Homo sapiens
  misc_RNA (1)...(19): siRNA sense strand
gcuaggaaguuucaucacu

SEQ ID NO: 2133739 - RNA, 19 nt, Homo sapiens
  misc_RNA (1)...(19): siRNA sense strand
gauccggccuuuccugaag

SEQ ID NO: 2133740 - RNA, 19 nt, Homo sapiens
  misc_RNA (1)...(19): siRNA sense strand
ucuaaacucacaccaagua

SEQ ID NO: 2133741 - RNA, 19 nt, Homo sapiens
  misc_RNA (1)...(19): siRNA sense strand
caccaaguaugcugcgauu

SEQ ID NO: 2133742 - RNA, 19 nt, Homo sapiens
  misc_RNA (1)...(19): siRNA sense strand
gaugacagcgaguacaaug

SEQ ID NO: 2133743 - RNA, 19 nt, Homo sapiens
  misc_RNA (1)...(19): siRNA sense strand
uggccaaucuggaccacua

SEQ ID NO: 2133744 - RNA, 19 nt, Homo sapiens
  misc_RNA (1)...(19): siRNA sense strand
gaaggaaguagagaaggaa

SEQ ID NO: 2133745 - RNA, 19 nt, Homo sapiens
  misc_RNA (1)...(19): siRNA sense strand
caacuaauucauccugaga

SEQ ID NO: 2133746 - RNA, 19 nt, Homo sapiens
  misc_RNA (1)...(19): siRNA sense strand
ccaaguaugcugcgauuag

SEQ ID NO: 2133747 - RNA, 19 nt, Homo sapiens
  misc_RNA (1)...(19): siRNA sense strand
caagcaagccucuaaacuc

SEQ ID NO: 2133748 - RNA, 19 nt, Homo sapiens
  misc_RNA (1)...(19): siRNA sense strand
ggaagauucuaguccuuuu

SEQ ID NO: 2133749 - RNA, 19 nt, Homo sapiens
  misc_RNA (1)...(19): siRNA sense strand
gauccugagcuucaaguga

SEQ ID NO: 2133750 - RNA, 19 nt, Homo sapiens
  misc_RNA (1)...(19): siRNA sense strand
guauauccaugcccuguac

SEQ ID NO: 2133751 - RNA, 19 nt, Homo sapiens
  misc_RNA (1)...(19): siRNA sense strand
ucaagugaauggguuuguu

SEQ ID NO: 2133752 - RNA, 19 nt, Homo sapiens
  misc_RNA (1)...(19): siRNA sense strand
ggagaaaacucggaaaagg

SEQ ID NO: 2133753 - RNA, 19 nt, Homo sapiens
  misc_RNA (1)...(19): siRNA sense strand
guacuaaaacgcauggaua

SEQ ID NO: 2133754 - RNA, 19 nt, Homo sapiens
  misc_RNA (1)...(19): siRNA sense strand
gucaaucaaccaugguaua

SEQ ID NO: 2133755 - RNA, 19 nt, Homo sapiens
  misc_RNA (1)...(19): siRNA sense strand
cagcagaaccuggacaugu

SEQ ID NO: 2133756 - RNA, 19 nt, Homo sapiens
  misc_RNA (1)...(19): siRNA sense strand
ccaucuuacuuucuuuaga

SEQ ID NO: 2133757 - RNA, 19 nt, Homo sapiens
  misc_RNA (1)...(19): siRNA sense strand
gcaucaagcaggcacugaa

SEQ ID NO: 2133758 - RNA, 19 nt, Homo sapiens
  misc_RNA (1)...(19): siRNA sense strand
agcagaaccuggacauguu

SEQ ID NO: 2133759 - RNA, 19 nt, Homo sapiens
  misc_RNA (1)...(19): siRNA sense strand
agaaggaacucuccccaaa

SEQ ID NO: 2133760 - RNA, 19 nt, Homo sapiens
  misc_RNA (1)...(19): siRNA sense strand
ucaaucaaccaugguauau

SEQ ID NO: 2133761 - RNA, 19 nt, Homo sapiens
  misc_RNA (1)...(19): siRNA sense strand
gaucauagacuggaguaac

SEQ ID NO: 2133762 - RNA, 19 nt, Homo sapiens
  misc_RNA (1)...(19): siRNA sense strand
gggcuaggaaguuucauca

SEQ ID NO: 2133763 - RNA, 19 nt, Homo sapiens
  misc_RNA (1)...(19): siRNA sense strand
uugaaggccugcaggauag

SEQ ID NO: 2133764 - RNA, 19 nt, Homo sapiens
  misc_RNA (1)...(19): siRNA sense strand
cgauuuggaggaauucauu

SEQ ID NO: 2133765 - RNA, 19 nt, Homo sapiens
  misc_RNA (1)...(19): siRNA sense strand
gcuagaccaugaauaugac

SEQ ID NO: 2133766 - RNA, 19 nt, Homo sapiens
  misc_RNA (1)...(19): siRNA sense strand
gccuggagcucaaugaaaa

SEQ ID NO: 2133767 - RNA, 19 nt, Homo sapiens
  misc_RNA (1)...(19): siRNA sense strand
ccugaacagucuacaccaa

SEQ ID NO: 2133768 - RNA, 19 nt, Homo sapiens
  misc_RNA (1)...(19): siRNA sense strand
gaagaaaacaugcaaccau

SEQ ID NO: 2133769 - RNA, 19 nt, Homo sapiens
  misc_RNA (1)...(19): siRNA sense strand
gcaugccugugaaggaagu

SEQ ID NO: 2133770 - RNA, 19 nt, Homo sapiens
  misc_RNA (1)...(19): siRNA sense strand
aagaaaacaugcaaccauu

SEQ ID NO: 2133771 - RNA, 19 nt, Homo sapiens
  misc_RNA (1)...(19): siRNA sense strand
uaaacucacaccaaguaug

SEQ ID NO: 2133772 - RNA, 19 nt, Homo sapiens
  misc_RNA (1)...(19): siRNA sense strand
caugaagagaucucaauca

SEQ ID NO: 2133773 - RNA, 19 nt, Homo sapiens
  misc_RNA (1)...(19): siRNA sense strand
caccgacccuggcaucaag

SEQ ID NO: 2133774 - RNA, 19 nt, Homo sapiens
  misc_RNA (1)...(19): siRNA sense strand
ccaaaguccaugaagagau

SEQ ID NO: 2133775 - RNA, 19 nt, Homo sapiens
  misc_RNA (1)...(19): siRNA sense strand
cugagauccugcccucuga

SEQ ID NO: 2133776 - RNA, 19 nt, Homo sapiens
  misc_RNA (1)...(19): siRNA sense strand
gguauauccaugcccugua

SEQ ID NO: 2133777 - RNA, 19 nt, Homo sapiens
  misc_RNA (1)...(19): siRNA sense strand
aaucaaccaugguauaucc

SEQ ID NO: 2133778 - RNA, 19 nt, Homo sapiens
  misc_RNA (1)...(19): siRNA sense strand
gauuuggaggaauucauuu

SEQ ID NO: 2133779 - RNA, 19 nt, Homo sapiens
  misc_RNA (1)...(19): siRNA sense strand
ccagcgcgauuuggaggaa

SEQ ID NO: 2133780 - RNA, 19 nt, Homo sapiens
  misc_RNA (1)...(19): siRNA sense strand
ggugagggauauggucauc

SEQ ID NO: 2133781 - RNA, 19 nt, Homo sapiens
  misc_RNA (1)...(19): siRNA sense strand
gugaauggguuuguuuuga

SEQ ID NO: 2133782 - RNA, 19 nt, Homo sapiens
  misc_RNA (1)...(19): siRNA sense strand
ucaagcaggcacugaagga

SEQ ID NO: 2133783 - RNA, 19 nt, Homo sapiens
  misc_RNA (1)...(19): siRNA sense strand
ccaugaauaugacgaugac

SEQ ID NO: 2133784 - RNA, 19 nt, Homo sapiens
  misc_RNA (1)...(19): siRNA sense strand
cagucuacaccaacuaauu

SEQ ID NO: 2133785 - RNA, 19 nt, Homo sapiens
  misc_RNA (1)...(19): siRNA sense strand
guacacacugguggauauu

SEQ ID NO: 2133786 - RNA, 19 nt, Homo sapiens
  misc_RNA (1)...(19): siRNA sense strand
uccaggaggugagggauau

SEQ ID NO: 2133787 - RNA, 19 nt, Homo sapiens
  misc_RNA (1)...(19): siRNA sense strand
auugaaggccugcaggaua

SEQ ID NO: 2133788 - RNA, 19 nt, Homo sapiens
  misc_RNA (1)...(19): siRNA sense strand
caaguaugcugcgauuagc

SEQ ID NO: 2133789 - RNA, 19 nt, Homo sapiens
  misc_RNA (1)...(19): siRNA sense strand
cgugccaucuuacuuucuu

SEQ ID NO: 2133790 - RNA, 19 nt, Homo sapiens
  misc_RNA (1)...(19): siRNA sense strand
acacacugguggauauuuu

SEQ ID NO: 2133791 - RNA, 19 nt, Homo sapiens
  misc_RNA (1)...(19): siRNA sense strand
aaacucacaccaaguaugc

SEQ ID NO: 2133792 - RNA, 19 nt, Homo sapiens
  misc_RNA (1)...(19): siRNA sense strand
ggaaguagagaaggaacuc

SEQ ID NO: 2133793 - RNA, 19 nt, Homo sapiens
  misc_RNA (1)...(19): siRNA sense strand
gagaaaacucggaaaagga

SEQ ID NO: 2133794 - RNA, 19 nt, Homo sapiens
  misc_RNA (1)...(19): siRNA sense strand
augcugcgauuagcuauug

SEQ ID NO: 2133795 - RNA, 19 nt, Homo sapiens
  misc_RNA (1)...(19): siRNA sense strand
ggacauguucaaaagcuuu

SEQ ID NO: 2133796 - RNA, 19 nt, Homo sapiens
  misc_RNA (1)...(19): siRNA sense strand
ugcuagaccaugaauauga

SEQ ID NO: 2133797 - RNA, 19 nt, Homo sapiens
  misc_RNA (1)...(19): siRNA sense strand
ugaacagucuacaccaacu

SEQ ID NO: 2133798 - RNA, 19 nt, Homo sapiens
  misc_RNA (1)...(19): siRNA sense strand
cuacaccaacuaauucauc

SEQ ID NO: 2133799 - RNA, 19 nt, Homo sapiens
  misc_RNA (1)...(19): siRNA sense strand
cuaaaacgcauggauaaaa

SEQ ID NO: 2133800 - RNA, 19 nt, Homo sapiens
  misc_RNA (1)...(19): siRNA sense strand
augaagagaucucaaucag

SEQ ID NO: 2133801 - RNA, 19 nt, Homo sapiens
  misc_RNA (1)...(19): siRNA sense strand
gggcaagaacacugcuaga

SEQ ID NO: 2133802 - RNA, 19 nt, Homo sapiens
  misc_RNA (1)...(19): siRNA sense strand
ggacaugggcaagaacacu

SEQ ID NO: 2133803 - RNA, 19 nt, Homo sapiens
  misc_RNA (1)...(19): siRNA sense strand
uaacaaccugaacagucua

SEQ ID NO: 2133804 - RNA, 19 nt, Homo sapiens
  misc_RNA (1)...(19): siRNA sense strand
acugcuagaccaugaauau

SEQ ID NO: 2133805 - RNA, 19 nt, Homo sapiens
  misc_RNA (1)...(19): siRNA sense strand
uauuuugcgugccaucuua

SEQ ID NO: 2133806 - RNA, 19 nt, Homo sapiens
  misc_RNA (1)...(19): siRNA sense strand
gcugccuccuuaugacaug

SEQ ID NO: 2133807 - RNA, 19 nt, Homo sapiens
  misc_RNA (1)...(19): siRNA sense strand
gaaggccugcaggauaguu

SEQ ID NO: 2133808 - RNA, 19 nt, Homo sapiens
  misc_RNA (1)...(19): siRNA sense strand
ucaccaggccggacauugg

SEQ ID NO: 2133809 - RNA, 19 nt, Homo sapiens
  misc_RNA (1)...(19): siRNA sense strand
gaauggguuuguuuugauc

SEQ ID NO: 2133810 - RNA, 19 nt, Homo sapiens
  misc_RNA (1)...(19): siRNA sense strand
cuuuagaagccaugauuga

SEQ ID NO: 2133811 - RNA, 19 nt, Homo sapiens
  misc_RNA (1)...(19): siRNA sense strand
gugccaucuuacuuucuuu

SEQ ID NO: 2133812 - RNA, 19 nt, Homo sapiens
  misc_RNA (1)...(19): siRNA sense strand
acuaauucauccugagauc

SEQ ID NO: 2133813 - RNA, 19 nt, Homo sapiens
  misc_RNA (1)...(19): siRNA sense strand
ggccggacauuggcuuucu

SEQ ID NO: 2133814 - RNA, 19 nt, Homo sapiens
  misc_RNA (1)...(19): siRNA sense strand
ggaauucauuuugucaauc

SEQ ID NO: 2133815 - RNA, 19 nt, Homo sapiens
  misc_RNA (1)...(19): siRNA sense strand
ugagggauauggucaucac

SEQ ID NO: 2133816 - RNA, 19 nt, Homo sapiens
  misc_RNA (1)...(19): siRNA sense strand
ucaagcaagccucuaaacu

SEQ ID NO: 2133817 - RNA, 19 nt, Homo sapiens
  misc_RNA (1)...(19): siRNA sense strand
gaucauagcugaaauuugu

SEQ ID NO: 2133818 - RNA, 19 nt, Homo sapiens
  misc_RNA (1)...(19): siRNA sense strand
gaacguauuuacacucuaa

SEQ ID NO: 2133819 - RNA, 19 nt, Homo sapiens
  misc_RNA (1)...(19): siRNA sense strand
gaagagcaauauuacauga

SEQ ID NO: 2133820 - RNA, 19 nt, Homo sapiens
  misc_RNA (1)...(19): siRNA sense strand
uaaaggagauuguugaaug

SEQ ID NO: 2133821 - RNA, 19 nt, Homo sapiens
  misc_RNA (1)...(19): siRNA sense strand
ccaagaaacuucacccaaa

SEQ ID NO: 2133822 - RNA, 19 nt, Homo sapiens
  misc_RNA (1)...(19): siRNA sense strand
uagagaaccucaucauaaa

SEQ ID NO: 2133823 - RNA, 19 nt, Homo sapiens
  misc_RNA (1)...(19): siRNA sense strand
uagaagagaucacugaaga

SEQ ID NO: 2133824 - RNA, 19 nt, Homo sapiens
  misc_RNA (1)...(19): siRNA sense strand
agagauugauggagaaaua

SEQ ID NO: 2133825 - RNA, 19 nt, Homo sapiens
  misc_RNA (1)...(19): siRNA sense strand
ucagggaucuuuccauuga

SEQ ID NO: 2133826 - RNA, 19 nt, Homo sapiens
  misc_RNA (1)...(19): siRNA sense strand
caacgaauccauuuccuaa

SEQ ID NO: 2133827 - RNA, 19 nt, Homo sapiens
  misc_RNA (1)...(19): siRNA sense strand
ucacugaagagcaauauua

SEQ ID NO: 2133828 - RNA, 19 nt, Homo sapiens
  misc_RNA (1)...(19): siRNA sense strand
cuagagaaccucaucauaa

SEQ ID NO: 2133829 - RNA, 19 nt, Homo sapiens
  misc_RNA (1)...(19): siRNA sense strand
caagaaacuucacccaaau

SEQ ID NO: 2133830 - RNA, 19 nt, Homo sapiens
  misc_RNA (1)...(19): siRNA sense strand
gaugcuaacugguuucuuc

SEQ ID NO: 2133831 - RNA, 19 nt, Homo sapiens
  misc_RNA (1)...(19): siRNA sense strand
uuacuggucucaaaguuaa

SEQ ID NO: 2133832 - RNA, 19 nt, Homo sapiens
  misc_RNA (1)...(19): siRNA sense strand
ucaucaaacucacucauuu

SEQ ID NO: 2133833 - RNA, 19 nt, Homo sapiens
  misc_RNA (1)...(19): siRNA sense strand
gaagaucauagcugaaauu

SEQ ID NO: 2133834 - RNA, 19 nt, Homo sapiens
  misc_RNA (1)...(19): siRNA sense strand
cauuaucacuggaagaauu

SEQ ID NO: 2133835 - RNA, 19 nt, Homo sapiens
  misc_RNA (1)...(19): siRNA sense strand
gaagauuccuaagaacaga

SEQ ID NO: 2133836 - RNA, 19 nt, Homo sapiens
  misc_RNA (1)...(19): siRNA sense strand
ggacucaacgaauccauuu

SEQ ID NO: 2133837 - RNA, 19 nt, Homo sapiens
  misc_RNA (1)...(19): siRNA sense strand
gaagaugaacguauuuaca

SEQ ID NO: 2133838 - RNA, 19 nt, Homo sapiens
  misc_RNA (1)...(19): siRNA sense strand
ugaaggcucuauuuaugaa

SEQ ID NO: 2133839 - RNA, 19 nt, Homo sapiens
  misc_RNA (1)...(19): siRNA sense strand
uagaggugauucaugauaa

SEQ ID NO: 2133840 - RNA, 19 nt, Homo sapiens
  misc_RNA (1)...(19): siRNA sense strand
caucaaacucacucauuua

SEQ ID NO: 2133841 - RNA, 19 nt, Homo sapiens
  misc_RNA (1)...(19): siRNA sense strand
agaaugauuugguggauga

SEQ ID NO: 2133842 - RNA, 19 nt, Homo sapiens
  misc_RNA (1)...(19): siRNA sense strand
ugaaaugacuaguaaagag

SEQ ID NO: 2133843 - RNA, 19 nt, Homo sapiens
  misc_RNA (1)...(19): siRNA sense strand
ggugauucaugauaagaaa

SEQ ID NO: 2133844 - RNA, 19 nt, Homo sapiens
  misc_RNA (1)...(19): siRNA sense strand
ucacaaggaccauucauau

SEQ ID NO: 2133845 - RNA, 19 nt, Homo sapiens
  misc_RNA (1)...(19): siRNA sense strand
ugaauguucuggccuguga

SEQ ID NO: 2133846 - RNA, 19 nt, Homo sapiens
  misc_RNA (1)...(19): siRNA sense strand
ucucaagccuguuuaugaa

SEQ ID NO: 2133847 - RNA, 19 nt, Homo sapiens
  misc_RNA (1)...(19): siRNA sense strand
cauuugaacugccuaugaa

SEQ ID NO: 2133848 - RNA, 19 nt, Homo sapiens
  misc_RNA (1)...(19): siRNA sense strand
guagaggugauucaugaua

SEQ ID NO: 2133849 - RNA, 19 nt, Homo sapiens
  misc_RNA (1)...(19): siRNA sense strand
acaaggaccauucauauug

SEQ ID NO: 2133850 - RNA, 19 nt, Homo sapiens
  misc_RNA (1)...(19): siRNA sense strand
gaaaucacaaggaccauuc

SEQ ID NO: 2133851 - RNA, 19 nt, Homo sapiens
  misc_RNA (1)...(19): siRNA sense strand
aacaagaacuguaaaccuu

SEQ ID NO: 2133852 - RNA, 19 nt, Homo sapiens
  misc_RNA (1)...(19): siRNA sense strand
gcaggcaucuaucuugaag

SEQ ID NO: 2133853 - RNA, 19 nt, Homo sapiens
  misc_RNA (1)...(19): siRNA sense strand
caaggaaucaucaaacuca

SEQ ID NO: 2133854 - RNA, 19 nt, Homo sapiens
  misc_RNA (1)...(19): siRNA sense strand
caacaggagaagugauuaa

SEQ ID NO: 2133855 - RNA, 19 nt, Homo sapiens
  misc_RNA (1)...(19): siRNA sense strand
ucaggacucugguagaaga

SEQ ID NO: 2133856 - RNA, 19 nt, Homo sapiens
  misc_RNA (1)...(19): siRNA sense strand
gauugaagguugugagucu

SEQ ID NO: 2133857 - RNA, 19 nt, Homo sapiens
  misc_RNA (1)...(19): siRNA sense strand
ccuaagaacagaacaagaa

SEQ ID NO: 2133858 - RNA, 19 nt, Homo sapiens
  misc_RNA (1)...(19): siRNA sense strand
cuugaaggcucuauuuaug

SEQ ID NO: 2133859 - RNA, 19 nt, Homo sapiens
  misc_RNA (1)...(19): siRNA sense strand
gaaauucaaggugugauga

SEQ ID NO: 2133860 - RNA, 19 nt, Homo sapiens
  misc_RNA (1)...(19): siRNA sense strand
gaaaugacuaguaaagagu

SEQ ID NO: 2133861 - RNA, 19 nt, Homo sapiens
  misc_RNA (1)...(19): siRNA sense strand
aagcuggccuggauucaaa

SEQ ID NO: 2133862 - RNA, 19 nt, Homo sapiens
  misc_RNA (1)...(19): siRNA sense strand
agagaucacugaagagcaa

SEQ ID NO: 2133863 - RNA, 19 nt, Homo sapiens
  misc_RNA (1)...(19): siRNA sense strand
ugucagggaucuuuccauu

SEQ ID NO: 2133864 - RNA, 19 nt, Homo sapiens
  misc_RNA (1)...(19): siRNA sense strand
cgaauccauuuccuaaaga

SEQ ID NO: 2133865 - RNA, 19 nt, Homo sapiens
  misc_RNA (1)...(19): siRNA sense strand
aagaaacaguacccgauuu

SEQ ID NO: 2133866 - RNA, 19 nt, Homo sapiens
  misc_RNA (1)...(19): siRNA sense strand
ggaaggagguuuuguagag

SEQ ID NO: 2133867 - RNA, 19 nt, Homo sapiens
  misc_RNA (1)...(19): siRNA sense strand
uuaagauuguggcugauaa

SEQ ID NO: 2133868 - RNA, 19 nt, Homo sapiens
  misc_RNA (1)...(19): siRNA sense strand
cauagaagcaccugaagga

SEQ ID NO: 2133869 - RNA, 19 nt, Homo sapiens
  misc_RNA (1)...(19): siRNA sense strand
uuacgaugcuaacugguuu

SEQ ID NO: 2133870 - RNA, 19 nt, Homo sapiens
  misc_RNA (1)...(19): siRNA sense strand
caaggaccauucauauugg

SEQ ID NO: 2133871 - RNA, 19 nt, Homo sapiens
  misc_RNA (1)...(19): siRNA sense strand
gauaaaacuccauaccuua

SEQ ID NO: 2133872 - RNA, 19 nt, Homo sapiens
  misc_RNA (1)...(19): siRNA sense strand
guagaggaaacaaaguuaa

SEQ ID NO: 2133873 - RNA, 19 nt, Homo sapiens
  misc_RNA (1)...(19): siRNA sense strand
gaacaagaacuguaaaccu

SEQ ID NO: 2133874 - RNA, 19 nt, Homo sapiens
  misc_RNA (1)...(19): siRNA sense strand
gugugaagaugaacguauu

SEQ ID NO: 2133875 - RNA, 19 nt, Homo sapiens
  misc_RNA (1)...(19): siRNA sense strand
cuacgagugugaagaugaa

SEQ ID NO: 2133876 - RNA, 19 nt, Homo sapiens
  misc_RNA (1)...(19): siRNA sense strand
ugaagagauugauggagaa

SEQ ID NO: 2133877 - RNA, 19 nt, Homo sapiens
  misc_RNA (1)...(19): siRNA sense strand
ugaaauuugugagcagauu

SEQ ID NO: 2133878 - RNA, 19 nt, Homo sapiens
  misc_RNA (1)...(19): siRNA sense strand
uaagaaacaguacccgauu

SEQ ID NO: 2133879 - RNA, 19 nt, Homo sapiens
  misc_RNA (1)...(19): siRNA sense strand
ucaaauaagugggacucaa

SEQ ID NO: 2133880 - RNA, 19 nt, Homo sapiens
  misc_RNA (1)...(19): siRNA sense strand
gcaaaucaugcucaacuca

SEQ ID NO: 2133881 - RNA, 19 nt, Homo sapiens
  misc_RNA (1)...(19): siRNA sense strand
caagccuguuuaugaaauu

SEQ ID NO: 2133882 - RNA, 19 nt, Homo sapiens
  misc_RNA (1)...(19): siRNA sense strand
acaagaacuguaaaccuua

SEQ ID NO: 2133883 - RNA, 19 nt, Homo sapiens
  misc_RNA (1)...(19): siRNA sense strand
agagcaauauuacaugaug

SEQ ID NO: 2133884 - RNA, 19 nt, Homo sapiens
  misc_RNA (1)...(19): siRNA sense strand
ucaagccuguuuaugaaau

SEQ ID NO: 2133885 - RNA, 19 nt, Homo sapiens
  misc_RNA (1)...(19): siRNA sense strand
gugagucucuacagccauu

SEQ ID NO: 2133886 - RNA, 19 nt, Homo sapiens
  misc_RNA (1)...(19): siRNA sense strand
aaaucaagcuggccuggau

SEQ ID NO: 2133887 - RNA, 19 nt, Homo sapiens
  misc_RNA (1)...(19): siRNA sense strand
gaaauuugugagcagauug

SEQ ID NO: 2133888 - RNA, 19 nt, Homo sapiens
  misc_RNA (1)...(19): siRNA sense strand
caccaggacugcaguugga

SEQ ID NO: 2133889 - RNA, 19 nt, Homo sapiens
  misc_RNA (1)...(19): siRNA sense strand
uuguagaggugauucauga

SEQ ID NO: 2133890 - RNA, 19 nt, Homo sapiens
  misc_RNA (1)...(19): siRNA sense strand
aggcugcgcugcucccuuu

SEQ ID NO: 2133891 - RNA, 19 nt, Homo sapiens
  misc_RNA (1)...(19): siRNA sense strand
uagaagcaccugaaggaaa

SEQ ID NO: 2133892 - RNA, 19 nt, Homo sapiens
  misc_RNA (1)...(19): siRNA sense strand
gaagagauugauggagaaa

SEQ ID NO: 2133893 - RNA, 19 nt, Homo sapiens
  misc_RNA (1)...(19): siRNA sense strand
cauccuugcuucuaucauc

SEQ ID NO: 2133894 - RNA, 19 nt, Homo sapiens
  misc_RNA (1)...(19): siRNA sense strand
uaucuugaaggcucuauuu

SEQ ID NO: 2133895 - RNA, 19 nt, Homo sapiens
  misc_RNA (1)...(19): siRNA sense strand
gacauaaccaagaaacuuc

SEQ ID NO: 2133896 - RNA, 19 nt, Homo sapiens
  misc_RNA (1)...(19): siRNA sense strand
uuucugagcucuguaaaca

SEQ ID NO: 2133897 - RNA, 19 nt, Homo sapiens
  misc_RNA (1)...(19): siRNA sense strand
guaaagaguuccccauagu

SEQ ID NO: 2133898 - RNA, 19 nt, Homo sapiens
  misc_RNA (1)...(19): siRNA sense strand
gugaagaugaacguauuua

SEQ ID NO: 2133899 - RNA, 19 nt, Homo sapiens
  misc_RNA (1)...(19): siRNA sense strand
gagauugauggagaaauaa

SEQ ID NO: 2133900 - RNA, 19 nt, Homo sapiens
  misc_RNA (1)...(19): siRNA sense strand
ggugagcugugcaguagca

SEQ ID NO: 2133901 - RNA, 19 nt, Homo sapiens
  misc_RNA (1)...(19): siRNA sense strand
aaacuucacccaaaucaag

SEQ ID NO: 2133902 - RNA, 19 nt, Homo sapiens
  misc_RNA (1)...(19): siRNA sense strand
cguuugcccuucaauguga

SEQ ID NO: 2133903 - RNA, 19 nt, Homo sapiens
  misc_RNA (1)...(19): siRNA sense strand
uaaagcagggugagcaaau

SEQ ID NO: 2133904 - RNA, 19 nt, Homo sapiens
  misc_RNA (1)...(19): siRNA sense strand
gcaauagcagaaacauuca

SEQ ID NO: 2133905 - RNA, 19 nt, Homo sapiens
  misc_RNA (1)...(19): siRNA sense strand
cacaaggaccauucauauu

SEQ ID NO: 2133906 - RNA, 19 nt, Homo sapiens
  misc_RNA (1)...(19): siRNA sense strand
ccacagcaauagcagaaac

SEQ ID NO: 2133907 - RNA, 19 nt, Homo sapiens
  misc_RNA (1)...(19): siRNA sense strand
gaaacuucacccaaaucaa

SEQ ID NO: 2133908 - RNA, 19 nt, Homo sapiens
  misc_RNA (1)...(19): siRNA sense strand
agacauaaccaagaaacuu

SEQ ID NO: 2133909 - RNA, 19 nt, Homo sapiens
  misc_RNA (1)...(19): siRNA sense strand
ucccaagcgucaucacgua

SEQ ID NO: 2133910 - RNA, 19 nt, Homo sapiens
  misc_RNA (1)...(19): siRNA sense strand
ccaccaaagcguuucauuc

SEQ ID NO: 2133911 - RNA, 19 nt, Homo sapiens
  misc_RNA (1)...(19): siRNA sense strand
agaagcaccugaaggaaac

SEQ ID NO: 2133912 - RNA, 19 nt, Homo sapiens
  misc_RNA (1)...(19): siRNA sense strand
caggagaagugauuaaaau

SEQ ID NO: 2133913 - RNA, 19 nt, Homo sapiens
  misc_RNA (1)...(19): siRNA sense strand
aaaggagauuguugaaugg

SEQ ID NO: 2133914 - RNA, 19 nt, Homo sapiens
  misc_RNA (1)...(19): siRNA sense strand
aacaguacccgauuucuga

SEQ ID NO: 2133915 - RNA, 19 nt, Homo sapiens
  misc_RNA (1)...(19): siRNA sense strand
cauuacagacucuuaccua

SEQ ID NO: 2133916 - RNA, 19 nt, Homo sapiens
  misc_RNA (1)...(19): siRNA sense strand
ggacauuacagacucuuac

SEQ ID NO: 2133917 - RNA, 19 nt, Homo sapiens
  misc_RNA (1)...(19): siRNA sense strand
gaacauagaagaacccuua

SEQ ID NO: 2133918 - RNA, 19 nt, Homo sapiens
  misc_RNA (1)...(19): siRNA sense strand
ggaagaagauccuaagugu

SEQ ID NO: 2133919 - RNA, 19 nt, Homo sapiens
  misc_RNA (1)...(19): siRNA sense strand
ggaaagguauuuaaagaug

SEQ ID NO: 2133920 - RNA, 19 nt, Homo sapiens
  misc_RNA (1)...(19): siRNA sense strand
gaagaauucucacaaugaa

SEQ ID NO: 2133921 - RNA, 19 nt, Homo sapiens
  misc_RNA (1)...(19): siRNA sense strand
gaacaaacaagauguaaga

SEQ ID NO: 2133922 - RNA, 19 nt, Homo sapiens
  misc_RNA (1)...(19): siRNA sense strand
guaaagggauuggccauuu

SEQ ID NO: 2133923 - RNA, 19 nt, Homo sapiens
  misc_RNA (1)...(19): siRNA sense strand
caucaauccuuuccauaua

SEQ ID NO: 2133924 - RNA, 19 nt, Homo sapiens
  misc_RNA (1)...(19): siRNA sense strand
ggacaaucguuuccuggua

SEQ ID NO: 2133925 - RNA, 19 nt, Homo sapiens
  misc_RNA (1)...(19): siRNA sense strand
cauagaagaacccuuauua

SEQ ID NO: 2133926 - RNA, 19 nt, Homo sapiens
  misc_RNA (1)...(19): siRNA sense strand
gaacauggaaagguauuua

SEQ ID NO: 2133927 - RNA, 19 nt, Homo sapiens
  misc_RNA (1)...(19): siRNA sense strand
ugaagaacauggaaaggua

SEQ ID NO: 2133928 - RNA, 19 nt, Homo sapiens
  misc_RNA (1)...(19): siRNA sense strand
gaaaugagaacaucacaug

SEQ ID NO: 2133929 - RNA, 19 nt, Homo sapiens
  misc_RNA (1)...(19): siRNA sense strand
caaacaagauguaagaauc

SEQ ID NO: 2133930 - RNA, 19 nt, Homo sapiens
  misc_RNA (1)...(19): siRNA sense strand
uaacagauaugguggacaa

SEQ ID NO: 2133931 - RNA, 19 nt, Homo sapiens
  misc_RNA (1)...(19): siRNA sense strand
agagagagaugaugaaaug

SEQ ID NO: 2133932 - RNA, 19 nt, Homo sapiens
  misc_RNA (1)...(19): siRNA sense strand
gaugagagcuaugacuauu

SEQ ID NO: 2133933 - RNA, 19 nt, Homo sapiens
  misc_RNA (1)...(19): siRNA sense strand
ccaguaaaguuuccaaaug

SEQ ID NO: 2133934 - RNA, 19 nt, Homo sapiens
  misc_RNA (1)...(19): siRNA sense strand
guucaaagcugcagagaag

SEQ ID NO: 2133935 - RNA, 19 nt, Homo sapiens
  misc_RNA (1)...(19): siRNA sense strand
ggaacaauugcuaugauua

SEQ ID NO: 2133936 - RNA, 19 nt, Homo sapiens
  misc_RNA (1)...(19): siRNA sense strand
gcaaacuucuuccaacugu

SEQ ID NO: 2133937 - RNA, 19 nt, Homo sapiens
  misc_RNA (1)...(19): siRNA sense strand
gcuccuaagucauuauuug

SEQ ID NO: 2133938 - RNA, 19 nt, Homo sapiens
  misc_RNA (1)...(19): siRNA sense strand
cggcgaagcuguucaagga

SEQ ID NO: 2133939 - RNA, 19 nt, Homo sapiens
  misc_RNA (1)...(19): siRNA sense strand
gacgaggugucagaauuua

SEQ ID NO: 2133940 - RNA, 19 nt, Homo sapiens
  misc_RNA (1)...(19): siRNA sense strand
gaaauuagaaggcguggau

SEQ ID NO: 2133941 - RNA, 19 nt, Homo sapiens
  misc_RNA (1)...(19): siRNA sense strand
gagaagagagagaugauga

SEQ ID NO: 2133942 - RNA, 19 nt, Homo sapiens
  misc_RNA (1)...(19): siRNA sense strand
gguaccaacugcucaagaa

SEQ ID NO: 2133943 - RNA, 19 nt, Homo sapiens
  misc_RNA (1)...(19): siRNA sense strand
cagacgaggugucagaauu

SEQ ID NO: 2133944 - RNA, 19 nt, Homo sapiens
  misc_RNA (1)...(19): siRNA sense strand
gaagaagauccuaagugua

SEQ ID NO: 2133945 - RNA, 19 nt, Homo sapiens
  misc_RNA (1)...(19): siRNA sense strand
ggacguagaagaagacaau

SEQ ID NO: 2133946 - RNA, 19 nt, Homo sapiens
  misc_RNA (1)...(19): siRNA sense strand
ggaagaaagggacguagaa

SEQ ID NO: 2133947 - RNA, 19 nt, Homo sapiens
  misc_RNA (1)...(19): siRNA sense strand
guugaaggauccagugaaa

SEQ ID NO: 2133948 - RNA, 19 nt, Homo sapiens
  misc_RNA (1)...(19): siRNA sense strand
gaagagagagaugaugaaa

SEQ ID NO: 2133949 - RNA, 19 nt, Homo sapiens
  misc_RNA (1)...(19): siRNA sense strand
agaccuaucuuaagacaug

SEQ ID NO: 2133950 - RNA, 19 nt, Homo sapiens
  misc_RNA (1)...(19): siRNA sense strand
uggcagaccuaucuuaaga

SEQ ID NO: 2133951 - RNA, 19 nt, Homo sapiens
  misc_RNA (1)...(19): siRNA sense strand
ggagaacaaacaagaugua

SEQ ID NO: 2133952 - RNA, 19 nt, Homo sapiens
  misc_RNA (1)...(19): siRNA sense strand
gagcuuaccugggugugaa

SEQ ID NO: 2133953 - RNA, 19 nt, Homo sapiens
  misc_RNA (1)...(19): siRNA sense strand
gaacagaaagugaaaugag

SEQ ID NO: 2133954 - RNA, 19 nt, Homo sapiens
  misc_RNA (1)...(19): siRNA sense strand
gaagagagaacagaaagug

SEQ ID NO: 2133955 - RNA, 19 nt, Homo sapiens
  misc_RNA (1)...(19): siRNA sense strand
aaaugaagcuugagguugu

SEQ ID NO: 2133956 - RNA, 19 nt, Homo sapiens
  misc_RNA (1)...(19): siRNA sense strand
ggauucggcuguacuaaag

SEQ ID NO: 2133957 - RNA, 19 nt, Homo sapiens
  misc_RNA (1)...(19): siRNA sense strand
caacguagaugagugucuu

SEQ ID NO: 2133958 - RNA, 19 nt, Homo sapiens
  misc_RNA (1)...(19): siRNA sense strand
gaaaccuccucauggauuc

SEQ ID NO: 2133959 - RNA, 19 nt, Homo sapiens
  misc_RNA (1)...(19): siRNA sense strand
caaaguuggcaugaaauua

SEQ ID NO: 2133960 - RNA, 19 nt, Homo sapiens
  misc_RNA (1)...(19): siRNA sense strand
cacaaguggucaagaguuu

SEQ ID NO: 2133961 - RNA, 19 nt, Homo sapiens
  misc_RNA (1)...(19): siRNA sense strand
gcacaucaaagauaaagau

SEQ ID NO: 2133962 - RNA, 19 nt, Homo sapiens
  misc_RNA (1)...(19): siRNA sense strand
gcacagacgaggugucaga

SEQ ID NO: 2133963 - RNA, 19 nt, Homo sapiens
  misc_RNA (1)...(19): siRNA sense strand
aaaggaacccuauguuuau

SEQ ID NO: 2133964 - RNA, 19 nt, Homo sapiens
  misc_RNA (1)...(19): siRNA sense strand
caacugggaugagagcuau

SEQ ID NO: 2133965 - RNA, 19 nt, Homo sapiens
  misc_RNA (1)...(19): siRNA sense strand
gcagaccuaucuuaagaca

SEQ ID NO: 2133966 - RNA, 19 nt, Homo sapiens
  misc_RNA (1)...(19): siRNA sense strand
guuauggacuggaaagaug

SEQ ID NO: 2133967 - RNA, 19 nt, Homo sapiens
  misc_RNA (1)...(19): siRNA sense strand
gaaucugccucuagcacaa

SEQ ID NO: 2133968 - RNA, 19 nt, Homo sapiens
  misc_RNA (1)...(19): siRNA sense strand
gagcaucaauccuuuccau

SEQ ID NO: 2133969 - RNA, 19 nt, Homo sapiens
  misc_RNA (1)...(19): siRNA sense strand
gcagagagcacggaggaaa

SEQ ID NO: 2133970 - RNA, 19 nt, Homo sapiens
  misc_RNA (1)...(19): siRNA sense strand
gaugcagauucuccugaua

SEQ ID NO: 2133971 - RNA, 19 nt, Homo sapiens
  misc_RNA (1)...(19): siRNA sense strand
gaacaauugcuaugauuac

SEQ ID NO: 2133972 - RNA, 19 nt, Homo sapiens
  misc_RNA (1)...(19): siRNA sense strand
gcaucaauccuuuccauau

SEQ ID NO: 2133973 - RNA, 19 nt, Homo sapiens
  misc_RNA (1)...(19): siRNA sense strand
gcucggcacaucaaagaua

SEQ ID NO: 2133974 - RNA, 19 nt, Homo sapiens
  misc_RNA (1)...(19): siRNA sense strand
cgaggugucagaauuuaua

SEQ ID NO: 2133975 - RNA, 19 nt, Homo sapiens
  misc_RNA (1)...(19): siRNA sense strand
uuugauguguucaguguua

SEQ ID NO: 2133976 - RNA, 19 nt, Homo sapiens
  misc_RNA (1)...(19): siRNA sense strand
caaaugaaagcucuucuuc

SEQ ID NO: 2133977 - RNA, 19 nt, Homo sapiens
  misc_RNA (1)...(19): siRNA sense strand
ggacagaugcaaaugaaag

SEQ ID NO: 2133978 - RNA, 19 nt, Homo sapiens
  misc_RNA (1)...(19): siRNA sense strand
ggaacccuauguuuauuag

SEQ ID NO: 2133979 - RNA, 19 nt, Homo sapiens
  misc_RNA (1)...(19): siRNA sense strand
caaggaggauggagaagag

SEQ ID NO: 2133980 - RNA, 19 nt, Homo sapiens
  misc_RNA (1)...(19): siRNA sense strand
gcacaaguggucaagaguu

SEQ ID NO: 2133981 - RNA, 19 nt, Homo sapiens
  misc_RNA (1)...(19): siRNA sense strand
gagaacagaaagugaaaug

SEQ ID NO: 2133982 - RNA, 19 nt, Homo sapiens
  misc_RNA (1)...(19): siRNA sense strand
uuugauggcuggaacaauu

SEQ ID NO: 2133983 - RNA, 19 nt, Homo sapiens
  misc_RNA (1)...(19): siRNA sense strand
uaaaguuucggguaaauga

SEQ ID NO: 2133984 - RNA, 19 nt, Homo sapiens
  misc_RNA (1)...(19): siRNA sense strand
ccaguuggguggugugaga

SEQ ID NO: 2133985 - RNA, 19 nt, Homo sapiens
  misc_RNA (1)...(19): siRNA sense strand
gggcuucaguucugugaga

SEQ ID NO: 2133986 - RNA, 19 nt, Homo sapiens
  misc_RNA (1)...(19): siRNA sense strand
agaaagggacguagaagaa

SEQ ID NO: 2133987 - RNA, 19 nt, Homo sapiens
  misc_RNA (1)...(19): siRNA sense strand
aauggaagcuucagaacau

SEQ ID NO: 2133988 - RNA, 19 nt, Homo sapiens
  misc_RNA (1)...(19): siRNA sense strand
ugaacaaauugauggagaa

SEQ ID NO: 2133989 - RNA, 19 nt, Homo sapiens
  misc_RNA (1)...(19): siRNA sense strand
gcaugcugaugaugucaaa

SEQ ID NO: 2133990 - RNA, 19 nt, Homo sapiens
  misc_RNA (1)...(19): siRNA sense strand
uaaagggauuggccauuuc

SEQ ID NO: 2133991 - RNA, 19 nt, Homo sapiens
  misc_RNA (1)...(19): siRNA sense strand
guagaugagugucuuucug

SEQ ID NO: 2133992 - RNA, 19 nt, Homo sapiens
  misc_RNA (1)...(19): siRNA sense strand
caguaaaguuuccaaaugg

SEQ ID NO: 2133993 - RNA, 19 nt, Homo sapiens
  misc_RNA (1)...(19): siRNA sense strand
cagcaaagcaaacuucuuc

SEQ ID NO: 2133994 - RNA, 19 nt, Homo sapiens
  misc_RNA (1)...(19): siRNA sense strand
gaaagugaaaugagaacau

SEQ ID NO: 2133995 - RNA, 19 nt, Homo sapiens
  misc_RNA (1)...(19): siRNA sense strand
gcaaaugaaagcucuucuu

SEQ ID NO: 2133996 - RNA, 19 nt, Homo sapiens
  misc_RNA (1)...(19): siRNA sense strand
aaaaggaacccuauguuua

SEQ ID NO: 2133997 - RNA, 19 nt, Homo sapiens
  misc_RNA (1)...(19): siRNA sense strand
caacugcuaccaccacuug

SEQ ID NO: 2133998 - RNA, 19 nt, Homo sapiens
  misc_RNA (1)...(19): siRNA sense strand
gggaugagagcuaugacua

SEQ ID NO: 2133999 - RNA, 19 nt, Homo sapiens
  misc_RNA (1)...(19): siRNA sense strand
ccaucgggcuuucgaguug

SEQ ID NO: 2134000 - RNA, 19 nt, Homo sapiens
  misc_RNA (1)...(19): siRNA sense strand
gagaacaaacaagauguaa

SEQ ID NO: 2134001 - RNA, 19 nt, Homo sapiens
  misc_RNA (1)...(19): siRNA sense strand
gaaggaagaaagggacgua

SEQ ID NO: 2134002 - RNA, 19 nt, Homo sapiens
  misc_RNA (1)...(19): siRNA sense strand
gaaggauccagugaaagua

SEQ ID NO: 2134003 - RNA, 19 nt, Homo sapiens
  misc_RNA (1)...(19): siRNA sense strand
aaggacagaugcaaaugaa

SEQ ID NO: 2134004 - RNA, 19 nt, Homo sapiens
  misc_RNA (1)...(19): siRNA sense strand
caacugucccuauucagaa

SEQ ID NO: 2134005 - RNA, 19 nt, Homo sapiens
  misc_RNA (1)...(19): siRNA sense strand
agauaaagaucagaaggaa

SEQ ID NO: 2134006 - RNA, 19 nt, Homo sapiens
  misc_RNA (1)...(19): siRNA sense strand
caucaaagauaaagaucag

SEQ ID NO: 2134007 - RNA, 19 nt, Homo sapiens
  misc_RNA (1)...(19): siRNA sense strand
aaagggacguagaagaaga

SEQ ID NO: 2134008 - RNA, 19 nt, Homo sapiens
  misc_RNA (1)...(19): siRNA sense strand
gagagaacagaaagugaaa

SEQ ID NO: 2134009 - RNA, 19 nt, Homo sapiens
  misc_RNA (1)...(19): siRNA sense strand
gcuaguccgucauuuccaa

SEQ ID NO: 2134010 - RNA, 19 nt, Homo sapiens
  misc_RNA (1)...(19): siRNA sense strand
gauuggccauuucaagaga

SEQ ID NO: 2134011 - RNA, 19 nt, Homo sapiens
  misc_RNA (1)...(19): siRNA sense strand
gaacaugguggaugcucaa

SEQ ID NO: 2134012 - RNA, 19 nt, Homo sapiens
  misc_RNA (1)...(19): siRNA sense strand
uaugauuacuggauagaug

SEQ ID NO: 2134013 - RNA, 19 nt, Homo sapiens
  misc_RNA (1)...(19): siRNA sense strand
gaguugguaugaagcuuga

SEQ ID NO: 2134014 - RNA, 19 nt, Homo sapiens
  misc_RNA (1)...(19): siRNA sense strand
ccacauauucauccaguug

SEQ ID NO: 2134015 - RNA, 19 nt, Homo sapiens
  misc_RNA (1)...(19): siRNA sense strand
acaaauugauggagaagca

SEQ ID NO: 2134016 - RNA, 19 nt, Homo sapiens
  misc_RNA (1)...(19): siRNA sense strand
gaagaacauggaaagguau

SEQ ID NO: 2134017 - RNA, 19 nt, Homo sapiens
  misc_RNA (1)...(19): siRNA sense strand
caaaugaaauggagaguga

SEQ ID NO: 2134018 - RNA, 19 nt, Homo sapiens
  misc_RNA (1)...(19): siRNA sense strand
gaauacaaauccucaggua

SEQ ID NO: 2134019 - RNA, 19 nt, Homo sapiens
  misc_RNA (1)...(19): siRNA sense strand
cgaaauagcacaaaugaaa

SEQ ID NO: 2134020 - RNA, 19 nt, Homo sapiens
  misc_RNA (1)...(19): siRNA sense strand
gaacacagacccuagauuc

SEQ ID NO: 2134021 - RNA, 19 nt, Homo sapiens
  misc_RNA (1)...(19): siRNA sense strand
cagaagcucucauuccuuu

SEQ ID NO: 2134022 - RNA, 19 nt, Homo sapiens
  misc_RNA (1)...(19): siRNA sense strand
ccacuucucuuucuucuag

SEQ ID NO: 2134023 - RNA, 19 nt, Homo sapiens
  misc_RNA (1)...(19): siRNA sense strand
gaaaggugauccucagucu

SEQ ID NO: 2134024 - RNA, 19 nt, Homo sapiens
  misc_RNA (1)...(19): siRNA sense strand
caauagcagugauggcuuu

SEQ ID NO: 2134025 - RNA, 19 nt, Homo sapiens
  misc_RNA (1)...(19): siRNA sense strand
ggacauggaucugggaauc

SEQ ID NO: 2134026 - RNA, 19 nt, Homo sapiens
  misc_RNA (1)...(19): siRNA sense strand
ccagagaggucacccacaa

SEQ ID NO: 2134027 - RNA, 19 nt, Homo sapiens
  misc_RNA (1)...(19): siRNA sense strand
gcaagagugaaucuaguua

SEQ ID NO: 2134028 - RNA, 19 nt, Homo sapiens
  misc_RNA (1)...(19): siRNA sense strand
gaauggcacuuuccucuac

SEQ ID NO: 2134029 - RNA, 19 nt, Homo sapiens
  misc_RNA (1)...(19): siRNA sense strand
ucaaagcucugcugcugaa

SEQ ID NO: 2134030 - RNA, 19 nt, Homo sapiens
  misc_RNA (1)...(19): siRNA sense strand
ggaccacgauggcuacugu

SEQ ID NO: 2134031 - RNA, 19 nt, Homo sapiens
  misc_RNA (1)...(19): siRNA sense strand
ccaagaagcccaaacuguu

SEQ ID NO: 2134032 - RNA, 19 nt, Homo sapiens
  misc_RNA (1)...(19): siRNA sense strand
gcuaugccguauaauugua

SEQ ID NO: 2134033 - RNA, 19 nt, Homo sapiens
  misc_RNA (1)...(19): siRNA sense strand
gaccaaacguccaacaaag

SEQ ID NO: 2134034 - RNA, 19 nt, Homo sapiens
  misc_RNA (1)...(19): siRNA sense strand
gaucacuacucuacacuag

SEQ ID NO: 2134035 - RNA, 19 nt, Homo sapiens
  misc_RNA (1)...(19): siRNA sense strand
aaacuuaggccauuuagga

SEQ ID NO: 2134036 - RNA, 19 nt, Homo sapiens
  misc_RNA (1)...(19): siRNA sense strand
uuaccaagaugaagaugaa

SEQ ID NO: 2134037 - RNA, 19 nt, Homo sapiens
  misc_RNA (1)...(19): siRNA sense strand
cccaagcuaugccguauaa

SEQ ID NO: 2134038 - RNA, 19 nt, Homo sapiens
  misc_RNA (1)...(19): siRNA sense strand
acaagcagaugaaaacuua

SEQ ID NO: 2134039 - RNA, 19 nt, Homo sapiens
  misc_RNA (1)...(19): siRNA sense strand
cagagaagcauccgaaaga

SEQ ID NO: 2134040 - RNA, 19 nt, Homo sapiens
  misc_RNA (1)...(19): siRNA sense strand
gaaguccucucugauaucu

SEQ ID NO: 2134041 - RNA, 19 nt, Homo sapiens
  misc_RNA (1)...(19): siRNA sense strand
caagcuaugccguauaauu

SEQ ID NO: 2134042 - RNA, 19 nt, Homo sapiens
  misc_RNA (1)...(19): siRNA sense strand
gcgauaaguugcggcauga

SEQ ID NO: 2134043 - RNA, 19 nt, Homo sapiens
  misc_RNA (1)...(19): siRNA sense strand
gcagagaugcucaagaaca

SEQ ID NO: 2134044 - RNA, 19 nt, Homo sapiens
  misc_RNA (1)...(19): siRNA sense strand
agacgggaaugaugaggua

SEQ ID NO: 2134045 - RNA, 19 nt, Homo sapiens
  misc_RNA (1)...(19): siRNA sense strand
gcacaguugucugaacgaa

SEQ ID NO: 2134046 - RNA, 19 nt, Homo sapiens
  misc_RNA (1)...(19): siRNA sense strand
ccaauuaccaggauaaauc

SEQ ID NO: 2134047 - RNA, 19 nt, Homo sapiens
  misc_RNA (1)...(19): siRNA sense strand
ucacuacucuacacuagga

SEQ ID NO: 2134048 - RNA, 19 nt, Homo sapiens
  misc_RNA (1)...(19): siRNA sense strand
guacugagggaaugcgaua

SEQ ID NO: 2134049 - RNA, 19 nt, Homo sapiens
  misc_RNA (1)...(19): siRNA sense strand
gggaaucugugcaauagca

SEQ ID NO: 2134050 - RNA, 19 nt, Homo sapiens
  misc_RNA (1)...(19): siRNA sense strand
gaugcuggcuuccauaguc

SEQ ID NO: 2134051 - RNA, 19 nt, Homo sapiens
  misc_RNA (1)...(19): siRNA sense strand
caugauggcuaccgcaguu

SEQ ID NO: 2134052 - RNA, 19 nt, Homo sapiens
  misc_RNA (1)...(19): siRNA sense strand
gaucaaaaguguucucugu

SEQ ID NO: 2134053 - RNA, 19 nt, Homo sapiens
  misc_RNA (1)...(19): siRNA sense strand
gagggaaugcgauaaguug

SEQ ID NO: 2134054 - RNA, 19 nt, Homo sapiens
  misc_RNA (1)...(19): siRNA sense strand
gaagucacacagagucauu

SEQ ID NO: 2134055 - RNA, 19 nt, Homo sapiens
  misc_RNA (1)...(19): siRNA sense strand
cguggugccuauuaacaua

SEQ ID NO: 2134056 - RNA, 19 nt, Homo sapiens
  misc_RNA (1)...(19): siRNA sense strand
agaugaagaugaagaaaca

SEQ ID NO: 2134057 - RNA, 19 nt, Homo sapiens
  misc_RNA (1)...(19): siRNA sense strand
gauaaccacggaagcauug

SEQ ID NO: 2134058 - RNA, 19 nt, Homo sapiens
  misc_RNA (1)...(19): siRNA sense strand
uuccugaaaucccgaaaua

SEQ ID NO: 2134059 - RNA, 19 nt, Homo sapiens
  misc_RNA (1)...(19): siRNA sense strand
gaugcugggucgcuguauu

SEQ ID NO: 2134060 - RNA, 19 nt, Homo sapiens
  misc_RNA (1)...(19): siRNA sense strand
acacuaggaagguucaaua

SEQ ID NO: 2134061 - RNA, 19 nt, Homo sapiens
  misc_RNA (1)...(19): siRNA sense strand
agacaugaauggcacuuuc

SEQ ID NO: 2134062 - RNA, 19 nt, Homo sapiens
  misc_RNA (1)...(19): siRNA sense strand
gagcaagggcaaacauuca

SEQ ID NO: 2134063 - RNA, 19 nt, Homo sapiens
  misc_RNA (1)...(19): siRNA sense strand
gcacugagccccauucuuc

SEQ ID NO: 2134064 - RNA, 19 nt, Homo sapiens
  misc_RNA (1)...(19): siRNA sense strand
guagagauucagaugauga

SEQ ID NO: 2134065 - RNA, 19 nt, Homo sapiens
  misc_RNA (1)...(19): siRNA sense strand
caagaagcccaaacuguuc

SEQ ID NO: 2134066 - RNA, 19 nt, Homo sapiens
  misc_RNA (1)...(19): siRNA sense strand
ucuccgaccuuaauacuca

SEQ ID NO: 2134067 - RNA, 19 nt, Homo sapiens
  misc_RNA (1)...(19): siRNA sense strand
caagcagcgucaagucaga

SEQ ID NO: 2134068 - RNA, 19 nt, Homo sapiens
  misc_RNA (1)...(19): siRNA sense strand
cugggucgcuguauucuga

SEQ ID NO: 2134069 - RNA, 19 nt, Homo sapiens
  misc_RNA (1)...(19): siRNA sense strand
ggccaugccaccauucuuu

SEQ ID NO: 2134070 - RNA, 19 nt, Homo sapiens
  misc_RNA (1)...(19): siRNA sense strand
ccaccagcaucaucccaaa

SEQ ID NO: 2134071 - RNA, 19 nt, Homo sapiens
  misc_RNA (1)...(19): siRNA sense strand
gaugaaaacuuaggccauu

SEQ ID NO: 2134072 - RNA, 19 nt, Homo sapiens
  misc_RNA (1)...(19): siRNA sense strand
cagacgaacuggaccaagu

SEQ ID NO: 2134073 - RNA, 19 nt, Homo sapiens
  misc_RNA (1)...(19): siRNA sense strand
gcugacguggugccuauua

SEQ ID NO: 2134074 - RNA, 19 nt, Homo sapiens
  misc_RNA (1)...(19): siRNA sense strand
gggcagcgcucagaaacca

SEQ ID NO: 2134075 - RNA, 19 nt, Homo sapiens
  misc_RNA (1)...(19): siRNA sense strand
ggagcaagggcaaacauuc

SEQ ID NO: 2134076 - RNA, 19 nt, Homo sapiens
  misc_RNA (1)...(19): siRNA sense strand
gaucaugucaccagagaag

SEQ ID NO: 2134077 - RNA, 19 nt, Homo sapiens
  misc_RNA (1)...(19): siRNA sense strand
caaccuagaugaggaaagc

SEQ ID NO: 2134078 - RNA, 19 nt, Homo sapiens
  misc_RNA (1)...(19): siRNA sense strand
ggacuuagacccucauucc

SEQ ID NO: 2134079 - RNA, 19 nt, Homo sapiens
  misc_RNA (1)...(19): siRNA sense strand
gaagaugaagaaacagauc

SEQ ID NO: 2134080 - RNA, 19 nt, Homo sapiens
  misc_RNA (1)...(19): siRNA sense strand
caagaacacagacccuaga

SEQ ID NO: 2134081 - RNA, 19 nt, Homo sapiens
  misc_RNA (1)...(19): siRNA sense strand
caccagcagugacaacuuc

SEQ ID NO: 2134082 - RNA, 19 nt, Homo sapiens
  misc_RNA (1)...(19): siRNA sense strand
gguaccaccuccgcagaaa

SEQ ID NO: 2134083 - RNA, 19 nt, Homo sapiens
  misc_RNA (1)...(19): siRNA sense strand
acaguugucugaacgaaca

SEQ ID NO: 2134084 - RNA, 19 nt, Homo sapiens
  misc_RNA (1)...(19): siRNA sense strand
gcccggugguucagucaaa

SEQ ID NO: 2134085 - RNA, 19 nt, Homo sapiens
  misc_RNA (1)...(19): siRNA sense strand
gcacagcgugaucaauguu

SEQ ID NO: 2134086 - RNA, 19 nt, Homo sapiens
  misc_RNA (1)...(19): siRNA sense strand
aagcuaugccguauaauug

SEQ ID NO: 2134087 - RNA, 19 nt, Homo sapiens
  misc_RNA (1)...(19): siRNA sense strand
ugacucagccgucccucua

SEQ ID NO: 2134088 - RNA, 19 nt, Homo sapiens
  misc_RNA (1)...(19): siRNA sense strand
caucagaagaagaaagauu

SEQ ID NO: 2134089 - RNA, 19 nt, Homo sapiens
  misc_RNA (1)...(19): siRNA sense strand
cuaggaagguucaauagcu

SEQ ID NO: 2134090 - RNA, 19 nt, Homo sapiens
  misc_RNA (1)...(19): siRNA sense strand
aagccaagcucaaccucaa

SEQ ID NO: 2134091 - RNA, 19 nt, Homo sapiens
  misc_RNA (1)...(19): siRNA sense strand
gcuccacaguaccacuuaa

SEQ ID NO: 2134092 - RNA, 19 nt, Homo sapiens
  misc_RNA (1)...(19): siRNA sense strand
auacaaauccucagguaau

SEQ ID NO: 2134093 - RNA, 19 nt, Homo sapiens
  misc_RNA (1)...(19): siRNA sense strand
ugacuucuccgaccuuaau

SEQ ID NO: 2134094 - RNA, 19 nt, Homo sapiens
  misc_RNA (1)...(19): siRNA sense strand
ccguagagauucagaugau

SEQ ID NO: 2134095 - RNA, 19 nt, Homo sapiens
  misc_RNA (1)...(19): siRNA sense strand
gaaaguccucggccguaga

SEQ ID NO: 2134096 - RNA, 19 nt, Homo sapiens
  misc_RNA (1)...(19): siRNA sense strand
acgaacagcucaggaacaa

SEQ ID NO: 2134097 - RNA, 19 nt, Homo sapiens
  misc_RNA (1)...(19): siRNA sense strand
uaaaaguucuggcucauca

SEQ ID NO: 2134098 - RNA, 19 nt, Homo sapiens
  misc_RNA (1)...(19): siRNA sense strand
cgggacagcgggaaaguaa

SEQ ID NO: 2134099 - RNA, 19 nt, Homo sapiens
  misc_RNA (1)...(19): siRNA sense strand
ccagaugggccacuucuca

SEQ ID NO: 2134100 - RNA, 19 nt, Homo sapiens
  misc_RNA (1)...(19): siRNA sense strand
ccaagaugaagaugaagaa

SEQ ID NO: 2134101 - RNA, 19 nt, Homo sapiens
  misc_RNA (1)...(19): siRNA sense strand
acacgggcaugcaggaaga

SEQ ID NO: 2134102 - RNA, 19 nt, Homo sapiens
  misc_RNA (1)...(19): siRNA sense strand
caagagugaaucuaguuau

SEQ ID NO: 2134103 - RNA, 19 nt, Homo sapiens
  misc_RNA (1)...(19): siRNA sense strand
gauaaguugcggcaugaug

SEQ ID NO: 2134104 - RNA, 19 nt, Homo sapiens
  misc_RNA (1)...(19): siRNA sense strand
aaacaccagccucaaguga

SEQ ID NO: 2134105 - RNA, 19 nt, Homo sapiens
  misc_RNA (1)...(19): siRNA sense strand
gcucaaccucaaaucagua

SEQ ID NO: 2134106 - RNA, 19 nt, Homo sapiens
  misc_RNA (1)...(19): siRNA sense strand
gccagaagcucucauuccu

SEQ ID NO: 2134107 - RNA, 19 nt, Homo sapiens
  misc_RNA (1)...(19): siRNA sense strand
uaucuucaguauccauuuc

SEQ ID NO: 2134108 - RNA, 19 nt, Homo sapiens
  misc_RNA (1)...(19): siRNA sense strand
aagaucaugucaccagaga

SEQ ID NO: 2134109 - RNA, 19 nt, Homo sapiens
  misc_RNA (1)...(19): siRNA sense strand
guuauuacauugacuacac

SEQ ID NO: 2134110 - RNA, 19 nt, Homo sapiens
  misc_RNA (1)...(19): siRNA sense strand
agaaacagaucaaaagugu

SEQ ID NO: 2134111 - RNA, 19 nt, Homo sapiens
  misc_RNA (1)...(19): siRNA sense strand
gaucugggaaucugugcaa

SEQ ID NO: 2134112 - RNA, 19 nt, Homo sapiens
  misc_RNA (1)...(19): siRNA sense strand
ccguauaauuguagaaaca

SEQ ID NO: 2134113 - RNA, 19 nt, Homo sapiens
  misc_RNA (1)...(19): siRNA sense strand
ugagggccaugccaccauu

SEQ ID NO: 2134114 - RNA, 19 nt, Homo sapiens
  misc_RNA (1)...(19): siRNA sense strand
ggagugggccaagaacgaa

SEQ ID NO: 2134115 - RNA, 19 nt, Homo sapiens
  misc_RNA (1)...(19): siRNA sense strand
ggaaguccucucugauauc

SEQ ID NO: 2134116 - RNA, 19 nt, Homo sapiens
  misc_RNA (1)...(19): siRNA sense strand
gaugaagaaacagaucaaa

SEQ ID NO: 2134117 - RNA, 19 nt, Homo sapiens
  misc_RNA (1)...(19): siRNA sense strand
gaaggaagauuguaacaua

SEQ ID NO: 2134118 - RNA, 19 nt, Homo sapiens
  misc_RNA (1)...(19): siRNA sense strand
gaauguggaucacgagguu

SEQ ID NO: 2134119 - RNA, 19 nt, Homo sapiens
  misc_RNA (1)...(19): siRNA sense strand
ggaggaaauucaucguuug

SEQ ID NO: 2134120 - RNA, 19 nt, Homo sapiens
  misc_RNA (1)...(19): siRNA sense strand
gaaguuuggccuuggauuu

SEQ ID NO: 2134121 - RNA, 19 nt, Homo sapiens
  misc_RNA (1)...(19): siRNA sense strand
gaaaguuaagcgugaaauu

SEQ ID NO: 2134122 - RNA, 19 nt, Homo sapiens
  misc_RNA (1)...(19): siRNA sense strand
gcgcagaaacacuuacuuu

SEQ ID NO: 2134123 - RNA, 19 nt, Homo sapiens
  misc_RNA (1)...(19): siRNA sense strand
gguaggaacucuuaaagcu

SEQ ID NO: 2134124 - RNA, 19 nt, Homo sapiens
  misc_RNA (1)...(19): siRNA sense strand
gcagagaggcagcaaugaa

SEQ ID NO: 2134125 - RNA, 19 nt, Homo sapiens
  misc_RNA (1)...(19): siRNA sense strand
uaaaugugccaaccucuuu

SEQ ID NO: 2134126 - RNA, 19 nt, Homo sapiens
  misc_RNA (1)...(19): siRNA sense strand
aaacgaaggaagauuguaa

SEQ ID NO: 2134127 - RNA, 19 nt, Homo sapiens
  misc_RNA (1)...(19): siRNA sense strand
caaccucuuugaagcauug

SEQ ID NO: 2134128 - RNA, 19 nt, Homo sapiens
  misc_RNA (1)...(19): siRNA sense strand
uggaggaaauucaucguuu

SEQ ID NO: 2134129 - RNA, 19 nt, Homo sapiens
  misc_RNA (1)...(19): siRNA sense strand
aaaugcugauggaaaguua

SEQ ID NO: 2134130 - RNA, 19 nt, Homo sapiens
  misc_RNA (1)...(19): siRNA sense strand
gcauugguaggaacucuua

SEQ ID NO: 2134131 - RNA, 19 nt, Homo sapiens
  misc_RNA (1)...(19): siRNA sense strand
ggucaccucugcuuuguac

SEQ ID NO: 2134132 - RNA, 19 nt, Homo sapiens
  misc_RNA (1)...(19): siRNA sense strand
ccacagccgucuuucucuu

SEQ ID NO: 2134133 - RNA, 19 nt, Homo sapiens
  misc_RNA (1)...(19): siRNA sense strand
ccucuuccgugaugauaaa

SEQ ID NO: 2134134 - RNA, 19 nt, Homo sapiens
  misc_RNA (1)...(19): siRNA sense strand
gcgcagagaggcagcaaug

SEQ ID NO: 2134135 - RNA, 19 nt, Homo sapiens
  misc_RNA (1)...(19): siRNA sense strand
gcaaaacgaaggaagauug

SEQ ID NO: 2134136 - RNA, 19 nt, Homo sapiens
  misc_RNA (1)...(19): siRNA sense strand
gagcuggcacugaaguuug

SEQ ID NO: 2134137 - RNA, 19 nt, Homo sapiens
  misc_RNA (1)...(19): siRNA sense strand
ggaagauuguaacauaucc

SEQ ID NO: 2134138 - RNA, 19 nt, Homo sapiens
  misc_RNA (1)...(19): siRNA sense strand
gagaggcagcaaugaaugu

SEQ ID NO: 2134139 - RNA, 19 nt, Homo sapiens
  misc_RNA (1)...(19): siRNA sense strand
cagagaggcagcaaugaau

SEQ ID NO: 2134140 - RNA, 19 nt, Homo sapiens
  misc_RNA (1)...(19): siRNA sense strand
aaguuaagcgugaaauuug

SEQ ID NO: 2134141 - RNA, 19 nt, Homo sapiens
  misc_RNA (1)...(19): siRNA sense strand
ggaaaguuaagcgugaaau

SEQ ID NO: 2134142 - RNA, 19 nt, Homo sapiens
  misc_RNA (1)...(19): siRNA sense strand
acagccgucuuucucuuug

SEQ ID NO: 2134143 - RNA, 19 nt, Homo sapiens
  misc_RNA (1)...(19): siRNA sense strand
gaacucuuaaagcugcaaa

SEQ ID NO: 2134144 - RNA, 19 nt, Homo sapiens
  misc_RNA (1)...(19): siRNA sense strand
gaggaaauucaucguuugg

SEQ ID NO: 2134145 - RNA, 19 nt, Homo sapiens
  misc_RNA (1)...(19): siRNA sense strand
cagcaaugaauguggauca

SEQ ID NO: 2134146 - RNA, 19 nt, Homo sapiens
  misc_RNA (1)...(19): siRNA sense strand
ucugcaagguguucaugau

SEQ ID NO: 2134147 - RNA, 19 nt, Homo sapiens
  misc_RNA (1)...(19): siRNA sense strand
cuuccgugaugauaaaugu

SEQ ID NO: 2134148 - RNA, 19 nt, Homo sapiens
  misc_RNA (1)...(19): siRNA sense strand
gccaaccucuuugaagcau

SEQ ID NO: 2134149 - RNA, 19 nt, Homo sapiens
  misc_RNA (1)...(19): siRNA sense strand
ucuuaaagcugcaaaacga

SEQ ID NO: 2134150 - RNA, 19 nt, Homo sapiens
  misc_RNA (1)...(19): siRNA sense strand
ccucuuugaagcauuggua

SEQ ID NO: 2134151 - RNA, 19 nt, Homo sapiens
  misc_RNA (1)...(19): siRNA sense strand
cacagccgucuuucucuuu

SEQ ID NO: 2134152 - RNA, 19 nt, Homo sapiens
  misc_RNA (1)...(19): siRNA sense strand
caccucugcuuuguacaug

SEQ ID NO: 2134153 - RNA, 19 nt, Homo sapiens
  misc_RNA (1)...(19): siRNA sense strand
gaagagagaugacacguuu

SEQ ID NO: 2134154 - RNA, 19 nt, Homo sapiens
  misc_RNA (1)...(19): siRNA sense strand
ggaaugaccuggaaaauua

SEQ ID NO: 2134155 - RNA, 19 nt, Homo sapiens
  misc_RNA (1)...(19): siRNA sense strand
ggacuuauguacaagauuu

SEQ ID NO: 2134156 - RNA, 19 nt, Homo sapiens
  misc_RNA (1)...(19): siRNA sense strand
gugaagaguuccacauuua

SEQ ID NO: 2134157 - RNA, 19 nt, Homo sapiens
  misc_RNA (1)...(19): siRNA sense strand
cgaaaggacuuauguacaa

SEQ ID NO: 2134158 - RNA, 19 nt, Homo sapiens
  misc_RNA (1)...(19): siRNA sense strand
ggaaagggaucagcgcuaa

SEQ ID NO: 2134159 - RNA, 19 nt, Homo sapiens
  misc_RNA (1)...(19): siRNA sense strand
caccauaucugacaccaua

SEQ ID NO: 2134160 - RNA, 19 nt, Homo sapiens
  misc_RNA (1)...(19): siRNA sense strand
caagauaucccacguuuga

SEQ ID NO: 2134161 - RNA, 19 nt, Homo sapiens
  misc_RNA (1)...(19): siRNA sense strand
ggauagaguuguucaggaa

SEQ ID NO: 2134162 - RNA, 19 nt, Homo sapiens
  misc_RNA (1)...(19): siRNA sense strand
gagaugacacguuuacaua

SEQ ID NO: 2134163 - RNA, 19 nt, Homo sapiens
  misc_RNA (1)...(19): siRNA sense strand
gaagaguuccacauuuaua

SEQ ID NO: 2134164 - RNA, 19 nt, Homo sapiens
  misc_RNA (1)...(19): siRNA sense strand
aggaagaccugauuucuaa

SEQ ID NO: 2134165 - RNA, 19 nt, Homo sapiens
  misc_RNA (1)...(19): siRNA sense strand
gaagaugacuauguggaaa

SEQ ID NO: 2134166 - RNA, 19 nt, Homo sapiens
  misc_RNA (1)...(19): siRNA sense strand
gaaugaggaugaugaagau

SEQ ID NO: 2134167 - RNA, 19 nt, Homo sapiens
  misc_RNA (1)...(19): siRNA sense strand
cacaugcccuccugaaaua

SEQ ID NO: 2134168 - RNA, 19 nt, Homo sapiens
  misc_RNA (1)...(19): siRNA sense strand
gaaaucugacucaaaguuu

SEQ ID NO: 2134169 - RNA, 19 nt, Homo sapiens
  misc_RNA (1)...(19): siRNA sense strand
gagacuggcuucugcauuc

SEQ ID NO: 2134170 - RNA, 19 nt, Homo sapiens
  misc_RNA (1)...(19): siRNA sense strand
caaagagacugauggagau

SEQ ID NO: 2134171 - RNA, 19 nt, Homo sapiens
  misc_RNA (1)...(19): siRNA sense strand
ggccagaccugaccagcua

SEQ ID NO: 2134172 - RNA, 19 nt, Homo sapiens
  misc_RNA (1)...(19): siRNA sense strand
gguggucaauagaaauuua

SEQ ID NO: 2134173 - RNA, 19 nt, Homo sapiens
  misc_RNA (1)...(19): siRNA sense strand
ggagaggcauccagccaaa

SEQ ID NO: 2134174 - RNA, 19 nt, Homo sapiens
  misc_RNA (1)...(19): siRNA sense strand
gaaggaaaucugacucaaa

SEQ ID NO: 2134175 - RNA, 19 nt, Homo sapiens
  misc_RNA (1)...(19): siRNA sense strand
gaucaugguuaucugaguu

SEQ ID NO: 2134176 - RNA, 19 nt, Homo sapiens
  misc_RNA (1)...(19): siRNA sense strand
ggaaaucaagucagaagaa

SEQ ID NO: 2134177 - RNA, 19 nt, Homo sapiens
  misc_RNA (1)...(19): siRNA sense strand
gcuaugauguggugcuuga

SEQ ID NO: 2134178 - RNA, 19 nt, Homo sapiens
  misc_RNA (1)...(19): siRNA sense strand
agaaauccaugcacaaaga

SEQ ID NO: 2134179 - RNA, 19 nt, Homo sapiens
  misc_RNA (1)...(19): siRNA sense strand
ggauggaggccacagauaa

SEQ ID NO: 2134180 - RNA, 19 nt, Homo sapiens
  misc_RNA (1)...(19): siRNA sense strand
gaguuagccuucacaaaga

SEQ ID NO: 2134181 - RNA, 19 nt, Homo sapiens
  misc_RNA (1)...(19): siRNA sense strand
cagccaagauuccagcuaa

SEQ ID NO: 2134182 - RNA, 19 nt, Homo sapiens
  misc_RNA (1)...(19): siRNA sense strand
ggaaaucugacucaaaguu

SEQ ID NO: 2134183 - RNA, 19 nt, Homo sapiens
  misc_RNA (1)...(19): siRNA sense strand
uaaacuguccgaagaagua

SEQ ID NO: 2134184 - RNA, 19 nt, Homo sapiens
  misc_RNA (1)...(19): siRNA sense strand
gaaaucaagucagaagaag

SEQ ID NO: 2134185 - RNA, 19 nt, Homo sapiens
  misc_RNA (1)...(19): siRNA sense strand
acaagauacuggccaaauu

SEQ ID NO: 2134186 - RNA, 19 nt, Homo sapiens
  misc_RNA (1)...(19): siRNA sense strand
uaagucagcccaacaaaga

SEQ ID NO: 2134187 - RNA, 19 nt, Homo sapiens
  misc_RNA (1)...(19): siRNA sense strand
gucaagauaucccacguuu

SEQ ID NO: 2134188 - RNA, 19 nt, Homo sapiens
  misc_RNA (1)...(19): siRNA sense strand
gaaggcgaaucaacuuuua

SEQ ID NO: 2134189 - RNA, 19 nt, Homo sapiens
  misc_RNA (1)...(19): siRNA sense strand
auacagaguuugcucacua

SEQ ID NO: 2134190 - RNA, 19 nt, Homo sapiens
  misc_RNA (1)...(19): siRNA sense strand
gaggaagaccugauuucua

SEQ ID NO: 2134191 - RNA, 19 nt, Homo sapiens
  misc_RNA (1)...(19): siRNA sense strand
gugaacuucugcaagauuu

SEQ ID NO: 2134192 - RNA, 19 nt, Homo sapiens
  misc_RNA (1)...(19): siRNA sense strand
gcaguacagucagaagauu

SEQ ID NO: 2134193 - RNA, 19 nt, Homo sapiens
  misc_RNA (1)...(19): siRNA sense strand
caucaguuaugaggacuua

SEQ ID NO: 2134194 - RNA, 19 nt, Homo sapiens
  misc_RNA (1)...(19): siRNA sense strand
gaaauaggaacuagugaca

SEQ ID NO: 2134195 - RNA, 19 nt, Homo sapiens
  misc_RNA (1)...(19): siRNA sense strand
gaugacacguuuacauaca

SEQ ID NO: 2134196 - RNA, 19 nt, Homo sapiens
  misc_RNA (1)...(19): siRNA sense strand
gaaugaccuuaguuucaaa

SEQ ID NO: 2134197 - RNA, 19 nt, Homo sapiens
  misc_RNA (1)...(19): siRNA sense strand
gcauaucaaugacaugaag

SEQ ID NO: 2134198 - RNA, 19 nt, Homo sapiens
  misc_RNA (1)...(19): siRNA sense strand
gcagagaugcagcguggua

SEQ ID NO: 2134199 - RNA, 19 nt, Homo sapiens
  misc_RNA (1)...(19): siRNA sense strand
ccaguuguaugaccagauu

SEQ ID NO: 2134200 - RNA, 19 nt, Homo sapiens
  misc_RNA (1)...(19): siRNA sense strand
uacaggagauacagaguuu

SEQ ID NO: 2134201 - RNA, 19 nt, Homo sapiens
  misc_RNA (1)...(19): siRNA sense strand
cuauaguaauggagaguua

SEQ ID NO: 2134202 - RNA, 19 nt, Homo sapiens
  misc_RNA (1)...(19): siRNA sense strand
uaacagaguguaugaggaa

SEQ ID NO: 2134203 - RNA, 19 nt, Homo sapiens
  misc_RNA (1)...(19): siRNA sense strand
caaacugaaugacuaucuu

SEQ ID NO: 2134204 - RNA, 19 nt, Homo sapiens
  misc_RNA (1)...(19): siRNA sense strand
gaaccaugcagccaagauu

SEQ ID NO: 2134205 - RNA, 19 nt, Homo sapiens
  misc_RNA (1)...(19): siRNA sense strand
gaaaccaguucagcggauu

SEQ ID NO: 2134206 - RNA, 19 nt, Homo sapiens
  misc_RNA (1)...(19): siRNA sense strand
gaggcaagcuggccacagu

SEQ ID NO: 2134207 - RNA, 19 nt, Homo sapiens
  misc_RNA (1)...(19): siRNA sense strand
ugaauccacucccucuaaa

SEQ ID NO: 2134208 - RNA, 19 nt, Homo sapiens
  misc_RNA (1)...(19): siRNA sense strand
cagcaaacuuggccuuuca

SEQ ID NO: 2134209 - RNA, 19 nt, Homo sapiens
  misc_RNA (1)...(19): siRNA sense strand
gcgcuaaaucucagccuua

SEQ ID NO: 2134210 - RNA, 19 nt, Homo sapiens
  misc_RNA (1)...(19): siRNA sense strand
gaaaggacuuauguacaag

SEQ ID NO: 2134211 - RNA, 19 nt, Homo sapiens
  misc_RNA (1)...(19): siRNA sense strand
gagaugaagaugacuaugu

SEQ ID NO: 2134212 - RNA, 19 nt, Homo sapiens
  misc_RNA (1)...(19): siRNA sense strand
cugauaaacuguccgaaga

SEQ ID NO: 2134213 - RNA, 19 nt, Homo sapiens
  misc_RNA (1)...(19): siRNA sense strand
agaaugaccuuaguuucaa

SEQ ID NO: 2134214 - RNA, 19 nt, Homo sapiens
  misc_RNA (1)...(19): siRNA sense strand
cauaucggcugagaagaaa

SEQ ID NO: 2134215 - RNA, 19 nt, Homo sapiens
  misc_RNA (1)...(19): siRNA sense strand
auagugaacuucugcaaga

SEQ ID NO: 2134216 - RNA, 19 nt, Homo sapiens
  misc_RNA (1)...(19): siRNA sense strand
caggauaucuaccacuuca

SEQ ID NO: 2134217 - RNA, 19 nt, Homo sapiens
  misc_RNA (1)...(19): siRNA sense strand
gaaacauacaggauaucua

SEQ ID NO: 2134218 - RNA, 19 nt, Homo sapiens
  misc_RNA (1)...(19): siRNA sense strand
cagcuucgguuccacauca

SEQ ID NO: 2134219 - RNA, 19 nt, Homo sapiens
  misc_RNA (1)...(19): siRNA sense strand
gaacuagggaacugcagaa

SEQ ID NO: 2134220 - RNA, 19 nt, Homo sapiens
  misc_RNA (1)...(19): siRNA sense strand
aauaggaacuagugacaga

SEQ ID NO: 2134221 - RNA, 19 nt, Homo sapiens
  misc_RNA (1)...(19): siRNA sense strand
gaccaugucuaugauaaca

SEQ ID NO: 2134222 - RNA, 19 nt, Homo sapiens
  misc_RNA (1)...(19): siRNA sense strand
aaggaaaucugacucaaag

SEQ ID NO: 2134223 - RNA, 19 nt, Homo sapiens
  misc_RNA (1)...(19): siRNA sense strand
ggagcuaucucacaaucgu

SEQ ID NO: 2134224 - RNA, 19 nt, Homo sapiens
  misc_RNA (1)...(19): siRNA sense strand
cagaaugaccuuaguuuca

SEQ ID NO: 2134225 - RNA, 19 nt, Homo sapiens
  misc_RNA (1)...(19): siRNA sense strand
gaaauucuggaaaccgaaa

SEQ ID NO: 2134226 - RNA, 19 nt, Homo sapiens
  misc_RNA (1)...(19): siRNA sense strand
guuuguggaugcugacuuu

SEQ ID NO: 2134227 - RNA, 19 nt, Homo sapiens
  misc_RNA (1)...(19): siRNA sense strand
gugccaggauugcugagua

SEQ ID NO: 2134228 - RNA, 19 nt, Homo sapiens
  misc_RNA (1)...(19): siRNA sense strand
gaggagaacaucuaugaca

SEQ ID NO: 2134229 - RNA, 19 nt, Homo sapiens
  misc_RNA (1)...(19): siRNA sense strand
ggacacagaaggcuaugau

SEQ ID NO: 2134230 - RNA, 19 nt, Homo sapiens
  misc_RNA (1)...(19): siRNA sense strand
cgagucgccuggcauauca

SEQ ID NO: 2134231 - RNA, 19 nt, Homo sapiens
  misc_RNA (1)...(19): siRNA sense strand
cugacaaacugaaugacua

SEQ ID NO: 2134232 - RNA, 19 nt, Homo sapiens
  misc_RNA (1)...(19): siRNA sense strand
ccgaagaaguagaugaaau

SEQ ID NO: 2134233 - RNA, 19 nt, Homo sapiens
  misc_RNA (1)...(19): siRNA sense strand
gauaaacuguccgaagaag

SEQ ID NO: 2134234 - RNA, 19 nt, Homo sapiens
  misc_RNA (1)...(19): siRNA sense strand
uaucugaguuugcuguaug

SEQ ID NO: 2134235 - RNA, 19 nt, Homo sapiens
  misc_RNA (1)...(19): siRNA sense strand
gauaucuaccacuucaaua

SEQ ID NO: 2134236 - RNA, 19 nt, Homo sapiens
  misc_RNA (1)...(19): siRNA sense strand
gaugcugacuuuucugaua

SEQ ID NO: 2134237 - RNA, 19 nt, Homo sapiens
  misc_RNA (1)...(19): siRNA sense strand
cuaaaucucagccuuauca

SEQ ID NO: 2134238 - RNA, 19 nt, Homo sapiens
  misc_RNA (1)...(19): siRNA sense strand
acaguaagggcucucuuua

SEQ ID NO: 2134239 - RNA, 19 nt, Homo sapiens
  misc_RNA (1)...(19): siRNA sense strand
caagagcaccccagaguua

SEQ ID NO: 2134240 - RNA, 19 nt, Homo sapiens
  misc_RNA (1)...(19): siRNA sense strand
ugacagaacuagggaacug

SEQ ID NO: 2134241 - RNA, 19 nt, Homo sapiens
  misc_RNA (1)...(19): siRNA sense strand
cauccaggcuucuguuaca

SEQ ID NO: 2134242 - RNA, 19 nt, Homo sapiens
  misc_RNA (1)...(19): siRNA sense strand
caagauacuggccaaauuc

SEQ ID NO: 2134243 - RNA, 19 nt, Homo sapiens
  misc_RNA (1)...(19): siRNA sense strand
ggaaaacugugaaaaugau

SEQ ID NO: 2134244 - RNA, 19 nt, Homo sapiens
  misc_RNA (1)...(19): siRNA sense strand
uaaccaggauaaggaggua

SEQ ID NO: 2134245 - RNA, 19 nt, Homo sapiens
  misc_RNA (1)...(19): siRNA sense strand
ccuagcaguucuaccauga

SEQ ID NO: 2134246 - RNA, 19 nt, Homo sapiens
  misc_RNA (1)...(19): siRNA sense strand
gauacuggccaaauucuuc

SEQ ID NO: 2134247 - RNA, 19 nt, Homo sapiens
  misc_RNA (1)...(19): siRNA sense strand
uaucugacaccauauaaug

SEQ ID NO: 2134248 - RNA, 19 nt, Homo sapiens
  misc_RNA (1)...(19): siRNA sense strand
gcagaaugaccuuaguuuc

SEQ ID NO: 2134249 - RNA, 19 nt, Homo sapiens
  misc_RNA (1)...(19): siRNA sense strand
uaagaaggcgaaucaacuu

SEQ ID NO: 2134250 - RNA, 19 nt, Homo sapiens
  misc_RNA (1)...(19): siRNA sense strand
gaacucuaccagacuaugu

SEQ ID NO: 2134251 - RNA, 19 nt, Homo sapiens
  misc_RNA (1)...(19): siRNA sense strand
ugaaacagcacaagacauc

SEQ ID NO: 2134252 - RNA, 19 nt, Homo sapiens
  misc_RNA (1)...(19): siRNA sense strand
caacacaugcccuccugaa

SEQ ID NO: 2134253 - RNA, 19 nt, Homo sapiens
  misc_RNA (1)...(19): siRNA sense strand
caaagaaaguggagaagug

SEQ ID NO: 2134254 - RNA, 19 nt, Homo sapiens
  misc_RNA (1)...(19): siRNA sense strand
gcagagacuugaccagcua

SEQ ID NO: 2134255 - RNA, 19 nt, Homo sapiens
  misc_RNA (1)...(19): siRNA sense strand
caacugaauucaccgaaga

SEQ ID NO: 2134256 - RNA, 19 nt, Homo sapiens
  misc_RNA (1)...(19): siRNA sense strand
gcaacuauguggaggucua

SEQ ID NO: 2134257 - RNA, 19 nt, Homo sapiens
  misc_RNA (1)...(19): siRNA sense strand
caccgaagauguagaagaa

SEQ ID NO: 2134258 - RNA, 19 nt, Homo sapiens
  misc_RNA (1)...(19): siRNA sense strand
ggucagcgauggccugcua

SEQ ID NO: 2134259 - RNA, 19 nt, Homo sapiens
  misc_RNA (1)...(19): siRNA sense strand
ccgcagagcucaagcagau

SEQ ID NO: 2134260 - RNA, 19 nt, Homo sapiens
  misc_RNA (1)...(19): siRNA sense strand
gaggugagccgcaucaaga

SEQ ID NO: 2134261 - RNA, 19 nt, Homo sapiens
  misc_RNA (1)...(19): siRNA sense strand
ugaauucaccgaagaugua

SEQ ID NO: 2134262 - RNA, 19 nt, Homo sapiens
  misc_RNA (1)...(19): siRNA sense strand
uguacgagcucuuugagaa

SEQ ID NO: 2134263 - RNA, 19 nt, Homo sapiens
  misc_RNA (1)...(19): siRNA sense strand
ggucgccgcuccaagaaga

SEQ ID NO: 2134264 - RNA, 19 nt, Homo sapiens
  misc_RNA (1)...(19): siRNA sense strand
gcaacuacacggagaucua

SEQ ID NO: 2134265 - RNA, 19 nt, Homo sapiens
  misc_RNA (1)...(19): siRNA sense strand
acaagaagccucuguaugg

SEQ ID NO: 2134266 - RNA, 19 nt, Homo sapiens
  misc_RNA (1)...(19): siRNA sense strand
gaggaggcccugucucuug

SEQ ID NO: 2134267 - RNA, 19 nt, Homo sapiens
  misc_RNA (1)...(19): siRNA sense strand
caacaucuacuuccugauc

SEQ ID NO: 2134268 - RNA, 19 nt, Homo sapiens
  misc_RNA (1)...(19): siRNA sense strand
caagaaagcaaagaaagug

SEQ ID NO: 2134269 - RNA, 19 nt, Homo sapiens
  misc_RNA (1)...(19): siRNA sense strand
ggagacagaggcugaagau

SEQ ID NO: 2134270 - RNA, 19 nt, Homo sapiens
  misc_RNA (1)...(19): siRNA sense strand
ccaggucgccagcuucuuu

SEQ ID NO: 2134271 - RNA, 19 nt, Homo sapiens
  misc_RNA (1)...(19): siRNA sense strand
gcagcaccaucgccucaga

SEQ ID NO: 2134272 - RNA, 19 nt, Homo sapiens
  misc_RNA (1)...(19): siRNA sense strand
acaagaucauggagaagaa

SEQ ID NO: 2134273 - RNA, 19 nt, Homo sapiens
  misc_RNA (1)...(19): siRNA sense strand
uauggcaucucgcacaaga

SEQ ID NO: 2134274 - RNA, 19 nt, Homo sapiens
  misc_RNA (1)...(19): siRNA sense strand
gacagaggcugaagaugcu

SEQ ID NO: 2134275 - RNA, 19 nt, Homo sapiens
  misc_RNA (1)...(19): siRNA sense strand
gaccagcuaugcaaucaac

SEQ ID NO: 2134276 - RNA, 19 nt, Homo sapiens
  misc_RNA (1)...(19): siRNA sense strand
gagaucuacuucccugaca

SEQ ID NO: 2134277 - RNA, 19 nt, Homo sapiens
  misc_RNA (1)...(19): siRNA sense strand
caagcugggugaacaguac

SEQ ID NO: 2134278 - RNA, 19 nt, Homo sapiens
  misc_RNA (1)...(19): siRNA sense strand
ugaacacccucacguccaa

SEQ ID NO: 2134279 - RNA, 19 nt, Homo sapiens
  misc_RNA (1)...(19): siRNA sense strand
gcaaagaaaguggagaagu

SEQ ID NO: 2134280 - RNA, 19 nt, Homo sapiens
  misc_RNA (1)...(19): siRNA sense strand
ccgaagauguagaagaagu

SEQ ID NO: 2134281 - RNA, 19 nt, Homo sapiens
  misc_RNA (1)...(19): siRNA sense strand
gcaagcugggugaacagua

SEQ ID NO: 2134282 - RNA, 19 nt, Homo sapiens
  misc_RNA (1)...(19): siRNA sense strand
cgcacaagaucauggagaa

SEQ ID NO: 2134283 - RNA, 19 nt, Homo sapiens
  misc_RNA (1)...(19): siRNA sense strand
gagaggaggagcccugcaa

SEQ ID NO: 2134284 - RNA, 19 nt, Homo sapiens
  misc_RNA (1)...(19): siRNA sense strand
ggaggagcccugcaacgau

SEQ ID NO: 2134285 - RNA, 19 nt, Homo sapiens
  misc_RNA (1)...(19): siRNA sense strand
cugagaugguggccaaauu

SEQ ID NO: 2134286 - RNA, 19 nt, Homo sapiens
  misc_RNA (1)...(19): siRNA sense strand
cacugcggcuccugaauga

SEQ ID NO: 2134287 - RNA, 19 nt, Homo sapiens
  misc_RNA (1)...(19): siRNA sense strand
acaaggaggugcgugagau

SEQ ID NO: 2134288 - RNA, 19 nt, Homo sapiens
  misc_RNA (1)...(19): siRNA sense strand
ucaagaaagcaaagaaagu

SEQ ID NO: 2134289 - RNA, 19 nt, Homo sapiens
  misc_RNA (1)...(19): siRNA sense strand
aaugcgacauccucaagaa

SEQ ID NO: 2134290 - RNA, 19 nt, Homo sapiens
  misc_RNA (1)...(19): siRNA sense strand
aaacguguacgagcucuuu

SEQ ID NO: 2134291 - RNA, 19 nt, Homo sapiens
  misc_RNA (1)...(19): siRNA sense strand
aaagaaaguggagaaguga

SEQ ID NO: 2134292 - RNA, 19 nt, Homo sapiens
  misc_RNA (1)...(19): siRNA sense strand
uggaggagguguggcacua

SEQ ID NO: 2134293 - RNA, 19 nt, Homo sapiens
  misc_RNA (1)...(19): siRNA sense strand
gaagauguagaagaaguuc

SEQ ID NO: 2134294 - RNA, 19 nt, Homo sapiens
  misc_RNA (1)...(19): siRNA sense strand
ucacugcggcuccugaaug

SEQ ID NO: 2134295 - RNA, 19 nt, Homo sapiens
  misc_RNA (1)...(19): siRNA sense strand
gcaggacuccagcaaacga

SEQ ID NO: 2134296 - RNA, 19 nt, Homo sapiens
  misc_RNA (1)...(19): siRNA sense strand
gaucuacuucccugacaug

SEQ ID NO: 2134297 - RNA, 19 nt, Homo sapiens
  misc_RNA (1)...(19): siRNA sense strand
ugaauuccaggacuucuga

SEQ ID NO: 2134298 - RNA, 19 nt, Homo sapiens
  misc_RNA (1)...(19): siRNA sense strand
gggaccugcuaaacgugua

SEQ ID NO: 2134299 - RNA, 19 nt, Homo sapiens
  misc_RNA (1)...(19): siRNA sense strand
gagcagcuacgcagcaucu

SEQ ID NO: 2134300 - RNA, 19 nt, Homo sapiens
  misc_RNA (1)...(19): siRNA sense strand
aggaggcccugucucuuga

SEQ ID NO: 2134301 - RNA, 19 nt, Homo sapiens
  misc_RNA (1)...(19): siRNA sense strand
ccucaagaaagcaaagaaa

SEQ ID NO: 2134302 - RNA, 19 nt, Homo sapiens
  misc_RNA (1)...(19): siRNA sense strand
ggagguguggcacuacgaa

SEQ ID NO: 2134303 - RNA, 19 nt, Homo sapiens
  misc_RNA (1)...(19): siRNA sense strand
gcagaucauccgcaacuac

SEQ ID NO: 2134304 - RNA, 19 nt, Homo sapiens
  misc_RNA (1)...(19): siRNA sense strand
cucccuaccugcugucuga

SEQ ID NO: 2134305 - RNA, 19 nt, Homo sapiens
  misc_RNA (1)...(19): siRNA sense strand
gaucauggagaagaagaau

SEQ ID NO: 2134306 - RNA, 19 nt, Homo sapiens
  misc_RNA (1)...(19): siRNA sense strand
aagcaaagaaaguggagaa

SEQ ID NO: 2134307 - RNA, 19 nt, Homo sapiens
  misc_RNA (1)...(19): siRNA sense strand
gccacuuccuggacaacaa

SEQ ID NO: 2134308 - RNA, 19 nt, Homo sapiens
  misc_RNA (1)...(19): siRNA sense strand
cgaagauguagaagaaguu

SEQ ID NO: 2134309 - RNA, 19 nt, Homo sapiens
  misc_RNA (1)...(19): siRNA sense strand
gcuccucguccgccuguuu

SEQ ID NO: 2134310 - RNA, 19 nt, Homo sapiens
  misc_RNA (1)...(19): siRNA sense strand
gaggagcagcaaggacuuu

SEQ ID NO: 2134311 - RNA, 19 nt, Homo sapiens
  misc_RNA (1)...(19): siRNA sense strand
gcucuacccacgcgccaaa

SEQ ID NO: 2134312 - RNA, 19 nt, Homo sapiens
  misc_RNA (1)...(19): siRNA sense strand
cagcucauccgcaacuaug

SEQ ID NO: 2134313 - RNA, 19 nt, Homo sapiens
  misc_RNA (1)...(19): siRNA sense strand
ugagaugguggccaaauuc

SEQ ID NO: 2134314 - RNA, 19 nt, Homo sapiens
  misc_RNA (1)...(19): siRNA sense strand
cacaagaucauggagaaga

SEQ ID NO: 2134315 - RNA, 19 nt, Homo sapiens
  misc_RNA (1)...(19): siRNA sense strand
gacaaggaggugcgugaga

SEQ ID NO: 2134316 - RNA, 19 nt, Homo sapiens
  misc_RNA (1)...(19): siRNA sense strand
ggaggaggcccugucucuu

SEQ ID NO: 2134317 - RNA, 19 nt, Homo sapiens
  misc_RNA (1)...(19): siRNA sense strand
ccacuuccuggacaacaaa

SEQ ID NO: 2134318 - RNA, 19 nt, Homo sapiens
  misc_RNA (1)...(19): siRNA sense strand
gggcaggcacugacaacga

SEQ ID NO: 2134319 - RNA, 19 nt, Homo sapiens
  misc_RNA (1)...(19): siRNA sense strand
acacgcaggaccucacuga

SEQ ID NO: 2134320 - RNA, 19 nt, Homo sapiens
  misc_RNA (1)...(19): siRNA sense strand
gguguggcacuacgaaugu

SEQ ID NO: 2134321 - RNA, 19 nt, Homo sapiens
  misc_RNA (1)...(19): siRNA sense strand
uguauggcaucucgcacaa

SEQ ID NO: 2134322 - RNA, 19 nt, Homo sapiens
  misc_RNA (1)...(19): siRNA sense strand
cggcugcaguacaaccauu

SEQ ID NO: 2134323 - RNA, 19 nt, Homo sapiens
  misc_RNA (1)...(19): siRNA sense strand
ucaccgaagauguagaaga

SEQ ID NO: 2134324 - RNA, 19 nt, Homo sapiens
  misc_RNA (1)...(19): siRNA sense strand
gcagcucauccgcaacuau

SEQ ID NO: 2134325 - RNA, 19 nt, Homo sapiens
  misc_RNA (1)...(19): siRNA sense strand
cugcagugccuguggcuuu

SEQ ID NO: 2134326 - RNA, 19 nt, Homo sapiens
  misc_RNA (1)...(19): siRNA sense strand
ucuacuuccugauccagaa

SEQ ID NO: 2134327 - RNA, 19 nt, Homo sapiens
  misc_RNA (1)...(19): siRNA sense strand
caacuacacggagaucuac

SEQ ID NO: 2134328 - RNA, 19 nt, Homo sapiens
  misc_RNA (1)...(19): siRNA sense strand
cagaucauccgcaacuaca

SEQ ID NO: 2134329 - RNA, 19 nt, Homo sapiens
  misc_RNA (1)...(19): siRNA sense strand
cugcaggacuccagcaaac

SEQ ID NO: 2134330 - RNA, 19 nt, Homo sapiens
  misc_RNA (1)...(19): siRNA sense strand
guacgagcucuuugagaag

SEQ ID NO: 2134331 - RNA, 19 nt, Homo sapiens
  misc_RNA (1)...(19): siRNA sense strand
gcgacauccucaagaaagc

SEQ ID NO: 2134332 - RNA, 19 nt, Homo sapiens
  misc_RNA (1)...(19): siRNA sense strand
gaagaggaggcggcugauc

SEQ ID NO: 2134333 - RNA, 19 nt, Homo sapiens
  misc_RNA (1)...(19): siRNA sense strand
gcucauccgcaacuaugug

SEQ ID NO: 2134334 - RNA, 19 nt, Homo sapiens
  misc_RNA (1)...(19): siRNA sense strand
gaauucaccgaagauguag

SEQ ID NO: 2134335 - RNA, 19 nt, Homo sapiens
  misc_RNA (1)...(19): siRNA sense strand
guguggcacuacgaaugua

SEQ ID NO: 2134336 - RNA, 19 nt, Homo sapiens
  misc_RNA (1)...(19): siRNA sense strand
cgacaucucaguggucaag

SEQ ID NO: 2134337 - RNA, 19 nt, Homo sapiens
  misc_RNA (1)...(19): siRNA sense strand
gacuugaccagcuaugcaa

SEQ ID NO: 2134338 - RNA, 19 nt, Homo sapiens
  misc_RNA (1)...(19): siRNA sense strand
gaagaaagauuccaagaaa

SEQ ID NO: 2134339 - RNA, 19 nt, Homo sapiens
  misc_RNA (1)...(19): siRNA sense strand
caagaaagaugacaagaaa

SEQ ID NO: 2134340 - RNA, 19 nt, Homo sapiens
  misc_RNA (1)...(19): siRNA sense strand
gaaaccagcucauaaaugg

SEQ ID NO: 2134341 - RNA, 19 nt, Homo sapiens
  misc_RNA (1)...(19): siRNA sense strand
gacaaacacugaauuccua

SEQ ID NO: 2134342 - RNA, 19 nt, Homo sapiens
  misc_RNA (1)...(19): siRNA sense strand
gaagcaccguggauucaua

SEQ ID NO: 2134343 - RNA, 19 nt, Homo sapiens
  misc_RNA (1)...(19): siRNA sense strand
gcaaauaguagaagagaaa

SEQ ID NO: 2134344 - RNA, 19 nt, Homo sapiens
  misc_RNA (1)...(19): siRNA sense strand
gauaaggcauucuuucaga

SEQ ID NO: 2134345 - RNA, 19 nt, Homo sapiens
  misc_RNA (1)...(19): siRNA sense strand
aaagaaggaugcaaagaaa

SEQ ID NO: 2134346 - RNA, 19 nt, Homo sapiens
  misc_RNA (1)...(19): siRNA sense strand
ggaacagacuccauucaga

SEQ ID NO: 2134347 - RNA, 19 nt, Homo sapiens
  misc_RNA (1)...(19): siRNA sense strand
ggaauuacucacagaauaa

SEQ ID NO: 2134348 - RNA, 19 nt, Homo sapiens
  misc_RNA (1)...(19): siRNA sense strand
agaaagauaucaagaagga

SEQ ID NO: 2134349 - RNA, 19 nt, Homo sapiens
  misc_RNA (1)...(19): siRNA sense strand
ucagacaucuuuauacuuc

SEQ ID NO: 2134350 - RNA, 19 nt, Homo sapiens
  misc_RNA (1)...(19): siRNA sense strand
cuacugaaauggaaucuga

SEQ ID NO: 2134351 - RNA, 19 nt, Homo sapiens
  misc_RNA (1)...(19): siRNA sense strand
ggaagaaagauucaaagaa

SEQ ID NO: 2134352 - RNA, 19 nt, Homo sapiens
  misc_RNA (1)...(19): siRNA sense strand
ucaaagaauuccaagaaga

SEQ ID NO: 2134353 - RNA, 19 nt, Homo sapiens
  misc_RNA (1)...(19): siRNA sense strand
gaaaggaaagauacaaaga

SEQ ID NO: 2134354 - RNA, 19 nt, Homo sapiens
  misc_RNA (1)...(19): siRNA sense strand
caaaggaugcuaagaaaga

SEQ ID NO: 2134355 - RNA, 19 nt, Homo sapiens
  misc_RNA (1)...(19): siRNA sense strand
ggucaaagacuaguaauga

SEQ ID NO: 2134356 - RNA, 19 nt, Homo sapiens
  misc_RNA (1)...(19): siRNA sense strand
aaucugaacuggagucaaa

SEQ ID NO: 2134357 - RNA, 19 nt, Homo sapiens
  misc_RNA (1)...(19): siRNA sense strand
ggaaagauacaaagaagga

SEQ ID NO: 2134358 - RNA, 19 nt, Homo sapiens
  misc_RNA (1)...(19): siRNA sense strand
caaaggagagucagaaaga

SEQ ID NO: 2134359 - RNA, 19 nt, Homo sapiens
  misc_RNA (1)...(19): siRNA sense strand
caagaaggaugcaagaaag

SEQ ID NO: 2134360 - RNA, 19 nt, Homo sapiens
  misc_RNA (1)...(19): siRNA sense strand
gaaaagcucugaugcugaa

SEQ ID NO: 2134361 - RNA, 19 nt, Homo sapiens
  misc_RNA (1)...(19): siRNA sense strand
caacaaauccagaauccaa

SEQ ID NO: 2134362 - RNA, 19 nt, Homo sapiens
  misc_RNA (1)...(19): siRNA sense strand
gaugaagagucuacugaug

SEQ ID NO: 2134363 - RNA, 19 nt, Homo sapiens
  misc_RNA (1)...(19): siRNA sense strand
gaggaacaccuuugaagaa

SEQ ID NO: 2134364 - RNA, 19 nt, Homo sapiens
  misc_RNA (1)...(19): siRNA sense strand
gcacaucugcaaauucaaa

SEQ ID NO: 2134365 - RNA, 19 nt, Homo sapiens
  misc_RNA (1)...(19): siRNA sense strand
ucagagauuugcucagaaa

SEQ ID NO: 2134366 - RNA, 19 nt, Homo sapiens
  misc_RNA (1)...(19): siRNA sense strand
gaagacaaacacugaauuc

SEQ ID NO: 2134367 - RNA, 19 nt, Homo sapiens
  misc_RNA (1)...(19): siRNA sense strand
aagaaacacucaaaggaaa

SEQ ID NO: 2134368 - RNA, 19 nt, Homo sapiens
  misc_RNA (1)...(19): siRNA sense strand
caagaaacacucaaaggaa

SEQ ID NO: 2134369 - RNA, 19 nt, Homo sapiens
  misc_RNA (1)...(19): siRNA sense strand
caaagaaugaugacaagaa

SEQ ID NO: 2134370 - RNA, 19 nt, Homo sapiens
  misc_RNA (1)...(19): siRNA sense strand
caaagaacaauccaaagaa

SEQ ID NO: 2134371 - RNA, 19 nt, Homo sapiens
  misc_RNA (1)...(19): siRNA sense strand
uggaaggacuggaaucaaa

SEQ ID NO: 2134372 - RNA, 19 nt, Homo sapiens
  misc_RNA (1)...(19): siRNA sense strand
uaucagagauuugcucaga

SEQ ID NO: 2134373 - RNA, 19 nt, Homo sapiens
  misc_RNA (1)...(19): siRNA sense strand
aggaauuacucacagaaua

SEQ ID NO: 2134374 - RNA, 19 nt, Homo sapiens
  misc_RNA (1)...(19): siRNA sense strand
ccagaaaccagcucauaaa

SEQ ID NO: 2134375 - RNA, 19 nt, Homo sapiens
  misc_RNA (1)...(19): siRNA sense strand
ccaagaagacaaacacuga

SEQ ID NO: 2134376 - RNA, 19 nt, Homo sapiens
  misc_RNA (1)...(19): siRNA sense strand
caagaaauuugaagaaagc

SEQ ID NO: 2134377 - RNA, 19 nt, Homo sapiens
  misc_RNA (1)...(19): siRNA sense strand
gaucccauaucagagauuu

SEQ ID NO: 2134378 - RNA, 19 nt, Homo sapiens
  misc_RNA (1)...(19): siRNA sense strand
ucaaagagaggauucagaa

SEQ ID NO: 2134379 - RNA, 19 nt, Homo sapiens
  misc_RNA (1)...(19): siRNA sense strand
ucugaagagucacuauaua

SEQ ID NO: 2134380 - RNA, 19 nt, Homo sapiens
  misc_RNA (1)...(19): siRNA sense strand
gaaaagaaagguucaaaga

SEQ ID NO: 2134381 - RNA, 19 nt, Homo sapiens
  misc_RNA (1)...(19): siRNA sense strand
ggaggaacaccuuugaaga

SEQ ID NO: 2134382 - RNA, 19 nt, Homo sapiens
  misc_RNA (1)...(19): siRNA sense strand
uaaagaaggacaagaaaca

SEQ ID NO: 2134383 - RNA, 19 nt, Homo sapiens
  misc_RNA (1)...(19): siRNA sense strand
caagaaugaugaagagucu

SEQ ID NO: 2134384 - RNA, 19 nt, Homo sapiens
  misc_RNA (1)...(19): siRNA sense strand
caaaguauacaaagaagga

SEQ ID NO: 2134385 - RNA, 19 nt, Homo sapiens
  misc_RNA (1)...(19): siRNA sense strand
gggacagucugaugaugaa

SEQ ID NO: 2134386 - RNA, 19 nt, Homo sapiens
  misc_RNA (1)...(19): siRNA sense strand
gcaaguacagguagaguuc

SEQ ID NO: 2134387 - RNA, 19 nt, Homo sapiens
  misc_RNA (1)...(19): siRNA sense strand
ccaagcaaauaguagaaga

SEQ ID NO: 2134388 - RNA, 19 nt, Homo sapiens
  misc_RNA (1)...(19): siRNA sense strand
ucaagaaggaugcaagaaa

SEQ ID NO: 2134389 - RNA, 19 nt, Homo sapiens
  misc_RNA (1)...(19): siRNA sense strand
gaugcaugguuaaggaauu

SEQ ID NO: 2134390 - RNA, 19 nt, Homo sapiens
  misc_RNA (1)...(19): siRNA sense strand
gcaaaggaugcaagaaaug

SEQ ID NO: 2134391 - RNA, 19 nt, Homo sapiens
  misc_RNA (1)...(19): siRNA sense strand
gcucugaugcugaaucuga

SEQ ID NO: 2134392 - RNA, 19 nt, Homo sapiens
  misc_RNA (1)...(19): siRNA sense strand
caaaggaugcaagaaauga

SEQ ID NO: 2134393 - RNA, 19 nt, Homo sapiens
  misc_RNA (1)...(19): siRNA sense strand
uggcacaucugcaaauuca

SEQ ID NO: 2134394 - RNA, 19 nt, Homo sapiens
  misc_RNA (1)...(19): siRNA sense strand
gcaagaaaugauucaagaa

SEQ ID NO: 2134395 - RNA, 19 nt, Homo sapiens
  misc_RNA (1)...(19): siRNA sense strand
acaaagaacaauccaaaga

SEQ ID NO: 2134396 - RNA, 19 nt, Homo sapiens
  misc_RNA (1)...(19): siRNA sense strand
gaaaggacacagagucuac

SEQ ID NO: 2134397 - RNA, 19 nt, Homo sapiens
  misc_RNA (1)...(19): siRNA sense strand
gcuaagaaagauucaaaga

SEQ ID NO: 2134398 - RNA, 19 nt, Homo sapiens
  misc_RNA (1)...(19): siRNA sense strand
gccagaaaccagcucauaa

SEQ ID NO: 2134399 - RNA, 19 nt, Homo sapiens
  misc_RNA (1)...(19): siRNA sense strand
aaucaaagguucagauacu

SEQ ID NO: 2134400 - RNA, 19 nt, Homo sapiens
  misc_RNA (1)...(19): siRNA sense strand
cuacugaugcugaauuuga

SEQ ID NO: 2134401 - RNA, 19 nt, Homo sapiens
  misc_RNA (1)...(19): siRNA sense strand
ugcaagaaaugauucaaga

SEQ ID NO: 2134402 - RNA, 19 nt, Homo sapiens
  misc_RNA (1)...(19): siRNA sense strand
auacaaagaaggacacaaa

SEQ ID NO: 2134403 - RNA, 19 nt, Homo sapiens
  misc_RNA (1)...(19): siRNA sense strand
gggaagaaagauucaaaga

SEQ ID NO: 2134404 - RNA, 19 nt, Homo sapiens
  misc_RNA (1)...(19): siRNA sense strand
ucaagaaagaugacaagaa

SEQ ID NO: 2134405 - RNA, 19 nt, Homo sapiens
  misc_RNA (1)...(19): siRNA sense strand
cucaaaggaugcuaagaaa

SEQ ID NO: 2134406 - RNA, 19 nt, Homo sapiens
  misc_RNA (1)...(19): siRNA sense strand
ugaagaaagauuccaagaa

SEQ ID NO: 2134407 - RNA, 19 nt, Homo sapiens
  misc_RNA (1)...(19): siRNA sense strand
gacuaguaaugaucccaua

SEQ ID NO: 2134408 - RNA, 19 nt, Homo sapiens
  misc_RNA (1)...(19): siRNA sense strand
gaagagucacuauauaaac

SEQ ID NO: 2134409 - RNA, 19 nt, Homo sapiens
  misc_RNA (1)...(19): siRNA sense strand
cugaagagucacuauauaa

SEQ ID NO: 2134410 - RNA, 19 nt, Homo sapiens
  misc_RNA (1)...(19): siRNA sense strand
ggacacagagucuacugau

SEQ ID NO: 2134411 - RNA, 19 nt, Homo sapiens
  misc_RNA (1)...(19): siRNA sense strand
gaaggacuggaaucaaaga

SEQ ID NO: 2134412 - RNA, 19 nt, Homo sapiens
  misc_RNA (1)...(19): siRNA sense strand
ggacacagagucuacugau

SEQ ID NO: 2134413 - RNA, 19 nt, Homo sapiens
  misc_RNA (1)...(19): siRNA sense strand
ggacaagaaacacucaaag

SEQ ID NO: 2134414 - RNA, 19 nt, Homo sapiens
  misc_RNA (1)...(19): siRNA sense strand
ugcagaaucuacugaaaug

SEQ ID NO: 2134415 - RNA, 19 nt, Homo sapiens
  misc_RNA (1)...(19): siRNA sense strand
cuacugaugcugacucuga

SEQ ID NO: 2134416 - RNA, 19 nt, Homo sapiens
  misc_RNA (1)...(19): siRNA sense strand
aaaagucugucaagaauga

SEQ ID NO: 2134417 - RNA, 19 nt, Homo sapiens
  misc_RNA (1)...(19): siRNA sense strand
acaaagaaguacccagagu

SEQ ID NO: 2134418 - RNA, 19 nt, Homo sapiens
  misc_RNA (1)...(19): siRNA sense strand
aggaacaccuuugaagaaa

SEQ ID NO: 2134419 - RNA, 19 nt, Homo sapiens
  misc_RNA (1)...(19): siRNA sense strand
aaaggagguucauaugcaa

SEQ ID NO: 2134420 - RNA, 19 nt, Homo sapiens
  misc_RNA (1)...(19): siRNA sense strand
ccauucagacaucuuuaua

SEQ ID NO: 2134421 - RNA, 19 nt, Homo sapiens
  misc_RNA (1)...(19): siRNA sense strand
acaagaaacacucaaagga

SEQ ID NO: 2134422 - RNA, 19 nt, Homo sapiens
  misc_RNA (1)...(19): siRNA sense strand
ggccagaaaccagcucaua

SEQ ID NO: 2134423 - RNA, 19 nt, Homo sapiens
  misc_RNA (1)...(19): siRNA sense strand
guuccuccaucaagagaaa

SEQ ID NO: 2134424 - RNA, 19 nt, Homo sapiens
  misc_RNA (1)...(19): siRNA sense strand
uagaguuccuccaucaaga

SEQ ID NO: 2134425 - RNA, 19 nt, Homo sapiens
  misc_RNA (1)...(19): siRNA sense strand
agaaucuacugaaauggaa

SEQ ID NO: 2134426 - RNA, 19 nt, Homo sapiens
  misc_RNA (1)...(19): siRNA sense strand
gaacaauccaagaagucaa

SEQ ID NO: 2134427 - RNA, 19 nt, Homo sapiens
  misc_RNA (1)...(19): siRNA sense strand
gacacagagucuacugaug

SEQ ID NO: 2134428 - RNA, 19 nt, Homo sapiens
  misc_RNA (1)...(19): siRNA sense strand
aagaaagcuucaaagaaug

SEQ ID NO: 2134429 - RNA, 19 nt, Homo sapiens
  misc_RNA (1)...(19): siRNA sense strand
aaggaaagauacaaagaag

SEQ ID NO: 2134430 - RNA, 19 nt, Homo sapiens
  misc_RNA (1)...(19): siRNA sense strand
cucaaaggaugaaaggaaa

SEQ ID NO: 2134431 - RNA, 19 nt, Homo sapiens
  misc_RNA (1)...(19): siRNA sense strand
gacacagagucuacugaug

SEQ ID NO: 2134432 - RNA, 19 nt, Homo sapiens
  misc_RNA (1)...(19): siRNA sense strand
agaacaauccaaagaaaga

SEQ ID NO: 2134433 - RNA, 19 nt, Homo sapiens
  misc_RNA (1)...(19): siRNA sense strand
acacugaauuccuacauac

SEQ ID NO: 2134434 - RNA, 19 nt, Homo sapiens
  misc_RNA (1)...(19): siRNA sense strand
guaaagcaggauacaaugu

SEQ ID NO: 2134435 - RNA, 19 nt, Homo sapiens
  misc_RNA (1)...(19): siRNA sense strand
aagaaagguucaaagaaag

SEQ ID NO: 2134436 - RNA, 19 nt, Homo sapiens
  misc_RNA (1)...(19): siRNA sense strand
cugaauuccuacauacaaa

SEQ ID NO: 2134437 - RNA, 19 nt, Homo sapiens
  misc_RNA (1)...(19): siRNA sense strand
guuaaagaaggacaagaaa

SEQ ID NO: 2134438 - RNA, 19 nt, Homo sapiens
  misc_RNA (1)...(19): siRNA sense strand
caaacugacuguuggauuu

SEQ ID NO: 2134439 - RNA, 19 nt, Homo sapiens
  misc_RNA (1)...(19): siRNA sense strand
aaaccaaccuggcaugaaa

SEQ ID NO: 2134440 - RNA, 19 nt, Homo sapiens
  misc_RNA (1)...(19): siRNA sense strand
gaaguaaacgaucaacaaa

SEQ ID NO: 2134441 - RNA, 19 nt, Homo sapiens
  misc_RNA (1)...(19): siRNA sense strand
gcacgaaccaaucaaguuu

SEQ ID NO: 2134442 - RNA, 19 nt, Homo sapiens
  misc_RNA (1)...(19): siRNA sense strand
ggaaucaacugggcaugaa

SEQ ID NO: 2134443 - RNA, 19 nt, Homo sapiens
  misc_RNA (1)...(19): siRNA sense strand
aaacaagcauggauuacuu

SEQ ID NO: 2134444 - RNA, 19 nt, Homo sapiens
  misc_RNA (1)...(19): siRNA sense strand
gaaccaaucaaguuuauca

SEQ ID NO: 2134445 - RNA, 19 nt, Homo sapiens
  misc_RNA (1)...(19): siRNA sense strand
guacaaaccuaccagacau

SEQ ID NO: 2134446 - RNA, 19 nt, Homo sapiens
  misc_RNA (1)...(19): siRNA sense strand
guacaaaccuaccagacau

SEQ ID NO: 2134447 - RNA, 19 nt, Homo sapiens
  misc_RNA (1)...(19): siRNA sense strand
caaaugcacuaccgcaaau

SEQ ID NO: 2134448 - RNA, 19 nt, Homo sapiens
  misc_RNA (1)...(19): siRNA sense strand
aacaagaccugaaccaauu

SEQ ID NO: 2134449 - RNA, 19 nt, Homo sapiens
  misc_RNA (1)...(19): siRNA sense strand
gaaccaaguggacaugaaa

SEQ ID NO: 2134450 - RNA, 19 nt, Homo sapiens
  misc_RNA (1)...(19): siRNA sense strand
gguauaagccaaccaguga

SEQ ID NO: 2134451 - RNA, 19 nt, Homo sapiens
  misc_RNA (1)...(19): siRNA sense strand
gcacaaaccaaucagguau

SEQ ID NO: 2134452 - RNA, 19 nt, Homo sapiens
  misc_RNA (1)...(19): siRNA sense strand
gaaccaaguggacaugaaa

SEQ ID NO: 2134453 - RNA, 19 nt, Homo sapiens
  misc_RNA (1)...(19): siRNA sense strand
gaacuaguccugagugaag

SEQ ID NO: 2134454 - RNA, 19 nt, Homo sapiens
  misc_RNA (1)...(19): siRNA sense strand
gcacuagccaaucaaguaa

SEQ ID NO: 2134455 - RNA, 19 nt, Homo sapiens
  misc_RNA (1)...(19): siRNA sense strand
caacaaagcaggaaucaac

SEQ ID NO: 2134456 - RNA, 19 nt, Homo sapiens
  misc_RNA (1)...(19): siRNA sense strand
ggacuggcaagguacuuua

SEQ ID NO: 2134457 - RNA, 19 nt, Homo sapiens
  misc_RNA (1)...(19): siRNA sense strand
gaaccaagcaggcauaaac

SEQ ID NO: 2134458 - RNA, 19 nt, Homo sapiens
  misc_RNA (1)...(19): siRNA sense strand
gguaugagccaaccaguga

SEQ ID NO: 2134459 - RNA, 19 nt, Homo sapiens
  misc_RNA (1)...(19): siRNA sense strand
caaacucacuugguaugaa

SEQ ID NO: 2134460 - RNA, 19 nt, Homo sapiens
  misc_RNA (1)...(19): siRNA sense strand
agaauuggcugccugugaa

SEQ ID NO: 2134461 - RNA, 19 nt, Homo sapiens
  misc_RNA (1)...(19): siRNA sense strand
caaaugggcaugaggcaaa

SEQ ID NO: 2134462 - RNA, 19 nt, Homo sapiens
  misc_RNA (1)...(19): siRNA sense strand
caacaagaccugaaccaau

SEQ ID NO: 2134463 - RNA, 19 nt, Homo sapiens
  misc_RNA (1)...(19): siRNA sense strand
gcaagccuauaugaaauga

SEQ ID NO: 2134464 - RNA, 19 nt, Homo sapiens
  misc_RNA (1)...(19): siRNA sense strand
gcaagccuauaugaaauga

SEQ ID NO: 2134465 - RNA, 19 nt, Homo sapiens
  misc_RNA (1)...(19): siRNA sense strand
acaaaccaaucagguauaa

SEQ ID NO: 2134466 - RNA, 19 nt, Homo sapiens
  misc_RNA (1)...(19): siRNA sense strand
ccucaucccuucacuuuca

SEQ ID NO: 2134467 - RNA, 19 nt, Homo sapiens
  misc_RNA (1)...(19): siRNA sense strand
acacaagcuuaccaagaua

SEQ ID NO: 2134468 - RNA, 19 nt, Homo sapiens
  misc_RNA (1)...(19): siRNA sense strand
cacacaagcuuaccaagau

SEQ ID NO: 2134469 - RNA, 19 nt, Homo sapiens
  misc_RNA (1)...(19): siRNA sense strand
ggagacugcccagaaauuu

SEQ ID NO: 2134470 - RNA, 19 nt, Homo sapiens
  misc_RNA (1)...(19): siRNA sense strand
ccaaucaaguuuaucagau

SEQ ID NO: 2134471 - RNA, 19 nt, Homo sapiens
  misc_RNA (1)...(19): siRNA sense strand
gacacuagccaaucaugua

SEQ ID NO: 2134472 - RNA, 19 nt, Homo sapiens
  misc_RNA (1)...(19): siRNA sense strand
gugcaagccuauaugaaau

SEQ ID NO: 2134473 - RNA, 19 nt, Homo sapiens
  misc_RNA (1)...(19): siRNA sense strand
gugcaagccuauaugaaau

SEQ ID NO: 2134474 - RNA, 19 nt, Homo sapiens
  misc_RNA (1)...(19): siRNA sense strand
aaaccaacccgacaugaaa

SEQ ID NO: 2134475 - RNA, 19 nt, Homo sapiens
  misc_RNA (1)...(19): siRNA sense strand
ccagacacauggcaauuag

SEQ ID NO: 2134476 - RNA, 19 nt, Homo sapiens
  misc_RNA (1)...(19): siRNA sense strand
aagcauggauuacuuucaa

SEQ ID NO: 2134477 - RNA, 19 nt, Homo sapiens
  misc_RNA (1)...(19): siRNA sense strand
ccagugauguggcaacuag

SEQ ID NO: 2134478 - RNA, 19 nt, Homo sapiens
  misc_RNA (1)...(19): siRNA sense strand
caaccaaacagguauaauc

SEQ ID NO: 2134479 - RNA, 19 nt, Homo sapiens
  misc_RNA (1)...(19): siRNA sense strand
gcacaaacucacuugguau

SEQ ID NO: 2134480 - RNA, 19 nt, Homo sapiens
  misc_RNA (1)...(19): siRNA sense strand
gaaauuuugcgacugauua

SEQ ID NO: 2134481 - RNA, 19 nt, Homo sapiens
  misc_RNA (1)...(19): siRNA sense strand
ggcaaacaagcauggauua

SEQ ID NO: 2134482 - RNA, 19 nt, Homo sapiens
  misc_RNA (1)...(19): siRNA sense strand
ggcacuagccaaucaagua

SEQ ID NO: 2134483 - RNA, 19 nt, Homo sapiens
  misc_RNA (1)...(19): siRNA sense strand
gcacgaaccaaucagguau

SEQ ID NO: 2134484 - RNA, 19 nt, Homo sapiens
  misc_RNA (1)...(19): siRNA sense strand
gagcaaagcaggcauaagc

SEQ ID NO: 2134485 - RNA, 19 nt, Homo sapiens
  misc_RNA (1)...(19): siRNA sense strand
ggagugcaagccuauauga

SEQ ID NO: 2134486 - RNA, 19 nt, Homo sapiens
  misc_RNA (1)...(19): siRNA sense strand
gcaaacugacuguuggauu

SEQ ID NO: 2134487 - RNA, 19 nt, Homo sapiens
  misc_RNA (1)...(19): siRNA sense strand
ggagugcaagccuauauga

SEQ ID NO: 2134488 - RNA, 19 nt, Homo sapiens
  misc_RNA (1)...(19): siRNA sense strand
gcaaauaggcacgaaccaa

SEQ ID NO: 2134489 - RNA, 19 nt, Homo sapiens
  misc_RNA (1)...(19): siRNA sense strand
caagauagccaucacaacu

SEQ ID NO: 2134490 - RNA, 19 nt, Homo sapiens
  misc_RNA (1)...(19): siRNA sense strand
aaauggacaugaaccaaug

SEQ ID NO: 2134491 - RNA, 19 nt, Homo sapiens
  misc_RNA (1)...(19): siRNA sense strand
caaauaggcacgaaccaau

SEQ ID NO: 2134492 - RNA, 19 nt, Homo sapiens
  misc_RNA (1)...(19): siRNA sense strand
gauuugccauguacuacuu

SEQ ID NO: 2134493 - RNA, 19 nt, Homo sapiens
  misc_RNA (1)...(19): siRNA sense strand
gcaacuagacagccaguca

SEQ ID NO: 2134494 - RNA, 19 nt, Homo sapiens
  misc_RNA (1)...(19): siRNA sense strand
caacugggcaugaaccaau

SEQ ID NO: 2134495 - RNA, 19 nt, Homo sapiens
  misc_RNA (1)...(19): siRNA sense strand
caaccaagcaugagacaag

SEQ ID NO: 2134496 - RNA, 19 nt, Homo sapiens
  misc_RNA (1)...(19): siRNA sense strand
ccaaaugcacuaccgcaaa

SEQ ID NO: 2134497 - RNA, 19 nt, Homo sapiens
  misc_RNA (1)...(19): siRNA sense strand
caaccaagcaugagacaag

SEQ ID NO: 2134498 - RNA, 19 nt, Homo sapiens
  misc_RNA (1)...(19): siRNA sense strand
caacuaguccugagcaaag

SEQ ID NO: 2134499 - RNA, 19 nt, Homo sapiens
  misc_RNA (1)...(19): siRNA sense strand
ugaaccaaauggacaugaa

SEQ ID NO: 2134500 - RNA, 19 nt, Homo sapiens
  misc_RNA (1)...(19): siRNA sense strand
ugaaccaaauggacaugaa

SEQ ID NO: 2134501 - RNA, 19 nt, Homo sapiens
  misc_RNA (1)...(19): siRNA sense strand
caaccaggcacauggcaaa

SEQ ID NO: 2134502 - RNA, 19 nt, Homo sapiens
  misc_RNA (1)...(19): siRNA sense strand
caaccaggcacauggcaaa

SEQ ID NO: 2134503 - RNA, 19 nt, Homo sapiens
  misc_RNA (1)...(19): siRNA sense strand
gcgaacuaguccugaguga

SEQ ID NO: 2134504 - RNA, 19 nt, Homo sapiens
  misc_RNA (1)...(19): siRNA sense strand
caaauggacaugaaccaau

SEQ ID NO: 2134505 - RNA, 19 nt, Homo sapiens
  misc_RNA (1)...(19): siRNA sense strand
agaaguaaacgaucaacaa

SEQ ID NO: 2134506 - RNA, 19 nt, Homo sapiens
  misc_RNA (1)...(19): siRNA sense strand
gcgacugauuaaagaauug

SEQ ID NO: 2134507 - RNA, 19 nt, Homo sapiens
  misc_RNA (1)...(19): siRNA sense strand
ugaaccaaguggacaugaa

SEQ ID NO: 2134508 - RNA, 19 nt, Homo sapiens
  misc_RNA (1)...(19): siRNA sense strand
ucacacaagcuuaccaaga

SEQ ID NO: 2134509 - RNA, 19 nt, Homo sapiens
  misc_RNA (1)...(19): siRNA sense strand
ugaaccaaguggacaugaa

SEQ ID NO: 2134510 - RNA, 19 nt, Homo sapiens
  misc_RNA (1)...(19): siRNA sense strand
caauuaggcacaagccaaa

SEQ ID NO: 2134511 - RNA, 19 nt, Homo sapiens
  misc_RNA (1)...(19): siRNA sense strand
ugaaacaaccagacacaug

SEQ ID NO: 2134512 - RNA, 19 nt, Homo sapiens
  misc_RNA (1)...(19): siRNA sense strand
uaaaccaacccgacaugaa

SEQ ID NO: 2134513 - RNA, 19 nt, Homo sapiens
  misc_RNA (1)...(19): siRNA sense strand
ggcaugaggcaaucaggua

SEQ ID NO: 2134514 - RNA, 19 nt, Homo sapiens
  misc_RNA (1)...(19): siRNA sense strand
ccaggcacauggcaauuag

SEQ ID NO: 2134515 - RNA, 19 nt, Homo sapiens
  misc_RNA (1)...(19): siRNA sense strand
ggcaugaggcaaucaggua

SEQ ID NO: 2134516 - RNA, 19 nt, Homo sapiens
  misc_RNA (1)...(19): siRNA sense strand
agcacaaacucacuuggua

SEQ ID NO: 2134517 - RNA, 19 nt, Homo sapiens
  misc_RNA (1)...(19): siRNA sense strand
caacuagacaugagacagu

SEQ ID NO: 2134518 - RNA, 19 nt, Homo sapiens
  misc_RNA (1)...(19): siRNA sense strand
caaccaggcccaagccaau

SEQ ID NO: 2134519 - RNA, 19 nt, Homo sapiens
  misc_RNA (1)...(19): siRNA sense strand
caacuaggcaugagacaac

SEQ ID NO: 2134520 - RNA, 19 nt, Homo sapiens
  misc_RNA (1)...(19): siRNA sense strand
gccaucagccaaucaguug

SEQ ID NO: 2134521 - RNA, 19 nt, Homo sapiens
  misc_RNA (1)...(19): siRNA sense strand
ccagaaauuuugcgacuga

SEQ ID NO: 2134522 - RNA, 19 nt, Homo sapiens
  misc_RNA (1)...(19): siRNA sense strand
caaccaagugugagccaaa

SEQ ID NO: 2134523 - RNA, 19 nt, Homo sapiens
  misc_RNA (1)...(19): siRNA sense strand
aguaggcaccagccaauua

SEQ ID NO: 2134524 - RNA, 19 nt, Homo sapiens
  misc_RNA (1)...(19): siRNA sense strand
caaucaaguuuaucagacu

SEQ ID NO: 2134525 - RNA, 19 nt, Homo sapiens
  misc_RNA (1)...(19): siRNA sense strand
cucauggacuggcaaggua

SEQ ID NO: 2134526 - RNA, 19 nt, Homo sapiens
  misc_RNA (1)...(19): siRNA sense strand
gcuagaugcaauggaguua

SEQ ID NO: 2134527 - RNA, 19 nt, Homo sapiens
  misc_RNA (1)...(19): siRNA sense strand
ggcacaaaccaaucaggua

SEQ ID NO: 2134528 - RNA, 19 nt, Homo sapiens
  misc_RNA (1)...(19): siRNA sense strand
cauguaagaaccaaacaga

SEQ ID NO: 2134529 - RNA, 19 nt, Homo sapiens
  misc_RNA (1)...(19): siRNA sense strand
acacuagccaaucauguaa

SEQ ID NO: 2134530 - RNA, 19 nt, Homo sapiens
  misc_RNA (1)...(19): siRNA sense strand
caaguaggcaccagccaau

SEQ ID NO: 2134531 - RNA, 19 nt, Homo sapiens
  misc_RNA (1)...(19): siRNA sense strand
agauagccaucacaacuca

SEQ ID NO: 2134532 - RNA, 19 nt, Homo sapiens
  misc_RNA (1)...(19): siRNA sense strand
ggcaggagccaaccaagug

SEQ ID NO: 2134533 - RNA, 19 nt, Homo sapiens
  misc_RNA (1)...(19): siRNA sense strand
caaguaggcaccagccaau

SEQ ID NO: 2134534 - RNA, 19 nt, Homo sapiens
  misc_RNA (1)...(19): siRNA sense strand
uaaaccagccaagcacaaa

SEQ ID NO: 2134535 - RNA, 19 nt, Homo sapiens
  misc_RNA (1)...(19): siRNA sense strand
gacgcaaaccaaucaaguu

SEQ ID NO: 2134536 - RNA, 19 nt, Homo sapiens
  misc_RNA (1)...(19): siRNA sense strand
acgaaccaaucaaguuuau

SEQ ID NO: 2134537 - RNA, 19 nt, Homo sapiens
  misc_RNA (1)...(19): siRNA sense strand
caggcaugcugcaacaaga

SEQ ID NO: 2134538 - RNA, 19 nt, Homo sapiens
  misc_RNA (1)...(19): siRNA sense strand
gaaggaaggucgcaacaaa

SEQ ID NO: 2134539 - RNA, 19 nt, Homo sapiens
  misc_RNA (1)...(19): siRNA sense strand
gaaagagaauugcugagua

SEQ ID NO: 2134540 - RNA, 19 nt, Homo sapiens
  misc_RNA (1)...(19): siRNA sense strand
caacugcaguaauuguuua

SEQ ID NO: 2134541 - RNA, 19 nt, Homo sapiens
  misc_RNA (1)...(19): siRNA sense strand
ggagaggccuacccugaaa

SEQ ID NO: 2134542 - RNA, 19 nt, Homo sapiens
  misc_RNA (1)...(19): siRNA sense strand
caacucggcuccacaccua

SEQ ID NO: 2134543 - RNA, 19 nt, Homo sapiens
  misc_RNA (1)...(19): siRNA sense strand
ggacagcgcuuacgaucca

SEQ ID NO: 2134544 - RNA, 19 nt, Homo sapiens
  misc_RNA (1)...(19): siRNA sense strand
gcaacagccugaaggauag

SEQ ID NO: 2134545 - RNA, 19 nt, Homo sapiens
  misc_RNA (1)...(19): siRNA sense strand
caagaggacugucgaugug

SEQ ID NO: 2134546 - RNA, 19 nt, Homo sapiens
  misc_RNA (1)...(19): siRNA sense strand
ucaaggaccugaacgacaa

SEQ ID NO: 2134547 - RNA, 19 nt, Homo sapiens
  misc_RNA (1)...(19): siRNA sense strand
gaauagccgagcccauuua

SEQ ID NO: 2134548 - RNA, 19 nt, Homo sapiens
  misc_RNA (1)...(19): siRNA sense strand
caaaagaaaucaagcaaga

SEQ ID NO: 2134549 - RNA, 19 nt, Homo sapiens
  misc_RNA (1)...(19): siRNA sense strand
ugaaggauaucguucucua

SEQ ID NO: 2134550 - RNA, 19 nt, Homo sapiens
  misc_RNA (1)...(19): siRNA sense strand
acaaagagauccggaccua

SEQ ID NO: 2134551 - RNA, 19 nt, Homo sapiens
  misc_RNA (1)...(19): siRNA sense strand
ggcaacagccugaaggaua

SEQ ID NO: 2134552 - RNA, 19 nt, Homo sapiens
  misc_RNA (1)...(19): siRNA sense strand
ugagagcacuuuccugaau

SEQ ID NO: 2134553 - RNA, 19 nt, Homo sapiens
  misc_RNA (1)...(19): siRNA sense strand
caauacaaccucacaauuc

SEQ ID NO: 2134554 - RNA, 19 nt, Homo sapiens
  misc_RNA (1)...(19): siRNA sense strand
ccuccucccucaacuauuu

SEQ ID NO: 2134555 - RNA, 19 nt, Homo sapiens
  misc_RNA (1)...(19): siRNA sense strand
gcuuuggcgugcagacuua

SEQ ID NO: 2134556 - RNA, 19 nt, Homo sapiens
  misc_RNA (1)...(19): siRNA sense strand
ugaagcgucugaaggauau

SEQ ID NO: 2134557 - RNA, 19 nt, Homo sapiens
  misc_RNA (1)...(19): siRNA sense strand
gcgagcagcacgaccaaua

SEQ ID NO: 2134558 - RNA, 19 nt, Homo sapiens
  misc_RNA (1)...(19): siRNA sense strand
gcgccuaucugcucucugu

SEQ ID NO: 2134559 - RNA, 19 nt, Homo sapiens
  misc_RNA (1)...(19): siRNA sense strand
gcaagaggacugucgaugu

SEQ ID NO: 2134560 - RNA, 19 nt, Homo sapiens
  misc_RNA (1)...(19): siRNA sense strand
gaccaaggcguucgaauuc

SEQ ID NO: 2134561 - RNA, 19 nt, Homo sapiens
  misc_RNA (1)...(19): siRNA sense strand
ucaaggugcuggccaagga

SEQ ID NO: 2134562 - RNA, 19 nt, Homo sapiens
  misc_RNA (1)...(19): siRNA sense strand
ucaacaaugucaacaaugg

SEQ ID NO: 2134563 - RNA, 19 nt, Homo sapiens
  misc_RNA (1)...(19): siRNA sense strand
ggagcaguaugucaacaau

SEQ ID NO: 2134564 - RNA, 19 nt, Homo sapiens
  misc_RNA (1)...(19): siRNA sense strand
cugcugaugucgaggcuua

SEQ ID NO: 2134565 - RNA, 19 nt, Homo sapiens
  misc_RNA (1)...(19): siRNA sense strand
gagagcacuuuccugaaug

SEQ ID NO: 2134566 - RNA, 19 nt, Homo sapiens
  misc_RNA (1)...(19): siRNA sense strand
gaaaucaagcaagaagaaa

SEQ ID NO: 2134567 - RNA, 19 nt, Homo sapiens
  misc_RNA (1)...(19): siRNA sense strand
gaggagaaagugagccuaa

SEQ ID NO: 2134568 - RNA, 19 nt, Homo sapiens
  misc_RNA (1)...(19): siRNA sense strand
cacuacagcuuccgaauca

SEQ ID NO: 2134569 - RNA, 19 nt, Homo sapiens
  misc_RNA (1)...(19): siRNA sense strand
gaaggauaucguucucuaa

SEQ ID NO: 2134570 - RNA, 19 nt, Homo sapiens
  misc_RNA (1)...(19): siRNA sense strand
ucaccaagcagaagauuga

SEQ ID NO: 2134571 - RNA, 19 nt, Homo sapiens
  misc_RNA (1)...(19): siRNA sense strand
aauacaaccucacaauuca

SEQ ID NO: 2134572 - RNA, 19 nt, Homo sapiens
  misc_RNA (1)...(19): siRNA sense strand
ccaauacaaccucacaauu

SEQ ID NO: 2134573 - RNA, 19 nt, Homo sapiens
  misc_RNA (1)...(19): siRNA sense strand
ccagcagccugaccugauu

SEQ ID NO: 2134574 - RNA, 19 nt, Homo sapiens
  misc_RNA (1)...(19): siRNA sense strand
ggaaagagaauugcugagu

SEQ ID NO: 2134575 - RNA, 19 nt, Homo sapiens
  misc_RNA (1)...(19): siRNA sense strand
ggccuucccucacugcaaa

SEQ ID NO: 2134576 - RNA, 19 nt, Homo sapiens
  misc_RNA (1)...(19): siRNA sense strand
ccaaggcguucgaauucaa

SEQ ID NO: 2134577 - RNA, 19 nt, Homo sapiens
  misc_RNA (1)...(19): siRNA sense strand
ucugugaacuuguccuuga

SEQ ID NO: 2134578 - RNA, 19 nt, Homo sapiens
  misc_RNA (1)...(19): siRNA sense strand
ucaucgcgcugucuauuga

SEQ ID NO: 2134579 - RNA, 19 nt, Homo sapiens
  misc_RNA (1)...(19): siRNA sense strand
aaagagaauugcugaguac

SEQ ID NO: 2134580 - RNA, 19 nt, Homo sapiens
  misc_RNA (1)...(19): siRNA sense strand
gcgggcauccucuuuguaa

SEQ ID NO: 2134581 - RNA, 19 nt, Homo sapiens
  misc_RNA (1)...(19): siRNA sense strand
gcucaucacugacgaaaau

SEQ ID NO: 2134582 - RNA, 19 nt, Homo sapiens
  misc_RNA (1)...(19): siRNA sense strand
ucauuaaucucaaguacuc

SEQ ID NO: 2134583 - RNA, 19 nt, Homo sapiens
  misc_RNA (1)...(19): siRNA sense strand
gugaacuuguccuugauuu

SEQ ID NO: 2134584 - RNA, 19 nt, Homo sapiens
  misc_RNA (1)...(19): siRNA sense strand
gcggugagcgugccagaaa

SEQ ID NO: 2134585 - RNA, 19 nt, Homo sapiens
  misc_RNA (1)...(19): siRNA sense strand
cccgugaucuggagcagua

SEQ ID NO: 2134586 - RNA, 19 nt, Homo sapiens
  misc_RNA (1)...(19): siRNA sense strand
uaccaucacucuuucaaca

SEQ ID NO: 2134587 - RNA, 19 nt, Homo sapiens
  misc_RNA (1)...(19): siRNA sense strand
gcagaagauugaccgugau

SEQ ID NO: 2134588 - RNA, 19 nt, Homo sapiens
  misc_RNA (1)...(19): siRNA sense strand
ggacggugauugccaacgu

SEQ ID NO: 2134589 - RNA, 19 nt, Homo sapiens
  misc_RNA (1)...(19): siRNA sense strand
ggaaaucugcgugauaaag

SEQ ID NO: 2134590 - RNA, 19 nt, Homo sapiens
  misc_RNA (1)...(19): siRNA sense strand
gcugauagcgagaaaguca

SEQ ID NO: 2134591 - RNA, 19 nt, Homo sapiens
  misc_RNA (1)...(19): siRNA sense strand
agaugaacguugucaguug

SEQ ID NO: 2134592 - RNA, 19 nt, Homo sapiens
  misc_RNA (1)...(19): siRNA sense strand
gcuccaaguccuccuauga

SEQ ID NO: 2134593 - RNA, 19 nt, Homo sapiens
  misc_RNA (1)...(19): siRNA sense strand
ucaccuaugucuccaucaa

SEQ ID NO: 2134594 - RNA, 19 nt, Homo sapiens
  misc_RNA (1)...(19): siRNA sense strand
uuaccgugcucaucacuga

SEQ ID NO: 2134595 - RNA, 19 nt, Homo sapiens
  misc_RNA (1)...(19): siRNA sense strand
ugucaacaaugucaacaau

SEQ ID NO: 2134596 - RNA, 19 nt, Homo sapiens
  misc_RNA (1)...(19): siRNA sense strand
cagcggagccuguauugug

SEQ ID NO: 2134597 - RNA, 19 nt, Homo sapiens
  misc_RNA (1)...(19): siRNA sense strand
gugaauagccgagcccauu

SEQ ID NO: 2134598 - RNA, 19 nt, Homo sapiens
  misc_RNA (1)...(19): siRNA sense strand
cacugucacuggcgcuuua

SEQ ID NO: 2134599 - RNA, 19 nt, Homo sapiens
  misc_RNA (1)...(19): siRNA sense strand
gaaaucugcgugauaaagg

SEQ ID NO: 2134600 - RNA, 19 nt, Homo sapiens
  misc_RNA (1)...(19): siRNA sense strand
gaaggucgcaacaaagagu

SEQ ID NO: 2134601 - RNA, 19 nt, Homo sapiens
  misc_RNA (1)...(19): siRNA sense strand
ugaucagaaugaaggauuu

SEQ ID NO: 2134602 - RNA, 19 nt, Homo sapiens
  misc_RNA (1)...(19): siRNA sense strand
ggaggagacagacaagaug

SEQ ID NO: 2134603 - RNA, 19 nt, Homo sapiens
  misc_RNA (1)...(19): siRNA sense strand
ggaccuacaacugcaguaa

SEQ ID NO: 2134604 - RNA, 19 nt, Homo sapiens
  misc_RNA (1)...(19): siRNA sense strand
ggcauccucuuuguaacua

SEQ ID NO: 2134605 - RNA, 19 nt, Homo sapiens
  misc_RNA (1)...(19): siRNA sense strand
gcacuacagcuuccgaauc

SEQ ID NO: 2134606 - RNA, 19 nt, Homo sapiens
  misc_RNA (1)...(19): siRNA sense strand
gugaagcgucugaaggaua

SEQ ID NO: 2134607 - RNA, 19 nt, Homo sapiens
  misc_RNA (1)...(19): siRNA sense strand
gaaggauaguggacaugag

SEQ ID NO: 2134608 - RNA, 19 nt, Homo sapiens
  misc_RNA (1)...(19): siRNA sense strand
caucuaccaucacucuuuc

SEQ ID NO: 2134609 - RNA, 19 nt, Homo sapiens
  misc_RNA (1)...(19): siRNA sense strand
gaggagacagacaagauga

SEQ ID NO: 2134610 - RNA, 19 nt, Homo sapiens
  misc_RNA (1)...(19): siRNA sense strand
aaacucgccucccaacaca

SEQ ID NO: 2134611 - RNA, 19 nt, Homo sapiens
  misc_RNA (1)...(19): siRNA sense strand
auggaaaucugcgugauaa

SEQ ID NO: 2134612 - RNA, 19 nt, Homo sapiens
  misc_RNA (1)...(19): siRNA sense strand
gaaugacauccgccuggua

SEQ ID NO: 2134613 - RNA, 19 nt, Homo sapiens
  misc_RNA (1)...(19): siRNA sense strand
caacucaggcgacaucuac

SEQ ID NO: 2134614 - RNA, 19 nt, Homo sapiens
  misc_RNA (1)...(19): siRNA sense strand
gcagagugccaaguccuuu

SEQ ID NO: 2134615 - RNA, 19 nt, Homo sapiens
  misc_RNA (1)...(19): siRNA sense strand
gagcugauagcgagaaagu

SEQ ID NO: 2134616 - RNA, 19 nt, Homo sapiens
  misc_RNA (1)...(19): siRNA sense strand
agaaaucaagcaagaagaa

SEQ ID NO: 2134617 - RNA, 19 nt, Homo sapiens
  misc_RNA (1)...(19): siRNA sense strand
gaauugcugaguacuccua

SEQ ID NO: 2134618 - RNA, 19 nt, Homo sapiens
  misc_RNA (1)...(19): siRNA sense strand
gcaagcgagacaacaaaga

SEQ ID NO: 2134619 - RNA, 19 nt, Homo sapiens
  misc_RNA (1)...(19): siRNA sense strand
ggucauguccagcucaaug

SEQ ID NO: 2134620 - RNA, 19 nt, Homo sapiens
  misc_RNA (1)...(19): siRNA sense strand
cgagucaccuacgacauga

SEQ ID NO: 2134621 - RNA, 19 nt, Homo sapiens
  misc_RNA (1)...(19): siRNA sense strand
agaccaaggcguucgaauu

SEQ ID NO: 2134622 - RNA, 19 nt, Homo sapiens
  misc_RNA (1)...(19): siRNA sense strand
ccaagccuuccgugucuua

SEQ ID NO: 2134623 - RNA, 19 nt, Homo sapiens
  misc_RNA (1)...(19): siRNA sense strand
uagccgagcccauuuaauc

SEQ ID NO: 2134624 - RNA, 19 nt, Homo sapiens
  misc_RNA (1)...(19): siRNA sense strand
ccuuucgacugcaggaaua

SEQ ID NO: 2134625 - RNA, 19 nt, Homo sapiens
  misc_RNA (1)...(19): siRNA sense strand
caagaugaacguugucagu

SEQ ID NO: 2134626 - RNA, 19 nt, Homo sapiens
  misc_RNA (1)...(19): siRNA sense strand
aaagagauccggaccuaca

SEQ ID NO: 2134627 - RNA, 19 nt, Homo sapiens
  misc_RNA (1)...(19): siRNA sense strand
ggucaauggcgaagucaga

SEQ ID NO: 2134628 - RNA, 19 nt, Homo sapiens
  misc_RNA (1)...(19): siRNA sense strand
caccaagccuuccgugucu

SEQ ID NO: 2134629 - RNA, 19 nt, Homo sapiens
  misc_RNA (1)...(19): siRNA sense strand
cuaaccacaucuaccauca

SEQ ID NO: 2134630 - RNA, 19 nt, Homo sapiens
  misc_RNA (1)...(19): siRNA sense strand
gaggucauguccagcucaa

SEQ ID NO: 2134631 - RNA, 19 nt, Homo sapiens
  misc_RNA (1)...(19): siRNA sense strand
cagagugccaaguccuuua

SEQ ID NO: 2134632 - RNA, 19 nt, Homo sapiens
  misc_RNA (1)...(19): siRNA sense strand
ugaauagccgagcccauuu

SEQ ID NO: 2134633 - RNA, 19 nt, Homo sapiens
  misc_RNA (1)...(19): siRNA sense strand
caucucgguuucucccauu

SEQ ID NO: 2134634 - RNA, 19 nt, Homo sapiens
  misc_RNA (1)...(19): siRNA sense strand
ucaaugggcucugugaacu

SEQ ID NO: 2134635 - RNA, 19 nt, Homo sapiens
  misc_RNA (1)...(19): siRNA sense strand
uaggcuaccuggugacugu

SEQ ID NO: 2134636 - RNA, 19 nt, Homo sapiens
  misc_RNA (1)...(19): siRNA sense strand
gagagugaccaaacugaca

SEQ ID NO: 2134637 - RNA, 19 nt, Homo sapiens
  misc_RNA (1)...(19): siRNA sense strand
cggagccuguauugugaua

SEQ ID NO: 2134638 - RNA, 19 nt, Homo sapiens
  misc_RNA (1)...(19): siRNA sense strand
ggagauagcucuguagaaa

SEQ ID NO: 2134639 - RNA, 19 nt, Homo sapiens
  misc_RNA (1)...(19): siRNA sense strand
ccaguuaccucauugcuua

SEQ ID NO: 2134640 - RNA, 19 nt, Homo sapiens
  misc_RNA (1)...(19): siRNA sense strand
gaagaugcauguugagaau

SEQ ID NO: 2134641 - RNA, 19 nt, Homo sapiens
  misc_RNA (1)...(19): siRNA sense strand
ggaagugaacaucaaauua

SEQ ID NO: 2134642 - RNA, 19 nt, Homo sapiens
  misc_RNA (1)...(19): siRNA sense strand
gagauggcauuuaguauga

SEQ ID NO: 2134643 - RNA, 19 nt, Homo sapiens
  misc_RNA (1)...(19): siRNA sense strand
caacgaccauaccauauuu

SEQ ID NO: 2134644 - RNA, 19 nt, Homo sapiens
  misc_RNA (1)...(19): siRNA sense strand
gcaaggaagugaacaucaa

SEQ ID NO: 2134645 - RNA, 19 nt, Homo sapiens
  misc_RNA (1)...(19): siRNA sense strand
gauaggagauagcucugua

SEQ ID NO: 2134646 - RNA, 19 nt, Homo sapiens
  misc_RNA (1)...(19): siRNA sense strand
gcaguuaccucauucaaag

SEQ ID NO: 2134647 - RNA, 19 nt, Homo sapiens
  misc_RNA (1)...(19): siRNA sense strand
ccaguacccuugagccuua

SEQ ID NO: 2134648 - RNA, 19 nt, Homo sapiens
  misc_RNA (1)...(19): siRNA sense strand
gcagaaagccagaggacua

SEQ ID NO: 2134649 - RNA, 19 nt, Homo sapiens
  misc_RNA (1)...(19): siRNA sense strand
gcagaaagccagaggacua

SEQ ID NO: 2134650 - RNA, 19 nt, Homo sapiens
  misc_RNA (1)...(19): siRNA sense strand
ggacccagaucaagaaugu

SEQ ID NO: 2134651 - RNA, 19 nt, Homo sapiens
  misc_RNA (1)...(19): siRNA sense strand
ccaaagacuuguuucagaa

SEQ ID NO: 2134652 - RNA, 19 nt, Homo sapiens
  misc_RNA (1)...(19): siRNA sense strand
gacaagagcaucagacaaa

SEQ ID NO: 2134653 - RNA, 19 nt, Homo sapiens
  misc_RNA (1)...(19): siRNA sense strand
ugaagugccugguaagaaa

SEQ ID NO: 2134654 - RNA, 19 nt, Homo sapiens
  misc_RNA (1)...(19): siRNA sense strand
gaaaagcaguuaccucauu

SEQ ID NO: 2134655 - RNA, 19 nt, Homo sapiens
  misc_RNA (1)...(19): siRNA sense strand
ggacauacgcagcaccaua

SEQ ID NO: 2134656 - RNA, 19 nt, Homo sapiens
  misc_RNA (1)...(19): siRNA sense strand
gcagcaccauacaauauuu

SEQ ID NO: 2134657 - RNA, 19 nt, Homo sapiens
  misc_RNA (1)...(19): siRNA sense strand
aaagagcaguccaagcaua

SEQ ID NO: 2134658 - RNA, 19 nt, Homo sapiens
  misc_RNA (1)...(19): siRNA sense strand
gagcaaagauuuucacaug

SEQ ID NO: 2134659 - RNA, 19 nt, Homo sapiens
  misc_RNA (1)...(19): siRNA sense strand
ucaaagaggacauaugauu

SEQ ID NO: 2134660 - RNA, 19 nt, Homo sapiens
  misc_RNA (1)...(19): siRNA sense strand
gcaaagaaaggccagagaa

SEQ ID NO: 2134661 - RNA, 19 nt, Homo sapiens
  misc_RNA (1)...(19): siRNA sense strand
ucaaguauguggagugaug

SEQ ID NO: 2134662 - RNA, 19 nt, Homo sapiens
  misc_RNA (1)...(19): siRNA sense strand
aaaugaagaugcauguuga

SEQ ID NO: 2134663 - RNA, 19 nt, Homo sapiens
  misc_RNA (1)...(19): siRNA sense strand
ucagaaagaugagagagaa

SEQ ID NO: 2134664 - RNA, 19 nt, Homo sapiens
  misc_RNA (1)...(19): siRNA sense strand
gagaagacgccauuuggaa

SEQ ID NO: 2134665 - RNA, 19 nt, Homo sapiens
  misc_RNA (1)...(19): siRNA sense strand
ggaaacccguagauacaga

SEQ ID NO: 2134666 - RNA, 19 nt, Homo sapiens
  misc_RNA (1)...(19): siRNA sense strand
gaggacauaugauucuuuc

SEQ ID NO: 2134667 - RNA, 19 nt, Homo sapiens
  misc_RNA (1)...(19): siRNA sense strand
ccagagauggcauuuagua

SEQ ID NO: 2134668 - RNA, 19 nt, Homo sapiens
  misc_RNA (1)...(19): siRNA sense strand
gaaaaccaguuaccucauu

SEQ ID NO: 2134669 - RNA, 19 nt, Homo sapiens
  misc_RNA (1)...(19): siRNA sense strand
ucaggaccauauaguauuu

SEQ ID NO: 2134670 - RNA, 19 nt, Homo sapiens
  misc_RNA (1)...(19): siRNA sense strand
gaaagccaguuaccucagu

SEQ ID NO: 2134671 - RNA, 19 nt, Homo sapiens
  misc_RNA (1)...(19): siRNA sense strand
acagagaaaugguugauuc

SEQ ID NO: 2134672 - RNA, 19 nt, Homo sapiens
  misc_RNA (1)...(19): siRNA sense strand
ugggaaagguccaugcuaa

SEQ ID NO: 2134673 - RNA, 19 nt, Homo sapiens
  misc_RNA (1)...(19): siRNA sense strand
agaaaugguugaugucaga

SEQ ID NO: 2134674 - RNA, 19 nt, Homo sapiens
  misc_RNA (1)...(19): siRNA sense strand
ccagaggacuagauccaaa

SEQ ID NO: 2134675 - RNA, 19 nt, Homo sapiens
  misc_RNA (1)...(19): siRNA sense strand
caaagaaaggccagagaaa

SEQ ID NO: 2134676 - RNA, 19 nt, Homo sapiens
  misc_RNA (1)...(19): siRNA sense strand
auguuuagcucuccacuua

SEQ ID NO: 2134677 - RNA, 19 nt, Homo sapiens
  misc_RNA (1)...(19): siRNA sense strand
acagagaaaugguugaugu

SEQ ID NO: 2134678 - RNA, 19 nt, Homo sapiens
  misc_RNA (1)...(19): siRNA sense strand
ccagaggacuagagccaaa

SEQ ID NO: 2134679 - RNA, 19 nt, Homo sapiens
  misc_RNA (1)...(19): siRNA sense strand
acaagcaccucucuucaga

SEQ ID NO: 2134680 - RNA, 19 nt, Homo sapiens
  misc_RNA (1)...(19): siRNA sense strand
ggagugaugcuacaguuug

SEQ ID NO: 2134681 - RNA, 19 nt, Homo sapiens
  misc_RNA (1)...(19): siRNA sense strand
gcaaacagagacuagauuc

SEQ ID NO: 2134682 - RNA, 19 nt, Homo sapiens
  misc_RNA (1)...(19): siRNA sense strand
guuuagcucuccacuuauu

SEQ ID NO: 2134683 - RNA, 19 nt, Homo sapiens
  misc_RNA (1)...(19): siRNA sense strand
agaugcauguugagaauuu

SEQ ID NO: 2134684 - RNA, 19 nt, Homo sapiens
  misc_RNA (1)...(19): siRNA sense strand
gaaaucuguugaagaaagg

SEQ ID NO: 2134685 - RNA, 19 nt, Homo sapiens
  misc_RNA (1)...(19): siRNA sense strand
gaagauacagauuuagaca

SEQ ID NO: 2134686 - RNA, 19 nt, Homo sapiens
  misc_RNA (1)...(19): siRNA sense strand
acagagaaguggucgauuc

SEQ ID NO: 2134687 - RNA, 19 nt, Homo sapiens
  misc_RNA (1)...(19): siRNA sense strand
ugugaucucugcaacauga

SEQ ID NO: 2134688 - RNA, 19 nt, Homo sapiens
  misc_RNA (1)...(19): siRNA sense strand
ugccauauuuguaguauug

SEQ ID NO: 2134689 - RNA, 19 nt, Homo sapiens
  misc_RNA (1)...(19): siRNA sense strand
aagcaccucucuucagaaa

SEQ ID NO: 2134690 - RNA, 19 nt, Homo sapiens
  misc_RNA (1)...(19): siRNA sense strand
ucaagaaugugugagcaaa

SEQ ID NO: 2134691 - RNA, 19 nt, Homo sapiens
  misc_RNA (1)...(19): siRNA sense strand
gacauaugauucuuuccaa

SEQ ID NO: 2134692 - RNA, 19 nt, Homo sapiens
  misc_RNA (1)...(19): siRNA sense strand
ggaugagucuauucuugga

SEQ ID NO: 2134693 - RNA, 19 nt, Homo sapiens
  misc_RNA (1)...(19): siRNA sense strand
gagugaugcuacaguuuga

SEQ ID NO: 2134694 - RNA, 19 nt, Homo sapiens
  misc_RNA (1)...(19): siRNA sense strand
gaacuugaagauuacauca

SEQ ID NO: 2134695 - RNA, 19 nt, Homo sapiens
  misc_RNA (1)...(19): siRNA sense strand
agaaaucuguugaagaaag

SEQ ID NO: 2134696 - RNA, 19 nt, Homo sapiens
  misc_RNA (1)...(19): siRNA sense strand
gaacguaagcacaggaaag

SEQ ID NO: 2134697 - RNA, 19 nt, Homo sapiens
  misc_RNA (1)...(19): siRNA sense strand
agaaacaucagaagagaaa

SEQ ID NO: 2134698 - RNA, 19 nt, Homo sapiens
  misc_RNA (1)...(19): siRNA sense strand
aaacagaaacaucagaaga

SEQ ID NO: 2134699 - RNA, 19 nt, Homo sapiens
  misc_RNA (1)...(19): siRNA sense strand
uguagaaucugaaguuuac

SEQ ID NO: 2134700 - RNA, 19 nt, Homo sapiens
  misc_RNA (1)...(19): siRNA sense strand
caaagaggacauaugauuc

SEQ ID NO: 2134701 - RNA, 19 nt, Homo sapiens
  misc_RNA (1)...(19): siRNA sense strand
aaccagagauggcauuuag

SEQ ID NO: 2134702 - RNA, 19 nt, Homo sapiens
  misc_RNA (1)...(19): siRNA sense strand
gaaaugcuuugggaugagu

SEQ ID NO: 2134703 - RNA, 19 nt, Homo sapiens
  misc_RNA (1)...(19): siRNA sense strand
cauagaauguuggagcaaa

SEQ ID NO: 2134704 - RNA, 19 nt, Homo sapiens
  misc_RNA (1)...(19): siRNA sense strand
gaacagagaaaugguugau

SEQ ID NO: 2134705 - RNA, 19 nt, Homo sapiens
  misc_RNA (1)...(19): siRNA sense strand
gaagauuacaucaaaguac

SEQ ID NO: 2134706 - RNA, 19 nt, Homo sapiens
  misc_RNA (1)...(19): siRNA sense strand
acagaaagccagaggacua

SEQ ID NO: 2134707 - RNA, 19 nt, Homo sapiens
  misc_RNA (1)...(19): siRNA sense strand
caauacugcugaccaucaa

SEQ ID NO: 2134708 - RNA, 19 nt, Homo sapiens
  misc_RNA (1)...(19): siRNA sense strand
aaauaacucuggcucauac

SEQ ID NO: 2134709 - RNA, 19 nt, Homo sapiens
  misc_RNA (1)...(19): siRNA sense strand
agauagcucuguagaaaca

SEQ ID NO: 2134710 - RNA, 19 nt, Homo sapiens
  misc_RNA (1)...(19): siRNA sense strand
uccaaagacuuguuucaga

SEQ ID NO: 2134711 - RNA, 19 nt, Homo sapiens
  misc_RNA (1)...(19): siRNA sense strand
aaacaauacugcugaccau

SEQ ID NO: 2134712 - RNA, 19 nt, Homo sapiens
  misc_RNA (1)...(19): siRNA sense strand
cagagacuguuucccagaa

SEQ ID NO: 2134713 - RNA, 19 nt, Homo sapiens
  misc_RNA (1)...(19): siRNA sense strand
ucagaaagauaggagauag

SEQ ID NO: 2134714 - RNA, 19 nt, Homo sapiens
  misc_RNA (1)...(19): siRNA sense strand
ccaacgaccauaccauauu

SEQ ID NO: 2134715 - RNA, 19 nt, Homo sapiens
  misc_RNA (1)...(19): siRNA sense strand
ucaggaagcuaccgucucu

SEQ ID NO: 2134716 - RNA, 19 nt, Homo sapiens
  misc_RNA (1)...(19): siRNA sense strand
caaggucaguucaggaaag

SEQ ID NO: 2134717 - RNA, 19 nt, Homo sapiens
  misc_RNA (1)...(19): siRNA sense strand
acagaaacaucagaagaga

SEQ ID NO: 2134718 - RNA, 19 nt, Homo sapiens
  misc_RNA (1)...(19): siRNA sense strand
gaaaauaacucuggcucau

SEQ ID NO: 2134719 - RNA, 19 nt, Homo sapiens
  misc_RNA (1)...(19): siRNA sense strand
gaaugugugagcaaagauu

SEQ ID NO: 2134720 - RNA, 19 nt, Homo sapiens
  misc_RNA (1)...(19): siRNA sense strand
gagcaucagacaaaggaaa

SEQ ID NO: 2134721 - RNA, 19 nt, Homo sapiens
  misc_RNA (1)...(19): siRNA sense strand
agaaagagcaguccaagca

SEQ ID NO: 2134722 - RNA, 19 nt, Homo sapiens
  misc_RNA (1)...(19): siRNA sense strand
aaaaugaagugccugguaa

SEQ ID NO: 2134723 - RNA, 19 nt, Homo sapiens
  misc_RNA (1)...(19): siRNA sense strand
ggacauaugauucuuucca

SEQ ID NO: 2134724 - RNA, 19 nt, Homo sapiens
  misc_RNA (1)...(19): siRNA sense strand
aaucugaaguuuacaagca

SEQ ID NO: 2134725 - RNA, 19 nt, Homo sapiens
  misc_RNA (1)...(19): siRNA sense strand
ucaagcaggucauaaacag

SEQ ID NO: 2134726 - RNA, 19 nt, Homo sapiens
  misc_RNA (1)...(19): siRNA sense strand
gacuagauccaaagacuug

SEQ ID NO: 2134727 - RNA, 19 nt, Homo sapiens
  misc_RNA (1)...(19): siRNA sense strand
gaccauauaguauuucaca

SEQ ID NO: 2134728 - RNA, 19 nt, Homo sapiens
  misc_RNA (1)...(19): siRNA sense strand
gggaaagguccaugcuaaa

SEQ ID NO: 2134729 - RNA, 19 nt, Homo sapiens
  misc_RNA (1)...(19): siRNA sense strand
gaaaggacagaagaggaaa

SEQ ID NO: 2134730 - RNA, 19 nt, Homo sapiens
  misc_RNA (1)...(19): siRNA sense strand
aagaaaggccagagaaaga

SEQ ID NO: 2134731 - RNA, 19 nt, Homo sapiens
  misc_RNA (1)...(19): siRNA sense strand
gggcaguaguuuuaaagua

SEQ ID NO: 2134732 - RNA, 19 nt, Homo sapiens
  misc_RNA (1)...(19): siRNA sense strand
acucauggguacagagaaa

SEQ ID NO: 2134733 - RNA, 19 nt, Homo sapiens
  misc_RNA (1)...(19): siRNA sense strand
ucaaucuagugaagaauuc

SEQ ID NO: 2134734 - RNA, 19 nt, Homo sapiens
  misc_RNA (1)...(19): siRNA sense strand
caaggaagugaacaucaaa

SEQ ID NO: 2134735 - RNA, 19 nt, Homo sapiens
  misc_RNA (1)...(19): siRNA sense strand
gaucaggcaucuccaucag

SEQ ID NO: 2134736 - RNA, 19 nt, Homo sapiens
  misc_RNA (1)...(19): siRNA sense strand
ggucauaaacagaaacauc

SEQ ID NO: 2134737 - RNA, 19 nt, Homo sapiens
  misc_RNA (1)...(19): siRNA sense strand
ugggaugagucuauucuug

SEQ ID NO: 2134738 - RNA, 19 nt, Homo sapiens
  misc_RNA (1)...(19): siRNA sense strand
ccaauaggcuugucgauaa

SEQ ID NO: 2134739 - RNA, 19 nt, Homo sapiens
  misc_RNA (1)...(19): siRNA sense strand
gagaggaugugcccaauag

SEQ ID NO: 2134740 - RNA, 19 nt, Homo sapiens
  misc_RNA (1)...(19): siRNA sense strand
uaugauagauggagaugga

SEQ ID NO: 2134741 - RNA, 19 nt, Homo sapiens
  misc_RNA (1)...(19): siRNA sense strand
gagcuaaggaggaaaauua

SEQ ID NO: 2134742 - RNA, 19 nt, Homo sapiens
  misc_RNA (1)...(19): siRNA sense strand
gagccuggaggaaauguua

SEQ ID NO: 2134743 - RNA, 19 nt, Homo sapiens
  misc_RNA (1)...(19): siRNA sense strand
ugagagagcuaaggaggaa

SEQ ID NO: 2134744 - RNA, 19 nt, Homo sapiens
  misc_RNA (1)...(19): siRNA sense strand
gaaaauguccccaaggaaa

SEQ ID NO: 2134745 - RNA, 19 nt, Homo sapiens
  misc_RNA (1)...(19): siRNA sense strand
agauggagaugauauggaa

SEQ ID NO: 2134746 - RNA, 19 nt, Homo sapiens
  misc_RNA (1)...(19): siRNA sense strand
ggagaggaugugcccaaua

SEQ ID NO: 2134747 - RNA, 19 nt, Homo sapiens
  misc_RNA (1)...(19): siRNA sense strand
gagaugagagagcuaagga

SEQ ID NO: 2134748 - RNA, 19 nt, Homo sapiens
  misc_RNA (1)...(19): siRNA sense strand
caugaugaguuuugccuua

SEQ ID NO: 2134749 - RNA, 19 nt, Homo sapiens
  misc_RNA (1)...(19): siRNA sense strand
uuuaggagguggugaauac

SEQ ID NO: 2134750 - RNA, 19 nt, Homo sapiens
  misc_RNA (1)...(19): siRNA sense strand
gaggagaugagagagcuaa

SEQ ID NO: 2134751 - RNA, 19 nt, Homo sapiens
  misc_RNA (1)...(19): siRNA sense strand
uacagucugcgcauucuua

SEQ ID NO: 2134752 - RNA, 19 nt, Homo sapiens
  misc_RNA (1)...(19): siRNA sense strand
agauggagauggagaugau

SEQ ID NO: 2134753 - RNA, 19 nt, Homo sapiens
  misc_RNA (1)...(19): siRNA sense strand
gagguacagucugcgcauu

SEQ ID NO: 2134754 - RNA, 19 nt, Homo sapiens
  misc_RNA (1)...(19): siRNA sense strand
gucgauaacauugauauga

SEQ ID NO: 2134755 - RNA, 19 nt, Homo sapiens
  misc_RNA (1)...(19): siRNA sense strand
cccaauaggcuugucgaua

SEQ ID NO: 2134756 - RNA, 19 nt, Homo sapiens
  misc_RNA (1)...(19): siRNA sense strand
ggacccuccucaccaugau

SEQ ID NO: 2134757 - RNA, 19 nt, Homo sapiens
  misc_RNA (1)...(19): siRNA sense strand
caauaggcuugucgauaac

SEQ ID NO: 2134758 - RNA, 19 nt, Homo sapiens
  misc_RNA (1)...(19): siRNA sense strand
gagauggagaugauaugga

SEQ ID NO: 2134759 - RNA, 19 nt, Homo sapiens
  misc_RNA (1)...(19): siRNA sense strand
gcuugucgauaacauugau

SEQ ID NO: 2134760 - RNA, 19 nt, Homo sapiens
  misc_RNA (1)...(19): siRNA sense strand
gauaugauagauggagaug

SEQ ID NO: 2134761 - RNA, 19 nt, Homo sapiens
  misc_RNA (1)...(19): siRNA sense strand
ggagauggagaugauaugg

SEQ ID NO: 2134762 - RNA, 19 nt, Homo sapiens
  misc_RNA (1)...(19): siRNA sense strand
gguacagucugcgcauucu

SEQ ID NO: 2134763 - RNA, 19 nt, Homo sapiens
  misc_RNA (1)...(19): siRNA sense strand
gggacccuccucaccauga

SEQ ID NO: 2134764 - RNA, 19 nt, Homo sapiens
  misc_RNA (1)...(19): siRNA sense strand
gauagauggagauggagau

SEQ ID NO: 2134765 - RNA, 19 nt, Homo sapiens
  misc_RNA (1)...(19): siRNA sense strand
agucugcgcauucuuauag

SEQ ID NO: 2134766 - RNA, 19 nt, Homo sapiens
  misc_RNA (1)...(19): siRNA sense strand
gauggagauggagaugaua

SEQ ID NO: 2134767 - RNA, 19 nt, Homo sapiens
  misc_RNA (1)...(19): siRNA sense strand
ccagagacaugaucaauau

SEQ ID NO: 2134768 - RNA, 19 nt, Homo sapiens
  misc_RNA (1)...(19): siRNA sense strand
gcaaagccaugggagauuu

SEQ ID NO: 2134769 - RNA, 19 nt, Homo sapiens
  misc_RNA (1)...(19): siRNA sense strand
guugaucacuugaguuaua

SEQ ID NO: 2134770 - RNA, 19 nt, Homo sapiens
  misc_RNA (1)...(19): siRNA sense strand
ggaaggagaugauacuagu

SEQ ID NO: 2134771 - RNA, 19 nt, Homo sapiens
  misc_RNA (1)...(19): siRNA sense strand
uaaaggagcauaucagaaa

SEQ ID NO: 2134772 - RNA, 19 nt, Homo sapiens
  misc_RNA (1)...(19): siRNA sense strand
guaaagaaaccaugucauu

SEQ ID NO: 2134773 - RNA, 19 nt, Homo sapiens
  misc_RNA (1)...(19): siRNA sense strand
gaagaggccacuaucaauu

SEQ ID NO: 2134774 - RNA, 19 nt, Homo sapiens
  misc_RNA (1)...(19): siRNA sense strand
guaacuaucuggcccaaug

SEQ ID NO: 2134775 - RNA, 19 nt, Homo sapiens
  misc_RNA (1)...(19): siRNA sense strand
gaccauagaugagauuaga

SEQ ID NO: 2134776 - RNA, 19 nt, Homo sapiens
  misc_RNA (1)...(19): siRNA sense strand
cgaaguagguguagugaca

SEQ ID NO: 2134777 - RNA, 19 nt, Homo sapiens
  misc_RNA (1)...(19): siRNA sense strand
gguguggccauauuuauua

SEQ ID NO: 2134778 - RNA, 19 nt, Homo sapiens
  misc_RNA (1)...(19): siRNA sense strand
ggcaagcccuccuucauau

SEQ ID NO: 2134779 - RNA, 19 nt, Homo sapiens
  misc_RNA (1)...(19): siRNA sense strand
uaagacagaugcaguagca

SEQ ID NO: 2134780 - RNA, 19 nt, Homo sapiens
  misc_RNA (1)...(19): siRNA sense strand
uaggacaacugacuacuga

SEQ ID NO: 2134781 - RNA, 19 nt, Homo sapiens
  misc_RNA (1)...(19): siRNA sense strand
ggacaacugacuacugauu

SEQ ID NO: 2134782 - RNA, 19 nt, Homo sapiens
  misc_RNA (1)...(19): siRNA sense strand
ugaaggcagugucuaagaa

SEQ ID NO: 2134783 - RNA, 19 nt, Homo sapiens
  misc_RNA (1)...(19): siRNA sense strand
gaaggcauuggcagcauua

SEQ ID NO: 2134784 - RNA, 19 nt, Homo sapiens
  misc_RNA (1)...(19): siRNA sense strand
gaaggaaggagcucuguca

SEQ ID NO: 2134785 - RNA, 19 nt, Homo sapiens
  misc_RNA (1)...(19): siRNA sense strand
ggacuaagaauaagacaag

SEQ ID NO: 2134786 - RNA, 19 nt, Homo sapiens
  misc_RNA (1)...(19): siRNA sense strand
ggaagaggccacuaucaau

SEQ ID NO: 2134787 - RNA, 19 nt, Homo sapiens
  misc_RNA (1)...(19): siRNA sense strand
gagacaugaucaauaugaa

SEQ ID NO: 2134788 - RNA, 19 nt, Homo sapiens
  misc_RNA (1)...(19): siRNA sense strand
ggaggaagagaauguuauu

SEQ ID NO: 2134789 - RNA, 19 nt, Homo sapiens
  misc_RNA (1)...(19): siRNA sense strand
ccagaaaucuuguuuugaa

SEQ ID NO: 2134790 - RNA, 19 nt, Homo sapiens
  misc_RNA (1)...(19): siRNA sense strand
gaaaaugccuguucuuugc

SEQ ID NO: 2134791 - RNA, 19 nt, Homo sapiens
  misc_RNA (1)...(19): siRNA sense strand
ugauaaaccugaaauuggu

SEQ ID NO: 2134792 - RNA, 19 nt, Homo sapiens
  misc_RNA (1)...(19): siRNA sense strand
gcaaaagccaaucuuguua

SEQ ID NO: 2134793 - RNA, 19 nt, Homo sapiens
  misc_RNA (1)...(19): siRNA sense strand
ggacuggucugagguaacu

SEQ ID NO: 2134794 - RNA, 19 nt, Homo sapiens
  misc_RNA (1)...(19): siRNA sense strand
gggaagaggccacuaucaa

SEQ ID NO: 2134795 - RNA, 19 nt, Homo sapiens
  misc_RNA (1)...(19): siRNA sense strand
guccaucacuacauuguug

SEQ ID NO: 2134796 - RNA, 19 nt, Homo sapiens
  misc_RNA (1)...(19): siRNA sense strand
gaacucaccgggacagcaa

SEQ ID NO: 2134797 - RNA, 19 nt, Homo sapiens
  misc_RNA (1)...(19): siRNA sense strand
cuacugauccucuuauuca

SEQ ID NO: 2134798 - RNA, 19 nt, Homo sapiens
  misc_RNA (1)...(19): siRNA sense strand
cuauauggauucugaggaa

SEQ ID NO: 2134799 - RNA, 19 nt, Homo sapiens
  misc_RNA (1)...(19): siRNA sense strand
ggagguaaaugggauuaag

SEQ ID NO: 2134800 - RNA, 19 nt, Homo sapiens
  misc_RNA (1)...(19): siRNA sense strand
gacaagagcccaggccaaa

SEQ ID NO: 2134801 - RNA, 19 nt, Homo sapiens
  misc_RNA (1)...(19): siRNA sense strand
gaggaggaagagaauguua

SEQ ID NO: 2134802 - RNA, 19 nt, Homo sapiens
  misc_RNA (1)...(19): siRNA sense strand
gagggaggcuacugguguu

SEQ ID NO: 2134803 - RNA, 19 nt, Homo sapiens
  misc_RNA (1)...(19): siRNA sense strand
cagggaaguuaaagagauu

SEQ ID NO: 2134804 - RNA, 19 nt, Homo sapiens
  misc_RNA (1)...(19): siRNA sense strand
uuucagagcuuuuccauuu

SEQ ID NO: 2134805 - RNA, 19 nt, Homo sapiens
  misc_RNA (1)...(19): siRNA sense strand
auugaaagcuugcucaguu

SEQ ID NO: 2134806 - RNA, 19 nt, Homo sapiens
  misc_RNA (1)...(19): siRNA sense strand
uuacuuaagucaacuacug

SEQ ID NO: 2134807 - RNA, 19 nt, Homo sapiens
  misc_RNA (1)...(19): siRNA sense strand
ccagcuguguuaggauuua

SEQ ID NO: 2134808 - RNA, 19 nt, Homo sapiens
  misc_RNA (1)...(19): siRNA sense strand
gcaagcccuccuucauaua

SEQ ID NO: 2134809 - RNA, 19 nt, Homo sapiens
  misc_RNA (1)...(19): siRNA sense strand
gaaagacaacgcaaaauug

SEQ ID NO: 2134810 - RNA, 19 nt, Homo sapiens
  misc_RNA (1)...(19): siRNA sense strand
ggucugugcugaggaguug

SEQ ID NO: 2134811 - RNA, 19 nt, Homo sapiens
  misc_RNA (1)...(19): siRNA sense strand
ggaggcuacugguguuguu

SEQ ID NO: 2134812 - RNA, 19 nt, Homo sapiens
  misc_RNA (1)...(19): siRNA sense strand
ggucugagguaacuaucug

SEQ ID NO: 2134813 - RNA, 19 nt, Homo sapiens
  misc_RNA (1)...(19): siRNA sense strand
cagccuguguaugaaauua

SEQ ID NO: 2134814 - RNA, 19 nt, Homo sapiens
  misc_RNA (1)...(19): siRNA sense strand
gaugagauuagacgucaaa

SEQ ID NO: 2134815 - RNA, 19 nt, Homo sapiens
  misc_RNA (1)...(19): siRNA sense strand
ucagggaaguuaaagagau

SEQ ID NO: 2134816 - RNA, 19 nt, Homo sapiens
  misc_RNA (1)...(19): siRNA sense strand
ccaagaguuuauuaacgaa

SEQ ID NO: 2134817 - RNA, 19 nt, Homo sapiens
  misc_RNA (1)...(19): siRNA sense strand
cccaagaguuuauuaacga

SEQ ID NO: 2134818 - RNA, 19 nt, Homo sapiens
  misc_RNA (1)...(19): siRNA sense strand
gccagagacaugaucaaua

SEQ ID NO: 2134819 - RNA, 19 nt, Homo sapiens
  misc_RNA (1)...(19): siRNA sense strand
gacaacugacuacugauuu

SEQ ID NO: 2134820 - RNA, 19 nt, Homo sapiens
  misc_RNA (1)...(19): siRNA sense strand
agaaaaggcucaauuguag

SEQ ID NO: 2134821 - RNA, 19 nt, Homo sapiens
  misc_RNA (1)...(19): siRNA sense strand
cauaaaggagcauaucaga

SEQ ID NO: 2134822 - RNA, 19 nt, Homo sapiens
  misc_RNA (1)...(19): siRNA sense strand
gcacuaagaaugauaaacc

SEQ ID NO: 2134823 - RNA, 19 nt, Homo sapiens
  misc_RNA (1)...(19): siRNA sense strand
caauuguaguuguugauca

SEQ ID NO: 2134824 - RNA, 19 nt, Homo sapiens
  misc_RNA (1)...(19): siRNA sense strand
uaacgaaguagguguagug

SEQ ID NO: 2134825 - RNA, 19 nt, Homo sapiens
  misc_RNA (1)...(19): siRNA sense strand
caagcccuccuucauauau

SEQ ID NO: 2134826 - RNA, 19 nt, Homo sapiens
  misc_RNA (1)...(19): siRNA sense strand
cagaaaaggcucaauugua

SEQ ID NO: 2134827 - RNA, 19 nt, Homo sapiens
  misc_RNA (1)...(19): siRNA sense strand
ugaaggcauuggcagcauu

SEQ ID NO: 2134828 - RNA, 19 nt, Homo sapiens
  misc_RNA (1)...(19): siRNA sense strand
ugaucaauaugaaggcauu

SEQ ID NO: 2134829 - RNA, 19 nt, Homo sapiens
  misc_RNA (1)...(19): siRNA sense strand
aaaugaggcugguacugau

SEQ ID NO: 2134830 - RNA, 19 nt, Homo sapiens
  misc_RNA (1)...(19): siRNA sense strand
ggaugaaagacaacgcaaa

SEQ ID NO: 2134831 - RNA, 19 nt, Homo sapiens
  misc_RNA (1)...(19): siRNA sense strand
aggcaagcccuccuucaua

SEQ ID NO: 2134832 - RNA, 19 nt, Homo sapiens
  misc_RNA (1)...(19): siRNA sense strand
uccaccagcuccacaugua

SEQ ID NO: 2134833 - RNA, 19 nt, Homo sapiens
  misc_RNA (1)...(19): siRNA sense strand
uuagugguguggccauauu

SEQ ID NO: 2134834 - RNA, 19 nt, Homo sapiens
  misc_RNA (1)...(19): siRNA sense strand
agagacaugaucaauauga

SEQ ID NO: 2134835 - RNA, 19 nt, Homo sapiens
  misc_RNA (1)...(19): siRNA sense strand
uugaaagcuugcucaguuu

SEQ ID NO: 2134836 - RNA, 19 nt, Homo sapiens
  misc_RNA (1)...(19): siRNA sense strand
caacuacugauccucuuau

SEQ ID NO: 2134837 - RNA, 19 nt, Homo sapiens
  misc_RNA (1)...(19): siRNA sense strand
ggaggaggaggaagagaau

SEQ ID NO: 2134838 - RNA, 19 nt, Homo sapiens
  misc_RNA (1)...(19): siRNA sense strand
gaaggagaugauacuaguu

SEQ ID NO: 2134839 - RNA, 19 nt, Homo sapiens
  misc_RNA (1)...(19): siRNA sense strand
ugacacuuauugaaagcuu

SEQ ID NO: 2134840 - RNA, 19 nt, Homo sapiens
  misc_RNA (1)...(19): siRNA sense strand
caaggacuggucugaggua

SEQ ID NO: 2134841 - RNA, 19 nt, Homo sapiens
  misc_RNA (1)...(19): siRNA sense strand
aaggagaugauacuaguuu

SEQ ID NO: 2134842 - RNA, 19 nt, Homo sapiens
  misc_RNA (1)...(19): siRNA sense strand
guguggccauauuuauuaa

SEQ ID NO: 2134843 - RNA, 19 nt, Homo sapiens
  misc_RNA (1)...(19): siRNA sense strand
gcccaagaguuuauuaacg

SEQ ID NO: 2134844 - RNA, 19 nt, Homo sapiens
  misc_RNA (1)...(19): siRNA sense strand
uaacauaaaggagcauauc

SEQ ID NO: 2134845 - RNA, 19 nt, Homo sapiens
  misc_RNA (1)...(19): siRNA sense strand
ccaugucauuuccuuugaa

SEQ ID NO: 2134846 - RNA, 19 nt, Homo sapiens
  misc_RNA (1)...(19): siRNA sense strand
agacuguaauuacucugaa

SEQ ID NO: 2134847 - RNA, 19 nt, Homo sapiens
  misc_RNA (1)...(19): siRNA sense strand
gaugaaagacaacgcaaaa

SEQ ID NO: 2134848 - RNA, 19 nt, Homo sapiens
  misc_RNA (1)...(19): siRNA sense strand
gaucccaggcaccaucuga

SEQ ID NO: 2134849 - RNA, 19 nt, Homo sapiens
  misc_RNA (1)...(19): siRNA sense strand
ucaacuacugauccucuua

SEQ ID NO: 2134850 - RNA, 19 nt, Homo sapiens
  misc_RNA (1)...(19): siRNA sense strand
gggcaaagccaugggagau

SEQ ID NO: 2134851 - RNA, 19 nt, Homo sapiens
  misc_RNA (1)...(19): siRNA sense strand
uguaguuguugaucacuug

SEQ ID NO: 2134852 - RNA, 19 nt, Homo sapiens
  misc_RNA (1)...(19): siRNA sense strand
agaugaaggcagugucuaa

SEQ ID NO: 2134853 - RNA, 19 nt, Homo sapiens
  misc_RNA (1)...(19): siRNA sense strand
cauguuaagcauaugugua

SEQ ID NO: 2134854 - RNA, 19 nt, Homo sapiens
  misc_RNA (1)...(19): siRNA sense strand
gcauauguguaaagaaacc

SEQ ID NO: 2134855 - RNA, 19 nt, Homo sapiens
  misc_RNA (1)...(19): siRNA sense strand
guggccauauuuauuaaca

SEQ ID NO: 2134856 - RNA, 19 nt, Homo sapiens
  misc_RNA (1)...(19): siRNA sense strand
gggaaggagaugauacuag

SEQ ID NO: 2134857 - RNA, 19 nt, Homo sapiens
  misc_RNA (1)...(19): siRNA sense strand
acucaucuuuaaccagaaa

SEQ ID NO: 2134858 - RNA, 19 nt, Homo sapiens
  misc_RNA (1)...(19): siRNA sense strand
ugaaagacaacgcaaaauu

SEQ ID NO: 2134859 - RNA, 19 nt, Homo sapiens
  misc_RNA (1)...(19): siRNA sense strand
cccauuugcccaagaguuu

SEQ ID NO: 2134860 - RNA, 19 nt, Homo sapiens
  misc_RNA (1)...(19): siRNA sense strand
ggaggaggaagagaauguu

SEQ ID NO: 2134861 - RNA, 19 nt, Homo sapiens
  misc_RNA (1)...(19): siRNA sense strand
ccaccagcuccacauguaa

SEQ ID NO: 2134862 - RNA, 19 nt, Homo sapiens
  misc_RNA (1)...(19): siRNA sense strand
gacuguaauuacucugaau

SEQ ID NO: 2134863 - RNA, 19 nt, Homo sapiens
  misc_RNA (1)...(19): siRNA sense strand
gccuguguaugaaauuaau

SEQ ID NO: 2134864 - RNA, 19 nt, Homo sapiens
  misc_RNA (1)...(19): siRNA sense strand
gaggaagagaauguuauug

SEQ ID NO: 2134865 - RNA, 19 nt, Homo sapiens
  misc_RNA (1)...(19): siRNA sense strand
uuguugaucacuugaguua

SEQ ID NO: 2134866 - RNA, 19 nt, Homo sapiens
  misc_RNA (1)...(19): siRNA sense strand
gccuaagacucugggcaaa

SEQ ID NO: 2134867 - RNA, 19 nt, Homo sapiens
  misc_RNA (1)...(19): siRNA sense strand
gaagaagaaucccgccauu

SEQ ID NO: 2134868 - RNA, 19 nt, Homo sapiens
  misc_RNA (1)...(19): siRNA sense strand
ugacaaccauuaugacuuu

SEQ ID NO: 2134869 - RNA, 19 nt, Homo sapiens
  misc_RNA (1)...(19): siRNA sense strand
gagaugauguagaaagguu

SEQ ID NO: 2134870 - RNA, 19 nt, Homo sapiens
  misc_RNA (1)...(19): siRNA sense strand
ggaacuagcggcaaacaau

SEQ ID NO: 2134871 - RNA, 19 nt, Homo sapiens
  misc_RNA (1)...(19): siRNA sense strand
gaaaaugcccaacaagaaa

SEQ ID NO: 2134872 - RNA, 19 nt, Homo sapiens
  misc_RNA (1)...(19): siRNA sense strand
agaagaaucccgccauuug

SEQ ID NO: 2134873 - RNA, 19 nt, Homo sapiens
  misc_RNA (1)...(19): siRNA sense strand
gagagaugauguagaaagg

SEQ ID NO: 2134874 - RNA, 19 nt, Homo sapiens
  misc_RNA (1)...(19): siRNA sense strand
ggaaaaugcccaacaagaa

SEQ ID NO: 2134875 - RNA, 19 nt, Homo sapiens
  misc_RNA (1)...(19): siRNA sense strand
gaagaaucccgccauuugg

SEQ ID NO: 2134876 - RNA, 19 nt, Homo sapiens
  misc_RNA (1)...(19): siRNA sense strand
gaacuagcggcaaacaauc

SEQ ID NO: 2134877 - RNA, 19 nt, Homo sapiens
  misc_RNA (1)...(19): siRNA sense strand
aagaggaacuagcggcaaa

SEQ ID NO: 2134878 - RNA, 19 nt, Homo sapiens
  misc_RNA (1)...(19): siRNA sense strand
agcgagagaugauguagaa

SEQ ID NO: 2134879 - RNA, 19 nt, Homo sapiens
  misc_RNA (1)...(19): siRNA sense strand
gaaccugacaaccauuaug

SEQ ID NO: 2134880 - RNA, 19 nt, Homo sapiens
  misc_RNA (1)...(19): siRNA sense strand
ggcgacuugucccuaauuu

SEQ ID NO: 2134881 - RNA, 19 nt, Homo sapiens
  misc_RNA (1)...(19): siRNA sense strand
uagggcagaugauggaaau

SEQ ID NO: 2134882 - RNA, 19 nt, Homo sapiens
  misc_RNA (1)...(19): siRNA sense strand
gagaaagacuagggaacag

SEQ ID NO: 2134883 - RNA, 19 nt, Homo sapiens
  misc_RNA (1)...(19): siRNA sense strand
ccacgcagaaugaagaaga

SEQ ID NO: 2134884 - RNA, 19 nt, Homo sapiens
  misc_RNA (1)...(19): siRNA sense strand
acaaugaagcgagagauga

SEQ ID NO: 2134885 - RNA, 19 nt, Homo sapiens
  misc_RNA (1)...(19): siRNA sense strand
cgagagaugauguagaaag

SEQ ID NO: 2134886 - RNA, 19 nt, Homo sapiens
  misc_RNA (1)...(19): siRNA sense strand
caaugaagcgagagaugau

SEQ ID NO: 2134887 - RNA, 19 nt, Homo sapiens
  misc_RNA (1)...(19): siRNA sense strand
gaugauguagaaagguuug

SEQ ID NO: 2134888 - RNA, 19 nt, Homo sapiens
  misc_RNA (1)...(19): siRNA sense strand
cacgcagaaugaagaagaa

SEQ ID NO: 2134889 - RNA, 19 nt, Homo sapiens
  misc_RNA (1)...(19): siRNA sense strand
gauguagaaagguuuguag

SEQ ID NO: 2134890 - RNA, 19 nt, Homo sapiens
  misc_RNA (1)...(19): siRNA sense strand
gaagcgagagaugauguag

SEQ ID NO: 2134891 - RNA, 19 nt, Homo sapiens
  misc_RNA (1)...(19): siRNA sense strand
aagaagaaucccgccauuu

SEQ ID NO: 2134892 - RNA, 19 nt, Homo sapiens
  misc_RNA (1)...(19): siRNA sense strand
aaccugacaaccauuauga

SEQ ID NO: 2134893 - RNA, 19 nt, Homo sapiens
  misc_RNA (1)...(19): siRNA sense strand
guagggcagaugauggaaa

SEQ ID NO: 2134894 - RNA, 19 nt, Homo sapiens
  misc_RNA (1)...(19): siRNA sense strand
gcagaaugaagaagaaucc

SEQ ID NO: 2134895 - RNA, 19 nt, Homo sapiens
  misc_RNA (1)...(19): siRNA sense strand
cugaaccugacaaccauua

SEQ ID NO: 2134896 - RNA, 19 nt, Homo sapiens
  misc_RNA (1)...(19): siRNA sense strand
ugaagcgagagaugaugua

SEQ ID NO: 2134897 - RNA, 19 nt, Homo sapiens
  misc_RNA (1)...(19): siRNA sense strand
gcacaaugaagcgagagau

SEQ ID NO: 2134898 - RNA, 19 nt, Homo sapiens
  misc_RNA (1)...(19): siRNA sense strand
auaggcauauugagcacaa

SEQ ID NO: 2134899 - RNA, 19 nt, Homo sapiens
  misc_RNA (1)...(19): siRNA sense strand
gggaaaaugcccaacaaga

SEQ ID NO: 2134900 - RNA, 19 nt, Homo sapiens
  misc_RNA (1)...(19): siRNA sense strand
aacagcagaugaggcacua

SEQ ID NO: 2134901 - RNA, 19 nt, Homo sapiens
  misc_RNA (1)...(19): siRNA sense strand
ggaguccaaagaggaacua

SEQ ID NO: 2134902 - RNA, 19 nt, Homo sapiens
  misc_RNA (1)...(19): siRNA sense strand
cgacuugucccuaauuuuc

SEQ ID NO: 2134903 - RNA, 19 nt, Homo sapiens
  misc_RNA (1)...(19): siRNA sense strand
ccucagaacuucacuguau

SEQ ID NO: 2134904 - RNA, 19 nt, Homo sapiens
  misc_RNA (1)...(19): siRNA sense strand
ugucauggauucuuugguu

SEQ ID NO: 2134905 - RNA, 19 nt, Homo sapiens
  misc_RNA (1)...(19): siRNA sense strand
cacgaaggcuguccucaga

SEQ ID NO: 2134906 - RNA, 19 nt, Homo sapiens
  misc_RNA (1)...(19): siRNA sense strand
ugagugucauggauucuuu

SEQ ID NO: 2134907 - RNA, 19 nt, Homo sapiens
  misc_RNA (1)...(19): siRNA sense strand
caccagggccucagccuuu

SEQ ID NO: 2134908 - RNA, 19 nt, Homo sapiens
  misc_RNA (1)...(19): siRNA sense strand
ggacagcuucgccaccuau

SEQ ID NO: 2134909 - RNA, 19 nt, Homo sapiens
  misc_RNA (1)...(19): siRNA sense strand
ccucugagacgaccucuga

SEQ ID NO: 2134910 - RNA, 19 nt, Homo sapiens
  misc_RNA (1)...(19): siRNA sense strand
ccauacagcaacagagaaa

SEQ ID NO: 2134911 - RNA, 19 nt, Homo sapiens
  misc_RNA (1)...(19): siRNA sense strand
uggauucuuugguucauga

SEQ ID NO: 2134912 - RNA, 19 nt, Homo sapiens
  misc_RNA (1)...(19): siRNA sense strand
cagcuucgccaccuauuuc

SEQ ID NO: 2134913 - RNA, 19 nt, Homo sapiens
  misc_RNA (1)...(19): siRNA sense strand
cgaaggcuguccucagaac

SEQ ID NO: 2134914 - RNA, 19 nt, Homo sapiens
  misc_RNA (1)...(19): siRNA sense strand
gaggccaacuccacuacgu

SEQ ID NO: 2134915 - RNA, 19 nt, Homo sapiens
  misc_RNA (1)...(19): siRNA sense strand
gcuggaccuuccucugaga

SEQ ID NO: 2134916 - RNA, 19 nt, Homo sapiens
  misc_RNA (1)...(19): siRNA sense strand
gcaggugccacuccaacug

SEQ ID NO: 2134917 - RNA, 19 nt, Homo sapiens
  misc_RNA (1)...(19): siRNA sense strand
gggacagcuucgccaccua

SEQ ID NO: 2134918 - RNA, 19 nt, Homo sapiens
  misc_RNA (1)...(19): siRNA sense strand
aaagaggccaacuccacua

SEQ ID NO: 2134919 - RNA, 19 nt, Homo sapiens
  misc_RNA (1)...(19): siRNA sense strand
ggccgugagugucauggau

SEQ ID NO: 2134920 - RNA, 19 nt, Homo sapiens
  misc_RNA (1)...(19): siRNA sense strand
uggcuggaccuuccucuga

SEQ ID NO: 2134921 - RNA, 19 nt, Homo sapiens
  misc_RNA (1)...(19): siRNA sense strand
ccacuacgucccagaagca

SEQ ID NO: 2134922 - RNA, 19 nt, Homo sapiens
  misc_RNA (1)...(19): siRNA sense strand
ccaccaagcgccagaccau

SEQ ID NO: 2134923 - RNA, 19 nt, Homo sapiens
  misc_RNA (1)...(19): siRNA sense strand
uuugguucaugacauauug

SEQ ID NO: 2134924 - RNA, 19 nt, Homo sapiens
  misc_RNA (1)...(19): siRNA sense strand
ucacccaggagcccaaaga

SEQ ID NO: 2134925 - RNA, 19 nt, Homo sapiens
  misc_RNA (1)...(19): siRNA sense strand
ucacagagcuaaauguuga

SEQ ID NO: 2134926 - RNA, 19 nt, Homo sapiens
  misc_RNA (1)...(19): siRNA sense strand
ccucagaacuucauuaugu

SEQ ID NO: 2134927 - RNA, 19 nt, Homo sapiens
  misc_RNA (1)...(19): siRNA sense strand
cuggucagcuggcccauua

SEQ ID NO: 2134928 - RNA, 19 nt, Homo sapiens
  misc_RNA (1)...(19): siRNA sense strand
caccagggccucagccuuu

SEQ ID NO: 2134929 - RNA, 19 nt, Homo sapiens
  misc_RNA (1)...(19): siRNA sense strand
caucacagagcuaaauguu

SEQ ID NO: 2134930 - RNA, 19 nt, Homo sapiens
  misc_RNA (1)...(19): siRNA sense strand
ucucuguucuugcuaucua

SEQ ID NO: 2134931 - RNA, 19 nt, Homo sapiens
  misc_RNA (1)...(19): siRNA sense strand
ccacgaaggcccagaagca

SEQ ID NO: 2134932 - RNA, 19 nt, Homo sapiens
  misc_RNA (1)...(19): siRNA sense strand
ugagugucauggauucuau

SEQ ID NO: 2134933 - RNA, 19 nt, Homo sapiens
  misc_RNA (1)...(19): siRNA sense strand
cgauauggcaacagagaaa

SEQ ID NO: 2134934 - RNA, 19 nt, Homo sapiens
  misc_RNA (1)...(19): siRNA sense strand
cgaaggcccagaagcagaa

SEQ ID NO: 2134935 - RNA, 19 nt, Homo sapiens
  misc_RNA (1)...(19): siRNA sense strand
gccaugcgaccauaccaaa

SEQ ID NO: 2134936 - RNA, 19 nt, Homo sapiens
  misc_RNA (1)...(19): siRNA sense strand
gcccucagaacuucauuau

SEQ ID NO: 2134937 - RNA, 19 nt, Homo sapiens
  misc_RNA (1)...(19): siRNA sense strand
ggccgugagugucauggau

SEQ ID NO: 2134938 - RNA, 19 nt, Homo sapiens
  misc_RNA (1)...(19): siRNA sense strand
agagcuaaauguugaucau

SEQ ID NO: 2134939 - RNA, 19 nt, Homo sapiens
  misc_RNA (1)...(19): siRNA sense strand
gcauccaggagcccaaaga

SEQ ID NO: 2134940 - RNA, 19 nt, Homo sapiens
  misc_RNA (1)...(19): siRNA sense strand
ugugcgauauggcaacaga

SEQ ID NO: 2134941 - RNA, 19 nt, Homo sapiens
  misc_RNA (1)...(19): siRNA sense strand
gagcauccaggagcccaaa

SEQ ID NO: 2134942 - RNA, 19 nt, Homo sapiens
  misc_RNA (1)...(19): siRNA sense strand
ggccaucacagagcuaaau

SEQ ID NO: 2134943 - RNA, 19 nt, Homo sapiens
  misc_RNA (1)...(19): siRNA sense strand
gcgauauggcaacagagaa

SEQ ID NO: 2134944 - RNA, 19 nt, Homo sapiens
  misc_RNA (1)...(19): siRNA sense strand
ucggagccaugcgaccaua

SEQ ID NO: 2134945 - RNA, 19 nt, Homo sapiens
  misc_RNA (1)...(19): siRNA sense strand
caaccgucacucucuguuc

SEQ ID NO: 2134946 - RNA, 19 nt, Homo sapiens
  misc_RNA (1)...(19): siRNA sense strand
gagcuaaauguugaucauc

SEQ ID NO: 2134947 - RNA, 19 nt, Homo sapiens
  misc_RNA (1)...(19): siRNA sense strand
caggaggccgugaguguca

SEQ ID NO: 2134948 - RNA, 19 nt, Homo sapiens
  misc_RNA (1)...(19): siRNA sense strand
ggagugcaaugacaaauga

SEQ ID NO: 2134949 - RNA, 19 nt, Homo sapiens
  misc_RNA (1)...(19): siRNA sense strand
gaaacuauaucaaggaaca

SEQ ID NO: 2134950 - RNA, 19 nt, Homo sapiens
  misc_RNA (1)...(19): siRNA sense strand
gcuauucccuguuagauga

SEQ ID NO: 2134951 - RNA, 19 nt, Homo sapiens
  misc_RNA (1)...(19): siRNA sense strand
gaucaggacuucacuucuu

SEQ ID NO: 2134952 - RNA, 19 nt, Homo sapiens
  misc_RNA (1)...(19): siRNA sense strand
ggagugauguacuuucuga

SEQ ID NO: 2134953 - RNA, 19 nt, Homo sapiens
  misc_RNA (1)...(19): siRNA sense strand
gcagugaugucucuucuuc

SEQ ID NO: 2134954 - RNA, 19 nt, Homo sapiens
  misc_RNA (1)...(19): siRNA sense strand
gacagugaguuuauuauug

SEQ ID NO: 2134955 - RNA, 19 nt, Homo sapiens
  misc_RNA (1)...(19): siRNA sense strand
gaaagugaguacugagaug

SEQ ID NO: 2134956 - RNA, 19 nt, Homo sapiens
  misc_RNA (1)...(19): siRNA sense strand
gggagcaacuugauauuau

SEQ ID NO: 2134957 - RNA, 19 nt, Homo sapiens
  misc_RNA (1)...(19): siRNA sense strand
ggagcaacuugauauuauu

SEQ ID NO: 2134958 - RNA, 19 nt, Homo sapiens
  misc_RNA (1)...(19): siRNA sense strand
ucagugggcucuuccuuaa

SEQ ID NO: 2134959 - RNA, 19 nt, Homo sapiens
  misc_RNA (1)...(19): siRNA sense strand
gcaccggaauuuagaugaa

SEQ ID NO: 2134960 - RNA, 19 nt, Homo sapiens
  misc_RNA (1)...(19): siRNA sense strand
gguggaaccuaacuucuug

SEQ ID NO: 2134961 - RNA, 19 nt, Homo sapiens
  misc_RNA (1)...(19): siRNA sense strand
ugaagcagauguugauguu

SEQ ID NO: 2134962 - RNA, 19 nt, Homo sapiens
  misc_RNA (1)...(19): siRNA sense strand
ugauugcuauucccuguua

SEQ ID NO: 2134963 - RNA, 19 nt, Homo sapiens
  misc_RNA (1)...(19): siRNA sense strand
ggaagaccaugaagcagau

SEQ ID NO: 2134964 - RNA, 19 nt, Homo sapiens
  misc_RNA (1)...(19): siRNA sense strand
gaugucucuucuucuauua

SEQ ID NO: 2134965 - RNA, 19 nt, Homo sapiens
  misc_RNA (1)...(19): siRNA sense strand
gaaagugacugaggaagac

SEQ ID NO: 2134966 - RNA, 19 nt, Homo sapiens
  misc_RNA (1)...(19): siRNA sense strand
gggagugucugcagugaug

SEQ ID NO: 2134967 - RNA, 19 nt, Homo sapiens
  misc_RNA (1)...(19): siRNA sense strand
gaagaggugcuguccuuga

SEQ ID NO: 2134968 - RNA, 19 nt, Homo sapiens
  misc_RNA (1)...(19): siRNA sense strand
gcaagaggcagcugaagga

SEQ ID NO: 2134969 - RNA, 19 nt, Homo sapiens
  misc_RNA (1)...(19): siRNA sense strand
gguggaauauauugaguau

SEQ ID NO: 2134970 - RNA, 19 nt, Homo sapiens
  misc_RNA (1)...(19): siRNA sense strand
ugaagcaggucagaaacua

SEQ ID NO: 2134971 - RNA, 19 nt, Homo sapiens
  misc_RNA (1)...(19): siRNA sense strand
aaacaagcaccggaauuua

SEQ ID NO: 2134972 - RNA, 19 nt, Homo sapiens
  misc_RNA (1)...(19): siRNA sense strand
gaagagaagcaacuuuagu

SEQ ID NO: 2134973 - RNA, 19 nt, Homo sapiens
  misc_RNA (1)...(19): siRNA sense strand
cagaaacuauaucaaggaa

SEQ ID NO: 2134974 - RNA, 19 nt, Homo sapiens
  misc_RNA (1)...(19): siRNA sense strand
uggaagagaagcaacuuua

SEQ ID NO: 2134975 - RNA, 19 nt, Homo sapiens
  misc_RNA (1)...(19): siRNA sense strand
caccuugccugcuuccuaa

SEQ ID NO: 2134976 - RNA, 19 nt, Homo sapiens
  misc_RNA (1)...(19): siRNA sense strand
agagaggccuggaagagaa

SEQ ID NO: 2134977 - RNA, 19 nt, Homo sapiens
  misc_RNA (1)...(19): siRNA sense strand
ggucagauagcgaguuuga

SEQ ID NO: 2134978 - RNA, 19 nt, Homo sapiens
  misc_RNA (1)...(19): siRNA sense strand
ugaugucucuucuucuauu

SEQ ID NO: 2134979 - RNA, 19 nt, Homo sapiens
  misc_RNA (1)...(19): siRNA sense strand
gugcuguccuugaaaguga

SEQ ID NO: 2134980 - RNA, 19 nt, Homo sapiens
  misc_RNA (1)...(19): siRNA sense strand
gagcagguggaauauauug

SEQ ID NO: 2134981 - RNA, 19 nt, Homo sapiens
  misc_RNA (1)...(19): siRNA sense strand
ggucagaaacuauaucaag

SEQ ID NO: 2134982 - RNA, 19 nt, Homo sapiens
  misc_RNA (1)...(19): siRNA sense strand
ggacuucacuucuuuugau

SEQ ID NO: 2134983 - RNA, 19 nt, Homo sapiens
  misc_RNA (1)...(19): siRNA sense strand
cuucuucuauuagcacuua

SEQ ID NO: 2134984 - RNA, 19 nt, Homo sapiens
  misc_RNA (1)...(19): siRNA sense strand
gcagagcggauucgggauu

SEQ ID NO: 2134985 - RNA, 19 nt, Homo sapiens
  misc_RNA (1)...(19): siRNA sense strand
uguacuuucugaugucaua

SEQ ID NO: 2134986 - RNA, 19 nt, Homo sapiens
  misc_RNA (1)...(19): siRNA sense strand
agugaugucucuucuucua

SEQ ID NO: 2134987 - RNA, 19 nt, Homo sapiens
  misc_RNA (1)...(19): siRNA sense strand
acagacagugaguuuauua

SEQ ID NO: 2134988 - RNA, 19 nt, Homo sapiens
  misc_RNA (1)...(19): siRNA sense strand
ucagauagcgaguuugaau

SEQ ID NO: 2134989 - RNA, 19 nt, Homo sapiens
  misc_RNA (1)...(19): siRNA sense strand
cuacagacagugaguuuau

SEQ ID NO: 2134990 - RNA, 19 nt, Homo sapiens
  misc_RNA (1)...(19): siRNA sense strand
gugauguacuuucugaugu

SEQ ID NO: 2134991 - RNA, 19 nt, Homo sapiens
  misc_RNA (1)...(19): siRNA sense strand
ggaagagaagcaacuuuag

SEQ ID NO: 2134992 - RNA, 19 nt, Homo sapiens
  misc_RNA (1)...(19): siRNA sense strand
ggaaagugaguacugagau

SEQ ID NO: 2134993 - RNA, 19 nt, Homo sapiens
  misc_RNA (1)...(19): siRNA sense strand
acgaagaggugcuguccuu

SEQ ID NO: 2134994 - RNA, 19 nt, Homo sapiens
  misc_RNA (1)...(19): siRNA sense strand
gauccaagcagcggaaguu

SEQ ID NO: 2134995 - RNA, 19 nt, Homo sapiens
  misc_RNA (1)...(19): siRNA sense strand
gcaagcaccaguggaguga

SEQ ID NO: 2134996 - RNA, 19 nt, Homo sapiens
  misc_RNA (1)...(19): siRNA sense strand
uaucugagucggaaaguga

SEQ ID NO: 2134997 - RNA, 19 nt, Homo sapiens
  misc_RNA (1)...(19): siRNA sense strand
aagaggugcuguccuugaa

SEQ ID NO: 2134998 - RNA, 19 nt, Homo sapiens
  misc_RNA (1)...(19): siRNA sense strand
aaacuccagugccaacaug

SEQ ID NO: 2134999 - RNA, 19 nt, Homo sapiens
  misc_RNA (1)...(19): siRNA sense strand
aagcaggucagaaacuaua

SEQ ID NO: 2135000 - RNA, 19 nt, Homo sapiens
  misc_RNA (1)...(19): siRNA sense strand
gaggugcuguccuugaaag

SEQ ID NO: 2135001 - RNA, 19 nt, Homo sapiens
  misc_RNA (1)...(19): siRNA sense strand
gaugagcagguggaauaua

SEQ ID NO: 2135002 - RNA, 19 nt, Homo sapiens
  misc_RNA (1)...(19): siRNA sense strand
ugaaagugacugaggaaga

SEQ ID NO: 2135003 - RNA, 19 nt, Homo sapiens
  misc_RNA (1)...(19): siRNA sense strand
gaaacucugcuucaaacuc

SEQ ID NO: 2135004 - RNA, 19 nt, Homo sapiens
  misc_RNA (1)...(19): siRNA sense strand
gcaagagaggccuggaaga

SEQ ID NO: 2135005 - RNA, 19 nt, Homo sapiens
  misc_RNA (1)...(19): siRNA sense strand
augagcagguggaauauau

SEQ ID NO: 2135006 - RNA, 19 nt, Homo sapiens
  misc_RNA (1)...(19): siRNA sense strand
ugacugaggaagaccauga

SEQ ID NO: 2135007 - RNA, 19 nt, Homo sapiens
  misc_RNA (1)...(19): siRNA sense strand
gaagcaggucagaaacuau

SEQ ID NO: 2135008 - RNA, 19 nt, Homo sapiens
  misc_RNA (1)...(19): siRNA sense strand
cgggagcaacuugauauua

SEQ ID NO: 2135009 - RNA, 19 nt, Homo sapiens
  misc_RNA (1)...(19): siRNA sense strand
guuggaaacucugcuucaa

SEQ ID NO: 2135010 - RNA, 19 nt, Homo sapiens
  misc_RNA (1)...(19): siRNA sense strand
ccaagcagcggaaguuaca

SEQ ID NO: 2135011 - RNA, 19 nt, Homo sapiens
  misc_RNA (1)...(19): siRNA sense strand
ccucggccaucacuuccua

SEQ ID NO: 2135012 - RNA, 19 nt, Homo sapiens
  misc_RNA (1)...(19): siRNA sense strand
aagcagauguugauguuuu

SEQ ID NO: 2135013 - RNA, 19 nt, Homo sapiens
  misc_RNA (1)...(19): siRNA sense strand
uggaaacucugcuucaaac

SEQ ID NO: 2135014 - RNA, 19 nt, Homo sapiens
  misc_RNA (1)...(19): siRNA sense strand
augaugagcagguggaaua

SEQ ID NO: 2135015 - RNA, 19 nt, Homo sapiens
  misc_RNA (1)...(19): siRNA sense strand
gauguacuuucugauguca

SEQ ID NO: 2135016 - RNA, 19 nt, Homo sapiens
  misc_RNA (1)...(19): siRNA sense strand
gugaggagcuguuuucauc

SEQ ID NO: 2135017 - RNA, 19 nt, Homo sapiens
  misc_RNA (1)...(19): siRNA sense strand
gccaacggccugcaagaga

SEQ ID NO: 2135018 - RNA, 19 nt, Homo sapiens
  misc_RNA (1)...(19): siRNA sense strand
caagagaggccuggaagag

SEQ ID NO: 2135019 - RNA, 19 nt, Homo sapiens
  misc_RNA (1)...(19): siRNA sense strand
gagcacacagugacagcaa

SEQ ID NO: 2135020 - RNA, 19 nt, Homo sapiens
  misc_RNA (1)...(19): siRNA sense strand
ugaggaagaccaugaagca

SEQ ID NO: 2135021 - RNA, 19 nt, Homo sapiens
  misc_RNA (1)...(19): siRNA sense strand
gugcaaugacaaaugauga

SEQ ID NO: 2135022 - RNA, 19 nt, Homo sapiens
  misc_RNA (1)...(19): siRNA sense strand
ccaugaagcagauguugau

SEQ ID NO: 2135023 - RNA, 19 nt, Homo sapiens
  misc_RNA (1)...(19): siRNA sense strand
ucagaaacuauaucaagga

SEQ ID NO: 2135024 - RNA, 19 nt, Homo sapiens
  misc_RNA (1)...(19): siRNA sense strand
gcucaaaucuccccuacag

SEQ ID NO: 2135025 - RNA, 19 nt, Homo sapiens
  misc_RNA (1)...(19): siRNA sense strand
ggaauauauugaguaucug

SEQ ID NO: 2135026 - RNA, 19 nt, Homo sapiens
  misc_RNA (1)...(19): siRNA sense strand
aaccuaacuucuuguggaa

SEQ ID NO: 2135027 - RNA, 19 nt, Homo sapiens
  misc_RNA (1)...(19): siRNA sense strand
cgaguuugaauggcaguua

SEQ ID NO: 2135028 - RNA, 19 nt, Homo sapiens
  misc_RNA (1)...(19): siRNA sense strand
gaagcagauguugauguuu

SEQ ID NO: 2135029 - RNA, 19 nt, Homo sapiens
  misc_RNA (1)...(19): siRNA sense strand
ccuaacuucuuguggaaca

SEQ ID NO: 2135030 - RNA, 19 nt, Homo sapiens
  misc_RNA (1)...(19): siRNA sense strand
gcagguggaauauauugag

SEQ ID NO: 2135031 - RNA, 19 nt, Homo sapiens
  misc_RNA (1)...(19): siRNA sense strand
acaagcaccggaauuuaga

SEQ ID NO: 2135032 - RNA, 19 nt, Homo sapiens
  misc_RNA (1)...(19): siRNA sense strand
gaguuugaauggcaguuac

SEQ ID NO: 2135033 - RNA, 19 nt, Homo sapiens
  misc_RNA (1)...(19): siRNA sense strand
uacagacagugaguuuauu

SEQ ID NO: 2135034 - RNA, 19 nt, Homo sapiens
  misc_RNA (1)...(19): siRNA sense strand
ucaccuugccugcuuccua

SEQ ID NO: 2135035 - RNA, 19 nt, Homo sapiens
  misc_RNA (1)...(19): siRNA sense strand
ucugaugucauacccagua

SEQ ID NO: 2135036 - RNA, 19 nt, Homo sapiens
  misc_RNA (1)...(19): siRNA sense strand
guuagaugaucaggacuuc

SEQ ID NO: 2135037 - RNA, 19 nt, Homo sapiens
  misc_RNA (1)...(19): siRNA sense strand
gucggaaagugaguacuga

SEQ ID NO: 2135038 - RNA, 19 nt, Homo sapiens
  misc_RNA (1)...(19): siRNA sense strand
uuggucagauagcgaguuu

SEQ ID NO: 2135039 - RNA, 19 nt, Homo sapiens
  misc_RNA (1)...(19): siRNA sense strand
cagugggagugauguacuu

SEQ ID NO: 2135040 - RNA, 19 nt, Homo sapiens
  misc_RNA (1)...(19): siRNA sense strand
uuacugggauuggucagau

SEQ ID NO: 2135041 - RNA, 19 nt, Homo sapiens
  misc_RNA (1)...(19): siRNA sense strand
gugccagcauggucaguuc

SEQ ID NO: 2135042 - RNA, 19 nt, Homo sapiens
  misc_RNA (1)...(19): siRNA sense strand
ggucuucgggagcaacuug

SEQ ID NO: 2135043 - RNA, 19 nt, Homo sapiens
  misc_RNA (1)...(19): siRNA sense strand
ucaagaugauugcuauucc

SEQ ID NO: 2135044 - RNA, 19 nt, Homo sapiens
  misc_RNA (1)...(19): siRNA sense strand
agcaguggguccaguguug

SEQ ID NO: 2135045 - RNA, 19 nt, Homo sapiens
  misc_RNA (1)...(19): siRNA sense strand
gaccaugaagcagauguug

SEQ ID NO: 2135046 - RNA, 19 nt, Homo sapiens
  misc_RNA (1)...(19): siRNA sense strand
cagagcggauucgggauuc

SEQ ID NO: 2135047 - RNA, 19 nt, Homo sapiens
  misc_RNA (1)...(19): siRNA sense strand
aucaggacuucacuucuuu

SEQ ID NO: 2135048 - RNA, 19 nt, Homo sapiens
  misc_RNA (1)...(19): siRNA sense strand
ugaggaagcugguggauuu

SEQ ID NO: 2135049 - RNA, 19 nt, Homo sapiens
  misc_RNA (1)...(19): siRNA sense strand
ggcacucccuggccuguua

SEQ ID NO: 2135050 - RNA, 19 nt, Homo sapiens
  misc_RNA (1)...(19): siRNA sense strand
gcaggaggaugaagaagag

SEQ ID NO: 2135051 - RNA, 19 nt, Homo sapiens
  misc_RNA (1)...(19): siRNA sense strand
ggcccuagcuccagaccua

SEQ ID NO: 2135052 - RNA, 19 nt, Homo sapiens
  misc_RNA (1)...(19): siRNA sense strand
gaaguaaaugggagugaaa

SEQ ID NO: 2135053 - RNA, 19 nt, Homo sapiens
  misc_RNA (1)...(19): siRNA sense strand
ggacucagacagcgaagaa

SEQ ID NO: 2135054 - RNA, 19 nt, Homo sapiens
  misc_RNA (1)...(19): siRNA sense strand
aggcaaccaucaaccuaua

SEQ ID NO: 2135055 - RNA, 19 nt, Homo sapiens
  misc_RNA (1)...(19): siRNA sense strand
agaagaagaggaagaugaa

SEQ ID NO: 2135056 - RNA, 19 nt, Homo sapiens
  misc_RNA (1)...(19): siRNA sense strand
ucucuccucuggacaagaa

SEQ ID NO: 2135057 - RNA, 19 nt, Homo sapiens
  misc_RNA (1)...(19): siRNA sense strand
agaaguaaaugggagugaa

SEQ ID NO: 2135058 - RNA, 19 nt, Homo sapiens
  misc_RNA (1)...(19): siRNA sense strand
cagcgaagaagaagaggaa

SEQ ID NO: 2135059 - RNA, 19 nt, Homo sapiens
  misc_RNA (1)...(19): siRNA sense strand
aagaagaagaggaagauga

SEQ ID NO: 2135060 - RNA, 19 nt, Homo sapiens
  misc_RNA (1)...(19): siRNA sense strand
guacagugcuggggagauu

SEQ ID NO: 2135061 - RNA, 19 nt, Homo sapiens
  misc_RNA (1)...(19): siRNA sense strand
gcgaagaagaagaggaaga

SEQ ID NO: 2135062 - RNA, 19 nt, Homo sapiens
  misc_RNA (1)...(19): siRNA sense strand
ucaccaaggcugaauccaa

SEQ ID NO: 2135063 - RNA, 19 nt, Homo sapiens
  misc_RNA (1)...(19): siRNA sense strand
cgaagaagaagaggaagau

SEQ ID NO: 2135064 - RNA, 19 nt, Homo sapiens
  misc_RNA (1)...(19): siRNA sense strand
augaagagcaggaggauga

SEQ ID NO: 2135065 - RNA, 19 nt, Homo sapiens
  misc_RNA (1)...(19): siRNA sense strand
ccaggcaaccaucaaccua

SEQ ID NO: 2135066 - RNA, 19 nt, Homo sapiens
  misc_RNA (1)...(19): siRNA sense strand
gaagaagaagaggaagaug

SEQ ID NO: 2135067 - RNA, 19 nt, Homo sapiens
  misc_RNA (1)...(19): siRNA sense strand
caaccuauacgaggacuca

SEQ ID NO: 2135068 - RNA, 19 nt, Homo sapiens
  misc_RNA (1)...(19): siRNA sense strand
ggaugaagaagagaaguag

SEQ ID NO: 2135069 - RNA, 19 nt, Homo sapiens
  misc_RNA (1)...(19): siRNA sense strand
ggagugaaagaggaacuug

SEQ ID NO: 2135070 - RNA, 19 nt, Homo sapiens
  misc_RNA (1)...(19): siRNA sense strand
aagaagaggaagaugaaga

SEQ ID NO: 2135071 - RNA, 19 nt, Homo sapiens
  misc_RNA (1)...(19): siRNA sense strand
caaggcagaugaggaagcu

SEQ ID NO: 2135072 - RNA, 19 nt, Homo sapiens
  misc_RNA (1)...(19): siRNA sense strand
guaaaugggagugaaagag

SEQ ID NO: 2135073 - RNA, 19 nt, Homo sapiens
  misc_RNA (1)...(19): siRNA sense strand
gcacucccuggccuguuaa

SEQ ID NO: 2135074 - RNA, 19 nt, Homo sapiens
  misc_RNA (1)...(19): siRNA sense strand
ccaaggcugaauccaaguu

SEQ ID NO: 2135075 - RNA, 19 nt, Homo sapiens
  misc_RNA (1)...(19): siRNA sense strand
agacagcgaagaagaagag

SEQ ID NO: 2135076 - RNA, 19 nt, Homo sapiens
  misc_RNA (1)...(19): siRNA sense strand
ggaggaugaagaagagaag

SEQ ID NO: 2135077 - RNA, 19 nt, Homo sapiens
  misc_RNA (1)...(19): siRNA sense strand
cuaaaucccgcuccuucga

SEQ ID NO: 2135078 - RNA, 19 nt, Homo sapiens
  misc_RNA (1)...(19): siRNA sense strand
gaagaagaggaagaugaag

SEQ ID NO: 2135079 - RNA, 19 nt, Homo sapiens
  misc_RNA (1)...(19): siRNA sense strand
aggaugaagaagagaagua

SEQ ID NO: 2135080 - RNA, 19 nt, Homo sapiens
  misc_RNA (1)...(19): siRNA sense strand
gaaguuagguuucgaauuc

SEQ ID NO: 2135081 - RNA, 19 nt, Homo sapiens
  misc_RNA (1)...(19): siRNA sense strand
gaauuucccugagcuauua

SEQ ID NO: 2135082 - RNA, 19 nt, Homo sapiens
  misc_RNA (1)...(19): siRNA sense strand
gauaagaguuggauaguga

SEQ ID NO: 2135083 - RNA, 19 nt, Homo sapiens
  misc_RNA (1)...(19): siRNA sense strand
uaaaggaucugagaccaua

SEQ ID NO: 2135084 - RNA, 19 nt, Homo sapiens
  misc_RNA (1)...(19): siRNA sense strand
gaacucagcaugaccuuaa

SEQ ID NO: 2135085 - RNA, 19 nt, Homo sapiens
  misc_RNA (1)...(19): siRNA sense strand
gaacgggucuccucagugu

SEQ ID NO: 2135086 - RNA, 19 nt, Homo sapiens
  misc_RNA (1)...(19): siRNA sense strand
gaaaggagacuuauaugga

SEQ ID NO: 2135087 - RNA, 19 nt, Homo sapiens
  misc_RNA (1)...(19): siRNA sense strand
gaguuagcaucuccaauua

SEQ ID NO: 2135088 - RNA, 19 nt, Homo sapiens
  misc_RNA (1)...(19): siRNA sense strand
guuagcaucuccaauuaua

SEQ ID NO: 2135089 - RNA, 19 nt, Homo sapiens
  misc_RNA (1)...(19): siRNA sense strand
gcuauuaucuuugaacuug

SEQ ID NO: 2135090 - RNA, 19 nt, Homo sapiens
  misc_RNA (1)...(19): siRNA sense strand
gcaaguacuucaaggauag

SEQ ID NO: 2135091 - RNA, 19 nt, Homo sapiens
  misc_RNA (1)...(19): siRNA sense strand
gaaagucaacugcaagauu

SEQ ID NO: 2135092 - RNA, 19 nt, Homo sapiens
  misc_RNA (1)...(19): siRNA sense strand
gaaaugccauagugaauac

SEQ ID NO: 2135093 - RNA, 19 nt, Homo sapiens
  misc_RNA (1)...(19): siRNA sense strand
uaaagaaagucaacugcaa

SEQ ID NO: 2135094 - RNA, 19 nt, Homo sapiens
  misc_RNA (1)...(19): siRNA sense strand
ggacauguguuaccagaag

SEQ ID NO: 2135095 - RNA, 19 nt, Homo sapiens
  misc_RNA (1)...(19): siRNA sense strand
gaaccgagcagcuuggaaa

SEQ ID NO: 2135096 - RNA, 19 nt, Homo sapiens
  misc_RNA (1)...(19): siRNA sense strand
gaagaucauugaaaggaau

SEQ ID NO: 2135097 - RNA, 19 nt, Homo sapiens
  misc_RNA (1)...(19): siRNA sense strand
gaagucggcuugggaguug

SEQ ID NO: 2135098 - RNA, 19 nt, Homo sapiens
  misc_RNA (1)...(19): siRNA sense strand
ggacagaagggccuccaua

SEQ ID NO: 2135099 - RNA, 19 nt, Homo sapiens
  misc_RNA (1)...(19): siRNA sense strand
guacauaucagaauaaugg

SEQ ID NO: 2135100 - RNA, 19 nt, Homo sapiens
  misc_RNA (1)...(19): siRNA sense strand
ggcaguacauaucagaaua

SEQ ID NO: 2135101 - RNA, 19 nt, Homo sapiens
  misc_RNA (1)...(19): siRNA sense strand
gagaagaacacacagaaug

SEQ ID NO: 2135102 - RNA, 19 nt, Homo sapiens
  misc_RNA (1)...(19): siRNA sense strand
aaggauagcaggaauauaa

SEQ ID NO: 2135103 - RNA, 19 nt, Homo sapiens
  misc_RNA (1)...(19): siRNA sense strand
agagagaaguggagaagaa

SEQ ID NO: 2135104 - RNA, 19 nt, Homo sapiens
  misc_RNA (1)...(19): siRNA sense strand
uaaagagucuggugcuuca

SEQ ID NO: 2135105 - RNA, 19 nt, Homo sapiens
  misc_RNA (1)...(19): siRNA sense strand
ggaaagcuauaaaggaucu

SEQ ID NO: 2135106 - RNA, 19 nt, Homo sapiens
  misc_RNA (1)...(19): siRNA sense strand
cauagugaauaccaagaua

SEQ ID NO: 2135107 - RNA, 19 nt, Homo sapiens
  misc_RNA (1)...(19): siRNA sense strand
gcaauuccaaucuguauau

SEQ ID NO: 2135108 - RNA, 19 nt, Homo sapiens
  misc_RNA (1)...(19): siRNA sense strand
cacaauuccuuaugggaua

SEQ ID NO: 2135109 - RNA, 19 nt, Homo sapiens
  misc_RNA (1)...(19): siRNA sense strand
gaaccuucaucuugacuuc

SEQ ID NO: 2135110 - RNA, 19 nt, Homo sapiens
  misc_RNA (1)...(19): siRNA sense strand
ggaaccagaucaacuuugg

SEQ ID NO: 2135111 - RNA, 19 nt, Homo sapiens
  misc_RNA (1)...(19): siRNA sense strand
ucccugagcuauuaucuuu

SEQ ID NO: 2135112 - RNA, 19 nt, Homo sapiens
  misc_RNA (1)...(19): siRNA sense strand
aaagucaacugcaagauuc

SEQ ID NO: 2135113 - RNA, 19 nt, Homo sapiens
  misc_RNA (1)...(19): siRNA sense strand
gaagguagaugaaaaugug

SEQ ID NO: 2135114 - RNA, 19 nt, Homo sapiens
  misc_RNA (1)...(19): siRNA sense strand
agaagggccuccauaauca

SEQ ID NO: 2135115 - RNA, 19 nt, Homo sapiens
  misc_RNA (1)...(19): siRNA sense strand
gguagcagcucuccucaag

SEQ ID NO: 2135116 - RNA, 19 nt, Homo sapiens
  misc_RNA (1)...(19): siRNA sense strand
aaauaaagguggagauucu

SEQ ID NO: 2135117 - RNA, 19 nt, Homo sapiens
  misc_RNA (1)...(19): siRNA sense strand
ccacgaggauccccaaaua

SEQ ID NO: 2135118 - RNA, 19 nt, Homo sapiens
  misc_RNA (1)...(19): siRNA sense strand
uuaaggaaguggaaagaga

SEQ ID NO: 2135119 - RNA, 19 nt, Homo sapiens
  misc_RNA (1)...(19): siRNA sense strand
gcaguacauaucagaauaa

SEQ ID NO: 2135120 - RNA, 19 nt, Homo sapiens
  misc_RNA (1)...(19): siRNA sense strand
gggauaaaguaugauaaga

SEQ ID NO: 2135121 - RNA, 19 nt, Homo sapiens
  misc_RNA (1)...(19): siRNA sense strand
gacagaagggccuccauaa

SEQ ID NO: 2135122 - RNA, 19 nt, Homo sapiens
  misc_RNA (1)...(19): siRNA sense strand
gaaaugggguggagaguca

SEQ ID NO: 2135123 - RNA, 19 nt, Homo sapiens
  misc_RNA (1)...(19): siRNA sense strand
gaucugagaccauaaagag

SEQ ID NO: 2135124 - RNA, 19 nt, Homo sapiens
  misc_RNA (1)...(19): siRNA sense strand
gguuuaggauuaauaguuc

SEQ ID NO: 2135125 - RNA, 19 nt, Homo sapiens
  misc_RNA (1)...(19): siRNA sense strand
ggguggagagucaauaaua

SEQ ID NO: 2135126 - RNA, 19 nt, Homo sapiens
  misc_RNA (1)...(19): siRNA sense strand
agagaaggcucccaaaguc

SEQ ID NO: 2135127 - RNA, 19 nt, Homo sapiens
  misc_RNA (1)...(19): siRNA sense strand
ggauuaauaguucgugaaa

SEQ ID NO: 2135128 - RNA, 19 nt, Homo sapiens
  misc_RNA (1)...(19): siRNA sense strand
aaggaaagcuauaaaggau

SEQ ID NO: 2135129 - RNA, 19 nt, Homo sapiens
  misc_RNA (1)...(19): siRNA sense strand
ugaaaugccauagugaaua

SEQ ID NO: 2135130 - RNA, 19 nt, Homo sapiens
  misc_RNA (1)...(19): siRNA sense strand
cagaagggccuccauaauc

SEQ ID NO: 2135131 - RNA, 19 nt, Homo sapiens
  misc_RNA (1)...(19): siRNA sense strand
gguggagagucaauaauag

SEQ ID NO: 2135132 - RNA, 19 nt, Homo sapiens
  misc_RNA (1)...(19): siRNA sense strand
ccugagcuauuaucuuuga

SEQ ID NO: 2135133 - RNA, 19 nt, Homo sapiens
  misc_RNA (1)...(19): siRNA sense strand
ggaaaggagacuuauaugg

SEQ ID NO: 2135134 - RNA, 19 nt, Homo sapiens
  misc_RNA (1)...(19): siRNA sense strand
ggagaacacagugauggua

SEQ ID NO: 2135135 - RNA, 19 nt, Homo sapiens
  misc_RNA (1)...(19): siRNA sense strand
uagaauuccuccagagaga

SEQ ID NO: 2135136 - RNA, 19 nt, Homo sapiens
  misc_RNA (1)...(19): siRNA sense strand
uaaggaaagcuauaaagga

SEQ ID NO: 2135137 - RNA, 19 nt, Homo sapiens
  misc_RNA (1)...(19): siRNA sense strand
gagacuuggugaaacauca

SEQ ID NO: 2135138 - RNA, 19 nt, Homo sapiens
  misc_RNA (1)...(19): siRNA sense strand
ucaauggaguauuuaagga

SEQ ID NO: 2135139 - RNA, 19 nt, Homo sapiens
  misc_RNA (1)...(19): siRNA sense strand
uggccugccugacauuaua

SEQ ID NO: 2135140 - RNA, 19 nt, Homo sapiens
  misc_RNA (1)...(19): siRNA sense strand
gauagcaggaauauaaaga

SEQ ID NO: 2135141 - RNA, 19 nt, Homo sapiens
  misc_RNA (1)...(19): siRNA sense strand
gauagaauuccuccagaga

SEQ ID NO: 2135142 - RNA, 19 nt, Homo sapiens
  misc_RNA (1)...(19): siRNA sense strand
ugaagaucauugaaaggaa

SEQ ID NO: 2135143 - RNA, 19 nt, Homo sapiens
  misc_RNA (1)...(19): siRNA sense strand
agaguuggauagugaauuc

SEQ ID NO: 2135144 - RNA, 19 nt, Homo sapiens
  misc_RNA (1)...(19): siRNA sense strand
ugcaaguacuucaaggaua

SEQ ID NO: 2135145 - RNA, 19 nt, Homo sapiens
  misc_RNA (1)...(19): siRNA sense strand
ggaaaccgagguccgcauu

SEQ ID NO: 2135146 - RNA, 19 nt, Homo sapiens
  misc_RNA (1)...(19): siRNA sense strand
gaagaacacacagaaugga

SEQ ID NO: 2135147 - RNA, 19 nt, Homo sapiens
  misc_RNA (1)...(19): siRNA sense strand
ugaugaacaugauggguau

SEQ ID NO: 2135148 - RNA, 19 nt, Homo sapiens
  misc_RNA (1)...(19): siRNA sense strand
ccucaaugcuucucuuucu

SEQ ID NO: 2135149 - RNA, 19 nt, Homo sapiens
  misc_RNA (1)...(19): siRNA sense strand
cagaauggguccaggaaac

SEQ ID NO: 2135150 - RNA, 19 nt, Homo sapiens
  misc_RNA (1)...(19): siRNA sense strand
agcaugaccuuaacuccua

SEQ ID NO: 2135151 - RNA, 19 nt, Homo sapiens
  misc_RNA (1)...(19): siRNA sense strand
acacaggccugaggauuca

SEQ ID NO: 2135152 - RNA, 19 nt, Homo sapiens
  misc_RNA (1)...(19): siRNA sense strand
ccaguccgccuauguaaga

SEQ ID NO: 2135153 - RNA, 19 nt, Homo sapiens
  misc_RNA (1)...(19): siRNA sense strand
aaacaaccccucuaccuua

SEQ ID NO: 2135154 - RNA, 19 nt, Homo sapiens
  misc_RNA (1)...(19): siRNA sense strand
guagacuugugcauccaaa

SEQ ID NO: 2135155 - RNA, 19 nt, Homo sapiens
  misc_RNA (1)...(19): siRNA sense strand
gaccaguccgccuauguaa

SEQ ID NO: 2135156 - RNA, 19 nt, Homo sapiens
  misc_RNA (1)...(19): siRNA sense strand
gacccugaaucucuccaaa

SEQ ID NO: 2135157 - RNA, 19 nt, Homo sapiens
  misc_RNA (1)...(19): siRNA sense strand
ggauaaaguaugauaagag

SEQ ID NO: 2135158 - RNA, 19 nt, Homo sapiens
  misc_RNA (1)...(19): siRNA sense strand
gaaaauaaagguggagauu

SEQ ID NO: 2135159 - RNA, 19 nt, Homo sapiens
  misc_RNA (1)...(19): siRNA sense strand
ugacuucugucggcaauuc

SEQ ID NO: 2135160 - RNA, 19 nt, Homo sapiens
  misc_RNA (1)...(19): siRNA sense strand
gaggguggauggcaguaca

SEQ ID NO: 2135161 - RNA, 19 nt, Homo sapiens
  misc_RNA (1)...(19): siRNA sense strand
gcaauucuagggcaaguag

SEQ ID NO: 2135162 - RNA, 19 nt, Homo sapiens
  misc_RNA (1)...(19): siRNA sense strand
ggagaagaacacacagaau

SEQ ID NO: 2135163 - RNA, 19 nt, Homo sapiens
  misc_RNA (1)...(19): siRNA sense strand
gauaguaggagugugaaau

SEQ ID NO: 2135164 - RNA, 19 nt, Homo sapiens
  misc_RNA (1)...(19): siRNA sense strand
caaggauagcagaaauaua

SEQ ID NO: 2135165 - RNA, 19 nt, Homo sapiens
  misc_RNA (1)...(19): siRNA sense strand
cagaucaacuuuggaugga

SEQ ID NO: 2135166 - RNA, 19 nt, Homo sapiens
  misc_RNA (1)...(19): siRNA sense strand
ccgcauugcuuccgucaca

SEQ ID NO: 2135167 - RNA, 19 nt, Homo sapiens
  misc_RNA (1)...(19): siRNA sense strand
gagcuauuaucuuugaacu

SEQ ID NO: 2135168 - RNA, 19 nt, Homo sapiens
  misc_RNA (1)...(19): siRNA sense strand
gaugaaacuugagcagucu

SEQ ID NO: 2135169 - RNA, 19 nt, Homo sapiens
  misc_RNA (1)...(19): siRNA sense strand
ggaaugccagcacgaagga

SEQ ID NO: 2135170 - RNA, 19 nt, Homo sapiens
  misc_RNA (1)...(19): siRNA sense strand
guaaggaaagcuauaaagg

SEQ ID NO: 2135171 - RNA, 19 nt, Homo sapiens
  misc_RNA (1)...(19): siRNA sense strand
gugaauaccaagauagaau

SEQ ID NO: 2135172 - RNA, 19 nt, Homo sapiens
  misc_RNA (1)...(19): siRNA sense strand
agucugggaugaaacuuga

SEQ ID NO: 2135173 - RNA, 19 nt, Homo sapiens
  misc_RNA (1)...(19): siRNA sense strand
cauaaucacgagaaugcua

SEQ ID NO: 2135174 - RNA, 19 nt, Homo sapiens
  misc_RNA (1)...(19): siRNA sense strand
caauggaguauuuaaggaa

SEQ ID NO: 2135175 - RNA, 19 nt, Homo sapiens
  misc_RNA (1)...(19): siRNA sense strand
cggaaaggaugcucgucuu

SEQ ID NO: 2135176 - RNA, 19 nt, Homo sapiens
  misc_RNA (1)...(19): siRNA sense strand
guucaucuccuuacucauc

SEQ ID NO: 2135177 - RNA, 19 nt, Homo sapiens
  misc_RNA (1)...(19): siRNA sense strand
ugaccaguccgccuaugua

SEQ ID NO: 2135178 - RNA, 19 nt, Homo sapiens
  misc_RNA (1)...(19): siRNA sense strand
ugccugacauuauagagaa

SEQ ID NO: 2135179 - RNA, 19 nt, Homo sapiens
  misc_RNA (1)...(19): siRNA sense strand
ucacgagaaugcuagucuu

SEQ ID NO: 2135180 - RNA, 19 nt, Homo sapiens
  misc_RNA (1)...(19): siRNA sense strand
agaaacagcugcaaaauuu

SEQ ID NO: 2135181 - RNA, 19 nt, Homo sapiens
  misc_RNA (1)...(19): siRNA sense strand
gcaaaccgcuggucuuucg

SEQ ID NO: 2135182 - RNA, 19 nt, Homo sapiens
  misc_RNA (1)...(19): siRNA sense strand
gaagccaccucaaguccuu

SEQ ID NO: 2135183 - RNA, 19 nt, Homo sapiens
  misc_RNA (1)...(19): siRNA sense strand
ucacggagcuggccaggau

SEQ ID NO: 2135184 - RNA, 19 nt, Homo sapiens
  misc_RNA (1)...(19): siRNA sense strand
uuaagaagauugaggaaca

SEQ ID NO: 2135185 - RNA, 19 nt, Homo sapiens
  misc_RNA (1)...(19): siRNA sense strand
ggguauggaucgauggauu

SEQ ID NO: 2135186 - RNA, 19 nt, Homo sapiens
  misc_RNA (1)...(19): siRNA sense strand
gguauggaucgauggauua

SEQ ID NO: 2135187 - RNA, 19 nt, Homo sapiens
  misc_RNA (1)...(19): siRNA sense strand
gggaagauuuuguaccaua

SEQ ID NO: 2135188 - RNA, 19 nt, Homo sapiens
  misc_RNA (1)...(19): siRNA sense strand
ggucagcccucugugcaau

SEQ ID NO: 2135189 - RNA, 19 nt, Homo sapiens
  misc_RNA (1)...(19): siRNA sense strand
gcaauuucaacaucauaga

SEQ ID NO: 2135190 - RNA, 19 nt, Homo sapiens
  misc_RNA (1)...(19): siRNA sense strand
ucaacaucauagagucuuu

SEQ ID NO: 2135191 - RNA, 19 nt, Homo sapiens
  misc_RNA (1)...(19): siRNA sense strand
gauccuggucuacgacauu

SEQ ID NO: 2135192 - RNA, 19 nt, Homo sapiens
  misc_RNA (1)...(19): siRNA sense strand
cgaccaggccuacgacuuc

SEQ ID NO: 2135193 - RNA, 19 nt, Homo sapiens
  misc_RNA (1)...(19): siRNA sense strand
gaucgauggauuaagaaga

SEQ ID NO: 2135194 - RNA, 19 nt, Homo sapiens
  misc_RNA (1)...(19): siRNA sense strand
cgagcaagguacugagcuu

SEQ ID NO: 2135195 - RNA, 19 nt, Homo sapiens
  misc_RNA (1)...(19): siRNA sense strand
ucagcccucugugcaauuu

SEQ ID NO: 2135196 - RNA, 19 nt, Homo sapiens
  misc_RNA (1)...(19): siRNA sense strand
gccuacaucuggcauucaa

SEQ ID NO: 2135197 - RNA, 19 nt, Homo sapiens
  misc_RNA (1)...(19): siRNA sense strand
auggaucgauggauuaaga

SEQ ID NO: 2135198 - RNA, 19 nt, Homo sapiens
  misc_RNA (1)...(19): siRNA sense strand
gagugauccuggucuacga

SEQ ID NO: 2135199 - RNA, 19 nt, Homo sapiens
  misc_RNA (1)...(19): siRNA sense strand
uaagaagccaccucaaguc

SEQ ID NO: 2135200 - RNA, 19 nt, Homo sapiens
  misc_RNA (1)...(19): siRNA sense strand
ggaagauuuuguaccauau

SEQ ID NO: 2135201 - RNA, 19 nt, Homo sapiens
  misc_RNA (1)...(19): siRNA sense strand
uuaagaagccaccucaagu

SEQ ID NO: 2135202 - RNA, 19 nt, Homo sapiens
  misc_RNA (1)...(19): siRNA sense strand
uaagaagauugaggaacau

SEQ ID NO: 2135203 - RNA, 19 nt, Homo sapiens
  misc_RNA (1)...(19): siRNA sense strand
guauggaucgauggauuaa

SEQ ID NO: 2135204 - RNA, 19 nt, Homo sapiens
  misc_RNA (1)...(19): siRNA sense strand
gcuggucuuucgaggguau

SEQ ID NO: 2135205 - RNA, 19 nt, Homo sapiens
  misc_RNA (1)...(19): siRNA sense strand
caccagcuccacucacaaa

SEQ ID NO: 2135206 - RNA, 19 nt, Homo sapiens
  misc_RNA (1)...(19): siRNA sense strand
cuacaucuggcauucaaga

SEQ ID NO: 2135207 - RNA, 19 nt, Homo sapiens
  misc_RNA (1)...(19): siRNA sense strand
gauggauuaagaagauuga

SEQ ID NO: 2135208 - RNA, 19 nt, Homo sapiens
  misc_RNA (1)...(19): siRNA sense strand
gugcaauuucaacaucaua

SEQ ID NO: 2135209 - RNA, 19 nt, Homo sapiens
  misc_RNA (1)...(19): siRNA sense strand
caccagaaacagcugcaaa

SEQ ID NO: 2135210 - RNA, 19 nt, Homo sapiens
  misc_RNA (1)...(19): siRNA sense strand
gauuaagaagauugaggaa

SEQ ID NO: 2135211 - RNA, 19 nt, Homo sapiens
  misc_RNA (1)...(19): siRNA sense strand
gacguaggcaagagugaga

SEQ ID NO: 2135212 - RNA, 19 nt, Homo sapiens
  misc_RNA (1)...(19): siRNA sense strand
cagaaacagcugcaaaauu

SEQ ID NO: 2135213 - RNA, 19 nt, Homo sapiens
  misc_RNA (1)...(19): siRNA sense strand
gggcagggaagauuuugua

SEQ ID NO: 2135214 - RNA, 19 nt, Homo sapiens
  misc_RNA (1)...(19): siRNA sense strand
ucugugcaauuucaacauc

SEQ ID NO: 2135215 - RNA, 19 nt, Homo sapiens
  misc_RNA (1)...(19): siRNA sense strand
uugcaaaccgcuggucuuu

SEQ ID NO: 2135216 - RNA, 19 nt, Homo sapiens
  misc_RNA (1)...(19): siRNA sense strand
ggagcuggccaggauagug

SEQ ID NO: 2135217 - RNA, 19 nt, Homo sapiens
  misc_RNA (1)...(19): siRNA sense strand
caacaucauagagucuuuc

SEQ ID NO: 2135218 - RNA, 19 nt, Homo sapiens
  misc_RNA (1)...(19): siRNA sense strand
gaagagagcgcaaaugaua

SEQ ID NO: 2135219 - RNA, 19 nt, Homo sapiens
  misc_RNA (1)...(19): siRNA sense strand
caaaugauauggaauguga

SEQ ID NO: 2135220 - RNA, 19 nt, Homo sapiens
  misc_RNA (1)...(19): siRNA sense strand
ccagagaccucauggaauu

SEQ ID NO: 2135221 - RNA, 19 nt, Homo sapiens
  misc_RNA (1)...(19): siRNA sense strand
aagaggagcuggacaagua

SEQ ID NO: 2135222 - RNA, 19 nt, Homo sapiens
  misc_RNA (1)...(19): siRNA sense strand
gauaguggaucauaaagug

SEQ ID NO: 2135223 - RNA, 19 nt, Homo sapiens
  misc_RNA (1)...(19): siRNA sense strand
cagaagaucucgcucaaga

SEQ ID NO: 2135224 - RNA, 19 nt, Homo sapiens
  misc_RNA (1)...(19): siRNA sense strand
gaucaagucauucacauuu

SEQ ID NO: 2135225 - RNA, 19 nt, Homo sapiens
  misc_RNA (1)...(19): siRNA sense strand
caacagcucugaugaggau

SEQ ID NO: 2135226 - RNA, 19 nt, Homo sapiens
  misc_RNA (1)...(19): siRNA sense strand
gcacuuugcucuuguccuu

SEQ ID NO: 2135227 - RNA, 19 nt, Homo sapiens
  misc_RNA (1)...(19): siRNA sense strand
gaaaugccucuuccgaaua

SEQ ID NO: 2135228 - RNA, 19 nt, Homo sapiens
  misc_RNA (1)...(19): siRNA sense strand
ugaaugaacuuccuaccuu

SEQ ID NO: 2135229 - RNA, 19 nt, Homo sapiens
  misc_RNA (1)...(19): siRNA sense strand
gaugagcucuccuacucua

SEQ ID NO: 2135230 - RNA, 19 nt, Homo sapiens
  misc_RNA (1)...(19): siRNA sense strand
ugaaacaacucucaaugga

SEQ ID NO: 2135231 - RNA, 19 nt, Homo sapiens
  misc_RNA (1)...(19): siRNA sense strand
gagaagaaccuccggaaau

SEQ ID NO: 2135232 - RNA, 19 nt, Homo sapiens
  misc_RNA (1)...(19): siRNA sense strand
uagaagagguggugaggaa

SEQ ID NO: 2135233 - RNA, 19 nt, Homo sapiens
  misc_RNA (1)...(19): siRNA sense strand
acaaaugguuggaagauga

SEQ ID NO: 2135234 - RNA, 19 nt, Homo sapiens
  misc_RNA (1)...(19): siRNA sense strand
gagcgcaaaugauauggaa

SEQ ID NO: 2135235 - RNA, 19 nt, Homo sapiens
  misc_RNA (1)...(19): siRNA sense strand
gaucaaggcagauuacaug

SEQ ID NO: 2135236 - RNA, 19 nt, Homo sapiens
  misc_RNA (1)...(19): siRNA sense strand
agacagagcugaccaugca

SEQ ID NO: 2135237 - RNA, 19 nt, Homo sapiens
  misc_RNA (1)...(19): siRNA sense strand
gcaagugguucacaauaag

SEQ ID NO: 2135238 - RNA, 19 nt, Homo sapiens
  misc_RNA (1)...(19): siRNA sense strand
cacaaucacuccugaauca

SEQ ID NO: 2135239 - RNA, 19 nt, Homo sapiens
  misc_RNA (1)...(19): siRNA sense strand
ucaagaauguggagaagga

SEQ ID NO: 2135240 - RNA, 19 nt, Homo sapiens
  misc_RNA (1)...(19): siRNA sense strand
gaagaucucgcucaagaau

SEQ ID NO: 2135241 - RNA, 19 nt, Homo sapiens
  misc_RNA (1)...(19): siRNA sense strand
gagaugaugucggccauga

SEQ ID NO: 2135242 - RNA, 19 nt, Homo sapiens
  misc_RNA (1)...(19): siRNA sense strand
gaagaaccacgaagaggaa

SEQ ID NO: 2135243 - RNA, 19 nt, Homo sapiens
  misc_RNA (1)...(19): siRNA sense strand
ugaaaugccucuuccgaau

SEQ ID NO: 2135244 - RNA, 19 nt, Homo sapiens
  misc_RNA (1)...(19): siRNA sense strand
gagagacucauagaacuua

SEQ ID NO: 2135245 - RNA, 19 nt, Homo sapiens
  misc_RNA (1)...(19): siRNA sense strand
ccaacgagcugcugacagu

SEQ ID NO: 2135246 - RNA, 19 nt, Homo sapiens
  misc_RNA (1)...(19): siRNA sense strand
ucacagacaugucagagau

SEQ ID NO: 2135247 - RNA, 19 nt, Homo sapiens
  misc_RNA (1)...(19): siRNA sense strand
aaaugccucuuccgaauaa

SEQ ID NO: 2135248 - RNA, 19 nt, Homo sapiens
  misc_RNA (1)...(19): siRNA sense strand
guuggaagaugacuuuaga

SEQ ID NO: 2135249 - RNA, 19 nt, Homo sapiens
  misc_RNA (1)...(19): siRNA sense strand
gacaagagcccaacucaca

SEQ ID NO: 2135250 - RNA, 19 nt, Homo sapiens
  misc_RNA (1)...(19): siRNA sense strand
ucucagaucuccgaguaua

SEQ ID NO: 2135251 - RNA, 19 nt, Homo sapiens
  misc_RNA (1)...(19): siRNA sense strand
aaaccaaccucaccacugu

SEQ ID NO: 2135252 - RNA, 19 nt, Homo sapiens
  misc_RNA (1)...(19): siRNA sense strand
gguuggagcugcugagaug

SEQ ID NO: 2135253 - RNA, 19 nt, Homo sapiens
  misc_RNA (1)...(19): siRNA sense strand
caaaucugcuuucaucagu

SEQ ID NO: 2135254 - RNA, 19 nt, Homo sapiens
  misc_RNA (1)...(19): siRNA sense strand
ccacugugcuguccgaguu

SEQ ID NO: 2135255 - RNA, 19 nt, Homo sapiens
  misc_RNA (1)...(19): siRNA sense strand
gaacagaaucacaaguuuc

SEQ ID NO: 2135256 - RNA, 19 nt, Homo sapiens
  misc_RNA (1)...(19): siRNA sense strand
ggaccacuguuaaggaugu

SEQ ID NO: 2135257 - RNA, 19 nt, Homo sapiens
  misc_RNA (1)...(19): siRNA sense strand
ggacuucaaucuuggugau

SEQ ID NO: 2135258 - RNA, 19 nt, Homo sapiens
  misc_RNA (1)...(19): siRNA sense strand
ugacauugauugacagugu

SEQ ID NO: 2135259 - RNA, 19 nt, Homo sapiens
  misc_RNA (1)...(19): siRNA sense strand
aggcaaagcuccaguaucu

SEQ ID NO: 2135260 - RNA, 19 nt, Homo sapiens
  misc_RNA (1)...(19): siRNA sense strand
gcaauuccaugcaaaccau

SEQ ID NO: 2135261 - RNA, 19 nt, Homo sapiens
  misc_RNA (1)...(19): siRNA sense strand
cgagaacgcuuuggaaugg

SEQ ID NO: 2135262 - RNA, 19 nt, Homo sapiens
  misc_RNA (1)...(19): siRNA sense strand
gggacaaccugcccaagga

SEQ ID NO: 2135263 - RNA, 19 nt, Homo sapiens
  misc_RNA (1)...(19): siRNA sense strand
agaacagaaucacaaguuu

SEQ ID NO: 2135264 - RNA, 19 nt, Homo sapiens
  misc_RNA (1)...(19): siRNA sense strand
gaggagagcaccacaaugg

SEQ ID NO: 2135265 - RNA, 19 nt, Homo sapiens
  misc_RNA (1)...(19): siRNA sense strand
gcucugcaauucaggcaaa

SEQ ID NO: 2135266 - RNA, 19 nt, Homo sapiens
  misc_RNA (1)...(19): siRNA sense strand
gaaccacgaagaggaagua

SEQ ID NO: 2135267 - RNA, 19 nt, Homo sapiens
  misc_RNA (1)...(19): siRNA sense strand
cuaggaagcuugaaacaac

SEQ ID NO: 2135268 - RNA, 19 nt, Homo sapiens
  misc_RNA (1)...(19): siRNA sense strand
ccagugacauugauugaca

SEQ ID NO: 2135269 - RNA, 19 nt, Homo sapiens
  misc_RNA (1)...(19): siRNA sense strand
agaagcaggucaugugaug

SEQ ID NO: 2135270 - RNA, 19 nt, Homo sapiens
  misc_RNA (1)...(19): siRNA sense strand
ccacagcccguaaccuuaa

SEQ ID NO: 2135271 - RNA, 19 nt, Homo sapiens
  misc_RNA (1)...(19): siRNA sense strand
ccagacagauggccguguu

SEQ ID NO: 2135272 - RNA, 19 nt, Homo sapiens
  misc_RNA (1)...(19): siRNA sense strand
caucaucccucagugaaga

SEQ ID NO: 2135273 - RNA, 19 nt, Homo sapiens
  misc_RNA (1)...(19): siRNA sense strand
cugaagcccugaauuucua

SEQ ID NO: 2135274 - RNA, 19 nt, Homo sapiens
  misc_RNA (1)...(19): siRNA sense strand
gcuccaguaucuacgaauu

SEQ ID NO: 2135275 - RNA, 19 nt, Homo sapiens
  misc_RNA (1)...(19): siRNA sense strand
gaccagauuguggcuauua

SEQ ID NO: 2135276 - RNA, 19 nt, Homo sapiens
  misc_RNA (1)...(19): siRNA sense strand
ucaccgagacccuauauau

SEQ ID NO: 2135277 - RNA, 19 nt, Homo sapiens
  misc_RNA (1)...(19): siRNA sense strand
ugucucagaucuccgagua

SEQ ID NO: 2135278 - RNA, 19 nt, Homo sapiens
  misc_RNA (1)...(19): siRNA sense strand
ccaguaagaaucugaaguu

SEQ ID NO: 2135279 - RNA, 19 nt, Homo sapiens
  misc_RNA (1)...(19): siRNA sense strand
ggacucaggucaugaaacc

SEQ ID NO: 2135280 - RNA, 19 nt, Homo sapiens
  misc_RNA (1)...(19): siRNA sense strand
uggccaagguuaugaggua

SEQ ID NO: 2135281 - RNA, 19 nt, Homo sapiens
  misc_RNA (1)...(19): siRNA sense strand
caggaaagccggacagaug

SEQ ID NO: 2135282 - RNA, 19 nt, Homo sapiens
  misc_RNA (1)...(19): siRNA sense strand
gcaaagcuccaguaucuac

SEQ ID NO: 2135283 - RNA, 19 nt, Homo sapiens
  misc_RNA (1)...(19): siRNA sense strand
gaagaagaaccacgaagag

SEQ ID NO: 2135284 - RNA, 19 nt, Homo sapiens
  misc_RNA (1)...(19): siRNA sense strand
caacuucggcgacuguuau

SEQ ID NO: 2135285 - RNA, 19 nt, Homo sapiens
  misc_RNA (1)...(19): siRNA sense strand
gcagguggcaguuggagaa

SEQ ID NO: 2135286 - RNA, 19 nt, Homo sapiens
  misc_RNA (1)...(19): siRNA sense strand
gagauacugcgacaaguga

SEQ ID NO: 2135287 - RNA, 19 nt, Homo sapiens
  misc_RNA (1)...(19): siRNA sense strand
gcagaagcaggucauguga

SEQ ID NO: 2135288 - RNA, 19 nt, Homo sapiens
  misc_RNA (1)...(19): siRNA sense strand
ggaggaagaugagacaacu

SEQ ID NO: 2135289 - RNA, 19 nt, Homo sapiens
  misc_RNA (1)...(19): siRNA sense strand
agaagaaccuccggaaauc

SEQ ID NO: 2135290 - RNA, 19 nt, Homo sapiens
  misc_RNA (1)...(19): siRNA sense strand
ccuaauguccugaagguuu

SEQ ID NO: 2135291 - RNA, 19 nt, Homo sapiens
  misc_RNA (1)...(19): siRNA sense strand
gaacaagccgagagucagu

SEQ ID NO: 2135292 - RNA, 19 nt, Homo sapiens
  misc_RNA (1)...(19): siRNA sense strand
cuucagagcucacagacau

SEQ ID NO: 2135293 - RNA, 19 nt, Homo sapiens
  misc_RNA (1)...(19): siRNA sense strand
caacgagaaccuaaucuuc

SEQ ID NO: 2135294 - RNA, 19 nt, Homo sapiens
  misc_RNA (1)...(19): siRNA sense strand
ccacuuccaccuccaauga

SEQ ID NO: 2135295 - RNA, 19 nt, Homo sapiens
  misc_RNA (1)...(19): siRNA sense strand
caacugaaggcucaccaaa

SEQ ID NO: 2135296 - RNA, 19 nt, Homo sapiens
  misc_RNA (1)...(19): siRNA sense strand
uuacaguucugcacacuca

SEQ ID NO: 2135297 - RNA, 19 nt, Homo sapiens
  misc_RNA (1)...(19): siRNA sense strand
gagauugaccuccgugugu

SEQ ID NO: 2135298 - RNA, 19 nt, Homo sapiens
  misc_RNA (1)...(19): siRNA sense strand
cagcaagugguucacaaua

SEQ ID NO: 2135299 - RNA, 19 nt, Homo sapiens
  misc_RNA (1)...(19): siRNA sense strand
cagaacagaaucacaaguu

SEQ ID NO: 2135300 - RNA, 19 nt, Homo sapiens
  misc_RNA (1)...(19): siRNA sense strand
ucacggaacugagacauac

SEQ ID NO: 2135301 - RNA, 19 nt, Homo sapiens
  misc_RNA (1)...(19): siRNA sense strand
cacauucacccacuccuua

SEQ ID NO: 2135302 - RNA, 19 nt, Homo sapiens
  misc_RNA (1)...(19): siRNA sense strand
gaagguaaagcaguaugaa

SEQ ID NO: 2135303 - RNA, 19 nt, Homo sapiens
  misc_RNA (1)...(19): siRNA sense strand
gagcagcagugccaguaag

SEQ ID NO: 2135304 - RNA, 19 nt, Homo sapiens
  misc_RNA (1)...(19): siRNA sense strand
agcaagugguucacaauaa

SEQ ID NO: 2135305 - RNA, 19 nt, Homo sapiens
  misc_RNA (1)...(19): siRNA sense strand
gagguucauugagcacuuu

SEQ ID NO: 2135306 - RNA, 19 nt, Homo sapiens
  misc_RNA (1)...(19): siRNA sense strand
gcgcaaaugauauggaaug

SEQ ID NO: 2135307 - RNA, 19 nt, Homo sapiens
  misc_RNA (1)...(19): siRNA sense strand
gcuaugcccuacagaugga

SEQ ID NO: 2135308 - RNA, 19 nt, Homo sapiens
  misc_RNA (1)...(19): siRNA sense strand
agaagaaggagacagauga

SEQ ID NO: 2135309 - RNA, 19 nt, Homo sapiens
  misc_RNA (1)...(19): siRNA sense strand
gcaccaugcccucuaggaa

SEQ ID NO: 2135310 - RNA, 19 nt, Homo sapiens
  misc_RNA (1)...(19): siRNA sense strand
gacaaaugguuggaagaug

SEQ ID NO: 2135311 - RNA, 19 nt, Homo sapiens
  misc_RNA (1)...(19): siRNA sense strand
caggagcgcuaaggaauuc

SEQ ID NO: 2135312 - RNA, 19 nt, Homo sapiens
  misc_RNA (1)...(19): siRNA sense strand
ggagagacucauagaacuu

SEQ ID NO: 2135313 - RNA, 19 nt, Homo sapiens
  misc_RNA (1)...(19): siRNA sense strand
gggagagacucauagaacu

SEQ ID NO: 2135314 - RNA, 19 nt, Homo sapiens
  misc_RNA (1)...(19): siRNA sense strand
aggcuaagaucgccaccua

SEQ ID NO: 2135315 - RNA, 19 nt, Homo sapiens
  misc_RNA (1)...(19): siRNA sense strand
gagauuccagugacauuga

SEQ ID NO: 2135316 - RNA, 19 nt, Homo sapiens
  misc_RNA (1)...(19): siRNA sense strand
ugcagaagguaaagcagua

SEQ ID NO: 2135317 - RNA, 19 nt, Homo sapiens
  misc_RNA (1)...(19): siRNA sense strand
ugaagaagaaccacgaaga

SEQ ID NO: 2135318 - RNA, 19 nt, Homo sapiens
  misc_RNA (1)...(19): siRNA sense strand
ucaccaaccugucauauua

SEQ ID NO: 2135319 - RNA, 19 nt, Homo sapiens
  misc_RNA (1)...(19): siRNA sense strand
caacagagcauuuauuuga

SEQ ID NO: 2135320 - RNA, 19 nt, Homo sapiens
  misc_RNA (1)...(19): siRNA sense strand
cgaaagaucuccucuggau

SEQ ID NO: 2135321 - RNA, 19 nt, Homo sapiens
  misc_RNA (1)...(19): siRNA sense strand
gcaaauaccgaaacaauag

SEQ ID NO: 2135322 - RNA, 19 nt, Homo sapiens
  misc_RNA (1)...(19): siRNA sense strand
aaaggaagcccacgacaua

SEQ ID NO: 2135323 - RNA, 19 nt, Homo sapiens
  misc_RNA (1)...(19): siRNA sense strand
ucauaagcaugcccuguaa

SEQ ID NO: 2135324 - RNA, 19 nt, Homo sapiens
  misc_RNA (1)...(19): siRNA sense strand
gugcucaccuucuucgaaa

SEQ ID NO: 2135325 - RNA, 19 nt, Homo sapiens
  misc_RNA (1)...(19): siRNA sense strand
gaaaucaugagguccaaug

SEQ ID NO: 2135326 - RNA, 19 nt, Homo sapiens
  misc_RNA (1)...(19): siRNA sense strand
ggacccaacagagcauuua

SEQ ID NO: 2135327 - RNA, 19 nt, Homo sapiens
  misc_RNA (1)...(19): siRNA sense strand
aagcaugcccuguaaauau

SEQ ID NO: 2135328 - RNA, 19 nt, Homo sapiens
  misc_RNA (1)...(19): siRNA sense strand
ugaagacgaucauaagcau

SEQ ID NO: 2135329 - RNA, 19 nt, Homo sapiens
  misc_RNA (1)...(19): siRNA sense strand
acagagcauuuauuugaga

SEQ ID NO: 2135330 - RNA, 19 nt, Homo sapiens
  misc_RNA (1)...(19): siRNA sense strand
uaagcaugcccuguaaaua

SEQ ID NO: 2135331 - RNA, 19 nt, Homo sapiens
  misc_RNA (1)...(19): siRNA sense strand
cccaacagagcauuuauuu

SEQ ID NO: 2135332 - RNA, 19 nt, Homo sapiens
  misc_RNA (1)...(19): siRNA sense strand
uagcaaauaccgaaacaau

SEQ ID NO: 2135333 - RNA, 19 nt, Homo sapiens
  misc_RNA (1)...(19): siRNA sense strand
gacauagagaccaggcuua

SEQ ID NO: 2135334 - RNA, 19 nt, Homo sapiens
  misc_RNA (1)...(19): siRNA sense strand
uggagaagcugcugaagac

SEQ ID NO: 2135335 - RNA, 19 nt, Homo sapiens
  misc_RNA (1)...(19): siRNA sense strand
uuaaugagguggagaagcu

SEQ ID NO: 2135336 - RNA, 19 nt, Homo sapiens
  misc_RNA (1)...(19): siRNA sense strand
gaccacaguauaccaaaug

SEQ ID NO: 2135337 - RNA, 19 nt, Homo sapiens
  misc_RNA (1)...(19): siRNA sense strand
gagaauggcagugaguuuc

SEQ ID NO: 2135338 - RNA, 19 nt, Homo sapiens
  misc_RNA (1)...(19): siRNA sense strand
agcaugcccuguaaauauu

SEQ ID NO: 2135339 - RNA, 19 nt, Homo sapiens
  misc_RNA (1)...(19): siRNA sense strand
cagagcauuuauuugagaa

SEQ ID NO: 2135340 - RNA, 19 nt, Homo sapiens
  misc_RNA (1)...(19): siRNA sense strand
gacagacauuugggacuga

SEQ ID NO: 2135341 - RNA, 19 nt, Homo sapiens
  misc_RNA (1)...(19): siRNA sense strand
auagagaccaggcuuaaug

SEQ ID NO: 2135342 - RNA, 19 nt, Homo sapiens
  misc_RNA (1)...(19): siRNA sense strand
cacaguauaccaaauggaa

SEQ ID NO: 2135343 - RNA, 19 nt, Homo sapiens
  misc_RNA (1)...(19): siRNA sense strand
ugagaauggcagugaguuu

SEQ ID NO: 2135344 - RNA, 19 nt, Homo sapiens
  misc_RNA (1)...(19): siRNA sense strand
uaaaggaagcccacgacau

SEQ ID NO: 2135345 - RNA, 19 nt, Homo sapiens
  misc_RNA (1)...(19): siRNA sense strand
ugaccacaguauaccaaau

SEQ ID NO: 2135346 - RNA, 19 nt, Homo sapiens
  misc_RNA (1)...(19): siRNA sense strand
agaagcugcugaagacgau

SEQ ID NO: 2135347 - RNA, 19 nt, Homo sapiens
  misc_RNA (1)...(19): siRNA sense strand
guggagaagcugcugaaga

SEQ ID NO: 2135348 - RNA, 19 nt, Homo sapiens
  misc_RNA (1)...(19): siRNA sense strand
ucaaaguccagucaaaaua

SEQ ID NO: 2135349 - RNA, 19 nt, Homo sapiens
  misc_RNA (1)...(19): siRNA sense strand
caaggacugguugccauaa

SEQ ID NO: 2135350 - RNA, 19 nt, Homo sapiens
  misc_RNA (1)...(19): siRNA sense strand
aaggacugguugccauaaa

SEQ ID NO: 2135351 - RNA, 19 nt, Homo sapiens
  misc_RNA (1)...(19): siRNA sense strand
ccaacagagcauuuauuug

SEQ ID NO: 2135352 - RNA, 19 nt, Homo sapiens
  misc_RNA (1)...(19): siRNA sense strand
acauagagaccaggcuuaa

SEQ ID NO: 2135353 - RNA, 19 nt, Homo sapiens
  misc_RNA (1)...(19): siRNA sense strand
uagagaccaggcuuaauga

SEQ ID NO: 2135354 - RNA, 19 nt, Homo sapiens
  misc_RNA (1)...(19): siRNA sense strand
agcaaauaccgaaacaaua

SEQ ID NO: 2135355 - RNA, 19 nt, Homo sapiens
  misc_RNA (1)...(19): siRNA sense strand
uauucuagaucggaaguug

SEQ ID NO: 2135356 - RNA, 19 nt, Homo sapiens
  misc_RNA (1)...(19): siRNA sense strand
guuauugaccacaguauac

SEQ ID NO: 2135357 - RNA, 19 nt, Homo sapiens
  misc_RNA (1)...(19): siRNA sense strand
ggaagcccacgacauagag

SEQ ID NO: 2135358 - RNA, 19 nt, Homo sapiens
  misc_RNA (1)...(19): siRNA sense strand
caguauaccaaauggaaga

SEQ ID NO: 2135359 - RNA, 19 nt, Homo sapiens
  misc_RNA (1)...(19): siRNA sense strand
cugcugaagacgaucauaa

SEQ ID NO: 2135360 - RNA, 19 nt, Homo sapiens
  misc_RNA (1)...(19): siRNA sense strand
caaaguccagucaaaauau

SEQ ID NO: 2135361 - RNA, 19 nt, Homo sapiens
  misc_RNA (1)...(19): siRNA sense strand
cagaaaucaugagguccaa

SEQ ID NO: 2135362 - RNA, 19 nt, Homo sapiens
  misc_RNA (1)...(19): siRNA sense strand
cggaaguugugcucaccuu

SEQ ID NO: 2135363 - RNA, 19 nt, Homo sapiens
  misc_RNA (1)...(19): siRNA sense strand
caaauaccgaaacaauagu

SEQ ID NO: 2135364 - RNA, 19 nt, Homo sapiens
  misc_RNA (1)...(19): siRNA sense strand
gaagcccacgacauagaga

SEQ ID NO: 2135365 - RNA, 19 nt, Homo sapiens
  misc_RNA (1)...(19): siRNA sense strand
cuacgucaccaaccuguca

SEQ ID NO: 2135366 - RNA, 19 nt, Homo sapiens
  misc_RNA (1)...(19): siRNA sense strand
ggacugguugccauaaagg

SEQ ID NO: 2135367 - RNA, 19 nt, Homo sapiens
  misc_RNA (1)...(19): siRNA sense strand
gucaccaaccugucauauu

SEQ ID NO: 2135368 - RNA, 19 nt, Homo sapiens
  misc_RNA (1)...(19): siRNA sense strand
auaagcaugcccuguaaau

SEQ ID NO: 2135369 - RNA, 19 nt, Homo sapiens
  misc_RNA (1)...(19): siRNA sense strand
cauaagcaugcccuguaaa

SEQ ID NO: 2135370 - RNA, 19 nt, Homo sapiens
  misc_RNA (1)...(19): siRNA sense strand
ucaccaaccugucauauua

SEQ ID NO: 2135371 - RNA, 19 nt, Homo sapiens
  misc_RNA (1)...(19): siRNA sense strand
caacagagcauuuauuuga

SEQ ID NO: 2135372 - RNA, 19 nt, Homo sapiens
  misc_RNA (1)...(19): siRNA sense strand
cgaaagaucuccucuggau

SEQ ID NO: 2135373 - RNA, 19 nt, Homo sapiens
  misc_RNA (1)...(19): siRNA sense strand
gcaaauaccgaaacaauag

SEQ ID NO: 2135374 - RNA, 19 nt, Homo sapiens
  misc_RNA (1)...(19): siRNA sense strand
aaaggaagcccacgacaua

SEQ ID NO: 2135375 - RNA, 19 nt, Homo sapiens
  misc_RNA (1)...(19): siRNA sense strand
ucauaagcaugcccuguaa

SEQ ID NO: 2135376 - RNA, 19 nt, Homo sapiens
  misc_RNA (1)...(19): siRNA sense strand
gugcucaccuucuucgaaa

SEQ ID NO: 2135377 - RNA, 19 nt, Homo sapiens
  misc_RNA (1)...(19): siRNA sense strand
gaaaucaugagguccaaug

SEQ ID NO: 2135378 - RNA, 19 nt, Homo sapiens
  misc_RNA (1)...(19): siRNA sense strand
ggacccaacagagcauuua

SEQ ID NO: 2135379 - RNA, 19 nt, Homo sapiens
  misc_RNA (1)...(19): siRNA sense strand
aagcaugcccuguaaauau

SEQ ID NO: 2135380 - RNA, 19 nt, Homo sapiens
  misc_RNA (1)...(19): siRNA sense strand
ugaagacgaucauaagcau

SEQ ID NO: 2135381 - RNA, 19 nt, Homo sapiens
  misc_RNA (1)...(19): siRNA sense strand
acagagcauuuauuugaga

SEQ ID NO: 2135382 - RNA, 19 nt, Homo sapiens
  misc_RNA (1)...(19): siRNA sense strand
uaagcaugcccuguaaaua

SEQ ID NO: 2135383 - RNA, 19 nt, Homo sapiens
  misc_RNA (1)...(19): siRNA sense strand
cccaacagagcauuuauuu

SEQ ID NO: 2135384 - RNA, 19 nt, Homo sapiens
  misc_RNA (1)...(19): siRNA sense strand
uagcaaauaccgaaacaau

SEQ ID NO: 2135385 - RNA, 19 nt, Homo sapiens
  misc_RNA (1)...(19): siRNA sense strand
gacauagagaccaggcuua

SEQ ID NO: 2135386 - RNA, 19 nt, Homo sapiens
  misc_RNA (1)...(19): siRNA sense strand
uggagaagcugcugaagac

SEQ ID NO: 2135387 - RNA, 19 nt, Homo sapiens
  misc_RNA (1)...(19): siRNA sense strand
uuaaugagguggagaagcu

SEQ ID NO: 2135388 - RNA, 19 nt, Homo sapiens
  misc_RNA (1)...(19): siRNA sense strand
gaccacaguauaccaaaug

SEQ ID NO: 2135389 - RNA, 19 nt, Homo sapiens
  misc_RNA (1)...(19): siRNA sense strand
gagaauggcagugaguuuc

SEQ ID NO: 2135390 - RNA, 19 nt, Homo sapiens
  misc_RNA (1)...(19): siRNA sense strand
agcaugcccuguaaauauu

SEQ ID NO: 2135391 - RNA, 19 nt, Homo sapiens
  misc_RNA (1)...(19): siRNA sense strand
cagagcauuuauuugagaa

SEQ ID NO: 2135392 - RNA, 19 nt, Homo sapiens
  misc_RNA (1)...(19): siRNA sense strand
gacagacauuugggacuga

SEQ ID NO: 2135393 - RNA, 19 nt, Homo sapiens
  misc_RNA (1)...(19): siRNA sense strand
auagagaccaggcuuaaug

SEQ ID NO: 2135394 - RNA, 19 nt, Homo sapiens
  misc_RNA (1)...(19): siRNA sense strand
cacaguauaccaaauggaa

SEQ ID NO: 2135395 - RNA, 19 nt, Homo sapiens
  misc_RNA (1)...(19): siRNA sense strand
ugagaauggcagugaguuu

SEQ ID NO: 2135396 - RNA, 19 nt, Homo sapiens
  misc_RNA (1)...(19): siRNA sense strand
uaaaggaagcccacgacau

SEQ ID NO: 2135397 - RNA, 19 nt, Homo sapiens
  misc_RNA (1)...(19): siRNA sense strand
ugaccacaguauaccaaau

SEQ ID NO: 2135398 - RNA, 19 nt, Homo sapiens
  misc_RNA (1)...(19): siRNA sense strand
agaagcugcugaagacgau

SEQ ID NO: 2135399 - RNA, 19 nt, Homo sapiens
  misc_RNA (1)...(19): siRNA sense strand
guggagaagcugcugaaga

SEQ ID NO: 2135400 - RNA, 19 nt, Homo sapiens
  misc_RNA (1)...(19): siRNA sense strand
ucaaaguccagucaaaaua

SEQ ID NO: 2135401 - RNA, 19 nt, Homo sapiens
  misc_RNA (1)...(19): siRNA sense strand
caaggacugguugccauaa

SEQ ID NO: 2135402 - RNA, 19 nt, Homo sapiens
  misc_RNA (1)...(19): siRNA sense strand
aaggacugguugccauaaa

SEQ ID NO: 2135403 - RNA, 19 nt, Homo sapiens
  misc_RNA (1)...(19): siRNA sense strand
ccaacagagcauuuauuug

SEQ ID NO: 2135404 - RNA, 19 nt, Homo sapiens
  misc_RNA (1)...(19): siRNA sense strand
acauagagaccaggcuuaa

SEQ ID NO: 2135405 - RNA, 19 nt, Homo sapiens
  misc_RNA (1)...(19): siRNA sense strand
uagagaccaggcuuaauga

SEQ ID NO: 2135406 - RNA, 19 nt, Homo sapiens
  misc_RNA (1)...(19): siRNA sense strand
agcaaauaccgaaacaaua

SEQ ID NO: 2135407 - RNA, 19 nt, Homo sapiens
  misc_RNA (1)...(19): siRNA sense strand
uauucuagaucggaaguug

SEQ ID NO: 2135408 - RNA, 19 nt, Homo sapiens
  misc_RNA (1)...(19): siRNA sense strand
guuauugaccacaguauac

SEQ ID NO: 2135409 - RNA, 19 nt, Homo sapiens
  misc_RNA (1)...(19): siRNA sense strand
ggaagcccacgacauagag

SEQ ID NO: 2135410 - RNA, 19 nt, Homo sapiens
  misc_RNA (1)...(19): siRNA sense strand
caguauaccaaauggaaga

SEQ ID NO: 2135411 - RNA, 19 nt, Homo sapiens
  misc_RNA (1)...(19): siRNA sense strand
cugcugaagacgaucauaa

SEQ ID NO: 2135412 - RNA, 19 nt, Homo sapiens
  misc_RNA (1)...(19): siRNA sense strand
caaaguccagucaaaauau

SEQ ID NO: 2135413 - RNA, 19 nt, Homo sapiens
  misc_RNA (1)...(19): siRNA sense strand
cagaaaucaugagguccaa

SEQ ID NO: 2135414 - RNA, 19 nt, Homo sapiens
  misc_RNA (1)...(19): siRNA sense strand
cggaaguugugcucaccuu

SEQ ID NO: 2135415 - RNA, 19 nt, Homo sapiens
  misc_RNA (1)...(19): siRNA sense strand
caaauaccgaaacaauagu

SEQ ID NO: 2135416 - RNA, 19 nt, Homo sapiens
  misc_RNA (1)...(19): siRNA sense strand
gaagcccacgacauagaga

SEQ ID NO: 2135417 - RNA, 19 nt, Homo sapiens
  misc_RNA (1)...(19): siRNA sense strand
cuacgucaccaaccuguca

SEQ ID NO: 2135418 - RNA, 19 nt, Homo sapiens
  misc_RNA (1)...(19): siRNA sense strand
ggacugguugccauaaagg

SEQ ID NO: 2135419 - RNA, 19 nt, Homo sapiens
  misc_RNA (1)...(19): siRNA sense strand
gucaccaaccugucauauu

SEQ ID NO: 2135420 - RNA, 19 nt, Homo sapiens
  misc_RNA (1)...(19): siRNA sense strand
auaagcaugcccuguaaau

SEQ ID NO: 2135421 - RNA, 19 nt, Homo sapiens
  misc_RNA (1)...(19): siRNA sense strand
cauaagcaugcccuguaaa

SEQ ID NO: 2135422 - RNA, 19 nt, Homo sapiens
  misc_RNA (1)...(19): siRNA sense strand
ggaaaacgguucaugauua

SEQ ID NO: 2135423 - RNA, 19 nt, Homo sapiens
  misc_RNA (1)...(19): siRNA sense strand
ccuaauaacuggaugcauu

SEQ ID NO: 2135424 - RNA, 19 nt, Homo sapiens
  misc_RNA (1)...(19): siRNA sense strand
ggacaacgccuccaacugu

SEQ ID NO: 2135425 - RNA, 19 nt, Homo sapiens
  misc_RNA (1)...(19): siRNA sense strand
gaucuugugugugauaaug

SEQ ID NO: 2135426 - RNA, 19 nt, Homo sapiens
  misc_RNA (1)...(19): siRNA sense strand
cuuguaugcuuuacgaaua

SEQ ID NO: 2135427 - RNA, 19 nt, Homo sapiens
  misc_RNA (1)...(19): siRNA sense strand
ggaagguccauaucgcuaa

SEQ ID NO: 2135428 - RNA, 19 nt, Homo sapiens
  misc_RNA (1)...(19): siRNA sense strand
cagguucuuugaaggauuu

SEQ ID NO: 2135429 - RNA, 19 nt, Homo sapiens
  misc_RNA (1)...(19): siRNA sense strand
agugggaucuuguguguga

SEQ ID NO: 2135430 - RNA, 19 nt, Homo sapiens
  misc_RNA (1)...(19): siRNA sense strand
uccaucaucuucauucuga

SEQ ID NO: 2135431 - RNA, 19 nt, Homo sapiens
  misc_RNA (1)...(19): siRNA sense strand
caucuucauucugaucuuu

SEQ ID NO: 2135432 - RNA, 19 nt, Homo sapiens
  misc_RNA (1)...(19): siRNA sense strand
acacucagguucuuugaag

SEQ ID NO: 2135433 - RNA, 19 nt, Homo sapiens
  misc_RNA (1)...(19): siRNA sense strand
gaagguccauaucgcuaag

SEQ ID NO: 2135434 - RNA, 19 nt, Homo sapiens
  misc_RNA (1)...(19): siRNA sense strand
aaucuuuggcuaccuaaua

SEQ ID NO: 2135435 - RNA, 19 nt, Homo sapiens
  misc_RNA (1)...(19): siRNA sense strand
cagugaaugugacaauguu

SEQ ID NO: 2135436 - RNA, 19 nt, Homo sapiens
  misc_RNA (1)...(19): siRNA sense strand
gaaaacgguucaugauuac

SEQ ID NO: 2135437 - RNA, 19 nt, Homo sapiens
  misc_RNA (1)...(19): siRNA sense strand
ucuuguugcuggacuauga

SEQ ID NO: 2135438 - RNA, 19 nt, Homo sapiens
  misc_RNA (1)...(19): siRNA sense strand
gcacacucagguucuuuga

SEQ ID NO: 2135439 - RNA, 19 nt, Homo sapiens
  misc_RNA (1)...(19): siRNA sense strand
uugccuggcuggaaucauu

SEQ ID NO: 2135440 - RNA, 19 nt, Homo sapiens
  misc_RNA (1)...(19): siRNA sense strand
auucugaucuuuggacuga

SEQ ID NO: 2135441 - RNA, 19 nt, Homo sapiens
  misc_RNA (1)...(19): siRNA sense strand
gggaucuugugugugauaa

SEQ ID NO: 2135442 - RNA, 19 nt, Homo sapiens
  misc_RNA (1)...(19): siRNA sense strand
cugguuggauuaaucuuug

SEQ ID NO: 2135443 - RNA, 19 nt, Homo sapiens
  misc_RNA (1)...(19): siRNA sense strand
caccuuguaugcuuuacga

SEQ ID NO: 2135444 - RNA, 19 nt, Homo sapiens
  misc_RNA (1)...(19): siRNA sense strand
cuaauaacuggaugcauug

SEQ ID NO: 2135445 - RNA, 19 nt, Homo sapiens
  misc_RNA (1)...(19): siRNA sense strand
auuaaucuuuggcuaccua

SEQ ID NO: 2135446 - RNA, 19 nt, Homo sapiens
  misc_RNA (1)...(19): siRNA sense strand
ucagguucuuugaaggauu

SEQ ID NO: 2135447 - RNA, 19 nt, Homo sapiens
  misc_RNA (1)...(19): siRNA sense strand
aucuuuggcuaccuaauaa

SEQ ID NO: 2135448 - RNA, 19 nt, Homo sapiens
  misc_RNA (1)...(19): siRNA sense strand
uuacgaugguggcgagcuu

SEQ ID NO: 2135449 - RNA, 19 nt, Homo sapiens
  misc_RNA (1)...(19): siRNA sense strand
ucagugaaugugacaaugu

SEQ ID NO: 2135450 - RNA, 19 nt, Homo sapiens
  misc_RNA (1)...(19): siRNA sense strand
auucucaccuuguaugcuu

SEQ ID NO: 2135451 - RNA, 19 nt, Homo sapiens
  misc_RNA (1)...(19): siRNA sense strand
ucuccuuacugguuggauu

SEQ ID NO: 2135452 - RNA, 19 nt, Homo sapiens
  misc_RNA (1)...(19): siRNA sense strand
cuuacugguuggauuaauc

SEQ ID NO: 2135453 - RNA, 19 nt, Homo sapiens
  misc_RNA (1)...(19): siRNA sense strand
aaacgguucaugauuacga

SEQ ID NO: 2135454 - RNA, 19 nt, Homo sapiens
  misc_RNA (1)...(19): siRNA sense strand
ggacugacuguggcacugu

SEQ ID NO: 2135455 - RNA, 19 nt, Homo sapiens
  misc_RNA (1)...(19): siRNA sense strand
uccagaacguggucagcaa

SEQ ID NO: 2135456 - RNA, 19 nt, Homo sapiens
  misc_RNA (1)...(19): siRNA sense strand
ucagcacacucagguucuu

SEQ ID NO: 2135457 - RNA, 19 nt, Homo sapiens
  misc_RNA (1)...(19): siRNA sense strand
gcugcaggcccucaucauc

SEQ ID NO: 2135458 - RNA, 19 nt, Homo sapiens
  misc_RNA (1)...(19): siRNA sense strand
gaacugauccugaagacaa

SEQ ID NO: 2135459 - RNA, 19 nt, Homo sapiens
  misc_RNA (1)...(19): siRNA sense strand
ccacugggcuccugccaua

SEQ ID NO: 2135460 - RNA, 19 nt, Homo sapiens
  misc_RNA (1)...(19): siRNA sense strand
aaacugagguguaugauca

SEQ ID NO: 2135461 - RNA, 19 nt, Homo sapiens
  misc_RNA (1)...(19): siRNA sense strand
caaauaccaugcacuuuau

SEQ ID NO: 2135462 - RNA, 19 nt, Homo sapiens
  misc_RNA (1)...(19): siRNA sense strand
acaaauaccaugcacuuua

SEQ ID NO: 2135463 - RNA, 19 nt, Homo sapiens
  misc_RNA (1)...(19): siRNA sense strand
ggacaaauaccaugcacuu

SEQ ID NO: 2135464 - RNA, 19 nt, Homo sapiens
  misc_RNA (1)...(19): siRNA sense strand
gaucaggugcuguuccaua

SEQ ID NO: 2135465 - RNA, 19 nt, Homo sapiens
  misc_RNA (1)...(19): siRNA sense strand
gaagacaaaggaccuauca

SEQ ID NO: 2135466 - RNA, 19 nt, Homo sapiens
  misc_RNA (1)...(19): siRNA sense strand
cagcacaaauuuggucuaa

SEQ ID NO: 2135467 - RNA, 19 nt, Homo sapiens
  misc_RNA (1)...(19): siRNA sense strand
gcacaaauuuggucuaacc

SEQ ID NO: 2135468 - RNA, 19 nt, Homo sapiens
  misc_RNA (1)...(19): siRNA sense strand
ccuggucccucaucaguuu

SEQ ID NO: 2135469 - RNA, 19 nt, Homo sapiens
  misc_RNA (1)...(19): siRNA sense strand
aaaggugugugcucuguga

SEQ ID NO: 2135470 - RNA, 19 nt, Homo sapiens
  misc_RNA (1)...(19): siRNA sense strand
gccaggagaugguggacaa

SEQ ID NO: 2135471 - RNA, 19 nt, Homo sapiens
  misc_RNA (1)...(19): siRNA sense strand
aggcaucacuccucacuug

SEQ ID NO: 2135472 - RNA, 19 nt, Homo sapiens
  misc_RNA (1)...(19): siRNA sense strand
aggagaugguggacaaaua

SEQ ID NO: 2135473 - RNA, 19 nt, Homo sapiens
  misc_RNA (1)...(19): siRNA sense strand
gggaaacugagguguauga

SEQ ID NO: 2135474 - RNA, 19 nt, Homo sapiens
  misc_RNA (1)...(19): siRNA sense strand
ccaaaggugugugcucugu

SEQ ID NO: 2135475 - RNA, 19 nt, Homo sapiens
  misc_RNA (1)...(19): siRNA sense strand
cacuauggcugcucagaga

SEQ ID NO: 2135476 - RNA, 19 nt, Homo sapiens
  misc_RNA (1)...(19): siRNA sense strand
gugaggcccugcaaagugu

SEQ ID NO: 2135477 - RNA, 19 nt, Homo sapiens
  misc_RNA (1)...(19): siRNA sense strand
uaucuuugguuucuacugu

SEQ ID NO: 2135478 - RNA, 19 nt, Homo sapiens
  misc_RNA (1)...(19): siRNA sense strand
cuacuguugugucuucuau

SEQ ID NO: 2135479 - RNA, 19 nt, Homo sapiens
  misc_RNA (1)...(19): siRNA sense strand
ggagaugguggacaaauac

SEQ ID NO: 2135480 - RNA, 19 nt, Homo sapiens
  misc_RNA (1)...(19): siRNA sense strand
gaaacugagguguaugauc

SEQ ID NO: 2135481 - RNA, 19 nt, Homo sapiens
  misc_RNA (1)...(19): siRNA sense strand
ggugaggcccugcaaagug

SEQ ID NO: 2135482 - RNA, 19 nt, Homo sapiens
  misc_RNA (1)...(19): siRNA sense strand
gauagcaggauguacaagu

SEQ ID NO: 2135483 - RNA, 19 nt, Homo sapiens
  misc_RNA (1)...(19): siRNA sense strand
uauggaugcucugcacaaa

SEQ ID NO: 2135484 - RNA, 19 nt, Homo sapiens
  misc_RNA (1)...(19): siRNA sense strand
auagcaggauguacaaguu

SEQ ID NO: 2135485 - RNA, 19 nt, Homo sapiens
  misc_RNA (1)...(19): siRNA sense strand
caaccucgugggcauugua

SEQ ID NO: 2135486 - RNA, 19 nt, Homo sapiens
  misc_RNA (1)...(19): siRNA sense strand
gacaaauaccaugcacuuu

SEQ ID NO: 2135487 - RNA, 19 nt, Homo sapiens
  misc_RNA (1)...(19): siRNA sense strand
gaucuugcagccauuguuc

SEQ ID NO: 2135488 - RNA, 19 nt, Homo sapiens
  misc_RNA (1)...(19): siRNA sense strand
gcuaccagugcuuuacuuu

SEQ ID NO: 2135489 - RNA, 19 nt, Homo sapiens
  misc_RNA (1)...(19): siRNA sense strand
ccaggccuauugucacugu

SEQ ID NO: 2135490 - RNA, 19 nt, Homo sapiens
  misc_RNA (1)...(19): siRNA sense strand
uggccacgcuguccugguu

SEQ ID NO: 2135491 - RNA, 19 nt, Homo sapiens
  misc_RNA (1)...(19): siRNA sense strand
uaccagugcuuuacuuugc

SEQ ID NO: 2135492 - RNA, 19 nt, Homo sapiens
  misc_RNA (1)...(19): siRNA sense strand
caacaccaccacccucauc

SEQ ID NO: 2135493 - RNA, 19 nt, Homo sapiens
  misc_RNA (1)...(19): siRNA sense strand
ccagccagccaucaacuau

SEQ ID NO: 2135494 - RNA, 19 nt, Homo sapiens
  misc_RNA (1)...(19): siRNA sense strand
uggaugcucugcacaaacu

SEQ ID NO: 2135495 - RNA, 19 nt, Homo sapiens
  misc_RNA (1)...(19): siRNA sense strand
aucaggugcuguuccauaa

SEQ ID NO: 2135496 - RNA, 19 nt, Homo sapiens
  misc_RNA (1)...(19): siRNA sense strand
ccucaucaguuuggaucuu

SEQ ID NO: 2135497 - RNA, 19 nt, Homo sapiens
  misc_RNA (1)...(19): siRNA sense strand
aaacuguucgaccagcaua

SEQ ID NO: 2135498 - RNA, 19 nt, Homo sapiens
  misc_RNA (1)...(19): siRNA sense strand
gugcuguuccauaaggaua

SEQ ID NO: 2135499 - RNA, 19 nt, Homo sapiens
  misc_RNA (1)...(19): siRNA sense strand
uuucuacuguugugucuuc

SEQ ID NO: 2135500 - RNA, 19 nt, Homo sapiens
  misc_RNA (1)...(19): siRNA sense strand
gcagcacaaauuuggucua

SEQ ID NO: 2135501 - RNA, 19 nt, Homo sapiens
  misc_RNA (1)...(19): siRNA sense strand
caggugcuguuccauaagg

SEQ ID NO: 2135502 - RNA, 19 nt, Homo sapiens
  misc_RNA (1)...(19): siRNA sense strand
cccauggccuccugaccuu

SEQ ID NO: 2135503 - RNA, 19 nt, Homo sapiens
  misc_RNA (1)...(19): siRNA sense strand
aaggauagcaggauguaca

SEQ ID NO: 2135504 - RNA, 19 nt, Homo sapiens
  misc_RNA (1)...(19): siRNA sense strand
uaucaccugagcacaacua

SEQ ID NO: 2135505 - RNA, 19 nt, Homo sapiens
  misc_RNA (1)...(19): siRNA sense strand
ggaucuugcagccauuguu

SEQ ID NO: 2135506 - RNA, 19 nt, Homo sapiens
  misc_RNA (1)...(19): siRNA sense strand
cgccguaucuuugguuucu

SEQ ID NO: 2135507 - RNA, 19 nt, Homo sapiens
  misc_RNA (1)...(19): siRNA sense strand
guucgucuaccugcuguuu

SEQ ID NO: 2135508 - RNA, 19 nt, Homo sapiens
  misc_RNA (1)...(19): siRNA sense strand
uucaagauccccuuuguua

SEQ ID NO: 2135509 - RNA, 19 nt, Homo sapiens
  misc_RNA (1)...(19): siRNA sense strand
uguaugaucaggugcuguu

SEQ ID NO: 2135510 - RNA, 19 nt, Homo sapiens
  misc_RNA (1)...(19): siRNA sense strand
ggaugcaucucccucuuga

SEQ ID NO: 2135511 - RNA, 19 nt, Homo sapiens
  misc_RNA (1)...(19): siRNA sense strand
gcaucucccucuugagcua

SEQ ID NO: 2135512 - RNA, 19 nt, Homo sapiens
  misc_RNA (1)...(19): siRNA sense strand
ggaaggagaacaacaugcu

SEQ ID NO: 2135513 - RNA, 19 nt, Homo sapiens
  misc_RNA (1)...(19): siRNA sense strand
ccaucucgcugccuauugg

SEQ ID NO: 2135514 - RNA, 19 nt, Homo sapiens
  misc_RNA (1)...(19): siRNA sense strand
ucacugggaaggagaacaa

SEQ ID NO: 2135515 - RNA, 19 nt, Homo sapiens
  misc_RNA (1)...(19): siRNA sense strand
gcccgagacccacaucuuc

SEQ ID NO: 2135516 - RNA, 19 nt, Homo sapiens
  misc_RNA (1)...(19): siRNA sense strand
gaggcucugcugacucuga

SEQ ID NO: 2135517 - RNA, 19 nt, Homo sapiens
  misc_RNA (1)...(19): siRNA sense strand
ccauccgugucaggaauuu

SEQ ID NO: 2135518 - RNA, 19 nt, Homo sapiens
  misc_RNA (1)...(19): siRNA sense strand
gcucugcugacucugagaa

SEQ ID NO: 2135519 - RNA, 19 nt, Homo sapiens
  misc_RNA (1)...(19): siRNA sense strand
ucaggaauuugaccaucag

SEQ ID NO: 2135520 - RNA, 19 nt, Homo sapiens
  misc_RNA (1)...(19): siRNA sense strand
cugaggcucugcugacucu

SEQ ID NO: 2135521 - RNA, 19 nt, Homo sapiens
  misc_RNA (1)...(19): siRNA sense strand
ggaugcaucucccucuuga

SEQ ID NO: 2135522 - RNA, 19 nt, Homo sapiens
  misc_RNA (1)...(19): siRNA sense strand
gcaucucccucuugagcua

SEQ ID NO: 2135523 - RNA, 19 nt, Homo sapiens
  misc_RNA (1)...(19): siRNA sense strand
ggaaggagaacaacaugcu

SEQ ID NO: 2135524 - RNA, 19 nt, Homo sapiens
  misc_RNA (1)...(19): siRNA sense strand
ccaucucgcugccuauugg

SEQ ID NO: 2135525 - RNA, 19 nt, Homo sapiens
  misc_RNA (1)...(19): siRNA sense strand
ucacugggaaggagaacaa

SEQ ID NO: 2135526 - RNA, 19 nt, Homo sapiens
  misc_RNA (1)...(19): siRNA sense strand
gcccgagacccacaucuuc

SEQ ID NO: 2135527 - RNA, 19 nt, Homo sapiens
  misc_RNA (1)...(19): siRNA sense strand
gaggcucugcugacucuga

SEQ ID NO: 2135528 - RNA, 19 nt, Homo sapiens
  misc_RNA (1)...(19): siRNA sense strand
ccauccgugucaggaauuu

SEQ ID NO: 2135529 - RNA, 19 nt, Homo sapiens
  misc_RNA (1)...(19): siRNA sense strand
gcucugcugacucugagaa

SEQ ID NO: 2135530 - RNA, 19 nt, Homo sapiens
  misc_RNA (1)...(19): siRNA sense strand
ucaggaauuugaccaucag

SEQ ID NO: 2135531 - RNA, 19 nt, Homo sapiens
  misc_RNA (1)...(19): siRNA sense strand
cugaggcucugcugacucu

SEQ ID NO: 2135532 - RNA, 19 nt, Homo sapiens
  misc_RNA (1)...(19): siRNA sense strand
agaaucagcucaacaaaua

SEQ ID NO: 2135533 - RNA, 19 nt, Homo sapiens
  misc_RNA (1)...(19): siRNA sense strand
gaagaaagauggaaaggau

SEQ ID NO: 2135534 - RNA, 19 nt, Homo sapiens
  misc_RNA (1)...(19): siRNA sense strand
gcaacaagguccuguauga

SEQ ID NO: 2135535 - RNA, 19 nt, Homo sapiens
  misc_RNA (1)...(19): siRNA sense strand
gcaaagcauugaugagaua

SEQ ID NO: 2135536 - RNA, 19 nt, Homo sapiens
  misc_RNA (1)...(19): siRNA sense strand
gaggauggauuuacuuuaa

SEQ ID NO: 2135537 - RNA, 19 nt, Homo sapiens
  misc_RNA (1)...(19): siRNA sense strand
gaaaguuggugaucuaaau

SEQ ID NO: 2135538 - RNA, 19 nt, Homo sapiens
  misc_RNA (1)...(19): siRNA sense strand
gcaggaagaugcccaauuc

SEQ ID NO: 2135539 - RNA, 19 nt, Homo sapiens
  misc_RNA (1)...(19): siRNA sense strand
ggagagaucugcuuuccuu

SEQ ID NO: 2135540 - RNA, 19 nt, Homo sapiens
  misc_RNA (1)...(19): siRNA sense strand
ugaugacucuuaccaauua

SEQ ID NO: 2135541 - RNA, 19 nt, Homo sapiens
  misc_RNA (1)...(19): siRNA sense strand
gaggguaucugcagacauu

SEQ ID NO: 2135542 - RNA, 19 nt, Homo sapiens
  misc_RNA (1)...(19): siRNA sense strand
gugcaaacaugccugguua

SEQ ID NO: 2135543 - RNA, 19 nt, Homo sapiens
  misc_RNA (1)...(19): siRNA sense strand
gcagucaucucauaacuuc

SEQ ID NO: 2135544 - RNA, 19 nt, Homo sapiens
  misc_RNA (1)...(19): siRNA sense strand
ccacugaccuccuggauau

SEQ ID NO: 2135545 - RNA, 19 nt, Homo sapiens
  misc_RNA (1)...(19): siRNA sense strand
caaagaaucccauccauug

SEQ ID NO: 2135546 - RNA, 19 nt, Homo sapiens
  misc_RNA (1)...(19): siRNA sense strand
gagaacagguccacaagga

SEQ ID NO: 2135547 - RNA, 19 nt, Homo sapiens
  misc_RNA (1)...(19): siRNA sense strand
gaagaaaggcaaagaggaa

SEQ ID NO: 2135548 - RNA, 19 nt, Homo sapiens
  misc_RNA (1)...(19): siRNA sense strand
caagaaagcaagccaauug

SEQ ID NO: 2135549 - RNA, 19 nt, Homo sapiens
  misc_RNA (1)...(19): siRNA sense strand
agaggaaagugcucaauaa

SEQ ID NO: 2135550 - RNA, 19 nt, Homo sapiens
  misc_RNA (1)...(19): siRNA sense strand
caaguagucuccauggaaa

SEQ ID NO: 2135551 - RNA, 19 nt, Homo sapiens
  misc_RNA (1)...(19): siRNA sense strand
gacaugcucuucugaaaug

SEQ ID NO: 2135552 - RNA, 19 nt, Homo sapiens
  misc_RNA (1)...(19): siRNA sense strand
aagaagauguggauaacua

SEQ ID NO: 2135553 - RNA, 19 nt, Homo sapiens
  misc_RNA (1)...(19): siRNA sense strand
aauccaaucugucucaaua

SEQ ID NO: 2135554 - RNA, 19 nt, Homo sapiens
  misc_RNA (1)...(19): siRNA sense strand
gaaaauaaccucacaccua

SEQ ID NO: 2135555 - RNA, 19 nt, Homo sapiens
  misc_RNA (1)...(19): siRNA sense strand
ggaagaugaugaugaaugg

SEQ ID NO: 2135556 - RNA, 19 nt, Homo sapiens
  misc_RNA (1)...(19): siRNA sense strand
ggaaagugcucaauaaaau

SEQ ID NO: 2135557 - RNA, 19 nt, Homo sapiens
  misc_RNA (1)...(19): siRNA sense strand
gauaguuccuucauugaga

SEQ ID NO: 2135558 - RNA, 19 nt, Homo sapiens
  misc_RNA (1)...(19): siRNA sense strand
gaagaagagacucgcauuu

SEQ ID NO: 2135559 - RNA, 19 nt, Homo sapiens
  misc_RNA (1)...(19): siRNA sense strand
gaaauuucagcaaguagua

SEQ ID NO: 2135560 - RNA, 19 nt, Homo sapiens
  misc_RNA (1)...(19): siRNA sense strand
gggauucaguguauuaaug

SEQ ID NO: 2135561 - RNA, 19 nt, Homo sapiens
  misc_RNA (1)...(19): siRNA sense strand
gcaaacaugccugguuaua

SEQ ID NO: 2135562 - RNA, 19 nt, Homo sapiens
  misc_RNA (1)...(19): siRNA sense strand
aaccaaagcucuucucaga

SEQ ID NO: 2135563 - RNA, 19 nt, Homo sapiens
  misc_RNA (1)...(19): siRNA sense strand
ucaagcaacuauagaaaug

SEQ ID NO: 2135564 - RNA, 19 nt, Homo sapiens
  misc_RNA (1)...(19): siRNA sense strand
ugaaaugccuuuaucaucu

SEQ ID NO: 2135565 - RNA, 19 nt, Homo sapiens
  misc_RNA (1)...(19): siRNA sense strand
gcaaguaguaaacagauuu

SEQ ID NO: 2135566 - RNA, 19 nt, Homo sapiens
  misc_RNA (1)...(19): siRNA sense strand
ucagauacagugaagauua

SEQ ID NO: 2135567 - RNA, 19 nt, Homo sapiens
  misc_RNA (1)...(19): siRNA sense strand
gagaggaaagugcucaaua

SEQ ID NO: 2135568 - RNA, 19 nt, Homo sapiens
  misc_RNA (1)...(19): siRNA sense strand
gcucuaccuucuuugauaa

SEQ ID NO: 2135569 - RNA, 19 nt, Homo sapiens
  misc_RNA (1)...(19): siRNA sense strand
caaauuaccagaugugaga

SEQ ID NO: 2135570 - RNA, 19 nt, Homo sapiens
  misc_RNA (1)...(19): siRNA sense strand
ggagaaaacacucugauua

SEQ ID NO: 2135571 - RNA, 19 nt, Homo sapiens
  misc_RNA (1)...(19): siRNA sense strand
cauggucacuucccaauga

SEQ ID NO: 2135572 - RNA, 19 nt, Homo sapiens
  misc_RNA (1)...(19): siRNA sense strand
ggacaccacaggagucuaa

SEQ ID NO: 2135573 - RNA, 19 nt, Homo sapiens
  misc_RNA (1)...(19): siRNA sense strand
ucaaacaguucccgucuau

SEQ ID NO: 2135574 - RNA, 19 nt, Homo sapiens
  misc_RNA (1)...(19): siRNA sense strand
gcaagccaauuguucaaau

SEQ ID NO: 2135575 - RNA, 19 nt, Homo sapiens
  misc_RNA (1)...(19): siRNA sense strand
gaaagcaagccaauuguuc

SEQ ID NO: 2135576 - RNA, 19 nt, Homo sapiens
  misc_RNA (1)...(19): siRNA sense strand
gaagaaaaguaacccguaa

SEQ ID NO: 2135577 - RNA, 19 nt, Homo sapiens
  misc_RNA (1)...(19): siRNA sense strand
agacaaagguguagagaag

SEQ ID NO: 2135578 - RNA, 19 nt, Homo sapiens
  misc_RNA (1)...(19): siRNA sense strand
gaagucauuugcagcucua

SEQ ID NO: 2135579 - RNA, 19 nt, Homo sapiens
  misc_RNA (1)...(19): siRNA sense strand
ccaacagccuucuggauga

SEQ ID NO: 2135580 - RNA, 19 nt, Homo sapiens
  misc_RNA (1)...(19): siRNA sense strand
gaaaugccuuuaucaucug

SEQ ID NO: 2135581 - RNA, 19 nt, Homo sapiens
  misc_RNA (1)...(19): siRNA sense strand
gaagcuagguuaaaaucua

SEQ ID NO: 2135582 - RNA, 19 nt, Homo sapiens
  misc_RNA (1)...(19): siRNA sense strand
gcuccuagcugugcaaaug

SEQ ID NO: 2135583 - RNA, 19 nt, Homo sapiens
  misc_RNA (1)...(19): siRNA sense strand
ggaaggacaggaagacaaa

SEQ ID NO: 2135584 - RNA, 19 nt, Homo sapiens
  misc_RNA (1)...(19): siRNA sense strand
gaugagauagcaccacuaa

SEQ ID NO: 2135585 - RNA, 19 nt, Homo sapiens
  misc_RNA (1)...(19): siRNA sense strand
ucugucagcucaaguaauu

SEQ ID NO: 2135586 - RNA, 19 nt, Homo sapiens
  misc_RNA (1)...(19): siRNA sense strand
ggucggcucuuuagcuuug

SEQ ID NO: 2135587 - RNA, 19 nt, Homo sapiens
  misc_RNA (1)...(19): siRNA sense strand
ccacuaauauaccuguuau

SEQ ID NO: 2135588 - RNA, 19 nt, Homo sapiens
  misc_RNA (1)...(19): siRNA sense strand
ccucaaaggcuaauuuaaa

SEQ ID NO: 2135589 - RNA, 19 nt, Homo sapiens
  misc_RNA (1)...(19): siRNA sense strand
uaauagugcuucugugaau

SEQ ID NO: 2135590 - RNA, 19 nt, Homo sapiens
  misc_RNA (1)...(19): siRNA sense strand
ccacaaagaaagggaaaua

SEQ ID NO: 2135591 - RNA, 19 nt, Homo sapiens
  misc_RNA (1)...(19): siRNA sense strand
guuagaugcuucugacuug

SEQ ID NO: 2135592 - RNA, 19 nt, Homo sapiens
  misc_RNA (1)...(19): siRNA sense strand
agaggaagaugaugaugaa

SEQ ID NO: 2135593 - RNA, 19 nt, Homo sapiens
  misc_RNA (1)...(19): siRNA sense strand
caagauaaggcuauuguug

SEQ ID NO: 2135594 - RNA, 19 nt, Homo sapiens
  misc_RNA (1)...(19): siRNA sense strand
caagugcaauacagaagaa

SEQ ID NO: 2135595 - RNA, 19 nt, Homo sapiens
  misc_RNA (1)...(19): siRNA sense strand
gaugauggucggcucuuua

SEQ ID NO: 2135596 - RNA, 19 nt, Homo sapiens
  misc_RNA (1)...(19): siRNA sense strand
gaaucaagcaacuauagaa

SEQ ID NO: 2135597 - RNA, 19 nt, Homo sapiens
  misc_RNA (1)...(19): siRNA sense strand
gaucagaggcacgcuagua

SEQ ID NO: 2135598 - RNA, 19 nt, Homo sapiens
  misc_RNA (1)...(19): siRNA sense strand
gagaaaagccugccuuaaa

SEQ ID NO: 2135599 - RNA, 19 nt, Homo sapiens
  misc_RNA (1)...(19): siRNA sense strand
guggauaacuacauguuug

SEQ ID NO: 2135600 - RNA, 19 nt, Homo sapiens
  misc_RNA (1)...(19): siRNA sense strand
ggcaaaggcugcuaagagu

SEQ ID NO: 2135601 - RNA, 19 nt, Homo sapiens
  misc_RNA (1)...(19): siRNA sense strand
aaacaugccugguuauaac

SEQ ID NO: 2135602 - RNA, 19 nt, Homo sapiens
  misc_RNA (1)...(19): siRNA sense strand
ggacaauguucgagacaag

SEQ ID NO: 2135603 - RNA, 19 nt, Homo sapiens
  misc_RNA (1)...(19): siRNA sense strand
cugcuaauguuaccacuaa

SEQ ID NO: 2135604 - RNA, 19 nt, Homo sapiens
  misc_RNA (1)...(19): siRNA sense strand
cagauacagugaagauuau

SEQ ID NO: 2135605 - RNA, 19 nt, Homo sapiens
  misc_RNA (1)...(19): siRNA sense strand
ccaaagaggaagaugauga

SEQ ID NO: 2135606 - RNA, 19 nt, Homo sapiens
  misc_RNA (1)...(19): siRNA sense strand
ggacugcaguacccuuuca

SEQ ID NO: 2135607 - RNA, 19 nt, Homo sapiens
  misc_RNA (1)...(19): siRNA sense strand
gcuaauguuaccacuaaua

SEQ ID NO: 2135608 - RNA, 19 nt, Homo sapiens
  misc_RNA (1)...(19): siRNA sense strand
gaggaaagugcucaauaaa

SEQ ID NO: 2135609 - RNA, 19 nt, Homo sapiens
  misc_RNA (1)...(19): siRNA sense strand
gcuaauagugcuucuguga

SEQ ID NO: 2135610 - RNA, 19 nt, Homo sapiens
  misc_RNA (1)...(19): siRNA sense strand
ccaaggcccugagagauga

SEQ ID NO: 2135611 - RNA, 19 nt, Homo sapiens
  misc_RNA (1)...(19): siRNA sense strand
caaacaugccugguuauaa

SEQ ID NO: 2135612 - RNA, 19 nt, Homo sapiens
  misc_RNA (1)...(19): siRNA sense strand
uggcagaugugcagagauu

SEQ ID NO: 2135613 - RNA, 19 nt, Homo sapiens
  misc_RNA (1)...(19): siRNA sense strand
ggaggauggauuuacuuua

SEQ ID NO: 2135614 - RNA, 19 nt, Homo sapiens
  misc_RNA (1)...(19): siRNA sense strand
caacagugaauuugaguga

SEQ ID NO: 2135615 - RNA, 19 nt, Homo sapiens
  misc_RNA (1)...(19): siRNA sense strand
uaaaugagaggaaggaaug

SEQ ID NO: 2135616 - RNA, 19 nt, Homo sapiens
  misc_RNA (1)...(19): siRNA sense strand
gaacaugcugcuaauagug

SEQ ID NO: 2135617 - RNA, 19 nt, Homo sapiens
  misc_RNA (1)...(19): siRNA sense strand
ugagagaugagaaauguaa

SEQ ID NO: 2135618 - RNA, 19 nt, Homo sapiens
  misc_RNA (1)...(19): siRNA sense strand
caacauugccucugguaug

SEQ ID NO: 2135619 - RNA, 19 nt, Homo sapiens
  misc_RNA (1)...(19): siRNA sense strand
ggauggcgaugaugauauc

SEQ ID NO: 2135620 - RNA, 19 nt, Homo sapiens
  misc_RNA (1)...(19): siRNA sense strand
acaaagguguagagaagaa

SEQ ID NO: 2135621 - RNA, 19 nt, Homo sapiens
  misc_RNA (1)...(19): siRNA sense strand
gaaagcuccauuugccaua

SEQ ID NO: 2135622 - RNA, 19 nt, Homo sapiens
  misc_RNA (1)...(19): siRNA sense strand
caaaaggccugaacacaug

SEQ ID NO: 2135623 - RNA, 19 nt, Homo sapiens
  misc_RNA (1)...(19): siRNA sense strand
ccaaggagccacuaagaau

SEQ ID NO: 2135624 - RNA, 19 nt, Homo sapiens
  misc_RNA (1)...(19): siRNA sense strand
gggaagacauuggcugaau

SEQ ID NO: 2135625 - RNA, 19 nt, Homo sapiens
  misc_RNA (1)...(19): siRNA sense strand
gauauagggauucagugua

SEQ ID NO: 2135626 - RNA, 19 nt, Homo sapiens
  misc_RNA (1)...(19): siRNA sense strand
gagaaaacacucugauuaa

SEQ ID NO: 2135627 - RNA, 19 nt, Homo sapiens
  misc_RNA (1)...(19): siRNA sense strand
caaagcugcugggcaagaa

SEQ ID NO: 2135628 - RNA, 19 nt, Homo sapiens
  misc_RNA (1)...(19): siRNA sense strand
uugaaaggcuucuggcaaa

SEQ ID NO: 2135629 - RNA, 19 nt, Homo sapiens
  misc_RNA (1)...(19): siRNA sense strand
gagaaucagcucaacaaau

SEQ ID NO: 2135630 - RNA, 19 nt, Homo sapiens
  misc_RNA (1)...(19): siRNA sense strand
ggacugaaguagagcaacu

SEQ ID NO: 2135631 - RNA, 19 nt, Homo sapiens
  misc_RNA (1)...(19): siRNA sense strand
gcacgcuaguaaucauaaa

SEQ ID NO: 2135632 - RNA, 19 nt, Homo sapiens
  misc_RNA (1)...(19): siRNA sense strand
cuacaaagauggugacuua

SEQ ID NO: 2135633 - RNA, 19 nt, Homo sapiens
  misc_RNA (1)...(19): siRNA sense strand
gauggugacuuacgcauua

SEQ ID NO: 2135634 - RNA, 19 nt, Homo sapiens
  misc_RNA (1)...(19): siRNA sense strand
gaaagauccuguucucuau

SEQ ID NO: 2135635 - RNA, 19 nt, Homo sapiens
  misc_RNA (1)...(19): siRNA sense strand
ccgcauaccugaugaagaa

SEQ ID NO: 2135636 - RNA, 19 nt, Homo sapiens
  misc_RNA (1)...(19): siRNA sense strand
gcaaagauaguguguaugg

SEQ ID NO: 2135637 - RNA, 19 nt, Homo sapiens
  misc_RNA (1)...(19): siRNA sense strand
gcaaggcaguggagcaugu

SEQ ID NO: 2135638 - RNA, 19 nt, Homo sapiens
  misc_RNA (1)...(19): siRNA sense strand
gaacugcaccgcgauaaga

SEQ ID NO: 2135639 - RNA, 19 nt, Homo sapiens
  misc_RNA (1)...(19): siRNA sense strand
gaugacggguccaagagaa

SEQ ID NO: 2135640 - RNA, 19 nt, Homo sapiens
  misc_RNA (1)...(19): siRNA sense strand
uggcaaagauaguguguau

SEQ ID NO: 2135641 - RNA, 19 nt, Homo sapiens
  misc_RNA (1)...(19): siRNA sense strand
gaagcccacucuuuacauc

SEQ ID NO: 2135642 - RNA, 19 nt, Homo sapiens
  misc_RNA (1)...(19): siRNA sense strand
caacuacuauuucccuaca

SEQ ID NO: 2135643 - RNA, 19 nt, Homo sapiens
  misc_RNA (1)...(19): siRNA sense strand
uuacaucaccuacgagaaa

SEQ ID NO: 2135644 - RNA, 19 nt, Homo sapiens
  misc_RNA (1)...(19): siRNA sense strand
uguacacgcugcuugauga

SEQ ID NO: 2135645 - RNA, 19 nt, Homo sapiens
  misc_RNA (1)...(19): siRNA sense strand
cuagagauccuuccugaga

SEQ ID NO: 2135646 - RNA, 19 nt, Homo sapiens
  misc_RNA (1)...(19): siRNA sense strand
uagauggcguguccgcaua

SEQ ID NO: 2135647 - RNA, 19 nt, Homo sapiens
  misc_RNA (1)...(19): siRNA sense strand
cagauuccaacuacuauuu

SEQ ID NO: 2135648 - RNA, 19 nt, Homo sapiens
  misc_RNA (1)...(19): siRNA sense strand
ccgugaagcccacucuuua

SEQ ID NO: 2135649 - RNA, 19 nt, Homo sapiens
  misc_RNA (1)...(19): siRNA sense strand
acacgcugcuugaugacua

SEQ ID NO: 2135650 - RNA, 19 nt, Homo sapiens
  misc_RNA (1)...(19): siRNA sense strand
guaccaaggaugaauggaa

SEQ ID NO: 2135651 - RNA, 19 nt, Homo sapiens
  misc_RNA (1)...(19): siRNA sense strand
gcaccgcgauaagagaguu

SEQ ID NO: 2135652 - RNA, 19 nt, Homo sapiens
  misc_RNA (1)...(19): siRNA sense strand
ugugauggauacuugguuu

SEQ ID NO: 2135653 - RNA, 19 nt, Homo sapiens
  misc_RNA (1)...(19): siRNA sense strand
gcugcuugaugacuacaaa

SEQ ID NO: 2135654 - RNA, 19 nt, Homo sapiens
  misc_RNA (1)...(19): siRNA sense strand
ccaucuguuuacuucauua

SEQ ID NO: 2135655 - RNA, 19 nt, Homo sapiens
  misc_RNA (1)...(19): siRNA sense strand
gcauguguuugaaggugaa

SEQ ID NO: 2135656 - RNA, 19 nt, Homo sapiens
  misc_RNA (1)...(19): siRNA sense strand
aagauccuguucucuauau

SEQ ID NO: 2135657 - RNA, 19 nt, Homo sapiens
  misc_RNA (1)...(19): siRNA sense strand
gagagguggucgacagucu

SEQ ID NO: 2135658 - RNA, 19 nt, Homo sapiens
  misc_RNA (1)...(19): siRNA sense strand
gcagguggagcaugccaaa

SEQ ID NO: 2135659 - RNA, 19 nt, Homo sapiens
  misc_RNA (1)...(19): siRNA sense strand
caaagauaguguguaugga

SEQ ID NO: 2135660 - RNA, 19 nt, Homo sapiens
  misc_RNA (1)...(19): siRNA sense strand
gguggagcaugccaaagau

SEQ ID NO: 2135661 - RNA, 19 nt, Homo sapiens
  misc_RNA (1)...(19): siRNA sense strand
gagcuccugugauggauac

SEQ ID NO: 2135662 - RNA, 19 nt, Homo sapiens
  misc_RNA (1)...(19): siRNA sense strand
caacuccucguaucgauuc

SEQ ID NO: 2135663 - RNA, 19 nt, Homo sapiens
  misc_RNA (1)...(19): siRNA sense strand
caguggagcauguguuuga

SEQ ID NO: 2135664 - RNA, 19 nt, Homo sapiens
  misc_RNA (1)...(19): siRNA sense strand
aaagaugacggguccaaga

SEQ ID NO: 2135665 - RNA, 19 nt, Homo sapiens
  misc_RNA (1)...(19): siRNA sense strand
agagauccuuccugagaga

SEQ ID NO: 2135666 - RNA, 19 nt, Homo sapiens
  misc_RNA (1)...(19): siRNA sense strand
ggcaguggagcauguguuu

SEQ ID NO: 2135667 - RNA, 19 nt, Homo sapiens
  misc_RNA (1)...(19): siRNA sense strand
aaagauccuguucucuaua

SEQ ID NO: 2135668 - RNA, 19 nt, Homo sapiens
  misc_RNA (1)...(19): siRNA sense strand
cuugaugacuacaaagaug

SEQ ID NO: 2135669 - RNA, 19 nt, Homo sapiens
  misc_RNA (1)...(19): siRNA sense strand
gccaucuguuuacuucauu

SEQ ID NO: 2135670 - RNA, 19 nt, Homo sapiens
  misc_RNA (1)...(19): siRNA sense strand
acuggcagauucccugauu

SEQ ID NO: 2135671 - RNA, 19 nt, Homo sapiens
  misc_RNA (1)...(19): siRNA sense strand
cuauuucccuacagcagaa

SEQ ID NO: 2135672 - RNA, 19 nt, Homo sapiens
  misc_RNA (1)...(19): siRNA sense strand
gauccuguucucuauaugu

SEQ ID NO: 2135673 - RNA, 19 nt, Homo sapiens
  misc_RNA (1)...(19): siRNA sense strand
ucgagcagguuuccgugaa

SEQ ID NO: 2135674 - RNA, 19 nt, Homo sapiens
  misc_RNA (1)...(19): siRNA sense strand
caacggcgcaagcccacuu

SEQ ID NO: 2135675 - RNA, 19 nt, Homo sapiens
  misc_RNA (1)...(19): siRNA sense strand
gcccacucuuuacaucauu

SEQ ID NO: 2135676 - RNA, 19 nt, Homo sapiens
  misc_RNA (1)...(19): siRNA sense strand
guuugaaggugaacauggu

SEQ ID NO: 2135677 - RNA, 19 nt, Homo sapiens
  misc_RNA (1)...(19): siRNA sense strand
cccacucuuuacaucauua

SEQ ID NO: 2135678 - RNA, 19 nt, Homo sapiens
  misc_RNA (1)...(19): siRNA sense strand
gccaacuccucguaucgau

SEQ ID NO: 2135679 - RNA, 19 nt, Homo sapiens
  misc_RNA (1)...(19): siRNA sense strand
ugucuaugguuuggugaaa

SEQ ID NO: 2135680 - RNA, 19 nt, Homo sapiens
  misc_RNA (1)...(19): siRNA sense strand
gcgaagccaucuguuuacu

SEQ ID NO: 2135681 - RNA, 19 nt, Homo sapiens
  misc_RNA (1)...(19): siRNA sense strand
caucgugggcugccgcauu

SEQ ID NO: 2135682 - RNA, 19 nt, Homo sapiens
  misc_RNA (1)...(19): siRNA sense strand
gauacuugguuuuacauca

SEQ ID NO: 2135683 - RNA, 19 nt, Homo sapiens
  misc_RNA (1)...(19): siRNA sense strand
caagcccacuuuccucacu

SEQ ID NO: 2135684 - RNA, 19 nt, Homo sapiens
  misc_RNA (1)...(19): siRNA sense strand
cuagaacugcaccgcgaua

SEQ ID NO: 2135685 - RNA, 19 nt, Homo sapiens
  misc_RNA (1)...(19): siRNA sense strand
gugaagcccacucuuuaca

SEQ ID NO: 2135686 - RNA, 19 nt, Homo sapiens
  misc_RNA (1)...(19): siRNA sense strand
gugaacaugguaccaagga

SEQ ID NO: 2135687 - RNA, 19 nt, Homo sapiens
  misc_RNA (1)...(19): siRNA sense strand
auucacgacuggcagauuc

SEQ ID NO: 2135688 - RNA, 19 nt, Homo sapiens
  misc_RNA (1)...(19): siRNA sense strand
ccaaagaugacggguccaa

SEQ ID NO: 2135689 - RNA, 19 nt, Homo sapiens
  misc_RNA (1)...(19): siRNA sense strand
gcauuauuccagauuccaa

SEQ ID NO: 2135690 - RNA, 19 nt, Homo sapiens
  misc_RNA (1)...(19): siRNA sense strand
aauaugauggcaaagauag

SEQ ID NO: 2135691 - RNA, 19 nt, Homo sapiens
  misc_RNA (1)...(19): siRNA sense strand
uccaagagaacuggcauuu

SEQ ID NO: 2135692 - RNA, 19 nt, Homo sapiens
  misc_RNA (1)...(19): siRNA sense strand
aaaggcacacccacaggaa

SEQ ID NO: 2135693 - RNA, 19 nt, Homo sapiens
  misc_RNA (1)...(19): siRNA sense strand
ccagauuccaacuacuauu

SEQ ID NO: 2135694 - RNA, 19 nt, Homo sapiens
  misc_RNA (1)...(19): siRNA sense strand
ccuguucucuauauguaca

SEQ ID NO: 2135695 - RNA, 19 nt, Homo sapiens
  misc_RNA (1)...(19): siRNA sense strand
auccuguucucuauaugua

SEQ ID NO: 2135696 - RNA, 19 nt, Homo sapiens
  misc_RNA (1)...(19): siRNA sense strand
cgagcagguuuccgugaag

SEQ ID NO: 2135697 - RNA, 19 nt, Homo sapiens
  misc_RNA (1)...(19): siRNA sense strand
cuccugugauggauacuug

SEQ ID NO: 2135698 - RNA, 19 nt, Homo sapiens
  misc_RNA (1)...(19): siRNA sense strand
ggugacuuacgcauuauuc

SEQ ID NO: 2135699 - RNA, 19 nt, Homo sapiens
  misc_RNA (1)...(19): siRNA sense strand
gcauucaacacggcuggaa

SEQ ID NO: 2135700 - RNA, 19 nt, Homo sapiens
  misc_RNA (1)...(19): siRNA sense strand
cgaagccaucuguuuacuu

SEQ ID NO: 2135701 - RNA, 19 nt, Homo sapiens
  misc_RNA (1)...(19): siRNA sense strand
uggagcaugccaaagauga

SEQ ID NO: 2135702 - RNA, 19 nt, Homo sapiens
  misc_RNA (1)...(19): siRNA sense strand
ggaagaaagugaagaugaa

SEQ ID NO: 2135703 - RNA, 19 nt, Homo sapiens
  misc_RNA (1)...(19): siRNA sense strand
gaaauaucaucuucccuuu

SEQ ID NO: 2135704 - RNA, 19 nt, Homo sapiens
  misc_RNA (1)...(19): siRNA sense strand
gaacaagaaugaggaggaa

SEQ ID NO: 2135705 - RNA, 19 nt, Homo sapiens
  misc_RNA (1)...(19): siRNA sense strand
ucaaaggccugucggaauu

SEQ ID NO: 2135706 - RNA, 19 nt, Homo sapiens
  misc_RNA (1)...(19): siRNA sense strand
gaagaaggaggaagaaaug

SEQ ID NO: 2135707 - RNA, 19 nt, Homo sapiens
  misc_RNA (1)...(19): siRNA sense strand
guacuacagugaagaugaa

SEQ ID NO: 2135708 - RNA, 19 nt, Homo sapiens
  misc_RNA (1)...(19): siRNA sense strand
ggaggaagaggaaaugaaa

SEQ ID NO: 2135709 - RNA, 19 nt, Homo sapiens
  misc_RNA (1)...(19): siRNA sense strand
gaguaaggaugaagaagau

SEQ ID NO: 2135710 - RNA, 19 nt, Homo sapiens
  misc_RNA (1)...(19): siRNA sense strand
uagaugagcugauggagau

SEQ ID NO: 2135711 - RNA, 19 nt, Homo sapiens
  misc_RNA (1)...(19): siRNA sense strand
gaagaguacuacagugaag

SEQ ID NO: 2135712 - RNA, 19 nt, Homo sapiens
  misc_RNA (1)...(19): siRNA sense strand
gaugaaauccguaaggaau

SEQ ID NO: 2135713 - RNA, 19 nt, Homo sapiens
  misc_RNA (1)...(19): siRNA sense strand
aggaagaaaugaagaagaa

SEQ ID NO: 2135714 - RNA, 19 nt, Homo sapiens
  misc_RNA (1)...(19): siRNA sense strand
gaagaggaaaugaaacaga

SEQ ID NO: 2135715 - RNA, 19 nt, Homo sapiens
  misc_RNA (1)...(19): siRNA sense strand
ugcaucaccucccauaaua

SEQ ID NO: 2135716 - RNA, 19 nt, Homo sapiens
  misc_RNA (1)...(19): siRNA sense strand
ugaagaagaugaagaugag

SEQ ID NO: 2135717 - RNA, 19 nt, Homo sapiens
  misc_RNA (1)...(19): siRNA sense strand
ggacaacgccaaguucgaa

SEQ ID NO: 2135718 - RNA, 19 nt, Homo sapiens
  misc_RNA (1)...(19): siRNA sense strand
aagaggaaaugaaacagaa

SEQ ID NO: 2135719 - RNA, 19 nt, Homo sapiens
  misc_RNA (1)...(19): siRNA sense strand
ggcccaagaugaugaccua

SEQ ID NO: 2135720 - RNA, 19 nt, Homo sapiens
  misc_RNA (1)...(19): siRNA sense strand
ggacugaggagaccuaugg

SEQ ID NO: 2135721 - RNA, 19 nt, Homo sapiens
  misc_RNA (1)...(19): siRNA sense strand
gcagcuagagaccuucaua

SEQ ID NO: 2135722 - RNA, 19 nt, Homo sapiens
  misc_RNA (1)...(19): siRNA sense strand
ccaagaugaugaccuagau

SEQ ID NO: 2135723 - RNA, 19 nt, Homo sapiens
  misc_RNA (1)...(19): siRNA sense strand
cggaugaucuuuugauuaa

SEQ ID NO: 2135724 - RNA, 19 nt, Homo sapiens
  misc_RNA (1)...(19): siRNA sense strand
ccgcacaggucguuuagga

SEQ ID NO: 2135725 - RNA, 19 nt, Homo sapiens
  misc_RNA (1)...(19): siRNA sense strand
ccaaugaggaagaaaguga

SEQ ID NO: 2135726 - RNA, 19 nt, Homo sapiens
  misc_RNA (1)...(19): siRNA sense strand
gagauaaggaacaagaaug

SEQ ID NO: 2135727 - RNA, 19 nt, Homo sapiens
  misc_RNA (1)...(19): siRNA sense strand
ugaagaagaaggaagagaa

SEQ ID NO: 2135728 - RNA, 19 nt, Homo sapiens
  misc_RNA (1)...(19): siRNA sense strand
gaggagauaaggaacaaga

SEQ ID NO: 2135729 - RNA, 19 nt, Homo sapiens
  misc_RNA (1)...(19): siRNA sense strand
guguggagauagaaagaaa

SEQ ID NO: 2135730 - RNA, 19 nt, Homo sapiens
  misc_RNA (1)...(19): siRNA sense strand
ggaugaagaagaugaagau

SEQ ID NO: 2135731 - RNA, 19 nt, Homo sapiens
  misc_RNA (1)...(19): siRNA sense strand
guaaggaugaagaagauga

SEQ ID NO: 2135732 - RNA, 19 nt, Homo sapiens
  misc_RNA (1)...(19): siRNA sense strand
ggagauaaggaacaagaau

SEQ ID NO: 2135733 - RNA, 19 nt, Homo sapiens
  misc_RNA (1)...(19): siRNA sense strand
agcaagagaugaaggagaa

SEQ ID NO: 2135734 - RNA, 19 nt, Homo sapiens
  misc_RNA (1)...(19): siRNA sense strand
cagucuaccuggcugaauu

SEQ ID NO: 2135735 - RNA, 19 nt, Homo sapiens
  misc_RNA (1)...(19): siRNA sense strand
gaagaagaaggaagagaag

SEQ ID NO: 2135736 - RNA, 19 nt, Homo sapiens
  misc_RNA (1)...(19): siRNA sense strand
gaaggaggaagaaaugaag

SEQ ID NO: 2135737 - RNA, 19 nt, Homo sapiens
  misc_RNA (1)...(19): siRNA sense strand
aggaggagaugaagaagga

SEQ ID NO: 2135738 - RNA, 19 nt, Homo sapiens
  misc_RNA (1)...(19): siRNA sense strand
aaagugaagaugaagagua

SEQ ID NO: 2135739 - RNA, 19 nt, Homo sapiens
  misc_RNA (1)...(19): siRNA sense strand
ugaaauccguaaggaauuc

SEQ ID NO: 2135740 - RNA, 19 nt, Homo sapiens
  misc_RNA (1)...(19): siRNA sense strand
ggcaaugucuccagcuaca

SEQ ID NO: 2135741 - RNA, 19 nt, Homo sapiens
  misc_RNA (1)...(19): siRNA sense strand
ugaccuagaugagcugaug

SEQ ID NO: 2135742 - RNA, 19 nt, Homo sapiens
  misc_RNA (1)...(19): siRNA sense strand
cagugaagaugaagaccaa

SEQ ID NO: 2135743 - RNA, 19 nt, Homo sapiens
  misc_RNA (1)...(19): siRNA sense strand
cgaccuggaugagcugauu

SEQ ID NO: 2135744 - RNA, 19 nt, Homo sapiens
  misc_RNA (1)...(19): siRNA sense strand
ggaaggagagaguaaggau

SEQ ID NO: 2135745 - RNA, 19 nt, Homo sapiens
  misc_RNA (1)...(19): siRNA sense strand
ucgaauguguggagauaga

SEQ ID NO: 2135746 - RNA, 19 nt, Homo sapiens
  misc_RNA (1)...(19): siRNA sense strand
ugaagaaggaggaagaaau

SEQ ID NO: 2135747 - RNA, 19 nt, Homo sapiens
  misc_RNA (1)...(19): siRNA sense strand
gaccagaggaagcgcauga

SEQ ID NO: 2135748 - RNA, 19 nt, Homo sapiens
  misc_RNA (1)...(19): siRNA sense strand
gcagcuaugcagaugcuuu

SEQ ID NO: 2135749 - RNA, 19 nt, Homo sapiens
  misc_RNA (1)...(19): siRNA sense strand
ggcacaggcuucacuccaa

SEQ ID NO: 2135750 - RNA, 19 nt, Homo sapiens
  misc_RNA (1)...(19): siRNA sense strand
gcucuuauggucaacagaa

SEQ ID NO: 2135751 - RNA, 19 nt, Homo sapiens
  misc_RNA (1)...(19): siRNA sense strand
ggagauggagccgaccuuu

SEQ ID NO: 2135752 - RNA, 19 nt, Homo sapiens
  misc_RNA (1)...(19): siRNA sense strand
ggaugaggcccaagaugau

SEQ ID NO: 2135753 - RNA, 19 nt, Homo sapiens
  misc_RNA (1)...(19): siRNA sense strand
ggaggaggaggaagaggaa

SEQ ID NO: 2135754 - RNA, 19 nt, Homo sapiens
  misc_RNA (1)...(19): siRNA sense strand
gaggaagaaaugaagaaga

SEQ ID NO: 2135755 - RNA, 19 nt, Homo sapiens
  misc_RNA (1)...(19): siRNA sense strand
agaaauggccgaccuggau

SEQ ID NO: 2135756 - RNA, 19 nt, Homo sapiens
  misc_RNA (1)...(19): siRNA sense strand
gcaccaauucaccauucua

SEQ ID NO: 2135757 - RNA, 19 nt, Homo sapiens
  misc_RNA (1)...(19): siRNA sense strand
ucagugagaucgaagucau

SEQ ID NO: 2135758 - RNA, 19 nt, Homo sapiens
  misc_RNA (1)...(19): siRNA sense strand
ggcccugcgcgaagaauua

SEQ ID NO: 2135759 - RNA, 19 nt, Homo sapiens
  misc_RNA (1)...(19): siRNA sense strand
gcagacggaggaaccagaa

SEQ ID NO: 2135760 - RNA, 19 nt, Homo sapiens
  misc_RNA (1)...(19): siRNA sense strand
gugaagaugaagaguacua

SEQ ID NO: 2135761 - RNA, 19 nt, Homo sapiens
  misc_RNA (1)...(19): siRNA sense strand
guuccuggcccaauucuug

SEQ ID NO: 2135762 - RNA, 19 nt, Homo sapiens
  misc_RNA (1)...(19): siRNA sense strand
gugcaucaccucccauaau

SEQ ID NO: 2135763 - RNA, 19 nt, Homo sapiens
  misc_RNA (1)...(19): siRNA sense strand
gagagaguaaggaugaaga

SEQ ID NO: 2135764 - RNA, 19 nt, Homo sapiens
  misc_RNA (1)...(19): siRNA sense strand
agauaaggaacaagaauga

SEQ ID NO: 2135765 - RNA, 19 nt, Homo sapiens
  misc_RNA (1)...(19): siRNA sense strand
gaauguguggagauagaaa

SEQ ID NO: 2135766 - RNA, 19 nt, Homo sapiens
  misc_RNA (1)...(19): siRNA sense strand
aaggagagaguaaggauga

SEQ ID NO: 2135767 - RNA, 19 nt, Homo sapiens
  misc_RNA (1)...(19): siRNA sense strand
gagauggagccgaccuuug

SEQ ID NO: 2135768 - RNA, 19 nt, Homo sapiens
  misc_RNA (1)...(19): siRNA sense strand
uggaugaggcccaagauga

SEQ ID NO: 2135769 - RNA, 19 nt, Homo sapiens
  misc_RNA (1)...(19): siRNA sense strand
gaugacugccgccuccaaa

SEQ ID NO: 2135770 - RNA, 19 nt, Homo sapiens
  misc_RNA (1)...(19): siRNA sense strand
ugaugcagcuagagaccuu

SEQ ID NO: 2135771 - RNA, 19 nt, Homo sapiens
  misc_RNA (1)...(19): siRNA sense strand
gaaggaggaggaggaggaa

SEQ ID NO: 2135772 - RNA, 19 nt, Homo sapiens
  misc_RNA (1)...(19): siRNA sense strand
aaaugaagaagaaggaaga

SEQ ID NO: 2135773 - RNA, 19 nt, Homo sapiens
  misc_RNA (1)...(19): siRNA sense strand
gaagaaagugaagaugaag

SEQ ID NO: 2135774 - RNA, 19 nt, Homo sapiens
  misc_RNA (1)...(19): siRNA sense strand
gagcggguggccuuucuga

SEQ ID NO: 2135775 - RNA, 19 nt, Homo sapiens
  misc_RNA (1)...(19): siRNA sense strand
cagaaucgagucccacuuc

SEQ ID NO: 2135776 - RNA, 19 nt, Homo sapiens
  misc_RNA (1)...(19): siRNA sense strand
agaguaaggaugaagaaga

SEQ ID NO: 2135777 - RNA, 19 nt, Homo sapiens
  misc_RNA (1)...(19): siRNA sense strand
gacuguaucucggaugauc

SEQ ID NO: 2135778 - RNA, 19 nt, Homo sapiens
  misc_RNA (1)...(19): siRNA sense strand
ggaaaugaaacagaaagag

SEQ ID NO: 2135779 - RNA, 19 nt, Homo sapiens
  misc_RNA (1)...(19): siRNA sense strand
ggaggaggaagaggaaaug

SEQ ID NO: 2135780 - RNA, 19 nt, Homo sapiens
  misc_RNA (1)...(19): siRNA sense strand
gaaggaggaggaggagaug

SEQ ID NO: 2135781 - RNA, 19 nt, Homo sapiens
  misc_RNA (1)...(19): siRNA sense strand
uggccgagguuaauuccuu

SEQ ID NO: 2135782 - RNA, 19 nt, Homo sapiens
  misc_RNA (1)...(19): siRNA sense strand
gaagaugaagaguacuaca

SEQ ID NO: 2135783 - RNA, 19 nt, Homo sapiens
  misc_RNA (1)...(19): siRNA sense strand
ggagcggccugagauagag

SEQ ID NO: 2135784 - RNA, 19 nt, Homo sapiens
  misc_RNA (1)...(19): siRNA sense strand
gcggguggccuuucugauc

SEQ ID NO: 2135785 - RNA, 19 nt, Homo sapiens
  misc_RNA (1)...(19): siRNA sense strand
caucaccucccauaauaca

SEQ ID NO: 2135786 - RNA, 19 nt, Homo sapiens
  misc_RNA (1)...(19): siRNA sense strand
agaaggaggaagaaaugaa

SEQ ID NO: 2135787 - RNA, 19 nt, Homo sapiens
  misc_RNA (1)...(19): siRNA sense strand
gaugaagaaggaggaagaa

SEQ ID NO: 2135788 - RNA, 19 nt, Homo sapiens
  misc_RNA (1)...(19): siRNA sense strand
caugagggcuuuucagcaa

SEQ ID NO: 2135789 - RNA, 19 nt, Homo sapiens
  misc_RNA (1)...(19): siRNA sense strand
ugaagaguacuacagugaa

SEQ ID NO: 2135790 - RNA, 19 nt, Homo sapiens
  misc_RNA (1)...(19): siRNA sense strand
aagugaagaugaagaguac

SEQ ID NO: 2135791 - RNA, 19 nt, Homo sapiens
  misc_RNA (1)...(19): siRNA sense strand
aggaagaaagugaagauga

SEQ ID NO: 2135792 - RNA, 19 nt, Homo sapiens
  misc_RNA (1)...(19): siRNA sense strand
aauaucaucuucccuuuug

SEQ ID NO: 2135793 - RNA, 19 nt, Homo sapiens
  misc_RNA (1)...(19): siRNA sense strand
uggccgaauucgaguuuga

SEQ ID NO: 2135794 - RNA, 19 nt, Homo sapiens
  misc_RNA (1)...(19): siRNA sense strand
agauggagccgaccuuugu

SEQ ID NO: 2135795 - RNA, 19 nt, Homo sapiens
  misc_RNA (1)...(19): siRNA sense strand
aagaugaugaccuagauga

SEQ ID NO: 2135796 - RNA, 19 nt, Homo sapiens
  misc_RNA (1)...(19): siRNA sense strand
gaggaaaugaaacagaaag

SEQ ID NO: 2135797 - RNA, 19 nt, Homo sapiens
  misc_RNA (1)...(19): siRNA sense strand
ggagauagaaagaaaagug

SEQ ID NO: 2135798 - RNA, 19 nt, Homo sapiens
  misc_RNA (1)...(19): siRNA sense strand
aggaggagccacuggauga

SEQ ID NO: 2135799 - RNA, 19 nt, Homo sapiens
  misc_RNA (1)...(19): siRNA sense strand
gaggaggaaggagagagua

SEQ ID NO: 2135800 - RNA, 19 nt, Homo sapiens
  misc_RNA (1)...(19): siRNA sense strand
agaagaaggaagagaagga

SEQ ID NO: 2135801 - RNA, 19 nt, Homo sapiens
  misc_RNA (1)...(19): siRNA sense strand
ggaguucgaaauaucaucu

SEQ ID NO: 2135802 - RNA, 19 nt, Homo sapiens
  misc_RNA (1)...(19): siRNA sense strand
gcaagaccaucgacaacaa

SEQ ID NO: 2135803 - RNA, 19 nt, Homo sapiens
  misc_RNA (1)...(19): siRNA sense strand
gugcugacgucaaggauuu

SEQ ID NO: 2135804 - RNA, 19 nt, Homo sapiens
  misc_RNA (1)...(19): siRNA sense strand
caaaguggccugugacgaa

SEQ ID NO: 2135805 - RNA, 19 nt, Homo sapiens
  misc_RNA (1)...(19): siRNA sense strand
cgucaaggauuucgaggaa

SEQ ID NO: 2135806 - RNA, 19 nt, Homo sapiens
  misc_RNA (1)...(19): siRNA sense strand
ucaaggauuucgaggaaga

SEQ ID NO: 2135807 - RNA, 19 nt, Homo sapiens
  misc_RNA (1)...(19): siRNA sense strand
ccugaacuuugaugucaua

SEQ ID NO: 2135808 - RNA, 19 nt, Homo sapiens
  misc_RNA (1)...(19): siRNA sense strand
acaaggcgcuguacaacau

SEQ ID NO: 2135809 - RNA, 19 nt, Homo sapiens
  misc_RNA (1)...(19): siRNA sense strand
gaacccagauuuucagaug

SEQ ID NO: 2135810 - RNA, 19 nt, Homo sapiens
  misc_RNA (1)...(19): siRNA sense strand
gcaacauccucuccugcaa

SEQ ID NO: 2135811 - RNA, 19 nt, Homo sapiens
  misc_RNA (1)...(19): siRNA sense strand
gaaaacagcuuuacuuacc

SEQ ID NO: 2135812 - RNA, 19 nt, Homo sapiens
  misc_RNA (1)...(19): siRNA sense strand
uggagacccugaacuuuga

SEQ ID NO: 2135813 - RNA, 19 nt, Homo sapiens
  misc_RNA (1)...(19): siRNA sense strand
guucacgguuguucuauca

SEQ ID NO: 2135814 - RNA, 19 nt, Homo sapiens
  misc_RNA (1)...(19): siRNA sense strand
ggagauucaagucgcauaa

SEQ ID NO: 2135815 - RNA, 19 nt, Homo sapiens
  misc_RNA (1)...(19): siRNA sense strand
gaggagaggaugagagaau

SEQ ID NO: 2135816 - RNA, 19 nt, Homo sapiens
  misc_RNA (1)...(19): siRNA sense strand
ugaauggcauguuccugaa

SEQ ID NO: 2135817 - RNA, 19 nt, Homo sapiens
  misc_RNA (1)...(19): siRNA sense strand
caacauccucuccugcaaa

SEQ ID NO: 2135818 - RNA, 19 nt, Homo sapiens
  misc_RNA (1)...(19): siRNA sense strand
aggcaaugcuguacgagaa

SEQ ID NO: 2135819 - RNA, 19 nt, Homo sapiens
  misc_RNA (1)...(19): siRNA sense strand
aaaguggccugugacgaaa

SEQ ID NO: 2135820 - RNA, 19 nt, Homo sapiens
  misc_RNA (1)...(19): siRNA sense strand
ucacgguuguucuaucaug

SEQ ID NO: 2135821 - RNA, 19 nt, Homo sapiens
  misc_RNA (1)...(19): siRNA sense strand
aggagaggaugagagaaua

SEQ ID NO: 2135822 - RNA, 19 nt, Homo sapiens
  misc_RNA (1)...(19): siRNA sense strand
cagaaaacagcuuuacuua

SEQ ID NO: 2135823 - RNA, 19 nt, Homo sapiens
  misc_RNA (1)...(19): siRNA sense strand
gcaaugcuguacgagaagu

SEQ ID NO: 2135824 - RNA, 19 nt, Homo sapiens
  misc_RNA (1)...(19): siRNA sense strand
gauucaagucgcauaaaga

SEQ ID NO: 2135825 - RNA, 19 nt, Homo sapiens
  misc_RNA (1)...(19): siRNA sense strand
gcagaggaggagaggauga

SEQ ID NO: 2135826 - RNA, 19 nt, Homo sapiens
  misc_RNA (1)...(19): siRNA sense strand
ucaagaaccugggcaagac

SEQ ID NO: 2135827 - RNA, 19 nt, Homo sapiens
  misc_RNA (1)...(19): siRNA sense strand
ucagauggccucccuguac

SEQ ID NO: 2135828 - RNA, 19 nt, Homo sapiens
  misc_RNA (1)...(19): siRNA sense strand
gccaggcaguccacuagug

SEQ ID NO: 2135829 - RNA, 19 nt, Homo sapiens
  misc_RNA (1)...(19): siRNA sense strand
ugugaugaauggcauguuc

SEQ ID NO: 2135830 - RNA, 19 nt, Homo sapiens
  misc_RNA (1)...(19): siRNA sense strand
acaacaaggcgcuguacaa

SEQ ID NO: 2135831 - RNA, 19 nt, Homo sapiens
  misc_RNA (1)...(19): siRNA sense strand
caagucgcauaaagaacga

SEQ ID NO: 2135832 - RNA, 19 nt, Homo sapiens
  misc_RNA (1)...(19): siRNA sense strand
ucagucacuuccucagguu

SEQ ID NO: 2135833 - RNA, 19 nt, Homo sapiens
  misc_RNA (1)...(19): siRNA sense strand
gagauucaagucgcauaaa

SEQ ID NO: 2135834 - RNA, 19 nt, Homo sapiens
  misc_RNA (1)...(19): siRNA sense strand
ccugcaaaguggccuguga

SEQ ID NO: 2135835 - RNA, 19 nt, Homo sapiens
  misc_RNA (1)...(19): siRNA sense strand
caacaaggcgcuguacaac

SEQ ID NO: 2135836 - RNA, 19 nt, Homo sapiens
  misc_RNA (1)...(19): siRNA sense strand
ugaccgaggcaaugcugua

SEQ ID NO: 2135837 - RNA, 19 nt, Homo sapiens
  misc_RNA (1)...(19): siRNA sense strand
ggaggccaccuugcgauga

SEQ ID NO: 2135838 - RNA, 19 nt, Homo sapiens
  misc_RNA (1)...(19): siRNA sense strand
gcuacggguucgugcacuu

SEQ ID NO: 2135839 - RNA, 19 nt, Homo sapiens
  misc_RNA (1)...(19): siRNA sense strand
gggcaacgucuucaucaag

SEQ ID NO: 2135840 - RNA, 19 nt, Homo sapiens
  misc_RNA (1)...(19): siRNA sense strand
agauucaagucgcauaaag

SEQ ID NO: 2135841 - RNA, 19 nt, Homo sapiens
  misc_RNA (1)...(19): siRNA sense strand
ccgaggcaaugcuguacga

SEQ ID NO: 2135842 - RNA, 19 nt, Homo sapiens
  misc_RNA (1)...(19): siRNA sense strand
cuggagacccugaacuuug

SEQ ID NO: 2135843 - RNA, 19 nt, Homo sapiens
  misc_RNA (1)...(19): siRNA sense strand
gcuacgcguaugucaacua

SEQ ID NO: 2135844 - RNA, 19 nt, Homo sapiens
  misc_RNA (1)...(19): siRNA sense strand
gggagauucaagucgcaua

SEQ ID NO: 2135845 - RNA, 19 nt, Homo sapiens
  misc_RNA (1)...(19): siRNA sense strand
gaacuaccgcaaaauuuuc

SEQ ID NO: 2135846 - RNA, 19 nt, Homo sapiens
  misc_RNA (1)...(19): siRNA sense strand
cauccucuccugcaaagug

SEQ ID NO: 2135847 - RNA, 19 nt, Homo sapiens
  misc_RNA (1)...(19): siRNA sense strand
cagguucacgguuguucua

SEQ ID NO: 2135848 - RNA, 19 nt, Homo sapiens
  misc_RNA (1)...(19): siRNA sense strand
cuacgcguaugucaacuac

SEQ ID NO: 2135849 - RNA, 19 nt, Homo sapiens
  misc_RNA (1)...(19): siRNA sense strand
gauccagccaucacugcaa

SEQ ID NO: 2135850 - RNA, 19 nt, Homo sapiens
  misc_RNA (1)...(19): siRNA sense strand
gaugagacccucggugacu

SEQ ID NO: 2135851 - RNA, 19 nt, Homo sapiens
  misc_RNA (1)...(19): siRNA sense strand
ugaacuaccgcaaaauuuu

SEQ ID NO: 2135852 - RNA, 19 nt, Homo sapiens
  misc_RNA (1)...(19): siRNA sense strand
acccugaacuuugauguca

SEQ ID NO: 2135853 - RNA, 19 nt, Homo sapiens
  misc_RNA (1)...(19): siRNA sense strand
gggcuacgcguaugucaac

SEQ ID NO: 2135854 - RNA, 19 nt, Homo sapiens
  misc_RNA (1)...(19): siRNA sense strand
auucaagucgcauaaagaa

SEQ ID NO: 2135855 - RNA, 19 nt, Homo sapiens
  misc_RNA (1)...(19): siRNA sense strand
ggagaggaugagagaauac

SEQ ID NO: 2135856 - RNA, 19 nt, Homo sapiens
  misc_RNA (1)...(19): siRNA sense strand
cacuagugcugacgucaag

SEQ ID NO: 2135857 - RNA, 19 nt, Homo sapiens
  misc_RNA (1)...(19): siRNA sense strand
ccacuagugcugacgucaa

SEQ ID NO: 2135858 - RNA, 19 nt, Homo sapiens
  misc_RNA (1)...(19): siRNA sense strand
acgcguaugucaacuacca

SEQ ID NO: 2135859 - RNA, 19 nt, Homo sapiens
  misc_RNA (1)...(19): siRNA sense strand
gguucacgguuguucuauc

SEQ ID NO: 2135860 - RNA, 19 nt, Homo sapiens
  misc_RNA (1)...(19): siRNA sense strand
gggcaagaccaucgacaac

SEQ ID NO: 2135861 - RNA, 19 nt, Homo sapiens
  misc_RNA (1)...(19): siRNA sense strand
guaugucaacuaccagcaa

SEQ ID NO: 2135862 - RNA, 19 nt, Homo sapiens
  misc_RNA (1)...(19): siRNA sense strand
gaaaggaaguucacuaaua

SEQ ID NO: 2135863 - RNA, 19 nt, Homo sapiens
  misc_RNA (1)...(19): siRNA sense strand
gaauugcacuugugacuua

SEQ ID NO: 2135864 - RNA, 19 nt, Homo sapiens
  misc_RNA (1)...(19): siRNA sense strand
agaaugaccucuuagaaua

SEQ ID NO: 2135865 - RNA, 19 nt, Homo sapiens
  misc_RNA (1)...(19): siRNA sense strand
ggaacuaucuucaaacugu

SEQ ID NO: 2135866 - RNA, 19 nt, Homo sapiens
  misc_RNA (1)...(19): siRNA sense strand
gaacaaaggauuuacaaca

SEQ ID NO: 2135867 - RNA, 19 nt, Homo sapiens
  misc_RNA (1)...(19): siRNA sense strand
guccuuaccugauaauaua

SEQ ID NO: 2135868 - RNA, 19 nt, Homo sapiens
  misc_RNA (1)...(19): siRNA sense strand
ggacagaacaugccaauuc

SEQ ID NO: 2135869 - RNA, 19 nt, Homo sapiens
  misc_RNA (1)...(19): siRNA sense strand
acaacaagcuugagauauu

SEQ ID NO: 2135870 - RNA, 19 nt, Homo sapiens
  misc_RNA (1)...(19): siRNA sense strand
ggaaccgucuugucaauga

SEQ ID NO: 2135871 - RNA, 19 nt, Homo sapiens
  misc_RNA (1)...(19): siRNA sense strand
ugacaagacuguauccaaa

SEQ ID NO: 2135872 - RNA, 19 nt, Homo sapiens
  misc_RNA (1)...(19): siRNA sense strand
cguaagcuccuuucaauua

SEQ ID NO: 2135873 - RNA, 19 nt, Homo sapiens
  misc_RNA (1)...(19): siRNA sense strand
caacaggauugcagucauu

SEQ ID NO: 2135874 - RNA, 19 nt, Homo sapiens
  misc_RNA (1)...(19): siRNA sense strand
gacguaagcuccuuucaau

SEQ ID NO: 2135875 - RNA, 19 nt, Homo sapiens
  misc_RNA (1)...(19): siRNA sense strand
gcuguacccuucuauguuu

SEQ ID NO: 2135876 - RNA, 19 nt, Homo sapiens
  misc_RNA (1)...(19): siRNA sense strand
gaaggaaggagacccagua

SEQ ID NO: 2135877 - RNA, 19 nt, Homo sapiens
  misc_RNA (1)...(19): siRNA sense strand
gaaguucacuaauaucucu

SEQ ID NO: 2135878 - RNA, 19 nt, Homo sapiens
  misc_RNA (1)...(19): siRNA sense strand
ccaaagaaacucuaccuaa

SEQ ID NO: 2135879 - RNA, 19 nt, Homo sapiens
  misc_RNA (1)...(19): siRNA sense strand
caacaacaagcuugagaua

SEQ ID NO: 2135880 - RNA, 19 nt, Homo sapiens
  misc_RNA (1)...(19): siRNA sense strand
caacaagcuugagauauug

SEQ ID NO: 2135881 - RNA, 19 nt, Homo sapiens
  misc_RNA (1)...(19): siRNA sense strand
caaagaaacucuaccuaac

SEQ ID NO: 2135882 - RNA, 19 nt, Homo sapiens
  misc_RNA (1)...(19): siRNA sense strand
gaauggcaauuaccuugaa

SEQ ID NO: 2135883 - RNA, 19 nt, Homo sapiens
  misc_RNA (1)...(19): siRNA sense strand
uaucgaaucuaucagcuuu

SEQ ID NO: 2135884 - RNA, 19 nt, Homo sapiens
  misc_RNA (1)...(19): siRNA sense strand
gaauguaaacugccaagaa

SEQ ID NO: 2135885 - RNA, 19 nt, Homo sapiens
  misc_RNA (1)...(19): siRNA sense strand
ggccaugucuacaacuaua

SEQ ID NO: 2135886 - RNA, 19 nt, Homo sapiens
  misc_RNA (1)...(19): siRNA sense strand
caaaggauuuacaacaguu

SEQ ID NO: 2135887 - RNA, 19 nt, Homo sapiens
  misc_RNA (1)...(19): siRNA sense strand
caaacugucuauaagaaug

SEQ ID NO: 2135888 - RNA, 19 nt, Homo sapiens
  misc_RNA (1)...(19): siRNA sense strand
caaaggcugucaccuacaa

SEQ ID NO: 2135889 - RNA, 19 nt, Homo sapiens
  misc_RNA (1)...(19): siRNA sense strand
caaaggacaggcaaaguuu

SEQ ID NO: 2135890 - RNA, 19 nt, Homo sapiens
  misc_RNA (1)...(19): siRNA sense strand
ccacugagcugcuagaaaa

SEQ ID NO: 2135891 - RNA, 19 nt, Homo sapiens
  misc_RNA (1)...(19): siRNA sense strand
acaauggucugaauguaaa

SEQ ID NO: 2135892 - RNA, 19 nt, Homo sapiens
  misc_RNA (1)...(19): siRNA sense strand
ucaaagugcucauccugaa

SEQ ID NO: 2135893 - RNA, 19 nt, Homo sapiens
  misc_RNA (1)...(19): siRNA sense strand
aauguaaacugccaagaaa

SEQ ID NO: 2135894 - RNA, 19 nt, Homo sapiens
  misc_RNA (1)...(19): siRNA sense strand
gagacccaguagccuauua

SEQ ID NO: 2135895 - RNA, 19 nt, Homo sapiens
  misc_RNA (1)...(19): siRNA sense strand
gacaauggucugaauguaa

SEQ ID NO: 2135896 - RNA, 19 nt, Homo sapiens
  misc_RNA (1)...(19): siRNA sense strand
gaccuuugaugcuuugauu

SEQ ID NO: 2135897 - RNA, 19 nt, Homo sapiens
  misc_RNA (1)...(19): siRNA sense strand
acagggaacuaucuucaaa

SEQ ID NO: 2135898 - RNA, 19 nt, Homo sapiens
  misc_RNA (1)...(19): siRNA sense strand
caaccacccuuuacugcaa

SEQ ID NO: 2135899 - RNA, 19 nt, Homo sapiens
  misc_RNA (1)...(19): siRNA sense strand
ugggagagauugucuguga

SEQ ID NO: 2135900 - RNA, 19 nt, Homo sapiens
  misc_RNA (1)...(19): siRNA sense strand
auacaguucuuuggacuua

SEQ ID NO: 2135901 - RNA, 19 nt, Homo sapiens
  misc_RNA (1)...(19): siRNA sense strand
ucucagagcucagacaaug

SEQ ID NO: 2135902 - RNA, 19 nt, Homo sapiens
  misc_RNA (1)...(19): siRNA sense strand
caagaaaggaaguucacua

SEQ ID NO: 2135903 - RNA, 19 nt, Homo sapiens
  misc_RNA (1)...(19): siRNA sense strand
cgacuacaauuacaucagu

SEQ ID NO: 2135904 - RNA, 19 nt, Homo sapiens
  misc_RNA (1)...(19): siRNA sense strand
caucuuaucugucuguuuu

SEQ ID NO: 2135905 - RNA, 19 nt, Homo sapiens
  misc_RNA (1)...(19): siRNA sense strand
uggaucagcucccggcuuu

SEQ ID NO: 2135906 - RNA, 19 nt, Homo sapiens
  misc_RNA (1)...(19): siRNA sense strand
gagaacaaaggauuuacaa

SEQ ID NO: 2135907 - RNA, 19 nt, Homo sapiens
  misc_RNA (1)...(19): siRNA sense strand
gaaccgucuugucaaugaa

SEQ ID NO: 2135908 - RNA, 19 nt, Homo sapiens
  misc_RNA (1)...(19): siRNA sense strand
gggaauaggcuaaaaguaa

SEQ ID NO: 2135909 - RNA, 19 nt, Homo sapiens
  misc_RNA (1)...(19): siRNA sense strand
gagcugcuguaucaaaaua

SEQ ID NO: 2135910 - RNA, 19 nt, Homo sapiens
  misc_RNA (1)...(19): siRNA sense strand
uaucaacugugagaacaaa

SEQ ID NO: 2135911 - RNA, 19 nt, Homo sapiens
  misc_RNA (1)...(19): siRNA sense strand
ggaauaccaacaacuuaga

SEQ ID NO: 2135912 - RNA, 19 nt, Homo sapiens
  misc_RNA (1)...(19): siRNA sense strand
caaugaaucacaauacaga

SEQ ID NO: 2135913 - RNA, 19 nt, Homo sapiens
  misc_RNA (1)...(19): siRNA sense strand
uuaagccucugaccuuuga

SEQ ID NO: 2135914 - RNA, 19 nt, Homo sapiens
  misc_RNA (1)...(19): siRNA sense strand
ucaaaggacaggcaaaguu

SEQ ID NO: 2135915 - RNA, 19 nt, Homo sapiens
  misc_RNA (1)...(19): siRNA sense strand
gaacauauuggagggauca

SEQ ID NO: 2135916 - RNA, 19 nt, Homo sapiens
  misc_RNA (1)...(19): siRNA sense strand
ggaauaggcuaaaaguaau

SEQ ID NO: 2135917 - RNA, 19 nt, Homo sapiens
  misc_RNA (1)...(19): siRNA sense strand
gaaaauccauggaauugca

SEQ ID NO: 2135918 - RNA, 19 nt, Homo sapiens
  misc_RNA (1)...(19): siRNA sense strand
cugcaagaguucagcuaua

SEQ ID NO: 2135919 - RNA, 19 nt, Homo sapiens
  misc_RNA (1)...(19): siRNA sense strand
gacugcaucucaacaacaa

SEQ ID NO: 2135920 - RNA, 19 nt, Homo sapiens
  misc_RNA (1)...(19): siRNA sense strand
agccugagcugcuguauca

SEQ ID NO: 2135921 - RNA, 19 nt, Homo sapiens
  misc_RNA (1)...(19): siRNA sense strand
cuagacaccauaacuguuu

SEQ ID NO: 2135922 - RNA, 19 nt, Homo sapiens
  misc_RNA (1)...(19): siRNA sense strand
ggagagauugucugugaga

SEQ ID NO: 2135923 - RNA, 19 nt, Homo sapiens
  misc_RNA (1)...(19): siRNA sense strand
caggaauaccaacaacuua

SEQ ID NO: 2135924 - RNA, 19 nt, Homo sapiens
  misc_RNA (1)...(19): siRNA sense strand
ugaggugacuugcgaaucu

SEQ ID NO: 2135925 - RNA, 19 nt, Homo sapiens
  misc_RNA (1)...(19): siRNA sense strand
ggacuuacugcacuuagga

SEQ ID NO: 2135926 - RNA, 19 nt, Homo sapiens
  misc_RNA (1)...(19): siRNA sense strand
gcugucaccuacaaugaau

SEQ ID NO: 2135927 - RNA, 19 nt, Homo sapiens
  misc_RNA (1)...(19): siRNA sense strand
aagcuaagccgcaaucaga

SEQ ID NO: 2135928 - RNA, 19 nt, Homo sapiens
  misc_RNA (1)...(19): siRNA sense strand
aagaaaggaaguucacuaa

SEQ ID NO: 2135929 - RNA, 19 nt, Homo sapiens
  misc_RNA (1)...(19): siRNA sense strand
uaacagggaacuaucuuca

SEQ ID NO: 2135930 - RNA, 19 nt, Homo sapiens
  misc_RNA (1)...(19): siRNA sense strand
cacaccugcuuacacaaua

SEQ ID NO: 2135931 - RNA, 19 nt, Homo sapiens
  misc_RNA (1)...(19): siRNA sense strand
ccagacagcccaaacuugu

SEQ ID NO: 2135932 - RNA, 19 nt, Homo sapiens
  misc_RNA (1)...(19): siRNA sense strand
ugacuuacuuccucucaag

SEQ ID NO: 2135933 - RNA, 19 nt, Homo sapiens
  misc_RNA (1)...(19): siRNA sense strand
cuucgguccuuaccugaua

SEQ ID NO: 2135934 - RNA, 19 nt, Homo sapiens
  misc_RNA (1)...(19): siRNA sense strand
aaauuaagccucugaccuu

SEQ ID NO: 2135935 - RNA, 19 nt, Homo sapiens
  misc_RNA (1)...(19): siRNA sense strand
ccugaaaacucucaaaaga

SEQ ID NO: 2135936 - RNA, 19 nt, Homo sapiens
  misc_RNA (1)...(19): siRNA sense strand
gaaaacguacugaauauca

SEQ ID NO: 2135937 - RNA, 19 nt, Homo sapiens
  misc_RNA (1)...(19): siRNA sense strand
gagcuugcaauaucucuau

SEQ ID NO: 2135938 - RNA, 19 nt, Homo sapiens
  misc_RNA (1)...(19): siRNA sense strand
ccaacgcggugacucuuca

SEQ ID NO: 2135939 - RNA, 19 nt, Homo sapiens
  misc_RNA (1)...(19): siRNA sense strand
ccaggaauaccaacaacuu

SEQ ID NO: 2135940 - RNA, 19 nt, Homo sapiens
  misc_RNA (1)...(19): siRNA sense strand
ggacuguaccugugacauc

SEQ ID NO: 2135941 - RNA, 19 nt, Homo sapiens
  misc_RNA (1)...(19): siRNA sense strand
acaaaggauuuacaacagu

SEQ ID NO: 2135942 - RNA, 19 nt, Homo sapiens
  misc_RNA (1)...(19): siRNA sense strand
aaaccgaccaguccaaaga

SEQ ID NO: 2135943 - RNA, 19 nt, Homo sapiens
  misc_RNA (1)...(19): siRNA sense strand
guccaaaggcugucaccua

SEQ ID NO: 2135944 - RNA, 19 nt, Homo sapiens
  misc_RNA (1)...(19): siRNA sense strand
gcaauguguuccgcuuugu

SEQ ID NO: 2135945 - RNA, 19 nt, Homo sapiens
  misc_RNA (1)...(19): siRNA sense strand
aaagaaacucuaccuaaca

SEQ ID NO: 2135946 - RNA, 19 nt, Homo sapiens
  misc_RNA (1)...(19): siRNA sense strand
aaccaagacagaaucaaua

SEQ ID NO: 2135947 - RNA, 19 nt, Homo sapiens
  misc_RNA (1)...(19): siRNA sense strand
acaccugcuuacacaauaa

SEQ ID NO: 2135948 - RNA, 19 nt, Homo sapiens
  misc_RNA (1)...(19): siRNA sense strand
caguaugggucuuacaaca

SEQ ID NO: 2135949 - RNA, 19 nt, Homo sapiens
  misc_RNA (1)...(19): siRNA sense strand
uccacugucugucuuaauu

SEQ ID NO: 2135950 - RNA, 19 nt, Homo sapiens
  misc_RNA (1)...(19): siRNA sense strand
gaaguuccacugucugucu

SEQ ID NO: 2135951 - RNA, 19 nt, Homo sapiens
  misc_RNA (1)...(19): siRNA sense strand
gucaaugaaucacaauaca

SEQ ID NO: 2135952 - RNA, 19 nt, Homo sapiens
  misc_RNA (1)...(19): siRNA sense strand
gcugaaagacuggacagaa

SEQ ID NO: 2135953 - RNA, 19 nt, Homo sapiens
  misc_RNA (1)...(19): siRNA sense strand
ggagggaucauggagauuc

SEQ ID NO: 2135954 - RNA, 19 nt, Homo sapiens
  misc_RNA (1)...(19): siRNA sense strand
auauggaacucccaggaaa

SEQ ID NO: 2135955 - RNA, 19 nt, Homo sapiens
  misc_RNA (1)...(19): siRNA sense strand
gaauaucaacugugagaac

SEQ ID NO: 2135956 - RNA, 19 nt, Homo sapiens
  misc_RNA (1)...(19): siRNA sense strand
ccaucuacaugcagaagga

SEQ ID NO: 2135957 - RNA, 19 nt, Homo sapiens
  misc_RNA (1)...(19): siRNA sense strand
gaaucacaauacagacaca

SEQ ID NO: 2135958 - RNA, 19 nt, Homo sapiens
  misc_RNA (1)...(19): siRNA sense strand
gacuguaccugugacauca

SEQ ID NO: 2135959 - RNA, 19 nt, Homo sapiens
  misc_RNA (1)...(19): siRNA sense strand
gaucagcucccggcuuuca

SEQ ID NO: 2135960 - RNA, 19 nt, Homo sapiens
  misc_RNA (1)...(19): siRNA sense strand
uuacugcacuuaggaaaca

SEQ ID NO: 2135961 - RNA, 19 nt, Homo sapiens
  misc_RNA (1)...(19): siRNA sense strand
gagggaucauggagauuca

SEQ ID NO: 2135962 - RNA, 19 nt, Homo sapiens
  misc_RNA (1)...(19): siRNA sense strand
gaaaggaaguucacuaaua

SEQ ID NO: 2135963 - RNA, 19 nt, Homo sapiens
  misc_RNA (1)...(19): siRNA sense strand
gaauugcacuugugacuua

SEQ ID NO: 2135964 - RNA, 19 nt, Homo sapiens
  misc_RNA (1)...(19): siRNA sense strand
agaaugaccucuuagaaua

SEQ ID NO: 2135965 - RNA, 19 nt, Homo sapiens
  misc_RNA (1)...(19): siRNA sense strand
ggaacuaucuucaaacugu

SEQ ID NO: 2135966 - RNA, 19 nt, Homo sapiens
  misc_RNA (1)...(19): siRNA sense strand
gaacaaaggauuuacaaca

SEQ ID NO: 2135967 - RNA, 19 nt, Homo sapiens
  misc_RNA (1)...(19): siRNA sense strand
guccuuaccugauaauaua

SEQ ID NO: 2135968 - RNA, 19 nt, Homo sapiens
  misc_RNA (1)...(19): siRNA sense strand
ggacagaacaugccaauuc

SEQ ID NO: 2135969 - RNA, 19 nt, Homo sapiens
  misc_RNA (1)...(19): siRNA sense strand
acaacaagcuugagauauu

SEQ ID NO: 2135970 - RNA, 19 nt, Homo sapiens
  misc_RNA (1)...(19): siRNA sense strand
ggaaccgucuugucaauga

SEQ ID NO: 2135971 - RNA, 19 nt, Homo sapiens
  misc_RNA (1)...(19): siRNA sense strand
ugacaagacuguauccaaa

SEQ ID NO: 2135972 - RNA, 19 nt, Homo sapiens
  misc_RNA (1)...(19): siRNA sense strand
cguaagcuccuuucaauua

SEQ ID NO: 2135973 - RNA, 19 nt, Homo sapiens
  misc_RNA (1)...(19): siRNA sense strand
caacaggauugcagucauu

SEQ ID NO: 2135974 - RNA, 19 nt, Homo sapiens
  misc_RNA (1)...(19): siRNA sense strand
gacguaagcuccuuucaau

SEQ ID NO: 2135975 - RNA, 19 nt, Homo sapiens
  misc_RNA (1)...(19): siRNA sense strand
gcuguacccuucuauguuu

SEQ ID NO: 2135976 - RNA, 19 nt, Homo sapiens
  misc_RNA (1)...(19): siRNA sense strand
gaaggaaggagacccagua

SEQ ID NO: 2135977 - RNA, 19 nt, Homo sapiens
  misc_RNA (1)...(19): siRNA sense strand
gaaguucacuaauaucucu

SEQ ID NO: 2135978 - RNA, 19 nt, Homo sapiens
  misc_RNA (1)...(19): siRNA sense strand
ccaaagaaacucuaccuaa

SEQ ID NO: 2135979 - RNA, 19 nt, Homo sapiens
  misc_RNA (1)...(19): siRNA sense strand
caacaacaagcuugagaua

SEQ ID NO: 2135980 - RNA, 19 nt, Homo sapiens
  misc_RNA (1)...(19): siRNA sense strand
caacaagcuugagauauug

SEQ ID NO: 2135981 - RNA, 19 nt, Homo sapiens
  misc_RNA (1)...(19): siRNA sense strand
caaagaaacucuaccuaac

SEQ ID NO: 2135982 - RNA, 19 nt, Homo sapiens
  misc_RNA (1)...(19): siRNA sense strand
gaauggcaauuaccuugaa

SEQ ID NO: 2135983 - RNA, 19 nt, Homo sapiens
  misc_RNA (1)...(19): siRNA sense strand
uaucgaaucuaucagcuuu

SEQ ID NO: 2135984 - RNA, 19 nt, Homo sapiens
  misc_RNA (1)...(19): siRNA sense strand
gaauguaaacugccaagaa

SEQ ID NO: 2135985 - RNA, 19 nt, Homo sapiens
  misc_RNA (1)...(19): siRNA sense strand
ggccaugucuacaacuaua

SEQ ID NO: 2135986 - RNA, 19 nt, Homo sapiens
  misc_RNA (1)...(19): siRNA sense strand
caaaggauuuacaacaguu

SEQ ID NO: 2135987 - RNA, 19 nt, Homo sapiens
  misc_RNA (1)...(19): siRNA sense strand
caaacugucuauaagaaug

SEQ ID NO: 2135988 - RNA, 19 nt, Homo sapiens
  misc_RNA (1)...(19): siRNA sense strand
caaaggcugucaccuacaa

SEQ ID NO: 2135989 - RNA, 19 nt, Homo sapiens
  misc_RNA (1)...(19): siRNA sense strand
caaaggacaggcaaaguuu

SEQ ID NO: 2135990 - RNA, 19 nt, Homo sapiens
  misc_RNA (1)...(19): siRNA sense strand
ccacugagcugcuagaaaa

SEQ ID NO: 2135991 - RNA, 19 nt, Homo sapiens
  misc_RNA (1)...(19): siRNA sense strand
acaauggucugaauguaaa

SEQ ID NO: 2135992 - RNA, 19 nt, Homo sapiens
  misc_RNA (1)...(19): siRNA sense strand
ucaaagugcucauccugaa

SEQ ID NO: 2135993 - RNA, 19 nt, Homo sapiens
  misc_RNA (1)...(19): siRNA sense strand
aauguaaacugccaagaaa

SEQ ID NO: 2135994 - RNA, 19 nt, Homo sapiens
  misc_RNA (1)...(19): siRNA sense strand
gagacccaguagccuauua

SEQ ID NO: 2135995 - RNA, 19 nt, Homo sapiens
  misc_RNA (1)...(19): siRNA sense strand
gacaauggucugaauguaa

SEQ ID NO: 2135996 - RNA, 19 nt, Homo sapiens
  misc_RNA (1)...(19): siRNA sense strand
gaccuuugaugcuuugauu

SEQ ID NO: 2135997 - RNA, 19 nt, Homo sapiens
  misc_RNA (1)...(19): siRNA sense strand
acagggaacuaucuucaaa

SEQ ID NO: 2135998 - RNA, 19 nt, Homo sapiens
  misc_RNA (1)...(19): siRNA sense strand
caaccacccuuuacugcaa

SEQ ID NO: 2135999 - RNA, 19 nt, Homo sapiens
  misc_RNA (1)...(19): siRNA sense strand
ugggagagauugucuguga

SEQ ID NO: 2136000 - RNA, 19 nt, Homo sapiens
  misc_RNA (1)...(19): siRNA sense strand
auacaguucuuuggacuua

SEQ ID NO: 2136001 - RNA, 19 nt, Homo sapiens
  misc_RNA (1)...(19): siRNA sense strand
ucucagagcucagacaaug

SEQ ID NO: 2136002 - RNA, 19 nt, Homo sapiens
  misc_RNA (1)...(19): siRNA sense strand
caagaaaggaaguucacua

SEQ ID NO: 2136003 - RNA, 19 nt, Homo sapiens
  misc_RNA (1)...(19): siRNA sense strand
cgacuacaauuacaucagu

SEQ ID NO: 2136004 - RNA, 19 nt, Homo sapiens
  misc_RNA (1)...(19): siRNA sense strand
caucuuaucugucuguuuu

SEQ ID NO: 2136005 - RNA, 19 nt, Homo sapiens
  misc_RNA (1)...(19): siRNA sense strand
uggaucagcucccggcuuu

SEQ ID NO: 2136006 - RNA, 19 nt, Homo sapiens
  misc_RNA (1)...(19): siRNA sense strand
gagaacaaaggauuuacaa

SEQ ID NO: 2136007 - RNA, 19 nt, Homo sapiens
  misc_RNA (1)...(19): siRNA sense strand
gaaccgucuugucaaugaa

SEQ ID NO: 2136008 - RNA, 19 nt, Homo sapiens
  misc_RNA (1)...(19): siRNA sense strand
gggaauaggcuaaaaguaa

SEQ ID NO: 2136009 - RNA, 19 nt, Homo sapiens
  misc_RNA (1)...(19): siRNA sense strand
gagcugcuguaucaaaaua

SEQ ID NO: 2136010 - RNA, 19 nt, Homo sapiens
  misc_RNA (1)...(19): siRNA sense strand
uaucaacugugagaacaaa

SEQ ID NO: 2136011 - RNA, 19 nt, Homo sapiens
  misc_RNA (1)...(19): siRNA sense strand
ggaauaccaacaacuuaga

SEQ ID NO: 2136012 - RNA, 19 nt, Homo sapiens
  misc_RNA (1)...(19): siRNA sense strand
caaugaaucacaauacaga

SEQ ID NO: 2136013 - RNA, 19 nt, Homo sapiens
  misc_RNA (1)...(19): siRNA sense strand
uuaagccucugaccuuuga

SEQ ID NO: 2136014 - RNA, 19 nt, Homo sapiens
  misc_RNA (1)...(19): siRNA sense strand
ucaaaggacaggcaaaguu

SEQ ID NO: 2136015 - RNA, 19 nt, Homo sapiens
  misc_RNA (1)...(19): siRNA sense strand
gaacauauuggagggauca

SEQ ID NO: 2136016 - RNA, 19 nt, Homo sapiens
  misc_RNA (1)...(19): siRNA sense strand
ggaauaggcuaaaaguaau

SEQ ID NO: 2136017 - RNA, 19 nt, Homo sapiens
  misc_RNA (1)...(19): siRNA sense strand
gaaaauccauggaauugca

SEQ ID NO: 2136018 - RNA, 19 nt, Homo sapiens
  misc_RNA (1)...(19): siRNA sense strand
cugcaagaguucagcuaua

SEQ ID NO: 2136019 - RNA, 19 nt, Homo sapiens
  misc_RNA (1)...(19): siRNA sense strand
gacugcaucucaacaacaa

SEQ ID NO: 2136020 - RNA, 19 nt, Homo sapiens
  misc_RNA (1)...(19): siRNA sense strand
agccugagcugcuguauca

SEQ ID NO: 2136021 - RNA, 19 nt, Homo sapiens
  misc_RNA (1)...(19): siRNA sense strand
cuagacaccauaacuguuu

SEQ ID NO: 2136022 - RNA, 19 nt, Homo sapiens
  misc_RNA (1)...(19): siRNA sense strand
ggagagauugucugugaga

SEQ ID NO: 2136023 - RNA, 19 nt, Homo sapiens
  misc_RNA (1)...(19): siRNA sense strand
caggaauaccaacaacuua

SEQ ID NO: 2136024 - RNA, 19 nt, Homo sapiens
  misc_RNA (1)...(19): siRNA sense strand
ugaggugacuugcgaaucu

SEQ ID NO: 2136025 - RNA, 19 nt, Homo sapiens
  misc_RNA (1)...(19): siRNA sense strand
ggacuuacugcacuuagga

SEQ ID NO: 2136026 - RNA, 19 nt, Homo sapiens
  misc_RNA (1)...(19): siRNA sense strand
gcugucaccuacaaugaau

SEQ ID NO: 2136027 - RNA, 19 nt, Homo sapiens
  misc_RNA (1)...(19): siRNA sense strand
aagcuaagccgcaaucaga

SEQ ID NO: 2136028 - RNA, 19 nt, Homo sapiens
  misc_RNA (1)...(19): siRNA sense strand
aagaaaggaaguucacuaa

SEQ ID NO: 2136029 - RNA, 19 nt, Homo sapiens
  misc_RNA (1)...(19): siRNA sense strand
uaacagggaacuaucuuca

SEQ ID NO: 2136030 - RNA, 19 nt, Homo sapiens
  misc_RNA (1)...(19): siRNA sense strand
cacaccugcuuacacaaua

SEQ ID NO: 2136031 - RNA, 19 nt, Homo sapiens
  misc_RNA (1)...(19): siRNA sense strand
ccagacagcccaaacuugu

SEQ ID NO: 2136032 - RNA, 19 nt, Homo sapiens
  misc_RNA (1)...(19): siRNA sense strand
ugacuuacuuccucucaag

SEQ ID NO: 2136033 - RNA, 19 nt, Homo sapiens
  misc_RNA (1)...(19): siRNA sense strand
cuucgguccuuaccugaua

SEQ ID NO: 2136034 - RNA, 19 nt, Homo sapiens
  misc_RNA (1)...(19): siRNA sense strand
aaauuaagccucugaccuu

SEQ ID NO: 2136035 - RNA, 19 nt, Homo sapiens
  misc_RNA (1)...(19): siRNA sense strand
ccugaaaacucucaaaaga

SEQ ID NO: 2136036 - RNA, 19 nt, Homo sapiens
  misc_RNA (1)...(19): siRNA sense strand
gaaaacguacugaauauca

SEQ ID NO: 2136037 - RNA, 19 nt, Homo sapiens
  misc_RNA (1)...(19): siRNA sense strand
gagcuugcaauaucucuau

SEQ ID NO: 2136038 - RNA, 19 nt, Homo sapiens
  misc_RNA (1)...(19): siRNA sense strand
ccaacgcggugacucuuca

SEQ ID NO: 2136039 - RNA, 19 nt, Homo sapiens
  misc_RNA (1)...(19): siRNA sense strand
ccaggaauaccaacaacuu

SEQ ID NO: 2136040 - RNA, 19 nt, Homo sapiens
  misc_RNA (1)...(19): siRNA sense strand
ggacuguaccugugacauc

SEQ ID NO: 2136041 - RNA, 19 nt, Homo sapiens
  misc_RNA (1)...(19): siRNA sense strand
acaaaggauuuacaacagu

SEQ ID NO: 2136042 - RNA, 19 nt, Homo sapiens
  misc_RNA (1)...(19): siRNA sense strand
aaaccgaccaguccaaaga

SEQ ID NO: 2136043 - RNA, 19 nt, Homo sapiens
  misc_RNA (1)...(19): siRNA sense strand
guccaaaggcugucaccua

SEQ ID NO: 2136044 - RNA, 19 nt, Homo sapiens
  misc_RNA (1)...(19): siRNA sense strand
gcaauguguuccgcuuugu

SEQ ID NO: 2136045 - RNA, 19 nt, Homo sapiens
  misc_RNA (1)...(19): siRNA sense strand
aaagaaacucuaccuaaca

SEQ ID NO: 2136046 - RNA, 19 nt, Homo sapiens
  misc_RNA (1)...(19): siRNA sense strand
aaccaagacagaaucaaua

SEQ ID NO: 2136047 - RNA, 19 nt, Homo sapiens
  misc_RNA (1)...(19): siRNA sense strand
acaccugcuuacacaauaa

SEQ ID NO: 2136048 - RNA, 19 nt, Homo sapiens
  misc_RNA (1)...(19): siRNA sense strand
caguaugggucuuacaaca

SEQ ID NO: 2136049 - RNA, 19 nt, Homo sapiens
  misc_RNA (1)...(19): siRNA sense strand
uccacugucugucuuaauu

SEQ ID NO: 2136050 - RNA, 19 nt, Homo sapiens
  misc_RNA (1)...(19): siRNA sense strand
gaaguuccacugucugucu

SEQ ID NO: 2136051 - RNA, 19 nt, Homo sapiens
  misc_RNA (1)...(19): siRNA sense strand
gucaaugaaucacaauaca

SEQ ID NO: 2136052 - RNA, 19 nt, Homo sapiens
  misc_RNA (1)...(19): siRNA sense strand
gcugaaagacuggacagaa

SEQ ID NO: 2136053 - RNA, 19 nt, Homo sapiens
  misc_RNA (1)...(19): siRNA sense strand
ggagggaucauggagauuc

SEQ ID NO: 2136054 - RNA, 19 nt, Homo sapiens
  misc_RNA (1)...(19): siRNA sense strand
auauggaacucccaggaaa

SEQ ID NO: 2136055 - RNA, 19 nt, Homo sapiens
  misc_RNA (1)...(19): siRNA sense strand
gaauaucaacugugagaac

SEQ ID NO: 2136056 - RNA, 19 nt, Homo sapiens
  misc_RNA (1)...(19): siRNA sense strand
ccaucuacaugcagaagga

SEQ ID NO: 2136057 - RNA, 19 nt, Homo sapiens
  misc_RNA (1)...(19): siRNA sense strand
gaaucacaauacagacaca

SEQ ID NO: 2136058 - RNA, 19 nt, Homo sapiens
  misc_RNA (1)...(19): siRNA sense strand
gacuguaccugugacauca

SEQ ID NO: 2136059 - RNA, 19 nt, Homo sapiens
  misc_RNA (1)...(19): siRNA sense strand
gaucagcucccggcuuuca

SEQ ID NO: 2136060 - RNA, 19 nt, Homo sapiens
  misc_RNA (1)...(19): siRNA sense strand
uuacugcacuuaggaaaca

SEQ ID NO: 2136061 - RNA, 19 nt, Homo sapiens
  misc_RNA (1)...(19): siRNA sense strand
gagggaucauggagauuca

SEQ ID NO: 2136062 - RNA, 19 nt, Homo sapiens
  misc_RNA (1)...(19): siRNA sense strand
gaagaaugguguuucaaua

SEQ ID NO: 2136063 - RNA, 19 nt, Homo sapiens
  misc_RNA (1)...(19): siRNA sense strand
ggaaagaauugcucagaaa

SEQ ID NO: 2136064 - RNA, 19 nt, Homo sapiens
  misc_RNA (1)...(19): siRNA sense strand
gcaaauggaugcaguuguu

SEQ ID NO: 2136065 - RNA, 19 nt, Homo sapiens
  misc_RNA (1)...(19): siRNA sense strand
ggagauauccuuguaauuu

SEQ ID NO: 2136066 - RNA, 19 nt, Homo sapiens
  misc_RNA (1)...(19): siRNA sense strand
caucauaugugguaaauug

SEQ ID NO: 2136067 - RNA, 19 nt, Homo sapiens
  misc_RNA (1)...(19): siRNA sense strand
ggaaacugcagcaauauua

SEQ ID NO: 2136068 - RNA, 19 nt, Homo sapiens
  misc_RNA (1)...(19): siRNA sense strand
ggaauaaugcuacauguaa

SEQ ID NO: 2136069 - RNA, 19 nt, Homo sapiens
  misc_RNA (1)...(19): siRNA sense strand
cuacagagauugcugguuu

SEQ ID NO: 2136070 - RNA, 19 nt, Homo sapiens
  misc_RNA (1)...(19): siRNA sense strand
ggagucaccuuccauggua

SEQ ID NO: 2136071 - RNA, 19 nt, Homo sapiens
  misc_RNA (1)...(19): siRNA sense strand
uaaagguccugcucaauuu

SEQ ID NO: 2136072 - RNA, 19 nt, Homo sapiens
  misc_RNA (1)...(19): siRNA sense strand
ucacagcucuuucauaaau

SEQ ID NO: 2136073 - RNA, 19 nt, Homo sapiens
  misc_RNA (1)...(19): siRNA sense strand
gaacgauccugaagauaau

SEQ ID NO: 2136074 - RNA, 19 nt, Homo sapiens
  misc_RNA (1)...(19): siRNA sense strand
gcagcaauauuacuucaaa

SEQ ID NO: 2136075 - RNA, 19 nt, Homo sapiens
  misc_RNA (1)...(19): siRNA sense strand
cauggaaacugcagcaaua

SEQ ID NO: 2136076 - RNA, 19 nt, Homo sapiens
  misc_RNA (1)...(19): siRNA sense strand
gaauaucgguaucuauguu

SEQ ID NO: 2136077 - RNA, 19 nt, Homo sapiens
  misc_RNA (1)...(19): siRNA sense strand
ccacaacccucaucauaug

SEQ ID NO: 2136078 - RNA, 19 nt, Homo sapiens
  misc_RNA (1)...(19): siRNA sense strand
ggacuucgacuaaauguga

SEQ ID NO: 2136079 - RNA, 19 nt, Homo sapiens
  misc_RNA (1)...(19): siRNA sense strand
uuucacagcucuuucauaa

SEQ ID NO: 2136080 - RNA, 19 nt, Homo sapiens
  misc_RNA (1)...(19): siRNA sense strand
gugcaucuguucaccaaua

SEQ ID NO: 2136081 - RNA, 19 nt, Homo sapiens
  misc_RNA (1)...(19): siRNA sense strand
gaaagcaauugaccacugu

SEQ ID NO: 2136082 - RNA, 19 nt, Homo sapiens
  misc_RNA (1)...(19): siRNA sense strand
gagauauccuuguaauuuc

SEQ ID NO: 2136083 - RNA, 19 nt, Homo sapiens
  misc_RNA (1)...(19): siRNA sense strand
caaaugauguuaugugcau

SEQ ID NO: 2136084 - RNA, 19 nt, Homo sapiens
  misc_RNA (1)...(19): siRNA sense strand
acaugaagcuguuuguaaa

SEQ ID NO: 2136085 - RNA, 19 nt, Homo sapiens
  misc_RNA (1)...(19): siRNA sense strand
gaaaaugagugucaacaug

SEQ ID NO: 2136086 - RNA, 19 nt, Homo sapiens
  misc_RNA (1)...(19): siRNA sense strand
caugguauuugccaagaua

SEQ ID NO: 2136087 - RNA, 19 nt, Homo sapiens
  misc_RNA (1)...(19): siRNA sense strand
gaagaugcaaccuauguga

SEQ ID NO: 2136088 - RNA, 19 nt, Homo sapiens
  misc_RNA (1)...(19): siRNA sense strand
gaauauguguggcaauugg

SEQ ID NO: 2136089 - RNA, 19 nt, Homo sapiens
  misc_RNA (1)...(19): siRNA sense strand
ugaacgauccugaagauaa

SEQ ID NO: 2136090 - RNA, 19 nt, Homo sapiens
  misc_RNA (1)...(19): siRNA sense strand
ugaaugugaugagcaauuu

SEQ ID NO: 2136091 - RNA, 19 nt, Homo sapiens
  misc_RNA (1)...(19): siRNA sense strand
cagaugggcuggcaacaug

SEQ ID NO: 2136092 - RNA, 19 nt, Homo sapiens
  misc_RNA (1)...(19): siRNA sense strand
gggaugagcaagcauauga

SEQ ID NO: 2136093 - RNA, 19 nt, Homo sapiens
  misc_RNA (1)...(19): siRNA sense strand
gaauaaugcuacauguaag

SEQ ID NO: 2136094 - RNA, 19 nt, Homo sapiens
  misc_RNA (1)...(19): siRNA sense strand
guaagagcauucaaacauc

SEQ ID NO: 2136095 - RNA, 19 nt, Homo sapiens
  misc_RNA (1)...(19): siRNA sense strand
ggaaugcacacuguuaauu

SEQ ID NO: 2136096 - RNA, 19 nt, Homo sapiens
  misc_RNA (1)...(19): siRNA sense strand
gaagcuguuuguaaagaug

SEQ ID NO: 2136097 - RNA, 19 nt, Homo sapiens
  misc_RNA (1)...(19): siRNA sense strand
gaaagaauugcucagaaau

SEQ ID NO: 2136098 - RNA, 19 nt, Homo sapiens
  misc_RNA (1)...(19): siRNA sense strand
ccacugggacuucgacuaa

SEQ ID NO: 2136099 - RNA, 19 nt, Homo sapiens
  misc_RNA (1)...(19): siRNA sense strand
gcacugaagaugcaaccua

SEQ ID NO: 2136100 - RNA, 19 nt, Homo sapiens
  misc_RNA (1)...(19): siRNA sense strand
ucaacugucugaaugaaga

SEQ ID NO: 2136101 - RNA, 19 nt, Homo sapiens
  misc_RNA (1)...(19): siRNA sense strand
uaagagcauucaaacauca

SEQ ID NO: 2136102 - RNA, 19 nt, Homo sapiens
  misc_RNA (1)...(19): siRNA sense strand
gugguaaauuggacacuaa

SEQ ID NO: 2136103 - RNA, 19 nt, Homo sapiens
  misc_RNA (1)...(19): siRNA sense strand
gaagaagacagucaggaau

SEQ ID NO: 2136104 - RNA, 19 nt, Homo sapiens
  misc_RNA (1)...(19): siRNA sense strand
agaaauaauuggccagugu

SEQ ID NO: 2136105 - RNA, 19 nt, Homo sapiens
  misc_RNA (1)...(19): siRNA sense strand
aaaggaaugcacacuguua

SEQ ID NO: 2136106 - RNA, 19 nt, Homo sapiens
  misc_RNA (1)...(19): siRNA sense strand
caugguaaaugucuuagug

SEQ ID NO: 2136107 - RNA, 19 nt, Homo sapiens
  misc_RNA (1)...(19): siRNA sense strand
ggucaugguaaaugucuua

SEQ ID NO: 2136108 - RNA, 19 nt, Homo sapiens
  misc_RNA (1)...(19): siRNA sense strand
gaggaauaaugcuacaugu

SEQ ID NO: 2136109 - RNA, 19 nt, Homo sapiens
  misc_RNA (1)...(19): siRNA sense strand
gacuaaaugugacagugaa

SEQ ID NO: 2136110 - RNA, 19 nt, Homo sapiens
  misc_RNA (1)...(19): siRNA sense strand
guaagaaaugugagaaaga

SEQ ID NO: 2136111 - RNA, 19 nt, Homo sapiens
  misc_RNA (1)...(19): siRNA sense strand
gauuauccuugcagcugua

SEQ ID NO: 2136112 - RNA, 19 nt, Homo sapiens
  misc_RNA (1)...(19): siRNA sense strand
ggaagaauggcauccacaa

SEQ ID NO: 2136113 - RNA, 19 nt, Homo sapiens
  misc_RNA (1)...(19): siRNA sense strand
ggcaauugguggaagaaug

SEQ ID NO: 2136114 - RNA, 19 nt, Homo sapiens
  misc_RNA (1)...(19): siRNA sense strand
ccaggaaucucugaguuca

SEQ ID NO: 2136115 - RNA, 19 nt, Homo sapiens
  misc_RNA (1)...(19): siRNA sense strand
aagaagacagucaggaaua

SEQ ID NO: 2136116 - RNA, 19 nt, Homo sapiens
  misc_RNA (1)...(19): siRNA sense strand
acaaaucaaucgucauucu

SEQ ID NO: 2136117 - RNA, 19 nt, Homo sapiens
  misc_RNA (1)...(19): siRNA sense strand
uaaauuggacacuaacaga

SEQ ID NO: 2136118 - RNA, 19 nt, Homo sapiens
  misc_RNA (1)...(19): siRNA sense strand
ccaggaacuugaugcaugu

SEQ ID NO: 2136119 - RNA, 19 nt, Homo sapiens
  misc_RNA (1)...(19): siRNA sense strand
ucaggaauaucgguaucua

SEQ ID NO: 2136120 - RNA, 19 nt, Homo sapiens
  misc_RNA (1)...(19): siRNA sense strand
caucaacugucugaaugaa

SEQ ID NO: 2136121 - RNA, 19 nt, Homo sapiens
  misc_RNA (1)...(19): siRNA sense strand
gcagcuguauaucaggauu

SEQ ID NO: 2136122 - RNA, 19 nt, Homo sapiens
  misc_RNA (1)...(19): siRNA sense strand
caucuguucaccaauauuu

SEQ ID NO: 2136123 - RNA, 19 nt, Homo sapiens
  misc_RNA (1)...(19): siRNA sense strand
ggcaacauguaucuggaaa

SEQ ID NO: 2136124 - RNA, 19 nt, Homo sapiens
  misc_RNA (1)...(19): siRNA sense strand
gguuauugaugccuauuuc

SEQ ID NO: 2136125 - RNA, 19 nt, Homo sapiens
  misc_RNA (1)...(19): siRNA sense strand
gcaauugaccacuguaaac

SEQ ID NO: 2136126 - RNA, 19 nt, Homo sapiens
  misc_RNA (1)...(19): siRNA sense strand
auaaagguccugcucaauu

SEQ ID NO: 2136127 - RNA, 19 nt, Homo sapiens
  misc_RNA (1)...(19): siRNA sense strand
agaagacagucaggaauau

SEQ ID NO: 2136128 - RNA, 19 nt, Homo sapiens
  misc_RNA (1)...(19): siRNA sense strand
gcaguuguuugagugaaga

SEQ ID NO: 2136129 - RNA, 19 nt, Homo sapiens
  misc_RNA (1)...(19): siRNA sense strand
ucugugaggugucagcaaa

SEQ ID NO: 2136130 - RNA, 19 nt, Homo sapiens
  misc_RNA (1)...(19): siRNA sense strand
ugaagaagacagucaggaa

SEQ ID NO: 2136131 - RNA, 19 nt, Homo sapiens
  misc_RNA (1)...(19): siRNA sense strand
cacaacggaagaucaguua

SEQ ID NO: 2136132 - RNA, 19 nt, Homo sapiens
  misc_RNA (1)...(19): siRNA sense strand
aaaugagugucaacaugaa

SEQ ID NO: 2136133 - RNA, 19 nt, Homo sapiens
  misc_RNA (1)...(19): siRNA sense strand
agauaaagguccugcucaa

SEQ ID NO: 2136134 - RNA, 19 nt, Homo sapiens
  misc_RNA (1)...(19): siRNA sense strand
ugagcaagcauaugaaugu

SEQ ID NO: 2136135 - RNA, 19 nt, Homo sapiens
  misc_RNA (1)...(19): siRNA sense strand
gcaagugguccaucaccuu

SEQ ID NO: 2136136 - RNA, 19 nt, Homo sapiens
  misc_RNA (1)...(19): siRNA sense strand
cgacuaaaugugacaguga

SEQ ID NO: 2136137 - RNA, 19 nt, Homo sapiens
  misc_RNA (1)...(19): siRNA sense strand
gcaauugguggaagaaugg

SEQ ID NO: 2136138 - RNA, 19 nt, Homo sapiens
  misc_RNA (1)...(19): siRNA sense strand
ggaauaucgguaucuaugu

SEQ ID NO: 2136139 - RNA, 19 nt, Homo sapiens
  misc_RNA (1)...(19): siRNA sense strand
gagaaagauuauccuugca

SEQ ID NO: 2136140 - RNA, 19 nt, Homo sapiens
  misc_RNA (1)...(19): siRNA sense strand
gagcaagcauaugaaugug

SEQ ID NO: 2136141 - RNA, 19 nt, Homo sapiens
  misc_RNA (1)...(19): siRNA sense strand
aggaaagaauugcucagaa

SEQ ID NO: 2136142 - RNA, 19 nt, Homo sapiens
  misc_RNA (1)...(19): siRNA sense strand
gaaaagugccaagggguua

SEQ ID NO: 2136143 - RNA, 19 nt, Homo sapiens
  misc_RNA (1)...(19): siRNA sense strand
guucaccaauauuuacaga

SEQ ID NO: 2136144 - RNA, 19 nt, Homo sapiens
  misc_RNA (1)...(19): siRNA sense strand
uguaagagcauucaaacau

SEQ ID NO: 2136145 - RNA, 19 nt, Homo sapiens
  misc_RNA (1)...(19): siRNA sense strand
caacauguaucuggaaaau

SEQ ID NO: 2136146 - RNA, 19 nt, Homo sapiens
  misc_RNA (1)...(19): siRNA sense strand
ugugaacgauccugaagau

SEQ ID NO: 2136147 - RNA, 19 nt, Homo sapiens
  misc_RNA (1)...(19): siRNA sense strand
uugaauauguguggcaauu

SEQ ID NO: 2136148 - RNA, 19 nt, Homo sapiens
  misc_RNA (1)...(19): siRNA sense strand
uaaaaggaaugcacacugu

SEQ ID NO: 2136149 - RNA, 19 nt, Homo sapiens
  misc_RNA (1)...(19): siRNA sense strand
gcaguugcauuaauaaaag

SEQ ID NO: 2136150 - RNA, 19 nt, Homo sapiens
  misc_RNA (1)...(19): siRNA sense strand
gaaacugcagcaauauuac

SEQ ID NO: 2136151 - RNA, 19 nt, Homo sapiens
  misc_RNA (1)...(19): siRNA sense strand
cacugaagaugcaaccuau

SEQ ID NO: 2136152 - RNA, 19 nt, Homo sapiens
  misc_RNA (1)...(19): siRNA sense strand
gcuuggacuucuacagaga

SEQ ID NO: 2136153 - RNA, 19 nt, Homo sapiens
  misc_RNA (1)...(19): siRNA sense strand
gaaugaagaaugguguuuc

SEQ ID NO: 2136154 - RNA, 19 nt, Homo sapiens
  misc_RNA (1)...(19): siRNA sense strand
gcacacuguuaauucuaag

SEQ ID NO: 2136155 - RNA, 19 nt, Homo sapiens
  misc_RNA (1)...(19): siRNA sense strand
cagauuugcuuuguaagag

SEQ ID NO: 2136156 - RNA, 19 nt, Homo sapiens
  misc_RNA (1)...(19): siRNA sense strand
uuaguaccaugucagaaug

SEQ ID NO: 2136157 - RNA, 19 nt, Homo sapiens
  misc_RNA (1)...(19): siRNA sense strand
ccauuuacaggaaagaauu

SEQ ID NO: 2136158 - RNA, 19 nt, Homo sapiens
  misc_RNA (1)...(19): siRNA sense strand
gaugagcaagcauaugaau

SEQ ID NO: 2136159 - RNA, 19 nt, Homo sapiens
  misc_RNA (1)...(19): siRNA sense strand
ucaaccacaugucuguuuc

SEQ ID NO: 2136160 - RNA, 19 nt, Homo sapiens
  misc_RNA (1)...(19): siRNA sense strand
gcaaacugcacugaagaug

SEQ ID NO: 2136161 - RNA, 19 nt, Homo sapiens
  misc_RNA (1)...(19): siRNA sense strand
gauaaagguccugcucaau

SEQ ID NO: 2136162 - RNA, 19 nt, Homo sapiens
  misc_RNA (1)...(19): siRNA sense strand
gaagaaugguguuucaaua

SEQ ID NO: 2136163 - RNA, 19 nt, Homo sapiens
  misc_RNA (1)...(19): siRNA sense strand
ggaaagaauugcucagaaa

SEQ ID NO: 2136164 - RNA, 19 nt, Homo sapiens
  misc_RNA (1)...(19): siRNA sense strand
gcaaauggaugcaguuguu

SEQ ID NO: 2136165 - RNA, 19 nt, Homo sapiens
  misc_RNA (1)...(19): siRNA sense strand
ggagauauccuuguaauuu

SEQ ID NO: 2136166 - RNA, 19 nt, Homo sapiens
  misc_RNA (1)...(19): siRNA sense strand
caucauaugugguaaauug

SEQ ID NO: 2136167 - RNA, 19 nt, Homo sapiens
  misc_RNA (1)...(19): siRNA sense strand
ggaaacugcagcaauauua

SEQ ID NO: 2136168 - RNA, 19 nt, Homo sapiens
  misc_RNA (1)...(19): siRNA sense strand
ggaauaaugcuacauguaa

SEQ ID NO: 2136169 - RNA, 19 nt, Homo sapiens
  misc_RNA (1)...(19): siRNA sense strand
cuacagagauugcugguuu

SEQ ID NO: 2136170 - RNA, 19 nt, Homo sapiens
  misc_RNA (1)...(19): siRNA sense strand
ggagucaccuuccauggua

SEQ ID NO: 2136171 - RNA, 19 nt, Homo sapiens
  misc_RNA (1)...(19): siRNA sense strand
uaaagguccugcucaauuu

SEQ ID NO: 2136172 - RNA, 19 nt, Homo sapiens
  misc_RNA (1)...(19): siRNA sense strand
ucacagcucuuucauaaau

SEQ ID NO: 2136173 - RNA, 19 nt, Homo sapiens
  misc_RNA (1)...(19): siRNA sense strand
gaacgauccugaagauaau

SEQ ID NO: 2136174 - RNA, 19 nt, Homo sapiens
  misc_RNA (1)...(19): siRNA sense strand
gcagcaauauuacuucaaa

SEQ ID NO: 2136175 - RNA, 19 nt, Homo sapiens
  misc_RNA (1)...(19): siRNA sense strand
cauggaaacugcagcaaua

SEQ ID NO: 2136176 - RNA, 19 nt, Homo sapiens
  misc_RNA (1)...(19): siRNA sense strand
gaauaucgguaucuauguu

SEQ ID NO: 2136177 - RNA, 19 nt, Homo sapiens
  misc_RNA (1)...(19): siRNA sense strand
ccacaacccucaucauaug

SEQ ID NO: 2136178 - RNA, 19 nt, Homo sapiens
  misc_RNA (1)...(19): siRNA sense strand
ggacuucgacuaaauguga

SEQ ID NO: 2136179 - RNA, 19 nt, Homo sapiens
  misc_RNA (1)...(19): siRNA sense strand
uuucacagcucuuucauaa

SEQ ID NO: 2136180 - RNA, 19 nt, Homo sapiens
  misc_RNA (1)...(19): siRNA sense strand
gugcaucuguucaccaaua

SEQ ID NO: 2136181 - RNA, 19 nt, Homo sapiens
  misc_RNA (1)...(19): siRNA sense strand
gaaagcaauugaccacugu

SEQ ID NO: 2136182 - RNA, 19 nt, Homo sapiens
  misc_RNA (1)...(19): siRNA sense strand
gagauauccuuguaauuuc

SEQ ID NO: 2136183 - RNA, 19 nt, Homo sapiens
  misc_RNA (1)...(19): siRNA sense strand
caaaugauguuaugugcau

SEQ ID NO: 2136184 - RNA, 19 nt, Homo sapiens
  misc_RNA (1)...(19): siRNA sense strand
acaugaagcuguuuguaaa

SEQ ID NO: 2136185 - RNA, 19 nt, Homo sapiens
  misc_RNA (1)...(19): siRNA sense strand
gaaaaugagugucaacaug

SEQ ID NO: 2136186 - RNA, 19 nt, Homo sapiens
  misc_RNA (1)...(19): siRNA sense strand
caugguauuugccaagaua

SEQ ID NO: 2136187 - RNA, 19 nt, Homo sapiens
  misc_RNA (1)...(19): siRNA sense strand
gaagaugcaaccuauguga

SEQ ID NO: 2136188 - RNA, 19 nt, Homo sapiens
  misc_RNA (1)...(19): siRNA sense strand
gaauauguguggcaauugg

SEQ ID NO: 2136189 - RNA, 19 nt, Homo sapiens
  misc_RNA (1)...(19): siRNA sense strand
ugaacgauccugaagauaa

SEQ ID NO: 2136190 - RNA, 19 nt, Homo sapiens
  misc_RNA (1)...(19): siRNA sense strand
ugaaugugaugagcaauuu

SEQ ID NO: 2136191 - RNA, 19 nt, Homo sapiens
  misc_RNA (1)...(19): siRNA sense strand
cagaugggcuggcaacaug

SEQ ID NO: 2136192 - RNA, 19 nt, Homo sapiens
  misc_RNA (1)...(19): siRNA sense strand
gggaugagcaagcauauga

SEQ ID NO: 2136193 - RNA, 19 nt, Homo sapiens
  misc_RNA (1)...(19): siRNA sense strand
gaauaaugcuacauguaag

SEQ ID NO: 2136194 - RNA, 19 nt, Homo sapiens
  misc_RNA (1)...(19): siRNA sense strand
guaagagcauucaaacauc

SEQ ID NO: 2136195 - RNA, 19 nt, Homo sapiens
  misc_RNA (1)...(19): siRNA sense strand
ggaaugcacacuguuaauu

SEQ ID NO: 2136196 - RNA, 19 nt, Homo sapiens
  misc_RNA (1)...(19): siRNA sense strand
gaagcuguuuguaaagaug

SEQ ID NO: 2136197 - RNA, 19 nt, Homo sapiens
  misc_RNA (1)...(19): siRNA sense strand
gaaagaauugcucagaaau

SEQ ID NO: 2136198 - RNA, 19 nt, Homo sapiens
  misc_RNA (1)...(19): siRNA sense strand
ccacugggacuucgacuaa

SEQ ID NO: 2136199 - RNA, 19 nt, Homo sapiens
  misc_RNA (1)...(19): siRNA sense strand
gcacugaagaugcaaccua

SEQ ID NO: 2136200 - RNA, 19 nt, Homo sapiens
  misc_RNA (1)...(19): siRNA sense strand
ucaacugucugaaugaaga

SEQ ID NO: 2136201 - RNA, 19 nt, Homo sapiens
  misc_RNA (1)...(19): siRNA sense strand
uaagagcauucaaacauca

SEQ ID NO: 2136202 - RNA, 19 nt, Homo sapiens
  misc_RNA (1)...(19): siRNA sense strand
gugguaaauuggacacuaa

SEQ ID NO: 2136203 - RNA, 19 nt, Homo sapiens
  misc_RNA (1)...(19): siRNA sense strand
gaagaagacagucaggaau

SEQ ID NO: 2136204 - RNA, 19 nt, Homo sapiens
  misc_RNA (1)...(19): siRNA sense strand
agaaauaauuggccagugu

SEQ ID NO: 2136205 - RNA, 19 nt, Homo sapiens
  misc_RNA (1)...(19): siRNA sense strand
aaaggaaugcacacuguua

SEQ ID NO: 2136206 - RNA, 19 nt, Homo sapiens
  misc_RNA (1)...(19): siRNA sense strand
caugguaaaugucuuagug

SEQ ID NO: 2136207 - RNA, 19 nt, Homo sapiens
  misc_RNA (1)...(19): siRNA sense strand
ggucaugguaaaugucuua

SEQ ID NO: 2136208 - RNA, 19 nt, Homo sapiens
  misc_RNA (1)...(19): siRNA sense strand
gaggaauaaugcuacaugu

SEQ ID NO: 2136209 - RNA, 19 nt, Homo sapiens
  misc_RNA (1)...(19): siRNA sense strand
gacuaaaugugacagugaa

SEQ ID NO: 2136210 - RNA, 19 nt, Homo sapiens
  misc_RNA (1)...(19): siRNA sense strand
guaagaaaugugagaaaga

SEQ ID NO: 2136211 - RNA, 19 nt, Homo sapiens
  misc_RNA (1)...(19): siRNA sense strand
gauuauccuugcagcugua

SEQ ID NO: 2136212 - RNA, 19 nt, Homo sapiens
  misc_RNA (1)...(19): siRNA sense strand
ggaagaauggcauccacaa

SEQ ID NO: 2136213 - RNA, 19 nt, Homo sapiens
  misc_RNA (1)...(19): siRNA sense strand
ggcaauugguggaagaaug

SEQ ID NO: 2136214 - RNA, 19 nt, Homo sapiens
  misc_RNA (1)...(19): siRNA sense strand
ccaggaaucucugaguuca

SEQ ID NO: 2136215 - RNA, 19 nt, Homo sapiens
  misc_RNA (1)...(19): siRNA sense strand
aagaagacagucaggaaua

SEQ ID NO: 2136216 - RNA, 19 nt, Homo sapiens
  misc_RNA (1)...(19): siRNA sense strand
acaaaucaaucgucauucu

SEQ ID NO: 2136217 - RNA, 19 nt, Homo sapiens
  misc_RNA (1)...(19): siRNA sense strand
uaaauuggacacuaacaga

SEQ ID NO: 2136218 - RNA, 19 nt, Homo sapiens
  misc_RNA (1)...(19): siRNA sense strand
ccaggaacuugaugcaugu

SEQ ID NO: 2136219 - RNA, 19 nt, Homo sapiens
  misc_RNA (1)...(19): siRNA sense strand
ucaggaauaucgguaucua

SEQ ID NO: 2136220 - RNA, 19 nt, Homo sapiens
  misc_RNA (1)...(19): siRNA sense strand
caucaacugucugaaugaa

SEQ ID NO: 2136221 - RNA, 19 nt, Homo sapiens
  misc_RNA (1)...(19): siRNA sense strand
gcagcuguauaucaggauu

SEQ ID NO: 2136222 - RNA, 19 nt, Homo sapiens
  misc_RNA (1)...(19): siRNA sense strand
caucuguucaccaauauuu

SEQ ID NO: 2136223 - RNA, 19 nt, Homo sapiens
  misc_RNA (1)...(19): siRNA sense strand
ggcaacauguaucuggaaa

SEQ ID NO: 2136224 - RNA, 19 nt, Homo sapiens
  misc_RNA (1)...(19): siRNA sense strand
gguuauugaugccuauuuc

SEQ ID NO: 2136225 - RNA, 19 nt, Homo sapiens
  misc_RNA (1)...(19): siRNA sense strand
gcaauugaccacuguaaac

SEQ ID NO: 2136226 - RNA, 19 nt, Homo sapiens
  misc_RNA (1)...(19): siRNA sense strand
auaaagguccugcucaauu

SEQ ID NO: 2136227 - RNA, 19 nt, Homo sapiens
  misc_RNA (1)...(19): siRNA sense strand
agaagacagucaggaauau

SEQ ID NO: 2136228 - RNA, 19 nt, Homo sapiens
  misc_RNA (1)...(19): siRNA sense strand
gcaguuguuugagugaaga

SEQ ID NO: 2136229 - RNA, 19 nt, Homo sapiens
  misc_RNA (1)...(19): siRNA sense strand
ucugugaggugucagcaaa

SEQ ID NO: 2136230 - RNA, 19 nt, Homo sapiens
  misc_RNA (1)...(19): siRNA sense strand
ugaagaagacagucaggaa

SEQ ID NO: 2136231 - RNA, 19 nt, Homo sapiens
  misc_RNA (1)...(19): siRNA sense strand
cacaacggaagaucaguua

SEQ ID NO: 2136232 - RNA, 19 nt, Homo sapiens
  misc_RNA (1)...(19): siRNA sense strand
aaaugagugucaacaugaa

SEQ ID NO: 2136233 - RNA, 19 nt, Homo sapiens
  misc_RNA (1)...(19): siRNA sense strand
agauaaagguccugcucaa

SEQ ID NO: 2136234 - RNA, 19 nt, Homo sapiens
  misc_RNA (1)...(19): siRNA sense strand
ugagcaagcauaugaaugu

SEQ ID NO: 2136235 - RNA, 19 nt, Homo sapiens
  misc_RNA (1)...(19): siRNA sense strand
gcaagugguccaucaccuu

SEQ ID NO: 2136236 - RNA, 19 nt, Homo sapiens
  misc_RNA (1)...(19): siRNA sense strand
cgacuaaaugugacaguga

SEQ ID NO: 2136237 - RNA, 19 nt, Homo sapiens
  misc_RNA (1)...(19): siRNA sense strand
gcaauugguggaagaaugg

SEQ ID NO: 2136238 - RNA, 19 nt, Homo sapiens
  misc_RNA (1)...(19): siRNA sense strand
ggaauaucgguaucuaugu

SEQ ID NO: 2136239 - RNA, 19 nt, Homo sapiens
  misc_RNA (1)...(19): siRNA sense strand
gagaaagauuauccuugca

SEQ ID NO: 2136240 - RNA, 19 nt, Homo sapiens
  misc_RNA (1)...(19): siRNA sense strand
gagcaagcauaugaaugug

SEQ ID NO: 2136241 - RNA, 19 nt, Homo sapiens
  misc_RNA (1)...(19): siRNA sense strand
aggaaagaauugcucagaa

SEQ ID NO: 2136242 - RNA, 19 nt, Homo sapiens
  misc_RNA (1)...(19): siRNA sense strand
gaaaagugccaagggguua

SEQ ID NO: 2136243 - RNA, 19 nt, Homo sapiens
  misc_RNA (1)...(19): siRNA sense strand
guucaccaauauuuacaga

SEQ ID NO: 2136244 - RNA, 19 nt, Homo sapiens
  misc_RNA (1)...(19): siRNA sense strand
uguaagagcauucaaacau

SEQ ID NO: 2136245 - RNA, 19 nt, Homo sapiens
  misc_RNA (1)...(19): siRNA sense strand
caacauguaucuggaaaau

SEQ ID NO: 2136246 - RNA, 19 nt, Homo sapiens
  misc_RNA (1)...(19): siRNA sense strand
ugugaacgauccugaagau

SEQ ID NO: 2136247 - RNA, 19 nt, Homo sapiens
  misc_RNA (1)...(19): siRNA sense strand
uugaauauguguggcaauu

SEQ ID NO: 2136248 - RNA, 19 nt, Homo sapiens
  misc_RNA (1)...(19): siRNA sense strand
uaaaaggaaugcacacugu

SEQ ID NO: 2136249 - RNA, 19 nt, Homo sapiens
  misc_RNA (1)...(19): siRNA sense strand
gcaguugcauuaauaaaag

SEQ ID NO: 2136250 - RNA, 19 nt, Homo sapiens
  misc_RNA (1)...(19): siRNA sense strand
gaaacugcagcaauauuac

SEQ ID NO: 2136251 - RNA, 19 nt, Homo sapiens
  misc_RNA (1)...(19): siRNA sense strand
cacugaagaugcaaccuau

SEQ ID NO: 2136252 - RNA, 19 nt, Homo sapiens
  misc_RNA (1)...(19): siRNA sense strand
gcuuggacuucuacagaga

SEQ ID NO: 2136253 - RNA, 19 nt, Homo sapiens
  misc_RNA (1)...(19): siRNA sense strand
gaaugaagaaugguguuuc

SEQ ID NO: 2136254 - RNA, 19 nt, Homo sapiens
  misc_RNA (1)...(19): siRNA sense strand
gcacacuguuaauucuaag

SEQ ID NO: 2136255 - RNA, 19 nt, Homo sapiens
  misc_RNA (1)...(19): siRNA sense strand
cagauuugcuuuguaagag

SEQ ID NO: 2136256 - RNA, 19 nt, Homo sapiens
  misc_RNA (1)...(19): siRNA sense strand
uuaguaccaugucagaaug

SEQ ID NO: 2136257 - RNA, 19 nt, Homo sapiens
  misc_RNA (1)...(19): siRNA sense strand
ccauuuacaggaaagaauu

SEQ ID NO: 2136258 - RNA, 19 nt, Homo sapiens
  misc_RNA (1)...(19): siRNA sense strand
gaugagcaagcauaugaau

SEQ ID NO: 2136259 - RNA, 19 nt, Homo sapiens
  misc_RNA (1)...(19): siRNA sense strand
ucaaccacaugucuguuuc

SEQ ID NO: 2136260 - RNA, 19 nt, Homo sapiens
  misc_RNA (1)...(19): siRNA sense strand
gcaaacugcacugaagaug

SEQ ID NO: 2136261 - RNA, 19 nt, Homo sapiens
  misc_RNA (1)...(19): siRNA sense strand
gauaaagguccugcucaau

SEQ ID NO: 2136262 - RNA, 19 nt, Homo sapiens
  misc_RNA (1)...(19): siRNA sense strand
gagagaagcccuuugauug

SEQ ID NO: 2136263 - RNA, 19 nt, Homo sapiens
  misc_RNA (1)...(19): siRNA sense strand
gcagagagaagcccuuuga

SEQ ID NO: 2136264 - RNA, 19 nt, Homo sapiens
  misc_RNA (1)...(19): siRNA sense strand
gagaagggcugggaaugug

SEQ ID NO: 2136265 - RNA, 19 nt, Homo sapiens
  misc_RNA (1)...(19): siRNA sense strand
gaacaucauuuugcuugua

SEQ ID NO: 2136266 - RNA, 19 nt, Homo sapiens
  misc_RNA (1)...(19): siRNA sense strand
ggacaccuuucggcuuaaa

SEQ ID NO: 2136267 - RNA, 19 nt, Homo sapiens
  misc_RNA (1)...(19): siRNA sense strand
ggacugaaacccuaugagu

SEQ ID NO: 2136268 - RNA, 19 nt, Homo sapiens
  misc_RNA (1)...(19): siRNA sense strand
ccucugaccucaucaagca

SEQ ID NO: 2136269 - RNA, 19 nt, Homo sapiens
  misc_RNA (1)...(19): siRNA sense strand
gcucggcacugcagaagca

SEQ ID NO: 2136270 - RNA, 19 nt, Homo sapiens
  misc_RNA (1)...(19): siRNA sense strand
ggggacaccuuucggcuua

SEQ ID NO: 2136271 - RNA, 19 nt, Homo sapiens
  misc_RNA (1)...(19): siRNA sense strand
gaagaaugcaggccugagu

SEQ ID NO: 2136272 - RNA, 19 nt, Homo sapiens
  misc_RNA (1)...(19): siRNA sense strand
ggagaagggcugggaaugu

SEQ ID NO: 2136273 - RNA, 19 nt, Homo sapiens
  misc_RNA (1)...(19): siRNA sense strand
caucagaaacuucacacuu

SEQ ID NO: 2136274 - RNA, 19 nt, Homo sapiens
  misc_RNA (1)...(19): siRNA sense strand
guagggcccuggagaaugc

SEQ ID NO: 2136275 - RNA, 19 nt, Homo sapiens
  misc_RNA (1)...(19): siRNA sense strand
agagagaagcccuuugauu

SEQ ID NO: 2136276 - RNA, 19 nt, Homo sapiens
  misc_RNA (1)...(19): siRNA sense strand
aaacuucacacuucggaaa

SEQ ID NO: 2136277 - RNA, 19 nt, Homo sapiens
  misc_RNA (1)...(19): siRNA sense strand
gcccuuugauugcgaggaa

SEQ ID NO: 2136278 - RNA, 19 nt, Homo sapiens
  misc_RNA (1)...(19): siRNA sense strand
gagauggcguccacaagcu

SEQ ID NO: 2136279 - RNA, 19 nt, Homo sapiens
  misc_RNA (1)...(19): siRNA sense strand
gggcggucguucaaaguca

SEQ ID NO: 2136280 - RNA, 19 nt, Homo sapiens
  misc_RNA (1)...(19): siRNA sense strand
agagggagcccacagaauc

SEQ ID NO: 2136281 - RNA, 19 nt, Homo sapiens
  misc_RNA (1)...(19): siRNA sense strand
gagagggagcccacagaau

SEQ ID NO: 2136282 - RNA, 19 nt, Homo sapiens
  misc_RNA (1)...(19): siRNA sense strand
aucagaaacuucacacuuc

SEQ ID NO: 2136283 - RNA, 19 nt, Homo sapiens
  misc_RNA (1)...(19): siRNA sense strand
gcccauagaacaucauuuu

SEQ ID NO: 2136284 - RNA, 19 nt, Homo sapiens
  misc_RNA (1)...(19): siRNA sense strand
gaggagaagggcugggaau

SEQ ID NO: 2136285 - RNA, 19 nt, Homo sapiens
  misc_RNA (1)...(19): siRNA sense strand
ggguggcggaguuuaauga

SEQ ID NO: 2136286 - RNA, 19 nt, Homo sapiens
  misc_RNA (1)...(19): siRNA sense strand
ccuaugagugcgacaaaug

SEQ ID NO: 2136287 - RNA, 19 nt, Homo sapiens
  misc_RNA (1)...(19): siRNA sense strand
cagcagagagaagcccuuu

SEQ ID NO: 2136288 - RNA, 19 nt, Homo sapiens
  misc_RNA (1)...(19): siRNA sense strand
ggcuuaaaguccugcuugu

SEQ ID NO: 2136289 - RNA, 19 nt, Homo sapiens
  misc_RNA (1)...(19): siRNA sense strand
gaaucugcccauagaacau

SEQ ID NO: 2136290 - RNA, 19 nt, Homo sapiens
  misc_RNA (1)...(19): siRNA sense strand
gggacaccuuucggcuuaa

SEQ ID NO: 2136291 - RNA, 19 nt, Homo sapiens
  misc_RNA (1)...(19): siRNA sense strand
ggagaagagggagcagaug

SEQ ID NO: 2136292 - RNA, 19 nt, Homo sapiens
  misc_RNA (1)...(19): siRNA sense strand
gagggagcccacagaaucu

SEQ ID NO: 2136293 - RNA, 19 nt, Homo sapiens
  misc_RNA (1)...(19): siRNA sense strand
gcacgcacgcauccacagu

SEQ ID NO: 2136294 - RNA, 19 nt, Homo sapiens
  misc_RNA (1)...(19): siRNA sense strand
agucaacacccaccucuuc

SEQ ID NO: 2136295 - RNA, 19 nt, Homo sapiens
  misc_RNA (1)...(19): siRNA sense strand
cgacugcgggaaggucuuu

SEQ ID NO: 2136296 - RNA, 19 nt, Homo sapiens
  misc_RNA (1)...(19): siRNA sense strand
cauccacagcggacugaaa

SEQ ID NO: 2136297 - RNA, 19 nt, Homo sapiens
  misc_RNA (1)...(19): siRNA sense strand
cgacaucagaaacuucaca

SEQ ID NO: 2136298 - RNA, 19 nt, Homo sapiens
  misc_RNA (1)...(19): siRNA sense strand
accagagaguccacaguga

SEQ ID NO: 2136299 - RNA, 19 nt, Homo sapiens
  misc_RNA (1)...(19): siRNA sense strand
agagagggagcccacagaa

SEQ ID NO: 2136300 - RNA, 19 nt, Homo sapiens
  misc_RNA (1)...(19): siRNA sense strand
gcgcaaagcucaagaaguc

SEQ ID NO: 2136301 - RNA, 19 nt, Homo sapiens
  misc_RNA (1)...(19): siRNA sense strand
ggaaaaugcuuaucacaug

SEQ ID NO: 2136302 - RNA, 19 nt, Homo sapiens
  misc_RNA (1)...(19): siRNA sense strand
cuagauagcucuguuguca

SEQ ID NO: 2136303 - RNA, 19 nt, Homo sapiens
  misc_RNA (1)...(19): siRNA sense strand
ggaaaaccuuuacuaauca

SEQ ID NO: 2136304 - RNA, 19 nt, Homo sapiens
  misc_RNA (1)...(19): siRNA sense strand
gaggucugcauuacauuua

SEQ ID NO: 2136305 - RNA, 19 nt, Homo sapiens
  misc_RNA (1)...(19): siRNA sense strand
agaaugggaaggccaaaua

SEQ ID NO: 2136306 - RNA, 19 nt, Homo sapiens
  misc_RNA (1)...(19): siRNA sense strand
caauacaugcugcuucaaa

SEQ ID NO: 2136307 - RNA, 19 nt, Homo sapiens
  misc_RNA (1)...(19): siRNA sense strand
uaacugugacaaaggauuu

SEQ ID NO: 2136308 - RNA, 19 nt, Homo sapiens
  misc_RNA (1)...(19): siRNA sense strand
cauccagacucucaaguuc

SEQ ID NO: 2136309 - RNA, 19 nt, Homo sapiens
  misc_RNA (1)...(19): siRNA sense strand
gggaaggccaaauagauga

SEQ ID NO: 2136310 - RNA, 19 nt, Homo sapiens
  misc_RNA (1)...(19): siRNA sense strand
gagcguuugucgccgucua

SEQ ID NO: 2136311 - RNA, 19 nt, Homo sapiens
  misc_RNA (1)...(19): siRNA sense strand
agauagcucuguugucauc

SEQ ID NO: 2136312 - RNA, 19 nt, Homo sapiens
  misc_RNA (1)...(19): siRNA sense strand
ucaagaagucuguaaccuu

SEQ ID NO: 2136313 - RNA, 19 nt, Homo sapiens
  misc_RNA (1)...(19): siRNA sense strand
aacaauacaugcugcuuca

SEQ ID NO: 2136314 - RNA, 19 nt, Homo sapiens
  misc_RNA (1)...(19): siRNA sense strand
cagacucucaaguucauua

SEQ ID NO: 2136315 - RNA, 19 nt, Homo sapiens
  misc_RNA (1)...(19): siRNA sense strand
agaagucuguaaccuuguu

SEQ ID NO: 2136316 - RNA, 19 nt, Homo sapiens
  misc_RNA (1)...(19): siRNA sense strand
gaaugggaaggccaaauag

SEQ ID NO: 2136317 - RNA, 19 nt, Homo sapiens
  misc_RNA (1)...(19): siRNA sense strand
acacaagcccaaacugcua

SEQ ID NO: 2136318 - RNA, 19 nt, Homo sapiens
  misc_RNA (1)...(19): siRNA sense strand
aauagaugaucaccaguca

SEQ ID NO: 2136319 - RNA, 19 nt, Homo sapiens
  misc_RNA (1)...(19): siRNA sense strand
auauaacugugacaaagga

SEQ ID NO: 2136320 - RNA, 19 nt, Homo sapiens
  misc_RNA (1)...(19): siRNA sense strand
aggaaaaccuuuacuaauc

SEQ ID NO: 2136321 - RNA, 19 nt, Homo sapiens
  misc_RNA (1)...(19): siRNA sense strand
guuugucgccgucuagauu

SEQ ID NO: 2136322 - RNA, 19 nt, Homo sapiens
  misc_RNA (1)...(19): siRNA sense strand
guaagcggcaccucagaag

SEQ ID NO: 2136323 - RNA, 19 nt, Homo sapiens
  misc_RNA (1)...(19): siRNA sense strand
agaggucugcauuacauuu

SEQ ID NO: 2136324 - RNA, 19 nt, Homo sapiens
  misc_RNA (1)...(19): siRNA sense strand
ggaaggccaaauagaugau

SEQ ID NO: 2136325 - RNA, 19 nt, Homo sapiens
  misc_RNA (1)...(19): siRNA sense strand
gcaacaauacaugcugcuu

SEQ ID NO: 2136326 - RNA, 19 nt, Homo sapiens
  misc_RNA (1)...(19): siRNA sense strand
ccaccccaguucuaucaua

SEQ ID NO: 2136327 - RNA, 19 nt, Homo sapiens
  misc_RNA (1)...(19): siRNA sense strand
ucuuguugcuguugagaau

SEQ ID NO: 2136328 - RNA, 19 nt, Homo sapiens
  misc_RNA (1)...(19): siRNA sense strand
ugggaaggccaaauagaug

SEQ ID NO: 2136329 - RNA, 19 nt, Homo sapiens
  misc_RNA (1)...(19): siRNA sense strand
ggagaguggaaaaugcuua

SEQ ID NO: 2136330 - RNA, 19 nt, Homo sapiens
  misc_RNA (1)...(19): siRNA sense strand
gaagucuguaaccuuguug

SEQ ID NO: 2136331 - RNA, 19 nt, Homo sapiens
  misc_RNA (1)...(19): siRNA sense strand
aaaugcuuaucacauggaa

SEQ ID NO: 2136332 - RNA, 19 nt, Homo sapiens
  misc_RNA (1)...(19): siRNA sense strand
ggucugcauuacauuuacu

SEQ ID NO: 2136333 - RNA, 19 nt, Homo sapiens
  misc_RNA (1)...(19): siRNA sense strand
guucauuaacuguacaaca

SEQ ID NO: 2136334 - RNA, 19 nt, Homo sapiens
  misc_RNA (1)...(19): siRNA sense strand
ucauccagacucucaaguu

SEQ ID NO: 2136335 - RNA, 19 nt, Homo sapiens
  misc_RNA (1)...(19): siRNA sense strand
gcaaagaccugaacuaucc

SEQ ID NO: 2136336 - RNA, 19 nt, Homo sapiens
  misc_RNA (1)...(19): siRNA sense strand
ccaagaauguugcacguuu

SEQ ID NO: 2136337 - RNA, 19 nt, Homo sapiens
  misc_RNA (1)...(19): siRNA sense strand
gcacaaaacugauuucaau

SEQ ID NO: 2136338 - RNA, 19 nt, Homo sapiens
  misc_RNA (1)...(19): siRNA sense strand
gcuaauaaaucacuucauc

SEQ ID NO: 2136339 - RNA, 19 nt, Homo sapiens
  misc_RNA (1)...(19): siRNA sense strand
gagaaugacuguuuuauug

SEQ ID NO: 2136340 - RNA, 19 nt, Homo sapiens
  misc_RNA (1)...(19): siRNA sense strand
ggagguaugcccaugaaua

SEQ ID NO: 2136341 - RNA, 19 nt, Homo sapiens
  misc_RNA (1)...(19): siRNA sense strand
gcggugaagucauaauaaa

SEQ ID NO: 2136342 - RNA, 19 nt, Homo sapiens
  misc_RNA (1)...(19): siRNA sense strand
caaaguguauaucuugcua

SEQ ID NO: 2136343 - RNA, 19 nt, Homo sapiens
  misc_RNA (1)...(19): siRNA sense strand
guggagaugugcuguguuu

SEQ ID NO: 2136344 - RNA, 19 nt, Homo sapiens
  misc_RNA (1)...(19): siRNA sense strand
ccugaaggcugcacagaaa

SEQ ID NO: 2136345 - RNA, 19 nt, Homo sapiens
  misc_RNA (1)...(19): siRNA sense strand
gguaugcccaugaauauuu

SEQ ID NO: 2136346 - RNA, 19 nt, Homo sapiens
  misc_RNA (1)...(19): siRNA sense strand
ggagaaugguguugucauc

SEQ ID NO: 2136347 - RNA, 19 nt, Homo sapiens
  misc_RNA (1)...(19): siRNA sense strand
gagcugcuguugauauugu

SEQ ID NO: 2136348 - RNA, 19 nt, Homo sapiens
  misc_RNA (1)...(19): siRNA sense strand
aaaggcaaauaccaaagua

SEQ ID NO: 2136349 - RNA, 19 nt, Homo sapiens
  misc_RNA (1)...(19): siRNA sense strand
gagagaccgugucaucaga

SEQ ID NO: 2136350 - RNA, 19 nt, Homo sapiens
  misc_RNA (1)...(19): siRNA sense strand
gcccaugaauauuuccaua

SEQ ID NO: 2136351 - RNA, 19 nt, Homo sapiens
  misc_RNA (1)...(19): siRNA sense strand
ugacaaaguguauaucuug

SEQ ID NO: 2136352 - RNA, 19 nt, Homo sapiens
  misc_RNA (1)...(19): siRNA sense strand
gagguaugcccaugaauau

SEQ ID NO: 2136353 - RNA, 19 nt, Homo sapiens
  misc_RNA (1)...(19): siRNA sense strand
caucagaaaccaccaaguu

SEQ ID NO: 2136354 - RNA, 19 nt, Homo sapiens
  misc_RNA (1)...(19): siRNA sense strand
gcaagagaaugacuguuuu

SEQ ID NO: 2136355 - RNA, 19 nt, Homo sapiens
  misc_RNA (1)...(19): siRNA sense strand
uggagacucuuucuucuug

SEQ ID NO: 2136356 - RNA, 19 nt, Homo sapiens
  misc_RNA (1)...(19): siRNA sense strand
gcuuggagcugcuguugau

SEQ ID NO: 2136357 - RNA, 19 nt, Homo sapiens
  misc_RNA (1)...(19): siRNA sense strand
gagaugugcuguguuucuu

SEQ ID NO: 2136358 - RNA, 19 nt, Homo sapiens
  misc_RNA (1)...(19): siRNA sense strand
uguaagcguugcaagguaa

SEQ ID NO: 2136359 - RNA, 19 nt, Homo sapiens
  misc_RNA (1)...(19): siRNA sense strand
gaaggagguaugcccauga

SEQ ID NO: 2136360 - RNA, 19 nt, Homo sapiens
  misc_RNA (1)...(19): siRNA sense strand
gagaccgugucaucagaaa

SEQ ID NO: 2136361 - RNA, 19 nt, Homo sapiens
  misc_RNA (1)...(19): siRNA sense strand
caaagccgauucuaguucu

SEQ ID NO: 2136362 - RNA, 19 nt, Homo sapiens
  misc_RNA (1)...(19): siRNA sense strand
gggcuacaguuuguuguug

SEQ ID NO: 2136363 - RNA, 19 nt, Homo sapiens
  misc_RNA (1)...(19): siRNA sense strand
cagcaaagaccugaacuau

SEQ ID NO: 2136364 - RNA, 19 nt, Homo sapiens
  misc_RNA (1)...(19): siRNA sense strand
gcagcaaagaccugaacua

SEQ ID NO: 2136365 - RNA, 19 nt, Homo sapiens
  misc_RNA (1)...(19): siRNA sense strand
ucagacaguuuggugauug

SEQ ID NO: 2136366 - RNA, 19 nt, Homo sapiens
  misc_RNA (1)...(19): siRNA sense strand
cagcagaggucaggcuugu

SEQ ID NO: 2136367 - RNA, 19 nt, Homo sapiens
  misc_RNA (1)...(19): siRNA sense strand
cgcaagagaaugacuguuu

SEQ ID NO: 2136368 - RNA, 19 nt, Homo sapiens
  misc_RNA (1)...(19): siRNA sense strand
gaauuuaagaaccaguuug

SEQ ID NO: 2136369 - RNA, 19 nt, Homo sapiens
  misc_RNA (1)...(19): siRNA sense strand
ggcaaauaccaaaguaauu

SEQ ID NO: 2136370 - RNA, 19 nt, Homo sapiens
  misc_RNA (1)...(19): siRNA sense strand
caaccauuguaaauuggaa

SEQ ID NO: 2136371 - RNA, 19 nt, Homo sapiens
  misc_RNA (1)...(19): siRNA sense strand
gaaccaaaggcaaauacca

SEQ ID NO: 2136372 - RNA, 19 nt, Homo sapiens
  misc_RNA (1)...(19): siRNA sense strand
cuugucagcuugugggaaa

SEQ ID NO: 2136373 - RNA, 19 nt, Homo sapiens
  misc_RNA (1)...(19): siRNA sense strand
gaaccgaaagaaggaggua

SEQ ID NO: 2136374 - RNA, 19 nt, Homo sapiens
  misc_RNA (1)...(19): siRNA sense strand
ggagaugugcuguguuucu

SEQ ID NO: 2136375 - RNA, 19 nt, Homo sapiens
  misc_RNA (1)...(19): siRNA sense strand
gcagaggucaggcuuguac

SEQ ID NO: 2136376 - RNA, 19 nt, Homo sapiens
  misc_RNA (1)...(19): siRNA sense strand
caaaggcaaauaccaaagu

SEQ ID NO: 2136377 - RNA, 19 nt, Homo sapiens
  misc_RNA (1)...(19): siRNA sense strand
gaugugcuguguuucuucu

SEQ ID NO: 2136378 - RNA, 19 nt, Homo sapiens
  misc_RNA (1)...(19): siRNA sense strand
uggagcugcuguugauauu

SEQ ID NO: 2136379 - RNA, 19 nt, Homo sapiens
  misc_RNA (1)...(19): siRNA sense strand
guaugcccaugaauauuuc

SEQ ID NO: 2136380 - RNA, 19 nt, Homo sapiens
  misc_RNA (1)...(19): siRNA sense strand
cagacaguuuggugauuga

SEQ ID NO: 2136381 - RNA, 19 nt, Homo sapiens
  misc_RNA (1)...(19): siRNA sense strand
gaugacaaaguguauaucu

SEQ ID NO: 2136382 - RNA, 19 nt, Homo sapiens
  misc_RNA (1)...(19): siRNA sense strand
uagaagcacuuuuagauuc

SEQ ID NO: 2136383 - RNA, 19 nt, Homo sapiens
  misc_RNA (1)...(19): siRNA sense strand
gcagacgcaagcaaaauua

SEQ ID NO: 2136384 - RNA, 19 nt, Homo sapiens
  misc_RNA (1)...(19): siRNA sense strand
caaagaguaaugccaaucu

SEQ ID NO: 2136385 - RNA, 19 nt, Homo sapiens
  misc_RNA (1)...(19): siRNA sense strand
gccgugggcuacaguuugu

SEQ ID NO: 2136386 - RNA, 19 nt, Homo sapiens
  misc_RNA (1)...(19): siRNA sense strand
ggagagaccgugucaucag

SEQ ID NO: 2136387 - RNA, 19 nt, Homo sapiens
  misc_RNA (1)...(19): siRNA sense strand
gggagaaccgaaagaagga

SEQ ID NO: 2136388 - RNA, 19 nt, Homo sapiens
  misc_RNA (1)...(19): siRNA sense strand
caagaauguugcacguuuu

SEQ ID NO: 2136389 - RNA, 19 nt, Homo sapiens
  misc_RNA (1)...(19): siRNA sense strand
gaaugacuguuuuauugga

SEQ ID NO: 2136390 - RNA, 19 nt, Homo sapiens
  misc_RNA (1)...(19): siRNA sense strand
aaggagguaugcccaugaa

SEQ ID NO: 2136391 - RNA, 19 nt, Homo sapiens
  misc_RNA (1)...(19): siRNA sense strand
ucaaagccgauucuaguuc

SEQ ID NO: 2136392 - RNA, 19 nt, Homo sapiens
  misc_RNA (1)...(19): siRNA sense strand
gcuacaguuuguuguugga

SEQ ID NO: 2136393 - RNA, 19 nt, Homo sapiens
  misc_RNA (1)...(19): siRNA sense strand
aaagaguaaugccaaucug

SEQ ID NO: 2136394 - RNA, 19 nt, Homo sapiens
  misc_RNA (1)...(19): siRNA sense strand
gcucgcaaacccaagaaug

SEQ ID NO: 2136395 - RNA, 19 nt, Homo sapiens
  misc_RNA (1)...(19): siRNA sense strand
auccugcggugaagucaua

SEQ ID NO: 2136396 - RNA, 19 nt, Homo sapiens
  misc_RNA (1)...(19): siRNA sense strand
gauccugggagaaccgaaa

SEQ ID NO: 2136397 - RNA, 19 nt, Homo sapiens
  misc_RNA (1)...(19): siRNA sense strand
caagagaaugacuguuuua

SEQ ID NO: 2136398 - RNA, 19 nt, Homo sapiens
  misc_RNA (1)...(19): siRNA sense strand
gagacucuuucuucuuggu

SEQ ID NO: 2136399 - RNA, 19 nt, Homo sapiens
  misc_RNA (1)...(19): siRNA sense strand
uauuggagacucuuucuuc

SEQ ID NO: 2136400 - RNA, 19 nt, Homo sapiens
  misc_RNA (1)...(19): siRNA sense strand
aaguguauaucuugcuaug

SEQ ID NO: 2136401 - RNA, 19 nt, Homo sapiens
  misc_RNA (1)...(19): siRNA sense strand
gcuagaagcacuuuuagau

SEQ ID NO: 2136402 - RNA, 19 nt, Homo sapiens
  misc_RNA (1)...(19): siRNA sense strand
caguggagaugugcugugu

SEQ ID NO: 2136403 - RNA, 19 nt, Homo sapiens
  misc_RNA (1)...(19): siRNA sense strand
gucaaagaguaaugccaau

SEQ ID NO: 2136404 - RNA, 19 nt, Homo sapiens
  misc_RNA (1)...(19): siRNA sense strand
gaauguugcacguuuuauu

SEQ ID NO: 2136405 - RNA, 19 nt, Homo sapiens
  misc_RNA (1)...(19): siRNA sense strand
cuaccagccaugcaucaaa

SEQ ID NO: 2136406 - RNA, 19 nt, Homo sapiens
  misc_RNA (1)...(19): siRNA sense strand
cagcucuccucugcuagaa

SEQ ID NO: 2136407 - RNA, 19 nt, Homo sapiens
  misc_RNA (1)...(19): siRNA sense strand
aagguaauguugggagaga

SEQ ID NO: 2136408 - RNA, 19 nt, Homo sapiens
  misc_RNA (1)...(19): siRNA sense strand
gagcucuaguuggagaaug

SEQ ID NO: 2136409 - RNA, 19 nt, Homo sapiens
  misc_RNA (1)...(19): siRNA sense strand
ugugcuguguuucuucuga

SEQ ID NO: 2136410 - RNA, 19 nt, Homo sapiens
  misc_RNA (1)...(19): siRNA sense strand
cccaugaauauuuccauaa

SEQ ID NO: 2136411 - RNA, 19 nt, Homo sapiens
  misc_RNA (1)...(19): siRNA sense strand
gggagagaccgugucauca

SEQ ID NO: 2136412 - RNA, 19 nt, Homo sapiens
  misc_RNA (1)...(19): siRNA sense strand
uuguaagcguugcaaggua

SEQ ID NO: 2136413 - RNA, 19 nt, Homo sapiens
  misc_RNA (1)...(19): siRNA sense strand
cugcggugaagucauaaua

SEQ ID NO: 2136414 - RNA, 19 nt, Homo sapiens
  misc_RNA (1)...(19): siRNA sense strand
auucaaagccgauucuagu

SEQ ID NO: 2136415 - RNA, 19 nt, Homo sapiens
  misc_RNA (1)...(19): siRNA sense strand
aggcaaauaccaaaguaau

SEQ ID NO: 2136416 - RNA, 19 nt, Homo sapiens
  misc_RNA (1)...(19): siRNA sense strand
ucacuucauccgcaagaga

SEQ ID NO: 2136417 - RNA, 19 nt, Homo sapiens
  misc_RNA (1)...(19): siRNA sense strand
aaccaaaggcaaauaccaa

SEQ ID NO: 2136418 - RNA, 19 nt, Homo sapiens
  misc_RNA (1)...(19): siRNA sense strand
gacugcagacgcaagcaaa

SEQ ID NO: 2136419 - RNA, 19 nt, Homo sapiens
  misc_RNA (1)...(19): siRNA sense strand
gcuauggcuuuuaaauuca

SEQ ID NO: 2136420 - RNA, 19 nt, Homo sapiens
  misc_RNA (1)...(19): siRNA sense strand
caggaugacaaaguguaua

SEQ ID NO: 2136421 - RNA, 19 nt, Homo sapiens
  misc_RNA (1)...(19): siRNA sense strand
gagcgugaucgcccagugu

SEQ ID NO: 2136422 - RNA, 19 nt, Homo sapiens
  misc_RNA (1)...(19): siRNA sense strand
guuggagaaugguguuguc

SEQ ID NO: 2136423 - RNA, 19 nt, Homo sapiens
  misc_RNA (1)...(19): siRNA sense strand
caucaggguuccuauaaua

SEQ ID NO: 2136424 - RNA, 19 nt, Homo sapiens
  misc_RNA (1)...(19): siRNA sense strand
gaagauaucccuggaauuc

SEQ ID NO: 2136425 - RNA, 19 nt, Homo sapiens
  misc_RNA (1)...(19): siRNA sense strand
ucaaguaucugcacauaug

SEQ ID NO: 2136426 - RNA, 19 nt, Homo sapiens
  misc_RNA (1)...(19): siRNA sense strand
gcaaugccuucgccacuaa

SEQ ID NO: 2136427 - RNA, 19 nt, Homo sapiens
  misc_RNA (1)...(19): siRNA sense strand
gaagcgcuuucaugagaua

SEQ ID NO: 2136428 - RNA, 19 nt, Homo sapiens
  misc_RNA (1)...(19): siRNA sense strand
ggauauaacuucuccacau

SEQ ID NO: 2136429 - RNA, 19 nt, Homo sapiens
  misc_RNA (1)...(19): siRNA sense strand
cuaggaagcuuaacucugu

SEQ ID NO: 2136430 - RNA, 19 nt, Homo sapiens
  misc_RNA (1)...(19): siRNA sense strand
gagugaagaucucuggauu

SEQ ID NO: 2136431 - RNA, 19 nt, Homo sapiens
  misc_RNA (1)...(19): siRNA sense strand
gauauaacuucuccacauc

SEQ ID NO: 2136432 - RNA, 19 nt, Homo sapiens
  misc_RNA (1)...(19): siRNA sense strand
uggaagcgcuuucaugaga

SEQ ID NO: 2136433 - RNA, 19 nt, Homo sapiens
  misc_RNA (1)...(19): siRNA sense strand
gaccaaggccauauuauuc

SEQ ID NO: 2136434 - RNA, 19 nt, Homo sapiens
  misc_RNA (1)...(19): siRNA sense strand
gcuaaaggcuuccgagacu

SEQ ID NO: 2136435 - RNA, 19 nt, Homo sapiens
  misc_RNA (1)...(19): siRNA sense strand
gaagauagauaggaaucca

SEQ ID NO: 2136436 - RNA, 19 nt, Homo sapiens
  misc_RNA (1)...(19): siRNA sense strand
cggcauauuuggaaacuug

SEQ ID NO: 2136437 - RNA, 19 nt, Homo sapiens
  misc_RNA (1)...(19): siRNA sense strand
gaaggagugcaccugcuua

SEQ ID NO: 2136438 - RNA, 19 nt, Homo sapiens
  misc_RNA (1)...(19): siRNA sense strand
gcagauuacucgccugaag

SEQ ID NO: 2136439 - RNA, 19 nt, Homo sapiens
  misc_RNA (1)...(19): siRNA sense strand
gaugaccaaggccauauua

SEQ ID NO: 2136440 - RNA, 19 nt, Homo sapiens
  misc_RNA (1)...(19): siRNA sense strand
gugaagaucucuggauuag

SEQ ID NO: 2136441 - RNA, 19 nt, Homo sapiens
  misc_RNA (1)...(19): siRNA sense strand
acucugaccuuugaagaua

SEQ ID NO: 2136442 - RNA, 19 nt, Homo sapiens
  misc_RNA (1)...(19): siRNA sense strand
gcaaugagagugaagaucu

SEQ ID NO: 2136443 - RNA, 19 nt, Homo sapiens
  misc_RNA (1)...(19): siRNA sense strand
gauaggaauccauuugcua

SEQ ID NO: 2136444 - RNA, 19 nt, Homo sapiens
  misc_RNA (1)...(19): siRNA sense strand
gauaggcacugagaugauc

SEQ ID NO: 2136445 - RNA, 19 nt, Homo sapiens
  misc_RNA (1)...(19): siRNA sense strand
ugaccaaggccauauuauu

SEQ ID NO: 2136446 - RNA, 19 nt, Homo sapiens
  misc_RNA (1)...(19): siRNA sense strand
gcuuaacucugucaucauc

SEQ ID NO: 2136447 - RNA, 19 nt, Homo sapiens
  misc_RNA (1)...(19): siRNA sense strand
gcucaggccucacccucaa

SEQ ID NO: 2136448 - RNA, 19 nt, Homo sapiens
  misc_RNA (1)...(19): siRNA sense strand
caacagaauggguuuggaa

SEQ ID NO: 2136449 - RNA, 19 nt, Homo sapiens
  misc_RNA (1)...(19): siRNA sense strand
uaaagacuguggagacgau

SEQ ID NO: 2136450 - RNA, 19 nt, Homo sapiens
  misc_RNA (1)...(19): siRNA sense strand
gcgcauguuuccagcaaug

SEQ ID NO: 2136451 - RNA, 19 nt, Homo sapiens
  misc_RNA (1)...(19): siRNA sense strand
ugagacaaguuaucagcuu

SEQ ID NO: 2136452 - RNA, 19 nt, Homo sapiens
  misc_RNA (1)...(19): siRNA sense strand
ucucaaguaucugcacaua

SEQ ID NO: 2136453 - RNA, 19 nt, Homo sapiens
  misc_RNA (1)...(19): siRNA sense strand
cagcagaguuucuuugacu

SEQ ID NO: 2136454 - RNA, 19 nt, Homo sapiens
  misc_RNA (1)...(19): siRNA sense strand
gagugcacgucauccguaa

SEQ ID NO: 2136455 - RNA, 19 nt, Homo sapiens
  misc_RNA (1)...(19): siRNA sense strand
gagauaggcacugagauga

SEQ ID NO: 2136456 - RNA, 19 nt, Homo sapiens
  misc_RNA (1)...(19): siRNA sense strand
aauauuacauugccaugga

SEQ ID NO: 2136457 - RNA, 19 nt, Homo sapiens
  misc_RNA (1)...(19): siRNA sense strand
gaagcucaccaacaaugaa

SEQ ID NO: 2136458 - RNA, 19 nt, Homo sapiens
  misc_RNA (1)...(19): siRNA sense strand
ggaauccauuugcuaaagg

SEQ ID NO: 2136459 - RNA, 19 nt, Homo sapiens
  misc_RNA (1)...(19): siRNA sense strand
aagcuuaacucugucauca

SEQ ID NO: 2136460 - RNA, 19 nt, Homo sapiens
  misc_RNA (1)...(19): siRNA sense strand
ccugugcacuauauggaua

SEQ ID NO: 2136461 - RNA, 19 nt, Homo sapiens
  misc_RNA (1)...(19): siRNA sense strand
ccacuaaccagacccauca

SEQ ID NO: 2136462 - RNA, 19 nt, Homo sapiens
  misc_RNA (1)...(19): siRNA sense strand
gcuuauccaugcagauuuc

SEQ ID NO: 2136463 - RNA, 19 nt, Homo sapiens
  misc_RNA (1)...(19): siRNA sense strand
ccaaggccauauuauucuu

SEQ ID NO: 2136464 - RNA, 19 nt, Homo sapiens
  misc_RNA (1)...(19): siRNA sense strand
gucaucaucucaaguaucu

SEQ ID NO: 2136465 - RNA, 19 nt, Homo sapiens
  misc_RNA (1)...(19): siRNA sense strand
ggaagcgcuuucaugagau

SEQ ID NO: 2136466 - RNA, 19 nt, Homo sapiens
  misc_RNA (1)...(19): siRNA sense strand
uuacucgccugaagauaga

SEQ ID NO: 2136467 - RNA, 19 nt, Homo sapiens
  misc_RNA (1)...(19): siRNA sense strand
gauccucaccagcaauauu

SEQ ID NO: 2136468 - RNA, 19 nt, Homo sapiens
  misc_RNA (1)...(19): siRNA sense strand
ggaaggagugcaccugcuu

SEQ ID NO: 2136469 - RNA, 19 nt, Homo sapiens
  misc_RNA (1)...(19): siRNA sense strand
gcaccuccgugaacauguc

SEQ ID NO: 2136470 - RNA, 19 nt, Homo sapiens
  misc_RNA (1)...(19): siRNA sense strand
gcaacagaauggguuugga

SEQ ID NO: 2136471 - RNA, 19 nt, Homo sapiens
  misc_RNA (1)...(19): siRNA sense strand
gacgaucuuucucccauca

SEQ ID NO: 2136472 - RNA, 19 nt, Homo sapiens
  misc_RNA (1)...(19): siRNA sense strand
gccauauuauucuucauuc

SEQ ID NO: 2136473 - RNA, 19 nt, Homo sapiens
  misc_RNA (1)...(19): siRNA sense strand
ggacucugaccuuugaaga

SEQ ID NO: 2136474 - RNA, 19 nt, Homo sapiens
  misc_RNA (1)...(19): siRNA sense strand
aagccuugguggaaucaua

SEQ ID NO: 2136475 - RNA, 19 nt, Homo sapiens
  misc_RNA (1)...(19): siRNA sense strand
cagaaacugucuucacaac

SEQ ID NO: 2136476 - RNA, 19 nt, Homo sapiens
  misc_RNA (1)...(19): siRNA sense strand
gggagggaguaaaggcauu

SEQ ID NO: 2136477 - RNA, 19 nt, Homo sapiens
  misc_RNA (1)...(19): siRNA sense strand
ugagauaggcacugagaug

SEQ ID NO: 2136478 - RNA, 19 nt, Homo sapiens
  misc_RNA (1)...(19): siRNA sense strand
ugacggaucggcagauguu

SEQ ID NO: 2136479 - RNA, 19 nt, Homo sapiens
  misc_RNA (1)...(19): siRNA sense strand
gcuccaagguacugggaau

SEQ ID NO: 2136480 - RNA, 19 nt, Homo sapiens
  misc_RNA (1)...(19): siRNA sense strand
uacggacucugaccuuuga

SEQ ID NO: 2136481 - RNA, 19 nt, Homo sapiens
  misc_RNA (1)...(19): siRNA sense strand
ggccauauuauucuucauu

SEQ ID NO: 2136482 - RNA, 19 nt, Homo sapiens
  misc_RNA (1)...(19): siRNA sense strand
gccugaagauagauaggaa

SEQ ID NO: 2136483 - RNA, 19 nt, Homo sapiens
  misc_RNA (1)...(19): siRNA sense strand
caccaacaaugaacuggau

SEQ ID NO: 2136484 - RNA, 19 nt, Homo sapiens
  misc_RNA (1)...(19): siRNA sense strand
ccaugcagauuucgggaau

SEQ ID NO: 2136485 - RNA, 19 nt, Homo sapiens
  misc_RNA (1)...(19): siRNA sense strand
uccagaaacugucuucaca

SEQ ID NO: 2136486 - RNA, 19 nt, Homo sapiens
  misc_RNA (1)...(19): siRNA sense strand
acaacaggcucaccaacca

SEQ ID NO: 2136487 - RNA, 19 nt, Homo sapiens
  misc_RNA (1)...(19): siRNA sense strand
ccaucaggguuccuauaau

SEQ ID NO: 2136488 - RNA, 19 nt, Homo sapiens
  misc_RNA (1)...(19): siRNA sense strand
uaccacaguucgaaaugga

SEQ ID NO: 2136489 - RNA, 19 nt, Homo sapiens
  misc_RNA (1)...(19): siRNA sense strand
uugaagauaucccuggaau

SEQ ID NO: 2136490 - RNA, 19 nt, Homo sapiens
  misc_RNA (1)...(19): siRNA sense strand
ucuggaagcgcuuucauga

SEQ ID NO: 2136491 - RNA, 19 nt, Homo sapiens
  misc_RNA (1)...(19): siRNA sense strand
gauagauaggaauccauuu

SEQ ID NO: 2136492 - RNA, 19 nt, Homo sapiens
  misc_RNA (1)...(19): siRNA sense strand
cgucauccguaaagacugu

SEQ ID NO: 2136493 - RNA, 19 nt, Homo sapiens
  misc_RNA (1)...(19): siRNA sense strand
ggucagcagaguuucuuug

SEQ ID NO: 2136494 - RNA, 19 nt, Homo sapiens
  misc_RNA (1)...(19): siRNA sense strand
ccaucacccuccagcaaug

SEQ ID NO: 2136495 - RNA, 19 nt, Homo sapiens
  misc_RNA (1)...(19): siRNA sense strand
cagcuuauccaugcagauu

SEQ ID NO: 2136496 - RNA, 19 nt, Homo sapiens
  misc_RNA (1)...(19): siRNA sense strand
auaggaauccauuugcuaa

SEQ ID NO: 2136497 - RNA, 19 nt, Homo sapiens
  misc_RNA (1)...(19): siRNA sense strand
uagauccucaccagcaaua

SEQ ID NO: 2136498 - RNA, 19 nt, Homo sapiens
  misc_RNA (1)...(19): siRNA sense strand
caggguuccuauaauacuu

SEQ ID NO: 2136499 - RNA, 19 nt, Homo sapiens
  misc_RNA (1)...(19): siRNA sense strand
ccacagaccagcuuaucca

SEQ ID NO: 2136500 - RNA, 19 nt, Homo sapiens
  misc_RNA (1)...(19): siRNA sense strand
gcgaaaaggguucuucuga

SEQ ID NO: 2136501 - RNA, 19 nt, Homo sapiens
  misc_RNA (1)...(19): siRNA sense strand
gccucacccucaaccgaua

SEQ ID NO: 2136502 - RNA, 19 nt, Homo sapiens
  misc_RNA (1)...(19): siRNA sense strand
gaccaucacuacggacucu

SEQ ID NO: 2136503 - RNA, 19 nt, Homo sapiens
  misc_RNA (1)...(19): siRNA sense strand
aauggaugguggcagguaa

SEQ ID NO: 2136504 - RNA, 19 nt, Homo sapiens
  misc_RNA (1)...(19): siRNA sense strand
cccaucaggguuccuauaa

SEQ ID NO: 2136505 - RNA, 19 nt, Homo sapiens
  misc_RNA (1)...(19): siRNA sense strand
caugagauaggcacugaga

SEQ ID NO: 2136506 - RNA, 19 nt, Homo sapiens
  misc_RNA (1)...(19): siRNA sense strand
ggaugaccaaggccauauu

SEQ ID NO: 2136507 - RNA, 19 nt, Homo sapiens
  misc_RNA (1)...(19): siRNA sense strand
ccaacaaugaacuggauga

SEQ ID NO: 2136508 - RNA, 19 nt, Homo sapiens
  misc_RNA (1)...(19): siRNA sense strand
ucugucaucaucucaagua

SEQ ID NO: 2136509 - RNA, 19 nt, Homo sapiens
  misc_RNA (1)...(19): siRNA sense strand
cagauuacucgccugaaga

SEQ ID NO: 2136510 - RNA, 19 nt, Homo sapiens
  misc_RNA (1)...(19): siRNA sense strand
ccugaaaccggaacgaaug

SEQ ID NO: 2136511 - RNA, 19 nt, Homo sapiens
  misc_RNA (1)...(19): siRNA sense strand
auagauaggaauccauuug

SEQ ID NO: 2136512 - RNA, 19 nt, Homo sapiens
  misc_RNA (1)...(19): siRNA sense strand
cgauacagcacaucuuugg

SEQ ID NO: 2136513 - RNA, 19 nt, Homo sapiens
  misc_RNA (1)...(19): siRNA sense strand
acauugccauggauauugu

SEQ ID NO: 2136514 - RNA, 19 nt, Homo sapiens
  misc_RNA (1)...(19): siRNA sense strand
ccagaaacugucuucacaa

SEQ ID NO: 2136515 - RNA, 19 nt, Homo sapiens
  misc_RNA (1)...(19): siRNA sense strand
agugaagaucucuggauua

SEQ ID NO: 2136516 - RNA, 19 nt, Homo sapiens
  misc_RNA (1)...(19): siRNA sense strand
caagcaaggcaaugcaagu

SEQ ID NO: 2136517 - RNA, 19 nt, Homo sapiens
  misc_RNA (1)...(19): siRNA sense strand
gaagcuuaacucugucauc

SEQ ID NO: 2136518 - RNA, 19 nt, Homo sapiens
  misc_RNA (1)...(19): siRNA sense strand
ucaccagcaauauuacauu

SEQ ID NO: 2136519 - RNA, 19 nt, Homo sapiens
  misc_RNA (1)...(19): siRNA sense strand
guccauggguggcacugau

SEQ ID NO: 2136520 - RNA, 19 nt, Homo sapiens
  misc_RNA (1)...(19): siRNA sense strand
gccacucacccucaccuuu

SEQ ID NO: 2136521 - RNA, 19 nt, Homo sapiens
  misc_RNA (1)...(19): siRNA sense strand
uuacauugccauggauauu

SEQ ID NO: 2136522 - RNA, 19 nt, Homo sapiens
  misc_RNA (1)...(19): siRNA sense strand
caugacggaucggcagaug

SEQ ID NO: 2136523 - RNA, 19 nt, Homo sapiens
  misc_RNA (1)...(19): siRNA sense strand
gcacugagcuugucuuaaa

SEQ ID NO: 2136524 - RNA, 19 nt, Homo sapiens
  misc_RNA (1)...(19): siRNA sense strand
ucagaaagcuaacaacuua

SEQ ID NO: 2136525 - RNA, 19 nt, Homo sapiens
  misc_RNA (1)...(19): siRNA sense strand
gaaauuugcucccuuuaaa

SEQ ID NO: 2136526 - RNA, 19 nt, Homo sapiens
  misc_RNA (1)...(19): siRNA sense strand
gaaaugaucuguaacuuag

SEQ ID NO: 2136527 - RNA, 19 nt, Homo sapiens
  misc_RNA (1)...(19): siRNA sense strand
gcaaauaacuucaguagca

SEQ ID NO: 2136528 - RNA, 19 nt, Homo sapiens
  misc_RNA (1)...(19): siRNA sense strand
gaacaagauugcuuuaaug

SEQ ID NO: 2136529 - RNA, 19 nt, Homo sapiens
  misc_RNA (1)...(19): siRNA sense strand
gacaaaggaugcacuauuu

SEQ ID NO: 2136530 - RNA, 19 nt, Homo sapiens
  misc_RNA (1)...(19): siRNA sense strand
gaaaguugcuccuccacua

SEQ ID NO: 2136531 - RNA, 19 nt, Homo sapiens
  misc_RNA (1)...(19): siRNA sense strand
gcaagaccauuucauguuu

SEQ ID NO: 2136532 - RNA, 19 nt, Homo sapiens
  misc_RNA (1)...(19): siRNA sense strand
gcaagaaggugcuaagaau

SEQ ID NO: 2136533 - RNA, 19 nt, Homo sapiens
  misc_RNA (1)...(19): siRNA sense strand
gaagagaguuaauaaggaa

SEQ ID NO: 2136534 - RNA, 19 nt, Homo sapiens
  misc_RNA (1)...(19): siRNA sense strand
ggaaaugaucuguaacuua

SEQ ID NO: 2136535 - RNA, 19 nt, Homo sapiens
  misc_RNA (1)...(19): siRNA sense strand
gaauuucgaugucagguaa

SEQ ID NO: 2136536 - RNA, 19 nt, Homo sapiens
  misc_RNA (1)...(19): siRNA sense strand
gaccuuaucuuaccucuga

SEQ ID NO: 2136537 - RNA, 19 nt, Homo sapiens
  misc_RNA (1)...(19): siRNA sense strand
cuacuaaccuucauucaaa

SEQ ID NO: 2136538 - RNA, 19 nt, Homo sapiens
  misc_RNA (1)...(19): siRNA sense strand
gaagauccuuuaccuuuau

SEQ ID NO: 2136539 - RNA, 19 nt, Homo sapiens
  misc_RNA (1)...(19): siRNA sense strand
gaagauagcacaaguguag

SEQ ID NO: 2136540 - RNA, 19 nt, Homo sapiens
  misc_RNA (1)...(19): siRNA sense strand
ugaaaugacuccugaagaa

SEQ ID NO: 2136541 - RNA, 19 nt, Homo sapiens
  misc_RNA (1)...(19): siRNA sense strand
caagauugcuuuaaugaug

SEQ ID NO: 2136542 - RNA, 19 nt, Homo sapiens
  misc_RNA (1)...(19): siRNA sense strand
uaucagagaugggaaauuu

SEQ ID NO: 2136543 - RNA, 19 nt, Homo sapiens
  misc_RNA (1)...(19): siRNA sense strand
gaagagauuucagaaguug

SEQ ID NO: 2136544 - RNA, 19 nt, Homo sapiens
  misc_RNA (1)...(19): siRNA sense strand
ucaagaagguagugaaauu

SEQ ID NO: 2136545 - RNA, 19 nt, Homo sapiens
  misc_RNA (1)...(19): siRNA sense strand
gaagaagcauccauugugu

SEQ ID NO: 2136546 - RNA, 19 nt, Homo sapiens
  misc_RNA (1)...(19): siRNA sense strand
gaaaugaugcccugucuga

SEQ ID NO: 2136547 - RNA, 19 nt, Homo sapiens
  misc_RNA (1)...(19): siRNA sense strand
cgaaauugcucaagaacuu

SEQ ID NO: 2136548 - RNA, 19 nt, Homo sapiens
  misc_RNA (1)...(19): siRNA sense strand
gcuaauacuucuucaaaug

SEQ ID NO: 2136549 - RNA, 19 nt, Homo sapiens
  misc_RNA (1)...(19): siRNA sense strand
gaucacaacuaccaaugaa

SEQ ID NO: 2136550 - RNA, 19 nt, Homo sapiens
  misc_RNA (1)...(19): siRNA sense strand
gaugggaaauuuaucugua

SEQ ID NO: 2136551 - RNA, 19 nt, Homo sapiens
  misc_RNA (1)...(19): siRNA sense strand
gaacacagcagagaauauu

SEQ ID NO: 2136552 - RNA, 19 nt, Homo sapiens
  misc_RNA (1)...(19): siRNA sense strand
guaagugacuguucucgaa

SEQ ID NO: 2136553 - RNA, 19 nt, Homo sapiens
  misc_RNA (1)...(19): siRNA sense strand
uagcaaagcuguguucuga

SEQ ID NO: 2136554 - RNA, 19 nt, Homo sapiens
  misc_RNA (1)...(19): siRNA sense strand
caacucagcucccuuacug

SEQ ID NO: 2136555 - RNA, 19 nt, Homo sapiens
  misc_RNA (1)...(19): siRNA sense strand
aaacagugcuucuaagaga

SEQ ID NO: 2136556 - RNA, 19 nt, Homo sapiens
  misc_RNA (1)...(19): siRNA sense strand
ggacagccuucucuucuug

SEQ ID NO: 2136557 - RNA, 19 nt, Homo sapiens
  misc_RNA (1)...(19): siRNA sense strand
gaucuaugcuuccuucaga

SEQ ID NO: 2136558 - RNA, 19 nt, Homo sapiens
  misc_RNA (1)...(19): siRNA sense strand
uaaagcaacuucaggaaau

SEQ ID NO: 2136559 - RNA, 19 nt, Homo sapiens
  misc_RNA (1)...(19): siRNA sense strand
ugaaauggaugaacuaaca

SEQ ID NO: 2136560 - RNA, 19 nt, Homo sapiens
  misc_RNA (1)...(19): siRNA sense strand
ggaaacgucugagcaagaa

SEQ ID NO: 2136561 - RNA, 19 nt, Homo sapiens
  misc_RNA (1)...(19): siRNA sense strand
ggaagcauguauauucuau

SEQ ID NO: 2136562 - RNA, 19 nt, Homo sapiens
  misc_RNA (1)...(19): siRNA sense strand
cagagaauauugagaaaga

SEQ ID NO: 2136563 - RNA, 19 nt, Homo sapiens
  misc_RNA (1)...(19): siRNA sense strand
ucaauacacuccagaaaug

SEQ ID NO: 2136564 - RNA, 19 nt, Homo sapiens
  misc_RNA (1)...(19): siRNA sense strand
gccagacacuccuagaaua

SEQ ID NO: 2136565 - RNA, 19 nt, Homo sapiens
  misc_RNA (1)...(19): siRNA sense strand
caacugagugaauuucuua

SEQ ID NO: 2136566 - RNA, 19 nt, Homo sapiens
  misc_RNA (1)...(19): siRNA sense strand
ggauguacuucaguuguua

SEQ ID NO: 2136567 - RNA, 19 nt, Homo sapiens
  misc_RNA (1)...(19): siRNA sense strand
uuacagaccuuaucgaugu

SEQ ID NO: 2136568 - RNA, 19 nt, Homo sapiens
  misc_RNA (1)...(19): siRNA sense strand
gaaaggagcaucaagucuu

SEQ ID NO: 2136569 - RNA, 19 nt, Homo sapiens
  misc_RNA (1)...(19): siRNA sense strand
cagaagauccuuuaccuuu

SEQ ID NO: 2136570 - RNA, 19 nt, Homo sapiens
  misc_RNA (1)...(19): siRNA sense strand
uaaaucaacugcagauauc

SEQ ID NO: 2136571 - RNA, 19 nt, Homo sapiens
  misc_RNA (1)...(19): siRNA sense strand
agaagauccuuuaccuuua

SEQ ID NO: 2136572 - RNA, 19 nt, Homo sapiens
  misc_RNA (1)...(19): siRNA sense strand
acauaaggcucauuugauu

SEQ ID NO: 2136573 - RNA, 19 nt, Homo sapiens
  misc_RNA (1)...(19): siRNA sense strand
caaauguaauuccaacuug

SEQ ID NO: 2136574 - RNA, 19 nt, Homo sapiens
  misc_RNA (1)...(19): siRNA sense strand
ugaaguagcuguguccauu

SEQ ID NO: 2136575 - RNA, 19 nt, Homo sapiens
  misc_RNA (1)...(19): siRNA sense strand
gaaguugauugcaaagaug

SEQ ID NO: 2136576 - RNA, 19 nt, Homo sapiens
  misc_RNA (1)...(19): siRNA sense strand
caaaggaugcacuauuuaa

SEQ ID NO: 2136577 - RNA, 19 nt, Homo sapiens
  misc_RNA (1)...(19): siRNA sense strand
aaacuuaccuugucugucu

SEQ ID NO: 2136578 - RNA, 19 nt, Homo sapiens
  misc_RNA (1)...(19): siRNA sense strand
gagcaaugauaauucaaga

SEQ ID NO: 2136579 - RNA, 19 nt, Homo sapiens
  misc_RNA (1)...(19): siRNA sense strand
uaaauggccugcaauuauc

SEQ ID NO: 2136580 - RNA, 19 nt, Homo sapiens
  misc_RNA (1)...(19): siRNA sense strand
gaauguggagauaauguua

SEQ ID NO: 2136581 - RNA, 19 nt, Homo sapiens
  misc_RNA (1)...(19): siRNA sense strand
guauagaacuguguguaaa

SEQ ID NO: 2136582 - RNA, 19 nt, Homo sapiens
  misc_RNA (1)...(19): siRNA sense strand
gaaaguuaaucgaagagau

SEQ ID NO: 2136583 - RNA, 19 nt, Homo sapiens
  misc_RNA (1)...(19): siRNA sense strand
ggauaaggauaaagugaau

SEQ ID NO: 2136584 - RNA, 19 nt, Homo sapiens
  misc_RNA (1)...(19): siRNA sense strand
caaagauugugcagauuga

SEQ ID NO: 2136585 - RNA, 19 nt, Homo sapiens
  misc_RNA (1)...(19): siRNA sense strand
cagcagauguggaaaggaa

SEQ ID NO: 2136586 - RNA, 19 nt, Homo sapiens
  misc_RNA (1)...(19): siRNA sense strand
cacaagauccagucauuua

SEQ ID NO: 2136587 - RNA, 19 nt, Homo sapiens
  misc_RNA (1)...(19): siRNA sense strand
gaaagugucauaaauccaa

SEQ ID NO: 2136588 - RNA, 19 nt, Homo sapiens
  misc_RNA (1)...(19): siRNA sense strand
gaagugaugcuugggauaa

SEQ ID NO: 2136589 - RNA, 19 nt, Homo sapiens
  misc_RNA (1)...(19): siRNA sense strand
caucaagucuuuagagcaa

SEQ ID NO: 2136590 - RNA, 19 nt, Homo sapiens
  misc_RNA (1)...(19): siRNA sense strand
gcugugagcuguuacuugu

SEQ ID NO: 2136591 - RNA, 19 nt, Homo sapiens
  misc_RNA (1)...(19): siRNA sense strand
ggucccaucuuguuggaua

SEQ ID NO: 2136592 - RNA, 19 nt, Homo sapiens
  misc_RNA (1)...(19): siRNA sense strand
gacaugcucagaaacauua

SEQ ID NO: 2136593 - RNA, 19 nt, Homo sapiens
  misc_RNA (1)...(19): siRNA sense strand
guagagacccaagcuaaua

SEQ ID NO: 2136594 - RNA, 19 nt, Homo sapiens
  misc_RNA (1)...(19): siRNA sense strand
gaacaacagcuacaguuuc

SEQ ID NO: 2136595 - RNA, 19 nt, Homo sapiens
  misc_RNA (1)...(19): siRNA sense strand
agaagaagaugguguauac

SEQ ID NO: 2136596 - RNA, 19 nt, Homo sapiens
  misc_RNA (1)...(19): siRNA sense strand
gugaagaaacugaaacuaa

SEQ ID NO: 2136597 - RNA, 19 nt, Homo sapiens
  misc_RNA (1)...(19): siRNA sense strand
uguagcagcuugccuguuu

SEQ ID NO: 2136598 - RNA, 19 nt, Homo sapiens
  misc_RNA (1)...(19): siRNA sense strand
aaacaguucugccuuugaa

SEQ ID NO: 2136599 - RNA, 19 nt, Homo sapiens
  misc_RNA (1)...(19): siRNA sense strand
gaaagaaagaucuaugcuu

SEQ ID NO: 2136600 - RNA, 19 nt, Homo sapiens
  misc_RNA (1)...(19): siRNA sense strand
cagcuucagugcagugaua

SEQ ID NO: 2136601 - RNA, 19 nt, Homo sapiens
  misc_RNA (1)...(19): siRNA sense strand
caacaccgaaaucuucuua

SEQ ID NO: 2136602 - RNA, 19 nt, Homo sapiens
  misc_RNA (1)...(19): siRNA sense strand
gcagauuuguaacccagua

SEQ ID NO: 2136603 - RNA, 19 nt, Homo sapiens
  misc_RNA (1)...(19): siRNA sense strand
gcaaagauugugcagauug

SEQ ID NO: 2136604 - RNA, 19 nt, Homo sapiens
  misc_RNA (1)...(19): siRNA sense strand
uuagaaggcuuacagaaau

SEQ ID NO: 2136605 - RNA, 19 nt, Homo sapiens
  misc_RNA (1)...(19): siRNA sense strand
gaucuggugugacuaacuu

SEQ ID NO: 2136606 - RNA, 19 nt, Homo sapiens
  misc_RNA (1)...(19): siRNA sense strand
guacugcgcuugggaacuu

SEQ ID NO: 2136607 - RNA, 19 nt, Homo sapiens
  misc_RNA (1)...(19): siRNA sense strand
gcagauaucacaguuauuc

SEQ ID NO: 2136608 - RNA, 19 nt, Homo sapiens
  misc_RNA (1)...(19): siRNA sense strand
ggaaacagugcuucuaaga

SEQ ID NO: 2136609 - RNA, 19 nt, Homo sapiens
  misc_RNA (1)...(19): siRNA sense strand
gaacuucuacagaguaaug

SEQ ID NO: 2136610 - RNA, 19 nt, Homo sapiens
  misc_RNA (1)...(19): siRNA sense strand
cuaaauggccugcaauuau

SEQ ID NO: 2136611 - RNA, 19 nt, Homo sapiens
  misc_RNA (1)...(19): siRNA sense strand
gcagaaaguaguucaaugu

SEQ ID NO: 2136612 - RNA, 19 nt, Homo sapiens
  misc_RNA (1)...(19): siRNA sense strand
gaaaguauugcauuuguuc

SEQ ID NO: 2136613 - RNA, 19 nt, Homo sapiens
  misc_RNA (1)...(19): siRNA sense strand
gaaguagcuguguccauua

SEQ ID NO: 2136614 - RNA, 19 nt, Homo sapiens
  misc_RNA (1)...(19): siRNA sense strand
gcauaaagauaaugaagac

SEQ ID NO: 2136615 - RNA, 19 nt, Homo sapiens
  misc_RNA (1)...(19): siRNA sense strand
gcuguuacuuguauugaaa

SEQ ID NO: 2136616 - RNA, 19 nt, Homo sapiens
  misc_RNA (1)...(19): siRNA sense strand
ccagaaauaugaugaagag

SEQ ID NO: 2136617 - RNA, 19 nt, Homo sapiens
  misc_RNA (1)...(19): siRNA sense strand
ccuagaauaugcagagaaa

SEQ ID NO: 2136618 - RNA, 19 nt, Homo sapiens
  misc_RNA (1)...(19): siRNA sense strand
gacaaagaccauccgaaua

SEQ ID NO: 2136619 - RNA, 19 nt, Homo sapiens
  misc_RNA (1)...(19): siRNA sense strand
ggaggagagucaagugaga

SEQ ID NO: 2136620 - RNA, 19 nt, Homo sapiens
  misc_RNA (1)...(19): siRNA sense strand
caaugggacucauagcaaa

SEQ ID NO: 2136621 - RNA, 19 nt, Homo sapiens
  misc_RNA (1)...(19): siRNA sense strand
caagaagguagugaaauua

SEQ ID NO: 2136622 - RNA, 19 nt, Homo sapiens
  misc_RNA (1)...(19): siRNA sense strand
cugaugaucuggaaguuaa

SEQ ID NO: 2136623 - RNA, 19 nt, Homo sapiens
  misc_RNA (1)...(19): siRNA sense strand
aaacauggaugacgaaaug

SEQ ID NO: 2136624 - RNA, 19 nt, Homo sapiens
  misc_RNA (1)...(19): siRNA sense strand
gaaaugagcauccucuaug

SEQ ID NO: 2136625 - RNA, 19 nt, Homo sapiens
  misc_RNA (1)...(19): siRNA sense strand
ggucgaagcuguggagaaa

SEQ ID NO: 2136626 - RNA, 19 nt, Homo sapiens
  misc_RNA (1)...(19): siRNA sense strand
gcaaagccguggaggaaau

SEQ ID NO: 2136627 - RNA, 19 nt, Homo sapiens
  misc_RNA (1)...(19): siRNA sense strand
gaaaacaccuucuaaucuu

SEQ ID NO: 2136628 - RNA, 19 nt, Homo sapiens
  misc_RNA (1)...(19): siRNA sense strand
gcacuuggcugcagaacag

SEQ ID NO: 2136629 - RNA, 19 nt, Homo sapiens
  misc_RNA (1)...(19): siRNA sense strand
gaggaggaauuacaggaaa

SEQ ID NO: 2136630 - RNA, 19 nt, Homo sapiens
  misc_RNA (1)...(19): siRNA sense strand
gcaagaagagguacaggaa

SEQ ID NO: 2136631 - RNA, 19 nt, Homo sapiens
  misc_RNA (1)...(19): siRNA sense strand
gcaauaugauggauaaacu

SEQ ID NO: 2136632 - RNA, 19 nt, Homo sapiens
  misc_RNA (1)...(19): siRNA sense strand
ucacaguuauuaaggauga

SEQ ID NO: 2136633 - RNA, 19 nt, Homo sapiens
  misc_RNA (1)...(19): siRNA sense strand
caaaacaacucuugauuag

SEQ ID NO: 2136634 - RNA, 19 nt, Homo sapiens
  misc_RNA (1)...(19): siRNA sense strand
gcagaggcaagaagaggua

SEQ ID NO: 2136635 - RNA, 19 nt, Homo sapiens
  misc_RNA (1)...(19): siRNA sense strand
aaaccaggauggcauuuca

SEQ ID NO: 2136636 - RNA, 19 nt, Homo sapiens
  misc_RNA (1)...(19): siRNA sense strand
aaacaacugggaaucauga

SEQ ID NO: 2136637 - RNA, 19 nt, Homo sapiens
  misc_RNA (1)...(19): siRNA sense strand
uggaggaaauugugaauac

SEQ ID NO: 2136638 - RNA, 19 nt, Homo sapiens
  misc_RNA (1)...(19): siRNA sense strand
ggaaucaugacaaauugga

SEQ ID NO: 2136639 - RNA, 19 nt, Homo sapiens
  misc_RNA (1)...(19): siRNA sense strand
aagaagagguacaggaagu

SEQ ID NO: 2136640 - RNA, 19 nt, Homo sapiens
  misc_RNA (1)...(19): siRNA sense strand
caacugggaaucaugacaa

SEQ ID NO: 2136641 - RNA, 19 nt, Homo sapiens
  misc_RNA (1)...(19): siRNA sense strand
aaaggauuaugauggaaug

SEQ ID NO: 2136642 - RNA, 19 nt, Homo sapiens
  misc_RNA (1)...(19): siRNA sense strand
caccaggacaugcagauuu

SEQ ID NO: 2136643 - RNA, 19 nt, Homo sapiens
  misc_RNA (1)...(19): siRNA sense strand
ccaaaggauuaugauggaa

SEQ ID NO: 2136644 - RNA, 19 nt, Homo sapiens
  misc_RNA (1)...(19): siRNA sense strand
gaacaaaacaacucuugau

SEQ ID NO: 2136645 - RNA, 19 nt, Homo sapiens
  misc_RNA (1)...(19): siRNA sense strand
ugggaaucaugacaaauug

SEQ ID NO: 2136646 - RNA, 19 nt, Homo sapiens
  misc_RNA (1)...(19): siRNA sense strand
ugaaaugagcauccucuau

SEQ ID NO: 2136647 - RNA, 19 nt, Homo sapiens
  misc_RNA (1)...(19): siRNA sense strand
caugacaaauuggaaagau

SEQ ID NO: 2136648 - RNA, 19 nt, Homo sapiens
  misc_RNA (1)...(19): siRNA sense strand
caaaggauuaugauggaau

SEQ ID NO: 2136649 - RNA, 19 nt, Homo sapiens
  misc_RNA (1)...(19): siRNA sense strand
aauuauaccuuuccuaagc

SEQ ID NO: 2136650 - RNA, 19 nt, Homo sapiens
  misc_RNA (1)...(19): siRNA sense strand
ggaggaaauugugaauacu

SEQ ID NO: 2136651 - RNA, 19 nt, Homo sapiens
  misc_RNA (1)...(19): siRNA sense strand
aagcaaagccguggaggaa

SEQ ID NO: 2136652 - RNA, 19 nt, Homo sapiens
  misc_RNA (1)...(19): siRNA sense strand
uuggcaauaugauggauaa

SEQ ID NO: 2136653 - RNA, 19 nt, Homo sapiens
  misc_RNA (1)...(19): siRNA sense strand
gaggaaauugugaauacug

SEQ ID NO: 2136654 - RNA, 19 nt, Homo sapiens
  misc_RNA (1)...(19): siRNA sense strand
aaaugagcauccucuaugg

SEQ ID NO: 2136655 - RNA, 19 nt, Homo sapiens
  misc_RNA (1)...(19): siRNA sense strand
uggauaaacuggcuaacac

SEQ ID NO: 2136656 - RNA, 19 nt, Homo sapiens
  misc_RNA (1)...(19): siRNA sense strand
ggaaaccaggauggcauuu

SEQ ID NO: 2136657 - RNA, 19 nt, Homo sapiens
  misc_RNA (1)...(19): siRNA sense strand
ccacagagagaaggucgaa

SEQ ID NO: 2136658 - RNA, 19 nt, Homo sapiens
  misc_RNA (1)...(19): siRNA sense strand
cugggaaucaugacaaauu

SEQ ID NO: 2136659 - RNA, 19 nt, Homo sapiens
  misc_RNA (1)...(19): siRNA sense strand
aaacacaucaggccacucu

SEQ ID NO: 2136660 - RNA, 19 nt, Homo sapiens
  misc_RNA (1)...(19): siRNA sense strand
ggaaugccacagagagaag

SEQ ID NO: 2136661 - RNA, 19 nt, Homo sapiens
  misc_RNA (1)...(19): siRNA sense strand
gaaucaugacaaauuggaa

SEQ ID NO: 2136662 - RNA, 19 nt, Homo sapiens
  misc_RNA (1)...(19): siRNA sense strand
gcgcaugguccacagaauc

SEQ ID NO: 2136663 - RNA, 19 nt, Homo sapiens
  misc_RNA (1)...(19): siRNA sense strand
ugucacaguuauuaaggau

SEQ ID NO: 2136664 - RNA, 19 nt, Homo sapiens
  misc_RNA (1)...(19): siRNA sense strand
acacaucaggccacucuug

SEQ ID NO: 2136665 - RNA, 19 nt, Homo sapiens
  misc_RNA (1)...(19): siRNA sense strand
caaaacaacugggaaucau

SEQ ID NO: 2136666 - RNA, 19 nt, Homo sapiens
  misc_RNA (1)...(19): siRNA sense strand
caaagccguggaggaaauu

SEQ ID NO: 2136667 - RNA, 19 nt, Homo sapiens
  misc_RNA (1)...(19): siRNA sense strand
acacaucgcccaggaagca

SEQ ID NO: 2136668 - RNA, 19 nt, Homo sapiens
  misc_RNA (1)...(19): siRNA sense strand
gagaacaaaacaacucuug

SEQ ID NO: 2136669 - RNA, 19 nt, Homo sapiens
  misc_RNA (1)...(19): siRNA sense strand
ggacaugcagauuuuauuc

SEQ ID NO: 2136670 - RNA, 19 nt, Homo sapiens
  misc_RNA (1)...(19): siRNA sense strand
uaugauggaaugccacaga

SEQ ID NO: 2136671 - RNA, 19 nt, Homo sapiens
  misc_RNA (1)...(19): siRNA sense strand
gcaaaacaacugggaauca

SEQ ID NO: 2136672 - RNA, 19 nt, Homo sapiens
  misc_RNA (1)...(19): siRNA sense strand
guggaggaaauugugaaua

SEQ ID NO: 2136673 - RNA, 19 nt, Homo sapiens
  misc_RNA (1)...(19): siRNA sense strand
gaaagaaagaaaacaccuu

SEQ ID NO: 2136674 - RNA, 19 nt, Homo sapiens
  misc_RNA (1)...(19): siRNA sense strand
guccacagaauccaaagga

SEQ ID NO: 2136675 - RNA, 19 nt, Homo sapiens
  misc_RNA (1)...(19): siRNA sense strand
gugucacaguuauuaagga

SEQ ID NO: 2136676 - RNA, 19 nt, Homo sapiens
  misc_RNA (1)...(19): siRNA sense strand
augacgaaaugaagagaga

SEQ ID NO: 2136677 - RNA, 19 nt, Homo sapiens
  misc_RNA (1)...(19): siRNA sense strand
gggagcugcugucuauagc

SEQ ID NO: 2136678 - RNA, 19 nt, Homo sapiens
  misc_RNA (1)...(19): siRNA sense strand
caauaugauggauaaacug

SEQ ID NO: 2136679 - RNA, 19 nt, Homo sapiens
  misc_RNA (1)...(19): siRNA sense strand
aaacaccuucuaaucuugu

SEQ ID NO: 2136680 - RNA, 19 nt, Homo sapiens
  misc_RNA (1)...(19): siRNA sense strand
agaggaggaauuacaggaa

SEQ ID NO: 2136681 - RNA, 19 nt, Homo sapiens
  misc_RNA (1)...(19): siRNA sense strand
gaagaaagcuaggaauaga

SEQ ID NO: 2136682 - RNA, 19 nt, Homo sapiens
  misc_RNA (1)...(19): siRNA sense strand
gaauagaguucauuucaga

SEQ ID NO: 2136683 - RNA, 19 nt, Homo sapiens
  misc_RNA (1)...(19): siRNA sense strand
gaaccucccuguccucauu

SEQ ID NO: 2136684 - RNA, 19 nt, Homo sapiens
  misc_RNA (1)...(19): siRNA sense strand
gagaguucaugguauaaua

SEQ ID NO: 2136685 - RNA, 19 nt, Homo sapiens
  misc_RNA (1)...(19): siRNA sense strand
gaagaacaguuuguaaaug

SEQ ID NO: 2136686 - RNA, 19 nt, Homo sapiens
  misc_RNA (1)...(19): siRNA sense strand
gaaagaaauuggaccacuu

SEQ ID NO: 2136687 - RNA, 19 nt, Homo sapiens
  misc_RNA (1)...(19): siRNA sense strand
ucuaaugccuugaaucaua

SEQ ID NO: 2136688 - RNA, 19 nt, Homo sapiens
  misc_RNA (1)...(19): siRNA sense strand
ccaauaucauucccucuua

SEQ ID NO: 2136689 - RNA, 19 nt, Homo sapiens
  misc_RNA (1)...(19): siRNA sense strand
acaauguucuucccaauaa

SEQ ID NO: 2136690 - RNA, 19 nt, Homo sapiens
  misc_RNA (1)...(19): siRNA sense strand
gaagauacaauguugaaug

SEQ ID NO: 2136691 - RNA, 19 nt, Homo sapiens
  misc_RNA (1)...(19): siRNA sense strand
caacaacacucggguacaa

SEQ ID NO: 2136692 - RNA, 19 nt, Homo sapiens
  misc_RNA (1)...(19): siRNA sense strand
gcacaugauuauuacaaug

SEQ ID NO: 2136693 - RNA, 19 nt, Homo sapiens
  misc_RNA (1)...(19): siRNA sense strand
gaacagagcagcuaaucuc

SEQ ID NO: 2136694 - RNA, 19 nt, Homo sapiens
  misc_RNA (1)...(19): siRNA sense strand
agagaggacuuuaaacuga

SEQ ID NO: 2136695 - RNA, 19 nt, Homo sapiens
  misc_RNA (1)...(19): siRNA sense strand
gaaaugagagcaucaacug

SEQ ID NO: 2136696 - RNA, 19 nt, Homo sapiens
  misc_RNA (1)...(19): siRNA sense strand
ggaaggauuaaaugcauua

SEQ ID NO: 2136697 - RNA, 19 nt, Homo sapiens
  misc_RNA (1)...(19): siRNA sense strand
gaucuaaugccuugaauca

SEQ ID NO: 2136698 - RNA, 19 nt, Homo sapiens
  misc_RNA (1)...(19): siRNA sense strand
aaaccaaccuggagaguuc

SEQ ID NO: 2136699 - RNA, 19 nt, Homo sapiens
  misc_RNA (1)...(19): siRNA sense strand
gagaggacuuuaaacugaa

SEQ ID NO: 2136700 - RNA, 19 nt, Homo sapiens
  misc_RNA (1)...(19): siRNA sense strand
guggagcacaugauuauua

SEQ ID NO: 2136701 - RNA, 19 nt, Homo sapiens
  misc_RNA (1)...(19): siRNA sense strand
agagaaugcugcuuaucua

SEQ ID NO: 2136702 - RNA, 19 nt, Homo sapiens
  misc_RNA (1)...(19): siRNA sense strand
caagaagaacaguuuguaa

SEQ ID NO: 2136703 - RNA, 19 nt, Homo sapiens
  misc_RNA (1)...(19): siRNA sense strand
gaauggcccuucaggaucu

SEQ ID NO: 2136704 - RNA, 19 nt, Homo sapiens
  misc_RNA (1)...(19): siRNA sense strand
caacacucggguacaauua

SEQ ID NO: 2136705 - RNA, 19 nt, Homo sapiens
  misc_RNA (1)...(19): siRNA sense strand
ugacggcacuggauguuau

SEQ ID NO: 2136706 - RNA, 19 nt, Homo sapiens
  misc_RNA (1)...(19): siRNA sense strand
cacaagagaaugcugcuua

SEQ ID NO: 2136707 - RNA, 19 nt, Homo sapiens
  misc_RNA (1)...(19): siRNA sense strand
acacucggguacaauuaua

SEQ ID NO: 2136708 - RNA, 19 nt, Homo sapiens
  misc_RNA (1)...(19): siRNA sense strand
ggaagaaagcuaggaauag

SEQ ID NO: 2136709 - RNA, 19 nt, Homo sapiens
  misc_RNA (1)...(19): siRNA sense strand
ggaaucagggcaaaggaaa

SEQ ID NO: 2136710 - RNA, 19 nt, Homo sapiens
  misc_RNA (1)...(19): siRNA sense strand
ggaauagaguucauuucag

SEQ ID NO: 2136711 - RNA, 19 nt, Homo sapiens
  misc_RNA (1)...(19): siRNA sense strand
gaauagugauggagaacag

SEQ ID NO: 2136712 - RNA, 19 nt, Homo sapiens
  misc_RNA (1)...(19): siRNA sense strand
ccaauaagagccuauggaa

SEQ ID NO: 2136713 - RNA, 19 nt, Homo sapiens
  misc_RNA (1)...(19): siRNA sense strand
cugcugugcuggccuauaa

SEQ ID NO: 2136714 - RNA, 19 nt, Homo sapiens
  misc_RNA (1)...(19): siRNA sense strand
ggugcacaguggaaauuaa

SEQ ID NO: 2136715 - RNA, 19 nt, Homo sapiens
  misc_RNA (1)...(19): siRNA sense strand
gaaauacuauggaaaagca

SEQ ID NO: 2136716 - RNA, 19 nt, Homo sapiens
  misc_RNA (1)...(19): siRNA sense strand
guuuguaaaugcaguagaa

SEQ ID NO: 2136717 - RNA, 19 nt, Homo sapiens
  misc_RNA (1)...(19): siRNA sense strand
gagcacaugauuauuacaa

SEQ ID NO: 2136718 - RNA, 19 nt, Homo sapiens
  misc_RNA (1)...(19): siRNA sense strand
caauaucauucccucuuau

SEQ ID NO: 2136719 - RNA, 19 nt, Homo sapiens
  misc_RNA (1)...(19): siRNA sense strand
cuggagaguucaugguaua

SEQ ID NO: 2136720 - RNA, 19 nt, Homo sapiens
  misc_RNA (1)...(19): siRNA sense strand
ggaaaagccuauccucuca

SEQ ID NO: 2136721 - RNA, 19 nt, Homo sapiens
  misc_RNA (1)...(19): siRNA sense strand
ggaaucagagaggacuuua

SEQ ID NO: 2136722 - RNA, 19 nt, Homo sapiens
  misc_RNA (1)...(19): siRNA sense strand
caagagaagggaagccaaa

SEQ ID NO: 2136723 - RNA, 19 nt, Homo sapiens
  misc_RNA (1)...(19): siRNA sense strand
aaucagagaggacuuuaaa

SEQ ID NO: 2136724 - RNA, 19 nt, Homo sapiens
  misc_RNA (1)...(19): siRNA sense strand
ccaaagcucuggcaaugac

SEQ ID NO: 2136725 - RNA, 19 nt, Homo sapiens
  misc_RNA (1)...(19): siRNA sense strand
aauaagagccuauggaaag

SEQ ID NO: 2136726 - RNA, 19 nt, Homo sapiens
  misc_RNA (1)...(19): siRNA sense strand
gggaaggauuaaaugcauu

SEQ ID NO: 2136727 - RNA, 19 nt, Homo sapiens
  misc_RNA (1)...(19): siRNA sense strand
caucucauucugcuucuua

SEQ ID NO: 2136728 - RNA, 19 nt, Homo sapiens
  misc_RNA (1)...(19): siRNA sense strand
agauauggcugaacaugau

SEQ ID NO: 2136729 - RNA, 19 nt, Homo sapiens
  misc_RNA (1)...(19): siRNA sense strand
gaaugcugcuuaucuacca

SEQ ID NO: 2136730 - RNA, 19 nt, Homo sapiens
  misc_RNA (1)...(19): siRNA sense strand
uggaaagccuauauggaaa

SEQ ID NO: 2136731 - RNA, 19 nt, Homo sapiens
  misc_RNA (1)...(19): siRNA sense strand
gaaaccaaccuggagaguu

SEQ ID NO: 2136732 - RNA, 19 nt, Homo sapiens
  misc_RNA (1)...(19): siRNA sense strand
gaguucauuucagaagaua

SEQ ID NO: 2136733 - RNA, 19 nt, Homo sapiens
  misc_RNA (1)...(19): siRNA sense strand
acaagagaaugcugcuuau

SEQ ID NO: 2136734 - RNA, 19 nt, Homo sapiens
  misc_RNA (1)...(19): siRNA sense strand
ucaagaagaacaguuugua

SEQ ID NO: 2136735 - RNA, 19 nt, Homo sapiens
  misc_RNA (1)...(19): siRNA sense strand
uggaagaaagcuaggaaua

SEQ ID NO: 2136736 - RNA, 19 nt, Homo sapiens
  misc_RNA (1)...(19): siRNA sense strand
cagaagauacaauguugaa

SEQ ID NO: 2136737 - RNA, 19 nt, Homo sapiens
  misc_RNA (1)...(19): siRNA sense strand
ccacuuguguuguuuugua

SEQ ID NO: 2136738 - RNA, 19 nt, Homo sapiens
  misc_RNA (1)...(19): siRNA sense strand
gaaucagagaggacuuuaa

SEQ ID NO: 2136739 - RNA, 19 nt, Homo sapiens
  misc_RNA (1)...(19): siRNA sense strand
caauaagagccuauggaaa

SEQ ID NO: 2136740 - RNA, 19 nt, Homo sapiens
  misc_RNA (1)...(19): siRNA sense strand
uaccagauauggcugaaca

SEQ ID NO: 2136741 - RNA, 19 nt, Homo sapiens
  misc_RNA (1)...(19): siRNA sense strand
agaagauggugguggcaaa

SEQ ID NO: 2136742 - RNA, 19 nt, Homo sapiens
  misc_RNA (1)...(19): siRNA sense strand
acaggaagcucaguucuac

SEQ ID NO: 2136743 - RNA, 19 nt, Homo sapiens
  misc_RNA (1)...(19): siRNA sense strand
ggguacaauuauaagcuaa

SEQ ID NO: 2136744 - RNA, 19 nt, Homo sapiens
  misc_RNA (1)...(19): siRNA sense strand
cggguacaauuauaagcua

SEQ ID NO: 2136745 - RNA, 19 nt, Homo sapiens
  misc_RNA (1)...(19): siRNA sense strand
aagaacaguuuguaaaugc

SEQ ID NO: 2136746 - RNA, 19 nt, Homo sapiens
  misc_RNA (1)...(19): siRNA sense strand
caucaacugcugccacuug

SEQ ID NO: 2136747 - RNA, 19 nt, Homo sapiens
  misc_RNA (1)...(19): siRNA sense strand
aagauacaauguugaaugg

SEQ ID NO: 2136748 - RNA, 19 nt, Homo sapiens
  misc_RNA (1)...(19): siRNA sense strand
caacugcugccacuugugu

SEQ ID NO: 2136749 - RNA, 19 nt, Homo sapiens
  misc_RNA (1)...(19): siRNA sense strand
caggaauagugauggagaa

SEQ ID NO: 2136750 - RNA, 19 nt, Homo sapiens
  misc_RNA (1)...(19): siRNA sense strand
aaagaaauuggaccacuug

SEQ ID NO: 2136751 - RNA, 19 nt, Homo sapiens
  misc_RNA (1)...(19): siRNA sense strand
cagaguuacuggaaggaau

SEQ ID NO: 2136752 - RNA, 19 nt, Homo sapiens
  misc_RNA (1)...(19): siRNA sense strand
ggaaaagcaucucauucug

SEQ ID NO: 2136753 - RNA, 19 nt, Homo sapiens
  misc_RNA (1)...(19): siRNA sense strand
cagagcagcuaaucucacu

SEQ ID NO: 2136754 - RNA, 19 nt, Homo sapiens
  misc_RNA (1)...(19): siRNA sense strand
uagaguucauuucagaaga

SEQ ID NO: 2136755 - RNA, 19 nt, Homo sapiens
  misc_RNA (1)...(19): siRNA sense strand
gagaacagagcagcuaauc

SEQ ID NO: 2136756 - RNA, 19 nt, Homo sapiens
  misc_RNA (1)...(19): siRNA sense strand
gugcuggccuauaacaauc

SEQ ID NO: 2136757 - RNA, 19 nt, Homo sapiens
  misc_RNA (1)...(19): siRNA sense strand
ggauuaaaugcauuagaug

SEQ ID NO: 2136758 - RNA, 19 nt, Homo sapiens
  misc_RNA (1)...(19): siRNA sense strand
gcccacccaucacaagaga

SEQ ID NO: 2136759 - RNA, 19 nt, Homo sapiens
  misc_RNA (1)...(19): siRNA sense strand
cagauauggcugaacauga

SEQ ID NO: 2136760 - RNA, 19 nt, Homo sapiens
  misc_RNA (1)...(19): siRNA sense strand
uucagaagauacaauguug

SEQ ID NO: 2136761 - RNA, 19 nt, Homo sapiens
  misc_RNA (1)...(19): siRNA sense strand
uacaauguucuucccaaua

SEQ ID NO: 2136762 - RNA, 19 nt, Homo sapiens
  misc_RNA (1)...(19): siRNA sense strand
gugcacaguggaaauuaaa

SEQ ID NO: 2136763 - RNA, 19 nt, Homo sapiens
  misc_RNA (1)...(19): siRNA sense strand
aaagguggagcacaugauu

SEQ ID NO: 2136764 - RNA, 19 nt, Homo sapiens
  misc_RNA (1)...(19): siRNA sense strand
gggaaccccugcagaagaa

SEQ ID NO: 2136765 - RNA, 19 nt, Homo sapiens
  misc_RNA (1)...(19): siRNA sense strand
gacuuuaaacugaaacuuc

SEQ ID NO: 2136766 - RNA, 19 nt, Homo sapiens
  misc_RNA (1)...(19): siRNA sense strand
ucagagaggacuuuaaacu

SEQ ID NO: 2136767 - RNA, 19 nt, Homo sapiens
  misc_RNA (1)...(19): siRNA sense strand
uuacaauguucuucccaau

SEQ ID NO: 2136768 - RNA, 19 nt, Homo sapiens
  misc_RNA (1)...(19): siRNA sense strand
ggagaacagagcagcuaau

SEQ ID NO: 2136769 - RNA, 19 nt, Homo sapiens
  misc_RNA (1)...(19): siRNA sense strand
agaggacuuuaaacugaaa

SEQ ID NO: 2136770 - RNA, 19 nt, Homo sapiens
  misc_RNA (1)...(19): siRNA sense strand
cagagaggacuuuaaacug

SEQ ID NO: 2136771 - RNA, 19 nt, Homo sapiens
  misc_RNA (1)...(19): siRNA sense strand
cuaaugccuugaaucauac

SEQ ID NO: 2136772 - RNA, 19 nt, Homo sapiens
  misc_RNA (1)...(19): siRNA sense strand
aggaauagaguucauuuca

SEQ ID NO: 2136773 - RNA, 19 nt, Homo sapiens
  misc_RNA (1)...(19): siRNA sense strand
cuaggaauagaguucauuu

SEQ ID NO: 2136774 - RNA, 19 nt, Homo sapiens
  misc_RNA (1)...(19): siRNA sense strand
auggaaagccuauauggaa

SEQ ID NO: 2136775 - RNA, 19 nt, Homo sapiens
  misc_RNA (1)...(19): siRNA sense strand
gggaaucagggcaaaggaa

SEQ ID NO: 2136776 - RNA, 19 nt, Homo sapiens
  misc_RNA (1)...(19): siRNA sense strand
gcuaaucucacugccaaga

SEQ ID NO: 2136777 - RNA, 19 nt, Homo sapiens
  misc_RNA (1)...(19): siRNA sense strand
agaguucauuucagaagau

SEQ ID NO: 2136778 - RNA, 19 nt, Homo sapiens
  misc_RNA (1)...(19): siRNA sense strand
aauuaaagguggagcacau

SEQ ID NO: 2136779 - RNA, 19 nt, Homo sapiens
  misc_RNA (1)...(19): siRNA sense strand
gcacaguggaaauuaaagg

SEQ ID NO: 2136780 - RNA, 19 nt, Homo sapiens
  misc_RNA (1)...(19): siRNA sense strand
cacaggaagcucaguucua

SEQ ID NO: 2136781 - RNA, 19 nt, Homo sapiens
  misc_RNA (1)...(19): siRNA sense strand
gcaaacaguuaacgaauua

SEQ ID NO: 2136782 - RNA, 19 nt, Homo sapiens
  misc_RNA (1)...(19): siRNA sense strand
caaauccacugucuacaua

SEQ ID NO: 2136783 - RNA, 19 nt, Homo sapiens
  misc_RNA (1)...(19): siRNA sense strand
gaaccacgauguacauuca

SEQ ID NO: 2136784 - RNA, 19 nt, Homo sapiens
  misc_RNA (1)...(19): siRNA sense strand
uagcagagcugucaacuca

SEQ ID NO: 2136785 - RNA, 19 nt, Homo sapiens
  misc_RNA (1)...(19): siRNA sense strand
gaauucagccgaguucuua

SEQ ID NO: 2136786 - RNA, 19 nt, Homo sapiens
  misc_RNA (1)...(19): siRNA sense strand
ggagaaagaaaguguuuaa

SEQ ID NO: 2136787 - RNA, 19 nt, Homo sapiens
  misc_RNA (1)...(19): siRNA sense strand
gaacuacacucaguauaca

SEQ ID NO: 2136788 - RNA, 19 nt, Homo sapiens
  misc_RNA (1)...(19): siRNA sense strand
cgaauuacaugauccaaug

SEQ ID NO: 2136789 - RNA, 19 nt, Homo sapiens
  misc_RNA (1)...(19): siRNA sense strand
caucgucacuugccuguuu

SEQ ID NO: 2136790 - RNA, 19 nt, Homo sapiens
  misc_RNA (1)...(19): siRNA sense strand
ggaauauggcaaacaguua

SEQ ID NO: 2136791 - RNA, 19 nt, Homo sapiens
  misc_RNA (1)...(19): siRNA sense strand
ucacauggaagacuuauaa

SEQ ID NO: 2136792 - RNA, 19 nt, Homo sapiens
  misc_RNA (1)...(19): siRNA sense strand
gaauauggcaaacaguuaa

SEQ ID NO: 2136793 - RNA, 19 nt, Homo sapiens
  misc_RNA (1)...(19): siRNA sense strand
gcuaaagccaauucaaaua

SEQ ID NO: 2136794 - RNA, 19 nt, Homo sapiens
  misc_RNA (1)...(19): siRNA sense strand
ggaaaugugcggagauuau

SEQ ID NO: 2136795 - RNA, 19 nt, Homo sapiens
  misc_RNA (1)...(19): siRNA sense strand
gcaucgccauccuuuauuu

SEQ ID NO: 2136796 - RNA, 19 nt, Homo sapiens
  misc_RNA (1)...(19): siRNA sense strand
gaugcuggaugaccucuuu

SEQ ID NO: 2136797 - RNA, 19 nt, Homo sapiens
  misc_RNA (1)...(19): siRNA sense strand
aagacaagcuuucccauga

SEQ ID NO: 2136798 - RNA, 19 nt, Homo sapiens
  misc_RNA (1)...(19): siRNA sense strand
ugacauguguuguugaguu

SEQ ID NO: 2136799 - RNA, 19 nt, Homo sapiens
  misc_RNA (1)...(19): siRNA sense strand
ggcaaacaguuaacgaauu

SEQ ID NO: 2136800 - RNA, 19 nt, Homo sapiens
  misc_RNA (1)...(19): siRNA sense strand
ggacaaggacccucacaug

SEQ ID NO: 2136801 - RNA, 19 nt, Homo sapiens
  misc_RNA (1)...(19): siRNA sense strand
cagccgaguucuuaucuuu

SEQ ID NO: 2136802 - RNA, 19 nt, Homo sapiens
  misc_RNA (1)...(19): siRNA sense strand
ccuaaauucuucauuguug

SEQ ID NO: 2136803 - RNA, 19 nt, Homo sapiens
  misc_RNA (1)...(19): siRNA sense strand
cgaagaaugcccucuauga

SEQ ID NO: 2136804 - RNA, 19 nt, Homo sapiens
  misc_RNA (1)...(19): siRNA sense strand
gaucucagguugaaauuuu

SEQ ID NO: 2136805 - RNA, 19 nt, Homo sapiens
  misc_RNA (1)...(19): siRNA sense strand
gaucagaggaccuaaagug

SEQ ID NO: 2136806 - RNA, 19 nt, Homo sapiens
  misc_RNA (1)...(19): siRNA sense strand
gcccagaguugccacuaaa

SEQ ID NO: 2136807 - RNA, 19 nt, Homo sapiens
  misc_RNA (1)...(19): siRNA sense strand
cgauguacauucauaacaa

SEQ ID NO: 2136808 - RNA, 19 nt, Homo sapiens
  misc_RNA (1)...(19): siRNA sense strand
gaaaugugcggagauuauu

SEQ ID NO: 2136809 - RNA, 19 nt, Homo sapiens
  misc_RNA (1)...(19): siRNA sense strand
ugcauugacuuucguagua

SEQ ID NO: 2136810 - RNA, 19 nt, Homo sapiens
  misc_RNA (1)...(19): siRNA sense strand
ucaacucacuaccagaauu

SEQ ID NO: 2136811 - RNA, 19 nt, Homo sapiens
  misc_RNA (1)...(19): siRNA sense strand
gaagaaugcccucuaugag

SEQ ID NO: 2136812 - RNA, 19 nt, Homo sapiens
  misc_RNA (1)...(19): siRNA sense strand
cagaggaccuaaagugauc

SEQ ID NO: 2136813 - RNA, 19 nt, Homo sapiens
  misc_RNA (1)...(19): siRNA sense strand
uaaagucgaugguguagcu

SEQ ID NO: 2136814 - RNA, 19 nt, Homo sapiens
  misc_RNA (1)...(19): siRNA sense strand
gacauguguuguugaguug

SEQ ID NO: 2136815 - RNA, 19 nt, Homo sapiens
  misc_RNA (1)...(19): siRNA sense strand
cggaugaugaugugauuua

SEQ ID NO: 2136816 - RNA, 19 nt, Homo sapiens
  misc_RNA (1)...(19): siRNA sense strand
caccuuggccuuuguauau

SEQ ID NO: 2136817 - RNA, 19 nt, Homo sapiens
  misc_RNA (1)...(19): siRNA sense strand
gcagagcugucaacucacu

SEQ ID NO: 2136818 - RNA, 19 nt, Homo sapiens
  misc_RNA (1)...(19): siRNA sense strand
cagcacaacucagcucuca

SEQ ID NO: 2136819 - RNA, 19 nt, Homo sapiens
  misc_RNA (1)...(19): siRNA sense strand
ggaugaugaugugauuuau

SEQ ID NO: 2136820 - RNA, 19 nt, Homo sapiens
  misc_RNA (1)...(19): siRNA sense strand
agacuucugcggcuaauuu

SEQ ID NO: 2136821 - RNA, 19 nt, Homo sapiens
  misc_RNA (1)...(19): siRNA sense strand
gcaaguacuacaagacaau

SEQ ID NO: 2136822 - RNA, 19 nt, Homo sapiens
  misc_RNA (1)...(19): siRNA sense strand
gacaaggacccucacaugu

SEQ ID NO: 2136823 - RNA, 19 nt, Homo sapiens
  misc_RNA (1)...(19): siRNA sense strand
gaguugauaccggaaauuu

SEQ ID NO: 2136824 - RNA, 19 nt, Homo sapiens
  misc_RNA (1)...(19): siRNA sense strand
gaaaucugguuccgguuuu

SEQ ID NO: 2136825 - RNA, 19 nt, Homo sapiens
  misc_RNA (1)...(19): siRNA sense strand
ccucacaugugcagggaaa

SEQ ID NO: 2136826 - RNA, 19 nt, Homo sapiens
  misc_RNA (1)...(19): siRNA sense strand
ucuauggccuguugaacuu

SEQ ID NO: 2136827 - RNA, 19 nt, Homo sapiens
  misc_RNA (1)...(19): siRNA sense strand
uagcaucgccauccuuuau

SEQ ID NO: 2136828 - RNA, 19 nt, Homo sapiens
  misc_RNA (1)...(19): siRNA sense strand
caagauggaaccacgaugu

SEQ ID NO: 2136829 - RNA, 19 nt, Homo sapiens
  misc_RNA (1)...(19): siRNA sense strand
ugaaugacucggaugauga

SEQ ID NO: 2136830 - RNA, 19 nt, Homo sapiens
  misc_RNA (1)...(19): siRNA sense strand
guaccaguaucgaguugau

SEQ ID NO: 2136831 - RNA, 19 nt, Homo sapiens
  misc_RNA (1)...(19): siRNA sense strand
guuaacgaauuacaugauc

SEQ ID NO: 2136832 - RNA, 19 nt, Homo sapiens
  misc_RNA (1)...(19): siRNA sense strand
cuucauuguuggacuauug

SEQ ID NO: 2136833 - RNA, 19 nt, Homo sapiens
  misc_RNA (1)...(19): siRNA sense strand
gggcgcaaguacuacaaga

SEQ ID NO: 2136834 - RNA, 19 nt, Homo sapiens
  misc_RNA (1)...(19): siRNA sense strand
gggagugacuaugaggaaa

SEQ ID NO: 2136835 - RNA, 19 nt, Homo sapiens
  misc_RNA (1)...(19): siRNA sense strand
ugacucggaugaugaugug

SEQ ID NO: 2136836 - RNA, 19 nt, Homo sapiens
  misc_RNA (1)...(19): siRNA sense strand
ccgaguacccugccuuuga

SEQ ID NO: 2136837 - RNA, 19 nt, Homo sapiens
  misc_RNA (1)...(19): siRNA sense strand
aagcuaaagccaauucaaa

SEQ ID NO: 2136838 - RNA, 19 nt, Homo sapiens
  misc_RNA (1)...(19): siRNA sense strand
gauccaauguaccaguauc

SEQ ID NO: 2136839 - RNA, 19 nt, Homo sapiens
  misc_RNA (1)...(19): siRNA sense strand
guucacaaccggacaagga

SEQ ID NO: 2136840 - RNA, 19 nt, Homo sapiens
  misc_RNA (1)...(19): siRNA sense strand
gcuguacgaccuuguguug

SEQ ID NO: 2136841 - RNA, 19 nt, Homo sapiens
  misc_RNA (1)...(19): siRNA sense strand
ccacuuuguccucguguuu

SEQ ID NO: 2136842 - RNA, 19 nt, Homo sapiens
  misc_RNA (1)...(19): siRNA sense strand
gagugacuaugaggaaaug

SEQ ID NO: 2136843 - RNA, 19 nt, Homo sapiens
  misc_RNA (1)...(19): siRNA sense strand
ugguguagcucaagaugga

SEQ ID NO: 2136844 - RNA, 19 nt, Homo sapiens
  misc_RNA (1)...(19): siRNA sense strand
gaaugacucggaugaugau

SEQ ID NO: 2136845 - RNA, 19 nt, Homo sapiens
  misc_RNA (1)...(19): siRNA sense strand
guaccucuuguucuugaua

SEQ ID NO: 2136846 - RNA, 19 nt, Homo sapiens
  misc_RNA (1)...(19): siRNA sense strand
gcagcgguguacauucugu

SEQ ID NO: 2136847 - RNA, 19 nt, Homo sapiens
  misc_RNA (1)...(19): siRNA sense strand
gcugacauguguuguugag

SEQ ID NO: 2136848 - RNA, 19 nt, Homo sapiens
  misc_RNA (1)...(19): siRNA sense strand
caacucacuaccagaauuc

SEQ ID NO: 2136849 - RNA, 19 nt, Homo sapiens
  misc_RNA (1)...(19): siRNA sense strand
uugccuaaauucuucauug

SEQ ID NO: 2136850 - RNA, 19 nt, Homo sapiens
  misc_RNA (1)...(19): siRNA sense strand
ugccucugcugcuacuuua

SEQ ID NO: 2136851 - RNA, 19 nt, Homo sapiens
  misc_RNA (1)...(19): siRNA sense strand
ccacgauguacauucauaa

SEQ ID NO: 2136852 - RNA, 19 nt, Homo sapiens
  misc_RNA (1)...(19): siRNA sense strand
ugaguuggaucaaucaaaa

SEQ ID NO: 2136853 - RNA, 19 nt, Homo sapiens
  misc_RNA (1)...(19): siRNA sense strand
cgaguacccugccuuugag

SEQ ID NO: 2136854 - RNA, 19 nt, Homo sapiens
  misc_RNA (1)...(19): siRNA sense strand
caacuauggcugacaugug

SEQ ID NO: 2136855 - RNA, 19 nt, Homo sapiens
  misc_RNA (1)...(19): siRNA sense strand
ggagugacuaugaggaaau

SEQ ID NO: 2136856 - RNA, 19 nt, Homo sapiens
  misc_RNA (1)...(19): siRNA sense strand
uuacaaugauccguucuuc

SEQ ID NO: 2136857 - RNA, 19 nt, Homo sapiens
  misc_RNA (1)...(19): siRNA sense strand
gcuuuggccugaccaucuu

SEQ ID NO: 2136858 - RNA, 19 nt, Homo sapiens
  misc_RNA (1)...(19): siRNA sense strand
acaaggacccucacaugug

SEQ ID NO: 2136859 - RNA, 19 nt, Homo sapiens
  misc_RNA (1)...(19): siRNA sense strand
gcuuucccaugacuguuaa

SEQ ID NO: 2136860 - RNA, 19 nt, Homo sapiens
  misc_RNA (1)...(19): siRNA sense strand
uacauacaaucagcaacua

SEQ ID NO: 2136861 - RNA, 19 nt, Homo sapiens
  misc_RNA (1)...(19): siRNA sense strand
caucgaagaaugcccucua

SEQ ID NO: 2136862 - RNA, 19 nt, Homo sapiens
  misc_RNA (1)...(19): siRNA sense strand
gcgcaaguacuacaagaca

SEQ ID NO: 2136863 - RNA, 19 nt, Homo sapiens
  misc_RNA (1)...(19): siRNA sense strand
gggagaaagaaaguguuua

SEQ ID NO: 2136864 - RNA, 19 nt, Homo sapiens
  misc_RNA (1)...(19): siRNA sense strand
ucaccuucaucgucacuug

SEQ ID NO: 2136865 - RNA, 19 nt, Homo sapiens
  misc_RNA (1)...(19): siRNA sense strand
uggcugacauguguuguug

SEQ ID NO: 2136866 - RNA, 19 nt, Homo sapiens
  misc_RNA (1)...(19): siRNA sense strand
ucaaauccacugucuacau

SEQ ID NO: 2136867 - RNA, 19 nt, Homo sapiens
  misc_RNA (1)...(19): siRNA sense strand
gaugaugaugugauuuaug

SEQ ID NO: 2136868 - RNA, 19 nt, Homo sapiens
  misc_RNA (1)...(19): siRNA sense strand
caucuucguugggaucaga

SEQ ID NO: 2136869 - RNA, 19 nt, Homo sapiens
  misc_RNA (1)...(19): siRNA sense strand
gcauugacuuucguaguac

SEQ ID NO: 2136870 - RNA, 19 nt, Homo sapiens
  misc_RNA (1)...(19): siRNA sense strand
cuaggaauauggcaaacag

SEQ ID NO: 2136871 - RNA, 19 nt, Homo sapiens
  misc_RNA (1)...(19): siRNA sense strand
auacagugauagugggauu

SEQ ID NO: 2136872 - RNA, 19 nt, Homo sapiens
  misc_RNA (1)...(19): siRNA sense strand
ggaaccacgauguacauuc

SEQ ID NO: 2136873 - RNA, 19 nt, Homo sapiens
  misc_RNA (1)...(19): siRNA sense strand
aacuauggcugacaugugu

SEQ ID NO: 2136874 - RNA, 19 nt, Homo sapiens
  misc_RNA (1)...(19): siRNA sense strand
gggaaaugugcggagauua

SEQ ID NO: 2136875 - RNA, 19 nt, Homo sapiens
  misc_RNA (1)...(19): siRNA sense strand
cugaaugacucggaugaug

SEQ ID NO: 2136876 - RNA, 19 nt, Homo sapiens
  misc_RNA (1)...(19): siRNA sense strand
gccgaguucuuaucuuucu

SEQ ID NO: 2136877 - RNA, 19 nt, Homo sapiens
  misc_RNA (1)...(19): siRNA sense strand
uggcagcgguguacauucu

SEQ ID NO: 2136878 - RNA, 19 nt, Homo sapiens
  misc_RNA (1)...(19): siRNA sense strand
gcaucgagcagaaguggau

SEQ ID NO: 2136879 - RNA, 19 nt, Homo sapiens
  misc_RNA (1)...(19): siRNA sense strand
ugaacuacacucaguauac

SEQ ID NO: 2136880 - RNA, 19 nt, Homo sapiens
  misc_RNA (1)...(19): siRNA sense strand
acaaggaggagucagauag

SEQ ID NO: 2136881 - RNA, 19 nt, Homo sapiens
  misc_RNA (1)...(19): siRNA sense strand
guacagagaugggcaauuu

SEQ ID NO: 2136882 - RNA, 19 nt, Homo sapiens
  misc_RNA (1)...(19): siRNA sense strand
uaaugucacuggagaaaua

SEQ ID NO: 2136883 - RNA, 19 nt, Homo sapiens
  misc_RNA (1)...(19): siRNA sense strand
ggacagacaugacucuugu

SEQ ID NO: 2136884 - RNA, 19 nt, Homo sapiens
  misc_RNA (1)...(19): siRNA sense strand
guaagaaccuugccuaugg

SEQ ID NO: 2136885 - RNA, 19 nt, Homo sapiens
  misc_RNA (1)...(19): siRNA sense strand
ggaacgagccaagaaauuu

SEQ ID NO: 2136886 - RNA, 19 nt, Homo sapiens
  misc_RNA (1)...(19): siRNA sense strand
gaagacagcguuccucaga

SEQ ID NO: 2136887 - RNA, 19 nt, Homo sapiens
  misc_RNA (1)...(19): siRNA sense strand
gaucagccaucacuucaug

SEQ ID NO: 2136888 - RNA, 19 nt, Homo sapiens
  misc_RNA (1)...(19): siRNA sense strand
gcuaggagccaagaauuua

SEQ ID NO: 2136889 - RNA, 19 nt, Homo sapiens
  misc_RNA (1)...(19): siRNA sense strand
ugaaaccucucaaucaaga

SEQ ID NO: 2136890 - RNA, 19 nt, Homo sapiens
  misc_RNA (1)...(19): siRNA sense strand
gaucccaaaugcucuacua

SEQ ID NO: 2136891 - RNA, 19 nt, Homo sapiens
  misc_RNA (1)...(19): siRNA sense strand
gggcagcucuugcaaucuu

SEQ ID NO: 2136892 - RNA, 19 nt, Homo sapiens
  misc_RNA (1)...(19): siRNA sense strand
gaagacagcacaacacagu

SEQ ID NO: 2136893 - RNA, 19 nt, Homo sapiens
  misc_RNA (1)...(19): siRNA sense strand
agacacggaaguuuaauua

SEQ ID NO: 2136894 - RNA, 19 nt, Homo sapiens
  misc_RNA (1)...(19): siRNA sense strand
gagggcagcucuugcaauc

SEQ ID NO: 2136895 - RNA, 19 nt, Homo sapiens
  misc_RNA (1)...(19): siRNA sense strand
gggccaaggcggagaaaua

SEQ ID NO: 2136896 - RNA, 19 nt, Homo sapiens
  misc_RNA (1)...(19): siRNA sense strand
ggaauuuggucaguuuaga

SEQ ID NO: 2136897 - RNA, 19 nt, Homo sapiens
  misc_RNA (1)...(19): siRNA sense strand
gaaccuugccuauggagaa

SEQ ID NO: 2136898 - RNA, 19 nt, Homo sapiens
  misc_RNA (1)...(19): siRNA sense strand
gaucaggcccucuuuggaa

SEQ ID NO: 2136899 - RNA, 19 nt, Homo sapiens
  misc_RNA (1)...(19): siRNA sense strand
aaacacaccugcagcaucu

SEQ ID NO: 2136900 - RNA, 19 nt, Homo sapiens
  misc_RNA (1)...(19): siRNA sense strand
gaaacacucauuugucuuc

SEQ ID NO: 2136901 - RNA, 19 nt, Homo sapiens
  misc_RNA (1)...(19): siRNA sense strand
gaaggucagugcaccagau

SEQ ID NO: 2136902 - RNA, 19 nt, Homo sapiens
  misc_RNA (1)...(19): siRNA sense strand
gagaggacacggaaacuga

SEQ ID NO: 2136903 - RNA, 19 nt, Homo sapiens
  misc_RNA (1)...(19): siRNA sense strand
gccaagaaauuuccaacug

SEQ ID NO: 2136904 - RNA, 19 nt, Homo sapiens
  misc_RNA (1)...(19): siRNA sense strand
ccaaaucccagaaugauau

SEQ ID NO: 2136905 - RNA, 19 nt, Homo sapiens
  misc_RNA (1)...(19): siRNA sense strand
acaggaauuuggucaguuu

SEQ ID NO: 2136906 - RNA, 19 nt, Homo sapiens
  misc_RNA (1)...(19): siRNA sense strand
gaacgagccaagaaauuuc

SEQ ID NO: 2136907 - RNA, 19 nt, Homo sapiens
  misc_RNA (1)...(19): siRNA sense strand
gcagucaagcuuggaguua

SEQ ID NO: 2136908 - RNA, 19 nt, Homo sapiens
  misc_RNA (1)...(19): siRNA sense strand
caggagaccuugaaguauc

SEQ ID NO: 2136909 - RNA, 19 nt, Homo sapiens
  misc_RNA (1)...(19): siRNA sense strand
ucugaaaccucucaaucaa

SEQ ID NO: 2136910 - RNA, 19 nt, Homo sapiens
  misc_RNA (1)...(19): siRNA sense strand
accuugaacucauuuguua

SEQ ID NO: 2136911 - RNA, 19 nt, Homo sapiens
  misc_RNA (1)...(19): siRNA sense strand
ggacagaucagccaucacu

SEQ ID NO: 2136912 - RNA, 19 nt, Homo sapiens
  misc_RNA (1)...(19): siRNA sense strand
ucaagaggaucccaaaugc

SEQ ID NO: 2136913 - RNA, 19 nt, Homo sapiens
  misc_RNA (1)...(19): siRNA sense strand
ggaaguuuaauuagcauug

SEQ ID NO: 2136914 - RNA, 19 nt, Homo sapiens
  misc_RNA (1)...(19): siRNA sense strand
gagcaaaauuucugugguu

SEQ ID NO: 2136915 - RNA, 19 nt, Homo sapiens
  misc_RNA (1)...(19): siRNA sense strand
ggucagugcaccagauauu

SEQ ID NO: 2136916 - RNA, 19 nt, Homo sapiens
  misc_RNA (1)...(19): siRNA sense strand
caacuggaggcaaacauga

SEQ ID NO: 2136917 - RNA, 19 nt, Homo sapiens
  misc_RNA (1)...(19): siRNA sense strand
uaagaaccuugccuaugga

SEQ ID NO: 2136918 - RNA, 19 nt, Homo sapiens
  misc_RNA (1)...(19): siRNA sense strand
uggaaacacucauuugucu

SEQ ID NO: 2136919 - RNA, 19 nt, Homo sapiens
  misc_RNA (1)...(19): siRNA sense strand
cagucaagcuuggaguuaa

SEQ ID NO: 2136920 - RNA, 19 nt, Homo sapiens
  misc_RNA (1)...(19): siRNA sense strand
gcuaaugucacuggagaaa

SEQ ID NO: 2136921 - RNA, 19 nt, Homo sapiens
  misc_RNA (1)...(19): siRNA sense strand
gauggcaccuugaacucau

SEQ ID NO: 2136922 - RNA, 19 nt, Homo sapiens
  misc_RNA (1)...(19): siRNA sense strand
gaggaacgagccaagaaau

SEQ ID NO: 2136923 - RNA, 19 nt, Homo sapiens
  misc_RNA (1)...(19): siRNA sense strand
cauauucucuggagguuuu

SEQ ID NO: 2136924 - RNA, 19 nt, Homo sapiens
  misc_RNA (1)...(19): siRNA sense strand
caucaaggccuguaagaac

SEQ ID NO: 2136925 - RNA, 19 nt, Homo sapiens
  misc_RNA (1)...(19): siRNA sense strand
gaugcaugcucacuaucga

SEQ ID NO: 2136926 - RNA, 19 nt, Homo sapiens
  misc_RNA (1)...(19): siRNA sense strand
agacagcguuccucagagu

SEQ ID NO: 2136927 - RNA, 19 nt, Homo sapiens
  misc_RNA (1)...(19): siRNA sense strand
ggacugggagcacaaagag

SEQ ID NO: 2136928 - RNA, 19 nt, Homo sapiens
  misc_RNA (1)...(19): siRNA sense strand
ggcagcucuugcaaucuua

SEQ ID NO: 2136929 - RNA, 19 nt, Homo sapiens
  misc_RNA (1)...(19): siRNA sense strand
gcccggagaguguuucuug

SEQ ID NO: 2136930 - RNA, 19 nt, Homo sapiens
  misc_RNA (1)...(19): siRNA sense strand
gcaucaaggccuguaagaa

SEQ ID NO: 2136931 - RNA, 19 nt, Homo sapiens
  misc_RNA (1)...(19): siRNA sense strand
cacggaaguuuaauuagca

SEQ ID NO: 2136932 - RNA, 19 nt, Homo sapiens
  misc_RNA (1)...(19): siRNA sense strand
acacggaaguuuaauuagc

SEQ ID NO: 2136933 - RNA, 19 nt, Homo sapiens
  misc_RNA (1)...(19): siRNA sense strand
ccacgugggacuuugaaga

SEQ ID NO: 2136934 - RNA, 19 nt, Homo sapiens
  misc_RNA (1)...(19): siRNA sense strand
uuuaauaaguccguggaaa

SEQ ID NO: 2136935 - RNA, 19 nt, Homo sapiens
  misc_RNA (1)...(19): siRNA sense strand
gaacgaccgcuugcuugga

SEQ ID NO: 2136936 - RNA, 19 nt, Homo sapiens
  misc_RNA (1)...(19): siRNA sense strand
ggaaaggagcgaagaacac

SEQ ID NO: 2136937 - RNA, 19 nt, Homo sapiens
  misc_RNA (1)...(19): siRNA sense strand
ggaaacacucauuugucuu

SEQ ID NO: 2136938 - RNA, 19 nt, Homo sapiens
  misc_RNA (1)...(19): siRNA sense strand
cuucaaaacccauucuuua

SEQ ID NO: 2136939 - RNA, 19 nt, Homo sapiens
  misc_RNA (1)...(19): siRNA sense strand
aggcaaacaugagacaguu

SEQ ID NO: 2136940 - RNA, 19 nt, Homo sapiens
  misc_RNA (1)...(19): siRNA sense strand
ggaucaggcccucuuugga

SEQ ID NO: 2136941 - RNA, 19 nt, Homo sapiens
  misc_RNA (1)...(19): siRNA sense strand
ucacuucauggucaacuuu

SEQ ID NO: 2136942 - RNA, 19 nt, Homo sapiens
  misc_RNA (1)...(19): siRNA sense strand
caacagaaucucccaucca

SEQ ID NO: 2136943 - RNA, 19 nt, Homo sapiens
  misc_RNA (1)...(19): siRNA sense strand
caaucaagaggaucccaaa

SEQ ID NO: 2136944 - RNA, 19 nt, Homo sapiens
  misc_RNA (1)...(19): siRNA sense strand
gaggacacggaaacugaaa

SEQ ID NO: 2136945 - RNA, 19 nt, Homo sapiens
  misc_RNA (1)...(19): siRNA sense strand
uaagcugguucucccuuca

SEQ ID NO: 2136946 - RNA, 19 nt, Homo sapiens
  misc_RNA (1)...(19): siRNA sense strand
gcggagaaauacgaagaca

SEQ ID NO: 2136947 - RNA, 19 nt, Homo sapiens
  misc_RNA (1)...(19): siRNA sense strand
cagcaccuguacagagaug

SEQ ID NO: 2136948 - RNA, 19 nt, Homo sapiens
  misc_RNA (1)...(19): siRNA sense strand
gaggaucccaaaugcucua

SEQ ID NO: 2136949 - RNA, 19 nt, Homo sapiens
  misc_RNA (1)...(19): siRNA sense strand
auaaguccguggaaaauuu

SEQ ID NO: 2136950 - RNA, 19 nt, Homo sapiens
  misc_RNA (1)...(19): siRNA sense strand
acacucauuugucuucagu

SEQ ID NO: 2136951 - RNA, 19 nt, Homo sapiens
  misc_RNA (1)...(19): siRNA sense strand
gugcuaggagccaagaauu

SEQ ID NO: 2136952 - RNA, 19 nt, Homo sapiens
  misc_RNA (1)...(19): siRNA sense strand
ugugaagaccuaccuguug

SEQ ID NO: 2136953 - RNA, 19 nt, Homo sapiens
  misc_RNA (1)...(19): siRNA sense strand
cagcaucuccgguggaaag

SEQ ID NO: 2136954 - RNA, 19 nt, Homo sapiens
  misc_RNA (1)...(19): siRNA sense strand
ugaggaacgagccaagaaa

SEQ ID NO: 2136955 - RNA, 19 nt, Homo sapiens
  misc_RNA (1)...(19): siRNA sense strand
gaggagaggacacggaaac

SEQ ID NO: 2136956 - RNA, 19 nt, Homo sapiens
  misc_RNA (1)...(19): siRNA sense strand
gcaccuugaacucauuugu

SEQ ID NO: 2136957 - RNA, 19 nt, Homo sapiens
  misc_RNA (1)...(19): siRNA sense strand
cagaucagccaucacuuca

SEQ ID NO: 2136958 - RNA, 19 nt, Homo sapiens
  misc_RNA (1)...(19): siRNA sense strand
ggagggcagcucuugcaau

SEQ ID NO: 2136959 - RNA, 19 nt, Homo sapiens
  misc_RNA (1)...(19): siRNA sense strand
cccaaucuauggacagaca

SEQ ID NO: 2136960 - RNA, 19 nt, Homo sapiens
  misc_RNA (1)...(19): siRNA sense strand
ccaaggcggagaaauacga

SEQ ID NO: 2136961 - RNA, 19 nt, Homo sapiens
  misc_RNA (1)...(19): siRNA sense strand
gauauucugaaaccucuca

SEQ ID NO: 2136962 - RNA, 19 nt, Homo sapiens
  misc_RNA (1)...(19): siRNA sense strand
gaauuuggucaguuuagag

SEQ ID NO: 2136963 - RNA, 19 nt, Homo sapiens
  misc_RNA (1)...(19): siRNA sense strand
uuacaggaauuuggucagu

SEQ ID NO: 2136964 - RNA, 19 nt, Homo sapiens
  misc_RNA (1)...(19): siRNA sense strand
ggucaguuuagaggauuua

SEQ ID NO: 2136965 - RNA, 19 nt, Homo sapiens
  misc_RNA (1)...(19): siRNA sense strand
ggagaggacacggaaacug

SEQ ID NO: 2136966 - RNA, 19 nt, Homo sapiens
  misc_RNA (1)...(19): siRNA sense strand
cuugcaaucuuaucagaag

SEQ ID NO: 2136967 - RNA, 19 nt, Homo sapiens
  misc_RNA (1)...(19): siRNA sense strand
aaagggagacacagcuguu

SEQ ID NO: 2136968 - RNA, 19 nt, Homo sapiens
  misc_RNA (1)...(19): siRNA sense strand
caggcccucuuuggaauga

SEQ ID NO: 2136969 - RNA, 19 nt, Homo sapiens
  misc_RNA (1)...(19): siRNA sense strand
ccagauggcaccuugaacu

SEQ ID NO: 2136970 - RNA, 19 nt, Homo sapiens
  misc_RNA (1)...(19): siRNA sense strand
ucacuggagaaauagaauu

SEQ ID NO: 2136971 - RNA, 19 nt, Homo sapiens
  misc_RNA (1)...(19): siRNA sense strand
uuuagacacggaaguuuaa

SEQ ID NO: 2136972 - RNA, 19 nt, Homo sapiens
  misc_RNA (1)...(19): siRNA sense strand
cuacuaacccuauuuugaa

SEQ ID NO: 2136973 - RNA, 19 nt, Homo sapiens
  misc_RNA (1)...(19): siRNA sense strand
gaggcaaacaugagacagu

SEQ ID NO: 2136974 - RNA, 19 nt, Homo sapiens
  misc_RNA (1)...(19): siRNA sense strand
aaugauaugacuucugaga

SEQ ID NO: 2136975 - RNA, 19 nt, Homo sapiens
  misc_RNA (1)...(19): siRNA sense strand
ccaagaaauagaucugagu

SEQ ID NO: 2136976 - RNA, 19 nt, Homo sapiens
  misc_RNA (1)...(19): siRNA sense strand
ccaacuggaggcaaacaug

SEQ ID NO: 2136977 - RNA, 19 nt, Homo sapiens
  misc_RNA (1)...(19): siRNA sense strand
ucaggagaccuugaaguau

SEQ ID NO: 2136978 - RNA, 19 nt, Homo sapiens
  misc_RNA (1)...(19): siRNA sense strand
aaagugcaauccguaugug

SEQ ID NO: 2136979 - RNA, 19 nt, Homo sapiens
  misc_RNA (1)...(19): siRNA sense strand
gaugggcaauuuugacaau

SEQ ID NO: 2136980 - RNA, 19 nt, Homo sapiens
  misc_RNA (1)...(19): siRNA sense strand
gaagcuccaguggcagaaa

SEQ ID NO: 2136981 - RNA, 19 nt, Homo sapiens
  misc_RNA (1)...(19): siRNA sense strand
gaagguaccuccaagauuc

SEQ ID NO: 2136982 - RNA, 19 nt, Homo sapiens
  misc_RNA (1)...(19): siRNA sense strand
ggaagaggccuacguuaua

SEQ ID NO: 2136983 - RNA, 19 nt, Homo sapiens
  misc_RNA (1)...(19): siRNA sense strand
guaauucacugagguauaa

SEQ ID NO: 2136984 - RNA, 19 nt, Homo sapiens
  misc_RNA (1)...(19): siRNA sense strand
gaacagggccucaguccua

SEQ ID NO: 2136985 - RNA, 19 nt, Homo sapiens
  misc_RNA (1)...(19): siRNA sense strand
gaagaggccuacguuauau

SEQ ID NO: 2136986 - RNA, 19 nt, Homo sapiens
  misc_RNA (1)...(19): siRNA sense strand
ggacagagaauuaucaaug

SEQ ID NO: 2136987 - RNA, 19 nt, Homo sapiens
  misc_RNA (1)...(19): siRNA sense strand
ugacguaccuaaauaaaga

SEQ ID NO: 2136988 - RNA, 19 nt, Homo sapiens
  misc_RNA (1)...(19): siRNA sense strand
ggaccuugaucguggguua

SEQ ID NO: 2136989 - RNA, 19 nt, Homo sapiens
  misc_RNA (1)...(19): siRNA sense strand
ggaaggaaacgauuuguug

SEQ ID NO: 2136990 - RNA, 19 nt, Homo sapiens
  misc_RNA (1)...(19): siRNA sense strand
ggucacagguuacuugguu

SEQ ID NO: 2136991 - RNA, 19 nt, Homo sapiens
  misc_RNA (1)...(19): siRNA sense strand
guaacucacuugcccauug

SEQ ID NO: 2136992 - RNA, 19 nt, Homo sapiens
  misc_RNA (1)...(19): siRNA sense strand
ccaaugaccugaagaagag

SEQ ID NO: 2136993 - RNA, 19 nt, Homo sapiens
  misc_RNA (1)...(19): siRNA sense strand
gaucguggguuaguauuga

SEQ ID NO: 2136994 - RNA, 19 nt, Homo sapiens
  misc_RNA (1)...(19): siRNA sense strand
gauggcaaccugauaauga

SEQ ID NO: 2136995 - RNA, 19 nt, Homo sapiens
  misc_RNA (1)...(19): siRNA sense strand
gcacaccucuggccaaugc

SEQ ID NO: 2136996 - RNA, 19 nt, Homo sapiens
  misc_RNA (1)...(19): siRNA sense strand
uagaagcccucccuacuau

SEQ ID NO: 2136997 - RNA, 19 nt, Homo sapiens
  misc_RNA (1)...(19): siRNA sense strand
gaugaugcaugccagauuc

SEQ ID NO: 2136998 - RNA, 19 nt, Homo sapiens
  misc_RNA (1)...(19): siRNA sense strand
gaugauggcaaccugauaa

SEQ ID NO: 2136999 - RNA, 19 nt, Homo sapiens
  misc_RNA (1)...(19): siRNA sense strand
gggaagaggugaagaccau

SEQ ID NO: 2137000 - RNA, 19 nt, Homo sapiens
  misc_RNA (1)...(19): siRNA sense strand
ccgaauggacagagaauua

SEQ ID NO: 2137001 - RNA, 19 nt, Homo sapiens
  misc_RNA (1)...(19): siRNA sense strand
gugcuacgcugaagaagau

SEQ ID NO: 2137002 - RNA, 19 nt, Homo sapiens
  misc_RNA (1)...(19): siRNA sense strand
uaacucacuugcccauuga

SEQ ID NO: 2137003 - RNA, 19 nt, Homo sapiens
  misc_RNA (1)...(19): siRNA sense strand
ggaagguaccuccaagauu

SEQ ID NO: 2137004 - RNA, 19 nt, Homo sapiens
  misc_RNA (1)...(19): siRNA sense strand
gaagguugccacucauuug

SEQ ID NO: 2137005 - RNA, 19 nt, Homo sapiens
  misc_RNA (1)...(19): siRNA sense strand
ggaguuguucuuuguaauu

SEQ ID NO: 2137006 - RNA, 19 nt, Homo sapiens
  misc_RNA (1)...(19): siRNA sense strand
gacagagaauuaucaaugg

SEQ ID NO: 2137007 - RNA, 19 nt, Homo sapiens
  misc_RNA (1)...(19): siRNA sense strand
gaaaguccuuccugguagu

SEQ ID NO: 2137008 - RNA, 19 nt, Homo sapiens
  misc_RNA (1)...(19): siRNA sense strand
gauacauucuacagcauug

SEQ ID NO: 2137009 - RNA, 19 nt, Homo sapiens
  misc_RNA (1)...(19): siRNA sense strand
ccaacacgagguauuauuu

SEQ ID NO: 2137010 - RNA, 19 nt, Homo sapiens
  misc_RNA (1)...(19): siRNA sense strand
ggaagguugccacucauuu

SEQ ID NO: 2137011 - RNA, 19 nt, Homo sapiens
  misc_RNA (1)...(19): siRNA sense strand
cacucaagcuucaucagua

SEQ ID NO: 2137012 - RNA, 19 nt, Homo sapiens
  misc_RNA (1)...(19): siRNA sense strand
uauaauggcagaccaaaug

SEQ ID NO: 2137013 - RNA, 19 nt, Homo sapiens
  misc_RNA (1)...(19): siRNA sense strand
gauaauccucugcuuguug

SEQ ID NO: 2137014 - RNA, 19 nt, Homo sapiens
  misc_RNA (1)...(19): siRNA sense strand
gaggaaggcgccaucaguu

SEQ ID NO: 2137015 - RNA, 19 nt, Homo sapiens
  misc_RNA (1)...(19): siRNA sense strand
gaagaggugaagaccauug

SEQ ID NO: 2137016 - RNA, 19 nt, Homo sapiens
  misc_RNA (1)...(19): siRNA sense strand
caauggcccucaaggaaca

SEQ ID NO: 2137017 - RNA, 19 nt, Homo sapiens
  misc_RNA (1)...(19): siRNA sense strand
gaagcccucccuacuauuc

SEQ ID NO: 2137018 - RNA, 19 nt, Homo sapiens
  misc_RNA (1)...(19): siRNA sense strand
gugacaaccugaaagauac

SEQ ID NO: 2137019 - RNA, 19 nt, Homo sapiens
  misc_RNA (1)...(19): siRNA sense strand
aggccuacguuauauauga

SEQ ID NO: 2137020 - RNA, 19 nt, Homo sapiens
  misc_RNA (1)...(19): siRNA sense strand
gcccuucggucucauuugu

SEQ ID NO: 2137021 - RNA, 19 nt, Homo sapiens
  misc_RNA (1)...(19): siRNA sense strand
acucaagcuucaucaguaa

SEQ ID NO: 2137022 - RNA, 19 nt, Homo sapiens
  misc_RNA (1)...(19): siRNA sense strand
ccacucauuugucauugug

SEQ ID NO: 2137023 - RNA, 19 nt, Homo sapiens
  misc_RNA (1)...(19): siRNA sense strand
ccugaaagauacauucuac

SEQ ID NO: 2137024 - RNA, 19 nt, Homo sapiens
  misc_RNA (1)...(19): siRNA sense strand
gaguuguucuuuguaauuc

SEQ ID NO: 2137025 - RNA, 19 nt, Homo sapiens
  misc_RNA (1)...(19): siRNA sense strand
gaaaguucgugggaguugu

SEQ ID NO: 2137026 - RNA, 19 nt, Homo sapiens
  misc_RNA (1)...(19): siRNA sense strand
ucacagguuacuugguuua

SEQ ID NO: 2137027 - RNA, 19 nt, Homo sapiens
  misc_RNA (1)...(19): siRNA sense strand
ugaucuggcuggaaggaaa

SEQ ID NO: 2137028 - RNA, 19 nt, Homo sapiens
  misc_RNA (1)...(19): siRNA sense strand
caagauaagccaauuuuga

SEQ ID NO: 2137029 - RNA, 19 nt, Homo sapiens
  misc_RNA (1)...(19): siRNA sense strand
ccucauggcuacggaccua

SEQ ID NO: 2137030 - RNA, 19 nt, Homo sapiens
  misc_RNA (1)...(19): siRNA sense strand
agugacaaccugaaagaua

SEQ ID NO: 2137031 - RNA, 19 nt, Homo sapiens
  misc_RNA (1)...(19): siRNA sense strand
cccauucgcuuucaaacau

SEQ ID NO: 2137032 - RNA, 19 nt, Homo sapiens
  misc_RNA (1)...(19): siRNA sense strand
gcggugagccuaucuggau

SEQ ID NO: 2137033 - RNA, 19 nt, Homo sapiens
  misc_RNA (1)...(19): siRNA sense strand
uaucagcccuucggucuca

SEQ ID NO: 2137034 - RNA, 19 nt, Homo sapiens
  misc_RNA (1)...(19): siRNA sense strand
gggcuuggaggucaucaaa

SEQ ID NO: 2137035 - RNA, 19 nt, Homo sapiens
  misc_RNA (1)...(19): siRNA sense strand
ugggaguuguucuuuguaa

SEQ ID NO: 2137036 - RNA, 19 nt, Homo sapiens
  misc_RNA (1)...(19): siRNA sense strand
ggacagccuggaugaaauc

SEQ ID NO: 2137037 - RNA, 19 nt, Homo sapiens
  misc_RNA (1)...(19): siRNA sense strand
cggaagaggccuacguuau

SEQ ID NO: 2137038 - RNA, 19 nt, Homo sapiens
  misc_RNA (1)...(19): siRNA sense strand
ggaugaugcaugccagauu

SEQ ID NO: 2137039 - RNA, 19 nt, Homo sapiens
  misc_RNA (1)...(19): siRNA sense strand
ggaagaacagggccucagu

SEQ ID NO: 2137040 - RNA, 19 nt, Homo sapiens
  misc_RNA (1)...(19): siRNA sense strand
ucaaacaugaucccagcua

SEQ ID NO: 2137041 - RNA, 19 nt, Homo sapiens
  misc_RNA (1)...(19): siRNA sense strand
gggaguuguucuuuguaau

SEQ ID NO: 2137042 - RNA, 19 nt, Homo sapiens
  misc_RNA (1)...(19): siRNA sense strand
cgugggaguuguucuuugu

SEQ ID NO: 2137043 - RNA, 19 nt, Homo sapiens
  misc_RNA (1)...(19): siRNA sense strand
ugaagaagaauuugaucug

SEQ ID NO: 2137044 - RNA, 19 nt, Homo sapiens
  misc_RNA (1)...(19): siRNA sense strand
gcacgugguaucgaaaguu

SEQ ID NO: 2137045 - RNA, 19 nt, Homo sapiens
  misc_RNA (1)...(19): siRNA sense strand
gguuuacagugcauccuau

SEQ ID NO: 2137046 - RNA, 19 nt, Homo sapiens
  misc_RNA (1)...(19): siRNA sense strand
gguugccacucauuuguca

SEQ ID NO: 2137047 - RNA, 19 nt, Homo sapiens
  misc_RNA (1)...(19): siRNA sense strand
aacgauuuguugcuccuua

SEQ ID NO: 2137048 - RNA, 19 nt, Homo sapiens
  misc_RNA (1)...(19): siRNA sense strand
gggccucaguccuauguag

SEQ ID NO: 2137049 - RNA, 19 nt, Homo sapiens
  misc_RNA (1)...(19): siRNA sense strand
cgaauggacagagaauuau

SEQ ID NO: 2137050 - RNA, 19 nt, Homo sapiens
  misc_RNA (1)...(19): siRNA sense strand
gaucccauucgcuuucaaa

SEQ ID NO: 2137051 - RNA, 19 nt, Homo sapiens
  misc_RNA (1)...(19): siRNA sense strand
guggacagccuggaugaaa

SEQ ID NO: 2137052 - RNA, 19 nt, Homo sapiens
  misc_RNA (1)...(19): siRNA sense strand
gaacggcacgacgaugaug

SEQ ID NO: 2137053 - RNA, 19 nt, Homo sapiens
  misc_RNA (1)...(19): siRNA sense strand
aguauugaaugcagaagga

SEQ ID NO: 2137054 - RNA, 19 nt, Homo sapiens
  misc_RNA (1)...(19): siRNA sense strand
caaccugaaagauacauuc

SEQ ID NO: 2137055 - RNA, 19 nt, Homo sapiens
  misc_RNA (1)...(19): siRNA sense strand
gaauggacagagaauuauc

SEQ ID NO: 2137056 - RNA, 19 nt, Homo sapiens
  misc_RNA (1)...(19): siRNA sense strand
ccucuuacagacaagguua

SEQ ID NO: 2137057 - RNA, 19 nt, Homo sapiens
  misc_RNA (1)...(19): siRNA sense strand
uuacagugcauccuaugaa

SEQ ID NO: 2137058 - RNA, 19 nt, Homo sapiens
  misc_RNA (1)...(19): siRNA sense strand
uggcagaccaaauguagaa

SEQ ID NO: 2137059 - RNA, 19 nt, Homo sapiens
  misc_RNA (1)...(19): siRNA sense strand
gcuggaaggaaacgauuug

SEQ ID NO: 2137060 - RNA, 19 nt, Homo sapiens
  misc_RNA (1)...(19): siRNA sense strand
ucacauggaaauccucuuc

SEQ ID NO: 2137061 - RNA, 19 nt, Homo sapiens
  misc_RNA (1)...(19): siRNA sense strand
ucacugagguauaaaaucu

SEQ ID NO: 2137062 - RNA, 19 nt, Homo sapiens
  misc_RNA (1)...(19): siRNA sense strand
aagcgcacgugguaucgaa

SEQ ID NO: 2137063 - RNA, 19 nt, Homo sapiens
  misc_RNA (1)...(19): siRNA sense strand
cagacccucuuacagacaa

SEQ ID NO: 2137064 - RNA, 19 nt, Homo sapiens
  misc_RNA (1)...(19): siRNA sense strand
uaaagcccaacacgaggua

SEQ ID NO: 2137065 - RNA, 19 nt, Homo sapiens
  misc_RNA (1)...(19): siRNA sense strand
ugaaagauacauucuacag

SEQ ID NO: 2137066 - RNA, 19 nt, Homo sapiens
  misc_RNA (1)...(19): siRNA sense strand
aaaucuaccucagugacaa

SEQ ID NO: 2137067 - RNA, 19 nt, Homo sapiens
  misc_RNA (1)...(19): siRNA sense strand
ccaagauucacauggaaau

SEQ ID NO: 2137068 - RNA, 19 nt, Homo sapiens
  misc_RNA (1)...(19): siRNA sense strand
auaauccucugcuuguugu

SEQ ID NO: 2137069 - RNA, 19 nt, Homo sapiens
  misc_RNA (1)...(19): siRNA sense strand
cccaaugaccugaagaaga

SEQ ID NO: 2137070 - RNA, 19 nt, Homo sapiens
  misc_RNA (1)...(19): siRNA sense strand
ugccagacccucuuacaga

SEQ ID NO: 2137071 - RNA, 19 nt, Homo sapiens
  misc_RNA (1)...(19): siRNA sense strand
ugacggccucccacucuuu

SEQ ID NO: 2137072 - RNA, 19 nt, Homo sapiens
  misc_RNA (1)...(19): siRNA sense strand
ggauucacaccuugaugga

SEQ ID NO: 2137073 - RNA, 19 nt, Homo sapiens
  misc_RNA (1)...(19): siRNA sense strand
ggagacagcuggggaagag

SEQ ID NO: 2137074 - RNA, 19 nt, Homo sapiens
  misc_RNA (1)...(19): siRNA sense strand
cacgugguaucgaaaguuc

SEQ ID NO: 2137075 - RNA, 19 nt, Homo sapiens
  misc_RNA (1)...(19): siRNA sense strand
uggacagccuggaugaaau

SEQ ID NO: 2137076 - RNA, 19 nt, Homo sapiens
  misc_RNA (1)...(19): siRNA sense strand
ggccuacguuauauaugau

SEQ ID NO: 2137077 - RNA, 19 nt, Homo sapiens
  misc_RNA (1)...(19): siRNA sense strand
ccacucaagcuucaucagu

SEQ ID NO: 2137078 - RNA, 19 nt, Homo sapiens
  misc_RNA (1)...(19): siRNA sense strand
uguaauucacugagguaua

SEQ ID NO: 2137079 - RNA, 19 nt, Homo sapiens
  misc_RNA (1)...(19): siRNA sense strand
uaauggcagaccaaaugua

SEQ ID NO: 2137080 - RNA, 19 nt, Homo sapiens
  misc_RNA (1)...(19): siRNA sense strand
gccauggacggcaauaugu

SEQ ID NO: 2137081 - RNA, 19 nt, Homo sapiens
  misc_RNA (1)...(19): siRNA sense strand
ggaaagacauguacaauga

SEQ ID NO: 2137082 - RNA, 19 nt, Homo sapiens
  misc_RNA (1)...(19): siRNA sense strand
gaacagagcagaaaucaaa

SEQ ID NO: 2137083 - RNA, 19 nt, Homo sapiens
  misc_RNA (1)...(19): siRNA sense strand
gaagagagcaguugaagaa

SEQ ID NO: 2137084 - RNA, 19 nt, Homo sapiens
  misc_RNA (1)...(19): siRNA sense strand
aaacaaggcugucccauug

SEQ ID NO: 2137085 - RNA, 19 nt, Homo sapiens
  misc_RNA (1)...(19): siRNA sense strand
gcgcacagccucuuuauuu

SEQ ID NO: 2137086 - RNA, 19 nt, Homo sapiens
  misc_RNA (1)...(19): siRNA sense strand
cuacagagaugccaacauu

SEQ ID NO: 2137087 - RNA, 19 nt, Homo sapiens
  misc_RNA (1)...(19): siRNA sense strand
gaagacagccugaagaaga

SEQ ID NO: 2137088 - RNA, 19 nt, Homo sapiens
  misc_RNA (1)...(19): siRNA sense strand
gaagcugguuuaaucuaua

SEQ ID NO: 2137089 - RNA, 19 nt, Homo sapiens
  misc_RNA (1)...(19): siRNA sense strand
ggucacagcucuaccuuug

SEQ ID NO: 2137090 - RNA, 19 nt, Homo sapiens
  misc_RNA (1)...(19): siRNA sense strand
gaaaaggagugcagaauug

SEQ ID NO: 2137091 - RNA, 19 nt, Homo sapiens
  misc_RNA (1)...(19): siRNA sense strand
gcccgaagcugguuuaauc

SEQ ID NO: 2137092 - RNA, 19 nt, Homo sapiens
  misc_RNA (1)...(19): siRNA sense strand
ucacccaacugcugcaaua

SEQ ID NO: 2137093 - RNA, 19 nt, Homo sapiens
  misc_RNA (1)...(19): siRNA sense strand
ggaagaugcucagaacaga

SEQ ID NO: 2137094 - RNA, 19 nt, Homo sapiens
  misc_RNA (1)...(19): siRNA sense strand
cgaagaaauuagcagagua

SEQ ID NO: 2137095 - RNA, 19 nt, Homo sapiens
  misc_RNA (1)...(19): siRNA sense strand
ggaccguuccucugcauua

SEQ ID NO: 2137096 - RNA, 19 nt, Homo sapiens
  misc_RNA (1)...(19): siRNA sense strand
caaacaacuugaagcagaa

SEQ ID NO: 2137097 - RNA, 19 nt, Homo sapiens
  misc_RNA (1)...(19): siRNA sense strand
gagagcaguugaagaagug

SEQ ID NO: 2137098 - RNA, 19 nt, Homo sapiens
  misc_RNA (1)...(19): siRNA sense strand
gaacagcacgcaucuagca

SEQ ID NO: 2137099 - RNA, 19 nt, Homo sapiens
  misc_RNA (1)...(19): siRNA sense strand
gcacaguucugggcuggaa

SEQ ID NO: 2137100 - RNA, 19 nt, Homo sapiens
  misc_RNA (1)...(19): siRNA sense strand
gaaaccaugcagaagauuu

SEQ ID NO: 2137101 - RNA, 19 nt, Homo sapiens
  misc_RNA (1)...(19): siRNA sense strand
gagaagacagccugaagaa

SEQ ID NO: 2137102 - RNA, 19 nt, Homo sapiens
  misc_RNA (1)...(19): siRNA sense strand
acgauuugcuuucagaaua

SEQ ID NO: 2137103 - RNA, 19 nt, Homo sapiens
  misc_RNA (1)...(19): siRNA sense strand
cgauuugcuuucagaauaa

SEQ ID NO: 2137104 - RNA, 19 nt, Homo sapiens
  misc_RNA (1)...(19): siRNA sense strand
cauaaugccuuugaucaga

SEQ ID NO: 2137105 - RNA, 19 nt, Homo sapiens
  misc_RNA (1)...(19): siRNA sense strand
gggagcaucuaaaugaaga

SEQ ID NO: 2137106 - RNA, 19 nt, Homo sapiens
  misc_RNA (1)...(19): siRNA sense strand
gagaauccuuggaccuaga

SEQ ID NO: 2137107 - RNA, 19 nt, Homo sapiens
  misc_RNA (1)...(19): siRNA sense strand
aaagugggcuugccaugga

SEQ ID NO: 2137108 - RNA, 19 nt, Homo sapiens
  misc_RNA (1)...(19): siRNA sense strand
ugaagaagaugcagcugau

SEQ ID NO: 2137109 - RNA, 19 nt, Homo sapiens
  misc_RNA (1)...(19): siRNA sense strand
gaaacuuuaugugccugua

SEQ ID NO: 2137110 - RNA, 19 nt, Homo sapiens
  misc_RNA (1)...(19): siRNA sense strand
caucugcagucccaagaaa

SEQ ID NO: 2137111 - RNA, 19 nt, Homo sapiens
  misc_RNA (1)...(19): siRNA sense strand
cagaaaccaugcagaagau

SEQ ID NO: 2137112 - RNA, 19 nt, Homo sapiens
  misc_RNA (1)...(19): siRNA sense strand
gcucagaaaccaugcagaa

SEQ ID NO: 2137113 - RNA, 19 nt, Homo sapiens
  misc_RNA (1)...(19): siRNA sense strand
ugaaccuagugguguauua

SEQ ID NO: 2137114 - RNA, 19 nt, Homo sapiens
  misc_RNA (1)...(19): siRNA sense strand
acagagaugccaacauuaa

SEQ ID NO: 2137115 - RNA, 19 nt, Homo sapiens
  misc_RNA (1)...(19): siRNA sense strand
ggagaagacagccugaaga

SEQ ID NO: 2137116 - RNA, 19 nt, Homo sapiens
  misc_RNA (1)...(19): siRNA sense strand
cgaagcugguuuaaucuau

SEQ ID NO: 2137117 - RNA, 19 nt, Homo sapiens
  misc_RNA (1)...(19): siRNA sense strand
gcagaaaccggauguaaaa

SEQ ID NO: 2137118 - RNA, 19 nt, Homo sapiens
  misc_RNA (1)...(19): siRNA sense strand
uaggugcgguggcuacuaa

SEQ ID NO: 2137119 - RNA, 19 nt, Homo sapiens
  misc_RNA (1)...(19): siRNA sense strand
cugaaaagcugaaaucuga

SEQ ID NO: 2137120 - RNA, 19 nt, Homo sapiens
  misc_RNA (1)...(19): siRNA sense strand
gaaaccggauguaaaauca

SEQ ID NO: 2137121 - RNA, 19 nt, Homo sapiens
  misc_RNA (1)...(19): siRNA sense strand
cagcacgcaucuagcauug

SEQ ID NO: 2137122 - RNA, 19 nt, Homo sapiens
  misc_RNA (1)...(19): siRNA sense strand
cagaagauuuggaccuugu

SEQ ID NO: 2137123 - RNA, 19 nt, Homo sapiens
  misc_RNA (1)...(19): siRNA sense strand
ugauggagcuugcgauucu

SEQ ID NO: 2137124 - RNA, 19 nt, Homo sapiens
  misc_RNA (1)...(19): siRNA sense strand
gaagaaauuagcagaguac

SEQ ID NO: 2137125 - RNA, 19 nt, Homo sapiens
  misc_RNA (1)...(19): siRNA sense strand
gcuacgauuugcuuucaga

SEQ ID NO: 2137126 - RNA, 19 nt, Homo sapiens
  misc_RNA (1)...(19): siRNA sense strand
ccagcuggcccuaccauaa

SEQ ID NO: 2137127 - RNA, 19 nt, Homo sapiens
  misc_RNA (1)...(19): siRNA sense strand
caucgaaugucagagagaa

SEQ ID NO: 2137128 - RNA, 19 nt, Homo sapiens
  misc_RNA (1)...(19): siRNA sense strand
ucagaaaccaugcagaaga

SEQ ID NO: 2137129 - RNA, 19 nt, Homo sapiens
  misc_RNA (1)...(19): siRNA sense strand
gcucgggucuggcuacgau

SEQ ID NO: 2137130 - RNA, 19 nt, Homo sapiens
  misc_RNA (1)...(19): siRNA sense strand
uuaaauggcaguacagaga

SEQ ID NO: 2137131 - RNA, 19 nt, Homo sapiens
  misc_RNA (1)...(19): siRNA sense strand
ugaugcagcugaugaacga

SEQ ID NO: 2137132 - RNA, 19 nt, Homo sapiens
  misc_RNA (1)...(19): siRNA sense strand
ccagugugccuucaugaaa

SEQ ID NO: 2137133 - RNA, 19 nt, Homo sapiens
  misc_RNA (1)...(19): siRNA sense strand
ccagcaaauucuucaggaa

SEQ ID NO: 2137134 - RNA, 19 nt, Homo sapiens
  misc_RNA (1)...(19): siRNA sense strand
gaauggcaccuacagagau

SEQ ID NO: 2137135 - RNA, 19 nt, Homo sapiens
  misc_RNA (1)...(19): siRNA sense strand
guaaaagaauacccagauu

SEQ ID NO: 2137136 - RNA, 19 nt, Homo sapiens
  misc_RNA (1)...(19): siRNA sense strand
cagcaaauucuucaggaaa

SEQ ID NO: 2137137 - RNA, 19 nt, Homo sapiens
  misc_RNA (1)...(19): siRNA sense strand
uggaucugcuggcaaguuu

SEQ ID NO: 2137138 - RNA, 19 nt, Homo sapiens
  misc_RNA (1)...(19): siRNA sense strand
uauugaaccuaguggugua

SEQ ID NO: 2137139 - RNA, 19 nt, Homo sapiens
  misc_RNA (1)...(19): siRNA sense strand
gaagugaagaaauuauugg

SEQ ID NO: 2137140 - RNA, 19 nt, Homo sapiens
  misc_RNA (1)...(19): siRNA sense strand
gggagaauccuuggaccua

SEQ ID NO: 2137141 - RNA, 19 nt, Homo sapiens
  misc_RNA (1)...(19): siRNA sense strand
aaagacauguacaaugaca

SEQ ID NO: 2137142 - RNA, 19 nt, Homo sapiens
  misc_RNA (1)...(19): siRNA sense strand
gcaugggacugacugaaaa

SEQ ID NO: 2137143 - RNA, 19 nt, Homo sapiens
  misc_RNA (1)...(19): siRNA sense strand
ucacagcucuaccuuugag

SEQ ID NO: 2137144 - RNA, 19 nt, Homo sapiens
  misc_RNA (1)...(19): siRNA sense strand
gcauuucgagcacgacuga

SEQ ID NO: 2137145 - RNA, 19 nt, Homo sapiens
  misc_RNA (1)...(19): siRNA sense strand
uuggaaaucuguuuguugu

SEQ ID NO: 2137146 - RNA, 19 nt, Homo sapiens
  misc_RNA (1)...(19): siRNA sense strand
ucuauacacccuaugagua

SEQ ID NO: 2137147 - RNA, 19 nt, Homo sapiens
  misc_RNA (1)...(19): siRNA sense strand
gcccuaccauaaugccuuu

SEQ ID NO: 2137148 - RNA, 19 nt, Homo sapiens
  misc_RNA (1)...(19): siRNA sense strand
ccaauugggagcaucuaaa

SEQ ID NO: 2137149 - RNA, 19 nt, Homo sapiens
  misc_RNA (1)...(19): siRNA sense strand
gggaccuauuguucaguua

SEQ ID NO: 2137150 - RNA, 19 nt, Homo sapiens
  misc_RNA (1)...(19): siRNA sense strand
gcauugcuccuuuaauugg

SEQ ID NO: 2137151 - RNA, 19 nt, Homo sapiens
  misc_RNA (1)...(19): siRNA sense strand
aaaguucgaaggcacgaua

SEQ ID NO: 2137152 - RNA, 19 nt, Homo sapiens
  misc_RNA (1)...(19): siRNA sense strand
gagaugccaacauuaaauc

SEQ ID NO: 2137153 - RNA, 19 nt, Homo sapiens
  misc_RNA (1)...(19): siRNA sense strand
ggaguggguggucacauga

SEQ ID NO: 2137154 - RNA, 19 nt, Homo sapiens
  misc_RNA (1)...(19): siRNA sense strand
cagugugccuucaugaaau

SEQ ID NO: 2137155 - RNA, 19 nt, Homo sapiens
  misc_RNA (1)...(19): siRNA sense strand
gaccguuccucugcauuau

SEQ ID NO: 2137156 - RNA, 19 nt, Homo sapiens
  misc_RNA (1)...(19): siRNA sense strand
ggcaugggacugacugaaa

SEQ ID NO: 2137157 - RNA, 19 nt, Homo sapiens
  misc_RNA (1)...(19): siRNA sense strand
gauggaucccgcucagaaa

SEQ ID NO: 2137158 - RNA, 19 nt, Homo sapiens
  misc_RNA (1)...(19): siRNA sense strand
gcacaccaacagcacaguu

SEQ ID NO: 2137159 - RNA, 19 nt, Homo sapiens
  misc_RNA (1)...(19): siRNA sense strand
gaaccuagugguguauuag

SEQ ID NO: 2137160 - RNA, 19 nt, Homo sapiens
  misc_RNA (1)...(19): siRNA sense strand
cagagaugccaacauuaaa

SEQ ID NO: 2137161 - RNA, 19 nt, Homo sapiens
  misc_RNA (1)...(19): siRNA sense strand
ggacuuacagccaaacaac

SEQ ID NO: 2137162 - RNA, 19 nt, Homo sapiens
  misc_RNA (1)...(19): siRNA sense strand
uaaauggcaguacagagaa

SEQ ID NO: 2137163 - RNA, 19 nt, Homo sapiens
  misc_RNA (1)...(19): siRNA sense strand
gcugcuggacgaagaaauu

SEQ ID NO: 2137164 - RNA, 19 nt, Homo sapiens
  misc_RNA (1)...(19): siRNA sense strand
aaauggcaguacagagaaa

SEQ ID NO: 2137165 - RNA, 19 nt, Homo sapiens
  misc_RNA (1)...(19): siRNA sense strand
gcacaaccagcaccacgau

SEQ ID NO: 2137166 - RNA, 19 nt, Homo sapiens
  misc_RNA (1)...(19): siRNA sense strand
gcuuggaaaucuguuuguu

SEQ ID NO: 2137167 - RNA, 19 nt, Homo sapiens
  misc_RNA (1)...(19): siRNA sense strand
agagagcaguugaagaagu

SEQ ID NO: 2137168 - RNA, 19 nt, Homo sapiens
  misc_RNA (1)...(19): siRNA sense strand
cagagcagaaaucaaauug

SEQ ID NO: 2137169 - RNA, 19 nt, Homo sapiens
  misc_RNA (1)...(19): siRNA sense strand
caauugggagcaucuaaau

SEQ ID NO: 2137170 - RNA, 19 nt, Homo sapiens
  misc_RNA (1)...(19): siRNA sense strand
gaccuauuguucaguuaca

SEQ ID NO: 2137171 - RNA, 19 nt, Homo sapiens
  misc_RNA (1)...(19): siRNA sense strand
aagcagaaaccggauguaa

SEQ ID NO: 2137172 - RNA, 19 nt, Homo sapiens
  misc_RNA (1)...(19): siRNA sense strand
cgauggaucccgcucagaa

SEQ ID NO: 2137173 - RNA, 19 nt, Homo sapiens
  misc_RNA (1)...(19): siRNA sense strand
uagaggacuuacagccaaa

SEQ ID NO: 2137174 - RNA, 19 nt, Homo sapiens
  misc_RNA (1)...(19): siRNA sense strand
ggaccuagaggacuuacag

SEQ ID NO: 2137175 - RNA, 19 nt, Homo sapiens
  misc_RNA (1)...(19): siRNA sense strand
aaaccaugcagaagauuug

SEQ ID NO: 2137176 - RNA, 19 nt, Homo sapiens
  misc_RNA (1)...(19): siRNA sense strand
ggcaccagcuacaucaauc

SEQ ID NO: 2137177 - RNA, 19 nt, Homo sapiens
  misc_RNA (1)...(19): siRNA sense strand
uaaucuauacacccuauga

SEQ ID NO: 2137178 - RNA, 19 nt, Homo sapiens
  misc_RNA (1)...(19): siRNA sense strand
caacauuaaaucaccaaca

SEQ ID NO: 2137179 - RNA, 19 nt, Homo sapiens
  misc_RNA (1)...(19): siRNA sense strand
aagacagccugaagaagau

SEQ ID NO: 2137180 - RNA, 19 nt, Homo sapiens
  misc_RNA (1)...(19): siRNA sense strand
caaauugaagagagcaguu

SEQ ID NO: 2137181 - RNA, 19 nt, Homo sapiens
  misc_RNA (1)...(19): siRNA sense strand
ggaguuuccuucuucauuu

SEQ ID NO: 2137182 - RNA, 19 nt, Homo sapiens
  misc_RNA (1)...(19): siRNA sense strand
aaucaggucuucuccauuu

SEQ ID NO: 2137183 - RNA, 19 nt, Homo sapiens
  misc_RNA (1)...(19): siRNA sense strand
cagcgugacucugccguua

SEQ ID NO: 2137184 - RNA, 19 nt, Homo sapiens
  misc_RNA (1)...(19): siRNA sense strand
gcugggaguuuccuucuuc

SEQ ID NO: 2137185 - RNA, 19 nt, Homo sapiens
  misc_RNA (1)...(19): siRNA sense strand
gccgaagcgucacauagaa

SEQ ID NO: 2137186 - RNA, 19 nt, Homo sapiens
  misc_RNA (1)...(19): siRNA sense strand
ugaaucaggucuucuccau

SEQ ID NO: 2137187 - RNA, 19 nt, Homo sapiens
  misc_RNA (1)...(19): siRNA sense strand
gggaguuuccuucuucauu

SEQ ID NO: 2137188 - RNA, 19 nt, Homo sapiens
  misc_RNA (1)...(19): siRNA sense strand
ggccgaagcgucacauaga

SEQ ID NO: 2137189 - RNA, 19 nt, Homo sapiens
  misc_RNA (1)...(19): siRNA sense strand
gaaucaggucuucuccauu

SEQ ID NO: 2137190 - RNA, 19 nt, Homo sapiens
  misc_RNA (1)...(19): siRNA sense strand
gaccugagagagcccagaa

SEQ ID NO: 2137191 - RNA, 19 nt, Homo sapiens
  misc_RNA (1)...(19): siRNA sense strand
gguucugucugcugcuuca

SEQ ID NO: 2137192 - RNA, 19 nt, Homo sapiens
  misc_RNA (1)...(19): siRNA sense strand
gugcgugaaucaggucuuc

SEQ ID NO: 2137193 - RNA, 19 nt, Homo sapiens
  misc_RNA (1)...(19): siRNA sense strand
gaguuuccuucuucauuuu

SEQ ID NO: 2137194 - RNA, 19 nt, Homo sapiens
  misc_RNA (1)...(19): siRNA sense strand
ccgaagcgucacauagaaa

SEQ ID NO: 2137195 - RNA, 19 nt, Homo sapiens
  misc_RNA (1)...(19): siRNA sense strand
gggccgaagcgucacauag

SEQ ID NO: 2137196 - RNA, 19 nt, Homo sapiens
  misc_RNA (1)...(19): siRNA sense strand
gaaauacaauugcaaaguc

SEQ ID NO: 2137197 - RNA, 19 nt, Homo sapiens
  misc_RNA (1)...(19): siRNA sense strand
ggaaagcuguuuauaagca

SEQ ID NO: 2137198 - RNA, 19 nt, Homo sapiens
  misc_RNA (1)...(19): siRNA sense strand
caugagaacuaaaugcaua

SEQ ID NO: 2137199 - RNA, 19 nt, Homo sapiens
  misc_RNA (1)...(19): siRNA sense strand
ucauggagauggcaaauaa

SEQ ID NO: 2137200 - RNA, 19 nt, Homo sapiens
  misc_RNA (1)...(19): siRNA sense strand
gaggaacagcccuaaauua

SEQ ID NO: 2137201 - RNA, 19 nt, Homo sapiens
  misc_RNA (1)...(19): siRNA sense strand
guggaaagcuguuuauaag

SEQ ID NO: 2137202 - RNA, 19 nt, Homo sapiens
  misc_RNA (1)...(19): siRNA sense strand
caauuuaugugacuaagga

SEQ ID NO: 2137203 - RNA, 19 nt, Homo sapiens
  misc_RNA (1)...(19): siRNA sense strand
gaaaugauugugccugaaa

SEQ ID NO: 2137204 - RNA, 19 nt, Homo sapiens
  misc_RNA (1)...(19): siRNA sense strand
caacacccaugagaacuaa

SEQ ID NO: 2137205 - RNA, 19 nt, Homo sapiens
  misc_RNA (1)...(19): siRNA sense strand
ggagacagauguggucaga

SEQ ID NO: 2137206 - RNA, 19 nt, Homo sapiens
  misc_RNA (1)...(19): siRNA sense strand
gaaauugaagagcauguuu

SEQ ID NO: 2137207 - RNA, 19 nt, Homo sapiens
  misc_RNA (1)...(19): siRNA sense strand
ggaacagcccuaaauuauu

SEQ ID NO: 2137208 - RNA, 19 nt, Homo sapiens
  misc_RNA (1)...(19): siRNA sense strand
uuacugagcuagaaacaau

SEQ ID NO: 2137209 - RNA, 19 nt, Homo sapiens
  misc_RNA (1)...(19): siRNA sense strand
caaaugaugacuuacguaa

SEQ ID NO: 2137210 - RNA, 19 nt, Homo sapiens
  misc_RNA (1)...(19): siRNA sense strand
aaacccagaugaacaaaug

SEQ ID NO: 2137211 - RNA, 19 nt, Homo sapiens
  misc_RNA (1)...(19): siRNA sense strand
gaucuuggcaaccaccuua

SEQ ID NO: 2137212 - RNA, 19 nt, Homo sapiens
  misc_RNA (1)...(19): siRNA sense strand
gcaaagucacuguaauuga

SEQ ID NO: 2137213 - RNA, 19 nt, Homo sapiens
  misc_RNA (1)...(19): siRNA sense strand
caaaguggaaagcuguuua

SEQ ID NO: 2137214 - RNA, 19 nt, Homo sapiens
  misc_RNA (1)...(19): siRNA sense strand
ggagauggcaaauaaggaa

SEQ ID NO: 2137215 - RNA, 19 nt, Homo sapiens
  misc_RNA (1)...(19): siRNA sense strand
uaagcagacucacuccaaa

SEQ ID NO: 2137216 - RNA, 19 nt, Homo sapiens
  misc_RNA (1)...(19): siRNA sense strand
ggaauucaaacccagauga

SEQ ID NO: 2137217 - RNA, 19 nt, Homo sapiens
  misc_RNA (1)...(19): siRNA sense strand
ccacgagaauuugcugaaa

SEQ ID NO: 2137218 - RNA, 19 nt, Homo sapiens
  misc_RNA (1)...(19): siRNA sense strand
ugaauccacuggcaagaga

SEQ ID NO: 2137219 - RNA, 19 nt, Homo sapiens
  misc_RNA (1)...(19): siRNA sense strand
gauggcacacagacaaaua

SEQ ID NO: 2137220 - RNA, 19 nt, Homo sapiens
  misc_RNA (1)...(19): siRNA sense strand
gaaagccaaguguuugcua

SEQ ID NO: 2137221 - RNA, 19 nt, Homo sapiens
  misc_RNA (1)...(19): siRNA sense strand
gaacaaaugaugacuuacg

SEQ ID NO: 2137222 - RNA, 19 nt, Homo sapiens
  misc_RNA (1)...(19): siRNA sense strand
gcagacgcugugagaaaua

SEQ ID NO: 2137223 - RNA, 19 nt, Homo sapiens
  misc_RNA (1)...(19): siRNA sense strand
caacugauguccaaaagga

SEQ ID NO: 2137224 - RNA, 19 nt, Homo sapiens
  misc_RNA (1)...(19): siRNA sense strand
uuacgcagcuuuaacuagu

SEQ ID NO: 2137225 - RNA, 19 nt, Homo sapiens
  misc_RNA (1)...(19): siRNA sense strand
gcgaggaacagcccuaaau

SEQ ID NO: 2137226 - RNA, 19 nt, Homo sapiens
  misc_RNA (1)...(19): siRNA sense strand
gagcagugguaccauagca

SEQ ID NO: 2137227 - RNA, 19 nt, Homo sapiens
  misc_RNA (1)...(19): siRNA sense strand
gcugugagaaauacaauug

SEQ ID NO: 2137228 - RNA, 19 nt, Homo sapiens
  misc_RNA (1)...(19): siRNA sense strand
aaagaaagccaaguguuug

SEQ ID NO: 2137229 - RNA, 19 nt, Homo sapiens
  misc_RNA (1)...(19): siRNA sense strand
cgaggaacagcccuaaauu

SEQ ID NO: 2137230 - RNA, 19 nt, Homo sapiens
  misc_RNA (1)...(19): siRNA sense strand
ggaaucuuguauccaggaa

SEQ ID NO: 2137231 - RNA, 19 nt, Homo sapiens
  misc_RNA (1)...(19): siRNA sense strand
caaauaaggaacugaagca

SEQ ID NO: 2137232 - RNA, 19 nt, Homo sapiens
  misc_RNA (1)...(19): siRNA sense strand
aggaacagcccuaaauuau

SEQ ID NO: 2137233 - RNA, 19 nt, Homo sapiens
  misc_RNA (1)...(19): siRNA sense strand
gagcuagaaacaauuuaug

SEQ ID NO: 2137234 - RNA, 19 nt, Homo sapiens
  misc_RNA (1)...(19): siRNA sense strand
ccagaugaacaaaugauga

SEQ ID NO: 2137235 - RNA, 19 nt, Homo sapiens
  misc_RNA (1)...(19): siRNA sense strand
gcacacagacaaauaaaau

SEQ ID NO: 2137236 - RNA, 19 nt, Homo sapiens
  misc_RNA (1)...(19): siRNA sense strand
caaccaccuuacugagcua

SEQ ID NO: 2137237 - RNA, 19 nt, Homo sapiens
  misc_RNA (1)...(19): siRNA sense strand
gcuagaaacaauuuaugug

SEQ ID NO: 2137238 - RNA, 19 nt, Homo sapiens
  misc_RNA (1)...(19): siRNA sense strand
gcaaaacucagugaaauga

SEQ ID NO: 2137239 - RNA, 19 nt, Homo sapiens
  misc_RNA (1)...(19): siRNA sense strand
ccaccuuacugagcuagaa

SEQ ID NO: 2137240 - RNA, 19 nt, Homo sapiens
  misc_RNA (1)...(19): siRNA sense strand
aguggaaagcuguuuauaa

SEQ ID NO: 2137241 - RNA, 19 nt, Homo sapiens
  misc_RNA (1)...(19): siRNA sense strand
aaagccaaguguuugcuau

SEQ ID NO: 2137242 - RNA, 19 nt, Homo sapiens
  misc_RNA (1)...(19): siRNA sense strand
uaacuaguucuuccacaga

SEQ ID NO: 2137243 - RNA, 19 nt, Homo sapiens
  misc_RNA (1)...(19): siRNA sense strand
ccacaacacccaugagaac

SEQ ID NO: 2137244 - RNA, 19 nt, Homo sapiens
  misc_RNA (1)...(19): siRNA sense strand
gccaaguguuugcuaucaa

SEQ ID NO: 2137245 - RNA, 19 nt, Homo sapiens
  misc_RNA (1)...(19): siRNA sense strand
gaugaacaaaugaugacuu

SEQ ID NO: 2137246 - RNA, 19 nt, Homo sapiens
  misc_RNA (1)...(19): siRNA sense strand
gcucgaauucucugucuuc

SEQ ID NO: 2137247 - RNA, 19 nt, Homo sapiens
  misc_RNA (1)...(19): siRNA sense strand
gaagaaaauucaggaccuu

SEQ ID NO: 2137248 - RNA, 19 nt, Homo sapiens
  misc_RNA (1)...(19): siRNA sense strand
aaaagaaagccaaguguuu

SEQ ID NO: 2137249 - RNA, 19 nt, Homo sapiens
  misc_RNA (1)...(19): siRNA sense strand
ugaaaugauugugccugaa

SEQ ID NO: 2137250 - RNA, 19 nt, Homo sapiens
  misc_RNA (1)...(19): siRNA sense strand
uuccacagaucaacccaaa

SEQ ID NO: 2137251 - RNA, 19 nt, Homo sapiens
  misc_RNA (1)...(19): siRNA sense strand
aaucuuguauccaggaaca

SEQ ID NO: 2137252 - RNA, 19 nt, Homo sapiens
  misc_RNA (1)...(19): siRNA sense strand
aaacucagugaaaugauug

SEQ ID NO: 2137253 - RNA, 19 nt, Homo sapiens
  misc_RNA (1)...(19): siRNA sense strand
gcugggugcggaauucaaa

SEQ ID NO: 2137254 - RNA, 19 nt, Homo sapiens
  misc_RNA (1)...(19): siRNA sense strand
ccagcugggugcggaauuc

SEQ ID NO: 2137255 - RNA, 19 nt, Homo sapiens
  misc_RNA (1)...(19): siRNA sense strand
uugcaaagucacuguaauu

SEQ ID NO: 2137256 - RNA, 19 nt, Homo sapiens
  misc_RNA (1)...(19): siRNA sense strand
cuaaaugcauagagcuucu

SEQ ID NO: 2137257 - RNA, 19 nt, Homo sapiens
  misc_RNA (1)...(19): siRNA sense strand
gauugugccugaaaauaga

SEQ ID NO: 2137258 - RNA, 19 nt, Homo sapiens
  misc_RNA (1)...(19): siRNA sense strand
acaacacccaugagaacua

SEQ ID NO: 2137259 - RNA, 19 nt, Homo sapiens
  misc_RNA (1)...(19): siRNA sense strand
gagaaauacaauugcaaag

SEQ ID NO: 2137260 - RNA, 19 nt, Homo sapiens
  misc_RNA (1)...(19): siRNA sense strand
uugagcaacugauguccaa

SEQ ID NO: 2137261 - RNA, 19 nt, Homo sapiens
  misc_RNA (1)...(19): siRNA sense strand
ggggagcagugguaccaua

SEQ ID NO: 2137262 - RNA, 19 nt, Homo sapiens
  misc_RNA (1)...(19): siRNA sense strand
caauugcaaagucacugua

SEQ ID NO: 2137263 - RNA, 19 nt, Homo sapiens
  misc_RNA (1)...(19): siRNA sense strand
guaauugauggcacacaga

SEQ ID NO: 2137264 - RNA, 19 nt, Homo sapiens
  misc_RNA (1)...(19): siRNA sense strand
gaucccacaacacccauga

SEQ ID NO: 2137265 - RNA, 19 nt, Homo sapiens
  misc_RNA (1)...(19): siRNA sense strand
ccacagaucaacccaaagc

SEQ ID NO: 2137266 - RNA, 19 nt, Homo sapiens
  misc_RNA (1)...(19): siRNA sense strand
aaaguggaaagcuguuuau

SEQ ID NO: 2137267 - RNA, 19 nt, Homo sapiens
  misc_RNA (1)...(19): siRNA sense strand
aaaguugccaauuugaaga

SEQ ID NO: 2137268 - RNA, 19 nt, Homo sapiens
  misc_RNA (1)...(19): siRNA sense strand
aagagaaauugaagagcau

SEQ ID NO: 2137269 - RNA, 19 nt, Homo sapiens
  misc_RNA (1)...(19): siRNA sense strand
auucaggaccuucucauga

SEQ ID NO: 2137270 - RNA, 19 nt, Homo sapiens
  misc_RNA (1)...(19): siRNA sense strand
gaugacuuacguaauuugu

SEQ ID NO: 2137271 - RNA, 19 nt, Homo sapiens
  misc_RNA (1)...(19): siRNA sense strand
acaaaugaugacuuacgua

SEQ ID NO: 2137272 - RNA, 19 nt, Homo sapiens
  misc_RNA (1)...(19): siRNA sense strand
ugugagaaauacaauugca

SEQ ID NO: 2137273 - RNA, 19 nt, Homo sapiens
  misc_RNA (1)...(19): siRNA sense strand
gauggcaaauaaggaacug

SEQ ID NO: 2137274 - RNA, 19 nt, Homo sapiens
  misc_RNA (1)...(19): siRNA sense strand
cagcucgaauucucugucu

SEQ ID NO: 2137275 - RNA, 19 nt, Homo sapiens
  misc_RNA (1)...(19): siRNA sense strand
aaaugcagacgcugugaga

SEQ ID NO: 2137276 - RNA, 19 nt, Homo sapiens
  misc_RNA (1)...(19): siRNA sense strand
gacccaagucagaaugaga

SEQ ID NO: 2137277 - RNA, 19 nt, Homo sapiens
  misc_RNA (1)...(19): siRNA sense strand
ugcagacgcugugagaaau

SEQ ID NO: 2137278 - RNA, 19 nt, Homo sapiens
  misc_RNA (1)...(19): siRNA sense strand
ccuccuacacggaaucuug

SEQ ID NO: 2137279 - RNA, 19 nt, Homo sapiens
  misc_RNA (1)...(19): siRNA sense strand
aaccuaaggaagagcauuu

SEQ ID NO: 2137280 - RNA, 19 nt, Homo sapiens
  misc_RNA (1)...(19): siRNA sense strand
gagaaauugaagagcaugu

SEQ ID NO: 2137281 - RNA, 19 nt, Homo sapiens
  misc_RNA (1)...(19): siRNA sense strand
caagucagaaugagacacu

SEQ ID NO: 2137282 - RNA, 19 nt, Homo sapiens
  misc_RNA (1)...(19): siRNA sense strand
gagcaacugauguccaaaa

SEQ ID NO: 2137283 - RNA, 19 nt, Homo sapiens
  misc_RNA (1)...(19): siRNA sense strand
ucaaaguggaaagcuguuu

SEQ ID NO: 2137284 - RNA, 19 nt, Homo sapiens
  misc_RNA (1)...(19): siRNA sense strand
uggcaaauaaggaacugaa

SEQ ID NO: 2137285 - RNA, 19 nt, Homo sapiens
  misc_RNA (1)...(19): siRNA sense strand
cuuguauccaggaacauua

SEQ ID NO: 2137286 - RNA, 19 nt, Homo sapiens
  misc_RNA (1)...(19): siRNA sense strand
aacaaaugaugacuuacgu

SEQ ID NO: 2137287 - RNA, 19 nt, Homo sapiens
  misc_RNA (1)...(19): siRNA sense strand
augcagacgcugugagaaa

SEQ ID NO: 2137288 - RNA, 19 nt, Homo sapiens
  misc_RNA (1)...(19): siRNA sense strand
gcacaucaaccuaucauuu

SEQ ID NO: 2137289 - RNA, 19 nt, Homo sapiens
  misc_RNA (1)...(19): siRNA sense strand
gacugaagcuaguggaaua

SEQ ID NO: 2137290 - RNA, 19 nt, Homo sapiens
  misc_RNA (1)...(19): siRNA sense strand
gaagugggauggagucgau

SEQ ID NO: 2137291 - RNA, 19 nt, Homo sapiens
  misc_RNA (1)...(19): siRNA sense strand
caauuuaccuacaaguuug

SEQ ID NO: 2137292 - RNA, 19 nt, Homo sapiens
  misc_RNA (1)...(19): siRNA sense strand
ugaugacacuguuaaguuu

SEQ ID NO: 2137293 - RNA, 19 nt, Homo sapiens
  misc_RNA (1)...(19): siRNA sense strand
agaggaauguaaccaauuu

SEQ ID NO: 2137294 - RNA, 19 nt, Homo sapiens
  misc_RNA (1)...(19): siRNA sense strand
gcagcuagaucuguauguu

SEQ ID NO: 2137295 - RNA, 19 nt, Homo sapiens
  misc_RNA (1)...(19): siRNA sense strand
ccaauuuaccuacaaguuu

SEQ ID NO: 2137296 - RNA, 19 nt, Homo sapiens
  misc_RNA (1)...(19): siRNA sense strand
gaagcuaguggaauacaaa

SEQ ID NO: 2137297 - RNA, 19 nt, Homo sapiens
  misc_RNA (1)...(19): siRNA sense strand
gaucguugguugcuucugu

SEQ ID NO: 2137298 - RNA, 19 nt, Homo sapiens
  misc_RNA (1)...(19): siRNA sense strand
caagcaggauaucauguug

SEQ ID NO: 2137299 - RNA, 19 nt, Homo sapiens
  misc_RNA (1)...(19): siRNA sense strand
cuacaaguuugccgaagaa

SEQ ID NO: 2137300 - RNA, 19 nt, Homo sapiens
  misc_RNA (1)...(19): siRNA sense strand
guggauuucugggcauuua

SEQ ID NO: 2137301 - RNA, 19 nt, Homo sapiens
  misc_RNA (1)...(19): siRNA sense strand
gggauggagucgauucuuc

SEQ ID NO: 2137302 - RNA, 19 nt, Homo sapiens
  misc_RNA (1)...(19): siRNA sense strand
ggacaaagggcagcuagau

SEQ ID NO: 2137303 - RNA, 19 nt, Homo sapiens
  misc_RNA (1)...(19): siRNA sense strand
gaaaucagaaggcagucuu

SEQ ID NO: 2137304 - RNA, 19 nt, Homo sapiens
  misc_RNA (1)...(19): siRNA sense strand
cagcuagaucuguauguua

SEQ ID NO: 2137305 - RNA, 19 nt, Homo sapiens
  misc_RNA (1)...(19): siRNA sense strand
caaguuugccgaagaaauc

SEQ ID NO: 2137306 - RNA, 19 nt, Homo sapiens
  misc_RNA (1)...(19): siRNA sense strand
gcaguuuugugcccauuua

SEQ ID NO: 2137307 - RNA, 19 nt, Homo sapiens
  misc_RNA (1)...(19): siRNA sense strand
gaggaauguaaccaauuua

SEQ ID NO: 2137308 - RNA, 19 nt, Homo sapiens
  misc_RNA (1)...(19): siRNA sense strand
agcuagaucuguauguuaa

SEQ ID NO: 2137309 - RNA, 19 nt, Homo sapiens
  misc_RNA (1)...(19): siRNA sense strand
cuucauggcccgacuaaga

SEQ ID NO: 2137310 - RNA, 19 nt, Homo sapiens
  misc_RNA (1)...(19): siRNA sense strand
cacaucaaccuaucauuug

SEQ ID NO: 2137311 - RNA, 19 nt, Homo sapiens
  misc_RNA (1)...(19): siRNA sense strand
ccuacaaguuugccgaaga

SEQ ID NO: 2137312 - RNA, 19 nt, Homo sapiens
  misc_RNA (1)...(19): siRNA sense strand
ccaagcaggauaucauguu

SEQ ID NO: 2137313 - RNA, 19 nt, Homo sapiens
  misc_RNA (1)...(19): siRNA sense strand
aagggcagcuagaucugua

SEQ ID NO: 2137314 - RNA, 19 nt, Homo sapiens
  misc_RNA (1)...(19): siRNA sense strand
ggacugaagcuaguggaau

SEQ ID NO: 2137315 - RNA, 19 nt, Homo sapiens
  misc_RNA (1)...(19): siRNA sense strand
uggcaaaccuggugagacu

SEQ ID NO: 2137316 - RNA, 19 nt, Homo sapiens
  misc_RNA (1)...(19): siRNA sense strand
gaauacaaaggacagaagu

SEQ ID NO: 2137317 - RNA, 19 nt, Homo sapiens
  misc_RNA (1)...(19): siRNA sense strand
gcuaguggaauacaaagga

SEQ ID NO: 2137318 - RNA, 19 nt, Homo sapiens
  misc_RNA (1)...(19): siRNA sense strand
uaaccaauuuaccuacaag

SEQ ID NO: 2137319 - RNA, 19 nt, Homo sapiens
  misc_RNA (1)...(19): siRNA sense strand
agaggaaaauggaaucuuu

SEQ ID NO: 2137320 - RNA, 19 nt, Homo sapiens
  misc_RNA (1)...(19): siRNA sense strand
cgacugcacguauccauca

SEQ ID NO: 2137321 - RNA, 19 nt, Homo sapiens
  misc_RNA (1)...(19): siRNA sense strand
ggaauacaaaggacagaag

SEQ ID NO: 2137322 - RNA, 19 nt, Homo sapiens
  misc_RNA (1)...(19): siRNA sense strand
ugaagcuaguggaauacaa

SEQ ID NO: 2137323 - RNA, 19 nt, Homo sapiens
  misc_RNA (1)...(19): siRNA sense strand
auagaggaauguaaccaau

SEQ ID NO: 2137324 - RNA, 19 nt, Homo sapiens
  misc_RNA (1)...(19): siRNA sense strand
acaaagggcagcuagaucu

SEQ ID NO: 2137325 - RNA, 19 nt, Homo sapiens
  misc_RNA (1)...(19): siRNA sense strand
gaagcacaucaaccuauca

SEQ ID NO: 2137326 - RNA, 19 nt, Homo sapiens
  misc_RNA (1)...(19): siRNA sense strand
gacaaagggcagcuagauc

SEQ ID NO: 2137327 - RNA, 19 nt, Homo sapiens
  misc_RNA (1)...(19): siRNA sense strand
guugguugcuucuguucug

SEQ ID NO: 2137328 - RNA, 19 nt, Homo sapiens
  misc_RNA (1)...(19): siRNA sense strand
gguugcuucuguucugcua

SEQ ID NO: 2137329 - RNA, 19 nt, Homo sapiens
  misc_RNA (1)...(19): siRNA sense strand
cagaaccgacugcacguau

SEQ ID NO: 2137330 - RNA, 19 nt, Homo sapiens
  misc_RNA (1)...(19): siRNA sense strand
uagaggaauguaaccaauu

SEQ ID NO: 2137331 - RNA, 19 nt, Homo sapiens
  misc_RNA (1)...(19): siRNA sense strand
ggaaaauggaaucuuugua

SEQ ID NO: 2137332 - RNA, 19 nt, Homo sapiens
  misc_RNA (1)...(19): siRNA sense strand
uugaugacacuguuaaguu

SEQ ID NO: 2137333 - RNA, 19 nt, Homo sapiens
  misc_RNA (1)...(19): siRNA sense strand
cagagaaaaucacuuaguc

SEQ ID NO: 2137334 - RNA, 19 nt, Homo sapiens
  misc_RNA (1)...(19): siRNA sense strand
ucacuuagucuccacuuuu

SEQ ID NO: 2137335 - RNA, 19 nt, Homo sapiens
  misc_RNA (1)...(19): siRNA sense strand
ucugggcauuuaccacuug

SEQ ID NO: 2137336 - RNA, 19 nt, Homo sapiens
  misc_RNA (1)...(19): siRNA sense strand
caaagggcagcuagaucug

SEQ ID NO: 2137337 - RNA, 19 nt, Homo sapiens
  misc_RNA (1)...(19): siRNA sense strand
gaaacuaacucuucugaaa

SEQ ID NO: 2137338 - RNA, 19 nt, Homo sapiens
  misc_RNA (1)...(19): siRNA sense strand
ggccggagcugaaauauga

SEQ ID NO: 2137339 - RNA, 19 nt, Homo sapiens
  misc_RNA (1)...(19): siRNA sense strand
gaacgaagcugcucuugcu

SEQ ID NO: 2137340 - RNA, 19 nt, Homo sapiens
  misc_RNA (1)...(19): siRNA sense strand
ggaagugacucuccugguu

SEQ ID NO: 2137341 - RNA, 19 nt, Homo sapiens
  misc_RNA (1)...(19): siRNA sense strand
gaacaagaagcccagauaa

SEQ ID NO: 2137342 - RNA, 19 nt, Homo sapiens
  misc_RNA (1)...(19): siRNA sense strand
uuagagagcugccaaauca

SEQ ID NO: 2137343 - RNA, 19 nt, Homo sapiens
  misc_RNA (1)...(19): siRNA sense strand
caaaugaccaccuuuauug

SEQ ID NO: 2137344 - RNA, 19 nt, Homo sapiens
  misc_RNA (1)...(19): siRNA sense strand
ggaggccagugguaaauuu

SEQ ID NO: 2137345 - RNA, 19 nt, Homo sapiens
  misc_RNA (1)...(19): siRNA sense strand
gcacuuccauuaaggaugu

SEQ ID NO: 2137346 - RNA, 19 nt, Homo sapiens
  misc_RNA (1)...(19): siRNA sense strand
ggaaaggcgugaauuacau

SEQ ID NO: 2137347 - RNA, 19 nt, Homo sapiens
  misc_RNA (1)...(19): siRNA sense strand
gcucagcggucccuauuga

SEQ ID NO: 2137348 - RNA, 19 nt, Homo sapiens
  misc_RNA (1)...(19): siRNA sense strand
gaugggagaugacggcaaa

SEQ ID NO: 2137349 - RNA, 19 nt, Homo sapiens
  misc_RNA (1)...(19): siRNA sense strand
ggagagauccaguugcuuu

SEQ ID NO: 2137350 - RNA, 19 nt, Homo sapiens
  misc_RNA (1)...(19): siRNA sense strand
uaacauggccaacaagaaa

SEQ ID NO: 2137351 - RNA, 19 nt, Homo sapiens
  misc_RNA (1)...(19): siRNA sense strand
ggaacaagaagcccagaua

SEQ ID NO: 2137352 - RNA, 19 nt, Homo sapiens
  misc_RNA (1)...(19): siRNA sense strand
gaaaagcgcucggaaguga

SEQ ID NO: 2137353 - RNA, 19 nt, Homo sapiens
  misc_RNA (1)...(19): siRNA sense strand
gaugguauguggccacuga

SEQ ID NO: 2137354 - RNA, 19 nt, Homo sapiens
  misc_RNA (1)...(19): siRNA sense strand
gcaaugaaacuaacucuuc

SEQ ID NO: 2137355 - RNA, 19 nt, Homo sapiens
  misc_RNA (1)...(19): siRNA sense strand
uccaggaggucgauauuua

SEQ ID NO: 2137356 - RNA, 19 nt, Homo sapiens
  misc_RNA (1)...(19): siRNA sense strand
gaagaaagcacaggaaucu

SEQ ID NO: 2137357 - RNA, 19 nt, Homo sapiens
  misc_RNA (1)...(19): siRNA sense strand
gagacuacuucaucaauca

SEQ ID NO: 2137358 - RNA, 19 nt, Homo sapiens
  misc_RNA (1)...(19): siRNA sense strand
aaggacaacucacuucuuu

SEQ ID NO: 2137359 - RNA, 19 nt, Homo sapiens
  misc_RNA (1)...(19): siRNA sense strand
gaacauaaagaaagcacuu

SEQ ID NO: 2137360 - RNA, 19 nt, Homo sapiens
  misc_RNA (1)...(19): siRNA sense strand
gucagaagcugcaaagaau

SEQ ID NO: 2137361 - RNA, 19 nt, Homo sapiens
  misc_RNA (1)...(19): siRNA sense strand
gagaagaacauaaagaaag

SEQ ID NO: 2137362 - RNA, 19 nt, Homo sapiens
  misc_RNA (1)...(19): siRNA sense strand
ggucagaagcugcaaagaa

SEQ ID NO: 2137363 - RNA, 19 nt, Homo sapiens
  misc_RNA (1)...(19): siRNA sense strand
gcagaccagugacaauuca

SEQ ID NO: 2137364 - RNA, 19 nt, Homo sapiens
  misc_RNA (1)...(19): siRNA sense strand
guccaauccugucaaagua

SEQ ID NO: 2137365 - RNA, 19 nt, Homo sapiens
  misc_RNA (1)...(19): siRNA sense strand
ucacugucauucagccuua

SEQ ID NO: 2137366 - RNA, 19 nt, Homo sapiens
  misc_RNA (1)...(19): siRNA sense strand
caaaggcauugaacacuuc

SEQ ID NO: 2137367 - RNA, 19 nt, Homo sapiens
  misc_RNA (1)...(19): siRNA sense strand
ggaggucgauauuuaacau

SEQ ID NO: 2137368 - RNA, 19 nt, Homo sapiens
  misc_RNA (1)...(19): siRNA sense strand
gauggagccugaaacuaug

SEQ ID NO: 2137369 - RNA, 19 nt, Homo sapiens
  misc_RNA (1)...(19): siRNA sense strand
gcagagggcauccaguuug

SEQ ID NO: 2137370 - RNA, 19 nt, Homo sapiens
  misc_RNA (1)...(19): siRNA sense strand
ccaaaugaccaccuuuauu

SEQ ID NO: 2137371 - RNA, 19 nt, Homo sapiens
  misc_RNA (1)...(19): siRNA sense strand
gaauuagcuucgucccaaa

SEQ ID NO: 2137372 - RNA, 19 nt, Homo sapiens
  misc_RNA (1)...(19): siRNA sense strand
ccaccuggcuuuagagaca

SEQ ID NO: 2137373 - RNA, 19 nt, Homo sapiens
  misc_RNA (1)...(19): siRNA sense strand
cugaaacuauggagacuaa

SEQ ID NO: 2137374 - RNA, 19 nt, Homo sapiens
  misc_RNA (1)...(19): siRNA sense strand
ccagauaacauacauagau

SEQ ID NO: 2137375 - RNA, 19 nt, Homo sapiens
  misc_RNA (1)...(19): siRNA sense strand
gaaaggcgugaauuacauu

SEQ ID NO: 2137376 - RNA, 19 nt, Homo sapiens
  misc_RNA (1)...(19): siRNA sense strand
ccaaggcucuucaguggau

SEQ ID NO: 2137377 - RNA, 19 nt, Homo sapiens
  misc_RNA (1)...(19): siRNA sense strand
gcaaggacagucaaagaug

SEQ ID NO: 2137378 - RNA, 19 nt, Homo sapiens
  misc_RNA (1)...(19): siRNA sense strand
cagaagagcagaccgaguu

SEQ ID NO: 2137379 - RNA, 19 nt, Homo sapiens
  misc_RNA (1)...(19): siRNA sense strand
gaacuggccacagcacaaa

SEQ ID NO: 2137380 - RNA, 19 nt, Homo sapiens
  misc_RNA (1)...(19): siRNA sense strand
gaaaaccucucccgcaugu

SEQ ID NO: 2137381 - RNA, 19 nt, Homo sapiens
  misc_RNA (1)...(19): siRNA sense strand
gaaaaucucccucaaauac

SEQ ID NO: 2137382 - RNA, 19 nt, Homo sapiens
  misc_RNA (1)...(19): siRNA sense strand
gagaagggacuggauaaug

SEQ ID NO: 2137383 - RNA, 19 nt, Homo sapiens
  misc_RNA (1)...(19): siRNA sense strand
ucagugaccuacgauugua

SEQ ID NO: 2137384 - RNA, 19 nt, Homo sapiens
  misc_RNA (1)...(19): siRNA sense strand
gggcgagacuacuucauca

SEQ ID NO: 2137385 - RNA, 19 nt, Homo sapiens
  misc_RNA (1)...(19): siRNA sense strand
gucaacaccugagcacuuu

SEQ ID NO: 2137386 - RNA, 19 nt, Homo sapiens
  misc_RNA (1)...(19): siRNA sense strand
gaacuccacgugcuagaug

SEQ ID NO: 2137387 - RNA, 19 nt, Homo sapiens
  misc_RNA (1)...(19): siRNA sense strand
caaagcaaaucaaaacuug

SEQ ID NO: 2137388 - RNA, 19 nt, Homo sapiens
  misc_RNA (1)...(19): siRNA sense strand
ucgaguaucucuauguuca

SEQ ID NO: 2137389 - RNA, 19 nt, Homo sapiens
  misc_RNA (1)...(19): siRNA sense strand
ggagaucagauuguaauga

SEQ ID NO: 2137390 - RNA, 19 nt, Homo sapiens
  misc_RNA (1)...(19): siRNA sense strand
caagguccauuaucucaag

SEQ ID NO: 2137391 - RNA, 19 nt, Homo sapiens
  misc_RNA (1)...(19): siRNA sense strand
gacugcagcacuuccauua

SEQ ID NO: 2137392 - RNA, 19 nt, Homo sapiens
  misc_RNA (1)...(19): siRNA sense strand
gaacagcagaccagugaca

SEQ ID NO: 2137393 - RNA, 19 nt, Homo sapiens
  misc_RNA (1)...(19): siRNA sense strand
ggaggaggccagugguaaa

SEQ ID NO: 2137394 - RNA, 19 nt, Homo sapiens
  misc_RNA (1)...(19): siRNA sense strand
cagaaaaucucccucaaau

SEQ ID NO: 2137395 - RNA, 19 nt, Homo sapiens
  misc_RNA (1)...(19): siRNA sense strand
caaugaaacuaacucuucu

SEQ ID NO: 2137396 - RNA, 19 nt, Homo sapiens
  misc_RNA (1)...(19): siRNA sense strand
aagaagcccagauaacaua

SEQ ID NO: 2137397 - RNA, 19 nt, Homo sapiens
  misc_RNA (1)...(19): siRNA sense strand
aaagcucucugcacuacaa

SEQ ID NO: 2137398 - RNA, 19 nt, Homo sapiens
  misc_RNA (1)...(19): siRNA sense strand
gaaagagaagaacauaaag

SEQ ID NO: 2137399 - RNA, 19 nt, Homo sapiens
  misc_RNA (1)...(19): siRNA sense strand
aaaguccaauccugucaaa

SEQ ID NO: 2137400 - RNA, 19 nt, Homo sapiens
  misc_RNA (1)...(19): siRNA sense strand
ccaaaguugugccuuccaa

SEQ ID NO: 2137401 - RNA, 19 nt, Homo sapiens
  misc_RNA (1)...(19): siRNA sense strand
augaaacgcuacuagauga

SEQ ID NO: 2137402 - RNA, 19 nt, Homo sapiens
  misc_RNA (1)...(19): siRNA sense strand
ccaugaaccuggccugcuu

SEQ ID NO: 2137403 - RNA, 19 nt, Homo sapiens
  misc_RNA (1)...(19): siRNA sense strand
gaaagucuaucuggaaaau

SEQ ID NO: 2137404 - RNA, 19 nt, Homo sapiens
  misc_RNA (1)...(19): siRNA sense strand
gaacaggagacucuaacuc

SEQ ID NO: 2137405 - RNA, 19 nt, Homo sapiens
  misc_RNA (1)...(19): siRNA sense strand
gggaaaggcgugaauuaca

SEQ ID NO: 2137406 - RNA, 19 nt, Homo sapiens
  misc_RNA (1)...(19): siRNA sense strand
ccaggaggucgauauuuaa

SEQ ID NO: 2137407 - RNA, 19 nt, Homo sapiens
  misc_RNA (1)...(19): siRNA sense strand
gaguaucucuauguucaga

SEQ ID NO: 2137408 - RNA, 19 nt, Homo sapiens
  misc_RNA (1)...(19): siRNA sense strand
ugacacaggcaaucccuuu

SEQ ID NO: 2137409 - RNA, 19 nt, Homo sapiens
  misc_RNA (1)...(19): siRNA sense strand
gaaacuauggagacuaagu

SEQ ID NO: 2137410 - RNA, 19 nt, Homo sapiens
  misc_RNA (1)...(19): siRNA sense strand
agaagggacuggauaaugc

SEQ ID NO: 2137411 - RNA, 19 nt, Homo sapiens
  misc_RNA (1)...(19): siRNA sense strand
gaaaacaaggggaagcaua

SEQ ID NO: 2137412 - RNA, 19 nt, Homo sapiens
  misc_RNA (1)...(19): siRNA sense strand
cggaaacuguuaaggacaa

SEQ ID NO: 2137413 - RNA, 19 nt, Homo sapiens
  misc_RNA (1)...(19): siRNA sense strand
gcucugcacacagccauua

SEQ ID NO: 2137414 - RNA, 19 nt, Homo sapiens
  misc_RNA (1)...(19): siRNA sense strand
cagaaggugaugacaauga

SEQ ID NO: 2137415 - RNA, 19 nt, Homo sapiens
  misc_RNA (1)...(19): siRNA sense strand
ugacaucauugaccucaca

SEQ ID NO: 2137416 - RNA, 19 nt, Homo sapiens
  misc_RNA (1)...(19): siRNA sense strand
guccugaaaugcuggagaa

SEQ ID NO: 2137417 - RNA, 19 nt, Homo sapiens
  misc_RNA (1)...(19): siRNA sense strand
gagagcgggucaucgaucu

SEQ ID NO: 2137418 - RNA, 19 nt, Homo sapiens
  misc_RNA (1)...(19): siRNA sense strand
gaaggugggauggcugaaa

SEQ ID NO: 2137419 - RNA, 19 nt, Homo sapiens
  misc_RNA (1)...(19): siRNA sense strand
agauggagccugaaacuau

SEQ ID NO: 2137420 - RNA, 19 nt, Homo sapiens
  misc_RNA (1)...(19): siRNA sense strand
ggaaaauucuguuuaugca

SEQ ID NO: 2137421 - RNA, 19 nt, Homo sapiens
  misc_RNA (1)...(19): siRNA sense strand
gcaccggcacuuguacaua

SEQ ID NO: 2137422 - RNA, 19 nt, Homo sapiens
  misc_RNA (1)...(19): siRNA sense strand
cugcaaagcaugaaagaga

SEQ ID NO: 2137423 - RNA, 19 nt, Homo sapiens
  misc_RNA (1)...(19): siRNA sense strand
uaaggaaaccacaguguag

SEQ ID NO: 2137424 - RNA, 19 nt, Homo sapiens
  misc_RNA (1)...(19): siRNA sense strand
cgagacuacuucaucaauc

SEQ ID NO: 2137425 - RNA, 19 nt, Homo sapiens
  misc_RNA (1)...(19): siRNA sense strand
uaaauuugguacugugucu

SEQ ID NO: 2137426 - RNA, 19 nt, Homo sapiens
  misc_RNA (1)...(19): siRNA sense strand
ugaaaugacugagaguucu

SEQ ID NO: 2137427 - RNA, 19 nt, Homo sapiens
  misc_RNA (1)...(19): siRNA sense strand
aagaacagcagaccaguga

SEQ ID NO: 2137428 - RNA, 19 nt, Homo sapiens
  misc_RNA (1)...(19): siRNA sense strand
gcuaugaaacgcuacuaga

SEQ ID NO: 2137429 - RNA, 19 nt, Homo sapiens
  misc_RNA (1)...(19): siRNA sense strand
caccggcacuuguacauag

SEQ ID NO: 2137430 - RNA, 19 nt, Homo sapiens
  misc_RNA (1)...(19): siRNA sense strand
acaagaagcccagauaaca

SEQ ID NO: 2137431 - RNA, 19 nt, Homo sapiens
  misc_RNA (1)...(19): siRNA sense strand
cauaagccaugucaucaac

SEQ ID NO: 2137432 - RNA, 19 nt, Homo sapiens
  misc_RNA (1)...(19): siRNA sense strand
ccacggagccaccuuuaag

SEQ ID NO: 2137433 - RNA, 19 nt, Homo sapiens
  misc_RNA (1)...(19): siRNA sense strand
gcaaagcgagggccauuuu

SEQ ID NO: 2137434 - RNA, 19 nt, Homo sapiens
  misc_RNA (1)...(19): siRNA sense strand
agaugaggguccugaaaug

SEQ ID NO: 2137435 - RNA, 19 nt, Homo sapiens
  misc_RNA (1)...(19): siRNA sense strand
aaacacagcgacccaggaa

SEQ ID NO: 2137436 - RNA, 19 nt, Homo sapiens
  misc_RNA (1)...(19): siRNA sense strand
uauuuaacauggccaacaa

SEQ ID NO: 2137437 - RNA, 19 nt, Homo sapiens
  misc_RNA (1)...(19): siRNA sense strand
gaauucagauccagaaaua

SEQ ID NO: 2137438 - RNA, 19 nt, Homo sapiens
  misc_RNA (1)...(19): siRNA sense strand
cagaagagcuuguacauuc

SEQ ID NO: 2137439 - RNA, 19 nt, Homo sapiens
  misc_RNA (1)...(19): siRNA sense strand
gaacuuucauccaguguuu

SEQ ID NO: 2137440 - RNA, 19 nt, Homo sapiens
  misc_RNA (1)...(19): siRNA sense strand
gcagaugccagcccaauua

SEQ ID NO: 2137441 - RNA, 19 nt, Homo sapiens
  misc_RNA (1)...(19): siRNA sense strand
aaacaaaccuacaggagaa

SEQ ID NO: 2137442 - RNA, 19 nt, Homo sapiens
  misc_RNA (1)...(19): siRNA sense strand
uaaacaagcugugaucuau

SEQ ID NO: 2137443 - RNA, 19 nt, Homo sapiens
  misc_RNA (1)...(19): siRNA sense strand
gagaauagauaugucuuug

SEQ ID NO: 2137444 - RNA, 19 nt, Homo sapiens
  misc_RNA (1)...(19): siRNA sense strand
caaaugaccuacgacauga

SEQ ID NO: 2137445 - RNA, 19 nt, Homo sapiens
  misc_RNA (1)...(19): siRNA sense strand
caaggcagauguaaaugaa

SEQ ID NO: 2137446 - RNA, 19 nt, Homo sapiens
  misc_RNA (1)...(19): siRNA sense strand
gaaauacacaggagaauag

SEQ ID NO: 2137447 - RNA, 19 nt, Homo sapiens
  misc_RNA (1)...(19): siRNA sense strand
gaugccagcccaauuauaa

SEQ ID NO: 2137448 - RNA, 19 nt, Homo sapiens
  misc_RNA (1)...(19): siRNA sense strand
aaagaacgguuacagaaug

SEQ ID NO: 2137449 - RNA, 19 nt, Homo sapiens
  misc_RNA (1)...(19): siRNA sense strand
uggccgagcuucagaguaa

SEQ ID NO: 2137450 - RNA, 19 nt, Homo sapiens
  misc_RNA (1)...(19): siRNA sense strand
acucauaaguucagagaaa

SEQ ID NO: 2137451 - RNA, 19 nt, Homo sapiens
  misc_RNA (1)...(19): siRNA sense strand
guaaacaagcugugaucua

SEQ ID NO: 2137452 - RNA, 19 nt, Homo sapiens
  misc_RNA (1)...(19): siRNA sense strand
gaaaagaacgguuacagaa

SEQ ID NO: 2137453 - RNA, 19 nt, Homo sapiens
  misc_RNA (1)...(19): siRNA sense strand
gacaugacauugaaagaag

SEQ ID NO: 2137454 - RNA, 19 nt, Homo sapiens
  misc_RNA (1)...(19): siRNA sense strand
ccaaaugaccuacgacaug

SEQ ID NO: 2137455 - RNA, 19 nt, Homo sapiens
  misc_RNA (1)...(19): siRNA sense strand
gcuuguacauucaggcuaa

SEQ ID NO: 2137456 - RNA, 19 nt, Homo sapiens
  misc_RNA (1)...(19): siRNA sense strand
ggagaauagauaugucuuu

SEQ ID NO: 2137457 - RNA, 19 nt, Homo sapiens
  misc_RNA (1)...(19): siRNA sense strand
aaucaggccugguacagaa

SEQ ID NO: 2137458 - RNA, 19 nt, Homo sapiens
  misc_RNA (1)...(19): siRNA sense strand
ucucaacaaugcaagauau

SEQ ID NO: 2137459 - RNA, 19 nt, Homo sapiens
  misc_RNA (1)...(19): siRNA sense strand
agagagggaugaucagaau

SEQ ID NO: 2137460 - RNA, 19 nt, Homo sapiens
  misc_RNA (1)...(19): siRNA sense strand
aacaagcugugaucuauga

SEQ ID NO: 2137461 - RNA, 19 nt, Homo sapiens
  misc_RNA (1)...(19): siRNA sense strand
acacaaggcagauguaaau

SEQ ID NO: 2137462 - RNA, 19 nt, Homo sapiens
  misc_RNA (1)...(19): siRNA sense strand
gagcguuucucaacaaugc

SEQ ID NO: 2137463 - RNA, 19 nt, Homo sapiens
  misc_RNA (1)...(19): siRNA sense strand
auacacaggagaauagaua

SEQ ID NO: 2137464 - RNA, 19 nt, Homo sapiens
  misc_RNA (1)...(19): siRNA sense strand
cgacaugacauugaaagaa

SEQ ID NO: 2137465 - RNA, 19 nt, Homo sapiens
  misc_RNA (1)...(19): siRNA sense strand
guucagagaaagauuaaug

SEQ ID NO: 2137466 - RNA, 19 nt, Homo sapiens
  misc_RNA (1)...(19): siRNA sense strand
agaaauacacaggagaaua

SEQ ID NO: 2137467 - RNA, 19 nt, Homo sapiens
  misc_RNA (1)...(19): siRNA sense strand
caacaaugcaagauauaca

SEQ ID NO: 2137468 - RNA, 19 nt, Homo sapiens
  misc_RNA (1)...(19): siRNA sense strand
uaucagcguuuacgguuca

SEQ ID NO: 2137469 - RNA, 19 nt, Homo sapiens
  misc_RNA (1)...(19): siRNA sense strand
ccagaaauacacaggagaa

SEQ ID NO: 2137470 - RNA, 19 nt, Homo sapiens
  misc_RNA (1)...(19): siRNA sense strand
aagaacgguuacagaauga

SEQ ID NO: 2137471 - RNA, 19 nt, Homo sapiens
  misc_RNA (1)...(19): siRNA sense strand
ccuacgacaugacauugaa

SEQ ID NO: 2137472 - RNA, 19 nt, Homo sapiens
  misc_RNA (1)...(19): siRNA sense strand
caaaccuacaggagaauuu

SEQ ID NO: 2137473 - RNA, 19 nt, Homo sapiens
  misc_RNA (1)...(19): siRNA sense strand
gcucaggaaaucauaacaa

SEQ ID NO: 2137474 - RNA, 19 nt, Homo sapiens
  misc_RNA (1)...(19): siRNA sense strand
ggcuaaguaucagcguuua

SEQ ID NO: 2137475 - RNA, 19 nt, Homo sapiens
  misc_RNA (1)...(19): siRNA sense strand
guuugaacaucuugacuca

SEQ ID NO: 2137476 - RNA, 19 nt, Homo sapiens
  misc_RNA (1)...(19): siRNA sense strand
ccagcccaauuauaaauca

SEQ ID NO: 2137477 - RNA, 19 nt, Homo sapiens
  misc_RNA (1)...(19): siRNA sense strand
aggcagauguaaaugaaau

SEQ ID NO: 2137478 - RNA, 19 nt, Homo sapiens
  misc_RNA (1)...(19): siRNA sense strand
cagagaaagauuaaugaga

SEQ ID NO: 2137479 - RNA, 19 nt, Homo sapiens
  misc_RNA (1)...(19): siRNA sense strand
guacauucaggcuaaguau

SEQ ID NO: 2137480 - RNA, 19 nt, Homo sapiens
  misc_RNA (1)...(19): siRNA sense strand
agaagagcuuguacauuca

SEQ ID NO: 2137481 - RNA, 19 nt, Homo sapiens
  misc_RNA (1)...(19): siRNA sense strand
uuauaaaucaggccuggua

SEQ ID NO: 2137482 - RNA, 19 nt, Homo sapiens
  misc_RNA (1)...(19): siRNA sense strand
gguuacagaaugaagauga

SEQ ID NO: 2137483 - RNA, 19 nt, Homo sapiens
  misc_RNA (1)...(19): siRNA sense strand
gcagagagggaugaucaga

SEQ ID NO: 2137484 - RNA, 19 nt, Homo sapiens
  misc_RNA (1)...(19): siRNA sense strand
acaaggcagauguaaauga

SEQ ID NO: 2137485 - RNA, 19 nt, Homo sapiens
  misc_RNA (1)...(19): siRNA sense strand
gaaagaaggcgaaaagaac

SEQ ID NO: 2137486 - RNA, 19 nt, Homo sapiens
  misc_RNA (1)...(19): siRNA sense strand
gcagauguaaaugaaauuc

SEQ ID NO: 2137487 - RNA, 19 nt, Homo sapiens
  misc_RNA (1)...(19): siRNA sense strand
caucaccuggcauuacuuu

SEQ ID NO: 2137488 - RNA, 19 nt, Homo sapiens
  misc_RNA (1)...(19): siRNA sense strand
ccaucaaguuaaagcaaau

SEQ ID NO: 2137489 - RNA, 19 nt, Homo sapiens
  misc_RNA (1)...(19): siRNA sense strand
ugacucaacucagaauacu

SEQ ID NO: 2137490 - RNA, 19 nt, Homo sapiens
  misc_RNA (1)...(19): siRNA sense strand
cucaggaaaucauaacaau

SEQ ID NO: 2137491 - RNA, 19 nt, Homo sapiens
  misc_RNA (1)...(19): siRNA sense strand
gaacgguuacagaaugaag

SEQ ID NO: 2137492 - RNA, 19 nt, Homo sapiens
  misc_RNA (1)...(19): siRNA sense strand
uccaucaaguuaaagcaaa

SEQ ID NO: 2137493 - RNA, 19 nt, Homo sapiens
  misc_RNA (1)...(19): siRNA sense strand
aggagaauuugcucaggaa

SEQ ID NO: 2137494 - RNA, 19 nt, Homo sapiens
  misc_RNA (1)...(19): siRNA sense strand
caccuggcauuacuuuaca

SEQ ID NO: 2137495 - RNA, 19 nt, Homo sapiens
  misc_RNA (1)...(19): siRNA sense strand
ugaccuacgacaugacauu

SEQ ID NO: 2137496 - RNA, 19 nt, Homo sapiens
  misc_RNA (1)...(19): siRNA sense strand
gaguaaacaagcugugauc

SEQ ID NO: 2137497 - RNA, 19 nt, Homo sapiens
  misc_RNA (1)...(19): siRNA sense strand
gaugaucagaauuccaguu

SEQ ID NO: 2137498 - RNA, 19 nt, Homo sapiens
  misc_RNA (1)...(19): siRNA sense strand
aagcugugaucuaugaauc

SEQ ID NO: 2137499 - RNA, 19 nt, Homo sapiens
  misc_RNA (1)...(19): siRNA sense strand
cagagagggaugaucagaa

SEQ ID NO: 2137500 - RNA, 19 nt, Homo sapiens
  misc_RNA (1)...(19): siRNA sense strand
ucacucauaaguucagaga

SEQ ID NO: 2137501 - RNA, 19 nt, Homo sapiens
  misc_RNA (1)...(19): siRNA sense strand
uggcauuacuuuacaugag

SEQ ID NO: 2137502 - RNA, 19 nt, Homo sapiens
  misc_RNA (1)...(19): siRNA sense strand
ggagaauuugcucaggaaa

SEQ ID NO: 2137503 - RNA, 19 nt, Homo sapiens
  misc_RNA (1)...(19): siRNA sense strand
ugaauucagauccagaaau

SEQ ID NO: 2137504 - RNA, 19 nt, Homo sapiens
  misc_RNA (1)...(19): siRNA sense strand
acauucaggcuaaguauca

SEQ ID NO: 2137505 - RNA, 19 nt, Homo sapiens
  misc_RNA (1)...(19): siRNA sense strand
agagggaugaucagaauuc

SEQ ID NO: 2137506 - RNA, 19 nt, Homo sapiens
  misc_RNA (1)...(19): siRNA sense strand
gagcuucagaguaaacaag

SEQ ID NO: 2137507 - RNA, 19 nt, Homo sapiens
  misc_RNA (1)...(19): siRNA sense strand
uuacuuuacaugagcguuu

SEQ ID NO: 2137508 - RNA, 19 nt, Homo sapiens
  misc_RNA (1)...(19): siRNA sense strand
cagaguaaacaagcuguga

SEQ ID NO: 2137509 - RNA, 19 nt, Homo sapiens
  misc_RNA (1)...(19): siRNA sense strand
gagagggaugaucagaauu

SEQ ID NO: 2137510 - RNA, 19 nt, Homo sapiens
  misc_RNA (1)...(19): siRNA sense strand
gaccuacgacaugacauug

SEQ ID NO: 2137511 - RNA, 19 nt, Homo sapiens
  misc_RNA (1)...(19): siRNA sense strand
gauauacacaaggcagaug

SEQ ID NO: 2137512 - RNA, 19 nt, Homo sapiens
  misc_RNA (1)...(19): siRNA sense strand
cugcagagagggaugauca

SEQ ID NO: 2137513 - RNA, 19 nt, Homo sapiens
  misc_RNA (1)...(19): siRNA sense strand
ugaaagaaggcgaaaagaa

SEQ ID NO: 2137514 - RNA, 19 nt, Homo sapiens
  misc_RNA (1)...(19): siRNA sense strand
ucaccuggcauuacuuuac

SEQ ID NO: 2137515 - RNA, 19 nt, Homo sapiens
  misc_RNA (1)...(19): siRNA sense strand
aaugcaagauauacacaag

SEQ ID NO: 2137516 - RNA, 19 nt, Homo sapiens
  misc_RNA (1)...(19): siRNA sense strand
cacaggagaauagauaugu

SEQ ID NO: 2137517 - RNA, 19 nt, Homo sapiens
  misc_RNA (1)...(19): siRNA sense strand
gaagagcuuguacauucag

SEQ ID NO: 2137518 - RNA, 19 nt, Homo sapiens
  misc_RNA (1)...(19): siRNA sense strand
acagaagagcuuguacauu

SEQ ID NO: 2137519 - RNA, 19 nt, Homo sapiens
  misc_RNA (1)...(19): siRNA sense strand
aaaccuacaggagaauuug

SEQ ID NO: 2137520 - RNA, 19 nt, Homo sapiens
  misc_RNA (1)...(19): siRNA sense strand
aaacaagcugugaucuaug

SEQ ID NO: 2137521 - RNA, 19 nt, Homo sapiens
  misc_RNA (1)...(19): siRNA sense strand
caaugcaagauauacacaa

SEQ ID NO: 2137522 - RNA, 19 nt, Homo sapiens
  misc_RNA (1)...(19): siRNA sense strand
cagaugccagcccaauuau

SEQ ID NO: 2137523 - RNA, 19 nt, Homo sapiens
  misc_RNA (1)...(19): siRNA sense strand
guuacagaaugaagaugag

SEQ ID NO: 2137524 - RNA, 19 nt, Homo sapiens
  misc_RNA (1)...(19): siRNA sense strand
caagcugugaucuaugaau

SEQ ID NO: 2137525 - RNA, 19 nt, Homo sapiens
  misc_RNA (1)...(19): siRNA sense strand
gaauucagauccagaaaua

SEQ ID NO: 2137526 - RNA, 19 nt, Homo sapiens
  misc_RNA (1)...(19): siRNA sense strand
gaacuuucauccaguguuu

SEQ ID NO: 2137527 - RNA, 19 nt, Homo sapiens
  misc_RNA (1)...(19): siRNA sense strand
gaaaguggcaugaagauga

SEQ ID NO: 2137528 - RNA, 19 nt, Homo sapiens
  misc_RNA (1)...(19): siRNA sense strand
gaagaaaucacuuacaguu

SEQ ID NO: 2137529 - RNA, 19 nt, Homo sapiens
  misc_RNA (1)...(19): siRNA sense strand
gaacucagaaguacuguaa

SEQ ID NO: 2137530 - RNA, 19 nt, Homo sapiens
  misc_RNA (1)...(19): siRNA sense strand
caaaguauccuaugacuau

SEQ ID NO: 2137531 - RNA, 19 nt, Homo sapiens
  misc_RNA (1)...(19): siRNA sense strand
acaaggagcucauuucaga

SEQ ID NO: 2137532 - RNA, 19 nt, Homo sapiens
  misc_RNA (1)...(19): siRNA sense strand
aaacaaaccuacaggagaa

SEQ ID NO: 2137533 - RNA, 19 nt, Homo sapiens
  misc_RNA (1)...(19): siRNA sense strand
uaaacaagcugugaucuau

SEQ ID NO: 2137534 - RNA, 19 nt, Homo sapiens
  misc_RNA (1)...(19): siRNA sense strand
cuaaagacguggagaggua

SEQ ID NO: 2137535 - RNA, 19 nt, Homo sapiens
  misc_RNA (1)...(19): siRNA sense strand
caaccaaaguauccuauga

SEQ ID NO: 2137536 - RNA, 19 nt, Homo sapiens
  misc_RNA (1)...(19): siRNA sense strand
gagaauagauaugucuuug

SEQ ID NO: 2137537 - RNA, 19 nt, Homo sapiens
  misc_RNA (1)...(19): siRNA sense strand
caaaugaccuacgacauga

SEQ ID NO: 2137538 - RNA, 19 nt, Homo sapiens
  misc_RNA (1)...(19): siRNA sense strand
gaaggaaaguggcaugaag

SEQ ID NO: 2137539 - RNA, 19 nt, Homo sapiens
  misc_RNA (1)...(19): siRNA sense strand
gaaauacacaggagaauag

SEQ ID NO: 2137540 - RNA, 19 nt, Homo sapiens
  misc_RNA (1)...(19): siRNA sense strand
caaggcagauguaaaugaa

SEQ ID NO: 2137541 - RNA, 19 nt, Homo sapiens
  misc_RNA (1)...(19): siRNA sense strand
gagagagacucaagaugga

SEQ ID NO: 2137542 - RNA, 19 nt, Homo sapiens
  misc_RNA (1)...(19): siRNA sense strand
aaagaacgguuacagaaug

SEQ ID NO: 2137543 - RNA, 19 nt, Homo sapiens
  misc_RNA (1)...(19): siRNA sense strand
gagagcaauucuuccagua

SEQ ID NO: 2137544 - RNA, 19 nt, Homo sapiens
  misc_RNA (1)...(19): siRNA sense strand
gauuugcgaucuaguaaug

SEQ ID NO: 2137545 - RNA, 19 nt, Homo sapiens
  misc_RNA (1)...(19): siRNA sense strand
gugaaacccucgccuauca

SEQ ID NO: 2137546 - RNA, 19 nt, Homo sapiens
  misc_RNA (1)...(19): siRNA sense strand
uggccgagcuucagaguaa

SEQ ID NO: 2137547 - RNA, 19 nt, Homo sapiens
  misc_RNA (1)...(19): siRNA sense strand
gaaguacuguaaggaagaa

SEQ ID NO: 2137548 - RNA, 19 nt, Homo sapiens
  misc_RNA (1)...(19): siRNA sense strand
guaaacaagcugugaucua

SEQ ID NO: 2137549 - RNA, 19 nt, Homo sapiens
  misc_RNA (1)...(19): siRNA sense strand
gaaaagaacgguuacagaa

SEQ ID NO: 2137550 - RNA, 19 nt, Homo sapiens
  misc_RNA (1)...(19): siRNA sense strand
gacaugacauugaaagaag

SEQ ID NO: 2137551 - RNA, 19 nt, Homo sapiens
  misc_RNA (1)...(19): siRNA sense strand
ccaaaugaccuacgacaug

SEQ ID NO: 2137552 - RNA, 19 nt, Homo sapiens
  misc_RNA (1)...(19): siRNA sense strand
ccacagaguuagaggaagu

SEQ ID NO: 2137553 - RNA, 19 nt, Homo sapiens
  misc_RNA (1)...(19): siRNA sense strand
gauguugauuugcgaucua

SEQ ID NO: 2137554 - RNA, 19 nt, Homo sapiens
  misc_RNA (1)...(19): siRNA sense strand
ggagaauagauaugucuuu

SEQ ID NO: 2137555 - RNA, 19 nt, Homo sapiens
  misc_RNA (1)...(19): siRNA sense strand
ccaguaaccaacuugauaa

SEQ ID NO: 2137556 - RNA, 19 nt, Homo sapiens
  misc_RNA (1)...(19): siRNA sense strand
agagagggaugaucagaau

SEQ ID NO: 2137557 - RNA, 19 nt, Homo sapiens
  misc_RNA (1)...(19): siRNA sense strand
aacaagcugugaucuauga

SEQ ID NO: 2137558 - RNA, 19 nt, Homo sapiens
  misc_RNA (1)...(19): siRNA sense strand
acacaaggcagauguaaau

SEQ ID NO: 2137559 - RNA, 19 nt, Homo sapiens
  misc_RNA (1)...(19): siRNA sense strand
ucucaacaaugcaagauau

SEQ ID NO: 2137560 - RNA, 19 nt, Homo sapiens
  misc_RNA (1)...(19): siRNA sense strand
gagcguuucucaacaaugc

SEQ ID NO: 2137561 - RNA, 19 nt, Homo sapiens
  misc_RNA (1)...(19): siRNA sense strand
guaaggaagaagauagaaa

SEQ ID NO: 2137562 - RNA, 19 nt, Homo sapiens
  misc_RNA (1)...(19): siRNA sense strand
gaucuaguaaugacaaaug

SEQ ID NO: 2137563 - RNA, 19 nt, Homo sapiens
  misc_RNA (1)...(19): siRNA sense strand
ggagaacucagaaguacug

SEQ ID NO: 2137564 - RNA, 19 nt, Homo sapiens
  misc_RNA (1)...(19): siRNA sense strand
auacacaggagaauagaua

SEQ ID NO: 2137565 - RNA, 19 nt, Homo sapiens
  misc_RNA (1)...(19): siRNA sense strand
gagcaauucuuccaguaac

SEQ ID NO: 2137566 - RNA, 19 nt, Homo sapiens
  misc_RNA (1)...(19): siRNA sense strand
gaagagggagagagacuca

SEQ ID NO: 2137567 - RNA, 19 nt, Homo sapiens
  misc_RNA (1)...(19): siRNA sense strand
gcucauuucagaagaggua

SEQ ID NO: 2137568 - RNA, 19 nt, Homo sapiens
  misc_RNA (1)...(19): siRNA sense strand
cgacaugacauugaaagaa

SEQ ID NO: 2137569 - RNA, 19 nt, Homo sapiens
  misc_RNA (1)...(19): siRNA sense strand
agaaauacacaggagaaua

SEQ ID NO: 2137570 - RNA, 19 nt, Homo sapiens
  misc_RNA (1)...(19): siRNA sense strand
ccugaugaccacagaguua

SEQ ID NO: 2137571 - RNA, 19 nt, Homo sapiens
  misc_RNA (1)...(19): siRNA sense strand
aaugacaaauggaaggaaa

SEQ ID NO: 2137572 - RNA, 19 nt, Homo sapiens
  misc_RNA (1)...(19): siRNA sense strand
caggguugcuucuagcuau

SEQ ID NO: 2137573 - RNA, 19 nt, Homo sapiens
  misc_RNA (1)...(19): siRNA sense strand
cagcauugccuguacuuau

SEQ ID NO: 2137574 - RNA, 19 nt, Homo sapiens
  misc_RNA (1)...(19): siRNA sense strand
gaccacagaguuagaggaa

SEQ ID NO: 2137575 - RNA, 19 nt, Homo sapiens
  misc_RNA (1)...(19): siRNA sense strand
caacaaugcaagauauaca

SEQ ID NO: 2137576 - RNA, 19 nt, Homo sapiens
  misc_RNA (1)...(19): siRNA sense strand
gaagaaaacaguagauaca

SEQ ID NO: 2137577 - RNA, 19 nt, Homo sapiens
  misc_RNA (1)...(19): siRNA sense strand
gagacaaggagcucauuuc

SEQ ID NO: 2137578 - RNA, 19 nt, Homo sapiens
  misc_RNA (1)...(19): siRNA sense strand
aagaacgguuacagaauga

SEQ ID NO: 2137579 - RNA, 19 nt, Homo sapiens
  misc_RNA (1)...(19): siRNA sense strand
ccuacgacaugacauugaa

SEQ ID NO: 2137580 - RNA, 19 nt, Homo sapiens
  misc_RNA (1)...(19): siRNA sense strand
ccagaaauacacaggagaa

SEQ ID NO: 2137581 - RNA, 19 nt, Homo sapiens
  misc_RNA (1)...(19): siRNA sense strand
agcauucccucccaccuua

SEQ ID NO: 2137582 - RNA, 19 nt, Homo sapiens
  misc_RNA (1)...(19): siRNA sense strand
ccagagaccaguucagcaa

SEQ ID NO: 2137583 - RNA, 19 nt, Homo sapiens
  misc_RNA (1)...(19): siRNA sense strand
caaaccuacaggagaauuu

SEQ ID NO: 2137584 - RNA, 19 nt, Homo sapiens
  misc_RNA (1)...(19): siRNA sense strand
gaccaggacuuuucugaug

SEQ ID NO: 2137585 - RNA, 19 nt, Homo sapiens
  misc_RNA (1)...(19): siRNA sense strand
ggucaauagcagauucuuu

SEQ ID NO: 2137586 - RNA, 19 nt, Homo sapiens
  misc_RNA (1)...(19): siRNA sense strand
gcucaggaaaucauaacaa

SEQ ID NO: 2137587 - RNA, 19 nt, Homo sapiens
  misc_RNA (1)...(19): siRNA sense strand
guuugaacaucuugacuca

SEQ ID NO: 2137588 - RNA, 19 nt, Homo sapiens
  misc_RNA (1)...(19): siRNA sense strand
ggaagaaaucacuuacagu

SEQ ID NO: 2137589 - RNA, 19 nt, Homo sapiens
  misc_RNA (1)...(19): siRNA sense strand
gaaacccucgccuaucaau

SEQ ID NO: 2137590 - RNA, 19 nt, Homo sapiens
  misc_RNA (1)...(19): siRNA sense strand
ccaggaacccaaaguggaa

SEQ ID NO: 2137591 - RNA, 19 nt, Homo sapiens
  misc_RNA (1)...(19): siRNA sense strand
gguuacagaaugaagauga

SEQ ID NO: 2137592 - RNA, 19 nt, Homo sapiens
  misc_RNA (1)...(19): siRNA sense strand
aggcagauguaaaugaaau

SEQ ID NO: 2137593 - RNA, 19 nt, Homo sapiens
  misc_RNA (1)...(19): siRNA sense strand
gaaaacaguagauacauuc

SEQ ID NO: 2137594 - RNA, 19 nt, Homo sapiens
  misc_RNA (1)...(19): siRNA sense strand
gaaagaaggggauuguaga

SEQ ID NO: 2137595 - RNA, 19 nt, Homo sapiens
  misc_RNA (1)...(19): siRNA sense strand
gaacacccagagaccaguu

SEQ ID NO: 2137596 - RNA, 19 nt, Homo sapiens
  misc_RNA (1)...(19): siRNA sense strand
gcagagagggaugaucaga

SEQ ID NO: 2137597 - RNA, 19 nt, Homo sapiens
  misc_RNA (1)...(19): siRNA sense strand
agcauugccuguacuuauu

SEQ ID NO: 2137598 - RNA, 19 nt, Homo sapiens
  misc_RNA (1)...(19): siRNA sense strand
ucagaaguacuguaaggaa

SEQ ID NO: 2137599 - RNA, 19 nt, Homo sapiens
  misc_RNA (1)...(19): siRNA sense strand
gagcauucccucccaccuu

SEQ ID NO: 2137600 - RNA, 19 nt, Homo sapiens
  misc_RNA (1)...(19): siRNA sense strand
guaaccaacuugauaaaag

SEQ ID NO: 2137601 - RNA, 19 nt, Homo sapiens
  misc_RNA (1)...(19): siRNA sense strand
uccaguaaccaacuugaua

SEQ ID NO: 2137602 - RNA, 19 nt, Homo sapiens
  misc_RNA (1)...(19): siRNA sense strand
caaacguccuaagcucuug

SEQ ID NO: 2137603 - RNA, 19 nt, Homo sapiens
  misc_RNA (1)...(19): siRNA sense strand
gcagauucuuuuagauuug

SEQ ID NO: 2137604 - RNA, 19 nt, Homo sapiens
  misc_RNA (1)...(19): siRNA sense strand
gaaagaaggcgaaaagaac

SEQ ID NO: 2137605 - RNA, 19 nt, Homo sapiens
  misc_RNA (1)...(19): siRNA sense strand
acaaggcagauguaaauga

SEQ ID NO: 2137606 - RNA, 19 nt, Homo sapiens
  misc_RNA (1)...(19): siRNA sense strand
agaaggggauuguagaaaa

SEQ ID NO: 2137607 - RNA, 19 nt, Homo sapiens
  misc_RNA (1)...(19): siRNA sense strand
ccaaaguauccuaugacua

SEQ ID NO: 2137608 - RNA, 19 nt, Homo sapiens
  misc_RNA (1)...(19): siRNA sense strand
gcagauguaaaugaaauuc

SEQ ID NO: 2137609 - RNA, 19 nt, Homo sapiens
  misc_RNA (1)...(19): siRNA sense strand
gcgaucuaguaaugacaaa

SEQ ID NO: 2137610 - RNA, 19 nt, Homo sapiens
  misc_RNA (1)...(19): siRNA sense strand
guugauuugcgaucuagua

SEQ ID NO: 2137611 - RNA, 19 nt, Homo sapiens
  misc_RNA (1)...(19): siRNA sense strand
ggacaagucaaagaaccuu

SEQ ID NO: 2137612 - RNA, 19 nt, Homo sapiens
  misc_RNA (1)...(19): siRNA sense strand
agacaaggagcucauuuca

SEQ ID NO: 2137613 - RNA, 19 nt, Homo sapiens
  misc_RNA (1)...(19): siRNA sense strand
gaugggagaacucagaagu

SEQ ID NO: 2137614 - RNA, 19 nt, Homo sapiens
  misc_RNA (1)...(19): siRNA sense strand
ggagcucauuucagaagag

SEQ ID NO: 2137615 - RNA, 19 nt, Homo sapiens
  misc_RNA (1)...(19): siRNA sense strand
ugaggaucgugauuucaga

SEQ ID NO: 2137616 - RNA, 19 nt, Homo sapiens
  misc_RNA (1)...(19): siRNA sense strand
ggaaaguggcaugaagaug

SEQ ID NO: 2137617 - RNA, 19 nt, Homo sapiens
  misc_RNA (1)...(19): siRNA sense strand
caucaccuggcauuacuuu

SEQ ID NO: 2137618 - RNA, 19 nt, Homo sapiens
  misc_RNA (1)...(19): siRNA sense strand
ccaucaaguuaaagcaaau

SEQ ID NO: 2137619 - RNA, 19 nt, Homo sapiens
  misc_RNA (1)...(19): siRNA sense strand
uuaaaccgucuaagaaaga

SEQ ID NO: 2137620 - RNA, 19 nt, Homo sapiens
  misc_RNA (1)...(19): siRNA sense strand
cuuaggaagaaaucacuua

SEQ ID NO: 2137621 - RNA, 19 nt, Homo sapiens
  misc_RNA (1)...(19): siRNA sense strand
cucaggaaaucauaacaau

SEQ ID NO: 2137622 - RNA, 19 nt, Homo sapiens
  misc_RNA (1)...(19): siRNA sense strand
ugacucaacucagaauacu

SEQ ID NO: 2137623 - RNA, 19 nt, Homo sapiens
  misc_RNA (1)...(19): siRNA sense strand
aggaagaaaucacuuacag

SEQ ID NO: 2137624 - RNA, 19 nt, Homo sapiens
  misc_RNA (1)...(19): siRNA sense strand
cagaaaauauggacacaca

SEQ ID NO: 2137625 - RNA, 19 nt, Homo sapiens
  misc_RNA (1)...(19): siRNA sense strand
gaauaacucugucaaccua

SEQ ID NO: 2137626 - RNA, 19 nt, Homo sapiens
  misc_RNA (1)...(19): siRNA sense strand
gaagaaaucuaggcagaaa

SEQ ID NO: 2137627 - RNA, 19 nt, Homo sapiens
  misc_RNA (1)...(19): siRNA sense strand
ucacaggcauggccaauua

SEQ ID NO: 2137628 - RNA, 19 nt, Homo sapiens
  misc_RNA (1)...(19): siRNA sense strand
caaggaauauugacguaua

SEQ ID NO: 2137629 - RNA, 19 nt, Homo sapiens
  misc_RNA (1)...(19): siRNA sense strand
gcagaucuaccaccaguua

SEQ ID NO: 2137630 - RNA, 19 nt, Homo sapiens
  misc_RNA (1)...(19): siRNA sense strand
ggacaaauagaagacauua

SEQ ID NO: 2137631 - RNA, 19 nt, Homo sapiens
  misc_RNA (1)...(19): siRNA sense strand
gaaaauggccggugaauug

SEQ ID NO: 2137632 - RNA, 19 nt, Homo sapiens
  misc_RNA (1)...(19): siRNA sense strand
ugaaugaccuacaaaugaa

SEQ ID NO: 2137633 - RNA, 19 nt, Homo sapiens
  misc_RNA (1)...(19): siRNA sense strand
gcugagccauugucaaauu

SEQ ID NO: 2137634 - RNA, 19 nt, Homo sapiens
  misc_RNA (1)...(19): siRNA sense strand
gcaauacccugaucuucug

SEQ ID NO: 2137635 - RNA, 19 nt, Homo sapiens
  misc_RNA (1)...(19): siRNA sense strand
gaaccaccacucugcuuua

SEQ ID NO: 2137636 - RNA, 19 nt, Homo sapiens
  misc_RNA (1)...(19): siRNA sense strand
ugacguauauguacacaga

SEQ ID NO: 2137637 - RNA, 19 nt, Homo sapiens
  misc_RNA (1)...(19): siRNA sense strand
caaagcggcuauagaaaca

SEQ ID NO: 2137638 - RNA, 19 nt, Homo sapiens
  misc_RNA (1)...(19): siRNA sense strand
uagcaaagguguagauauc

SEQ ID NO: 2137639 - RNA, 19 nt, Homo sapiens
  misc_RNA (1)...(19): siRNA sense strand
cgacaaagucaucauguuu

SEQ ID NO: 2137640 - RNA, 19 nt, Homo sapiens
  misc_RNA (1)...(19): siRNA sense strand
ugaaagauccuaugauugu

SEQ ID NO: 2137641 - RNA, 19 nt, Homo sapiens
  misc_RNA (1)...(19): siRNA sense strand
gaaauggacaaauagaaga

SEQ ID NO: 2137642 - RNA, 19 nt, Homo sapiens
  misc_RNA (1)...(19): siRNA sense strand
ggaagaucuuguaguaaug

SEQ ID NO: 2137643 - RNA, 19 nt, Homo sapiens
  misc_RNA (1)...(19): siRNA sense strand
cggaagaucuuguaguaau

SEQ ID NO: 2137644 - RNA, 19 nt, Homo sapiens
  misc_RNA (1)...(19): siRNA sense strand
aggcauaucugcagaauca

SEQ ID NO: 2137645 - RNA, 19 nt, Homo sapiens
  misc_RNA (1)...(19): siRNA sense strand
gaaagauccuaugauuguu

SEQ ID NO: 2137646 - RNA, 19 nt, Homo sapiens
  misc_RNA (1)...(19): siRNA sense strand
guaaauacagugaagcaaa

SEQ ID NO: 2137647 - RNA, 19 nt, Homo sapiens
  misc_RNA (1)...(19): siRNA sense strand
ggacagagcaaaucagagu

SEQ ID NO: 2137648 - RNA, 19 nt, Homo sapiens
  misc_RNA (1)...(19): siRNA sense strand
ggaagagggcggaggcuaa

SEQ ID NO: 2137649 - RNA, 19 nt, Homo sapiens
  misc_RNA (1)...(19): siRNA sense strand
caacuagcacuuucuuauu

SEQ ID NO: 2137650 - RNA, 19 nt, Homo sapiens
  misc_RNA (1)...(19): siRNA sense strand
gcacagagaaacacgauca

SEQ ID NO: 2137651 - RNA, 19 nt, Homo sapiens
  misc_RNA (1)...(19): siRNA sense strand
ggccaaagcggcuauagaa

SEQ ID NO: 2137652 - RNA, 19 nt, Homo sapiens
  misc_RNA (1)...(19): siRNA sense strand
ggaaacauaaagauacuga

SEQ ID NO: 2137653 - RNA, 19 nt, Homo sapiens
  misc_RNA (1)...(19): siRNA sense strand
gcaaagguguagauaucau

SEQ ID NO: 2137654 - RNA, 19 nt, Homo sapiens
  misc_RNA (1)...(19): siRNA sense strand
gugauuaacuggagaaagg

SEQ ID NO: 2137655 - RNA, 19 nt, Homo sapiens
  misc_RNA (1)...(19): siRNA sense strand
gagaaacacgaucaagaaa

SEQ ID NO: 2137656 - RNA, 19 nt, Homo sapiens
  misc_RNA (1)...(19): siRNA sense strand
gcugagcaauacaaguuaa

SEQ ID NO: 2137657 - RNA, 19 nt, Homo sapiens
  misc_RNA (1)...(19): siRNA sense strand
gaaugggccugggaugcua

SEQ ID NO: 2137658 - RNA, 19 nt, Homo sapiens
  misc_RNA (1)...(19): siRNA sense strand
uaagaagcauaaccuacuu

SEQ ID NO: 2137659 - RNA, 19 nt, Homo sapiens
  misc_RNA (1)...(19): siRNA sense strand
cauaacgugugaugacuug

SEQ ID NO: 2137660 - RNA, 19 nt, Homo sapiens
  misc_RNA (1)...(19): siRNA sense strand
acauauugcugaugacuug

SEQ ID NO: 2137661 - RNA, 19 nt, Homo sapiens
  misc_RNA (1)...(19): siRNA sense strand
cuacaaggaauagaucuua

SEQ ID NO: 2137662 - RNA, 19 nt, Homo sapiens
  misc_RNA (1)...(19): siRNA sense strand
ccacucugcuuuaaaauaa

SEQ ID NO: 2137663 - RNA, 19 nt, Homo sapiens
  misc_RNA (1)...(19): siRNA sense strand
caacuuggccagauacugu

SEQ ID NO: 2137664 - RNA, 19 nt, Homo sapiens
  misc_RNA (1)...(19): siRNA sense strand
uccggaagaucuuguagua

SEQ ID NO: 2137665 - RNA, 19 nt, Homo sapiens
  misc_RNA (1)...(19): siRNA sense strand
uggagaagcugagccauug

SEQ ID NO: 2137666 - RNA, 19 nt, Homo sapiens
  misc_RNA (1)...(19): siRNA sense strand
caacuugcagguuuaaaga

SEQ ID NO: 2137667 - RNA, 19 nt, Homo sapiens
  misc_RNA (1)...(19): siRNA sense strand
ggaauagaucuuauaguag

SEQ ID NO: 2137668 - RNA, 19 nt, Homo sapiens
  misc_RNA (1)...(19): siRNA sense strand
cauaucugcagaaucauua

SEQ ID NO: 2137669 - RNA, 19 nt, Homo sapiens
  misc_RNA (1)...(19): siRNA sense strand
ccaauuauucuacaaggaa

SEQ ID NO: 2137670 - RNA, 19 nt, Homo sapiens
  misc_RNA (1)...(19): siRNA sense strand
cuacaacauucgacaaaca

SEQ ID NO: 2137671 - RNA, 19 nt, Homo sapiens
  misc_RNA (1)...(19): siRNA sense strand
ucaaauugggaucgcauua

SEQ ID NO: 2137672 - RNA, 19 nt, Homo sapiens
  misc_RNA (1)...(19): siRNA sense strand
agagaaacacgaucaagaa

SEQ ID NO: 2137673 - RNA, 19 nt, Homo sapiens
  misc_RNA (1)...(19): siRNA sense strand
cugaaugaccuacaaauga

SEQ ID NO: 2137674 - RNA, 19 nt, Homo sapiens
  misc_RNA (1)...(19): siRNA sense strand
ucuaaugccuggguuuauu

SEQ ID NO: 2137675 - RNA, 19 nt, Homo sapiens
  misc_RNA (1)...(19): siRNA sense strand
guaaagccaacgccaauuc

SEQ ID NO: 2137676 - RNA, 19 nt, Homo sapiens
  misc_RNA (1)...(19): siRNA sense strand
cccgaggucuugaucuuaa

SEQ ID NO: 2137677 - RNA, 19 nt, Homo sapiens
  misc_RNA (1)...(19): siRNA sense strand
ucaacuagcacuuucuuau

SEQ ID NO: 2137678 - RNA, 19 nt, Homo sapiens
  misc_RNA (1)...(19): siRNA sense strand
caacgccaauucagucaca

SEQ ID NO: 2137679 - RNA, 19 nt, Homo sapiens
  misc_RNA (1)...(19): siRNA sense strand
caagcugcaugucugaaau

SEQ ID NO: 2137680 - RNA, 19 nt, Homo sapiens
  misc_RNA (1)...(19): siRNA sense strand
aagaaaaccuggacaaaga

SEQ ID NO: 2137681 - RNA, 19 nt, Homo sapiens
  misc_RNA (1)...(19): siRNA sense strand
gagcaguagaggacuuuaa

SEQ ID NO: 2137682 - RNA, 19 nt, Homo sapiens
  misc_RNA (1)...(19): siRNA sense strand
caacauaacgugugaugac

SEQ ID NO: 2137683 - RNA, 19 nt, Homo sapiens
  misc_RNA (1)...(19): siRNA sense strand
gaaaugcaggugauuaacu

SEQ ID NO: 2137684 - RNA, 19 nt, Homo sapiens
  misc_RNA (1)...(19): siRNA sense strand
auagggaaaugaaagcaaa

SEQ ID NO: 2137685 - RNA, 19 nt, Homo sapiens
  misc_RNA (1)...(19): siRNA sense strand
gcauaucugcagaaucauu

SEQ ID NO: 2137686 - RNA, 19 nt, Homo sapiens
  misc_RNA (1)...(19): siRNA sense strand
caacaagcugcaugucuga

SEQ ID NO: 2137687 - RNA, 19 nt, Homo sapiens
  misc_RNA (1)...(19): siRNA sense strand
aagcugagccauugucaaa

SEQ ID NO: 2137688 - RNA, 19 nt, Homo sapiens
  misc_RNA (1)...(19): siRNA sense strand
ggaagaaaucuaggcagaa

SEQ ID NO: 2137689 - RNA, 19 nt, Homo sapiens
  misc_RNA (1)...(19): siRNA sense strand
gacaaagacgcaaggaguu

SEQ ID NO: 2137690 - RNA, 19 nt, Homo sapiens
  misc_RNA (1)...(19): siRNA sense strand
gaaacacgaucaagaaaac

SEQ ID NO: 2137691 - RNA, 19 nt, Homo sapiens
  misc_RNA (1)...(19): siRNA sense strand
cagagaaacacgaucaaga

SEQ ID NO: 2137692 - RNA, 19 nt, Homo sapiens
  misc_RNA (1)...(19): siRNA sense strand
ccaccacucugcuuuaaaa

SEQ ID NO: 2137693 - RNA, 19 nt, Homo sapiens
  misc_RNA (1)...(19): siRNA sense strand
guacgucaacuagcacuuu

SEQ ID NO: 2137694 - RNA, 19 nt, Homo sapiens
  misc_RNA (1)...(19): siRNA sense strand
gaggcugaaugaccuacaa

SEQ ID NO: 2137695 - RNA, 19 nt, Homo sapiens
  misc_RNA (1)...(19): siRNA sense strand
gcauauauggugguagaaa

SEQ ID NO: 2137696 - RNA, 19 nt, Homo sapiens
  misc_RNA (1)...(19): siRNA sense strand
cauaauaaggguagggauu

SEQ ID NO: 2137697 - RNA, 19 nt, Homo sapiens
  misc_RNA (1)...(19): siRNA sense strand
gaagcaaaagucagaauuu

SEQ ID NO: 2137698 - RNA, 19 nt, Homo sapiens
  misc_RNA (1)...(19): siRNA sense strand
caaaagaggcacagagaaa

SEQ ID NO: 2137699 - RNA, 19 nt, Homo sapiens
  misc_RNA (1)...(19): siRNA sense strand
gaaucuaguggcuguaaau

SEQ ID NO: 2137700 - RNA, 19 nt, Homo sapiens
  misc_RNA (1)...(19): siRNA sense strand
caacauucgacaaacacua

SEQ ID NO: 2137701 - RNA, 19 nt, Homo sapiens
  misc_RNA (1)...(19): siRNA sense strand
gaagagggcggaggcuaau

SEQ ID NO: 2137702 - RNA, 19 nt, Homo sapiens
  misc_RNA (1)...(19): siRNA sense strand
gucuugaucuuaaugaugu

SEQ ID NO: 2137703 - RNA, 19 nt, Homo sapiens
  misc_RNA (1)...(19): siRNA sense strand
caaggcauaucugcagaau

SEQ ID NO: 2137704 - RNA, 19 nt, Homo sapiens
  misc_RNA (1)...(19): siRNA sense strand
cccaagaauucguagagaa

SEQ ID NO: 2137705 - RNA, 19 nt, Homo sapiens
  misc_RNA (1)...(19): siRNA sense strand
gguuauagaugaggcagau

SEQ ID NO: 2137706 - RNA, 19 nt, Homo sapiens
  misc_RNA (1)...(19): siRNA sense strand
caaggaauagaucuuauag

SEQ ID NO: 2137707 - RNA, 19 nt, Homo sapiens
  misc_RNA (1)...(19): siRNA sense strand
aaaugcaggugauuaacug

SEQ ID NO: 2137708 - RNA, 19 nt, Homo sapiens
  misc_RNA (1)...(19): siRNA sense strand
ggaaaacauuguccuaucu

SEQ ID NO: 2137709 - RNA, 19 nt, Homo sapiens
  misc_RNA (1)...(19): siRNA sense strand
cccaaggaauauugacgua

SEQ ID NO: 2137710 - RNA, 19 nt, Homo sapiens
  misc_RNA (1)...(19): siRNA sense strand
aagcggaaacauaaagaua

SEQ ID NO: 2137711 - RNA, 19 nt, Homo sapiens
  misc_RNA (1)...(19): siRNA sense strand
gcugaaugaccuacaaaug

SEQ ID NO: 2137712 - RNA, 19 nt, Homo sapiens
  misc_RNA (1)...(19): siRNA sense strand
ggcggaggcuaauccaaga

SEQ ID NO: 2137713 - RNA, 19 nt, Homo sapiens
  misc_RNA (1)...(19): siRNA sense strand
acaagaaagcuacaacuca

SEQ ID NO: 2137714 - RNA, 19 nt, Homo sapiens
  misc_RNA (1)...(19): siRNA sense strand
gcggaaacauaaagauacu

SEQ ID NO: 2137715 - RNA, 19 nt, Homo sapiens
  misc_RNA (1)...(19): siRNA sense strand
caacgacaaagucaucaug

SEQ ID NO: 2137716 - RNA, 19 nt, Homo sapiens
  misc_RNA (1)...(19): siRNA sense strand
ccuacuugguuauagauga

SEQ ID NO: 2137717 - RNA, 19 nt, Homo sapiens
  misc_RNA (1)...(19): siRNA sense strand
caaagguguagauaucauu

SEQ ID NO: 2137718 - RNA, 19 nt, Homo sapiens
  misc_RNA (1)...(19): siRNA sense strand
uagaagacauuagcaaagg

SEQ ID NO: 2137719 - RNA, 19 nt, Homo sapiens
  misc_RNA (1)...(19): siRNA sense strand
cagaaauggacaaauagaa

SEQ ID NO: 2137720 - RNA, 19 nt, Homo sapiens
  misc_RNA (1)...(19): siRNA sense strand
uaucuaaugccuggguuua

SEQ ID NO: 2137721 - RNA, 19 nt, Homo sapiens
  misc_RNA (1)...(19): siRNA sense strand
uuacauagaauccaaagca

SEQ ID NO: 2137722 - RNA, 19 nt, Homo sapiens
  misc_RNA (1)...(19): siRNA sense strand
gagcaauacaaguuaaauc

SEQ ID NO: 2137723 - RNA, 19 nt, Homo sapiens
  misc_RNA (1)...(19): siRNA sense strand
aguaauggcugagcaauac

SEQ ID NO: 2137724 - RNA, 19 nt, Homo sapiens
  misc_RNA (1)...(19): siRNA sense strand
uugcauauauggugguaga

SEQ ID NO: 2137725 - RNA, 19 nt, Homo sapiens
  misc_RNA (1)...(19): siRNA sense strand
gaauaacucugucaaccua

SEQ ID NO: 2137726 - RNA, 19 nt, Homo sapiens
  misc_RNA (1)...(19): siRNA sense strand
gaagaaaucuaggcagaaa

SEQ ID NO: 2137727 - RNA, 19 nt, Homo sapiens
  misc_RNA (1)...(19): siRNA sense strand
ucacaggcauggccaauua

SEQ ID NO: 2137728 - RNA, 19 nt, Homo sapiens
  misc_RNA (1)...(19): siRNA sense strand
caaggaauauugacguaua

SEQ ID NO: 2137729 - RNA, 19 nt, Homo sapiens
  misc_RNA (1)...(19): siRNA sense strand
gcagaucuaccaccaguua

SEQ ID NO: 2137730 - RNA, 19 nt, Homo sapiens
  misc_RNA (1)...(19): siRNA sense strand
ggacaaauagaagacauua

SEQ ID NO: 2137731 - RNA, 19 nt, Homo sapiens
  misc_RNA (1)...(19): siRNA sense strand
gaaaauggccggugaauug

SEQ ID NO: 2137732 - RNA, 19 nt, Homo sapiens
  misc_RNA (1)...(19): siRNA sense strand
ugaaugaccuacaaaugaa

SEQ ID NO: 2137733 - RNA, 19 nt, Homo sapiens
  misc_RNA (1)...(19): siRNA sense strand
gcugagccauugucaaauu

SEQ ID NO: 2137734 - RNA, 19 nt, Homo sapiens
  misc_RNA (1)...(19): siRNA sense strand
gcaauacccugaucuucug

SEQ ID NO: 2137735 - RNA, 19 nt, Homo sapiens
  misc_RNA (1)...(19): siRNA sense strand
gaaccaccacucugcuuua

SEQ ID NO: 2137736 - RNA, 19 nt, Homo sapiens
  misc_RNA (1)...(19): siRNA sense strand
ugacguauauguacacaga

SEQ ID NO: 2137737 - RNA, 19 nt, Homo sapiens
  misc_RNA (1)...(19): siRNA sense strand
caaagcggcuauagaaaca

SEQ ID NO: 2137738 - RNA, 19 nt, Homo sapiens
  misc_RNA (1)...(19): siRNA sense strand
uagcaaagguguagauauc

SEQ ID NO: 2137739 - RNA, 19 nt, Homo sapiens
  misc_RNA (1)...(19): siRNA sense strand
cgacaaagucaucauguuu

SEQ ID NO: 2137740 - RNA, 19 nt, Homo sapiens
  misc_RNA (1)...(19): siRNA sense strand
ugaaagauccuaugauugu

SEQ ID NO: 2137741 - RNA, 19 nt, Homo sapiens
  misc_RNA (1)...(19): siRNA sense strand
gaaauggacaaauagaaga

SEQ ID NO: 2137742 - RNA, 19 nt, Homo sapiens
  misc_RNA (1)...(19): siRNA sense strand
ggaagaucuuguaguaaug

SEQ ID NO: 2137743 - RNA, 19 nt, Homo sapiens
  misc_RNA (1)...(19): siRNA sense strand
cggaagaucuuguaguaau

SEQ ID NO: 2137744 - RNA, 19 nt, Homo sapiens
  misc_RNA (1)...(19): siRNA sense strand
aggcauaucugcagaauca

SEQ ID NO: 2137745 - RNA, 19 nt, Homo sapiens
  misc_RNA (1)...(19): siRNA sense strand
gaaagauccuaugauuguu

SEQ ID NO: 2137746 - RNA, 19 nt, Homo sapiens
  misc_RNA (1)...(19): siRNA sense strand
guaaauacagugaagcaaa

SEQ ID NO: 2137747 - RNA, 19 nt, Homo sapiens
  misc_RNA (1)...(19): siRNA sense strand
ggacagagcaaaucagagu

SEQ ID NO: 2137748 - RNA, 19 nt, Homo sapiens
  misc_RNA (1)...(19): siRNA sense strand
ggaagagggcggaggcuaa

SEQ ID NO: 2137749 - RNA, 19 nt, Homo sapiens
  misc_RNA (1)...(19): siRNA sense strand
caacuagcacuuucuuauu

SEQ ID NO: 2137750 - RNA, 19 nt, Homo sapiens
  misc_RNA (1)...(19): siRNA sense strand
gcacagagaaacacgauca

SEQ ID NO: 2137751 - RNA, 19 nt, Homo sapiens
  misc_RNA (1)...(19): siRNA sense strand
ggccaaagcggcuauagaa

SEQ ID NO: 2137752 - RNA, 19 nt, Homo sapiens
  misc_RNA (1)...(19): siRNA sense strand
ggaaacauaaagauacuga

SEQ ID NO: 2137753 - RNA, 19 nt, Homo sapiens
  misc_RNA (1)...(19): siRNA sense strand
gcaaagguguagauaucau

SEQ ID NO: 2137754 - RNA, 19 nt, Homo sapiens
  misc_RNA (1)...(19): siRNA sense strand
gugauuaacuggagaaagg

SEQ ID NO: 2137755 - RNA, 19 nt, Homo sapiens
  misc_RNA (1)...(19): siRNA sense strand
gagaaacacgaucaagaaa

SEQ ID NO: 2137756 - RNA, 19 nt, Homo sapiens
  misc_RNA (1)...(19): siRNA sense strand
gcugagcaauacaaguuaa

SEQ ID NO: 2137757 - RNA, 19 nt, Homo sapiens
  misc_RNA (1)...(19): siRNA sense strand
gaaugggccugggaugcua

SEQ ID NO: 2137758 - RNA, 19 nt, Homo sapiens
  misc_RNA (1)...(19): siRNA sense strand
uaagaagcauaaccuacuu

SEQ ID NO: 2137759 - RNA, 19 nt, Homo sapiens
  misc_RNA (1)...(19): siRNA sense strand
cauaacgugugaugacuug

SEQ ID NO: 2137760 - RNA, 19 nt, Homo sapiens
  misc_RNA (1)...(19): siRNA sense strand
acauauugcugaugacuug

SEQ ID NO: 2137761 - RNA, 19 nt, Homo sapiens
  misc_RNA (1)...(19): siRNA sense strand
cuacaaggaauagaucuua

SEQ ID NO: 2137762 - RNA, 19 nt, Homo sapiens
  misc_RNA (1)...(19): siRNA sense strand
ccacucugcuuuaaaauaa

SEQ ID NO: 2137763 - RNA, 19 nt, Homo sapiens
  misc_RNA (1)...(19): siRNA sense strand
caacuuggccagauacugu

SEQ ID NO: 2137764 - RNA, 19 nt, Homo sapiens
  misc_RNA (1)...(19): siRNA sense strand
uccggaagaucuuguagua

SEQ ID NO: 2137765 - RNA, 19 nt, Homo sapiens
  misc_RNA (1)...(19): siRNA sense strand
uggagaagcugagccauug

SEQ ID NO: 2137766 - RNA, 19 nt, Homo sapiens
  misc_RNA (1)...(19): siRNA sense strand
caacuugcagguuuaaaga

SEQ ID NO: 2137767 - RNA, 19 nt, Homo sapiens
  misc_RNA (1)...(19): siRNA sense strand
ggaauagaucuuauaguag

SEQ ID NO: 2137768 - RNA, 19 nt, Homo sapiens
  misc_RNA (1)...(19): siRNA sense strand
cauaucugcagaaucauua

SEQ ID NO: 2137769 - RNA, 19 nt, Homo sapiens
  misc_RNA (1)...(19): siRNA sense strand
cuacaacauucgacaaaca

SEQ ID NO: 2137770 - RNA, 19 nt, Homo sapiens
  misc_RNA (1)...(19): siRNA sense strand
ccaauuauucuacaaggaa

SEQ ID NO: 2137771 - RNA, 19 nt, Homo sapiens
  misc_RNA (1)...(19): siRNA sense strand
ucaaauugggaucgcauua

SEQ ID NO: 2137772 - RNA, 19 nt, Homo sapiens
  misc_RNA (1)...(19): siRNA sense strand
agagaaacacgaucaagaa

SEQ ID NO: 2137773 - RNA, 19 nt, Homo sapiens
  misc_RNA (1)...(19): siRNA sense strand
cugaaugaccuacaaauga

SEQ ID NO: 2137774 - RNA, 19 nt, Homo sapiens
  misc_RNA (1)...(19): siRNA sense strand
ucuaaugccuggguuuauu

SEQ ID NO: 2137775 - RNA, 19 nt, Homo sapiens
  misc_RNA (1)...(19): siRNA sense strand
guaaagccaacgccaauuc

SEQ ID NO: 2137776 - RNA, 19 nt, Homo sapiens
  misc_RNA (1)...(19): siRNA sense strand
cccgaggucuugaucuuaa

SEQ ID NO: 2137777 - RNA, 19 nt, Homo sapiens
  misc_RNA (1)...(19): siRNA sense strand
ucaacuagcacuuucuuau

SEQ ID NO: 2137778 - RNA, 19 nt, Homo sapiens
  misc_RNA (1)...(19): siRNA sense strand
caacgccaauucagucaca

SEQ ID NO: 2137779 - RNA, 19 nt, Homo sapiens
  misc_RNA (1)...(19): siRNA sense strand
caagcugcaugucugaaau

SEQ ID NO: 2137780 - RNA, 19 nt, Homo sapiens
  misc_RNA (1)...(19): siRNA sense strand
aagaaaaccuggacaaaga

SEQ ID NO: 2137781 - RNA, 19 nt, Homo sapiens
  misc_RNA (1)...(19): siRNA sense strand
gagcaguagaggacuuuaa

SEQ ID NO: 2137782 - RNA, 19 nt, Homo sapiens
  misc_RNA (1)...(19): siRNA sense strand
caacauaacgugugaugac

SEQ ID NO: 2137783 - RNA, 19 nt, Homo sapiens
  misc_RNA (1)...(19): siRNA sense strand
gaaaugcaggugauuaacu

SEQ ID NO: 2137784 - RNA, 19 nt, Homo sapiens
  misc_RNA (1)...(19): siRNA sense strand
auagggaaaugaaagcaaa

SEQ ID NO: 2137785 - RNA, 19 nt, Homo sapiens
  misc_RNA (1)...(19): siRNA sense strand
gcauaucugcagaaucauu

SEQ ID NO: 2137786 - RNA, 19 nt, Homo sapiens
  misc_RNA (1)...(19): siRNA sense strand
caacaagcugcaugucuga

SEQ ID NO: 2137787 - RNA, 19 nt, Homo sapiens
  misc_RNA (1)...(19): siRNA sense strand
aagcugagccauugucaaa

SEQ ID NO: 2137788 - RNA, 19 nt, Homo sapiens
  misc_RNA (1)...(19): siRNA sense strand
ggaagaaaucuaggcagaa

SEQ ID NO: 2137789 - RNA, 19 nt, Homo sapiens
  misc_RNA (1)...(19): siRNA sense strand
gacaaagacgcaaggaguu

SEQ ID NO: 2137790 - RNA, 19 nt, Homo sapiens
  misc_RNA (1)...(19): siRNA sense strand
gaaacacgaucaagaaaac

SEQ ID NO: 2137791 - RNA, 19 nt, Homo sapiens
  misc_RNA (1)...(19): siRNA sense strand
cagagaaacacgaucaaga

SEQ ID NO: 2137792 - RNA, 19 nt, Homo sapiens
  misc_RNA (1)...(19): siRNA sense strand
ccaccacucugcuuuaaaa

SEQ ID NO: 2137793 - RNA, 19 nt, Homo sapiens
  misc_RNA (1)...(19): siRNA sense strand
guacgucaacuagcacuuu

SEQ ID NO: 2137794 - RNA, 19 nt, Homo sapiens
  misc_RNA (1)...(19): siRNA sense strand
gaggcugaaugaccuacaa

SEQ ID NO: 2137795 - RNA, 19 nt, Homo sapiens
  misc_RNA (1)...(19): siRNA sense strand
gcauauauggugguagaaa

SEQ ID NO: 2137796 - RNA, 19 nt, Homo sapiens
  misc_RNA (1)...(19): siRNA sense strand
cauaauaaggguagggauu

SEQ ID NO: 2137797 - RNA, 19 nt, Homo sapiens
  misc_RNA (1)...(19): siRNA sense strand
gaagcaaaagucagaauuu

SEQ ID NO: 2137798 - RNA, 19 nt, Homo sapiens
  misc_RNA (1)...(19): siRNA sense strand
caaaagaggcacagagaaa

SEQ ID NO: 2137799 - RNA, 19 nt, Homo sapiens
  misc_RNA (1)...(19): siRNA sense strand
gaaucuaguggcuguaaau

SEQ ID NO: 2137800 - RNA, 19 nt, Homo sapiens
  misc_RNA (1)...(19): siRNA sense strand
caacauucgacaaacacua

SEQ ID NO: 2137801 - RNA, 19 nt, Homo sapiens
  misc_RNA (1)...(19): siRNA sense strand
gaagagggcggaggcuaau

SEQ ID NO: 2137802 - RNA, 19 nt, Homo sapiens
  misc_RNA (1)...(19): siRNA sense strand
gucuugaucuuaaugaugu

SEQ ID NO: 2137803 - RNA, 19 nt, Homo sapiens
  misc_RNA (1)...(19): siRNA sense strand
caaggcauaucugcagaau

SEQ ID NO: 2137804 - RNA, 19 nt, Homo sapiens
  misc_RNA (1)...(19): siRNA sense strand
cccaagaauucguagagaa

SEQ ID NO: 2137805 - RNA, 19 nt, Homo sapiens
  misc_RNA (1)...(19): siRNA sense strand
gguuauagaugaggcagau

SEQ ID NO: 2137806 - RNA, 19 nt, Homo sapiens
  misc_RNA (1)...(19): siRNA sense strand
caaggaauagaucuuauag

SEQ ID NO: 2137807 - RNA, 19 nt, Homo sapiens
  misc_RNA (1)...(19): siRNA sense strand
aaaugcaggugauuaacug

SEQ ID NO: 2137808 - RNA, 19 nt, Homo sapiens
  misc_RNA (1)...(19): siRNA sense strand
ggaaaacauuguccuaucu

SEQ ID NO: 2137809 - RNA, 19 nt, Homo sapiens
  misc_RNA (1)...(19): siRNA sense strand
cccaaggaauauugacgua

SEQ ID NO: 2137810 - RNA, 19 nt, Homo sapiens
  misc_RNA (1)...(19): siRNA sense strand
aagcggaaacauaaagaua

SEQ ID NO: 2137811 - RNA, 19 nt, Homo sapiens
  misc_RNA (1)...(19): siRNA sense strand
gcugaaugaccuacaaaug

SEQ ID NO: 2137812 - RNA, 19 nt, Homo sapiens
  misc_RNA (1)...(19): siRNA sense strand
ggcggaggcuaauccaaga

SEQ ID NO: 2137813 - RNA, 19 nt, Homo sapiens
  misc_RNA (1)...(19): siRNA sense strand
acaagaaagcuacaacuca

SEQ ID NO: 2137814 - RNA, 19 nt, Homo sapiens
  misc_RNA (1)...(19): siRNA sense strand
gcggaaacauaaagauacu

SEQ ID NO: 2137815 - RNA, 19 nt, Homo sapiens
  misc_RNA (1)...(19): siRNA sense strand
caacgacaaagucaucaug

SEQ ID NO: 2137816 - RNA, 19 nt, Homo sapiens
  misc_RNA (1)...(19): siRNA sense strand
ccuacuugguuauagauga

SEQ ID NO: 2137817 - RNA, 19 nt, Homo sapiens
  misc_RNA (1)...(19): siRNA sense strand
caaagguguagauaucauu

SEQ ID NO: 2137818 - RNA, 19 nt, Homo sapiens
  misc_RNA (1)...(19): siRNA sense strand
uagaagacauuagcaaagg

SEQ ID NO: 2137819 - RNA, 19 nt, Homo sapiens
  misc_RNA (1)...(19): siRNA sense strand
cagaaauggacaaauagaa

SEQ ID NO: 2137820 - RNA, 19 nt, Homo sapiens
  misc_RNA (1)...(19): siRNA sense strand
uaucuaaugccuggguuua

SEQ ID NO: 2137821 - RNA, 19 nt, Homo sapiens
  misc_RNA (1)...(19): siRNA sense strand
uuacauagaauccaaagca

SEQ ID NO: 2137822 - RNA, 19 nt, Homo sapiens
  misc_RNA (1)...(19): siRNA sense strand
gagcaauacaaguuaaauc

SEQ ID NO: 2137823 - RNA, 19 nt, Homo sapiens
  misc_RNA (1)...(19): siRNA sense strand
aguaauggcugagcaauac

SEQ ID NO: 2137824 - RNA, 19 nt, Homo sapiens
  misc_RNA (1)...(19): siRNA sense strand
uugcauauauggugguaga

SEQ ID NO: 2137825 - RNA, 19 nt, Homo sapiens
  misc_RNA (1)...(19): siRNA sense strand
ggacagugcucaauaacaa

SEQ ID NO: 2137826 - RNA, 19 nt, Homo sapiens
  misc_RNA (1)...(19): siRNA sense strand
gcgaagaucugccuagaaa

SEQ ID NO: 2137827 - RNA, 19 nt, Homo sapiens
  misc_RNA (1)...(19): siRNA sense strand
agaagacgcuggagacaua

SEQ ID NO: 2137828 - RNA, 19 nt, Homo sapiens
  misc_RNA (1)...(19): siRNA sense strand
gaggagggauugcuucuug

SEQ ID NO: 2137829 - RNA, 19 nt, Homo sapiens
  misc_RNA (1)...(19): siRNA sense strand
ggaacgagaucaggacaaa

SEQ ID NO: 2137830 - RNA, 19 nt, Homo sapiens
  misc_RNA (1)...(19): siRNA sense strand
gagaugagacuuucuauuc

SEQ ID NO: 2137831 - RNA, 19 nt, Homo sapiens
  misc_RNA (1)...(19): siRNA sense strand
ggucaggcguugcaacuaa

SEQ ID NO: 2137832 - RNA, 19 nt, Homo sapiens
  misc_RNA (1)...(19): siRNA sense strand
gaauaccguucaugagauu

SEQ ID NO: 2137833 - RNA, 19 nt, Homo sapiens
  misc_RNA (1)...(19): siRNA sense strand
gggaauuuguggauccuua

SEQ ID NO: 2137834 - RNA, 19 nt, Homo sapiens
  misc_RNA (1)...(19): siRNA sense strand
ggacauagcaugguuaaca

SEQ ID NO: 2137835 - RNA, 19 nt, Homo sapiens
  misc_RNA (1)...(19): siRNA sense strand
gauaugacaucaccaacga

SEQ ID NO: 2137836 - RNA, 19 nt, Homo sapiens
  misc_RNA (1)...(19): siRNA sense strand
gcuagaaggcccacaagua

SEQ ID NO: 2137837 - RNA, 19 nt, Homo sapiens
  misc_RNA (1)...(19): siRNA sense strand
caggagaacucaagugguu

SEQ ID NO: 2137838 - RNA, 19 nt, Homo sapiens
  misc_RNA (1)...(19): siRNA sense strand
uaacaaauauggacaugag

SEQ ID NO: 2137839 - RNA, 19 nt, Homo sapiens
  misc_RNA (1)...(19): siRNA sense strand
gaacaacggaccaggagaa

SEQ ID NO: 2137840 - RNA, 19 nt, Homo sapiens
  misc_RNA (1)...(19): siRNA sense strand
gcgauuccauccucacuuu

SEQ ID NO: 2137841 - RNA, 19 nt, Homo sapiens
  misc_RNA (1)...(19): siRNA sense strand
gcucaugucuuacuuggau

SEQ ID NO: 2137842 - RNA, 19 nt, Homo sapiens
  misc_RNA (1)...(19): siRNA sense strand
gagaauaagagcaagauga

SEQ ID NO: 2137843 - RNA, 19 nt, Homo sapiens
  misc_RNA (1)...(19): siRNA sense strand
gaugagacuuucuauucaa

SEQ ID NO: 2137844 - RNA, 19 nt, Homo sapiens
  misc_RNA (1)...(19): siRNA sense strand
guaccacgcucugaauuug

SEQ ID NO: 2137845 - RNA, 19 nt, Homo sapiens
  misc_RNA (1)...(19): siRNA sense strand
gcuggaugguuuacaagua

SEQ ID NO: 2137846 - RNA, 19 nt, Homo sapiens
  misc_RNA (1)...(19): siRNA sense strand
gcgagaugcuuucacaaga

SEQ ID NO: 2137847 - RNA, 19 nt, Homo sapiens
  misc_RNA (1)...(19): siRNA sense strand
gcaaagaagggaccauaga

SEQ ID NO: 2137848 - RNA, 19 nt, Homo sapiens
  misc_RNA (1)...(19): siRNA sense strand
gaaauuaugagacucuuag

SEQ ID NO: 2137849 - RNA, 19 nt, Homo sapiens
  misc_RNA (1)...(19): siRNA sense strand
ggacaaacaaauaaugguu

SEQ ID NO: 2137850 - RNA, 19 nt, Homo sapiens
  misc_RNA (1)...(19): siRNA sense strand
caagcuggaugguuuacaa

SEQ ID NO: 2137851 - RNA, 19 nt, Homo sapiens
  misc_RNA (1)...(19): siRNA sense strand
ccagagugauuacuucaga

SEQ ID NO: 2137852 - RNA, 19 nt, Homo sapiens
  misc_RNA (1)...(19): siRNA sense strand
gaaccagagaugagacuuu

SEQ ID NO: 2137853 - RNA, 19 nt, Homo sapiens
  misc_RNA (1)...(19): siRNA sense strand
cuauagagcugaguaugaa

SEQ ID NO: 2137854 - RNA, 19 nt, Homo sapiens
  misc_RNA (1)...(19): siRNA sense strand
cagcagccuuuguuggaua

SEQ ID NO: 2137855 - RNA, 19 nt, Homo sapiens
  misc_RNA (1)...(19): siRNA sense strand
caaagaagggaccauagaa

SEQ ID NO: 2137856 - RNA, 19 nt, Homo sapiens
  misc_RNA (1)...(19): siRNA sense strand
ugaauuugcuguagguguu

SEQ ID NO: 2137857 - RNA, 19 nt, Homo sapiens
  misc_RNA (1)...(19): siRNA sense strand
ugucuuacuuggauaauga

SEQ ID NO: 2137858 - RNA, 19 nt, Homo sapiens
  misc_RNA (1)...(19): siRNA sense strand
ugacugugcuggacaaaca

SEQ ID NO: 2137859 - RNA, 19 nt, Homo sapiens
  misc_RNA (1)...(19): siRNA sense strand
gagaugcuuucacaagaug

SEQ ID NO: 2137860 - RNA, 19 nt, Homo sapiens
  misc_RNA (1)...(19): siRNA sense strand
cgaccugacugccuugcua

SEQ ID NO: 2137861 - RNA, 19 nt, Homo sapiens
  misc_RNA (1)...(19): siRNA sense strand
gagcagguucccagagaua

SEQ ID NO: 2137862 - RNA, 19 nt, Homo sapiens
  misc_RNA (1)...(19): siRNA sense strand
gguuaagacaucagaauuu

SEQ ID NO: 2137863 - RNA, 19 nt, Homo sapiens
  misc_RNA (1)...(19): siRNA sense strand
ccugcaagcuggaugguuu

SEQ ID NO: 2137864 - RNA, 19 nt, Homo sapiens
  misc_RNA (1)...(19): siRNA sense strand
gaauuacgcgagaugcuuu

SEQ ID NO: 2137865 - RNA, 19 nt, Homo sapiens
  misc_RNA (1)...(19): siRNA sense strand
ccauguauguucaacuuau

SEQ ID NO: 2137866 - RNA, 19 nt, Homo sapiens
  misc_RNA (1)...(19): siRNA sense strand
ggaggccuuuguuauaaug

SEQ ID NO: 2137867 - RNA, 19 nt, Homo sapiens
  misc_RNA (1)...(19): siRNA sense strand
uuauagaaguggugaaguu

SEQ ID NO: 2137868 - RNA, 19 nt, Homo sapiens
  misc_RNA (1)...(19): siRNA sense strand
gcagauggcagauaugucu

SEQ ID NO: 2137869 - RNA, 19 nt, Homo sapiens
  misc_RNA (1)...(19): siRNA sense strand
ugacaucaccaacgauaaa

SEQ ID NO: 2137870 - RNA, 19 nt, Homo sapiens
  misc_RNA (1)...(19): siRNA sense strand
gaaguuagacaccuuucug

SEQ ID NO: 2137871 - RNA, 19 nt, Homo sapiens
  misc_RNA (1)...(19): siRNA sense strand
uauugaagaucaucaguuc

SEQ ID NO: 2137872 - RNA, 19 nt, Homo sapiens
  misc_RNA (1)...(19): siRNA sense strand
ccaaaguauucagguauga

SEQ ID NO: 2137873 - RNA, 19 nt, Homo sapiens
  misc_RNA (1)...(19): siRNA sense strand
gaaguugaccaagcauuga

SEQ ID NO: 2137874 - RNA, 19 nt, Homo sapiens
  misc_RNA (1)...(19): siRNA sense strand
ggaacuauagagcugagua

SEQ ID NO: 2137875 - RNA, 19 nt, Homo sapiens
  misc_RNA (1)...(19): siRNA sense strand
gccuugcuaucgucaauaa

SEQ ID NO: 2137876 - RNA, 19 nt, Homo sapiens
  misc_RNA (1)...(19): siRNA sense strand
guacgaggcugugcagucu

SEQ ID NO: 2137877 - RNA, 19 nt, Homo sapiens
  misc_RNA (1)...(19): siRNA sense strand
uuaugagacucuuagauga

SEQ ID NO: 2137878 - RNA, 19 nt, Homo sapiens
  misc_RNA (1)...(19): siRNA sense strand
gaacuauagagcugaguau

SEQ ID NO: 2137879 - RNA, 19 nt, Homo sapiens
  misc_RNA (1)...(19): siRNA sense strand
gccauguccugcaauuuau

SEQ ID NO: 2137880 - RNA, 19 nt, Homo sapiens
  misc_RNA (1)...(19): siRNA sense strand
ccaugcuucuuccaaagua

SEQ ID NO: 2137881 - RNA, 19 nt, Homo sapiens
  misc_RNA (1)...(19): siRNA sense strand
gugcagaaauuaugagacu

SEQ ID NO: 2137882 - RNA, 19 nt, Homo sapiens
  misc_RNA (1)...(19): siRNA sense strand
ggacguggaaggauucugu

SEQ ID NO: 2137883 - RNA, 19 nt, Homo sapiens
  misc_RNA (1)...(19): siRNA sense strand
cgagaugcuuucacaagau

SEQ ID NO: 2137884 - RNA, 19 nt, Homo sapiens
  misc_RNA (1)...(19): siRNA sense strand
uagcaugguuaacaguaaa

SEQ ID NO: 2137885 - RNA, 19 nt, Homo sapiens
  misc_RNA (1)...(19): siRNA sense strand
gauuggacauagcaugguu

SEQ ID NO: 2137886 - RNA, 19 nt, Homo sapiens
  misc_RNA (1)...(19): siRNA sense strand
gggagaaguuagacaccuu

SEQ ID NO: 2137887 - RNA, 19 nt, Homo sapiens
  misc_RNA (1)...(19): siRNA sense strand
ggccugacuuucuguccua

SEQ ID NO: 2137888 - RNA, 19 nt, Homo sapiens
  misc_RNA (1)...(19): siRNA sense strand
gaccaagcauugaauuacu

SEQ ID NO: 2137889 - RNA, 19 nt, Homo sapiens
  misc_RNA (1)...(19): siRNA sense strand
ggagaaguuagacaccuuu

SEQ ID NO: 2137890 - RNA, 19 nt, Homo sapiens
  misc_RNA (1)...(19): siRNA sense strand
agaauaagagcaagaugaa

SEQ ID NO: 2137891 - RNA, 19 nt, Homo sapiens
  misc_RNA (1)...(19): siRNA sense strand
ccagagaugagacuuucua

SEQ ID NO: 2137892 - RNA, 19 nt, Homo sapiens
  misc_RNA (1)...(19): siRNA sense strand
gaggaaugauuggacauag

SEQ ID NO: 2137893 - RNA, 19 nt, Homo sapiens
  misc_RNA (1)...(19): siRNA sense strand
gacuuucuguccuaucuga

SEQ ID NO: 2137894 - RNA, 19 nt, Homo sapiens
  misc_RNA (1)...(19): siRNA sense strand
ucacucugguuauugaaga

SEQ ID NO: 2137895 - RNA, 19 nt, Homo sapiens
  misc_RNA (1)...(19): siRNA sense strand
uuggaggccuuuguuauaa

SEQ ID NO: 2137896 - RNA, 19 nt, Homo sapiens
  misc_RNA (1)...(19): siRNA sense strand
agaugagacuuucuauuca

SEQ ID NO: 2137897 - RNA, 19 nt, Homo sapiens
  misc_RNA (1)...(19): siRNA sense strand
uuacgaaguugaccaagca

SEQ ID NO: 2137898 - RNA, 19 nt, Homo sapiens
  misc_RNA (1)...(19): siRNA sense strand
ucuaacagcuaccgguuuc

SEQ ID NO: 2137899 - RNA, 19 nt, Homo sapiens
  misc_RNA (1)...(19): siRNA sense strand
cagcaaagaagggaccaua

SEQ ID NO: 2137900 - RNA, 19 nt, Homo sapiens
  misc_RNA (1)...(19): siRNA sense strand
caagcaagugugcguguuu

SEQ ID NO: 2137901 - RNA, 19 nt, Homo sapiens
  misc_RNA (1)...(19): siRNA sense strand
gguguuauugggaaguuua

SEQ ID NO: 2137902 - RNA, 19 nt, Homo sapiens
  misc_RNA (1)...(19): siRNA sense strand
ccgauaccaucauucagaa

SEQ ID NO: 2137903 - RNA, 19 nt, Homo sapiens
  misc_RNA (1)...(19): siRNA sense strand
ucccagagauagagcugua

SEQ ID NO: 2137904 - RNA, 19 nt, Homo sapiens
  misc_RNA (1)...(19): siRNA sense strand
agccauguccugcaauuua

SEQ ID NO: 2137905 - RNA, 19 nt, Homo sapiens
  misc_RNA (1)...(19): siRNA sense strand
gugcuggacaaacaaauaa

SEQ ID NO: 2137906 - RNA, 19 nt, Homo sapiens
  misc_RNA (1)...(19): siRNA sense strand
gaauuugcuguagguguua

SEQ ID NO: 2137907 - RNA, 19 nt, Homo sapiens
  misc_RNA (1)...(19): siRNA sense strand
cgaaguugaccaagcauug

SEQ ID NO: 2137908 - RNA, 19 nt, Homo sapiens
  misc_RNA (1)...(19): siRNA sense strand
guuagacaccuuucugcua

SEQ ID NO: 2137909 - RNA, 19 nt, Homo sapiens
  misc_RNA (1)...(19): siRNA sense strand
ggaaugauuggacauagca

SEQ ID NO: 2137910 - RNA, 19 nt, Homo sapiens
  misc_RNA (1)...(19): siRNA sense strand
ugaugucacucugguuauu

SEQ ID NO: 2137911 - RNA, 19 nt, Homo sapiens
  misc_RNA (1)...(19): siRNA sense strand
cuuggaggccuuuguuaua

SEQ ID NO: 2137912 - RNA, 19 nt, Homo sapiens
  misc_RNA (1)...(19): siRNA sense strand
uaugacaucaccaacgaua

SEQ ID NO: 2137913 - RNA, 19 nt, Homo sapiens
  misc_RNA (1)...(19): siRNA sense strand
gagacuuucuauucaacug

SEQ ID NO: 2137914 - RNA, 19 nt, Homo sapiens
  misc_RNA (1)...(19): siRNA sense strand
gguaugacccgagacagaa

SEQ ID NO: 2137915 - RNA, 19 nt, Homo sapiens
  misc_RNA (1)...(19): siRNA sense strand
uagcgaagaucugccuaga

SEQ ID NO: 2137916 - RNA, 19 nt, Homo sapiens
  misc_RNA (1)...(19): siRNA sense strand
ucuauucaacugagagaua

SEQ ID NO: 2137917 - RNA, 19 nt, Homo sapiens
  misc_RNA (1)...(19): siRNA sense strand
gcaggcagaaccagagaug

SEQ ID NO: 2137918 - RNA, 19 nt, Homo sapiens
  misc_RNA (1)...(19): siRNA sense strand
uugagaagguuaagacauc

SEQ ID NO: 2137919 - RNA, 19 nt, Homo sapiens
  misc_RNA (1)...(19): siRNA sense strand
uguccuaucugagcuuuga

SEQ ID NO: 2137920 - RNA, 19 nt, Homo sapiens
  misc_RNA (1)...(19): siRNA sense strand
gcagaaauuaugagacucu

SEQ ID NO: 2137921 - RNA, 19 nt, Homo sapiens
  misc_RNA (1)...(19): siRNA sense strand
gaagaucugccuagaaaau

SEQ ID NO: 2137922 - RNA, 19 nt, Homo sapiens
  misc_RNA (1)...(19): siRNA sense strand
guauuucgaggaaugauug

SEQ ID NO: 2137923 - RNA, 19 nt, Homo sapiens
  misc_RNA (1)...(19): siRNA sense strand
caacggaccaggagaacuc

SEQ ID NO: 2137924 - RNA, 19 nt, Homo sapiens
  misc_RNA (1)...(19): siRNA sense strand
gacauagcaugguuaacag

SEQ ID NO: 2137925 - RNA, 19 nt, Homo sapiens
  misc_RNA (1)...(19): siRNA sense strand
gaaagaagcccaaggaaua

SEQ ID NO: 2137926 - RNA, 19 nt, Homo sapiens
  misc_RNA (1)...(19): siRNA sense strand
caaggaagcuggauaugua

SEQ ID NO: 2137927 - RNA, 19 nt, Homo sapiens
  misc_RNA (1)...(19): siRNA sense strand
caacugagcuggagcauuc

SEQ ID NO: 2137928 - RNA, 19 nt, Homo sapiens
  misc_RNA (1)...(19): siRNA sense strand
gaagaugcauuuguaugua

SEQ ID NO: 2137929 - RNA, 19 nt, Homo sapiens
  misc_RNA (1)...(19): siRNA sense strand
cagcaaagcagcuaacuua

SEQ ID NO: 2137930 - RNA, 19 nt, Homo sapiens
  misc_RNA (1)...(19): siRNA sense strand
ggaauaccaugcuuucuuc

SEQ ID NO: 2137931 - RNA, 19 nt, Homo sapiens
  misc_RNA (1)...(19): siRNA sense strand
gcagaaagguauguagcua

SEQ ID NO: 2137932 - RNA, 19 nt, Homo sapiens
  misc_RNA (1)...(19): siRNA sense strand
gcagaccuguuuacggaua

SEQ ID NO: 2137933 - RNA, 19 nt, Homo sapiens
  misc_RNA (1)...(19): siRNA sense strand
cugaagagcuugccauuug

SEQ ID NO: 2137934 - RNA, 19 nt, Homo sapiens
  misc_RNA (1)...(19): siRNA sense strand
guaaucacaugagcauaua

SEQ ID NO: 2137935 - RNA, 19 nt, Homo sapiens
  misc_RNA (1)...(19): siRNA sense strand
gaggaggaauucugcauug

SEQ ID NO: 2137936 - RNA, 19 nt, Homo sapiens
  misc_RNA (1)...(19): siRNA sense strand
ucucuaagcuccuuccaaa

SEQ ID NO: 2137937 - RNA, 19 nt, Homo sapiens
  misc_RNA (1)...(19): siRNA sense strand
ggcacaaacucgguacuua

SEQ ID NO: 2137938 - RNA, 19 nt, Homo sapiens
  misc_RNA (1)...(19): siRNA sense strand
caaaacaaguggaagauuu

SEQ ID NO: 2137939 - RNA, 19 nt, Homo sapiens
  misc_RNA (1)...(19): siRNA sense strand
cggaagagcccaaaucaaa

SEQ ID NO: 2137940 - RNA, 19 nt, Homo sapiens
  misc_RNA (1)...(19): siRNA sense strand
ggaagcaucuggcacaaac

SEQ ID NO: 2137941 - RNA, 19 nt, Homo sapiens
  misc_RNA (1)...(19): siRNA sense strand
acacggaugugcccuauau

SEQ ID NO: 2137942 - RNA, 19 nt, Homo sapiens
  misc_RNA (1)...(19): siRNA sense strand
acacugagcccaauccuaa

SEQ ID NO: 2137943 - RNA, 19 nt, Homo sapiens
  misc_RNA (1)...(19): siRNA sense strand
caaggaauaucagaaugaa

SEQ ID NO: 2137944 - RNA, 19 nt, Homo sapiens
  misc_RNA (1)...(19): siRNA sense strand
gaagaugcuuauuucaaca

SEQ ID NO: 2137945 - RNA, 19 nt, Homo sapiens
  misc_RNA (1)...(19): siRNA sense strand
gcaagaucaugcacuuuca

SEQ ID NO: 2137946 - RNA, 19 nt, Homo sapiens
  misc_RNA (1)...(19): siRNA sense strand
ucauaaagcagaccuguuu

SEQ ID NO: 2137947 - RNA, 19 nt, Homo sapiens
  misc_RNA (1)...(19): siRNA sense strand
ggaagaugcauuuguaugu

SEQ ID NO: 2137948 - RNA, 19 nt, Homo sapiens
  misc_RNA (1)...(19): siRNA sense strand
acaguuagaugaagaagau

SEQ ID NO: 2137949 - RNA, 19 nt, Homo sapiens
  misc_RNA (1)...(19): siRNA sense strand
gagaguaggaggaggaauu

SEQ ID NO: 2137950 - RNA, 19 nt, Homo sapiens
  misc_RNA (1)...(19): siRNA sense strand
caauguaggucuagaagag

SEQ ID NO: 2137951 - RNA, 19 nt, Homo sapiens
  misc_RNA (1)...(19): siRNA sense strand
gcaaagugcguccagcaaa

SEQ ID NO: 2137952 - RNA, 19 nt, Homo sapiens
  misc_RNA (1)...(19): siRNA sense strand
gaagaggaagacccaaauu

SEQ ID NO: 2137953 - RNA, 19 nt, Homo sapiens
  misc_RNA (1)...(19): siRNA sense strand
aaagguauguagcuaguga

SEQ ID NO: 2137954 - RNA, 19 nt, Homo sapiens
  misc_RNA (1)...(19): siRNA sense strand
ggaagacuuguguggaaua

SEQ ID NO: 2137955 - RNA, 19 nt, Homo sapiens
  misc_RNA (1)...(19): siRNA sense strand
agacuacuaugcuuuguau

SEQ ID NO: 2137956 - RNA, 19 nt, Homo sapiens
  misc_RNA (1)...(19): siRNA sense strand
gcaaugaagccagcugaaa

SEQ ID NO: 2137957 - RNA, 19 nt, Homo sapiens
  misc_RNA (1)...(19): siRNA sense strand
gcagcaaggguuccaguuu

SEQ ID NO: 2137958 - RNA, 19 nt, Homo sapiens
  misc_RNA (1)...(19): siRNA sense strand
gaacuuggagacuuucaug

SEQ ID NO: 2137959 - RNA, 19 nt, Homo sapiens
  misc_RNA (1)...(19): siRNA sense strand
gagccaaucagacaugaaa

SEQ ID NO: 2137960 - RNA, 19 nt, Homo sapiens
  misc_RNA (1)...(19): siRNA sense strand
gcaaagcagcuaacuuaca

SEQ ID NO: 2137961 - RNA, 19 nt, Homo sapiens
  misc_RNA (1)...(19): siRNA sense strand
guacagcguugaugguauc

SEQ ID NO: 2137962 - RNA, 19 nt, Homo sapiens
  misc_RNA (1)...(19): siRNA sense strand
cagcaaggguuccaguuuc

SEQ ID NO: 2137963 - RNA, 19 nt, Homo sapiens
  misc_RNA (1)...(19): siRNA sense strand
caaagcagcuaacuuacac

SEQ ID NO: 2137964 - RNA, 19 nt, Homo sapiens
  misc_RNA (1)...(19): siRNA sense strand
gguaaucacaugagcauau

SEQ ID NO: 2137965 - RNA, 19 nt, Homo sapiens
  misc_RNA (1)...(19): siRNA sense strand
agaugaagaugcuuauuuc

SEQ ID NO: 2137966 - RNA, 19 nt, Homo sapiens
  misc_RNA (1)...(19): siRNA sense strand
gcaaggaagcuggauaugu

SEQ ID NO: 2137967 - RNA, 19 nt, Homo sapiens
  misc_RNA (1)...(19): siRNA sense strand
agacaggacuucacuaaaa

SEQ ID NO: 2137968 - RNA, 19 nt, Homo sapiens
  misc_RNA (1)...(19): siRNA sense strand
caaagugcguccagcaaag

SEQ ID NO: 2137969 - RNA, 19 nt, Homo sapiens
  misc_RNA (1)...(19): siRNA sense strand
caucaaacuucaugccaau

SEQ ID NO: 2137970 - RNA, 19 nt, Homo sapiens
  misc_RNA (1)...(19): siRNA sense strand
ugaagagcuugccauuuga

SEQ ID NO: 2137971 - RNA, 19 nt, Homo sapiens
  misc_RNA (1)...(19): siRNA sense strand
gaucaaaguacagcagaaa

SEQ ID NO: 2137972 - RNA, 19 nt, Homo sapiens
  misc_RNA (1)...(19): siRNA sense strand
uuuggaagaugcauuugua

SEQ ID NO: 2137973 - RNA, 19 nt, Homo sapiens
  misc_RNA (1)...(19): siRNA sense strand
ggucagcagguugguauua

SEQ ID NO: 2137974 - RNA, 19 nt, Homo sapiens
  misc_RNA (1)...(19): siRNA sense strand
gaugugcccuauauuccuu

SEQ ID NO: 2137975 - RNA, 19 nt, Homo sapiens
  misc_RNA (1)...(19): siRNA sense strand
aaagaaggauuuggcucua

SEQ ID NO: 2137976 - RNA, 19 nt, Homo sapiens
  misc_RNA (1)...(19): siRNA sense strand
gucagaauuuagaccuuua

SEQ ID NO: 2137977 - RNA, 19 nt, Homo sapiens
  misc_RNA (1)...(19): siRNA sense strand
ccaaggaauaucagaauga

SEQ ID NO: 2137978 - RNA, 19 nt, Homo sapiens
  misc_RNA (1)...(19): siRNA sense strand
gaagcuauagccaggacua

SEQ ID NO: 2137979 - RNA, 19 nt, Homo sapiens
  misc_RNA (1)...(19): siRNA sense strand
ugaagaagaugaagaugcu

SEQ ID NO: 2137980 - RNA, 19 nt, Homo sapiens
  misc_RNA (1)...(19): siRNA sense strand
aaucagaacuuggagacuu

SEQ ID NO: 2137981 - RNA, 19 nt, Homo sapiens
  misc_RNA (1)...(19): siRNA sense strand
ggaucaaaguacagcagaa

SEQ ID NO: 2137982 - RNA, 19 nt, Homo sapiens
  misc_RNA (1)...(19): siRNA sense strand
gaagagcuugccauuugaa

SEQ ID NO: 2137983 - RNA, 19 nt, Homo sapiens
  misc_RNA (1)...(19): siRNA sense strand
guauguagcuagugaaucc

SEQ ID NO: 2137984 - RNA, 19 nt, Homo sapiens
  misc_RNA (1)...(19): siRNA sense strand
ggaguugccagcaguucua

SEQ ID NO: 2137985 - RNA, 19 nt, Homo sapiens
  misc_RNA (1)...(19): siRNA sense strand
cuacaucagucccaaagca

SEQ ID NO: 2137986 - RNA, 19 nt, Homo sapiens
  misc_RNA (1)...(19): siRNA sense strand
cagcaguucuaauggauca

SEQ ID NO: 2137987 - RNA, 19 nt, Homo sapiens
  misc_RNA (1)...(19): siRNA sense strand
gguaggagcaacaucaaug

SEQ ID NO: 2137988 - RNA, 19 nt, Homo sapiens
  misc_RNA (1)...(19): siRNA sense strand
ggaaacauuacccaucuca

SEQ ID NO: 2137989 - RNA, 19 nt, Homo sapiens
  misc_RNA (1)...(19): siRNA sense strand
gcacaaacucgguacuuac

SEQ ID NO: 2137990 - RNA, 19 nt, Homo sapiens
  misc_RNA (1)...(19): siRNA sense strand
agaggaagacccaaauuug

SEQ ID NO: 2137991 - RNA, 19 nt, Homo sapiens
  misc_RNA (1)...(19): siRNA sense strand
gaucccacauugcuacauc

SEQ ID NO: 2137992 - RNA, 19 nt, Homo sapiens
  misc_RNA (1)...(19): siRNA sense strand
ggaggaggaauucugcauu

SEQ ID NO: 2137993 - RNA, 19 nt, Homo sapiens
  misc_RNA (1)...(19): siRNA sense strand
ggaagagcccaaaucaaag

SEQ ID NO: 2137994 - RNA, 19 nt, Homo sapiens
  misc_RNA (1)...(19): siRNA sense strand
guccugcucucagucauaa

SEQ ID NO: 2137995 - RNA, 19 nt, Homo sapiens
  misc_RNA (1)...(19): siRNA sense strand
cagcguugaugguaucuca

SEQ ID NO: 2137996 - RNA, 19 nt, Homo sapiens
  misc_RNA (1)...(19): siRNA sense strand
gaagaugaagaugcuuauu

SEQ ID NO: 2137997 - RNA, 19 nt, Homo sapiens
  misc_RNA (1)...(19): siRNA sense strand
ucuaauggaucaaaguaca

SEQ ID NO: 2137998 - RNA, 19 nt, Homo sapiens
  misc_RNA (1)...(19): siRNA sense strand
gcugaaagaagcccaagga

SEQ ID NO: 2137999 - RNA, 19 nt, Homo sapiens
  misc_RNA (1)...(19): siRNA sense strand
gcaguuccucuuucccuuu

SEQ ID NO: 2138000 - RNA, 19 nt, Homo sapiens
  misc_RNA (1)...(19): siRNA sense strand
gaggugacauuugcaacug

SEQ ID NO: 2138001 - RNA, 19 nt, Homo sapiens
  misc_RNA (1)...(19): siRNA sense strand
gaagacuuguguggaauac

SEQ ID NO: 2138002 - RNA, 19 nt, Homo sapiens
  misc_RNA (1)...(19): siRNA sense strand
ugaaagaagcccaaggaau

SEQ ID NO: 2138003 - RNA, 19 nt, Homo sapiens
  misc_RNA (1)...(19): siRNA sense strand
ggucacccauggccagaau

SEQ ID NO: 2138004 - RNA, 19 nt, Homo sapiens
  misc_RNA (1)...(19): siRNA sense strand
aaaccagacuacuaugcuu

SEQ ID NO: 2138005 - RNA, 19 nt, Homo sapiens
  misc_RNA (1)...(19): siRNA sense strand
guucuaauggaucaaagua

SEQ ID NO: 2138006 - RNA, 19 nt, Homo sapiens
  misc_RNA (1)...(19): siRNA sense strand
uaucucacaucuuacaauc

SEQ ID NO: 2138007 - RNA, 19 nt, Homo sapiens
  misc_RNA (1)...(19): siRNA sense strand
caaacuucaugccaauauc

SEQ ID NO: 2138008 - RNA, 19 nt, Homo sapiens
  misc_RNA (1)...(19): siRNA sense strand
aagaagaugaagaugcuua

SEQ ID NO: 2138009 - RNA, 19 nt, Homo sapiens
  misc_RNA (1)...(19): siRNA sense strand
agaaagguauguagcuagu

SEQ ID NO: 2138010 - RNA, 19 nt, Homo sapiens
  misc_RNA (1)...(19): siRNA sense strand
aagaggaagacccaaauuu

SEQ ID NO: 2138011 - RNA, 19 nt, Homo sapiens
  misc_RNA (1)...(19): siRNA sense strand
guagagcccacugcaauga

SEQ ID NO: 2138012 - RNA, 19 nt, Homo sapiens
  misc_RNA (1)...(19): siRNA sense strand
cauauauucuggccucaca

SEQ ID NO: 2138013 - RNA, 19 nt, Homo sapiens
  misc_RNA (1)...(19): siRNA sense strand
uauauggacccugucuuua

SEQ ID NO: 2138014 - RNA, 19 nt, Homo sapiens
  misc_RNA (1)...(19): siRNA sense strand
cuggaagacuuguguggaa

SEQ ID NO: 2138015 - RNA, 19 nt, Homo sapiens
  misc_RNA (1)...(19): siRNA sense strand
caacacaccaacugcugaa

SEQ ID NO: 2138016 - RNA, 19 nt, Homo sapiens
  misc_RNA (1)...(19): siRNA sense strand
gaagagcuuucagcaagac

SEQ ID NO: 2138017 - RNA, 19 nt, Homo sapiens
  misc_RNA (1)...(19): siRNA sense strand
gcuguaaguuuucugguaa

SEQ ID NO: 2138018 - RNA, 19 nt, Homo sapiens
  misc_RNA (1)...(19): siRNA sense strand
ggaggaauucugcauugga

SEQ ID NO: 2138019 - RNA, 19 nt, Homo sapiens
  misc_RNA (1)...(19): siRNA sense strand
ccaauuagagcagaggaaa

SEQ ID NO: 2138020 - RNA, 19 nt, Homo sapiens
  misc_RNA (1)...(19): siRNA sense strand
aaggaaacauuacccaucu

SEQ ID NO: 2138021 - RNA, 19 nt, Homo sapiens
  misc_RNA (1)...(19): siRNA sense strand
ggcaagaucaugcacuuuc

SEQ ID NO: 2138022 - RNA, 19 nt, Homo sapiens
  misc_RNA (1)...(19): siRNA sense strand
caaugaagccagcugaaag

SEQ ID NO: 2138023 - RNA, 19 nt, Homo sapiens
  misc_RNA (1)...(19): siRNA sense strand
cuaagcuccuuccaaacaa

SEQ ID NO: 2138024 - RNA, 19 nt, Homo sapiens
  misc_RNA (1)...(19): siRNA sense strand
uuauauggacccugucuuu

SEQ ID NO: 2138025 - RNA, 19 nt, Homo sapiens
  misc_RNA (1)...(19): siRNA sense strand
gaaagaagcccaaggaaua

SEQ ID NO: 2138026 - RNA, 19 nt, Homo sapiens
  misc_RNA (1)...(19): siRNA sense strand
caaggaagcuggauaugua

SEQ ID NO: 2138027 - RNA, 19 nt, Homo sapiens
  misc_RNA (1)...(19): siRNA sense strand
caacugagcuggagcauuc

SEQ ID NO: 2138028 - RNA, 19 nt, Homo sapiens
  misc_RNA (1)...(19): siRNA sense strand
gaagaugcauuuguaugua

SEQ ID NO: 2138029 - RNA, 19 nt, Homo sapiens
  misc_RNA (1)...(19): siRNA sense strand
cagcaaagcagcuaacuua

SEQ ID NO: 2138030 - RNA, 19 nt, Homo sapiens
  misc_RNA (1)...(19): siRNA sense strand
ggaauaccaugcuuucuuc

SEQ ID NO: 2138031 - RNA, 19 nt, Homo sapiens
  misc_RNA (1)...(19): siRNA sense strand
gcagaaagguauguagcua

SEQ ID NO: 2138032 - RNA, 19 nt, Homo sapiens
  misc_RNA (1)...(19): siRNA sense strand
gcagaccuguuuacggaua

SEQ ID NO: 2138033 - RNA, 19 nt, Homo sapiens
  misc_RNA (1)...(19): siRNA sense strand
cugaagagcuugccauuug

SEQ ID NO: 2138034 - RNA, 19 nt, Homo sapiens
  misc_RNA (1)...(19): siRNA sense strand
guaaucacaugagcauaua

SEQ ID NO: 2138035 - RNA, 19 nt, Homo sapiens
  misc_RNA (1)...(19): siRNA sense strand
gaggaggaauucugcauug

SEQ ID NO: 2138036 - RNA, 19 nt, Homo sapiens
  misc_RNA (1)...(19): siRNA sense strand
ucucuaagcuccuuccaaa

SEQ ID NO: 2138037 - RNA, 19 nt, Homo sapiens
  misc_RNA (1)...(19): siRNA sense strand
ggcacaaacucgguacuua

SEQ ID NO: 2138038 - RNA, 19 nt, Homo sapiens
  misc_RNA (1)...(19): siRNA sense strand
caaaacaaguggaagauuu

SEQ ID NO: 2138039 - RNA, 19 nt, Homo sapiens
  misc_RNA (1)...(19): siRNA sense strand
cggaagagcccaaaucaaa

SEQ ID NO: 2138040 - RNA, 19 nt, Homo sapiens
  misc_RNA (1)...(19): siRNA sense strand
ggaagcaucuggcacaaac

SEQ ID NO: 2138041 - RNA, 19 nt, Homo sapiens
  misc_RNA (1)...(19): siRNA sense strand
acacggaugugcccuauau

SEQ ID NO: 2138042 - RNA, 19 nt, Homo sapiens
  misc_RNA (1)...(19): siRNA sense strand
acacugagcccaauccuaa

SEQ ID NO: 2138043 - RNA, 19 nt, Homo sapiens
  misc_RNA (1)...(19): siRNA sense strand
caaggaauaucagaaugaa

SEQ ID NO: 2138044 - RNA, 19 nt, Homo sapiens
  misc_RNA (1)...(19): siRNA sense strand
gaagaugcuuauuucaaca

SEQ ID NO: 2138045 - RNA, 19 nt, Homo sapiens
  misc_RNA (1)...(19): siRNA sense strand
gcaagaucaugcacuuuca

SEQ ID NO: 2138046 - RNA, 19 nt, Homo sapiens
  misc_RNA (1)...(19): siRNA sense strand
ucauaaagcagaccuguuu

SEQ ID NO: 2138047 - RNA, 19 nt, Homo sapiens
  misc_RNA (1)...(19): siRNA sense strand
ggaagaugcauuuguaugu

SEQ ID NO: 2138048 - RNA, 19 nt, Homo sapiens
  misc_RNA (1)...(19): siRNA sense strand
acaguuagaugaagaagau

SEQ ID NO: 2138049 - RNA, 19 nt, Homo sapiens
  misc_RNA (1)...(19): siRNA sense strand
gagaguaggaggaggaauu

SEQ ID NO: 2138050 - RNA, 19 nt, Homo sapiens
  misc_RNA (1)...(19): siRNA sense strand
caauguaggucuagaagag

SEQ ID NO: 2138051 - RNA, 19 nt, Homo sapiens
  misc_RNA (1)...(19): siRNA sense strand
gcaaagugcguccagcaaa

SEQ ID NO: 2138052 - RNA, 19 nt, Homo sapiens
  misc_RNA (1)...(19): siRNA sense strand
gaagaggaagacccaaauu

SEQ ID NO: 2138053 - RNA, 19 nt, Homo sapiens
  misc_RNA (1)...(19): siRNA sense strand
aaagguauguagcuaguga

SEQ ID NO: 2138054 - RNA, 19 nt, Homo sapiens
  misc_RNA (1)...(19): siRNA sense strand
ggaagacuuguguggaaua

SEQ ID NO: 2138055 - RNA, 19 nt, Homo sapiens
  misc_RNA (1)...(19): siRNA sense strand
agacuacuaugcuuuguau

SEQ ID NO: 2138056 - RNA, 19 nt, Homo sapiens
  misc_RNA (1)...(19): siRNA sense strand
gcaaugaagccagcugaaa

SEQ ID NO: 2138057 - RNA, 19 nt, Homo sapiens
  misc_RNA (1)...(19): siRNA sense strand
gcagcaaggguuccaguuu

SEQ ID NO: 2138058 - RNA, 19 nt, Homo sapiens
  misc_RNA (1)...(19): siRNA sense strand
gcaaagcagcuaacuuaca

SEQ ID NO: 2138059 - RNA, 19 nt, Homo sapiens
  misc_RNA (1)...(19): siRNA sense strand
gaacuuggagacuuucaug

SEQ ID NO: 2138060 - RNA, 19 nt, Homo sapiens
  misc_RNA (1)...(19): siRNA sense strand
gagccaaucagacaugaaa

SEQ ID NO: 2138061 - RNA, 19 nt, Homo sapiens
  misc_RNA (1)...(19): siRNA sense strand
cagcaaggguuccaguuuc

SEQ ID NO: 2138062 - RNA, 19 nt, Homo sapiens
  misc_RNA (1)...(19): siRNA sense strand
caaagcagcuaacuuacac

SEQ ID NO: 2138063 - RNA, 19 nt, Homo sapiens
  misc_RNA (1)...(19): siRNA sense strand
gguaaucacaugagcauau

SEQ ID NO: 2138064 - RNA, 19 nt, Homo sapiens
  misc_RNA (1)...(19): siRNA sense strand
agaugaagaugcuuauuuc

SEQ ID NO: 2138065 - RNA, 19 nt, Homo sapiens
  misc_RNA (1)...(19): siRNA sense strand
gcaaggaagcuggauaugu

SEQ ID NO: 2138066 - RNA, 19 nt, Homo sapiens
  misc_RNA (1)...(19): siRNA sense strand
agacaggacuucacuaaaa

SEQ ID NO: 2138067 - RNA, 19 nt, Homo sapiens
  misc_RNA (1)...(19): siRNA sense strand
caaagugcguccagcaaag

SEQ ID NO: 2138068 - RNA, 19 nt, Homo sapiens
  misc_RNA (1)...(19): siRNA sense strand
caucaaacuucaugccaau

SEQ ID NO: 2138069 - RNA, 19 nt, Homo sapiens
  misc_RNA (1)...(19): siRNA sense strand
ugaagagcuugccauuuga

SEQ ID NO: 2138070 - RNA, 19 nt, Homo sapiens
  misc_RNA (1)...(19): siRNA sense strand
gaucaaaguacagcagaaa

SEQ ID NO: 2138071 - RNA, 19 nt, Homo sapiens
  misc_RNA (1)...(19): siRNA sense strand
uuuggaagaugcauuugua

SEQ ID NO: 2138072 - RNA, 19 nt, Homo sapiens
  misc_RNA (1)...(19): siRNA sense strand
ggucagcagguugguauua

SEQ ID NO: 2138073 - RNA, 19 nt, Homo sapiens
  misc_RNA (1)...(19): siRNA sense strand
gaugugcccuauauuccuu

SEQ ID NO: 2138074 - RNA, 19 nt, Homo sapiens
  misc_RNA (1)...(19): siRNA sense strand
ccaaggaauaucagaauga

SEQ ID NO: 2138075 - RNA, 19 nt, Homo sapiens
  misc_RNA (1)...(19): siRNA sense strand
gucagaauuuagaccuuua

SEQ ID NO: 2138076 - RNA, 19 nt, Homo sapiens
  misc_RNA (1)...(19): siRNA sense strand
gaagcuauagccaggacua

SEQ ID NO: 2138077 - RNA, 19 nt, Homo sapiens
  misc_RNA (1)...(19): siRNA sense strand
ugaagaagaugaagaugcu

SEQ ID NO: 2138078 - RNA, 19 nt, Homo sapiens
  misc_RNA (1)...(19): siRNA sense strand
aaucagaacuuggagacuu

SEQ ID NO: 2138079 - RNA, 19 nt, Homo sapiens
  misc_RNA (1)...(19): siRNA sense strand
ggaucaaaguacagcagaa

SEQ ID NO: 2138080 - RNA, 19 nt, Homo sapiens
  misc_RNA (1)...(19): siRNA sense strand
gaagagcuugccauuugaa

SEQ ID NO: 2138081 - RNA, 19 nt, Homo sapiens
  misc_RNA (1)...(19): siRNA sense strand
guauguagcuagugaaucc

SEQ ID NO: 2138082 - RNA, 19 nt, Homo sapiens
  misc_RNA (1)...(19): siRNA sense strand
ggaguugccagcaguucua

SEQ ID NO: 2138083 - RNA, 19 nt, Homo sapiens
  misc_RNA (1)...(19): siRNA sense strand
cuacaucagucccaaagca

SEQ ID NO: 2138084 - RNA, 19 nt, Homo sapiens
  misc_RNA (1)...(19): siRNA sense strand
cagcaguucuaauggauca

SEQ ID NO: 2138085 - RNA, 19 nt, Homo sapiens
  misc_RNA (1)...(19): siRNA sense strand
gguaggagcaacaucaaug

SEQ ID NO: 2138086 - RNA, 19 nt, Homo sapiens
  misc_RNA (1)...(19): siRNA sense strand
gcacaaacucgguacuuac

SEQ ID NO: 2138087 - RNA, 19 nt, Homo sapiens
  misc_RNA (1)...(19): siRNA sense strand
agaggaagacccaaauuug

SEQ ID NO: 2138088 - RNA, 19 nt, Homo sapiens
  misc_RNA (1)...(19): siRNA sense strand
gaucccacauugcuacauc

SEQ ID NO: 2138089 - RNA, 19 nt, Homo sapiens
  misc_RNA (1)...(19): siRNA sense strand
ggaggaggaauucugcauu

SEQ ID NO: 2138090 - RNA, 19 nt, Homo sapiens
  misc_RNA (1)...(19): siRNA sense strand
ggaaacauuacccaucuca

SEQ ID NO: 2138091 - RNA, 19 nt, Homo sapiens
  misc_RNA (1)...(19): siRNA sense strand
ggaagagcccaaaucaaag

SEQ ID NO: 2138092 - RNA, 19 nt, Homo sapiens
  misc_RNA (1)...(19): siRNA sense strand
guccugcucucagucauaa

SEQ ID NO: 2138093 - RNA, 19 nt, Homo sapiens
  misc_RNA (1)...(19): siRNA sense strand
gaagacuuguguggaauac

SEQ ID NO: 2138094 - RNA, 19 nt, Homo sapiens
  misc_RNA (1)...(19): siRNA sense strand
gaagaugaagaugcuuauu

SEQ ID NO: 2138095 - RNA, 19 nt, Homo sapiens
  misc_RNA (1)...(19): siRNA sense strand
ucuaauggaucaaaguaca

SEQ ID NO: 2138096 - RNA, 19 nt, Homo sapiens
  misc_RNA (1)...(19): siRNA sense strand
gcugaaagaagcccaagga

SEQ ID NO: 2138097 - RNA, 19 nt, Homo sapiens
  misc_RNA (1)...(19): siRNA sense strand
gcaguuccucuuucccuuu

SEQ ID NO: 2138098 - RNA, 19 nt, Homo sapiens
  misc_RNA (1)...(19): siRNA sense strand
gaggugacauuugcaacug

SEQ ID NO: 2138099 - RNA, 19 nt, Homo sapiens
  misc_RNA (1)...(19): siRNA sense strand
uaucucacaucuuacaauc

SEQ ID NO: 2138100 - RNA, 19 nt, Homo sapiens
  misc_RNA (1)...(19): siRNA sense strand
ggucacccauggccagaau

SEQ ID NO: 2138101 - RNA, 19 nt, Homo sapiens
  misc_RNA (1)...(19): siRNA sense strand
aaaccagacuacuaugcuu

SEQ ID NO: 2138102 - RNA, 19 nt, Homo sapiens
  misc_RNA (1)...(19): siRNA sense strand
guucuaauggaucaaagua

SEQ ID NO: 2138103 - RNA, 19 nt, Homo sapiens
  misc_RNA (1)...(19): siRNA sense strand
ugaaagaagcccaaggaau

SEQ ID NO: 2138104 - RNA, 19 nt, Homo sapiens
  misc_RNA (1)...(19): siRNA sense strand
caaacuucaugccaauauc

SEQ ID NO: 2138105 - RNA, 19 nt, Homo sapiens
  misc_RNA (1)...(19): siRNA sense strand
aagaagaugaagaugcuua

SEQ ID NO: 2138106 - RNA, 19 nt, Homo sapiens
  misc_RNA (1)...(19): siRNA sense strand
agaaagguauguagcuagu

SEQ ID NO: 2138107 - RNA, 19 nt, Homo sapiens
  misc_RNA (1)...(19): siRNA sense strand
aagaggaagacccaaauuu

SEQ ID NO: 2138108 - RNA, 19 nt, Homo sapiens
  misc_RNA (1)...(19): siRNA sense strand
guagagcccacugcaauga

SEQ ID NO: 2138109 - RNA, 19 nt, Homo sapiens
  misc_RNA (1)...(19): siRNA sense strand
cauauauucuggccucaca

SEQ ID NO: 2138110 - RNA, 19 nt, Homo sapiens
  misc_RNA (1)...(19): siRNA sense strand
uauauggacccugucuuua

SEQ ID NO: 2138111 - RNA, 19 nt, Homo sapiens
  misc_RNA (1)...(19): siRNA sense strand
cuggaagacuuguguggaa

SEQ ID NO: 2138112 - RNA, 19 nt, Homo sapiens
  misc_RNA (1)...(19): siRNA sense strand
caacacaccaacugcugaa

SEQ ID NO: 2138113 - RNA, 19 nt, Homo sapiens
  misc_RNA (1)...(19): siRNA sense strand
gaagagcuuucagcaagac

SEQ ID NO: 2138114 - RNA, 19 nt, Homo sapiens
  misc_RNA (1)...(19): siRNA sense strand
gcuguaaguuuucugguaa

SEQ ID NO: 2138115 - RNA, 19 nt, Homo sapiens
  misc_RNA (1)...(19): siRNA sense strand
ggaggaauucugcauugga

SEQ ID NO: 2138116 - RNA, 19 nt, Homo sapiens
  misc_RNA (1)...(19): siRNA sense strand
ccaauuagagcagaggaaa

SEQ ID NO: 2138117 - RNA, 19 nt, Homo sapiens
  misc_RNA (1)...(19): siRNA sense strand
gcuaaaauccgcaaguuga

SEQ ID NO: 2138118 - RNA, 19 nt, Homo sapiens
  misc_RNA (1)...(19): siRNA sense strand
ggcaagaucaugcacuuuc

SEQ ID NO: 2138119 - RNA, 19 nt, Homo sapiens
  misc_RNA (1)...(19): siRNA sense strand
caaugaagccagcugaaag

SEQ ID NO: 2138120 - RNA, 19 nt, Homo sapiens
  misc_RNA (1)...(19): siRNA sense strand
cuaagcuccuuccaaacaa

SEQ ID NO: 2138121 - RNA, 19 nt, Homo sapiens
  misc_RNA (1)...(19): siRNA sense strand
uuauauggacccugucuuu

SEQ ID NO: 2138122 - RNA, 19 nt, Homo sapiens
  misc_RNA (1)...(19): siRNA sense strand
aaggaaacauuacccaucu

SEQ ID NO: 2138123 - RNA, 19 nt, Homo sapiens
  misc_RNA (1)...(19): siRNA sense strand
caugcuuucuucaggcuuu

SEQ ID NO: 2138124 - RNA, 19 nt, Homo sapiens
  misc_RNA (1)...(19): siRNA sense strand
aggaauaucagaaugaaga

SEQ ID NO: 2138125 - RNA, 19 nt, Homo sapiens
  misc_RNA (1)...(19): siRNA sense strand
gagaaaggacacacucuaa

SEQ ID NO: 2138126 - RNA, 19 nt, Homo sapiens
  misc_RNA (1)...(19): siRNA sense strand
ccagcgagaucgacauaga

SEQ ID NO: 2138127 - RNA, 19 nt, Homo sapiens
  misc_RNA (1)...(19): siRNA sense strand
gcacagcacaggacagaag

SEQ ID NO: 2138128 - RNA, 19 nt, Homo sapiens
  misc_RNA (1)...(19): siRNA sense strand
ucuguaggcugcccauuug

SEQ ID NO: 2138129 - RNA, 19 nt, Homo sapiens
  misc_RNA (1)...(19): siRNA sense strand
agacacagccuccaaccaa

SEQ ID NO: 2138130 - RNA, 19 nt, Homo sapiens
  misc_RNA (1)...(19): siRNA sense strand
cgacauagaaggccuaggu

SEQ ID NO: 2138131 - RNA, 19 nt, Homo sapiens
  misc_RNA (1)...(19): siRNA sense strand
caagacuguuggaaacugu

SEQ ID NO: 2138132 - RNA, 19 nt, Homo sapiens
  misc_RNA (1)...(19): siRNA sense strand
uagaaggccuaggucauca

SEQ ID NO: 2138133 - RNA, 19 nt, Homo sapiens
  misc_RNA (1)...(19): siRNA sense strand
gcuccuacccaucacaguu

SEQ ID NO: 2138134 - RNA, 19 nt, Homo sapiens
  misc_RNA (1)...(19): siRNA sense strand
cgguguagcugggagagaa

SEQ ID NO: 2138135 - RNA, 19 nt, Homo sapiens
  misc_RNA (1)...(19): siRNA sense strand
aggccuaggucaucaagau

SEQ ID NO: 2138136 - RNA, 19 nt, Homo sapiens
  misc_RNA (1)...(19): siRNA sense strand
gaaacugugcgguguagcu

SEQ ID NO: 2138137 - RNA, 19 nt, Homo sapiens
  misc_RNA (1)...(19): siRNA sense strand
cagcgagaucgacauagaa

SEQ ID NO: 2138138 - RNA, 19 nt, Homo sapiens
  misc_RNA (1)...(19): siRNA sense strand
acacagacacagccuccaa

SEQ ID NO: 2138139 - RNA, 19 nt, Homo sapiens
  misc_RNA (1)...(19): siRNA sense strand
cauagaaggccuaggucau

SEQ ID NO: 2138140 - RNA, 19 nt, Homo sapiens
  misc_RNA (1)...(19): siRNA sense strand
gaaggccuaggucaucaag

SEQ ID NO: 2138141 - RNA, 19 nt, Homo sapiens
  misc_RNA (1)...(19): siRNA sense strand
ccuccucgccugcuuguuc

SEQ ID NO: 2138142 - RNA, 19 nt, Homo sapiens
  misc_RNA (1)...(19): siRNA sense strand
gagagaagcucaucuuuaa

SEQ ID NO: 2138143 - RNA, 19 nt, Homo sapiens
  misc_RNA (1)...(19): siRNA sense strand
gagaauagcugcagaagaa

SEQ ID NO: 2138144 - RNA, 19 nt, Homo sapiens
  misc_RNA (1)...(19): siRNA sense strand
gaaaggaagccacguguua

SEQ ID NO: 2138145 - RNA, 19 nt, Homo sapiens
  misc_RNA (1)...(19): siRNA sense strand
gagagacgcuccaaagaaa

SEQ ID NO: 2138146 - RNA, 19 nt, Homo sapiens
  misc_RNA (1)...(19): siRNA sense strand
ggagagaagcucaucuuua

SEQ ID NO: 2138147 - RNA, 19 nt, Homo sapiens
  misc_RNA (1)...(19): siRNA sense strand
gaagaccacuugaaacuca

SEQ ID NO: 2138148 - RNA, 19 nt, Homo sapiens
  misc_RNA (1)...(19): siRNA sense strand
gaaaauaccuccucaaaca

SEQ ID NO: 2138149 - RNA, 19 nt, Homo sapiens
  misc_RNA (1)...(19): siRNA sense strand
agaccaagcuccaauauga

SEQ ID NO: 2138150 - RNA, 19 nt, Homo sapiens
  misc_RNA (1)...(19): siRNA sense strand
ggaggagacuugcugauga

SEQ ID NO: 2138151 - RNA, 19 nt, Homo sapiens
  misc_RNA (1)...(19): siRNA sense strand
gaaagacacuucaauacag

SEQ ID NO: 2138152 - RNA, 19 nt, Homo sapiens
  misc_RNA (1)...(19): siRNA sense strand
uuacaggcgucaccaauua

SEQ ID NO: 2138153 - RNA, 19 nt, Homo sapiens
  misc_RNA (1)...(19): siRNA sense strand
caaacgagauugcuaagga

SEQ ID NO: 2138154 - RNA, 19 nt, Homo sapiens
  misc_RNA (1)...(19): siRNA sense strand
gcaagacgccaauaaagaa

SEQ ID NO: 2138155 - RNA, 19 nt, Homo sapiens
  misc_RNA (1)...(19): siRNA sense strand
gagcaaaacugccaauaaa

SEQ ID NO: 2138156 - RNA, 19 nt, Homo sapiens
  misc_RNA (1)...(19): siRNA sense strand
gaaagaccaagcuccaaua

SEQ ID NO: 2138157 - RNA, 19 nt, Homo sapiens
  misc_RNA (1)...(19): siRNA sense strand
gaaguauucugcaacacaa

SEQ ID NO: 2138158 - RNA, 19 nt, Homo sapiens
  misc_RNA (1)...(19): siRNA sense strand
uagaagagauaguaaccua

SEQ ID NO: 2138159 - RNA, 19 nt, Homo sapiens
  misc_RNA (1)...(19): siRNA sense strand
gcaacccauuccucaaaua

SEQ ID NO: 2138160 - RNA, 19 nt, Homo sapiens
  misc_RNA (1)...(19): siRNA sense strand
gaaagaacacgagagaauu

SEQ ID NO: 2138161 - RNA, 19 nt, Homo sapiens
  misc_RNA (1)...(19): siRNA sense strand
gaagcaagaugugguuaau

SEQ ID NO: 2138162 - RNA, 19 nt, Homo sapiens
  misc_RNA (1)...(19): siRNA sense strand
gagacuugcugaugauuau

SEQ ID NO: 2138163 - RNA, 19 nt, Homo sapiens
  misc_RNA (1)...(19): siRNA sense strand
gaaacacaacuacuugaaa

SEQ ID NO: 2138164 - RNA, 19 nt, Homo sapiens
  misc_RNA (1)...(19): siRNA sense strand
caagaagcgucuaucauca

SEQ ID NO: 2138165 - RNA, 19 nt, Homo sapiens
  misc_RNA (1)...(19): siRNA sense strand
gaagaacaacggagaauag

SEQ ID NO: 2138166 - RNA, 19 nt, Homo sapiens
  misc_RNA (1)...(19): siRNA sense strand
cuacauucgucuacugaua

SEQ ID NO: 2138167 - RNA, 19 nt, Homo sapiens
  misc_RNA (1)...(19): siRNA sense strand
aaagaacacgagagaauua

SEQ ID NO: 2138168 - RNA, 19 nt, Homo sapiens
  misc_RNA (1)...(19): siRNA sense strand
uaacagaugugaggcuuug

SEQ ID NO: 2138169 - RNA, 19 nt, Homo sapiens
  misc_RNA (1)...(19): siRNA sense strand
aaacaaagauuagcaagag

SEQ ID NO: 2138170 - RNA, 19 nt, Homo sapiens
  misc_RNA (1)...(19): siRNA sense strand
guucaacaaugccaagaaa

SEQ ID NO: 2138171 - RNA, 19 nt, Homo sapiens
  misc_RNA (1)...(19): siRNA sense strand
caagaacgguuagaaagga

SEQ ID NO: 2138172 - RNA, 19 nt, Homo sapiens
  misc_RNA (1)...(19): siRNA sense strand
gcaaagggucauuaagaaa

SEQ ID NO: 2138173 - RNA, 19 nt, Homo sapiens
  misc_RNA (1)...(19): siRNA sense strand
ccaaagaaaucagaaaugg

SEQ ID NO: 2138174 - RNA, 19 nt, Homo sapiens
  misc_RNA (1)...(19): siRNA sense strand
gagaagcucaucuuuaaau

SEQ ID NO: 2138175 - RNA, 19 nt, Homo sapiens
  misc_RNA (1)...(19): siRNA sense strand
gaaaggggacgccaaaaua

SEQ ID NO: 2138176 - RNA, 19 nt, Homo sapiens
  misc_RNA (1)...(19): siRNA sense strand
ucagacaccuuuagacaau

SEQ ID NO: 2138177 - RNA, 19 nt, Homo sapiens
  misc_RNA (1)...(19): siRNA sense strand
ggacaaacaggccuuaauc

SEQ ID NO: 2138178 - RNA, 19 nt, Homo sapiens
  misc_RNA (1)...(19): siRNA sense strand
gggaagaaaugcagcaaag

SEQ ID NO: 2138179 - RNA, 19 nt, Homo sapiens
  misc_RNA (1)...(19): siRNA sense strand
uaagaguacugcagguauu

SEQ ID NO: 2138180 - RNA, 19 nt, Homo sapiens
  misc_RNA (1)...(19): siRNA sense strand
gaaaggaggaagcaagaug

SEQ ID NO: 2138181 - RNA, 19 nt, Homo sapiens
  misc_RNA (1)...(19): siRNA sense strand
caaagugcaucaaguacug

SEQ ID NO: 2138182 - RNA, 19 nt, Homo sapiens
  misc_RNA (1)...(19): siRNA sense strand
ccagaaggaugaagcacaa

SEQ ID NO: 2138183 - RNA, 19 nt, Homo sapiens
  misc_RNA (1)...(19): siRNA sense strand
caagaaagaacacgagaga

SEQ ID NO: 2138184 - RNA, 19 nt, Homo sapiens
  misc_RNA (1)...(19): siRNA sense strand
aaucagaaauggacaaaca

SEQ ID NO: 2138185 - RNA, 19 nt, Homo sapiens
  misc_RNA (1)...(19): siRNA sense strand
gaacacgagagaauuaugu

SEQ ID NO: 2138186 - RNA, 19 nt, Homo sapiens
  misc_RNA (1)...(19): siRNA sense strand
ggagacuugcugaugauua

SEQ ID NO: 2138187 - RNA, 19 nt, Homo sapiens
  misc_RNA (1)...(19): siRNA sense strand
uaugaagagucugguaaua

SEQ ID NO: 2138188 - RNA, 19 nt, Homo sapiens
  misc_RNA (1)...(19): siRNA sense strand
agaagcgucuaucaucaua

SEQ ID NO: 2138189 - RNA, 19 nt, Homo sapiens
  misc_RNA (1)...(19): siRNA sense strand
gcacauaugauucugagau

SEQ ID NO: 2138190 - RNA, 19 nt, Homo sapiens
  misc_RNA (1)...(19): siRNA sense strand
gcucugcaauggcgaauuc

SEQ ID NO: 2138191 - RNA, 19 nt, Homo sapiens
  misc_RNA (1)...(19): siRNA sense strand
caugacaucuugccaaagu

SEQ ID NO: 2138192 - RNA, 19 nt, Homo sapiens
  misc_RNA (1)...(19): siRNA sense strand
caaaagacauggcaaagga

SEQ ID NO: 2138193 - RNA, 19 nt, Homo sapiens
  misc_RNA (1)...(19): siRNA sense strand
cagcaaagggucauuaaga

SEQ ID NO: 2138194 - RNA, 19 nt, Homo sapiens
  misc_RNA (1)...(19): siRNA sense strand
gaaagacaacgggaagaaa

SEQ ID NO: 2138195 - RNA, 19 nt, Homo sapiens
  misc_RNA (1)...(19): siRNA sense strand
gcuguuauguuucccaugu

SEQ ID NO: 2138196 - RNA, 19 nt, Homo sapiens
  misc_RNA (1)...(19): siRNA sense strand
ugaagagucugguaauaag

SEQ ID NO: 2138197 - RNA, 19 nt, Homo sapiens
  misc_RNA (1)...(19): siRNA sense strand
ccaucaccauuaccacuua

SEQ ID NO: 2138198 - RNA, 19 nt, Homo sapiens
  misc_RNA (1)...(19): siRNA sense strand
acaggguacuucugcuuua

SEQ ID NO: 2138199 - RNA, 19 nt, Homo sapiens
  misc_RNA (1)...(19): siRNA sense strand
gaaaggcggaugaaaccaa

SEQ ID NO: 2138200 - RNA, 19 nt, Homo sapiens
  misc_RNA (1)...(19): siRNA sense strand
caagaaagacagaugugaa

SEQ ID NO: 2138201 - RNA, 19 nt, Homo sapiens
  misc_RNA (1)...(19): siRNA sense strand
ggaagcaagaugugguuaa

SEQ ID NO: 2138202 - RNA, 19 nt, Homo sapiens
  misc_RNA (1)...(19): siRNA sense strand
cgacaaggacucauugaau

SEQ ID NO: 2138203 - RNA, 19 nt, Homo sapiens
  misc_RNA (1)...(19): siRNA sense strand
auugagggcuguuauguuu

SEQ ID NO: 2138204 - RNA, 19 nt, Homo sapiens
  misc_RNA (1)...(19): siRNA sense strand
uaaauguacuagcgacgaa

SEQ ID NO: 2138205 - RNA, 19 nt, Homo sapiens
  misc_RNA (1)...(19): siRNA sense strand
gaagagauaguaaccuaca

SEQ ID NO: 2138206 - RNA, 19 nt, Homo sapiens
  misc_RNA (1)...(19): siRNA sense strand
gaacaggguacuucugcuu

SEQ ID NO: 2138207 - RNA, 19 nt, Homo sapiens
  misc_RNA (1)...(19): siRNA sense strand
caaagggucauuaagaaau

SEQ ID NO: 2138208 - RNA, 19 nt, Homo sapiens
  misc_RNA (1)...(19): siRNA sense strand
ccaagaagcgucuaucauc

SEQ ID NO: 2138209 - RNA, 19 nt, Homo sapiens
  misc_RNA (1)...(19): siRNA sense strand
gaaaucagaaauggacaaa

SEQ ID NO: 2138210 - RNA, 19 nt, Homo sapiens
  misc_RNA (1)...(19): siRNA sense strand
acccauuccucaaauauaa

SEQ ID NO: 2138211 - RNA, 19 nt, Homo sapiens
  misc_RNA (1)...(19): siRNA sense strand
agacaccuuuagacaauaa

SEQ ID NO: 2138212 - RNA, 19 nt, Homo sapiens
  misc_RNA (1)...(19): siRNA sense strand
gaaguaguuucaagaccau

SEQ ID NO: 2138213 - RNA, 19 nt, Homo sapiens
  misc_RNA (1)...(19): siRNA sense strand
gcucaccuaccaaauuuaa

SEQ ID NO: 2138214 - RNA, 19 nt, Homo sapiens
  misc_RNA (1)...(19): siRNA sense strand
ggacaagaaagacagaugu

SEQ ID NO: 2138215 - RNA, 19 nt, Homo sapiens
  misc_RNA (1)...(19): siRNA sense strand
gaaauuaugaagcggacaa

SEQ ID NO: 2138216 - RNA, 19 nt, Homo sapiens
  misc_RNA (1)...(19): siRNA sense strand
aauaaaagcucaagaggaa

SEQ ID NO: 2138217 - RNA, 19 nt, Homo sapiens
  misc_RNA (1)...(19): siRNA sense strand
cgagagacgcuccaaagaa

SEQ ID NO: 2138218 - RNA, 19 nt, Homo sapiens
  misc_RNA (1)...(19): siRNA sense strand
ccaggugaauguggaagua

SEQ ID NO: 2138219 - RNA, 19 nt, Homo sapiens
  misc_RNA (1)...(19): siRNA sense strand
gaggagacuugcugaugau

SEQ ID NO: 2138220 - RNA, 19 nt, Homo sapiens
  misc_RNA (1)...(19): siRNA sense strand
gccaugacauauaugaaga

SEQ ID NO: 2138221 - RNA, 19 nt, Homo sapiens
  misc_RNA (1)...(19): siRNA sense strand
ucgcauggcugguaagcuu

SEQ ID NO: 2138222 - RNA, 19 nt, Homo sapiens
  misc_RNA (1)...(19): siRNA sense strand
ccaaaggcauaugaucuau

SEQ ID NO: 2138223 - RNA, 19 nt, Homo sapiens
  misc_RNA (1)...(19): siRNA sense strand
gccaaaggcauaugaucua

SEQ ID NO: 2138224 - RNA, 19 nt, Homo sapiens
  misc_RNA (1)...(19): siRNA sense strand
ugagaaggcugccaucaac

SEQ ID NO: 2138225 - RNA, 19 nt, Homo sapiens
  misc_RNA (1)...(19): siRNA sense strand
aaacgagauugcuaaggaa

SEQ ID NO: 2138226 - RNA, 19 nt, Homo sapiens
  misc_RNA (1)...(19): siRNA sense strand
aaagaaacacaacuacuug

SEQ ID NO: 2138227 - RNA, 19 nt, Homo sapiens
  misc_RNA (1)...(19): siRNA sense strand
gcugguauuucuagaagau

SEQ ID NO: 2138228 - RNA, 19 nt, Homo sapiens
  misc_RNA (1)...(19): siRNA sense strand
aggcucaccuaccaaauuu

SEQ ID NO: 2138229 - RNA, 19 nt, Homo sapiens
  misc_RNA (1)...(19): siRNA sense strand
ccucaaaggucacagaaac

SEQ ID NO: 2138230 - RNA, 19 nt, Homo sapiens
  misc_RNA (1)...(19): siRNA sense strand
ggaaguauucugcaacaca

SEQ ID NO: 2138231 - RNA, 19 nt, Homo sapiens
  misc_RNA (1)...(19): siRNA sense strand
uaaacgaucugcaucuacu

SEQ ID NO: 2138232 - RNA, 19 nt, Homo sapiens
  misc_RNA (1)...(19): siRNA sense strand
aauaaacgaucugcaucua

SEQ ID NO: 2138233 - RNA, 19 nt, Homo sapiens
  misc_RNA (1)...(19): siRNA sense strand
ggaagugagucuggaagca

SEQ ID NO: 2138234 - RNA, 19 nt, Homo sapiens
  misc_RNA (1)...(19): siRNA sense strand
cacacaagcugguauuucu

SEQ ID NO: 2138235 - RNA, 19 nt, Homo sapiens
  misc_RNA (1)...(19): siRNA sense strand
agaaagaacacgagagaau

SEQ ID NO: 2138236 - RNA, 19 nt, Homo sapiens
  misc_RNA (1)...(19): siRNA sense strand
gaagaaaggauggcuggau

SEQ ID NO: 2138237 - RNA, 19 nt, Homo sapiens
  misc_RNA (1)...(19): siRNA sense strand
caaaagaacugcccuccau

SEQ ID NO: 2138238 - RNA, 19 nt, Homo sapiens
  misc_RNA (1)...(19): siRNA sense strand
gaauugagggcuguuaugu

SEQ ID NO: 2138239 - RNA, 19 nt, Homo sapiens
  misc_RNA (1)...(19): siRNA sense strand
agcaaagggucauuaagaa

SEQ ID NO: 2138240 - RNA, 19 nt, Homo sapiens
  misc_RNA (1)...(19): siRNA sense strand
uagaagcacucccgaaggu

SEQ ID NO: 2138241 - RNA, 19 nt, Homo sapiens
  misc_RNA (1)...(19): siRNA sense strand
guggugagcacauaugauu

SEQ ID NO: 2138242 - RNA, 19 nt, Homo sapiens
  misc_RNA (1)...(19): siRNA sense strand
gagcggagcuuucguuuuc

SEQ ID NO: 2138243 - RNA, 19 nt, Homo sapiens
  misc_RNA (1)...(19): siRNA sense strand
ucgcugcgguuauugagua

SEQ ID NO: 2138244 - RNA, 19 nt, Homo sapiens
  misc_RNA (1)...(19): siRNA sense strand
cuaccucgcugcgguuauu

SEQ ID NO: 2138245 - RNA, 19 nt, Homo sapiens
  misc_RNA (1)...(19): siRNA sense strand
gcaacgaggcccagaacag

SEQ ID NO: 2138246 - RNA, 19 nt, Homo sapiens
  misc_RNA (1)...(19): siRNA sense strand
cgaccaccaucucucaagu

SEQ ID NO: 2138247 - RNA, 19 nt, Homo sapiens
  misc_RNA (1)...(19): siRNA sense strand
ggacauggugguucacaac

SEQ ID NO: 2138248 - RNA, 19 nt, Homo sapiens
  misc_RNA (1)...(19): siRNA sense strand
gagcuuucguuuucaguga

SEQ ID NO: 2138249 - RNA, 19 nt, Homo sapiens
  misc_RNA (1)...(19): siRNA sense strand
caacacgaccaccaucucu

SEQ ID NO: 2138250 - RNA, 19 nt, Homo sapiens
  misc_RNA (1)...(19): siRNA sense strand
cacaacgacaggcuacuga

SEQ ID NO: 2138251 - RNA, 19 nt, Homo sapiens
  misc_RNA (1)...(19): siRNA sense strand
acacgaccaccaucucuca

SEQ ID NO: 2138252 - RNA, 19 nt, Homo sapiens
  misc_RNA (1)...(19): siRNA sense strand
aaacggaggucucaucugu

SEQ ID NO: 2138253 - RNA, 19 nt, Homo sapiens
  misc_RNA (1)...(19): siRNA sense strand
ggugcagucuuacaugauu

SEQ ID NO: 2138254 - RNA, 19 nt, Homo sapiens
  misc_RNA (1)...(19): siRNA sense strand
uggcaaagcagcagaaaga

SEQ ID NO: 2138255 - RNA, 19 nt, Homo sapiens
  misc_RNA (1)...(19): siRNA sense strand
ugaacuggauccuggugaa

SEQ ID NO: 2138256 - RNA, 19 nt, Homo sapiens
  misc_RNA (1)...(19): siRNA sense strand
gacgauggcucugaacucu

SEQ ID NO: 2138257 - RNA, 19 nt, Homo sapiens
  misc_RNA (1)...(19): siRNA sense strand
gcaaagcagcagaaagagu

SEQ ID NO: 2138258 - RNA, 19 nt, Homo sapiens
  misc_RNA (1)...(19): siRNA sense strand
cccguuaucuaugucuuua

SEQ ID NO: 2138259 - RNA, 19 nt, Homo sapiens
  misc_RNA (1)...(19): siRNA sense strand
ucacaggucucuggucucu

SEQ ID NO: 2138260 - RNA, 19 nt, Homo sapiens
  misc_RNA (1)...(19): siRNA sense strand
gcaagcccuuuggcaaugu

SEQ ID NO: 2138261 - RNA, 19 nt, Homo sapiens
  misc_RNA (1)...(19): siRNA sense strand
cguuaucuaugucuuuaug

SEQ ID NO: 2138262 - RNA, 19 nt, Homo sapiens
  misc_RNA (1)...(19): siRNA sense strand
gguugacgauggcucugaa

SEQ ID NO: 2138263 - RNA, 19 nt, Homo sapiens
  misc_RNA (1)...(19): siRNA sense strand
ccagaaggcagagaaggaa

SEQ ID NO: 2138264 - RNA, 19 nt, Homo sapiens
  misc_RNA (1)...(19): siRNA sense strand
gcauugccuucuccuggau

SEQ ID NO: 2138265 - RNA, 19 nt, Homo sapiens
  misc_RNA (1)...(19): siRNA sense strand
acggaggucucaucugugu

SEQ ID NO: 2138266 - RNA, 19 nt, Homo sapiens
  misc_RNA (1)...(19): siRNA sense strand
gugcagucuuacaugauug

SEQ ID NO: 2138267 - RNA, 19 nt, Homo sapiens
  misc_RNA (1)...(19): siRNA sense strand
gcucugcuaccuccaagug

SEQ ID NO: 2138268 - RNA, 19 nt, Homo sapiens
  misc_RNA (1)...(19): siRNA sense strand
gugcugggccacccuaugu

SEQ ID NO: 2138269 - RNA, 19 nt, Homo sapiens
  misc_RNA (1)...(19): siRNA sense strand
uguaccaccucaccagugu

SEQ ID NO: 2138270 - RNA, 19 nt, Homo sapiens
  misc_RNA (1)...(19): siRNA sense strand
gaaggcagagaaggaagug

SEQ ID NO: 2138271 - RNA, 19 nt, Homo sapiens
  misc_RNA (1)...(19): siRNA sense strand
ggcaaugugagauuugaug

SEQ ID NO: 2138272 - RNA, 19 nt, Homo sapiens
  misc_RNA (1)...(19): siRNA sense strand
gcacuaucagcguugugaa

SEQ ID NO: 2138273 - RNA, 19 nt, Homo sapiens
  misc_RNA (1)...(19): siRNA sense strand
gccacccgcugaacuggau

SEQ ID NO: 2138274 - RNA, 19 nt, Homo sapiens
  misc_RNA (1)...(19): siRNA sense strand
ucaccuacaccaacagcaa

SEQ ID NO: 2138275 - RNA, 19 nt, Homo sapiens
  misc_RNA (1)...(19): siRNA sense strand
ugcaagcccuuuggcaaug

SEQ ID NO: 2138276 - RNA, 19 nt, Homo sapiens
  misc_RNA (1)...(19): siRNA sense strand
gugucuggaugaucuuugu

SEQ ID NO: 2138277 - RNA, 19 nt, Homo sapiens
  misc_RNA (1)...(19): siRNA sense strand
ugaaccggcaguuucgaaa

SEQ ID NO: 2138278 - RNA, 19 nt, Homo sapiens
  misc_RNA (1)...(19): siRNA sense strand
ccacccagaaggcagagaa

SEQ ID NO: 2138279 - RNA, 19 nt, Homo sapiens
  misc_RNA (1)...(19): siRNA sense strand
cuacaaccccguuaucuau

SEQ ID NO: 2138280 - RNA, 19 nt, Homo sapiens
  misc_RNA (1)...(19): siRNA sense strand
ggggugcagucuuacauga

SEQ ID NO: 2138281 - RNA, 19 nt, Homo sapiens
  misc_RNA (1)...(19): siRNA sense strand
gccauccgcaggacagcua

SEQ ID NO: 2138282 - RNA, 19 nt, Homo sapiens
  misc_RNA (1)...(19): siRNA sense strand
aaacggaggucucaucugu

SEQ ID NO: 2138283 - RNA, 19 nt, Homo sapiens
  misc_RNA (1)...(19): siRNA sense strand
ggugcagucuuacaugauu

SEQ ID NO: 2138284 - RNA, 19 nt, Homo sapiens
  misc_RNA (1)...(19): siRNA sense strand
uggcaaagcagcagaaaga

SEQ ID NO: 2138285 - RNA, 19 nt, Homo sapiens
  misc_RNA (1)...(19): siRNA sense strand
ugaacuggauccuggugaa

SEQ ID NO: 2138286 - RNA, 19 nt, Homo sapiens
  misc_RNA (1)...(19): siRNA sense strand
gacgauggcucugaacucu

SEQ ID NO: 2138287 - RNA, 19 nt, Homo sapiens
  misc_RNA (1)...(19): siRNA sense strand
gcaaagcagcagaaagagu

SEQ ID NO: 2138288 - RNA, 19 nt, Homo sapiens
  misc_RNA (1)...(19): siRNA sense strand
cccguuaucuaugucuuua

SEQ ID NO: 2138289 - RNA, 19 nt, Homo sapiens
  misc_RNA (1)...(19): siRNA sense strand
ucacaggucucuggucucu

SEQ ID NO: 2138290 - RNA, 19 nt, Homo sapiens
  misc_RNA (1)...(19): siRNA sense strand
gcaagcccuuuggcaaugu

SEQ ID NO: 2138291 - RNA, 19 nt, Homo sapiens
  misc_RNA (1)...(19): siRNA sense strand
cguuaucuaugucuuuaug

SEQ ID NO: 2138292 - RNA, 19 nt, Homo sapiens
  misc_RNA (1)...(19): siRNA sense strand
gguugacgauggcucugaa

SEQ ID NO: 2138293 - RNA, 19 nt, Homo sapiens
  misc_RNA (1)...(19): siRNA sense strand
ccagaaggcagagaaggaa

SEQ ID NO: 2138294 - RNA, 19 nt, Homo sapiens
  misc_RNA (1)...(19): siRNA sense strand
gcauugccuucuccuggau

SEQ ID NO: 2138295 - RNA, 19 nt, Homo sapiens
  misc_RNA (1)...(19): siRNA sense strand
acggaggucucaucugugu

SEQ ID NO: 2138296 - RNA, 19 nt, Homo sapiens
  misc_RNA (1)...(19): siRNA sense strand
gugcagucuuacaugauug

SEQ ID NO: 2138297 - RNA, 19 nt, Homo sapiens
  misc_RNA (1)...(19): siRNA sense strand
gcucugcuaccuccaagug

SEQ ID NO: 2138298 - RNA, 19 nt, Homo sapiens
  misc_RNA (1)...(19): siRNA sense strand
gugcugggccacccuaugu

SEQ ID NO: 2138299 - RNA, 19 nt, Homo sapiens
  misc_RNA (1)...(19): siRNA sense strand
uguaccaccucaccagugu

SEQ ID NO: 2138300 - RNA, 19 nt, Homo sapiens
  misc_RNA (1)...(19): siRNA sense strand
gaaggcagagaaggaagug

SEQ ID NO: 2138301 - RNA, 19 nt, Homo sapiens
  misc_RNA (1)...(19): siRNA sense strand
ggcaaugugagauuugaug

SEQ ID NO: 2138302 - RNA, 19 nt, Homo sapiens
  misc_RNA (1)...(19): siRNA sense strand
gcacuaucagcguugugaa

SEQ ID NO: 2138303 - RNA, 19 nt, Homo sapiens
  misc_RNA (1)...(19): siRNA sense strand
gccacccgcugaacuggau

SEQ ID NO: 2138304 - RNA, 19 nt, Homo sapiens
  misc_RNA (1)...(19): siRNA sense strand
ucaccuacaccaacagcaa

SEQ ID NO: 2138305 - RNA, 19 nt, Homo sapiens
  misc_RNA (1)...(19): siRNA sense strand
ugcaagcccuuuggcaaug

SEQ ID NO: 2138306 - RNA, 19 nt, Homo sapiens
  misc_RNA (1)...(19): siRNA sense strand
gugucuggaugaucuuugu

SEQ ID NO: 2138307 - RNA, 19 nt, Homo sapiens
  misc_RNA (1)...(19): siRNA sense strand
ugaaccggcaguuucgaaa

SEQ ID NO: 2138308 - RNA, 19 nt, Homo sapiens
  misc_RNA (1)...(19): siRNA sense strand
ccacccagaaggcagagaa

SEQ ID NO: 2138309 - RNA, 19 nt, Homo sapiens
  misc_RNA (1)...(19): siRNA sense strand
cuacaaccccguuaucuau

SEQ ID NO: 2138310 - RNA, 19 nt, Homo sapiens
  misc_RNA (1)...(19): siRNA sense strand
ggggugcagucuuacauga

SEQ ID NO: 2138311 - RNA, 19 nt, Homo sapiens
  misc_RNA (1)...(19): siRNA sense strand
gccauccgcaggacagcua

SEQ ID NO: 2138312 - RNA, 19 nt, Homo sapiens
  misc_RNA (1)...(19): siRNA sense strand
gaagagagcauuucuauga

SEQ ID NO: 2138313 - RNA, 19 nt, Homo sapiens
  misc_RNA (1)...(19): siRNA sense strand
ggaagaagauggagaagaa

SEQ ID NO: 2138314 - RNA, 19 nt, Homo sapiens
  misc_RNA (1)...(19): siRNA sense strand
gaagaagucuccucagauu

SEQ ID NO: 2138315 - RNA, 19 nt, Homo sapiens
  misc_RNA (1)...(19): siRNA sense strand
gaaaugaccucacgacuag

SEQ ID NO: 2138316 - RNA, 19 nt, Homo sapiens
  misc_RNA (1)...(19): siRNA sense strand
caaacuaucugcaaagaaa

SEQ ID NO: 2138317 - RNA, 19 nt, Homo sapiens
  misc_RNA (1)...(19): siRNA sense strand
gaagaagccuuaaacaauc

SEQ ID NO: 2138318 - RNA, 19 nt, Homo sapiens
  misc_RNA (1)...(19): siRNA sense strand
ggacauugcuguugagaga

SEQ ID NO: 2138319 - RNA, 19 nt, Homo sapiens
  misc_RNA (1)...(19): siRNA sense strand
ggaagaagccuuaaacaau

SEQ ID NO: 2138320 - RNA, 19 nt, Homo sapiens
  misc_RNA (1)...(19): siRNA sense strand
ggaaggcacuuauguggaa

SEQ ID NO: 2138321 - RNA, 19 nt, Homo sapiens
  misc_RNA (1)...(19): siRNA sense strand
ugaaagagcugaaaacuaa

SEQ ID NO: 2138322 - RNA, 19 nt, Homo sapiens
  misc_RNA (1)...(19): siRNA sense strand
gagcauggcuguugaagag

SEQ ID NO: 2138323 - RNA, 19 nt, Homo sapiens
  misc_RNA (1)...(19): siRNA sense strand
cuaaggagccuaaauauga

SEQ ID NO: 2138324 - RNA, 19 nt, Homo sapiens
  misc_RNA (1)...(19): siRNA sense strand
gaaauaaaguccagcaacu

SEQ ID NO: 2138325 - RNA, 19 nt, Homo sapiens
  misc_RNA (1)...(19): siRNA sense strand
ggaaaugaccucacgacua

SEQ ID NO: 2138326 - RNA, 19 nt, Homo sapiens
  misc_RNA (1)...(19): siRNA sense strand
uuaaagaggucuaaaguuc

SEQ ID NO: 2138327 - RNA, 19 nt, Homo sapiens
  misc_RNA (1)...(19): siRNA sense strand
gagcaaguguuucaggauu

SEQ ID NO: 2138328 - RNA, 19 nt, Homo sapiens
  misc_RNA (1)...(19): siRNA sense strand
gcaagaaguuuccucaucu

SEQ ID NO: 2138329 - RNA, 19 nt, Homo sapiens
  misc_RNA (1)...(19): siRNA sense strand
gaugaugagucaccuaaga

SEQ ID NO: 2138330 - RNA, 19 nt, Homo sapiens
  misc_RNA (1)...(19): siRNA sense strand
gcaguuauguugaaaagua

SEQ ID NO: 2138331 - RNA, 19 nt, Homo sapiens
  misc_RNA (1)...(19): siRNA sense strand
uggcagaaaucacgcaaua

SEQ ID NO: 2138332 - RNA, 19 nt, Homo sapiens
  misc_RNA (1)...(19): siRNA sense strand
cagcaacuguccucaaauu

SEQ ID NO: 2138333 - RNA, 19 nt, Homo sapiens
  misc_RNA (1)...(19): siRNA sense strand
ggucuucaccuaccaauaa

SEQ ID NO: 2138334 - RNA, 19 nt, Homo sapiens
  misc_RNA (1)...(19): siRNA sense strand
caaagaugcuaccuaugaa

SEQ ID NO: 2138335 - RNA, 19 nt, Homo sapiens
  misc_RNA (1)...(19): siRNA sense strand
ucaaagaugcuaccuauga

SEQ ID NO: 2138336 - RNA, 19 nt, Homo sapiens
  misc_RNA (1)...(19): siRNA sense strand
caagaagucuccucugcuu

SEQ ID NO: 2138337 - RNA, 19 nt, Homo sapiens
  misc_RNA (1)...(19): siRNA sense strand
gaaguuuccucaucuccaa

SEQ ID NO: 2138338 - RNA, 19 nt, Homo sapiens
  misc_RNA (1)...(19): siRNA sense strand
caacagagcaggcccaaau

SEQ ID NO: 2138339 - RNA, 19 nt, Homo sapiens
  misc_RNA (1)...(19): siRNA sense strand
ccagacaucuuucccaguu

SEQ ID NO: 2138340 - RNA, 19 nt, Homo sapiens
  misc_RNA (1)...(19): siRNA sense strand
gagcuucucugaguuauca

SEQ ID NO: 2138341 - RNA, 19 nt, Homo sapiens
  misc_RNA (1)...(19): siRNA sense strand
gaaucaagcaguuauguug

SEQ ID NO: 2138342 - RNA, 19 nt, Homo sapiens
  misc_RNA (1)...(19): siRNA sense strand
gcacagcccauaccugaaa

SEQ ID NO: 2138343 - RNA, 19 nt, Homo sapiens
  misc_RNA (1)...(19): siRNA sense strand
acacuugccucuaccagua

SEQ ID NO: 2138344 - RNA, 19 nt, Homo sapiens
  misc_RNA (1)...(19): siRNA sense strand
ggucuaaaguucaggaaau

SEQ ID NO: 2138345 - RNA, 19 nt, Homo sapiens
  misc_RNA (1)...(19): siRNA sense strand
ccagaaagcacuacuguug

SEQ ID NO: 2138346 - RNA, 19 nt, Homo sapiens
  misc_RNA (1)...(19): siRNA sense strand
caaagagcauggcuguuga

SEQ ID NO: 2138347 - RNA, 19 nt, Homo sapiens
  misc_RNA (1)...(19): siRNA sense strand
caaauaauacuccugaaga

SEQ ID NO: 2138348 - RNA, 19 nt, Homo sapiens
  misc_RNA (1)...(19): siRNA sense strand
caacagaccaggcuccaaa

SEQ ID NO: 2138349 - RNA, 19 nt, Homo sapiens
  misc_RNA (1)...(19): siRNA sense strand
agacuaaggagccuaaaua

SEQ ID NO: 2138350 - RNA, 19 nt, Homo sapiens
  misc_RNA (1)...(19): siRNA sense strand
aagcacagcuguugaggaa

SEQ ID NO: 2138351 - RNA, 19 nt, Homo sapiens
  misc_RNA (1)...(19): siRNA sense strand
caccaacaccuuccaaaua

SEQ ID NO: 2138352 - RNA, 19 nt, Homo sapiens
  misc_RNA (1)...(19): siRNA sense strand
caacaaaacugagauguau

SEQ ID NO: 2138353 - RNA, 19 nt, Homo sapiens
  misc_RNA (1)...(19): siRNA sense strand
gaacccaguugagccaauu

SEQ ID NO: 2138354 - RNA, 19 nt, Homo sapiens
  misc_RNA (1)...(19): siRNA sense strand
ugaggaaaccugaguauga

SEQ ID NO: 2138355 - RNA, 19 nt, Homo sapiens
  misc_RNA (1)...(19): siRNA sense strand
gagaagacagcacagauga

SEQ ID NO: 2138356 - RNA, 19 nt, Homo sapiens
  misc_RNA (1)...(19): siRNA sense strand
caccagaccuuuacagcaa

SEQ ID NO: 2138357 - RNA, 19 nt, Homo sapiens
  misc_RNA (1)...(19): siRNA sense strand
guuugaagaugaacaagaa

SEQ ID NO: 2138358 - RNA, 19 nt, Homo sapiens
  misc_RNA (1)...(19): siRNA sense strand
gcaaguguuucaggauuga

SEQ ID NO: 2138359 - RNA, 19 nt, Homo sapiens
  misc_RNA (1)...(19): siRNA sense strand
gaagucaagcaccaaguuu

SEQ ID NO: 2138360 - RNA, 19 nt, Homo sapiens
  misc_RNA (1)...(19): siRNA sense strand
agaaagcacuacuguugaa

SEQ ID NO: 2138361 - RNA, 19 nt, Homo sapiens
  misc_RNA (1)...(19): siRNA sense strand
caauaagacugccaggaau

SEQ ID NO: 2138362 - RNA, 19 nt, Homo sapiens
  misc_RNA (1)...(19): siRNA sense strand
ccaauaagacugccaggaa

SEQ ID NO: 2138363 - RNA, 19 nt, Homo sapiens
  misc_RNA (1)...(19): siRNA sense strand
caauugagccugucugguu

SEQ ID NO: 2138364 - RNA, 19 nt, Homo sapiens
  misc_RNA (1)...(19): siRNA sense strand
caaaauaucuuacguugca

SEQ ID NO: 2138365 - RNA, 19 nt, Homo sapiens
  misc_RNA (1)...(19): siRNA sense strand
cuucaaagaugcuaccuau

SEQ ID NO: 2138366 - RNA, 19 nt, Homo sapiens
  misc_RNA (1)...(19): siRNA sense strand
agaaaucucucucgaugau

SEQ ID NO: 2138367 - RNA, 19 nt, Homo sapiens
  misc_RNA (1)...(19): siRNA sense strand
cagaggacauugcuguuga

SEQ ID NO: 2138368 - RNA, 19 nt, Homo sapiens
  misc_RNA (1)...(19): siRNA sense strand
gcucagguguuuaugaauc

SEQ ID NO: 2138369 - RNA, 19 nt, Homo sapiens
  misc_RNA (1)...(19): siRNA sense strand
acaauuccaugguuaguga

SEQ ID NO: 2138370 - RNA, 19 nt, Homo sapiens
  misc_RNA (1)...(19): siRNA sense strand
cugaagagcagaaugauuu

SEQ ID NO: 2138371 - RNA, 19 nt, Homo sapiens
  misc_RNA (1)...(19): siRNA sense strand
ggauaacuauggcaaagca

SEQ ID NO: 2138372 - RNA, 19 nt, Homo sapiens
  misc_RNA (1)...(19): siRNA sense strand
gaagacccacagaaaguuu

SEQ ID NO: 2138373 - RNA, 19 nt, Homo sapiens
  misc_RNA (1)...(19): siRNA sense strand
ccaaagagcauggcuguug

SEQ ID NO: 2138374 - RNA, 19 nt, Homo sapiens
  misc_RNA (1)...(19): siRNA sense strand
aagaaggcuuuaccacaua

SEQ ID NO: 2138375 - RNA, 19 nt, Homo sapiens
  misc_RNA (1)...(19): siRNA sense strand
ccuaaagaguggaggaauu

SEQ ID NO: 2138376 - RNA, 19 nt, Homo sapiens
  misc_RNA (1)...(19): siRNA sense strand
gcaacuguccucaaauuuc

SEQ ID NO: 2138377 - RNA, 19 nt, Homo sapiens
  misc_RNA (1)...(19): siRNA sense strand
gaagaggacauuucuaagg

SEQ ID NO: 2138378 - RNA, 19 nt, Homo sapiens
  misc_RNA (1)...(19): siRNA sense strand
ugaagccucugccuccuaa

SEQ ID NO: 2138379 - RNA, 19 nt, Homo sapiens
  misc_RNA (1)...(19): siRNA sense strand
gaagccugaugcugaagaa

SEQ ID NO: 2138380 - RNA, 19 nt, Homo sapiens
  misc_RNA (1)...(19): siRNA sense strand
gagcuucucucucacugau

SEQ ID NO: 2138381 - RNA, 19 nt, Homo sapiens
  misc_RNA (1)...(19): siRNA sense strand
ccaauaugcuacccaguuc

SEQ ID NO: 2138382 - RNA, 19 nt, Homo sapiens
  misc_RNA (1)...(19): siRNA sense strand
uaaccagcaugcaaaccua

SEQ ID NO: 2138383 - RNA, 19 nt, Homo sapiens
  misc_RNA (1)...(19): siRNA sense strand
gcaacagguucauucaagu

SEQ ID NO: 2138384 - RNA, 19 nt, Homo sapiens
  misc_RNA (1)...(19): siRNA sense strand
caaaggaggaggagccaaa

SEQ ID NO: 2138385 - RNA, 19 nt, Homo sapiens
  misc_RNA (1)...(19): siRNA sense strand
gagccgaugcugagacuaa

SEQ ID NO: 2138386 - RNA, 19 nt, Homo sapiens
  misc_RNA (1)...(19): siRNA sense strand
gcacuuguccuuagagaag

SEQ ID NO: 2138387 - RNA, 19 nt, Homo sapiens
  misc_RNA (1)...(19): siRNA sense strand
gagugggugugaauucaaa

SEQ ID NO: 2138388 - RNA, 19 nt, Homo sapiens
  misc_RNA (1)...(19): siRNA sense strand
ggaggccauucucucagua

SEQ ID NO: 2138389 - RNA, 19 nt, Homo sapiens
  misc_RNA (1)...(19): siRNA sense strand
gcacagaugaagccaccua

SEQ ID NO: 2138390 - RNA, 19 nt, Homo sapiens
  misc_RNA (1)...(19): siRNA sense strand
gagccgguuuggauaacua

SEQ ID NO: 2138391 - RNA, 19 nt, Homo sapiens
  misc_RNA (1)...(19): siRNA sense strand
gcaccugccuucaaguagu

SEQ ID NO: 2138392 - RNA, 19 nt, Homo sapiens
  misc_RNA (1)...(19): siRNA sense strand
cagcaaaucuuuucagaga

SEQ ID NO: 2138393 - RNA, 19 nt, Homo sapiens
  misc_RNA (1)...(19): siRNA sense strand
ggaacuguaucaacucucu

SEQ ID NO: 2138394 - RNA, 19 nt, Homo sapiens
  misc_RNA (1)...(19): siRNA sense strand
gacaaguacuacagccaaa

SEQ ID NO: 2138395 - RNA, 19 nt, Homo sapiens
  misc_RNA (1)...(19): siRNA sense strand
ccaguuagaagaucaagaa

SEQ ID NO: 2138396 - RNA, 19 nt, Homo sapiens
  misc_RNA (1)...(19): siRNA sense strand
cgauagagcugggucuuca

SEQ ID NO: 2138397 - RNA, 19 nt, Homo sapiens
  misc_RNA (1)...(19): siRNA sense strand
ggagaagacagcacagaug

SEQ ID NO: 2138398 - RNA, 19 nt, Homo sapiens
  misc_RNA (1)...(19): siRNA sense strand
gcauuuacucuaagaaaga

SEQ ID NO: 2138399 - RNA, 19 nt, Homo sapiens
  misc_RNA (1)...(19): siRNA sense strand
ugagagcaauucugacaau

SEQ ID NO: 2138400 - RNA, 19 nt, Homo sapiens
  misc_RNA (1)...(19): siRNA sense strand
gaggaaaccugaguaugag

SEQ ID NO: 2138401 - RNA, 19 nt, Homo sapiens
  misc_RNA (1)...(19): siRNA sense strand
uaucaaagccugaagucaa

SEQ ID NO: 2138402 - RNA, 19 nt, Homo sapiens
  misc_RNA (1)...(19): siRNA sense strand
cuaagaacuugguagaaau

SEQ ID NO: 2138403 - RNA, 19 nt, Homo sapiens
  misc_RNA (1)...(19): siRNA sense strand
uaaaguggagcaagaaguu

SEQ ID NO: 2138404 - RNA, 19 nt, Homo sapiens
  misc_RNA (1)...(19): siRNA sense strand
aagaggacauuucuaagga

SEQ ID NO: 2138405 - RNA, 19 nt, Homo sapiens
  misc_RNA (1)...(19): siRNA sense strand
gaaguuugaagaugaacaa

SEQ ID NO: 2138406 - RNA, 19 nt, Homo sapiens
  misc_RNA (1)...(19): siRNA sense strand
gaaaccaaacgaucuucaa

SEQ ID NO: 2138407 - RNA, 19 nt, Homo sapiens
  misc_RNA (1)...(19): siRNA sense strand
ggucaacagucagauuaug

SEQ ID NO: 2138408 - RNA, 19 nt, Homo sapiens
  misc_RNA (1)...(19): siRNA sense strand
gauauucuccucaguccuu

SEQ ID NO: 2138409 - RNA, 19 nt, Homo sapiens
  misc_RNA (1)...(19): siRNA sense strand
gcaccaacaccuuccaaau

SEQ ID NO: 2138410 - RNA, 19 nt, Homo sapiens
  misc_RNA (1)...(19): siRNA sense strand
cagaagauacugcaaguuc

SEQ ID NO: 2138411 - RNA, 19 nt, Homo sapiens
  misc_RNA (1)...(19): siRNA sense strand
ucagauaggucuaaauucc

SEQ ID NO: 2138412 - RNA, 19 nt, Homo sapiens
  misc_RNA (1)...(19): siRNA sense strand
gcuaaaggcucaccuguua

SEQ ID NO: 2138413 - RNA, 19 nt, Homo sapiens
  misc_RNA (1)...(19): siRNA sense strand
cagcaaagcucuacauuaa

SEQ ID NO: 2138414 - RNA, 19 nt, Homo sapiens
  misc_RNA (1)...(19): siRNA sense strand
gaaauaaggcugaucaauu

SEQ ID NO: 2138415 - RNA, 19 nt, Homo sapiens
  misc_RNA (1)...(19): siRNA sense strand
ggagagacguguucaauau

SEQ ID NO: 2138416 - RNA, 19 nt, Homo sapiens
  misc_RNA (1)...(19): siRNA sense strand
gaaguaaacagcaacauaa

SEQ ID NO: 2138417 - RNA, 19 nt, Homo sapiens
  misc_RNA (1)...(19): siRNA sense strand
gcaaagcucuacauuaauc

SEQ ID NO: 2138418 - RNA, 19 nt, Homo sapiens
  misc_RNA (1)...(19): siRNA sense strand
gagaagagaaugaagguua

SEQ ID NO: 2138419 - RNA, 19 nt, Homo sapiens
  misc_RNA (1)...(19): siRNA sense strand
ggaaagauccagagaaaga

SEQ ID NO: 2138420 - RNA, 19 nt, Homo sapiens
  misc_RNA (1)...(19): siRNA sense strand
gcauagauaucgucuguau

SEQ ID NO: 2138421 - RNA, 19 nt, Homo sapiens
  misc_RNA (1)...(19): siRNA sense strand
gauaugcccuccauucuug

SEQ ID NO: 2138422 - RNA, 19 nt, Homo sapiens
  misc_RNA (1)...(19): siRNA sense strand
gcugagagcuuugaagauu

SEQ ID NO: 2138423 - RNA, 19 nt, Homo sapiens
  misc_RNA (1)...(19): siRNA sense strand
cagaaacacuggaaucauu

SEQ ID NO: 2138424 - RNA, 19 nt, Homo sapiens
  misc_RNA (1)...(19): siRNA sense strand
gaagagaagaaacaucaua

SEQ ID NO: 2138425 - RNA, 19 nt, Homo sapiens
  misc_RNA (1)...(19): siRNA sense strand
gaagacaaauugggaaguu

SEQ ID NO: 2138426 - RNA, 19 nt, Homo sapiens
  misc_RNA (1)...(19): siRNA sense strand
gaaaccaccugauaaccaa

SEQ ID NO: 2138427 - RNA, 19 nt, Homo sapiens
  misc_RNA (1)...(19): siRNA sense strand
gaagcuaagcaaauuguua

SEQ ID NO: 2138428 - RNA, 19 nt, Homo sapiens
  misc_RNA (1)...(19): siRNA sense strand
ggaaguaaacagcaacaua

SEQ ID NO: 2138429 - RNA, 19 nt, Homo sapiens
  misc_RNA (1)...(19): siRNA sense strand
ggaaagaagaguacacaaa

SEQ ID NO: 2138430 - RNA, 19 nt, Homo sapiens
  misc_RNA (1)...(19): siRNA sense strand
gaagaggccagaucuauau

SEQ ID NO: 2138431 - RNA, 19 nt, Homo sapiens
  misc_RNA (1)...(19): siRNA sense strand
ucacagcaauucaaucaaa

SEQ ID NO: 2138432 - RNA, 19 nt, Homo sapiens
  misc_RNA (1)...(19): siRNA sense strand
ucacauuccuccacaguaa

SEQ ID NO: 2138433 - RNA, 19 nt, Homo sapiens
  misc_RNA (1)...(19): siRNA sense strand
caacaugcacagaacauua

SEQ ID NO: 2138434 - RNA, 19 nt, Homo sapiens
  misc_RNA (1)...(19): siRNA sense strand
gaacacaaacgagaaauug

SEQ ID NO: 2138435 - RNA, 19 nt, Homo sapiens
  misc_RNA (1)...(19): siRNA sense strand
gaaguuauccuuagcuguu

SEQ ID NO: 2138436 - RNA, 19 nt, Homo sapiens
  misc_RNA (1)...(19): siRNA sense strand
guagagaaaccaccugaua

SEQ ID NO: 2138437 - RNA, 19 nt, Homo sapiens
  misc_RNA (1)...(19): siRNA sense strand
caucagcccucaauucuau

SEQ ID NO: 2138438 - RNA, 19 nt, Homo sapiens
  misc_RNA (1)...(19): siRNA sense strand
gcaguggucuccuuacaug

SEQ ID NO: 2138439 - RNA, 19 nt, Homo sapiens
  misc_RNA (1)...(19): siRNA sense strand
caaggaaucuucagcaaag

SEQ ID NO: 2138440 - RNA, 19 nt, Homo sapiens
  misc_RNA (1)...(19): siRNA sense strand
guacugaggagacugauaa

SEQ ID NO: 2138441 - RNA, 19 nt, Homo sapiens
  misc_RNA (1)...(19): siRNA sense strand
gguauuagcauguuuguau

SEQ ID NO: 2138442 - RNA, 19 nt, Homo sapiens
  misc_RNA (1)...(19): siRNA sense strand
gaaauggacaagaaagauu

SEQ ID NO: 2138443 - RNA, 19 nt, Homo sapiens
  misc_RNA (1)...(19): siRNA sense strand
gauggaacauguacagaga

SEQ ID NO: 2138444 - RNA, 19 nt, Homo sapiens
  misc_RNA (1)...(19): siRNA sense strand
gaagcaaacaagaagauaa

SEQ ID NO: 2138445 - RNA, 19 nt, Homo sapiens
  misc_RNA (1)...(19): siRNA sense strand
gcaguacuucuacaauuua

SEQ ID NO: 2138446 - RNA, 19 nt, Homo sapiens
  misc_RNA (1)...(19): siRNA sense strand
ucagaugccuccauacuau

SEQ ID NO: 2138447 - RNA, 19 nt, Homo sapiens
  misc_RNA (1)...(19): siRNA sense strand
agagagaaauggacaagaa

SEQ ID NO: 2138448 - RNA, 19 nt, Homo sapiens
  misc_RNA (1)...(19): siRNA sense strand
cacgaugacuucuuuauau

SEQ ID NO: 2138449 - RNA, 19 nt, Homo sapiens
  misc_RNA (1)...(19): siRNA sense strand
gaaaggaagagaagaaaca

SEQ ID NO: 2138450 - RNA, 19 nt, Homo sapiens
  misc_RNA (1)...(19): siRNA sense strand
caagaaagauuuggacaag

SEQ ID NO: 2138451 - RNA, 19 nt, Homo sapiens
  misc_RNA (1)...(19): siRNA sense strand
gaagagcggccaaauaaag

SEQ ID NO: 2138452 - RNA, 19 nt, Homo sapiens
  misc_RNA (1)...(19): siRNA sense strand
ggaaugcaguugccagugu

SEQ ID NO: 2138453 - RNA, 19 nt, Homo sapiens
  misc_RNA (1)...(19): siRNA sense strand
ggccagaucuauaugcauu

SEQ ID NO: 2138454 - RNA, 19 nt, Homo sapiens
  misc_RNA (1)...(19): siRNA sense strand
aaaggaauguggaaacuau

SEQ ID NO: 2138455 - RNA, 19 nt, Homo sapiens
  misc_RNA (1)...(19): siRNA sense strand
cagcaguacuucuacaauu

SEQ ID NO: 2138456 - RNA, 19 nt, Homo sapiens
  misc_RNA (1)...(19): siRNA sense strand
auacagaguugcagcagua

SEQ ID NO: 2138457 - RNA, 19 nt, Homo sapiens
  misc_RNA (1)...(19): siRNA sense strand
guugcaagcuguacugaaa

SEQ ID NO: 2138458 - RNA, 19 nt, Homo sapiens
  misc_RNA (1)...(19): siRNA sense strand
guacagagaguucuacaga

SEQ ID NO: 2138459 - RNA, 19 nt, Homo sapiens
  misc_RNA (1)...(19): siRNA sense strand
ccacagcaauccaaccauu

SEQ ID NO: 2138460 - RNA, 19 nt, Homo sapiens
  misc_RNA (1)...(19): siRNA sense strand
ggacugcaaugcuuguaug

SEQ ID NO: 2138461 - RNA, 19 nt, Homo sapiens
  misc_RNA (1)...(19): siRNA sense strand
cagcauagauaucgucugu

SEQ ID NO: 2138462 - RNA, 19 nt, Homo sapiens
  misc_RNA (1)...(19): siRNA sense strand
ggaaauaguggcucuaaca

SEQ ID NO: 2138463 - RNA, 19 nt, Homo sapiens
  misc_RNA (1)...(19): siRNA sense strand
agaaacagauggaacaugu

SEQ ID NO: 2138464 - RNA, 19 nt, Homo sapiens
  misc_RNA (1)...(19): siRNA sense strand
gcugauguauucugcauau

SEQ ID NO: 2138465 - RNA, 19 nt, Homo sapiens
  misc_RNA (1)...(19): siRNA sense strand
guacugcccuucaggacaa

SEQ ID NO: 2138466 - RNA, 19 nt, Homo sapiens
  misc_RNA (1)...(19): siRNA sense strand
guuagaaucuuacaugagu

SEQ ID NO: 2138467 - RNA, 19 nt, Homo sapiens
  misc_RNA (1)...(19): siRNA sense strand
aaggaaaucuaaagcauga

SEQ ID NO: 2138468 - RNA, 19 nt, Homo sapiens
  misc_RNA (1)...(19): siRNA sense strand
ggaaaugaaaucaaaggaa

SEQ ID NO: 2138469 - RNA, 19 nt, Homo sapiens
  misc_RNA (1)...(19): siRNA sense strand
aaagagauauagcaaagga

SEQ ID NO: 2138470 - RNA, 19 nt, Homo sapiens
  misc_RNA (1)...(19): siRNA sense strand
ggucagaucagaaacacua

SEQ ID NO: 2138471 - RNA, 19 nt, Homo sapiens
  misc_RNA (1)...(19): siRNA sense strand
gaaauuacagaggaaauga

SEQ ID NO: 2138472 - RNA, 19 nt, Homo sapiens
  misc_RNA (1)...(19): siRNA sense strand
gcucaccuguuaaugcuuu

SEQ ID NO: 2138473 - RNA, 19 nt, Homo sapiens
  misc_RNA (1)...(19): siRNA sense strand
cauuauggaugaacacaaa

SEQ ID NO: 2138474 - RNA, 19 nt, Homo sapiens
  misc_RNA (1)...(19): siRNA sense strand
cauuagggcuuaucaaaca

SEQ ID NO: 2138475 - RNA, 19 nt, Homo sapiens
  misc_RNA (1)...(19): siRNA sense strand
aaagaacgccgaagucuga

SEQ ID NO: 2138476 - RNA, 19 nt, Homo sapiens
  misc_RNA (1)...(19): siRNA sense strand
gaaucugggucaagcuuug

SEQ ID NO: 2138477 - RNA, 19 nt, Homo sapiens
  misc_RNA (1)...(19): siRNA sense strand
ugaaagcaauugaugacaa

SEQ ID NO: 2138478 - RNA, 19 nt, Homo sapiens
  misc_RNA (1)...(19): siRNA sense strand
gaaagaaugaaacaugaug

SEQ ID NO: 2138479 - RNA, 19 nt, Homo sapiens
  misc_RNA (1)...(19): siRNA sense strand
uagcauuacugaccaggua

SEQ ID NO: 2138480 - RNA, 19 nt, Homo sapiens
  misc_RNA (1)...(19): siRNA sense strand
cgagacaccaucaucuuua

SEQ ID NO: 2138481 - RNA, 19 nt, Homo sapiens
  misc_RNA (1)...(19): siRNA sense strand
agaaagagauauagcaaag

SEQ ID NO: 2138482 - RNA, 19 nt, Homo sapiens
  misc_RNA (1)...(19): siRNA sense strand
auacagagauuuccagcaa

SEQ ID NO: 2138483 - RNA, 19 nt, Homo sapiens
  misc_RNA (1)...(19): siRNA sense strand
gcaaauuguuagaaagcuu

SEQ ID NO: 2138484 - RNA, 19 nt, Homo sapiens
  misc_RNA (1)...(19): siRNA sense strand
gagacaccaucaucuuuau

SEQ ID NO: 2138485 - RNA, 19 nt, Homo sapiens
  misc_RNA (1)...(19): siRNA sense strand
agacacaguucuaaaggaa

SEQ ID NO: 2138486 - RNA, 19 nt, Homo sapiens
  misc_RNA (1)...(19): siRNA sense strand
gagaagaggccagaucuau

SEQ ID NO: 2138487 - RNA, 19 nt, Homo sapiens
  misc_RNA (1)...(19): siRNA sense strand
gacauaauuuacacaguug

SEQ ID NO: 2138488 - RNA, 19 nt, Homo sapiens
  misc_RNA (1)...(19): siRNA sense strand
ucaauucuaugcuacauuc

SEQ ID NO: 2138489 - RNA, 19 nt, Homo sapiens
  misc_RNA (1)...(19): siRNA sense strand
auccuuagcuguuugcuua

SEQ ID NO: 2138490 - RNA, 19 nt, Homo sapiens
  misc_RNA (1)...(19): siRNA sense strand
gauguauucugcauauuag

SEQ ID NO: 2138491 - RNA, 19 nt, Homo sapiens
  misc_RNA (1)...(19): siRNA sense strand
gaaagaagaguacacaaaa

SEQ ID NO: 2138492 - RNA, 19 nt, Homo sapiens
  misc_RNA (1)...(19): siRNA sense strand
gauagagccacauaugaaa

SEQ ID NO: 2138493 - RNA, 19 nt, Homo sapiens
  misc_RNA (1)...(19): siRNA sense strand
acagagaguucuacagaga

SEQ ID NO: 2138494 - RNA, 19 nt, Homo sapiens
  misc_RNA (1)...(19): siRNA sense strand
aauaacaccuguaguagau

SEQ ID NO: 2138495 - RNA, 19 nt, Homo sapiens
  misc_RNA (1)...(19): siRNA sense strand
aaacggaaguuauccuuag

SEQ ID NO: 2138496 - RNA, 19 nt, Homo sapiens
  misc_RNA (1)...(19): siRNA sense strand
gcaaacaagaagauaaaga

SEQ ID NO: 2138497 - RNA, 19 nt, Homo sapiens
  misc_RNA (1)...(19): siRNA sense strand
uuagaaagcuuacgauggu

SEQ ID NO: 2138498 - RNA, 19 nt, Homo sapiens
  misc_RNA (1)...(19): siRNA sense strand
caugauaguucaacauaca

SEQ ID NO: 2138499 - RNA, 19 nt, Homo sapiens
  misc_RNA (1)...(19): siRNA sense strand
ugaaaguccuugugaaucu

SEQ ID NO: 2138500 - RNA, 19 nt, Homo sapiens
  misc_RNA (1)...(19): siRNA sense strand
aggaagagcggccaaauaa

SEQ ID NO: 2138501 - RNA, 19 nt, Homo sapiens
  misc_RNA (1)...(19): siRNA sense strand
ugguaaagaugguaaagaa

SEQ ID NO: 2138502 - RNA, 19 nt, Homo sapiens
  misc_RNA (1)...(19): siRNA sense strand
uaaagggaauucaagcaau

SEQ ID NO: 2138503 - RNA, 19 nt, Homo sapiens
  misc_RNA (1)...(19): siRNA sense strand
ucaggaauaucuugauugu

SEQ ID NO: 2138504 - RNA, 19 nt, Homo sapiens
  misc_RNA (1)...(19): siRNA sense strand
ccacacuucuuugcuauga

SEQ ID NO: 2138505 - RNA, 19 nt, Homo sapiens
  misc_RNA (1)...(19): siRNA sense strand
caauagacagagccaaaua

SEQ ID NO: 2138506 - RNA, 19 nt, Homo sapiens
  misc_RNA (1)...(19): siRNA sense strand
gaagccuuauuaaagauug

SEQ ID NO: 2138507 - RNA, 19 nt, Homo sapiens
  misc_RNA (1)...(19): siRNA sense strand
gagaagaaacaucauaagu

SEQ ID NO: 2138508 - RNA, 19 nt, Homo sapiens
  misc_RNA (1)...(19): siRNA sense strand
ccaccggacuuaaccaaga

SEQ ID NO: 2138509 - RNA, 19 nt, Homo sapiens
  misc_RNA (1)...(19): siRNA sense strand
guaaacagcaacauaaagu

SEQ ID NO: 2138510 - RNA, 19 nt, Homo sapiens
  misc_RNA (1)...(19): siRNA sense strand
ugucacaaauacagaagua

SEQ ID NO: 2138511 - RNA, 19 nt, Homo sapiens
  misc_RNA (1)...(19): siRNA sense strand
agggaaagauccagagaaa

SEQ ID NO: 2138512 - RNA, 19 nt, Homo sapiens
  misc_RNA (1)...(19): siRNA sense strand
cagaguuccuccacaauaa

SEQ ID NO: 2138513 - RNA, 19 nt, Homo sapiens
  misc_RNA (1)...(19): siRNA sense strand
gcgcaacacuucacaagau

SEQ ID NO: 2138514 - RNA, 19 nt, Homo sapiens
  misc_RNA (1)...(19): siRNA sense strand
uaaauacccuccuuaccuu

SEQ ID NO: 2138515 - RNA, 19 nt, Homo sapiens
  misc_RNA (1)...(19): siRNA sense strand
ucaagacccuucuagaaau

SEQ ID NO: 2138516 - RNA, 19 nt, Homo sapiens
  misc_RNA (1)...(19): siRNA sense strand
gaacucgucuacaaauaac

SEQ ID NO: 2138517 - RNA, 19 nt, Homo sapiens
  misc_RNA (1)...(19): siRNA sense strand
agagagaaguggacaacaa

SEQ ID NO: 2138518 - RNA, 19 nt, Homo sapiens
  misc_RNA (1)...(19): siRNA sense strand
guaagaacucgucuacaaa

SEQ ID NO: 2138519 - RNA, 19 nt, Homo sapiens
  misc_RNA (1)...(19): siRNA sense strand
caagacccuucuagaaaug

SEQ ID NO: 2138520 - RNA, 19 nt, Homo sapiens
  misc_RNA (1)...(19): siRNA sense strand
ccaaauccaggaagaauga

SEQ ID NO: 2138521 - RNA, 19 nt, Homo sapiens
  misc_RNA (1)...(19): siRNA sense strand
ccagaguuccuccacaaua

SEQ ID NO: 2138522 - RNA, 19 nt, Homo sapiens
  misc_RNA (1)...(19): siRNA sense strand
caaauaacaaccagacuca

SEQ ID NO: 2138523 - RNA, 19 nt, Homo sapiens
  misc_RNA (1)...(19): siRNA sense strand
aagaacucgucuacaaaua

SEQ ID NO: 2138524 - RNA, 19 nt, Homo sapiens
  misc_RNA (1)...(19): siRNA sense strand
cagcaacaauggcaguaug

SEQ ID NO: 2138525 - RNA, 19 nt, Homo sapiens
  misc_RNA (1)...(19): siRNA sense strand
ccacagcgcugagagugau

SEQ ID NO: 2138526 - RNA, 19 nt, Homo sapiens
  misc_RNA (1)...(19): siRNA sense strand
cgcaacacuucacaagaua

SEQ ID NO: 2138527 - RNA, 19 nt, Homo sapiens
  misc_RNA (1)...(19): siRNA sense strand
ucgauugccuugcugacua

SEQ ID NO: 2138528 - RNA, 19 nt, Homo sapiens
  misc_RNA (1)...(19): siRNA sense strand
uaagaacucgucuacaaau

SEQ ID NO: 2138529 - RNA, 19 nt, Homo sapiens
  misc_RNA (1)...(19): siRNA sense strand
agaacucgucuacaaauaa

SEQ ID NO: 2138530 - RNA, 19 nt, Homo sapiens
  misc_RNA (1)...(19): siRNA sense strand
acaauaaauacccuccuua

SEQ ID NO: 2138531 - RNA, 19 nt, Homo sapiens
  misc_RNA (1)...(19): siRNA sense strand
cacaauaaauacccuccuu

SEQ ID NO: 2138532 - RNA, 19 nt, Homo sapiens
  misc_RNA (1)...(19): siRNA sense strand
gcaguaugcgcaacacuuc

SEQ ID NO: 2138533 - RNA, 19 nt, Homo sapiens
  misc_RNA (1)...(19): siRNA sense strand
uugaugagaugcccaaauc

SEQ ID NO: 2138534 - RNA, 19 nt, Homo sapiens
  misc_RNA (1)...(19): siRNA sense strand
cuccuuaccuugcucgauu

SEQ ID NO: 2138535 - RNA, 19 nt, Homo sapiens
  misc_RNA (1)...(19): siRNA sense strand
cucaagacccuucuagaaa

SEQ ID NO: 2138536 - RNA, 19 nt, Homo sapiens
  misc_RNA (1)...(19): siRNA sense strand
caagauagggagagagaag

SEQ ID NO: 2138537 - RNA, 19 nt, Homo sapiens
  misc_RNA (1)...(19): siRNA sense strand
acucaagacccuucuagaa

SEQ ID NO: 2138538 - RNA, 19 nt, Homo sapiens
  misc_RNA (1)...(19): siRNA sense strand
caauaaauacccuccuuac

SEQ ID NO: 2138539 - RNA, 19 nt, Homo sapiens
  misc_RNA (1)...(19): siRNA sense strand
gaugagaugcccaaaucca

SEQ ID NO: 2138540 - RNA, 19 nt, Homo sapiens
  misc_RNA (1)...(19): siRNA sense strand
gagcuacaggucccuagga

SEQ ID NO: 2138541 - RNA, 19 nt, Homo sapiens
  misc_RNA (1)...(19): siRNA sense strand
cacaagauagggagagaga

SEQ ID NO: 2138542 - RNA, 19 nt, Homo sapiens
  misc_RNA (1)...(19): siRNA sense strand
ggagagagaaguggacaac

SEQ ID NO: 2138543 - RNA, 19 nt, Homo sapiens
  misc_RNA (1)...(19): siRNA sense strand
gagagaaguggacaacaac

SEQ ID NO: 2138544 - RNA, 19 nt, Homo sapiens
  misc_RNA (1)...(19): siRNA sense strand
gcccaaauccaggaagaau

SEQ ID NO: 2138545 - RNA, 19 nt, Homo sapiens
  misc_RNA (1)...(19): siRNA sense strand
agccagaguuccuccacaa

SEQ ID NO: 2138546 - RNA, 19 nt, Homo sapiens
  misc_RNA (1)...(19): siRNA sense strand
ggcaguaugcgcaacacuu

SEQ ID NO: 2138547 - RNA, 19 nt, Homo sapiens
  misc_RNA (1)...(19): siRNA sense strand
gaguuccuccacaauaaau

SEQ ID NO: 2138548 - RNA, 19 nt, Homo sapiens
  misc_RNA (1)...(19): siRNA sense strand
gcaacacuucacaagauag

SEQ ID NO: 2138549 - RNA, 19 nt, Homo sapiens
  misc_RNA (1)...(19): siRNA sense strand
auaaauacccuccuuaccu

SEQ ID NO: 2138550 - RNA, 19 nt, Homo sapiens
  misc_RNA (1)...(19): siRNA sense strand
auaacaaccagacucaaga

SEQ ID NO: 2138551 - RNA, 19 nt, Homo sapiens
  misc_RNA (1)...(19): siRNA sense strand
gaugaacgagacguccaaa

SEQ ID NO: 2138552 - RNA, 19 nt, Homo sapiens
  misc_RNA (1)...(19): siRNA sense strand
gcaagucgcuggaugguuu

SEQ ID NO: 2138553 - RNA, 19 nt, Homo sapiens
  misc_RNA (1)...(19): siRNA sense strand
ccaaagcuguccaaauuua

SEQ ID NO: 2138554 - RNA, 19 nt, Homo sapiens
  misc_RNA (1)...(19): siRNA sense strand
aaccaaagcuguccaaauu

SEQ ID NO: 2138555 - RNA, 19 nt, Homo sapiens
  misc_RNA (1)...(19): siRNA sense strand
gcaaggaggagcagcagaa

SEQ ID NO: 2138556 - RNA, 19 nt, Homo sapiens
  misc_RNA (1)...(19): siRNA sense strand
gaugguuuauuaccugaaa

SEQ ID NO: 2138557 - RNA, 19 nt, Homo sapiens
  misc_RNA (1)...(19): siRNA sense strand
ggaccaaccugacuuucca

SEQ ID NO: 2138558 - RNA, 19 nt, Homo sapiens
  misc_RNA (1)...(19): siRNA sense strand
caacuaccuucuccaggaa

SEQ ID NO: 2138559 - RNA, 19 nt, Homo sapiens
  misc_RNA (1)...(19): siRNA sense strand
gucgcuggaugguuuauua

SEQ ID NO: 2138560 - RNA, 19 nt, Homo sapiens
  misc_RNA (1)...(19): siRNA sense strand
caaccugacuuuccacuac

SEQ ID NO: 2138561 - RNA, 19 nt, Homo sapiens
  misc_RNA (1)...(19): siRNA sense strand
gauggugucucuccuccuu

SEQ ID NO: 2138562 - RNA, 19 nt, Homo sapiens
  misc_RNA (1)...(19): siRNA sense strand
gcagaaggaguacagauuc

SEQ ID NO: 2138563 - RNA, 19 nt, Homo sapiens
  misc_RNA (1)...(19): siRNA sense strand
gacauggaaugccagcaaa

SEQ ID NO: 2138564 - RNA, 19 nt, Homo sapiens
  misc_RNA (1)...(19): siRNA sense strand
cgagaaguguuacucuuuc

SEQ ID NO: 2138565 - RNA, 19 nt, Homo sapiens
  misc_RNA (1)...(19): siRNA sense strand
gaguacagauucagaucau

SEQ ID NO: 2138566 - RNA, 19 nt, Homo sapiens
  misc_RNA (1)...(19): siRNA sense strand
gaaggaguacagauucaga

SEQ ID NO: 2138567 - RNA, 19 nt, Homo sapiens
  misc_RNA (1)...(19): siRNA sense strand
ugaaggcuauggaggaugu

SEQ ID NO: 2138568 - RNA, 19 nt, Homo sapiens
  misc_RNA (1)...(19): siRNA sense strand
cagaaggaguacagauuca

SEQ ID NO: 2138569 - RNA, 19 nt, Homo sapiens
  misc_RNA (1)...(19): siRNA sense strand
caacgccucccaaaccaaa

SEQ ID NO: 2138570 - RNA, 19 nt, Homo sapiens
  misc_RNA (1)...(19): siRNA sense strand
cauggaaugccagcaaaua

SEQ ID NO: 2138571 - RNA, 19 nt, Homo sapiens
  misc_RNA (1)...(19): siRNA sense strand
caacggugaugaggccuau

SEQ ID NO: 2138572 - RNA, 19 nt, Homo sapiens
  misc_RNA (1)...(19): siRNA sense strand
gcaaauacuccaggaccaa

SEQ ID NO: 2138573 - RNA, 19 nt, Homo sapiens
  misc_RNA (1)...(19): siRNA sense strand
agacgacauucucuauuuc

SEQ ID NO: 2138574 - RNA, 19 nt, Homo sapiens
  misc_RNA (1)...(19): siRNA sense strand
gccgagaaguguuacucuu

SEQ ID NO: 2138575 - RNA, 19 nt, Homo sapiens
  misc_RNA (1)...(19): siRNA sense strand
guggggagcugccgucuuu

SEQ ID NO: 2138576 - RNA, 19 nt, Homo sapiens
  misc_RNA (1)...(19): siRNA sense strand
ggaguacagauucagauca

SEQ ID NO: 2138577 - RNA, 19 nt, Homo sapiens
  misc_RNA (1)...(19): siRNA sense strand
ccgagaaguguuacucuuu

SEQ ID NO: 2138578 - RNA, 19 nt, Homo sapiens
  misc_RNA (1)...(19): siRNA sense strand
ggugaaggcuauggaggau

SEQ ID NO: 2138579 - RNA, 19 nt, Homo sapiens
  misc_RNA (1)...(19): siRNA sense strand
aaaccaaagcuguccaaau

SEQ ID NO: 2138580 - RNA, 19 nt, Homo sapiens
  misc_RNA (1)...(19): siRNA sense strand
caaagcuguccaaauuuau

SEQ ID NO: 2138581 - RNA, 19 nt, Homo sapiens
  misc_RNA (1)...(19): siRNA sense strand
gcagugacggugacguguu

SEQ ID NO: 2138582 - RNA, 19 nt, Homo sapiens
  misc_RNA (1)...(19): siRNA sense strand
ugacauggaaugccagcaa

SEQ ID NO: 2138583 - RNA, 19 nt, Homo sapiens
  misc_RNA (1)...(19): siRNA sense strand
ugacuuuccacuacagauu

SEQ ID NO: 2138584 - RNA, 19 nt, Homo sapiens
  misc_RNA (1)...(19): siRNA sense strand
cagugacggugacguguuc

SEQ ID NO: 2138585 - RNA, 19 nt, Homo sapiens
  misc_RNA (1)...(19): siRNA sense strand
ggaaugccagcaaauacuc

SEQ ID NO: 2138586 - RNA, 19 nt, Homo sapiens
  misc_RNA (1)...(19): siRNA sense strand
ggaugccugugcagagaca

SEQ ID NO: 2138587 - RNA, 19 nt, Homo sapiens
  misc_RNA (1)...(19): siRNA sense strand
cuacuucaauuuagaaacc

SEQ ID NO: 2138588 - RNA, 19 nt, Homo sapiens
  misc_RNA (1)...(19): siRNA sense strand
ccuucugucuuuauggaaa

SEQ ID NO: 2138589 - RNA, 19 nt, Homo sapiens
  misc_RNA (1)...(19): siRNA sense strand
caagucgcuggaugguuua

SEQ ID NO: 2138590 - RNA, 19 nt, Homo sapiens
  misc_RNA (1)...(19): siRNA sense strand
cgggaugccugugcagaga

SEQ ID NO: 2138591 - RNA, 19 nt, Homo sapiens
  misc_RNA (1)...(19): siRNA sense strand
ggcuauggaggauguauau

SEQ ID NO: 2138592 - RNA, 19 nt, Homo sapiens
  misc_RNA (1)...(19): siRNA sense strand
uggaugccgagaaguguua

SEQ ID NO: 2138593 - RNA, 19 nt, Homo sapiens
  misc_RNA (1)...(19): siRNA sense strand
ccugcaacgucaccauaga

SEQ ID NO: 2138594 - RNA, 19 nt, Homo sapiens
  misc_RNA (1)...(19): siRNA sense strand
caccauagaaggcuuggau

SEQ ID NO: 2138595 - RNA, 19 nt, Homo sapiens
  misc_RNA (1)...(19): siRNA sense strand
aggagcagcagaaggagua

SEQ ID NO: 2138596 - RNA, 19 nt, Homo sapiens
  misc_RNA (1)...(19): siRNA sense strand
gggucagggugaaggcuau

SEQ ID NO: 2138597 - RNA, 19 nt, Homo sapiens
  misc_RNA (1)...(19): siRNA sense strand
cuacggggaucuccucuau

SEQ ID NO: 2138598 - RNA, 19 nt, Homo sapiens
  misc_RNA (1)...(19): siRNA sense strand
ccgugcaggugacauggaa

SEQ ID NO: 2138599 - RNA, 19 nt, Homo sapiens
  misc_RNA (1)...(19): siRNA sense strand
ccgaguggcaguccaaaca

SEQ ID NO: 2138600 - RNA, 19 nt, Homo sapiens
  misc_RNA (1)...(19): siRNA sense strand
aggaggagcagcagaagga

SEQ ID NO: 2138601 - RNA, 19 nt, Homo sapiens
  misc_RNA (1)...(19): siRNA sense strand
gagcagcgagacgacauuc

SEQ ID NO: 2138602 - RNA, 19 nt, Homo sapiens
  misc_RNA (1)...(19): siRNA sense strand
uaccugcaacgucaccaua

SEQ ID NO: 2138603 - RNA, 19 nt, Homo sapiens
  misc_RNA (1)...(19): siRNA sense strand
ccagugcaccaacuaccuu

SEQ ID NO: 2138604 - RNA, 19 nt, Homo sapiens
  misc_RNA (1)...(19): siRNA sense strand
ccaaaccaaagcuguccaa

SEQ ID NO: 2138605 - RNA, 19 nt, Homo sapiens
  misc_RNA (1)...(19): siRNA sense strand
gacaccaacgccucccaaa

SEQ ID NO: 2138606 - RNA, 19 nt, Homo sapiens
  misc_RNA (1)...(19): siRNA sense strand
gcuuggaugccgagaagug

SEQ ID NO: 2138607 - RNA, 19 nt, Homo sapiens
  misc_RNA (1)...(19): siRNA sense strand
gcaagucgcuggaugguuu

SEQ ID NO: 2138608 - RNA, 19 nt, Homo sapiens
  misc_RNA (1)...(19): siRNA sense strand
ccaaagcuguccaaauuua

SEQ ID NO: 2138609 - RNA, 19 nt, Homo sapiens
  misc_RNA (1)...(19): siRNA sense strand
aaccaaagcuguccaaauu

SEQ ID NO: 2138610 - RNA, 19 nt, Homo sapiens
  misc_RNA (1)...(19): siRNA sense strand
gcaaggaggagcagcagaa

SEQ ID NO: 2138611 - RNA, 19 nt, Homo sapiens
  misc_RNA (1)...(19): siRNA sense strand
gaugguuuauuaccugaaa

SEQ ID NO: 2138612 - RNA, 19 nt, Homo sapiens
  misc_RNA (1)...(19): siRNA sense strand
ggaccaaccugacuuucca

SEQ ID NO: 2138613 - RNA, 19 nt, Homo sapiens
  misc_RNA (1)...(19): siRNA sense strand
caacuaccuucuccaggaa

SEQ ID NO: 2138614 - RNA, 19 nt, Homo sapiens
  misc_RNA (1)...(19): siRNA sense strand
gucgcuggaugguuuauua

SEQ ID NO: 2138615 - RNA, 19 nt, Homo sapiens
  misc_RNA (1)...(19): siRNA sense strand
caaccugacuuuccacuac

SEQ ID NO: 2138616 - RNA, 19 nt, Homo sapiens
  misc_RNA (1)...(19): siRNA sense strand
gauggugucucuccuccuu

SEQ ID NO: 2138617 - RNA, 19 nt, Homo sapiens
  misc_RNA (1)...(19): siRNA sense strand
gcagaaggaguacagauuc

SEQ ID NO: 2138618 - RNA, 19 nt, Homo sapiens
  misc_RNA (1)...(19): siRNA sense strand
gacauggaaugccagcaaa

SEQ ID NO: 2138619 - RNA, 19 nt, Homo sapiens
  misc_RNA (1)...(19): siRNA sense strand
cgagaaguguuacucuuuc

SEQ ID NO: 2138620 - RNA, 19 nt, Homo sapiens
  misc_RNA (1)...(19): siRNA sense strand
gaguacagauucagaucau

SEQ ID NO: 2138621 - RNA, 19 nt, Homo sapiens
  misc_RNA (1)...(19): siRNA sense strand
gaaggaguacagauucaga

SEQ ID NO: 2138622 - RNA, 19 nt, Homo sapiens
  misc_RNA (1)...(19): siRNA sense strand
ugaaggcuauggaggaugu

SEQ ID NO: 2138623 - RNA, 19 nt, Homo sapiens
  misc_RNA (1)...(19): siRNA sense strand
cagaaggaguacagauuca

SEQ ID NO: 2138624 - RNA, 19 nt, Homo sapiens
  misc_RNA (1)...(19): siRNA sense strand
caacgccucccaaaccaaa

SEQ ID NO: 2138625 - RNA, 19 nt, Homo sapiens
  misc_RNA (1)...(19): siRNA sense strand
cauggaaugccagcaaaua

SEQ ID NO: 2138626 - RNA, 19 nt, Homo sapiens
  misc_RNA (1)...(19): siRNA sense strand
caacggugaugaggccuau

SEQ ID NO: 2138627 - RNA, 19 nt, Homo sapiens
  misc_RNA (1)...(19): siRNA sense strand
gcaaauacuccaggaccaa

SEQ ID NO: 2138628 - RNA, 19 nt, Homo sapiens
  misc_RNA (1)...(19): siRNA sense strand
agacgacauucucuauuuc

SEQ ID NO: 2138629 - RNA, 19 nt, Homo sapiens
  misc_RNA (1)...(19): siRNA sense strand
gccgagaaguguuacucuu

SEQ ID NO: 2138630 - RNA, 19 nt, Homo sapiens
  misc_RNA (1)...(19): siRNA sense strand
guggggagcugccgucuuu

SEQ ID NO: 2138631 - RNA, 19 nt, Homo sapiens
  misc_RNA (1)...(19): siRNA sense strand
ggaguacagauucagauca

SEQ ID NO: 2138632 - RNA, 19 nt, Homo sapiens
  misc_RNA (1)...(19): siRNA sense strand
ccgagaaguguuacucuuu

SEQ ID NO: 2138633 - RNA, 19 nt, Homo sapiens
  misc_RNA (1)...(19): siRNA sense strand
ggugaaggcuauggaggau

SEQ ID NO: 2138634 - RNA, 19 nt, Homo sapiens
  misc_RNA (1)...(19): siRNA sense strand
aaaccaaagcuguccaaau

SEQ ID NO: 2138635 - RNA, 19 nt, Homo sapiens
  misc_RNA (1)...(19): siRNA sense strand
caaagcuguccaaauuuau

SEQ ID NO: 2138636 - RNA, 19 nt, Homo sapiens
  misc_RNA (1)...(19): siRNA sense strand
gcagugacggugacguguu

SEQ ID NO: 2138637 - RNA, 19 nt, Homo sapiens
  misc_RNA (1)...(19): siRNA sense strand
ugacauggaaugccagcaa

SEQ ID NO: 2138638 - RNA, 19 nt, Homo sapiens
  misc_RNA (1)...(19): siRNA sense strand
ugacuuuccacuacagauu

SEQ ID NO: 2138639 - RNA, 19 nt, Homo sapiens
  misc_RNA (1)...(19): siRNA sense strand
cagugacggugacguguuc

SEQ ID NO: 2138640 - RNA, 19 nt, Homo sapiens
  misc_RNA (1)...(19): siRNA sense strand
ggaaugccagcaaauacuc

SEQ ID NO: 2138641 - RNA, 19 nt, Homo sapiens
  misc_RNA (1)...(19): siRNA sense strand
ggaugccugugcagagaca

SEQ ID NO: 2138642 - RNA, 19 nt, Homo sapiens
  misc_RNA (1)...(19): siRNA sense strand
cuacuucaauuuagaaacc

SEQ ID NO: 2138643 - RNA, 19 nt, Homo sapiens
  misc_RNA (1)...(19): siRNA sense strand
ccuucugucuuuauggaaa

SEQ ID NO: 2138644 - RNA, 19 nt, Homo sapiens
  misc_RNA (1)...(19): siRNA sense strand
caagucgcuggaugguuua

SEQ ID NO: 2138645 - RNA, 19 nt, Homo sapiens
  misc_RNA (1)...(19): siRNA sense strand
cgggaugccugugcagaga

SEQ ID NO: 2138646 - RNA, 19 nt, Homo sapiens
  misc_RNA (1)...(19): siRNA sense strand
ggcuauggaggauguauau

SEQ ID NO: 2138647 - RNA, 19 nt, Homo sapiens
  misc_RNA (1)...(19): siRNA sense strand
uggaugccgagaaguguua

SEQ ID NO: 2138648 - RNA, 19 nt, Homo sapiens
  misc_RNA (1)...(19): siRNA sense strand
ccugcaacgucaccauaga

SEQ ID NO: 2138649 - RNA, 19 nt, Homo sapiens
  misc_RNA (1)...(19): siRNA sense strand
caccauagaaggcuuggau

SEQ ID NO: 2138650 - RNA, 19 nt, Homo sapiens
  misc_RNA (1)...(19): siRNA sense strand
aggagcagcagaaggagua

SEQ ID NO: 2138651 - RNA, 19 nt, Homo sapiens
  misc_RNA (1)...(19): siRNA sense strand
gggucagggugaaggcuau

SEQ ID NO: 2138652 - RNA, 19 nt, Homo sapiens
  misc_RNA (1)...(19): siRNA sense strand
cuacggggaucuccucuau

SEQ ID NO: 2138653 - RNA, 19 nt, Homo sapiens
  misc_RNA (1)...(19): siRNA sense strand
ccgugcaggugacauggaa

SEQ ID NO: 2138654 - RNA, 19 nt, Homo sapiens
  misc_RNA (1)...(19): siRNA sense strand
ccgaguggcaguccaaaca

SEQ ID NO: 2138655 - RNA, 19 nt, Homo sapiens
  misc_RNA (1)...(19): siRNA sense strand
aggaggagcagcagaagga

SEQ ID NO: 2138656 - RNA, 19 nt, Homo sapiens
  misc_RNA (1)...(19): siRNA sense strand
gagcagcgagacgacauuc

SEQ ID NO: 2138657 - RNA, 19 nt, Homo sapiens
  misc_RNA (1)...(19): siRNA sense strand
uaccugcaacgucaccaua

SEQ ID NO: 2138658 - RNA, 19 nt, Homo sapiens
  misc_RNA (1)...(19): siRNA sense strand
ccagugcaccaacuaccuu

SEQ ID NO: 2138659 - RNA, 19 nt, Homo sapiens
  misc_RNA (1)...(19): siRNA sense strand
ccaaaccaaagcuguccaa

SEQ ID NO: 2138660 - RNA, 19 nt, Homo sapiens
  misc_RNA (1)...(19): siRNA sense strand
gacaccaacgccucccaaa

SEQ ID NO: 2138661 - RNA, 19 nt, Homo sapiens
  misc_RNA (1)...(19): siRNA sense strand
gcuuggaugccgagaagug

SEQ ID NO: 2138662 - RNA, 19 nt, Homo sapiens
  misc_RNA (1)...(19): siRNA sense strand
uuaaggagcuugccucaua

SEQ ID NO: 2138663 - RNA, 19 nt, Homo sapiens
  misc_RNA (1)...(19): siRNA sense strand
ccagauggcuguucuucua

SEQ ID NO: 2138664 - RNA, 19 nt, Homo sapiens
  misc_RNA (1)...(19): siRNA sense strand
gcaagaacguuaggagaaa

SEQ ID NO: 2138665 - RNA, 19 nt, Homo sapiens
  misc_RNA (1)...(19): siRNA sense strand
guggaaagguuaugacaaa

SEQ ID NO: 2138666 - RNA, 19 nt, Homo sapiens
  misc_RNA (1)...(19): siRNA sense strand
uaaagcaucugccaaugaa

SEQ ID NO: 2138667 - RNA, 19 nt, Homo sapiens
  misc_RNA (1)...(19): siRNA sense strand
gaagaaagaggauggauuc

SEQ ID NO: 2138668 - RNA, 19 nt, Homo sapiens
  misc_RNA (1)...(19): siRNA sense strand
gaaaggguauagugguauu

SEQ ID NO: 2138669 - RNA, 19 nt, Homo sapiens
  misc_RNA (1)...(19): siRNA sense strand
gagcuugccucauacaaug

SEQ ID NO: 2138670 - RNA, 19 nt, Homo sapiens
  misc_RNA (1)...(19): siRNA sense strand
ucaacuagaucgacagaaa

SEQ ID NO: 2138671 - RNA, 19 nt, Homo sapiens
  misc_RNA (1)...(19): siRNA sense strand
ccaaaggccuggucucuca

SEQ ID NO: 2138672 - RNA, 19 nt, Homo sapiens
  misc_RNA (1)...(19): siRNA sense strand
aaacugacauggacuacaa

SEQ ID NO: 2138673 - RNA, 19 nt, Homo sapiens
  misc_RNA (1)...(19): siRNA sense strand
gagcucagcccaagggaua

SEQ ID NO: 2138674 - RNA, 19 nt, Homo sapiens
  misc_RNA (1)...(19): siRNA sense strand
gauggcuguucuucuauua

SEQ ID NO: 2138675 - RNA, 19 nt, Homo sapiens
  misc_RNA (1)...(19): siRNA sense strand
gaacagacuggaauacaga

SEQ ID NO: 2138676 - RNA, 19 nt, Homo sapiens
  misc_RNA (1)...(19): siRNA sense strand
cucguucgcuguaauauua

SEQ ID NO: 2138677 - RNA, 19 nt, Homo sapiens
  misc_RNA (1)...(19): siRNA sense strand
aagaugcacuucaccauaa

SEQ ID NO: 2138678 - RNA, 19 nt, Homo sapiens
  misc_RNA (1)...(19): siRNA sense strand
gaaagacacagaacgauca

SEQ ID NO: 2138679 - RNA, 19 nt, Homo sapiens
  misc_RNA (1)...(19): siRNA sense strand
ccacuaaugucgcagaugu

SEQ ID NO: 2138680 - RNA, 19 nt, Homo sapiens
  misc_RNA (1)...(19): siRNA sense strand
cuucagagacacacaauua

SEQ ID NO: 2138681 - RNA, 19 nt, Homo sapiens
  misc_RNA (1)...(19): siRNA sense strand
ggguauagugguauuaaua

SEQ ID NO: 2138682 - RNA, 19 nt, Homo sapiens
  misc_RNA (1)...(19): siRNA sense strand
cagagacacacaauuauaa

SEQ ID NO: 2138683 - RNA, 19 nt, Homo sapiens
  misc_RNA (1)...(19): siRNA sense strand
gcuguaauauuaaguugga

SEQ ID NO: 2138684 - RNA, 19 nt, Homo sapiens
  misc_RNA (1)...(19): siRNA sense strand
guaaagcaucugccaauga

SEQ ID NO: 2138685 - RNA, 19 nt, Homo sapiens
  misc_RNA (1)...(19): siRNA sense strand
gaaagguuaugacaaacag

SEQ ID NO: 2138686 - RNA, 19 nt, Homo sapiens
  misc_RNA (1)...(19): siRNA sense strand
cccaagagguuaugauuca

SEQ ID NO: 2138687 - RNA, 19 nt, Homo sapiens
  misc_RNA (1)...(19): siRNA sense strand
ccgaaaggguauaguggua

SEQ ID NO: 2138688 - RNA, 19 nt, Homo sapiens
  misc_RNA (1)...(19): siRNA sense strand
gaacuuccagaucuacaaa

SEQ ID NO: 2138689 - RNA, 19 nt, Homo sapiens
  misc_RNA (1)...(19): siRNA sense strand
ucagagacacacaauuaua

SEQ ID NO: 2138690 - RNA, 19 nt, Homo sapiens
  misc_RNA (1)...(19): siRNA sense strand
ucaagaacuuugugaauac

SEQ ID NO: 2138691 - RNA, 19 nt, Homo sapiens
  misc_RNA (1)...(19): siRNA sense strand
gaauacagaacaagacuca

SEQ ID NO: 2138692 - RNA, 19 nt, Homo sapiens
  misc_RNA (1)...(19): siRNA sense strand
ggugggcaaagaaauauua

SEQ ID NO: 2138693 - RNA, 19 nt, Homo sapiens
  misc_RNA (1)...(19): siRNA sense strand
gugaggcacuuaaggaaug

SEQ ID NO: 2138694 - RNA, 19 nt, Homo sapiens
  misc_RNA (1)...(19): siRNA sense strand
acagagacauuguagugaa

SEQ ID NO: 2138695 - RNA, 19 nt, Homo sapiens
  misc_RNA (1)...(19): siRNA sense strand
ucuaagaacucuccuaaaa

SEQ ID NO: 2138696 - RNA, 19 nt, Homo sapiens
  misc_RNA (1)...(19): siRNA sense strand
aaaggugggcaaagaaaua

SEQ ID NO: 2138697 - RNA, 19 nt, Homo sapiens
  misc_RNA (1)...(19): siRNA sense strand
caauuguacuggaagaaug

SEQ ID NO: 2138698 - RNA, 19 nt, Homo sapiens
  misc_RNA (1)...(19): siRNA sense strand
gacacacaauuauaagaga

SEQ ID NO: 2138699 - RNA, 19 nt, Homo sapiens
  misc_RNA (1)...(19): siRNA sense strand
gcacugaauacagaaguaa

SEQ ID NO: 2138700 - RNA, 19 nt, Homo sapiens
  misc_RNA (1)...(19): siRNA sense strand
cacaaacacuucagagaca

SEQ ID NO: 2138701 - RNA, 19 nt, Homo sapiens
  misc_RNA (1)...(19): siRNA sense strand
ggaacaggccaaugagaga

SEQ ID NO: 2138702 - RNA, 19 nt, Homo sapiens
  misc_RNA (1)...(19): siRNA sense strand
ccauaaggcuaacagaaag

SEQ ID NO: 2138703 - RNA, 19 nt, Homo sapiens
  misc_RNA (1)...(19): siRNA sense strand
gaaaggcagcuucaacucu

SEQ ID NO: 2138704 - RNA, 19 nt, Homo sapiens
  misc_RNA (1)...(19): siRNA sense strand
gauggugcccuugacuuua

SEQ ID NO: 2138705 - RNA, 19 nt, Homo sapiens
  misc_RNA (1)...(19): siRNA sense strand
gcacuuaaggaaugacaga

SEQ ID NO: 2138706 - RNA, 19 nt, Homo sapiens
  misc_RNA (1)...(19): siRNA sense strand
gaaaggugggcaaagaaau

SEQ ID NO: 2138707 - RNA, 19 nt, Homo sapiens
  misc_RNA (1)...(19): siRNA sense strand
gguaaagcaucugccaaug

SEQ ID NO: 2138708 - RNA, 19 nt, Homo sapiens
  misc_RNA (1)...(19): siRNA sense strand
cacaaagaauauggagaua

SEQ ID NO: 2138709 - RNA, 19 nt, Homo sapiens
  misc_RNA (1)...(19): siRNA sense strand
ggaaagguuaugacaaaca

SEQ ID NO: 2138710 - RNA, 19 nt, Homo sapiens
  misc_RNA (1)...(19): siRNA sense strand
ccaaugagagagaguguga

SEQ ID NO: 2138711 - RNA, 19 nt, Homo sapiens
  misc_RNA (1)...(19): siRNA sense strand
aaacaaugccagaagaaga

SEQ ID NO: 2138712 - RNA, 19 nt, Homo sapiens
  misc_RNA (1)...(19): siRNA sense strand
gcauccauccugccucuuu

SEQ ID NO: 2138713 - RNA, 19 nt, Homo sapiens
  misc_RNA (1)...(19): siRNA sense strand
gagaaacuggacccuauug

SEQ ID NO: 2138714 - RNA, 19 nt, Homo sapiens
  misc_RNA (1)...(19): siRNA sense strand
gaaacuggacccuauugca

SEQ ID NO: 2138715 - RNA, 19 nt, Homo sapiens
  misc_RNA (1)...(19): siRNA sense strand
agacaugcauaccucaguu

SEQ ID NO: 2138716 - RNA, 19 nt, Homo sapiens
  misc_RNA (1)...(19): siRNA sense strand
caagagguuaugauucaaa

SEQ ID NO: 2138717 - RNA, 19 nt, Homo sapiens
  misc_RNA (1)...(19): siRNA sense strand
gaucauucuccuaaacuga

SEQ ID NO: 2138718 - RNA, 19 nt, Homo sapiens
  misc_RNA (1)...(19): siRNA sense strand
ugacgaucauucuccuaaa

SEQ ID NO: 2138719 - RNA, 19 nt, Homo sapiens
  misc_RNA (1)...(19): siRNA sense strand
gagaaaggcagcuucaacu

SEQ ID NO: 2138720 - RNA, 19 nt, Homo sapiens
  misc_RNA (1)...(19): siRNA sense strand
acaaacaggaugacacuug

SEQ ID NO: 2138721 - RNA, 19 nt, Homo sapiens
  misc_RNA (1)...(19): siRNA sense strand
aaaaugcacugaauacaga

SEQ ID NO: 2138722 - RNA, 19 nt, Homo sapiens
  misc_RNA (1)...(19): siRNA sense strand
ggauggauucacccagaua

SEQ ID NO: 2138723 - RNA, 19 nt, Homo sapiens
  misc_RNA (1)...(19): siRNA sense strand
gagacauuguagugaagaa

SEQ ID NO: 2138724 - RNA, 19 nt, Homo sapiens
  misc_RNA (1)...(19): siRNA sense strand
ggagaaaggcagcuucaac

SEQ ID NO: 2138725 - RNA, 19 nt, Homo sapiens
  misc_RNA (1)...(19): siRNA sense strand
cuccuaaacugaacacaug

SEQ ID NO: 2138726 - RNA, 19 nt, Homo sapiens
  misc_RNA (1)...(19): siRNA sense strand
gggcaaagaaauauuacug

SEQ ID NO: 2138727 - RNA, 19 nt, Homo sapiens
  misc_RNA (1)...(19): siRNA sense strand
ggacaacagacaugcauac

SEQ ID NO: 2138728 - RNA, 19 nt, Homo sapiens
  misc_RNA (1)...(19): siRNA sense strand
cagaugcacccacuaaugu

SEQ ID NO: 2138729 - RNA, 19 nt, Homo sapiens
  misc_RNA (1)...(19): siRNA sense strand
uugagaaacuggacccuau

SEQ ID NO: 2138730 - RNA, 19 nt, Homo sapiens
  misc_RNA (1)...(19): siRNA sense strand
acacaaagaauauggagau

SEQ ID NO: 2138731 - RNA, 19 nt, Homo sapiens
  misc_RNA (1)...(19): siRNA sense strand
caaggugacagaagggaaa

SEQ ID NO: 2138732 - RNA, 19 nt, Homo sapiens
  misc_RNA (1)...(19): siRNA sense strand
gagacacacaauuauaaga

SEQ ID NO: 2138733 - RNA, 19 nt, Homo sapiens
  misc_RNA (1)...(19): siRNA sense strand
ccagaaagacacagaacga

SEQ ID NO: 2138734 - RNA, 19 nt, Homo sapiens
  misc_RNA (1)...(19): siRNA sense strand
gcaauuguacuggaagaau

SEQ ID NO: 2138735 - RNA, 19 nt, Homo sapiens
  misc_RNA (1)...(19): siRNA sense strand
uauacgaccuuuggacaga

SEQ ID NO: 2138736 - RNA, 19 nt, Homo sapiens
  misc_RNA (1)...(19): siRNA sense strand
gaucucgugugggcuaaug

SEQ ID NO: 2138737 - RNA, 19 nt, Homo sapiens
  misc_RNA (1)...(19): siRNA sense strand
caucaagaacuuugugaau

SEQ ID NO: 2138738 - RNA, 19 nt, Homo sapiens
  misc_RNA (1)...(19): siRNA sense strand
ggcaaagaaauauuacuga

SEQ ID NO: 2138739 - RNA, 19 nt, Homo sapiens
  misc_RNA (1)...(19): siRNA sense strand
ugaaaggugggcaaagaaa

SEQ ID NO: 2138740 - RNA, 19 nt, Homo sapiens
  misc_RNA (1)...(19): siRNA sense strand
agacuggaauacagaacaa

SEQ ID NO: 2138741 - RNA, 19 nt, Homo sapiens
  misc_RNA (1)...(19): siRNA sense strand
gagcagcaccucaugaacu

SEQ ID NO: 2138742 - RNA, 19 nt, Homo sapiens
  misc_RNA (1)...(19): siRNA sense strand
gguauagugguauuaauag

SEQ ID NO: 2138743 - RNA, 19 nt, Homo sapiens
  misc_RNA (1)...(19): siRNA sense strand
ggagcuugccucauacaau

SEQ ID NO: 2138744 - RNA, 19 nt, Homo sapiens
  misc_RNA (1)...(19): siRNA sense strand
agugaaaggugggcaaaga

SEQ ID NO: 2138745 - RNA, 19 nt, Homo sapiens
  misc_RNA (1)...(19): siRNA sense strand
uagcuucccucccagaaag

SEQ ID NO: 2138746 - RNA, 19 nt, Homo sapiens
  misc_RNA (1)...(19): siRNA sense strand
ugaagaaagaggauggauu

SEQ ID NO: 2138747 - RNA, 19 nt, Homo sapiens
  misc_RNA (1)...(19): siRNA sense strand
cccaggaguuugagguuga

SEQ ID NO: 2138748 - RNA, 19 nt, Homo sapiens
  misc_RNA (1)...(19): siRNA sense strand
ucagaugcacccacuaaug

SEQ ID NO: 2138749 - RNA, 19 nt, Homo sapiens
  misc_RNA (1)...(19): siRNA sense strand
gagguugaagcuauuguug

SEQ ID NO: 2138750 - RNA, 19 nt, Homo sapiens
  misc_RNA (1)...(19): siRNA sense strand
ucagaaacuugagaaacug

SEQ ID NO: 2138751 - RNA, 19 nt, Homo sapiens
  misc_RNA (1)...(19): siRNA sense strand
ggguaaagcaucugccaau

SEQ ID NO: 2138752 - RNA, 19 nt, Homo sapiens
  misc_RNA (1)...(19): siRNA sense strand
gcauaccucaguuccaaga

SEQ ID NO: 2138753 - RNA, 19 nt, Homo sapiens
  misc_RNA (1)...(19): siRNA sense strand
cagagcagcaccucaugaa

SEQ ID NO: 2138754 - RNA, 19 nt, Homo sapiens
  misc_RNA (1)...(19): siRNA sense strand
gguugaagcuauuguugac

SEQ ID NO: 2138755 - RNA, 19 nt, Homo sapiens
  misc_RNA (1)...(19): siRNA sense strand
gacgaucauucuccuaaac

SEQ ID NO: 2138756 - RNA, 19 nt, Homo sapiens
  misc_RNA (1)...(19): siRNA sense strand
gggauauaaagcagccuua

SEQ ID NO: 2138757 - RNA, 19 nt, Homo sapiens
  misc_RNA (1)...(19): siRNA sense strand
agugugaggugcugaggaa

SEQ ID NO: 2138758 - RNA, 19 nt, Homo sapiens
  misc_RNA (1)...(19): siRNA sense strand
guuaauugcugggcgaaag

SEQ ID NO: 2138759 - RNA, 19 nt, Homo sapiens
  misc_RNA (1)...(19): siRNA sense strand
uaagaacucuccuaaaacu

SEQ ID NO: 2138760 - RNA, 19 nt, Homo sapiens
  misc_RNA (1)...(19): siRNA sense strand
ucaaacaaugccagaagaa

SEQ ID NO: 2138761 - RNA, 19 nt, Homo sapiens
  misc_RNA (1)...(19): siRNA sense strand
auaccucuauugggauaua

SEQ ID NO: 2138762 - RNA, 19 nt, Homo sapiens
  misc_RNA (1)...(19): siRNA sense strand
ggaagaagcuggacuuugu

SEQ ID NO: 2138763 - RNA, 19 nt, Homo sapiens
  misc_RNA (1)...(19): siRNA sense strand
gaaauucaccucuucuaua

SEQ ID NO: 2138764 - RNA, 19 nt, Homo sapiens
  misc_RNA (1)...(19): siRNA sense strand
gaaauaugcugaucuugga

SEQ ID NO: 2138765 - RNA, 19 nt, Homo sapiens
  misc_RNA (1)...(19): siRNA sense strand
gaagaaggccgugacuuua

SEQ ID NO: 2138766 - RNA, 19 nt, Homo sapiens
  misc_RNA (1)...(19): siRNA sense strand
aagcagauauguuguguaa

SEQ ID NO: 2138767 - RNA, 19 nt, Homo sapiens
  misc_RNA (1)...(19): siRNA sense strand
gcagauauguuguguaacu

SEQ ID NO: 2138768 - RNA, 19 nt, Homo sapiens
  misc_RNA (1)...(19): siRNA sense strand
gaaagcagauauguugugu

SEQ ID NO: 2138769 - RNA, 19 nt, Homo sapiens
  misc_RNA (1)...(19): siRNA sense strand
gcagcucucuguaagaaau

SEQ ID NO: 2138770 - RNA, 19 nt, Homo sapiens
  misc_RNA (1)...(19): siRNA sense strand
ugaagaaggccgugacuuu

SEQ ID NO: 2138771 - RNA, 19 nt, Homo sapiens
  misc_RNA (1)...(19): siRNA sense strand
agaaggccgugacuuuaua

SEQ ID NO: 2138772 - RNA, 19 nt, Homo sapiens
  misc_RNA (1)...(19): siRNA sense strand
agagaaagcagauauguug

SEQ ID NO: 2138773 - RNA, 19 nt, Homo sapiens
  misc_RNA (1)...(19): siRNA sense strand
ggccgugacuuuauaacaa

SEQ ID NO: 2138774 - RNA, 19 nt, Homo sapiens
  misc_RNA (1)...(19): siRNA sense strand
ggaaauucaccucuucuau

SEQ ID NO: 2138775 - RNA, 19 nt, Homo sapiens
  misc_RNA (1)...(19): siRNA sense strand
caacaucaagacucaaauu

SEQ ID NO: 2138776 - RNA, 19 nt, Homo sapiens
  misc_RNA (1)...(19): siRNA sense strand
aaauucaccucuucuauag

SEQ ID NO: 2138777 - RNA, 19 nt, Homo sapiens
  misc_RNA (1)...(19): siRNA sense strand
caucaagacucaaauugca

SEQ ID NO: 2138778 - RNA, 19 nt, Homo sapiens
  misc_RNA (1)...(19): siRNA sense strand
uaacaaagaacaggaguug

SEQ ID NO: 2138779 - RNA, 19 nt, Homo sapiens
  misc_RNA (1)...(19): siRNA sense strand
ucagcaagcuuuacaaugc

SEQ ID NO: 2138780 - RNA, 19 nt, Homo sapiens
  misc_RNA (1)...(19): siRNA sense strand
uaagagagaaagcagauau

SEQ ID NO: 2138781 - RNA, 19 nt, Homo sapiens
  misc_RNA (1)...(19): siRNA sense strand
gcacugcacacaagaguca

SEQ ID NO: 2138782 - RNA, 19 nt, Homo sapiens
  misc_RNA (1)...(19): siRNA sense strand
gccgugacuuuauaacaaa

SEQ ID NO: 2138783 - RNA, 19 nt, Homo sapiens
  misc_RNA (1)...(19): siRNA sense strand
cacaugauauucuucaaca

SEQ ID NO: 2138784 - RNA, 19 nt, Homo sapiens
  misc_RNA (1)...(19): siRNA sense strand
gagagaaagcagauauguu

SEQ ID NO: 2138785 - RNA, 19 nt, Homo sapiens
  misc_RNA (1)...(19): siRNA sense strand
gaaggccgugacuuuauaa

SEQ ID NO: 2138786 - RNA, 19 nt, Homo sapiens
  misc_RNA (1)...(19): siRNA sense strand
gcagugccacaaguaauaa

SEQ ID NO: 2138787 - RNA, 19 nt, Homo sapiens
  misc_RNA (1)...(19): siRNA sense strand
uggcagcucucuguaagaa

SEQ ID NO: 2138788 - RNA, 19 nt, Homo sapiens
  misc_RNA (1)...(19): siRNA sense strand
ggagcuuccugagcaagaa

SEQ ID NO: 2138789 - RNA, 19 nt, Homo sapiens
  misc_RNA (1)...(19): siRNA sense strand
gcacacaagagucaagaag

SEQ ID NO: 2138790 - RNA, 19 nt, Homo sapiens
  misc_RNA (1)...(19): siRNA sense strand
gaagaagcuggacuuugug

SEQ ID NO: 2138791 - RNA, 19 nt, Homo sapiens
  misc_RNA (1)...(19): siRNA sense strand
gaugcaagcccuaaacacu

SEQ ID NO: 2138792 - RNA, 19 nt, Homo sapiens
  misc_RNA (1)...(19): siRNA sense strand
ggucagcaagcuuuacaau

SEQ ID NO: 2138793 - RNA, 19 nt, Homo sapiens
  misc_RNA (1)...(19): siRNA sense strand
augcugaucuuggaaauuc

SEQ ID NO: 2138794 - RNA, 19 nt, Homo sapiens
  misc_RNA (1)...(19): siRNA sense strand
cagcaagcuuuacaaugca

SEQ ID NO: 2138795 - RNA, 19 nt, Homo sapiens
  misc_RNA (1)...(19): siRNA sense strand
guguaacucugaaucacau

SEQ ID NO: 2138796 - RNA, 19 nt, Homo sapiens
  misc_RNA (1)...(19): siRNA sense strand
caugauauucuucaacauc

SEQ ID NO: 2138797 - RNA, 19 nt, Homo sapiens
  misc_RNA (1)...(19): siRNA sense strand
guaagaaauaugcugaucu

SEQ ID NO: 2138798 - RNA, 19 nt, Homo sapiens
  misc_RNA (1)...(19): siRNA sense strand
aagaaggccgugacuuuau

SEQ ID NO: 2138799 - RNA, 19 nt, Homo sapiens
  misc_RNA (1)...(19): siRNA sense strand
ugcagugccacaaguaaua

SEQ ID NO: 2138800 - RNA, 19 nt, Homo sapiens
  misc_RNA (1)...(19): siRNA sense strand
gcuggacuuuguggguuaa

SEQ ID NO: 2138801 - RNA, 19 nt, Homo sapiens
  misc_RNA (1)...(19): siRNA sense strand
guuaagagagaaagcagau

SEQ ID NO: 2138802 - RNA, 19 nt, Homo sapiens
  misc_RNA (1)...(19): siRNA sense strand
gagaaagcagauauguugu

SEQ ID NO: 2138803 - RNA, 19 nt, Homo sapiens
  misc_RNA (1)...(19): siRNA sense strand
caaauugcagugccacaag

SEQ ID NO: 2138804 - RNA, 19 nt, Homo sapiens
  misc_RNA (1)...(19): siRNA sense strand
uguaagaaauaugcugauc

SEQ ID NO: 2138805 - RNA, 19 nt, Homo sapiens
  misc_RNA (1)...(19): siRNA sense strand
aaauugcagugccacaagu

SEQ ID NO: 2138806 - RNA, 19 nt, Homo sapiens
  misc_RNA (1)...(19): siRNA sense strand
guaacucugaaucacauga

SEQ ID NO: 2138807 - RNA, 19 nt, Homo sapiens
  misc_RNA (1)...(19): siRNA sense strand
cgucuggucagcaagcuuu

SEQ ID NO: 2138808 - RNA, 19 nt, Homo sapiens
  misc_RNA (1)...(19): siRNA sense strand
gcaacaggaacaaagaaaa

SEQ ID NO: 2138809 - RNA, 19 nt, Homo sapiens
  misc_RNA (1)...(19): siRNA sense strand
uauguuguguaacucugaa

SEQ ID NO: 2138810 - RNA, 19 nt, Homo sapiens
  misc_RNA (1)...(19): siRNA sense strand
gcccuaaacacucuuucga

SEQ ID NO: 2138811 - RNA, 19 nt, Homo sapiens
  misc_RNA (1)...(19): siRNA sense strand
cuuggaaauucaccucuuc

SEQ ID NO: 2138812 - RNA, 19 nt, Homo sapiens
  misc_RNA (1)...(19): siRNA sense strand
cuuuguggguuaagagaga

SEQ ID NO: 2138813 - RNA, 19 nt, Homo sapiens
  misc_RNA (1)...(19): siRNA sense strand
ggacuuuguggguuaagag

SEQ ID NO: 2138814 - RNA, 19 nt, Homo sapiens
  misc_RNA (1)...(19): siRNA sense strand
caaugcaacaggaacaaag

SEQ ID NO: 2138815 - RNA, 19 nt, Homo sapiens
  misc_RNA (1)...(19): siRNA sense strand
gauauucuucaacaucaag

SEQ ID NO: 2138816 - RNA, 19 nt, Homo sapiens
  misc_RNA (1)...(19): siRNA sense strand
agaaagcagauauguugug

SEQ ID NO: 2138817 - RNA, 19 nt, Homo sapiens
  misc_RNA (1)...(19): siRNA sense strand
agagagaaagcagauaugu

SEQ ID NO: 2138818 - RNA, 19 nt, Homo sapiens
  misc_RNA (1)...(19): siRNA sense strand
gccacaaguaauaaacauu

SEQ ID NO: 2138819 - RNA, 19 nt, Homo sapiens
  misc_RNA (1)...(19): siRNA sense strand
ucaaauugcagugccacaa

SEQ ID NO: 2138820 - RNA, 19 nt, Homo sapiens
  misc_RNA (1)...(19): siRNA sense strand
ggacuuaaagggucaguua

SEQ ID NO: 2138821 - RNA, 19 nt, Homo sapiens
  misc_RNA (1)...(19): siRNA sense strand
gaacauagaacugaagaga

SEQ ID NO: 2138822 - RNA, 19 nt, Homo sapiens
  misc_RNA (1)...(19): siRNA sense strand
ggcaagaccuucacaaugg

SEQ ID NO: 2138823 - RNA, 19 nt, Homo sapiens
  misc_RNA (1)...(19): siRNA sense strand
ugaccuaaaugcagaacua

SEQ ID NO: 2138824 - RNA, 19 nt, Homo sapiens
  misc_RNA (1)...(19): siRNA sense strand
ccucaacucucuacgcuuu

SEQ ID NO: 2138825 - RNA, 19 nt, Homo sapiens
  misc_RNA (1)...(19): siRNA sense strand
gaggaggccugaccagaug

SEQ ID NO: 2138826 - RNA, 19 nt, Homo sapiens
  misc_RNA (1)...(19): siRNA sense strand
gugcuaagaugcucauguu

SEQ ID NO: 2138827 - RNA, 19 nt, Homo sapiens
  misc_RNA (1)...(19): siRNA sense strand
ucaguuaugugaccuaaau

SEQ ID NO: 2138828 - RNA, 19 nt, Homo sapiens
  misc_RNA (1)...(19): siRNA sense strand
ggacagagcgcacaacacu

SEQ ID NO: 2138829 - RNA, 19 nt, Homo sapiens
  misc_RNA (1)...(19): siRNA sense strand
gggaaacacaggccauuaa

SEQ ID NO: 2138830 - RNA, 19 nt, Homo sapiens
  misc_RNA (1)...(19): siRNA sense strand
gcaagaccuucacaaugga

SEQ ID NO: 2138831 - RNA, 19 nt, Homo sapiens
  misc_RNA (1)...(19): siRNA sense strand
aacaggagcugaagaacuu

SEQ ID NO: 2138832 - RNA, 19 nt, Homo sapiens
  misc_RNA (1)...(19): siRNA sense strand
cuaagaugcucauguuugu

SEQ ID NO: 2138833 - RNA, 19 nt, Homo sapiens
  misc_RNA (1)...(19): siRNA sense strand
gcuaagaugcucauguuug

SEQ ID NO: 2138834 - RNA, 19 nt, Homo sapiens
  misc_RNA (1)...(19): siRNA sense strand
ugaaguguuugaagagauu

SEQ ID NO: 2138835 - RNA, 19 nt, Homo sapiens
  misc_RNA (1)...(19): siRNA sense strand
gaagaaacccagcaaacgu

SEQ ID NO: 2138836 - RNA, 19 nt, Homo sapiens
  misc_RNA (1)...(19): siRNA sense strand
gaugaaguguuugaagaga

SEQ ID NO: 2138837 - RNA, 19 nt, Homo sapiens
  misc_RNA (1)...(19): siRNA sense strand
uaaagggucaguuauguga

SEQ ID NO: 2138838 - RNA, 19 nt, Homo sapiens
  misc_RNA (1)...(19): siRNA sense strand
gaagccaguuccugcuguu

SEQ ID NO: 2138839 - RNA, 19 nt, Homo sapiens
  misc_RNA (1)...(19): siRNA sense strand
ggagcucacugucaccaau

SEQ ID NO: 2138840 - RNA, 19 nt, Homo sapiens
  misc_RNA (1)...(19): siRNA sense strand
gagaagaaacggacaagag

SEQ ID NO: 2138841 - RNA, 19 nt, Homo sapiens
  misc_RNA (1)...(19): siRNA sense strand
cugaagaacuugcgugcuu

SEQ ID NO: 2138842 - RNA, 19 nt, Homo sapiens
  misc_RNA (1)...(19): siRNA sense strand
uggacaggaugaaguguuu

SEQ ID NO: 2138843 - RNA, 19 nt, Homo sapiens
  misc_RNA (1)...(19): siRNA sense strand
ucaggaagcagacucaaga

SEQ ID NO: 2138844 - RNA, 19 nt, Homo sapiens
  misc_RNA (1)...(19): siRNA sense strand
aaggugaaccaguguguua

SEQ ID NO: 2138845 - RNA, 19 nt, Homo sapiens
  misc_RNA (1)...(19): siRNA sense strand
gaaguggacaggaugaagu

SEQ ID NO: 2138846 - RNA, 19 nt, Homo sapiens
  misc_RNA (1)...(19): siRNA sense strand
gaaacacaggccauuaaca

SEQ ID NO: 2138847 - RNA, 19 nt, Homo sapiens
  misc_RNA (1)...(19): siRNA sense strand
agaggaggcugcagacauc

SEQ ID NO: 2138848 - RNA, 19 nt, Homo sapiens
  misc_RNA (1)...(19): siRNA sense strand
gugaaccaguguguuauug

SEQ ID NO: 2138849 - RNA, 19 nt, Homo sapiens
  misc_RNA (1)...(19): siRNA sense strand
aggaugaaguguuugaaga

SEQ ID NO: 2138850 - RNA, 19 nt, Homo sapiens
  misc_RNA (1)...(19): siRNA sense strand
ucacgcagccacaguguau

SEQ ID NO: 2138851 - RNA, 19 nt, Homo sapiens
  misc_RNA (1)...(19): siRNA sense strand
agaguuccaucccucacua

SEQ ID NO: 2138852 - RNA, 19 nt, Homo sapiens
  misc_RNA (1)...(19): siRNA sense strand
gaagcagcccugucaagca

SEQ ID NO: 2138853 - RNA, 19 nt, Homo sapiens
  misc_RNA (1)...(19): siRNA sense strand
cuuaaagggucaguuaugu

SEQ ID NO: 2138854 - RNA, 19 nt, Homo sapiens
  misc_RNA (1)...(19): siRNA sense strand
gagaggaggcugcagacau

SEQ ID NO: 2138855 - RNA, 19 nt, Homo sapiens
  misc_RNA (1)...(19): siRNA sense strand
caccaaugcucgauauguc

SEQ ID NO: 2138856 - RNA, 19 nt, Homo sapiens
  misc_RNA (1)...(19): siRNA sense strand
gccuggagccugagaagaa

SEQ ID NO: 2138857 - RNA, 19 nt, Homo sapiens
  misc_RNA (1)...(19): siRNA sense strand
ggaagaaacccagcaaacg

SEQ ID NO: 2138858 - RNA, 19 nt, Homo sapiens
  misc_RNA (1)...(19): siRNA sense strand
gccaacaggagcugaagaa

SEQ ID NO: 2138859 - RNA, 19 nt, Homo sapiens
  misc_RNA (1)...(19): siRNA sense strand
ugaagagauugccaugcuu

SEQ ID NO: 2138860 - RNA, 19 nt, Homo sapiens
  misc_RNA (1)...(19): siRNA sense strand
gggcaacauccguguauuc

SEQ ID NO: 2138861 - RNA, 19 nt, Homo sapiens
  misc_RNA (1)...(19): siRNA sense strand
gauccuccaacccgccuua

SEQ ID NO: 2138862 - RNA, 19 nt, Homo sapiens
  misc_RNA (1)...(19): siRNA sense strand
aaacacaggccauuaacag

SEQ ID NO: 2138863 - RNA, 19 nt, Homo sapiens
  misc_RNA (1)...(19): siRNA sense strand
ugucaccaaugcucgauau

SEQ ID NO: 2138864 - RNA, 19 nt, Homo sapiens
  misc_RNA (1)...(19): siRNA sense strand
guaugcaucuuugccuaug

SEQ ID NO: 2138865 - RNA, 19 nt, Homo sapiens
  misc_RNA (1)...(19): siRNA sense strand
uauccaguaugcaucuuug

SEQ ID NO: 2138866 - RNA, 19 nt, Homo sapiens
  misc_RNA (1)...(19): siRNA sense strand
caacaggagcugaagaacu

SEQ ID NO: 2138867 - RNA, 19 nt, Homo sapiens
  misc_RNA (1)...(19): siRNA sense strand
ggugaaccaguguguuauu

SEQ ID NO: 2138868 - RNA, 19 nt, Homo sapiens
  misc_RNA (1)...(19): siRNA sense strand
ggaaacacaggccauuaac

SEQ ID NO: 2138869 - RNA, 19 nt, Homo sapiens
  misc_RNA (1)...(19): siRNA sense strand
ggugcaagagcuucagaaa

SEQ ID NO: 2138870 - RNA, 19 nt, Homo sapiens
  misc_RNA (1)...(19): siRNA sense strand
gaagaacuugcgugcuugu

SEQ ID NO: 2138871 - RNA, 19 nt, Homo sapiens
  misc_RNA (1)...(19): siRNA sense strand
gacaggaugaaguguuuga

SEQ ID NO: 2138872 - RNA, 19 nt, Homo sapiens
  misc_RNA (1)...(19): siRNA sense strand
gcacaaccagcugcaggaa

SEQ ID NO: 2138873 - RNA, 19 nt, Homo sapiens
  misc_RNA (1)...(19): siRNA sense strand
gggaagaaacccagcaaac

SEQ ID NO: 2138874 - RNA, 19 nt, Homo sapiens
  misc_RNA (1)...(19): siRNA sense strand
guauuccagcuacagauuu

SEQ ID NO: 2138875 - RNA, 19 nt, Homo sapiens
  misc_RNA (1)...(19): siRNA sense strand
gaacggaggggacugaugu

SEQ ID NO: 2138876 - RNA, 19 nt, Homo sapiens
  misc_RNA (1)...(19): siRNA sense strand
ggccagaccacagcucaaa

SEQ ID NO: 2138877 - RNA, 19 nt, Homo sapiens
  misc_RNA (1)...(19): siRNA sense strand
cgggaacgccuucgggaaa

SEQ ID NO: 2138878 - RNA, 19 nt, Homo sapiens
  misc_RNA (1)...(19): siRNA sense strand
ggccugaccagauggaaga

SEQ ID NO: 2138879 - RNA, 19 nt, Homo sapiens
  misc_RNA (1)...(19): siRNA sense strand
uggcaagaccuucacaaug

SEQ ID NO: 2138880 - RNA, 19 nt, Homo sapiens
  misc_RNA (1)...(19): siRNA sense strand
ccuggagccugagaagaaa

SEQ ID NO: 2138881 - RNA, 19 nt, Homo sapiens
  misc_RNA (1)...(19): siRNA sense strand
acaaccagcugcaggaacu

SEQ ID NO: 2138882 - RNA, 19 nt, Homo sapiens
  misc_RNA (1)...(19): siRNA sense strand
ccacaucccacccaagagu

SEQ ID NO: 2138883 - RNA, 19 nt, Homo sapiens
  misc_RNA (1)...(19): siRNA sense strand
gaccuaaaugcagaacuaa

SEQ ID NO: 2138884 - RNA, 19 nt, Homo sapiens
  misc_RNA (1)...(19): siRNA sense strand
ggaaguaaaggggaacaua

SEQ ID NO: 2138885 - RNA, 19 nt, Homo sapiens
  misc_RNA (1)...(19): siRNA sense strand
aagaugcucauguuuguga

SEQ ID NO: 2138886 - RNA, 19 nt, Homo sapiens
  misc_RNA (1)...(19): siRNA sense strand
uaccggaacagcaaacuga

SEQ ID NO: 2138887 - RNA, 19 nt, Homo sapiens
  misc_RNA (1)...(19): siRNA sense strand
ggaacgccuucgggaaaca

SEQ ID NO: 2138888 - RNA, 19 nt, Homo sapiens
  misc_RNA (1)...(19): siRNA sense strand
ggaugaaguguuugaagag

SEQ ID NO: 2138889 - RNA, 19 nt, Homo sapiens
  misc_RNA (1)...(19): siRNA sense strand
gaagaaccagaagccaguu

SEQ ID NO: 2138890 - RNA, 19 nt, Homo sapiens
  misc_RNA (1)...(19): siRNA sense strand
ccacaguguauuccagcua

SEQ ID NO: 2138891 - RNA, 19 nt, Homo sapiens
  misc_RNA (1)...(19): siRNA sense strand
gggaacauagaacugaaga

SEQ ID NO: 2138892 - RNA, 19 nt, Homo sapiens
  misc_RNA (1)...(19): siRNA sense strand
caagggcaacauccgugua

SEQ ID NO: 2138893 - RNA, 19 nt, Homo sapiens
  misc_RNA (1)...(19): siRNA sense strand
ggaggcugcagacaucaga

SEQ ID NO: 2138894 - RNA, 19 nt, Homo sapiens
  misc_RNA (1)...(19): siRNA sense strand
uaccacaucccacccaaga

SEQ ID NO: 2138895 - RNA, 19 nt, Homo sapiens
  misc_RNA (1)...(19): siRNA sense strand
ggaacagcaaacugaccua

SEQ ID NO: 2138896 - RNA, 19 nt, Homo sapiens
  misc_RNA (1)...(19): siRNA sense strand
ccgcacagcccagaaugaa

SEQ ID NO: 2138897 - RNA, 19 nt, Homo sapiens
  misc_RNA (1)...(19): siRNA sense strand
uauuccagcuacagauuuc

SEQ ID NO: 2138898 - RNA, 19 nt, Homo sapiens
  misc_RNA (1)...(19): siRNA sense strand
cgggaaacacaggccauua

SEQ ID NO: 2138899 - RNA, 19 nt, Homo sapiens
  misc_RNA (1)...(19): siRNA sense strand
gagggaagaaacccagcaa

SEQ ID NO: 2138900 - RNA, 19 nt, Homo sapiens
  misc_RNA (1)...(19): siRNA sense strand
ucauggcccugagcaacaa

SEQ ID NO: 2138901 - RNA, 19 nt, Homo sapiens
  misc_RNA (1)...(19): siRNA sense strand
gcaggagggcuuggugcaa

SEQ ID NO: 2138902 - RNA, 19 nt, Homo sapiens
  misc_RNA (1)...(19): siRNA sense strand
gaaguaaaggggaacauag

SEQ ID NO: 2138903 - RNA, 19 nt, Homo sapiens
  misc_RNA (1)...(19): siRNA sense strand
uugaagagauugccaugcu

SEQ ID NO: 2138904 - RNA, 19 nt, Homo sapiens
  misc_RNA (1)...(19): siRNA sense strand
ggaaguggacaggaugaag

SEQ ID NO: 2138905 - RNA, 19 nt, Homo sapiens
  misc_RNA (1)...(19): siRNA sense strand
ggaacucaagggcaacauc

SEQ ID NO: 2138906 - RNA, 19 nt, Homo sapiens
  misc_RNA (1)...(19): siRNA sense strand
gcauuuagccaagguacag

SEQ ID NO: 2138907 - RNA, 19 nt, Homo sapiens
  misc_RNA (1)...(19): siRNA sense strand
ugucccaacuagaggagaa

SEQ ID NO: 2138908 - RNA, 19 nt, Homo sapiens
  misc_RNA (1)...(19): siRNA sense strand
gagcucacugucaccaaug

SEQ ID NO: 2138909 - RNA, 19 nt, Homo sapiens
  misc_RNA (1)...(19): siRNA sense strand
gggaacgccuucgggaaac

SEQ ID NO: 2138910 - RNA, 19 nt, Homo sapiens
  misc_RNA (1)...(19): siRNA sense strand
cgaccaaaauuaccacauc

SEQ ID NO: 2138911 - RNA, 19 nt, Homo sapiens
  misc_RNA (1)...(19): siRNA sense strand
ucaccaaugcucgauaugu

SEQ ID NO: 2138912 - RNA, 19 nt, Homo sapiens
  misc_RNA (1)...(19): siRNA sense strand
cuacagugccacagacaca

SEQ ID NO: 2138913 - RNA, 19 nt, Homo sapiens
  misc_RNA (1)...(19): siRNA sense strand
guggcaagaccuucacaau

SEQ ID NO: 2138914 - RNA, 19 nt, Homo sapiens
  misc_RNA (1)...(19): siRNA sense strand
guacugcucaggccaacag

SEQ ID NO: 2138915 - RNA, 19 nt, Homo sapiens
  misc_RNA (1)...(19): siRNA sense strand
gggugguagugcuaagaug

SEQ ID NO: 2138916 - RNA, 19 nt, Homo sapiens
  misc_RNA (1)...(19): siRNA sense strand
acagcaaacugaccuaccu

SEQ ID NO: 2138917 - RNA, 19 nt, Homo sapiens
  misc_RNA (1)...(19): siRNA sense strand
aggagucccacgugccuua

SEQ ID NO: 2138918 - RNA, 19 nt, Homo sapiens
  misc_RNA (1)...(19): siRNA sense strand
agaggaggccugaccagau

SEQ ID NO: 2138919 - RNA, 19 nt, Homo sapiens
  misc_RNA (1)...(19): siRNA sense strand
agaaguggacgcccugcuu

SEQ ID NO: 2138920 - RNA, 19 nt, Homo sapiens
  misc_RNA (1)...(19): siRNA sense strand
gguuuccucuucucuauua

SEQ ID NO: 2138921 - RNA, 19 nt, Homo sapiens
  misc_RNA (1)...(19): siRNA sense strand
uccaucuucuuccauauua

SEQ ID NO: 2138922 - RNA, 19 nt, Homo sapiens
  misc_RNA (1)...(19): siRNA sense strand
uagguuuccucuucucuau

SEQ ID NO: 2138923 - RNA, 19 nt, Homo sapiens
  misc_RNA (1)...(19): siRNA sense strand
uugguuagguuuccucuuc

SEQ ID NO: 2138924 - RNA, 19 nt, Homo sapiens
  misc_RNA (1)...(19): siRNA sense strand
ccauauuauuccacaguca

SEQ ID NO: 2138925 - RNA, 19 nt, Homo sapiens
  misc_RNA (1)...(19): siRNA sense strand
cacagucauugguuagguu

SEQ ID NO: 2138926 - RNA, 19 nt, Homo sapiens
  misc_RNA (1)...(19): siRNA sense strand
auuccacagucauugguua

SEQ ID NO: 2138927 - RNA, 19 nt, Homo sapiens
  misc_RNA (1)...(19): siRNA sense strand
ccacagucauugguuaggu

SEQ ID NO: 2138928 - RNA, 19 nt, Homo sapiens
  misc_RNA (1)...(19): siRNA sense strand
caagugggaaacaaucugu

SEQ ID NO: 2138929 - RNA, 19 nt, Homo sapiens
  misc_RNA (1)...(19): siRNA sense strand
cuacaagugggaaacaauc

SEQ ID NO: 2138930 - RNA, 19 nt, Homo sapiens
  misc_RNA (1)...(19): siRNA sense strand
gggaugaacuuguccauaa

SEQ ID NO: 2138931 - RNA, 19 nt, Homo sapiens
  misc_RNA (1)...(19): siRNA sense strand
gaagcgcuguguagacuga

SEQ ID NO: 2138932 - RNA, 19 nt, Homo sapiens
  misc_RNA (1)...(19): siRNA sense strand
ggaugaacuuguccauaaa

SEQ ID NO: 2138933 - RNA, 19 nt, Homo sapiens
  misc_RNA (1)...(19): siRNA sense strand
gcagguugcuauuucugaa

SEQ ID NO: 2138934 - RNA, 19 nt, Homo sapiens
  misc_RNA (1)...(19): siRNA sense strand
gaaauuaaggaucgagaau

SEQ ID NO: 2138935 - RNA, 19 nt, Homo sapiens
  misc_RNA (1)...(19): siRNA sense strand
uguguagacugacgauuaa

SEQ ID NO: 2138936 - RNA, 19 nt, Homo sapiens
  misc_RNA (1)...(19): siRNA sense strand
cauaaaugguuugaugaug

SEQ ID NO: 2138937 - RNA, 19 nt, Homo sapiens
  misc_RNA (1)...(19): siRNA sense strand
ucaaucaccuaaacaacag

SEQ ID NO: 2138938 - RNA, 19 nt, Homo sapiens
  misc_RNA (1)...(19): siRNA sense strand
uuaaggaucgagaauuuga

SEQ ID NO: 2138939 - RNA, 19 nt, Homo sapiens
  misc_RNA (1)...(19): siRNA sense strand
agucauugcugaagcuuuc

SEQ ID NO: 2138940 - RNA, 19 nt, Homo sapiens
  misc_RNA (1)...(19): siRNA sense strand
caaagaaauuaaggaucga

SEQ ID NO: 2138941 - RNA, 19 nt, Homo sapiens
  misc_RNA (1)...(19): siRNA sense strand
cuguguagacugacgauua

SEQ ID NO: 2138942 - RNA, 19 nt, Homo sapiens
  misc_RNA (1)...(19): siRNA sense strand
gaugaacuuguccauaaau

SEQ ID NO: 2138943 - RNA, 19 nt, Homo sapiens
  misc_RNA (1)...(19): siRNA sense strand
caccuaaacaacagacuug

SEQ ID NO: 2138944 - RNA, 19 nt, Homo sapiens
  misc_RNA (1)...(19): siRNA sense strand
ugaagucauugcugaagcu

SEQ ID NO: 2138945 - RNA, 19 nt, Homo sapiens
  misc_RNA (1)...(19): siRNA sense strand
gacaguagacguuuucuca

SEQ ID NO: 2138946 - RNA, 19 nt, Homo sapiens
  misc_RNA (1)...(19): siRNA sense strand
agaaauuaaggaucgagaa

SEQ ID NO: 2138947 - RNA, 19 nt, Homo sapiens
  misc_RNA (1)...(19): siRNA sense strand
guagacguuuucucaauca

SEQ ID NO: 2138948 - RNA, 19 nt, Homo sapiens
  misc_RNA (1)...(19): siRNA sense strand
ccuaauaacucuccacuua

SEQ ID NO: 2138949 - RNA, 19 nt, Homo sapiens
  misc_RNA (1)...(19): siRNA sense strand
gggaugaacuuguccauaa

SEQ ID NO: 2138950 - RNA, 19 nt, Homo sapiens
  misc_RNA (1)...(19): siRNA sense strand
gaugaccgcugccuaauaa

SEQ ID NO: 2138951 - RNA, 19 nt, Homo sapiens
  misc_RNA (1)...(19): siRNA sense strand
gaaaacaucucuucucuga

SEQ ID NO: 2138952 - RNA, 19 nt, Homo sapiens
  misc_RNA (1)...(19): siRNA sense strand
gaagaugaccgcugccuaa

SEQ ID NO: 2138953 - RNA, 19 nt, Homo sapiens
  misc_RNA (1)...(19): siRNA sense strand
gaagaagccucguuaugca

SEQ ID NO: 2138954 - RNA, 19 nt, Homo sapiens
  misc_RNA (1)...(19): siRNA sense strand
guacuagcuugaaacauaa

SEQ ID NO: 2138955 - RNA, 19 nt, Homo sapiens
  misc_RNA (1)...(19): siRNA sense strand
gcagaagaauccacuaaca

SEQ ID NO: 2138956 - RNA, 19 nt, Homo sapiens
  misc_RNA (1)...(19): siRNA sense strand
gcaccggauugccuaauaa

SEQ ID NO: 2138957 - RNA, 19 nt, Homo sapiens
  misc_RNA (1)...(19): siRNA sense strand
gaacuaucuuggaccagua

SEQ ID NO: 2138958 - RNA, 19 nt, Homo sapiens
  misc_RNA (1)...(19): siRNA sense strand
aguacuagcuugaaacaua

SEQ ID NO: 2138959 - RNA, 19 nt, Homo sapiens
  misc_RNA (1)...(19): siRNA sense strand
gaaagcguccguuuaauuc

SEQ ID NO: 2138960 - RNA, 19 nt, Homo sapiens
  misc_RNA (1)...(19): siRNA sense strand
gaaagagaguugccagaag

SEQ ID NO: 2138961 - RNA, 19 nt, Homo sapiens
  misc_RNA (1)...(19): siRNA sense strand
ugaagaagcccaugauuau

SEQ ID NO: 2138962 - RNA, 19 nt, Homo sapiens
  misc_RNA (1)...(19): siRNA sense strand
gaagcgcuguguagacuga

SEQ ID NO: 2138963 - RNA, 19 nt, Homo sapiens
  misc_RNA (1)...(19): siRNA sense strand
gaaacagucugcugaucug

SEQ ID NO: 2138964 - RNA, 19 nt, Homo sapiens
  misc_RNA (1)...(19): siRNA sense strand
ccacuuaaaugaccaaucu

SEQ ID NO: 2138965 - RNA, 19 nt, Homo sapiens
  misc_RNA (1)...(19): siRNA sense strand
ggaugaacuuguccauaaa

SEQ ID NO: 2138966 - RNA, 19 nt, Homo sapiens
  misc_RNA (1)...(19): siRNA sense strand
aggaagcggugaugaauuu

SEQ ID NO: 2138967 - RNA, 19 nt, Homo sapiens
  misc_RNA (1)...(19): siRNA sense strand
cugcugaucugcaaucuuu

SEQ ID NO: 2138968 - RNA, 19 nt, Homo sapiens
  misc_RNA (1)...(19): siRNA sense strand
gaaccaagaaucacuaaca

SEQ ID NO: 2138969 - RNA, 19 nt, Homo sapiens
  misc_RNA (1)...(19): siRNA sense strand
ugagugagcucucuuccuu

SEQ ID NO: 2138970 - RNA, 19 nt, Homo sapiens
  misc_RNA (1)...(19): siRNA sense strand
ccaaagacuucugaacaaa

SEQ ID NO: 2138971 - RNA, 19 nt, Homo sapiens
  misc_RNA (1)...(19): siRNA sense strand
gaaggagguucuggaauuc

SEQ ID NO: 2138972 - RNA, 19 nt, Homo sapiens
  misc_RNA (1)...(19): siRNA sense strand
aaacagagcaggcagaaga

SEQ ID NO: 2138973 - RNA, 19 nt, Homo sapiens
  misc_RNA (1)...(19): siRNA sense strand
gcaaagaaagcaccggauu

SEQ ID NO: 2138974 - RNA, 19 nt, Homo sapiens
  misc_RNA (1)...(19): siRNA sense strand
acagaaagcguccguuuaa

SEQ ID NO: 2138975 - RNA, 19 nt, Homo sapiens
  misc_RNA (1)...(19): siRNA sense strand
gcacucagaagaugaagaa

SEQ ID NO: 2138976 - RNA, 19 nt, Homo sapiens
  misc_RNA (1)...(19): siRNA sense strand
cggagaagauaaagauauu

SEQ ID NO: 2138977 - RNA, 19 nt, Homo sapiens
  misc_RNA (1)...(19): siRNA sense strand
caaccuaagucucauuaca

SEQ ID NO: 2138978 - RNA, 19 nt, Homo sapiens
  misc_RNA (1)...(19): siRNA sense strand
cuacaaagaagucaugaaa

SEQ ID NO: 2138979 - RNA, 19 nt, Homo sapiens
  misc_RNA (1)...(19): siRNA sense strand
uugagaaucuugccaguuu

SEQ ID NO: 2138980 - RNA, 19 nt, Homo sapiens
  misc_RNA (1)...(19): siRNA sense strand
gaaaauaugagcuuaggua

SEQ ID NO: 2138981 - RNA, 19 nt, Homo sapiens
  misc_RNA (1)...(19): siRNA sense strand
gcagguugcuauuucugaa

SEQ ID NO: 2138982 - RNA, 19 nt, Homo sapiens
  misc_RNA (1)...(19): siRNA sense strand
caacuguucagacucaaua

SEQ ID NO: 2138983 - RNA, 19 nt, Homo sapiens
  misc_RNA (1)...(19): siRNA sense strand
guacagaaagcguccguuu

SEQ ID NO: 2138984 - RNA, 19 nt, Homo sapiens
  misc_RNA (1)...(19): siRNA sense strand
gaaauuaaggaucgagaau

SEQ ID NO: 2138985 - RNA, 19 nt, Homo sapiens
  misc_RNA (1)...(19): siRNA sense strand
gugcugagguucaauucaa

SEQ ID NO: 2138986 - RNA, 19 nt, Homo sapiens
  misc_RNA (1)...(19): siRNA sense strand
acaagaaccagaaguaauu

SEQ ID NO: 2138987 - RNA, 19 nt, Homo sapiens
  misc_RNA (1)...(19): siRNA sense strand
ccaguggccuugaaagaga

SEQ ID NO: 2138988 - RNA, 19 nt, Homo sapiens
  misc_RNA (1)...(19): siRNA sense strand
gaaggaagcggugaugaau

SEQ ID NO: 2138989 - RNA, 19 nt, Homo sapiens
  misc_RNA (1)...(19): siRNA sense strand
agaaaguacuagcuugaaa

SEQ ID NO: 2138990 - RNA, 19 nt, Homo sapiens
  misc_RNA (1)...(19): siRNA sense strand
ccaagaaucacuaacagaa

SEQ ID NO: 2138991 - RNA, 19 nt, Homo sapiens
  misc_RNA (1)...(19): siRNA sense strand
gaaccugccucugauaguc

SEQ ID NO: 2138992 - RNA, 19 nt, Homo sapiens
  misc_RNA (1)...(19): siRNA sense strand
gauuugcaguucaacauau

SEQ ID NO: 2138993 - RNA, 19 nt, Homo sapiens
  misc_RNA (1)...(19): siRNA sense strand
uaaaccagaugcaacuguu

SEQ ID NO: 2138994 - RNA, 19 nt, Homo sapiens
  misc_RNA (1)...(19): siRNA sense strand
cauucaagcuuuaggagaa

SEQ ID NO: 2138995 - RNA, 19 nt, Homo sapiens
  misc_RNA (1)...(19): siRNA sense strand
uaucacaaguuuccauuca

SEQ ID NO: 2138996 - RNA, 19 nt, Homo sapiens
  misc_RNA (1)...(19): siRNA sense strand
gaaaaucuccucagaacuu

SEQ ID NO: 2138997 - RNA, 19 nt, Homo sapiens
  misc_RNA (1)...(19): siRNA sense strand
uguguagacugacgauuaa

SEQ ID NO: 2138998 - RNA, 19 nt, Homo sapiens
  misc_RNA (1)...(19): siRNA sense strand
cuagagcgcuuucaaaauu

SEQ ID NO: 2138999 - RNA, 19 nt, Homo sapiens
  misc_RNA (1)...(19): siRNA sense strand
cugaagaagcccaugauua

SEQ ID NO: 2139000 - RNA, 19 nt, Homo sapiens
  misc_RNA (1)...(19): siRNA sense strand
gaaauacccgagcaaaaua

SEQ ID NO: 2139001 - RNA, 19 nt, Homo sapiens
  misc_RNA (1)...(19): siRNA sense strand
caaagaaagcaccggauug

SEQ ID NO: 2139002 - RNA, 19 nt, Homo sapiens
  misc_RNA (1)...(19): siRNA sense strand
gcaguggccaugagaaaga

SEQ ID NO: 2139003 - RNA, 19 nt, Homo sapiens
  misc_RNA (1)...(19): siRNA sense strand
agaaagcguccguuuaauu

SEQ ID NO: 2139004 - RNA, 19 nt, Homo sapiens
  misc_RNA (1)...(19): siRNA sense strand
ugagaaacuuggaagacaa

SEQ ID NO: 2139005 - RNA, 19 nt, Homo sapiens
  misc_RNA (1)...(19): siRNA sense strand
uaacagaaaguacuagcuu

SEQ ID NO: 2139006 - RNA, 19 nt, Homo sapiens
  misc_RNA (1)...(19): siRNA sense strand
gaaagaaauacccgagcaa

SEQ ID NO: 2139007 - RNA, 19 nt, Homo sapiens
  misc_RNA (1)...(19): siRNA sense strand
caagaaucacuaacagaaa

SEQ ID NO: 2139008 - RNA, 19 nt, Homo sapiens
  misc_RNA (1)...(19): siRNA sense strand
gauuaucagcuacaaagaa

SEQ ID NO: 2139009 - RNA, 19 nt, Homo sapiens
  misc_RNA (1)...(19): siRNA sense strand
ggaaacagucugcugaucu

SEQ ID NO: 2139010 - RNA, 19 nt, Homo sapiens
  misc_RNA (1)...(19): siRNA sense strand
agacaaagacauaccagaa

SEQ ID NO: 2139011 - RNA, 19 nt, Homo sapiens
  misc_RNA (1)...(19): siRNA sense strand
aaacggagaagauaaagau

SEQ ID NO: 2139012 - RNA, 19 nt, Homo sapiens
  misc_RNA (1)...(19): siRNA sense strand
aacauaagcugagaaacuu

SEQ ID NO: 2139013 - RNA, 19 nt, Homo sapiens
  misc_RNA (1)...(19): siRNA sense strand
gaagcacucagaagaugaa

SEQ ID NO: 2139014 - RNA, 19 nt, Homo sapiens
  misc_RNA (1)...(19): siRNA sense strand
gacaagaaccagaaguaau

SEQ ID NO: 2139015 - RNA, 19 nt, Homo sapiens
  misc_RNA (1)...(19): siRNA sense strand
cauaaaugguuugaugaug

SEQ ID NO: 2139016 - RNA, 19 nt, Homo sapiens
  misc_RNA (1)...(19): siRNA sense strand
gagaaacuuggaagacaaa

SEQ ID NO: 2139017 - RNA, 19 nt, Homo sapiens
  misc_RNA (1)...(19): siRNA sense strand
aaacauaagcugagaaacu

SEQ ID NO: 2139018 - RNA, 19 nt, Homo sapiens
  misc_RNA (1)...(19): siRNA sense strand
uccaaagacuucugaacaa

SEQ ID NO: 2139019 - RNA, 19 nt, Homo sapiens
  misc_RNA (1)...(19): siRNA sense strand
ccacaucuccaaagacuuc

SEQ ID NO: 2139020 - RNA, 19 nt, Homo sapiens
  misc_RNA (1)...(19): siRNA sense strand
caacauaucacaaguuucc

SEQ ID NO: 2139021 - RNA, 19 nt, Homo sapiens
  misc_RNA (1)...(19): siRNA sense strand
aaacuagagcgcuuucaaa

SEQ ID NO: 2139022 - RNA, 19 nt, Homo sapiens
  misc_RNA (1)...(19): siRNA sense strand
ugaaacauaagcugagaaa

SEQ ID NO: 2139023 - RNA, 19 nt, Homo sapiens
  misc_RNA (1)...(19): siRNA sense strand
uauagacaaugcugagaau

SEQ ID NO: 2139024 - RNA, 19 nt, Homo sapiens
  misc_RNA (1)...(19): siRNA sense strand
cuaagucucauuacagaaa

SEQ ID NO: 2139025 - RNA, 19 nt, Homo sapiens
  misc_RNA (1)...(19): siRNA sense strand
ggagaagacaaacagaugu

SEQ ID NO: 2139026 - RNA, 19 nt, Homo sapiens
  misc_RNA (1)...(19): siRNA sense strand
ucacaaguuuccauucaag

SEQ ID NO: 2139027 - RNA, 19 nt, Homo sapiens
  misc_RNA (1)...(19): siRNA sense strand
gaaacggagaagauaaaga

SEQ ID NO: 2139028 - RNA, 19 nt, Homo sapiens
  misc_RNA (1)...(19): siRNA sense strand
cgaaggaagcggugaugaa

SEQ ID NO: 2139029 - RNA, 19 nt, Homo sapiens
  misc_RNA (1)...(19): siRNA sense strand
cuaauaacucuccacuuaa

SEQ ID NO: 2139030 - RNA, 19 nt, Homo sapiens
  misc_RNA (1)...(19): siRNA sense strand
gcuucaagauccucacuca

SEQ ID NO: 2139031 - RNA, 19 nt, Homo sapiens
  misc_RNA (1)...(19): siRNA sense strand
gaagaagcccaugauuauc

SEQ ID NO: 2139032 - RNA, 19 nt, Homo sapiens
  misc_RNA (1)...(19): siRNA sense strand
guaagucugauaaagaaga

SEQ ID NO: 2139033 - RNA, 19 nt, Homo sapiens
  misc_RNA (1)...(19): siRNA sense strand
agaagaauccacuaacaug

SEQ ID NO: 2139034 - RNA, 19 nt, Homo sapiens
  misc_RNA (1)...(19): siRNA sense strand
caauucaacucagacuuca

SEQ ID NO: 2139035 - RNA, 19 nt, Homo sapiens
  misc_RNA (1)...(19): siRNA sense strand
guucagacucaauaaacua

SEQ ID NO: 2139036 - RNA, 19 nt, Homo sapiens
  misc_RNA (1)...(19): siRNA sense strand
gggauccccuuucucaaua

SEQ ID NO: 2139037 - RNA, 19 nt, Homo sapiens
  misc_RNA (1)...(19): siRNA sense strand
gaaacuuggaagacaaaga

SEQ ID NO: 2139038 - RNA, 19 nt, Homo sapiens
  misc_RNA (1)...(19): siRNA sense strand
gaaaguacuagcuugaaac

SEQ ID NO: 2139039 - RNA, 19 nt, Homo sapiens
  misc_RNA (1)...(19): siRNA sense strand
ucacuaacagaaaguacua

SEQ ID NO: 2139040 - RNA, 19 nt, Homo sapiens
  misc_RNA (1)...(19): siRNA sense strand
aagaaucacuaacagaaag

SEQ ID NO: 2139041 - RNA, 19 nt, Homo sapiens
  misc_RNA (1)...(19): siRNA sense strand
gaaaacagagcuucaagau

SEQ ID NO: 2139042 - RNA, 19 nt, Homo sapiens
  misc_RNA (1)...(19): siRNA sense strand
aaccagaaguaauuugaga

SEQ ID NO: 2139043 - RNA, 19 nt, Homo sapiens
  misc_RNA (1)...(19): siRNA sense strand
caagaaccagaaguaauuu

SEQ ID NO: 2139044 - RNA, 19 nt, Homo sapiens
  misc_RNA (1)...(19): siRNA sense strand
caaucugagccaccuguua

SEQ ID NO: 2139045 - RNA, 19 nt, Homo sapiens
  misc_RNA (1)...(19): siRNA sense strand
uaacucuccacuuaaauga

SEQ ID NO: 2139046 - RNA, 19 nt, Homo sapiens
  misc_RNA (1)...(19): siRNA sense strand
uacagaaagcguccguuua

SEQ ID NO: 2139047 - RNA, 19 nt, Homo sapiens
  misc_RNA (1)...(19): siRNA sense strand
cgaagaagccucguuaugc

SEQ ID NO: 2139048 - RNA, 19 nt, Homo sapiens
  misc_RNA (1)...(19): siRNA sense strand
gaaaggagcucaaugaauu

SEQ ID NO: 2139049 - RNA, 19 nt, Homo sapiens
  misc_RNA (1)...(19): siRNA sense strand
gaagaggacucccuagaaa

SEQ ID NO: 2139050 - RNA, 19 nt, Homo sapiens
  misc_RNA (1)...(19): siRNA sense strand
gcacugagauggaaguuca

SEQ ID NO: 2139051 - RNA, 19 nt, Homo sapiens
  misc_RNA (1)...(19): siRNA sense strand
gauggaaguucaugaauug

SEQ ID NO: 2139052 - RNA, 19 nt, Homo sapiens
  misc_RNA (1)...(19): siRNA sense strand
gcuccugccucccacauua

SEQ ID NO: 2139053 - RNA, 19 nt, Homo sapiens
  misc_RNA (1)...(19): siRNA sense strand
ugaauugaguagacacuua

SEQ ID NO: 2139054 - RNA, 19 nt, Homo sapiens
  misc_RNA (1)...(19): siRNA sense strand
ggaaauggaggaagaagaa

SEQ ID NO: 2139055 - RNA, 19 nt, Homo sapiens
  misc_RNA (1)...(19): siRNA sense strand
caaagaaagucaugaucug

SEQ ID NO: 2139056 - RNA, 19 nt, Homo sapiens
  misc_RNA (1)...(19): siRNA sense strand
ggagcucaaugaauucaaa

SEQ ID NO: 2139057 - RNA, 19 nt, Homo sapiens
  misc_RNA (1)...(19): siRNA sense strand
gacgacagcucauuauaca

SEQ ID NO: 2139058 - RNA, 19 nt, Homo sapiens
  misc_RNA (1)...(19): siRNA sense strand
gcagagaagagcugauaaa

SEQ ID NO: 2139059 - RNA, 19 nt, Homo sapiens
  misc_RNA (1)...(19): siRNA sense strand
cagcagcccuggaaaggaa

SEQ ID NO: 2139060 - RNA, 19 nt, Homo sapiens
  misc_RNA (1)...(19): siRNA sense strand
gaauugaguagacacuuaa

SEQ ID NO: 2139061 - RNA, 19 nt, Homo sapiens
  misc_RNA (1)...(19): siRNA sense strand
gaaguaaguuugccaaccu

SEQ ID NO: 2139062 - RNA, 19 nt, Homo sapiens
  misc_RNA (1)...(19): siRNA sense strand
ggaacucucuauauccaau

SEQ ID NO: 2139063 - RNA, 19 nt, Homo sapiens
  misc_RNA (1)...(19): siRNA sense strand
uaagacaagugccaacugu

SEQ ID NO: 2139064 - RNA, 19 nt, Homo sapiens
  misc_RNA (1)...(19): siRNA sense strand
ccucaccgcugcagacaaa

SEQ ID NO: 2139065 - RNA, 19 nt, Homo sapiens
  misc_RNA (1)...(19): siRNA sense strand
gagcugaggcaacagauug

SEQ ID NO: 2139066 - RNA, 19 nt, Homo sapiens
  misc_RNA (1)...(19): siRNA sense strand
ggaaguucaugaauugagu

SEQ ID NO: 2139067 - RNA, 19 nt, Homo sapiens
  misc_RNA (1)...(19): siRNA sense strand
gagaagagagagaucaaga

SEQ ID NO: 2139068 - RNA, 19 nt, Homo sapiens
  misc_RNA (1)...(19): siRNA sense strand
gauagacgagcucaacaaa

SEQ ID NO: 2139069 - RNA, 19 nt, Homo sapiens
  misc_RNA (1)...(19): siRNA sense strand
agaaagucaugaucuguau

SEQ ID NO: 2139070 - RNA, 19 nt, Homo sapiens
  misc_RNA (1)...(19): siRNA sense strand
gaacagaggaacauuuuga

SEQ ID NO: 2139071 - RNA, 19 nt, Homo sapiens
  misc_RNA (1)...(19): siRNA sense strand
agauggaaguucaugaauu

SEQ ID NO: 2139072 - RNA, 19 nt, Homo sapiens
  misc_RNA (1)...(19): siRNA sense strand
gaggccaacugcagaggaa

SEQ ID NO: 2139073 - RNA, 19 nt, Homo sapiens
  misc_RNA (1)...(19): siRNA sense strand
ggaaugaacaagaggaaca

SEQ ID NO: 2139074 - RNA, 19 nt, Homo sapiens
  misc_RNA (1)...(19): siRNA sense strand
uaugggccuuccagaaaua

SEQ ID NO: 2139075 - RNA, 19 nt, Homo sapiens
  misc_RNA (1)...(19): siRNA sense strand
ggaaagaaagauccucauc

SEQ ID NO: 2139076 - RNA, 19 nt, Homo sapiens
  misc_RNA (1)...(19): siRNA sense strand
caagagaagaggaggaaga

SEQ ID NO: 2139077 - RNA, 19 nt, Homo sapiens
  misc_RNA (1)...(19): siRNA sense strand
guagacacuuaacaagguu

SEQ ID NO: 2139078 - RNA, 19 nt, Homo sapiens
  misc_RNA (1)...(19): siRNA sense strand
agacgacgacagcucauua

SEQ ID NO: 2139079 - RNA, 19 nt, Homo sapiens
  misc_RNA (1)...(19): siRNA sense strand
gaagaaaagcgaaaaguuc

SEQ ID NO: 2139080 - RNA, 19 nt, Homo sapiens
  misc_RNA (1)...(19): siRNA sense strand
aaaugugccucaugaguca

SEQ ID NO: 2139081 - RNA, 19 nt, Homo sapiens
  misc_RNA (1)...(19): siRNA sense strand
ugaagaggacucccuagaa

SEQ ID NO: 2139082 - RNA, 19 nt, Homo sapiens
  misc_RNA (1)...(19): siRNA sense strand
gaaguucaugaauugagua

SEQ ID NO: 2139083 - RNA, 19 nt, Homo sapiens
  misc_RNA (1)...(19): siRNA sense strand
cgaaaggagcucaaugaau

SEQ ID NO: 2139084 - RNA, 19 nt, Homo sapiens
  misc_RNA (1)...(19): siRNA sense strand
ccuaugggccuuccagaaa

SEQ ID NO: 2139085 - RNA, 19 nt, Homo sapiens
  misc_RNA (1)...(19): siRNA sense strand
caaaagcacugagauggaa

SEQ ID NO: 2139086 - RNA, 19 nt, Homo sapiens
  misc_RNA (1)...(19): siRNA sense strand
agaggaggcuaacccgaaa

SEQ ID NO: 2139087 - RNA, 19 nt, Homo sapiens
  misc_RNA (1)...(19): siRNA sense strand
gaacuggaacagaggaaca

SEQ ID NO: 2139088 - RNA, 19 nt, Homo sapiens
  misc_RNA (1)...(19): siRNA sense strand
gaaauggaggaagaagaaa

SEQ ID NO: 2139089 - RNA, 19 nt, Homo sapiens
  misc_RNA (1)...(19): siRNA sense strand
gagaucaagaggaggcuaa

SEQ ID NO: 2139090 - RNA, 19 nt, Homo sapiens
  misc_RNA (1)...(19): siRNA sense strand
ccaugaaggucugcaggaa

SEQ ID NO: 2139091 - RNA, 19 nt, Homo sapiens
  misc_RNA (1)...(19): siRNA sense strand
ccaaagaaagucaugaucu

SEQ ID NO: 2139092 - RNA, 19 nt, Homo sapiens
  misc_RNA (1)...(19): siRNA sense strand
cacagacucuuggauguug

SEQ ID NO: 2139093 - RNA, 19 nt, Homo sapiens
  misc_RNA (1)...(19): siRNA sense strand
gagcuucgggaaagaaaga

SEQ ID NO: 2139094 - RNA, 19 nt, Homo sapiens
  misc_RNA (1)...(19): siRNA sense strand
guucaugaauugaguagac

SEQ ID NO: 2139095 - RNA, 19 nt, Homo sapiens
  misc_RNA (1)...(19): siRNA sense strand
aagcagagaagagcugaua

SEQ ID NO: 2139096 - RNA, 19 nt, Homo sapiens
  misc_RNA (1)...(19): siRNA sense strand
agacucuucuugccuguau

SEQ ID NO: 2139097 - RNA, 19 nt, Homo sapiens
  misc_RNA (1)...(19): siRNA sense strand
aagaaagucaugaucugua

SEQ ID NO: 2139098 - RNA, 19 nt, Homo sapiens
  misc_RNA (1)...(19): siRNA sense strand
caccaaagcaggaccuaug

SEQ ID NO: 2139099 - RNA, 19 nt, Homo sapiens
  misc_RNA (1)...(19): siRNA sense strand
gagauggaaguucaugaau

SEQ ID NO: 2139100 - RNA, 19 nt, Homo sapiens
  misc_RNA (1)...(19): siRNA sense strand
ugagauggaaguucaugaa

SEQ ID NO: 2139101 - RNA, 19 nt, Homo sapiens
  misc_RNA (1)...(19): siRNA sense strand
gcagaggaacuggaacaga

SEQ ID NO: 2139102 - RNA, 19 nt, Homo sapiens
  misc_RNA (1)...(19): siRNA sense strand
aagaaaaugugccucauga

SEQ ID NO: 2139103 - RNA, 19 nt, Homo sapiens
  misc_RNA (1)...(19): siRNA sense strand
cuaugggccuuccagaaau

SEQ ID NO: 2139104 - RNA, 19 nt, Homo sapiens
  misc_RNA (1)...(19): siRNA sense strand
ggaagaggaggaggacgaa

SEQ ID NO: 2139105 - RNA, 19 nt, Homo sapiens
  misc_RNA (1)...(19): siRNA sense strand
cugaaggaaaucuaugaua

SEQ ID NO: 2139106 - RNA, 19 nt, Homo sapiens
  misc_RNA (1)...(19): siRNA sense strand
acaaagcugccauccgaaa

SEQ ID NO: 2139107 - RNA, 19 nt, Homo sapiens
  misc_RNA (1)...(19): siRNA sense strand
uuugaaaccucggaaugaa

SEQ ID NO: 2139108 - RNA, 19 nt, Homo sapiens
  misc_RNA (1)...(19): siRNA sense strand
cgacgacagcucauuauac

SEQ ID NO: 2139109 - RNA, 19 nt, Homo sapiens
  misc_RNA (1)...(19): siRNA sense strand
gaaagucaugaucuguaug

SEQ ID NO: 2139110 - RNA, 19 nt, Homo sapiens
  misc_RNA (1)...(19): siRNA sense strand
aguagacacuuaacaaggu

SEQ ID NO: 2139111 - RNA, 19 nt, Homo sapiens
  misc_RNA (1)...(19): siRNA sense strand
uccgcuaccuccaaagaaa

SEQ ID NO: 2139112 - RNA, 19 nt, Homo sapiens
  misc_RNA (1)...(19): siRNA sense strand
cccgaaagcucagucaaag

SEQ ID NO: 2139113 - RNA, 19 nt, Homo sapiens
  misc_RNA (1)...(19): siRNA sense strand
gauguagagucugcucaca

SEQ ID NO: 2139114 - RNA, 19 nt, Homo sapiens
  misc_RNA (1)...(19): siRNA sense strand
ggacuccuuagccaucaaa

SEQ ID NO: 2139115 - RNA, 19 nt, Homo sapiens
  misc_RNA (1)...(19): siRNA sense strand
gaaaaugugccucaugagu

SEQ ID NO: 2139116 - RNA, 19 nt, Homo sapiens
  misc_RNA (1)...(19): siRNA sense strand
ccuuggaaauggaggaaga

SEQ ID NO: 2139117 - RNA, 19 nt, Homo sapiens
  misc_RNA (1)...(19): siRNA sense strand
gaaaagcgaaaaguucaaa

SEQ ID NO: 2139118 - RNA, 19 nt, Homo sapiens
  misc_RNA (1)...(19): siRNA sense strand
ccacccauccgcaggagaa

SEQ ID NO: 2139119 - RNA, 19 nt, Homo sapiens
  misc_RNA (1)...(19): siRNA sense strand
ggagcugaggcaacagauu

SEQ ID NO: 2139120 - RNA, 19 nt, Homo sapiens
  misc_RNA (1)...(19): siRNA sense strand
caagcgagagcuggaagaa

SEQ ID NO: 2139121 - RNA, 19 nt, Homo sapiens
  misc_RNA (1)...(19): siRNA sense strand
ccgaaaggagcucaaugaa

SEQ ID NO: 2139122 - RNA, 19 nt, Homo sapiens
  misc_RNA (1)...(19): siRNA sense strand
gaggagaagagagagauca

SEQ ID NO: 2139123 - RNA, 19 nt, Homo sapiens
  misc_RNA (1)...(19): siRNA sense strand
ucacagacucuuggauguu

SEQ ID NO: 2139124 - RNA, 19 nt, Homo sapiens
  misc_RNA (1)...(19): siRNA sense strand
ggaacaggaggagaagaga

SEQ ID NO: 2139125 - RNA, 19 nt, Homo sapiens
  misc_RNA (1)...(19): siRNA sense strand
aagaggaacaggaggagaa

SEQ ID NO: 2139126 - RNA, 19 nt, Homo sapiens
  misc_RNA (1)...(19): siRNA sense strand
cuacacagcccagaagagu

SEQ ID NO: 2139127 - RNA, 19 nt, Homo sapiens
  misc_RNA (1)...(19): siRNA sense strand
aaauaucuaugaggcaaag

SEQ ID NO: 2139128 - RNA, 19 nt, Homo sapiens
  misc_RNA (1)...(19): siRNA sense strand
uccgaaaggagcucaauga

SEQ ID NO: 2139129 - RNA, 19 nt, Homo sapiens
  misc_RNA (1)...(19): siRNA sense strand
ugaaaccucggaaugaaca

SEQ ID NO: 2139130 - RNA, 19 nt, Homo sapiens
  misc_RNA (1)...(19): siRNA sense strand
gacgacgacagcucauuau

SEQ ID NO: 2139131 - RNA, 19 nt, Homo sapiens
  misc_RNA (1)...(19): siRNA sense strand
gugauugaaugugaugaca

SEQ ID NO: 2139132 - RNA, 19 nt, Homo sapiens
  misc_RNA (1)...(19): siRNA sense strand
ccugugaaauugccuuguc

SEQ ID NO: 2139133 - RNA, 19 nt, Homo sapiens
  misc_RNA (1)...(19): siRNA sense strand
gaacucucuauauccaaug

SEQ ID NO: 2139134 - RNA, 19 nt, Homo sapiens
  misc_RNA (1)...(19): siRNA sense strand
cccucgggcugcagaauga

SEQ ID NO: 2139135 - RNA, 19 nt, Homo sapiens
  misc_RNA (1)...(19): siRNA sense strand
aaauggagccagucccaau

SEQ ID NO: 2139136 - RNA, 19 nt, Homo sapiens
  misc_RNA (1)...(19): siRNA sense strand
ggcuggagcugaggcaaca

SEQ ID NO: 2139137 - RNA, 19 nt, Homo sapiens
  misc_RNA (1)...(19): siRNA sense strand
gccaaccugggaaggauuu

SEQ ID NO: 2139138 - RNA, 19 nt, Homo sapiens
  misc_RNA (1)...(19): siRNA sense strand
ugauagacgagcucaacaa

SEQ ID NO: 2139139 - RNA, 19 nt, Homo sapiens
  misc_RNA (1)...(19): siRNA sense strand
aaagaaagucaugaucugu

SEQ ID NO: 2139140 - RNA, 19 nt, Homo sapiens
  misc_RNA (1)...(19): siRNA sense strand
gcuccaaccgucagacauc

SEQ ID NO: 2139141 - RNA, 19 nt, Homo sapiens
  misc_RNA (1)...(19): siRNA sense strand
cagagaagagcugauaaag

SEQ ID NO: 2139142 - RNA, 19 nt, Homo sapiens
  misc_RNA (1)...(19): siRNA sense strand
ggguugcacucgggugaug

SEQ ID NO: 2139143 - RNA, 19 nt, Homo sapiens
  misc_RNA (1)...(19): siRNA sense strand
ugccuugucugccagugaa

SEQ ID NO: 2139144 - RNA, 19 nt, Homo sapiens
  misc_RNA (1)...(19): siRNA sense strand
ugccugcccuguccgaaau

SEQ ID NO: 2139145 - RNA, 19 nt, Homo sapiens
  misc_RNA (1)...(19): siRNA sense strand
agcgagagcuggaagaaaa

SEQ ID NO: 2139146 - RNA, 19 nt, Homo sapiens
  misc_RNA (1)...(19): siRNA sense strand
aagaggaggaggacgaaga

SEQ ID NO: 2139147 - RNA, 19 nt, Homo sapiens
  misc_RNA (1)...(19): siRNA sense strand
cccauccgcaggagaagua

SEQ ID NO: 2139148 - RNA, 19 nt, Homo sapiens
  misc_RNA (1)...(19): siRNA sense strand
gaauauacaucuuccacua

SEQ ID NO: 2139149 - RNA, 19 nt, Homo sapiens
  misc_RNA (1)...(19): siRNA sense strand
ccucaaagcccaaguauua

SEQ ID NO: 2139150 - RNA, 19 nt, Homo sapiens
  misc_RNA (1)...(19): siRNA sense strand
gcaaugggauaucuuacaa

SEQ ID NO: 2139151 - RNA, 19 nt, Homo sapiens
  misc_RNA (1)...(19): siRNA sense strand
gaauaacgcagcuggcuuu

SEQ ID NO: 2139152 - RNA, 19 nt, Homo sapiens
  misc_RNA (1)...(19): siRNA sense strand
ggaagcauauacacaugaa

SEQ ID NO: 2139153 - RNA, 19 nt, Homo sapiens
  misc_RNA (1)...(19): siRNA sense strand
gaacaacaucgacuugcua

SEQ ID NO: 2139154 - RNA, 19 nt, Homo sapiens
  misc_RNA (1)...(19): siRNA sense strand
gcuaguguauccaauauuc

SEQ ID NO: 2139155 - RNA, 19 nt, Homo sapiens
  misc_RNA (1)...(19): siRNA sense strand
guaacaauuucaaggacua

SEQ ID NO: 2139156 - RNA, 19 nt, Homo sapiens
  misc_RNA (1)...(19): siRNA sense strand
cuacuuauauguugucaug

SEQ ID NO: 2139157 - RNA, 19 nt, Homo sapiens
  misc_RNA (1)...(19): siRNA sense strand
ccagguucaugauggauua

SEQ ID NO: 2139158 - RNA, 19 nt, Homo sapiens
  misc_RNA (1)...(19): siRNA sense strand
gaucugcuuucgaaccuaa

SEQ ID NO: 2139159 - RNA, 19 nt, Homo sapiens
  misc_RNA (1)...(19): siRNA sense strand
ucgaagagcugaagaccuu

SEQ ID NO: 2139160 - RNA, 19 nt, Homo sapiens
  misc_RNA (1)...(19): siRNA sense strand
cuacagacauuacuuccuu

SEQ ID NO: 2139161 - RNA, 19 nt, Homo sapiens
  misc_RNA (1)...(19): siRNA sense strand
gcucgacucugcuacuuau

SEQ ID NO: 2139162 - RNA, 19 nt, Homo sapiens
  misc_RNA (1)...(19): siRNA sense strand
ugucauagcugguccuugu

SEQ ID NO: 2139163 - RNA, 19 nt, Homo sapiens
  misc_RNA (1)...(19): siRNA sense strand
gacauuacuuccuuucuuc

SEQ ID NO: 2139164 - RNA, 19 nt, Homo sapiens
  misc_RNA (1)...(19): siRNA sense strand
gaaccgaccaucagcuuau

SEQ ID NO: 2139165 - RNA, 19 nt, Homo sapiens
  misc_RNA (1)...(19): siRNA sense strand
ggaauucucacuacggauu

SEQ ID NO: 2139166 - RNA, 19 nt, Homo sapiens
  misc_RNA (1)...(19): siRNA sense strand
gaaccuaaacaucuggaaa

SEQ ID NO: 2139167 - RNA, 19 nt, Homo sapiens
  misc_RNA (1)...(19): siRNA sense strand
caacaucgacuugcuauca

SEQ ID NO: 2139168 - RNA, 19 nt, Homo sapiens
  misc_RNA (1)...(19): siRNA sense strand
cuaaacaucuggaaaauug

SEQ ID NO: 2139169 - RNA, 19 nt, Homo sapiens
  misc_RNA (1)...(19): siRNA sense strand
guugggaucugcuuucgaa

SEQ ID NO: 2139170 - RNA, 19 nt, Homo sapiens
  misc_RNA (1)...(19): siRNA sense strand
guagcaaugggauaucuua

SEQ ID NO: 2139171 - RNA, 19 nt, Homo sapiens
  misc_RNA (1)...(19): siRNA sense strand
ucaccugccuuguggauga

SEQ ID NO: 2139172 - RNA, 19 nt, Homo sapiens
  misc_RNA (1)...(19): siRNA sense strand
uaaagugugugugcuauca

SEQ ID NO: 2139173 - RNA, 19 nt, Homo sapiens
  misc_RNA (1)...(19): siRNA sense strand
ucauaagucuccugauaau

SEQ ID NO: 2139174 - RNA, 19 nt, Homo sapiens
  misc_RNA (1)...(19): siRNA sense strand
acgaagaccuuuccuguca

SEQ ID NO: 2139175 - RNA, 19 nt, Homo sapiens
  misc_RNA (1)...(19): siRNA sense strand
gaacaacuacagacauuac

SEQ ID NO: 2139176 - RNA, 19 nt, Homo sapiens
  misc_RNA (1)...(19): siRNA sense strand
ugacugguuuguccauaaa

SEQ ID NO: 2139177 - RNA, 19 nt, Homo sapiens
  misc_RNA (1)...(19): siRNA sense strand
ggauaagaaugggaauuuc

SEQ ID NO: 2139178 - RNA, 19 nt, Homo sapiens
  misc_RNA (1)...(19): siRNA sense strand
gcagccaccucccgaagau

SEQ ID NO: 2139179 - RNA, 19 nt, Homo sapiens
  misc_RNA (1)...(19): siRNA sense strand
agacauuacuuccuuucuu

SEQ ID NO: 2139180 - RNA, 19 nt, Homo sapiens
  misc_RNA (1)...(19): siRNA sense strand
uggaauucuugucacauua

SEQ ID NO: 2139181 - RNA, 19 nt, Homo sapiens
  misc_RNA (1)...(19): siRNA sense strand
ugaaguugcuggaggugaa

SEQ ID NO: 2139182 - RNA, 19 nt, Homo sapiens
  misc_RNA (1)...(19): siRNA sense strand
cuacauagccuucauugag

SEQ ID NO: 2139183 - RNA, 19 nt, Homo sapiens
  misc_RNA (1)...(19): siRNA sense strand
ggaacaacuacagacauua

SEQ ID NO: 2139184 - RNA, 19 nt, Homo sapiens
  misc_RNA (1)...(19): siRNA sense strand
gcauggacauuagcugaug

SEQ ID NO: 2139185 - RNA, 19 nt, Homo sapiens
  misc_RNA (1)...(19): siRNA sense strand
cuucuuaacuggaauucuu

SEQ ID NO: 2139186 - RNA, 19 nt, Homo sapiens
  misc_RNA (1)...(19): siRNA sense strand
gcaaucauggucacugcua

SEQ ID NO: 2139187 - RNA, 19 nt, Homo sapiens
  misc_RNA (1)...(19): siRNA sense strand
ugucuacccuggauacuau

SEQ ID NO: 2139188 - RNA, 19 nt, Homo sapiens
  misc_RNA (1)...(19): siRNA sense strand
gaugacugguuuguccaua

SEQ ID NO: 2139189 - RNA, 19 nt, Homo sapiens
  misc_RNA (1)...(19): siRNA sense strand
gaucacaaccuuggcauuc

SEQ ID NO: 2139190 - RNA, 19 nt, Homo sapiens
  misc_RNA (1)...(19): siRNA sense strand
gcuaaagugugugugcuau

SEQ ID NO: 2139191 - RNA, 19 nt, Homo sapiens
  misc_RNA (1)...(19): siRNA sense strand
cgacucugcuacuuauaug

SEQ ID NO: 2139192 - RNA, 19 nt, Homo sapiens
  misc_RNA (1)...(19): siRNA sense strand
aggaacaacuacagacauu

SEQ ID NO: 2139193 - RNA, 19 nt, Homo sapiens
  misc_RNA (1)...(19): siRNA sense strand
uagcugaugcagugaauaa

SEQ ID NO: 2139194 - RNA, 19 nt, Homo sapiens
  misc_RNA (1)...(19): siRNA sense strand
caugauggauuaggucgaa

SEQ ID NO: 2139195 - RNA, 19 nt, Homo sapiens
  misc_RNA (1)...(19): siRNA sense strand
gcagcuggcuuuggguuca

SEQ ID NO: 2139196 - RNA, 19 nt, Homo sapiens
  misc_RNA (1)...(19): siRNA sense strand
caauuucaaggacuacaua

SEQ ID NO: 2139197 - RNA, 19 nt, Homo sapiens
  misc_RNA (1)...(19): siRNA sense strand
ccacaaguuucaaaaugua

SEQ ID NO: 2139198 - RNA, 19 nt, Homo sapiens
  misc_RNA (1)...(19): siRNA sense strand
ggacuacauagccuucauu

SEQ ID NO: 2139199 - RNA, 19 nt, Homo sapiens
  misc_RNA (1)...(19): siRNA sense strand
gcagaggaggguaaaggaa

SEQ ID NO: 2139200 - RNA, 19 nt, Homo sapiens
  misc_RNA (1)...(19): siRNA sense strand
gguagcacccuuugugaug

SEQ ID NO: 2139201 - RNA, 19 nt, Homo sapiens
  misc_RNA (1)...(19): siRNA sense strand
caacuacagacauuacuuc

SEQ ID NO: 2139202 - RNA, 19 nt, Homo sapiens
  misc_RNA (1)...(19): siRNA sense strand
aaacuggaauauucagaca

SEQ ID NO: 2139203 - RNA, 19 nt, Homo sapiens
  misc_RNA (1)...(19): siRNA sense strand
ccacaucagccgaauauac

SEQ ID NO: 2139204 - RNA, 19 nt, Homo sapiens
  misc_RNA (1)...(19): siRNA sense strand
gcauauacacaugaaguug

SEQ ID NO: 2139205 - RNA, 19 nt, Homo sapiens
  misc_RNA (1)...(19): siRNA sense strand
cuacuuacguccugguaca

SEQ ID NO: 2139206 - RNA, 19 nt, Homo sapiens
  misc_RNA (1)...(19): siRNA sense strand
gcaguugaaccgaccauca

SEQ ID NO: 2139207 - RNA, 19 nt, Homo sapiens
  misc_RNA (1)...(19): siRNA sense strand
gaauucucacuacggauuu

SEQ ID NO: 2139208 - RNA, 19 nt, Homo sapiens
  misc_RNA (1)...(19): siRNA sense strand
ccagcuuguugcucuguuu

SEQ ID NO: 2139209 - RNA, 19 nt, Homo sapiens
  misc_RNA (1)...(19): siRNA sense strand
guacaaccagcucugaugu

SEQ ID NO: 2139210 - RNA, 19 nt, Homo sapiens
  misc_RNA (1)...(19): siRNA sense strand
cuggaauucuugucacauu

SEQ ID NO: 2139211 - RNA, 19 nt, Homo sapiens
  misc_RNA (1)...(19): siRNA sense strand
ucagcggaguggauaagaa

SEQ ID NO: 2139212 - RNA, 19 nt, Homo sapiens
  misc_RNA (1)...(19): siRNA sense strand
gcaugcgguugccaccauu

SEQ ID NO: 2139213 - RNA, 19 nt, Homo sapiens
  misc_RNA (1)...(19): siRNA sense strand
ucucaaggcuguguaugau

SEQ ID NO: 2139214 - RNA, 19 nt, Homo sapiens
  misc_RNA (1)...(19): siRNA sense strand
cuagagcggucaggaacaa

SEQ ID NO: 2139215 - RNA, 19 nt, Homo sapiens
  misc_RNA (1)...(19): siRNA sense strand
ggaauucuugucacauuag

SEQ ID NO: 2139216 - RNA, 19 nt, Homo sapiens
  misc_RNA (1)...(19): siRNA sense strand
uuacuuugcauggacauua

SEQ ID NO: 2139217 - RNA, 19 nt, Homo sapiens
  misc_RNA (1)...(19): siRNA sense strand
ugaagaccuuucugcugaa

SEQ ID NO: 2139218 - RNA, 19 nt, Homo sapiens
  misc_RNA (1)...(19): siRNA sense strand
uuaaugugcuaugcaauca

SEQ ID NO: 2139219 - RNA, 19 nt, Homo sapiens
  misc_RNA (1)...(19): siRNA sense strand
guagcacccuuugugaugu

SEQ ID NO: 2139220 - RNA, 19 nt, Homo sapiens
  misc_RNA (1)...(19): siRNA sense strand
gaauuucuguugggaucug

SEQ ID NO: 2139221 - RNA, 19 nt, Homo sapiens
  misc_RNA (1)...(19): siRNA sense strand
uggauaagaaugggaauuu

SEQ ID NO: 2139222 - RNA, 19 nt, Homo sapiens
  misc_RNA (1)...(19): siRNA sense strand
ccuuguggaugacugguuu

SEQ ID NO: 2139223 - RNA, 19 nt, Homo sapiens
  misc_RNA (1)...(19): siRNA sense strand
gauugucacucagaagauc

SEQ ID NO: 2139224 - RNA, 19 nt, Homo sapiens
  misc_RNA (1)...(19): siRNA sense strand
auauacaucuuccacuaug

SEQ ID NO: 2139225 - RNA, 19 nt, Homo sapiens
  misc_RNA (1)...(19): siRNA sense strand
guuugcgccucgagaguuu

SEQ ID NO: 2139226 - RNA, 19 nt, Homo sapiens
  misc_RNA (1)...(19): siRNA sense strand
guuugcgccucgagaguuu

SEQ ID NO: 2139227 - RNA, 19 nt, Homo sapiens
  misc_RNA (1)...(19): siRNA sense strand
gggaagcauauacacauga

SEQ ID NO: 2139228 - RNA, 19 nt, Homo sapiens
  misc_RNA (1)...(19): siRNA sense strand
agaccuuucugcugaacaa

SEQ ID NO: 2139229 - RNA, 19 nt, Homo sapiens
  misc_RNA (1)...(19): siRNA sense strand
guguuaaugugcuaugcaa

SEQ ID NO: 2139230 - RNA, 19 nt, Homo sapiens
  misc_RNA (1)...(19): siRNA sense strand
uaaaggaaguagggagucu

SEQ ID NO: 2139231 - RNA, 19 nt, Homo sapiens
  misc_RNA (1)...(19): siRNA sense strand
gaagagcugaagaccuuuc

SEQ ID NO: 2139232 - RNA, 19 nt, Homo sapiens
  misc_RNA (1)...(19): siRNA sense strand
ggaacccucuacggcuuga

SEQ ID NO: 2139233 - RNA, 19 nt, Homo sapiens
  misc_RNA (1)...(19): siRNA sense strand
gaccaucagcuuauacaag

SEQ ID NO: 2139234 - RNA, 19 nt, Homo sapiens
  misc_RNA (1)...(19): siRNA sense strand
ggucaggaacaacuacaga

SEQ ID NO: 2139235 - RNA, 19 nt, Homo sapiens
  misc_RNA (1)...(19): siRNA sense strand
ccacggugcuaaccuucau

SEQ ID NO: 2139236 - RNA, 19 nt, Homo sapiens
  misc_RNA (1)...(19): siRNA sense strand
gguacaaccagcucugaug

SEQ ID NO: 2139237 - RNA, 19 nt, Homo sapiens
  misc_RNA (1)...(19): siRNA sense strand
cugcuaguguauccaauau

SEQ ID NO: 2139238 - RNA, 19 nt, Homo sapiens
  misc_RNA (1)...(19): siRNA sense strand
cauaagucuccugauaaua

SEQ ID NO: 2139239 - RNA, 19 nt, Homo sapiens
  misc_RNA (1)...(19): siRNA sense strand
gagacugccacaaguuuca

SEQ ID NO: 2139240 - RNA, 19 nt, Homo sapiens
  misc_RNA (1)...(19): siRNA sense strand
ccaggugaauuuuguggua

SEQ ID NO: 2139241 - RNA, 19 nt, Homo sapiens
  misc_RNA (1)...(19): siRNA sense strand
cucagaagaucacaaccuu

SEQ ID NO: 2139242 - RNA, 19 nt, Homo sapiens
  misc_RNA (1)...(19): siRNA sense strand
guuugcugcuuucugguuu

SEQ ID NO: 2139243 - RNA, 19 nt, Homo sapiens
  misc_RNA (1)...(19): siRNA sense strand
cuuacaauaugccacauca

SEQ ID NO: 2139244 - RNA, 19 nt, Homo sapiens
  misc_RNA (1)...(19): siRNA sense strand
aaugugcuaugcaaucaug

SEQ ID NO: 2139245 - RNA, 19 nt, Homo sapiens
  misc_RNA (1)...(19): siRNA sense strand
accaucagcuuauacaagu

SEQ ID NO: 2139246 - RNA, 19 nt, Homo sapiens
  misc_RNA (1)...(19): siRNA sense strand
gcugaacaacaucgacuug

SEQ ID NO: 2139247 - RNA, 19 nt, Homo sapiens
  misc_RNA (1)...(19): siRNA sense strand
cacaucagccgaauauaca

SEQ ID NO: 2139248 - RNA, 19 nt, Homo sapiens
  misc_RNA (1)...(19): siRNA sense strand
caagucagcucagaugauu

SEQ ID NO: 2139249 - RNA, 19 nt, Homo sapiens
  misc_RNA (1)...(19): siRNA sense strand
gaagagcucuagccaacug

SEQ ID NO: 2139250 - RNA, 19 nt, Homo sapiens
  misc_RNA (1)...(19): siRNA sense strand
gaagaagaaaguaaaguug

SEQ ID NO: 2139251 - RNA, 19 nt, Homo sapiens
  misc_RNA (1)...(19): siRNA sense strand
ggauauaccuccucuuugc

SEQ ID NO: 2139252 - RNA, 19 nt, Homo sapiens
  misc_RNA (1)...(19): siRNA sense strand
gaaaguaaaguuggaaguu

SEQ ID NO: 2139253 - RNA, 19 nt, Homo sapiens
  misc_RNA (1)...(19): siRNA sense strand
ggauguggauacaauuuau

SEQ ID NO: 2139254 - RNA, 19 nt, Homo sapiens
  misc_RNA (1)...(19): siRNA sense strand
gagaaagcauaaaggaugu

SEQ ID NO: 2139255 - RNA, 19 nt, Homo sapiens
  misc_RNA (1)...(19): siRNA sense strand
cacaggaaauccagaauug

SEQ ID NO: 2139256 - RNA, 19 nt, Homo sapiens
  misc_RNA (1)...(19): siRNA sense strand
gaaagcauaaaggauguua

SEQ ID NO: 2139257 - RNA, 19 nt, Homo sapiens
  misc_RNA (1)...(19): siRNA sense strand
gcaguucuccuucuuccua

SEQ ID NO: 2139258 - RNA, 19 nt, Homo sapiens
  misc_RNA (1)...(19): siRNA sense strand
gaagcaggcucagcugugu

SEQ ID NO: 2139259 - RNA, 19 nt, Homo sapiens
  misc_RNA (1)...(19): siRNA sense strand
ggagauucauggcgucguu

SEQ ID NO: 2139260 - RNA, 19 nt, Homo sapiens
  misc_RNA (1)...(19): siRNA sense strand
ccaccaagcucgaguuaac

SEQ ID NO: 2139261 - RNA, 19 nt, Homo sapiens
  misc_RNA (1)...(19): siRNA sense strand
gcaguguggucccugaaga

SEQ ID NO: 2139262 - RNA, 19 nt, Homo sapiens
  misc_RNA (1)...(19): siRNA sense strand
aaaguauacuagcuggaua

SEQ ID NO: 2139263 - RNA, 19 nt, Homo sapiens
  misc_RNA (1)...(19): siRNA sense strand
acugagaagugcagcauuu

SEQ ID NO: 2139264 - RNA, 19 nt, Homo sapiens
  misc_RNA (1)...(19): siRNA sense strand
gggauguggauacaauuua

SEQ ID NO: 2139265 - RNA, 19 nt, Homo sapiens
  misc_RNA (1)...(19): siRNA sense strand
gcaccugccugaggaagau

SEQ ID NO: 2139266 - RNA, 19 nt, Homo sapiens
  misc_RNA (1)...(19): siRNA sense strand
gauauuuccuggccucucu

SEQ ID NO: 2139267 - RNA, 19 nt, Homo sapiens
  misc_RNA (1)...(19): siRNA sense strand
gaagaaaguaaaguuggaa

SEQ ID NO: 2139268 - RNA, 19 nt, Homo sapiens
  misc_RNA (1)...(19): siRNA sense strand
agaagaaaguaaaguugga

SEQ ID NO: 2139269 - RNA, 19 nt, Homo sapiens
  misc_RNA (1)...(19): siRNA sense strand
uaagggagacaaaguugaa

SEQ ID NO: 2139270 - RNA, 19 nt, Homo sapiens
  misc_RNA (1)...(19): siRNA sense strand
ccacaggaaauccagaauu

SEQ ID NO: 2139271 - RNA, 19 nt, Homo sapiens
  misc_RNA (1)...(19): siRNA sense strand
ucagauguaugccuguguu

SEQ ID NO: 2139272 - RNA, 19 nt, Homo sapiens
  misc_RNA (1)...(19): siRNA sense strand
ugccgagccuuccuuguaa

SEQ ID NO: 2139273 - RNA, 19 nt, Homo sapiens
  misc_RNA (1)...(19): siRNA sense strand
ggaaguuaagggagacaaa

SEQ ID NO: 2139274 - RNA, 19 nt, Homo sapiens
  misc_RNA (1)...(19): siRNA sense strand
acaaagugcugguccuuac

SEQ ID NO: 2139275 - RNA, 19 nt, Homo sapiens
  misc_RNA (1)...(19): siRNA sense strand
gaguuaaccuucagcuacu

SEQ ID NO: 2139276 - RNA, 19 nt, Homo sapiens
  misc_RNA (1)...(19): siRNA sense strand
gcucagcugugucuguagu

SEQ ID NO: 2139277 - RNA, 19 nt, Homo sapiens
  misc_RNA (1)...(19): siRNA sense strand
gauguaugccuguguuugu

SEQ ID NO: 2139278 - RNA, 19 nt, Homo sapiens
  misc_RNA (1)...(19): siRNA sense strand
gcaagucagcucagaugau

SEQ ID NO: 2139279 - RNA, 19 nt, Homo sapiens
  misc_RNA (1)...(19): siRNA sense strand
gagacaaaguugaaaacaa

SEQ ID NO: 2139280 - RNA, 19 nt, Homo sapiens
  misc_RNA (1)...(19): siRNA sense strand
caagacaccagggaauuga

SEQ ID NO: 2139281 - RNA, 19 nt, Homo sapiens
  misc_RNA (1)...(19): siRNA sense strand
gauguuauuggcagaaaga

SEQ ID NO: 2139282 - RNA, 19 nt, Homo sapiens
  misc_RNA (1)...(19): siRNA sense strand
ggagcucagggaagucaua

SEQ ID NO: 2139283 - RNA, 19 nt, Homo sapiens
  misc_RNA (1)...(19): siRNA sense strand
gggaagucauagggaguuu

SEQ ID NO: 2139284 - RNA, 19 nt, Homo sapiens
  misc_RNA (1)...(19): siRNA sense strand
gcuuagagcaguucuccuu

SEQ ID NO: 2139285 - RNA, 19 nt, Homo sapiens
  misc_RNA (1)...(19): siRNA sense strand
aaugggauguggauacaau

SEQ ID NO: 2139286 - RNA, 19 nt, Homo sapiens
  misc_RNA (1)...(19): siRNA sense strand
ucagugaagaagaaaguaa

SEQ ID NO: 2139287 - RNA, 19 nt, Homo sapiens
  misc_RNA (1)...(19): siRNA sense strand
cagcaagucagcucagaug

SEQ ID NO: 2139288 - RNA, 19 nt, Homo sapiens
  misc_RNA (1)...(19): siRNA sense strand
uagagcaguucuccuucuu

SEQ ID NO: 2139289 - RNA, 19 nt, Homo sapiens
  misc_RNA (1)...(19): siRNA sense strand
cuggauauaccuccucuuu

SEQ ID NO: 2139290 - RNA, 19 nt, Homo sapiens
  misc_RNA (1)...(19): siRNA sense strand
gaagucauagggaguuugg

SEQ ID NO: 2139291 - RNA, 19 nt, Homo sapiens
  misc_RNA (1)...(19): siRNA sense strand
ccaagacaccagggaauug

SEQ ID NO: 2139292 - RNA, 19 nt, Homo sapiens
  misc_RNA (1)...(19): siRNA sense strand
ucagcuacuuggagauuca

SEQ ID NO: 2139293 - RNA, 19 nt, Homo sapiens
  misc_RNA (1)...(19): siRNA sense strand
gaaguuaagggagacaaag

SEQ ID NO: 2139294 - RNA, 19 nt, Homo sapiens
  misc_RNA (1)...(19): siRNA sense strand
ccuaaagccuccaguucuc

SEQ ID NO: 2139295 - RNA, 19 nt, Homo sapiens
  misc_RNA (1)...(19): siRNA sense strand
gcucagaugauuguggaaa

SEQ ID NO: 2139296 - RNA, 19 nt, Homo sapiens
  misc_RNA (1)...(19): siRNA sense strand
acaaugggauguggauaca

SEQ ID NO: 2139297 - RNA, 19 nt, Homo sapiens
  misc_RNA (1)...(19): siRNA sense strand
aggcucagcugugucugua

SEQ ID NO: 2139298 - RNA, 19 nt, Homo sapiens
  misc_RNA (1)...(19): siRNA sense strand
uacggaagauggugaagca

SEQ ID NO: 2139299 - RNA, 19 nt, Homo sapiens
  misc_RNA (1)...(19): siRNA sense strand
guuaagggagacaaaguug

SEQ ID NO: 2139300 - RNA, 19 nt, Homo sapiens
  misc_RNA (1)...(19): siRNA sense strand
gugcagcauuuccaugaag

SEQ ID NO: 2139301 - RNA, 19 nt, Homo sapiens
  misc_RNA (1)...(19): siRNA sense strand
gaccacaggaaauccagaa

SEQ ID NO: 2139302 - RNA, 19 nt, Homo sapiens
  misc_RNA (1)...(19): siRNA sense strand
guucuccuucuuccuauaa

SEQ ID NO: 2139303 - RNA, 19 nt, Homo sapiens
  misc_RNA (1)...(19): siRNA sense strand
guacaaugggauguggaua

SEQ ID NO: 2139304 - RNA, 19 nt, Homo sapiens
  misc_RNA (1)...(19): siRNA sense strand
cagugaagaagaaaguaaa

SEQ ID NO: 2139305 - RNA, 19 nt, Homo sapiens
  misc_RNA (1)...(19): siRNA sense strand
ggccuaaagccuccaguuc

SEQ ID NO: 2139306 - RNA, 19 nt, Homo sapiens
  misc_RNA (1)...(19): siRNA sense strand
agaugauuguggaaacuga

SEQ ID NO: 2139307 - RNA, 19 nt, Homo sapiens
  misc_RNA (1)...(19): siRNA sense strand
caucuugaccacaggaaau

SEQ ID NO: 2139308 - RNA, 19 nt, Homo sapiens
  misc_RNA (1)...(19): siRNA sense strand
gcgagaaagcauaaaggau

SEQ ID NO: 2139309 - RNA, 19 nt, Homo sapiens
  misc_RNA (1)...(19): siRNA sense strand
auacagggaagaaguacaa

SEQ ID NO: 2139310 - RNA, 19 nt, Homo sapiens
  misc_RNA (1)...(19): siRNA sense strand
gagaagugcagcauuucca

SEQ ID NO: 2139311 - RNA, 19 nt, Homo sapiens
  misc_RNA (1)...(19): siRNA sense strand
cagggaagaaguacaaugg

SEQ ID NO: 2139312 - RNA, 19 nt, Homo sapiens
  misc_RNA (1)...(19): siRNA sense strand
caggaaauccagaauugca

SEQ ID NO: 2139313 - RNA, 19 nt, Homo sapiens
  misc_RNA (1)...(19): siRNA sense strand
guuugugacuggcuuggau

SEQ ID NO: 2139314 - RNA, 19 nt, Homo sapiens
  misc_RNA (1)...(19): siRNA sense strand
ggauguuauuggcagaaag

SEQ ID NO: 2139315 - RNA, 19 nt, Homo sapiens
  misc_RNA (1)...(19): siRNA sense strand
aaacaaagugcugguccuu

SEQ ID NO: 2139316 - RNA, 19 nt, Homo sapiens
  misc_RNA (1)...(19): siRNA sense strand
ucagcugugucuguaguug

SEQ ID NO: 2139317 - RNA, 19 nt, Homo sapiens
  misc_RNA (1)...(19): siRNA sense strand
ccagugagaaucaugaaaa

SEQ ID NO: 2139318 - RNA, 19 nt, Homo sapiens
  misc_RNA (1)...(19): siRNA sense strand
uuagagcaguucuccuucu

SEQ ID NO: 2139319 - RNA, 19 nt, Homo sapiens
  misc_RNA (1)...(19): siRNA sense strand
gccuaaagccuccaguucu

SEQ ID NO: 2139320 - RNA, 19 nt, Homo sapiens
  misc_RNA (1)...(19): siRNA sense strand
augccgagccuuccuugua

SEQ ID NO: 2139321 - RNA, 19 nt, Homo sapiens
  misc_RNA (1)...(19): siRNA sense strand
gcagcaagucagcucagau

SEQ ID NO: 2139322 - RNA, 19 nt, Homo sapiens
  misc_RNA (1)...(19): siRNA sense strand
gauauaccuccucuuugca

SEQ ID NO: 2139323 - RNA, 19 nt, Homo sapiens
  misc_RNA (1)...(19): siRNA sense strand
ggaagucauagggaguuug

SEQ ID NO: 2139324 - RNA, 19 nt, Homo sapiens
  misc_RNA (1)...(19): siRNA sense strand
gggccuaaagccuccaguu

SEQ ID NO: 2139325 - RNA, 19 nt, Homo sapiens
  misc_RNA (1)...(19): siRNA sense strand
gaagugaaaucucuuauac

SEQ ID NO: 2139326 - RNA, 19 nt, Homo sapiens
  misc_RNA (1)...(19): siRNA sense strand
agagagaccuuaugaaugu

SEQ ID NO: 2139327 - RNA, 19 nt, Homo sapiens
  misc_RNA (1)...(19): siRNA sense strand
ugacugugcuggaggauuu

SEQ ID NO: 2139328 - RNA, 19 nt, Homo sapiens
  misc_RNA (1)...(19): siRNA sense strand
ggagagagaccuuaugaau

SEQ ID NO: 2139329 - RNA, 19 nt, Homo sapiens
  misc_RNA (1)...(19): siRNA sense strand
ggagagacccuauaucugu

SEQ ID NO: 2139330 - RNA, 19 nt, Homo sapiens
  misc_RNA (1)...(19): siRNA sense strand
gaacaggaagaguuuguaa

SEQ ID NO: 2139331 - RNA, 19 nt, Homo sapiens
  misc_RNA (1)...(19): siRNA sense strand
gaccagagaugcacaccaa

SEQ ID NO: 2139332 - RNA, 19 nt, Homo sapiens
  misc_RNA (1)...(19): siRNA sense strand
ugagaagccuuaugaaugu

SEQ ID NO: 2139333 - RNA, 19 nt, Homo sapiens
  misc_RNA (1)...(19): siRNA sense strand
gagagacccuauaucugua

SEQ ID NO: 2139334 - RNA, 19 nt, Homo sapiens
  misc_RNA (1)...(19): siRNA sense strand
ggaagugaaaucucuuaua

SEQ ID NO: 2139335 - RNA, 19 nt, Homo sapiens
  misc_RNA (1)...(19): siRNA sense strand
gcucaggagucaucaaaug

SEQ ID NO: 2139336 - RNA, 19 nt, Homo sapiens
  misc_RNA (1)...(19): siRNA sense strand
gcaagaacuucauuuacca

SEQ ID NO: 2139337 - RNA, 19 nt, Homo sapiens
  misc_RNA (1)...(19): siRNA sense strand
aaucaggccugucaagaaa

SEQ ID NO: 2139338 - RNA, 19 nt, Homo sapiens
  misc_RNA (1)...(19): siRNA sense strand
gaaucaggccugucaagaa

SEQ ID NO: 2139339 - RNA, 19 nt, Homo sapiens
  misc_RNA (1)...(19): siRNA sense strand
gaacuucauuuaccauugc

SEQ ID NO: 2139340 - RNA, 19 nt, Homo sapiens
  misc_RNA (1)...(19): siRNA sense strand
gacguucaguccucauuaa

SEQ ID NO: 2139341 - RNA, 19 nt, Homo sapiens
  misc_RNA (1)...(19): siRNA sense strand
gaagagcaacuuggguaua

SEQ ID NO: 2139342 - RNA, 19 nt, Homo sapiens
  misc_RNA (1)...(19): siRNA sense strand
ucaggccugucaagaaaua

SEQ ID NO: 2139343 - RNA, 19 nt, Homo sapiens
  misc_RNA (1)...(19): siRNA sense strand
aagagcaacuuggguauaa

SEQ ID NO: 2139344 - RNA, 19 nt, Homo sapiens
  misc_RNA (1)...(19): siRNA sense strand
gagagagaccuuaugaaug

SEQ ID NO: 2139345 - RNA, 19 nt, Homo sapiens
  misc_RNA (1)...(19): siRNA sense strand
gugagaagccuuaugaaug

SEQ ID NO: 2139346 - RNA, 19 nt, Homo sapiens
  misc_RNA (1)...(19): siRNA sense strand
gcaaagccuucagccagaa

SEQ ID NO: 2139347 - RNA, 19 nt, Homo sapiens
  misc_RNA (1)...(19): siRNA sense strand
caacuuggguauaauuugc

SEQ ID NO: 2139348 - RNA, 19 nt, Homo sapiens
  misc_RNA (1)...(19): siRNA sense strand
ggacuuggaauguggaguu

SEQ ID NO: 2139349 - RNA, 19 nt, Homo sapiens
  misc_RNA (1)...(19): siRNA sense strand
gagcaacuuggguauaauu

SEQ ID NO: 2139350 - RNA, 19 nt, Homo sapiens
  misc_RNA (1)...(19): siRNA sense strand
agagagaucuuucguagac

SEQ ID NO: 2139351 - RNA, 19 nt, Homo sapiens
  misc_RNA (1)...(19): siRNA sense strand
aggaagaguuuguaaagga

SEQ ID NO: 2139352 - RNA, 19 nt, Homo sapiens
  misc_RNA (1)...(19): siRNA sense strand
ucaaaugaccaauuccaaa

SEQ ID NO: 2139353 - RNA, 19 nt, Homo sapiens
  misc_RNA (1)...(19): siRNA sense strand
gacccuauaucuguaguga

SEQ ID NO: 2139354 - RNA, 19 nt, Homo sapiens
  misc_RNA (1)...(19): siRNA sense strand
cgagaggugugcccaguuc

SEQ ID NO: 2139355 - RNA, 19 nt, Homo sapiens
  misc_RNA (1)...(19): siRNA sense strand
gacuuggaauguggaguua

SEQ ID NO: 2139356 - RNA, 19 nt, Homo sapiens
  misc_RNA (1)...(19): siRNA sense strand
acccagaauuccauccuua

SEQ ID NO: 2139357 - RNA, 19 nt, Homo sapiens
  misc_RNA (1)...(19): siRNA sense strand
ugaagaauguggcaagaac

SEQ ID NO: 2139358 - RNA, 19 nt, Homo sapiens
  misc_RNA (1)...(19): siRNA sense strand
gaacacacacaggugagaa

SEQ ID NO: 2139359 - RNA, 19 nt, Homo sapiens
  misc_RNA (1)...(19): siRNA sense strand
agaaauaacccucauacca

SEQ ID NO: 2139360 - RNA, 19 nt, Homo sapiens
  misc_RNA (1)...(19): siRNA sense strand
guggcaagaacuucauuua

SEQ ID NO: 2139361 - RNA, 19 nt, Homo sapiens
  misc_RNA (1)...(19): siRNA sense strand
guucaguccucauuaagca

SEQ ID NO: 2139362 - RNA, 19 nt, Homo sapiens
  misc_RNA (1)...(19): siRNA sense strand
gcaacuuggguauaauuug

SEQ ID NO: 2139363 - RNA, 19 nt, Homo sapiens
  misc_RNA (1)...(19): siRNA sense strand
ggugagaagccuuaugaau

SEQ ID NO: 2139364 - RNA, 19 nt, Homo sapiens
  misc_RNA (1)...(19): siRNA sense strand
caggugagaagccuuauga

SEQ ID NO: 2139365 - RNA, 19 nt, Homo sapiens
  misc_RNA (1)...(19): siRNA sense strand
caagaaauaacccucauac

SEQ ID NO: 2139366 - RNA, 19 nt, Homo sapiens
  misc_RNA (1)...(19): siRNA sense strand
ggcaagaacuucauuuacc

SEQ ID NO: 2139367 - RNA, 19 nt, Homo sapiens
  misc_RNA (1)...(19): siRNA sense strand
caggagcucugccaucagu

SEQ ID NO: 2139368 - RNA, 19 nt, Homo sapiens
  misc_RNA (1)...(19): siRNA sense strand
cgacguucaguccucauua

SEQ ID NO: 2139369 - RNA, 19 nt, Homo sapiens
  misc_RNA (1)...(19): siRNA sense strand
acacaggugagaagccuua

SEQ ID NO: 2139370 - RNA, 19 nt, Homo sapiens
  misc_RNA (1)...(19): siRNA sense strand
cccuauaucuguagugaau

SEQ ID NO: 2139371 - RNA, 19 nt, Homo sapiens
  misc_RNA (1)...(19): siRNA sense strand
ggaagagcaacuuggguau

SEQ ID NO: 2139372 - RNA, 19 nt, Homo sapiens
  misc_RNA (1)...(19): siRNA sense strand
ccagaggucaggccuauuc

SEQ ID NO: 2139373 - RNA, 19 nt, Homo sapiens
  misc_RNA (1)...(19): siRNA sense strand
gcuggaggauuuggagaga

SEQ ID NO: 2139374 - RNA, 19 nt, Homo sapiens
  misc_RNA (1)...(19): siRNA sense strand
cauuuaccauugcaaccua

SEQ ID NO: 2139375 - RNA, 19 nt, Homo sapiens
  misc_RNA (1)...(19): siRNA sense strand
gaauguggcaagaacuuca

SEQ ID NO: 2139376 - RNA, 19 nt, Homo sapiens
  misc_RNA (1)...(19): siRNA sense strand
ucauuaagcaucagagaau

SEQ ID NO: 2139377 - RNA, 19 nt, Homo sapiens
  misc_RNA (1)...(19): siRNA sense strand
caggaagugaaaucucuua

SEQ ID NO: 2139378 - RNA, 19 nt, Homo sapiens
  misc_RNA (1)...(19): siRNA sense strand
gugcccaguucaagagauu

SEQ ID NO: 2139379 - RNA, 19 nt, Homo sapiens
  misc_RNA (1)...(19): siRNA sense strand
ucaagaaauaacccucaua

SEQ ID NO: 2139380 - RNA, 19 nt, Homo sapiens
  misc_RNA (1)...(19): siRNA sense strand
cuauaucuguagugaaugu

SEQ ID NO: 2139381 - RNA, 19 nt, Homo sapiens
  misc_RNA (1)...(19): siRNA sense strand
agaacuucauuuaccauug

SEQ ID NO: 2139382 - RNA, 19 nt, Homo sapiens
  misc_RNA (1)...(19): siRNA sense strand
cauuaagcaucagagaauu

SEQ ID NO: 2139383 - RNA, 19 nt, Homo sapiens
  misc_RNA (1)...(19): siRNA sense strand
gcaaucagugcaauaagag

SEQ ID NO: 2139384 - RNA, 19 nt, Homo sapiens
  misc_RNA (1)...(19): siRNA sense strand
caaaugaccaauuccaaac

SEQ ID NO: 2139385 - RNA, 19 nt, Homo sapiens
  misc_RNA (1)...(19): siRNA sense strand
uuaugaaugugaugagugu

SEQ ID NO: 2139386 - RNA, 19 nt, Homo sapiens
  misc_RNA (1)...(19): siRNA sense strand
agaauuccauccuuaucga

SEQ ID NO: 2139387 - RNA, 19 nt, Homo sapiens
  misc_RNA (1)...(19): siRNA sense strand
guggagagacccuauaucu

SEQ ID NO: 2139388 - RNA, 19 nt, Homo sapiens
  misc_RNA (1)...(19): siRNA sense strand
uggagcaguuccugacuau

SEQ ID NO: 2139389 - RNA, 19 nt, Homo sapiens
  misc_RNA (1)...(19): siRNA sense strand
cagcucaggagucaucaaa

SEQ ID NO: 2139390 - RNA, 19 nt, Homo sapiens
  misc_RNA (1)...(19): siRNA sense strand
uggaggauuuggagagaga

SEQ ID NO: 2139391 - RNA, 19 nt, Homo sapiens
  misc_RNA (1)...(19): siRNA sense strand
ucaugaacaggaagaguuu

SEQ ID NO: 2139392 - RNA, 19 nt, Homo sapiens
  misc_RNA (1)...(19): siRNA sense strand
gagaagccuuaugaaugug

SEQ ID NO: 2139393 - RNA, 19 nt, Homo sapiens
  misc_RNA (1)...(19): siRNA sense strand
gcaaagggugagcucuuca

SEQ ID NO: 2139394 - RNA, 19 nt, Homo sapiens
  misc_RNA (1)...(19): siRNA sense strand
gaagguaaaggaggaagag

SEQ ID NO: 2139395 - RNA, 19 nt, Homo sapiens
  misc_RNA (1)...(19): siRNA sense strand
uccaggagcucugccauca

SEQ ID NO: 2139396 - RNA, 19 nt, Homo sapiens
  misc_RNA (1)...(19): siRNA sense strand
acaggaagaguuuguaaag

SEQ ID NO: 2139397 - RNA, 19 nt, Homo sapiens
  misc_RNA (1)...(19): siRNA sense strand
gagaccuuaugaaugugaa

SEQ ID NO: 2139398 - RNA, 19 nt, Homo sapiens
  misc_RNA (1)...(19): siRNA sense strand
ggaaaacagaaugguaaua

SEQ ID NO: 2139399 - RNA, 19 nt, Homo sapiens
  misc_RNA (1)...(19): siRNA sense strand
ccauaaccuugacccuuca

SEQ ID NO: 2139400 - RNA, 19 nt, Homo sapiens
  misc_RNA (1)...(19): siRNA sense strand
gccagaaucaggccuguca

SEQ ID NO: 2139401 - RNA, 19 nt, Homo sapiens
  misc_RNA (1)...(19): siRNA sense strand
cuggagcaguuccugacua

SEQ ID NO: 2139402 - RNA, 19 nt, Homo sapiens
  misc_RNA (1)...(19): siRNA sense strand
gaagccuuaugaaugugau

SEQ ID NO: 2139403 - RNA, 19 nt, Homo sapiens
  misc_RNA (1)...(19): siRNA sense strand
cgugagggcagauuggaaa

SEQ ID NO: 2139404 - RNA, 19 nt, Homo sapiens
  misc_RNA (1)...(19): siRNA sense strand
gagcaguuccugacuaucc

SEQ ID NO: 2139405 - RNA, 19 nt, Homo sapiens
  misc_RNA (1)...(19): siRNA sense strand
ggaggaagaggaggaacau

SEQ ID NO: 2139406 - RNA, 19 nt, Homo sapiens
  misc_RNA (1)...(19): siRNA sense strand
caggaagaguuuguaaagg

SEQ ID NO: 2139407 - RNA, 19 nt, Homo sapiens
  misc_RNA (1)...(19): siRNA sense strand
aggaagaggaggaacauuc

SEQ ID NO: 2139408 - RNA, 19 nt, Homo sapiens
  misc_RNA (1)...(19): siRNA sense strand
guagacgcuucaggcaguu

SEQ ID NO: 2139409 - RNA, 19 nt, Homo sapiens
  misc_RNA (1)...(19): siRNA sense strand
gaagaauguggcaagaacu

SEQ ID NO: 2139410 - RNA, 19 nt, Homo sapiens
  misc_RNA (1)...(19): siRNA sense strand
gagagaccuuaugaaugug

SEQ ID NO: 2139411 - RNA, 19 nt, Homo sapiens
  misc_RNA (1)...(19): siRNA sense strand
cagagaugcacaccaagga

SEQ ID NO: 2139412 - RNA, 19 nt, Homo sapiens
  misc_RNA (1)...(19): siRNA sense strand
ucaguggagagacccuaua

SEQ ID NO: 2139413 - RNA, 19 nt, Homo sapiens
  misc_RNA (1)...(19): siRNA sense strand
cuggagagagaccuuauga

SEQ ID NO: 2139414 - RNA, 19 nt, Homo sapiens
  misc_RNA (1)...(19): siRNA sense strand
ugaacaggaagaguuugua

SEQ ID NO: 2139415 - RNA, 19 nt, Homo sapiens
  misc_RNA (1)...(19): siRNA sense strand
gucaagaaauaacccucau

SEQ ID NO: 2139416 - RNA, 19 nt, Homo sapiens
  misc_RNA (1)...(19): siRNA sense strand
caucaccucagaauucaca

SEQ ID NO: 2139417 - RNA, 19 nt, Homo sapiens
  misc_RNA (1)...(19): siRNA sense strand
aagaguuuguaaaggagaa

SEQ ID NO: 2139418 - RNA, 19 nt, Homo sapiens
  misc_RNA (1)...(19): siRNA sense strand
ugugaagaauguggcaaga

SEQ ID NO: 2139419 - RNA, 19 nt, Homo sapiens
  misc_RNA (1)...(19): siRNA sense strand
ccagaauuccauccuuauc

SEQ ID NO: 2139420 - RNA, 19 nt, Homo sapiens
  misc_RNA (1)...(19): siRNA sense strand
gagcaccagagaacacaca

SEQ ID NO: 2139421 - RNA, 19 nt, Homo sapiens
  misc_RNA (1)...(19): siRNA sense strand
ccuaauccagcaucggaaa

SEQ ID NO: 2139422 - RNA, 19 nt, Homo sapiens
  misc_RNA (1)...(19): siRNA sense strand
gugaagaauguggcaagaa

SEQ ID NO: 2139423 - RNA, 19 nt, Homo sapiens
  misc_RNA (1)...(19): siRNA sense strand
aauucacacuggagagaga

SEQ ID NO: 2139424 - RNA, 19 nt, Homo sapiens
  misc_RNA (1)...(19): siRNA sense strand
aaucagugcaauaagaguu

SEQ ID NO: 2139425 - RNA, 19 nt, Homo sapiens
  misc_RNA (1)...(19): siRNA sense strand
ggagaaaccuuaugaaugu

SEQ ID NO: 2139426 - RNA, 19 nt, Homo sapiens
  misc_RNA (1)...(19): siRNA sense strand
agagugagcucaaaucuua

SEQ ID NO: 2139427 - RNA, 19 nt, Homo sapiens
  misc_RNA (1)...(19): siRNA sense strand
ggagaagccuuacaaaugu

SEQ ID NO: 2139428 - RNA, 19 nt, Homo sapiens
  misc_RNA (1)...(19): siRNA sense strand
gcagauaucacacuaauga

SEQ ID NO: 2139429 - RNA, 19 nt, Homo sapiens
  misc_RNA (1)...(19): siRNA sense strand
gaaagaaggcucugaggaa

SEQ ID NO: 2139430 - RNA, 19 nt, Homo sapiens
  misc_RNA (1)...(19): siRNA sense strand
gagagaagccucacaaaug

SEQ ID NO: 2139431 - RNA, 19 nt, Homo sapiens
  misc_RNA (1)...(19): siRNA sense strand
gcaagcagauaucacacua

SEQ ID NO: 2139432 - RNA, 19 nt, Homo sapiens
  misc_RNA (1)...(19): siRNA sense strand
ggagaagccuacuggauga

SEQ ID NO: 2139433 - RNA, 19 nt, Homo sapiens
  misc_RNA (1)...(19): siRNA sense strand
agagaaaccuuacaaaugu

SEQ ID NO: 2139434 - RNA, 19 nt, Homo sapiens
  misc_RNA (1)...(19): siRNA sense strand
ggacauaagcgaguucaua

SEQ ID NO: 2139435 - RNA, 19 nt, Homo sapiens
  misc_RNA (1)...(19): siRNA sense strand
gagagaaaccuuacaaaug

SEQ ID NO: 2139436 - RNA, 19 nt, Homo sapiens
  misc_RNA (1)...(19): siRNA sense strand
ggaaagcgcucuauuaccu

SEQ ID NO: 2139437 - RNA, 19 nt, Homo sapiens
  misc_RNA (1)...(19): siRNA sense strand
gauccacacugaagagaaa

SEQ ID NO: 2139438 - RNA, 19 nt, Homo sapiens
  misc_RNA (1)...(19): siRNA sense strand
gggagaagccuuacaaaug

SEQ ID NO: 2139439 - RNA, 19 nt, Homo sapiens
  misc_RNA (1)...(19): siRNA sense strand
ggauguagcugugaacuuc

SEQ ID NO: 2139440 - RNA, 19 nt, Homo sapiens
  misc_RNA (1)...(19): siRNA sense strand
guucagaccucaccaaaca

SEQ ID NO: 2139441 - RNA, 19 nt, Homo sapiens
  misc_RNA (1)...(19): siRNA sense strand
gcacagaaacuccaugaau

SEQ ID NO: 2139442 - RNA, 19 nt, Homo sapiens
  misc_RNA (1)...(19): siRNA sense strand
gacaagauguggccugaga

SEQ ID NO: 2139443 - RNA, 19 nt, Homo sapiens
  misc_RNA (1)...(19): siRNA sense strand
gcgcagggcucaugaacga

SEQ ID NO: 2139444 - RNA, 19 nt, Homo sapiens
  misc_RNA (1)...(19): siRNA sense strand
ucaggaaagcgcucuauua

SEQ ID NO: 2139445 - RNA, 19 nt, Homo sapiens
  misc_RNA (1)...(19): siRNA sense strand
gcucaaaggcaucucuaua

SEQ ID NO: 2139446 - RNA, 19 nt, Homo sapiens
  misc_RNA (1)...(19): siRNA sense strand
ggagagaaaccuuacaaau

SEQ ID NO: 2139447 - RNA, 19 nt, Homo sapiens
  misc_RNA (1)...(19): siRNA sense strand
gggaaggcuuucaacagua

SEQ ID NO: 2139448 - RNA, 19 nt, Homo sapiens
  misc_RNA (1)...(19): siRNA sense strand
gcacucagaucuaauucuc

SEQ ID NO: 2139449 - RNA, 19 nt, Homo sapiens
  misc_RNA (1)...(19): siRNA sense strand
ggaaaagacuucagcauca

SEQ ID NO: 2139450 - RNA, 19 nt, Homo sapiens
  misc_RNA (1)...(19): siRNA sense strand
ucuauuaccugcuccauau

SEQ ID NO: 2139451 - RNA, 19 nt, Homo sapiens
  misc_RNA (1)...(19): siRNA sense strand
gggagaagcccuaucaaug

SEQ ID NO: 2139452 - RNA, 19 nt, Homo sapiens
  misc_RNA (1)...(19): siRNA sense strand
gggagaaacugagagaaga

SEQ ID NO: 2139453 - RNA, 19 nt, Homo sapiens
  misc_RNA (1)...(19): siRNA sense strand
aaaggcaucucuauaagga

SEQ ID NO: 2139454 - RNA, 19 nt, Homo sapiens
  misc_RNA (1)...(19): siRNA sense strand
ggaggaagaaggagaaguu

SEQ ID NO: 2139455 - RNA, 19 nt, Homo sapiens
  misc_RNA (1)...(19): siRNA sense strand
agagaagccucacaaaugu

SEQ ID NO: 2139456 - RNA, 19 nt, Homo sapiens
  misc_RNA (1)...(19): siRNA sense strand
acagaaggauccacacuga

SEQ ID NO: 2139457 - RNA, 19 nt, Homo sapiens
  misc_RNA (1)...(19): siRNA sense strand
aaacacaaacgaauccaua

SEQ ID NO: 2139458 - RNA, 19 nt, Homo sapiens
  misc_RNA (1)...(19): siRNA sense strand
ggagaagccauaugaaugu

SEQ ID NO: 2139459 - RNA, 19 nt, Homo sapiens
  misc_RNA (1)...(19): siRNA sense strand
cacagaaacuccaugaaug

SEQ ID NO: 2139460 - RNA, 19 nt, Homo sapiens
  misc_RNA (1)...(19): siRNA sense strand
ccuacuggaugaaauuuaa

SEQ ID NO: 2139461 - RNA, 19 nt, Homo sapiens
  misc_RNA (1)...(19): siRNA sense strand
gaccaaucaucgaagaauu

SEQ ID NO: 2139462 - RNA, 19 nt, Homo sapiens
  misc_RNA (1)...(19): siRNA sense strand
ggaaggcuuucaacaguag

SEQ ID NO: 2139463 - RNA, 19 nt, Homo sapiens
  misc_RNA (1)...(19): siRNA sense strand
aaacuugaauccaaacuca

SEQ ID NO: 2139464 - RNA, 19 nt, Homo sapiens
  misc_RNA (1)...(19): siRNA sense strand
gagaaaccuuacaaauguu

SEQ ID NO: 2139465 - RNA, 19 nt, Homo sapiens
  misc_RNA (1)...(19): siRNA sense strand
gggagaaaccuuaugaaug

SEQ ID NO: 2139466 - RNA, 19 nt, Homo sapiens
  misc_RNA (1)...(19): siRNA sense strand
ggagagaagccucacaaau

SEQ ID NO: 2139467 - RNA, 19 nt, Homo sapiens
  misc_RNA (1)...(19): siRNA sense strand
gaacaugguaucacuugga

SEQ ID NO: 2139468 - RNA, 19 nt, Homo sapiens
  misc_RNA (1)...(19): siRNA sense strand
gaacucaccaaacacagaa

SEQ ID NO: 2139469 - RNA, 19 nt, Homo sapiens
  misc_RNA (1)...(19): siRNA sense strand
gcucagaccuaagcaaaca

SEQ ID NO: 2139470 - RNA, 19 nt, Homo sapiens
  misc_RNA (1)...(19): siRNA sense strand
ggaagaaggagaaguugug

SEQ ID NO: 2139471 - RNA, 19 nt, Homo sapiens
  misc_RNA (1)...(19): siRNA sense strand
gagaagcccuaucaaugca

SEQ ID NO: 2139472 - RNA, 19 nt, Homo sapiens
  misc_RNA (1)...(19): siRNA sense strand
gaaacugagagaagagaaa

SEQ ID NO: 2139473 - RNA, 19 nt, Homo sapiens
  misc_RNA (1)...(19): siRNA sense strand
gggagaagccauaugaaug

SEQ ID NO: 2139474 - RNA, 19 nt, Homo sapiens
  misc_RNA (1)...(19): siRNA sense strand
ucaaaggcaucucuauaag

SEQ ID NO: 2139475 - RNA, 19 nt, Homo sapiens
  misc_RNA (1)...(19): siRNA sense strand
aaacaucaaguauggagua

SEQ ID NO: 2139476 - RNA, 19 nt, Homo sapiens
  misc_RNA (1)...(19): siRNA sense strand
aggcagaacucaccaaaca

SEQ ID NO: 2139477 - RNA, 19 nt, Homo sapiens
  misc_RNA (1)...(19): siRNA sense strand
gagcucagaccuaagcaaa

SEQ ID NO: 2139478 - RNA, 19 nt, Homo sapiens
  misc_RNA (1)...(19): siRNA sense strand
caaauuagagaaucaaugg

SEQ ID NO: 2139479 - RNA, 19 nt, Homo sapiens
  misc_RNA (1)...(19): siRNA sense strand
ggaugaaauuuaacagucu

SEQ ID NO: 2139480 - RNA, 19 nt, Homo sapiens
  misc_RNA (1)...(19): siRNA sense strand
gagaaguugugcuguugga

SEQ ID NO: 2139481 - RNA, 19 nt, Homo sapiens
  misc_RNA (1)...(19): siRNA sense strand
ggagaaaccuuuuaauugc

SEQ ID NO: 2139482 - RNA, 19 nt, Homo sapiens
  misc_RNA (1)...(19): siRNA sense strand
uguucaggaugucaaauua

SEQ ID NO: 2139483 - RNA, 19 nt, Homo sapiens
  misc_RNA (1)...(19): siRNA sense strand
gaaauuuaacagucuccua

SEQ ID NO: 2139484 - RNA, 19 nt, Homo sapiens
  misc_RNA (1)...(19): siRNA sense strand
caugguaucacuuggauuu

SEQ ID NO: 2139485 - RNA, 19 nt, Homo sapiens
  misc_RNA (1)...(19): siRNA sense strand
ggagaagcccuaucaaugc

SEQ ID NO: 2139486 - RNA, 19 nt, Homo sapiens
  misc_RNA (1)...(19): siRNA sense strand
gagaaucaaugggaaacau

SEQ ID NO: 2139487 - RNA, 19 nt, Homo sapiens
  misc_RNA (1)...(19): siRNA sense strand
gauguggccugagaaugaa

SEQ ID NO: 2139488 - RNA, 19 nt, Homo sapiens
  misc_RNA (1)...(19): siRNA sense strand
aagcagauaucacacuaau

SEQ ID NO: 2139489 - RNA, 19 nt, Homo sapiens
  misc_RNA (1)...(19): siRNA sense strand
acacugaagagaaacguua

SEQ ID NO: 2139490 - RNA, 19 nt, Homo sapiens
  misc_RNA (1)...(19): siRNA sense strand
gaagccuacuggaugaaau

SEQ ID NO: 2139491 - RNA, 19 nt, Homo sapiens
  misc_RNA (1)...(19): siRNA sense strand
aaaggcaaguucacaacaa

SEQ ID NO: 2139492 - RNA, 19 nt, Homo sapiens
  misc_RNA (1)...(19): siRNA sense strand
ggauuuccauuuccuaaac

SEQ ID NO: 2139493 - RNA, 19 nt, Homo sapiens
  misc_RNA (1)...(19): siRNA sense strand
caaauucauucuggugaga

SEQ ID NO: 2139494 - RNA, 19 nt, Homo sapiens
  misc_RNA (1)...(19): siRNA sense strand
caaugggaaacaucuauaa

SEQ ID NO: 2139495 - RNA, 19 nt, Homo sapiens
  misc_RNA (1)...(19): siRNA sense strand
ggaguacccaugaacuuga

SEQ ID NO: 2139496 - RNA, 19 nt, Homo sapiens
  misc_RNA (1)...(19): siRNA sense strand
aacaguagaucagcucuuu

SEQ ID NO: 2139497 - RNA, 19 nt, Homo sapiens
  misc_RNA (1)...(19): siRNA sense strand
agucggagcucagaccuaa

SEQ ID NO: 2139498 - RNA, 19 nt, Homo sapiens
  misc_RNA (1)...(19): siRNA sense strand
gcagaacucaccaaacaca

SEQ ID NO: 2139499 - RNA, 19 nt, Homo sapiens
  misc_RNA (1)...(19): siRNA sense strand
aaacaucuauaagggagaa

SEQ ID NO: 2139500 - RNA, 19 nt, Homo sapiens
  misc_RNA (1)...(19): siRNA sense strand
ucucagaccucaguaguca

SEQ ID NO: 2139501 - RNA, 19 nt, Homo sapiens
  misc_RNA (1)...(19): siRNA sense strand
ccagaaagugcuuaguaaa

SEQ ID NO: 2139502 - RNA, 19 nt, Homo sapiens
  misc_RNA (1)...(19): siRNA sense strand
accagaaagugcuuaguaa

SEQ ID NO: 2139503 - RNA, 19 nt, Homo sapiens
  misc_RNA (1)...(19): siRNA sense strand
gggagaaaccuuuuaauug

SEQ ID NO: 2139504 - RNA, 19 nt, Homo sapiens
  misc_RNA (1)...(19): siRNA sense strand
gaacuugaugggaguagga

SEQ ID NO: 2139505 - RNA, 19 nt, Homo sapiens
  misc_RNA (1)...(19): siRNA sense strand
ccauacaccugcagugagu

SEQ ID NO: 2139506 - RNA, 19 nt, Homo sapiens
  misc_RNA (1)...(19): siRNA sense strand
cucaaaggcaucucuauaa

SEQ ID NO: 2139507 - RNA, 19 nt, Homo sapiens
  misc_RNA (1)...(19): siRNA sense strand
gaaggauccacacugaaga

SEQ ID NO: 2139508 - RNA, 19 nt, Homo sapiens
  misc_RNA (1)...(19): siRNA sense strand
gaaaagacuucagcaucaa

SEQ ID NO: 2139509 - RNA, 19 nt, Homo sapiens
  misc_RNA (1)...(19): siRNA sense strand
cuauaaggaugugauguug

SEQ ID NO: 2139510 - RNA, 19 nt, Homo sapiens
  misc_RNA (1)...(19): siRNA sense strand
auaaggaugugauguugga

SEQ ID NO: 2139511 - RNA, 19 nt, Homo sapiens
  misc_RNA (1)...(19): siRNA sense strand
ccaggaaccgucucuguau

SEQ ID NO: 2139512 - RNA, 19 nt, Homo sapiens
  misc_RNA (1)...(19): siRNA sense strand
gagccaggcccaagaguca

SEQ ID NO: 2139513 - RNA, 19 nt, Homo sapiens
  misc_RNA (1)...(19): siRNA sense strand
aagaggagggucugugaua

SEQ ID NO: 2139514 - RNA, 19 nt, Homo sapiens
  misc_RNA (1)...(19): siRNA sense strand
gggaacaugguaucacuug

SEQ ID NO: 2139515 - RNA, 19 nt, Homo sapiens
  misc_RNA (1)...(19): siRNA sense strand
gaccucaccaaacacauaa

SEQ ID NO: 2139516 - RNA, 19 nt, Homo sapiens
  misc_RNA (1)...(19): siRNA sense strand
gagaagccauaugaaugug

SEQ ID NO: 2139517 - RNA, 19 nt, Homo sapiens
  misc_RNA (1)...(19): siRNA sense strand
ugggaaggcuuucaacagu

SEQ ID NO: 2139518 - RNA, 19 nt, Homo sapiens
  misc_RNA (1)...(19): siRNA sense strand
gaugucaaauuagagaauc

SEQ ID NO: 2139519 - RNA, 19 nt, Homo sapiens
  misc_RNA (1)...(19): siRNA sense strand
gaugugauguuggaaaauu

SEQ ID NO: 2139520 - RNA, 19 nt, Homo sapiens
  misc_RNA (1)...(19): siRNA sense strand
ucacaaggaggaagaagga

SEQ ID NO: 2139521 - RNA, 19 nt, Homo sapiens
  misc_RNA (1)...(19): siRNA sense strand
agauguggccugagaauga

SEQ ID NO: 2139522 - RNA, 19 nt, Homo sapiens
  misc_RNA (1)...(19): siRNA sense strand
ucaaugggaaacaucuaua

SEQ ID NO: 2139523 - RNA, 19 nt, Homo sapiens
  misc_RNA (1)...(19): siRNA sense strand
aaggagaaguugugcuguu

SEQ ID NO: 2139524 - RNA, 19 nt, Homo sapiens
  misc_RNA (1)...(19): siRNA sense strand
ucagcucuuugccgacaua

SEQ ID NO: 2139525 - RNA, 19 nt, Homo sapiens
  misc_RNA (1)...(19): siRNA sense strand
gaaaagagguggaaaguag

SEQ ID NO: 2139526 - RNA, 19 nt, Homo sapiens
  misc_RNA (1)...(19): siRNA sense strand
gaacagaguuugguacaac

SEQ ID NO: 2139527 - RNA, 19 nt, Homo sapiens
  misc_RNA (1)...(19): siRNA sense strand
ugacagaggcccauaaaug

SEQ ID NO: 2139528 - RNA, 19 nt, Homo sapiens
  misc_RNA (1)...(19): siRNA sense strand
ggaagagagucaagagaag

SEQ ID NO: 2139529 - RNA, 19 nt, Homo sapiens
  misc_RNA (1)...(19): siRNA sense strand
gcagaggccuguggaagau

SEQ ID NO: 2139530 - RNA, 19 nt, Homo sapiens
  misc_RNA (1)...(19): siRNA sense strand
ggacauagaggcucaaacu

SEQ ID NO: 2139531 - RNA, 19 nt, Homo sapiens
  misc_RNA (1)...(19): siRNA sense strand
gcucgggacuggaggcaaa

SEQ ID NO: 2139532 - RNA, 19 nt, Homo sapiens
  misc_RNA (1)...(19): siRNA sense strand
acaaacagcuuaagaucuc

SEQ ID NO: 2139533 - RNA, 19 nt, Homo sapiens
  misc_RNA (1)...(19): siRNA sense strand
gggaagagagucaagagaa

SEQ ID NO: 2139534 - RNA, 19 nt, Homo sapiens
  misc_RNA (1)...(19): siRNA sense strand
gagaagaaagacaagacua

SEQ ID NO: 2139535 - RNA, 19 nt, Homo sapiens
  misc_RNA (1)...(19): siRNA sense strand
ggaaauggacccugaacuc

SEQ ID NO: 2139536 - RNA, 19 nt, Homo sapiens
  misc_RNA (1)...(19): siRNA sense strand
aaagaagaguggccaguuc

SEQ ID NO: 2139537 - RNA, 19 nt, Homo sapiens
  misc_RNA (1)...(19): siRNA sense strand
gcaccaaggcccugauugu

SEQ ID NO: 2139538 - RNA, 19 nt, Homo sapiens
  misc_RNA (1)...(19): siRNA sense strand
gaagagagucaagagaaga

SEQ ID NO: 2139539 - RNA, 19 nt, Homo sapiens
  misc_RNA (1)...(19): siRNA sense strand
ggaacagaguuugguacaa

SEQ ID NO: 2139540 - RNA, 19 nt, Homo sapiens
  misc_RNA (1)...(19): siRNA sense strand
ggaagaaugugggagaaaa

SEQ ID NO: 2139541 - RNA, 19 nt, Homo sapiens
  misc_RNA (1)...(19): siRNA sense strand
ugagagcccugcagaacug

SEQ ID NO: 2139542 - RNA, 19 nt, Homo sapiens
  misc_RNA (1)...(19): siRNA sense strand
caacagaaggguggaaaug

SEQ ID NO: 2139543 - RNA, 19 nt, Homo sapiens
  misc_RNA (1)...(19): siRNA sense strand
acagaaggguggaaaugga

SEQ ID NO: 2139544 - RNA, 19 nt, Homo sapiens
  misc_RNA (1)...(19): siRNA sense strand
cgacgaagaggaugaggaa

SEQ ID NO: 2139545 - RNA, 19 nt, Homo sapiens
  misc_RNA (1)...(19): siRNA sense strand
cgggaaggcucgagaaugg

SEQ ID NO: 2139546 - RNA, 19 nt, Homo sapiens
  misc_RNA (1)...(19): siRNA sense strand
gagcaaagccccaggagaa

SEQ ID NO: 2139547 - RNA, 19 nt, Homo sapiens
  misc_RNA (1)...(19): siRNA sense strand
caacaacaacggagugaag

SEQ ID NO: 2139548 - RNA, 19 nt, Homo sapiens
  misc_RNA (1)...(19): siRNA sense strand
ccacaaacagcuuaagauc

SEQ ID NO: 2139549 - RNA, 19 nt, Homo sapiens
  misc_RNA (1)...(19): siRNA sense strand
ucagaggcauggaaaugga

SEQ ID NO: 2139550 - RNA, 19 nt, Homo sapiens
  misc_RNA (1)...(19): siRNA sense strand
gaggucaggagaagaaaga

SEQ ID NO: 2139551 - RNA, 19 nt, Homo sapiens
  misc_RNA (1)...(19): siRNA sense strand
gaggcugaguccuggagaa

SEQ ID NO: 2139552 - RNA, 19 nt, Homo sapiens
  misc_RNA (1)...(19): siRNA sense strand
cgaagaggaugaggaagag

SEQ ID NO: 2139553 - RNA, 19 nt, Homo sapiens
  misc_RNA (1)...(19): siRNA sense strand
ggagaccacguaccaauac

SEQ ID NO: 2139554 - RNA, 19 nt, Homo sapiens
  misc_RNA (1)...(19): siRNA sense strand
cgaaagacaccacaaacag

SEQ ID NO: 2139555 - RNA, 19 nt, Homo sapiens
  misc_RNA (1)...(19): siRNA sense strand
caagacuacucggaagaau

SEQ ID NO: 2139556 - RNA, 19 nt, Homo sapiens
  misc_RNA (1)...(19): siRNA sense strand
ggaugagucugcgguccuu

SEQ ID NO: 2139557 - RNA, 19 nt, Homo sapiens
  misc_RNA (1)...(19): siRNA sense strand
gcugaguccuggagaaacu

SEQ ID NO: 2139558 - RNA, 19 nt, Homo sapiens
  misc_RNA (1)...(19): siRNA sense strand
ggacacccagggacauaga

SEQ ID NO: 2139559 - RNA, 19 nt, Homo sapiens
  misc_RNA (1)...(19): siRNA sense strand
gaagaaagacaagacuacu

SEQ ID NO: 2139560 - RNA, 19 nt, Homo sapiens
  misc_RNA (1)...(19): siRNA sense strand
agacaccacaaacagcuua

SEQ ID NO: 2139561 - RNA, 19 nt, Homo sapiens
  misc_RNA (1)...(19): siRNA sense strand
ccgaggagaucuugguucu

SEQ ID NO: 2139562 - RNA, 19 nt, Homo sapiens
  misc_RNA (1)...(19): siRNA sense strand
acauagaggcucaaacuca

SEQ ID NO: 2139563 - RNA, 19 nt, Homo sapiens
  misc_RNA (1)...(19): siRNA sense strand
gagguggaaaguagacuga

SEQ ID NO: 2139564 - RNA, 19 nt, Homo sapiens
  misc_RNA (1)...(19): siRNA sense strand
agacuacucggaagaaugu

SEQ ID NO: 2139565 - RNA, 19 nt, Homo sapiens
  misc_RNA (1)...(19): siRNA sense strand
gacaagacuacucggaaga

SEQ ID NO: 2139566 - RNA, 19 nt, Homo sapiens
  misc_RNA (1)...(19): siRNA sense strand
ucaagagaagagagacuaa

SEQ ID NO: 2139567 - RNA, 19 nt, Homo sapiens
  misc_RNA (1)...(19): siRNA sense strand
gcaccagaaccgauucauc

SEQ ID NO: 2139568 - RNA, 19 nt, Homo sapiens
  misc_RNA (1)...(19): siRNA sense strand
gggcaugaagccaacagaa

SEQ ID NO: 2139569 - RNA, 19 nt, Homo sapiens
  misc_RNA (1)...(19): siRNA sense strand
gaagaagcgguacccaacu

SEQ ID NO: 2139570 - RNA, 19 nt, Homo sapiens
  misc_RNA (1)...(19): siRNA sense strand
aagaagcgguacccaacug

SEQ ID NO: 2139571 - RNA, 19 nt, Homo sapiens
  misc_RNA (1)...(19): siRNA sense strand
uggagaccacguaccaaua

SEQ ID NO: 2139572 - RNA, 19 nt, Homo sapiens
  misc_RNA (1)...(19): siRNA sense strand
caggagcucccgacuguca

SEQ ID NO: 2139573 - RNA, 19 nt, Homo sapiens
  misc_RNA (1)...(19): siRNA sense strand
ucaggaacagaguuuggua

SEQ ID NO: 2139574 - RNA, 19 nt, Homo sapiens
  misc_RNA (1)...(19): siRNA sense strand
ggagaagaaagacaagacu

SEQ ID NO: 2139575 - RNA, 19 nt, Homo sapiens
  misc_RNA (1)...(19): siRNA sense strand
ccgaaagacaccacaaaca

SEQ ID NO: 2139576 - RNA, 19 nt, Homo sapiens
  misc_RNA (1)...(19): siRNA sense strand
ggacuggaggccugagaca

SEQ ID NO: 2139577 - RNA, 19 nt, Homo sapiens
  misc_RNA (1)...(19): siRNA sense strand
caagggaagagagucaaga

SEQ ID NO: 2139578 - RNA, 19 nt, Homo sapiens
  misc_RNA (1)...(19): siRNA sense strand
acgaagaggaugaggaaga

SEQ ID NO: 2139579 - RNA, 19 nt, Homo sapiens
  misc_RNA (1)...(19): siRNA sense strand
caccacaaacagcuuaaga

SEQ ID NO: 2139580 - RNA, 19 nt, Homo sapiens
  misc_RNA (1)...(19): siRNA sense strand
caacugccgaggagaucuu

SEQ ID NO: 2139581 - RNA, 19 nt, Homo sapiens
  misc_RNA (1)...(19): siRNA sense strand
gucaagagaagagagacua

SEQ ID NO: 2139582 - RNA, 19 nt, Homo sapiens
  misc_RNA (1)...(19): siRNA sense strand
caacuggaggcaacagagu

SEQ ID NO: 2139583 - RNA, 19 nt, Homo sapiens
  misc_RNA (1)...(19): siRNA sense strand
ccugacagaggcccauaaa

SEQ ID NO: 2139584 - RNA, 19 nt, Homo sapiens
  misc_RNA (1)...(19): siRNA sense strand
gcaacaacaacggagugaa

SEQ ID NO: 2139585 - RNA, 19 nt, Homo sapiens
  misc_RNA (1)...(19): siRNA sense strand
cagcuuaagaucuccuuca

SEQ ID NO: 2139586 - RNA, 19 nt, Homo sapiens
  misc_RNA (1)...(19): siRNA sense strand
gcagcagcagcaacaacaa

SEQ ID NO: 2139587 - RNA, 19 nt, Homo sapiens
  misc_RNA (1)...(19): siRNA sense strand
ugagccgccuguucuaugg

SEQ ID NO: 2139588 - RNA, 19 nt, Homo sapiens
  misc_RNA (1)...(19): siRNA sense strand
gagacagcaggaagaggaa

SEQ ID NO: 2139589 - RNA, 19 nt, Homo sapiens
  misc_RNA (1)...(19): siRNA sense strand
ugucagaggcauggaaaug

SEQ ID NO: 2139590 - RNA, 19 nt, Homo sapiens
  misc_RNA (1)...(19): siRNA sense strand
gcgcaccaaggcccugauu

SEQ ID NO: 2139591 - RNA, 19 nt, Homo sapiens
  misc_RNA (1)...(19): siRNA sense strand
ggcaugaagccaacagaag

SEQ ID NO: 2139592 - RNA, 19 nt, Homo sapiens
  misc_RNA (1)...(19): siRNA sense strand
agaagaaagacaagacuac

SEQ ID NO: 2139593 - RNA, 19 nt, Homo sapiens
  misc_RNA (1)...(19): siRNA sense strand
gcaaagccccaggagaaaa

SEQ ID NO: 2139594 - RNA, 19 nt, Homo sapiens
  misc_RNA (1)...(19): siRNA sense strand
gucaggagaagaaagacaa

SEQ ID NO: 2139595 - RNA, 19 nt, Homo sapiens
  misc_RNA (1)...(19): siRNA sense strand
caaccucuccagccacagu

SEQ ID NO: 2139596 - RNA, 19 nt, Homo sapiens
  misc_RNA (1)...(19): siRNA sense strand
acaagacuacucggaagaa

SEQ ID NO: 2139597 - RNA, 19 nt, Homo sapiens
  misc_RNA (1)...(19): siRNA sense strand
ccaguacacccaugaauuu

SEQ ID NO: 2139598 - RNA, 19 nt, Homo sapiens
  misc_RNA (1)...(19): siRNA sense strand
guacacccaugaauuugau

SEQ ID NO: 2139599 - RNA, 19 nt, Homo sapiens
  misc_RNA (1)...(19): siRNA sense strand
gccaguacacccaugaauu

SEQ ID NO: 2139600 - RNA, 19 nt, Homo sapiens
  misc_RNA (1)...(19): siRNA sense strand
ugaauuugauggagaugag

SEQ ID NO: 2139601 - RNA, 19 nt, Homo sapiens
  misc_RNA (1)...(19): siRNA sense strand
gagugaucauuccuucuuc

SEQ ID NO: 2139602 - RNA, 19 nt, Homo sapiens
  misc_RNA (1)...(19): siRNA sense strand
acacugggagccugagauu

SEQ ID NO: 2139603 - RNA, 19 nt, Homo sapiens
  misc_RNA (1)...(19): siRNA sense strand
agagugaucauuccuucuu

SEQ ID NO: 2139604 - RNA, 19 nt, Homo sapiens
  misc_RNA (1)...(19): siRNA sense strand
ccaagagugaucauuccuu

SEQ ID NO: 2139605 - RNA, 19 nt, Homo sapiens
  misc_RNA (1)...(19): siRNA sense strand
uuccugaggucacaguguu

SEQ ID NO: 2139606 - RNA, 19 nt, Homo sapiens
  misc_RNA (1)...(19): siRNA sense strand
gagugaucauuccuucuuc

SEQ ID NO: 2139607 - RNA, 19 nt, Homo sapiens
  misc_RNA (1)...(19): siRNA sense strand
acacugggagccugagauu

SEQ ID NO: 2139608 - RNA, 19 nt, Homo sapiens
  misc_RNA (1)...(19): siRNA sense strand
agagugaucauuccuucuu

SEQ ID NO: 2139609 - RNA, 19 nt, Homo sapiens
  misc_RNA (1)...(19): siRNA sense strand
ccaagagugaucauuccuu

SEQ ID NO: 2139610 - RNA, 19 nt, Homo sapiens
  misc_RNA (1)...(19): siRNA sense strand
uuccugaggucacaguguu

SEQ ID NO: 2139611 - RNA, 19 nt, Homo sapiens
  misc_RNA (1)...(19): siRNA sense strand
gaaaggagaugcccagaua

SEQ ID NO: 2139612 - RNA, 19 nt, Homo sapiens
  misc_RNA (1)...(19): siRNA sense strand
gcaaauagcagcauuaauu

SEQ ID NO: 2139613 - RNA, 19 nt, Homo sapiens
  misc_RNA (1)...(19): siRNA sense strand
gaacugacgucaacauaaa

SEQ ID NO: 2139614 - RNA, 19 nt, Homo sapiens
  misc_RNA (1)...(19): siRNA sense strand
gcaugaggcugcuuuguuu

SEQ ID NO: 2139615 - RNA, 19 nt, Homo sapiens
  misc_RNA (1)...(19): siRNA sense strand
gaagaagaccacauagaua

SEQ ID NO: 2139616 - RNA, 19 nt, Homo sapiens
  misc_RNA (1)...(19): siRNA sense strand
ugacugaacugauuauaga

SEQ ID NO: 2139617 - RNA, 19 nt, Homo sapiens
  misc_RNA (1)...(19): siRNA sense strand
ccacauagauaagaaguau

SEQ ID NO: 2139618 - RNA, 19 nt, Homo sapiens
  misc_RNA (1)...(19): siRNA sense strand
ggaagaagaccacauagau

SEQ ID NO: 2139619 - RNA, 19 nt, Homo sapiens
  misc_RNA (1)...(19): siRNA sense strand
cagcugaggugccaagauu

SEQ ID NO: 2139620 - RNA, 19 nt, Homo sapiens
  misc_RNA (1)...(19): siRNA sense strand
ggucuaaugugauggaaga

SEQ ID NO: 2139621 - RNA, 19 nt, Homo sapiens
  misc_RNA (1)...(19): siRNA sense strand
gaagaucacaugacuggaa

SEQ ID NO: 2139622 - RNA, 19 nt, Homo sapiens
  misc_RNA (1)...(19): siRNA sense strand
gcacuggaaccaccugaua

SEQ ID NO: 2139623 - RNA, 19 nt, Homo sapiens
  misc_RNA (1)...(19): siRNA sense strand
gcaccaugcugcuuugaau

SEQ ID NO: 2139624 - RNA, 19 nt, Homo sapiens
  misc_RNA (1)...(19): siRNA sense strand
auacaaaggugucaaguuc

SEQ ID NO: 2139625 - RNA, 19 nt, Homo sapiens
  misc_RNA (1)...(19): siRNA sense strand
ucaaugaacagaacaauga

SEQ ID NO: 2139626 - RNA, 19 nt, Homo sapiens
  misc_RNA (1)...(19): siRNA sense strand
acccaaagcugaacucaaa

SEQ ID NO: 2139627 - RNA, 19 nt, Homo sapiens
  misc_RNA (1)...(19): siRNA sense strand
ggaacugacgucaacauaa

SEQ ID NO: 2139628 - RNA, 19 nt, Homo sapiens
  misc_RNA (1)...(19): siRNA sense strand
cuacgaagcucuguauaau

SEQ ID NO: 2139629 - RNA, 19 nt, Homo sapiens
  misc_RNA (1)...(19): siRNA sense strand
caacguggcugacucaaaa

SEQ ID NO: 2139630 - RNA, 19 nt, Homo sapiens
  misc_RNA (1)...(19): siRNA sense strand
gaggaaauccgcacuggaa

SEQ ID NO: 2139631 - RNA, 19 nt, Homo sapiens
  misc_RNA (1)...(19): siRNA sense strand
cgaaguggccuaucaguug

SEQ ID NO: 2139632 - RNA, 19 nt, Homo sapiens
  misc_RNA (1)...(19): siRNA sense strand
caaagaaagugguguuggu

SEQ ID NO: 2139633 - RNA, 19 nt, Homo sapiens
  misc_RNA (1)...(19): siRNA sense strand
ugaaggcucuggguuauga

SEQ ID NO: 2139634 - RNA, 19 nt, Homo sapiens
  misc_RNA (1)...(19): siRNA sense strand
caaauagcagcauuaauug

SEQ ID NO: 2139635 - RNA, 19 nt, Homo sapiens
  misc_RNA (1)...(19): siRNA sense strand
ggacagaauccacgcaaga

SEQ ID NO: 2139636 - RNA, 19 nt, Homo sapiens
  misc_RNA (1)...(19): siRNA sense strand
gaccaagacuccacgaaca

SEQ ID NO: 2139637 - RNA, 19 nt, Homo sapiens
  misc_RNA (1)...(19): siRNA sense strand
ggccaaaugugaacugugu

SEQ ID NO: 2139638 - RNA, 19 nt, Homo sapiens
  misc_RNA (1)...(19): siRNA sense strand
gcuccaugcugaucaaaga

SEQ ID NO: 2139639 - RNA, 19 nt, Homo sapiens
  misc_RNA (1)...(19): siRNA sense strand
acacagagguggugaaggu

SEQ ID NO: 2139640 - RNA, 19 nt, Homo sapiens
  misc_RNA (1)...(19): siRNA sense strand
cagagaaacucaucuucga

SEQ ID NO: 2139641 - RNA, 19 nt, Homo sapiens
  misc_RNA (1)...(19): siRNA sense strand
ugacagcacuggcuacaca

SEQ ID NO: 2139642 - RNA, 19 nt, Homo sapiens
  misc_RNA (1)...(19): siRNA sense strand
aagaagaccacauagauaa

SEQ ID NO: 2139643 - RNA, 19 nt, Homo sapiens
  misc_RNA (1)...(19): siRNA sense strand
gcucgcacccugaaacuuu

SEQ ID NO: 2139644 - RNA, 19 nt, Homo sapiens
  misc_RNA (1)...(19): siRNA sense strand
ggaccaagaugcccaaucc

SEQ ID NO: 2139645 - RNA, 19 nt, Homo sapiens
  misc_RNA (1)...(19): siRNA sense strand
gguuacagcuccauugaca

SEQ ID NO: 2139646 - RNA, 19 nt, Homo sapiens
  misc_RNA (1)...(19): siRNA sense strand
gggaguggcuggagucgau

SEQ ID NO: 2139647 - RNA, 19 nt, Homo sapiens
  misc_RNA (1)...(19): siRNA sense strand
cuacggagcacaugaagaa

SEQ ID NO: 2139648 - RNA, 19 nt, Homo sapiens
  misc_RNA (1)...(19): siRNA sense strand
ggagagggccaaaugugaa

SEQ ID NO: 2139649 - RNA, 19 nt, Homo sapiens
  misc_RNA (1)...(19): siRNA sense strand
ggugaaggcucuggguuau

SEQ ID NO: 2139650 - RNA, 19 nt, Homo sapiens
  misc_RNA (1)...(19): siRNA sense strand
cuacguccauuccuucuug

SEQ ID NO: 2139651 - RNA, 19 nt, Homo sapiens
  misc_RNA (1)...(19): siRNA sense strand
gaagaccacauagauaaga

SEQ ID NO: 2139652 - RNA, 19 nt, Homo sapiens
  misc_RNA (1)...(19): siRNA sense strand
cagcugagaugauugaaac

SEQ ID NO: 2139653 - RNA, 19 nt, Homo sapiens
  misc_RNA (1)...(19): siRNA sense strand
gaaccugaccuacgagauc

SEQ ID NO: 2139654 - RNA, 19 nt, Homo sapiens
  misc_RNA (1)...(19): siRNA sense strand
cacgagauccggaacauuu

SEQ ID NO: 2139655 - RNA, 19 nt, Homo sapiens
  misc_RNA (1)...(19): siRNA sense strand
gaacaaugacaacgagaca

SEQ ID NO: 2139656 - RNA, 19 nt, Homo sapiens
  misc_RNA (1)...(19): siRNA sense strand
gagaagggauugacuuuuc

SEQ ID NO: 2139657 - RNA, 19 nt, Homo sapiens
  misc_RNA (1)...(19): siRNA sense strand
gggaugagauugagaaaau

SEQ ID NO: 2139658 - RNA, 19 nt, Homo sapiens
  misc_RNA (1)...(19): siRNA sense strand
uaacagcagagacaaagaa

SEQ ID NO: 2139659 - RNA, 19 nt, Homo sapiens
  misc_RNA (1)...(19): siRNA sense strand
cgaacacccuuaugaacug

SEQ ID NO: 2139660 - RNA, 19 nt, Homo sapiens
  misc_RNA (1)...(19): siRNA sense strand
cagcauuaauugaagauca

SEQ ID NO: 2139661 - RNA, 19 nt, Homo sapiens
  misc_RNA (1)...(19): siRNA sense strand
gaacugccuucucaaaaga

SEQ ID NO: 2139662 - RNA, 19 nt, Homo sapiens
  misc_RNA (1)...(19): siRNA sense strand
caaaagagccagcaaauag

SEQ ID NO: 2139663 - RNA, 19 nt, Homo sapiens
  misc_RNA (1)...(19): siRNA sense strand
cuccugagcugcaacacua

SEQ ID NO: 2139664 - RNA, 19 nt, Homo sapiens
  misc_RNA (1)...(19): siRNA sense strand
ggagugaguccuuauccaa

SEQ ID NO: 2139665 - RNA, 19 nt, Homo sapiens
  misc_RNA (1)...(19): siRNA sense strand
gcugcuacccucugcauuu

SEQ ID NO: 2139666 - RNA, 19 nt, Homo sapiens
  misc_RNA (1)...(19): siRNA sense strand
caccugauauggaccaaga

SEQ ID NO: 2139667 - RNA, 19 nt, Homo sapiens
  misc_RNA (1)...(19): siRNA sense strand
cuugacagcuucugagguu

SEQ ID NO: 2139668 - RNA, 19 nt, Homo sapiens
  misc_RNA (1)...(19): siRNA sense strand
agaggaagaagaccacaua

SEQ ID NO: 2139669 - RNA, 19 nt, Homo sapiens
  misc_RNA (1)...(19): siRNA sense strand
caagacgccugugccaaga

SEQ ID NO: 2139670 - RNA, 19 nt, Homo sapiens
  misc_RNA (1)...(19): siRNA sense strand
ccaauuaucugggcuccau

SEQ ID NO: 2139671 - RNA, 19 nt, Homo sapiens
  misc_RNA (1)...(19): siRNA sense strand
ggagaugggcagugcuuug

SEQ ID NO: 2139672 - RNA, 19 nt, Homo sapiens
  misc_RNA (1)...(19): siRNA sense strand
ugacugcccuagacacugu

SEQ ID NO: 2139673 - RNA, 19 nt, Homo sapiens
  misc_RNA (1)...(19): siRNA sense strand
aaucaugaguucuauugga

SEQ ID NO: 2139674 - RNA, 19 nt, Homo sapiens
  misc_RNA (1)...(19): siRNA sense strand
gaacacccuuaugaacugu

SEQ ID NO: 2139675 - RNA, 19 nt, Homo sapiens
  misc_RNA (1)...(19): siRNA sense strand
gcgaucaucugaccaagac

SEQ ID NO: 2139676 - RNA, 19 nt, Homo sapiens
  misc_RNA (1)...(19): siRNA sense strand
ugaugcaaaugcugaagaa

SEQ ID NO: 2139677 - RNA, 19 nt, Homo sapiens
  misc_RNA (1)...(19): siRNA sense strand
aaagauaaccauggacuga

SEQ ID NO: 2139678 - RNA, 19 nt, Homo sapiens
  misc_RNA (1)...(19): siRNA sense strand
ggaaaucuacggagcacau

SEQ ID NO: 2139679 - RNA, 19 nt, Homo sapiens
  misc_RNA (1)...(19): siRNA sense strand
cagcagagacaaagaaagu

SEQ ID NO: 2139680 - RNA, 19 nt, Homo sapiens
  misc_RNA (1)...(19): siRNA sense strand
gcauuuggcagccuggaaa

SEQ ID NO: 2139681 - RNA, 19 nt, Homo sapiens
  misc_RNA (1)...(19): siRNA sense strand
ccucucaucuccaguaugg

SEQ ID NO: 2139682 - RNA, 19 nt, Homo sapiens
  misc_RNA (1)...(19): siRNA sense strand
cagcaaauagcagcauuaa

SEQ ID NO: 2139683 - RNA, 19 nt, Homo sapiens
  misc_RNA (1)...(19): siRNA sense strand
gugguuaugaagccaauua

SEQ ID NO: 2139684 - RNA, 19 nt, Homo sapiens
  misc_RNA (1)...(19): siRNA sense strand
ccuacgaagcucuguauaa

SEQ ID NO: 2139685 - RNA, 19 nt, Homo sapiens
  misc_RNA (1)...(19): siRNA sense strand
gcaacuaccagacggagau

SEQ ID NO: 2139686 - RNA, 19 nt, Homo sapiens
  misc_RNA (1)...(19): siRNA sense strand
gaaacaaaaucuuccaaac

SEQ ID NO: 2139687 - RNA, 19 nt, Homo sapiens
  misc_RNA (1)...(19): siRNA sense strand
caacaagaacgucauugca

SEQ ID NO: 2139688 - RNA, 19 nt, Homo sapiens
  misc_RNA (1)...(19): siRNA sense strand
caagaccgauguggugcaa

SEQ ID NO: 2139689 - RNA, 19 nt, Homo sapiens
  misc_RNA (1)...(19): siRNA sense strand
cugagaugauugaaacaaa

SEQ ID NO: 2139690 - RNA, 19 nt, Homo sapiens
  misc_RNA (1)...(19): siRNA sense strand
gcucgucaauguccugaag

SEQ ID NO: 2139691 - RNA, 19 nt, Homo sapiens
  misc_RNA (1)...(19): siRNA sense strand
ugaauggcuuugacgaugu

SEQ ID NO: 2139692 - RNA, 19 nt, Homo sapiens
  misc_RNA (1)...(19): siRNA sense strand
aagaucacaugacuggaaa

SEQ ID NO: 2139693 - RNA, 19 nt, Homo sapiens
  misc_RNA (1)...(19): siRNA sense strand
ggaacgaugcgcugaccaa

SEQ ID NO: 2139694 - RNA, 19 nt, Homo sapiens
  misc_RNA (1)...(19): siRNA sense strand
agaccgauguggugcaaau

SEQ ID NO: 2139695 - RNA, 19 nt, Homo sapiens
  misc_RNA (1)...(19): siRNA sense strand
gcagaccagccaccacuau

SEQ ID NO: 2139696 - RNA, 19 nt, Homo sapiens
  misc_RNA (1)...(19): siRNA sense strand
acaaaggugucaaguucau

SEQ ID NO: 2139697 - RNA, 19 nt, Homo sapiens
  misc_RNA (1)...(19): siRNA sense strand
aaacucagccgcagcuugu

SEQ ID NO: 2139698 - RNA, 19 nt, Homo sapiens
  misc_RNA (1)...(19): siRNA sense strand
cuuaugaacuguuguuaac

SEQ ID NO: 2139699 - RNA, 19 nt, Homo sapiens
  misc_RNA (1)...(19): siRNA sense strand
gaagacgaacacccuuaug

SEQ ID NO: 2139700 - RNA, 19 nt, Homo sapiens
  misc_RNA (1)...(19): siRNA sense strand
ggaaaggagaugcccagau

SEQ ID NO: 2139701 - RNA, 19 nt, Homo sapiens
  misc_RNA (1)...(19): siRNA sense strand
cgaguccugugguuaugaa

SEQ ID NO: 2139702 - RNA, 19 nt, Homo sapiens
  misc_RNA (1)...(19): siRNA sense strand
gcaacaccagccagagaaa

SEQ ID NO: 2139703 - RNA, 19 nt, Homo sapiens
  misc_RNA (1)...(19): siRNA sense strand
gaagaaccucugggagcua

SEQ ID NO: 2139704 - RNA, 19 nt, Homo sapiens
  misc_RNA (1)...(19): siRNA sense strand
gaauggcuuugacgauguc

SEQ ID NO: 2139705 - RNA, 19 nt, Homo sapiens
  misc_RNA (1)...(19): siRNA sense strand
ggagugggaugagauugag

SEQ ID NO: 2139706 - RNA, 19 nt, Homo sapiens
  misc_RNA (1)...(19): siRNA sense strand
uagcagcauuaauugaaga

SEQ ID NO: 2139707 - RNA, 19 nt, Homo sapiens
  misc_RNA (1)...(19): siRNA sense strand
ccagcaaauagcagcauua

SEQ ID NO: 2139708 - RNA, 19 nt, Homo sapiens
  misc_RNA (1)...(19): siRNA sense strand
ggaacugccuucucaaaag

SEQ ID NO: 2139709 - RNA, 19 nt, Homo sapiens
  misc_RNA (1)...(19): siRNA sense strand
gagagugggcuaccucaca

SEQ ID NO: 2139710 - RNA, 19 nt, Homo sapiens
  misc_RNA (1)...(19): siRNA sense strand
gcugaggugccaagauuug

SEQ ID NO: 2139711 - RNA, 19 nt, Homo sapiens
  misc_RNA (1)...(19): siRNA sense strand
gaaaggagaugcccagaua

SEQ ID NO: 2139712 - RNA, 19 nt, Homo sapiens
  misc_RNA (1)...(19): siRNA sense strand
gcaaauagcagcauuaauu

SEQ ID NO: 2139713 - RNA, 19 nt, Homo sapiens
  misc_RNA (1)...(19): siRNA sense strand
gaacugacgucaacauaaa

SEQ ID NO: 2139714 - RNA, 19 nt, Homo sapiens
  misc_RNA (1)...(19): siRNA sense strand
gcaugaggcugcuuuguuu

SEQ ID NO: 2139715 - RNA, 19 nt, Homo sapiens
  misc_RNA (1)...(19): siRNA sense strand
gaagaagaccacauagaua

SEQ ID NO: 2139716 - RNA, 19 nt, Homo sapiens
  misc_RNA (1)...(19): siRNA sense strand
ugacugaacugauuauaga

SEQ ID NO: 2139717 - RNA, 19 nt, Homo sapiens
  misc_RNA (1)...(19): siRNA sense strand
ccacauagauaagaaguau

SEQ ID NO: 2139718 - RNA, 19 nt, Homo sapiens
  misc_RNA (1)...(19): siRNA sense strand
ggaagaagaccacauagau

SEQ ID NO: 2139719 - RNA, 19 nt, Homo sapiens
  misc_RNA (1)...(19): siRNA sense strand
cagcugaggugccaagauu

SEQ ID NO: 2139720 - RNA, 19 nt, Homo sapiens
  misc_RNA (1)...(19): siRNA sense strand
ggucuaaugugauggaaga

SEQ ID NO: 2139721 - RNA, 19 nt, Homo sapiens
  misc_RNA (1)...(19): siRNA sense strand
gaagaucacaugacuggaa

SEQ ID NO: 2139722 - RNA, 19 nt, Homo sapiens
  misc_RNA (1)...(19): siRNA sense strand
gcacuggaaccaccugaua

SEQ ID NO: 2139723 - RNA, 19 nt, Homo sapiens
  misc_RNA (1)...(19): siRNA sense strand
gcaccaugcugcuuugaau

SEQ ID NO: 2139724 - RNA, 19 nt, Homo sapiens
  misc_RNA (1)...(19): siRNA sense strand
auacaaaggugucaaguuc

SEQ ID NO: 2139725 - RNA, 19 nt, Homo sapiens
  misc_RNA (1)...(19): siRNA sense strand
ucaaugaacagaacaauga

SEQ ID NO: 2139726 - RNA, 19 nt, Homo sapiens
  misc_RNA (1)...(19): siRNA sense strand
acccaaagcugaacucaaa

SEQ ID NO: 2139727 - RNA, 19 nt, Homo sapiens
  misc_RNA (1)...(19): siRNA sense strand
ggaacugacgucaacauaa

SEQ ID NO: 2139728 - RNA, 19 nt, Homo sapiens
  misc_RNA (1)...(19): siRNA sense strand
cuacgaagcucuguauaau

SEQ ID NO: 2139729 - RNA, 19 nt, Homo sapiens
  misc_RNA (1)...(19): siRNA sense strand
caacguggcugacucaaaa

SEQ ID NO: 2139730 - RNA, 19 nt, Homo sapiens
  misc_RNA (1)...(19): siRNA sense strand
gaggaaauccgcacuggaa

SEQ ID NO: 2139731 - RNA, 19 nt, Homo sapiens
  misc_RNA (1)...(19): siRNA sense strand
cgaaguggccuaucaguug

SEQ ID NO: 2139732 - RNA, 19 nt, Homo sapiens
  misc_RNA (1)...(19): siRNA sense strand
caaagaaagugguguuggu

SEQ ID NO: 2139733 - RNA, 19 nt, Homo sapiens
  misc_RNA (1)...(19): siRNA sense strand
ugaaggcucuggguuauga

SEQ ID NO: 2139734 - RNA, 19 nt, Homo sapiens
  misc_RNA (1)...(19): siRNA sense strand
caaauagcagcauuaauug

SEQ ID NO: 2139735 - RNA, 19 nt, Homo sapiens
  misc_RNA (1)...(19): siRNA sense strand
ggacagaauccacgcaaga

SEQ ID NO: 2139736 - RNA, 19 nt, Homo sapiens
  misc_RNA (1)...(19): siRNA sense strand
gaccaagacuccacgaaca

SEQ ID NO: 2139737 - RNA, 19 nt, Homo sapiens
  misc_RNA (1)...(19): siRNA sense strand
ggccaaaugugaacugugu

SEQ ID NO: 2139738 - RNA, 19 nt, Homo sapiens
  misc_RNA (1)...(19): siRNA sense strand
gcuccaugcugaucaaaga

SEQ ID NO: 2139739 - RNA, 19 nt, Homo sapiens
  misc_RNA (1)...(19): siRNA sense strand
ugacagcacuggcuacaca

SEQ ID NO: 2139740 - RNA, 19 nt, Homo sapiens
  misc_RNA (1)...(19): siRNA sense strand
cagagaaacucaucuucga

SEQ ID NO: 2139741 - RNA, 19 nt, Homo sapiens
  misc_RNA (1)...(19): siRNA sense strand
aagaagaccacauagauaa

SEQ ID NO: 2139742 - RNA, 19 nt, Homo sapiens
  misc_RNA (1)...(19): siRNA sense strand
acacagagguggugaaggu

SEQ ID NO: 2139743 - RNA, 19 nt, Homo sapiens
  misc_RNA (1)...(19): siRNA sense strand
gcucgcacccugaaacuuu

SEQ ID NO: 2139744 - RNA, 19 nt, Homo sapiens
  misc_RNA (1)...(19): siRNA sense strand
ggaccaagaugcccaaucc

SEQ ID NO: 2139745 - RNA, 19 nt, Homo sapiens
  misc_RNA (1)...(19): siRNA sense strand
gguuacagcuccauugaca

SEQ ID NO: 2139746 - RNA, 19 nt, Homo sapiens
  misc_RNA (1)...(19): siRNA sense strand
gggaguggcuggagucgau

SEQ ID NO: 2139747 - RNA, 19 nt, Homo sapiens
  misc_RNA (1)...(19): siRNA sense strand
cuacggagcacaugaagaa

SEQ ID NO: 2139748 - RNA, 19 nt, Homo sapiens
  misc_RNA (1)...(19): siRNA sense strand
ggagagggccaaaugugaa

SEQ ID NO: 2139749 - RNA, 19 nt, Homo sapiens
  misc_RNA (1)...(19): siRNA sense strand
ggugaaggcucuggguuau

SEQ ID NO: 2139750 - RNA, 19 nt, Homo sapiens
  misc_RNA (1)...(19): siRNA sense strand
cuacguccauuccuucuug

SEQ ID NO: 2139751 - RNA, 19 nt, Homo sapiens
  misc_RNA (1)...(19): siRNA sense strand
gaagaccacauagauaaga

SEQ ID NO: 2139752 - RNA, 19 nt, Homo sapiens
  misc_RNA (1)...(19): siRNA sense strand
cagcugagaugauugaaac

SEQ ID NO: 2139753 - RNA, 19 nt, Homo sapiens
  misc_RNA (1)...(19): siRNA sense strand
gaaccugaccuacgagauc

SEQ ID NO: 2139754 - RNA, 19 nt, Homo sapiens
  misc_RNA (1)...(19): siRNA sense strand
cacgagauccggaacauuu

SEQ ID NO: 2139755 - RNA, 19 nt, Homo sapiens
  misc_RNA (1)...(19): siRNA sense strand
gaacaaugacaacgagaca

SEQ ID NO: 2139756 - RNA, 19 nt, Homo sapiens
  misc_RNA (1)...(19): siRNA sense strand
gagaagggauugacuuuuc

SEQ ID NO: 2139757 - RNA, 19 nt, Homo sapiens
  misc_RNA (1)...(19): siRNA sense strand
gggaugagauugagaaaau

SEQ ID NO: 2139758 - RNA, 19 nt, Homo sapiens
  misc_RNA (1)...(19): siRNA sense strand
uaacagcagagacaaagaa

SEQ ID NO: 2139759 - RNA, 19 nt, Homo sapiens
  misc_RNA (1)...(19): siRNA sense strand
cgaacacccuuaugaacug

SEQ ID NO: 2139760 - RNA, 19 nt, Homo sapiens
  misc_RNA (1)...(19): siRNA sense strand
gcccggagacggaaaguuu

SEQ ID NO: 2139761 - RNA, 19 nt, Homo sapiens
  misc_RNA (1)...(19): siRNA sense strand
cagcauuaauugaagauca

SEQ ID NO: 2139762 - RNA, 19 nt, Homo sapiens
  misc_RNA (1)...(19): siRNA sense strand
gaacugccuucucaaaaga

SEQ ID NO: 2139763 - RNA, 19 nt, Homo sapiens
  misc_RNA (1)...(19): siRNA sense strand
caaaagagccagcaaauag

SEQ ID NO: 2139764 - RNA, 19 nt, Homo sapiens
  misc_RNA (1)...(19): siRNA sense strand
cuccugagcugcaacacua

SEQ ID NO: 2139765 - RNA, 19 nt, Homo sapiens
  misc_RNA (1)...(19): siRNA sense strand
ggagugaguccuuauccaa

SEQ ID NO: 2139766 - RNA, 19 nt, Homo sapiens
  misc_RNA (1)...(19): siRNA sense strand
gcugcuacccucugcauuu

SEQ ID NO: 2139767 - RNA, 19 nt, Homo sapiens
  misc_RNA (1)...(19): siRNA sense strand
caccugauauggaccaaga

SEQ ID NO: 2139768 - RNA, 19 nt, Homo sapiens
  misc_RNA (1)...(19): siRNA sense strand
cuugacagcuucugagguu

SEQ ID NO: 2139769 - RNA, 19 nt, Homo sapiens
  misc_RNA (1)...(19): siRNA sense strand
agaggaagaagaccacaua

SEQ ID NO: 2139770 - RNA, 19 nt, Homo sapiens
  misc_RNA (1)...(19): siRNA sense strand
caagacgccugugccaaga

SEQ ID NO: 2139771 - RNA, 19 nt, Homo sapiens
  misc_RNA (1)...(19): siRNA sense strand
ccaauuaucugggcuccau

SEQ ID NO: 2139772 - RNA, 19 nt, Homo sapiens
  misc_RNA (1)...(19): siRNA sense strand
ggagaugggcagugcuuug

SEQ ID NO: 2139773 - RNA, 19 nt, Homo sapiens
  misc_RNA (1)...(19): siRNA sense strand
ugacugcccuagacacugu

SEQ ID NO: 2139774 - RNA, 19 nt, Homo sapiens
  misc_RNA (1)...(19): siRNA sense strand
aaucaugaguucuauugga

SEQ ID NO: 2139775 - RNA, 19 nt, Homo sapiens
  misc_RNA (1)...(19): siRNA sense strand
gaacacccuuaugaacugu

SEQ ID NO: 2139776 - RNA, 19 nt, Homo sapiens
  misc_RNA (1)...(19): siRNA sense strand
gcgaucaucugaccaagac

SEQ ID NO: 2139777 - RNA, 19 nt, Homo sapiens
  misc_RNA (1)...(19): siRNA sense strand
ugaugcaaaugcugaagaa

SEQ ID NO: 2139778 - RNA, 19 nt, Homo sapiens
  misc_RNA (1)...(19): siRNA sense strand
gcauuuggcagccuggaaa

SEQ ID NO: 2139779 - RNA, 19 nt, Homo sapiens
  misc_RNA (1)...(19): siRNA sense strand
ggaaaucuacggagcacau

SEQ ID NO: 2139780 - RNA, 19 nt, Homo sapiens
  misc_RNA (1)...(19): siRNA sense strand
cagcagagacaaagaaagu

SEQ ID NO: 2139781 - RNA, 19 nt, Homo sapiens
  misc_RNA (1)...(19): siRNA sense strand
ccucucaucuccaguaugg

SEQ ID NO: 2139782 - RNA, 19 nt, Homo sapiens
  misc_RNA (1)...(19): siRNA sense strand
aaagauaaccauggacuga

SEQ ID NO: 2139783 - RNA, 19 nt, Homo sapiens
  misc_RNA (1)...(19): siRNA sense strand
cagcaaauagcagcauuaa

SEQ ID NO: 2139784 - RNA, 19 nt, Homo sapiens
  misc_RNA (1)...(19): siRNA sense strand
gugguuaugaagccaauua

SEQ ID NO: 2139785 - RNA, 19 nt, Homo sapiens
  misc_RNA (1)...(19): siRNA sense strand
ccuacgaagcucuguauaa

SEQ ID NO: 2139786 - RNA, 19 nt, Homo sapiens
  misc_RNA (1)...(19): siRNA sense strand
gcaacuaccagacggagau

SEQ ID NO: 2139787 - RNA, 19 nt, Homo sapiens
  misc_RNA (1)...(19): siRNA sense strand
gaaacaaaaucuuccaaac

SEQ ID NO: 2139788 - RNA, 19 nt, Homo sapiens
  misc_RNA (1)...(19): siRNA sense strand
caacaagaacgucauugca

SEQ ID NO: 2139789 - RNA, 19 nt, Homo sapiens
  misc_RNA (1)...(19): siRNA sense strand
caagaccgauguggugcaa

SEQ ID NO: 2139790 - RNA, 19 nt, Homo sapiens
  misc_RNA (1)...(19): siRNA sense strand
cugagaugauugaaacaaa

SEQ ID NO: 2139791 - RNA, 19 nt, Homo sapiens
  misc_RNA (1)...(19): siRNA sense strand
gcucgucaauguccugaag

SEQ ID NO: 2139792 - RNA, 19 nt, Homo sapiens
  misc_RNA (1)...(19): siRNA sense strand
ugaauggcuuugacgaugu

SEQ ID NO: 2139793 - RNA, 19 nt, Homo sapiens
  misc_RNA (1)...(19): siRNA sense strand
ggaacgaugcgcugaccaa

SEQ ID NO: 2139794 - RNA, 19 nt, Homo sapiens
  misc_RNA (1)...(19): siRNA sense strand
aagaucacaugacuggaaa

SEQ ID NO: 2139795 - RNA, 19 nt, Homo sapiens
  misc_RNA (1)...(19): siRNA sense strand
agaccgauguggugcaaau

SEQ ID NO: 2139796 - RNA, 19 nt, Homo sapiens
  misc_RNA (1)...(19): siRNA sense strand
gcagaccagccaccacuau

SEQ ID NO: 2139797 - RNA, 19 nt, Homo sapiens
  misc_RNA (1)...(19): siRNA sense strand
acaaaggugucaaguucau

SEQ ID NO: 2139798 - RNA, 19 nt, Homo sapiens
  misc_RNA (1)...(19): siRNA sense strand
aaacucagccgcagcuugu

SEQ ID NO: 2139799 - RNA, 19 nt, Homo sapiens
  misc_RNA (1)...(19): siRNA sense strand
cuuaugaacuguuguuaac

SEQ ID NO: 2139800 - RNA, 19 nt, Homo sapiens
  misc_RNA (1)...(19): siRNA sense strand
gaagacgaacacccuuaug

SEQ ID NO: 2139801 - RNA, 19 nt, Homo sapiens
  misc_RNA (1)...(19): siRNA sense strand
ggaacugccuucucaaaag

SEQ ID NO: 2139802 - RNA, 19 nt, Homo sapiens
  misc_RNA (1)...(19): siRNA sense strand
ggaaaggagaugcccagau

SEQ ID NO: 2139803 - RNA, 19 nt, Homo sapiens
  misc_RNA (1)...(19): siRNA sense strand
cgaguccugugguuaugaa

SEQ ID NO: 2139804 - RNA, 19 nt, Homo sapiens
  misc_RNA (1)...(19): siRNA sense strand
gcaacaccagccagagaaa

SEQ ID NO: 2139805 - RNA, 19 nt, Homo sapiens
  misc_RNA (1)...(19): siRNA sense strand
gaagaaccucugggagcua

SEQ ID NO: 2139806 - RNA, 19 nt, Homo sapiens
  misc_RNA (1)...(19): siRNA sense strand
gaauggcuuugacgauguc

SEQ ID NO: 2139807 - RNA, 19 nt, Homo sapiens
  misc_RNA (1)...(19): siRNA sense strand
ggagugggaugagauugag

SEQ ID NO: 2139808 - RNA, 19 nt, Homo sapiens
  misc_RNA (1)...(19): siRNA sense strand
uagcagcauuaauugaaga

SEQ ID NO: 2139809 - RNA, 19 nt, Homo sapiens
  misc_RNA (1)...(19): siRNA sense strand
ccagcaaauagcagcauua

SEQ ID NO: 2139810 - RNA, 19 nt, Homo sapiens
  misc_RNA (1)...(19): siRNA sense strand
gcugaggugccaagauuug

SEQ ID NO: 2139811 - RNA, 19 nt, Homo sapiens
  misc_RNA (1)...(19): siRNA sense strand
ggacagagaugacuccaaa

SEQ ID NO: 2139812 - RNA, 19 nt, Homo sapiens
  misc_RNA (1)...(19): siRNA sense strand
gaggaggacuuuaaccuua

SEQ ID NO: 2139813 - RNA, 19 nt, Homo sapiens
  misc_RNA (1)...(19): siRNA sense strand
gaugaugaaugucacaaua

SEQ ID NO: 2139814 - RNA, 19 nt, Homo sapiens
  misc_RNA (1)...(19): siRNA sense strand
ugagugagguuccagauua

SEQ ID NO: 2139815 - RNA, 19 nt, Homo sapiens
  misc_RNA (1)...(19): siRNA sense strand
ugaaggagcugcuggagaa

SEQ ID NO: 2139816 - RNA, 19 nt, Homo sapiens
  misc_RNA (1)...(19): siRNA sense strand
ccagaaagguggaagaaga

SEQ ID NO: 2139817 - RNA, 19 nt, Homo sapiens
  misc_RNA (1)...(19): siRNA sense strand
aaacuaaccugcuauaucu

SEQ ID NO: 2139818 - RNA, 19 nt, Homo sapiens
  misc_RNA (1)...(19): siRNA sense strand
ccaacugcaugaaguauaa

SEQ ID NO: 2139819 - RNA, 19 nt, Homo sapiens
  misc_RNA (1)...(19): siRNA sense strand
gcacaucaguccucuucaa

SEQ ID NO: 2139820 - RNA, 19 nt, Homo sapiens
  misc_RNA (1)...(19): siRNA sense strand
gaaacuaaccugcuauauc

SEQ ID NO: 2139821 - RNA, 19 nt, Homo sapiens
  misc_RNA (1)...(19): siRNA sense strand
gaagacaagugcagugaag

SEQ ID NO: 2139822 - RNA, 19 nt, Homo sapiens
  misc_RNA (1)...(19): siRNA sense strand
aggaggagcugaaguauug

SEQ ID NO: 2139823 - RNA, 19 nt, Homo sapiens
  misc_RNA (1)...(19): siRNA sense strand
gggcugggcucuucaugaa

SEQ ID NO: 2139824 - RNA, 19 nt, Homo sapiens
  misc_RNA (1)...(19): siRNA sense strand
ggaauggugucccucuuau

SEQ ID NO: 2139825 - RNA, 19 nt, Homo sapiens
  misc_RNA (1)...(19): siRNA sense strand
gccauaaggugaacugcua

SEQ ID NO: 2139826 - RNA, 19 nt, Homo sapiens
  misc_RNA (1)...(19): siRNA sense strand
gaacggagacucugacuac

SEQ ID NO: 2139827 - RNA, 19 nt, Homo sapiens
  misc_RNA (1)...(19): siRNA sense strand
ggaggacuuuaaccuuaua

SEQ ID NO: 2139828 - RNA, 19 nt, Homo sapiens
  misc_RNA (1)...(19): siRNA sense strand
gcgcaagacugccuacugu

SEQ ID NO: 2139829 - RNA, 19 nt, Homo sapiens
  misc_RNA (1)...(19): siRNA sense strand
guaguggucucuccuuuca

SEQ ID NO: 2139830 - RNA, 19 nt, Homo sapiens
  misc_RNA (1)...(19): siRNA sense strand
ugcagcggcuucacaauua

SEQ ID NO: 2139831 - RNA, 19 nt, Homo sapiens
  misc_RNA (1)...(19): siRNA sense strand
gcuggaaacuaaccugcua

SEQ ID NO: 2139832 - RNA, 19 nt, Homo sapiens
  misc_RNA (1)...(19): siRNA sense strand
gaaggauccugcacacauc

SEQ ID NO: 2139833 - RNA, 19 nt, Homo sapiens
  misc_RNA (1)...(19): siRNA sense strand
gaauguaguuugggucuca

SEQ ID NO: 2139834 - RNA, 19 nt, Homo sapiens
  misc_RNA (1)...(19): siRNA sense strand
gauaucaccgaaugcaaua

SEQ ID NO: 2139835 - RNA, 19 nt, Homo sapiens
  misc_RNA (1)...(19): siRNA sense strand
ggcagaagcuccggcauga

SEQ ID NO: 2139836 - RNA, 19 nt, Homo sapiens
  misc_RNA (1)...(19): siRNA sense strand
gcaagacugccuacuguga

SEQ ID NO: 2139837 - RNA, 19 nt, Homo sapiens
  misc_RNA (1)...(19): siRNA sense strand
gggaagacguggacaacau

SEQ ID NO: 2139838 - RNA, 19 nt, Homo sapiens
  misc_RNA (1)...(19): siRNA sense strand
gaagagagagaagcucaaa

SEQ ID NO: 2139839 - RNA, 19 nt, Homo sapiens
  misc_RNA (1)...(19): siRNA sense strand
ugaaggaggagcugaagua

SEQ ID NO: 2139840 - RNA, 19 nt, Homo sapiens
  misc_RNA (1)...(19): siRNA sense strand
gaagucugcuuugcuaaca

SEQ ID NO: 2139841 - RNA, 19 nt, Homo sapiens
  misc_RNA (1)...(19): siRNA sense strand
ccaaggagcaggagcugua

SEQ ID NO: 2139842 - RNA, 19 nt, Homo sapiens
  misc_RNA (1)...(19): siRNA sense strand
cagagaacaucggcuauga

SEQ ID NO: 2139843 - RNA, 19 nt, Homo sapiens
  misc_RNA (1)...(19): siRNA sense strand
gcacacaucuucgcagaac

SEQ ID NO: 2139844 - RNA, 19 nt, Homo sapiens
  misc_RNA (1)...(19): siRNA sense strand
cagauuaccuggaauucau

SEQ ID NO: 2139845 - RNA, 19 nt, Homo sapiens
  misc_RNA (1)...(19): siRNA sense strand
ggacuuuaaccuuauaguu

SEQ ID NO: 2139846 - RNA, 19 nt, Homo sapiens
  misc_RNA (1)...(19): siRNA sense strand
ugagaaagagucauacuug

SEQ ID NO: 2139847 - RNA, 19 nt, Homo sapiens
  misc_RNA (1)...(19): siRNA sense strand
ccugaagucugcuuugcua

SEQ ID NO: 2139848 - RNA, 19 nt, Homo sapiens
  misc_RNA (1)...(19): siRNA sense strand
ugaaacccauuaaugauag

SEQ ID NO: 2139849 - RNA, 19 nt, Homo sapiens
  misc_RNA (1)...(19): siRNA sense strand
caucugcagucccaaagaa

SEQ ID NO: 2139850 - RNA, 19 nt, Homo sapiens
  misc_RNA (1)...(19): siRNA sense strand
ucaagggagugcccaagaa

SEQ ID NO: 2139851 - RNA, 19 nt, Homo sapiens
  misc_RNA (1)...(19): siRNA sense strand
ccaagaaacccucauccaa

SEQ ID NO: 2139852 - RNA, 19 nt, Homo sapiens
  misc_RNA (1)...(19): siRNA sense strand
ucccacagauacccucuua

SEQ ID NO: 2139853 - RNA, 19 nt, Homo sapiens
  misc_RNA (1)...(19): siRNA sense strand
gcaauguuauucucuucug

SEQ ID NO: 2139854 - RNA, 19 nt, Homo sapiens
  misc_RNA (1)...(19): siRNA sense strand
caacaagacaguauccaau

SEQ ID NO: 2139855 - RNA, 19 nt, Homo sapiens
  misc_RNA (1)...(19): siRNA sense strand
gaaguauaaugcuaaagac

SEQ ID NO: 2139856 - RNA, 19 nt, Homo sapiens
  misc_RNA (1)...(19): siRNA sense strand
guuauucucuucugugaca

SEQ ID NO: 2139857 - RNA, 19 nt, Homo sapiens
  misc_RNA (1)...(19): siRNA sense strand
aggaagagguggaggaaga

SEQ ID NO: 2139858 - RNA, 19 nt, Homo sapiens
  misc_RNA (1)...(19): siRNA sense strand
ggacuggcauuugaagcuu

SEQ ID NO: 2139859 - RNA, 19 nt, Homo sapiens
  misc_RNA (1)...(19): siRNA sense strand
guauaaugcuaaagacaca

SEQ ID NO: 2139860 - RNA, 19 nt, Homo sapiens
  misc_RNA (1)...(19): siRNA sense strand
gugguggacuggcauuuga

SEQ ID NO: 2139861 - RNA, 19 nt, Homo sapiens
  misc_RNA (1)...(19): siRNA sense strand
gaaagguggaagaagauga

SEQ ID NO: 2139862 - RNA, 19 nt, Homo sapiens
  misc_RNA (1)...(19): siRNA sense strand
augcagagguagaguauga

SEQ ID NO: 2139863 - RNA, 19 nt, Homo sapiens
  misc_RNA (1)...(19): siRNA sense strand
gggagacccugacauaugc

SEQ ID NO: 2139864 - RNA, 19 nt, Homo sapiens
  misc_RNA (1)...(19): siRNA sense strand
gaguagaugggcacaguuu

SEQ ID NO: 2139865 - RNA, 19 nt, Homo sapiens
  misc_RNA (1)...(19): siRNA sense strand
ggaagcaggccaagacaca

SEQ ID NO: 2139866 - RNA, 19 nt, Homo sapiens
  misc_RNA (1)...(19): siRNA sense strand
aaagcaagaugaguuugaa

SEQ ID NO: 2139867 - RNA, 19 nt, Homo sapiens
  misc_RNA (1)...(19): siRNA sense strand
gguagaguaugacauggau

SEQ ID NO: 2139868 - RNA, 19 nt, Homo sapiens
  misc_RNA (1)...(19): siRNA sense strand
ucaagaaggccaagaaugg

SEQ ID NO: 2139869 - RNA, 19 nt, Homo sapiens
  misc_RNA (1)...(19): siRNA sense strand
gcagcggcuucacaauuau

SEQ ID NO: 2139870 - RNA, 19 nt, Homo sapiens
  misc_RNA (1)...(19): siRNA sense strand
ccacagauacccucuuaca

SEQ ID NO: 2139871 - RNA, 19 nt, Homo sapiens
  misc_RNA (1)...(19): siRNA sense strand
ggauaucaccgaaugcaau

SEQ ID NO: 2139872 - RNA, 19 nt, Homo sapiens
  misc_RNA (1)...(19): siRNA sense strand
uagaccggcuugagaaaga

SEQ ID NO: 2139873 - RNA, 19 nt, Homo sapiens
  misc_RNA (1)...(19): siRNA sense strand
ggcuggacauggugaauga

SEQ ID NO: 2139874 - RNA, 19 nt, Homo sapiens
  misc_RNA (1)...(19): siRNA sense strand
gagaagacaagugcaguga

SEQ ID NO: 2139875 - RNA, 19 nt, Homo sapiens
  misc_RNA (1)...(19): siRNA sense strand
cagugcagguggccuauga

SEQ ID NO: 2139876 - RNA, 19 nt, Homo sapiens
  misc_RNA (1)...(19): siRNA sense strand
cggagacucugacuacaau

SEQ ID NO: 2139877 - RNA, 19 nt, Homo sapiens
  misc_RNA (1)...(19): siRNA sense strand
ggguuaagcuacagagaag

SEQ ID NO: 2139878 - RNA, 19 nt, Homo sapiens
  misc_RNA (1)...(19): siRNA sense strand
caacagacuaucccucaug

SEQ ID NO: 2139879 - RNA, 19 nt, Homo sapiens
  misc_RNA (1)...(19): siRNA sense strand
ccaagcagguuccuaaagc

SEQ ID NO: 2139880 - RNA, 19 nt, Homo sapiens
  misc_RNA (1)...(19): siRNA sense strand
cagcccagcuuccguaugg

SEQ ID NO: 2139881 - RNA, 19 nt, Homo sapiens
  misc_RNA (1)...(19): siRNA sense strand
ggcagaggcuggagagaag

SEQ ID NO: 2139882 - RNA, 19 nt, Homo sapiens
  misc_RNA (1)...(19): siRNA sense strand
uacaauggcucaggcagaa

SEQ ID NO: 2139883 - RNA, 19 nt, Homo sapiens
  misc_RNA (1)...(19): siRNA sense strand
cugaaacccauuaaugaua

SEQ ID NO: 2139884 - RNA, 19 nt, Homo sapiens
  misc_RNA (1)...(19): siRNA sense strand
caagaaggagccagaggaa

SEQ ID NO: 2139885 - RNA, 19 nt, Homo sapiens
  misc_RNA (1)...(19): siRNA sense strand
gugccuggaugaugaaugu

SEQ ID NO: 2139886 - RNA, 19 nt, Homo sapiens
  misc_RNA (1)...(19): siRNA sense strand
caagggagugcccaagaaa

SEQ ID NO: 2139887 - RNA, 19 nt, Homo sapiens
  misc_RNA (1)...(19): siRNA sense strand
gagcuaacugcccaggaua

SEQ ID NO: 2139888 - RNA, 19 nt, Homo sapiens
  misc_RNA (1)...(19): siRNA sense strand
agcaggagcuguagugaga

SEQ ID NO: 2139889 - RNA, 19 nt, Homo sapiens
  misc_RNA (1)...(19): siRNA sense strand
ugaagcagaagaucaagaa

SEQ ID NO: 2139890 - RNA, 19 nt, Homo sapiens
  misc_RNA (1)...(19): siRNA sense strand
gcgaguagaugggcacagu

SEQ ID NO: 2139891 - RNA, 19 nt, Homo sapiens
  misc_RNA (1)...(19): siRNA sense strand
cgaaugcaauaguaacaag

SEQ ID NO: 2139892 - RNA, 19 nt, Homo sapiens
  misc_RNA (1)...(19): siRNA sense strand
gaaggaggagcugaaguau

SEQ ID NO: 2139893 - RNA, 19 nt, Homo sapiens
  misc_RNA (1)...(19): siRNA sense strand
ccuuugagcugcugguaga

SEQ ID NO: 2139894 - RNA, 19 nt, Homo sapiens
  misc_RNA (1)...(19): siRNA sense strand
gcucuuccuuguccucuuc

SEQ ID NO: 2139895 - RNA, 19 nt, Homo sapiens
  misc_RNA (1)...(19): siRNA sense strand
ccuagaagcaucagugaga

SEQ ID NO: 2139896 - RNA, 19 nt, Homo sapiens
  misc_RNA (1)...(19): siRNA sense strand
gguggcgccuucaaacaga

SEQ ID NO: 2139897 - RNA, 19 nt, Homo sapiens
  misc_RNA (1)...(19): siRNA sense strand
gugugugccuggaugauga

SEQ ID NO: 2139898 - RNA, 19 nt, Homo sapiens
  misc_RNA (1)...(19): siRNA sense strand
gcagagaacaucggcuaug

SEQ ID NO: 2139899 - RNA, 19 nt, Homo sapiens
  misc_RNA (1)...(19): siRNA sense strand
cggaauggugucccucuua

SEQ ID NO: 2139900 - RNA, 19 nt, Homo sapiens
  misc_RNA (1)...(19): siRNA sense strand
gcagccauccagugccaua

SEQ ID NO: 2139901 - RNA, 19 nt, Homo sapiens
  misc_RNA (1)...(19): siRNA sense strand
gaaugucacaauagcaaug

SEQ ID NO: 2139902 - RNA, 19 nt, Homo sapiens
  misc_RNA (1)...(19): siRNA sense strand
ggaaacuaaccugcuauau

SEQ ID NO: 2139903 - RNA, 19 nt, Homo sapiens
  misc_RNA (1)...(19): siRNA sense strand
caaacgagagcaggucaaa

SEQ ID NO: 2139904 - RNA, 19 nt, Homo sapiens
  misc_RNA (1)...(19): siRNA sense strand
ugagcuaacugcccaggau

SEQ ID NO: 2139905 - RNA, 19 nt, Homo sapiens
  misc_RNA (1)...(19): siRNA sense strand
ggaugcagagguagaguau

SEQ ID NO: 2139906 - RNA, 19 nt, Homo sapiens
  misc_RNA (1)...(19): siRNA sense strand
caccaucacucaacaagac

SEQ ID NO: 2139907 - RNA, 19 nt, Homo sapiens
  misc_RNA (1)...(19): siRNA sense strand
ccacagccaccaucacuca

SEQ ID NO: 2139908 - RNA, 19 nt, Homo sapiens
  misc_RNA (1)...(19): siRNA sense strand
agcagaagaucaagaagga

SEQ ID NO: 2139909 - RNA, 19 nt, Homo sapiens
  misc_RNA (1)...(19): siRNA sense strand
ggaggaagaagagcaggaa

SEQ ID NO: 2139910 - RNA, 19 nt, Homo sapiens
  misc_RNA (1)...(19): siRNA sense strand
ccugcccgcuggaaacuaa

SEQ ID NO: 2139911 - RNA, 19 nt, Homo sapiens
  misc_RNA (1)...(19): siRNA sense strand
gaacaaagccuccaacuac

SEQ ID NO: 2139912 - RNA, 19 nt, Homo sapiens
  misc_RNA (1)...(19): siRNA sense strand
ggaggucccuggagaagga

SEQ ID NO: 2139913 - RNA, 19 nt, Homo sapiens
  misc_RNA (1)...(19): siRNA sense strand
caagagaaccggaagaaca

SEQ ID NO: 2139914 - RNA, 19 nt, Homo sapiens
  misc_RNA (1)...(19): siRNA sense strand
gggcgucgcucuagagauc

SEQ ID NO: 2139915 - RNA, 19 nt, Homo sapiens
  misc_RNA (1)...(19): siRNA sense strand
ugaacaaagccuccaacua

SEQ ID NO: 2139916 - RNA, 19 nt, Homo sapiens
  misc_RNA (1)...(19): siRNA sense strand
ucgaugggcuagaggagaa

SEQ ID NO: 2139917 - RNA, 19 nt, Homo sapiens
  misc_RNA (1)...(19): siRNA sense strand
agaacaugcugcucucugu

SEQ ID NO: 2139918 - RNA, 19 nt, Homo sapiens
  misc_RNA (1)...(19): siRNA sense strand
ggcaagagaaccggaagaa

SEQ ID NO: 2139919 - RNA, 19 nt, Homo sapiens
  misc_RNA (1)...(19): siRNA sense strand
gaaucugggcgucgcucua

SEQ ID NO: 2139920 - RNA, 19 nt, Homo sapiens
  misc_RNA (1)...(19): siRNA sense strand
ggagaagcugucccagugu

SEQ ID NO: 2139921 - RNA, 19 nt, Homo sapiens
  misc_RNA (1)...(19): siRNA sense strand
agagaucgaugggcuagag

SEQ ID NO: 2139922 - RNA, 19 nt, Homo sapiens
  misc_RNA (1)...(19): siRNA sense strand
aaaacagccuaaugaacaa

SEQ ID NO: 2139923 - RNA, 19 nt, Homo sapiens
  misc_RNA (1)...(19): siRNA sense strand
aaaagaagcgggagaaucu

SEQ ID NO: 2139924 - RNA, 19 nt, Homo sapiens
  misc_RNA (1)...(19): siRNA sense strand
gcaacgagcuccuggacuu

SEQ ID NO: 2139925 - RNA, 19 nt, Homo sapiens
  misc_RNA (1)...(19): siRNA sense strand
guacugauuuacaggauga

SEQ ID NO: 2139926 - RNA, 19 nt, Homo sapiens
  misc_RNA (1)...(19): siRNA sense strand
gggcugugcuugugucuga

SEQ ID NO: 2139927 - RNA, 19 nt, Homo sapiens
  misc_RNA (1)...(19): siRNA sense strand
acgaugagguacugauuua

SEQ ID NO: 2139928 - RNA, 19 nt, Homo sapiens
  misc_RNA (1)...(19): siRNA sense strand
ccacuucacugcaauugug

SEQ ID NO: 2139929 - RNA, 19 nt, Homo sapiens
  misc_RNA (1)...(19): siRNA sense strand
caacugcucugacgaugag

SEQ ID NO: 2139930 - RNA, 19 nt, Homo sapiens
  misc_RNA (1)...(19): siRNA sense strand
ggaacgggcugugcuugug

SEQ ID NO: 2139931 - RNA, 19 nt, Homo sapiens
  misc_RNA (1)...(19): siRNA sense strand
ccucaagggucgcuacuuc

SEQ ID NO: 2139932 - RNA, 19 nt, Homo sapiens
  misc_RNA (1)...(19): siRNA sense strand
caaggaccgcugucuauga

SEQ ID NO: 2139933 - RNA, 19 nt, Homo sapiens
  misc_RNA (1)...(19): siRNA sense strand
gcgggacgaugaccuggaa

SEQ ID NO: 2139934 - RNA, 19 nt, Homo sapiens
  misc_RNA (1)...(19): siRNA sense strand
guaacccacuucacugcaa

SEQ ID NO: 2139935 - RNA, 19 nt, Homo sapiens
  misc_RNA (1)...(19): siRNA sense strand
cggaaggucucgaacaucu

SEQ ID NO: 2139936 - RNA, 19 nt, Homo sapiens
  misc_RNA (1)...(19): siRNA sense strand
ccaaucggcugcagaagcu

SEQ ID NO: 2139937 - RNA, 19 nt, Homo sapiens
  misc_RNA (1)...(19): siRNA sense strand
gacgaugagguacugauuu

SEQ ID NO: 2139938 - RNA, 19 nt, Homo sapiens
  misc_RNA (1)...(19): siRNA sense strand
guacaacugcucugacgau

SEQ ID NO: 2139939 - RNA, 19 nt, Homo sapiens
  misc_RNA (1)...(19): siRNA sense strand
gaugagguacugauuuaca

SEQ ID NO: 2139940 - RNA, 19 nt, Homo sapiens
  misc_RNA (1)...(19): siRNA sense strand
ccaggacuuugccaacaug

SEQ ID NO: 2139941 - RNA, 19 nt, Homo sapiens
  misc_RNA (1)...(19): siRNA sense strand
gaucccagccuccaacaag

SEQ ID NO: 2139942 - RNA, 19 nt, Homo sapiens
  misc_RNA (1)...(19): siRNA sense strand
gugcuugugucugaaguga

SEQ ID NO: 2139943 - RNA, 19 nt, Homo sapiens
  misc_RNA (1)...(19): siRNA sense strand
ccaaggggcugcucuuugu

SEQ ID NO: 2139944 - RNA, 19 nt, Homo sapiens
  misc_RNA (1)...(19): siRNA sense strand
gcaacuucaucauccacau

SEQ ID NO: 2139945 - RNA, 19 nt, Homo sapiens
  misc_RNA (1)...(19): siRNA sense strand
gaucuggaccucuccuaca

SEQ ID NO: 2139946 - RNA, 19 nt, Homo sapiens
  misc_RNA (1)...(19): siRNA sense strand
gaacgggcugugcuugugu

SEQ ID NO: 2139947 - RNA, 19 nt, Homo sapiens
  misc_RNA (1)...(19): siRNA sense strand
ggaccucuccuacaacaac

SEQ ID NO: 2139948 - RNA, 19 nt, Homo sapiens
  misc_RNA (1)...(19): siRNA sense strand
ccaagucccgccucucaga

SEQ ID NO: 2139949 - RNA, 19 nt, Homo sapiens
  misc_RNA (1)...(19): siRNA sense strand
gcucccaggcuucggcuuu

SEQ ID NO: 2139950 - RNA, 19 nt, Homo sapiens
  misc_RNA (1)...(19): siRNA sense strand
gcgcccaguucuucaccaa

SEQ ID NO: 2139951 - RNA, 19 nt, Homo sapiens
  misc_RNA (1)...(19): siRNA sense strand
uaacccacuucacugcaau

SEQ ID NO: 2139952 - RNA, 19 nt, Homo sapiens
  misc_RNA (1)...(19): siRNA sense strand
gccaggacuuugccaacau

SEQ ID NO: 2139953 - RNA, 19 nt, Homo sapiens
  misc_RNA (1)...(19): siRNA sense strand
gcuacaaggucugcaacca

SEQ ID NO: 2139954 - RNA, 19 nt, Homo sapiens
  misc_RNA (1)...(19): siRNA sense strand
ccacgcugcuggucuucau

SEQ ID NO: 2139955 - RNA, 19 nt, Homo sapiens
  misc_RNA (1)...(19): siRNA sense strand
ccacccuuguccuuuaguu

SEQ ID NO: 2139956 - RNA, 19 nt, Homo sapiens
  misc_RNA (1)...(19): siRNA sense strand
gaacaccaucagccacauc

SEQ ID NO: 2139957 - RNA, 19 nt, Homo sapiens
  misc_RNA (1)...(19): siRNA sense strand
agauguaccagcugcagua

SEQ ID NO: 2139958 - RNA, 19 nt, Homo sapiens
  misc_RNA (1)...(19): siRNA sense strand
caucagccgccaggacuuu

SEQ ID NO: 2139959 - RNA, 19 nt, Homo sapiens
  misc_RNA (1)...(19): siRNA sense strand
ucucgaacaucuggacgaa

SEQ ID NO: 2139960 - RNA, 19 nt, Homo sapiens
  misc_RNA (1)...(19): siRNA sense strand
ugacgaugagguacugauu

SEQ ID NO: 2139961 - RNA, 19 nt, Homo sapiens
  misc_RNA (1)...(19): siRNA sense strand
caccacaucucaggacagu

SEQ ID NO: 2139962 - RNA, 19 nt, Homo sapiens
  misc_RNA (1)...(19): siRNA sense strand
ccucaaggaccgcugucua

SEQ ID NO: 2139963 - RNA, 19 nt, Homo sapiens
  misc_RNA (1)...(19): siRNA sense strand
aagcgcagccucucuguca

SEQ ID NO: 2139964 - RNA, 19 nt, Homo sapiens
  misc_RNA (1)...(19): siRNA sense strand
ggaacaccaucagccacau

SEQ ID NO: 2139965 - RNA, 19 nt, Homo sapiens
  misc_RNA (1)...(19): siRNA sense strand
ugcagcaccuuaucgugaa

SEQ ID NO: 2139966 - RNA, 19 nt, Homo sapiens
  misc_RNA (1)...(19): siRNA sense strand
gcaugcucuugcccuuuga

SEQ ID NO: 2139967 - RNA, 19 nt, Homo sapiens
  misc_RNA (1)...(19): siRNA sense strand
caccuuaucgugaacaaca

SEQ ID NO: 2139968 - RNA, 19 nt, Homo sapiens
  misc_RNA (1)...(19): siRNA sense strand
ccagcacacacacaaguug

SEQ ID NO: 2139969 - RNA, 19 nt, Homo sapiens
  misc_RNA (1)...(19): siRNA sense strand
gccccacccuuguccuuua

SEQ ID NO: 2139970 - RNA, 19 nt, Homo sapiens
  misc_RNA (1)...(19): siRNA sense strand
ggacuuccugcugacauug

SEQ ID NO: 2139971 - RNA, 19 nt, Homo sapiens
  misc_RNA (1)...(19): siRNA sense strand
ucaaguggucugucagcaa

SEQ ID NO: 2139972 - RNA, 19 nt, Homo sapiens
  misc_RNA (1)...(19): siRNA sense strand
gaccucaagagucagagaa

SEQ ID NO: 2139973 - RNA, 19 nt, Homo sapiens
  misc_RNA (1)...(19): siRNA sense strand
cccuggaccucaagaguca

SEQ ID NO: 2139974 - RNA, 19 nt, Homo sapiens
  misc_RNA (1)...(19): siRNA sense strand
ggucaacaaccugguguca

SEQ ID NO: 2139975 - RNA, 19 nt, Homo sapiens
  misc_RNA (1)...(19): siRNA sense strand
gggacuggcuacgacuugu

SEQ ID NO: 2139976 - RNA, 19 nt, Homo sapiens
  misc_RNA (1)...(19): siRNA sense strand
accacaaccugcuggauca

SEQ ID NO: 2139977 - RNA, 19 nt, Homo sapiens
  misc_RNA (1)...(19): siRNA sense strand
cagccacuccuucgacaug

SEQ ID NO: 2139978 - RNA, 19 nt, Homo sapiens
  misc_RNA (1)...(19): siRNA sense strand
ucaagagucagagaaagga

SEQ ID NO: 2139979 - RNA, 19 nt, Homo sapiens
  misc_RNA (1)...(19): siRNA sense strand
ccucaagagucagagaaag

SEQ ID NO: 2139980 - RNA, 19 nt, Homo sapiens
  misc_RNA (1)...(19): siRNA sense strand
ggaccucaagagucagaga

SEQ ID NO: 2139981 - RNA, 19 nt, Homo sapiens
  misc_RNA (1)...(19): siRNA sense strand
caacuucaucauccacauc

SEQ ID NO: 2139982 - RNA, 19 nt, Homo sapiens
  misc_RNA (1)...(19): siRNA sense strand
ucacccagcacacacacaa

SEQ ID NO: 2139983 - RNA, 19 nt, Homo sapiens
  misc_RNA (1)...(19): siRNA sense strand
ggacuggcuacgacuugug

SEQ ID NO: 2139984 - RNA, 19 nt, Homo sapiens
  misc_RNA (1)...(19): siRNA sense strand
gaacaaggaugcagaagaa

SEQ ID NO: 2139985 - RNA, 19 nt, Homo sapiens
  misc_RNA (1)...(19): siRNA sense strand
gaauucagcugaugaguuu

SEQ ID NO: 2139986 - RNA, 19 nt, Homo sapiens
  misc_RNA (1)...(19): siRNA sense strand
gaaacccacuuuauuguga

SEQ ID NO: 2139987 - RNA, 19 nt, Homo sapiens
  misc_RNA (1)...(19): siRNA sense strand
gcccauaucuucaguuauu

SEQ ID NO: 2139988 - RNA, 19 nt, Homo sapiens
  misc_RNA (1)...(19): siRNA sense strand
agaagaaacucaagaugua

SEQ ID NO: 2139989 - RNA, 19 nt, Homo sapiens
  misc_RNA (1)...(19): siRNA sense strand
gaacuuggauacaguacuu

SEQ ID NO: 2139990 - RNA, 19 nt, Homo sapiens
  misc_RNA (1)...(19): siRNA sense strand
aaacugagguguuggaauu

SEQ ID NO: 2139991 - RNA, 19 nt, Homo sapiens
  misc_RNA (1)...(19): siRNA sense strand
gggcauagauucagcauuc

SEQ ID NO: 2139992 - RNA, 19 nt, Homo sapiens
  misc_RNA (1)...(19): siRNA sense strand
gacaagcaguucuguauga

SEQ ID NO: 2139993 - RNA, 19 nt, Homo sapiens
  misc_RNA (1)...(19): siRNA sense strand
gccaggaccuucucucuaa

SEQ ID NO: 2139994 - RNA, 19 nt, Homo sapiens
  misc_RNA (1)...(19): siRNA sense strand
ucaagaaacucccagagaa

SEQ ID NO: 2139995 - RNA, 19 nt, Homo sapiens
  misc_RNA (1)...(19): siRNA sense strand
gaaagaagggcauagauuc

SEQ ID NO: 2139996 - RNA, 19 nt, Homo sapiens
  misc_RNA (1)...(19): siRNA sense strand
cagggaagauauaugaaua

SEQ ID NO: 2139997 - RNA, 19 nt, Homo sapiens
  misc_RNA (1)...(19): siRNA sense strand
caagugugcugcaaucauu

SEQ ID NO: 2139998 - RNA, 19 nt, Homo sapiens
  misc_RNA (1)...(19): siRNA sense strand
gaauuuguuuccaucagua

SEQ ID NO: 2139999 - RNA, 19 nt, Homo sapiens
  misc_RNA (1)...(19): siRNA sense strand
uaacacaagugaucacaga

SEQ ID NO: 2140000 - RNA, 19 nt, Homo sapiens
  misc_RNA (1)...(19): siRNA sense strand
gcuuggaccugucagauaa

SEQ ID NO: 2140001 - RNA, 19 nt, Homo sapiens
  misc_RNA (1)...(19): siRNA sense strand
gcagauggccauucagaaa

SEQ ID NO: 2140002 - RNA, 19 nt, Homo sapiens
  misc_RNA (1)...(19): siRNA sense strand
ccaaagagaagaagacaaa

SEQ ID NO: 2140003 - RNA, 19 nt, Homo sapiens
  misc_RNA (1)...(19): siRNA sense strand
caacugagugacaucauua

SEQ ID NO: 2140004 - RNA, 19 nt, Homo sapiens
  misc_RNA (1)...(19): siRNA sense strand
gauccaugcuaccugcuua

SEQ ID NO: 2140005 - RNA, 19 nt, Homo sapiens
  misc_RNA (1)...(19): siRNA sense strand
ccagaaugauaacugcuua

SEQ ID NO: 2140006 - RNA, 19 nt, Homo sapiens
  misc_RNA (1)...(19): siRNA sense strand
ggagaaauuugggaucuau

SEQ ID NO: 2140007 - RNA, 19 nt, Homo sapiens
  misc_RNA (1)...(19): siRNA sense strand
ugagagcucuuguggauau

SEQ ID NO: 2140008 - RNA, 19 nt, Homo sapiens
  misc_RNA (1)...(19): siRNA sense strand
ggagauacaggagaaauuu

SEQ ID NO: 2140009 - RNA, 19 nt, Homo sapiens
  misc_RNA (1)...(19): siRNA sense strand
uaagaagccagacgaauuu

SEQ ID NO: 2140010 - RNA, 19 nt, Homo sapiens
  misc_RNA (1)...(19): siRNA sense strand
agacacgaauauacaguua

SEQ ID NO: 2140011 - RNA, 19 nt, Homo sapiens
  misc_RNA (1)...(19): siRNA sense strand
gcaguuuguucuacuaaga

SEQ ID NO: 2140012 - RNA, 19 nt, Homo sapiens
  misc_RNA (1)...(19): siRNA sense strand
gaagauacugggagaaaga

SEQ ID NO: 2140013 - RNA, 19 nt, Homo sapiens
  misc_RNA (1)...(19): siRNA sense strand
aaagauagguuguagugau

SEQ ID NO: 2140014 - RNA, 19 nt, Homo sapiens
  misc_RNA (1)...(19): siRNA sense strand
gccaugaaauccauaaugu

SEQ ID NO: 2140015 - RNA, 19 nt, Homo sapiens
  misc_RNA (1)...(19): siRNA sense strand
ccaguuagcucagcguuug

SEQ ID NO: 2140016 - RNA, 19 nt, Homo sapiens
  misc_RNA (1)...(19): siRNA sense strand
cuucagaggucuaggguuu

SEQ ID NO: 2140017 - RNA, 19 nt, Homo sapiens
  misc_RNA (1)...(19): siRNA sense strand
gaagaagggacaagcaguu

SEQ ID NO: 2140018 - RNA, 19 nt, Homo sapiens
  misc_RNA (1)...(19): siRNA sense strand
gccaguagcuacagguuug

SEQ ID NO: 2140019 - RNA, 19 nt, Homo sapiens
  misc_RNA (1)...(19): siRNA sense strand
gcaagagugccuacaaaga

SEQ ID NO: 2140020 - RNA, 19 nt, Homo sapiens
  misc_RNA (1)...(19): siRNA sense strand
caucuugacuucuccauca

SEQ ID NO: 2140021 - RNA, 19 nt, Homo sapiens
  misc_RNA (1)...(19): siRNA sense strand
gaacaacuucacugccuuu

SEQ ID NO: 2140022 - RNA, 19 nt, Homo sapiens
  misc_RNA (1)...(19): siRNA sense strand
cgaaugaaauuguccuauc

SEQ ID NO: 2140023 - RNA, 19 nt, Homo sapiens
  misc_RNA (1)...(19): siRNA sense strand
caugggacguaucacuuua

SEQ ID NO: 2140024 - RNA, 19 nt, Homo sapiens
  misc_RNA (1)...(19): siRNA sense strand
gcuguuggcugaaauaaac

SEQ ID NO: 2140025 - RNA, 19 nt, Homo sapiens
  misc_RNA (1)...(19): siRNA sense strand
cugaugaguuugcaaauga

SEQ ID NO: 2140026 - RNA, 19 nt, Homo sapiens
  misc_RNA (1)...(19): siRNA sense strand
gcagaagaauucagcugau

SEQ ID NO: 2140027 - RNA, 19 nt, Homo sapiens
  misc_RNA (1)...(19): siRNA sense strand
gcaagcaguauauguuuga

SEQ ID NO: 2140028 - RNA, 19 nt, Homo sapiens
  misc_RNA (1)...(19): siRNA sense strand
uuagugaccucuuauuugu

SEQ ID NO: 2140029 - RNA, 19 nt, Homo sapiens
  misc_RNA (1)...(19): siRNA sense strand
caagaaacucccagagaaa

SEQ ID NO: 2140030 - RNA, 19 nt, Homo sapiens
  misc_RNA (1)...(19): siRNA sense strand
gaugagguaacauaucuaa

SEQ ID NO: 2140031 - RNA, 19 nt, Homo sapiens
  misc_RNA (1)...(19): siRNA sense strand
caaacuggcccauaucuuc

SEQ ID NO: 2140032 - RNA, 19 nt, Homo sapiens
  misc_RNA (1)...(19): siRNA sense strand
auacaugcccagccuauua

SEQ ID NO: 2140033 - RNA, 19 nt, Homo sapiens
  misc_RNA (1)...(19): siRNA sense strand
ggaccugcaguuaaagaua

SEQ ID NO: 2140034 - RNA, 19 nt, Homo sapiens
  misc_RNA (1)...(19): siRNA sense strand
gaauuaucccuaccacaaa

SEQ ID NO: 2140035 - RNA, 19 nt, Homo sapiens
  misc_RNA (1)...(19): siRNA sense strand
gaacuugacccaucagcau

SEQ ID NO: 2140036 - RNA, 19 nt, Homo sapiens
  misc_RNA (1)...(19): siRNA sense strand
cagcugagucggaucuuua

SEQ ID NO: 2140037 - RNA, 19 nt, Homo sapiens
  misc_RNA (1)...(19): siRNA sense strand
gaagccagacgaauuuguu

SEQ ID NO: 2140038 - RNA, 19 nt, Homo sapiens
  misc_RNA (1)...(19): siRNA sense strand
cagaguggcugaugucaag

SEQ ID NO: 2140039 - RNA, 19 nt, Homo sapiens
  misc_RNA (1)...(19): siRNA sense strand
ucaagugaaugcugcagaa

SEQ ID NO: 2140040 - RNA, 19 nt, Homo sapiens
  misc_RNA (1)...(19): siRNA sense strand
ggucacuccuuccauauag

SEQ ID NO: 2140041 - RNA, 19 nt, Homo sapiens
  misc_RNA (1)...(19): siRNA sense strand
gaaacccucucagccaaug

SEQ ID NO: 2140042 - RNA, 19 nt, Homo sapiens
  misc_RNA (1)...(19): siRNA sense strand
agucggaucuuuauguuug

SEQ ID NO: 2140043 - RNA, 19 nt, Homo sapiens
  misc_RNA (1)...(19): siRNA sense strand
caaaugaagcccagagugu

SEQ ID NO: 2140044 - RNA, 19 nt, Homo sapiens
  misc_RNA (1)...(19): siRNA sense strand
ggaccugucagauaauuau

SEQ ID NO: 2140045 - RNA, 19 nt, Homo sapiens
  misc_RNA (1)...(19): siRNA sense strand
ucaacugagugacaucauu

SEQ ID NO: 2140046 - RNA, 19 nt, Homo sapiens
  misc_RNA (1)...(19): siRNA sense strand
aaacgacccuagugagaau

SEQ ID NO: 2140047 - RNA, 19 nt, Homo sapiens
  misc_RNA (1)...(19): siRNA sense strand
gaaaccaccugugcauuuu

SEQ ID NO: 2140048 - RNA, 19 nt, Homo sapiens
  misc_RNA (1)...(19): siRNA sense strand
caggaggccuucucaagug

SEQ ID NO: 2140049 - RNA, 19 nt, Homo sapiens
  misc_RNA (1)...(19): siRNA sense strand
ggucaagugugcugcaauc

SEQ ID NO: 2140050 - RNA, 19 nt, Homo sapiens
  misc_RNA (1)...(19): siRNA sense strand
gugaugagguaacauaucu

SEQ ID NO: 2140051 - RNA, 19 nt, Homo sapiens
  misc_RNA (1)...(19): siRNA sense strand
gaccugcaguuaaagauag

SEQ ID NO: 2140052 - RNA, 19 nt, Homo sapiens
  misc_RNA (1)...(19): siRNA sense strand
ugagugacaucauuaccuu

SEQ ID NO: 2140053 - RNA, 19 nt, Homo sapiens
  misc_RNA (1)...(19): siRNA sense strand
gagcagauggccauucaga

SEQ ID NO: 2140054 - RNA, 19 nt, Homo sapiens
  misc_RNA (1)...(19): siRNA sense strand
ccucauggccaucuucuuu

SEQ ID NO: 2140055 - RNA, 19 nt, Homo sapiens
  misc_RNA (1)...(19): siRNA sense strand
ugagguaacauaucuaaga

SEQ ID NO: 2140056 - RNA, 19 nt, Homo sapiens
  misc_RNA (1)...(19): siRNA sense strand
gaaugaaauuguccuaucc

SEQ ID NO: 2140057 - RNA, 19 nt, Homo sapiens
  misc_RNA (1)...(19): siRNA sense strand
gaagaaacucaagauguau

SEQ ID NO: 2140058 - RNA, 19 nt, Homo sapiens
  misc_RNA (1)...(19): siRNA sense strand
agaaaccaccugugcauuu

SEQ ID NO: 2140059 - RNA, 19 nt, Homo sapiens
  misc_RNA (1)...(19): siRNA sense strand
gcucagugcuaacacaagu

SEQ ID NO: 2140060 - RNA, 19 nt, Homo sapiens
  misc_RNA (1)...(19): siRNA sense strand
gcccaaggaacaacagaua

SEQ ID NO: 2140061 - RNA, 19 nt, Homo sapiens
  misc_RNA (1)...(19): siRNA sense strand
ugaaagaaauagcaguaag

SEQ ID NO: 2140062 - RNA, 19 nt, Homo sapiens
  misc_RNA (1)...(19): siRNA sense strand
gcacagaaagaagggcaua

SEQ ID NO: 2140063 - RNA, 19 nt, Homo sapiens
  misc_RNA (1)...(19): siRNA sense strand
gggacaagcaguucuguau

SEQ ID NO: 2140064 - RNA, 19 nt, Homo sapiens
  misc_RNA (1)...(19): siRNA sense strand
cagaagaaacucaagaugu

SEQ ID NO: 2140065 - RNA, 19 nt, Homo sapiens
  misc_RNA (1)...(19): siRNA sense strand
gcugaugaguuugcaaaug

SEQ ID NO: 2140066 - RNA, 19 nt, Homo sapiens
  misc_RNA (1)...(19): siRNA sense strand
gaggaaggccaggaacuuu

SEQ ID NO: 2140067 - RNA, 19 nt, Homo sapiens
  misc_RNA (1)...(19): siRNA sense strand
uggcccauaucuucaguua

SEQ ID NO: 2140068 - RNA, 19 nt, Homo sapiens
  misc_RNA (1)...(19): siRNA sense strand
gauaguggaagaacaacuu

SEQ ID NO: 2140069 - RNA, 19 nt, Homo sapiens
  misc_RNA (1)...(19): siRNA sense strand
gagaagaagacaaaguuag

SEQ ID NO: 2140070 - RNA, 19 nt, Homo sapiens
  misc_RNA (1)...(19): siRNA sense strand
cuugagagcucuuguggau

SEQ ID NO: 2140071 - RNA, 19 nt, Homo sapiens
  misc_RNA (1)...(19): siRNA sense strand
agaaagaagggcauagauu

SEQ ID NO: 2140072 - RNA, 19 nt, Homo sapiens
  misc_RNA (1)...(19): siRNA sense strand
gcagaagaaacucaagaug

SEQ ID NO: 2140073 - RNA, 19 nt, Homo sapiens
  misc_RNA (1)...(19): siRNA sense strand
gugagcagauggccauuca

SEQ ID NO: 2140074 - RNA, 19 nt, Homo sapiens
  misc_RNA (1)...(19): siRNA sense strand
uggcuacucuuaugcagaa

SEQ ID NO: 2140075 - RNA, 19 nt, Homo sapiens
  misc_RNA (1)...(19): siRNA sense strand
uagaucaagugaagaggaa

SEQ ID NO: 2140076 - RNA, 19 nt, Homo sapiens
  misc_RNA (1)...(19): siRNA sense strand
caggcuacaagaagaauua

SEQ ID NO: 2140077 - RNA, 19 nt, Homo sapiens
  misc_RNA (1)...(19): siRNA sense strand
gaugugaacuuggauacag

SEQ ID NO: 2140078 - RNA, 19 nt, Homo sapiens
  misc_RNA (1)...(19): siRNA sense strand
ggaaggccaggaacuuuau

SEQ ID NO: 2140079 - RNA, 19 nt, Homo sapiens
  misc_RNA (1)...(19): siRNA sense strand
ggaaacccacuuuauugug

SEQ ID NO: 2140080 - RNA, 19 nt, Homo sapiens
  misc_RNA (1)...(19): siRNA sense strand
agaauuaucccuaccacaa

SEQ ID NO: 2140081 - RNA, 19 nt, Homo sapiens
  misc_RNA (1)...(19): siRNA sense strand
ggagaacaaggaugcagaa

SEQ ID NO: 2140082 - RNA, 19 nt, Homo sapiens
  misc_RNA (1)...(19): siRNA sense strand
uggacaaacuggcccauau

SEQ ID NO: 2140083 - RNA, 19 nt, Homo sapiens
  misc_RNA (1)...(19): siRNA sense strand
agauagcucugcaccuuga

SEQ ID NO: 2140084 - RNA, 19 nt, Homo sapiens
  misc_RNA (1)...(19): siRNA sense strand
gaauacugcuguccacuua

SEQ ID NO: 2140085 - RNA, 19 nt, Homo sapiens
  misc_RNA (1)...(19): siRNA sense strand
gcagagcacugaaauuuga

SEQ ID NO: 2140086 - RNA, 19 nt, Homo sapiens
  misc_RNA (1)...(19): siRNA sense strand
ggaccaaccuuucgacauu

SEQ ID NO: 2140087 - RNA, 19 nt, Homo sapiens
  misc_RNA (1)...(19): siRNA sense strand
gagaugacguguaacaauu

SEQ ID NO: 2140088 - RNA, 19 nt, Homo sapiens
  misc_RNA (1)...(19): siRNA sense strand
uagcggcucuguugaguua

SEQ ID NO: 2140089 - RNA, 19 nt, Homo sapiens
  misc_RNA (1)...(19): siRNA sense strand
gcaaugaugacuugacuaa

SEQ ID NO: 2140090 - RNA, 19 nt, Homo sapiens
  misc_RNA (1)...(19): siRNA sense strand
gaacagacauuggcagaag

SEQ ID NO: 2140091 - RNA, 19 nt, Homo sapiens
  misc_RNA (1)...(19): siRNA sense strand
cuacauggaccuaguaaua

SEQ ID NO: 2140092 - RNA, 19 nt, Homo sapiens
  misc_RNA (1)...(19): siRNA sense strand
gaaaccacauuuaagaaca

SEQ ID NO: 2140093 - RNA, 19 nt, Homo sapiens
  misc_RNA (1)...(19): siRNA sense strand
ccacaagcauugaacuauu

SEQ ID NO: 2140094 - RNA, 19 nt, Homo sapiens
  misc_RNA (1)...(19): siRNA sense strand
cagaaacucuuccaacaug

SEQ ID NO: 2140095 - RNA, 19 nt, Homo sapiens
  misc_RNA (1)...(19): siRNA sense strand
uuaauugggucauuuggua

SEQ ID NO: 2140096 - RNA, 19 nt, Homo sapiens
  misc_RNA (1)...(19): siRNA sense strand
gaagaugccaugcgaauca

SEQ ID NO: 2140097 - RNA, 19 nt, Homo sapiens
  misc_RNA (1)...(19): siRNA sense strand
gcaccaaauucaaauaaag

SEQ ID NO: 2140098 - RNA, 19 nt, Homo sapiens
  misc_RNA (1)...(19): siRNA sense strand
caaagucaguuccuuauac

SEQ ID NO: 2140099 - RNA, 19 nt, Homo sapiens
  misc_RNA (1)...(19): siRNA sense strand
ggucaaauacaguuaauug

SEQ ID NO: 2140100 - RNA, 19 nt, Homo sapiens
  misc_RNA (1)...(19): siRNA sense strand
gaacaucuuggaacucaaa

SEQ ID NO: 2140101 - RNA, 19 nt, Homo sapiens
  misc_RNA (1)...(19): siRNA sense strand
cgaaacagcuaacgaaagg

SEQ ID NO: 2140102 - RNA, 19 nt, Homo sapiens
  misc_RNA (1)...(19): siRNA sense strand
gagcagcguuucccaagga

SEQ ID NO: 2140103 - RNA, 19 nt, Homo sapiens
  misc_RNA (1)...(19): siRNA sense strand
cacaagcauugaacuauuu

SEQ ID NO: 2140104 - RNA, 19 nt, Homo sapiens
  misc_RNA (1)...(19): siRNA sense strand
gcaggauucuggaagcaaa

SEQ ID NO: 2140105 - RNA, 19 nt, Homo sapiens
  misc_RNA (1)...(19): siRNA sense strand
caauaucacugaacagaca

SEQ ID NO: 2140106 - RNA, 19 nt, Homo sapiens
  misc_RNA (1)...(19): siRNA sense strand
gaagaagacuugagaaaag

SEQ ID NO: 2140107 - RNA, 19 nt, Homo sapiens
  misc_RNA (1)...(19): siRNA sense strand
gcaguauuguuauucauuc

SEQ ID NO: 2140108 - RNA, 19 nt, Homo sapiens
  misc_RNA (1)...(19): siRNA sense strand
aaugaugacuugacuaaug

SEQ ID NO: 2140109 - RNA, 19 nt, Homo sapiens
  misc_RNA (1)...(19): siRNA sense strand
gaaagccagucaccucaca

SEQ ID NO: 2140110 - RNA, 19 nt, Homo sapiens
  misc_RNA (1)...(19): siRNA sense strand
agaagcagcuguaaauagu

SEQ ID NO: 2140111 - RNA, 19 nt, Homo sapiens
  misc_RNA (1)...(19): siRNA sense strand
uguagaaacugacuccauu

SEQ ID NO: 2140112 - RNA, 19 nt, Homo sapiens
  misc_RNA (1)...(19): siRNA sense strand
gcucauuucuggccaagug

SEQ ID NO: 2140113 - RNA, 19 nt, Homo sapiens
  misc_RNA (1)...(19): siRNA sense strand
cagugaagguguuguagaa

SEQ ID NO: 2140114 - RNA, 19 nt, Homo sapiens
  misc_RNA (1)...(19): siRNA sense strand
gagcacgucugaagagaag

SEQ ID NO: 2140115 - RNA, 19 nt, Homo sapiens
  misc_RNA (1)...(19): siRNA sense strand
gaacaggaacccagcaaca

SEQ ID NO: 2140116 - RNA, 19 nt, Homo sapiens
  misc_RNA (1)...(19): siRNA sense strand
ucaucaggaucaaacuuua

SEQ ID NO: 2140117 - RNA, 19 nt, Homo sapiens
  misc_RNA (1)...(19): siRNA sense strand
ugacggaacccaugaauca

SEQ ID NO: 2140118 - RNA, 19 nt, Homo sapiens
  misc_RNA (1)...(19): siRNA sense strand
aaacaggacuccaguacca

SEQ ID NO: 2140119 - RNA, 19 nt, Homo sapiens
  misc_RNA (1)...(19): siRNA sense strand
acaaagagcuuggaaacca

SEQ ID NO: 2140120 - RNA, 19 nt, Homo sapiens
  misc_RNA (1)...(19): siRNA sense strand
ugauaaagcugcucaugag

SEQ ID NO: 2140121 - RNA, 19 nt, Homo sapiens
  misc_RNA (1)...(19): siRNA sense strand
caaguagccuccaguuucu

SEQ ID NO: 2140122 - RNA, 19 nt, Homo sapiens
  misc_RNA (1)...(19): siRNA sense strand
acacagacaucaugaaagg

SEQ ID NO: 2140123 - RNA, 19 nt, Homo sapiens
  misc_RNA (1)...(19): siRNA sense strand
ggagaugacguguaacaau

SEQ ID NO: 2140124 - RNA, 19 nt, Homo sapiens
  misc_RNA (1)...(19): siRNA sense strand
ucaaguagccuccaguuuc

SEQ ID NO: 2140125 - RNA, 19 nt, Homo sapiens
  misc_RNA (1)...(19): siRNA sense strand
ggagaagggcccagugaug

SEQ ID NO: 2140126 - RNA, 19 nt, Homo sapiens
  misc_RNA (1)...(19): siRNA sense strand
gaaacugacuccauuuuag

SEQ ID NO: 2140127 - RNA, 19 nt, Homo sapiens
  misc_RNA (1)...(19): siRNA sense strand
gcacaaauuuucaaacauc

SEQ ID NO: 2140128 - RNA, 19 nt, Homo sapiens
  misc_RNA (1)...(19): siRNA sense strand
caacagaacacaagaaagc

SEQ ID NO: 2140129 - RNA, 19 nt, Homo sapiens
  misc_RNA (1)...(19): siRNA sense strand
ggaccacagugaagguguu

SEQ ID NO: 2140130 - RNA, 19 nt, Homo sapiens
  misc_RNA (1)...(19): siRNA sense strand
acauggaccuaguaauaaa

SEQ ID NO: 2140131 - RNA, 19 nt, Homo sapiens
  misc_RNA (1)...(19): siRNA sense strand
ccuguuaccguuccauuua

SEQ ID NO: 2140132 - RNA, 19 nt, Homo sapiens
  misc_RNA (1)...(19): siRNA sense strand
uaaagcugcucaugagaca

SEQ ID NO: 2140133 - RNA, 19 nt, Homo sapiens
  misc_RNA (1)...(19): siRNA sense strand
uagugguucuggucaaaua

SEQ ID NO: 2140134 - RNA, 19 nt, Homo sapiens
  misc_RNA (1)...(19): siRNA sense strand
guaaauaguauccuagagu

SEQ ID NO: 2140135 - RNA, 19 nt, Homo sapiens
  misc_RNA (1)...(19): siRNA sense strand
uggcagagcacugaaauuu

SEQ ID NO: 2140136 - RNA, 19 nt, Homo sapiens
  misc_RNA (1)...(19): siRNA sense strand
gaugaucgauaggauguuc

SEQ ID NO: 2140137 - RNA, 19 nt, Homo sapiens
  misc_RNA (1)...(19): siRNA sense strand
ugagaaaaguggacaauga

SEQ ID NO: 2140138 - RNA, 19 nt, Homo sapiens
  misc_RNA (1)...(19): siRNA sense strand
gccaaagccuauccagaug

SEQ ID NO: 2140139 - RNA, 19 nt, Homo sapiens
  misc_RNA (1)...(19): siRNA sense strand
gcacaaccacagcaggaaa

SEQ ID NO: 2140140 - RNA, 19 nt, Homo sapiens
  misc_RNA (1)...(19): siRNA sense strand
gaagcagcuguaaauagua

SEQ ID NO: 2140141 - RNA, 19 nt, Homo sapiens
  misc_RNA (1)...(19): siRNA sense strand
gagcuuggaaaccacauuu

SEQ ID NO: 2140142 - RNA, 19 nt, Homo sapiens
  misc_RNA (1)...(19): siRNA sense strand
ucacugaggaccaaccuuu

SEQ ID NO: 2140143 - RNA, 19 nt, Homo sapiens
  misc_RNA (1)...(19): siRNA sense strand
gagauggugaugaucgaua

SEQ ID NO: 2140144 - RNA, 19 nt, Homo sapiens
  misc_RNA (1)...(19): siRNA sense strand
ccaaagucaguuccuuaua

SEQ ID NO: 2140145 - RNA, 19 nt, Homo sapiens
  misc_RNA (1)...(19): siRNA sense strand
guucauagacagacuccua

SEQ ID NO: 2140146 - RNA, 19 nt, Homo sapiens
  misc_RNA (1)...(19): siRNA sense strand
caucuuuaccugugcauaa

SEQ ID NO: 2140147 - RNA, 19 nt, Homo sapiens
  misc_RNA (1)...(19): siRNA sense strand
auaguauccuagaguguua

SEQ ID NO: 2140148 - RNA, 19 nt, Homo sapiens
  misc_RNA (1)...(19): siRNA sense strand
ggacaaugaauuugagaca

SEQ ID NO: 2140149 - RNA, 19 nt, Homo sapiens
  misc_RNA (1)...(19): siRNA sense strand
gaacccagcaacaauucuu

SEQ ID NO: 2140150 - RNA, 19 nt, Homo sapiens
  misc_RNA (1)...(19): siRNA sense strand
acagaugccugcuccuaga

SEQ ID NO: 2140151 - RNA, 19 nt, Homo sapiens
  misc_RNA (1)...(19): siRNA sense strand
ggaccuaguaauaaaucua

SEQ ID NO: 2140152 - RNA, 19 nt, Homo sapiens
  misc_RNA (1)...(19): siRNA sense strand
gcuuggaaaccacauuuaa

SEQ ID NO: 2140153 - RNA, 19 nt, Homo sapiens
  misc_RNA (1)...(19): siRNA sense strand
ccagccagcauuugucuaa

SEQ ID NO: 2140154 - RNA, 19 nt, Homo sapiens
  misc_RNA (1)...(19): siRNA sense strand
acacacagacaucaugaaa

SEQ ID NO: 2140155 - RNA, 19 nt, Homo sapiens
  misc_RNA (1)...(19): siRNA sense strand
gauucuggaagcaaaguua

SEQ ID NO: 2140156 - RNA, 19 nt, Homo sapiens
  misc_RNA (1)...(19): siRNA sense strand
gaccgaugcuuaacaacca

SEQ ID NO: 2140157 - RNA, 19 nt, Homo sapiens
  misc_RNA (1)...(19): siRNA sense strand
acaguuaauugggucauuu

SEQ ID NO: 2140158 - RNA, 19 nt, Homo sapiens
  misc_RNA (1)...(19): siRNA sense strand
gugauggacugccacuuuc

SEQ ID NO: 2140159 - RNA, 19 nt, Homo sapiens
  misc_RNA (1)...(19): siRNA sense strand
aagcagcuguaaauaguau

SEQ ID NO: 2140160 - RNA, 19 nt, Homo sapiens
  misc_RNA (1)...(19): siRNA sense strand
guagaaacugacuccauuu

SEQ ID NO: 2140161 - RNA, 19 nt, Homo sapiens
  misc_RNA (1)...(19): siRNA sense strand
ccacagugaagguguugua

SEQ ID NO: 2140162 - RNA, 19 nt, Homo sapiens
  misc_RNA (1)...(19): siRNA sense strand
acuuggagaugacguguaa

SEQ ID NO: 2140163 - RNA, 19 nt, Homo sapiens
  misc_RNA (1)...(19): siRNA sense strand
acaaugaauuugagacagu

SEQ ID NO: 2140164 - RNA, 19 nt, Homo sapiens
  misc_RNA (1)...(19): siRNA sense strand
guacaccacguccagacua

SEQ ID NO: 2140165 - RNA, 19 nt, Homo sapiens
  misc_RNA (1)...(19): siRNA sense strand
caagggaucucuuuugcuu

SEQ ID NO: 2140166 - RNA, 19 nt, Homo sapiens
  misc_RNA (1)...(19): siRNA sense strand
agccagcauuugucuaaua

SEQ ID NO: 2140167 - RNA, 19 nt, Homo sapiens
  misc_RNA (1)...(19): siRNA sense strand
gucagacgcugcagccuau

SEQ ID NO: 2140168 - RNA, 19 nt, Homo sapiens
  misc_RNA (1)...(19): siRNA sense strand
acucaggcuucuaauguuu

SEQ ID NO: 2140169 - RNA, 19 nt, Homo sapiens
  misc_RNA (1)...(19): siRNA sense strand
uggcagaagaggcauauuu

SEQ ID NO: 2140170 - RNA, 19 nt, Homo sapiens
  misc_RNA (1)...(19): siRNA sense strand
gcaagaggccaauaucacu

SEQ ID NO: 2140171 - RNA, 19 nt, Homo sapiens
  misc_RNA (1)...(19): siRNA sense strand
cuaguaaugcugauccuaa

SEQ ID NO: 2140172 - RNA, 19 nt, Homo sapiens
  misc_RNA (1)...(19): siRNA sense strand
gaaugaaguuuuacacaca

SEQ ID NO: 2140173 - RNA, 19 nt, Homo sapiens
  misc_RNA (1)...(19): siRNA sense strand
caaugaauuugagacaguu

SEQ ID NO: 2140174 - RNA, 19 nt, Homo sapiens
  misc_RNA (1)...(19): siRNA sense strand
aacagaaacucuuccaaca

SEQ ID NO: 2140175 - RNA, 19 nt, Homo sapiens
  misc_RNA (1)...(19): siRNA sense strand
ggcaacuucuucaaacuca

SEQ ID NO: 2140176 - RNA, 19 nt, Homo sapiens
  misc_RNA (1)...(19): siRNA sense strand
gacuauaaaugggcaacuu

SEQ ID NO: 2140177 - RNA, 19 nt, Homo sapiens
  misc_RNA (1)...(19): siRNA sense strand
auauuuggaugccaguaua

SEQ ID NO: 2140178 - RNA, 19 nt, Homo sapiens
  misc_RNA (1)...(19): siRNA sense strand
cagaagaggcauauuugga

SEQ ID NO: 2140179 - RNA, 19 nt, Homo sapiens
  misc_RNA (1)...(19): siRNA sense strand
ggaaaccacauuuaagaac

SEQ ID NO: 2140180 - RNA, 19 nt, Homo sapiens
  misc_RNA (1)...(19): siRNA sense strand
gaaaaguggacaaugaauu

SEQ ID NO: 2140181 - RNA, 19 nt, Homo sapiens
  misc_RNA (1)...(19): siRNA sense strand
aguuauauccgcauccuua

SEQ ID NO: 2140182 - RNA, 19 nt, Homo sapiens
  misc_RNA (1)...(19): siRNA sense strand
acagaucccugggcucuug

SEQ ID NO: 2140183 - RNA, 19 nt, Homo sapiens
  misc_RNA (1)...(19): siRNA sense strand
gauauucugcagccaauuc

SEQ ID NO: 2140184 - RNA, 19 nt, Homo sapiens
  misc_RNA (1)...(19): siRNA sense strand
caucaagccuucaaacuuu

SEQ ID NO: 2140185 - RNA, 19 nt, Homo sapiens
  misc_RNA (1)...(19): siRNA sense strand
caagagcccugggaaguua

SEQ ID NO: 2140186 - RNA, 19 nt, Homo sapiens
  misc_RNA (1)...(19): siRNA sense strand
ggaggaagaucaaggacaa

SEQ ID NO: 2140187 - RNA, 19 nt, Homo sapiens
  misc_RNA (1)...(19): siRNA sense strand
ccucagagauggccacaaa

SEQ ID NO: 2140188 - RNA, 19 nt, Homo sapiens
  misc_RNA (1)...(19): siRNA sense strand
gaaaggacccagagggaaa

SEQ ID NO: 2140189 - RNA, 19 nt, Homo sapiens
  misc_RNA (1)...(19): siRNA sense strand
ggaagaagaggaugaggaa

SEQ ID NO: 2140190 - RNA, 19 nt, Homo sapiens
  misc_RNA (1)...(19): siRNA sense strand
agacggagcucaaggacuu

SEQ ID NO: 2140191 - RNA, 19 nt, Homo sapiens
  misc_RNA (1)...(19): siRNA sense strand
gcaggaacgagaaguuuaa

SEQ ID NO: 2140192 - RNA, 19 nt, Homo sapiens
  misc_RNA (1)...(19): siRNA sense strand
ggaacaaacuccggaucaa

SEQ ID NO: 2140193 - RNA, 19 nt, Homo sapiens
  misc_RNA (1)...(19): siRNA sense strand
gcagacggcagccauguuu

SEQ ID NO: 2140194 - RNA, 19 nt, Homo sapiens
  misc_RNA (1)...(19): siRNA sense strand
gaacaccgaggaugugcua

SEQ ID NO: 2140195 - RNA, 19 nt, Homo sapiens
  misc_RNA (1)...(19): siRNA sense strand
gaacagguagggaugauca

SEQ ID NO: 2140196 - RNA, 19 nt, Homo sapiens
  misc_RNA (1)...(19): siRNA sense strand
caaacucacugcccaaugg

SEQ ID NO: 2140197 - RNA, 19 nt, Homo sapiens
  misc_RNA (1)...(19): siRNA sense strand
ccaagcagguccucaagau

SEQ ID NO: 2140198 - RNA, 19 nt, Homo sapiens
  misc_RNA (1)...(19): siRNA sense strand
gcacaugccgucagaguuc

SEQ ID NO: 2140199 - RNA, 19 nt, Homo sapiens
  misc_RNA (1)...(19): siRNA sense strand
gaagaucaaggacaaggaa

SEQ ID NO: 2140200 - RNA, 19 nt, Homo sapiens
  misc_RNA (1)...(19): siRNA sense strand
aggaggaccugcagcauuu

SEQ ID NO: 2140201 - RNA, 19 nt, Homo sapiens
  misc_RNA (1)...(19): siRNA sense strand
ggaggaagaugaggaagag

SEQ ID NO: 2140202 - RNA, 19 nt, Homo sapiens
  misc_RNA (1)...(19): siRNA sense strand
ccaacuacguggucaagga

SEQ ID NO: 2140203 - RNA, 19 nt, Homo sapiens
  misc_RNA (1)...(19): siRNA sense strand
ggacgaaaccaacaugagu

SEQ ID NO: 2140204 - RNA, 19 nt, Homo sapiens
  misc_RNA (1)...(19): siRNA sense strand
gcaagagcccugggaaguu

SEQ ID NO: 2140205 - RNA, 19 nt, Homo sapiens
  misc_RNA (1)...(19): siRNA sense strand
ggaagaagaagaggaggaa

SEQ ID NO: 2140206 - RNA, 19 nt, Homo sapiens
  misc_RNA (1)...(19): siRNA sense strand
cagcugcccuggaggaaga

SEQ ID NO: 2140207 - RNA, 19 nt, Homo sapiens
  misc_RNA (1)...(19): siRNA sense strand
gaccaugugugcagguuca

SEQ ID NO: 2140208 - RNA, 19 nt, Homo sapiens
  misc_RNA (1)...(19): siRNA sense strand
agaagaggaugaggaagaa

SEQ ID NO: 2140209 - RNA, 19 nt, Homo sapiens
  misc_RNA (1)...(19): siRNA sense strand
ugaagcacaugccgucaga

SEQ ID NO: 2140210 - RNA, 19 nt, Homo sapiens
  misc_RNA (1)...(19): siRNA sense strand
gaggaggaccugcagcauu

SEQ ID NO: 2140211 - RNA, 19 nt, Homo sapiens
  misc_RNA (1)...(19): siRNA sense strand
gggagaauguggcccucaa

SEQ ID NO: 2140212 - RNA, 19 nt, Homo sapiens
  misc_RNA (1)...(19): siRNA sense strand
gcaaagagugggucaucau

SEQ ID NO: 2140213 - RNA, 19 nt, Homo sapiens
  misc_RNA (1)...(19): siRNA sense strand
ggcaggaacgagaaguuua

SEQ ID NO: 2140214 - RNA, 19 nt, Homo sapiens
  misc_RNA (1)...(19): siRNA sense strand
ggaagaggaggaggaagaa

SEQ ID NO: 2140215 - RNA, 19 nt, Homo sapiens
  misc_RNA (1)...(19): siRNA sense strand
gucuggagcuggccucuga

SEQ ID NO: 2140216 - RNA, 19 nt, Homo sapiens
  misc_RNA (1)...(19): siRNA sense strand
ggaggaggaagaugaggaa

SEQ ID NO: 2140217 - RNA, 19 nt, Homo sapiens
  misc_RNA (1)...(19): siRNA sense strand
gccaagcccugagaaagug

SEQ ID NO: 2140218 - RNA, 19 nt, Homo sapiens
  misc_RNA (1)...(19): siRNA sense strand
ccucuguccucaagucuga

SEQ ID NO: 2140219 - RNA, 19 nt, Homo sapiens
  misc_RNA (1)...(19): siRNA sense strand
ggaagaggaagaagaggau

SEQ ID NO: 2140220 - RNA, 19 nt, Homo sapiens
  misc_RNA (1)...(19): siRNA sense strand
ggaagaugaggaagaggaa

SEQ ID NO: 2140221 - RNA, 19 nt, Homo sapiens
  misc_RNA (1)...(19): siRNA sense strand
ccaaaacgcuggugcuugu

SEQ ID NO: 2140222 - RNA, 19 nt, Homo sapiens
  misc_RNA (1)...(19): siRNA sense strand
ccaaagagcgguggagcaa

SEQ ID NO: 2140223 - RNA, 19 nt, Homo sapiens
  misc_RNA (1)...(19): siRNA sense strand
caaggacaaggaacaggua

SEQ ID NO: 2140224 - RNA, 19 nt, Homo sapiens
  misc_RNA (1)...(19): siRNA sense strand
uggcagcccuucccacuca

SEQ ID NO: 2140225 - RNA, 19 nt, Homo sapiens
  misc_RNA (1)...(19): siRNA sense strand
ugaauuagaaggugguuuc

SEQ ID NO: 2140226 - RNA, 19 nt, Homo sapiens
  misc_RNA (1)...(19): siRNA sense strand
ucaugucaguguuugagaa

SEQ ID NO: 2140227 - RNA, 19 nt, Homo sapiens
  misc_RNA (1)...(19): siRNA sense strand
gaagaagucgcccgucacu

SEQ ID NO: 2140228 - RNA, 19 nt, Homo sapiens
  misc_RNA (1)...(19): siRNA sense strand
gaacaaacuccggaucaac

SEQ ID NO: 2140229 - RNA, 19 nt, Homo sapiens
  misc_RNA (1)...(19): siRNA sense strand
guuauuucaucccaaggaa

SEQ ID NO: 2140230 - RNA, 19 nt, Homo sapiens
  misc_RNA (1)...(19): siRNA sense strand
ggagaacaccgaggaugug

SEQ ID NO: 2140231 - RNA, 19 nt, Homo sapiens
  misc_RNA (1)...(19): siRNA sense strand
ccugggaaguuauuucauc

SEQ ID NO: 2140232 - RNA, 19 nt, Homo sapiens
  misc_RNA (1)...(19): siRNA sense strand
aagaagaggaugaggaaga

SEQ ID NO: 2140233 - RNA, 19 nt, Homo sapiens
  misc_RNA (1)...(19): siRNA sense strand
ggcaggaugucuagaugca

SEQ ID NO: 2140234 - RNA, 19 nt, Homo sapiens
  misc_RNA (1)...(19): siRNA sense strand
ggagccaagcccugagaaa

SEQ ID NO: 2140235 - RNA, 19 nt, Homo sapiens
  misc_RNA (1)...(19): siRNA sense strand
gggagaacaccgaggaugu

SEQ ID NO: 2140236 - RNA, 19 nt, Homo sapiens
  misc_RNA (1)...(19): siRNA sense strand
gaggaccuuugugcacauu

SEQ ID NO: 2140237 - RNA, 19 nt, Homo sapiens
  misc_RNA (1)...(19): siRNA sense strand
ggaugaucaaggagaagua

SEQ ID NO: 2140238 - RNA, 19 nt, Homo sapiens
  misc_RNA (1)...(19): siRNA sense strand
agagauggccacaaacuca

SEQ ID NO: 2140239 - RNA, 19 nt, Homo sapiens
  misc_RNA (1)...(19): siRNA sense strand
uggccgugcucaagaaguu

SEQ ID NO: 2140240 - RNA, 19 nt, Homo sapiens
  misc_RNA (1)...(19): siRNA sense strand
gagccaagcccugagaaag

SEQ ID NO: 2140241 - RNA, 19 nt, Homo sapiens
  misc_RNA (1)...(19): siRNA sense strand
gagcugugccucugagucu

SEQ ID NO: 2140242 - RNA, 19 nt, Homo sapiens
  misc_RNA (1)...(19): siRNA sense strand
uggcugaggaggaggauuu

SEQ ID NO: 2140243 - RNA, 19 nt, Homo sapiens
  misc_RNA (1)...(19): siRNA sense strand
ugaucaaggagaaguauga

SEQ ID NO: 2140244 - RNA, 19 nt, Homo sapiens
  misc_RNA (1)...(19): siRNA sense strand
uagggaugaucaaggagaa

SEQ ID NO: 2140245 - RNA, 19 nt, Homo sapiens
  misc_RNA (1)...(19): siRNA sense strand
ggaagaucaaggacaagga

SEQ ID NO: 2140246 - RNA, 19 nt, Homo sapiens
  misc_RNA (1)...(19): siRNA sense strand
uacaggaagugcuauaugc

SEQ ID NO: 2140247 - RNA, 19 nt, Homo sapiens
  misc_RNA (1)...(19): siRNA sense strand
gcaagggaaggaccaugug

SEQ ID NO: 2140248 - RNA, 19 nt, Homo sapiens
  misc_RNA (1)...(19): siRNA sense strand
gacuaccaguugaucaugu

SEQ ID NO: 2140249 - RNA, 19 nt, Homo sapiens
  misc_RNA (1)...(19): siRNA sense strand
ggcccaucaugaauuagaa

SEQ ID NO: 2140250 - RNA, 19 nt, Homo sapiens
  misc_RNA (1)...(19): siRNA sense strand
acaucaagccuucaaacuu

SEQ ID NO: 2140251 - RNA, 19 nt, Homo sapiens
  misc_RNA (1)...(19): siRNA sense strand
ccaccuacaggaagugcua

SEQ ID NO: 2140252 - RNA, 19 nt, Homo sapiens
  misc_RNA (1)...(19): siRNA sense strand
gcucagcgcgcaacaacca

SEQ ID NO: 2140253 - RNA, 19 nt, Homo sapiens
  misc_RNA (1)...(19): siRNA sense strand
caaagagugggucaucauc

SEQ ID NO: 2140254 - RNA, 19 nt, Homo sapiens
  misc_RNA (1)...(19): siRNA sense strand
ucuacaugcugguggaguu

SEQ ID NO: 2140255 - RNA, 19 nt, Homo sapiens
  misc_RNA (1)...(19): siRNA sense strand
ggaccuuugugcacauugc

SEQ ID NO: 2140256 - RNA, 19 nt, Homo sapiens
  misc_RNA (1)...(19): siRNA sense strand
ccacaggcccacagagaca

SEQ ID NO: 2140257 - RNA, 19 nt, Homo sapiens
  misc_RNA (1)...(19): siRNA sense strand
aagagugggucaucaucga

SEQ ID NO: 2140258 - RNA, 19 nt, Homo sapiens
  misc_RNA (1)...(19): siRNA sense strand
gagguggccgugcucaaga

SEQ ID NO: 2140259 - RNA, 19 nt, Homo sapiens
  misc_RNA (1)...(19): siRNA sense strand
ggaggucacggauggaucu

SEQ ID NO: 2140260 - RNA, 19 nt, Homo sapiens
  misc_RNA (1)...(19): siRNA sense strand
agggagagcaccugaguga

SEQ ID NO: 2140261 - RNA, 19 nt, Homo sapiens
  misc_RNA (1)...(19): siRNA sense strand
ucaccaagcccgacuacca

SEQ ID NO: 2140262 - RNA, 19 nt, Homo sapiens
  misc_RNA (1)...(19): siRNA sense strand
gaugaucaaggagaaguau

SEQ ID NO: 2140263 - RNA, 19 nt, Homo sapiens
  misc_RNA (1)...(19): siRNA sense strand
cuacaggaagugcuauaug

SEQ ID NO: 2140264 - RNA, 19 nt, Homo sapiens
  misc_RNA (1)...(19): siRNA sense strand
aaacccaccucaacgucau

SEQ ID NO: 2140265 - RNA, 19 nt, Homo sapiens
  misc_RNA (1)...(19): siRNA sense strand
gaugucaaccggaacaaac

SEQ ID NO: 2140266 - RNA, 19 nt, Homo sapiens
  misc_RNA (1)...(19): siRNA sense strand
caagcccgacuaccaguug

SEQ ID NO: 2140267 - RNA, 19 nt, Homo sapiens
  misc_RNA (1)...(19): siRNA sense strand
gagaaaguggccaccaucu

SEQ ID NO: 2140268 - RNA, 19 nt, Homo sapiens
  misc_RNA (1)...(19): siRNA sense strand
aagaagaagaggaggaaga

SEQ ID NO: 2140269 - RNA, 19 nt, Homo sapiens
  misc_RNA (1)...(19): siRNA sense strand
cuaaugggaaggaggaaga

SEQ ID NO: 2140270 - RNA, 19 nt, Homo sapiens
  misc_RNA (1)...(19): siRNA sense strand
acaaggagacggagcucaa

SEQ ID NO: 2140271 - RNA, 19 nt, Homo sapiens
  misc_RNA (1)...(19): siRNA sense strand
ggugaacagcccugaguca

SEQ ID NO: 2140272 - RNA, 19 nt, Homo sapiens
  misc_RNA (1)...(19): siRNA sense strand
caacuacguggucaaggau

SEQ ID NO: 2140273 - RNA, 19 nt, Homo sapiens
  misc_RNA (1)...(19): siRNA sense strand
agaagaggaggaagaggaa

SEQ ID NO: 2140274 - RNA, 19 nt, Homo sapiens
  misc_RNA (1)...(19): siRNA sense strand
ccacaagaaccgggagaug

SEQ ID NO: 2140275 - RNA, 19 nt, Homo sapiens
  misc_RNA (1)...(19): siRNA sense strand
aagaggaggaggaagaaga

SEQ ID NO: 2140276 - RNA, 19 nt, Homo sapiens
  misc_RNA (1)...(19): siRNA sense strand
caugugugcagguucauug

SEQ ID NO: 2140277 - RNA, 19 nt, Homo sapiens
  misc_RNA (1)...(19): siRNA sense strand
guugaucaugucaguguuu

SEQ ID NO: 2140278 - RNA, 19 nt, Homo sapiens
  misc_RNA (1)...(19): siRNA sense strand
agguagggaugaucaagga

SEQ ID NO: 2140279 - RNA, 19 nt, Homo sapiens
  misc_RNA (1)...(19): siRNA sense strand
ccgagaaugaggccuuuga

SEQ ID NO: 2140280 - RNA, 19 nt, Homo sapiens
  misc_RNA (1)...(19): siRNA sense strand
gaauggggcugagauagag

SEQ ID NO: 2140281 - RNA, 19 nt, Homo sapiens
  misc_RNA (1)...(19): siRNA sense strand
ggaugaggaagaagaagag

SEQ ID NO: 2140282 - RNA, 19 nt, Homo sapiens
  misc_RNA (1)...(19): siRNA sense strand
ggaggauuucgacagcaaa

SEQ ID NO: 2140283 - RNA, 19 nt, Homo sapiens
  misc_RNA (1)...(19): siRNA sense strand
cgaguggagcuaccugaga

SEQ ID NO: 2140284 - RNA, 19 nt, Homo sapiens
  misc_RNA (1)...(19): siRNA sense strand
gaacaaugccuacagcuuu

SEQ ID NO: 2140285 - RNA, 19 nt, Homo sapiens
  misc_RNA (1)...(19): siRNA sense strand
caacguggcucgccuaaug

SEQ ID NO: 2140286 - RNA, 19 nt, Homo sapiens
  misc_RNA (1)...(19): siRNA sense strand
acacaaagcuggagcagaa

SEQ ID NO: 2140287 - RNA, 19 nt, Homo sapiens
  misc_RNA (1)...(19): siRNA sense strand
gauaaaggaugaugagauc

SEQ ID NO: 2140288 - RNA, 19 nt, Homo sapiens
  misc_RNA (1)...(19): siRNA sense strand
ggacaaccaugcacaagug

SEQ ID NO: 2140289 - RNA, 19 nt, Homo sapiens
  misc_RNA (1)...(19): siRNA sense strand
ucacaaaccuccagagcaa

SEQ ID NO: 2140290 - RNA, 19 nt, Homo sapiens
  misc_RNA (1)...(19): siRNA sense strand
ggacagccaugaccgguau

SEQ ID NO: 2140291 - RNA, 19 nt, Homo sapiens
  misc_RNA (1)...(19): siRNA sense strand
gaacgugccuaccaugauc

SEQ ID NO: 2140292 - RNA, 19 nt, Homo sapiens
  misc_RNA (1)...(19): siRNA sense strand
gaaccaccauugccaacuu

SEQ ID NO: 2140293 - RNA, 19 nt, Homo sapiens
  misc_RNA (1)...(19): siRNA sense strand
ggaaagcuguacuucacaa

SEQ ID NO: 2140294 - RNA, 19 nt, Homo sapiens
  misc_RNA (1)...(19): siRNA sense strand
gcacugcuguucuuauucu

SEQ ID NO: 2140295 - RNA, 19 nt, Homo sapiens
  misc_RNA (1)...(19): siRNA sense strand
cggccaagcuggacaagaa

SEQ ID NO: 2140296 - RNA, 19 nt, Homo sapiens
  misc_RNA (1)...(19): siRNA sense strand
gcccacaacuacaagauug

SEQ ID NO: 2140297 - RNA, 19 nt, Homo sapiens
  misc_RNA (1)...(19): siRNA sense strand
ucaccaagccuguggagua

SEQ ID NO: 2140298 - RNA, 19 nt, Homo sapiens
  misc_RNA (1)...(19): siRNA sense strand
ugaggcagcuauucgguuu

SEQ ID NO: 2140299 - RNA, 19 nt, Homo sapiens
  misc_RNA (1)...(19): siRNA sense strand
gaagguggccugggacuau

SEQ ID NO: 2140300 - RNA, 19 nt, Homo sapiens
  misc_RNA (1)...(19): siRNA sense strand
acagccaucuucaggauaa

SEQ ID NO: 2140301 - RNA, 19 nt, Homo sapiens
  misc_RNA (1)...(19): siRNA sense strand
ccacagcccucaacaacag

SEQ ID NO: 2140302 - RNA, 19 nt, Homo sapiens
  misc_RNA (1)...(19): siRNA sense strand
agaaggagaaggugaauga

SEQ ID NO: 2140303 - RNA, 19 nt, Homo sapiens
  misc_RNA (1)...(19): siRNA sense strand
gucaugaccuacaguauca

SEQ ID NO: 2140304 - RNA, 19 nt, Homo sapiens
  misc_RNA (1)...(19): siRNA sense strand
guagacagguacaaucucu

SEQ ID NO: 2140305 - RNA, 19 nt, Homo sapiens
  misc_RNA (1)...(19): siRNA sense strand
ggugacagaugcagacagu

SEQ ID NO: 2140306 - RNA, 19 nt, Homo sapiens
  misc_RNA (1)...(19): siRNA sense strand
cuacucagccuucuuugaa

SEQ ID NO: 2140307 - RNA, 19 nt, Homo sapiens
  misc_RNA (1)...(19): siRNA sense strand
gaaaagaucaagaagcauu

SEQ ID NO: 2140308 - RNA, 19 nt, Homo sapiens
  misc_RNA (1)...(19): siRNA sense strand
ccaaauaugcagagucaga

SEQ ID NO: 2140309 - RNA, 19 nt, Homo sapiens
  misc_RNA (1)...(19): siRNA sense strand
ggauaaaggaugaugagau

SEQ ID NO: 2140310 - RNA, 19 nt, Homo sapiens
  misc_RNA (1)...(19): siRNA sense strand
aggagaaggugaaugagaa

SEQ ID NO: 2140311 - RNA, 19 nt, Homo sapiens
  misc_RNA (1)...(19): siRNA sense strand
ugacagccaucuucaggau

SEQ ID NO: 2140312 - RNA, 19 nt, Homo sapiens
  misc_RNA (1)...(19): siRNA sense strand
agcagaagcugaaggaaga

SEQ ID NO: 2140313 - RNA, 19 nt, Homo sapiens
  misc_RNA (1)...(19): siRNA sense strand
gagcacacggagacagaua

SEQ ID NO: 2140314 - RNA, 19 nt, Homo sapiens
  misc_RNA (1)...(19): siRNA sense strand
gucauugccucagccuuua

SEQ ID NO: 2140315 - RNA, 19 nt, Homo sapiens
  misc_RNA (1)...(19): siRNA sense strand
gugcuacacuuuccucauc

SEQ ID NO: 2140316 - RNA, 19 nt, Homo sapiens
  misc_RNA (1)...(19): siRNA sense strand
gaugagauccgggacaaau

SEQ ID NO: 2140317 - RNA, 19 nt, Homo sapiens
  misc_RNA (1)...(19): siRNA sense strand
ucaccaccauggacaaguu

SEQ ID NO: 2140318 - RNA, 19 nt, Homo sapiens
  misc_RNA (1)...(19): siRNA sense strand
gagaacgugccuaccauga

SEQ ID NO: 2140319 - RNA, 19 nt, Homo sapiens
  misc_RNA (1)...(19): siRNA sense strand
cuacuacucagccuucuuu

SEQ ID NO: 2140320 - RNA, 19 nt, Homo sapiens
  misc_RNA (1)...(19): siRNA sense strand
ccagcuccguugacuuuga

SEQ ID NO: 2140321 - RNA, 19 nt, Homo sapiens
  misc_RNA (1)...(19): siRNA sense strand
gaaagcuguacuucacaaa

SEQ ID NO: 2140322 - RNA, 19 nt, Homo sapiens
  misc_RNA (1)...(19): siRNA sense strand
cagaaaagaucaagaagca

SEQ ID NO: 2140323 - RNA, 19 nt, Homo sapiens
  misc_RNA (1)...(19): siRNA sense strand
ggacuucaacguguguaaa

SEQ ID NO: 2140324 - RNA, 19 nt, Homo sapiens
  misc_RNA (1)...(19): siRNA sense strand
uggaggccauugaguacua

SEQ ID NO: 2140325 - RNA, 19 nt, Homo sapiens
  misc_RNA (1)...(19): siRNA sense strand
caagaagcauuuugaggaa

SEQ ID NO: 2140326 - RNA, 19 nt, Homo sapiens
  misc_RNA (1)...(19): siRNA sense strand
ccaaaucugcgaaauacau

SEQ ID NO: 2140327 - RNA, 19 nt, Homo sapiens
  misc_RNA (1)...(19): siRNA sense strand
cgucauugccucagccuuu

SEQ ID NO: 2140328 - RNA, 19 nt, Homo sapiens
  misc_RNA (1)...(19): siRNA sense strand
caguguggcuucagcuaug

SEQ ID NO: 2140329 - RNA, 19 nt, Homo sapiens
  misc_RNA (1)...(19): siRNA sense strand
gcaucaggccuacgaguuc

SEQ ID NO: 2140330 - RNA, 19 nt, Homo sapiens
  misc_RNA (1)...(19): siRNA sense strand
ccaaagggacaaugguuuc

SEQ ID NO: 2140331 - RNA, 19 nt, Homo sapiens
  misc_RNA (1)...(19): siRNA sense strand
ggacagccucauagagaau

SEQ ID NO: 2140332 - RNA, 19 nt, Homo sapiens
  misc_RNA (1)...(19): siRNA sense strand
uccgcuggcucuuugauaa

SEQ ID NO: 2140333 - RNA, 19 nt, Homo sapiens
  misc_RNA (1)...(19): siRNA sense strand
uugcacugcuguucuuauu

SEQ ID NO: 2140334 - RNA, 19 nt, Homo sapiens
  misc_RNA (1)...(19): siRNA sense strand
caaauaugcagagucagaa

SEQ ID NO: 2140335 - RNA, 19 nt, Homo sapiens
  misc_RNA (1)...(19): siRNA sense strand
cuccaaauaugcagaguca

SEQ ID NO: 2140336 - RNA, 19 nt, Homo sapiens
  misc_RNA (1)...(19): siRNA sense strand
guagacacaccuccaagau

SEQ ID NO: 2140337 - RNA, 19 nt, Homo sapiens
  misc_RNA (1)...(19): siRNA sense strand
gccuacagcuuugggagaa

SEQ ID NO: 2140338 - RNA, 19 nt, Homo sapiens
  misc_RNA (1)...(19): siRNA sense strand
gcaccacagcccucaacaa

SEQ ID NO: 2140339 - RNA, 19 nt, Homo sapiens
  misc_RNA (1)...(19): siRNA sense strand
ugacagaugcagacagugu

SEQ ID NO: 2140340 - RNA, 19 nt, Homo sapiens
  misc_RNA (1)...(19): siRNA sense strand
ggccuacgaguuccaguuu

SEQ ID NO: 2140341 - RNA, 19 nt, Homo sapiens
  misc_RNA (1)...(19): siRNA sense strand
gggagaaggagaaggugaa

SEQ ID NO: 2140342 - RNA, 19 nt, Homo sapiens
  misc_RNA (1)...(19): siRNA sense strand
ccaagaugcgcuacaagga

SEQ ID NO: 2140343 - RNA, 19 nt, Homo sapiens
  misc_RNA (1)...(19): siRNA sense strand
aacaaugccuacagcuuug

SEQ ID NO: 2140344 - RNA, 19 nt, Homo sapiens
  misc_RNA (1)...(19): siRNA sense strand
gggaccugcuggagaacaa

SEQ ID NO: 2140345 - RNA, 19 nt, Homo sapiens
  misc_RNA (1)...(19): siRNA sense strand
gcauggccuuugucaccuu

SEQ ID NO: 2140346 - RNA, 19 nt, Homo sapiens
  misc_RNA (1)...(19): siRNA sense strand
gcgagucccugcacaucuc

SEQ ID NO: 2140347 - RNA, 19 nt, Homo sapiens
  misc_RNA (1)...(19): siRNA sense strand
caccauugccaacuugaaa

SEQ ID NO: 2140348 - RNA, 19 nt, Homo sapiens
  misc_RNA (1)...(19): siRNA sense strand
ggucaucaccaucgucauc

SEQ ID NO: 2140349 - RNA, 19 nt, Homo sapiens
  misc_RNA (1)...(19): siRNA sense strand
acagguacaaucucuacua

SEQ ID NO: 2140350 - RNA, 19 nt, Homo sapiens
  misc_RNA (1)...(19): siRNA sense strand
ccauugaguacuacacaaa

SEQ ID NO: 2140351 - RNA, 19 nt, Homo sapiens
  misc_RNA (1)...(19): siRNA sense strand
ggaggaugaucuggugaag

SEQ ID NO: 2140352 - RNA, 19 nt, Homo sapiens
  misc_RNA (1)...(19): siRNA sense strand
gcaucgugcugccugucaa

SEQ ID NO: 2140353 - RNA, 19 nt, Homo sapiens
  misc_RNA (1)...(19): siRNA sense strand
gcucccacgucuauguuca

SEQ ID NO: 2140354 - RNA, 19 nt, Homo sapiens
  misc_RNA (1)...(19): siRNA sense strand
caucaucacccaguucuuc

SEQ ID NO: 2140355 - RNA, 19 nt, Homo sapiens
  misc_RNA (1)...(19): siRNA sense strand
cgugcuggcucucgacuuc

SEQ ID NO: 2140356 - RNA, 19 nt, Homo sapiens
  misc_RNA (1)...(19): siRNA sense strand
cagguacaaucucuacuac

SEQ ID NO: 2140357 - RNA, 19 nt, Homo sapiens
  misc_RNA (1)...(19): siRNA sense strand
aagcggacccucuucauca

SEQ ID NO: 2140358 - RNA, 19 nt, Homo sapiens
  misc_RNA (1)...(19): siRNA sense strand
ugcacuaccuguccuuuca

SEQ ID NO: 2140359 - RNA, 19 nt, Homo sapiens
  misc_RNA (1)...(19): siRNA sense strand
ggaagguggccugggacua

SEQ ID NO: 2140360 - RNA, 19 nt, Homo sapiens
  misc_RNA (1)...(19): siRNA sense strand
acacuuuccucaucuucau

SEQ ID NO: 2140361 - RNA, 19 nt, Homo sapiens
  misc_RNA (1)...(19): siRNA sense strand
ucaccgccaucauccugaa

SEQ ID NO: 2140362 - RNA, 19 nt, Homo sapiens
  misc_RNA (1)...(19): siRNA sense strand
gccauugaguacuacacaa

SEQ ID NO: 2140363 - RNA, 19 nt, Homo sapiens
  misc_RNA (1)...(19): siRNA sense strand
ccuccaagaugcgcuacaa

SEQ ID NO: 2140364 - RNA, 19 nt, Homo sapiens
  misc_RNA (1)...(19): siRNA sense strand
gacaaugguuucuguuccu

SEQ ID NO: 2140365 - RNA, 19 nt, Homo sapiens
  misc_RNA (1)...(19): siRNA sense strand
gcgccuucuucgugaacua

SEQ ID NO: 2140366 - RNA, 19 nt, Homo sapiens
  misc_RNA (1)...(19): siRNA sense strand
gcuacacuuuccucaucuu

SEQ ID NO: 2140367 - RNA, 19 nt, Homo sapiens
  misc_RNA (1)...(19): siRNA sense strand
cugcuguucuuauucucua

SEQ ID NO: 2140368 - RNA, 19 nt, Homo sapiens
  misc_RNA (1)...(19): siRNA sense strand
ggcaucaggccuacgaguu

SEQ ID NO: 2140369 - RNA, 19 nt, Homo sapiens
  misc_RNA (1)...(19): siRNA sense strand
aggacagccucauagagaa

SEQ ID NO: 2140370 - RNA, 19 nt, Homo sapiens
  misc_RNA (1)...(19): siRNA sense strand
cuccagcuccguugacuuu

SEQ ID NO: 2140371 - RNA, 19 nt, Homo sapiens
  misc_RNA (1)...(19): siRNA sense strand
gagcgucucaccucugucu

SEQ ID NO: 2140372 - RNA, 19 nt, Homo sapiens
  misc_RNA (1)...(19): siRNA sense strand
cgucugcuuuggacacuuc

SEQ ID NO: 2140373 - RNA, 19 nt, Homo sapiens
  misc_RNA (1)...(19): siRNA sense strand
gggacaaugguuucuguuc

SEQ ID NO: 2140374 - RNA, 19 nt, Homo sapiens
  misc_RNA (1)...(19): siRNA sense strand
aggcagcuauucgguuuga

SEQ ID NO: 2140375 - RNA, 19 nt, Homo sapiens
  misc_RNA (1)...(19): siRNA sense strand
gagacuaucaccgccauca

SEQ ID NO: 2140376 - RNA, 19 nt, Homo sapiens
  misc_RNA (1)...(19): siRNA sense strand
cggacccucuucaucaaug

SEQ ID NO: 2140377 - RNA, 19 nt, Homo sapiens
  misc_RNA (1)...(19): siRNA sense strand
ggagaaggagaaggugaau

SEQ ID NO: 2140378 - RNA, 19 nt, Homo sapiens
  misc_RNA (1)...(19): siRNA sense strand
gccuacgccuggaugaugu

SEQ ID NO: 2140379 - RNA, 19 nt, Homo sapiens
  misc_RNA (1)...(19): siRNA sense strand
ccuacgaguuccaguuugg

SEQ ID NO: 2140380 - RNA, 19 nt, Homo sapiens
  misc_RNA (1)...(19): siRNA sense strand
aagggacaaugguuucugu

SEQ ID NO: 2140381 - RNA, 19 nt, Homo sapiens
  misc_RNA (1)...(19): siRNA sense strand
gcagcuauucgguuugagu

SEQ ID NO: 2140382 - RNA, 19 nt, Homo sapiens
  misc_RNA (1)...(19): siRNA sense strand
caccaagccuguggaguac

SEQ ID NO: 2140383 - RNA, 19 nt, Homo sapiens
  misc_RNA (1)...(19): siRNA sense strand
gacuucaacguguguaaau

SEQ ID NO: 2140384 - RNA, 19 nt, Homo sapiens
  misc_RNA (1)...(19): siRNA sense strand
caucauaccuucuuugaaa

SEQ ID NO: 2140385 - RNA, 19 nt, Homo sapiens
  misc_RNA (1)...(19): siRNA sense strand
ggaggaggcuuguaacaug

SEQ ID NO: 2140386 - RNA, 19 nt, Homo sapiens
  misc_RNA (1)...(19): siRNA sense strand
ggacauaggacgacucauu

SEQ ID NO: 2140387 - RNA, 19 nt, Homo sapiens
  misc_RNA (1)...(19): siRNA sense strand
guacugagauccacuacga

SEQ ID NO: 2140388 - RNA, 19 nt, Homo sapiens
  misc_RNA (1)...(19): siRNA sense strand
gggacaggcugcaaagaaa

SEQ ID NO: 2140389 - RNA, 19 nt, Homo sapiens
  misc_RNA (1)...(19): siRNA sense strand
gaaguggccugguccuugu

SEQ ID NO: 2140390 - RNA, 19 nt, Homo sapiens
  misc_RNA (1)...(19): siRNA sense strand
gcaaacacuccaccuauga

SEQ ID NO: 2140391 - RNA, 19 nt, Homo sapiens
  misc_RNA (1)...(19): siRNA sense strand
cagcagggcucccaucuca

SEQ ID NO: 2140392 - RNA, 19 nt, Homo sapiens
  misc_RNA (1)...(19): siRNA sense strand
gggagaugcuuauccagaa

SEQ ID NO: 2140393 - RNA, 19 nt, Homo sapiens
  misc_RNA (1)...(19): siRNA sense strand
gaugaggccuggcgucuag

SEQ ID NO: 2140394 - RNA, 19 nt, Homo sapiens
  misc_RNA (1)...(19): siRNA sense strand
ggaagcugcccucaguaua

SEQ ID NO: 2140395 - RNA, 19 nt, Homo sapiens
  misc_RNA (1)...(19): siRNA sense strand
cagcggaaguuaugaguuc

SEQ ID NO: 2140396 - RNA, 19 nt, Homo sapiens
  misc_RNA (1)...(19): siRNA sense strand
ggaugaggcuguguacaug

SEQ ID NO: 2140397 - RNA, 19 nt, Homo sapiens
  misc_RNA (1)...(19): siRNA sense strand
caacagagaggcagaugga

SEQ ID NO: 2140398 - RNA, 19 nt, Homo sapiens
  misc_RNA (1)...(19): siRNA sense strand
cgagaccuuucccaucaua

SEQ ID NO: 2140399 - RNA, 19 nt, Homo sapiens
  misc_RNA (1)...(19): siRNA sense strand
cagcugcgcuuggauguga

SEQ ID NO: 2140400 - RNA, 19 nt, Homo sapiens
  misc_RNA (1)...(19): siRNA sense strand
cuaugacacugaccucuuu

SEQ ID NO: 2140401 - RNA, 19 nt, Homo sapiens
  misc_RNA (1)...(19): siRNA sense strand
ggacaucuggcugagcuua

SEQ ID NO: 2140402 - RNA, 19 nt, Homo sapiens
  misc_RNA (1)...(19): siRNA sense strand
gaagcugcccucaguauag

SEQ ID NO: 2140403 - RNA, 19 nt, Homo sapiens
  misc_RNA (1)...(19): siRNA sense strand
ggcaaacacuccaccuaug

SEQ ID NO: 2140404 - RNA, 19 nt, Homo sapiens
  misc_RNA (1)...(19): siRNA sense strand
gucgagaccuuucccauca

SEQ ID NO: 2140405 - RNA, 19 nt, Homo sapiens
  misc_RNA (1)...(19): siRNA sense strand
ggacaggaccaacuucuac

SEQ ID NO: 2140406 - RNA, 19 nt, Homo sapiens
  misc_RNA (1)...(19): siRNA sense strand
gacauaggacgacucauug

SEQ ID NO: 2140407 - RNA, 19 nt, Homo sapiens
  misc_RNA (1)...(19): siRNA sense strand
uuaaggaggaggcuuguaa

SEQ ID NO: 2140408 - RNA, 19 nt, Homo sapiens
  misc_RNA (1)...(19): siRNA sense strand
gaggaaaggcucuggaucu

SEQ ID NO: 2140409 - RNA, 19 nt, Homo sapiens
  misc_RNA (1)...(19): siRNA sense strand
gcagggcucccaucucaau

SEQ ID NO: 2140410 - RNA, 19 nt, Homo sapiens
  misc_RNA (1)...(19): siRNA sense strand
ccugggaacugcugacuca

SEQ ID NO: 2140411 - RNA, 19 nt, Homo sapiens
  misc_RNA (1)...(19): siRNA sense strand
uguggaaacugcugugaug

SEQ ID NO: 2140412 - RNA, 19 nt, Homo sapiens
  misc_RNA (1)...(19): siRNA sense strand
gaccacauccgcacacuca

SEQ ID NO: 2140413 - RNA, 19 nt, Homo sapiens
  misc_RNA (1)...(19): siRNA sense strand
gaaccuggucuucaugcaa

SEQ ID NO: 2140414 - RNA, 19 nt, Homo sapiens
  misc_RNA (1)...(19): siRNA sense strand
auaacgaccuggaagaugu

SEQ ID NO: 2140415 - RNA, 19 nt, Homo sapiens
  misc_RNA (1)...(19): siRNA sense strand
uaacauggccugggaacug

SEQ ID NO: 2140416 - RNA, 19 nt, Homo sapiens
  misc_RNA (1)...(19): siRNA sense strand
gcccagguguugcaacugu

SEQ ID NO: 2140417 - RNA, 19 nt, Homo sapiens
  misc_RNA (1)...(19): siRNA sense strand
uauguucccugcugaagug

SEQ ID NO: 2140418 - RNA, 19 nt, Homo sapiens
  misc_RNA (1)...(19): siRNA sense strand
uugaaaugcuuggcaauug

SEQ ID NO: 2140419 - RNA, 19 nt, Homo sapiens
  misc_RNA (1)...(19): siRNA sense strand
ccuggaagcugcccucagu

SEQ ID NO: 2140420 - RNA, 19 nt, Homo sapiens
  misc_RNA (1)...(19): siRNA sense strand
ccacccaccugcugaacug

SEQ ID NO: 2140421 - RNA, 19 nt, Homo sapiens
  misc_RNA (1)...(19): siRNA sense strand
gcaagaggacgugcuguuc

SEQ ID NO: 2140422 - RNA, 19 nt, Homo sapiens
  misc_RNA (1)...(19): siRNA sense strand
gcuguggccuccucuugga

SEQ ID NO: 2140423 - RNA, 19 nt, Homo sapiens
  misc_RNA (1)...(19): siRNA sense strand
ugaaaugcuuggcaauugg

SEQ ID NO: 2140424 - RNA, 19 nt, Homo sapiens
  misc_RNA (1)...(19): siRNA sense strand
ggacgugcuguucccagua

SEQ ID NO: 2140425 - RNA, 19 nt, Homo sapiens
  misc_RNA (1)...(19): siRNA sense strand
gggacgcaccuguuacgua

SEQ ID NO: 2140426 - RNA, 19 nt, Homo sapiens
  misc_RNA (1)...(19): siRNA sense strand
ggcaccaccuggcuuccua

SEQ ID NO: 2140427 - RNA, 19 nt, Homo sapiens
  misc_RNA (1)...(19): siRNA sense strand
gcccaggucuguggagguu

SEQ ID NO: 2140428 - RNA, 19 nt, Homo sapiens
  misc_RNA (1)...(19): siRNA sense strand
gcucuggaucuccuacuuu

SEQ ID NO: 2140429 - RNA, 19 nt, Homo sapiens
  misc_RNA (1)...(19): siRNA sense strand
caaggcaccggaagcacua

SEQ ID NO: 2140430 - RNA, 19 nt, Homo sapiens
  misc_RNA (1)...(19): siRNA sense strand
ccacugagcggcugagucu

SEQ ID NO: 2140431 - RNA, 19 nt, Homo sapiens
  misc_RNA (1)...(19): siRNA sense strand
auccagaacugcaaaggaa

SEQ ID NO: 2140432 - RNA, 19 nt, Homo sapiens
  misc_RNA (1)...(19): siRNA sense strand
ccaguucaagccaaucuuu

SEQ ID NO: 2140433 - RNA, 19 nt, Homo sapiens
  misc_RNA (1)...(19): siRNA sense strand
ucgccaaccuggugucaga

SEQ ID NO: 2140434 - RNA, 19 nt, Homo sapiens
  misc_RNA (1)...(19): siRNA sense strand
gcugguggcugugcugcaa

SEQ ID NO: 2140435 - RNA, 19 nt, Homo sapiens
  misc_RNA (1)...(19): siRNA sense strand
gcaccggaagcacuacuga

SEQ ID NO: 2140436 - RNA, 19 nt, Homo sapiens
  misc_RNA (1)...(19): siRNA sense strand
cugcugaacugggcacuga

SEQ ID NO: 2140437 - RNA, 19 nt, Homo sapiens
  misc_RNA (1)...(19): siRNA sense strand
gagcuggaggacaccauaa

SEQ ID NO: 2140438 - RNA, 19 nt, Homo sapiens
  misc_RNA (1)...(19): siRNA sense strand
ccaggucuguggagguuuc

SEQ ID NO: 2140439 - RNA, 19 nt, Homo sapiens
  misc_RNA (1)...(19): siRNA sense strand
ggagaugcuuauccagaac

SEQ ID NO: 2140440 - RNA, 19 nt, Homo sapiens
  misc_RNA (1)...(19): siRNA sense strand
ggacaugguagagcugaug

SEQ ID NO: 2140441 - RNA, 19 nt, Homo sapiens
  misc_RNA (1)...(19): siRNA sense strand
ucucagugcuggugaaggu

SEQ ID NO: 2140442 - RNA, 19 nt, Homo sapiens
  misc_RNA (1)...(19): siRNA sense strand
cauugaagcuguggaaacu

SEQ ID NO: 2140443 - RNA, 19 nt, Homo sapiens
  misc_RNA (1)...(19): siRNA sense strand
gacgugcuguucccaguag

SEQ ID NO: 2140444 - RNA, 19 nt, Homo sapiens
  misc_RNA (1)...(19): siRNA sense strand
cacugaggcuguccaagga

SEQ ID NO: 2140445 - RNA, 19 nt, Homo sapiens
  misc_RNA (1)...(19): siRNA sense strand
gagcugcuggccacaguga

SEQ ID NO: 2140446 - RNA, 19 nt, Homo sapiens
  misc_RNA (1)...(19): siRNA sense strand
cgacccagcggaaguuaug

SEQ ID NO: 2140447 - RNA, 19 nt, Homo sapiens
  misc_RNA (1)...(19): siRNA sense strand
cacagucucugcugagucu

SEQ ID NO: 2140448 - RNA, 19 nt, Homo sapiens
  misc_RNA (1)...(19): siRNA sense strand
ccaacacugccauccguaa

SEQ ID NO: 2140449 - RNA, 19 nt, Homo sapiens
  misc_RNA (1)...(19): siRNA sense strand
gccaacagccagaaaugug

SEQ ID NO: 2140450 - RNA, 19 nt, Homo sapiens
  misc_RNA (1)...(19): siRNA sense strand
ggagaaagggguccagcua

SEQ ID NO: 2140451 - RNA, 19 nt, Homo sapiens
  misc_RNA (1)...(19): siRNA sense strand
aagcacuacugaccuggaa

SEQ ID NO: 2140452 - RNA, 19 nt, Homo sapiens
  misc_RNA (1)...(19): siRNA sense strand
cauaggacgacucauugaa

SEQ ID NO: 2140453 - RNA, 19 nt, Homo sapiens
  misc_RNA (1)...(19): siRNA sense strand
ggaaccuggucuucaugca

SEQ ID NO: 2140454 - RNA, 19 nt, Homo sapiens
  misc_RNA (1)...(19): siRNA sense strand
ugugggcccuguacugaga

SEQ ID NO: 2140455 - RNA, 19 nt, Homo sapiens
  misc_RNA (1)...(19): siRNA sense strand
gcucucuggaugagguuua

SEQ ID NO: 2140456 - RNA, 19 nt, Homo sapiens
  misc_RNA (1)...(19): siRNA sense strand
ggcaagaggacgugcuguu

SEQ ID NO: 2140457 - RNA, 19 nt, Homo sapiens
  misc_RNA (1)...(19): siRNA sense strand
ggaugaggccuggcgucua

SEQ ID NO: 2140458 - RNA, 19 nt, Homo sapiens
  misc_RNA (1)...(19): siRNA sense strand
gccgugugcuuuccuuugg

SEQ ID NO: 2140459 - RNA, 19 nt, Homo sapiens
  misc_RNA (1)...(19): siRNA sense strand
ccaacagccagaaaugugu

SEQ ID NO: 2140460 - RNA, 19 nt, Homo sapiens
  misc_RNA (1)...(19): siRNA sense strand
gcgucgagcugugcguuuc

SEQ ID NO: 2140461 - RNA, 19 nt, Homo sapiens
  misc_RNA (1)...(19): siRNA sense strand
gacacagucucugcugagu

SEQ ID NO: 2140462 - RNA, 19 nt, Homo sapiens
  misc_RNA (1)...(19): siRNA sense strand
gaaggggccucugauugug

SEQ ID NO: 2140463 - RNA, 19 nt, Homo sapiens
  misc_RNA (1)...(19): siRNA sense strand
ugggacaggcugcaaagaa

SEQ ID NO: 2140464 - RNA, 19 nt, Homo sapiens
  misc_RNA (1)...(19): siRNA sense strand
gcuuggcaauugggccuuu

SEQ ID NO: 2140465 - RNA, 19 nt, Homo sapiens
  misc_RNA (1)...(19): siRNA sense strand
ugagauccacuacgaccuu

SEQ ID NO: 2140466 - RNA, 19 nt, Homo sapiens
  misc_RNA (1)...(19): siRNA sense strand
agaccucuguggagcuaug

SEQ ID NO: 2140467 - RNA, 19 nt, Homo sapiens
  misc_RNA (1)...(19): siRNA sense strand
ggcaggaugaggcugugua

SEQ ID NO: 2140468 - RNA, 19 nt, Homo sapiens
  misc_RNA (1)...(19): siRNA sense strand
cagggauuguggcuugaug

SEQ ID NO: 2140469 - RNA, 19 nt, Homo sapiens
  misc_RNA (1)...(19): siRNA sense strand
gagcugugcguuucuccau

SEQ ID NO: 2140470 - RNA, 19 nt, Homo sapiens
  misc_RNA (1)...(19): siRNA sense strand
cauaacgaccuggaagaug

SEQ ID NO: 2140471 - RNA, 19 nt, Homo sapiens
  misc_RNA (1)...(19): siRNA sense strand
uaccuucuuugaaaugcuu

SEQ ID NO: 2140472 - RNA, 19 nt, Homo sapiens
  misc_RNA (1)...(19): siRNA sense strand
aggcaaacacuccaccuau

SEQ ID NO: 2140473 - RNA, 19 nt, Homo sapiens
  misc_RNA (1)...(19): siRNA sense strand
caaaugggacaggcugcaa

SEQ ID NO: 2140474 - RNA, 19 nt, Homo sapiens
  misc_RNA (1)...(19): siRNA sense strand
caacacugccauccguaag

SEQ ID NO: 2140475 - RNA, 19 nt, Homo sapiens
  misc_RNA (1)...(19): siRNA sense strand
agaaagggguccagcuaga

SEQ ID NO: 2140476 - RNA, 19 nt, Homo sapiens
  misc_RNA (1)...(19): siRNA sense strand
ggcucuggaucuccuacuu

SEQ ID NO: 2140477 - RNA, 19 nt, Homo sapiens
  misc_RNA (1)...(19): siRNA sense strand
uggaagcugcccucaguau

SEQ ID NO: 2140478 - RNA, 19 nt, Homo sapiens
  misc_RNA (1)...(19): siRNA sense strand
cucuggaucuccuacuuug

SEQ ID NO: 2140479 - RNA, 19 nt, Homo sapiens
  misc_RNA (1)...(19): siRNA sense strand
ggacaggcugcaaagaaaa

SEQ ID NO: 2140480 - RNA, 19 nt, Homo sapiens
  misc_RNA (1)...(19): siRNA sense strand
uaugggaucccugaggaaa

SEQ ID NO: 2140481 - RNA, 19 nt, Homo sapiens
  misc_RNA (1)...(19): siRNA sense strand
caucauaccuucuuugaaa

SEQ ID NO: 2140482 - RNA, 19 nt, Homo sapiens
  misc_RNA (1)...(19): siRNA sense strand
ggaggaggcuuguaacaug

SEQ ID NO: 2140483 - RNA, 19 nt, Homo sapiens
  misc_RNA (1)...(19): siRNA sense strand
ggacauaggacgacucauu

SEQ ID NO: 2140484 - RNA, 19 nt, Homo sapiens
  misc_RNA (1)...(19): siRNA sense strand
guacugagauccacuacga

SEQ ID NO: 2140485 - RNA, 19 nt, Homo sapiens
  misc_RNA (1)...(19): siRNA sense strand
gaaguggccugguccuugu

SEQ ID NO: 2140486 - RNA, 19 nt, Homo sapiens
  misc_RNA (1)...(19): siRNA sense strand
gcaaacacuccaccuauga

SEQ ID NO: 2140487 - RNA, 19 nt, Homo sapiens
  misc_RNA (1)...(19): siRNA sense strand
cagcagggcucccaucuca

SEQ ID NO: 2140488 - RNA, 19 nt, Homo sapiens
  misc_RNA (1)...(19): siRNA sense strand
gggagaugcuuauccagaa

SEQ ID NO: 2140489 - RNA, 19 nt, Homo sapiens
  misc_RNA (1)...(19): siRNA sense strand
gaugaggccuggcgucuag

SEQ ID NO: 2140490 - RNA, 19 nt, Homo sapiens
  misc_RNA (1)...(19): siRNA sense strand
ggaagcugcccucaguaua

SEQ ID NO: 2140491 - RNA, 19 nt, Homo sapiens
  misc_RNA (1)...(19): siRNA sense strand
cagcggaaguuaugaguuc

SEQ ID NO: 2140492 - RNA, 19 nt, Homo sapiens
  misc_RNA (1)...(19): siRNA sense strand
ggaugaggcuguguacaug

SEQ ID NO: 2140493 - RNA, 19 nt, Homo sapiens
  misc_RNA (1)...(19): siRNA sense strand
caacagagaggcagaugga

SEQ ID NO: 2140494 - RNA, 19 nt, Homo sapiens
  misc_RNA (1)...(19): siRNA sense strand
cgagaccuuucccaucaua

SEQ ID NO: 2140495 - RNA, 19 nt, Homo sapiens
  misc_RNA (1)...(19): siRNA sense strand
cagcugcgcuuggauguga

SEQ ID NO: 2140496 - RNA, 19 nt, Homo sapiens
  misc_RNA (1)...(19): siRNA sense strand
cuaugacacugaccucuuu

SEQ ID NO: 2140497 - RNA, 19 nt, Homo sapiens
  misc_RNA (1)...(19): siRNA sense strand
ggacaucuggcugagcuua

SEQ ID NO: 2140498 - RNA, 19 nt, Homo sapiens
  misc_RNA (1)...(19): siRNA sense strand
gaagcugcccucaguauag

SEQ ID NO: 2140499 - RNA, 19 nt, Homo sapiens
  misc_RNA (1)...(19): siRNA sense strand
ggcaaacacuccaccuaug

SEQ ID NO: 2140500 - RNA, 19 nt, Homo sapiens
  misc_RNA (1)...(19): siRNA sense strand
gucgagaccuuucccauca

SEQ ID NO: 2140501 - RNA, 19 nt, Homo sapiens
  misc_RNA (1)...(19): siRNA sense strand
ggacaggaccaacuucuac

SEQ ID NO: 2140502 - RNA, 19 nt, Homo sapiens
  misc_RNA (1)...(19): siRNA sense strand
gacauaggacgacucauug

SEQ ID NO: 2140503 - RNA, 19 nt, Homo sapiens
  misc_RNA (1)...(19): siRNA sense strand
uuaaggaggaggcuuguaa

SEQ ID NO: 2140504 - RNA, 19 nt, Homo sapiens
  misc_RNA (1)...(19): siRNA sense strand
gaggaaaggcucuggaucu

SEQ ID NO: 2140505 - RNA, 19 nt, Homo sapiens
  misc_RNA (1)...(19): siRNA sense strand
gcagggcucccaucucaau

SEQ ID NO: 2140506 - RNA, 19 nt, Homo sapiens
  misc_RNA (1)...(19): siRNA sense strand
ccugggaacugcugacuca

SEQ ID NO: 2140507 - RNA, 19 nt, Homo sapiens
  misc_RNA (1)...(19): siRNA sense strand
uguggaaacugcugugaug

SEQ ID NO: 2140508 - RNA, 19 nt, Homo sapiens
  misc_RNA (1)...(19): siRNA sense strand
gaccacauccgcacacuca

SEQ ID NO: 2140509 - RNA, 19 nt, Homo sapiens
  misc_RNA (1)...(19): siRNA sense strand
gaaccuggucuucaugcaa

SEQ ID NO: 2140510 - RNA, 19 nt, Homo sapiens
  misc_RNA (1)...(19): siRNA sense strand
auaacgaccuggaagaugu

SEQ ID NO: 2140511 - RNA, 19 nt, Homo sapiens
  misc_RNA (1)...(19): siRNA sense strand
uaacauggccugggaacug

SEQ ID NO: 2140512 - RNA, 19 nt, Homo sapiens
  misc_RNA (1)...(19): siRNA sense strand
gcccagguguugcaacugu

SEQ ID NO: 2140513 - RNA, 19 nt, Homo sapiens
  misc_RNA (1)...(19): siRNA sense strand
uauguucccugcugaagug

SEQ ID NO: 2140514 - RNA, 19 nt, Homo sapiens
  misc_RNA (1)...(19): siRNA sense strand
uugaaaugcuuggcaauug

SEQ ID NO: 2140515 - RNA, 19 nt, Homo sapiens
  misc_RNA (1)...(19): siRNA sense strand
ccuggaagcugcccucagu

SEQ ID NO: 2140516 - RNA, 19 nt, Homo sapiens
  misc_RNA (1)...(19): siRNA sense strand
ccacccaccugcugaacug

SEQ ID NO: 2140517 - RNA, 19 nt, Homo sapiens
  misc_RNA (1)...(19): siRNA sense strand
gcaagaggacgugcuguuc

SEQ ID NO: 2140518 - RNA, 19 nt, Homo sapiens
  misc_RNA (1)...(19): siRNA sense strand
gcuguggccuccucuugga

SEQ ID NO: 2140519 - RNA, 19 nt, Homo sapiens
  misc_RNA (1)...(19): siRNA sense strand
ugaaaugcuuggcaauugg

SEQ ID NO: 2140520 - RNA, 19 nt, Homo sapiens
  misc_RNA (1)...(19): siRNA sense strand
ggacgugcuguucccagua

SEQ ID NO: 2140521 - RNA, 19 nt, Homo sapiens
  misc_RNA (1)...(19): siRNA sense strand
gggacgcaccuguuacgua

SEQ ID NO: 2140522 - RNA, 19 nt, Homo sapiens
  misc_RNA (1)...(19): siRNA sense strand
ggcaccaccuggcuuccua

SEQ ID NO: 2140523 - RNA, 19 nt, Homo sapiens
  misc_RNA (1)...(19): siRNA sense strand
gcccaggucuguggagguu

SEQ ID NO: 2140524 - RNA, 19 nt, Homo sapiens
  misc_RNA (1)...(19): siRNA sense strand
gcucuggaucuccuacuuu

SEQ ID NO: 2140525 - RNA, 19 nt, Homo sapiens
  misc_RNA (1)...(19): siRNA sense strand
caaggcaccggaagcacua

SEQ ID NO: 2140526 - RNA, 19 nt, Homo sapiens
  misc_RNA (1)...(19): siRNA sense strand
ccacugagcggcugagucu

SEQ ID NO: 2140527 - RNA, 19 nt, Homo sapiens
  misc_RNA (1)...(19): siRNA sense strand
auccagaacugcaaaggaa

SEQ ID NO: 2140528 - RNA, 19 nt, Homo sapiens
  misc_RNA (1)...(19): siRNA sense strand
ccaguucaagccaaucuuu

SEQ ID NO: 2140529 - RNA, 19 nt, Homo sapiens
  misc_RNA (1)...(19): siRNA sense strand
ucgccaaccuggugucaga

SEQ ID NO: 2140530 - RNA, 19 nt, Homo sapiens
  misc_RNA (1)...(19): siRNA sense strand
gcugguggcugugcugcaa

SEQ ID NO: 2140531 - RNA, 19 nt, Homo sapiens
  misc_RNA (1)...(19): siRNA sense strand
gcaccggaagcacuacuga

SEQ ID NO: 2140532 - RNA, 19 nt, Homo sapiens
  misc_RNA (1)...(19): siRNA sense strand
cugcugaacugggcacuga

SEQ ID NO: 2140533 - RNA, 19 nt, Homo sapiens
  misc_RNA (1)...(19): siRNA sense strand
gagcuggaggacaccauaa

SEQ ID NO: 2140534 - RNA, 19 nt, Homo sapiens
  misc_RNA (1)...(19): siRNA sense strand
ccaggucuguggagguuuc

SEQ ID NO: 2140535 - RNA, 19 nt, Homo sapiens
  misc_RNA (1)...(19): siRNA sense strand
ggagaugcuuauccagaac

SEQ ID NO: 2140536 - RNA, 19 nt, Homo sapiens
  misc_RNA (1)...(19): siRNA sense strand
ggacaugguagagcugaug

SEQ ID NO: 2140537 - RNA, 19 nt, Homo sapiens
  misc_RNA (1)...(19): siRNA sense strand
ucucagugcuggugaaggu

SEQ ID NO: 2140538 - RNA, 19 nt, Homo sapiens
  misc_RNA (1)...(19): siRNA sense strand
cauugaagcuguggaaacu

SEQ ID NO: 2140539 - RNA, 19 nt, Homo sapiens
  misc_RNA (1)...(19): siRNA sense strand
gacgugcuguucccaguag

SEQ ID NO: 2140540 - RNA, 19 nt, Homo sapiens
  misc_RNA (1)...(19): siRNA sense strand
cacugaggcuguccaagga

SEQ ID NO: 2140541 - RNA, 19 nt, Homo sapiens
  misc_RNA (1)...(19): siRNA sense strand
gagcugcuggccacaguga

SEQ ID NO: 2140542 - RNA, 19 nt, Homo sapiens
  misc_RNA (1)...(19): siRNA sense strand
cgacccagcggaaguuaug

SEQ ID NO: 2140543 - RNA, 19 nt, Homo sapiens
  misc_RNA (1)...(19): siRNA sense strand
cacagucucugcugagucu

SEQ ID NO: 2140544 - RNA, 19 nt, Homo sapiens
  misc_RNA (1)...(19): siRNA sense strand
ccaacacugccauccguaa

SEQ ID NO: 2140545 - RNA, 19 nt, Homo sapiens
  misc_RNA (1)...(19): siRNA sense strand
gccaacagccagaaaugug

SEQ ID NO: 2140546 - RNA, 19 nt, Homo sapiens
  misc_RNA (1)...(19): siRNA sense strand
ggagaaagggguccagcua

SEQ ID NO: 2140547 - RNA, 19 nt, Homo sapiens
  misc_RNA (1)...(19): siRNA sense strand
aagcacuacugaccuggaa

SEQ ID NO: 2140548 - RNA, 19 nt, Homo sapiens
  misc_RNA (1)...(19): siRNA sense strand
cauaggacgacucauugaa

SEQ ID NO: 2140549 - RNA, 19 nt, Homo sapiens
  misc_RNA (1)...(19): siRNA sense strand
ggaaccuggucuucaugca

SEQ ID NO: 2140550 - RNA, 19 nt, Homo sapiens
  misc_RNA (1)...(19): siRNA sense strand
ugugggcccuguacugaga

SEQ ID NO: 2140551 - RNA, 19 nt, Homo sapiens
  misc_RNA (1)...(19): siRNA sense strand
gcucucuggaugagguuua

SEQ ID NO: 2140552 - RNA, 19 nt, Homo sapiens
  misc_RNA (1)...(19): siRNA sense strand
ggcaagaggacgugcuguu

SEQ ID NO: 2140553 - RNA, 19 nt, Homo sapiens
  misc_RNA (1)...(19): siRNA sense strand
ggaugaggccuggcgucua

SEQ ID NO: 2140554 - RNA, 19 nt, Homo sapiens
  misc_RNA (1)...(19): siRNA sense strand
gccgugugcuuuccuuugg

SEQ ID NO: 2140555 - RNA, 19 nt, Homo sapiens
  misc_RNA (1)...(19): siRNA sense strand
ccaacagccagaaaugugu

SEQ ID NO: 2140556 - RNA, 19 nt, Homo sapiens
  misc_RNA (1)...(19): siRNA sense strand
gcgucgagcugugcguuuc

SEQ ID NO: 2140557 - RNA, 19 nt, Homo sapiens
  misc_RNA (1)...(19): siRNA sense strand
gacacagucucugcugagu

SEQ ID NO: 2140558 - RNA, 19 nt, Homo sapiens
  misc_RNA (1)...(19): siRNA sense strand
gaaggggccucugauugug

SEQ ID NO: 2140559 - RNA, 19 nt, Homo sapiens
  misc_RNA (1)...(19): siRNA sense strand
gcuuggcaauugggccuuu

SEQ ID NO: 2140560 - RNA, 19 nt, Homo sapiens
  misc_RNA (1)...(19): siRNA sense strand
ugagauccacuacgaccuu

SEQ ID NO: 2140561 - RNA, 19 nt, Homo sapiens
  misc_RNA (1)...(19): siRNA sense strand
agaccucuguggagcuaug

SEQ ID NO: 2140562 - RNA, 19 nt, Homo sapiens
  misc_RNA (1)...(19): siRNA sense strand
ggcaggaugaggcugugua

SEQ ID NO: 2140563 - RNA, 19 nt, Homo sapiens
  misc_RNA (1)...(19): siRNA sense strand
cagggauuguggcuugaug

SEQ ID NO: 2140564 - RNA, 19 nt, Homo sapiens
  misc_RNA (1)...(19): siRNA sense strand
uaccuucuuugaaaugcuu

SEQ ID NO: 2140565 - RNA, 19 nt, Homo sapiens
  misc_RNA (1)...(19): siRNA sense strand
cauaacgaccuggaagaug

SEQ ID NO: 2140566 - RNA, 19 nt, Homo sapiens
  misc_RNA (1)...(19): siRNA sense strand
gagcugugcguuucuccau

SEQ ID NO: 2140567 - RNA, 19 nt, Homo sapiens
  misc_RNA (1)...(19): siRNA sense strand
aggcaaacacuccaccuau

SEQ ID NO: 2140568 - RNA, 19 nt, Homo sapiens
  misc_RNA (1)...(19): siRNA sense strand
caaaugggacaggcugcaa

SEQ ID NO: 2140569 - RNA, 19 nt, Homo sapiens
  misc_RNA (1)...(19): siRNA sense strand
caacacugccauccguaag

SEQ ID NO: 2140570 - RNA, 19 nt, Homo sapiens
  misc_RNA (1)...(19): siRNA sense strand
agaaagggguccagcuaga

SEQ ID NO: 2140571 - RNA, 19 nt, Homo sapiens
  misc_RNA (1)...(19): siRNA sense strand
cucuggaucuccuacuuug

SEQ ID NO: 2140572 - RNA, 19 nt, Homo sapiens
  misc_RNA (1)...(19): siRNA sense strand
uggaagcugcccucaguau

SEQ ID NO: 2140573 - RNA, 19 nt, Homo sapiens
  misc_RNA (1)...(19): siRNA sense strand
uaugggaucccugaggaaa

SEQ ID NO: 2140574 - RNA, 19 nt, Homo sapiens
  misc_RNA (1)...(19): siRNA sense strand
ggcucuggaucuccuacuu

SEQ ID NO: 2140575 - RNA, 19 nt, Homo sapiens
  misc_RNA (1)...(19): siRNA sense strand
gcagagaguucuucaauuu

SEQ ID NO: 2140576 - RNA, 19 nt, Homo sapiens
  misc_RNA (1)...(19): siRNA sense strand
gaacaguugucauguagua

SEQ ID NO: 2140577 - RNA, 19 nt, Homo sapiens
  misc_RNA (1)...(19): siRNA sense strand
aaacaaggcccgaauauua

SEQ ID NO: 2140578 - RNA, 19 nt, Homo sapiens
  misc_RNA (1)...(19): siRNA sense strand
gaagauguguuggaaauaa

SEQ ID NO: 2140579 - RNA, 19 nt, Homo sapiens
  misc_RNA (1)...(19): siRNA sense strand
gcaaagaggagauaugaua

SEQ ID NO: 2140580 - RNA, 19 nt, Homo sapiens
  misc_RNA (1)...(19): siRNA sense strand
gcaauaagaugugaauuug

SEQ ID NO: 2140581 - RNA, 19 nt, Homo sapiens
  misc_RNA (1)...(19): siRNA sense strand
caagacagaugggaaguua

SEQ ID NO: 2140582 - RNA, 19 nt, Homo sapiens
  misc_RNA (1)...(19): siRNA sense strand
gaacauacaaggacuuaaa

SEQ ID NO: 2140583 - RNA, 19 nt, Homo sapiens
  misc_RNA (1)...(19): siRNA sense strand
gaguguggauguauucuua

SEQ ID NO: 2140584 - RNA, 19 nt, Homo sapiens
  misc_RNA (1)...(19): siRNA sense strand
ggagauccuuguauaguaa

SEQ ID NO: 2140585 - RNA, 19 nt, Homo sapiens
  misc_RNA (1)...(19): siRNA sense strand
gagaagauggacauuauua

SEQ ID NO: 2140586 - RNA, 19 nt, Homo sapiens
  misc_RNA (1)...(19): siRNA sense strand
uaaaugaccuuucagacuu

SEQ ID NO: 2140587 - RNA, 19 nt, Homo sapiens
  misc_RNA (1)...(19): siRNA sense strand
ggaaggaguuagugaguug

SEQ ID NO: 2140588 - RNA, 19 nt, Homo sapiens
  misc_RNA (1)...(19): siRNA sense strand
gaaaaccccugcaaagaua

SEQ ID NO: 2140589 - RNA, 19 nt, Homo sapiens
  misc_RNA (1)...(19): siRNA sense strand
agaaguagaugaagagauu

SEQ ID NO: 2140590 - RNA, 19 nt, Homo sapiens
  misc_RNA (1)...(19): siRNA sense strand
gaagaugaagcugaaauua

SEQ ID NO: 2140591 - RNA, 19 nt, Homo sapiens
  misc_RNA (1)...(19): siRNA sense strand
gaagggauguuugugauau

SEQ ID NO: 2140592 - RNA, 19 nt, Homo sapiens
  misc_RNA (1)...(19): siRNA sense strand
ggaauggcauacccaaauu

SEQ ID NO: 2140593 - RNA, 19 nt, Homo sapiens
  misc_RNA (1)...(19): siRNA sense strand
ggcaagaaaugcaaauauu

SEQ ID NO: 2140594 - RNA, 19 nt, Homo sapiens
  misc_RNA (1)...(19): siRNA sense strand
agaaacagcugaagaagga

SEQ ID NO: 2140595 - RNA, 19 nt, Homo sapiens
  misc_RNA (1)...(19): siRNA sense strand
gaacuggaaucuauugagu

SEQ ID NO: 2140596 - RNA, 19 nt, Homo sapiens
  misc_RNA (1)...(19): siRNA sense strand
ggaacuggaaggugaauua

SEQ ID NO: 2140597 - RNA, 19 nt, Homo sapiens
  misc_RNA (1)...(19): siRNA sense strand
cagaugagcuugcugaaau

SEQ ID NO: 2140598 - RNA, 19 nt, Homo sapiens
  misc_RNA (1)...(19): siRNA sense strand
gaaguccucuguucuacaa

SEQ ID NO: 2140599 - RNA, 19 nt, Homo sapiens
  misc_RNA (1)...(19): siRNA sense strand
ggugcagucuuuauaauuu

SEQ ID NO: 2140600 - RNA, 19 nt, Homo sapiens
  misc_RNA (1)...(19): siRNA sense strand
aagcagaguuugaugauaa

SEQ ID NO: 2140601 - RNA, 19 nt, Homo sapiens
  misc_RNA (1)...(19): siRNA sense strand
ccaaugaccuucucucugu

SEQ ID NO: 2140602 - RNA, 19 nt, Homo sapiens
  misc_RNA (1)...(19): siRNA sense strand
cuuaagaucuaucagguua

SEQ ID NO: 2140603 - RNA, 19 nt, Homo sapiens
  misc_RNA (1)...(19): siRNA sense strand
cagagaagauggacauuau

SEQ ID NO: 2140604 - RNA, 19 nt, Homo sapiens
  misc_RNA (1)...(19): siRNA sense strand
gcaaggcagugaaugcaaa

SEQ ID NO: 2140605 - RNA, 19 nt, Homo sapiens
  misc_RNA (1)...(19): siRNA sense strand
caaagucuguuaacaaauc

SEQ ID NO: 2140606 - RNA, 19 nt, Homo sapiens
  misc_RNA (1)...(19): siRNA sense strand
gaaaugguaucugugaaga

SEQ ID NO: 2140607 - RNA, 19 nt, Homo sapiens
  misc_RNA (1)...(19): siRNA sense strand
aaagugcucuucccuauga

SEQ ID NO: 2140608 - RNA, 19 nt, Homo sapiens
  misc_RNA (1)...(19): siRNA sense strand
gaagaaagcagugauggaa

SEQ ID NO: 2140609 - RNA, 19 nt, Homo sapiens
  misc_RNA (1)...(19): siRNA sense strand
gaaaagagcaucuguuuau

SEQ ID NO: 2140610 - RNA, 19 nt, Homo sapiens
  misc_RNA (1)...(19): siRNA sense strand
gaagaaggaacaaggguuu

SEQ ID NO: 2140611 - RNA, 19 nt, Homo sapiens
  misc_RNA (1)...(19): siRNA sense strand
caaauuggaugacaagagu

SEQ ID NO: 2140612 - RNA, 19 nt, Homo sapiens
  misc_RNA (1)...(19): siRNA sense strand
uaacauuugugaaggguuu

SEQ ID NO: 2140613 - RNA, 19 nt, Homo sapiens
  misc_RNA (1)...(19): siRNA sense strand
gguacuugcugccugaaua

SEQ ID NO: 2140614 - RNA, 19 nt, Homo sapiens
  misc_RNA (1)...(19): siRNA sense strand
caaguuguguagaaucuuu

SEQ ID NO: 2140615 - RNA, 19 nt, Homo sapiens
  misc_RNA (1)...(19): siRNA sense strand
caaacuuagucacucaaua

SEQ ID NO: 2140616 - RNA, 19 nt, Homo sapiens
  misc_RNA (1)...(19): siRNA sense strand
ggaggugccugauguguuc

SEQ ID NO: 2140617 - RNA, 19 nt, Homo sapiens
  misc_RNA (1)...(19): siRNA sense strand
gcagguagaguuuguuaaa

SEQ ID NO: 2140618 - RNA, 19 nt, Homo sapiens
  misc_RNA (1)...(19): siRNA sense strand
cauugacacuucaguauuu

SEQ ID NO: 2140619 - RNA, 19 nt, Homo sapiens
  misc_RNA (1)...(19): siRNA sense strand
cagaagauguguuggaaau

SEQ ID NO: 2140620 - RNA, 19 nt, Homo sapiens
  misc_RNA (1)...(19): siRNA sense strand
uaacaaaugguucaacuga

SEQ ID NO: 2140621 - RNA, 19 nt, Homo sapiens
  misc_RNA (1)...(19): siRNA sense strand
gauggaagcaagcacaaua

SEQ ID NO: 2140622 - RNA, 19 nt, Homo sapiens
  misc_RNA (1)...(19): siRNA sense strand
ugauaucccuuuagcaauu

SEQ ID NO: 2140623 - RNA, 19 nt, Homo sapiens
  misc_RNA (1)...(19): siRNA sense strand
gaaaucagaagggauguuu

SEQ ID NO: 2140624 - RNA, 19 nt, Homo sapiens
  misc_RNA (1)...(19): siRNA sense strand
gcagacaggagaaauugua

SEQ ID NO: 2140625 - RNA, 19 nt, Homo sapiens
  misc_RNA (1)...(19): siRNA sense strand
ggaguccucuguucagcua

SEQ ID NO: 2140626 - RNA, 19 nt, Homo sapiens
  misc_RNA (1)...(19): siRNA sense strand
gagcauguguauuauguca

SEQ ID NO: 2140627 - RNA, 19 nt, Homo sapiens
  misc_RNA (1)...(19): siRNA sense strand
gaagaagaauuuguagagu

SEQ ID NO: 2140628 - RNA, 19 nt, Homo sapiens
  misc_RNA (1)...(19): siRNA sense strand
caagauggauccuuugucu

SEQ ID NO: 2140629 - RNA, 19 nt, Homo sapiens
  misc_RNA (1)...(19): siRNA sense strand
gaacacugauuauagaacu

SEQ ID NO: 2140630 - RNA, 19 nt, Homo sapiens
  misc_RNA (1)...(19): siRNA sense strand
ccagauggaacacugauua

SEQ ID NO: 2140631 - RNA, 19 nt, Homo sapiens
  misc_RNA (1)...(19): siRNA sense strand
ugaugcauaugaugucuua

SEQ ID NO: 2140632 - RNA, 19 nt, Homo sapiens
  misc_RNA (1)...(19): siRNA sense strand
cagagugucuuauguugaa

SEQ ID NO: 2140633 - RNA, 19 nt, Homo sapiens
  misc_RNA (1)...(19): siRNA sense strand
gaagcaagcacaauaaugg

SEQ ID NO: 2140634 - RNA, 19 nt, Homo sapiens
  misc_RNA (1)...(19): siRNA sense strand
ccaaguaucaggaauuuga

SEQ ID NO: 2140635 - RNA, 19 nt, Homo sapiens
  misc_RNA (1)...(19): siRNA sense strand
agaaacacauggucuaaau

SEQ ID NO: 2140636 - RNA, 19 nt, Homo sapiens
  misc_RNA (1)...(19): siRNA sense strand
gaucauaucucagcucaac

SEQ ID NO: 2140637 - RNA, 19 nt, Homo sapiens
  misc_RNA (1)...(19): siRNA sense strand
caagcacaauaaugguuua

SEQ ID NO: 2140638 - RNA, 19 nt, Homo sapiens
  misc_RNA (1)...(19): siRNA sense strand
gaaacagccagaacuagaa

SEQ ID NO: 2140639 - RNA, 19 nt, Homo sapiens
  misc_RNA (1)...(19): siRNA sense strand
aauaugaaguugccaugua

SEQ ID NO: 2140640 - RNA, 19 nt, Homo sapiens
  misc_RNA (1)...(19): siRNA sense strand
gcugucagauguucauuau

SEQ ID NO: 2140641 - RNA, 19 nt, Homo sapiens
  misc_RNA (1)...(19): siRNA sense strand
acuggaaucuauugaguua

SEQ ID NO: 2140642 - RNA, 19 nt, Homo sapiens
  misc_RNA (1)...(19): siRNA sense strand
gauaagaguccaccugaga

SEQ ID NO: 2140643 - RNA, 19 nt, Homo sapiens
  misc_RNA (1)...(19): siRNA sense strand
guacugaggacaugagaaa

SEQ ID NO: 2140644 - RNA, 19 nt, Homo sapiens
  misc_RNA (1)...(19): siRNA sense strand
gauggauccuuugucuuua

SEQ ID NO: 2140645 - RNA, 19 nt, Homo sapiens
  misc_RNA (1)...(19): siRNA sense strand
gaaaauauccugguaaaug

SEQ ID NO: 2140646 - RNA, 19 nt, Homo sapiens
  misc_RNA (1)...(19): siRNA sense strand
caaaggagauacuagaacu

SEQ ID NO: 2140647 - RNA, 19 nt, Homo sapiens
  misc_RNA (1)...(19): siRNA sense strand
uaacuuccgugacccuaaa

SEQ ID NO: 2140648 - RNA, 19 nt, Homo sapiens
  misc_RNA (1)...(19): siRNA sense strand
gaccuacccuugugcuuug

SEQ ID NO: 2140649 - RNA, 19 nt, Homo sapiens
  misc_RNA (1)...(19): siRNA sense strand
aaagucaaguuguguagaa

SEQ ID NO: 2140650 - RNA, 19 nt, Homo sapiens
  misc_RNA (1)...(19): siRNA sense strand
uauuggagauccuuguaua

SEQ ID NO: 2140651 - RNA, 19 nt, Homo sapiens
  misc_RNA (1)...(19): siRNA sense strand
gcagguaugcucucaguga

SEQ ID NO: 2140652 - RNA, 19 nt, Homo sapiens
  misc_RNA (1)...(19): siRNA sense strand
gauuugagguuccugacaa

SEQ ID NO: 2140653 - RNA, 19 nt, Homo sapiens
  misc_RNA (1)...(19): siRNA sense strand
gaaugccgguggugaccua

SEQ ID NO: 2140654 - RNA, 19 nt, Homo sapiens
  misc_RNA (1)...(19): siRNA sense strand
gaacaccuacacucugaaa

SEQ ID NO: 2140655 - RNA, 19 nt, Homo sapiens
  misc_RNA (1)...(19): siRNA sense strand
aaacaaacuuagucacuca

SEQ ID NO: 2140656 - RNA, 19 nt, Homo sapiens
  misc_RNA (1)...(19): siRNA sense strand
caauacaagcuuucaauga

SEQ ID NO: 2140657 - RNA, 19 nt, Homo sapiens
  misc_RNA (1)...(19): siRNA sense strand
ggacugguaugacguaagg

SEQ ID NO: 2140658 - RNA, 19 nt, Homo sapiens
  misc_RNA (1)...(19): siRNA sense strand
ccuuugagcauguguauua

SEQ ID NO: 2140659 - RNA, 19 nt, Homo sapiens
  misc_RNA (1)...(19): siRNA sense strand
ucuaucagguuaaagauga

SEQ ID NO: 2140660 - RNA, 19 nt, Homo sapiens
  misc_RNA (1)...(19): siRNA sense strand
caaaugguauggaggagau

SEQ ID NO: 2140661 - RNA, 19 nt, Homo sapiens
  misc_RNA (1)...(19): siRNA sense strand
aaucagacauugacacuuc

SEQ ID NO: 2140662 - RNA, 19 nt, Homo sapiens
  misc_RNA (1)...(19): siRNA sense strand
uuagaacaguugucaugua

SEQ ID NO: 2140663 - RNA, 19 nt, Homo sapiens
  misc_RNA (1)...(19): siRNA sense strand
uaagcuggaugguguaguu

SEQ ID NO: 2140664 - RNA, 19 nt, Homo sapiens
  misc_RNA (1)...(19): siRNA sense strand
ugacaagaguguggaugua

SEQ ID NO: 2140665 - RNA, 19 nt, Homo sapiens
  misc_RNA (1)...(19): siRNA sense strand
gcaagcacaauaaugguuu

SEQ ID NO: 2140666 - RNA, 19 nt, Homo sapiens
  misc_RNA (1)...(19): siRNA sense strand
aaagugaaguccucuguuc

SEQ ID NO: 2140667 - RNA, 19 nt, Homo sapiens
  misc_RNA (1)...(19): siRNA sense strand
gugaugaucugcuuccaau

SEQ ID NO: 2140668 - RNA, 19 nt, Homo sapiens
  misc_RNA (1)...(19): siRNA sense strand
ggaagugaagaauuaguuu

SEQ ID NO: 2140669 - RNA, 19 nt, Homo sapiens
  misc_RNA (1)...(19): siRNA sense strand
gagaaaugguaucugugaa

SEQ ID NO: 2140670 - RNA, 19 nt, Homo sapiens
  misc_RNA (1)...(19): siRNA sense strand
caugcaagcugucagaugu

SEQ ID NO: 2140671 - RNA, 19 nt, Homo sapiens
  misc_RNA (1)...(19): siRNA sense strand
gaaggauuauguucucaag

SEQ ID NO: 2140672 - RNA, 19 nt, Homo sapiens
  misc_RNA (1)...(19): siRNA sense strand
auagggcacuuaucacuaa

SEQ ID NO: 2140673 - RNA, 19 nt, Homo sapiens
  misc_RNA (1)...(19): siRNA sense strand
aauagaagaugaagcugaa

SEQ ID NO: 2140674 - RNA, 19 nt, Homo sapiens
  misc_RNA (1)...(19): siRNA sense strand
agucaaguguuuccauuaa

SEQ ID NO: 2140675 - RNA, 19 nt, Homo sapiens
  misc_RNA (1)...(19): siRNA sense strand
ccaaagaaguagcucauuu

SEQ ID NO: 2140676 - RNA, 19 nt, Homo sapiens
  misc_RNA (1)...(19): siRNA sense strand
ggaaauggauauguccuuu

SEQ ID NO: 2140677 - RNA, 19 nt, Homo sapiens
  misc_RNA (1)...(19): siRNA sense strand
gcugagacccgcugaaaua

SEQ ID NO: 2140678 - RNA, 19 nt, Homo sapiens
  misc_RNA (1)...(19): siRNA sense strand
gaaauggauauguccuuua

SEQ ID NO: 2140679 - RNA, 19 nt, Homo sapiens
  misc_RNA (1)...(19): siRNA sense strand
ugacaaagguagcgauguu

SEQ ID NO: 2140680 - RNA, 19 nt, Homo sapiens
  misc_RNA (1)...(19): siRNA sense strand
gagacccgcugaaauaaug

SEQ ID NO: 2140681 - RNA, 19 nt, Homo sapiens
  misc_RNA (1)...(19): siRNA sense strand
gaaaugaaacugacaaagg

SEQ ID NO: 2140682 - RNA, 19 nt, Homo sapiens
  misc_RNA (1)...(19): siRNA sense strand
gggauucuguccacauuug

SEQ ID NO: 2140683 - RNA, 19 nt, Homo sapiens
  misc_RNA (1)...(19): siRNA sense strand
uguacaaucccaucauuua

SEQ ID NO: 2140684 - RNA, 19 nt, Homo sapiens
  misc_RNA (1)...(19): siRNA sense strand
caacggcugugaucguguu

SEQ ID NO: 2140685 - RNA, 19 nt, Homo sapiens
  misc_RNA (1)...(19): siRNA sense strand
aaaugaaacugacaaaggu

SEQ ID NO: 2140686 - RNA, 19 nt, Homo sapiens
  misc_RNA (1)...(19): siRNA sense strand
cagccuggaucgauauuug

SEQ ID NO: 2140687 - RNA, 19 nt, Homo sapiens
  misc_RNA (1)...(19): siRNA sense strand
ugaaagcaaccaagaagaa

SEQ ID NO: 2140688 - RNA, 19 nt, Homo sapiens
  misc_RNA (1)...(19): siRNA sense strand
gccaugugcuggaaaugaa

SEQ ID NO: 2140689 - RNA, 19 nt, Homo sapiens
  misc_RNA (1)...(19): siRNA sense strand
caaagaaguagcucauuuc

SEQ ID NO: 2140690 - RNA, 19 nt, Homo sapiens
  misc_RNA (1)...(19): siRNA sense strand
gcugaaauaaugacuauca

SEQ ID NO: 2140691 - RNA, 19 nt, Homo sapiens
  misc_RNA (1)...(19): siRNA sense strand
aaagaucauugccaagguu

SEQ ID NO: 2140692 - RNA, 19 nt, Homo sapiens
  misc_RNA (1)...(19): siRNA sense strand
guagcgauguugauuugug

SEQ ID NO: 2140693 - RNA, 19 nt, Homo sapiens
  misc_RNA (1)...(19): siRNA sense strand
ccgcugaaauaaugacuau

SEQ ID NO: 2140694 - RNA, 19 nt, Homo sapiens
  misc_RNA (1)...(19): siRNA sense strand
aaagaaagcacgccuacau

SEQ ID NO: 2140695 - RNA, 19 nt, Homo sapiens
  misc_RNA (1)...(19): siRNA sense strand
gaucguguucuccuacgua

SEQ ID NO: 2140696 - RNA, 19 nt, Homo sapiens
  misc_RNA (1)...(19): siRNA sense strand
ggauuuaguggcuggcuuu

SEQ ID NO: 2140697 - RNA, 19 nt, Homo sapiens
  misc_RNA (1)...(19): siRNA sense strand
gaaagcacgccuacaucug

SEQ ID NO: 2140698 - RNA, 19 nt, Homo sapiens
  misc_RNA (1)...(19): siRNA sense strand
guuaaguccucuuccaaag

SEQ ID NO: 2140699 - RNA, 19 nt, Homo sapiens
  misc_RNA (1)...(19): siRNA sense strand
aaauggauauguccuuuac

SEQ ID NO: 2140700 - RNA, 19 nt, Homo sapiens
  misc_RNA (1)...(19): siRNA sense strand
caagaagaagucucuggaa

SEQ ID NO: 2140701 - RNA, 19 nt, Homo sapiens
  misc_RNA (1)...(19): siRNA sense strand
uaaagaucauugccaaggu

SEQ ID NO: 2140702 - RNA, 19 nt, Homo sapiens
  misc_RNA (1)...(19): siRNA sense strand
gaaagcaaccaagaagaag

SEQ ID NO: 2140703 - RNA, 19 nt, Homo sapiens
  misc_RNA (1)...(19): siRNA sense strand
gguuaaguccucuuccaaa

SEQ ID NO: 2140704 - RNA, 19 nt, Homo sapiens
  misc_RNA (1)...(19): siRNA sense strand
gcuggaaauucaugaagag

SEQ ID NO: 2140705 - RNA, 19 nt, Homo sapiens
  misc_RNA (1)...(19): siRNA sense strand
gauuacaaauuugccuguu

SEQ ID NO: 2140706 - RNA, 19 nt, Homo sapiens
  misc_RNA (1)...(19): siRNA sense strand
cccaucauuuaccaaguua

SEQ ID NO: 2140707 - RNA, 19 nt, Homo sapiens
  misc_RNA (1)...(19): siRNA sense strand
guauggaugggcuggauuu

SEQ ID NO: 2140708 - RNA, 19 nt, Homo sapiens
  misc_RNA (1)...(19): siRNA sense strand
caauuuagcagucugugau

SEQ ID NO: 2140709 - RNA, 19 nt, Homo sapiens
  misc_RNA (1)...(19): siRNA sense strand
caucaucucuugcuuuugu

SEQ ID NO: 2140710 - RNA, 19 nt, Homo sapiens
  misc_RNA (1)...(19): siRNA sense strand
guggaagccuuaucaccau

SEQ ID NO: 2140711 - RNA, 19 nt, Homo sapiens
  misc_RNA (1)...(19): siRNA sense strand
caaccaagaagaagucucu

SEQ ID NO: 2140712 - RNA, 19 nt, Homo sapiens
  misc_RNA (1)...(19): siRNA sense strand
ggguuuggcugaaaagaaa

SEQ ID NO: 2140713 - RNA, 19 nt, Homo sapiens
  misc_RNA (1)...(19): siRNA sense strand
ucaugaagagugggaauaa

SEQ ID NO: 2140714 - RNA, 19 nt, Homo sapiens
  misc_RNA (1)...(19): siRNA sense strand
gcagccaucugggccuaug

SEQ ID NO: 2140715 - RNA, 19 nt, Homo sapiens
  misc_RNA (1)...(19): siRNA sense strand
aaagguagcgauguugauu

SEQ ID NO: 2140716 - RNA, 19 nt, Homo sapiens
  misc_RNA (1)...(19): siRNA sense strand
ggaaaugaaacugacaaag

SEQ ID NO: 2140717 - RNA, 19 nt, Homo sapiens
  misc_RNA (1)...(19): siRNA sense strand
cugcugugcuggaaauuca

SEQ ID NO: 2140718 - RNA, 19 nt, Homo sapiens
  misc_RNA (1)...(19): siRNA sense strand
guacaaucccaucauuuac

SEQ ID NO: 2140719 - RNA, 19 nt, Homo sapiens
  misc_RNA (1)...(19): siRNA sense strand
gccagacuccauucccaua

SEQ ID NO: 2140720 - RNA, 19 nt, Homo sapiens
  misc_RNA (1)...(19): siRNA sense strand
guugauuugugcuggauuc

SEQ ID NO: 2140721 - RNA, 19 nt, Homo sapiens
  misc_RNA (1)...(19): siRNA sense strand
agguagcgauguugauuug

SEQ ID NO: 2140722 - RNA, 19 nt, Homo sapiens
  misc_RNA (1)...(19): siRNA sense strand
ggaagccuuaucaccauga

SEQ ID NO: 2140723 - RNA, 19 nt, Homo sapiens
  misc_RNA (1)...(19): siRNA sense strand
ucccaucauuuaccaaguu

SEQ ID NO: 2140724 - RNA, 19 nt, Homo sapiens
  misc_RNA (1)...(19): siRNA sense strand
cugauugccuggauuccuu

SEQ ID NO: 2140725 - RNA, 19 nt, Homo sapiens
  misc_RNA (1)...(19): siRNA sense strand
ugccaacccuacuugcaaa

SEQ ID NO: 2140726 - RNA, 19 nt, Homo sapiens
  misc_RNA (1)...(19): siRNA sense strand
ugugcuggauuccugauug

SEQ ID NO: 2140727 - RNA, 19 nt, Homo sapiens
  misc_RNA (1)...(19): siRNA sense strand
acaaagguagcgauguuga

SEQ ID NO: 2140728 - RNA, 19 nt, Homo sapiens
  misc_RNA (1)...(19): siRNA sense strand
ggaaggccagacuccauuc

SEQ ID NO: 2140729 - RNA, 19 nt, Homo sapiens
  misc_RNA (1)...(19): siRNA sense strand
ugaacauccucuucuucug

SEQ ID NO: 2140730 - RNA, 19 nt, Homo sapiens
  misc_RNA (1)...(19): siRNA sense strand
cagacuccauucccauaca

SEQ ID NO: 2140731 - RNA, 19 nt, Homo sapiens
  misc_RNA (1)...(19): siRNA sense strand
caccaucaucucuugcuuu

SEQ ID NO: 2140732 - RNA, 19 nt, Homo sapiens
  misc_RNA (1)...(19): siRNA sense strand
uaaccacagucaggaaguc

SEQ ID NO: 2140733 - RNA, 19 nt, Homo sapiens
  misc_RNA (1)...(19): siRNA sense strand
caaaaucugcagcgaugua

SEQ ID NO: 2140734 - RNA, 19 nt, Homo sapiens
  misc_RNA (1)...(19): siRNA sense strand
gaucauugccaagguuaag

SEQ ID NO: 2140735 - RNA, 19 nt, Homo sapiens
  misc_RNA (1)...(19): siRNA sense strand
gugcuggaaaugaaacuga

SEQ ID NO: 2140736 - RNA, 19 nt, Homo sapiens
  misc_RNA (1)...(19): siRNA sense strand
gugccaacccuacuugcaa

SEQ ID NO: 2140737 - RNA, 19 nt, Homo sapiens
  misc_RNA (1)...(19): siRNA sense strand
caaagguagcgauguugau

SEQ ID NO: 2140738 - RNA, 19 nt, Homo sapiens
  misc_RNA (1)...(19): siRNA sense strand
gacaaagguagcgauguug

SEQ ID NO: 2140739 - RNA, 19 nt, Homo sapiens
  misc_RNA (1)...(19): siRNA sense strand
acaaucccaucauuuacca

SEQ ID NO: 2140740 - RNA, 19 nt, Homo sapiens
  misc_RNA (1)...(19): siRNA sense strand
cuuaugcaguggugucugu

SEQ ID NO: 2140741 - RNA, 19 nt, Homo sapiens
  misc_RNA (1)...(19): siRNA sense strand
ucaccaucaucucuugcuu

SEQ ID NO: 2140742 - RNA, 19 nt, Homo sapiens
  misc_RNA (1)...(19): siRNA sense strand
cuucugcugugcuggaaau

SEQ ID NO: 2140743 - RNA, 19 nt, Homo sapiens
  misc_RNA (1)...(19): siRNA sense strand
aagcugagacccgcugaaa

SEQ ID NO: 2140744 - RNA, 19 nt, Homo sapiens
  misc_RNA (1)...(19): siRNA sense strand
agaaagcacgccuacaucu

SEQ ID NO: 2140745 - RNA, 19 nt, Homo sapiens
  misc_RNA (1)...(19): siRNA sense strand
ucaauuuagcagucuguga

SEQ ID NO: 2140746 - RNA, 19 nt, Homo sapiens
  misc_RNA (1)...(19): siRNA sense strand
guggcuggcuuuuaccuaa

SEQ ID NO: 2140747 - RNA, 19 nt, Homo sapiens
  misc_RNA (1)...(19): siRNA sense strand
cugcagcgauguacaaucc

SEQ ID NO: 2140748 - RNA, 19 nt, Homo sapiens
  misc_RNA (1)...(19): siRNA sense strand
aagaucauugccaagguua

SEQ ID NO: 2140749 - RNA, 19 nt, Homo sapiens
  misc_RNA (1)...(19): siRNA sense strand
auuacaaauuugccuguug

SEQ ID NO: 2140750 - RNA, 19 nt, Homo sapiens
  misc_RNA (1)...(19): siRNA sense strand
gaagcugagacccgcugaa

SEQ ID NO: 2140751 - RNA, 19 nt, Homo sapiens
  misc_RNA (1)...(19): siRNA sense strand
gacagucggauccauagca

SEQ ID NO: 2140752 - RNA, 19 nt, Homo sapiens
  misc_RNA (1)...(19): siRNA sense strand
uugggauucuguccacauu

SEQ ID NO: 2140753 - RNA, 19 nt, Homo sapiens
  misc_RNA (1)...(19): siRNA sense strand
ugcuggaaauucaugaaga

SEQ ID NO: 2140754 - RNA, 19 nt, Homo sapiens
  misc_RNA (1)...(19): siRNA sense strand
ccaaagaaguagcucauuu

SEQ ID NO: 2140755 - RNA, 19 nt, Homo sapiens
  misc_RNA (1)...(19): siRNA sense strand
ggaaauggauauguccuuu

SEQ ID NO: 2140756 - RNA, 19 nt, Homo sapiens
  misc_RNA (1)...(19): siRNA sense strand
gcugagacccgcugaaaua

SEQ ID NO: 2140757 - RNA, 19 nt, Homo sapiens
  misc_RNA (1)...(19): siRNA sense strand
gaaauggauauguccuuua

SEQ ID NO: 2140758 - RNA, 19 nt, Homo sapiens
  misc_RNA (1)...(19): siRNA sense strand
ugacaaagguagcgauguu

SEQ ID NO: 2140759 - RNA, 19 nt, Homo sapiens
  misc_RNA (1)...(19): siRNA sense strand
gagacccgcugaaauaaug

SEQ ID NO: 2140760 - RNA, 19 nt, Homo sapiens
  misc_RNA (1)...(19): siRNA sense strand
gaaaugaaacugacaaagg

SEQ ID NO: 2140761 - RNA, 19 nt, Homo sapiens
  misc_RNA (1)...(19): siRNA sense strand
gggauucuguccacauuug

SEQ ID NO: 2140762 - RNA, 19 nt, Homo sapiens
  misc_RNA (1)...(19): siRNA sense strand
uguacaaucccaucauuua

SEQ ID NO: 2140763 - RNA, 19 nt, Homo sapiens
  misc_RNA (1)...(19): siRNA sense strand
caacggcugugaucguguu

SEQ ID NO: 2140764 - RNA, 19 nt, Homo sapiens
  misc_RNA (1)...(19): siRNA sense strand
aaaugaaacugacaaaggu

SEQ ID NO: 2140765 - RNA, 19 nt, Homo sapiens
  misc_RNA (1)...(19): siRNA sense strand
cagccuggaucgauauuug

SEQ ID NO: 2140766 - RNA, 19 nt, Homo sapiens
  misc_RNA (1)...(19): siRNA sense strand
ugaaagcaaccaagaagaa

SEQ ID NO: 2140767 - RNA, 19 nt, Homo sapiens
  misc_RNA (1)...(19): siRNA sense strand
gccaugugcuggaaaugaa

SEQ ID NO: 2140768 - RNA, 19 nt, Homo sapiens
  misc_RNA (1)...(19): siRNA sense strand
caaagaaguagcucauuuc

SEQ ID NO: 2140769 - RNA, 19 nt, Homo sapiens
  misc_RNA (1)...(19): siRNA sense strand
gcugaaauaaugacuauca

SEQ ID NO: 2140770 - RNA, 19 nt, Homo sapiens
  misc_RNA (1)...(19): siRNA sense strand
aaagaucauugccaagguu

SEQ ID NO: 2140771 - RNA, 19 nt, Homo sapiens
  misc_RNA (1)...(19): siRNA sense strand
guagcgauguugauuugug

SEQ ID NO: 2140772 - RNA, 19 nt, Homo sapiens
  misc_RNA (1)...(19): siRNA sense strand
ccgcugaaauaaugacuau

SEQ ID NO: 2140773 - RNA, 19 nt, Homo sapiens
  misc_RNA (1)...(19): siRNA sense strand
aaagaaagcacgccuacau

SEQ ID NO: 2140774 - RNA, 19 nt, Homo sapiens
  misc_RNA (1)...(19): siRNA sense strand
gaucguguucuccuacgua

SEQ ID NO: 2140775 - RNA, 19 nt, Homo sapiens
  misc_RNA (1)...(19): siRNA sense strand
ggauuuaguggcuggcuuu

SEQ ID NO: 2140776 - RNA, 19 nt, Homo sapiens
  misc_RNA (1)...(19): siRNA sense strand
gaaagcacgccuacaucug

SEQ ID NO: 2140777 - RNA, 19 nt, Homo sapiens
  misc_RNA (1)...(19): siRNA sense strand
guuaaguccucuuccaaag

SEQ ID NO: 2140778 - RNA, 19 nt, Homo sapiens
  misc_RNA (1)...(19): siRNA sense strand
aaauggauauguccuuuac

SEQ ID NO: 2140779 - RNA, 19 nt, Homo sapiens
  misc_RNA (1)...(19): siRNA sense strand
caagaagaagucucuggaa

SEQ ID NO: 2140780 - RNA, 19 nt, Homo sapiens
  misc_RNA (1)...(19): siRNA sense strand
uaaagaucauugccaaggu

SEQ ID NO: 2140781 - RNA, 19 nt, Homo sapiens
  misc_RNA (1)...(19): siRNA sense strand
gaaagcaaccaagaagaag

SEQ ID NO: 2140782 - RNA, 19 nt, Homo sapiens
  misc_RNA (1)...(19): siRNA sense strand
gguuaaguccucuuccaaa

SEQ ID NO: 2140783 - RNA, 19 nt, Homo sapiens
  misc_RNA (1)...(19): siRNA sense strand
gcuggaaauucaugaagag

SEQ ID NO: 2140784 - RNA, 19 nt, Homo sapiens
  misc_RNA (1)...(19): siRNA sense strand
gauuacaaauuugccuguu

SEQ ID NO: 2140785 - RNA, 19 nt, Homo sapiens
  misc_RNA (1)...(19): siRNA sense strand
cccaucauuuaccaaguua

SEQ ID NO: 2140786 - RNA, 19 nt, Homo sapiens
  misc_RNA (1)...(19): siRNA sense strand
guauggaugggcuggauuu

SEQ ID NO: 2140787 - RNA, 19 nt, Homo sapiens
  misc_RNA (1)...(19): siRNA sense strand
caauuuagcagucugugau

SEQ ID NO: 2140788 - RNA, 19 nt, Homo sapiens
  misc_RNA (1)...(19): siRNA sense strand
caucaucucuugcuuuugu

SEQ ID NO: 2140789 - RNA, 19 nt, Homo sapiens
  misc_RNA (1)...(19): siRNA sense strand
guggaagccuuaucaccau

SEQ ID NO: 2140790 - RNA, 19 nt, Homo sapiens
  misc_RNA (1)...(19): siRNA sense strand
caaccaagaagaagucucu

SEQ ID NO: 2140791 - RNA, 19 nt, Homo sapiens
  misc_RNA (1)...(19): siRNA sense strand
ggguuuggcugaaaagaaa

SEQ ID NO: 2140792 - RNA, 19 nt, Homo sapiens
  misc_RNA (1)...(19): siRNA sense strand
ucaugaagagugggaauaa

SEQ ID NO: 2140793 - RNA, 19 nt, Homo sapiens
  misc_RNA (1)...(19): siRNA sense strand
gcagccaucugggccuaug

SEQ ID NO: 2140794 - RNA, 19 nt, Homo sapiens
  misc_RNA (1)...(19): siRNA sense strand
aaagguagcgauguugauu

SEQ ID NO: 2140795 - RNA, 19 nt, Homo sapiens
  misc_RNA (1)...(19): siRNA sense strand
ggaaaugaaacugacaaag

SEQ ID NO: 2140796 - RNA, 19 nt, Homo sapiens
  misc_RNA (1)...(19): siRNA sense strand
cugcugugcuggaaauuca

SEQ ID NO: 2140797 - RNA, 19 nt, Homo sapiens
  misc_RNA (1)...(19): siRNA sense strand
guacaaucccaucauuuac

SEQ ID NO: 2140798 - RNA, 19 nt, Homo sapiens
  misc_RNA (1)...(19): siRNA sense strand
gccagacuccauucccaua

SEQ ID NO: 2140799 - RNA, 19 nt, Homo sapiens
  misc_RNA (1)...(19): siRNA sense strand
guugauuugugcuggauuc

SEQ ID NO: 2140800 - RNA, 19 nt, Homo sapiens
  misc_RNA (1)...(19): siRNA sense strand
agguagcgauguugauuug

SEQ ID NO: 2140801 - RNA, 19 nt, Homo sapiens
  misc_RNA (1)...(19): siRNA sense strand
ggaagccuuaucaccauga

SEQ ID NO: 2140802 - RNA, 19 nt, Homo sapiens
  misc_RNA (1)...(19): siRNA sense strand
ucccaucauuuaccaaguu

SEQ ID NO: 2140803 - RNA, 19 nt, Homo sapiens
  misc_RNA (1)...(19): siRNA sense strand
cugauugccuggauuccuu

SEQ ID NO: 2140804 - RNA, 19 nt, Homo sapiens
  misc_RNA (1)...(19): siRNA sense strand
ugccaacccuacuugcaaa

SEQ ID NO: 2140805 - RNA, 19 nt, Homo sapiens
  misc_RNA (1)...(19): siRNA sense strand
ugugcuggauuccugauug

SEQ ID NO: 2140806 - RNA, 19 nt, Homo sapiens
  misc_RNA (1)...(19): siRNA sense strand
acaaagguagcgauguuga

SEQ ID NO: 2140807 - RNA, 19 nt, Homo sapiens
  misc_RNA (1)...(19): siRNA sense strand
ggaaggccagacuccauuc

SEQ ID NO: 2140808 - RNA, 19 nt, Homo sapiens
  misc_RNA (1)...(19): siRNA sense strand
ugaacauccucuucuucug

SEQ ID NO: 2140809 - RNA, 19 nt, Homo sapiens
  misc_RNA (1)...(19): siRNA sense strand
cagacuccauucccauaca

SEQ ID NO: 2140810 - RNA, 19 nt, Homo sapiens
  misc_RNA (1)...(19): siRNA sense strand
caccaucaucucuugcuuu

SEQ ID NO: 2140811 - RNA, 19 nt, Homo sapiens
  misc_RNA (1)...(19): siRNA sense strand
uaaccacagucaggaaguc

SEQ ID NO: 2140812 - RNA, 19 nt, Homo sapiens
  misc_RNA (1)...(19): siRNA sense strand
caaaaucugcagcgaugua

SEQ ID NO: 2140813 - RNA, 19 nt, Homo sapiens
  misc_RNA (1)...(19): siRNA sense strand
gaucauugccaagguuaag

SEQ ID NO: 2140814 - RNA, 19 nt, Homo sapiens
  misc_RNA (1)...(19): siRNA sense strand
gugcuggaaaugaaacuga

SEQ ID NO: 2140815 - RNA, 19 nt, Homo sapiens
  misc_RNA (1)...(19): siRNA sense strand
gugccaacccuacuugcaa

SEQ ID NO: 2140816 - RNA, 19 nt, Homo sapiens
  misc_RNA (1)...(19): siRNA sense strand
caaagguagcgauguugau

SEQ ID NO: 2140817 - RNA, 19 nt, Homo sapiens
  misc_RNA (1)...(19): siRNA sense strand
gacaaagguagcgauguug

SEQ ID NO: 2140818 - RNA, 19 nt, Homo sapiens
  misc_RNA (1)...(19): siRNA sense strand
acaaucccaucauuuacca

SEQ ID NO: 2140819 - RNA, 19 nt, Homo sapiens
  misc_RNA (1)...(19): siRNA sense strand
cuuaugcaguggugucugu

SEQ ID NO: 2140820 - RNA, 19 nt, Homo sapiens
  misc_RNA (1)...(19): siRNA sense strand
ucaccaucaucucuugcuu

SEQ ID NO: 2140821 - RNA, 19 nt, Homo sapiens
  misc_RNA (1)...(19): siRNA sense strand
cuucugcugugcuggaaau

SEQ ID NO: 2140822 - RNA, 19 nt, Homo sapiens
  misc_RNA (1)...(19): siRNA sense strand
aagcugagacccgcugaaa

SEQ ID NO: 2140823 - RNA, 19 nt, Homo sapiens
  misc_RNA (1)...(19): siRNA sense strand
agaaagcacgccuacaucu

SEQ ID NO: 2140824 - RNA, 19 nt, Homo sapiens
  misc_RNA (1)...(19): siRNA sense strand
ucaauuuagcagucuguga

SEQ ID NO: 2140825 - RNA, 19 nt, Homo sapiens
  misc_RNA (1)...(19): siRNA sense strand
guggcuggcuuuuaccuaa

SEQ ID NO: 2140826 - RNA, 19 nt, Homo sapiens
  misc_RNA (1)...(19): siRNA sense strand
cugcagcgauguacaaucc

SEQ ID NO: 2140827 - RNA, 19 nt, Homo sapiens
  misc_RNA (1)...(19): siRNA sense strand
aagaucauugccaagguua

SEQ ID NO: 2140828 - RNA, 19 nt, Homo sapiens
  misc_RNA (1)...(19): siRNA sense strand
auuacaaauuugccuguug

SEQ ID NO: 2140829 - RNA, 19 nt, Homo sapiens
  misc_RNA (1)...(19): siRNA sense strand
gaagcugagacccgcugaa

SEQ ID NO: 2140830 - RNA, 19 nt, Homo sapiens
  misc_RNA (1)...(19): siRNA sense strand
gacagucggauccauagca

SEQ ID NO: 2140831 - RNA, 19 nt, Homo sapiens
  misc_RNA (1)...(19): siRNA sense strand
uugggauucuguccacauu

SEQ ID NO: 2140832 - RNA, 19 nt, Homo sapiens
  misc_RNA (1)...(19): siRNA sense strand
ugcuggaaauucaugaaga

SEQ ID NO: 2140833 - RNA, 19 nt, Homo sapiens
  misc_RNA (1)...(19): siRNA sense strand
gaacaaguuucgaggauuu

SEQ ID NO: 2140834 - RNA, 19 nt, Homo sapiens
  misc_RNA (1)...(19): siRNA sense strand
acaaagaacuugcuucaaa

SEQ ID NO: 2140835 - RNA, 19 nt, Homo sapiens
  misc_RNA (1)...(19): siRNA sense strand
ggaacgaguuucagacuuu

SEQ ID NO: 2140836 - RNA, 19 nt, Homo sapiens
  misc_RNA (1)...(19): siRNA sense strand
caacuuagauccuggaaau

SEQ ID NO: 2140837 - RNA, 19 nt, Homo sapiens
  misc_RNA (1)...(19): siRNA sense strand
cuacguaacuggagaauug

SEQ ID NO: 2140838 - RNA, 19 nt, Homo sapiens
  misc_RNA (1)...(19): siRNA sense strand
gcacaucuacuuacgauaa

SEQ ID NO: 2140839 - RNA, 19 nt, Homo sapiens
  misc_RNA (1)...(19): siRNA sense strand
uaaggaagauguaacaguu

SEQ ID NO: 2140840 - RNA, 19 nt, Homo sapiens
  misc_RNA (1)...(19): siRNA sense strand
gaaguuaacaguuguacaa

SEQ ID NO: 2140841 - RNA, 19 nt, Homo sapiens
  misc_RNA (1)...(19): siRNA sense strand
ggucauugcuuuagugaug

SEQ ID NO: 2140842 - RNA, 19 nt, Homo sapiens
  misc_RNA (1)...(19): siRNA sense strand
gagaauugaauccuacuua

SEQ ID NO: 2140843 - RNA, 19 nt, Homo sapiens
  misc_RNA (1)...(19): siRNA sense strand
gaagugagacaccuaaaga

SEQ ID NO: 2140844 - RNA, 19 nt, Homo sapiens
  misc_RNA (1)...(19): siRNA sense strand
caaugugacucauaacuug

SEQ ID NO: 2140845 - RNA, 19 nt, Homo sapiens
  misc_RNA (1)...(19): siRNA sense strand
gauaaaugcuccaccagau

SEQ ID NO: 2140846 - RNA, 19 nt, Homo sapiens
  misc_RNA (1)...(19): siRNA sense strand
uaguagcucugacacauua

SEQ ID NO: 2140847 - RNA, 19 nt, Homo sapiens
  misc_RNA (1)...(19): siRNA sense strand
gaugauuccugugaugaua

SEQ ID NO: 2140848 - RNA, 19 nt, Homo sapiens
  misc_RNA (1)...(19): siRNA sense strand
ccaaugcccuuuauacuca

SEQ ID NO: 2140849 - RNA, 19 nt, Homo sapiens
  misc_RNA (1)...(19): siRNA sense strand
caaagucauuccuacguaa

SEQ ID NO: 2140850 - RNA, 19 nt, Homo sapiens
  misc_RNA (1)...(19): siRNA sense strand
acaacuggcuccucaaauu

SEQ ID NO: 2140851 - RNA, 19 nt, Homo sapiens
  misc_RNA (1)...(19): siRNA sense strand
caacacaccugcccagagu

SEQ ID NO: 2140852 - RNA, 19 nt, Homo sapiens
  misc_RNA (1)...(19): siRNA sense strand
gacaaacccuugccagaau

SEQ ID NO: 2140853 - RNA, 19 nt, Homo sapiens
  misc_RNA (1)...(19): siRNA sense strand
gaaacuauucggaagauga

SEQ ID NO: 2140854 - RNA, 19 nt, Homo sapiens
  misc_RNA (1)...(19): siRNA sense strand
guaaauaagcagacagaaa

SEQ ID NO: 2140855 - RNA, 19 nt, Homo sapiens
  misc_RNA (1)...(19): siRNA sense strand
ccauugauauucugauuga

SEQ ID NO: 2140856 - RNA, 19 nt, Homo sapiens
  misc_RNA (1)...(19): siRNA sense strand
ggagauuaaugcaguuguu

SEQ ID NO: 2140857 - RNA, 19 nt, Homo sapiens
  misc_RNA (1)...(19): siRNA sense strand
ggaggaaguuaccaagaga

SEQ ID NO: 2140858 - RNA, 19 nt, Homo sapiens
  misc_RNA (1)...(19): siRNA sense strand
gaaguuucccguuauuuga

SEQ ID NO: 2140859 - RNA, 19 nt, Homo sapiens
  misc_RNA (1)...(19): siRNA sense strand
acagagggauauauacuuu

SEQ ID NO: 2140860 - RNA, 19 nt, Homo sapiens
  misc_RNA (1)...(19): siRNA sense strand
gacaagacaagauucauaa

SEQ ID NO: 2140861 - RNA, 19 nt, Homo sapiens
  misc_RNA (1)...(19): siRNA sense strand
gcacaaagcacagcacaug

SEQ ID NO: 2140862 - RNA, 19 nt, Homo sapiens
  misc_RNA (1)...(19): siRNA sense strand
gagcacaucuacuuacgau

SEQ ID NO: 2140863 - RNA, 19 nt, Homo sapiens
  misc_RNA (1)...(19): siRNA sense strand
gaacauaccacaaagucau

SEQ ID NO: 2140864 - RNA, 19 nt, Homo sapiens
  misc_RNA (1)...(19): siRNA sense strand
gagaacaaguuucgaggau

SEQ ID NO: 2140865 - RNA, 19 nt, Homo sapiens
  misc_RNA (1)...(19): siRNA sense strand
agaggaaucuaacaaagaa

SEQ ID NO: 2140866 - RNA, 19 nt, Homo sapiens
  misc_RNA (1)...(19): siRNA sense strand
aggaguaucuguuuacauu

SEQ ID NO: 2140867 - RNA, 19 nt, Homo sapiens
  misc_RNA (1)...(19): siRNA sense strand
caacugaucggcguguuua

SEQ ID NO: 2140868 - RNA, 19 nt, Homo sapiens
  misc_RNA (1)...(19): siRNA sense strand
caaagaacuugcuucaaag

SEQ ID NO: 2140869 - RNA, 19 nt, Homo sapiens
  misc_RNA (1)...(19): siRNA sense strand
gaaaagcccucugggaaaa

SEQ ID NO: 2140870 - RNA, 19 nt, Homo sapiens
  misc_RNA (1)...(19): siRNA sense strand
guacgguucuuacaguuau

SEQ ID NO: 2140871 - RNA, 19 nt, Homo sapiens
  misc_RNA (1)...(19): siRNA sense strand
ccaaagaaaucagacacaa

SEQ ID NO: 2140872 - RNA, 19 nt, Homo sapiens
  misc_RNA (1)...(19): siRNA sense strand
uaauagggcucugaauaga

SEQ ID NO: 2140873 - RNA, 19 nt, Homo sapiens
  misc_RNA (1)...(19): siRNA sense strand
acacugaacagauccaaua

SEQ ID NO: 2140874 - RNA, 19 nt, Homo sapiens
  misc_RNA (1)...(19): siRNA sense strand
ggaaauaguaagcauuaug

SEQ ID NO: 2140875 - RNA, 19 nt, Homo sapiens
  misc_RNA (1)...(19): siRNA sense strand
ucaguagccuuaaaccaaa

SEQ ID NO: 2140876 - RNA, 19 nt, Homo sapiens
  misc_RNA (1)...(19): siRNA sense strand
agacaggaauucaaauguu

SEQ ID NO: 2140877 - RNA, 19 nt, Homo sapiens
  misc_RNA (1)...(19): siRNA sense strand
ccaauaauccaccugguaa

SEQ ID NO: 2140878 - RNA, 19 nt, Homo sapiens
  misc_RNA (1)...(19): siRNA sense strand
cagcaugguucagauaauu

SEQ ID NO: 2140879 - RNA, 19 nt, Homo sapiens
  misc_RNA (1)...(19): siRNA sense strand
gaaauaaaaucugcgacua

SEQ ID NO: 2140880 - RNA, 19 nt, Homo sapiens
  misc_RNA (1)...(19): siRNA sense strand
gacaggaauucaaauguuc

SEQ ID NO: 2140881 - RNA, 19 nt, Homo sapiens
  misc_RNA (1)...(19): siRNA sense strand
guuagaagcauaccaagaa

SEQ ID NO: 2140882 - RNA, 19 nt, Homo sapiens
  misc_RNA (1)...(19): siRNA sense strand
guccauugcuuaauuacaa

SEQ ID NO: 2140883 - RNA, 19 nt, Homo sapiens
  misc_RNA (1)...(19): siRNA sense strand
cuaguccauugcuuaauua

SEQ ID NO: 2140884 - RNA, 19 nt, Homo sapiens
  misc_RNA (1)...(19): siRNA sense strand
uaacaaagaacuugcuuca

SEQ ID NO: 2140885 - RNA, 19 nt, Homo sapiens
  misc_RNA (1)...(19): siRNA sense strand
uaaagaaucaacagacuga

SEQ ID NO: 2140886 - RNA, 19 nt, Homo sapiens
  misc_RNA (1)...(19): siRNA sense strand
ugccauaccuccugcuuaa

SEQ ID NO: 2140887 - RNA, 19 nt, Homo sapiens
  misc_RNA (1)...(19): siRNA sense strand
cauaagaagucacggauac

SEQ ID NO: 2140888 - RNA, 19 nt, Homo sapiens
  misc_RNA (1)...(19): siRNA sense strand
guccuuugaugaagaauuu

SEQ ID NO: 2140889 - RNA, 19 nt, Homo sapiens
  misc_RNA (1)...(19): siRNA sense strand
gaugaagaauuuagaacuc

SEQ ID NO: 2140890 - RNA, 19 nt, Homo sapiens
  misc_RNA (1)...(19): siRNA sense strand
auaaaucgcccagaaauaa

SEQ ID NO: 2140891 - RNA, 19 nt, Homo sapiens
  misc_RNA (1)...(19): siRNA sense strand
acaaagucauuccuacgua

SEQ ID NO: 2140892 - RNA, 19 nt, Homo sapiens
  misc_RNA (1)...(19): siRNA sense strand
gauuugagggcuaugauaa

SEQ ID NO: 2140893 - RNA, 19 nt, Homo sapiens
  misc_RNA (1)...(19): siRNA sense strand
caagcaacaugccaaauac

SEQ ID NO: 2140894 - RNA, 19 nt, Homo sapiens
  misc_RNA (1)...(19): siRNA sense strand
acaagcaacaugccaaaua

SEQ ID NO: 2140895 - RNA, 19 nt, Homo sapiens
  misc_RNA (1)...(19): siRNA sense strand
gaacacggguuagaagcau

SEQ ID NO: 2140896 - RNA, 19 nt, Homo sapiens
  misc_RNA (1)...(19): siRNA sense strand
ccaagagcacaucuacuua

SEQ ID NO: 2140897 - RNA, 19 nt, Homo sapiens
  misc_RNA (1)...(19): siRNA sense strand
gagauuaaugcaguuguua

SEQ ID NO: 2140898 - RNA, 19 nt, Homo sapiens
  misc_RNA (1)...(19): siRNA sense strand
guacagcauuugacagaca

SEQ ID NO: 2140899 - RNA, 19 nt, Homo sapiens
  misc_RNA (1)...(19): siRNA sense strand
ucaaauggaucagcuuuag

SEQ ID NO: 2140900 - RNA, 19 nt, Homo sapiens
  misc_RNA (1)...(19): siRNA sense strand
ccauaccuccugcuuaaua

SEQ ID NO: 2140901 - RNA, 19 nt, Homo sapiens
  misc_RNA (1)...(19): siRNA sense strand
ggauauauuuacagaugug

SEQ ID NO: 2140902 - RNA, 19 nt, Homo sapiens
  misc_RNA (1)...(19): siRNA sense strand
gcacagcacaugguacuga

SEQ ID NO: 2140903 - RNA, 19 nt, Homo sapiens
  misc_RNA (1)...(19): siRNA sense strand
gagauucaagggagauuaa

SEQ ID NO: 2140904 - RNA, 19 nt, Homo sapiens
  misc_RNA (1)...(19): siRNA sense strand
ggaggaggaugaggaggaa

SEQ ID NO: 2140905 - RNA, 19 nt, Homo sapiens
  misc_RNA (1)...(19): siRNA sense strand
guacugaugauuccuguga

SEQ ID NO: 2140906 - RNA, 19 nt, Homo sapiens
  misc_RNA (1)...(19): siRNA sense strand
gaacgaguuucagacuuuc

SEQ ID NO: 2140907 - RNA, 19 nt, Homo sapiens
  misc_RNA (1)...(19): siRNA sense strand
ucuaguccauugcuuaauu

SEQ ID NO: 2140908 - RNA, 19 nt, Homo sapiens
  misc_RNA (1)...(19): siRNA sense strand
caaagaaaucagacacaaa

SEQ ID NO: 2140909 - RNA, 19 nt, Homo sapiens
  misc_RNA (1)...(19): siRNA sense strand
agaagcauaccaagaauuu

SEQ ID NO: 2140910 - RNA, 19 nt, Homo sapiens
  misc_RNA (1)...(19): siRNA sense strand
gcagacaggaauucaaaug

SEQ ID NO: 2140911 - RNA, 19 nt, Homo sapiens
  misc_RNA (1)...(19): siRNA sense strand
gagcuucuacgaucucauu

SEQ ID NO: 2140912 - RNA, 19 nt, Homo sapiens
  misc_RNA (1)...(19): siRNA sense strand
agacaagacaagauucaua

SEQ ID NO: 2140913 - RNA, 19 nt, Homo sapiens
  misc_RNA (1)...(19): siRNA sense strand
cgacuaugggcaacaguua

SEQ ID NO: 2140914 - RNA, 19 nt, Homo sapiens
  misc_RNA (1)...(19): siRNA sense strand
caguauaaaucgcccagaa

SEQ ID NO: 2140915 - RNA, 19 nt, Homo sapiens
  misc_RNA (1)...(19): siRNA sense strand
uaaaugcuccaccagauga

SEQ ID NO: 2140916 - RNA, 19 nt, Homo sapiens
  misc_RNA (1)...(19): siRNA sense strand
aaagaggaaucuaacaaag

SEQ ID NO: 2140917 - RNA, 19 nt, Homo sapiens
  misc_RNA (1)...(19): siRNA sense strand
ccaaaucaguuuccauugc

SEQ ID NO: 2140918 - RNA, 19 nt, Homo sapiens
  misc_RNA (1)...(19): siRNA sense strand
agacugagaaucuacuuaa

SEQ ID NO: 2140919 - RNA, 19 nt, Homo sapiens
  misc_RNA (1)...(19): siRNA sense strand
cuuaauagggcucugaaua

SEQ ID NO: 2140920 - RNA, 19 nt, Homo sapiens
  misc_RNA (1)...(19): siRNA sense strand
gacuuaggcuggccauaug

SEQ ID NO: 2140921 - RNA, 19 nt, Homo sapiens
  misc_RNA (1)...(19): siRNA sense strand
ugauucaucuccuagaaga

SEQ ID NO: 2140922 - RNA, 19 nt, Homo sapiens
  misc_RNA (1)...(19): siRNA sense strand
ccagaaaguugcacaaagc

SEQ ID NO: 2140923 - RNA, 19 nt, Homo sapiens
  misc_RNA (1)...(19): siRNA sense strand
guguaaaucugacaacuac

SEQ ID NO: 2140924 - RNA, 19 nt, Homo sapiens
  misc_RNA (1)...(19): siRNA sense strand
gcucugaauagaaccaaua

SEQ ID NO: 2140925 - RNA, 19 nt, Homo sapiens
  misc_RNA (1)...(19): siRNA sense strand
gauccugugucccuaguuc

SEQ ID NO: 2140926 - RNA, 19 nt, Homo sapiens
  misc_RNA (1)...(19): siRNA sense strand
uauaaaucgcccagaaaua

SEQ ID NO: 2140927 - RNA, 19 nt, Homo sapiens
  misc_RNA (1)...(19): siRNA sense strand
caacaagcaacaugccaaa

SEQ ID NO: 2140928 - RNA, 19 nt, Homo sapiens
  misc_RNA (1)...(19): siRNA sense strand
caaagcacagcacauggua

SEQ ID NO: 2140929 - RNA, 19 nt, Homo sapiens
  misc_RNA (1)...(19): siRNA sense strand
cgaguuagacaaccagaaa

SEQ ID NO: 2140930 - RNA, 19 nt, Homo sapiens
  misc_RNA (1)...(19): siRNA sense strand
gacugagaaucuacuuaaa

SEQ ID NO: 2140931 - RNA, 19 nt, Homo sapiens
  misc_RNA (1)...(19): siRNA sense strand
guacaacuggcuccucaaa

SEQ ID NO: 2140932 - RNA, 19 nt, Homo sapiens
  misc_RNA (1)...(19): siRNA sense strand
gaauagaaccaauaaucca

SEQ ID NO: 2140933 - RNA, 19 nt, Homo sapiens
  misc_RNA (1)...(19): siRNA sense strand
ggacaagccuuagcaaaua

SEQ ID NO: 2140934 - RNA, 19 nt, Homo sapiens
  misc_RNA (1)...(19): siRNA sense strand
gauggaagcuggugacuuu

SEQ ID NO: 2140935 - RNA, 19 nt, Homo sapiens
  misc_RNA (1)...(19): siRNA sense strand
caaacuggcuugucuguaa

SEQ ID NO: 2140936 - RNA, 19 nt, Homo sapiens
  misc_RNA (1)...(19): siRNA sense strand
gaaaggcauucaucaauau

SEQ ID NO: 2140937 - RNA, 19 nt, Homo sapiens
  misc_RNA (1)...(19): siRNA sense strand
gcacaagccuccuucaaug

SEQ ID NO: 2140938 - RNA, 19 nt, Homo sapiens
  misc_RNA (1)...(19): siRNA sense strand
gcaggaaacaucccaguua

SEQ ID NO: 2140939 - RNA, 19 nt, Homo sapiens
  misc_RNA (1)...(19): siRNA sense strand
ccacugaggauuugauaua

SEQ ID NO: 2140940 - RNA, 19 nt, Homo sapiens
  misc_RNA (1)...(19): siRNA sense strand
gaaagugugaugaaagaaa

SEQ ID NO: 2140941 - RNA, 19 nt, Homo sapiens
  misc_RNA (1)...(19): siRNA sense strand
gcaagacacaugaauauuc

SEQ ID NO: 2140942 - RNA, 19 nt, Homo sapiens
  misc_RNA (1)...(19): siRNA sense strand
ggaagcuggugacuuuauu

SEQ ID NO: 2140943 - RNA, 19 nt, Homo sapiens
  misc_RNA (1)...(19): siRNA sense strand
gcucugggcuguccauaug

SEQ ID NO: 2140944 - RNA, 19 nt, Homo sapiens
  misc_RNA (1)...(19): siRNA sense strand
gcaagaagaauauuaacug

SEQ ID NO: 2140945 - RNA, 19 nt, Homo sapiens
  misc_RNA (1)...(19): siRNA sense strand
uaauagaagugacuagcuu

SEQ ID NO: 2140946 - RNA, 19 nt, Homo sapiens
  misc_RNA (1)...(19): siRNA sense strand
uugcaaagcugugaauaaa

SEQ ID NO: 2140947 - RNA, 19 nt, Homo sapiens
  misc_RNA (1)...(19): siRNA sense strand
auacaggugugaaucuaua

SEQ ID NO: 2140948 - RNA, 19 nt, Homo sapiens
  misc_RNA (1)...(19): siRNA sense strand
gggauggauugcagaauga

SEQ ID NO: 2140949 - RNA, 19 nt, Homo sapiens
  misc_RNA (1)...(19): siRNA sense strand
caauacaggugugaaucua

SEQ ID NO: 2140950 - RNA, 19 nt, Homo sapiens
  misc_RNA (1)...(19): siRNA sense strand
ccauaugaaggaaguauua

SEQ ID NO: 2140951 - RNA, 19 nt, Homo sapiens
  misc_RNA (1)...(19): siRNA sense strand
gugaaucuauacaaaguga

SEQ ID NO: 2140952 - RNA, 19 nt, Homo sapiens
  misc_RNA (1)...(19): siRNA sense strand
uggcuugucuguaauagaa

SEQ ID NO: 2140953 - RNA, 19 nt, Homo sapiens
  misc_RNA (1)...(19): siRNA sense strand
caggaaacaucccaguuau

SEQ ID NO: 2140954 - RNA, 19 nt, Homo sapiens
  misc_RNA (1)...(19): siRNA sense strand
gacaagccuuagcaaauau

SEQ ID NO: 2140955 - RNA, 19 nt, Homo sapiens
  misc_RNA (1)...(19): siRNA sense strand
ggaaacaucccaguuaucu

SEQ ID NO: 2140956 - RNA, 19 nt, Homo sapiens
  misc_RNA (1)...(19): siRNA sense strand
uggaaagugugaugaaaga

SEQ ID NO: 2140957 - RNA, 19 nt, Homo sapiens
  misc_RNA (1)...(19): siRNA sense strand
gaauguagccacugaggau

SEQ ID NO: 2140958 - RNA, 19 nt, Homo sapiens
  misc_RNA (1)...(19): siRNA sense strand
gguuauaguuccuacagau

SEQ ID NO: 2140959 - RNA, 19 nt, Homo sapiens
  misc_RNA (1)...(19): siRNA sense strand
gaagcuggugacuuuauuu

SEQ ID NO: 2140960 - RNA, 19 nt, Homo sapiens
  misc_RNA (1)...(19): siRNA sense strand
cuccuaaucuucaggguuu

SEQ ID NO: 2140961 - RNA, 19 nt, Homo sapiens
  misc_RNA (1)...(19): siRNA sense strand
ggaacuccaggaaguauga

SEQ ID NO: 2140962 - RNA, 19 nt, Homo sapiens
  misc_RNA (1)...(19): siRNA sense strand
ggaaguauuacaccgcaaa

SEQ ID NO: 2140963 - RNA, 19 nt, Homo sapiens
  misc_RNA (1)...(19): siRNA sense strand
gaaaguaugggaaaauuug

SEQ ID NO: 2140964 - RNA, 19 nt, Homo sapiens
  misc_RNA (1)...(19): siRNA sense strand
uuagguggcugcccuuaug

SEQ ID NO: 2140965 - RNA, 19 nt, Homo sapiens
  misc_RNA (1)...(19): siRNA sense strand
uaccacagauggcugauca

SEQ ID NO: 2140966 - RNA, 19 nt, Homo sapiens
  misc_RNA (1)...(19): siRNA sense strand
aaagaauguuggaaagugu

SEQ ID NO: 2140967 - RNA, 19 nt, Homo sapiens
  misc_RNA (1)...(19): siRNA sense strand
gaagugacuagcuuugugu

SEQ ID NO: 2140968 - RNA, 19 nt, Homo sapiens
  misc_RNA (1)...(19): siRNA sense strand
gcaaagcugugaauaaaac

SEQ ID NO: 2140969 - RNA, 19 nt, Homo sapiens
  misc_RNA (1)...(19): siRNA sense strand
gcuggugacuuuauuugca

SEQ ID NO: 2140970 - RNA, 19 nt, Homo sapiens
  misc_RNA (1)...(19): siRNA sense strand
ggcauggguuguuaugaga

SEQ ID NO: 2140971 - RNA, 19 nt, Homo sapiens
  misc_RNA (1)...(19): siRNA sense strand
caagacacaugaauauucc

SEQ ID NO: 2140972 - RNA, 19 nt, Homo sapiens
  misc_RNA (1)...(19): siRNA sense strand
ugaucacacugaaguaaug

SEQ ID NO: 2140973 - RNA, 19 nt, Homo sapiens
  misc_RNA (1)...(19): siRNA sense strand
acagauggcugaucacacu

SEQ ID NO: 2140974 - RNA, 19 nt, Homo sapiens
  misc_RNA (1)...(19): siRNA sense strand
ugacuagcuuugugucuuc

SEQ ID NO: 2140975 - RNA, 19 nt, Homo sapiens
  misc_RNA (1)...(19): siRNA sense strand
cacaaacucuaaaguagca

SEQ ID NO: 2140976 - RNA, 19 nt, Homo sapiens
  misc_RNA (1)...(19): siRNA sense strand
guuggaaagugugaugaaa

SEQ ID NO: 2140977 - RNA, 19 nt, Homo sapiens
  misc_RNA (1)...(19): siRNA sense strand
agaagugucuaagagauug

SEQ ID NO: 2140978 - RNA, 19 nt, Homo sapiens
  misc_RNA (1)...(19): siRNA sense strand
uaacuguuccauugaagaa

SEQ ID NO: 2140979 - RNA, 19 nt, Homo sapiens
  misc_RNA (1)...(19): siRNA sense strand
ccagauggguaccacagau

SEQ ID NO: 2140980 - RNA, 19 nt, Homo sapiens
  misc_RNA (1)...(19): siRNA sense strand
gaaucuauacaaagugaug

SEQ ID NO: 2140981 - RNA, 19 nt, Homo sapiens
  misc_RNA (1)...(19): siRNA sense strand
agaagugacuagcuuugug

SEQ ID NO: 2140982 - RNA, 19 nt, Homo sapiens
  misc_RNA (1)...(19): siRNA sense strand
gugugaaucuauacaaagu

SEQ ID NO: 2140983 - RNA, 19 nt, Homo sapiens
  misc_RNA (1)...(19): siRNA sense strand
guuauaguuccuacagaua

SEQ ID NO: 2140984 - RNA, 19 nt, Homo sapiens
  misc_RNA (1)...(19): siRNA sense strand
ugcuggagcuacugagaua

SEQ ID NO: 2140985 - RNA, 19 nt, Homo sapiens
  misc_RNA (1)...(19): siRNA sense strand
gcugaucacacugaaguaa

SEQ ID NO: 2140986 - RNA, 19 nt, Homo sapiens
  misc_RNA (1)...(19): siRNA sense strand
acagaagugucuaagagau

SEQ ID NO: 2140987 - RNA, 19 nt, Homo sapiens
  misc_RNA (1)...(19): siRNA sense strand
gcacgaggguaugugucuu

SEQ ID NO: 2140988 - RNA, 19 nt, Homo sapiens
  misc_RNA (1)...(19): siRNA sense strand
acacugaaguaaugaaagg

SEQ ID NO: 2140989 - RNA, 19 nt, Homo sapiens
  misc_RNA (1)...(19): siRNA sense strand
gcaucugaauccuuuagca

SEQ ID NO: 2140990 - RNA, 19 nt, Homo sapiens
  misc_RNA (1)...(19): siRNA sense strand
aaccacaaacucuaaagua

SEQ ID NO: 2140991 - RNA, 19 nt, Homo sapiens
  misc_RNA (1)...(19): siRNA sense strand
caggugcucuugcuguuca

SEQ ID NO: 2140992 - RNA, 19 nt, Homo sapiens
  misc_RNA (1)...(19): siRNA sense strand
gugacuagcuuugugucuu

SEQ ID NO: 2140993 - RNA, 19 nt, Homo sapiens
  misc_RNA (1)...(19): siRNA sense strand
ucugaauccuuuagcaaga

SEQ ID NO: 2140994 - RNA, 19 nt, Homo sapiens
  misc_RNA (1)...(19): siRNA sense strand
ucaucaauauccaggaguu

SEQ ID NO: 2140995 - RNA, 19 nt, Homo sapiens
  misc_RNA (1)...(19): siRNA sense strand
aaacuggcuugucuguaau

SEQ ID NO: 2140996 - RNA, 19 nt, Homo sapiens
  misc_RNA (1)...(19): siRNA sense strand
ucaaucgacuuucccaaac

SEQ ID NO: 2140997 - RNA, 19 nt, Homo sapiens
  misc_RNA (1)...(19): siRNA sense strand
uugaggagguuguuaaguc

SEQ ID NO: 2140998 - RNA, 19 nt, Homo sapiens
  misc_RNA (1)...(19): siRNA sense strand
cggacaagccuuagcaaau

SEQ ID NO: 2140999 - RNA, 19 nt, Homo sapiens
  misc_RNA (1)...(19): siRNA sense strand
cacauacggacaagccuua

SEQ ID NO: 2141000 - RNA, 19 nt, Homo sapiens
  misc_RNA (1)...(19): siRNA sense strand
cggcauggguuguuaugag

SEQ ID NO: 2141001 - RNA, 19 nt, Homo sapiens
  misc_RNA (1)...(19): siRNA sense strand
cagaagugucuaagagauu

SEQ ID NO: 2141002 - RNA, 19 nt, Homo sapiens
  misc_RNA (1)...(19): siRNA sense strand
gauggcugaucacacugaa

SEQ ID NO: 2141003 - RNA, 19 nt, Homo sapiens
  misc_RNA (1)...(19): siRNA sense strand
agggauggauugcagaaug

SEQ ID NO: 2141004 - RNA, 19 nt, Homo sapiens
  misc_RNA (1)...(19): siRNA sense strand
cugcaagacacaugaauau

SEQ ID NO: 2141005 - RNA, 19 nt, Homo sapiens
  misc_RNA (1)...(19): siRNA sense strand
ucacacugaaguaaugaaa

SEQ ID NO: 2141006 - RNA, 19 nt, Homo sapiens
  misc_RNA (1)...(19): siRNA sense strand
ugaggagguuguuaagucu

SEQ ID NO: 2141007 - RNA, 19 nt, Homo sapiens
  misc_RNA (1)...(19): siRNA sense strand
uguacggcauggguuguua

SEQ ID NO: 2141008 - RNA, 19 nt, Homo sapiens
  misc_RNA (1)...(19): siRNA sense strand
gcucaauacaggugugaau

SEQ ID NO: 2141009 - RNA, 19 nt, Homo sapiens
  misc_RNA (1)...(19): siRNA sense strand
cacugaggauuugauauau

SEQ ID NO: 2141010 - RNA, 19 nt, Homo sapiens
  misc_RNA (1)...(19): siRNA sense strand
gcccuucagaugggaauua

SEQ ID NO: 2141011 - RNA, 19 nt, Homo sapiens
  misc_RNA (1)...(19): siRNA sense strand
cuucagaugggaauuaaug

SEQ ID NO: 2141012 - RNA, 19 nt, Homo sapiens
  misc_RNA (1)...(19): siRNA sense strand
gaucacacugaaguaauga

SEQ ID NO: 2141013 - RNA, 19 nt, Homo sapiens
  misc_RNA (1)...(19): siRNA sense strand
accacaaacucuaaaguag

SEQ ID NO: 2141014 - RNA, 19 nt, Homo sapiens
  misc_RNA (1)...(19): siRNA sense strand
ggaaagugugaugaaagaa

SEQ ID NO: 2141015 - RNA, 19 nt, Homo sapiens
  misc_RNA (1)...(19): siRNA sense strand
uauccuguccuuacuccua

SEQ ID NO: 2141016 - RNA, 19 nt, Homo sapiens
  misc_RNA (1)...(19): siRNA sense strand
gaauaaaaccacaaacucu

SEQ ID NO: 2141017 - RNA, 19 nt, Homo sapiens
  misc_RNA (1)...(19): siRNA sense strand
gugguggacuccgcaguau

SEQ ID NO: 2141018 - RNA, 19 nt, Homo sapiens
  misc_RNA (1)...(19): siRNA sense strand
gaaacaucccaguuaucug

SEQ ID NO: 2141019 - RNA, 19 nt, Homo sapiens
  misc_RNA (1)...(19): siRNA sense strand
gaagaaaguaugggaaaau

SEQ ID NO: 2141020 - RNA, 19 nt, Homo sapiens
  misc_RNA (1)...(19): siRNA sense strand
caucugaauccuuuagcaa

SEQ ID NO: 2141021 - RNA, 19 nt, Homo sapiens
  misc_RNA (1)...(19): siRNA sense strand
caaucgacuuucccaaacu

SEQ ID NO: 2141022 - RNA, 19 nt, Homo sapiens
  misc_RNA (1)...(19): siRNA sense strand
gagcugcaucugaauccuu

SEQ ID NO: 2141023 - RNA, 19 nt, Homo sapiens
  misc_RNA (1)...(19): siRNA sense strand
aaaagaauguuggaaagug

SEQ ID NO: 2141024 - RNA, 19 nt, Homo sapiens
  misc_RNA (1)...(19): siRNA sense strand
ugaaaagaauguuggaaag

SEQ ID NO: 2141025 - RNA, 19 nt, Homo sapiens
  misc_RNA (1)...(19): siRNA sense strand
ucugcaagacacaugaaua

SEQ ID NO: 2141026 - RNA, 19 nt, Homo sapiens
  misc_RNA (1)...(19): siRNA sense strand
cugaauccuuuagcaagaa

SEQ ID NO: 2141027 - RNA, 19 nt, Homo sapiens
  misc_RNA (1)...(19): siRNA sense strand
gauuagguggcugcccuua

SEQ ID NO: 2141028 - RNA, 19 nt, Homo sapiens
  misc_RNA (1)...(19): siRNA sense strand
gauggauugcagaaugaaa

SEQ ID NO: 2141029 - RNA, 19 nt, Homo sapiens
  misc_RNA (1)...(19): siRNA sense strand
ggaaguaugaaaagaaugu

SEQ ID NO: 2141030 - RNA, 19 nt, Homo sapiens
  misc_RNA (1)...(19): siRNA sense strand
agugggaacuccaggaagu

SEQ ID NO: 2141031 - RNA, 19 nt, Homo sapiens
  misc_RNA (1)...(19): siRNA sense strand
cugggaauguagccacuga

SEQ ID NO: 2141032 - RNA, 19 nt, Homo sapiens
  misc_RNA (1)...(19): siRNA sense strand
uguagccacugaggauuug

SEQ ID NO: 2141033 - RNA, 19 nt, Homo sapiens
  misc_RNA (1)...(19): siRNA sense strand
ggaauggauugcauauuua

SEQ ID NO: 2141034 - RNA, 19 nt, Homo sapiens
  misc_RNA (1)...(19): siRNA sense strand
cuaaagaacuugaaacuga

SEQ ID NO: 2141035 - RNA, 19 nt, Homo sapiens
  misc_RNA (1)...(19): siRNA sense strand
gaagguaaauuaggaugua

SEQ ID NO: 2141036 - RNA, 19 nt, Homo sapiens
  misc_RNA (1)...(19): siRNA sense strand
ggaaagaauuagcagauug

SEQ ID NO: 2141037 - RNA, 19 nt, Homo sapiens
  misc_RNA (1)...(19): siRNA sense strand
gaucaaacguaccauaaga

SEQ ID NO: 2141038 - RNA, 19 nt, Homo sapiens
  misc_RNA (1)...(19): siRNA sense strand
gaaauaacuucaccaugga

SEQ ID NO: 2141039 - RNA, 19 nt, Homo sapiens
  misc_RNA (1)...(19): siRNA sense strand
gcaagagaauuacaggaaa

SEQ ID NO: 2141040 - RNA, 19 nt, Homo sapiens
  misc_RNA (1)...(19): siRNA sense strand
gaucaagucagauaaguuu

SEQ ID NO: 2141041 - RNA, 19 nt, Homo sapiens
  misc_RNA (1)...(19): siRNA sense strand
gagaaucaauuggcuauau

SEQ ID NO: 2141042 - RNA, 19 nt, Homo sapiens
  misc_RNA (1)...(19): siRNA sense strand
aaaccacccuagugauuua

SEQ ID NO: 2141043 - RNA, 19 nt, Homo sapiens
  misc_RNA (1)...(19): siRNA sense strand
caauacaaauggcuugaaa

SEQ ID NO: 2141044 - RNA, 19 nt, Homo sapiens
  misc_RNA (1)...(19): siRNA sense strand
gaauuggugucaacuauag

SEQ ID NO: 2141045 - RNA, 19 nt, Homo sapiens
  misc_RNA (1)...(19): siRNA sense strand
aggaauggauugcauauuu

SEQ ID NO: 2141046 - RNA, 19 nt, Homo sapiens
  misc_RNA (1)...(19): siRNA sense strand
cagucaagaucaacuaaua

SEQ ID NO: 2141047 - RNA, 19 nt, Homo sapiens
  misc_RNA (1)...(19): siRNA sense strand
guacaagggugagaaauag

SEQ ID NO: 2141048 - RNA, 19 nt, Homo sapiens
  misc_RNA (1)...(19): siRNA sense strand
cagaaaccaugaagauauu

SEQ ID NO: 2141049 - RNA, 19 nt, Homo sapiens
  misc_RNA (1)...(19): siRNA sense strand
ggaaccacauuucgaguau

SEQ ID NO: 2141050 - RNA, 19 nt, Homo sapiens
  misc_RNA (1)...(19): siRNA sense strand
gaagagauuagcuaacauu

SEQ ID NO: 2141051 - RNA, 19 nt, Homo sapiens
  misc_RNA (1)...(19): siRNA sense strand
gcgaagagauuagcuaaca

SEQ ID NO: 2141052 - RNA, 19 nt, Homo sapiens
  misc_RNA (1)...(19): siRNA sense strand
cgagaccuguucuugaaua

SEQ ID NO: 2141053 - RNA, 19 nt, Homo sapiens
  misc_RNA (1)...(19): siRNA sense strand
caacaaaagucuuccauga

SEQ ID NO: 2141054 - RNA, 19 nt, Homo sapiens
  misc_RNA (1)...(19): siRNA sense strand
ccacauggccuuaugaaga

SEQ ID NO: 2141055 - RNA, 19 nt, Homo sapiens
  misc_RNA (1)...(19): siRNA sense strand
gccaaaaucuguaucauaa

SEQ ID NO: 2141056 - RNA, 19 nt, Homo sapiens
  misc_RNA (1)...(19): siRNA sense strand
ggaagaaagucuggaguag

SEQ ID NO: 2141057 - RNA, 19 nt, Homo sapiens
  misc_RNA (1)...(19): siRNA sense strand
gaaccacauuucgaguaua

SEQ ID NO: 2141058 - RNA, 19 nt, Homo sapiens
  misc_RNA (1)...(19): siRNA sense strand
caucuacaguuucaaagaa

SEQ ID NO: 2141059 - RNA, 19 nt, Homo sapiens
  misc_RNA (1)...(19): siRNA sense strand
caacaagaauagcagaaca

SEQ ID NO: 2141060 - RNA, 19 nt, Homo sapiens
  misc_RNA (1)...(19): siRNA sense strand
ggugagaaauaguuuaaca

SEQ ID NO: 2141061 - RNA, 19 nt, Homo sapiens
  misc_RNA (1)...(19): siRNA sense strand
aaagauaguuagcaccauu

SEQ ID NO: 2141062 - RNA, 19 nt, Homo sapiens
  misc_RNA (1)...(19): siRNA sense strand
caauagugcugaagcugaa

SEQ ID NO: 2141063 - RNA, 19 nt, Homo sapiens
  misc_RNA (1)...(19): siRNA sense strand
gggaaagaauuagcagauu

SEQ ID NO: 2141064 - RNA, 19 nt, Homo sapiens
  misc_RNA (1)...(19): siRNA sense strand
gugauauucuguuuccuaa

SEQ ID NO: 2141065 - RNA, 19 nt, Homo sapiens
  misc_RNA (1)...(19): siRNA sense strand
ucuaggaacuguagcuaaa

SEQ ID NO: 2141066 - RNA, 19 nt, Homo sapiens
  misc_RNA (1)...(19): siRNA sense strand
ccagauuguuggaaugaaa

SEQ ID NO: 2141067 - RNA, 19 nt, Homo sapiens
  misc_RNA (1)...(19): siRNA sense strand
caauagaucauguaucaga

SEQ ID NO: 2141068 - RNA, 19 nt, Homo sapiens
  misc_RNA (1)...(19): siRNA sense strand
cacauggccuuaugaagaa

SEQ ID NO: 2141069 - RNA, 19 nt, Homo sapiens
  misc_RNA (1)...(19): siRNA sense strand
agaccuugcuuuaaugauu

SEQ ID NO: 2141070 - RNA, 19 nt, Homo sapiens
  misc_RNA (1)...(19): siRNA sense strand
gaucuggucuguggugaug

SEQ ID NO: 2141071 - RNA, 19 nt, Homo sapiens
  misc_RNA (1)...(19): siRNA sense strand
gaagacgacauucaguuug

SEQ ID NO: 2141072 - RNA, 19 nt, Homo sapiens
  misc_RNA (1)...(19): siRNA sense strand
gaccuugcuuuaaugauug

SEQ ID NO: 2141073 - RNA, 19 nt, Homo sapiens
  misc_RNA (1)...(19): siRNA sense strand
gggaagaaagucuggagua

SEQ ID NO: 2141074 - RNA, 19 nt, Homo sapiens
  misc_RNA (1)...(19): siRNA sense strand
gcauuuauguuuacagaac

SEQ ID NO: 2141075 - RNA, 19 nt, Homo sapiens
  misc_RNA (1)...(19): siRNA sense strand
gauuacaauugucacuuga

SEQ ID NO: 2141076 - RNA, 19 nt, Homo sapiens
  misc_RNA (1)...(19): siRNA sense strand
gacagaaaccaugaagaua

SEQ ID NO: 2141077 - RNA, 19 nt, Homo sapiens
  misc_RNA (1)...(19): siRNA sense strand
gauuugaucaagucagaua

SEQ ID NO: 2141078 - RNA, 19 nt, Homo sapiens
  misc_RNA (1)...(19): siRNA sense strand
ggucggaaauaauagaauc

SEQ ID NO: 2141079 - RNA, 19 nt, Homo sapiens
  misc_RNA (1)...(19): siRNA sense strand
gcauuacagucaagaucaa

SEQ ID NO: 2141080 - RNA, 19 nt, Homo sapiens
  misc_RNA (1)...(19): siRNA sense strand
cgauuacaauugucacuug

SEQ ID NO: 2141081 - RNA, 19 nt, Homo sapiens
  misc_RNA (1)...(19): siRNA sense strand
gaugcaacaccguuuguaa

SEQ ID NO: 2141082 - RNA, 19 nt, Homo sapiens
  misc_RNA (1)...(19): siRNA sense strand
cauaagagcuuuggaaaau

SEQ ID NO: 2141083 - RNA, 19 nt, Homo sapiens
  misc_RNA (1)...(19): siRNA sense strand
ggucuguggugaugaugaa

SEQ ID NO: 2141084 - RNA, 19 nt, Homo sapiens
  misc_RNA (1)...(19): siRNA sense strand
ugacagaaaccaugaagau

SEQ ID NO: 2141085 - RNA, 19 nt, Homo sapiens
  misc_RNA (1)...(19): siRNA sense strand
caauauaauucagcacaug

SEQ ID NO: 2141086 - RNA, 19 nt, Homo sapiens
  misc_RNA (1)...(19): siRNA sense strand
aagaauuggugucaacuau

SEQ ID NO: 2141087 - RNA, 19 nt, Homo sapiens
  misc_RNA (1)...(19): siRNA sense strand
uagcagaacauauugcaaa

SEQ ID NO: 2141088 - RNA, 19 nt, Homo sapiens
  misc_RNA (1)...(19): siRNA sense strand
guucagcaguucggcauuu

SEQ ID NO: 2141089 - RNA, 19 nt, Homo sapiens
  misc_RNA (1)...(19): siRNA sense strand
gaaaacagacacagaaaau

SEQ ID NO: 2141090 - RNA, 19 nt, Homo sapiens
  misc_RNA (1)...(19): siRNA sense strand
gaaagaauuagcagauugg

SEQ ID NO: 2141091 - RNA, 19 nt, Homo sapiens
  misc_RNA (1)...(19): siRNA sense strand
acagaaaccaugaagauau

SEQ ID NO: 2141092 - RNA, 19 nt, Homo sapiens
  misc_RNA (1)...(19): siRNA sense strand
gaaaaccacccuagugauu

SEQ ID NO: 2141093 - RNA, 19 nt, Homo sapiens
  misc_RNA (1)...(19): siRNA sense strand
agccaucacuuucaucaaa

SEQ ID NO: 2141094 - RNA, 19 nt, Homo sapiens
  misc_RNA (1)...(19): siRNA sense strand
gauacaagaguucggcaaa

SEQ ID NO: 2141095 - RNA, 19 nt, Homo sapiens
  misc_RNA (1)...(19): siRNA sense strand
uaaaauuggucgaguaaug

SEQ ID NO: 2141096 - RNA, 19 nt, Homo sapiens
  misc_RNA (1)...(19): siRNA sense strand
caaaggaaccacauuucga

SEQ ID NO: 2141097 - RNA, 19 nt, Homo sapiens
  misc_RNA (1)...(19): siRNA sense strand
ggcaagagaauuacaggaa

SEQ ID NO: 2141098 - RNA, 19 nt, Homo sapiens
  misc_RNA (1)...(19): siRNA sense strand
ugaagaaggugaaaacaga

SEQ ID NO: 2141099 - RNA, 19 nt, Homo sapiens
  misc_RNA (1)...(19): siRNA sense strand
cacaugaaccuacgccuuu

SEQ ID NO: 2141100 - RNA, 19 nt, Homo sapiens
  misc_RNA (1)...(19): siRNA sense strand
gaccuguucuugaauacau

SEQ ID NO: 2141101 - RNA, 19 nt, Homo sapiens
  misc_RNA (1)...(19): siRNA sense strand
auggagagguaaauuguuu

SEQ ID NO: 2141102 - RNA, 19 nt, Homo sapiens
  misc_RNA (1)...(19): siRNA sense strand
uaggcaagcuucucuacga

SEQ ID NO: 2141103 - RNA, 19 nt, Homo sapiens
  misc_RNA (1)...(19): siRNA sense strand
ccacauuucgaguauauug

SEQ ID NO: 2141104 - RNA, 19 nt, Homo sapiens
  misc_RNA (1)...(19): siRNA sense strand
gcagauugucuaaggcaaa

SEQ ID NO: 2141105 - RNA, 19 nt, Homo sapiens
  misc_RNA (1)...(19): siRNA sense strand
ccaaggaauggauugcaua

SEQ ID NO: 2141106 - RNA, 19 nt, Homo sapiens
  misc_RNA (1)...(19): siRNA sense strand
uaaggauuguucagcaguu

SEQ ID NO: 2141107 - RNA, 19 nt, Homo sapiens
  misc_RNA (1)...(19): siRNA sense strand
aaacguaccauaagagcuu

SEQ ID NO: 2141108 - RNA, 19 nt, Homo sapiens
  misc_RNA (1)...(19): siRNA sense strand
uuacaauugucacuugaug

SEQ ID NO: 2141109 - RNA, 19 nt, Homo sapiens
  misc_RNA (1)...(19): siRNA sense strand
caacaacggaugaaaauga

SEQ ID NO: 2141110 - RNA, 19 nt, Homo sapiens
  misc_RNA (1)...(19): siRNA sense strand
ugaggcaucuacaguuuca

SEQ ID NO: 2141111 - RNA, 19 nt, Homo sapiens
  misc_RNA (1)...(19): siRNA sense strand
uuacagugcaacaagaaua

SEQ ID NO: 2141112 - RNA, 19 nt, Homo sapiens
  misc_RNA (1)...(19): siRNA sense strand
agaaucaauuggcuauaug

SEQ ID NO: 2141113 - RNA, 19 nt, Homo sapiens
  misc_RNA (1)...(19): siRNA sense strand
uguacaagggugagaaaua

SEQ ID NO: 2141114 - RNA, 19 nt, Homo sapiens
  misc_RNA (1)...(19): siRNA sense strand
uaggaacuguagcuaaaga

SEQ ID NO: 2141115 - RNA, 19 nt, Homo sapiens
  misc_RNA (1)...(19): siRNA sense strand
gcaaaggaaccacauuucg

SEQ ID NO: 2141116 - RNA, 19 nt, Homo sapiens
  misc_RNA (1)...(19): siRNA sense strand
uccugcaccuguuauguua

SEQ ID NO: 2141117 - RNA, 19 nt, Homo sapiens
  misc_RNA (1)...(19): siRNA sense strand
caagagaauuacaggaaaa

SEQ ID NO: 2141118 - RNA, 19 nt, Homo sapiens
  misc_RNA (1)...(19): siRNA sense strand
aaccacauuucgaguauau

SEQ ID NO: 2141119 - RNA, 19 nt, Homo sapiens
  misc_RNA (1)...(19): siRNA sense strand
aagauuugaucaagucaga

SEQ ID NO: 2141120 - RNA, 19 nt, Homo sapiens
  misc_RNA (1)...(19): siRNA sense strand
uggaguagcuacaaaauug

SEQ ID NO: 2141121 - RNA, 19 nt, Homo sapiens
  misc_RNA (1)...(19): siRNA sense strand
cagaacauauugcaaaaga

SEQ ID NO: 2141122 - RNA, 19 nt, Homo sapiens
  misc_RNA (1)...(19): siRNA sense strand
gcaagcuucucuacgaaaa

SEQ ID NO: 2141123 - RNA, 19 nt, Homo sapiens
  misc_RNA (1)...(19): siRNA sense strand
gaauggauugcauauuuag

SEQ ID NO: 2141124 - RNA, 19 nt, Homo sapiens
  misc_RNA (1)...(19): siRNA sense strand
caucgagaccuguucuuga

SEQ ID NO: 2141125 - RNA, 19 nt, Homo sapiens
  misc_RNA (1)...(19): siRNA sense strand
acaaaagucuuccaugaga

SEQ ID NO: 2141126 - RNA, 19 nt, Homo sapiens
  misc_RNA (1)...(19): siRNA sense strand
cagguuggcuacagauaca

SEQ ID NO: 2141127 - RNA, 19 nt, Homo sapiens
  misc_RNA (1)...(19): siRNA sense strand
acauucaguuugucaguga

SEQ ID NO: 2141128 - RNA, 19 nt, Homo sapiens
  misc_RNA (1)...(19): siRNA sense strand
caaaccaagcuucuaggaa

SEQ ID NO: 2141129 - RNA, 19 nt, Homo sapiens
  misc_RNA (1)...(19): siRNA sense strand
gcaucuacaguuucaaaga

SEQ ID NO: 2141130 - RNA, 19 nt, Homo sapiens
  misc_RNA (1)...(19): siRNA sense strand
uaucuccagugcacaauuc

SEQ ID NO: 2141131 - RNA, 19 nt, Homo sapiens
  misc_RNA (1)...(19): siRNA sense strand
gucacuugaugauucuaua

SEQ ID NO: 2141132 - RNA, 19 nt, Homo sapiens
  misc_RNA (1)...(19): siRNA sense strand
auacaauccugggaagaaa

SEQ ID NO: 2141133 - RNA, 19 nt, Homo sapiens
  misc_RNA (1)...(19): siRNA sense strand
gcacagauccuuuccacaa

SEQ ID NO: 2141134 - RNA, 19 nt, Homo sapiens
  misc_RNA (1)...(19): siRNA sense strand
gaauaaacuuggccacuca

SEQ ID NO: 2141135 - RNA, 19 nt, Homo sapiens
  misc_RNA (1)...(19): siRNA sense strand
ccucagacauuaugacaaa

SEQ ID NO: 2141136 - RNA, 19 nt, Homo sapiens
  misc_RNA (1)...(19): siRNA sense strand
cagcuugccugaaacagua

SEQ ID NO: 2141137 - RNA, 19 nt, Homo sapiens
  misc_RNA (1)...(19): siRNA sense strand
aagcugagauugccuguuu

SEQ ID NO: 2141138 - RNA, 19 nt, Homo sapiens
  misc_RNA (1)...(19): siRNA sense strand
gcagaggucuccuguagag

SEQ ID NO: 2141139 - RNA, 19 nt, Homo sapiens
  misc_RNA (1)...(19): siRNA sense strand
aaagggccaugcaggaaua

SEQ ID NO: 2141140 - RNA, 19 nt, Homo sapiens
  misc_RNA (1)...(19): siRNA sense strand
gaggaaagacggagagaau

SEQ ID NO: 2141141 - RNA, 19 nt, Homo sapiens
  misc_RNA (1)...(19): siRNA sense strand
uugcacagcuugccugaaa

SEQ ID NO: 2141142 - RNA, 19 nt, Homo sapiens
  misc_RNA (1)...(19): siRNA sense strand
gcgcucagaugaugugcaa

SEQ ID NO: 2141143 - RNA, 19 nt, Homo sapiens
  misc_RNA (1)...(19): siRNA sense strand
ugagauugccuguuuggua

SEQ ID NO: 2141144 - RNA, 19 nt, Homo sapiens
  misc_RNA (1)...(19): siRNA sense strand
gguacugccuccagaacuu

SEQ ID NO: 2141145 - RNA, 19 nt, Homo sapiens
  misc_RNA (1)...(19): siRNA sense strand
ccacaaagggccucuguca

SEQ ID NO: 2141146 - RNA, 19 nt, Homo sapiens
  misc_RNA (1)...(19): siRNA sense strand
uguauaaucuguugugucu

SEQ ID NO: 2141147 - RNA, 19 nt, Homo sapiens
  misc_RNA (1)...(19): siRNA sense strand
gagggaggcuacugagaag

SEQ ID NO: 2141148 - RNA, 19 nt, Homo sapiens
  misc_RNA (1)...(19): siRNA sense strand
ugaccacacuccaggaaug

SEQ ID NO: 2141149 - RNA, 19 nt, Homo sapiens
  misc_RNA (1)...(19): siRNA sense strand
ggaaagacggagagaaugg

SEQ ID NO: 2141150 - RNA, 19 nt, Homo sapiens
  misc_RNA (1)...(19): siRNA sense strand
aaacugcaagcauacauuu

SEQ ID NO: 2141151 - RNA, 19 nt, Homo sapiens
  misc_RNA (1)...(19): siRNA sense strand
ggauugaggagacugaaga

SEQ ID NO: 2141152 - RNA, 19 nt, Homo sapiens
  misc_RNA (1)...(19): siRNA sense strand
cacagauccuuuccacaaa

SEQ ID NO: 2141153 - RNA, 19 nt, Homo sapiens
  misc_RNA (1)...(19): siRNA sense strand
gaaggcugcgcucagauga

SEQ ID NO: 2141154 - RNA, 19 nt, Homo sapiens
  misc_RNA (1)...(19): siRNA sense strand
cgagggaggcuacugagaa

SEQ ID NO: 2141155 - RNA, 19 nt, Homo sapiens
  misc_RNA (1)...(19): siRNA sense strand
ccucaucacuugcaaacuc

SEQ ID NO: 2141156 - RNA, 19 nt, Homo sapiens
  misc_RNA (1)...(19): siRNA sense strand
ugaggagacugaagaaugc

SEQ ID NO: 2141157 - RNA, 19 nt, Homo sapiens
  misc_RNA (1)...(19): siRNA sense strand
gcagagcacggaggaaaga

SEQ ID NO: 2141158 - RNA, 19 nt, Homo sapiens
  misc_RNA (1)...(19): siRNA sense strand
gaaagacggagagaaugga

SEQ ID NO: 2141159 - RNA, 19 nt, Homo sapiens
  misc_RNA (1)...(19): siRNA sense strand
guagagacagucagccuau

SEQ ID NO: 2141160 - RNA, 19 nt, Homo sapiens
  misc_RNA (1)...(19): siRNA sense strand
ucaacuuuaucagagguua

SEQ ID NO: 2141161 - RNA, 19 nt, Homo sapiens
  misc_RNA (1)...(19): siRNA sense strand
ccaguuugccggguuuaua

SEQ ID NO: 2141162 - RNA, 19 nt, Homo sapiens
  misc_RNA (1)...(19): siRNA sense strand
gcacagcuugccugaaaca

SEQ ID NO: 2141163 - RNA, 19 nt, Homo sapiens
  misc_RNA (1)...(19): siRNA sense strand
auuaagcagugcccaguuu

SEQ ID NO: 2141164 - RNA, 19 nt, Homo sapiens
  misc_RNA (1)...(19): siRNA sense strand
aaugaaggcugcgcucaga

SEQ ID NO: 2141165 - RNA, 19 nt, Homo sapiens
  misc_RNA (1)...(19): siRNA sense strand
augcagaggucuccuguag

SEQ ID NO: 2141166 - RNA, 19 nt, Homo sapiens
  misc_RNA (1)...(19): siRNA sense strand
caaagggccaugcaggaau

SEQ ID NO: 2141167 - RNA, 19 nt, Homo sapiens
  misc_RNA (1)...(19): siRNA sense strand
cgacccauccacaaccuaa

SEQ ID NO: 2141168 - RNA, 19 nt, Homo sapiens
  misc_RNA (1)...(19): siRNA sense strand
gaugaccacacuccaggaa

SEQ ID NO: 2141169 - RNA, 19 nt, Homo sapiens
  misc_RNA (1)...(19): siRNA sense strand
gagcaccgagcccucuuug

SEQ ID NO: 2141170 - RNA, 19 nt, Homo sapiens
  misc_RNA (1)...(19): siRNA sense strand
gguuacuucacccuuguua

SEQ ID NO: 2141171 - RNA, 19 nt, Homo sapiens
  misc_RNA (1)...(19): siRNA sense strand
cugguaggcuccacuaucu

SEQ ID NO: 2141172 - RNA, 19 nt, Homo sapiens
  misc_RNA (1)...(19): siRNA sense strand
gagacagucagccuauugu

SEQ ID NO: 2141173 - RNA, 19 nt, Homo sapiens
  misc_RNA (1)...(19): siRNA sense strand
cugaaauucugcucguguu

SEQ ID NO: 2141174 - RNA, 19 nt, Homo sapiens
  misc_RNA (1)...(19): siRNA sense strand
caacuuuaucagagguuaa

SEQ ID NO: 2141175 - RNA, 19 nt, Homo sapiens
  misc_RNA (1)...(19): siRNA sense strand
gcagcuggcaauccgagaa

SEQ ID NO: 2141176 - RNA, 19 nt, Homo sapiens
  misc_RNA (1)...(19): siRNA sense strand
ggaggaaagacggagagaa

SEQ ID NO: 2141177 - RNA, 19 nt, Homo sapiens
  misc_RNA (1)...(19): siRNA sense strand
gacugaagaaugcugaaga

SEQ ID NO: 2141178 - RNA, 19 nt, Homo sapiens
  misc_RNA (1)...(19): siRNA sense strand
uagagacagucagccuauu

SEQ ID NO: 2141179 - RNA, 19 nt, Homo sapiens
  misc_RNA (1)...(19): siRNA sense strand
cuauuguccugccaacaga

SEQ ID NO: 2141180 - RNA, 19 nt, Homo sapiens
  misc_RNA (1)...(19): siRNA sense strand
agagacagucagccuauug

SEQ ID NO: 2141181 - RNA, 19 nt, Homo sapiens
  misc_RNA (1)...(19): siRNA sense strand
gcaaacucugccuguguga

SEQ ID NO: 2141182 - RNA, 19 nt, Homo sapiens
  misc_RNA (1)...(19): siRNA sense strand
acaaagggccaugcaggaa

SEQ ID NO: 2141183 - RNA, 19 nt, Homo sapiens
  misc_RNA (1)...(19): siRNA sense strand
ccgcagagcacggaggaaa

SEQ ID NO: 2141184 - RNA, 19 nt, Homo sapiens
  misc_RNA (1)...(19): siRNA sense strand
agacggagagaauggaaga

SEQ ID NO: 2141185 - RNA, 19 nt, Homo sapiens
  misc_RNA (1)...(19): siRNA sense strand
gcugguaggcuccacuauc

SEQ ID NO: 2141186 - RNA, 19 nt, Homo sapiens
  misc_RNA (1)...(19): siRNA sense strand
ucauugccuugguuacuuc

SEQ ID NO: 2141187 - RNA, 19 nt, Homo sapiens
  misc_RNA (1)...(19): siRNA sense strand
aggcugcgcucagaugaug

SEQ ID NO: 2141188 - RNA, 19 nt, Homo sapiens
  misc_RNA (1)...(19): siRNA sense strand
cuucuugccaccugaaauu

SEQ ID NO: 2141189 - RNA, 19 nt, Homo sapiens
  misc_RNA (1)...(19): siRNA sense strand
gauugaggagacugaagaa

SEQ ID NO: 2141190 - RNA, 19 nt, Homo sapiens
  misc_RNA (1)...(19): siRNA sense strand
caguuugccggguuuauau

SEQ ID NO: 2141191 - RNA, 19 nt, Homo sapiens
  misc_RNA (1)...(19): siRNA sense strand
uugcuugugucguuuggaa

SEQ ID NO: 2141192 - RNA, 19 nt, Homo sapiens
  misc_RNA (1)...(19): siRNA sense strand
ugaaggcugcgcucagaug

SEQ ID NO: 2141193 - RNA, 19 nt, Homo sapiens
  misc_RNA (1)...(19): siRNA sense strand
uugaggagacugaagaaug

SEQ ID NO: 2141194 - RNA, 19 nt, Homo sapiens
  misc_RNA (1)...(19): siRNA sense strand
gcucagaugaugugcaaaa

SEQ ID NO: 2141195 - RNA, 19 nt, Homo sapiens
  misc_RNA (1)...(19): siRNA sense strand
agcagucucuggacaagau

SEQ ID NO: 2141196 - RNA, 19 nt, Homo sapiens
  misc_RNA (1)...(19): siRNA sense strand
guacugccuccagaacuug

SEQ ID NO: 2141197 - RNA, 19 nt, Homo sapiens
  misc_RNA (1)...(19): siRNA sense strand
guuuauaucgaacgcaaug

SEQ ID NO: 2141198 - RNA, 19 nt, Homo sapiens
  misc_RNA (1)...(19): siRNA sense strand
gacauggugugccuaaacc

SEQ ID NO: 2141199 - RNA, 19 nt, Homo sapiens
  misc_RNA (1)...(19): siRNA sense strand
uggacaagaugaccacacu

SEQ ID NO: 2141200 - RNA, 19 nt, Homo sapiens
  misc_RNA (1)...(19): siRNA sense strand
ucacuugcccugacauggu

SEQ ID NO: 2141201 - RNA, 19 nt, Homo sapiens
  misc_RNA (1)...(19): siRNA sense strand
gaaauuggguugacaagug

SEQ ID NO: 2141202 - RNA, 19 nt, Homo sapiens
  misc_RNA (1)...(19): siRNA sense strand
agagaaagaugacaaguaa

SEQ ID NO: 2141203 - RNA, 19 nt, Homo sapiens
  misc_RNA (1)...(19): siRNA sense strand
gaaagaauaagucgucuaa

SEQ ID NO: 2141204 - RNA, 19 nt, Homo sapiens
  misc_RNA (1)...(19): siRNA sense strand
gaagaggacuugucagaag

SEQ ID NO: 2141205 - RNA, 19 nt, Homo sapiens
  misc_RNA (1)...(19): siRNA sense strand
ggaaauauucugauaguga

SEQ ID NO: 2141206 - RNA, 19 nt, Homo sapiens
  misc_RNA (1)...(19): siRNA sense strand
gccagaagcaccuauaaua

SEQ ID NO: 2141207 - RNA, 19 nt, Homo sapiens
  misc_RNA (1)...(19): siRNA sense strand
gaagaccagucguucaaga

SEQ ID NO: 2141208 - RNA, 19 nt, Homo sapiens
  misc_RNA (1)...(19): siRNA sense strand
gaaagcauaggaaauauuc

SEQ ID NO: 2141209 - RNA, 19 nt, Homo sapiens
  misc_RNA (1)...(19): siRNA sense strand
auacauaccucucaagaug

SEQ ID NO: 2141210 - RNA, 19 nt, Homo sapiens
  misc_RNA (1)...(19): siRNA sense strand
cgaaagagagaaaguaaga

SEQ ID NO: 2141211 - RNA, 19 nt, Homo sapiens
  misc_RNA (1)...(19): siRNA sense strand
ggaaagcgaaucccacgaa

SEQ ID NO: 2141212 - RNA, 19 nt, Homo sapiens
  misc_RNA (1)...(19): siRNA sense strand
guaaggagaaccagaucua

SEQ ID NO: 2141213 - RNA, 19 nt, Homo sapiens
  misc_RNA (1)...(19): siRNA sense strand
ggauggagcagccaaaugu

SEQ ID NO: 2141214 - RNA, 19 nt, Homo sapiens
  misc_RNA (1)...(19): siRNA sense strand
gacgaaagagagaaaguaa

SEQ ID NO: 2141215 - RNA, 19 nt, Homo sapiens
  misc_RNA (1)...(19): siRNA sense strand
aagaagagguaacgcauca

SEQ ID NO: 2141216 - RNA, 19 nt, Homo sapiens
  misc_RNA (1)...(19): siRNA sense strand
gcagauacuauggauuuaa

SEQ ID NO: 2141217 - RNA, 19 nt, Homo sapiens
  misc_RNA (1)...(19): siRNA sense strand
gaagagguaacgcaucaga

SEQ ID NO: 2141218 - RNA, 19 nt, Homo sapiens
  misc_RNA (1)...(19): siRNA sense strand
ugacacaaauucugacucu

SEQ ID NO: 2141219 - RNA, 19 nt, Homo sapiens
  misc_RNA (1)...(19): siRNA sense strand
cuacagugcugaugagaag

SEQ ID NO: 2141220 - RNA, 19 nt, Homo sapiens
  misc_RNA (1)...(19): siRNA sense strand
ugacucugaugaugauaaa

SEQ ID NO: 2141221 - RNA, 19 nt, Homo sapiens
  misc_RNA (1)...(19): siRNA sense strand
caaauucugacucugauga

SEQ ID NO: 2141222 - RNA, 19 nt, Homo sapiens
  misc_RNA (1)...(19): siRNA sense strand
gaagcaccuauaauacaua

SEQ ID NO: 2141223 - RNA, 19 nt, Homo sapiens
  misc_RNA (1)...(19): siRNA sense strand
uggcagauacuauggauuu

SEQ ID NO: 2141224 - RNA, 19 nt, Homo sapiens
  misc_RNA (1)...(19): siRNA sense strand
gaaguauggccaugcuuug

SEQ ID NO: 2141225 - RNA, 19 nt, Homo sapiens
  misc_RNA (1)...(19): siRNA sense strand
acacaaauucugacucuga

SEQ ID NO: 2141226 - RNA, 19 nt, Homo sapiens
  misc_RNA (1)...(19): siRNA sense strand
aaauuggguugacaaguga

SEQ ID NO: 2141227 - RNA, 19 nt, Homo sapiens
  misc_RNA (1)...(19): siRNA sense strand
ccacgaagaggugaaauug

SEQ ID NO: 2141228 - RNA, 19 nt, Homo sapiens
  misc_RNA (1)...(19): siRNA sense strand
ggcagauacuauggauuua

SEQ ID NO: 2141229 - RNA, 19 nt, Homo sapiens
  misc_RNA (1)...(19): siRNA sense strand
gaguuaaagccaagaagaa

SEQ ID NO: 2141230 - RNA, 19 nt, Homo sapiens
  misc_RNA (1)...(19): siRNA sense strand
cagaagaggacuugucaga

SEQ ID NO: 2141231 - RNA, 19 nt, Homo sapiens
  misc_RNA (1)...(19): siRNA sense strand
caagaagagagacgaaaga

SEQ ID NO: 2141232 - RNA, 19 nt, Homo sapiens
  misc_RNA (1)...(19): siRNA sense strand
gcuagauucugacgaacau

SEQ ID NO: 2141233 - RNA, 19 nt, Homo sapiens
  misc_RNA (1)...(19): siRNA sense strand
gaucuacagugcugaugag

SEQ ID NO: 2141234 - RNA, 19 nt, Homo sapiens
  misc_RNA (1)...(19): siRNA sense strand
uagcaggcaucgcagaaug

SEQ ID NO: 2141235 - RNA, 19 nt, Homo sapiens
  misc_RNA (1)...(19): siRNA sense strand
cagaagcaccuauaauaca

SEQ ID NO: 2141236 - RNA, 19 nt, Homo sapiens
  misc_RNA (1)...(19): siRNA sense strand
agaagcaccuauaauacau

SEQ ID NO: 2141237 - RNA, 19 nt, Homo sapiens
  misc_RNA (1)...(19): siRNA sense strand
gagagacgaaagagagaaa

SEQ ID NO: 2141238 - RNA, 19 nt, Homo sapiens
  misc_RNA (1)...(19): siRNA sense strand
ugaaguauggccaugcuuu

SEQ ID NO: 2141239 - RNA, 19 nt, Homo sapiens
  misc_RNA (1)...(19): siRNA sense strand
caaauguggcagauacuau

SEQ ID NO: 2141240 - RNA, 19 nt, Homo sapiens
  misc_RNA (1)...(19): siRNA sense strand
aagagaaagaugacaagua

SEQ ID NO: 2141241 - RNA, 19 nt, Homo sapiens
  misc_RNA (1)...(19): siRNA sense strand
ggacgugggcgcucuuuac

SEQ ID NO: 2141242 - RNA, 19 nt, Homo sapiens
  misc_RNA (1)...(19): siRNA sense strand
acauaccucucaagaugaa

SEQ ID NO: 2141243 - RNA, 19 nt, Homo sapiens
  misc_RNA (1)...(19): siRNA sense strand
gguuaugucaugaguggua

SEQ ID NO: 2141244 - RNA, 19 nt, Homo sapiens
  misc_RNA (1)...(19): siRNA sense strand
ggaagacuacgagaaggaa

SEQ ID NO: 2141245 - RNA, 19 nt, Homo sapiens
  misc_RNA (1)...(19): siRNA sense strand
gaauaagucgucuaaaaga

SEQ ID NO: 2141246 - RNA, 19 nt, Homo sapiens
  misc_RNA (1)...(19): siRNA sense strand
agagguaacgcaucagaaa

SEQ ID NO: 2141247 - RNA, 19 nt, Homo sapiens
  misc_RNA (1)...(19): siRNA sense strand
aaaguucccucagcuagau

SEQ ID NO: 2141248 - RNA, 19 nt, Homo sapiens
  misc_RNA (1)...(19): siRNA sense strand
caaaguucccucagcuaga

SEQ ID NO: 2141249 - RNA, 19 nt, Homo sapiens
  misc_RNA (1)...(19): siRNA sense strand
guugacaagugaagagauc

SEQ ID NO: 2141250 - RNA, 19 nt, Homo sapiens
  misc_RNA (1)...(19): siRNA sense strand
uaauacauaccucucaaga

SEQ ID NO: 2141251 - RNA, 19 nt, Homo sapiens
  misc_RNA (1)...(19): siRNA sense strand
gacucaagcuguaaagacu

SEQ ID NO: 2141252 - RNA, 19 nt, Homo sapiens
  misc_RNA (1)...(19): siRNA sense strand
gaccucguauaguggauau

SEQ ID NO: 2141253 - RNA, 19 nt, Homo sapiens
  misc_RNA (1)...(19): siRNA sense strand
gagagcucuugcauccuuu

SEQ ID NO: 2141254 - RNA, 19 nt, Homo sapiens
  misc_RNA (1)...(19): siRNA sense strand
uccagugacucaagcugua

SEQ ID NO: 2141255 - RNA, 19 nt, Homo sapiens
  misc_RNA (1)...(19): siRNA sense strand
ccagaagcaccuauaauac

SEQ ID NO: 2141256 - RNA, 19 nt, Homo sapiens
  misc_RNA (1)...(19): siRNA sense strand
ccaaauguggcagauacua

SEQ ID NO: 2141257 - RNA, 19 nt, Homo sapiens
  misc_RNA (1)...(19): siRNA sense strand
guauggccaugcuuugcuu

SEQ ID NO: 2141258 - RNA, 19 nt, Homo sapiens
  misc_RNA (1)...(19): siRNA sense strand
agacgaaagagagaaagua

SEQ ID NO: 2141259 - RNA, 19 nt, Homo sapiens
  misc_RNA (1)...(19): siRNA sense strand
gggccagaagcaccuauaa

SEQ ID NO: 2141260 - RNA, 19 nt, Homo sapiens
  misc_RNA (1)...(19): siRNA sense strand
gagagaggauuggggaauu

SEQ ID NO: 2141261 - RNA, 19 nt, Homo sapiens
  misc_RNA (1)...(19): siRNA sense strand
gaaagagagaaaguaagau

SEQ ID NO: 2141262 - RNA, 19 nt, Homo sapiens
  misc_RNA (1)...(19): siRNA sense strand
cacaaauucugacucugau

SEQ ID NO: 2141263 - RNA, 19 nt, Homo sapiens
  misc_RNA (1)...(19): siRNA sense strand
gcuguaaagacucagaaga

SEQ ID NO: 2141264 - RNA, 19 nt, Homo sapiens
  misc_RNA (1)...(19): siRNA sense strand
uccgagagauggugcacaa

SEQ ID NO: 2141265 - RNA, 19 nt, Homo sapiens
  misc_RNA (1)...(19): siRNA sense strand
aagaagaccagucguucaa

SEQ ID NO: 2141266 - RNA, 19 nt, Homo sapiens
  misc_RNA (1)...(19): siRNA sense strand
gaccagucguucaagaaac

SEQ ID NO: 2141267 - RNA, 19 nt, Homo sapiens
  misc_RNA (1)...(19): siRNA sense strand
gaggacuugucagaagcua

SEQ ID NO: 2141268 - RNA, 19 nt, Homo sapiens
  misc_RNA (1)...(19): siRNA sense strand
gaaggagagagagaggauu

SEQ ID NO: 2141269 - RNA, 19 nt, Homo sapiens
  misc_RNA (1)...(19): siRNA sense strand
aaagaagaccagucguuca

SEQ ID NO: 2141270 - RNA, 19 nt, Homo sapiens
  misc_RNA (1)...(19): siRNA sense strand
ccaagaagagagacgaaag

SEQ ID NO: 2141271 - RNA, 19 nt, Homo sapiens
  misc_RNA (1)...(19): siRNA sense strand
gguagcaggcaucgcagaa

SEQ ID NO: 2141272 - RNA, 19 nt, Homo sapiens
  misc_RNA (1)...(19): siRNA sense strand
agagaucgguucuuuugaa

SEQ ID NO: 2141273 - RNA, 19 nt, Homo sapiens
  misc_RNA (1)...(19): siRNA sense strand
agaccagucguucaagaaa

SEQ ID NO: 2141274 - RNA, 19 nt, Homo sapiens
  misc_RNA (1)...(19): siRNA sense strand
gcucuugcauccuuuaacc

SEQ ID NO: 2141275 - RNA, 19 nt, Homo sapiens
  misc_RNA (1)...(19): siRNA sense strand
cagaauggaggcuguacga

SEQ ID NO: 2141276 - RNA, 19 nt, Homo sapiens
  misc_RNA (1)...(19): siRNA sense strand
ggccagaagcaccuauaau

SEQ ID NO: 2141277 - RNA, 19 nt, Homo sapiens
  misc_RNA (1)...(19): siRNA sense strand
gaauugggagcgccugaag

SEQ ID NO: 2141278 - RNA, 19 nt, Homo sapiens
  misc_RNA (1)...(19): siRNA sense strand
guaucccgguccagcuauu

SEQ ID NO: 2141279 - RNA, 19 nt, Homo sapiens
  misc_RNA (1)...(19): siRNA sense strand
cggugaaggugcagcuaug

SEQ ID NO: 2141280 - RNA, 19 nt, Homo sapiens
  misc_RNA (1)...(19): siRNA sense strand
caaaagagaaagaugacaa

SEQ ID NO: 2141281 - RNA, 19 nt, Homo sapiens
  misc_RNA (1)...(19): siRNA sense strand
ggaauugggagcgccugaa

SEQ ID NO: 2141282 - RNA, 19 nt, Homo sapiens
  misc_RNA (1)...(19): siRNA sense strand
uugcauccuuuaaccaaga

SEQ ID NO: 2141283 - RNA, 19 nt, Homo sapiens
  misc_RNA (1)...(19): siRNA sense strand
gagcucuugcauccuuuaa

SEQ ID NO: 2141284 - RNA, 19 nt, Homo sapiens
  misc_RNA (1)...(19): siRNA sense strand
cagcggaagacuacgagaa

SEQ ID NO: 2141285 - RNA, 19 nt, Homo sapiens
  misc_RNA (1)...(19): siRNA sense strand
augcucagguuaugucaug

SEQ ID NO: 2141286 - RNA, 19 nt, Homo sapiens
  misc_RNA (1)...(19): siRNA sense strand
aaaagcagcaguucagauu

SEQ ID NO: 2141287 - RNA, 19 nt, Homo sapiens
  misc_RNA (1)...(19): siRNA sense strand
gaggugaaauuggguugac

SEQ ID NO: 2141288 - RNA, 19 nt, Homo sapiens
  misc_RNA (1)...(19): siRNA sense strand
agaguuaaagccaagaaga

SEQ ID NO: 2141289 - RNA, 19 nt, Homo sapiens
  misc_RNA (1)...(19): siRNA sense strand
gcauaggaaauauucugau

SEQ ID NO: 2141290 - RNA, 19 nt, Homo sapiens
  misc_RNA (1)...(19): siRNA sense strand
ugaggaugaagaagaggua

SEQ ID NO: 2141291 - RNA, 19 nt, Homo sapiens
  misc_RNA (1)...(19): siRNA sense strand
ggagaaccagaucuacagu

SEQ ID NO: 2141292 - RNA, 19 nt, Homo sapiens
  misc_RNA (1)...(19): siRNA sense strand
ggugaaauuggguugacaa

SEQ ID NO: 2141293 - RNA, 19 nt, Homo sapiens
  misc_RNA (1)...(19): siRNA sense strand
gcuauggcugaguauguaa

SEQ ID NO: 2141294 - RNA, 19 nt, Homo sapiens
  misc_RNA (1)...(19): siRNA sense strand
agcuauggcugaguaugua

SEQ ID NO: 2141295 - RNA, 19 nt, Homo sapiens
  misc_RNA (1)...(19): siRNA sense strand
aaauguggcagauacuaug

SEQ ID NO: 2141296 - RNA, 19 nt, Homo sapiens
  misc_RNA (1)...(19): siRNA sense strand
gcaccuauaauacauaccu

SEQ ID NO: 2141297 - RNA, 19 nt, Homo sapiens
  misc_RNA (1)...(19): siRNA sense strand
gagacgaaagagagaaagu

SEQ ID NO: 2141298 - RNA, 19 nt, Homo sapiens
  misc_RNA (1)...(19): siRNA sense strand
gaucgguucuuuugaaugc

SEQ ID NO: 2141299 - RNA, 19 nt, Homo sapiens
  misc_RNA (1)...(19): siRNA sense strand
caguugaggaugaagaaga

SEQ ID NO: 2141300 - RNA, 19 nt, Homo sapiens
  misc_RNA (1)...(19): siRNA sense strand
gagaucgguucuuuugaau

SEQ ID NO: 2141301 - RNA, 19 nt, Homo sapiens
  misc_RNA (1)...(19): siRNA sense strand
gagaagagguggugacuuu

SEQ ID NO: 2141302 - RNA, 19 nt, Homo sapiens
  misc_RNA (1)...(19): siRNA sense strand
gaacacaguaguaguaaua

SEQ ID NO: 2141303 - RNA, 19 nt, Homo sapiens
  misc_RNA (1)...(19): siRNA sense strand
gcacagguguuaauaguug

SEQ ID NO: 2141304 - RNA, 19 nt, Homo sapiens
  misc_RNA (1)...(19): siRNA sense strand
gaaaugagaagcuaauuga

SEQ ID NO: 2141305 - RNA, 19 nt, Homo sapiens
  misc_RNA (1)...(19): siRNA sense strand
gaggaaacaugaugagauu

SEQ ID NO: 2141306 - RNA, 19 nt, Homo sapiens
  misc_RNA (1)...(19): siRNA sense strand
gcacccagcuucagucuau

SEQ ID NO: 2141307 - RNA, 19 nt, Homo sapiens
  misc_RNA (1)...(19): siRNA sense strand
caaauaacuuguagccuuu

SEQ ID NO: 2141308 - RNA, 19 nt, Homo sapiens
  misc_RNA (1)...(19): siRNA sense strand
gcaggaaguuucuauggaa

SEQ ID NO: 2141309 - RNA, 19 nt, Homo sapiens
  misc_RNA (1)...(19): siRNA sense strand
caagaucucuguacaaagu

SEQ ID NO: 2141310 - RNA, 19 nt, Homo sapiens
  misc_RNA (1)...(19): siRNA sense strand
ugacuuugcuggaagauuu

SEQ ID NO: 2141311 - RNA, 19 nt, Homo sapiens
  misc_RNA (1)...(19): siRNA sense strand
gugagaaacuugagaaaga

SEQ ID NO: 2141312 - RNA, 19 nt, Homo sapiens
  misc_RNA (1)...(19): siRNA sense strand
guagugauauugaagagaa

SEQ ID NO: 2141313 - RNA, 19 nt, Homo sapiens
  misc_RNA (1)...(19): siRNA sense strand
ggagugcccucucaacaug

SEQ ID NO: 2141314 - RNA, 19 nt, Homo sapiens
  misc_RNA (1)...(19): siRNA sense strand
caauagaaguuauccugaa

SEQ ID NO: 2141315 - RNA, 19 nt, Homo sapiens
  misc_RNA (1)...(19): siRNA sense strand
ucagugaacucaguaauau

SEQ ID NO: 2141316 - RNA, 19 nt, Homo sapiens
  misc_RNA (1)...(19): siRNA sense strand
gcaacagacuccaugugaa

SEQ ID NO: 2141317 - RNA, 19 nt, Homo sapiens
  misc_RNA (1)...(19): siRNA sense strand
gaacagacaguagugauau

SEQ ID NO: 2141318 - RNA, 19 nt, Homo sapiens
  misc_RNA (1)...(19): siRNA sense strand
gaaaccagcacaaugaaga

SEQ ID NO: 2141319 - RNA, 19 nt, Homo sapiens
  misc_RNA (1)...(19): siRNA sense strand
cguaggaauuugucuuaua

SEQ ID NO: 2141320 - RNA, 19 nt, Homo sapiens
  misc_RNA (1)...(19): siRNA sense strand
ggaacagacaguagugaua

SEQ ID NO: 2141321 - RNA, 19 nt, Homo sapiens
  misc_RNA (1)...(19): siRNA sense strand
caacagacuccaugugaaa

SEQ ID NO: 2141322 - RNA, 19 nt, Homo sapiens
  misc_RNA (1)...(19): siRNA sense strand
ccaaguagaucuuauagac

SEQ ID NO: 2141323 - RNA, 19 nt, Homo sapiens
  misc_RNA (1)...(19): siRNA sense strand
ggacuuauuugacauucug

SEQ ID NO: 2141324 - RNA, 19 nt, Homo sapiens
  misc_RNA (1)...(19): siRNA sense strand
cacaggaucuuucuacaga

SEQ ID NO: 2141325 - RNA, 19 nt, Homo sapiens
  misc_RNA (1)...(19): siRNA sense strand
ggaaaugagaagcuaauug

SEQ ID NO: 2141326 - RNA, 19 nt, Homo sapiens
  misc_RNA (1)...(19): siRNA sense strand
caagccagguugucaguga

SEQ ID NO: 2141327 - RNA, 19 nt, Homo sapiens
  misc_RNA (1)...(19): siRNA sense strand
uaaggaaguuaguucaaga

SEQ ID NO: 2141328 - RNA, 19 nt, Homo sapiens
  misc_RNA (1)...(19): siRNA sense strand
caaaguaggagacuggaaa

SEQ ID NO: 2141329 - RNA, 19 nt, Homo sapiens
  misc_RNA (1)...(19): siRNA sense strand
gaugcaaacuaacaacuca

SEQ ID NO: 2141330 - RNA, 19 nt, Homo sapiens
  misc_RNA (1)...(19): siRNA sense strand
guaggaauuugucuuauac

SEQ ID NO: 2141331 - RNA, 19 nt, Homo sapiens
  misc_RNA (1)...(19): siRNA sense strand
aaagaaguuugccuguuaa

SEQ ID NO: 2141332 - RNA, 19 nt, Homo sapiens
  misc_RNA (1)...(19): siRNA sense strand
gguauuacuuacacaguga

SEQ ID NO: 2141333 - RNA, 19 nt, Homo sapiens
  misc_RNA (1)...(19): siRNA sense strand
cugaggagcuccagucuug

SEQ ID NO: 2141334 - RNA, 19 nt, Homo sapiens
  misc_RNA (1)...(19): siRNA sense strand
guacucgcauggagaaaga

SEQ ID NO: 2141335 - RNA, 19 nt, Homo sapiens
  misc_RNA (1)...(19): siRNA sense strand
uaauacacaucucagcauu

SEQ ID NO: 2141336 - RNA, 19 nt, Homo sapiens
  misc_RNA (1)...(19): siRNA sense strand
gaagauagaauggaaugug

SEQ ID NO: 2141337 - RNA, 19 nt, Homo sapiens
  misc_RNA (1)...(19): siRNA sense strand
ggaaacaugaugagauuca

SEQ ID NO: 2141338 - RNA, 19 nt, Homo sapiens
  misc_RNA (1)...(19): siRNA sense strand
gaagcuaauugaggcugua

SEQ ID NO: 2141339 - RNA, 19 nt, Homo sapiens
  misc_RNA (1)...(19): siRNA sense strand
gaaacaugaugagauucaa

SEQ ID NO: 2141340 - RNA, 19 nt, Homo sapiens
  misc_RNA (1)...(19): siRNA sense strand
ugagaaagaaccaaaguga

SEQ ID NO: 2141341 - RNA, 19 nt, Homo sapiens
  misc_RNA (1)...(19): siRNA sense strand
gagcagauccuggaauugu

SEQ ID NO: 2141342 - RNA, 19 nt, Homo sapiens
  misc_RNA (1)...(19): siRNA sense strand
gggcuguggucggcaaaua

SEQ ID NO: 2141343 - RNA, 19 nt, Homo sapiens
  misc_RNA (1)...(19): siRNA sense strand
uugaagaaguugcuaguga

SEQ ID NO: 2141344 - RNA, 19 nt, Homo sapiens
  misc_RNA (1)...(19): siRNA sense strand
ugagaaacuugagaaagaa

SEQ ID NO: 2141345 - RNA, 19 nt, Homo sapiens
  misc_RNA (1)...(19): siRNA sense strand
caaugaagaggaaacauga

SEQ ID NO: 2141346 - RNA, 19 nt, Homo sapiens
  misc_RNA (1)...(19): siRNA sense strand
uaugaaaccagcacaauga

SEQ ID NO: 2141347 - RNA, 19 nt, Homo sapiens
  misc_RNA (1)...(19): siRNA sense strand
gauuugauguuauccuugu

SEQ ID NO: 2141348 - RNA, 19 nt, Homo sapiens
  misc_RNA (1)...(19): siRNA sense strand
gauaaaggaagugaaagaa

SEQ ID NO: 2141349 - RNA, 19 nt, Homo sapiens
  misc_RNA (1)...(19): siRNA sense strand
ccacacccacuucaagaua

SEQ ID NO: 2141350 - RNA, 19 nt, Homo sapiens
  misc_RNA (1)...(19): siRNA sense strand
uagaaguuauccugaagaa

SEQ ID NO: 2141351 - RNA, 19 nt, Homo sapiens
  misc_RNA (1)...(19): siRNA sense strand
ggagagggagcuugaugaa

SEQ ID NO: 2141352 - RNA, 19 nt, Homo sapiens
  misc_RNA (1)...(19): siRNA sense strand
gggagauuaucaaaguaaa

SEQ ID NO: 2141353 - RNA, 19 nt, Homo sapiens
  misc_RNA (1)...(19): siRNA sense strand
guuauaaugcuguaucuga

SEQ ID NO: 2141354 - RNA, 19 nt, Homo sapiens
  misc_RNA (1)...(19): siRNA sense strand
aagauagaauggaauguga

SEQ ID NO: 2141355 - RNA, 19 nt, Homo sapiens
  misc_RNA (1)...(19): siRNA sense strand
uauggaagauagaauggaa

SEQ ID NO: 2141356 - RNA, 19 nt, Homo sapiens
  misc_RNA (1)...(19): siRNA sense strand
gcacauaugggcaggaagu

SEQ ID NO: 2141357 - RNA, 19 nt, Homo sapiens
  misc_RNA (1)...(19): siRNA sense strand
gaaugcacagguguuaaua

SEQ ID NO: 2141358 - RNA, 19 nt, Homo sapiens
  misc_RNA (1)...(19): siRNA sense strand
aaacugaggauauccgaaa

SEQ ID NO: 2141359 - RNA, 19 nt, Homo sapiens
  misc_RNA (1)...(19): siRNA sense strand
gaaagaguuacaagcgaaa

SEQ ID NO: 2141360 - RNA, 19 nt, Homo sapiens
  misc_RNA (1)...(19): siRNA sense strand
acaaggaaaugagaagcua

SEQ ID NO: 2141361 - RNA, 19 nt, Homo sapiens
  misc_RNA (1)...(19): siRNA sense strand
ggaagugaaagaagcuaaa

SEQ ID NO: 2141362 - RNA, 19 nt, Homo sapiens
  misc_RNA (1)...(19): siRNA sense strand
gguuggauuugaagaaguu

SEQ ID NO: 2141363 - RNA, 19 nt, Homo sapiens
  misc_RNA (1)...(19): siRNA sense strand
gaugagauucaaagaaguu

SEQ ID NO: 2141364 - RNA, 19 nt, Homo sapiens
  misc_RNA (1)...(19): siRNA sense strand
agacaguagugauauugaa

SEQ ID NO: 2141365 - RNA, 19 nt, Homo sapiens
  misc_RNA (1)...(19): siRNA sense strand
gaaguuauaaugcuguauc

SEQ ID NO: 2141366 - RNA, 19 nt, Homo sapiens
  misc_RNA (1)...(19): siRNA sense strand
gcagaaauugaaccagaaa

SEQ ID NO: 2141367 - RNA, 19 nt, Homo sapiens
  misc_RNA (1)...(19): siRNA sense strand
ggcaggaaguuucuaugga

SEQ ID NO: 2141368 - RNA, 19 nt, Homo sapiens
  misc_RNA (1)...(19): siRNA sense strand
aaagaccacuucuccuuca

SEQ ID NO: 2141369 - RNA, 19 nt, Homo sapiens
  misc_RNA (1)...(19): siRNA sense strand
aaagaaugcacagguguua

SEQ ID NO: 2141370 - RNA, 19 nt, Homo sapiens
  misc_RNA (1)...(19): siRNA sense strand
ucuccuggaugcaaacuaa

SEQ ID NO: 2141371 - RNA, 19 nt, Homo sapiens
  misc_RNA (1)...(19): siRNA sense strand
uuauagacaugcaguugaa

SEQ ID NO: 2141372 - RNA, 19 nt, Homo sapiens
  misc_RNA (1)...(19): siRNA sense strand
uuagcaagguuacuggaaa

SEQ ID NO: 2141373 - RNA, 19 nt, Homo sapiens
  misc_RNA (1)...(19): siRNA sense strand
ugaaagaccacuucuccuu

SEQ ID NO: 2141374 - RNA, 19 nt, Homo sapiens
  misc_RNA (1)...(19): siRNA sense strand
aaucagcccuaucacagaa

SEQ ID NO: 2141375 - RNA, 19 nt, Homo sapiens
  misc_RNA (1)...(19): siRNA sense strand
acacagugaggacuuauuu

SEQ ID NO: 2141376 - RNA, 19 nt, Homo sapiens
  misc_RNA (1)...(19): siRNA sense strand
gugauaaccucaguagcuu

SEQ ID NO: 2141377 - RNA, 19 nt, Homo sapiens
  misc_RNA (1)...(19): siRNA sense strand
ccaguguccuacaaucuga

SEQ ID NO: 2141378 - RNA, 19 nt, Homo sapiens
  misc_RNA (1)...(19): siRNA sense strand
gaacaucacaaaagaaguu

SEQ ID NO: 2141379 - RNA, 19 nt, Homo sapiens
  misc_RNA (1)...(19): siRNA sense strand
ggagcuugaugaaccuaga

SEQ ID NO: 2141380 - RNA, 19 nt, Homo sapiens
  misc_RNA (1)...(19): siRNA sense strand
cuucauauauugaguuugg

SEQ ID NO: 2141381 - RNA, 19 nt, Homo sapiens
  misc_RNA (1)...(19): siRNA sense strand
aaagaguucaugcuaguuu

SEQ ID NO: 2141382 - RNA, 19 nt, Homo sapiens
  misc_RNA (1)...(19): siRNA sense strand
uaagagcccaguaugaaga

SEQ ID NO: 2141383 - RNA, 19 nt, Homo sapiens
  misc_RNA (1)...(19): siRNA sense strand
cagaacaaacugaggauau

SEQ ID NO: 2141384 - RNA, 19 nt, Homo sapiens
  misc_RNA (1)...(19): siRNA sense strand
gcacaugcucuuuuagaua

SEQ ID NO: 2141385 - RNA, 19 nt, Homo sapiens
  misc_RNA (1)...(19): siRNA sense strand
gaaguugcacaugcucuuu

SEQ ID NO: 2141386 - RNA, 19 nt, Homo sapiens
  misc_RNA (1)...(19): siRNA sense strand
caagcgaaauacaagaaca

SEQ ID NO: 2141387 - RNA, 19 nt, Homo sapiens
  misc_RNA (1)...(19): siRNA sense strand
cacacccacuucaagauaa

SEQ ID NO: 2141388 - RNA, 19 nt, Homo sapiens
  misc_RNA (1)...(19): siRNA sense strand
gaaauacaagaacaucaca

SEQ ID NO: 2141389 - RNA, 19 nt, Homo sapiens
  misc_RNA (1)...(19): siRNA sense strand
gcagaacaaacugaggaua

SEQ ID NO: 2141390 - RNA, 19 nt, Homo sapiens
  misc_RNA (1)...(19): siRNA sense strand
uguaaaccaugccaacaga

SEQ ID NO: 2141391 - RNA, 19 nt, Homo sapiens
  misc_RNA (1)...(19): siRNA sense strand
gggcacauaugggcaggaa

SEQ ID NO: 2141392 - RNA, 19 nt, Homo sapiens
  misc_RNA (1)...(19): siRNA sense strand
uggccaggcuccagaagaa

SEQ ID NO: 2141393 - RNA, 19 nt, Homo sapiens
  misc_RNA (1)...(19): siRNA sense strand
gucagugaacucaguaaua

SEQ ID NO: 2141394 - RNA, 19 nt, Homo sapiens
  misc_RNA (1)...(19): siRNA sense strand
gcagauccuggaauuguug

SEQ ID NO: 2141395 - RNA, 19 nt, Homo sapiens
  misc_RNA (1)...(19): siRNA sense strand
uaauugaggcuguaaaugg

SEQ ID NO: 2141396 - RNA, 19 nt, Homo sapiens
  misc_RNA (1)...(19): siRNA sense strand
cuaaugaagcagaaauuga

SEQ ID NO: 2141397 - RNA, 19 nt, Homo sapiens
  misc_RNA (1)...(19): siRNA sense strand
guugauaaaggaagugaaa

SEQ ID NO: 2141398 - RNA, 19 nt, Homo sapiens
  misc_RNA (1)...(19): siRNA sense strand
gaugccaccuggaugaaag

SEQ ID NO: 2141399 - RNA, 19 nt, Homo sapiens
  misc_RNA (1)...(19): siRNA sense strand
caaaagaguucaugcuagu

SEQ ID NO: 2141400 - RNA, 19 nt, Homo sapiens
  misc_RNA (1)...(19): siRNA sense strand
uaaaccaugccaacagaaa

SEQ ID NO: 2141401 - RNA, 19 nt, Homo sapiens
  misc_RNA (1)...(19): siRNA sense strand
agacauagcuauagaauuc

SEQ ID NO: 2141402 - RNA, 19 nt, Homo sapiens
  misc_RNA (1)...(19): siRNA sense strand
cuacaaaugugaagaaugu

SEQ ID NO: 2141403 - RNA, 19 nt, Homo sapiens
  misc_RNA (1)...(19): siRNA sense strand
cuacaaaugugaagaaugu

SEQ ID NO: 2141404 - RNA, 19 nt, Homo sapiens
  misc_RNA (1)...(19): siRNA sense strand
cuacaaaugugaagaaugu

SEQ ID NO: 2141405 - RNA, 19 nt, Homo sapiens
  misc_RNA (1)...(19): siRNA sense strand
caucaaagauucacuccaa

SEQ ID NO: 2141406 - RNA, 19 nt, Homo sapiens
  misc_RNA (1)...(19): siRNA sense strand
caagggagguuauagugaa

SEQ ID NO: 2141407 - RNA, 19 nt, Homo sapiens
  misc_RNA (1)...(19): siRNA sense strand
gagagaaacccuacaaaug

SEQ ID NO: 2141408 - RNA, 19 nt, Homo sapiens
  misc_RNA (1)...(19): siRNA sense strand
gagagaaacccuacaaaug

SEQ ID NO: 2141409 - RNA, 19 nt, Homo sapiens
  misc_RNA (1)...(19): siRNA sense strand
caacaucagguaauucaua

SEQ ID NO: 2141410 - RNA, 19 nt, Homo sapiens
  misc_RNA (1)...(19): siRNA sense strand
agacauaggagaauucaua

SEQ ID NO: 2141411 - RNA, 19 nt, Homo sapiens
  misc_RNA (1)...(19): siRNA sense strand
aauaaagagucccagaaua

SEQ ID NO: 2141412 - RNA, 19 nt, Homo sapiens
  misc_RNA (1)...(19): siRNA sense strand
ggagagagacccuacaaau

SEQ ID NO: 2141413 - RNA, 19 nt, Homo sapiens
  misc_RNA (1)...(19): siRNA sense strand
ggagagagacccuacaaau

SEQ ID NO: 2141414 - RNA, 19 nt, Homo sapiens
  misc_RNA (1)...(19): siRNA sense strand
ggagagagacccuacaaau

SEQ ID NO: 2141415 - RNA, 19 nt, Homo sapiens
  misc_RNA (1)...(19): siRNA sense strand
gagcagggcaucaaagauu

SEQ ID NO: 2141416 - RNA, 19 nt, Homo sapiens
  misc_RNA (1)...(19): siRNA sense strand
aaagagaaaugagauggua

SEQ ID NO: 2141417 - RNA, 19 nt, Homo sapiens
  misc_RNA (1)...(19): siRNA sense strand
gaauguggcaaauccuuua

SEQ ID NO: 2141418 - RNA, 19 nt, Homo sapiens
  misc_RNA (1)...(19): siRNA sense strand
gagaaacccuacaaaugug

SEQ ID NO: 2141419 - RNA, 19 nt, Homo sapiens
  misc_RNA (1)...(19): siRNA sense strand
gagaaacccuacaaaugug

SEQ ID NO: 2141420 - RNA, 19 nt, Homo sapiens
  misc_RNA (1)...(19): siRNA sense strand
cuacaaaugugaagagugu

SEQ ID NO: 2141421 - RNA, 19 nt, Homo sapiens
  misc_RNA (1)...(19): siRNA sense strand
gagaugugauguuagagaa

SEQ ID NO: 2141422 - RNA, 19 nt, Homo sapiens
  misc_RNA (1)...(19): siRNA sense strand
ggagagaaaccauauagau

SEQ ID NO: 2141423 - RNA, 19 nt, Homo sapiens
  misc_RNA (1)...(19): siRNA sense strand
gagagaaacccuacacaug

SEQ ID NO: 2141424 - RNA, 19 nt, Homo sapiens
  misc_RNA (1)...(19): siRNA sense strand
gagaaacccuacacaugug

SEQ ID NO: 2141425 - RNA, 19 nt, Homo sapiens
  misc_RNA (1)...(19): siRNA sense strand
ggagagaaacccuacaaau

SEQ ID NO: 2141426 - RNA, 19 nt, Homo sapiens
  misc_RNA (1)...(19): siRNA sense strand
ggagagaaacccuacaaau

SEQ ID NO: 2141427 - RNA, 19 nt, Homo sapiens
  misc_RNA (1)...(19): siRNA sense strand
uaaagagucccagaauaua

SEQ ID NO: 2141428 - RNA, 19 nt, Homo sapiens
  misc_RNA (1)...(19): siRNA sense strand
gagagaaaccauauagaug

SEQ ID NO: 2141429 - RNA, 19 nt, Homo sapiens
  misc_RNA (1)...(19): siRNA sense strand
gagagagacccuacaaaug

SEQ ID NO: 2141430 - RNA, 19 nt, Homo sapiens
  misc_RNA (1)...(19): siRNA sense strand
gagagagacccuacaaaug

SEQ ID NO: 2141431 - RNA, 19 nt, Homo sapiens
  misc_RNA (1)...(19): siRNA sense strand
gagagagacccuacaaaug

SEQ ID NO: 2141432 - RNA, 19 nt, Homo sapiens
  misc_RNA (1)...(19): siRNA sense strand
caaagaauguggcaaaucc

SEQ ID NO: 2141433 - RNA, 19 nt, Homo sapiens
  misc_RNA (1)...(19): siRNA sense strand
gaauguggccaagacuuua

SEQ ID NO: 2141434 - RNA, 19 nt, Homo sapiens
  misc_RNA (1)...(19): siRNA sense strand
gagaaaccauauagaugug

SEQ ID NO: 2141435 - RNA, 19 nt, Homo sapiens
  misc_RNA (1)...(19): siRNA sense strand
caaaccauacuacacauaa

SEQ ID NO: 2141436 - RNA, 19 nt, Homo sapiens
  misc_RNA (1)...(19): siRNA sense strand
gaauguggccaagccuuua

SEQ ID NO: 2141437 - RNA, 19 nt, Homo sapiens
  misc_RNA (1)...(19): siRNA sense strand
ucagagacauagcuauaga

SEQ ID NO: 2141438 - RNA, 19 nt, Homo sapiens
  misc_RNA (1)...(19): siRNA sense strand
gagagacccuacaaaugug

SEQ ID NO: 2141439 - RNA, 19 nt, Homo sapiens
  misc_RNA (1)...(19): siRNA sense strand
gagagacccuacaaaugug

SEQ ID NO: 2141440 - RNA, 19 nt, Homo sapiens
  misc_RNA (1)...(19): siRNA sense strand
gaaaugggacuguugacau

SEQ ID NO: 2141441 - RNA, 19 nt, Homo sapiens
  misc_RNA (1)...(19): siRNA sense strand
gaauguggccaagccuuua

SEQ ID NO: 2141442 - RNA, 19 nt, Homo sapiens
  misc_RNA (1)...(19): siRNA sense strand
gagagacccuacaaaugug

SEQ ID NO: 2141443 - RNA, 19 nt, Homo sapiens
  misc_RNA (1)...(19): siRNA sense strand
gaccacaagagaauucaua

SEQ ID NO: 2141444 - RNA, 19 nt, Homo sapiens
  misc_RNA (1)...(19): siRNA sense strand
agagaaacccuacaaaugu

SEQ ID NO: 2141445 - RNA, 19 nt, Homo sapiens
  misc_RNA (1)...(19): siRNA sense strand
gugcucagcggaauuuaua

SEQ ID NO: 2141446 - RNA, 19 nt, Homo sapiens
  misc_RNA (1)...(19): siRNA sense strand
agagaaacccuacaaaugu

SEQ ID NO: 2141447 - RNA, 19 nt, Homo sapiens
  misc_RNA (1)...(19): siRNA sense strand
gcucagcggaauuuauaua

SEQ ID NO: 2141448 - RNA, 19 nt, Homo sapiens
  misc_RNA (1)...(19): siRNA sense strand
gaccacaagagaauucaua

SEQ ID NO: 2141449 - RNA, 19 nt, Homo sapiens
  misc_RNA (1)...(19): siRNA sense strand
gaccacaagagaauucaua

SEQ ID NO: 2141450 - RNA, 19 nt, Homo sapiens
  misc_RNA (1)...(19): siRNA sense strand
ggagaaguccuacaaaugc

SEQ ID NO: 2141451 - RNA, 19 nt, Homo sapiens
  misc_RNA (1)...(19): siRNA sense strand
gaaacccuaugccugugaa

SEQ ID NO: 2141452 - RNA, 19 nt, Homo sapiens
  misc_RNA (1)...(19): siRNA sense strand
gagguuauagugaaguuaa

SEQ ID NO: 2141453 - RNA, 19 nt, Homo sapiens
  misc_RNA (1)...(19): siRNA sense strand
gagagacccuacacaugug

SEQ ID NO: 2141454 - RNA, 19 nt, Homo sapiens
  misc_RNA (1)...(19): siRNA sense strand
auagagaugugauguuaga

SEQ ID NO: 2141455 - RNA, 19 nt, Homo sapiens
  misc_RNA (1)...(19): siRNA sense strand
ggagagagacccuacacau

SEQ ID NO: 2141456 - RNA, 19 nt, Homo sapiens
  misc_RNA (1)...(19): siRNA sense strand
agagagacccuacaaaugu

SEQ ID NO: 2141457 - RNA, 19 nt, Homo sapiens
  misc_RNA (1)...(19): siRNA sense strand
agagagacccuacaaaugu

SEQ ID NO: 2141458 - RNA, 19 nt, Homo sapiens
  misc_RNA (1)...(19): siRNA sense strand
ccucgaaccuuaugagaca

SEQ ID NO: 2141459 - RNA, 19 nt, Homo sapiens
  misc_RNA (1)...(19): siRNA sense strand
agagagacccuacaaaugu

SEQ ID NO: 2141460 - RNA, 19 nt, Homo sapiens
  misc_RNA (1)...(19): siRNA sense strand
aaagagucccagaauauaa

SEQ ID NO: 2141461 - RNA, 19 nt, Homo sapiens
  misc_RNA (1)...(19): siRNA sense strand
gagagagacccuacacaug

SEQ ID NO: 2141462 - RNA, 19 nt, Homo sapiens
  misc_RNA (1)...(19): siRNA sense strand
gggagaaguccuacaaaug

SEQ ID NO: 2141463 - RNA, 19 nt, Homo sapiens
  misc_RNA (1)...(19): siRNA sense strand
auaaagagucccagaauau

SEQ ID NO: 2141464 - RNA, 19 nt, Homo sapiens
  misc_RNA (1)...(19): siRNA sense strand
ccucaacccuuaugcaaca

SEQ ID NO: 2141465 - RNA, 19 nt, Homo sapiens
  misc_RNA (1)...(19): siRNA sense strand
cuacacgugugaagaaugu

SEQ ID NO: 2141466 - RNA, 19 nt, Homo sapiens
  misc_RNA (1)...(19): siRNA sense strand
gcacaagggagguuauagu

SEQ ID NO: 2141467 - RNA, 19 nt, Homo sapiens
  misc_RNA (1)...(19): siRNA sense strand
gcacuuacuauccacaaga

SEQ ID NO: 2141468 - RNA, 19 nt, Homo sapiens
  misc_RNA (1)...(19): siRNA sense strand
ccauauagaugugaggaau

SEQ ID NO: 2141469 - RNA, 19 nt, Homo sapiens
  misc_RNA (1)...(19): siRNA sense strand
cauaagagaauucauacug

SEQ ID NO: 2141470 - RNA, 19 nt, Homo sapiens
  misc_RNA (1)...(19): siRNA sense strand
ggacaugagaaauuacaau

SEQ ID NO: 2141471 - RNA, 19 nt, Homo sapiens
  misc_RNA (1)...(19): siRNA sense strand
gccuuuagcuggucugcaa

SEQ ID NO: 2141472 - RNA, 19 nt, Homo sapiens
  misc_RNA (1)...(19): siRNA sense strand
cuacaaaugcaaagaaugu

SEQ ID NO: 2141473 - RNA, 19 nt, Homo sapiens
  misc_RNA (1)...(19): siRNA sense strand
gagaaguccuacaaaugca

SEQ ID NO: 2141474 - RNA, 19 nt, Homo sapiens
  misc_RNA (1)...(19): siRNA sense strand
caucagguaauucauacua

SEQ ID NO: 2141475 - RNA, 19 nt, Homo sapiens
  misc_RNA (1)...(19): siRNA sense strand
gccuuuagcuuauccucaa

SEQ ID NO: 2141476 - RNA, 19 nt, Homo sapiens
  misc_RNA (1)...(19): siRNA sense strand
agagaaacccuacacaugu

SEQ ID NO: 2141477 - RNA, 19 nt, Homo sapiens
  misc_RNA (1)...(19): siRNA sense strand
ggagagaaacccuacacau

SEQ ID NO: 2141478 - RNA, 19 nt, Homo sapiens
  misc_RNA (1)...(19): siRNA sense strand
cccagaauauaaagagaaa

SEQ ID NO: 2141479 - RNA, 19 nt, Homo sapiens
  misc_RNA (1)...(19): siRNA sense strand
agaauucucucuggaggaa

SEQ ID NO: 2141480 - RNA, 19 nt, Homo sapiens
  misc_RNA (1)...(19): siRNA sense strand
cagcggaauuuauauagag

SEQ ID NO: 2141481 - RNA, 19 nt, Homo sapiens
  misc_RNA (1)...(19): siRNA sense strand
agagaaaccauauagaugu

SEQ ID NO: 2141482 - RNA, 19 nt, Homo sapiens
  misc_RNA (1)...(19): siRNA sense strand
gauguuagagaacuacaga

SEQ ID NO: 2141483 - RNA, 19 nt, Homo sapiens
  misc_RNA (1)...(19): siRNA sense strand
agagagacccuacacaugu

SEQ ID NO: 2141484 - RNA, 19 nt, Homo sapiens
  misc_RNA (1)...(19): siRNA sense strand
ugaagaguguggcaaaguc

SEQ ID NO: 2141485 - RNA, 19 nt, Homo sapiens
  misc_RNA (1)...(19): siRNA sense strand
ugaagaauguggccaagac

SEQ ID NO: 2141486 - RNA, 19 nt, Homo sapiens
  misc_RNA (1)...(19): siRNA sense strand
ccucagcacuuacuaacca

SEQ ID NO: 2141487 - RNA, 19 nt, Homo sapiens
  misc_RNA (1)...(19): siRNA sense strand
cuaaaucaacaucagguaa

SEQ ID NO: 2141488 - RNA, 19 nt, Homo sapiens
  misc_RNA (1)...(19): siRNA sense strand
uaaguggcauucaagucuu

SEQ ID NO: 2141489 - RNA, 19 nt, Homo sapiens
  misc_RNA (1)...(19): siRNA sense strand
ucacugaccacaagagaau

SEQ ID NO: 2141490 - RNA, 19 nt, Homo sapiens
  misc_RNA (1)...(19): siRNA sense strand
ucacugaccacaagagaau

SEQ ID NO: 2141491 - RNA, 19 nt, Homo sapiens
  misc_RNA (1)...(19): siRNA sense strand
ucacugaccacaagagaau

SEQ ID NO: 2141492 - RNA, 19 nt, Homo sapiens
  misc_RNA (1)...(19): siRNA sense strand
gcaaagaauguggcaaauc

SEQ ID NO: 2141493 - RNA, 19 nt, Homo sapiens
  misc_RNA (1)...(19): siRNA sense strand
guaauaccaagaacauaug

SEQ ID NO: 2141494 - RNA, 19 nt, Homo sapiens
  misc_RNA (1)...(19): siRNA sense strand
cgagaaaugggacuguuga

SEQ ID NO: 2141495 - RNA, 19 nt, Homo sapiens
  misc_RNA (1)...(19): siRNA sense strand
ucagcggaauuuauauaga

SEQ ID NO: 2141496 - RNA, 19 nt, Homo sapiens
  misc_RNA (1)...(19): siRNA sense strand
gggagguuauagugaaguu

SEQ ID NO: 2141497 - RNA, 19 nt, Homo sapiens
  misc_RNA (1)...(19): siRNA sense strand
gaaguccuacaaaugcaaa

SEQ ID NO: 2141498 - RNA, 19 nt, Homo sapiens
  misc_RNA (1)...(19): siRNA sense strand
gccuuuagcugguccucaa

SEQ ID NO: 2141499 - RNA, 19 nt, Homo sapiens
  misc_RNA (1)...(19): siRNA sense strand
gcacuuacuaaccacaaga

SEQ ID NO: 2141500 - RNA, 19 nt, Homo sapiens
  misc_RNA (1)...(19): siRNA sense strand
gaauucauacuagagagaa

SEQ ID NO: 2141501 - RNA, 19 nt, Homo sapiens
  misc_RNA (1)...(19): siRNA sense strand
agacauagcuauagaauuc

SEQ ID NO: 2141502 - RNA, 19 nt, Homo sapiens
  misc_RNA (1)...(19): siRNA sense strand
cuacaaaugugaagaaugu

SEQ ID NO: 2141503 - RNA, 19 nt, Homo sapiens
  misc_RNA (1)...(19): siRNA sense strand
cuacaaaugugaagaaugu

SEQ ID NO: 2141504 - RNA, 19 nt, Homo sapiens
  misc_RNA (1)...(19): siRNA sense strand
cuacaaaugugaagaaugu

SEQ ID NO: 2141505 - RNA, 19 nt, Homo sapiens
  misc_RNA (1)...(19): siRNA sense strand
caucaaagauucacuccaa

SEQ ID NO: 2141506 - RNA, 19 nt, Homo sapiens
  misc_RNA (1)...(19): siRNA sense strand
caagggagguuauagugaa

SEQ ID NO: 2141507 - RNA, 19 nt, Homo sapiens
  misc_RNA (1)...(19): siRNA sense strand
gagagaaacccuacaaaug

SEQ ID NO: 2141508 - RNA, 19 nt, Homo sapiens
  misc_RNA (1)...(19): siRNA sense strand
gagagaaacccuacaaaug

SEQ ID NO: 2141509 - RNA, 19 nt, Homo sapiens
  misc_RNA (1)...(19): siRNA sense strand
caacaucagguaauucaua

SEQ ID NO: 2141510 - RNA, 19 nt, Homo sapiens
  misc_RNA (1)...(19): siRNA sense strand
agacauaggagaauucaua

SEQ ID NO: 2141511 - RNA, 19 nt, Homo sapiens
  misc_RNA (1)...(19): siRNA sense strand
aauaaagagucccagaaua

SEQ ID NO: 2141512 - RNA, 19 nt, Homo sapiens
  misc_RNA (1)...(19): siRNA sense strand
ggagagagacccuacaaau

SEQ ID NO: 2141513 - RNA, 19 nt, Homo sapiens
  misc_RNA (1)...(19): siRNA sense strand
ggagagagacccuacaaau

SEQ ID NO: 2141514 - RNA, 19 nt, Homo sapiens
  misc_RNA (1)...(19): siRNA sense strand
ggagagagacccuacaaau

SEQ ID NO: 2141515 - RNA, 19 nt, Homo sapiens
  misc_RNA (1)...(19): siRNA sense strand
gagcagggcaucaaagauu

SEQ ID NO: 2141516 - RNA, 19 nt, Homo sapiens
  misc_RNA (1)...(19): siRNA sense strand
aaagagaaaugagauggua

SEQ ID NO: 2141517 - RNA, 19 nt, Homo sapiens
  misc_RNA (1)...(19): siRNA sense strand
gaauguggcaaauccuuua

SEQ ID NO: 2141518 - RNA, 19 nt, Homo sapiens
  misc_RNA (1)...(19): siRNA sense strand
gagaaacccuacaaaugug

SEQ ID NO: 2141519 - RNA, 19 nt, Homo sapiens
  misc_RNA (1)...(19): siRNA sense strand
gagaaacccuacaaaugug

SEQ ID NO: 2141520 - RNA, 19 nt, Homo sapiens
  misc_RNA (1)...(19): siRNA sense strand
cuacaaaugugaagagugu

SEQ ID NO: 2141521 - RNA, 19 nt, Homo sapiens
  misc_RNA (1)...(19): siRNA sense strand
gagaugugauguuagagaa

SEQ ID NO: 2141522 - RNA, 19 nt, Homo sapiens
  misc_RNA (1)...(19): siRNA sense strand
ggagagaaaccauauagau

SEQ ID NO: 2141523 - RNA, 19 nt, Homo sapiens
  misc_RNA (1)...(19): siRNA sense strand
gagagaaacccuacacaug

SEQ ID NO: 2141524 - RNA, 19 nt, Homo sapiens
  misc_RNA (1)...(19): siRNA sense strand
gagaaacccuacacaugug

SEQ ID NO: 2141525 - RNA, 19 nt, Homo sapiens
  misc_RNA (1)...(19): siRNA sense strand
ggagagaaacccuacaaau

SEQ ID NO: 2141526 - RNA, 19 nt, Homo sapiens
  misc_RNA (1)...(19): siRNA sense strand
ggagagaaacccuacaaau

SEQ ID NO: 2141527 - RNA, 19 nt, Homo sapiens
  misc_RNA (1)...(19): siRNA sense strand
uaaagagucccagaauaua

SEQ ID NO: 2141528 - RNA, 19 nt, Homo sapiens
  misc_RNA (1)...(19): siRNA sense strand
gagagaaaccauauagaug

SEQ ID NO: 2141529 - RNA, 19 nt, Homo sapiens
  misc_RNA (1)...(19): siRNA sense strand
gagagagacccuacaaaug

SEQ ID NO: 2141530 - RNA, 19 nt, Homo sapiens
  misc_RNA (1)...(19): siRNA sense strand
gagagagacccuacaaaug

SEQ ID NO: 2141531 - RNA, 19 nt, Homo sapiens
  misc_RNA (1)...(19): siRNA sense strand
gagagagacccuacaaaug

SEQ ID NO: 2141532 - RNA, 19 nt, Homo sapiens
  misc_RNA (1)...(19): siRNA sense strand
caaagaauguggcaaaucc

SEQ ID NO: 2141533 - RNA, 19 nt, Homo sapiens
  misc_RNA (1)...(19): siRNA sense strand
gaauguggccaagacuuua

SEQ ID NO: 2141534 - RNA, 19 nt, Homo sapiens
  misc_RNA (1)...(19): siRNA sense strand
gagaaaccauauagaugug

SEQ ID NO: 2141535 - RNA, 19 nt, Homo sapiens
  misc_RNA (1)...(19): siRNA sense strand
caaaccauacuacacauaa

SEQ ID NO: 2141536 - RNA, 19 nt, Homo sapiens
  misc_RNA (1)...(19): siRNA sense strand
gaauguggccaagccuuua

SEQ ID NO: 2141537 - RNA, 19 nt, Homo sapiens
  misc_RNA (1)...(19): siRNA sense strand
ucagagacauagcuauaga

SEQ ID NO: 2141538 - RNA, 19 nt, Homo sapiens
  misc_RNA (1)...(19): siRNA sense strand
gagagacccuacaaaugug

SEQ ID NO: 2141539 - RNA, 19 nt, Homo sapiens
  misc_RNA (1)...(19): siRNA sense strand
gagagacccuacaaaugug

SEQ ID NO: 2141540 - RNA, 19 nt, Homo sapiens
  misc_RNA (1)...(19): siRNA sense strand
gaaaugggacuguugacau

SEQ ID NO: 2141541 - RNA, 19 nt, Homo sapiens
  misc_RNA (1)...(19): siRNA sense strand
gaauguggccaagccuuua

SEQ ID NO: 2141542 - RNA, 19 nt, Homo sapiens
  misc_RNA (1)...(19): siRNA sense strand
gagagacccuacaaaugug

SEQ ID NO: 2141543 - RNA, 19 nt, Homo sapiens
  misc_RNA (1)...(19): siRNA sense strand
gaccacaagagaauucaua

SEQ ID NO: 2141544 - RNA, 19 nt, Homo sapiens
  misc_RNA (1)...(19): siRNA sense strand
agagaaacccuacaaaugu

SEQ ID NO: 2141545 - RNA, 19 nt, Homo sapiens
  misc_RNA (1)...(19): siRNA sense strand
gugcucagcggaauuuaua

SEQ ID NO: 2141546 - RNA, 19 nt, Homo sapiens
  misc_RNA (1)...(19): siRNA sense strand
agagaaacccuacaaaugu

SEQ ID NO: 2141547 - RNA, 19 nt, Homo sapiens
  misc_RNA (1)...(19): siRNA sense strand
gcucagcggaauuuauaua

SEQ ID NO: 2141548 - RNA, 19 nt, Homo sapiens
  misc_RNA (1)...(19): siRNA sense strand
gaccacaagagaauucaua

SEQ ID NO: 2141549 - RNA, 19 nt, Homo sapiens
  misc_RNA (1)...(19): siRNA sense strand
gaccacaagagaauucaua

SEQ ID NO: 2141550 - RNA, 19 nt, Homo sapiens
  misc_RNA (1)...(19): siRNA sense strand
ggagaaguccuacaaaugc

SEQ ID NO: 2141551 - RNA, 19 nt, Homo sapiens
  misc_RNA (1)...(19): siRNA sense strand
gaaacccuaugccugugaa

SEQ ID NO: 2141552 - RNA, 19 nt, Homo sapiens
  misc_RNA (1)...(19): siRNA sense strand
gagguuauagugaaguuaa

SEQ ID NO: 2141553 - RNA, 19 nt, Homo sapiens
  misc_RNA (1)...(19): siRNA sense strand
gagagacccuacacaugug

SEQ ID NO: 2141554 - RNA, 19 nt, Homo sapiens
  misc_RNA (1)...(19): siRNA sense strand
auagagaugugauguuaga

SEQ ID NO: 2141555 - RNA, 19 nt, Homo sapiens
  misc_RNA (1)...(19): siRNA sense strand
ggagagagacccuacacau

SEQ ID NO: 2141556 - RNA, 19 nt, Homo sapiens
  misc_RNA (1)...(19): siRNA sense strand
agagagacccuacaaaugu

SEQ ID NO: 2141557 - RNA, 19 nt, Homo sapiens
  misc_RNA (1)...(19): siRNA sense strand
agagagacccuacaaaugu

SEQ ID NO: 2141558 - RNA, 19 nt, Homo sapiens
  misc_RNA (1)...(19): siRNA sense strand
ccucgaaccuuaugagaca

SEQ ID NO: 2141559 - RNA, 19 nt, Homo sapiens
  misc_RNA (1)...(19): siRNA sense strand
agagagacccuacaaaugu

SEQ ID NO: 2141560 - RNA, 19 nt, Homo sapiens
  misc_RNA (1)...(19): siRNA sense strand
aaagagucccagaauauaa

SEQ ID NO: 2141561 - RNA, 19 nt, Homo sapiens
  misc_RNA (1)...(19): siRNA sense strand
gagagagacccuacacaug

SEQ ID NO: 2141562 - RNA, 19 nt, Homo sapiens
  misc_RNA (1)...(19): siRNA sense strand
gggagaaguccuacaaaug

SEQ ID NO: 2141563 - RNA, 19 nt, Homo sapiens
  misc_RNA (1)...(19): siRNA sense strand
auaaagagucccagaauau

SEQ ID NO: 2141564 - RNA, 19 nt, Homo sapiens
  misc_RNA (1)...(19): siRNA sense strand
ccucaacccuuaugcaaca

SEQ ID NO: 2141565 - RNA, 19 nt, Homo sapiens
  misc_RNA (1)...(19): siRNA sense strand
cuacacgugugaagaaugu

SEQ ID NO: 2141566 - RNA, 19 nt, Homo sapiens
  misc_RNA (1)...(19): siRNA sense strand
gcacaagggagguuauagu

SEQ ID NO: 2141567 - RNA, 19 nt, Homo sapiens
  misc_RNA (1)...(19): siRNA sense strand
gcacuuacuauccacaaga

SEQ ID NO: 2141568 - RNA, 19 nt, Homo sapiens
  misc_RNA (1)...(19): siRNA sense strand
ccauauagaugugaggaau

SEQ ID NO: 2141569 - RNA, 19 nt, Homo sapiens
  misc_RNA (1)...(19): siRNA sense strand
cauaagagaauucauacug

SEQ ID NO: 2141570 - RNA, 19 nt, Homo sapiens
  misc_RNA (1)...(19): siRNA sense strand
ggacaugagaaauuacaau

SEQ ID NO: 2141571 - RNA, 19 nt, Homo sapiens
  misc_RNA (1)...(19): siRNA sense strand
gccuuuagcuggucugcaa

SEQ ID NO: 2141572 - RNA, 19 nt, Homo sapiens
  misc_RNA (1)...(19): siRNA sense strand
cuacaaaugcaaagaaugu

SEQ ID NO: 2141573 - RNA, 19 nt, Homo sapiens
  misc_RNA (1)...(19): siRNA sense strand
gagaaguccuacaaaugca

SEQ ID NO: 2141574 - RNA, 19 nt, Homo sapiens
  misc_RNA (1)...(19): siRNA sense strand
caucagguaauucauacua

SEQ ID NO: 2141575 - RNA, 19 nt, Homo sapiens
  misc_RNA (1)...(19): siRNA sense strand
gccuuuagcuuauccucaa

SEQ ID NO: 2141576 - RNA, 19 nt, Homo sapiens
  misc_RNA (1)...(19): siRNA sense strand
agagaaacccuacacaugu

SEQ ID NO: 2141577 - RNA, 19 nt, Homo sapiens
  misc_RNA (1)...(19): siRNA sense strand
ggagagaaacccuacacau

SEQ ID NO: 2141578 - RNA, 19 nt, Homo sapiens
  misc_RNA (1)...(19): siRNA sense strand
cccagaauauaaagagaaa

SEQ ID NO: 2141579 - RNA, 19 nt, Homo sapiens
  misc_RNA (1)...(19): siRNA sense strand
agaauucucucuggaggaa

SEQ ID NO: 2141580 - RNA, 19 nt, Homo sapiens
  misc_RNA (1)...(19): siRNA sense strand
cagcggaauuuauauagag

SEQ ID NO: 2141581 - RNA, 19 nt, Homo sapiens
  misc_RNA (1)...(19): siRNA sense strand
agagaaaccauauagaugu

SEQ ID NO: 2141582 - RNA, 19 nt, Homo sapiens
  misc_RNA (1)...(19): siRNA sense strand
gauguuagagaacuacaga

SEQ ID NO: 2141583 - RNA, 19 nt, Homo sapiens
  misc_RNA (1)...(19): siRNA sense strand
agagagacccuacacaugu

SEQ ID NO: 2141584 - RNA, 19 nt, Homo sapiens
  misc_RNA (1)...(19): siRNA sense strand
ugaagaguguggcaaaguc

SEQ ID NO: 2141585 - RNA, 19 nt, Homo sapiens
  misc_RNA (1)...(19): siRNA sense strand
ugaagaauguggccaagac

SEQ ID NO: 2141586 - RNA, 19 nt, Homo sapiens
  misc_RNA (1)...(19): siRNA sense strand
ccucagcacuuacuaacca

SEQ ID NO: 2141587 - RNA, 19 nt, Homo sapiens
  misc_RNA (1)...(19): siRNA sense strand
cuaaaucaacaucagguaa

SEQ ID NO: 2141588 - RNA, 19 nt, Homo sapiens
  misc_RNA (1)...(19): siRNA sense strand
uaaguggcauucaagucuu

SEQ ID NO: 2141589 - RNA, 19 nt, Homo sapiens
  misc_RNA (1)...(19): siRNA sense strand
ucacugaccacaagagaau

SEQ ID NO: 2141590 - RNA, 19 nt, Homo sapiens
  misc_RNA (1)...(19): siRNA sense strand
ucacugaccacaagagaau

SEQ ID NO: 2141591 - RNA, 19 nt, Homo sapiens
  misc_RNA (1)...(19): siRNA sense strand
ucacugaccacaagagaau

SEQ ID NO: 2141592 - RNA, 19 nt, Homo sapiens
  misc_RNA (1)...(19): siRNA sense strand
gcaaagaauguggcaaauc

SEQ ID NO: 2141593 - RNA, 19 nt, Homo sapiens
  misc_RNA (1)...(19): siRNA sense strand
guaauaccaagaacauaug

SEQ ID NO: 2141594 - RNA, 19 nt, Homo sapiens
  misc_RNA (1)...(19): siRNA sense strand
cgagaaaugggacuguuga

SEQ ID NO: 2141595 - RNA, 19 nt, Homo sapiens
  misc_RNA (1)...(19): siRNA sense strand
ucagcggaauuuauauaga

SEQ ID NO: 2141596 - RNA, 19 nt, Homo sapiens
  misc_RNA (1)...(19): siRNA sense strand
gggagguuauagugaaguu

SEQ ID NO: 2141597 - RNA, 19 nt, Homo sapiens
  misc_RNA (1)...(19): siRNA sense strand
gaaguccuacaaaugcaaa

SEQ ID NO: 2141598 - RNA, 19 nt, Homo sapiens
  misc_RNA (1)...(19): siRNA sense strand
gccuuuagcugguccucaa

SEQ ID NO: 2141599 - RNA, 19 nt, Homo sapiens
  misc_RNA (1)...(19): siRNA sense strand
gcacuuacuaaccacaaga

SEQ ID NO: 2141600 - RNA, 19 nt, Homo sapiens
  misc_RNA (1)...(19): siRNA sense strand
gaauucauacuagagagaa

SEQ ID NO: 2141601 - RNA, 19 nt, Homo sapiens
  misc_RNA (1)...(19): siRNA sense strand
gagcuguacuccagacaca

SEQ ID NO: 2141602 - RNA, 19 nt, Homo sapiens
  misc_RNA (1)...(19): siRNA sense strand
gacguccuguucaauguga

SEQ ID NO: 2141603 - RNA, 19 nt, Homo sapiens
  misc_RNA (1)...(19): siRNA sense strand
uggcucaaguuccacauug

SEQ ID NO: 2141604 - RNA, 19 nt, Homo sapiens
  misc_RNA (1)...(19): siRNA sense strand
gcaugcgggugcugaaggu

SEQ ID NO: 2141605 - RNA, 19 nt, Homo sapiens
  misc_RNA (1)...(19): siRNA sense strand
gugcugaaggugcagaauu

SEQ ID NO: 2141606 - RNA, 19 nt, Homo sapiens
  misc_RNA (1)...(19): siRNA sense strand
uaucccaacuggcucaagu

SEQ ID NO: 2141607 - RNA, 19 nt, Homo sapiens
  misc_RNA (1)...(19): siRNA sense strand
ugcugaaggugcagaauuc

SEQ ID NO: 2141608 - RNA, 19 nt, Homo sapiens
  misc_RNA (1)...(19): siRNA sense strand
ggacguccuguucaaugug

SEQ ID NO: 2141609 - RNA, 19 nt, Homo sapiens
  misc_RNA (1)...(19): siRNA sense strand
ucaaguuccacauugguau

SEQ ID NO: 2141610 - RNA, 19 nt, Homo sapiens
  misc_RNA (1)...(19): siRNA sense strand
gagcuguacuccagacaca

SEQ ID NO: 2141611 - RNA, 19 nt, Homo sapiens
  misc_RNA (1)...(19): siRNA sense strand
gacguccuguucaauguga

SEQ ID NO: 2141612 - RNA, 19 nt, Homo sapiens
  misc_RNA (1)...(19): siRNA sense strand
uggcucaaguuccacauug

SEQ ID NO: 2141613 - RNA, 19 nt, Homo sapiens
  misc_RNA (1)...(19): siRNA sense strand
gcaugcgggugcugaaggu

SEQ ID NO: 2141614 - RNA, 19 nt, Homo sapiens
  misc_RNA (1)...(19): siRNA sense strand
gugcugaaggugcagaauu

SEQ ID NO: 2141615 - RNA, 19 nt, Homo sapiens
  misc_RNA (1)...(19): siRNA sense strand
uaucccaacuggcucaagu

SEQ ID NO: 2141616 - RNA, 19 nt, Homo sapiens
  misc_RNA (1)...(19): siRNA sense strand
ugcugaaggugcagaauuc

SEQ ID NO: 2141617 - RNA, 19 nt, Homo sapiens
  misc_RNA (1)...(19): siRNA sense strand
ggacguccuguucaaugug

SEQ ID NO: 2141618 - RNA, 19 nt, Homo sapiens
  misc_RNA (1)...(19): siRNA sense strand
ucaaguuccacauugguau

SEQ ID NO: 2141619 - RNA, 19 nt, Homo sapiens
  misc_RNA (1)...(19): siRNA sense strand
gauaauaccagaccgauuu

SEQ ID NO: 2141620 - RNA, 19 nt, Homo sapiens
  misc_RNA (1)...(19): siRNA sense strand
gaugcuacaugguuauaua

SEQ ID NO: 2141621 - RNA, 19 nt, Homo sapiens
  misc_RNA (1)...(19): siRNA sense strand
caguauggcuuccuuaauu

SEQ ID NO: 2141622 - RNA, 19 nt, Homo sapiens
  misc_RNA (1)...(19): siRNA sense strand
ggagauacacccuauauuc

SEQ ID NO: 2141623 - RNA, 19 nt, Homo sapiens
  misc_RNA (1)...(19): siRNA sense strand
aaacggagauuuaaauugg

SEQ ID NO: 2141624 - RNA, 19 nt, Homo sapiens
  misc_RNA (1)...(19): siRNA sense strand
gcaaugguuuacagauauu

SEQ ID NO: 2141625 - RNA, 19 nt, Homo sapiens
  misc_RNA (1)...(19): siRNA sense strand
uaaagaaggcaaugcagua

SEQ ID NO: 2141626 - RNA, 19 nt, Homo sapiens
  misc_RNA (1)...(19): siRNA sense strand
gaccaaagagugcaucaaa

SEQ ID NO: 2141627 - RNA, 19 nt, Homo sapiens
  misc_RNA (1)...(19): siRNA sense strand
gcuacaucaugaagcauua

SEQ ID NO: 2141628 - RNA, 19 nt, Homo sapiens
  misc_RNA (1)...(19): siRNA sense strand
agaagcagcauauagaaua

SEQ ID NO: 2141629 - RNA, 19 nt, Homo sapiens
  misc_RNA (1)...(19): siRNA sense strand
ggcaaugguuuacagauau

SEQ ID NO: 2141630 - RNA, 19 nt, Homo sapiens
  misc_RNA (1)...(19): siRNA sense strand
gugcugaccuuuacacugu

SEQ ID NO: 2141631 - RNA, 19 nt, Homo sapiens
  misc_RNA (1)...(19): siRNA sense strand
cagauauuguugcaagaua

SEQ ID NO: 2141632 - RNA, 19 nt, Homo sapiens
  misc_RNA (1)...(19): siRNA sense strand
uggcaaugguuuacagaua

SEQ ID NO: 2141633 - RNA, 19 nt, Homo sapiens
  misc_RNA (1)...(19): siRNA sense strand
cgaaaucaauggagugaca

SEQ ID NO: 2141634 - RNA, 19 nt, Homo sapiens
  misc_RNA (1)...(19): siRNA sense strand
cuacaugguuauauacuug

SEQ ID NO: 2141635 - RNA, 19 nt, Homo sapiens
  misc_RNA (1)...(19): siRNA sense strand
aaacuucucucugguguug

SEQ ID NO: 2141636 - RNA, 19 nt, Homo sapiens
  misc_RNA (1)...(19): siRNA sense strand
uuacacuucuugacuguuu

SEQ ID NO: 2141637 - RNA, 19 nt, Homo sapiens
  misc_RNA (1)...(19): siRNA sense strand
ccaaagagugcaucaaaug

SEQ ID NO: 2141638 - RNA, 19 nt, Homo sapiens
  misc_RNA (1)...(19): siRNA sense strand
cagcauagauaaugaacuc

SEQ ID NO: 2141639 - RNA, 19 nt, Homo sapiens
  misc_RNA (1)...(19): siRNA sense strand
uauggaagcugcaauuucu

SEQ ID NO: 2141640 - RNA, 19 nt, Homo sapiens
  misc_RNA (1)...(19): siRNA sense strand
guacauuauuucagcauag

SEQ ID NO: 2141641 - RNA, 19 nt, Homo sapiens
  misc_RNA (1)...(19): siRNA sense strand
gacacaaggugauagaagu

SEQ ID NO: 2141642 - RNA, 19 nt, Homo sapiens
  misc_RNA (1)...(19): siRNA sense strand
guuggaugcuacaugguua

SEQ ID NO: 2141643 - RNA, 19 nt, Homo sapiens
  misc_RNA (1)...(19): siRNA sense strand
guugucaucugguggauug

SEQ ID NO: 2141644 - RNA, 19 nt, Homo sapiens
  misc_RNA (1)...(19): siRNA sense strand
gauacacccuauauuccuu

SEQ ID NO: 2141645 - RNA, 19 nt, Homo sapiens
  misc_RNA (1)...(19): siRNA sense strand
aaagagugcaucaaaugua

SEQ ID NO: 2141646 - RNA, 19 nt, Homo sapiens
  misc_RNA (1)...(19): siRNA sense strand
gucaaaagauuucuggaua

SEQ ID NO: 2141647 - RNA, 19 nt, Homo sapiens
  misc_RNA (1)...(19): siRNA sense strand
gcuacaugguuauauacuu

SEQ ID NO: 2141648 - RNA, 19 nt, Homo sapiens
  misc_RNA (1)...(19): siRNA sense strand
guugaugacauuuccauaa

SEQ ID NO: 2141649 - RNA, 19 nt, Homo sapiens
  misc_RNA (1)...(19): siRNA sense strand
aagcugcaauuucuacauu

SEQ ID NO: 2141650 - RNA, 19 nt, Homo sapiens
  misc_RNA (1)...(19): siRNA sense strand
uuucagagaugcugccuau

SEQ ID NO: 2141651 - RNA, 19 nt, Homo sapiens
  misc_RNA (1)...(19): siRNA sense strand
ggagugacacaaggugaua

SEQ ID NO: 2141652 - RNA, 19 nt, Homo sapiens
  misc_RNA (1)...(19): siRNA sense strand
gaaucaagaccagcaagaa

SEQ ID NO: 2141653 - RNA, 19 nt, Homo sapiens
  misc_RNA (1)...(19): siRNA sense strand
agcaagaacccaaaccuua

SEQ ID NO: 2141654 - RNA, 19 nt, Homo sapiens
  misc_RNA (1)...(19): siRNA sense strand
gauuguuugugacuacauu

SEQ ID NO: 2141655 - RNA, 19 nt, Homo sapiens
  misc_RNA (1)...(19): siRNA sense strand
gcaagaacccaaaccuuac

SEQ ID NO: 2141656 - RNA, 19 nt, Homo sapiens
  misc_RNA (1)...(19): siRNA sense strand
cagagaugcugccuaugga

SEQ ID NO: 2141657 - RNA, 19 nt, Homo sapiens
  misc_RNA (1)...(19): siRNA sense strand
cagagcagccuucuccaaa

SEQ ID NO: 2141658 - RNA, 19 nt, Homo sapiens
  misc_RNA (1)...(19): siRNA sense strand
aguauggcuuccuuaauuu

SEQ ID NO: 2141659 - RNA, 19 nt, Homo sapiens
  misc_RNA (1)...(19): siRNA sense strand
cauagauaaugaacucgaa

SEQ ID NO: 2141660 - RNA, 19 nt, Homo sapiens
  misc_RNA (1)...(19): siRNA sense strand
gauaaugaacucgaauaug

SEQ ID NO: 2141661 - RNA, 19 nt, Homo sapiens
  misc_RNA (1)...(19): siRNA sense strand
uaaauggggucgagaauca

SEQ ID NO: 2141662 - RNA, 19 nt, Homo sapiens
  misc_RNA (1)...(19): siRNA sense strand
gagcagccuucuccaaacu

SEQ ID NO: 2141663 - RNA, 19 nt, Homo sapiens
  misc_RNA (1)...(19): siRNA sense strand
caaagagugcaucaaaugu

SEQ ID NO: 2141664 - RNA, 19 nt, Homo sapiens
  misc_RNA (1)...(19): siRNA sense strand
caacucauuuaaccuugau

SEQ ID NO: 2141665 - RNA, 19 nt, Homo sapiens
  misc_RNA (1)...(19): siRNA sense strand
ucugguggauuguuuguga

SEQ ID NO: 2141666 - RNA, 19 nt, Homo sapiens
  misc_RNA (1)...(19): siRNA sense strand
ggagaauggacaacacaga

SEQ ID NO: 2141667 - RNA, 19 nt, Homo sapiens
  misc_RNA (1)...(19): siRNA sense strand
agaaggcaaugcaguaugg

SEQ ID NO: 2141668 - RNA, 19 nt, Homo sapiens
  misc_RNA (1)...(19): siRNA sense strand
gcagaaaacggagauuuaa

SEQ ID NO: 2141669 - RNA, 19 nt, Homo sapiens
  misc_RNA (1)...(19): siRNA sense strand
ccagaagcagcauauagaa

SEQ ID NO: 2141670 - RNA, 19 nt, Homo sapiens
  misc_RNA (1)...(19): siRNA sense strand
gcagccuucuccaaacuuc

SEQ ID NO: 2141671 - RNA, 19 nt, Homo sapiens
  misc_RNA (1)...(19): siRNA sense strand
gcaguauggcuuccuuaau

SEQ ID NO: 2141672 - RNA, 19 nt, Homo sapiens
  misc_RNA (1)...(19): siRNA sense strand
uauauuccuuucagagaug

SEQ ID NO: 2141673 - RNA, 19 nt, Homo sapiens
  misc_RNA (1)...(19): siRNA sense strand
ucaccgaucgccuucguuu

SEQ ID NO: 2141674 - RNA, 19 nt, Homo sapiens
  misc_RNA (1)...(19): siRNA sense strand
gcaggagaauggacaacac

SEQ ID NO: 2141675 - RNA, 19 nt, Homo sapiens
  misc_RNA (1)...(19): siRNA sense strand
caaaugcugccuuccuugu

SEQ ID NO: 2141676 - RNA, 19 nt, Homo sapiens
  misc_RNA (1)...(19): siRNA sense strand
gucaucugguggauuguuu

SEQ ID NO: 2141677 - RNA, 19 nt, Homo sapiens
  misc_RNA (1)...(19): siRNA sense strand
uaugaugccaaacgcuuua

SEQ ID NO: 2141678 - RNA, 19 nt, Homo sapiens
  misc_RNA (1)...(19): siRNA sense strand
ucagagaugcugccuaugg

SEQ ID NO: 2141679 - RNA, 19 nt, Homo sapiens
  misc_RNA (1)...(19): siRNA sense strand
ggauaauaccagaccgauu

SEQ ID NO: 2141680 - RNA, 19 nt, Homo sapiens
  misc_RNA (1)...(19): siRNA sense strand
aaugcugccuuccuuguug

SEQ ID NO: 2141681 - RNA, 19 nt, Homo sapiens
  misc_RNA (1)...(19): siRNA sense strand
ucgcacaggcacucugaua

SEQ ID NO: 2141682 - RNA, 19 nt, Homo sapiens
  misc_RNA (1)...(19): siRNA sense strand
auaccagaccgauuuauug

SEQ ID NO: 2141683 - RNA, 19 nt, Homo sapiens
  misc_RNA (1)...(19): siRNA sense strand
cuauauuccuuucagagau

SEQ ID NO: 2141684 - RNA, 19 nt, Homo sapiens
  misc_RNA (1)...(19): siRNA sense strand
gacagcagccgagaccauu

SEQ ID NO: 2141685 - RNA, 19 nt, Homo sapiens
  misc_RNA (1)...(19): siRNA sense strand
gaacucgaauaugagaacu

SEQ ID NO: 2141686 - RNA, 19 nt, Homo sapiens
  misc_RNA (1)...(19): siRNA sense strand
gcugcaauuucuacauuac

SEQ ID NO: 2141687 - RNA, 19 nt, Homo sapiens
  misc_RNA (1)...(19): siRNA sense strand
guuugugacuacauucuuc

SEQ ID NO: 2141688 - RNA, 19 nt, Homo sapiens
  misc_RNA (1)...(19): siRNA sense strand
gacgaaaucaauggaguga

SEQ ID NO: 2141689 - RNA, 19 nt, Homo sapiens
  misc_RNA (1)...(19): siRNA sense strand
ucccgagacuuauauucaa

SEQ ID NO: 2141690 - RNA, 19 nt, Homo sapiens
  misc_RNA (1)...(19): siRNA sense strand
cuguggaccucauucaaga

SEQ ID NO: 2141691 - RNA, 19 nt, Homo sapiens
  misc_RNA (1)...(19): siRNA sense strand
cccagaagcagcauauaga

SEQ ID NO: 2141692 - RNA, 19 nt, Homo sapiens
  misc_RNA (1)...(19): siRNA sense strand
ucaaucuggcaaugguuua

SEQ ID NO: 2141693 - RNA, 19 nt, Homo sapiens
  misc_RNA (1)...(19): siRNA sense strand
gcacaggcacucugauagc

SEQ ID NO: 2141694 - RNA, 19 nt, Homo sapiens
  misc_RNA (1)...(19): siRNA sense strand
caaaagauuucuggauauc

SEQ ID NO: 2141695 - RNA, 19 nt, Homo sapiens
  misc_RNA (1)...(19): siRNA sense strand
cauuacacuucuugacugu

SEQ ID NO: 2141696 - RNA, 19 nt, Homo sapiens
  misc_RNA (1)...(19): siRNA sense strand
gagauacacccuauauucc

SEQ ID NO: 2141697 - RNA, 19 nt, Homo sapiens
  misc_RNA (1)...(19): siRNA sense strand
aagagugcaucaaauguac

SEQ ID NO: 2141698 - RNA, 19 nt, Homo sapiens
  misc_RNA (1)...(19): siRNA sense strand
ucaugaagcauuacaggau

SEQ ID NO: 2141699 - RNA, 19 nt, Homo sapiens
  misc_RNA (1)...(19): siRNA sense strand
gaagcugcaauuucuacau

SEQ ID NO: 2141700 - RNA, 19 nt, Homo sapiens
  misc_RNA (1)...(19): siRNA sense strand
gaugacgacgaaaucaaug

SEQ ID NO: 2141701 - RNA, 19 nt, Homo sapiens
  misc_RNA (1)...(19): siRNA sense strand
cagcaagaacccaaaccuu

SEQ ID NO: 2141702 - RNA, 19 nt, Homo sapiens
  misc_RNA (1)...(19): siRNA sense strand
ugagggugccauugcagua

SEQ ID NO: 2141703 - RNA, 19 nt, Homo sapiens
  misc_RNA (1)...(19): siRNA sense strand
ucaccaugaucuuuucuuu

SEQ ID NO: 2141704 - RNA, 19 nt, Homo sapiens
  misc_RNA (1)...(19): siRNA sense strand
aaagaaggcaaugcaguau

SEQ ID NO: 2141705 - RNA, 19 nt, Homo sapiens
  misc_RNA (1)...(19): siRNA sense strand
cagaagcagcauauagaau

SEQ ID NO: 2141706 - RNA, 19 nt, Homo sapiens
  misc_RNA (1)...(19): siRNA sense strand
acucgaauaugagaacuuc

SEQ ID NO: 2141707 - RNA, 19 nt, Homo sapiens
  misc_RNA (1)...(19): siRNA sense strand
auaauaccagaccgauuua

SEQ ID NO: 2141708 - RNA, 19 nt, Homo sapiens
  misc_RNA (1)...(19): siRNA sense strand
cuacugaugccauugucaa

SEQ ID NO: 2141709 - RNA, 19 nt, Homo sapiens
  misc_RNA (1)...(19): siRNA sense strand
gguggauuguuugugacua

SEQ ID NO: 2141710 - RNA, 19 nt, Homo sapiens
  misc_RNA (1)...(19): siRNA sense strand
accaaagagugcaucaaau

SEQ ID NO: 2141711 - RNA, 19 nt, Homo sapiens
  misc_RNA (1)...(19): siRNA sense strand
uggcugugcugaccuuuac

SEQ ID NO: 2141712 - RNA, 19 nt, Homo sapiens
  misc_RNA (1)...(19): siRNA sense strand
guuuacagauauuguugca

SEQ ID NO: 2141713 - RNA, 19 nt, Homo sapiens
  misc_RNA (1)...(19): siRNA sense strand
ggucgcacaggcacucuga

SEQ ID NO: 2141714 - RNA, 19 nt, Homo sapiens
  misc_RNA (1)...(19): siRNA sense strand
ccuauauuccuuucagaga

SEQ ID NO: 2141715 - RNA, 19 nt, Homo sapiens
  misc_RNA (1)...(19): siRNA sense strand
caucaccgaucgccuucgu

SEQ ID NO: 2141716 - RNA, 19 nt, Homo sapiens
  misc_RNA (1)...(19): siRNA sense strand
guggauuguuugugacuac

SEQ ID NO: 2141717 - RNA, 19 nt, Homo sapiens
  misc_RNA (1)...(19): siRNA sense strand
ugacacaaggugauagaag

SEQ ID NO: 2141718 - RNA, 19 nt, Homo sapiens
  misc_RNA (1)...(19): siRNA sense strand
uuguaaagcuggccuuggu

SEQ ID NO: 2141719 - RNA, 19 nt, Homo sapiens
  misc_RNA (1)...(19): siRNA sense strand
gauaauaccagaccgauuu

SEQ ID NO: 2141720 - RNA, 19 nt, Homo sapiens
  misc_RNA (1)...(19): siRNA sense strand
gaugcuacaugguuauaua

SEQ ID NO: 2141721 - RNA, 19 nt, Homo sapiens
  misc_RNA (1)...(19): siRNA sense strand
caguauggcuuccuuaauu

SEQ ID NO: 2141722 - RNA, 19 nt, Homo sapiens
  misc_RNA (1)...(19): siRNA sense strand
ggagauacacccuauauuc

SEQ ID NO: 2141723 - RNA, 19 nt, Homo sapiens
  misc_RNA (1)...(19): siRNA sense strand
aaacggagauuuaaauugg

SEQ ID NO: 2141724 - RNA, 19 nt, Homo sapiens
  misc_RNA (1)...(19): siRNA sense strand
gcaaugguuuacagauauu

SEQ ID NO: 2141725 - RNA, 19 nt, Homo sapiens
  misc_RNA (1)...(19): siRNA sense strand
uaaagaaggcaaugcagua

SEQ ID NO: 2141726 - RNA, 19 nt, Homo sapiens
  misc_RNA (1)...(19): siRNA sense strand
gaccaaagagugcaucaaa

SEQ ID NO: 2141727 - RNA, 19 nt, Homo sapiens
  misc_RNA (1)...(19): siRNA sense strand
gcuacaucaugaagcauua

SEQ ID NO: 2141728 - RNA, 19 nt, Homo sapiens
  misc_RNA (1)...(19): siRNA sense strand
agaagcagcauauagaaua

SEQ ID NO: 2141729 - RNA, 19 nt, Homo sapiens
  misc_RNA (1)...(19): siRNA sense strand
ggcaaugguuuacagauau

SEQ ID NO: 2141730 - RNA, 19 nt, Homo sapiens
  misc_RNA (1)...(19): siRNA sense strand
gugcugaccuuuacacugu

SEQ ID NO: 2141731 - RNA, 19 nt, Homo sapiens
  misc_RNA (1)...(19): siRNA sense strand
cagauauuguugcaagaua

SEQ ID NO: 2141732 - RNA, 19 nt, Homo sapiens
  misc_RNA (1)...(19): siRNA sense strand
uggcaaugguuuacagaua

SEQ ID NO: 2141733 - RNA, 19 nt, Homo sapiens
  misc_RNA (1)...(19): siRNA sense strand
cgaaaucaauggagugaca

SEQ ID NO: 2141734 - RNA, 19 nt, Homo sapiens
  misc_RNA (1)...(19): siRNA sense strand
cuacaugguuauauacuug

SEQ ID NO: 2141735 - RNA, 19 nt, Homo sapiens
  misc_RNA (1)...(19): siRNA sense strand
aaacuucucucugguguug

SEQ ID NO: 2141736 - RNA, 19 nt, Homo sapiens
  misc_RNA (1)...(19): siRNA sense strand
uuacacuucuugacuguuu

SEQ ID NO: 2141737 - RNA, 19 nt, Homo sapiens
  misc_RNA (1)...(19): siRNA sense strand
ccaaagagugcaucaaaug

SEQ ID NO: 2141738 - RNA, 19 nt, Homo sapiens
  misc_RNA (1)...(19): siRNA sense strand
cagcauagauaaugaacuc

SEQ ID NO: 2141739 - RNA, 19 nt, Homo sapiens
  misc_RNA (1)...(19): siRNA sense strand
uauggaagcugcaauuucu

SEQ ID NO: 2141740 - RNA, 19 nt, Homo sapiens
  misc_RNA (1)...(19): siRNA sense strand
guacauuauuucagcauag

SEQ ID NO: 2141741 - RNA, 19 nt, Homo sapiens
  misc_RNA (1)...(19): siRNA sense strand
gacacaaggugauagaagu

SEQ ID NO: 2141742 - RNA, 19 nt, Homo sapiens
  misc_RNA (1)...(19): siRNA sense strand
guuggaugcuacaugguua

SEQ ID NO: 2141743 - RNA, 19 nt, Homo sapiens
  misc_RNA (1)...(19): siRNA sense strand
guugucaucugguggauug

SEQ ID NO: 2141744 - RNA, 19 nt, Homo sapiens
  misc_RNA (1)...(19): siRNA sense strand
gauacacccuauauuccuu

SEQ ID NO: 2141745 - RNA, 19 nt, Homo sapiens
  misc_RNA (1)...(19): siRNA sense strand
aaagagugcaucaaaugua

SEQ ID NO: 2141746 - RNA, 19 nt, Homo sapiens
  misc_RNA (1)...(19): siRNA sense strand
gucaaaagauuucuggaua

SEQ ID NO: 2141747 - RNA, 19 nt, Homo sapiens
  misc_RNA (1)...(19): siRNA sense strand
gcuacaugguuauauacuu

SEQ ID NO: 2141748 - RNA, 19 nt, Homo sapiens
  misc_RNA (1)...(19): siRNA sense strand
guugaugacauuuccauaa

SEQ ID NO: 2141749 - RNA, 19 nt, Homo sapiens
  misc_RNA (1)...(19): siRNA sense strand
aagcugcaauuucuacauu

SEQ ID NO: 2141750 - RNA, 19 nt, Homo sapiens
  misc_RNA (1)...(19): siRNA sense strand
uuucagagaugcugccuau

SEQ ID NO: 2141751 - RNA, 19 nt, Homo sapiens
  misc_RNA (1)...(19): siRNA sense strand
ggagugacacaaggugaua

SEQ ID NO: 2141752 - RNA, 19 nt, Homo sapiens
  misc_RNA (1)...(19): siRNA sense strand
gaaucaagaccagcaagaa

SEQ ID NO: 2141753 - RNA, 19 nt, Homo sapiens
  misc_RNA (1)...(19): siRNA sense strand
agcaagaacccaaaccuua

SEQ ID NO: 2141754 - RNA, 19 nt, Homo sapiens
  misc_RNA (1)...(19): siRNA sense strand
gauuguuugugacuacauu

SEQ ID NO: 2141755 - RNA, 19 nt, Homo sapiens
  misc_RNA (1)...(19): siRNA sense strand
gcaagaacccaaaccuuac

SEQ ID NO: 2141756 - RNA, 19 nt, Homo sapiens
  misc_RNA (1)...(19): siRNA sense strand
cagagaugcugccuaugga

SEQ ID NO: 2141757 - RNA, 19 nt, Homo sapiens
  misc_RNA (1)...(19): siRNA sense strand
cagagcagccuucuccaaa

SEQ ID NO: 2141758 - RNA, 19 nt, Homo sapiens
  misc_RNA (1)...(19): siRNA sense strand
aguauggcuuccuuaauuu

SEQ ID NO: 2141759 - RNA, 19 nt, Homo sapiens
  misc_RNA (1)...(19): siRNA sense strand
cauagauaaugaacucgaa

SEQ ID NO: 2141760 - RNA, 19 nt, Homo sapiens
  misc_RNA (1)...(19): siRNA sense strand
uaaauggggucgagaauca

SEQ ID NO: 2141761 - RNA, 19 nt, Homo sapiens
  misc_RNA (1)...(19): siRNA sense strand
caaagagugcaucaaaugu

SEQ ID NO: 2141762 - RNA, 19 nt, Homo sapiens
  misc_RNA (1)...(19): siRNA sense strand
gagcagccuucuccaaacu

SEQ ID NO: 2141763 - RNA, 19 nt, Homo sapiens
  misc_RNA (1)...(19): siRNA sense strand
gauaaugaacucgaauaug

SEQ ID NO: 2141764 - RNA, 19 nt, Homo sapiens
  misc_RNA (1)...(19): siRNA sense strand
caacucauuuaaccuugau

SEQ ID NO: 2141765 - RNA, 19 nt, Homo sapiens
  misc_RNA (1)...(19): siRNA sense strand
ucugguggauuguuuguga

SEQ ID NO: 2141766 - RNA, 19 nt, Homo sapiens
  misc_RNA (1)...(19): siRNA sense strand
ggagaauggacaacacaga

SEQ ID NO: 2141767 - RNA, 19 nt, Homo sapiens
  misc_RNA (1)...(19): siRNA sense strand
agaaggcaaugcaguaugg

SEQ ID NO: 2141768 - RNA, 19 nt, Homo sapiens
  misc_RNA (1)...(19): siRNA sense strand
gcagaaaacggagauuuaa

SEQ ID NO: 2141769 - RNA, 19 nt, Homo sapiens
  misc_RNA (1)...(19): siRNA sense strand
ccagaagcagcauauagaa

SEQ ID NO: 2141770 - RNA, 19 nt, Homo sapiens
  misc_RNA (1)...(19): siRNA sense strand
gcagccuucuccaaacuuc

SEQ ID NO: 2141771 - RNA, 19 nt, Homo sapiens
  misc_RNA (1)...(19): siRNA sense strand
gcaguauggcuuccuuaau

SEQ ID NO: 2141772 - RNA, 19 nt, Homo sapiens
  misc_RNA (1)...(19): siRNA sense strand
uauauuccuuucagagaug

SEQ ID NO: 2141773 - RNA, 19 nt, Homo sapiens
  misc_RNA (1)...(19): siRNA sense strand
ucaccgaucgccuucguuu

SEQ ID NO: 2141774 - RNA, 19 nt, Homo sapiens
  misc_RNA (1)...(19): siRNA sense strand
gcaggagaauggacaacac

SEQ ID NO: 2141775 - RNA, 19 nt, Homo sapiens
  misc_RNA (1)...(19): siRNA sense strand
caaaugcugccuuccuugu

SEQ ID NO: 2141776 - RNA, 19 nt, Homo sapiens
  misc_RNA (1)...(19): siRNA sense strand
gucaucugguggauuguuu

SEQ ID NO: 2141777 - RNA, 19 nt, Homo sapiens
  misc_RNA (1)...(19): siRNA sense strand
uaugaugccaaacgcuuua

SEQ ID NO: 2141778 - RNA, 19 nt, Homo sapiens
  misc_RNA (1)...(19): siRNA sense strand
ucagagaugcugccuaugg

SEQ ID NO: 2141779 - RNA, 19 nt, Homo sapiens
  misc_RNA (1)...(19): siRNA sense strand
ggauaauaccagaccgauu

SEQ ID NO: 2141780 - RNA, 19 nt, Homo sapiens
  misc_RNA (1)...(19): siRNA sense strand
aaugcugccuuccuuguug

SEQ ID NO: 2141781 - RNA, 19 nt, Homo sapiens
  misc_RNA (1)...(19): siRNA sense strand
ucgcacaggcacucugaua

SEQ ID NO: 2141782 - RNA, 19 nt, Homo sapiens
  misc_RNA (1)...(19): siRNA sense strand
auaccagaccgauuuauug

SEQ ID NO: 2141783 - RNA, 19 nt, Homo sapiens
  misc_RNA (1)...(19): siRNA sense strand
cuauauuccuuucagagau

SEQ ID NO: 2141784 - RNA, 19 nt, Homo sapiens
  misc_RNA (1)...(19): siRNA sense strand
gacagcagccgagaccauu

SEQ ID NO: 2141785 - RNA, 19 nt, Homo sapiens
  misc_RNA (1)...(19): siRNA sense strand
gaacucgaauaugagaacu

SEQ ID NO: 2141786 - RNA, 19 nt, Homo sapiens
  misc_RNA (1)...(19): siRNA sense strand
gcugcaauuucuacauuac

SEQ ID NO: 2141787 - RNA, 19 nt, Homo sapiens
  misc_RNA (1)...(19): siRNA sense strand
guuugugacuacauucuuc

SEQ ID NO: 2141788 - RNA, 19 nt, Homo sapiens
  misc_RNA (1)...(19): siRNA sense strand
gacgaaaucaauggaguga

SEQ ID NO: 2141789 - RNA, 19 nt, Homo sapiens
  misc_RNA (1)...(19): siRNA sense strand
ucccgagacuuauauucaa

SEQ ID NO: 2141790 - RNA, 19 nt, Homo sapiens
  misc_RNA (1)...(19): siRNA sense strand
cuguggaccucauucaaga

SEQ ID NO: 2141791 - RNA, 19 nt, Homo sapiens
  misc_RNA (1)...(19): siRNA sense strand
cccagaagcagcauauaga

SEQ ID NO: 2141792 - RNA, 19 nt, Homo sapiens
  misc_RNA (1)...(19): siRNA sense strand
gcacaggcacucugauagc

SEQ ID NO: 2141793 - RNA, 19 nt, Homo sapiens
  misc_RNA (1)...(19): siRNA sense strand
caaaagauuucuggauauc

SEQ ID NO: 2141794 - RNA, 19 nt, Homo sapiens
  misc_RNA (1)...(19): siRNA sense strand
ucaaucuggcaaugguuua

SEQ ID NO: 2141795 - RNA, 19 nt, Homo sapiens
  misc_RNA (1)...(19): siRNA sense strand
cauuacacuucuugacugu

SEQ ID NO: 2141796 - RNA, 19 nt, Homo sapiens
  misc_RNA (1)...(19): siRNA sense strand
gagauacacccuauauucc

SEQ ID NO: 2141797 - RNA, 19 nt, Homo sapiens
  misc_RNA (1)...(19): siRNA sense strand
aagagugcaucaaauguac

SEQ ID NO: 2141798 - RNA, 19 nt, Homo sapiens
  misc_RNA (1)...(19): siRNA sense strand
ucaugaagcauuacaggau

SEQ ID NO: 2141799 - RNA, 19 nt, Homo sapiens
  misc_RNA (1)...(19): siRNA sense strand
gaagcugcaauuucuacau

SEQ ID NO: 2141800 - RNA, 19 nt, Homo sapiens
  misc_RNA (1)...(19): siRNA sense strand
gaugacgacgaaaucaaug

SEQ ID NO: 2141801 - RNA, 19 nt, Homo sapiens
  misc_RNA (1)...(19): siRNA sense strand
cagcaagaacccaaaccuu

SEQ ID NO: 2141802 - RNA, 19 nt, Homo sapiens
  misc_RNA (1)...(19): siRNA sense strand
ugagggugccauugcagua

SEQ ID NO: 2141803 - RNA, 19 nt, Homo sapiens
  misc_RNA (1)...(19): siRNA sense strand
ucaccaugaucuuuucuuu

SEQ ID NO: 2141804 - RNA, 19 nt, Homo sapiens
  misc_RNA (1)...(19): siRNA sense strand
aaagaaggcaaugcaguau

SEQ ID NO: 2141805 - RNA, 19 nt, Homo sapiens
  misc_RNA (1)...(19): siRNA sense strand
cagaagcagcauauagaau

SEQ ID NO: 2141806 - RNA, 19 nt, Homo sapiens
  misc_RNA (1)...(19): siRNA sense strand
auaauaccagaccgauuua

SEQ ID NO: 2141807 - RNA, 19 nt, Homo sapiens
  misc_RNA (1)...(19): siRNA sense strand
acucgaauaugagaacuuc

SEQ ID NO: 2141808 - RNA, 19 nt, Homo sapiens
  misc_RNA (1)...(19): siRNA sense strand
cuacugaugccauugucaa

SEQ ID NO: 2141809 - RNA, 19 nt, Homo sapiens
  misc_RNA (1)...(19): siRNA sense strand
gguggauuguuugugacua

SEQ ID NO: 2141810 - RNA, 19 nt, Homo sapiens
  misc_RNA (1)...(19): siRNA sense strand
ccuauauuccuuucagaga

SEQ ID NO: 2141811 - RNA, 19 nt, Homo sapiens
  misc_RNA (1)...(19): siRNA sense strand
uggcugugcugaccuuuac

SEQ ID NO: 2141812 - RNA, 19 nt, Homo sapiens
  misc_RNA (1)...(19): siRNA sense strand
guuuacagauauuguugca

SEQ ID NO: 2141813 - RNA, 19 nt, Homo sapiens
  misc_RNA (1)...(19): siRNA sense strand
ggucgcacaggcacucuga

SEQ ID NO: 2141814 - RNA, 19 nt, Homo sapiens
  misc_RNA (1)...(19): siRNA sense strand
accaaagagugcaucaaau

SEQ ID NO: 2141815 - RNA, 19 nt, Homo sapiens
  misc_RNA (1)...(19): siRNA sense strand
uuguaaagcuggccuuggu

SEQ ID NO: 2141816 - RNA, 19 nt, Homo sapiens
  misc_RNA (1)...(19): siRNA sense strand
guggauuguuugugacuac

SEQ ID NO: 2141817 - RNA, 19 nt, Homo sapiens
  misc_RNA (1)...(19): siRNA sense strand
ugacacaaggugauagaag

SEQ ID NO: 2141818 - RNA, 19 nt, Homo sapiens
  misc_RNA (1)...(19): siRNA sense strand
caucaccgaucgccuucgu

SEQ ID NO: 2141819 - RNA, 19 nt, Homo sapiens
  misc_RNA (1)...(19): siRNA sense strand
ggaacgagcucaaguccaa

SEQ ID NO: 2141820 - RNA, 19 nt, Homo sapiens
  misc_RNA (1)...(19): siRNA sense strand
ggaaagcccugaucgaaca

SEQ ID NO: 2141821 - RNA, 19 nt, Homo sapiens
  misc_RNA (1)...(19): siRNA sense strand
aggaggagcuggcuuacua

SEQ ID NO: 2141822 - RNA, 19 nt, Homo sapiens
  misc_RNA (1)...(19): siRNA sense strand
ugaaggaggugguggacaa

SEQ ID NO: 2141823 - RNA, 19 nt, Homo sapiens
  misc_RNA (1)...(19): siRNA sense strand
agacacggcugaugaagau

SEQ ID NO: 2141824 - RNA, 19 nt, Homo sapiens
  misc_RNA (1)...(19): siRNA sense strand
gaagaucaaccaugaccuu

SEQ ID NO: 2141825 - RNA, 19 nt, Homo sapiens
  misc_RNA (1)...(19): siRNA sense strand
gagcagagcuggggaaguu

SEQ ID NO: 2141826 - RNA, 19 nt, Homo sapiens
  misc_RNA (1)...(19): siRNA sense strand
cagagaagguggccaugga

SEQ ID NO: 2141827 - RNA, 19 nt, Homo sapiens
  misc_RNA (1)...(19): siRNA sense strand
cuauaagagugaagaaaug

SEQ ID NO: 2141828 - RNA, 19 nt, Homo sapiens
  misc_RNA (1)...(19): siRNA sense strand
gaagaaauggaagaggaaa

SEQ ID NO: 2141829 - RNA, 19 nt, Homo sapiens
  misc_RNA (1)...(19): siRNA sense strand
ugaggacguugaggcuuua

SEQ ID NO: 2141830 - RNA, 19 nt, Homo sapiens
  misc_RNA (1)...(19): siRNA sense strand
gaggagcuggcuuacuaua

SEQ ID NO: 2141831 - RNA, 19 nt, Homo sapiens
  misc_RNA (1)...(19): siRNA sense strand
uaagagugaagaaauggaa

SEQ ID NO: 2141832 - RNA, 19 nt, Homo sapiens
  misc_RNA (1)...(19): siRNA sense strand
caaacaacgcgacgagauc

SEQ ID NO: 2141833 - RNA, 19 nt, Homo sapiens
  misc_RNA (1)...(19): siRNA sense strand
gaaggaggugguggacaaa

SEQ ID NO: 2141834 - RNA, 19 nt, Homo sapiens
  misc_RNA (1)...(19): siRNA sense strand
ggaggugguggacaaacaa

SEQ ID NO: 2141835 - RNA, 19 nt, Homo sapiens
  misc_RNA (1)...(19): siRNA sense strand
gagcgacaggugaugaaga

SEQ ID NO: 2141836 - RNA, 19 nt, Homo sapiens
  misc_RNA (1)...(19): siRNA sense strand
ggaagaggaaaaccgaaua

SEQ ID NO: 2141837 - RNA, 19 nt, Homo sapiens
  misc_RNA (1)...(19): siRNA sense strand
gagaggaacgagcucaagu

SEQ ID NO: 2141838 - RNA, 19 nt, Homo sapiens
  misc_RNA (1)...(19): siRNA sense strand
augaggacguugaggcuuu

SEQ ID NO: 2141839 - RNA, 19 nt, Homo sapiens
  misc_RNA (1)...(19): siRNA sense strand
agcgacaggugaugaagaa

SEQ ID NO: 2141840 - RNA, 19 nt, Homo sapiens
  misc_RNA (1)...(19): siRNA sense strand
ugaagaaauggaagaggaa

SEQ ID NO: 2141841 - RNA, 19 nt, Homo sapiens
  misc_RNA (1)...(19): siRNA sense strand
gacaggugaugaagaagcu

SEQ ID NO: 2141842 - RNA, 19 nt, Homo sapiens
  misc_RNA (1)...(19): siRNA sense strand
ggaggagcuggcuuacuau

SEQ ID NO: 2141843 - RNA, 19 nt, Homo sapiens
  misc_RNA (1)...(19): siRNA sense strand
gcucaaguccaagguguuc

SEQ ID NO: 2141844 - RNA, 19 nt, Homo sapiens
  misc_RNA (1)...(19): siRNA sense strand
ugaugaagaagcugaagga

SEQ ID NO: 2141845 - RNA, 19 nt, Homo sapiens
  misc_RNA (1)...(19): siRNA sense strand
acaaacaacgcgacgagau

SEQ ID NO: 2141846 - RNA, 19 nt, Homo sapiens
  misc_RNA (1)...(19): siRNA sense strand
cagacacggcugaugaaga

SEQ ID NO: 2141847 - RNA, 19 nt, Homo sapiens
  misc_RNA (1)...(19): siRNA sense strand
ugcaggaggagcuggcuua

SEQ ID NO: 2141848 - RNA, 19 nt, Homo sapiens
  misc_RNA (1)...(19): siRNA sense strand
gaccaaggagcaggagaug

SEQ ID NO: 2141849 - RNA, 19 nt, Homo sapiens
  misc_RNA (1)...(19): siRNA sense strand
ggacguugaggcuuuacag

SEQ ID NO: 2141850 - RNA, 19 nt, Homo sapiens
  misc_RNA (1)...(19): siRNA sense strand
gaagguggccauggaucuc

SEQ ID NO: 2141851 - RNA, 19 nt, Homo sapiens
  misc_RNA (1)...(19): siRNA sense strand
gggagcgacaggugaugaa

SEQ ID NO: 2141852 - RNA, 19 nt, Homo sapiens
  misc_RNA (1)...(19): siRNA sense strand
ggaacgagcucaaguccaa

SEQ ID NO: 2141853 - RNA, 19 nt, Homo sapiens
  misc_RNA (1)...(19): siRNA sense strand
ggaaagcccugaucgaaca

SEQ ID NO: 2141854 - RNA, 19 nt, Homo sapiens
  misc_RNA (1)...(19): siRNA sense strand
aggaggagcuggcuuacua

SEQ ID NO: 2141855 - RNA, 19 nt, Homo sapiens
  misc_RNA (1)...(19): siRNA sense strand
ugaaggaggugguggacaa

SEQ ID NO: 2141856 - RNA, 19 nt, Homo sapiens
  misc_RNA (1)...(19): siRNA sense strand
agacacggcugaugaagau

SEQ ID NO: 2141857 - RNA, 19 nt, Homo sapiens
  misc_RNA (1)...(19): siRNA sense strand
gaagaucaaccaugaccuu

SEQ ID NO: 2141858 - RNA, 19 nt, Homo sapiens
  misc_RNA (1)...(19): siRNA sense strand
gagcagagcuggggaaguu

SEQ ID NO: 2141859 - RNA, 19 nt, Homo sapiens
  misc_RNA (1)...(19): siRNA sense strand
cagagaagguggccaugga

SEQ ID NO: 2141860 - RNA, 19 nt, Homo sapiens
  misc_RNA (1)...(19): siRNA sense strand
cuauaagagugaagaaaug

SEQ ID NO: 2141861 - RNA, 19 nt, Homo sapiens
  misc_RNA (1)...(19): siRNA sense strand
gaagaaauggaagaggaaa

SEQ ID NO: 2141862 - RNA, 19 nt, Homo sapiens
  misc_RNA (1)...(19): siRNA sense strand
ugaggacguugaggcuuua

SEQ ID NO: 2141863 - RNA, 19 nt, Homo sapiens
  misc_RNA (1)...(19): siRNA sense strand
gaggagcuggcuuacuaua

SEQ ID NO: 2141864 - RNA, 19 nt, Homo sapiens
  misc_RNA (1)...(19): siRNA sense strand
uaagagugaagaaauggaa

SEQ ID NO: 2141865 - RNA, 19 nt, Homo sapiens
  misc_RNA (1)...(19): siRNA sense strand
caaacaacgcgacgagauc

SEQ ID NO: 2141866 - RNA, 19 nt, Homo sapiens
  misc_RNA (1)...(19): siRNA sense strand
gaaggaggugguggacaaa

SEQ ID NO: 2141867 - RNA, 19 nt, Homo sapiens
  misc_RNA (1)...(19): siRNA sense strand
ggaggugguggacaaacaa

SEQ ID NO: 2141868 - RNA, 19 nt, Homo sapiens
  misc_RNA (1)...(19): siRNA sense strand
gagcgacaggugaugaaga

SEQ ID NO: 2141869 - RNA, 19 nt, Homo sapiens
  misc_RNA (1)...(19): siRNA sense strand
ggaagaggaaaaccgaaua

SEQ ID NO: 2141870 - RNA, 19 nt, Homo sapiens
  misc_RNA (1)...(19): siRNA sense strand
gagaggaacgagcucaagu

SEQ ID NO: 2141871 - RNA, 19 nt, Homo sapiens
  misc_RNA (1)...(19): siRNA sense strand
augaggacguugaggcuuu

SEQ ID NO: 2141872 - RNA, 19 nt, Homo sapiens
  misc_RNA (1)...(19): siRNA sense strand
agcgacaggugaugaagaa

SEQ ID NO: 2141873 - RNA, 19 nt, Homo sapiens
  misc_RNA (1)...(19): siRNA sense strand
ugaagaaauggaagaggaa

SEQ ID NO: 2141874 - RNA, 19 nt, Homo sapiens
  misc_RNA (1)...(19): siRNA sense strand
gacaggugaugaagaagcu

SEQ ID NO: 2141875 - RNA, 19 nt, Homo sapiens
  misc_RNA (1)...(19): siRNA sense strand
ggaggagcuggcuuacuau

SEQ ID NO: 2141876 - RNA, 19 nt, Homo sapiens
  misc_RNA (1)...(19): siRNA sense strand
gcucaaguccaagguguuc

SEQ ID NO: 2141877 - RNA, 19 nt, Homo sapiens
  misc_RNA (1)...(19): siRNA sense strand
ugaugaagaagcugaagga

SEQ ID NO: 2141878 - RNA, 19 nt, Homo sapiens
  misc_RNA (1)...(19): siRNA sense strand
acaaacaacgcgacgagau

SEQ ID NO: 2141879 - RNA, 19 nt, Homo sapiens
  misc_RNA (1)...(19): siRNA sense strand
cagacacggcugaugaaga

SEQ ID NO: 2141880 - RNA, 19 nt, Homo sapiens
  misc_RNA (1)...(19): siRNA sense strand
ugcaggaggagcuggcuua

SEQ ID NO: 2141881 - RNA, 19 nt, Homo sapiens
  misc_RNA (1)...(19): siRNA sense strand
gaccaaggagcaggagaug

SEQ ID NO: 2141882 - RNA, 19 nt, Homo sapiens
  misc_RNA (1)...(19): siRNA sense strand
ggacguugaggcuuuacag

SEQ ID NO: 2141883 - RNA, 19 nt, Homo sapiens
  misc_RNA (1)...(19): siRNA sense strand
gaagguggccauggaucuc

SEQ ID NO: 2141884 - RNA, 19 nt, Homo sapiens
  misc_RNA (1)...(19): siRNA sense strand
gggagcgacaggugaugaa

SEQ ID NO: 2141885 - RNA, 19 nt, Homo sapiens
  misc_RNA (1)...(19): siRNA sense strand
caaagacacucacaaugga

SEQ ID NO: 2141886 - RNA, 19 nt, Homo sapiens
  misc_RNA (1)...(19): siRNA sense strand
ucacaaacaucgagguuau

SEQ ID NO: 2141887 - RNA, 19 nt, Homo sapiens
  misc_RNA (1)...(19): siRNA sense strand
gcaaagacacucacaaugg

SEQ ID NO: 2141888 - RNA, 19 nt, Homo sapiens
  misc_RNA (1)...(19): siRNA sense strand
caacagcaccauagaaaga

SEQ ID NO: 2141889 - RNA, 19 nt, Homo sapiens
  misc_RNA (1)...(19): siRNA sense strand
caagagagaccaggaguuu

SEQ ID NO: 2141890 - RNA, 19 nt, Homo sapiens
  misc_RNA (1)...(19): siRNA sense strand
gcucacaccuccacagaag

SEQ ID NO: 2141891 - RNA, 19 nt, Homo sapiens
  misc_RNA (1)...(19): siRNA sense strand
acaucgagguuauuaauug

SEQ ID NO: 2141892 - RNA, 19 nt, Homo sapiens
  misc_RNA (1)...(19): siRNA sense strand
acacagaagugcccgcuau

SEQ ID NO: 2141893 - RNA, 19 nt, Homo sapiens
  misc_RNA (1)...(19): siRNA sense strand
ccacggacaucgcaaccaa

SEQ ID NO: 2141894 - RNA, 19 nt, Homo sapiens
  misc_RNA (1)...(19): siRNA sense strand
ccucagcccucucuguuga

SEQ ID NO: 2141895 - RNA, 19 nt, Homo sapiens
  misc_RNA (1)...(19): siRNA sense strand
ggaaugaccacaguucaga

SEQ ID NO: 2141896 - RNA, 19 nt, Homo sapiens
  misc_RNA (1)...(19): siRNA sense strand
gacaccaaguuacgucaaa

SEQ ID NO: 2141897 - RNA, 19 nt, Homo sapiens
  misc_RNA (1)...(19): siRNA sense strand
guuauuaauugcagcauca

SEQ ID NO: 2141898 - RNA, 19 nt, Homo sapiens
  misc_RNA (1)...(19): siRNA sense strand
cuaagggccuguccucaga

SEQ ID NO: 2141899 - RNA, 19 nt, Homo sapiens
  misc_RNA (1)...(19): siRNA sense strand
acaaacaucgagguuauua

SEQ ID NO: 2141900 - RNA, 19 nt, Homo sapiens
  misc_RNA (1)...(19): siRNA sense strand
cagcaucacagaaauagaa

SEQ ID NO: 2141901 - RNA, 19 nt, Homo sapiens
  misc_RNA (1)...(19): siRNA sense strand
ucacagaaauagaaacaac

SEQ ID NO: 2141902 - RNA, 19 nt, Homo sapiens
  misc_RNA (1)...(19): siRNA sense strand
gagcuggaaugaccacagu

SEQ ID NO: 2141903 - RNA, 19 nt, Homo sapiens
  misc_RNA (1)...(19): siRNA sense strand
gcgcugagaccucuucuag

SEQ ID NO: 2141904 - RNA, 19 nt, Homo sapiens
  misc_RNA (1)...(19): siRNA sense strand
gcaagagagaccaggaguu

SEQ ID NO: 2141905 - RNA, 19 nt, Homo sapiens
  misc_RNA (1)...(19): siRNA sense strand
acacaucacugaggucaca

SEQ ID NO: 2141906 - RNA, 19 nt, Homo sapiens
  misc_RNA (1)...(19): siRNA sense strand
gaagaggcaaagacacuca

SEQ ID NO: 2141907 - RNA, 19 nt, Homo sapiens
  misc_RNA (1)...(19): siRNA sense strand
gaccaggaguuucacaaaa

SEQ ID NO: 2141908 - RNA, 19 nt, Homo sapiens
  misc_RNA (1)...(19): siRNA sense strand
cagcuccggucuccauaga

SEQ ID NO: 2141909 - RNA, 19 nt, Homo sapiens
  misc_RNA (1)...(19): siRNA sense strand
aaacaucucccaacuucau

SEQ ID NO: 2141910 - RNA, 19 nt, Homo sapiens
  misc_RNA (1)...(19): siRNA sense strand
gacaacggacgacacagaa

SEQ ID NO: 2141911 - RNA, 19 nt, Homo sapiens
  misc_RNA (1)...(19): siRNA sense strand
cugaagcccuggugacugu

SEQ ID NO: 2141912 - RNA, 19 nt, Homo sapiens
  misc_RNA (1)...(19): siRNA sense strand
caaacaucgagguuauuaa

SEQ ID NO: 2141913 - RNA, 19 nt, Homo sapiens
  misc_RNA (1)...(19): siRNA sense strand
agagagaccaggaguuuca

SEQ ID NO: 2141914 - RNA, 19 nt, Homo sapiens
  misc_RNA (1)...(19): siRNA sense strand
ggcaaagacacucacaaug

SEQ ID NO: 2141915 - RNA, 19 nt, Homo sapiens
  misc_RNA (1)...(19): siRNA sense strand
caacggacgacacagaagu

SEQ ID NO: 2141916 - RNA, 19 nt, Homo sapiens
  misc_RNA (1)...(19): siRNA sense strand
caucacagaaauagaaaca

SEQ ID NO: 2141917 - RNA, 19 nt, Homo sapiens
  misc_RNA (1)...(19): siRNA sense strand
ccacgccgcucuggaaacu

SEQ ID NO: 2141918 - RNA, 19 nt, Homo sapiens
  misc_RNA (1)...(19): siRNA sense strand
caccauagaaagagaagug

SEQ ID NO: 2141919 - RNA, 19 nt, Homo sapiens
  misc_RNA (1)...(19): siRNA sense strand
gagaccaggaguuucacaa

SEQ ID NO: 2141920 - RNA, 19 nt, Homo sapiens
  misc_RNA (1)...(19): siRNA sense strand
cuguugagacaccaaguua

SEQ ID NO: 2141921 - RNA, 19 nt, Homo sapiens
  misc_RNA (1)...(19): siRNA sense strand
cauagaaagagaagugaca

SEQ ID NO: 2141922 - RNA, 19 nt, Homo sapiens
  misc_RNA (1)...(19): siRNA sense strand
ccaccaacagcaccauaga

SEQ ID NO: 2141923 - RNA, 19 nt, Homo sapiens
  misc_RNA (1)...(19): siRNA sense strand
gcaccugaugccacgauug

SEQ ID NO: 2141924 - RNA, 19 nt, Homo sapiens
  misc_RNA (1)...(19): siRNA sense strand
caaaaccacacaucacuga

SEQ ID NO: 2141925 - RNA, 19 nt, Homo sapiens
  misc_RNA (1)...(19): siRNA sense strand
agaccaggaguuucacaaa

SEQ ID NO: 2141926 - RNA, 19 nt, Homo sapiens
  misc_RNA (1)...(19): siRNA sense strand
accaacagcaccauagaaa

SEQ ID NO: 2141927 - RNA, 19 nt, Homo sapiens
  misc_RNA (1)...(19): siRNA sense strand
caucgagguuauuaauugc

SEQ ID NO: 2141928 - RNA, 19 nt, Homo sapiens
  misc_RNA (1)...(19): siRNA sense strand
gaauuuccccugcaagaga

SEQ ID NO: 2141929 - RNA, 19 nt, Homo sapiens
  misc_RNA (1)...(19): siRNA sense strand
gggcaaaacaacuuccuuu

SEQ ID NO: 2141930 - RNA, 19 nt, Homo sapiens
  misc_RNA (1)...(19): siRNA sense strand
gcuggaaugaccacaguuc

SEQ ID NO: 2141931 - RNA, 19 nt, Homo sapiens
  misc_RNA (1)...(19): siRNA sense strand
cugccugacuccacuaaca

SEQ ID NO: 2141932 - RNA, 19 nt, Homo sapiens
  misc_RNA (1)...(19): siRNA sense strand
ugacuccacuaacacaaaa

SEQ ID NO: 2141933 - RNA, 19 nt, Homo sapiens
  misc_RNA (1)...(19): siRNA sense strand
ugaccacaguucagaccau

SEQ ID NO: 2141934 - RNA, 19 nt, Homo sapiens
  misc_RNA (1)...(19): siRNA sense strand
ggaauccccuggaagaaac

SEQ ID NO: 2141935 - RNA, 19 nt, Homo sapiens
  misc_RNA (1)...(19): siRNA sense strand
caccaacagcaccauagaa

SEQ ID NO: 2141936 - RNA, 19 nt, Homo sapiens
  misc_RNA (1)...(19): siRNA sense strand
gucacaaacaucgagguua

SEQ ID NO: 2141937 - RNA, 19 nt, Homo sapiens
  misc_RNA (1)...(19): siRNA sense strand
aggcaaagacacucacaau

SEQ ID NO: 2141938 - RNA, 19 nt, Homo sapiens
  misc_RNA (1)...(19): siRNA sense strand
acagaagugcccgcuauga

SEQ ID NO: 2141939 - RNA, 19 nt, Homo sapiens
  misc_RNA (1)...(19): siRNA sense strand
gacacucacaauggacaua

SEQ ID NO: 2141940 - RNA, 19 nt, Homo sapiens
  misc_RNA (1)...(19): siRNA sense strand
gagaauuuccccugcaaga

SEQ ID NO: 2141941 - RNA, 19 nt, Homo sapiens
  misc_RNA (1)...(19): siRNA sense strand
aauugcagcaucacagaaa

SEQ ID NO: 2141942 - RNA, 19 nt, Homo sapiens
  misc_RNA (1)...(19): siRNA sense strand
ggaaacagcaucaaacaua

SEQ ID NO: 2141943 - RNA, 19 nt, Homo sapiens
  misc_RNA (1)...(19): siRNA sense strand
gaaacagcaucaaacauaa

SEQ ID NO: 2141944 - RNA, 19 nt, Homo sapiens
  misc_RNA (1)...(19): siRNA sense strand
gagaaacccuauaaaugua

SEQ ID NO: 2141945 - RNA, 19 nt, Homo sapiens
  misc_RNA (1)...(19): siRNA sense strand
ggacacaucugaaucaaca

SEQ ID NO: 2141946 - RNA, 19 nt, Homo sapiens
  misc_RNA (1)...(19): siRNA sense strand
gagaauuccuuccauuaaa

SEQ ID NO: 2141947 - RNA, 19 nt, Homo sapiens
  misc_RNA (1)...(19): siRNA sense strand
aaucugaacucaaaccuua

SEQ ID NO: 2141948 - RNA, 19 nt, Homo sapiens
  misc_RNA (1)...(19): siRNA sense strand
caagagauauuuaggacaa

SEQ ID NO: 2141949 - RNA, 19 nt, Homo sapiens
  misc_RNA (1)...(19): siRNA sense strand
gaaaagcccuauaaaugua

SEQ ID NO: 2141950 - RNA, 19 nt, Homo sapiens
  misc_RNA (1)...(19): siRNA sense strand
gaacaucauagacuucaua

SEQ ID NO: 2141951 - RNA, 19 nt, Homo sapiens
  misc_RNA (1)...(19): siRNA sense strand
gcagagaauuccuuccauu

SEQ ID NO: 2141952 - RNA, 19 nt, Homo sapiens
  misc_RNA (1)...(19): siRNA sense strand
gagagaaacccuauaaaug

SEQ ID NO: 2141953 - RNA, 19 nt, Homo sapiens
  misc_RNA (1)...(19): siRNA sense strand
aaacagacccgaaaucaaa

SEQ ID NO: 2141954 - RNA, 19 nt, Homo sapiens
  misc_RNA (1)...(19): siRNA sense strand
uaagagagacucccuauga

SEQ ID NO: 2141955 - RNA, 19 nt, Homo sapiens
  misc_RNA (1)...(19): siRNA sense strand
gagagacucccuaugaaua

SEQ ID NO: 2141956 - RNA, 19 nt, Homo sapiens
  misc_RNA (1)...(19): siRNA sense strand
agagaaaccuuacgaaugu

SEQ ID NO: 2141957 - RNA, 19 nt, Homo sapiens
  misc_RNA (1)...(19): siRNA sense strand
gagagaagcccuauaagug

SEQ ID NO: 2141958 - RNA, 19 nt, Homo sapiens
  misc_RNA (1)...(19): siRNA sense strand
agagaagccuugaguguaa

SEQ ID NO: 2141959 - RNA, 19 nt, Homo sapiens
  misc_RNA (1)...(19): siRNA sense strand
gaggauacaucucauucaa

SEQ ID NO: 2141960 - RNA, 19 nt, Homo sapiens
  misc_RNA (1)...(19): siRNA sense strand
ggagagaaacccuauaaau

SEQ ID NO: 2141961 - RNA, 19 nt, Homo sapiens
  misc_RNA (1)...(19): siRNA sense strand
ggauacaucucauucaaca

SEQ ID NO: 2141962 - RNA, 19 nt, Homo sapiens
  misc_RNA (1)...(19): siRNA sense strand
caacaucugaggauucaua

SEQ ID NO: 2141963 - RNA, 19 nt, Homo sapiens
  misc_RNA (1)...(19): siRNA sense strand
gagagaaaccuuacgaaug

SEQ ID NO: 2141964 - RNA, 19 nt, Homo sapiens
  misc_RNA (1)...(19): siRNA sense strand
ucacaucccuuacugaaca

SEQ ID NO: 2141965 - RNA, 19 nt, Homo sapiens
  misc_RNA (1)...(19): siRNA sense strand
gaagaaugggugauagaaa

SEQ ID NO: 2141966 - RNA, 19 nt, Homo sapiens
  misc_RNA (1)...(19): siRNA sense strand
gagaaaagcccuauaaaug

SEQ ID NO: 2141967 - RNA, 19 nt, Homo sapiens
  misc_RNA (1)...(19): siRNA sense strand
gagagaagccuugagugua

SEQ ID NO: 2141968 - RNA, 19 nt, Homo sapiens
  misc_RNA (1)...(19): siRNA sense strand
ggagacagcuucugguacu

SEQ ID NO: 2141969 - RNA, 19 nt, Homo sapiens
  misc_RNA (1)...(19): siRNA sense strand
gagacucccuaugaauaua

SEQ ID NO: 2141970 - RNA, 19 nt, Homo sapiens
  misc_RNA (1)...(19): siRNA sense strand
ggcaaagccuucagucaga

SEQ ID NO: 2141971 - RNA, 19 nt, Homo sapiens
  misc_RNA (1)...(19): siRNA sense strand
cagagaauuccuuccauua

SEQ ID NO: 2141972 - RNA, 19 nt, Homo sapiens
  misc_RNA (1)...(19): siRNA sense strand
ggagagaagcccuauaagu

SEQ ID NO: 2141973 - RNA, 19 nt, Homo sapiens
  misc_RNA (1)...(19): siRNA sense strand
agccacaccucaucucuua

SEQ ID NO: 2141974 - RNA, 19 nt, Homo sapiens
  misc_RNA (1)...(19): siRNA sense strand
caaacauaauucagacuug

SEQ ID NO: 2141975 - RNA, 19 nt, Homo sapiens
  misc_RNA (1)...(19): siRNA sense strand
caggagagaagcccuauaa

SEQ ID NO: 2141976 - RNA, 19 nt, Homo sapiens
  misc_RNA (1)...(19): siRNA sense strand
agagaaacccuauaaaugu

SEQ ID NO: 2141977 - RNA, 19 nt, Homo sapiens
  misc_RNA (1)...(19): siRNA sense strand
cgucagcauucauccuuua

SEQ ID NO: 2141978 - RNA, 19 nt, Homo sapiens
  misc_RNA (1)...(19): siRNA sense strand
ucaaacccaugagaugaua

SEQ ID NO: 2141979 - RNA, 19 nt, Homo sapiens
  misc_RNA (1)...(19): siRNA sense strand
gggagaaauuaugugaaua

SEQ ID NO: 2141980 - RNA, 19 nt, Homo sapiens
  misc_RNA (1)...(19): siRNA sense strand
gugcacaccuuaaucaaca

SEQ ID NO: 2141981 - RNA, 19 nt, Homo sapiens
  misc_RNA (1)...(19): siRNA sense strand
caacauauucuucuuacug

SEQ ID NO: 2141982 - RNA, 19 nt, Homo sapiens
  misc_RNA (1)...(19): siRNA sense strand
ggagagaagccuugagugu

SEQ ID NO: 2141983 - RNA, 19 nt, Homo sapiens
  misc_RNA (1)...(19): siRNA sense strand
ggagagaaaccuuacgaau

SEQ ID NO: 2141984 - RNA, 19 nt, Homo sapiens
  misc_RNA (1)...(19): siRNA sense strand
acuguaaucugaacucaaa

SEQ ID NO: 2141985 - RNA, 19 nt, Homo sapiens
  misc_RNA (1)...(19): siRNA sense strand
uuacgaaugugguuucugu

SEQ ID NO: 2141986 - RNA, 19 nt, Homo sapiens
  misc_RNA (1)...(19): siRNA sense strand
gaaucaacaugaaagaacu

SEQ ID NO: 2141987 - RNA, 19 nt, Homo sapiens
  misc_RNA (1)...(19): siRNA sense strand
ggaagaaugggugauagaa

SEQ ID NO: 2141988 - RNA, 19 nt, Homo sapiens
  misc_RNA (1)...(19): siRNA sense strand
cgggagaaauuaugugaau

SEQ ID NO: 2141989 - RNA, 19 nt, Homo sapiens
  misc_RNA (1)...(19): siRNA sense strand
caggagagaaacccuauaa

SEQ ID NO: 2141990 - RNA, 19 nt, Homo sapiens
  misc_RNA (1)...(19): siRNA sense strand
ugauuaccauccagaguuu

SEQ ID NO: 2141991 - RNA, 19 nt, Homo sapiens
  misc_RNA (1)...(19): siRNA sense strand
ccacaagccagaauauuuc

SEQ ID NO: 2141992 - RNA, 19 nt, Homo sapiens
  misc_RNA (1)...(19): siRNA sense strand
gcagagaaacccagugagu

SEQ ID NO: 2141993 - RNA, 19 nt, Homo sapiens
  misc_RNA (1)...(19): siRNA sense strand
gaauauagugaguguggaa

SEQ ID NO: 2141994 - RNA, 19 nt, Homo sapiens
  misc_RNA (1)...(19): siRNA sense strand
uaggaggacucugggauuu

SEQ ID NO: 2141995 - RNA, 19 nt, Homo sapiens
  misc_RNA (1)...(19): siRNA sense strand
aagagagacucccuaugaa

SEQ ID NO: 2141996 - RNA, 19 nt, Homo sapiens
  misc_RNA (1)...(19): siRNA sense strand
cuauaagugugaugaaugu

SEQ ID NO: 2141997 - RNA, 19 nt, Homo sapiens
  misc_RNA (1)...(19): siRNA sense strand
aagaaugggugauagaaag

SEQ ID NO: 2141998 - RNA, 19 nt, Homo sapiens
  misc_RNA (1)...(19): siRNA sense strand
gagacgugaugcuggagaa

SEQ ID NO: 2141999 - RNA, 19 nt, Homo sapiens
  misc_RNA (1)...(19): siRNA sense strand
gcaucaaacauaauucaga

SEQ ID NO: 2142000 - RNA, 19 nt, Homo sapiens
  misc_RNA (1)...(19): siRNA sense strand
agagaauuccuuccauuaa

SEQ ID NO: 2142001 - RNA, 19 nt, Homo sapiens
  misc_RNA (1)...(19): siRNA sense strand
aggaaucacugacguuuca

SEQ ID NO: 2142002 - RNA, 19 nt, Homo sapiens
  misc_RNA (1)...(19): siRNA sense strand
gaggaagaaugggugauag

SEQ ID NO: 2142003 - RNA, 19 nt, Homo sapiens
  misc_RNA (1)...(19): siRNA sense strand
gcacugggguaucagcuuu

SEQ ID NO: 2142004 - RNA, 19 nt, Homo sapiens
  misc_RNA (1)...(19): siRNA sense strand
gcaguuggagcuagaggaa

SEQ ID NO: 2142005 - RNA, 19 nt, Homo sapiens
  misc_RNA (1)...(19): siRNA sense strand
gaggacacaucugaaucaa

SEQ ID NO: 2142006 - RNA, 19 nt, Homo sapiens
  misc_RNA (1)...(19): siRNA sense strand
caucacaucccuuacugaa

SEQ ID NO: 2142007 - RNA, 19 nt, Homo sapiens
  misc_RNA (1)...(19): siRNA sense strand
gaggauucauacuggagaa

SEQ ID NO: 2142008 - RNA, 19 nt, Homo sapiens
  misc_RNA (1)...(19): siRNA sense strand
ggaggaggaagaaaugaau

SEQ ID NO: 2142009 - RNA, 19 nt, Homo sapiens
  misc_RNA (1)...(19): siRNA sense strand
ccacaagagauauuuagga

SEQ ID NO: 2142010 - RNA, 19 nt, Homo sapiens
  misc_RNA (1)...(19): siRNA sense strand
caacaucagagaauucaca

SEQ ID NO: 2142011 - RNA, 19 nt, Homo sapiens
  misc_RNA (1)...(19): siRNA sense strand
gaaaacagacccgaaauca

SEQ ID NO: 2142012 - RNA, 19 nt, Homo sapiens
  misc_RNA (1)...(19): siRNA sense strand
cuacaggaaucuaguugca

SEQ ID NO: 2142013 - RNA, 19 nt, Homo sapiens
  misc_RNA (1)...(19): siRNA sense strand
ggagaaaagcccuauaaau

SEQ ID NO: 2142014 - RNA, 19 nt, Homo sapiens
  misc_RNA (1)...(19): siRNA sense strand
cgccacaguccuucauuua

SEQ ID NO: 2142015 - RNA, 19 nt, Homo sapiens
  misc_RNA (1)...(19): siRNA sense strand
gaacucauacaggagagaa

SEQ ID NO: 2142016 - RNA, 19 nt, Homo sapiens
  misc_RNA (1)...(19): siRNA sense strand
caaccacaagccagaauau

SEQ ID NO: 2142017 - RNA, 19 nt, Homo sapiens
  misc_RNA (1)...(19): siRNA sense strand
ccacaguccuucauuuagc

SEQ ID NO: 2142018 - RNA, 19 nt, Homo sapiens
  misc_RNA (1)...(19): siRNA sense strand
ggagcuagaggaagaaugg

SEQ ID NO: 2142019 - RNA, 19 nt, Homo sapiens
  misc_RNA (1)...(19): siRNA sense strand
gaaugauggcucacagaug

SEQ ID NO: 2142020 - RNA, 19 nt, Homo sapiens
  misc_RNA (1)...(19): siRNA sense strand
ccucagauguugcuuacag

SEQ ID NO: 2142021 - RNA, 19 nt, Homo sapiens
  misc_RNA (1)...(19): siRNA sense strand
gaggaagaaaugaaugaug

SEQ ID NO: 2142022 - RNA, 19 nt, Homo sapiens
  misc_RNA (1)...(19): siRNA sense strand
gagauauuuaggacaagua

SEQ ID NO: 2142023 - RNA, 19 nt, Homo sapiens
  misc_RNA (1)...(19): siRNA sense strand
gcauucauccuuuacucaa

SEQ ID NO: 2142024 - RNA, 19 nt, Homo sapiens
  misc_RNA (1)...(19): siRNA sense strand
gagaagccuugaguguaau

SEQ ID NO: 2142025 - RNA, 19 nt, Homo sapiens
  misc_RNA (1)...(19): siRNA sense strand
caggagacagcuucuggua

SEQ ID NO: 2142026 - RNA, 19 nt, Homo sapiens
  misc_RNA (1)...(19): siRNA sense strand
gaaaaucaaacccaugaga

SEQ ID NO: 2142027 - RNA, 19 nt, Homo sapiens
  misc_RNA (1)...(19): siRNA sense strand
ggagaaaacagacccgaaa

SEQ ID NO: 2142028 - RNA, 19 nt, Homo sapiens
  misc_RNA (1)...(19): siRNA sense strand
agagaagcccuauaagugu

SEQ ID NO: 2142029 - RNA, 19 nt, Homo sapiens
  misc_RNA (1)...(19): siRNA sense strand
gaaaaccacaagagauauu

SEQ ID NO: 2142030 - RNA, 19 nt, Homo sapiens
  misc_RNA (1)...(19): siRNA sense strand
ucgccacaguccuucauuu

SEQ ID NO: 2142031 - RNA, 19 nt, Homo sapiens
  misc_RNA (1)...(19): siRNA sense strand
ggagaacuacaggaaucua

SEQ ID NO: 2142032 - RNA, 19 nt, Homo sapiens
  misc_RNA (1)...(19): siRNA sense strand
caucugaaucaacaugaaa

SEQ ID NO: 2142033 - RNA, 19 nt, Homo sapiens
  misc_RNA (1)...(19): siRNA sense strand
aaucaaacccaugagauga

SEQ ID NO: 2142034 - RNA, 19 nt, Homo sapiens
  misc_RNA (1)...(19): siRNA sense strand
caucugaggauucauacug

SEQ ID NO: 2142035 - RNA, 19 nt, Homo sapiens
  misc_RNA (1)...(19): siRNA sense strand
cagcaucaaacauaauuca

SEQ ID NO: 2142036 - RNA, 19 nt, Homo sapiens
  misc_RNA (1)...(19): siRNA sense strand
aaacuguaaucugaacuca

SEQ ID NO: 2142037 - RNA, 19 nt, Homo sapiens
  misc_RNA (1)...(19): siRNA sense strand
ggaggacucugggauuuug

SEQ ID NO: 2142038 - RNA, 19 nt, Homo sapiens
  misc_RNA (1)...(19): siRNA sense strand
agagaaacccagugagugu

SEQ ID NO: 2142039 - RNA, 19 nt, Homo sapiens
  misc_RNA (1)...(19): siRNA sense strand
gagaaaccuuacgaaugug

SEQ ID NO: 2142040 - RNA, 19 nt, Homo sapiens
  misc_RNA (1)...(19): siRNA sense strand
agaggaagaaugggugaua

SEQ ID NO: 2142041 - RNA, 19 nt, Homo sapiens
  misc_RNA (1)...(19): siRNA sense strand
gagaauucacacaggagaa

SEQ ID NO: 2142042 - RNA, 19 nt, Homo sapiens
  misc_RNA (1)...(19): siRNA sense strand
ggaaacagcaucaaacaua

SEQ ID NO: 2142043 - RNA, 19 nt, Homo sapiens
  misc_RNA (1)...(19): siRNA sense strand
gaaacagcaucaaacauaa

SEQ ID NO: 2142044 - RNA, 19 nt, Homo sapiens
  misc_RNA (1)...(19): siRNA sense strand
gagaaacccuauaaaugua

SEQ ID NO: 2142045 - RNA, 19 nt, Homo sapiens
  misc_RNA (1)...(19): siRNA sense strand
ggacacaucugaaucaaca

SEQ ID NO: 2142046 - RNA, 19 nt, Homo sapiens
  misc_RNA (1)...(19): siRNA sense strand
gagaauuccuuccauuaaa

SEQ ID NO: 2142047 - RNA, 19 nt, Homo sapiens
  misc_RNA (1)...(19): siRNA sense strand
aaucugaacucaaaccuua

SEQ ID NO: 2142048 - RNA, 19 nt, Homo sapiens
  misc_RNA (1)...(19): siRNA sense strand
caagagauauuuaggacaa

SEQ ID NO: 2142049 - RNA, 19 nt, Homo sapiens
  misc_RNA (1)...(19): siRNA sense strand
gaaaagcccuauaaaugua

SEQ ID NO: 2142050 - RNA, 19 nt, Homo sapiens
  misc_RNA (1)...(19): siRNA sense strand
gaacaucauagacuucaua

SEQ ID NO: 2142051 - RNA, 19 nt, Homo sapiens
  misc_RNA (1)...(19): siRNA sense strand
gcagagaauuccuuccauu

SEQ ID NO: 2142052 - RNA, 19 nt, Homo sapiens
  misc_RNA (1)...(19): siRNA sense strand
gagagaaacccuauaaaug

SEQ ID NO: 2142053 - RNA, 19 nt, Homo sapiens
  misc_RNA (1)...(19): siRNA sense strand
aaacagacccgaaaucaaa

SEQ ID NO: 2142054 - RNA, 19 nt, Homo sapiens
  misc_RNA (1)...(19): siRNA sense strand
uaagagagacucccuauga

SEQ ID NO: 2142055 - RNA, 19 nt, Homo sapiens
  misc_RNA (1)...(19): siRNA sense strand
gagagacucccuaugaaua

SEQ ID NO: 2142056 - RNA, 19 nt, Homo sapiens
  misc_RNA (1)...(19): siRNA sense strand
agagaaaccuuacgaaugu

SEQ ID NO: 2142057 - RNA, 19 nt, Homo sapiens
  misc_RNA (1)...(19): siRNA sense strand
gagagaagcccuauaagug

SEQ ID NO: 2142058 - RNA, 19 nt, Homo sapiens
  misc_RNA (1)...(19): siRNA sense strand
agagaagccuugaguguaa

SEQ ID NO: 2142059 - RNA, 19 nt, Homo sapiens
  misc_RNA (1)...(19): siRNA sense strand
gaggauacaucucauucaa

SEQ ID NO: 2142060 - RNA, 19 nt, Homo sapiens
  misc_RNA (1)...(19): siRNA sense strand
ggagagaaacccuauaaau

SEQ ID NO: 2142061 - RNA, 19 nt, Homo sapiens
  misc_RNA (1)...(19): siRNA sense strand
ggauacaucucauucaaca

SEQ ID NO: 2142062 - RNA, 19 nt, Homo sapiens
  misc_RNA (1)...(19): siRNA sense strand
caacaucugaggauucaua

SEQ ID NO: 2142063 - RNA, 19 nt, Homo sapiens
  misc_RNA (1)...(19): siRNA sense strand
gagagaaaccuuacgaaug

SEQ ID NO: 2142064 - RNA, 19 nt, Homo sapiens
  misc_RNA (1)...(19): siRNA sense strand
ucacaucccuuacugaaca

SEQ ID NO: 2142065 - RNA, 19 nt, Homo sapiens
  misc_RNA (1)...(19): siRNA sense strand
gaagaaugggugauagaaa

SEQ ID NO: 2142066 - RNA, 19 nt, Homo sapiens
  misc_RNA (1)...(19): siRNA sense strand
gagaaaagcccuauaaaug

SEQ ID NO: 2142067 - RNA, 19 nt, Homo sapiens
  misc_RNA (1)...(19): siRNA sense strand
gagagaagccuugagugua

SEQ ID NO: 2142068 - RNA, 19 nt, Homo sapiens
  misc_RNA (1)...(19): siRNA sense strand
ggagacagcuucugguacu

SEQ ID NO: 2142069 - RNA, 19 nt, Homo sapiens
  misc_RNA (1)...(19): siRNA sense strand
gagacucccuaugaauaua

SEQ ID NO: 2142070 - RNA, 19 nt, Homo sapiens
  misc_RNA (1)...(19): siRNA sense strand
ggcaaagccuucagucaga

SEQ ID NO: 2142071 - RNA, 19 nt, Homo sapiens
  misc_RNA (1)...(19): siRNA sense strand
cagagaauuccuuccauua

SEQ ID NO: 2142072 - RNA, 19 nt, Homo sapiens
  misc_RNA (1)...(19): siRNA sense strand
ggagagaagcccuauaagu

SEQ ID NO: 2142073 - RNA, 19 nt, Homo sapiens
  misc_RNA (1)...(19): siRNA sense strand
agccacaccucaucucuua

SEQ ID NO: 2142074 - RNA, 19 nt, Homo sapiens
  misc_RNA (1)...(19): siRNA sense strand
caaacauaauucagacuug

SEQ ID NO: 2142075 - RNA, 19 nt, Homo sapiens
  misc_RNA (1)...(19): siRNA sense strand
caggagagaagcccuauaa

SEQ ID NO: 2142076 - RNA, 19 nt, Homo sapiens
  misc_RNA (1)...(19): siRNA sense strand
agagaaacccuauaaaugu

SEQ ID NO: 2142077 - RNA, 19 nt, Homo sapiens
  misc_RNA (1)...(19): siRNA sense strand
cgucagcauucauccuuua

SEQ ID NO: 2142078 - RNA, 19 nt, Homo sapiens
  misc_RNA (1)...(19): siRNA sense strand
ucaaacccaugagaugaua

SEQ ID NO: 2142079 - RNA, 19 nt, Homo sapiens
  misc_RNA (1)...(19): siRNA sense strand
gggagaaauuaugugaaua

SEQ ID NO: 2142080 - RNA, 19 nt, Homo sapiens
  misc_RNA (1)...(19): siRNA sense strand
gugcacaccuuaaucaaca

SEQ ID NO: 2142081 - RNA, 19 nt, Homo sapiens
  misc_RNA (1)...(19): siRNA sense strand
caacauauucuucuuacug

SEQ ID NO: 2142082 - RNA, 19 nt, Homo sapiens
  misc_RNA (1)...(19): siRNA sense strand
ggagagaagccuugagugu

SEQ ID NO: 2142083 - RNA, 19 nt, Homo sapiens
  misc_RNA (1)...(19): siRNA sense strand
ggagagaaaccuuacgaau

SEQ ID NO: 2142084 - RNA, 19 nt, Homo sapiens
  misc_RNA (1)...(19): siRNA sense strand
acuguaaucugaacucaaa

SEQ ID NO: 2142085 - RNA, 19 nt, Homo sapiens
  misc_RNA (1)...(19): siRNA sense strand
uuacgaaugugguuucugu

SEQ ID NO: 2142086 - RNA, 19 nt, Homo sapiens
  misc_RNA (1)...(19): siRNA sense strand
gaaucaacaugaaagaacu

SEQ ID NO: 2142087 - RNA, 19 nt, Homo sapiens
  misc_RNA (1)...(19): siRNA sense strand
ggaagaaugggugauagaa

SEQ ID NO: 2142088 - RNA, 19 nt, Homo sapiens
  misc_RNA (1)...(19): siRNA sense strand
cgggagaaauuaugugaau

SEQ ID NO: 2142089 - RNA, 19 nt, Homo sapiens
  misc_RNA (1)...(19): siRNA sense strand
caggagagaaacccuauaa

SEQ ID NO: 2142090 - RNA, 19 nt, Homo sapiens
  misc_RNA (1)...(19): siRNA sense strand
ugauuaccauccagaguuu

SEQ ID NO: 2142091 - RNA, 19 nt, Homo sapiens
  misc_RNA (1)...(19): siRNA sense strand
ccacaagccagaauauuuc

SEQ ID NO: 2142092 - RNA, 19 nt, Homo sapiens
  misc_RNA (1)...(19): siRNA sense strand
gcagagaaacccagugagu

SEQ ID NO: 2142093 - RNA, 19 nt, Homo sapiens
  misc_RNA (1)...(19): siRNA sense strand
gaauauagugaguguggaa

SEQ ID NO: 2142094 - RNA, 19 nt, Homo sapiens
  misc_RNA (1)...(19): siRNA sense strand
uaggaggacucugggauuu

SEQ ID NO: 2142095 - RNA, 19 nt, Homo sapiens
  misc_RNA (1)...(19): siRNA sense strand
aagagagacucccuaugaa

SEQ ID NO: 2142096 - RNA, 19 nt, Homo sapiens
  misc_RNA (1)...(19): siRNA sense strand
cuauaagugugaugaaugu

SEQ ID NO: 2142097 - RNA, 19 nt, Homo sapiens
  misc_RNA (1)...(19): siRNA sense strand
aagaaugggugauagaaag

SEQ ID NO: 2142098 - RNA, 19 nt, Homo sapiens
  misc_RNA (1)...(19): siRNA sense strand
gagacgugaugcuggagaa

SEQ ID NO: 2142099 - RNA, 19 nt, Homo sapiens
  misc_RNA (1)...(19): siRNA sense strand
gcaucaaacauaauucaga

SEQ ID NO: 2142100 - RNA, 19 nt, Homo sapiens
  misc_RNA (1)...(19): siRNA sense strand
agagaauuccuuccauuaa

SEQ ID NO: 2142101 - RNA, 19 nt, Homo sapiens
  misc_RNA (1)...(19): siRNA sense strand
aggaaucacugacguuuca

SEQ ID NO: 2142102 - RNA, 19 nt, Homo sapiens
  misc_RNA (1)...(19): siRNA sense strand
gaggaagaaugggugauag

SEQ ID NO: 2142103 - RNA, 19 nt, Homo sapiens
  misc_RNA (1)...(19): siRNA sense strand
gcacugggguaucagcuuu

SEQ ID NO: 2142104 - RNA, 19 nt, Homo sapiens
  misc_RNA (1)...(19): siRNA sense strand
gcaguuggagcuagaggaa

SEQ ID NO: 2142105 - RNA, 19 nt, Homo sapiens
  misc_RNA (1)...(19): siRNA sense strand
gaggacacaucugaaucaa

SEQ ID NO: 2142106 - RNA, 19 nt, Homo sapiens
  misc_RNA (1)...(19): siRNA sense strand
caucacaucccuuacugaa

SEQ ID NO: 2142107 - RNA, 19 nt, Homo sapiens
  misc_RNA (1)...(19): siRNA sense strand
gaggauucauacuggagaa

SEQ ID NO: 2142108 - RNA, 19 nt, Homo sapiens
  misc_RNA (1)...(19): siRNA sense strand
ggaggaggaagaaaugaau

SEQ ID NO: 2142109 - RNA, 19 nt, Homo sapiens
  misc_RNA (1)...(19): siRNA sense strand
ccacaagagauauuuagga

SEQ ID NO: 2142110 - RNA, 19 nt, Homo sapiens
  misc_RNA (1)...(19): siRNA sense strand
caacaucagagaauucaca

SEQ ID NO: 2142111 - RNA, 19 nt, Homo sapiens
  misc_RNA (1)...(19): siRNA sense strand
gaaaacagacccgaaauca

SEQ ID NO: 2142112 - RNA, 19 nt, Homo sapiens
  misc_RNA (1)...(19): siRNA sense strand
cuacaggaaucuaguugca

SEQ ID NO: 2142113 - RNA, 19 nt, Homo sapiens
  misc_RNA (1)...(19): siRNA sense strand
ggagaaaagcccuauaaau

SEQ ID NO: 2142114 - RNA, 19 nt, Homo sapiens
  misc_RNA (1)...(19): siRNA sense strand
cgccacaguccuucauuua

SEQ ID NO: 2142115 - RNA, 19 nt, Homo sapiens
  misc_RNA (1)...(19): siRNA sense strand
gaacucauacaggagagaa

SEQ ID NO: 2142116 - RNA, 19 nt, Homo sapiens
  misc_RNA (1)...(19): siRNA sense strand
caaccacaagccagaauau

SEQ ID NO: 2142117 - RNA, 19 nt, Homo sapiens
  misc_RNA (1)...(19): siRNA sense strand
ccacaguccuucauuuagc

SEQ ID NO: 2142118 - RNA, 19 nt, Homo sapiens
  misc_RNA (1)...(19): siRNA sense strand
ggagcuagaggaagaaugg

SEQ ID NO: 2142119 - RNA, 19 nt, Homo sapiens
  misc_RNA (1)...(19): siRNA sense strand
gaaugauggcucacagaug

SEQ ID NO: 2142120 - RNA, 19 nt, Homo sapiens
  misc_RNA (1)...(19): siRNA sense strand
ccucagauguugcuuacag

SEQ ID NO: 2142121 - RNA, 19 nt, Homo sapiens
  misc_RNA (1)...(19): siRNA sense strand
gaggaagaaaugaaugaug

SEQ ID NO: 2142122 - RNA, 19 nt, Homo sapiens
  misc_RNA (1)...(19): siRNA sense strand
gagauauuuaggacaagua

SEQ ID NO: 2142123 - RNA, 19 nt, Homo sapiens
  misc_RNA (1)...(19): siRNA sense strand
gcauucauccuuuacucaa

SEQ ID NO: 2142124 - RNA, 19 nt, Homo sapiens
  misc_RNA (1)...(19): siRNA sense strand
gagaagccuugaguguaau

SEQ ID NO: 2142125 - RNA, 19 nt, Homo sapiens
  misc_RNA (1)...(19): siRNA sense strand
caggagacagcuucuggua

SEQ ID NO: 2142126 - RNA, 19 nt, Homo sapiens
  misc_RNA (1)...(19): siRNA sense strand
gaaaaucaaacccaugaga

SEQ ID NO: 2142127 - RNA, 19 nt, Homo sapiens
  misc_RNA (1)...(19): siRNA sense strand
ggagaaaacagacccgaaa

SEQ ID NO: 2142128 - RNA, 19 nt, Homo sapiens
  misc_RNA (1)...(19): siRNA sense strand
agagaagcccuauaagugu

SEQ ID NO: 2142129 - RNA, 19 nt, Homo sapiens
  misc_RNA (1)...(19): siRNA sense strand
gaaaaccacaagagauauu

SEQ ID NO: 2142130 - RNA, 19 nt, Homo sapiens
  misc_RNA (1)...(19): siRNA sense strand
ucgccacaguccuucauuu

SEQ ID NO: 2142131 - RNA, 19 nt, Homo sapiens
  misc_RNA (1)...(19): siRNA sense strand
ggagaacuacaggaaucua

SEQ ID NO: 2142132 - RNA, 19 nt, Homo sapiens
  misc_RNA (1)...(19): siRNA sense strand
caucugaaucaacaugaaa

SEQ ID NO: 2142133 - RNA, 19 nt, Homo sapiens
  misc_RNA (1)...(19): siRNA sense strand
aaucaaacccaugagauga

SEQ ID NO: 2142134 - RNA, 19 nt, Homo sapiens
  misc_RNA (1)...(19): siRNA sense strand
caucugaggauucauacug

SEQ ID NO: 2142135 - RNA, 19 nt, Homo sapiens
  misc_RNA (1)...(19): siRNA sense strand
cagcaucaaacauaauuca

SEQ ID NO: 2142136 - RNA, 19 nt, Homo sapiens
  misc_RNA (1)...(19): siRNA sense strand
aaacuguaaucugaacuca

SEQ ID NO: 2142137 - RNA, 19 nt, Homo sapiens
  misc_RNA (1)...(19): siRNA sense strand
ggaggacucugggauuuug

SEQ ID NO: 2142138 - RNA, 19 nt, Homo sapiens
  misc_RNA (1)...(19): siRNA sense strand
agagaaacccagugagugu

SEQ ID NO: 2142139 - RNA, 19 nt, Homo sapiens
  misc_RNA (1)...(19): siRNA sense strand
gagaaaccuuacgaaugug

SEQ ID NO: 2142140 - RNA, 19 nt, Homo sapiens
  misc_RNA (1)...(19): siRNA sense strand
agaggaagaaugggugaua

SEQ ID NO: 2142141 - RNA, 19 nt, Homo sapiens
  misc_RNA (1)...(19): siRNA sense strand
gagaauucacacaggagaa

SEQ ID NO: 2142142 - RNA, 19 nt, Homo sapiens
  misc_RNA (1)...(19): siRNA sense strand
ggacaaagauggacaagga

SEQ ID NO: 2142143 - RNA, 19 nt, Homo sapiens
  misc_RNA (1)...(19): siRNA sense strand
ggaagaaagagaugaauua

SEQ ID NO: 2142144 - RNA, 19 nt, Homo sapiens
  misc_RNA (1)...(19): siRNA sense strand
gaacuacauuucugacuuu

SEQ ID NO: 2142145 - RNA, 19 nt, Homo sapiens
  misc_RNA (1)...(19): siRNA sense strand
ugaaagaacuagauacuga

SEQ ID NO: 2142146 - RNA, 19 nt, Homo sapiens
  misc_RNA (1)...(19): siRNA sense strand
aaacaaggaucuagaagga

SEQ ID NO: 2142147 - RNA, 19 nt, Homo sapiens
  misc_RNA (1)...(19): siRNA sense strand
ggacacagcagcucaguga

SEQ ID NO: 2142148 - RNA, 19 nt, Homo sapiens
  misc_RNA (1)...(19): siRNA sense strand
gcugauaaauugaagaaga

SEQ ID NO: 2142149 - RNA, 19 nt, Homo sapiens
  misc_RNA (1)...(19): siRNA sense strand
ggaacuacauuucugacuu

SEQ ID NO: 2142150 - RNA, 19 nt, Homo sapiens
  misc_RNA (1)...(19): siRNA sense strand
gcuggaaaguagagaauuu

SEQ ID NO: 2142151 - RNA, 19 nt, Homo sapiens
  misc_RNA (1)...(19): siRNA sense strand
gauaaaagcuuguaugaca

SEQ ID NO: 2142152 - RNA, 19 nt, Homo sapiens
  misc_RNA (1)...(19): siRNA sense strand
agaaagagaugaauuagag

SEQ ID NO: 2142153 - RNA, 19 nt, Homo sapiens
  misc_RNA (1)...(19): siRNA sense strand
acaaggagcucauugacuu

SEQ ID NO: 2142154 - RNA, 19 nt, Homo sapiens
  misc_RNA (1)...(19): siRNA sense strand
ggacagaacgcaggcauuu

SEQ ID NO: 2142155 - RNA, 19 nt, Homo sapiens
  misc_RNA (1)...(19): siRNA sense strand
gacaagaccuggaacuaca

SEQ ID NO: 2142156 - RNA, 19 nt, Homo sapiens
  misc_RNA (1)...(19): siRNA sense strand
gcacgaagacgccuaaagu

SEQ ID NO: 2142157 - RNA, 19 nt, Homo sapiens
  misc_RNA (1)...(19): siRNA sense strand
gaaaacagcugaggacaga

SEQ ID NO: 2142158 - RNA, 19 nt, Homo sapiens
  misc_RNA (1)...(19): siRNA sense strand
ggauggcucuuugcuguuu

SEQ ID NO: 2142159 - RNA, 19 nt, Homo sapiens
  misc_RNA (1)...(19): siRNA sense strand
acaaggaucuagaaggaaa

SEQ ID NO: 2142160 - RNA, 19 nt, Homo sapiens
  misc_RNA (1)...(19): siRNA sense strand
ggccuucgauguuaaguga

SEQ ID NO: 2142161 - RNA, 19 nt, Homo sapiens
  misc_RNA (1)...(19): siRNA sense strand
uggagaagcuggacaagga

SEQ ID NO: 2142162 - RNA, 19 nt, Homo sapiens
  misc_RNA (1)...(19): siRNA sense strand
gauaaacaaggaucuagaa

SEQ ID NO: 2142163 - RNA, 19 nt, Homo sapiens
  misc_RNA (1)...(19): siRNA sense strand
ggacugaggccgugcugaa

SEQ ID NO: 2142164 - RNA, 19 nt, Homo sapiens
  misc_RNA (1)...(19): siRNA sense strand
ucaagccgaugauaaacaa

SEQ ID NO: 2142165 - RNA, 19 nt, Homo sapiens
  misc_RNA (1)...(19): siRNA sense strand
uaagcagucuccugaccua

SEQ ID NO: 2142166 - RNA, 19 nt, Homo sapiens
  misc_RNA (1)...(19): siRNA sense strand
caucaaaugucuucuacag

SEQ ID NO: 2142167 - RNA, 19 nt, Homo sapiens
  misc_RNA (1)...(19): siRNA sense strand
gaagaaagagaugaauuag

SEQ ID NO: 2142168 - RNA, 19 nt, Homo sapiens
  misc_RNA (1)...(19): siRNA sense strand
ucucugggcuuuggaauga

SEQ ID NO: 2142169 - RNA, 19 nt, Homo sapiens
  misc_RNA (1)...(19): siRNA sense strand
caaaugucuucuacaggaa

SEQ ID NO: 2142170 - RNA, 19 nt, Homo sapiens
  misc_RNA (1)...(19): siRNA sense strand
uugcagagcuggagaacga

SEQ ID NO: 2142171 - RNA, 19 nt, Homo sapiens
  misc_RNA (1)...(19): siRNA sense strand
gcucagaggaggaaacguu

SEQ ID NO: 2142172 - RNA, 19 nt, Homo sapiens
  misc_RNA (1)...(19): siRNA sense strand
uagaggauccggaguuuga

SEQ ID NO: 2142173 - RNA, 19 nt, Homo sapiens
  misc_RNA (1)...(19): siRNA sense strand
ucagccaccucuauaucua

SEQ ID NO: 2142174 - RNA, 19 nt, Homo sapiens
  misc_RNA (1)...(19): siRNA sense strand
gcaggaagaaagagaugaa

SEQ ID NO: 2142175 - RNA, 19 nt, Homo sapiens
  misc_RNA (1)...(19): siRNA sense strand
ucccaggccuucgauguua

SEQ ID NO: 2142176 - RNA, 19 nt, Homo sapiens
  misc_RNA (1)...(19): siRNA sense strand
ccaccuacacgaucaacua

SEQ ID NO: 2142177 - RNA, 19 nt, Homo sapiens
  misc_RNA (1)...(19): siRNA sense strand
cagccgagaucgccacaga

SEQ ID NO: 2142178 - RNA, 19 nt, Homo sapiens
  misc_RNA (1)...(19): siRNA sense strand
ggaaccgacugcugaggau

SEQ ID NO: 2142179 - RNA, 19 nt, Homo sapiens
  misc_RNA (1)...(19): siRNA sense strand
gcucuuugcuguuucuucu

SEQ ID NO: 2142180 - RNA, 19 nt, Homo sapiens
  misc_RNA (1)...(19): siRNA sense strand
gaaagaacuagauacugau

SEQ ID NO: 2142181 - RNA, 19 nt, Homo sapiens
  misc_RNA (1)...(19): siRNA sense strand
ggacaagaccuggaacuac

SEQ ID NO: 2142182 - RNA, 19 nt, Homo sapiens
  misc_RNA (1)...(19): siRNA sense strand
gagaucaucagucggauuc

SEQ ID NO: 2142183 - RNA, 19 nt, Homo sapiens
  misc_RNA (1)...(19): siRNA sense strand
ccagucugcccugaaauua

SEQ ID NO: 2142184 - RNA, 19 nt, Homo sapiens
  misc_RNA (1)...(19): siRNA sense strand
cgagaucgccacagaggaa

SEQ ID NO: 2142185 - RNA, 19 nt, Homo sapiens
  misc_RNA (1)...(19): siRNA sense strand
gaagaauccgagagcaaga

SEQ ID NO: 2142186 - RNA, 19 nt, Homo sapiens
  misc_RNA (1)...(19): siRNA sense strand
uacugaugcugauaaauug

SEQ ID NO: 2142187 - RNA, 19 nt, Homo sapiens
  misc_RNA (1)...(19): siRNA sense strand
gaucaucagucggauucug

SEQ ID NO: 2142188 - RNA, 19 nt, Homo sapiens
  misc_RNA (1)...(19): siRNA sense strand
ggcgggaccugaucgacaa

SEQ ID NO: 2142189 - RNA, 19 nt, Homo sapiens
  misc_RNA (1)...(19): siRNA sense strand
ucagugaaagaacuagaua

SEQ ID NO: 2142190 - RNA, 19 nt, Homo sapiens
  misc_RNA (1)...(19): siRNA sense strand
gcagucuccugaccuacga

SEQ ID NO: 2142191 - RNA, 19 nt, Homo sapiens
  misc_RNA (1)...(19): siRNA sense strand
gaugauaaacaaggaucua

SEQ ID NO: 2142192 - RNA, 19 nt, Homo sapiens
  misc_RNA (1)...(19): siRNA sense strand
cauaccaggugcccaagga

SEQ ID NO: 2142193 - RNA, 19 nt, Homo sapiens
  misc_RNA (1)...(19): siRNA sense strand
gggacacacugcggaaguu

SEQ ID NO: 2142194 - RNA, 19 nt, Homo sapiens
  misc_RNA (1)...(19): siRNA sense strand
uaagaugcaugaggagcaa

SEQ ID NO: 2142195 - RNA, 19 nt, Homo sapiens
  misc_RNA (1)...(19): siRNA sense strand
acacagcagcucagugaaa

SEQ ID NO: 2142196 - RNA, 19 nt, Homo sapiens
  misc_RNA (1)...(19): siRNA sense strand
cagccggaauguccuguga

SEQ ID NO: 2142197 - RNA, 19 nt, Homo sapiens
  misc_RNA (1)...(19): siRNA sense strand
cgagaucucugggcuuugg

SEQ ID NO: 2142198 - RNA, 19 nt, Homo sapiens
  misc_RNA (1)...(19): siRNA sense strand
gaucuagaaggaaauaucu

SEQ ID NO: 2142199 - RNA, 19 nt, Homo sapiens
  misc_RNA (1)...(19): siRNA sense strand
gauccggaguuugacauca

SEQ ID NO: 2142200 - RNA, 19 nt, Homo sapiens
  misc_RNA (1)...(19): siRNA sense strand
cccgagaucucugggcuuu

SEQ ID NO: 2142201 - RNA, 19 nt, Homo sapiens
  misc_RNA (1)...(19): siRNA sense strand
gggacaagaccuggaacua

SEQ ID NO: 2142202 - RNA, 19 nt, Homo sapiens
  misc_RNA (1)...(19): siRNA sense strand
agaggaggcugaggaggaa

SEQ ID NO: 2142203 - RNA, 19 nt, Homo sapiens
  misc_RNA (1)...(19): siRNA sense strand
gaaagcaggagaucaucag

SEQ ID NO: 2142204 - RNA, 19 nt, Homo sapiens
  misc_RNA (1)...(19): siRNA sense strand
ucagaaagcaggagaucau

SEQ ID NO: 2142205 - RNA, 19 nt, Homo sapiens
  misc_RNA (1)...(19): siRNA sense strand
agauacugaugcugauaaa

SEQ ID NO: 2142206 - RNA, 19 nt, Homo sapiens
  misc_RNA (1)...(19): siRNA sense strand
cggaauguccugugaagug

SEQ ID NO: 2142207 - RNA, 19 nt, Homo sapiens
  misc_RNA (1)...(19): siRNA sense strand
uggcaaaguguacaagaaa

SEQ ID NO: 2142208 - RNA, 19 nt, Homo sapiens
  misc_RNA (1)...(19): siRNA sense strand
ugagcgcccuggauaagau

SEQ ID NO: 2142209 - RNA, 19 nt, Homo sapiens
  misc_RNA (1)...(19): siRNA sense strand
gcagcucagugaaagaacu

SEQ ID NO: 2142210 - RNA, 19 nt, Homo sapiens
  misc_RNA (1)...(19): siRNA sense strand
uuccaggacuuugauauug

SEQ ID NO: 2142211 - RNA, 19 nt, Homo sapiens
  misc_RNA (1)...(19): siRNA sense strand
gagagcaagagaagaagga

SEQ ID NO: 2142212 - RNA, 19 nt, Homo sapiens
  misc_RNA (1)...(19): siRNA sense strand
gggaagaauccgagagcaa

SEQ ID NO: 2142213 - RNA, 19 nt, Homo sapiens
  misc_RNA (1)...(19): siRNA sense strand
agcaagagcuuuucacuga

SEQ ID NO: 2142214 - RNA, 19 nt, Homo sapiens
  misc_RNA (1)...(19): siRNA sense strand
uagauacugaugcugauaa

SEQ ID NO: 2142215 - RNA, 19 nt, Homo sapiens
  misc_RNA (1)...(19): siRNA sense strand
acagaacgcaggcauuuca

SEQ ID NO: 2142216 - RNA, 19 nt, Homo sapiens
  misc_RNA (1)...(19): siRNA sense strand
gaagauaaaagcuuguaug

SEQ ID NO: 2142217 - RNA, 19 nt, Homo sapiens
  misc_RNA (1)...(19): siRNA sense strand
ggagaucaucagucggauu

SEQ ID NO: 2142218 - RNA, 19 nt, Homo sapiens
  misc_RNA (1)...(19): siRNA sense strand
gguccaggcugagaagaag

SEQ ID NO: 2142219 - RNA, 19 nt, Homo sapiens
  misc_RNA (1)...(19): siRNA sense strand
ccaccucuauaucuacauc

SEQ ID NO: 2142220 - RNA, 19 nt, Homo sapiens
  misc_RNA (1)...(19): siRNA sense strand
ggaucuagaaggaaauauc

SEQ ID NO: 2142221 - RNA, 19 nt, Homo sapiens
  misc_RNA (1)...(19): siRNA sense strand
cuucauccacguugacuuu

SEQ ID NO: 2142222 - RNA, 19 nt, Homo sapiens
  misc_RNA (1)...(19): siRNA sense strand
gaaccugagcgcccuggau

SEQ ID NO: 2142223 - RNA, 19 nt, Homo sapiens
  misc_RNA (1)...(19): siRNA sense strand
ggggagggcuggaaaguag

SEQ ID NO: 2142224 - RNA, 19 nt, Homo sapiens
  misc_RNA (1)...(19): siRNA sense strand
cuccugaccuacgaagaua

SEQ ID NO: 2142225 - RNA, 19 nt, Homo sapiens
  misc_RNA (1)...(19): siRNA sense strand
ggucagccaccucuauauc

SEQ ID NO: 2142226 - RNA, 19 nt, Homo sapiens
  misc_RNA (1)...(19): siRNA sense strand
gcgauacaagcacgacuga

SEQ ID NO: 2142227 - RNA, 19 nt, Homo sapiens
  misc_RNA (1)...(19): siRNA sense strand
ucauccacguugacuuuga

SEQ ID NO: 2142228 - RNA, 19 nt, Homo sapiens
  misc_RNA (1)...(19): siRNA sense strand
aaccugagcgcccuggaua

SEQ ID NO: 2142229 - RNA, 19 nt, Homo sapiens
  misc_RNA (1)...(19): siRNA sense strand
cagcagcucagugaaagaa

SEQ ID NO: 2142230 - RNA, 19 nt, Homo sapiens
  misc_RNA (1)...(19): siRNA sense strand
ccuucaagccgaugauaaa

SEQ ID NO: 2142231 - RNA, 19 nt, Homo sapiens
  misc_RNA (1)...(19): siRNA sense strand
ccuacacgaucaacuacug

SEQ ID NO: 2142232 - RNA, 19 nt, Homo sapiens
  misc_RNA (1)...(19): siRNA sense strand
aggaggacguggaccgaaa

SEQ ID NO: 2142233 - RNA, 19 nt, Homo sapiens
  misc_RNA (1)...(19): siRNA sense strand
cacagcagcucagugaaag

SEQ ID NO: 2142234 - RNA, 19 nt, Homo sapiens
  misc_RNA (1)...(19): siRNA sense strand
gugcugccaucucuacuac

SEQ ID NO: 2142235 - RNA, 19 nt, Homo sapiens
  misc_RNA (1)...(19): siRNA sense strand
gccggaauguccugugaag

SEQ ID NO: 2142236 - RNA, 19 nt, Homo sapiens
  misc_RNA (1)...(19): siRNA sense strand
gggacuucauccacguuga

SEQ ID NO: 2142237 - RNA, 19 nt, Homo sapiens
  misc_RNA (1)...(19): siRNA sense strand
caagagcuuuucacugaga

SEQ ID NO: 2142238 - RNA, 19 nt, Homo sapiens
  misc_RNA (1)...(19): siRNA sense strand
agaagaaggaggagaugga

SEQ ID NO: 2142239 - RNA, 19 nt, Homo sapiens
  misc_RNA (1)...(19): siRNA sense strand
agucugcccugaaauuaag

SEQ ID NO: 2142240 - RNA, 19 nt, Homo sapiens
  misc_RNA (1)...(19): siRNA sense strand
gcuuuggaaugaagacuac

SEQ ID NO: 2142241 - RNA, 19 nt, Homo sapiens
  misc_RNA (1)...(19): siRNA sense strand
acacguacacacuggacua

SEQ ID NO: 2142242 - RNA, 19 nt, Homo sapiens
  misc_RNA (1)...(19): siRNA sense strand
gcacaaggguuucuccauu

SEQ ID NO: 2142243 - RNA, 19 nt, Homo sapiens
  misc_RNA (1)...(19): siRNA sense strand
caaagaagaccguugaguu

SEQ ID NO: 2142244 - RNA, 19 nt, Homo sapiens
  misc_RNA (1)...(19): siRNA sense strand
acacaagacuucacuguca

SEQ ID NO: 2142245 - RNA, 19 nt, Homo sapiens
  misc_RNA (1)...(19): siRNA sense strand
cacaaggguuucuccauug

SEQ ID NO: 2142246 - RNA, 19 nt, Homo sapiens
  misc_RNA (1)...(19): siRNA sense strand
gaaggcagcguccucaaca

SEQ ID NO: 2142247 - RNA, 19 nt, Homo sapiens
  misc_RNA (1)...(19): siRNA sense strand
aaagaagaccguugaguuc

SEQ ID NO: 2142248 - RNA, 19 nt, Homo sapiens
  misc_RNA (1)...(19): siRNA sense strand
ccacgaaagccucuacuuc

SEQ ID NO: 2142249 - RNA, 19 nt, Homo sapiens
  misc_RNA (1)...(19): siRNA sense strand
acaaggguuucuccauuga

SEQ ID NO: 2142250 - RNA, 19 nt, Homo sapiens
  misc_RNA (1)...(19): siRNA sense strand
gaucacgugcuccauugaa

SEQ ID NO: 2142251 - RNA, 19 nt, Homo sapiens
  misc_RNA (1)...(19): siRNA sense strand
ucgcaucccugcagcacaa

SEQ ID NO: 2142252 - RNA, 19 nt, Homo sapiens
  misc_RNA (1)...(19): siRNA sense strand
ccagccaucuccaaagaag

SEQ ID NO: 2142253 - RNA, 19 nt, Homo sapiens
  misc_RNA (1)...(19): siRNA sense strand
cagcgaucccuguauuuga

SEQ ID NO: 2142254 - RNA, 19 nt, Homo sapiens
  misc_RNA (1)...(19): siRNA sense strand
ccacccagccaucuccaaa

SEQ ID NO: 2142255 - RNA, 19 nt, Homo sapiens
  misc_RNA (1)...(19): siRNA sense strand
gaccguugaguucagcaua

SEQ ID NO: 2142256 - RNA, 19 nt, Homo sapiens
  misc_RNA (1)...(19): siRNA sense strand
caugaucacgugcuccauu

SEQ ID NO: 2142257 - RNA, 19 nt, Homo sapiens
  misc_RNA (1)...(19): siRNA sense strand
cacgaaagccucuacuucu

SEQ ID NO: 2142258 - RNA, 19 nt, Homo sapiens
  misc_RNA (1)...(19): siRNA sense strand
gguguugacuggccccuaa

SEQ ID NO: 2142259 - RNA, 19 nt, Homo sapiens
  misc_RNA (1)...(19): siRNA sense strand
acccagccaucuccaaaga

SEQ ID NO: 2142260 - RNA, 19 nt, Homo sapiens
  misc_RNA (1)...(19): siRNA sense strand
cagguggugcucuuugaaa

SEQ ID NO: 2142261 - RNA, 19 nt, Homo sapiens
  misc_RNA (1)...(19): siRNA sense strand
gauccagaccacccacuca

SEQ ID NO: 2142262 - RNA, 19 nt, Homo sapiens
  misc_RNA (1)...(19): siRNA sense strand
agacgaagaccaucagcau

SEQ ID NO: 2142263 - RNA, 19 nt, Homo sapiens
  misc_RNA (1)...(19): siRNA sense strand
ggcccucucucuccagaag

SEQ ID NO: 2142264 - RNA, 19 nt, Homo sapiens
  misc_RNA (1)...(19): siRNA sense strand
ggcguggcguccaugauca

SEQ ID NO: 2142265 - RNA, 19 nt, Homo sapiens
  misc_RNA (1)...(19): siRNA sense strand
ccaucaaguucuccaugca

SEQ ID NO: 2142266 - RNA, 19 nt, Homo sapiens
  misc_RNA (1)...(19): siRNA sense strand
gggaugugaaggagaccua

SEQ ID NO: 2142267 - RNA, 19 nt, Homo sapiens
  misc_RNA (1)...(19): siRNA sense strand
acgaaagccucuacuucuc

SEQ ID NO: 2142268 - RNA, 19 nt, Homo sapiens
  misc_RNA (1)...(19): siRNA sense strand
agacacaagacuucacugu

SEQ ID NO: 2142269 - RNA, 19 nt, Homo sapiens
  misc_RNA (1)...(19): siRNA sense strand
uccagguggugcucuuuga

SEQ ID NO: 2142270 - RNA, 19 nt, Homo sapiens
  misc_RNA (1)...(19): siRNA sense strand
ccaaagaagaccguugagu

SEQ ID NO: 2142271 - RNA, 19 nt, Homo sapiens
  misc_RNA (1)...(19): siRNA sense strand
augaucacgugcuccauug

SEQ ID NO: 2142272 - RNA, 19 nt, Homo sapiens
  misc_RNA (1)...(19): siRNA sense strand
cuacauccaguuugacaca

SEQ ID NO: 2142273 - RNA, 19 nt, Homo sapiens
  misc_RNA (1)...(19): siRNA sense strand
ugaagggugccgccuguca

SEQ ID NO: 2142274 - RNA, 19 nt, Homo sapiens
  misc_RNA (1)...(19): siRNA sense strand
gaacugaucuuguuaaugc

SEQ ID NO: 2142275 - RNA, 19 nt, Homo sapiens
  misc_RNA (1)...(19): siRNA sense strand
gcacaauaaugacaaguga

SEQ ID NO: 2142276 - RNA, 19 nt, Homo sapiens
  misc_RNA (1)...(19): siRNA sense strand
gauggagcauguucucuua

SEQ ID NO: 2142277 - RNA, 19 nt, Homo sapiens
  misc_RNA (1)...(19): siRNA sense strand
gaagaccucaguuuaauuu

SEQ ID NO: 2142278 - RNA, 19 nt, Homo sapiens
  misc_RNA (1)...(19): siRNA sense strand
gcagaaaggacaugaauga

SEQ ID NO: 2142279 - RNA, 19 nt, Homo sapiens
  misc_RNA (1)...(19): siRNA sense strand
ggacaaauuucgggacuug

SEQ ID NO: 2142280 - RNA, 19 nt, Homo sapiens
  misc_RNA (1)...(19): siRNA sense strand
uagaaaggcugaagaaaca

SEQ ID NO: 2142281 - RNA, 19 nt, Homo sapiens
  misc_RNA (1)...(19): siRNA sense strand
guaaggaacugaggaagga

SEQ ID NO: 2142282 - RNA, 19 nt, Homo sapiens
  misc_RNA (1)...(19): siRNA sense strand
cgaagugucugcaaggaaa

SEQ ID NO: 2142283 - RNA, 19 nt, Homo sapiens
  misc_RNA (1)...(19): siRNA sense strand
ucaaugcgcugguucaugu

SEQ ID NO: 2142284 - RNA, 19 nt, Homo sapiens
  misc_RNA (1)...(19): siRNA sense strand
gcgacggucuugacuauau

SEQ ID NO: 2142285 - RNA, 19 nt, Homo sapiens
  misc_RNA (1)...(19): siRNA sense strand
ucagaugacuuuccaguuc

SEQ ID NO: 2142286 - RNA, 19 nt, Homo sapiens
  misc_RNA (1)...(19): siRNA sense strand
cagcauaugggacaaauuu

SEQ ID NO: 2142287 - RNA, 19 nt, Homo sapiens
  misc_RNA (1)...(19): siRNA sense strand
cgaggucggugcccacuuu

SEQ ID NO: 2142288 - RNA, 19 nt, Homo sapiens
  misc_RNA (1)...(19): siRNA sense strand
ggagauuucagaugacuuu

SEQ ID NO: 2142289 - RNA, 19 nt, Homo sapiens
  misc_RNA (1)...(19): siRNA sense strand
gaagaaacauguaaaaggu

SEQ ID NO: 2142290 - RNA, 19 nt, Homo sapiens
  misc_RNA (1)...(19): siRNA sense strand
agagaaagcugaccuugca

SEQ ID NO: 2142291 - RNA, 19 nt, Homo sapiens
  misc_RNA (1)...(19): siRNA sense strand
caaaaucgcuuucccuuuc

SEQ ID NO: 2142292 - RNA, 19 nt, Homo sapiens
  misc_RNA (1)...(19): siRNA sense strand
uuaaggaauugaucacuga

SEQ ID NO: 2142293 - RNA, 19 nt, Homo sapiens
  misc_RNA (1)...(19): siRNA sense strand
gaacuagaaaggcugaaga

SEQ ID NO: 2142294 - RNA, 19 nt, Homo sapiens
  misc_RNA (1)...(19): siRNA sense strand
aagcugaccuugcaacgaa

SEQ ID NO: 2142295 - RNA, 19 nt, Homo sapiens
  misc_RNA (1)...(19): siRNA sense strand
acacagacauccggagaaa

SEQ ID NO: 2142296 - RNA, 19 nt, Homo sapiens
  misc_RNA (1)...(19): siRNA sense strand
guugaagaccucaguuuaa

SEQ ID NO: 2142297 - RNA, 19 nt, Homo sapiens
  misc_RNA (1)...(19): siRNA sense strand
ucacgcaggucuccucaug

SEQ ID NO: 2142298 - RNA, 19 nt, Homo sapiens
  misc_RNA (1)...(19): siRNA sense strand
aaagguaguugaauucagu

SEQ ID NO: 2142299 - RNA, 19 nt, Homo sapiens
  misc_RNA (1)...(19): siRNA sense strand
gacaguggacuucaagaaa

SEQ ID NO: 2142300 - RNA, 19 nt, Homo sapiens
  misc_RNA (1)...(19): siRNA sense strand
caccgucauugcccauuua

SEQ ID NO: 2142301 - RNA, 19 nt, Homo sapiens
  misc_RNA (1)...(19): siRNA sense strand
ggaggaggagggagacgua

SEQ ID NO: 2142302 - RNA, 19 nt, Homo sapiens
  misc_RNA (1)...(19): siRNA sense strand
ccacagaagcgccgacgaa

SEQ ID NO: 2142303 - RNA, 19 nt, Homo sapiens
  misc_RNA (1)...(19): siRNA sense strand
ucacaagaguaucugacaa

SEQ ID NO: 2142304 - RNA, 19 nt, Homo sapiens
  misc_RNA (1)...(19): siRNA sense strand
cagcuacgaauuucucuaa

SEQ ID NO: 2142305 - RNA, 19 nt, Homo sapiens
  misc_RNA (1)...(19): siRNA sense strand
uacaaucccuucuaugcuu

SEQ ID NO: 2142306 - RNA, 19 nt, Homo sapiens
  misc_RNA (1)...(19): siRNA sense strand
ugacauaacggauaagagu

SEQ ID NO: 2142307 - RNA, 19 nt, Homo sapiens
  misc_RNA (1)...(19): siRNA sense strand
ggaggacggugacauaacg

SEQ ID NO: 2142308 - RNA, 19 nt, Homo sapiens
  misc_RNA (1)...(19): siRNA sense strand
ggaagaugccggacagaca

SEQ ID NO: 2142309 - RNA, 19 nt, Homo sapiens
  misc_RNA (1)...(19): siRNA sense strand
ggaaacagaaguugaagac

SEQ ID NO: 2142310 - RNA, 19 nt, Homo sapiens
  misc_RNA (1)...(19): siRNA sense strand
ggaggagggagacguagaa

SEQ ID NO: 2142311 - RNA, 19 nt, Homo sapiens
  misc_RNA (1)...(19): siRNA sense strand
cgugaggguuugaagcuuu

SEQ ID NO: 2142312 - RNA, 19 nt, Homo sapiens
  misc_RNA (1)...(19): siRNA sense strand
aaacuuacaaucccuucua

SEQ ID NO: 2142313 - RNA, 19 nt, Homo sapiens
  misc_RNA (1)...(19): siRNA sense strand
gaacaaugacaugcgcaaa

SEQ ID NO: 2142314 - RNA, 19 nt, Homo sapiens
  misc_RNA (1)...(19): siRNA sense strand
gaggcaagcugaggagaca

SEQ ID NO: 2142315 - RNA, 19 nt, Homo sapiens
  misc_RNA (1)...(19): siRNA sense strand
gaaaggcugaagaaacaug

SEQ ID NO: 2142316 - RNA, 19 nt, Homo sapiens
  misc_RNA (1)...(19): siRNA sense strand
gaacgcacaggcccacaga

SEQ ID NO: 2142317 - RNA, 19 nt, Homo sapiens
  misc_RNA (1)...(19): siRNA sense strand
gcaggagagagaaaucauu

SEQ ID NO: 2142318 - RNA, 19 nt, Homo sapiens
  misc_RNA (1)...(19): siRNA sense strand
gguacagucucuccucauc

SEQ ID NO: 2142319 - RNA, 19 nt, Homo sapiens
  misc_RNA (1)...(19): siRNA sense strand
cgacggucuugacuauauu

SEQ ID NO: 2142320 - RNA, 19 nt, Homo sapiens
  misc_RNA (1)...(19): siRNA sense strand
aagcuucccugagaaugua

SEQ ID NO: 2142321 - RNA, 19 nt, Homo sapiens
  misc_RNA (1)...(19): siRNA sense strand
gcuuucccuuuccaucuua

SEQ ID NO: 2142322 - RNA, 19 nt, Homo sapiens
  misc_RNA (1)...(19): siRNA sense strand
gaccucagcaucaucaaug

SEQ ID NO: 2142323 - RNA, 19 nt, Homo sapiens
  misc_RNA (1)...(19): siRNA sense strand
gagcauguucucuuaguca

SEQ ID NO: 2142324 - RNA, 19 nt, Homo sapiens
  misc_RNA (1)...(19): siRNA sense strand
cgacgaggauacagaagag

SEQ ID NO: 2142325 - RNA, 19 nt, Homo sapiens
  misc_RNA (1)...(19): siRNA sense strand
cagaugacuuuccaguuca

SEQ ID NO: 2142326 - RNA, 19 nt, Homo sapiens
  misc_RNA (1)...(19): siRNA sense strand
ggaaacugcagagagcuuu

SEQ ID NO: 2142327 - RNA, 19 nt, Homo sapiens
  misc_RNA (1)...(19): siRNA sense strand
gauauugaacugaucuugu

SEQ ID NO: 2142328 - RNA, 19 nt, Homo sapiens
  misc_RNA (1)...(19): siRNA sense strand
ccagcagacugaugaugga

SEQ ID NO: 2142329 - RNA, 19 nt, Homo sapiens
  misc_RNA (1)...(19): siRNA sense strand
ggauucgguuuaugcuaga

SEQ ID NO: 2142330 - RNA, 19 nt, Homo sapiens
  misc_RNA (1)...(19): siRNA sense strand
caucaucaaugcgcugguu

SEQ ID NO: 2142331 - RNA, 19 nt, Homo sapiens
  misc_RNA (1)...(19): siRNA sense strand
ucaccgucauugcccauuu

SEQ ID NO: 2142332 - RNA, 19 nt, Homo sapiens
  misc_RNA (1)...(19): siRNA sense strand
gaaacauauucugcacaau

SEQ ID NO: 2142333 - RNA, 19 nt, Homo sapiens
  misc_RNA (1)...(19): siRNA sense strand
caucagccacuucuugcua

SEQ ID NO: 2142334 - RNA, 19 nt, Homo sapiens
  misc_RNA (1)...(19): siRNA sense strand
uugaagaccucaguuuaau

SEQ ID NO: 2142335 - RNA, 19 nt, Homo sapiens
  misc_RNA (1)...(19): siRNA sense strand
gagagaaaucauucacguu

SEQ ID NO: 2142336 - RNA, 19 nt, Homo sapiens
  misc_RNA (1)...(19): siRNA sense strand
gaucagcaggagagagaaa

SEQ ID NO: 2142337 - RNA, 19 nt, Homo sapiens
  misc_RNA (1)...(19): siRNA sense strand
caucuuaaagguaguugaa

SEQ ID NO: 2142338 - RNA, 19 nt, Homo sapiens
  misc_RNA (1)...(19): siRNA sense strand
ccaacgugcugagagagaa

SEQ ID NO: 2142339 - RNA, 19 nt, Homo sapiens
  misc_RNA (1)...(19): siRNA sense strand
gguguuacgugaggguuug

SEQ ID NO: 2142340 - RNA, 19 nt, Homo sapiens
  misc_RNA (1)...(19): siRNA sense strand
ggaggaggaccgagagauc

SEQ ID NO: 2142341 - RNA, 19 nt, Homo sapiens
  misc_RNA (1)...(19): siRNA sense strand
gaaguugaagaccucaguu

SEQ ID NO: 2142342 - RNA, 19 nt, Homo sapiens
  misc_RNA (1)...(19): siRNA sense strand
acaaucccuucuaugcuuu

SEQ ID NO: 2142343 - RNA, 19 nt, Homo sapiens
  misc_RNA (1)...(19): siRNA sense strand
gcgaagggaaagaguguga

SEQ ID NO: 2142344 - RNA, 19 nt, Homo sapiens
  misc_RNA (1)...(19): siRNA sense strand
gacggugacauaacggaua

SEQ ID NO: 2142345 - RNA, 19 nt, Homo sapiens
  misc_RNA (1)...(19): siRNA sense strand
gagcguugccucgguuuga

SEQ ID NO: 2142346 - RNA, 19 nt, Homo sapiens
  misc_RNA (1)...(19): siRNA sense strand
cgacgacgaggauacagaa

SEQ ID NO: 2142347 - RNA, 19 nt, Homo sapiens
  misc_RNA (1)...(19): siRNA sense strand
gauuucagaugacuuucca

SEQ ID NO: 2142348 - RNA, 19 nt, Homo sapiens
  misc_RNA (1)...(19): siRNA sense strand
gacggucaguucaaagauc

SEQ ID NO: 2142349 - RNA, 19 nt, Homo sapiens
  misc_RNA (1)...(19): siRNA sense strand
gcugguucauguuugcauu

SEQ ID NO: 2142350 - RNA, 19 nt, Homo sapiens
  misc_RNA (1)...(19): siRNA sense strand
ggaaagagugugacaaccu

SEQ ID NO: 2142351 - RNA, 19 nt, Homo sapiens
  misc_RNA (1)...(19): siRNA sense strand
gaagggaaagagugugaca

SEQ ID NO: 2142352 - RNA, 19 nt, Homo sapiens
  misc_RNA (1)...(19): siRNA sense strand
cagcagaaaggacaugaau

SEQ ID NO: 2142353 - RNA, 19 nt, Homo sapiens
  misc_RNA (1)...(19): siRNA sense strand
aaagggagcgcaggagaaa

SEQ ID NO: 2142354 - RNA, 19 nt, Homo sapiens
  misc_RNA (1)...(19): siRNA sense strand
ggacagacacuccccgaaa

SEQ ID NO: 2142355 - RNA, 19 nt, Homo sapiens
  misc_RNA (1)...(19): siRNA sense strand
cgacaacagucaccauacg

SEQ ID NO: 2142356 - RNA, 19 nt, Homo sapiens
  misc_RNA (1)...(19): siRNA sense strand
acgggucgcugguggauug

SEQ ID NO: 2142357 - RNA, 19 nt, Homo sapiens
  misc_RNA (1)...(19): siRNA sense strand
gaccaggauucgguuuaug

SEQ ID NO: 2142358 - RNA, 19 nt, Homo sapiens
  misc_RNA (1)...(19): siRNA sense strand
uacagucucuccucaucuu

SEQ ID NO: 2142359 - RNA, 19 nt, Homo sapiens
  misc_RNA (1)...(19): siRNA sense strand
acgcgacggucuugacuau

SEQ ID NO: 2142360 - RNA, 19 nt, Homo sapiens
  misc_RNA (1)...(19): siRNA sense strand
agacauccggagaaacaua

SEQ ID NO: 2142361 - RNA, 19 nt, Homo sapiens
  misc_RNA (1)...(19): siRNA sense strand
uggagaagcugaggaaacu

SEQ ID NO: 2142362 - RNA, 19 nt, Homo sapiens
  misc_RNA (1)...(19): siRNA sense strand
cagaccaggauucgguuua

SEQ ID NO: 2142363 - RNA, 19 nt, Homo sapiens
  misc_RNA (1)...(19): siRNA sense strand
cgucauugcccauuuauac

SEQ ID NO: 2142364 - RNA, 19 nt, Homo sapiens
  misc_RNA (1)...(19): siRNA sense strand
cagcauccuucaccacaca

SEQ ID NO: 2142365 - RNA, 19 nt, Homo sapiens
  misc_RNA (1)...(19): siRNA sense strand
ggagcauguucucuuaguc

SEQ ID NO: 2142366 - RNA, 19 nt, Homo sapiens
  misc_RNA (1)...(19): siRNA sense strand
acggugacauaacggauaa

SEQ ID NO: 2142367 - RNA, 19 nt, Homo sapiens
  misc_RNA (1)...(19): siRNA sense strand
agaccaggauucgguuuau

SEQ ID NO: 2142368 - RNA, 19 nt, Homo sapiens
  misc_RNA (1)...(19): siRNA sense strand
acagacauccggagaaaca

SEQ ID NO: 2142369 - RNA, 19 nt, Homo sapiens
  misc_RNA (1)...(19): siRNA sense strand
gaaacugcagagagcuuug

SEQ ID NO: 2142370 - RNA, 19 nt, Homo sapiens
  misc_RNA (1)...(19): siRNA sense strand
caaaccgaccucagcauca

SEQ ID NO: 2142371 - RNA, 19 nt, Homo sapiens
  misc_RNA (1)...(19): siRNA sense strand
ugaagaccucaguuuaauu

SEQ ID NO: 2142372 - RNA, 19 nt, Homo sapiens
  misc_RNA (1)...(19): siRNA sense strand
gaaaucauucacguucuca

SEQ ID NO: 2142373 - RNA, 19 nt, Homo sapiens
  misc_RNA (1)...(19): siRNA sense strand
auacgcaccugcagaagca

SEQ ID NO: 2142374 - RNA, 19 nt, Homo sapiens
  misc_RNA (1)...(19): siRNA sense strand
gaucaaugguguuaaggua

SEQ ID NO: 2142375 - RNA, 19 nt, Homo sapiens
  misc_RNA (1)...(19): siRNA sense strand
ggaaagacacuuaccuuaa

SEQ ID NO: 2142376 - RNA, 19 nt, Homo sapiens
  misc_RNA (1)...(19): siRNA sense strand
ggacaggacugacgaaucu

SEQ ID NO: 2142377 - RNA, 19 nt, Homo sapiens
  misc_RNA (1)...(19): siRNA sense strand
ggacaagaauuagagauug

SEQ ID NO: 2142378 - RNA, 19 nt, Homo sapiens
  misc_RNA (1)...(19): siRNA sense strand
gagcaagauucgauacaaa

SEQ ID NO: 2142379 - RNA, 19 nt, Homo sapiens
  misc_RNA (1)...(19): siRNA sense strand
acacucagcucaagucaaa

SEQ ID NO: 2142380 - RNA, 19 nt, Homo sapiens
  misc_RNA (1)...(19): siRNA sense strand
caucaaaucucauaugucu

SEQ ID NO: 2142381 - RNA, 19 nt, Homo sapiens
  misc_RNA (1)...(19): siRNA sense strand
gguaugaccucacggaaga

SEQ ID NO: 2142382 - RNA, 19 nt, Homo sapiens
  misc_RNA (1)...(19): siRNA sense strand
ugacgaaucuucuggaugu

SEQ ID NO: 2142383 - RNA, 19 nt, Homo sapiens
  misc_RNA (1)...(19): siRNA sense strand
caucaaagcugacaaagac

SEQ ID NO: 2142384 - RNA, 19 nt, Homo sapiens
  misc_RNA (1)...(19): siRNA sense strand
gagcagaauggcuaaauaa

SEQ ID NO: 2142385 - RNA, 19 nt, Homo sapiens
  misc_RNA (1)...(19): siRNA sense strand
agauugagcucuuugauga

SEQ ID NO: 2142386 - RNA, 19 nt, Homo sapiens
  misc_RNA (1)...(19): siRNA sense strand
ggagauaugcccuuaguug

SEQ ID NO: 2142387 - RNA, 19 nt, Homo sapiens
  misc_RNA (1)...(19): siRNA sense strand
ucaaugguguuaagguaua

SEQ ID NO: 2142388 - RNA, 19 nt, Homo sapiens
  misc_RNA (1)...(19): siRNA sense strand
aaacauccaucaaaucuca

SEQ ID NO: 2142389 - RNA, 19 nt, Homo sapiens
  misc_RNA (1)...(19): siRNA sense strand
gacaagaauuagagauuga

SEQ ID NO: 2142390 - RNA, 19 nt, Homo sapiens
  misc_RNA (1)...(19): siRNA sense strand
uaggaagucuuaugauuga

SEQ ID NO: 2142391 - RNA, 19 nt, Homo sapiens
  misc_RNA (1)...(19): siRNA sense strand
gggaaagacacuuaccuua

SEQ ID NO: 2142392 - RNA, 19 nt, Homo sapiens
  misc_RNA (1)...(19): siRNA sense strand
gcagaauggcuaaauaaga

SEQ ID NO: 2142393 - RNA, 19 nt, Homo sapiens
  misc_RNA (1)...(19): siRNA sense strand
gccaggaccuugaaguuga

SEQ ID NO: 2142394 - RNA, 19 nt, Homo sapiens
  misc_RNA (1)...(19): siRNA sense strand
ggagcaaacacccaccuua

SEQ ID NO: 2142395 - RNA, 19 nt, Homo sapiens
  misc_RNA (1)...(19): siRNA sense strand
aaacacauguggccuuuca

SEQ ID NO: 2142396 - RNA, 19 nt, Homo sapiens
  misc_RNA (1)...(19): siRNA sense strand
gcagagucaucaaggagaa

SEQ ID NO: 2142397 - RNA, 19 nt, Homo sapiens
  misc_RNA (1)...(19): siRNA sense strand
ggaugucccuggauugaau

SEQ ID NO: 2142398 - RNA, 19 nt, Homo sapiens
  misc_RNA (1)...(19): siRNA sense strand
gauuggagauaugcccuua

SEQ ID NO: 2142399 - RNA, 19 nt, Homo sapiens
  misc_RNA (1)...(19): siRNA sense strand
ugaagucuaugaggcuuua

SEQ ID NO: 2142400 - RNA, 19 nt, Homo sapiens
  misc_RNA (1)...(19): siRNA sense strand
ugauuucaguguuucguua

SEQ ID NO: 2142401 - RNA, 19 nt, Homo sapiens
  misc_RNA (1)...(19): siRNA sense strand
cggcacagcucgcagagaa

SEQ ID NO: 2142402 - RNA, 19 nt, Homo sapiens
  misc_RNA (1)...(19): siRNA sense strand
caaaggguguucuaaggau

SEQ ID NO: 2142403 - RNA, 19 nt, Homo sapiens
  misc_RNA (1)...(19): siRNA sense strand
ccaaacagcaccaucaaga

SEQ ID NO: 2142404 - RNA, 19 nt, Homo sapiens
  misc_RNA (1)...(19): siRNA sense strand
guuaagguauacacugaaa

SEQ ID NO: 2142405 - RNA, 19 nt, Homo sapiens
  misc_RNA (1)...(19): siRNA sense strand
cugcauugcugaucuugua

SEQ ID NO: 2142406 - RNA, 19 nt, Homo sapiens
  misc_RNA (1)...(19): siRNA sense strand
cuaugaggcuuuaguguau

SEQ ID NO: 2142407 - RNA, 19 nt, Homo sapiens
  misc_RNA (1)...(19): siRNA sense strand
uguaggaaauugugagauu

SEQ ID NO: 2142408 - RNA, 19 nt, Homo sapiens
  misc_RNA (1)...(19): siRNA sense strand
ggaaaccacuuuuagaaau

SEQ ID NO: 2142409 - RNA, 19 nt, Homo sapiens
  misc_RNA (1)...(19): siRNA sense strand
uaaauccaguguuugauca

SEQ ID NO: 2142410 - RNA, 19 nt, Homo sapiens
  misc_RNA (1)...(19): siRNA sense strand
aaaguggaaugaagucuau

SEQ ID NO: 2142411 - RNA, 19 nt, Homo sapiens
  misc_RNA (1)...(19): siRNA sense strand
gcaaccaaaucuuccaaag

SEQ ID NO: 2142412 - RNA, 19 nt, Homo sapiens
  misc_RNA (1)...(19): siRNA sense strand
gacaagaggcggucaggaa

SEQ ID NO: 2142413 - RNA, 19 nt, Homo sapiens
  misc_RNA (1)...(19): siRNA sense strand
agagcagaauggcuaaaua

SEQ ID NO: 2142414 - RNA, 19 nt, Homo sapiens
  misc_RNA (1)...(19): siRNA sense strand
ugauaagccugguauggaa

SEQ ID NO: 2142415 - RNA, 19 nt, Homo sapiens
  misc_RNA (1)...(19): siRNA sense strand
cagaauggcuaaauaagac

SEQ ID NO: 2142416 - RNA, 19 nt, Homo sapiens
  misc_RNA (1)...(19): siRNA sense strand
gaaccugugugggaggaaa

SEQ ID NO: 2142417 - RNA, 19 nt, Homo sapiens
  misc_RNA (1)...(19): siRNA sense strand
gaaagagcagaauggcuaa

SEQ ID NO: 2142418 - RNA, 19 nt, Homo sapiens
  misc_RNA (1)...(19): siRNA sense strand
guaggaaauugugagauug

SEQ ID NO: 2142419 - RNA, 19 nt, Homo sapiens
  misc_RNA (1)...(19): siRNA sense strand
gcaaacacccaccuuagca

SEQ ID NO: 2142420 - RNA, 19 nt, Homo sapiens
  misc_RNA (1)...(19): siRNA sense strand
gaacauccuggacaagaau

SEQ ID NO: 2142421 - RNA, 19 nt, Homo sapiens
  misc_RNA (1)...(19): siRNA sense strand
aaccaaaucuuccaaagca

SEQ ID NO: 2142422 - RNA, 19 nt, Homo sapiens
  misc_RNA (1)...(19): siRNA sense strand
gcccuuaguuggagcuuug

SEQ ID NO: 2142423 - RNA, 19 nt, Homo sapiens
  misc_RNA (1)...(19): siRNA sense strand
uuguagagcuggugugaaa

SEQ ID NO: 2142424 - RNA, 19 nt, Homo sapiens
  misc_RNA (1)...(19): siRNA sense strand
guaugaacauccuggacaa

SEQ ID NO: 2142425 - RNA, 19 nt, Homo sapiens
  misc_RNA (1)...(19): siRNA sense strand
aaaggguguucuaaggaua

SEQ ID NO: 2142426 - RNA, 19 nt, Homo sapiens
  misc_RNA (1)...(19): siRNA sense strand
ugauugaccucauugaagu

SEQ ID NO: 2142427 - RNA, 19 nt, Homo sapiens
  misc_RNA (1)...(19): siRNA sense strand
ugaacauccuggacaagaa

SEQ ID NO: 2142428 - RNA, 19 nt, Homo sapiens
  misc_RNA (1)...(19): siRNA sense strand
caaaguggaaugaagucua

SEQ ID NO: 2142429 - RNA, 19 nt, Homo sapiens
  misc_RNA (1)...(19): siRNA sense strand
gagcaaacacccaccuuag

SEQ ID NO: 2142430 - RNA, 19 nt, Homo sapiens
  misc_RNA (1)...(19): siRNA sense strand
caaauccuguuguccagau

SEQ ID NO: 2142431 - RNA, 19 nt, Homo sapiens
  misc_RNA (1)...(19): siRNA sense strand
gcggucagccuuuggguuu

SEQ ID NO: 2142432 - RNA, 19 nt, Homo sapiens
  misc_RNA (1)...(19): siRNA sense strand
caccuuagcaccuuuaguu

SEQ ID NO: 2142433 - RNA, 19 nt, Homo sapiens
  misc_RNA (1)...(19): siRNA sense strand
uggaguggcucacguuaau

SEQ ID NO: 2142434 - RNA, 19 nt, Homo sapiens
  misc_RNA (1)...(19): siRNA sense strand
cugaagaacuugccaaagg

SEQ ID NO: 2142435 - RNA, 19 nt, Homo sapiens
  misc_RNA (1)...(19): siRNA sense strand
ggaaauugugagauugauu

SEQ ID NO: 2142436 - RNA, 19 nt, Homo sapiens
  misc_RNA (1)...(19): siRNA sense strand
gagauugagcucuuugaug

SEQ ID NO: 2142437 - RNA, 19 nt, Homo sapiens
  misc_RNA (1)...(19): siRNA sense strand
uggauugaaugguuuauca

SEQ ID NO: 2142438 - RNA, 19 nt, Homo sapiens
  misc_RNA (1)...(19): siRNA sense strand
cgaaucaccguuccacuug

SEQ ID NO: 2142439 - RNA, 19 nt, Homo sapiens
  misc_RNA (1)...(19): siRNA sense strand
cauuaaauccaguguuuga

SEQ ID NO: 2142440 - RNA, 19 nt, Homo sapiens
  misc_RNA (1)...(19): siRNA sense strand
gccaauuuauagagaaguu

SEQ ID NO: 2142441 - RNA, 19 nt, Homo sapiens
  misc_RNA (1)...(19): siRNA sense strand
ccuuucauuugccaauuua

SEQ ID NO: 2142442 - RNA, 19 nt, Homo sapiens
  misc_RNA (1)...(19): siRNA sense strand
cuuagcaccuuuaguuuca

SEQ ID NO: 2142443 - RNA, 19 nt, Homo sapiens
  misc_RNA (1)...(19): siRNA sense strand
gcagugauaagccugguau

SEQ ID NO: 2142444 - RNA, 19 nt, Homo sapiens
  misc_RNA (1)...(19): siRNA sense strand
gaaaacauccaucaaaucu

SEQ ID NO: 2142445 - RNA, 19 nt, Homo sapiens
  misc_RNA (1)...(19): siRNA sense strand
ggucagccuuuggguuuga

SEQ ID NO: 2142446 - RNA, 19 nt, Homo sapiens
  misc_RNA (1)...(19): siRNA sense strand
guagacaaaaggcaaauua

SEQ ID NO: 2142447 - RNA, 19 nt, Homo sapiens
  misc_RNA (1)...(19): siRNA sense strand
ucgcagagaaacaagcuua

SEQ ID NO: 2142448 - RNA, 19 nt, Homo sapiens
  misc_RNA (1)...(19): siRNA sense strand
ucgacaaggugcuaacaga

SEQ ID NO: 2142449 - RNA, 19 nt, Homo sapiens
  misc_RNA (1)...(19): siRNA sense strand
ucuaugaggcuuuagugua

SEQ ID NO: 2142450 - RNA, 19 nt, Homo sapiens
  misc_RNA (1)...(19): siRNA sense strand
gaaucaccguuccacuugu

SEQ ID NO: 2142451 - RNA, 19 nt, Homo sapiens
  misc_RNA (1)...(19): siRNA sense strand
gccuuucauuugccaauuu

SEQ ID NO: 2142452 - RNA, 19 nt, Homo sapiens
  misc_RNA (1)...(19): siRNA sense strand
uugucuaucuucuuccuua

SEQ ID NO: 2142453 - RNA, 19 nt, Homo sapiens
  misc_RNA (1)...(19): siRNA sense strand
uauggaaucauuagaguug

SEQ ID NO: 2142454 - RNA, 19 nt, Homo sapiens
  misc_RNA (1)...(19): siRNA sense strand
caggaucaaugguguuaag

SEQ ID NO: 2142455 - RNA, 19 nt, Homo sapiens
  misc_RNA (1)...(19): siRNA sense strand
ggugcuaacagacaucaaa

SEQ ID NO: 2142456 - RNA, 19 nt, Homo sapiens
  misc_RNA (1)...(19): siRNA sense strand
gagaaccucaguccaaagu

SEQ ID NO: 2142457 - RNA, 19 nt, Homo sapiens
  misc_RNA (1)...(19): siRNA sense strand
ccaaaggguguucuaagga

SEQ ID NO: 2142458 - RNA, 19 nt, Homo sapiens
  misc_RNA (1)...(19): siRNA sense strand
gagcuggugugaaaaguau

SEQ ID NO: 2142459 - RNA, 19 nt, Homo sapiens
  misc_RNA (1)...(19): siRNA sense strand
ccgcauguauuuauuacca

SEQ ID NO: 2142460 - RNA, 19 nt, Homo sapiens
  misc_RNA (1)...(19): siRNA sense strand
gaggaaaacauccaucaaa

SEQ ID NO: 2142461 - RNA, 19 nt, Homo sapiens
  misc_RNA (1)...(19): siRNA sense strand
uuaggaagucuuaugauug

SEQ ID NO: 2142462 - RNA, 19 nt, Homo sapiens
  misc_RNA (1)...(19): siRNA sense strand
aaagcagagucaucaagga

SEQ ID NO: 2142463 - RNA, 19 nt, Homo sapiens
  misc_RNA (1)...(19): siRNA sense strand
gauugaaugguuuaucaga

SEQ ID NO: 2142464 - RNA, 19 nt, Homo sapiens
  misc_RNA (1)...(19): siRNA sense strand
ucuggcaucugaagaacuu

SEQ ID NO: 2142465 - RNA, 19 nt, Homo sapiens
  misc_RNA (1)...(19): siRNA sense strand
agagcaagauucgauacaa

SEQ ID NO: 2142466 - RNA, 19 nt, Homo sapiens
  misc_RNA (1)...(19): siRNA sense strand
agacaucaaagcugacaaa

SEQ ID NO: 2142467 - RNA, 19 nt, Homo sapiens
  misc_RNA (1)...(19): siRNA sense strand
ugaccucauugaaguugaa

SEQ ID NO: 2142468 - RNA, 19 nt, Homo sapiens
  misc_RNA (1)...(19): siRNA sense strand
guaccaaaggguguucuaa

SEQ ID NO: 2142469 - RNA, 19 nt, Homo sapiens
  misc_RNA (1)...(19): siRNA sense strand
gaaccguugauuggagaua

SEQ ID NO: 2142470 - RNA, 19 nt, Homo sapiens
  misc_RNA (1)...(19): siRNA sense strand
gcggcuuccuguccaaaga

SEQ ID NO: 2142471 - RNA, 19 nt, Homo sapiens
  misc_RNA (1)...(19): siRNA sense strand
acauguggccuuucauuug

SEQ ID NO: 2142472 - RNA, 19 nt, Homo sapiens
  misc_RNA (1)...(19): siRNA sense strand
uauugaagcucaggaucuu

SEQ ID NO: 2142473 - RNA, 19 nt, Homo sapiens
  misc_RNA (1)...(19): siRNA sense strand
gcucgacguugccgugaag

SEQ ID NO: 2142474 - RNA, 19 nt, Homo sapiens
  misc_RNA (1)...(19): siRNA sense strand
aaacaguccucacaccuua

SEQ ID NO: 2142475 - RNA, 19 nt, Homo sapiens
  misc_RNA (1)...(19): siRNA sense strand
ggacuuaaccaauguuuga

SEQ ID NO: 2142476 - RNA, 19 nt, Homo sapiens
  misc_RNA (1)...(19): siRNA sense strand
cuacaaaugugaaguaugu

SEQ ID NO: 2142477 - RNA, 19 nt, Homo sapiens
  misc_RNA (1)...(19): siRNA sense strand
cuacaaaugugaacaaugu

SEQ ID NO: 2142478 - RNA, 19 nt, Homo sapiens
  misc_RNA (1)...(19): siRNA sense strand
gaagagaaacccuacaaau

SEQ ID NO: 2142479 - RNA, 19 nt, Homo sapiens
  misc_RNA (1)...(19): siRNA sense strand
cuacaaaugugaagagugu

SEQ ID NO: 2142480 - RNA, 19 nt, Homo sapiens
  misc_RNA (1)...(19): siRNA sense strand
gagaaacccuacaaaugug

SEQ ID NO: 2142481 - RNA, 19 nt, Homo sapiens
  misc_RNA (1)...(19): siRNA sense strand
caccaauccucaauccuua

SEQ ID NO: 2142482 - RNA, 19 nt, Homo sapiens
  misc_RNA (1)...(19): siRNA sense strand
ccacaaaccuuucuaaacc

SEQ ID NO: 2142483 - RNA, 19 nt, Homo sapiens
  misc_RNA (1)...(19): siRNA sense strand
gagaggaaccauacaaaug

SEQ ID NO: 2142484 - RNA, 19 nt, Homo sapiens
  misc_RNA (1)...(19): siRNA sense strand
gauaauucguacuggagaa

SEQ ID NO: 2142485 - RNA, 19 nt, Homo sapiens
  misc_RNA (1)...(19): siRNA sense strand
agagaaacccuacaaaugu

SEQ ID NO: 2142486 - RNA, 19 nt, Homo sapiens
  misc_RNA (1)...(19): siRNA sense strand
ggagaggaaccauacaaau

SEQ ID NO: 2142487 - RNA, 19 nt, Homo sapiens
  misc_RNA (1)...(19): siRNA sense strand
ggacauaagaauuuacagu

SEQ ID NO: 2142488 - RNA, 19 nt, Homo sapiens
  misc_RNA (1)...(19): siRNA sense strand
guaaagaaugugacaaauc

SEQ ID NO: 2142489 - RNA, 19 nt, Homo sapiens
  misc_RNA (1)...(19): siRNA sense strand
acacugagcagauauggaa

SEQ ID NO: 2142490 - RNA, 19 nt, Homo sapiens
  misc_RNA (1)...(19): siRNA sense strand
uggcaaagcuuuuaaccua

SEQ ID NO: 2142491 - RNA, 19 nt, Homo sapiens
  misc_RNA (1)...(19): siRNA sense strand
ccucacaccuuacuagaca

SEQ ID NO: 2142492 - RNA, 19 nt, Homo sapiens
  misc_RNA (1)...(19): siRNA sense strand
ccucaauccuuacuaaaca

SEQ ID NO: 2142493 - RNA, 19 nt, Homo sapiens
  misc_RNA (1)...(19): siRNA sense strand
caagauaagacauacugaa

SEQ ID NO: 2142494 - RNA, 19 nt, Homo sapiens
  misc_RNA (1)...(19): siRNA sense strand
agacacaagauaagacaua

SEQ ID NO: 2142495 - RNA, 19 nt, Homo sapiens
  misc_RNA (1)...(19): siRNA sense strand
acgccuaacucaacauaaa

SEQ ID NO: 2142496 - RNA, 19 nt, Homo sapiens
  misc_RNA (1)...(19): siRNA sense strand
auacaaaugugaggaaugu

SEQ ID NO: 2142497 - RNA, 19 nt, Homo sapiens
  misc_RNA (1)...(19): siRNA sense strand
cuauaaaugugcacacugu

SEQ ID NO: 2142498 - RNA, 19 nt, Homo sapiens
  misc_RNA (1)...(19): siRNA sense strand
agaaaaggcuguaaaagug

SEQ ID NO: 2142499 - RNA, 19 nt, Homo sapiens
  misc_RNA (1)...(19): siRNA sense strand
gaggaaccauacaaaugug

SEQ ID NO: 2142500 - RNA, 19 nt, Homo sapiens
  misc_RNA (1)...(19): siRNA sense strand
aagagaaacccuacaaaug

SEQ ID NO: 2142501 - RNA, 19 nt, Homo sapiens
  misc_RNA (1)...(19): siRNA sense strand
gagcagaacauaaaagauu

SEQ ID NO: 2142502 - RNA, 19 nt, Homo sapiens
  misc_RNA (1)...(19): siRNA sense strand
aauccucaauccuuacuaa

SEQ ID NO: 2142503 - RNA, 19 nt, Homo sapiens
  misc_RNA (1)...(19): siRNA sense strand
caaauagacacaagauaag

SEQ ID NO: 2142504 - RNA, 19 nt, Homo sapiens
  misc_RNA (1)...(19): siRNA sense strand
gaaaauucauacuggagaa

SEQ ID NO: 2142505 - RNA, 19 nt, Homo sapiens
  misc_RNA (1)...(19): siRNA sense strand
acaaaccuuucuaaaccua

SEQ ID NO: 2142506 - RNA, 19 nt, Homo sapiens
  misc_RNA (1)...(19): siRNA sense strand
ggcuagagcagaacauaaa

SEQ ID NO: 2142507 - RNA, 19 nt, Homo sapiens
  misc_RNA (1)...(19): siRNA sense strand
uaauggacuuaaccaaugu

SEQ ID NO: 2142508 - RNA, 19 nt, Homo sapiens
  misc_RNA (1)...(19): siRNA sense strand
cauaagauaauucguacug

SEQ ID NO: 2142509 - RNA, 19 nt, Homo sapiens
  misc_RNA (1)...(19): siRNA sense strand
gaaaauuaccacaagcaaa

SEQ ID NO: 2142510 - RNA, 19 nt, Homo sapiens
  misc_RNA (1)...(19): siRNA sense strand
agaggaaccauacaaaugu

SEQ ID NO: 2142511 - RNA, 19 nt, Homo sapiens
  misc_RNA (1)...(19): siRNA sense strand
ucaccaauccucaauccuu

SEQ ID NO: 2142512 - RNA, 19 nt, Homo sapiens
  misc_RNA (1)...(19): siRNA sense strand
uaacugguccacaaaccuu

SEQ ID NO: 2142513 - RNA, 19 nt, Homo sapiens
  misc_RNA (1)...(19): siRNA sense strand
guggcaaggucuuuaagca

SEQ ID NO: 2142514 - RNA, 19 nt, Homo sapiens
  misc_RNA (1)...(19): siRNA sense strand
uaaacaguccucacaccuu

SEQ ID NO: 2142515 - RNA, 19 nt, Homo sapiens
  misc_RNA (1)...(19): siRNA sense strand
ugaagagaaacccuacaaa

SEQ ID NO: 2142516 - RNA, 19 nt, Homo sapiens
  misc_RNA (1)...(19): siRNA sense strand
caauguggcaaggucuuua

SEQ ID NO: 2142517 - RNA, 19 nt, Homo sapiens
  misc_RNA (1)...(19): siRNA sense strand
ucacaccuuacuagacaua

SEQ ID NO: 2142518 - RNA, 19 nt, Homo sapiens
  misc_RNA (1)...(19): siRNA sense strand
gacacaagauaagacauac

SEQ ID NO: 2142519 - RNA, 19 nt, Homo sapiens
  misc_RNA (1)...(19): siRNA sense strand
gcaaagcuuuuaaccuauc

SEQ ID NO: 2142520 - RNA, 19 nt, Homo sapiens
  misc_RNA (1)...(19): siRNA sense strand
ugaggaauguggcaaagcu

SEQ ID NO: 2142521 - RNA, 19 nt, Homo sapiens
  misc_RNA (1)...(19): siRNA sense strand
aaaguguggaugaguguaa

SEQ ID NO: 2142522 - RNA, 19 nt, Homo sapiens
  misc_RNA (1)...(19): siRNA sense strand
gguccacaaaccuuucuaa

SEQ ID NO: 2142523 - RNA, 19 nt, Homo sapiens
  misc_RNA (1)...(19): siRNA sense strand
ucacgccuaacucaacaua

SEQ ID NO: 2142524 - RNA, 19 nt, Homo sapiens
  misc_RNA (1)...(19): siRNA sense strand
aaaucacuuugcaugcuuu

SEQ ID NO: 2142525 - RNA, 19 nt, Homo sapiens
  misc_RNA (1)...(19): siRNA sense strand
gaaacccuacaaaugugaa

SEQ ID NO: 2142526 - RNA, 19 nt, Homo sapiens
  misc_RNA (1)...(19): siRNA sense strand
ucagauguaaagaauguga

SEQ ID NO: 2142527 - RNA, 19 nt, Homo sapiens
  misc_RNA (1)...(19): siRNA sense strand
gaauguggcaaagcuuuua

SEQ ID NO: 2142528 - RNA, 19 nt, Homo sapiens
  misc_RNA (1)...(19): siRNA sense strand
ccauacaaaugugaggaau

SEQ ID NO: 2142529 - RNA, 19 nt, Homo sapiens
  misc_RNA (1)...(19): siRNA sense strand
guccacaaaccuuucuaaa

SEQ ID NO: 2142530 - RNA, 19 nt, Homo sapiens
  misc_RNA (1)...(19): siRNA sense strand
cacaagauaagacauacug

SEQ ID NO: 2142531 - RNA, 19 nt, Homo sapiens
  misc_RNA (1)...(19): siRNA sense strand
gaaaaggcuguaaaagugu

SEQ ID NO: 2142532 - RNA, 19 nt, Homo sapiens
  misc_RNA (1)...(19): siRNA sense strand
aauuuauacuggagaggaa

SEQ ID NO: 2142533 - RNA, 19 nt, Homo sapiens
  misc_RNA (1)...(19): siRNA sense strand
aaaccuuucuaaaccuaag

SEQ ID NO: 2142534 - RNA, 19 nt, Homo sapiens
  misc_RNA (1)...(19): siRNA sense strand
uggagaggaaccauacaaa

SEQ ID NO: 2142535 - RNA, 19 nt, Homo sapiens
  misc_RNA (1)...(19): siRNA sense strand
caaaccuuucuaaaccuaa

SEQ ID NO: 2142536 - RNA, 19 nt, Homo sapiens
  misc_RNA (1)...(19): siRNA sense strand
aaugugaaguauguggaaa

SEQ ID NO: 2142537 - RNA, 19 nt, Homo sapiens
  misc_RNA (1)...(19): siRNA sense strand
ugcaugcuuucacgccuaa

SEQ ID NO: 2142538 - RNA, 19 nt, Homo sapiens
  misc_RNA (1)...(19): siRNA sense strand
gcacauaagaucauucaua

SEQ ID NO: 2142539 - RNA, 19 nt, Homo sapiens
  misc_RNA (1)...(19): siRNA sense strand
ccacaaauaugaagaaugu

SEQ ID NO: 2142540 - RNA, 19 nt, Homo sapiens
  misc_RNA (1)...(19): siRNA sense strand
aaacaguccucacaccuua

SEQ ID NO: 2142541 - RNA, 19 nt, Homo sapiens
  misc_RNA (1)...(19): siRNA sense strand
ggacuuaaccaauguuuga

SEQ ID NO: 2142542 - RNA, 19 nt, Homo sapiens
  misc_RNA (1)...(19): siRNA sense strand
agagaaaccuuacaaaugu

SEQ ID NO: 2142543 - RNA, 19 nt, Homo sapiens
  misc_RNA (1)...(19): siRNA sense strand
cuacaaaugugaaguaugu

SEQ ID NO: 2142544 - RNA, 19 nt, Homo sapiens
  misc_RNA (1)...(19): siRNA sense strand
cuacaaaugugaagaaugu

SEQ ID NO: 2142545 - RNA, 19 nt, Homo sapiens
  misc_RNA (1)...(19): siRNA sense strand
gaaugaaacccuacaaaug

SEQ ID NO: 2142546 - RNA, 19 nt, Homo sapiens
  misc_RNA (1)...(19): siRNA sense strand
gagagaaaccuuacaaaug

SEQ ID NO: 2142547 - RNA, 19 nt, Homo sapiens
  misc_RNA (1)...(19): siRNA sense strand
cuacaaaugugaagaaugu

SEQ ID NO: 2142548 - RNA, 19 nt, Homo sapiens
  misc_RNA (1)...(19): siRNA sense strand
cuacaaaugugaacaaugu

SEQ ID NO: 2142549 - RNA, 19 nt, Homo sapiens
  misc_RNA (1)...(19): siRNA sense strand
gaagagaaacccuacaaau

SEQ ID NO: 2142550 - RNA, 19 nt, Homo sapiens
  misc_RNA (1)...(19): siRNA sense strand
gagaaacucuacaaaugug

SEQ ID NO: 2142551 - RNA, 19 nt, Homo sapiens
  misc_RNA (1)...(19): siRNA sense strand
gcaaagcucacugaacaua

SEQ ID NO: 2142552 - RNA, 19 nt, Homo sapiens
  misc_RNA (1)...(19): siRNA sense strand
acaagaagauucauacuag

SEQ ID NO: 2142553 - RNA, 19 nt, Homo sapiens
  misc_RNA (1)...(19): siRNA sense strand
ucucaaaccuuacuaaaca

SEQ ID NO: 2142554 - RNA, 19 nt, Homo sapiens
  misc_RNA (1)...(19): siRNA sense strand
cuacaaaugugaagagugu

SEQ ID NO: 2142555 - RNA, 19 nt, Homo sapiens
  misc_RNA (1)...(19): siRNA sense strand
cuacaaaugugaacgaugu

SEQ ID NO: 2142556 - RNA, 19 nt, Homo sapiens
  misc_RNA (1)...(19): siRNA sense strand
gagaaagccuacaaaugug

SEQ ID NO: 2142557 - RNA, 19 nt, Homo sapiens
  misc_RNA (1)...(19): siRNA sense strand
gagaaacccuacaaaugug

SEQ ID NO: 2142558 - RNA, 19 nt, Homo sapiens
  misc_RNA (1)...(19): siRNA sense strand
ccgcaaagcucacugaaca

SEQ ID NO: 2142559 - RNA, 19 nt, Homo sapiens
  misc_RNA (1)...(19): siRNA sense strand
caccaauccucaauccuua

SEQ ID NO: 2142560 - RNA, 19 nt, Homo sapiens
  misc_RNA (1)...(19): siRNA sense strand
ggagagaaaccuuacaaau

SEQ ID NO: 2142561 - RNA, 19 nt, Homo sapiens
  misc_RNA (1)...(19): siRNA sense strand
agagaaagccuacaaaugu

SEQ ID NO: 2142562 - RNA, 19 nt, Homo sapiens
  misc_RNA (1)...(19): siRNA sense strand
ccacaaaccuuucuaaacc

SEQ ID NO: 2142563 - RNA, 19 nt, Homo sapiens
  misc_RNA (1)...(19): siRNA sense strand
gagaggaaccauacaaaug

SEQ ID NO: 2142564 - RNA, 19 nt, Homo sapiens
  misc_RNA (1)...(19): siRNA sense strand
gagagaaagccuacaaaug

SEQ ID NO: 2142565 - RNA, 19 nt, Homo sapiens
  misc_RNA (1)...(19): siRNA sense strand
ugaagaauguggcauaucu

SEQ ID NO: 2142566 - RNA, 19 nt, Homo sapiens
  misc_RNA (1)...(19): siRNA sense strand
gagagaaaccccacaaaua

SEQ ID NO: 2142567 - RNA, 19 nt, Homo sapiens
  misc_RNA (1)...(19): siRNA sense strand
caagaagauucauacuaga

SEQ ID NO: 2142568 - RNA, 19 nt, Homo sapiens
  misc_RNA (1)...(19): siRNA sense strand
uaagaugauucacacuuga

SEQ ID NO: 2142569 - RNA, 19 nt, Homo sapiens
  misc_RNA (1)...(19): siRNA sense strand
caccgauacucaauccuua

SEQ ID NO: 2142570 - RNA, 19 nt, Homo sapiens
  misc_RNA (1)...(19): siRNA sense strand
ccucaacucuuauuacaca

SEQ ID NO: 2142571 - RNA, 19 nt, Homo sapiens
  misc_RNA (1)...(19): siRNA sense strand
gaauguggcauaucuuuua

SEQ ID NO: 2142572 - RNA, 19 nt, Homo sapiens
  misc_RNA (1)...(19): siRNA sense strand
gcacagcggaauguauaua

SEQ ID NO: 2142573 - RNA, 19 nt, Homo sapiens
  misc_RNA (1)...(19): siRNA sense strand
agccaacucucaaaccuua

SEQ ID NO: 2142574 - RNA, 19 nt, Homo sapiens
  misc_RNA (1)...(19): siRNA sense strand
gauaauucguacuggagaa

SEQ ID NO: 2142575 - RNA, 19 nt, Homo sapiens
  misc_RNA (1)...(19): siRNA sense strand
uuacaaaugugaggaaugu

SEQ ID NO: 2142576 - RNA, 19 nt, Homo sapiens
  misc_RNA (1)...(19): siRNA sense strand
cacauaagaucauucauac

SEQ ID NO: 2142577 - RNA, 19 nt, Homo sapiens
  misc_RNA (1)...(19): siRNA sense strand
agagaaacccuacaaaugu

SEQ ID NO: 2142578 - RNA, 19 nt, Homo sapiens
  misc_RNA (1)...(19): siRNA sense strand
gaacuuuacuaugcauaag

SEQ ID NO: 2142579 - RNA, 19 nt, Homo sapiens
  misc_RNA (1)...(19): siRNA sense strand
ggagaggaaccauacaaau

SEQ ID NO: 2142580 - RNA, 19 nt, Homo sapiens
  misc_RNA (1)...(19): siRNA sense strand
ggacauaagaauuuacagu

SEQ ID NO: 2142581 - RNA, 19 nt, Homo sapiens
  misc_RNA (1)...(19): siRNA sense strand
ucucaacacuuacuauaca

SEQ ID NO: 2142582 - RNA, 19 nt, Homo sapiens
  misc_RNA (1)...(19): siRNA sense strand
gcucacugaacauaaguua

SEQ ID NO: 2142583 - RNA, 19 nt, Homo sapiens
  misc_RNA (1)...(19): siRNA sense strand
guaaagaaugugacaaauc

SEQ ID NO: 2142584 - RNA, 19 nt, Homo sapiens
  misc_RNA (1)...(19): siRNA sense strand
acacugagcagauauggaa

SEQ ID NO: 2142585 - RNA, 19 nt, Homo sapiens
  misc_RNA (1)...(19): siRNA sense strand
gagaaaccuuacaaaugug

SEQ ID NO: 2142586 - RNA, 19 nt, Homo sapiens
  misc_RNA (1)...(19): siRNA sense strand
cauaagaucauucauacug

SEQ ID NO: 2142587 - RNA, 19 nt, Homo sapiens
  misc_RNA (1)...(19): siRNA sense strand
uggcaaagcuuuuaaccua

SEQ ID NO: 2142588 - RNA, 19 nt, Homo sapiens
  misc_RNA (1)...(19): siRNA sense strand
ccucacaccuuacuagaca

SEQ ID NO: 2142589 - RNA, 19 nt, Homo sapiens
  misc_RNA (1)...(19): siRNA sense strand
ccucaauccuuacuaaaca

SEQ ID NO: 2142590 - RNA, 19 nt, Homo sapiens
  misc_RNA (1)...(19): siRNA sense strand
caagauaagacauacugaa

SEQ ID NO: 2142591 - RNA, 19 nt, Homo sapiens
  misc_RNA (1)...(19): siRNA sense strand
agacacaagauaagacaua

SEQ ID NO: 2142592 - RNA, 19 nt, Homo sapiens
  misc_RNA (1)...(19): siRNA sense strand
acgccuaacucaacauaaa

SEQ ID NO: 2142593 - RNA, 19 nt, Homo sapiens
  misc_RNA (1)...(19): siRNA sense strand
aaccaguccucacaccuua

SEQ ID NO: 2142594 - RNA, 19 nt, Homo sapiens
  misc_RNA (1)...(19): siRNA sense strand
auacaaaugugaggaaugu

SEQ ID NO: 2142595 - RNA, 19 nt, Homo sapiens
  misc_RNA (1)...(19): siRNA sense strand
cuauaaaugugcacacugu

SEQ ID NO: 2142596 - RNA, 19 nt, Homo sapiens
  misc_RNA (1)...(19): siRNA sense strand
agaaaaggcuguaaaagug

SEQ ID NO: 2142597 - RNA, 19 nt, Homo sapiens
  misc_RNA (1)...(19): siRNA sense strand
aaugaaacccuacaaaugu

SEQ ID NO: 2142598 - RNA, 19 nt, Homo sapiens
  misc_RNA (1)...(19): siRNA sense strand
ucacaacuugcuauacaua

SEQ ID NO: 2142599 - RNA, 19 nt, Homo sapiens
  misc_RNA (1)...(19): siRNA sense strand
ucucacaacuugcuauaca

SEQ ID NO: 2142600 - RNA, 19 nt, Homo sapiens
  misc_RNA (1)...(19): siRNA sense strand
cuuaacaacuuacugaaca

SEQ ID NO: 2142601 - RNA, 19 nt, Homo sapiens
  misc_RNA (1)...(19): siRNA sense strand
gagcagaacauaaaagauu

SEQ ID NO: 2142602 - RNA, 19 nt, Homo sapiens
  misc_RNA (1)...(19): siRNA sense strand
gaggaaccauacaaaugug

SEQ ID NO: 2142603 - RNA, 19 nt, Homo sapiens
  misc_RNA (1)...(19): siRNA sense strand
aagagaaacccuacaaaug

SEQ ID NO: 2142604 - RNA, 19 nt, Homo sapiens
  misc_RNA (1)...(19): siRNA sense strand
gaauguauauaggcaugug

SEQ ID NO: 2142605 - RNA, 19 nt, Homo sapiens
  misc_RNA (1)...(19): siRNA sense strand
ggagaaaccccacaaaugu

SEQ ID NO: 2142606 - RNA, 19 nt, Homo sapiens
  misc_RNA (1)...(19): siRNA sense strand
aauccucaauccuuacuaa

SEQ ID NO: 2142607 - RNA, 19 nt, Homo sapiens
  misc_RNA (1)...(19): siRNA sense strand
caaauagacacaagauaag

SEQ ID NO: 2142608 - RNA, 19 nt, Homo sapiens
  misc_RNA (1)...(19): siRNA sense strand
gagcaaaaccuuggaaauu

SEQ ID NO: 2142609 - RNA, 19 nt, Homo sapiens
  misc_RNA (1)...(19): siRNA sense strand
ugaaugaaacccuacaaau

SEQ ID NO: 2142610 - RNA, 19 nt, Homo sapiens
  misc_RNA (1)...(19): siRNA sense strand
auaagaugauucacacuug

SEQ ID NO: 2142611 - RNA, 19 nt, Homo sapiens
  misc_RNA (1)...(19): siRNA sense strand
cacaagaagauucauacua

SEQ ID NO: 2142612 - RNA, 19 nt, Homo sapiens
  misc_RNA (1)...(19): siRNA sense strand
gaaaauucauacuggagaa

SEQ ID NO: 2142613 - RNA, 19 nt, Homo sapiens
  misc_RNA (1)...(19): siRNA sense strand
acaaaccuuucuaaaccua

SEQ ID NO: 2142614 - RNA, 19 nt, Homo sapiens
  misc_RNA (1)...(19): siRNA sense strand
ggcuagagcagaacauaaa

SEQ ID NO: 2142615 - RNA, 19 nt, Homo sapiens
  misc_RNA (1)...(19): siRNA sense strand
gcaaaaccuuggaaauuca

SEQ ID NO: 2142616 - RNA, 19 nt, Homo sapiens
  misc_RNA (1)...(19): siRNA sense strand
ggcaugugauguuagagaa

SEQ ID NO: 2142617 - RNA, 19 nt, Homo sapiens
  misc_RNA (1)...(19): siRNA sense strand
caaagcucacugaacauaa

SEQ ID NO: 2142618 - RNA, 19 nt, Homo sapiens
  misc_RNA (1)...(19): siRNA sense strand
ugaagaauguggcaaagcu

SEQ ID NO: 2142619 - RNA, 19 nt, Homo sapiens
  misc_RNA (1)...(19): siRNA sense strand
gaaacucuacaaaugugaa

SEQ ID NO: 2142620 - RNA, 19 nt, Homo sapiens
  misc_RNA (1)...(19): siRNA sense strand
caacuugcuauacauaaga

SEQ ID NO: 2142621 - RNA, 19 nt, Homo sapiens
  misc_RNA (1)...(19): siRNA sense strand
caacucuuacugcacauaa

SEQ ID NO: 2142622 - RNA, 19 nt, Homo sapiens
  misc_RNA (1)...(19): siRNA sense strand
ugaagaauguggcaaagcu

SEQ ID NO: 2142623 - RNA, 19 nt, Homo sapiens
  misc_RNA (1)...(19): siRNA sense strand
uaauggacuuaaccaaugu

SEQ ID NO: 2142624 - RNA, 19 nt, Homo sapiens
  misc_RNA (1)...(19): siRNA sense strand
aauucaaacuggagagaaa

SEQ ID NO: 2142625 - RNA, 19 nt, Homo sapiens
  misc_RNA (1)...(19): siRNA sense strand
gauguuagagaacuacaga

SEQ ID NO: 2142626 - RNA, 19 nt, Homo sapiens
  misc_RNA (1)...(19): siRNA sense strand
auauaggcaugugauguua

SEQ ID NO: 2142627 - RNA, 19 nt, Homo sapiens
  misc_RNA (1)...(19): siRNA sense strand
ggauguggccauagaguuc

SEQ ID NO: 2142628 - RNA, 19 nt, Homo sapiens
  misc_RNA (1)...(19): siRNA sense strand
ugaggaauguggcaaaggu

SEQ ID NO: 2142629 - RNA, 19 nt, Homo sapiens
  misc_RNA (1)...(19): siRNA sense strand
gaaagccuacaaaugugaa

SEQ ID NO: 2142630 - RNA, 19 nt, Homo sapiens
  misc_RNA (1)...(19): siRNA sense strand
uaugaagaaugugguaaug

SEQ ID NO: 2142631 - RNA, 19 nt, Homo sapiens
  misc_RNA (1)...(19): siRNA sense strand
caaagaaugugguaaaacu

SEQ ID NO: 2142632 - RNA, 19 nt, Homo sapiens
  misc_RNA (1)...(19): siRNA sense strand
guccucaacucuuauuaca

SEQ ID NO: 2142633 - RNA, 19 nt, Homo sapiens
  misc_RNA (1)...(19): siRNA sense strand
uuucaacccuuauuacaca

SEQ ID NO: 2142634 - RNA, 19 nt, Homo sapiens
  misc_RNA (1)...(19): siRNA sense strand
gaacgauguggcaguuguu

SEQ ID NO: 2142635 - RNA, 19 nt, Homo sapiens
  misc_RNA (1)...(19): siRNA sense strand
gaagaaugugguaaugcuu

SEQ ID NO: 2142636 - RNA, 19 nt, Homo sapiens
  misc_RNA (1)...(19): siRNA sense strand
ugaagaaugugguaaugcu

SEQ ID NO: 2142637 - RNA, 19 nt, Homo sapiens
  misc_RNA (1)...(19): siRNA sense strand
uggcaaagcuuuuaaccaa

SEQ ID NO: 2142638 - RNA, 19 nt, Homo sapiens
  misc_RNA (1)...(19): siRNA sense strand
aagcagggcccuagcagua

SEQ ID NO: 2142639 - RNA, 19 nt, Homo sapiens
  misc_RNA (1)...(19): siRNA sense strand
gcugcaggcugagcuagaa

SEQ ID NO: 2142640 - RNA, 19 nt, Homo sapiens
  misc_RNA (1)...(19): siRNA sense strand
gcagggcccuagcaguaag

SEQ ID NO: 2142641 - RNA, 19 nt, Homo sapiens
  misc_RNA (1)...(19): siRNA sense strand
ggcccuagcaguaagaaga

SEQ ID NO: 2142642 - RNA, 19 nt, Homo sapiens
  misc_RNA (1)...(19): siRNA sense strand
acuacgcgcuggccaagga

SEQ ID NO: 2142643 - RNA, 19 nt, Homo sapiens
  misc_RNA (1)...(19): siRNA sense strand
caucaaauaccaggagcuu

SEQ ID NO: 2142644 - RNA, 19 nt, Homo sapiens
  misc_RNA (1)...(19): siRNA sense strand
ggacgcaggcagagaagcu

SEQ ID NO: 2142645 - RNA, 19 nt, Homo sapiens
  misc_RNA (1)...(19): siRNA sense strand
ggaggcagaggagcagaug

SEQ ID NO: 2142646 - RNA, 19 nt, Homo sapiens
  misc_RNA (1)...(19): siRNA sense strand
aagcagggcccuagcagua

SEQ ID NO: 2142647 - RNA, 19 nt, Homo sapiens
  misc_RNA (1)...(19): siRNA sense strand
gcugcaggcugagcuagaa

SEQ ID NO: 2142648 - RNA, 19 nt, Homo sapiens
  misc_RNA (1)...(19): siRNA sense strand
gcagggcccuagcaguaag

SEQ ID NO: 2142649 - RNA, 19 nt, Homo sapiens
  misc_RNA (1)...(19): siRNA sense strand
ggcccuagcaguaagaaga

SEQ ID NO: 2142650 - RNA, 19 nt, Homo sapiens
  misc_RNA (1)...(19): siRNA sense strand
acuacgcgcuggccaagga

SEQ ID NO: 2142651 - RNA, 19 nt, Homo sapiens
  misc_RNA (1)...(19): siRNA sense strand
caucaaauaccaggagcuu

SEQ ID NO: 2142652 - RNA, 19 nt, Homo sapiens
  misc_RNA (1)...(19): siRNA sense strand
ggacgcaggcagagaagcu

SEQ ID NO: 2142653 - RNA, 19 nt, Homo sapiens
  misc_RNA (1)...(19): siRNA sense strand
ggaggcagaggagcagaug

SEQ ID NO: 2142654 - RNA, 19 nt, Homo sapiens
  misc_RNA (1)...(19): siRNA sense strand
ggaaauggauaaagugaug

SEQ ID NO: 2142655 - RNA, 19 nt, Homo sapiens
  misc_RNA (1)...(19): siRNA sense strand
ccaagaagaugagcaguuu

SEQ ID NO: 2142656 - RNA, 19 nt, Homo sapiens
  misc_RNA (1)...(19): siRNA sense strand
gacaaaagcuuccggcuaa

SEQ ID NO: 2142657 - RNA, 19 nt, Homo sapiens
  misc_RNA (1)...(19): siRNA sense strand
aaagugaugccucugauua

SEQ ID NO: 2142658 - RNA, 19 nt, Homo sapiens
  misc_RNA (1)...(19): siRNA sense strand
caccaagcauggauuauug

SEQ ID NO: 2142659 - RNA, 19 nt, Homo sapiens
  misc_RNA (1)...(19): siRNA sense strand
gaagggcacaggcuacaaa

SEQ ID NO: 2142660 - RNA, 19 nt, Homo sapiens
  misc_RNA (1)...(19): siRNA sense strand
gugcaucaguggcuggaua

SEQ ID NO: 2142661 - RNA, 19 nt, Homo sapiens
  misc_RNA (1)...(19): siRNA sense strand
cagauuacauuuacccaau

SEQ ID NO: 2142662 - RNA, 19 nt, Homo sapiens
  misc_RNA (1)...(19): siRNA sense strand
gauuacauuuacccaauug

SEQ ID NO: 2142663 - RNA, 19 nt, Homo sapiens
  misc_RNA (1)...(19): siRNA sense strand
ucagugaccucuacgcaau

SEQ ID NO: 2142664 - RNA, 19 nt, Homo sapiens
  misc_RNA (1)...(19): siRNA sense strand
gaauuuaucaugccagaca

SEQ ID NO: 2142665 - RNA, 19 nt, Homo sapiens
  misc_RNA (1)...(19): siRNA sense strand
gauaaagugaugccucuga

SEQ ID NO: 2142666 - RNA, 19 nt, Homo sapiens
  misc_RNA (1)...(19): siRNA sense strand
gauagcaugugccaauguc

SEQ ID NO: 2142667 - RNA, 19 nt, Homo sapiens
  misc_RNA (1)...(19): siRNA sense strand
guggugcuauugcgacuuu

SEQ ID NO: 2142668 - RNA, 19 nt, Homo sapiens
  misc_RNA (1)...(19): siRNA sense strand
acagggaaauggauaaagu

SEQ ID NO: 2142669 - RNA, 19 nt, Homo sapiens
  misc_RNA (1)...(19): siRNA sense strand
gugccaauguccucaguga

SEQ ID NO: 2142670 - RNA, 19 nt, Homo sapiens
  misc_RNA (1)...(19): siRNA sense strand
agacgacucuuacgugaca

SEQ ID NO: 2142671 - RNA, 19 nt, Homo sapiens
  misc_RNA (1)...(19): siRNA sense strand
gaccaccaagcauggauua

SEQ ID NO: 2142672 - RNA, 19 nt, Homo sapiens
  misc_RNA (1)...(19): siRNA sense strand
gggcacaggcuacaaagug

SEQ ID NO: 2142673 - RNA, 19 nt, Homo sapiens
  misc_RNA (1)...(19): siRNA sense strand
ggcuggauauuccuaagaa

SEQ ID NO: 2142674 - RNA, 19 nt, Homo sapiens
  misc_RNA (1)...(19): siRNA sense strand
gaagagucacuaccacugu

SEQ ID NO: 2142675 - RNA, 19 nt, Homo sapiens
  misc_RNA (1)...(19): siRNA sense strand
gggcuuuccuugguucaaa

SEQ ID NO: 2142676 - RNA, 19 nt, Homo sapiens
  misc_RNA (1)...(19): siRNA sense strand
gauacuugcauuccuuuga

SEQ ID NO: 2142677 - RNA, 19 nt, Homo sapiens
  misc_RNA (1)...(19): siRNA sense strand
gcgggcuucugaucuguuu

SEQ ID NO: 2142678 - RNA, 19 nt, Homo sapiens
  misc_RNA (1)...(19): siRNA sense strand
acgaggaggugaugaugaa

SEQ ID NO: 2142679 - RNA, 19 nt, Homo sapiens
  misc_RNA (1)...(19): siRNA sense strand
ccaccaagcauggauuauu

SEQ ID NO: 2142680 - RNA, 19 nt, Homo sapiens
  misc_RNA (1)...(19): siRNA sense strand
caacagggaaauggauaaa

SEQ ID NO: 2142681 - RNA, 19 nt, Homo sapiens
  misc_RNA (1)...(19): siRNA sense strand
guuuggguguuacgaauug

SEQ ID NO: 2142682 - RNA, 19 nt, Homo sapiens
  misc_RNA (1)...(19): siRNA sense strand
guacuaaaccccuggauug

SEQ ID NO: 2142683 - RNA, 19 nt, Homo sapiens
  misc_RNA (1)...(19): siRNA sense strand
uuauugggauuguagagaa

SEQ ID NO: 2142684 - RNA, 19 nt, Homo sapiens
  misc_RNA (1)...(19): siRNA sense strand
ggauauuccuaagaaaugg

SEQ ID NO: 2142685 - RNA, 19 nt, Homo sapiens
  misc_RNA (1)...(19): siRNA sense strand
caggauagcaugugccaau

SEQ ID NO: 2142686 - RNA, 19 nt, Homo sapiens
  misc_RNA (1)...(19): siRNA sense strand
gcuggauauuccuaagaaa

SEQ ID NO: 2142687 - RNA, 19 nt, Homo sapiens
  misc_RNA (1)...(19): siRNA sense strand
cuucugaucuguuuaccau

SEQ ID NO: 2142688 - RNA, 19 nt, Homo sapiens
  misc_RNA (1)...(19): siRNA sense strand
caauuguagacgacucuua

SEQ ID NO: 2142689 - RNA, 19 nt, Homo sapiens
  misc_RNA (1)...(19): siRNA sense strand
cuuuaacgaugaugaugaa

SEQ ID NO: 2142690 - RNA, 19 nt, Homo sapiens
  misc_RNA (1)...(19): siRNA sense strand
acagaaccacuuccaagaa

SEQ ID NO: 2142691 - RNA, 19 nt, Homo sapiens
  misc_RNA (1)...(19): siRNA sense strand
ucugaucuguuuaccaugu

SEQ ID NO: 2142692 - RNA, 19 nt, Homo sapiens
  misc_RNA (1)...(19): siRNA sense strand
ugucagcccagugaauuua

SEQ ID NO: 2142693 - RNA, 19 nt, Homo sapiens
  misc_RNA (1)...(19): siRNA sense strand
ccaacagggaaauggauaa

SEQ ID NO: 2142694 - RNA, 19 nt, Homo sapiens
  misc_RNA (1)...(19): siRNA sense strand
uaaagugaugccucugauu

SEQ ID NO: 2142695 - RNA, 19 nt, Homo sapiens
  misc_RNA (1)...(19): siRNA sense strand
cgagauugcaccacaagug

SEQ ID NO: 2142696 - RNA, 19 nt, Homo sapiens
  misc_RNA (1)...(19): siRNA sense strand
cagccagaaucauagacaa

SEQ ID NO: 2142697 - RNA, 19 nt, Homo sapiens
  misc_RNA (1)...(19): siRNA sense strand
gaacauggcgaggcucaac

SEQ ID NO: 2142698 - RNA, 19 nt, Homo sapiens
  misc_RNA (1)...(19): siRNA sense strand
uuacgugacaggcaggaua

SEQ ID NO: 2142699 - RNA, 19 nt, Homo sapiens
  misc_RNA (1)...(19): siRNA sense strand
guaauaaaaugaccaacag

SEQ ID NO: 2142700 - RNA, 19 nt, Homo sapiens
  misc_RNA (1)...(19): siRNA sense strand
gguucaaacuacagauuac

SEQ ID NO: 2142701 - RNA, 19 nt, Homo sapiens
  misc_RNA (1)...(19): siRNA sense strand
caucgagauugcaccacaa

SEQ ID NO: 2142702 - RNA, 19 nt, Homo sapiens
  misc_RNA (1)...(19): siRNA sense strand
gcacuuguuuggguguuac

SEQ ID NO: 2142703 - RNA, 19 nt, Homo sapiens
  misc_RNA (1)...(19): siRNA sense strand
gggaugugcugguguugac

SEQ ID NO: 2142704 - RNA, 19 nt, Homo sapiens
  misc_RNA (1)...(19): siRNA sense strand
uaacgaugaugaugaaaag

SEQ ID NO: 2142705 - RNA, 19 nt, Homo sapiens
  misc_RNA (1)...(19): siRNA sense strand
gggcaguggcugugcauca

SEQ ID NO: 2142706 - RNA, 19 nt, Homo sapiens
  misc_RNA (1)...(19): siRNA sense strand
ucacuaccacugucuguca

SEQ ID NO: 2142707 - RNA, 19 nt, Homo sapiens
  misc_RNA (1)...(19): siRNA sense strand
ggauagcaugugccaaugu

SEQ ID NO: 2142708 - RNA, 19 nt, Homo sapiens
  misc_RNA (1)...(19): siRNA sense strand
gaagaccaccaagcaugga

SEQ ID NO: 2142709 - RNA, 19 nt, Homo sapiens
  misc_RNA (1)...(19): siRNA sense strand
gcuuccggcuaaccagauu

SEQ ID NO: 2142710 - RNA, 19 nt, Homo sapiens
  misc_RNA (1)...(19): siRNA sense strand
ugguucaaacuacagauua

SEQ ID NO: 2142711 - RNA, 19 nt, Homo sapiens
  misc_RNA (1)...(19): siRNA sense strand
uacagaaccacuuccaaga

SEQ ID NO: 2142712 - RNA, 19 nt, Homo sapiens
  misc_RNA (1)...(19): siRNA sense strand
uggauauuccuaagaaaug

SEQ ID NO: 2142713 - RNA, 19 nt, Homo sapiens
  misc_RNA (1)...(19): siRNA sense strand
auaaagugaugccucugau

SEQ ID NO: 2142714 - RNA, 19 nt, Homo sapiens
  misc_RNA (1)...(19): siRNA sense strand
ggugcuauugcgacuuuaa

SEQ ID NO: 2142715 - RNA, 19 nt, Homo sapiens
  misc_RNA (1)...(19): siRNA sense strand
gaggaggugaugaugaaca

SEQ ID NO: 2142716 - RNA, 19 nt, Homo sapiens
  misc_RNA (1)...(19): siRNA sense strand
gccagacaaugcaguacca

SEQ ID NO: 2142717 - RNA, 19 nt, Homo sapiens
  misc_RNA (1)...(19): siRNA sense strand
ggauuguccugggaagagu

SEQ ID NO: 2142718 - RNA, 19 nt, Homo sapiens
  misc_RNA (1)...(19): siRNA sense strand
caucaguggcuggauauuc

SEQ ID NO: 2142719 - RNA, 19 nt, Homo sapiens
  misc_RNA (1)...(19): siRNA sense strand
cccaagauguccugcaaaa

SEQ ID NO: 2142720 - RNA, 19 nt, Homo sapiens
  misc_RNA (1)...(19): siRNA sense strand
gcccagugaauuuaucaug

SEQ ID NO: 2142721 - RNA, 19 nt, Homo sapiens
  misc_RNA (1)...(19): siRNA sense strand
gaccaacagggaaauggau

SEQ ID NO: 2142722 - RNA, 19 nt, Homo sapiens
  misc_RNA (1)...(19): siRNA sense strand
gcauggauuauugggauug

SEQ ID NO: 2142723 - RNA, 19 nt, Homo sapiens
  misc_RNA (1)...(19): siRNA sense strand
gcuauugcgacuuuaacga

SEQ ID NO: 2142724 - RNA, 19 nt, Homo sapiens
  misc_RNA (1)...(19): siRNA sense strand
auacuugcauuccuuugag

SEQ ID NO: 2142725 - RNA, 19 nt, Homo sapiens
  misc_RNA (1)...(19): siRNA sense strand
gcuacaaagugccccaaga

SEQ ID NO: 2142726 - RNA, 19 nt, Homo sapiens
  misc_RNA (1)...(19): siRNA sense strand
acauuuacccaauuguaga

SEQ ID NO: 2142727 - RNA, 19 nt, Homo sapiens
  misc_RNA (1)...(19): siRNA sense strand
gaugugcugguguugacaa

SEQ ID NO: 2142728 - RNA, 19 nt, Homo sapiens
  misc_RNA (1)...(19): siRNA sense strand
cgacuuuaacgaugaugau

SEQ ID NO: 2142729 - RNA, 19 nt, Homo sapiens
  misc_RNA (1)...(19): siRNA sense strand
cgacacagcuuuccaaaua

SEQ ID NO: 2142730 - RNA, 19 nt, Homo sapiens
  misc_RNA (1)...(19): siRNA sense strand
gaacacagcggguggauga

SEQ ID NO: 2142731 - RNA, 19 nt, Homo sapiens
  misc_RNA (1)...(19): siRNA sense strand
gcaaggcgguucucuggaa

SEQ ID NO: 2142732 - RNA, 19 nt, Homo sapiens
  misc_RNA (1)...(19): siRNA sense strand
gaaauaaagcugccauuca

SEQ ID NO: 2142733 - RNA, 19 nt, Homo sapiens
  misc_RNA (1)...(19): siRNA sense strand
cugaauguguuucuucuua

SEQ ID NO: 2142734 - RNA, 19 nt, Homo sapiens
  misc_RNA (1)...(19): siRNA sense strand
gguaacugcugggcauuua

SEQ ID NO: 2142735 - RNA, 19 nt, Homo sapiens
  misc_RNA (1)...(19): siRNA sense strand
gcacaaacaaaucagcuuu

SEQ ID NO: 2142736 - RNA, 19 nt, Homo sapiens
  misc_RNA (1)...(19): siRNA sense strand
gagggagacugacuuuaug

SEQ ID NO: 2142737 - RNA, 19 nt, Homo sapiens
  misc_RNA (1)...(19): siRNA sense strand
gaucuuaaagguggaaaua

SEQ ID NO: 2142738 - RNA, 19 nt, Homo sapiens
  misc_RNA (1)...(19): siRNA sense strand
gguaccaguuuguuacuuu

SEQ ID NO: 2142739 - RNA, 19 nt, Homo sapiens
  misc_RNA (1)...(19): siRNA sense strand
gaacacgggcuacacguau

SEQ ID NO: 2142740 - RNA, 19 nt, Homo sapiens
  misc_RNA (1)...(19): siRNA sense strand
uccgagagcugaccacuuu

SEQ ID NO: 2142741 - RNA, 19 nt, Homo sapiens
  misc_RNA (1)...(19): siRNA sense strand
gaagcuguauucccaagau

SEQ ID NO: 2142742 - RNA, 19 nt, Homo sapiens
  misc_RNA (1)...(19): siRNA sense strand
ggacuucgccgucuaugga

SEQ ID NO: 2142743 - RNA, 19 nt, Homo sapiens
  misc_RNA (1)...(19): siRNA sense strand
ggacuuugcucuggaaucu

SEQ ID NO: 2142744 - RNA, 19 nt, Homo sapiens
  misc_RNA (1)...(19): siRNA sense strand
gugaggcucuccaugauga

SEQ ID NO: 2142745 - RNA, 19 nt, Homo sapiens
  misc_RNA (1)...(19): siRNA sense strand
gcacaaauuggacccugua

SEQ ID NO: 2142746 - RNA, 19 nt, Homo sapiens
  misc_RNA (1)...(19): siRNA sense strand
uggcgaaccugucaaguga

SEQ ID NO: 2142747 - RNA, 19 nt, Homo sapiens
  misc_RNA (1)...(19): siRNA sense strand
gacaguggaugccguacaa

SEQ ID NO: 2142748 - RNA, 19 nt, Homo sapiens
  misc_RNA (1)...(19): siRNA sense strand
uggaagauauucugggaaa

SEQ ID NO: 2142749 - RNA, 19 nt, Homo sapiens
  misc_RNA (1)...(19): siRNA sense strand
aaacggcgcugaugagucu

SEQ ID NO: 2142750 - RNA, 19 nt, Homo sapiens
  misc_RNA (1)...(19): siRNA sense strand
gaaccgagcggccagaaca

SEQ ID NO: 2142751 - RNA, 19 nt, Homo sapiens
  misc_RNA (1)...(19): siRNA sense strand
aaauaaagcugccauucag

SEQ ID NO: 2142752 - RNA, 19 nt, Homo sapiens
  misc_RNA (1)...(19): siRNA sense strand
acuagcaggucucuccuua

SEQ ID NO: 2142753 - RNA, 19 nt, Homo sapiens
  misc_RNA (1)...(19): siRNA sense strand
gagguucucaucacaguuu

SEQ ID NO: 2142754 - RNA, 19 nt, Homo sapiens
  misc_RNA (1)...(19): siRNA sense strand
ucagagaaauggugaaacu

SEQ ID NO: 2142755 - RNA, 19 nt, Homo sapiens
  misc_RNA (1)...(19): siRNA sense strand
ggaaauaaagcugccauuc

SEQ ID NO: 2142756 - RNA, 19 nt, Homo sapiens
  misc_RNA (1)...(19): siRNA sense strand
ggaugguaccaguuuguua

SEQ ID NO: 2142757 - RNA, 19 nt, Homo sapiens
  misc_RNA (1)...(19): siRNA sense strand
cgagggagacugacuuuau

SEQ ID NO: 2142758 - RNA, 19 nt, Homo sapiens
  misc_RNA (1)...(19): siRNA sense strand
gcgcucaguuccagcuauu

SEQ ID NO: 2142759 - RNA, 19 nt, Homo sapiens
  misc_RNA (1)...(19): siRNA sense strand
caaaucagcuuuuaguauc

SEQ ID NO: 2142760 - RNA, 19 nt, Homo sapiens
  misc_RNA (1)...(19): siRNA sense strand
gcgcagaagcacaaacaaa

SEQ ID NO: 2142761 - RNA, 19 nt, Homo sapiens
  misc_RNA (1)...(19): siRNA sense strand
ucauccagccugacauuua

SEQ ID NO: 2142762 - RNA, 19 nt, Homo sapiens
  misc_RNA (1)...(19): siRNA sense strand
gaaaagacccgacgacaca

SEQ ID NO: 2142763 - RNA, 19 nt, Homo sapiens
  misc_RNA (1)...(19): siRNA sense strand
ccaaggacuucgccgucua

SEQ ID NO: 2142764 - RNA, 19 nt, Homo sapiens
  misc_RNA (1)...(19): siRNA sense strand
guaccaguuuguuacuuug

SEQ ID NO: 2142765 - RNA, 19 nt, Homo sapiens
  misc_RNA (1)...(19): siRNA sense strand
aaacagcgcagaagcacaa

SEQ ID NO: 2142766 - RNA, 19 nt, Homo sapiens
  misc_RNA (1)...(19): siRNA sense strand
ugggacaguucacguauga

SEQ ID NO: 2142767 - RNA, 19 nt, Homo sapiens
  misc_RNA (1)...(19): siRNA sense strand
aguacucgcuguucugaaa

SEQ ID NO: 2142768 - RNA, 19 nt, Homo sapiens
  misc_RNA (1)...(19): siRNA sense strand
gguggcagcaucuugagua

SEQ ID NO: 2142769 - RNA, 19 nt, Homo sapiens
  misc_RNA (1)...(19): siRNA sense strand
gaagaccggcugugagaca

SEQ ID NO: 2142770 - RNA, 19 nt, Homo sapiens
  misc_RNA (1)...(19): siRNA sense strand
uggaucagcuaaagucaga

SEQ ID NO: 2142771 - RNA, 19 nt, Homo sapiens
  misc_RNA (1)...(19): siRNA sense strand
gcagaagcacaaacaaauc

SEQ ID NO: 2142772 - RNA, 19 nt, Homo sapiens
  misc_RNA (1)...(19): siRNA sense strand
ugaugauggugaucuuaaa

SEQ ID NO: 2142773 - RNA, 19 nt, Homo sapiens
  misc_RNA (1)...(19): siRNA sense strand
ggacaguucacguaugauc

SEQ ID NO: 2142774 - RNA, 19 nt, Homo sapiens
  misc_RNA (1)...(19): siRNA sense strand
uuucucggcuucacaugua

SEQ ID NO: 2142775 - RNA, 19 nt, Homo sapiens
  misc_RNA (1)...(19): siRNA sense strand
gcagguggccucucugucu

SEQ ID NO: 2142776 - RNA, 19 nt, Homo sapiens
  misc_RNA (1)...(19): siRNA sense strand
gauuggaugguaccaguuu

SEQ ID NO: 2142777 - RNA, 19 nt, Homo sapiens
  misc_RNA (1)...(19): siRNA sense strand
uaacugcugggcauuuaaa

SEQ ID NO: 2142778 - RNA, 19 nt, Homo sapiens
  misc_RNA (1)...(19): siRNA sense strand
gaugaugauggugaucuua

SEQ ID NO: 2142779 - RNA, 19 nt, Homo sapiens
  misc_RNA (1)...(19): siRNA sense strand
ggacgugcaagucagagaa

SEQ ID NO: 2142780 - RNA, 19 nt, Homo sapiens
  misc_RNA (1)...(19): siRNA sense strand
gggcaagcaugcauagaac

SEQ ID NO: 2142781 - RNA, 19 nt, Homo sapiens
  misc_RNA (1)...(19): siRNA sense strand
gaacugggcaagcaugcau

SEQ ID NO: 2142782 - RNA, 19 nt, Homo sapiens
  misc_RNA (1)...(19): siRNA sense strand
ccaguuuguuacuuugauu

SEQ ID NO: 2142783 - RNA, 19 nt, Homo sapiens
  misc_RNA (1)...(19): siRNA sense strand
agacggagcacaaauugga

SEQ ID NO: 2142784 - RNA, 19 nt, Homo sapiens
  misc_RNA (1)...(19): siRNA sense strand
gugaagaccggcugugaga

SEQ ID NO: 2142785 - RNA, 19 nt, Homo sapiens
  misc_RNA (1)...(19): siRNA sense strand
ugucacacuuggaagauau

SEQ ID NO: 2142786 - RNA, 19 nt, Homo sapiens
  misc_RNA (1)...(19): siRNA sense strand
uuucuuggcugaauguguu

SEQ ID NO: 2142787 - RNA, 19 nt, Homo sapiens
  misc_RNA (1)...(19): siRNA sense strand
ucgacggccuccuguauug

SEQ ID NO: 2142788 - RNA, 19 nt, Homo sapiens
  misc_RNA (1)...(19): siRNA sense strand
gcagcgcugucucccugaa

SEQ ID NO: 2142789 - RNA, 19 nt, Homo sapiens
  misc_RNA (1)...(19): siRNA sense strand
gacacagcuuuccaaauag

SEQ ID NO: 2142790 - RNA, 19 nt, Homo sapiens
  misc_RNA (1)...(19): siRNA sense strand
cagaagcacaaacaaauca

SEQ ID NO: 2142791 - RNA, 19 nt, Homo sapiens
  misc_RNA (1)...(19): siRNA sense strand
gguuugaaguggugaacau

SEQ ID NO: 2142792 - RNA, 19 nt, Homo sapiens
  misc_RNA (1)...(19): siRNA sense strand
acacagcuuuccaaauagu

SEQ ID NO: 2142793 - RNA, 19 nt, Homo sapiens
  misc_RNA (1)...(19): siRNA sense strand
ggcagcaucuugaguacuc

SEQ ID NO: 2142794 - RNA, 19 nt, Homo sapiens
  misc_RNA (1)...(19): siRNA sense strand
gaaguggugaacauggauu

SEQ ID NO: 2142795 - RNA, 19 nt, Homo sapiens
  misc_RNA (1)...(19): siRNA sense strand
guggugaggcucuccauga

SEQ ID NO: 2142796 - RNA, 19 nt, Homo sapiens
  misc_RNA (1)...(19): siRNA sense strand
cauccagccugacauuuac

SEQ ID NO: 2142797 - RNA, 19 nt, Homo sapiens
  misc_RNA (1)...(19): siRNA sense strand
ggcagccucuggaguguuc

SEQ ID NO: 2142798 - RNA, 19 nt, Homo sapiens
  misc_RNA (1)...(19): siRNA sense strand
aaaugaguaucaggaagaa

SEQ ID NO: 2142799 - RNA, 19 nt, Homo sapiens
  misc_RNA (1)...(19): siRNA sense strand
ggugugugcauuaugguuu

SEQ ID NO: 2142800 - RNA, 19 nt, Homo sapiens
  misc_RNA (1)...(19): siRNA sense strand
aagcuguauucccaagaua

SEQ ID NO: 2142801 - RNA, 19 nt, Homo sapiens
  misc_RNA (1)...(19): siRNA sense strand
cagagguucucaucacagu

SEQ ID NO: 2142802 - RNA, 19 nt, Homo sapiens
  misc_RNA (1)...(19): siRNA sense strand
ccacuuugcuacagaagcu

SEQ ID NO: 2142803 - RNA, 19 nt, Homo sapiens
  misc_RNA (1)...(19): siRNA sense strand
aagcugccauucagggaaa

SEQ ID NO: 2142804 - RNA, 19 nt, Homo sapiens
  misc_RNA (1)...(19): siRNA sense strand
gguggacuuugcucuggaa

SEQ ID NO: 2142805 - RNA, 19 nt, Homo sapiens
  misc_RNA (1)...(19): siRNA sense strand
ugagacggagcacaaauug

SEQ ID NO: 2142806 - RNA, 19 nt, Homo sapiens
  misc_RNA (1)...(19): siRNA sense strand
ugaccacuuugcuacagaa

SEQ ID NO: 2142807 - RNA, 19 nt, Homo sapiens
  misc_RNA (1)...(19): siRNA sense strand
gcucaucccacucuuccuu

SEQ ID NO: 2142808 - RNA, 19 nt, Homo sapiens
  misc_RNA (1)...(19): siRNA sense strand
ugucgagaguuuauucuag

SEQ ID NO: 2142809 - RNA, 19 nt, Homo sapiens
  misc_RNA (1)...(19): siRNA sense strand
gggccagggcaauuucuuu

SEQ ID NO: 2142810 - RNA, 19 nt, Homo sapiens
  misc_RNA (1)...(19): siRNA sense strand
guucacguaugaucaggau

SEQ ID NO: 2142811 - RNA, 19 nt, Homo sapiens
  misc_RNA (1)...(19): siRNA sense strand
guggaugccguacaagaaa

SEQ ID NO: 2142812 - RNA, 19 nt, Homo sapiens
  misc_RNA (1)...(19): siRNA sense strand
ucaccaagaacaugaagug

SEQ ID NO: 2142813 - RNA, 19 nt, Homo sapiens
  misc_RNA (1)...(19): siRNA sense strand
gccgucagcuucggucaga

SEQ ID NO: 2142814 - RNA, 19 nt, Homo sapiens
  misc_RNA (1)...(19): siRNA sense strand
gaugguaccaguuuguuac

SEQ ID NO: 2142815 - RNA, 19 nt, Homo sapiens
  misc_RNA (1)...(19): siRNA sense strand
cagggugugugcauuaugg

SEQ ID NO: 2142816 - RNA, 19 nt, Homo sapiens
  misc_RNA (1)...(19): siRNA sense strand
ggaucccgcugugguacuu

SEQ ID NO: 2142817 - RNA, 19 nt, Homo sapiens
  misc_RNA (1)...(19): siRNA sense strand
gcgcugaugagucuguuug

SEQ ID NO: 2142818 - RNA, 19 nt, Homo sapiens
  misc_RNA (1)...(19): siRNA sense strand
ggugguggcagcaucuuga

SEQ ID NO: 2142819 - RNA, 19 nt, Homo sapiens
  misc_RNA (1)...(19): siRNA sense strand
ccaggugccuucgaaacau

SEQ ID NO: 2142820 - RNA, 19 nt, Homo sapiens
  misc_RNA (1)...(19): siRNA sense strand
acacguaugcgcucaguuc

SEQ ID NO: 2142821 - RNA, 19 nt, Homo sapiens
  misc_RNA (1)...(19): siRNA sense strand
agucagggugugugcauua

SEQ ID NO: 2142822 - RNA, 19 nt, Homo sapiens
  misc_RNA (1)...(19): siRNA sense strand
cgacgacacagcuuuccaa

SEQ ID NO: 2142823 - RNA, 19 nt, Homo sapiens
  misc_RNA (1)...(19): siRNA sense strand
guaacugcugggcauuuaa

SEQ ID NO: 2142824 - RNA, 19 nt, Homo sapiens
  misc_RNA (1)...(19): siRNA sense strand
aauuggacccuguauuuga

SEQ ID NO: 2142825 - RNA, 19 nt, Homo sapiens
  misc_RNA (1)...(19): siRNA sense strand
ugaauguguuucuucuuac

SEQ ID NO: 2142826 - RNA, 19 nt, Homo sapiens
  misc_RNA (1)...(19): siRNA sense strand
agaccgggaugguggacuu

SEQ ID NO: 2142827 - RNA, 19 nt, Homo sapiens
  misc_RNA (1)...(19): siRNA sense strand
guaugucacacuuggaaga

SEQ ID NO: 2142828 - RNA, 19 nt, Homo sapiens
  misc_RNA (1)...(19): siRNA sense strand
uagcaggucucuccuuacg

SEQ ID NO: 2142829 - RNA, 19 nt, Homo sapiens
  misc_RNA (1)...(19): siRNA sense strand
cgacacagcuuuccaaaua

SEQ ID NO: 2142830 - RNA, 19 nt, Homo sapiens
  misc_RNA (1)...(19): siRNA sense strand
gaacacagcggguggauga

SEQ ID NO: 2142831 - RNA, 19 nt, Homo sapiens
  misc_RNA (1)...(19): siRNA sense strand
gcaaggcgguucucuggaa

SEQ ID NO: 2142832 - RNA, 19 nt, Homo sapiens
  misc_RNA (1)...(19): siRNA sense strand
gaaauaaagcugccauuca

SEQ ID NO: 2142833 - RNA, 19 nt, Homo sapiens
  misc_RNA (1)...(19): siRNA sense strand
cugaauguguuucuucuua

SEQ ID NO: 2142834 - RNA, 19 nt, Homo sapiens
  misc_RNA (1)...(19): siRNA sense strand
gguaacugcugggcauuua

SEQ ID NO: 2142835 - RNA, 19 nt, Homo sapiens
  misc_RNA (1)...(19): siRNA sense strand
gcacaaacaaaucagcuuu

SEQ ID NO: 2142836 - RNA, 19 nt, Homo sapiens
  misc_RNA (1)...(19): siRNA sense strand
gagggagacugacuuuaug

SEQ ID NO: 2142837 - RNA, 19 nt, Homo sapiens
  misc_RNA (1)...(19): siRNA sense strand
gaucuuaaagguggaaaua

SEQ ID NO: 2142838 - RNA, 19 nt, Homo sapiens
  misc_RNA (1)...(19): siRNA sense strand
gguaccaguuuguuacuuu

SEQ ID NO: 2142839 - RNA, 19 nt, Homo sapiens
  misc_RNA (1)...(19): siRNA sense strand
gaacacgggcuacacguau

SEQ ID NO: 2142840 - RNA, 19 nt, Homo sapiens
  misc_RNA (1)...(19): siRNA sense strand
uccgagagcugaccacuuu

SEQ ID NO: 2142841 - RNA, 19 nt, Homo sapiens
  misc_RNA (1)...(19): siRNA sense strand
gaagcuguauucccaagau

SEQ ID NO: 2142842 - RNA, 19 nt, Homo sapiens
  misc_RNA (1)...(19): siRNA sense strand
ggacuucgccgucuaugga

SEQ ID NO: 2142843 - RNA, 19 nt, Homo sapiens
  misc_RNA (1)...(19): siRNA sense strand
ggacuuugcucuggaaucu

SEQ ID NO: 2142844 - RNA, 19 nt, Homo sapiens
  misc_RNA (1)...(19): siRNA sense strand
gugaggcucuccaugauga

SEQ ID NO: 2142845 - RNA, 19 nt, Homo sapiens
  misc_RNA (1)...(19): siRNA sense strand
gcacaaauuggacccugua

SEQ ID NO: 2142846 - RNA, 19 nt, Homo sapiens
  misc_RNA (1)...(19): siRNA sense strand
uggcgaaccugucaaguga

SEQ ID NO: 2142847 - RNA, 19 nt, Homo sapiens
  misc_RNA (1)...(19): siRNA sense strand
gacaguggaugccguacaa

SEQ ID NO: 2142848 - RNA, 19 nt, Homo sapiens
  misc_RNA (1)...(19): siRNA sense strand
uggaagauauucugggaaa

SEQ ID NO: 2142849 - RNA, 19 nt, Homo sapiens
  misc_RNA (1)...(19): siRNA sense strand
aaacggcgcugaugagucu

SEQ ID NO: 2142850 - RNA, 19 nt, Homo sapiens
  misc_RNA (1)...(19): siRNA sense strand
gaaccgagcggccagaaca

SEQ ID NO: 2142851 - RNA, 19 nt, Homo sapiens
  misc_RNA (1)...(19): siRNA sense strand
aaauaaagcugccauucag

SEQ ID NO: 2142852 - RNA, 19 nt, Homo sapiens
  misc_RNA (1)...(19): siRNA sense strand
acuagcaggucucuccuua

SEQ ID NO: 2142853 - RNA, 19 nt, Homo sapiens
  misc_RNA (1)...(19): siRNA sense strand
gagguucucaucacaguuu

SEQ ID NO: 2142854 - RNA, 19 nt, Homo sapiens
  misc_RNA (1)...(19): siRNA sense strand
ucagagaaauggugaaacu

SEQ ID NO: 2142855 - RNA, 19 nt, Homo sapiens
  misc_RNA (1)...(19): siRNA sense strand
ggaaauaaagcugccauuc

SEQ ID NO: 2142856 - RNA, 19 nt, Homo sapiens
  misc_RNA (1)...(19): siRNA sense strand
ggaugguaccaguuuguua

SEQ ID NO: 2142857 - RNA, 19 nt, Homo sapiens
  misc_RNA (1)...(19): siRNA sense strand
cgagggagacugacuuuau

SEQ ID NO: 2142858 - RNA, 19 nt, Homo sapiens
  misc_RNA (1)...(19): siRNA sense strand
gcgcucaguuccagcuauu

SEQ ID NO: 2142859 - RNA, 19 nt, Homo sapiens
  misc_RNA (1)...(19): siRNA sense strand
caaaucagcuuuuaguauc

SEQ ID NO: 2142860 - RNA, 19 nt, Homo sapiens
  misc_RNA (1)...(19): siRNA sense strand
gcgcagaagcacaaacaaa

SEQ ID NO: 2142861 - RNA, 19 nt, Homo sapiens
  misc_RNA (1)...(19): siRNA sense strand
ucauccagccugacauuua

SEQ ID NO: 2142862 - RNA, 19 nt, Homo sapiens
  misc_RNA (1)...(19): siRNA sense strand
gaaaagacccgacgacaca

SEQ ID NO: 2142863 - RNA, 19 nt, Homo sapiens
  misc_RNA (1)...(19): siRNA sense strand
ccaaggacuucgccgucua

SEQ ID NO: 2142864 - RNA, 19 nt, Homo sapiens
  misc_RNA (1)...(19): siRNA sense strand
guaccaguuuguuacuuug

SEQ ID NO: 2142865 - RNA, 19 nt, Homo sapiens
  misc_RNA (1)...(19): siRNA sense strand
aaacagcgcagaagcacaa

SEQ ID NO: 2142866 - RNA, 19 nt, Homo sapiens
  misc_RNA (1)...(19): siRNA sense strand
ugggacaguucacguauga

SEQ ID NO: 2142867 - RNA, 19 nt, Homo sapiens
  misc_RNA (1)...(19): siRNA sense strand
aguacucgcuguucugaaa

SEQ ID NO: 2142868 - RNA, 19 nt, Homo sapiens
  misc_RNA (1)...(19): siRNA sense strand
gguggcagcaucuugagua

SEQ ID NO: 2142869 - RNA, 19 nt, Homo sapiens
  misc_RNA (1)...(19): siRNA sense strand
gaagaccggcugugagaca

SEQ ID NO: 2142870 - RNA, 19 nt, Homo sapiens
  misc_RNA (1)...(19): siRNA sense strand
uggaucagcuaaagucaga

SEQ ID NO: 2142871 - RNA, 19 nt, Homo sapiens
  misc_RNA (1)...(19): siRNA sense strand
gcagaagcacaaacaaauc

SEQ ID NO: 2142872 - RNA, 19 nt, Homo sapiens
  misc_RNA (1)...(19): siRNA sense strand
ugaugauggugaucuuaaa

SEQ ID NO: 2142873 - RNA, 19 nt, Homo sapiens
  misc_RNA (1)...(19): siRNA sense strand
ggacaguucacguaugauc

SEQ ID NO: 2142874 - RNA, 19 nt, Homo sapiens
  misc_RNA (1)...(19): siRNA sense strand
uuucucggcuucacaugua

SEQ ID NO: 2142875 - RNA, 19 nt, Homo sapiens
  misc_RNA (1)...(19): siRNA sense strand
gcagguggccucucugucu

SEQ ID NO: 2142876 - RNA, 19 nt, Homo sapiens
  misc_RNA (1)...(19): siRNA sense strand
gauuggaugguaccaguuu

SEQ ID NO: 2142877 - RNA, 19 nt, Homo sapiens
  misc_RNA (1)...(19): siRNA sense strand
uaacugcugggcauuuaaa

SEQ ID NO: 2142878 - RNA, 19 nt, Homo sapiens
  misc_RNA (1)...(19): siRNA sense strand
gaugaugauggugaucuua

SEQ ID NO: 2142879 - RNA, 19 nt, Homo sapiens
  misc_RNA (1)...(19): siRNA sense strand
ggacgugcaagucagagaa

SEQ ID NO: 2142880 - RNA, 19 nt, Homo sapiens
  misc_RNA (1)...(19): siRNA sense strand
gggcaagcaugcauagaac

SEQ ID NO: 2142881 - RNA, 19 nt, Homo sapiens
  misc_RNA (1)...(19): siRNA sense strand
gaacugggcaagcaugcau

SEQ ID NO: 2142882 - RNA, 19 nt, Homo sapiens
  misc_RNA (1)...(19): siRNA sense strand
ccaguuuguuacuuugauu

SEQ ID NO: 2142883 - RNA, 19 nt, Homo sapiens
  misc_RNA (1)...(19): siRNA sense strand
agacggagcacaaauugga

SEQ ID NO: 2142884 - RNA, 19 nt, Homo sapiens
  misc_RNA (1)...(19): siRNA sense strand
gugaagaccggcugugaga

SEQ ID NO: 2142885 - RNA, 19 nt, Homo sapiens
  misc_RNA (1)...(19): siRNA sense strand
ugucacacuuggaagauau

SEQ ID NO: 2142886 - RNA, 19 nt, Homo sapiens
  misc_RNA (1)...(19): siRNA sense strand
uuucuuggcugaauguguu

SEQ ID NO: 2142887 - RNA, 19 nt, Homo sapiens
  misc_RNA (1)...(19): siRNA sense strand
ucgacggccuccuguauug

SEQ ID NO: 2142888 - RNA, 19 nt, Homo sapiens
  misc_RNA (1)...(19): siRNA sense strand
gcagcgcugucucccugaa

SEQ ID NO: 2142889 - RNA, 19 nt, Homo sapiens
  misc_RNA (1)...(19): siRNA sense strand
gacacagcuuuccaaauag

SEQ ID NO: 2142890 - RNA, 19 nt, Homo sapiens
  misc_RNA (1)...(19): siRNA sense strand
cagaagcacaaacaaauca

SEQ ID NO: 2142891 - RNA, 19 nt, Homo sapiens
  misc_RNA (1)...(19): siRNA sense strand
gguuugaaguggugaacau

SEQ ID NO: 2142892 - RNA, 19 nt, Homo sapiens
  misc_RNA (1)...(19): siRNA sense strand
acacagcuuuccaaauagu

SEQ ID NO: 2142893 - RNA, 19 nt, Homo sapiens
  misc_RNA (1)...(19): siRNA sense strand
ggcagcaucuugaguacuc

SEQ ID NO: 2142894 - RNA, 19 nt, Homo sapiens
  misc_RNA (1)...(19): siRNA sense strand
gaaguggugaacauggauu

SEQ ID NO: 2142895 - RNA, 19 nt, Homo sapiens
  misc_RNA (1)...(19): siRNA sense strand
guggugaggcucuccauga

SEQ ID NO: 2142896 - RNA, 19 nt, Homo sapiens
  misc_RNA (1)...(19): siRNA sense strand
cauccagccugacauuuac

SEQ ID NO: 2142897 - RNA, 19 nt, Homo sapiens
  misc_RNA (1)...(19): siRNA sense strand
ggcagccucuggaguguuc

SEQ ID NO: 2142898 - RNA, 19 nt, Homo sapiens
  misc_RNA (1)...(19): siRNA sense strand
aaaugaguaucaggaagaa

SEQ ID NO: 2142899 - RNA, 19 nt, Homo sapiens
  misc_RNA (1)...(19): siRNA sense strand
ggugugugcauuaugguuu

SEQ ID NO: 2142900 - RNA, 19 nt, Homo sapiens
  misc_RNA (1)...(19): siRNA sense strand
aagcuguauucccaagaua

SEQ ID NO: 2142901 - RNA, 19 nt, Homo sapiens
  misc_RNA (1)...(19): siRNA sense strand
cagagguucucaucacagu

SEQ ID NO: 2142902 - RNA, 19 nt, Homo sapiens
  misc_RNA (1)...(19): siRNA sense strand
ccacuuugcuacagaagcu

SEQ ID NO: 2142903 - RNA, 19 nt, Homo sapiens
  misc_RNA (1)...(19): siRNA sense strand
aagcugccauucagggaaa

SEQ ID NO: 2142904 - RNA, 19 nt, Homo sapiens
  misc_RNA (1)...(19): siRNA sense strand
gguggacuuugcucuggaa

SEQ ID NO: 2142905 - RNA, 19 nt, Homo sapiens
  misc_RNA (1)...(19): siRNA sense strand
ugagacggagcacaaauug

SEQ ID NO: 2142906 - RNA, 19 nt, Homo sapiens
  misc_RNA (1)...(19): siRNA sense strand
ugaccacuuugcuacagaa

SEQ ID NO: 2142907 - RNA, 19 nt, Homo sapiens
  misc_RNA (1)...(19): siRNA sense strand
gcucaucccacucuuccuu

SEQ ID NO: 2142908 - RNA, 19 nt, Homo sapiens
  misc_RNA (1)...(19): siRNA sense strand
ugucgagaguuuauucuag

SEQ ID NO: 2142909 - RNA, 19 nt, Homo sapiens
  misc_RNA (1)...(19): siRNA sense strand
gggccagggcaauuucuuu

SEQ ID NO: 2142910 - RNA, 19 nt, Homo sapiens
  misc_RNA (1)...(19): siRNA sense strand
guucacguaugaucaggau

SEQ ID NO: 2142911 - RNA, 19 nt, Homo sapiens
  misc_RNA (1)...(19): siRNA sense strand
guggaugccguacaagaaa

SEQ ID NO: 2142912 - RNA, 19 nt, Homo sapiens
  misc_RNA (1)...(19): siRNA sense strand
ucaccaagaacaugaagug

SEQ ID NO: 2142913 - RNA, 19 nt, Homo sapiens
  misc_RNA (1)...(19): siRNA sense strand
gccgucagcuucggucaga

SEQ ID NO: 2142914 - RNA, 19 nt, Homo sapiens
  misc_RNA (1)...(19): siRNA sense strand
gaugguaccaguuuguuac

SEQ ID NO: 2142915 - RNA, 19 nt, Homo sapiens
  misc_RNA (1)...(19): siRNA sense strand
cagggugugugcauuaugg

SEQ ID NO: 2142916 - RNA, 19 nt, Homo sapiens
  misc_RNA (1)...(19): siRNA sense strand
ggaucccgcugugguacuu

SEQ ID NO: 2142917 - RNA, 19 nt, Homo sapiens
  misc_RNA (1)...(19): siRNA sense strand
gcgcugaugagucuguuug

SEQ ID NO: 2142918 - RNA, 19 nt, Homo sapiens
  misc_RNA (1)...(19): siRNA sense strand
ggugguggcagcaucuuga

SEQ ID NO: 2142919 - RNA, 19 nt, Homo sapiens
  misc_RNA (1)...(19): siRNA sense strand
ccaggugccuucgaaacau

SEQ ID NO: 2142920 - RNA, 19 nt, Homo sapiens
  misc_RNA (1)...(19): siRNA sense strand
acacguaugcgcucaguuc

SEQ ID NO: 2142921 - RNA, 19 nt, Homo sapiens
  misc_RNA (1)...(19): siRNA sense strand
agucagggugugugcauua

SEQ ID NO: 2142922 - RNA, 19 nt, Homo sapiens
  misc_RNA (1)...(19): siRNA sense strand
cgacgacacagcuuuccaa

SEQ ID NO: 2142923 - RNA, 19 nt, Homo sapiens
  misc_RNA (1)...(19): siRNA sense strand
guaacugcugggcauuuaa

SEQ ID NO: 2142924 - RNA, 19 nt, Homo sapiens
  misc_RNA (1)...(19): siRNA sense strand
aauuggacccuguauuuga

SEQ ID NO: 2142925 - RNA, 19 nt, Homo sapiens
  misc_RNA (1)...(19): siRNA sense strand
ugaauguguuucuucuuac

SEQ ID NO: 2142926 - RNA, 19 nt, Homo sapiens
  misc_RNA (1)...(19): siRNA sense strand
agaccgggaugguggacuu

SEQ ID NO: 2142927 - RNA, 19 nt, Homo sapiens
  misc_RNA (1)...(19): siRNA sense strand
guaugucacacuuggaaga

SEQ ID NO: 2142928 - RNA, 19 nt, Homo sapiens
  misc_RNA (1)...(19): siRNA sense strand
uagcaggucucuccuuacg

SEQ ID NO: 2142929 - RNA, 19 nt, Homo sapiens
  misc_RNA (1)...(19): siRNA sense strand
gaacuggcccgagaucuuu

SEQ ID NO: 2142930 - RNA, 19 nt, Homo sapiens
  misc_RNA (1)...(19): siRNA sense strand
ccacggugcugcuggauga

SEQ ID NO: 2142931 - RNA, 19 nt, Homo sapiens
  misc_RNA (1)...(19): siRNA sense strand
gcgccuaccugaucuacuu

SEQ ID NO: 2142932 - RNA, 19 nt, Homo sapiens
  misc_RNA (1)...(19): siRNA sense strand
caaagggucaggccaauga

SEQ ID NO: 2142933 - RNA, 19 nt, Homo sapiens
  misc_RNA (1)...(19): siRNA sense strand
cgaccuggcuggcauguuc

SEQ ID NO: 2142934 - RNA, 19 nt, Homo sapiens
  misc_RNA (1)...(19): siRNA sense strand
gaucgacgccguucugaau

SEQ ID NO: 2142935 - RNA, 19 nt, Homo sapiens
  misc_RNA (1)...(19): siRNA sense strand
gaucaagcccaacaucuuc

SEQ ID NO: 2142936 - RNA, 19 nt, Homo sapiens
  misc_RNA (1)...(19): siRNA sense strand
ccaagcagaccaucacuga

SEQ ID NO: 2142937 - RNA, 19 nt, Homo sapiens
  misc_RNA (1)...(19): siRNA sense strand
caucuguggugccaauuga

SEQ ID NO: 2142938 - RNA, 19 nt, Homo sapiens
  misc_RNA (1)...(19): siRNA sense strand
ugaagaugcucauggagau

SEQ ID NO: 2142939 - RNA, 19 nt, Homo sapiens
  misc_RNA (1)...(19): siRNA sense strand
ugucugugcuggccuguaa

SEQ ID NO: 2142940 - RNA, 19 nt, Homo sapiens
  misc_RNA (1)...(19): siRNA sense strand
ccacugagggcgucauuga

SEQ ID NO: 2142941 - RNA, 19 nt, Homo sapiens
  misc_RNA (1)...(19): siRNA sense strand
gcacgaugcuguggacgau

SEQ ID NO: 2142942 - RNA, 19 nt, Homo sapiens
  misc_RNA (1)...(19): siRNA sense strand
ucucacaccugaucaagau

SEQ ID NO: 2142943 - RNA, 19 nt, Homo sapiens
  misc_RNA (1)...(19): siRNA sense strand
ucauguaccuggccaagau

SEQ ID NO: 2142944 - RNA, 19 nt, Homo sapiens
  misc_RNA (1)...(19): siRNA sense strand
caacaugcagguccucuau

SEQ ID NO: 2142945 - RNA, 19 nt, Homo sapiens
  misc_RNA (1)...(19): siRNA sense strand
gcaaggagccgcaguaccu

SEQ ID NO: 2142946 - RNA, 19 nt, Homo sapiens
  misc_RNA (1)...(19): siRNA sense strand
gacccgagauccugagcuu

SEQ ID NO: 2142947 - RNA, 19 nt, Homo sapiens
  misc_RNA (1)...(19): siRNA sense strand
cgugugaggugcuggacua

SEQ ID NO: 2142948 - RNA, 19 nt, Homo sapiens
  misc_RNA (1)...(19): siRNA sense strand
ccauuucuccgucgauuaa

SEQ ID NO: 2142949 - RNA, 19 nt, Homo sapiens
  misc_RNA (1)...(19): siRNA sense strand
cuaguggacuggcuggaaa

SEQ ID NO: 2142950 - RNA, 19 nt, Homo sapiens
  misc_RNA (1)...(19): siRNA sense strand
gugaggugcuggacuacuu

SEQ ID NO: 2142951 - RNA, 19 nt, Homo sapiens
  misc_RNA (1)...(19): siRNA sense strand
gcacgguuccgaagacaug

SEQ ID NO: 2142952 - RNA, 19 nt, Homo sapiens
  misc_RNA (1)...(19): siRNA sense strand
ucaaguuggugaucuucaa

SEQ ID NO: 2142953 - RNA, 19 nt, Homo sapiens
  misc_RNA (1)...(19): siRNA sense strand
gaacaucauggacaagagu

SEQ ID NO: 2142954 - RNA, 19 nt, Homo sapiens
  misc_RNA (1)...(19): siRNA sense strand
gcacccaccucaacuucca

SEQ ID NO: 2142955 - RNA, 19 nt, Homo sapiens
  misc_RNA (1)...(19): siRNA sense strand
ugaaggugcuccugcagau

SEQ ID NO: 2142956 - RNA, 19 nt, Homo sapiens
  misc_RNA (1)...(19): siRNA sense strand
ucucuacccucuacuggaa

SEQ ID NO: 2142957 - RNA, 19 nt, Homo sapiens
  misc_RNA (1)...(19): siRNA sense strand
gcugcugacugcauucuuc

SEQ ID NO: 2142958 - RNA, 19 nt, Homo sapiens
  misc_RNA (1)...(19): siRNA sense strand
caucaugucccaccucuuc

SEQ ID NO: 2142959 - RNA, 19 nt, Homo sapiens
  misc_RNA (1)...(19): siRNA sense strand
cagagcagccggagaccua

SEQ ID NO: 2142960 - RNA, 19 nt, Homo sapiens
  misc_RNA (1)...(19): siRNA sense strand
gccaaacgguggaggaucu

SEQ ID NO: 2142961 - RNA, 19 nt, Homo sapiens
  misc_RNA (1)...(19): siRNA sense strand
ugcagaagcuggagaugug

SEQ ID NO: 2142962 - RNA, 19 nt, Homo sapiens
  misc_RNA (1)...(19): siRNA sense strand
guucauccauaaguacauu

SEQ ID NO: 2142963 - RNA, 19 nt, Homo sapiens
  misc_RNA (1)...(19): siRNA sense strand
ccucaccggucucaccaaa

SEQ ID NO: 2142964 - RNA, 19 nt, Homo sapiens
  misc_RNA (1)...(19): siRNA sense strand
ggcaagagccgggaacaga

SEQ ID NO: 2142965 - RNA, 19 nt, Homo sapiens
  misc_RNA (1)...(19): siRNA sense strand
agacauggacgucaucuca

SEQ ID NO: 2142966 - RNA, 19 nt, Homo sapiens
  misc_RNA (1)...(19): siRNA sense strand
cggagagcguggaggagua

SEQ ID NO: 2142967 - RNA, 19 nt, Homo sapiens
  misc_RNA (1)...(19): siRNA sense strand
ggacucauccaccgcuuca

SEQ ID NO: 2142968 - RNA, 19 nt, Homo sapiens
  misc_RNA (1)...(19): siRNA sense strand
gcccugaggauccugcaua

SEQ ID NO: 2142969 - RNA, 19 nt, Homo sapiens
  misc_RNA (1)...(19): siRNA sense strand
uccggaaccugccugagua

SEQ ID NO: 2142970 - RNA, 19 nt, Homo sapiens
  misc_RNA (1)...(19): siRNA sense strand
gcuccgaggugcccauuuu

SEQ ID NO: 2142971 - RNA, 19 nt, Homo sapiens
  misc_RNA (1)...(19): siRNA sense strand
ggacgccuccaucaacuuc

SEQ ID NO: 2142972 - RNA, 19 nt, Homo sapiens
  misc_RNA (1)...(19): siRNA sense strand
gcugaaaucccuccuugca

SEQ ID NO: 2142973 - RNA, 19 nt, Homo sapiens
  misc_RNA (1)...(19): siRNA sense strand
gcauguuccuccagauuuu

SEQ ID NO: 2142974 - RNA, 19 nt, Homo sapiens
  misc_RNA (1)...(19): siRNA sense strand
cagccgaaacccugacuuu

SEQ ID NO: 2142975 - RNA, 19 nt, Homo sapiens
  misc_RNA (1)...(19): siRNA sense strand
ggaagugcuccgcucauuc

SEQ ID NO: 2142976 - RNA, 19 nt, Homo sapiens
  misc_RNA (1)...(19): siRNA sense strand
cgcaguaccuggagaugga

SEQ ID NO: 2142977 - RNA, 19 nt, Homo sapiens
  misc_RNA (1)...(19): siRNA sense strand
ggcccgagaucuuugucaa

SEQ ID NO: 2142978 - RNA, 19 nt, Homo sapiens
  misc_RNA (1)...(19): siRNA sense strand
ggcauguuccuccagauuu

SEQ ID NO: 2142979 - RNA, 19 nt, Homo sapiens
  misc_RNA (1)...(19): siRNA sense strand
cagaggcacccaaaccaaa

SEQ ID NO: 2142980 - RNA, 19 nt, Homo sapiens
  misc_RNA (1)...(19): siRNA sense strand
cggcccagcucaugagugu

SEQ ID NO: 2142981 - RNA, 19 nt, Homo sapiens
  misc_RNA (1)...(19): siRNA sense strand
ccggagaccuacuacaagu

SEQ ID NO: 2142982 - RNA, 19 nt, Homo sapiens
  misc_RNA (1)...(19): siRNA sense strand
uggaagugcuccgcucauu

SEQ ID NO: 2142983 - RNA, 19 nt, Homo sapiens
  misc_RNA (1)...(19): siRNA sense strand
aagcagaccaucacugaga

SEQ ID NO: 2142984 - RNA, 19 nt, Homo sapiens
  misc_RNA (1)...(19): siRNA sense strand
ucaggccaaugaaucgaaa

SEQ ID NO: 2142985 - RNA, 19 nt, Homo sapiens
  misc_RNA (1)...(19): siRNA sense strand
ccaucuggcugccuucauc

SEQ ID NO: 2142986 - RNA, 19 nt, Homo sapiens
  misc_RNA (1)...(19): siRNA sense strand
ucauugcucugggcucaaa

SEQ ID NO: 2142987 - RNA, 19 nt, Homo sapiens
  misc_RNA (1)...(19): siRNA sense strand
ccaagguccuccucaacca

SEQ ID NO: 2142988 - RNA, 19 nt, Homo sapiens
  misc_RNA (1)...(19): siRNA sense strand
ugaggauccugcauaugga

SEQ ID NO: 2142989 - RNA, 19 nt, Homo sapiens
  misc_RNA (1)...(19): siRNA sense strand
ugagugacauagacgagau

SEQ ID NO: 2142990 - RNA, 19 nt, Homo sapiens
  misc_RNA (1)...(19): siRNA sense strand
gcacagaggcacccaaacc

SEQ ID NO: 2142991 - RNA, 19 nt, Homo sapiens
  misc_RNA (1)...(19): siRNA sense strand
guuugucgcuggugcuuuc

SEQ ID NO: 2142992 - RNA, 19 nt, Homo sapiens
  misc_RNA (1)...(19): siRNA sense strand
gggcaccaccaucaaguug

SEQ ID NO: 2142993 - RNA, 19 nt, Homo sapiens
  misc_RNA (1)...(19): siRNA sense strand
ucagcaagcucgccccuaa

SEQ ID NO: 2142994 - RNA, 19 nt, Homo sapiens
  misc_RNA (1)...(19): siRNA sense strand
gggcauguacggccagaug

SEQ ID NO: 2142995 - RNA, 19 nt, Homo sapiens
  misc_RNA (1)...(19): siRNA sense strand
ggucagcgucucccuguuc

SEQ ID NO: 2142996 - RNA, 19 nt, Homo sapiens
  misc_RNA (1)...(19): siRNA sense strand
caacagugaccuggugaug

SEQ ID NO: 2142997 - RNA, 19 nt, Homo sapiens
  misc_RNA (1)...(19): siRNA sense strand
ccaaguuccuggccauggu

SEQ ID NO: 2142998 - RNA, 19 nt, Homo sapiens
  misc_RNA (1)...(19): siRNA sense strand
ugcaguucauccauaagua

SEQ ID NO: 2142999 - RNA, 19 nt, Homo sapiens
  misc_RNA (1)...(19): siRNA sense strand
gggcacagcucaggaugcu

SEQ ID NO: 2143000 - RNA, 19 nt, Homo sapiens
  misc_RNA (1)...(19): siRNA sense strand
ucuccucgcucuuccugaa

SEQ ID NO: 2143001 - RNA, 19 nt, Homo sapiens
  misc_RNA (1)...(19): siRNA sense strand
cggcaucgccugggacaaa

SEQ ID NO: 2143002 - RNA, 19 nt, Homo sapiens
  misc_RNA (1)...(19): siRNA sense strand
cagcacagaggcacccaaa

SEQ ID NO: 2143003 - RNA, 19 nt, Homo sapiens
  misc_RNA (1)...(19): siRNA sense strand
gagagugaccgcaacuucu

SEQ ID NO: 2143004 - RNA, 19 nt, Homo sapiens
  misc_RNA (1)...(19): siRNA sense strand
gaagugcuccgcucauucc

SEQ ID NO: 2143005 - RNA, 19 nt, Homo sapiens
  misc_RNA (1)...(19): siRNA sense strand
caagaucaagcccaacauc

SEQ ID NO: 2143006 - RNA, 19 nt, Homo sapiens
  misc_RNA (1)...(19): siRNA sense strand
gaaguccucccgccaucug

SEQ ID NO: 2143007 - RNA, 19 nt, Homo sapiens
  misc_RNA (1)...(19): siRNA sense strand
ugucccaccucuucucgaa

SEQ ID NO: 2143008 - RNA, 19 nt, Homo sapiens
  misc_RNA (1)...(19): siRNA sense strand
cgugcacccugacggauga

SEQ ID NO: 2143009 - RNA, 19 nt, Homo sapiens
  misc_RNA (1)...(19): siRNA sense strand
acaugcagguccucuauac

SEQ ID NO: 2143010 - RNA, 19 nt, Homo sapiens
  misc_RNA (1)...(19): siRNA sense strand
ccaacaucuucgccacuga
